United States Patent Application Publication US 2005/0255487 A1 - sequence listing, part 80

SEQ ID NO: 2198361 - RNA, 19 nt, Homo sapiens
  misc_RNA (1)...(19): siRNA sense strand
accaagaaaucaugacuca

SEQ ID NO: 2198362 - RNA, 19 nt, Homo sapiens
  misc_RNA (1)...(19): siRNA sense strand
agucaaagaccucucagaa

SEQ ID NO: 2198363 - RNA, 19 nt, Homo sapiens
  misc_RNA (1)...(19): siRNA sense strand
guaccagcacuccaauuug

SEQ ID NO: 2198364 - RNA, 19 nt, Homo sapiens
  misc_RNA (1)...(19): siRNA sense strand
aggcugugcauuaaauuua

SEQ ID NO: 2198365 - RNA, 19 nt, Homo sapiens
  misc_RNA (1)...(19): siRNA sense strand
gaaguggcuuuuaggaaga

SEQ ID NO: 2198366 - RNA, 19 nt, Homo sapiens
  misc_RNA (1)...(19): siRNA sense strand
ggaaucaccaucaaaucuc

SEQ ID NO: 2198367 - RNA, 19 nt, Homo sapiens
  misc_RNA (1)...(19): siRNA sense strand
caauggauggugugccuuu

SEQ ID NO: 2198368 - RNA, 19 nt, Homo sapiens
  misc_RNA (1)...(19): siRNA sense strand
ggcugugcauuaaauuuau

SEQ ID NO: 2198369 - RNA, 19 nt, Homo sapiens
  misc_RNA (1)...(19): siRNA sense strand
gcacaccaauaugcucaag

SEQ ID NO: 2198370 - RNA, 19 nt, Homo sapiens
  misc_RNA (1)...(19): siRNA sense strand
gcagaguaccaagaaauca

SEQ ID NO: 2198371 - RNA, 19 nt, Homo sapiens
  misc_RNA (1)...(19): siRNA sense strand
ccucaguacacguuuauug

SEQ ID NO: 2198372 - RNA, 19 nt, Homo sapiens
  misc_RNA (1)...(19): siRNA sense strand
ccagauaccuguguuucac

SEQ ID NO: 2198373 - RNA, 19 nt, Homo sapiens
  misc_RNA (1)...(19): siRNA sense strand
ccgccucaguacacguuua

SEQ ID NO: 2198374 - RNA, 19 nt, Homo sapiens
  misc_RNA (1)...(19): siRNA sense strand
cggaagcugcgauuuguga

SEQ ID NO: 2198375 - RNA, 19 nt, Homo sapiens
  misc_RNA (1)...(19): siRNA sense strand
guaugcagcccuuugaucu

SEQ ID NO: 2198376 - RNA, 19 nt, Homo sapiens
  misc_RNA (1)...(19): siRNA sense strand
ccuuugaucuccugggaau

SEQ ID NO: 2198377 - RNA, 19 nt, Homo sapiens
  misc_RNA (1)...(19): siRNA sense strand
caaagaaaauagucaucug

SEQ ID NO: 2198378 - RNA, 19 nt, Homo sapiens
  misc_RNA (1)...(19): siRNA sense strand
aguaccagcacuccaauuu

SEQ ID NO: 2198379 - RNA, 19 nt, Homo sapiens
  misc_RNA (1)...(19): siRNA sense strand
acacacaggaaguggcuuu

SEQ ID NO: 2198380 - RNA, 19 nt, Homo sapiens
  misc_RNA (1)...(19): siRNA sense strand
uaacacuuccugccaccuu

SEQ ID NO: 2198381 - RNA, 19 nt, Homo sapiens
  misc_RNA (1)...(19): siRNA sense strand
augcugaccucuggaaaga

SEQ ID NO: 2198382 - RNA, 19 nt, Homo sapiens
  misc_RNA (1)...(19): siRNA sense strand
guuaccagauaccuguguu

SEQ ID NO: 2198383 - RNA, 19 nt, Homo sapiens
  misc_RNA (1)...(19): siRNA sense strand
aacggaagcugcgauuugu

SEQ ID NO: 2198384 - RNA, 19 nt, Homo sapiens
  misc_RNA (1)...(19): siRNA sense strand
gccagaaacgucaauggau

SEQ ID NO: 2198385 - RNA, 19 nt, Homo sapiens
  misc_RNA (1)...(19): siRNA sense strand
ccagcacuccaauuuguau

SEQ ID NO: 2198386 - RNA, 19 nt, Homo sapiens
  misc_RNA (1)...(19): siRNA sense strand
ccucuggaaagacggcuua

SEQ ID NO: 2198387 - RNA, 19 nt, Homo sapiens
  misc_RNA (1)...(19): siRNA sense strand
ggugugccuuuuaugauuu

SEQ ID NO: 2198388 - RNA, 19 nt, Homo sapiens
  misc_RNA (1)...(19): siRNA sense strand
cgaaugggcagaguaccaa

SEQ ID NO: 2198389 - RNA, 19 nt, Homo sapiens
  misc_RNA (1)...(19): siRNA sense strand
gaagcugcgauuugugaca

SEQ ID NO: 2198390 - RNA, 19 nt, Homo sapiens
  misc_RNA (1)...(19): siRNA sense strand
cagaagccuugccagaaac

SEQ ID NO: 2198391 - RNA, 19 nt, Homo sapiens
  misc_RNA (1)...(19): siRNA sense strand
cagaagccucuaccacaga

SEQ ID NO: 2198392 - RNA, 19 nt, Homo sapiens
  misc_RNA (1)...(19): siRNA sense strand
gaaguuuucuuguguucca

SEQ ID NO: 2198393 - RNA, 19 nt, Homo sapiens
  misc_RNA (1)...(19): siRNA sense strand
gggaucugguaucgaaugg

SEQ ID NO: 2198394 - RNA, 19 nt, Homo sapiens
  misc_RNA (1)...(19): siRNA sense strand
agaagccucuaccacagau

SEQ ID NO: 2198395 - RNA, 19 nt, Homo sapiens
  misc_RNA (1)...(19): siRNA sense strand
ugaagucaaagaccucuca

SEQ ID NO: 2198396 - RNA, 19 nt, Homo sapiens
  misc_RNA (1)...(19): siRNA sense strand
ggacggacuacgaguacca

SEQ ID NO: 2198397 - RNA, 19 nt, Homo sapiens
  misc_RNA (1)...(19): siRNA sense strand
ggcagaguaccaagaaauc

SEQ ID NO: 2198398 - RNA, 19 nt, Homo sapiens
  misc_RNA (1)...(19): siRNA sense strand
cccgacaggcuaugacgua

SEQ ID NO: 2198399 - RNA, 19 nt, Homo sapiens
  misc_RNA (1)...(19): siRNA sense strand
gucaaagaccucucagaag

SEQ ID NO: 2198400 - RNA, 19 nt, Homo sapiens
  misc_RNA (1)...(19): siRNA sense strand
gaugcugaccucuggaaag

SEQ ID NO: 2198401 - RNA, 19 nt, Homo sapiens
  misc_RNA (1)...(19): siRNA sense strand
gcugcgauuugugacauuc

SEQ ID NO: 2198402 - RNA, 19 nt, Homo sapiens
  misc_RNA (1)...(19): siRNA sense strand
gauggugugccuuuuauga

SEQ ID NO: 2198403 - RNA, 19 nt, Homo sapiens
  misc_RNA (1)...(19): siRNA sense strand
aggagacgguggacacaca

SEQ ID NO: 2198404 - RNA, 19 nt, Homo sapiens
  misc_RNA (1)...(19): siRNA sense strand
ggaguccguuccugcauua

SEQ ID NO: 2198405 - RNA, 19 nt, Homo sapiens
  misc_RNA (1)...(19): siRNA sense strand
gccaugagccgauguguuu

SEQ ID NO: 2198406 - RNA, 19 nt, Homo sapiens
  misc_RNA (1)...(19): siRNA sense strand
ccaccgaccugaucuugga

SEQ ID NO: 2198407 - RNA, 19 nt, Homo sapiens
  misc_RNA (1)...(19): siRNA sense strand
aagucuaccuggugcauga

SEQ ID NO: 2198408 - RNA, 19 nt, Homo sapiens
  misc_RNA (1)...(19): siRNA sense strand
ugcauuagcugccucaacu

SEQ ID NO: 2198409 - RNA, 19 nt, Homo sapiens
  misc_RNA (1)...(19): siRNA sense strand
uggaguccguuccugcauu

SEQ ID NO: 2198410 - RNA, 19 nt, Homo sapiens
  misc_RNA (1)...(19): siRNA sense strand
ccucaacuccaaugcaaug

SEQ ID NO: 2198411 - RNA, 19 nt, Homo sapiens
  misc_RNA (1)...(19): siRNA sense strand
ugccucaacuccaaugcaa

SEQ ID NO: 2198412 - RNA, 19 nt, Homo sapiens
  misc_RNA (1)...(19): siRNA sense strand
uuagcugccucaacuccaa

SEQ ID NO: 2198413 - RNA, 19 nt, Homo sapiens
  misc_RNA (1)...(19): siRNA sense strand
gcagagcaguuuccuaaga

SEQ ID NO: 2198414 - RNA, 19 nt, Homo sapiens
  misc_RNA (1)...(19): siRNA sense strand
gcuagacuuugaagaauuu

SEQ ID NO: 2198415 - RNA, 19 nt, Homo sapiens
  misc_RNA (1)...(19): siRNA sense strand
gcagcuagacuuugaagaa

SEQ ID NO: 2198416 - RNA, 19 nt, Homo sapiens
  misc_RNA (1)...(19): siRNA sense strand
gcaucgaccuugcagucua

SEQ ID NO: 2198417 - RNA, 19 nt, Homo sapiens
  misc_RNA (1)...(19): siRNA sense strand
cagagcaguuuccuaagaa

SEQ ID NO: 2198418 - RNA, 19 nt, Homo sapiens
  misc_RNA (1)...(19): siRNA sense strand
ggaggauccuggccagaga

SEQ ID NO: 2198419 - RNA, 19 nt, Homo sapiens
  misc_RNA (1)...(19): siRNA sense strand
guugguggcuucacucaga

SEQ ID NO: 2198420 - RNA, 19 nt, Homo sapiens
  misc_RNA (1)...(19): siRNA sense strand
gaagacaggccaguacuca

SEQ ID NO: 2198421 - RNA, 19 nt, Homo sapiens
  misc_RNA (1)...(19): siRNA sense strand
cagcuagacuuugaagaau

SEQ ID NO: 2198422 - RNA, 19 nt, Homo sapiens
  misc_RNA (1)...(19): siRNA sense strand
caauggagguccugaagac

SEQ ID NO: 2198423 - RNA, 19 nt, Homo sapiens
  misc_RNA (1)...(19): siRNA sense strand
ucagaugauucgagaagga

SEQ ID NO: 2198424 - RNA, 19 nt, Homo sapiens
  misc_RNA (1)...(19): siRNA sense strand
uguacaagcuggagauaag

SEQ ID NO: 2198425 - RNA, 19 nt, Homo sapiens
  misc_RNA (1)...(19): siRNA sense strand
ggaccuugaugggcagcua

SEQ ID NO: 2198426 - RNA, 19 nt, Homo sapiens
  misc_RNA (1)...(19): siRNA sense strand
ccaggagacucugaggauu

SEQ ID NO: 2198427 - RNA, 19 nt, Homo sapiens
  misc_RNA (1)...(19): siRNA sense strand
ccgaaucagccaucaaauu

SEQ ID NO: 2198428 - RNA, 19 nt, Homo sapiens
  misc_RNA (1)...(19): siRNA sense strand
ccugucaccuacauggaua

SEQ ID NO: 2198429 - RNA, 19 nt, Homo sapiens
  misc_RNA (1)...(19): siRNA sense strand
gagucaagauaucugaaca

SEQ ID NO: 2198430 - RNA, 19 nt, Homo sapiens
  misc_RNA (1)...(19): siRNA sense strand
ugagcagccucuucaaaca

SEQ ID NO: 2198431 - RNA, 19 nt, Homo sapiens
  misc_RNA (1)...(19): siRNA sense strand
gaauacgaacgggccauuu

SEQ ID NO: 2198432 - RNA, 19 nt, Homo sapiens
  misc_RNA (1)...(19): siRNA sense strand
cgaugaccauugacuggaa

SEQ ID NO: 2198433 - RNA, 19 nt, Homo sapiens
  misc_RNA (1)...(19): siRNA sense strand
gagcagcaucuacccaaug

SEQ ID NO: 2198434 - RNA, 19 nt, Homo sapiens
  misc_RNA (1)...(19): siRNA sense strand
gcuacguggucuacgagaa

SEQ ID NO: 2198435 - RNA, 19 nt, Homo sapiens
  misc_RNA (1)...(19): siRNA sense strand
uggcuucacucagaugauu

SEQ ID NO: 2198436 - RNA, 19 nt, Homo sapiens
  misc_RNA (1)...(19): siRNA sense strand
aagcugaggcugguguuua

SEQ ID NO: 2198437 - RNA, 19 nt, Homo sapiens
  misc_RNA (1)...(19): siRNA sense strand
agcagccucuucaaacaua

SEQ ID NO: 2198438 - RNA, 19 nt, Homo sapiens
  misc_RNA (1)...(19): siRNA sense strand
caacaacaugggcaucguu

SEQ ID NO: 2198439 - RNA, 19 nt, Homo sapiens
  misc_RNA (1)...(19): siRNA sense strand
uccaagaucaugagaagaa

SEQ ID NO: 2198440 - RNA, 19 nt, Homo sapiens
  misc_RNA (1)...(19): siRNA sense strand
gaaaacauccccgagauca

SEQ ID NO: 2198441 - RNA, 19 nt, Homo sapiens
  misc_RNA (1)...(19): siRNA sense strand
caugagcagccucuucaaa

SEQ ID NO: 2198442 - RNA, 19 nt, Homo sapiens
  misc_RNA (1)...(19): siRNA sense strand
uaacggucccggaugaguu

SEQ ID NO: 2198443 - RNA, 19 nt, Homo sapiens
  misc_RNA (1)...(19): siRNA sense strand
gaagcauuccacgaucuuu

SEQ ID NO: 2198444 - RNA, 19 nt, Homo sapiens
  misc_RNA (1)...(19): siRNA sense strand
uacgagaaccugaagauca

SEQ ID NO: 2198445 - RNA, 19 nt, Homo sapiens
  misc_RNA (1)...(19): siRNA sense strand
gaugugggugagaaucuaa

SEQ ID NO: 2198446 - RNA, 19 nt, Homo sapiens
  misc_RNA (1)...(19): siRNA sense strand
gaagaauuuguccauuauc

SEQ ID NO: 2198447 - RNA, 19 nt, Homo sapiens
  misc_RNA (1)...(19): siRNA sense strand
ucagcuacguggucuacga

SEQ ID NO: 2198448 - RNA, 19 nt, Homo sapiens
  misc_RNA (1)...(19): siRNA sense strand
acgagacgcucaagaaugc

SEQ ID NO: 2198449 - RNA, 19 nt, Homo sapiens
  misc_RNA (1)...(19): siRNA sense strand
aaucagccaucaaauucau

SEQ ID NO: 2198450 - RNA, 19 nt, Homo sapiens
  misc_RNA (1)...(19): siRNA sense strand
ugaugugggugagaaucua

SEQ ID NO: 2198451 - RNA, 19 nt, Homo sapiens
  misc_RNA (1)...(19): siRNA sense strand
ggaacgaguggagagacua

SEQ ID NO: 2198452 - RNA, 19 nt, Homo sapiens
  misc_RNA (1)...(19): siRNA sense strand
agcugaggcugguguuuaa

SEQ ID NO: 2198453 - RNA, 19 nt, Homo sapiens
  misc_RNA (1)...(19): siRNA sense strand
gagcagccucuucaaacau

SEQ ID NO: 2198454 - RNA, 19 nt, Homo sapiens
  misc_RNA (1)...(19): siRNA sense strand
guagugaccaggagacucu

SEQ ID NO: 2198455 - RNA, 19 nt, Homo sapiens
  misc_RNA (1)...(19): siRNA sense strand
gcaacaacaugggcaucgu

SEQ ID NO: 2198456 - RNA, 19 nt, Homo sapiens
  misc_RNA (1)...(19): siRNA sense strand
gaagcugaggcugguguuu

SEQ ID NO: 2198457 - RNA, 19 nt, Homo sapiens
  misc_RNA (1)...(19): siRNA sense strand
ggcugguguuuaagaguuu

SEQ ID NO: 2198458 - RNA, 19 nt, Homo sapiens
  misc_RNA (1)...(19): siRNA sense strand
gaacgaguggagagacuac

SEQ ID NO: 2198459 - RNA, 19 nt, Homo sapiens
  misc_RNA (1)...(19): siRNA sense strand
gcauugacgcgcaggagau

SEQ ID NO: 2198460 - RNA, 19 nt, Homo sapiens
  misc_RNA (1)...(19): siRNA sense strand
gcagccucuucaaacauau

SEQ ID NO: 2198461 - RNA, 19 nt, Homo sapiens
  misc_RNA (1)...(19): siRNA sense strand
ucuacgagacgcucaagaa

SEQ ID NO: 2198462 - RNA, 19 nt, Homo sapiens
  misc_RNA (1)...(19): siRNA sense strand
gcaucaacguccucaaaau

SEQ ID NO: 2198463 - RNA, 19 nt, Homo sapiens
  misc_RNA (1)...(19): siRNA sense strand
aggcugguguuuaagaguu

SEQ ID NO: 2198464 - RNA, 19 nt, Homo sapiens
  misc_RNA (1)...(19): siRNA sense strand
uggcaucaacguccucaaa

SEQ ID NO: 2198465 - RNA, 19 nt, Homo sapiens
  misc_RNA (1)...(19): siRNA sense strand
ccaauggagguccugaaga

SEQ ID NO: 2198466 - RNA, 19 nt, Homo sapiens
  misc_RNA (1)...(19): siRNA sense strand
caggagacucugaggauuc

SEQ ID NO: 2198467 - RNA, 19 nt, Homo sapiens
  misc_RNA (1)...(19): siRNA sense strand
cuacgagacgcucaagaau

SEQ ID NO: 2198468 - RNA, 19 nt, Homo sapiens
  misc_RNA (1)...(19): siRNA sense strand
ggaagacaggccaguacuc

SEQ ID NO: 2198469 - RNA, 19 nt, Homo sapiens
  misc_RNA (1)...(19): siRNA sense strand
gaccaugagcagccucuuc

SEQ ID NO: 2198470 - RNA, 19 nt, Homo sapiens
  misc_RNA (1)...(19): siRNA sense strand
caucgaccuugcagucuac

SEQ ID NO: 2198471 - RNA, 19 nt, Homo sapiens
  misc_RNA (1)...(19): siRNA sense strand
ccaagaucaugagaagaag

SEQ ID NO: 2198472 - RNA, 19 nt, Homo sapiens
  misc_RNA (1)...(19): siRNA sense strand
augggcagcuagacuuuga

SEQ ID NO: 2198473 - RNA, 19 nt, Homo sapiens
  misc_RNA (1)...(19): siRNA sense strand
caucaacguccucaaaauu

SEQ ID NO: 2198474 - RNA, 19 nt, Homo sapiens
  misc_RNA (1)...(19): siRNA sense strand
augccuggcugcagcacua

SEQ ID NO: 2198475 - RNA, 19 nt, Homo sapiens
  misc_RNA (1)...(19): siRNA sense strand
gggcugaggccacggaaaa

SEQ ID NO: 2198476 - RNA, 19 nt, Homo sapiens
  misc_RNA (1)...(19): siRNA sense strand
agcuagacuuugaagaauu

SEQ ID NO: 2198477 - RNA, 19 nt, Homo sapiens
  misc_RNA (1)...(19): siRNA sense strand
caucguugguggcuucacu

SEQ ID NO: 2198478 - RNA, 19 nt, Homo sapiens
  misc_RNA (1)...(19): siRNA sense strand
ggagucaagauaucugaac

SEQ ID NO: 2198479 - RNA, 19 nt, Homo sapiens
  misc_RNA (1)...(19): siRNA sense strand
acggcacgaugaccauuga

SEQ ID NO: 2198480 - RNA, 19 nt, Homo sapiens
  misc_RNA (1)...(19): siRNA sense strand
uacgagacgcucaagaaug

SEQ ID NO: 2198481 - RNA, 19 nt, Homo sapiens
  misc_RNA (1)...(19): siRNA sense strand
ggccaguacucaggaaugc

SEQ ID NO: 2198482 - RNA, 19 nt, Homo sapiens
  misc_RNA (1)...(19): siRNA sense strand
aggagacucugaggauuca

SEQ ID NO: 2198483 - RNA, 19 nt, Homo sapiens
  misc_RNA (1)...(19): siRNA sense strand
gcaacaagaucgagaagau

SEQ ID NO: 2198484 - RNA, 19 nt, Homo sapiens
  misc_RNA (1)...(19): siRNA sense strand
ccacaggcaucaaguauga

SEQ ID NO: 2198485 - RNA, 19 nt, Homo sapiens
  misc_RNA (1)...(19): siRNA sense strand
ccaaggcgcuguuugagaa

SEQ ID NO: 2198486 - RNA, 19 nt, Homo sapiens
  misc_RNA (1)...(19): siRNA sense strand
ugacagagcuccgcuacuu

SEQ ID NO: 2198487 - RNA, 19 nt, Homo sapiens
  misc_RNA (1)...(19): siRNA sense strand
guaagugggucaccaagga

SEQ ID NO: 2198488 - RNA, 19 nt, Homo sapiens
  misc_RNA (1)...(19): siRNA sense strand
ggccucaucugcauguaua

SEQ ID NO: 2198489 - RNA, 19 nt, Homo sapiens
  misc_RNA (1)...(19): siRNA sense strand
cuacaucucuaucgucaug

SEQ ID NO: 2198490 - RNA, 19 nt, Homo sapiens
  misc_RNA (1)...(19): siRNA sense strand
ccacacagcggccaagauu

SEQ ID NO: 2198491 - RNA, 19 nt, Homo sapiens
  misc_RNA (1)...(19): siRNA sense strand
cuacggcgcucccucaaga

SEQ ID NO: 2198492 - RNA, 19 nt, Homo sapiens
  misc_RNA (1)...(19): siRNA sense strand
ccacccagcucuucuacug

SEQ ID NO: 2198493 - RNA, 19 nt, Homo sapiens
  misc_RNA (1)...(19): siRNA sense strand
uugagaaggugaagaaguu

SEQ ID NO: 2198494 - RNA, 19 nt, Homo sapiens
  misc_RNA (1)...(19): siRNA sense strand
ggcagcggcucaccaagaa

SEQ ID NO: 2198495 - RNA, 19 nt, Homo sapiens
  misc_RNA (1)...(19): siRNA sense strand
gcacugguuugccaaguac

SEQ ID NO: 2198496 - RNA, 19 nt, Homo sapiens
  misc_RNA (1)...(19): siRNA sense strand
ucaacagccucaagaagau

SEQ ID NO: 2198497 - RNA, 19 nt, Homo sapiens
  misc_RNA (1)...(19): siRNA sense strand
ggacugcaccguggacauu

SEQ ID NO: 2198498 - RNA, 19 nt, Homo sapiens
  misc_RNA (1)...(19): siRNA sense strand
caacuucugguucaaauuc

SEQ ID NO: 2198499 - RNA, 19 nt, Homo sapiens
  misc_RNA (1)...(19): siRNA sense strand
gaacgacuucgccuucaug

SEQ ID NO: 2198500 - RNA, 19 nt, Homo sapiens
  misc_RNA (1)...(19): siRNA sense strand
ggcgcucccucaagaagua

SEQ ID NO: 2198501 - RNA, 19 nt, Homo sapiens
  misc_RNA (1)...(19): siRNA sense strand
ugaccaaccugacgcagau

SEQ ID NO: 2198502 - RNA, 19 nt, Homo sapiens
  misc_RNA (1)...(19): siRNA sense strand
ugaucugccugccuuguaa

SEQ ID NO: 2198503 - RNA, 19 nt, Homo sapiens
  misc_RNA (1)...(19): siRNA sense strand
cagaagcuguccaucaaca

SEQ ID NO: 2198504 - RNA, 19 nt, Homo sapiens
  misc_RNA (1)...(19): siRNA sense strand
acacagcggccaagauuga

SEQ ID NO: 2198505 - RNA, 19 nt, Homo sapiens
  misc_RNA (1)...(19): siRNA sense strand
ugcagaagcuguccaucaa

SEQ ID NO: 2198506 - RNA, 19 nt, Homo sapiens
  misc_RNA (1)...(19): siRNA sense strand
ucgaggagaucaucagcuu

SEQ ID NO: 2198507 - RNA, 19 nt, Homo sapiens
  misc_RNA (1)...(19): siRNA sense strand
ggagaacaaccgcuacauc

SEQ ID NO: 2198508 - RNA, 19 nt, Homo sapiens
  misc_RNA (1)...(19): siRNA sense strand
ucaagaagauggcgaaccu

SEQ ID NO: 2198509 - RNA, 19 nt, Homo sapiens
  misc_RNA (1)...(19): siRNA sense strand
gaagcuguccaucaacaau

SEQ ID NO: 2198510 - RNA, 19 nt, Homo sapiens
  misc_RNA (1)...(19): siRNA sense strand
gcugaugauugccgucuuc

SEQ ID NO: 2198511 - RNA, 19 nt, Homo sapiens
  misc_RNA (1)...(19): siRNA sense strand
gccuuaagcugugguacaa

SEQ ID NO: 2198512 - RNA, 19 nt, Homo sapiens
  misc_RNA (1)...(19): siRNA sense strand
gaagauggcgaaccugacu

SEQ ID NO: 2198513 - RNA, 19 nt, Homo sapiens
  misc_RNA (1)...(19): siRNA sense strand
acaacaaccucaagaccau

SEQ ID NO: 2198514 - RNA, 19 nt, Homo sapiens
  misc_RNA (1)...(19): siRNA sense strand
gcaggucacccaagacaag

SEQ ID NO: 2198515 - RNA, 19 nt, Homo sapiens
  misc_RNA (1)...(19): siRNA sense strand
cagcauaccggauccugaa

SEQ ID NO: 2198516 - RNA, 19 nt, Homo sapiens
  misc_RNA (1)...(19): siRNA sense strand
ucaagaccaucgaggagau

SEQ ID NO: 2198517 - RNA, 19 nt, Homo sapiens
  misc_RNA (1)...(19): siRNA sense strand
ucacagacuacaucucuau

SEQ ID NO: 2198518 - RNA, 19 nt, Homo sapiens
  misc_RNA (1)...(19): siRNA sense strand
ucaccgacaucaaggagau

SEQ ID NO: 2198519 - RNA, 19 nt, Homo sapiens
  misc_RNA (1)...(19): siRNA sense strand
ucaagauccuggcguccuu

SEQ ID NO: 2198520 - RNA, 19 nt, Homo sapiens
  misc_RNA (1)...(19): siRNA sense strand
caaguucaccgacaucaag

SEQ ID NO: 2198521 - RNA, 19 nt, Homo sapiens
  misc_RNA (1)...(19): siRNA sense strand
ggaggugagugagaacaag

SEQ ID NO: 2198522 - RNA, 19 nt, Homo sapiens
  misc_RNA (1)...(19): siRNA sense strand
ccaagaacgcgcaggacaa

SEQ ID NO: 2198523 - RNA, 19 nt, Homo sapiens
  misc_RNA (1)...(19): siRNA sense strand
ucaaggugaucaaguucau

SEQ ID NO: 2198524 - RNA, 19 nt, Homo sapiens
  misc_RNA (1)...(19): siRNA sense strand
ugucggaggugagugagaa

SEQ ID NO: 2198525 - RNA, 19 nt, Homo sapiens
  misc_RNA (1)...(19): siRNA sense strand
gcagcaacuucugguucaa

SEQ ID NO: 2198526 - RNA, 19 nt, Homo sapiens
  misc_RNA (1)...(19): siRNA sense strand
gacagagcuccgcuacuuu

SEQ ID NO: 2198527 - RNA, 19 nt, Homo sapiens
  misc_RNA (1)...(19): siRNA sense strand
gaagcuggagcacuuugug

SEQ ID NO: 2198528 - RNA, 19 nt, Homo sapiens
  misc_RNA (1)...(19): siRNA sense strand
acagagcuccgcuacuuug

SEQ ID NO: 2198529 - RNA, 19 nt, Homo sapiens
  misc_RNA (1)...(19): siRNA sense strand
uaccugaaccgcaacaaga

SEQ ID NO: 2198530 - RNA, 19 nt, Homo sapiens
  misc_RNA (1)...(19): siRNA sense strand
guucacagacuacaucucu

SEQ ID NO: 2198531 - RNA, 19 nt, Homo sapiens
  misc_RNA (1)...(19): siRNA sense strand
gcaacuucugguucaaauu

SEQ ID NO: 2198532 - RNA, 19 nt, Homo sapiens
  misc_RNA (1)...(19): siRNA sense strand
gacgcugugugcuaugaga

SEQ ID NO: 2198533 - RNA, 19 nt, Homo sapiens
  misc_RNA (1)...(19): siRNA sense strand
ugucuauccugcugaagug

SEQ ID NO: 2198534 - RNA, 19 nt, Homo sapiens
  misc_RNA (1)...(19): siRNA sense strand
gcagaaccuccagaaccua

SEQ ID NO: 2198535 - RNA, 19 nt, Homo sapiens
  misc_RNA (1)...(19): siRNA sense strand
ggcagaccaucaucaaggu

SEQ ID NO: 2198536 - RNA, 19 nt, Homo sapiens
  misc_RNA (1)...(19): siRNA sense strand
ccucaagaaguacucguuu

SEQ ID NO: 2198537 - RNA, 19 nt, Homo sapiens
  misc_RNA (1)...(19): siRNA sense strand
ugcacugguuugccaagua

SEQ ID NO: 2198538 - RNA, 19 nt, Homo sapiens
  misc_RNA (1)...(19): siRNA sense strand
cucaagaaguacucguuug

SEQ ID NO: 2198539 - RNA, 19 nt, Homo sapiens
  misc_RNA (1)...(19): siRNA sense strand
gauccuggcguccuucuac

SEQ ID NO: 2198540 - RNA, 19 nt, Homo sapiens
  misc_RNA (1)...(19): siRNA sense strand
agacgggcgugcuggacaa

SEQ ID NO: 2198541 - RNA, 19 nt, Homo sapiens
  misc_RNA (1)...(19): siRNA sense strand
agucaucgaccgucaguga

SEQ ID NO: 2198542 - RNA, 19 nt, Homo sapiens
  misc_RNA (1)...(19): siRNA sense strand
uggagcacuuugugucuau

SEQ ID NO: 2198543 - RNA, 19 nt, Homo sapiens
  misc_RNA (1)...(19): siRNA sense strand
cguggacgcugugugcuau

SEQ ID NO: 2198544 - RNA, 19 nt, Homo sapiens
  misc_RNA (1)...(19): siRNA sense strand
caacaacgugcugcaguca

SEQ ID NO: 2198545 - RNA, 19 nt, Homo sapiens
  misc_RNA (1)...(19): siRNA sense strand
cucaacagccucaagaaga

SEQ ID NO: 2198546 - RNA, 19 nt, Homo sapiens
  misc_RNA (1)...(19): siRNA sense strand
cacagguggucacagaugu

SEQ ID NO: 2198547 - RNA, 19 nt, Homo sapiens
  misc_RNA (1)...(19): siRNA sense strand
caagaacgcgcaggacaag

SEQ ID NO: 2198548 - RNA, 19 nt, Homo sapiens
  misc_RNA (1)...(19): siRNA sense strand
gagcagcuacagcgacauc

SEQ ID NO: 2198549 - RNA, 19 nt, Homo sapiens
  misc_RNA (1)...(19): siRNA sense strand
cuacaucagccuagucauc

SEQ ID NO: 2198550 - RNA, 19 nt, Homo sapiens
  misc_RNA (1)...(19): siRNA sense strand
gaucaaguucauccucauc

SEQ ID NO: 2198551 - RNA, 19 nt, Homo sapiens
  misc_RNA (1)...(19): siRNA sense strand
gccaaggcgcuguuugaga

SEQ ID NO: 2198552 - RNA, 19 nt, Homo sapiens
  misc_RNA (1)...(19): siRNA sense strand
aagccaaggcgcuguuuga

SEQ ID NO: 2198553 - RNA, 19 nt, Homo sapiens
  misc_RNA (1)...(19): siRNA sense strand
gcaagccaaggcgcuguuu

SEQ ID NO: 2198554 - RNA, 19 nt, Homo sapiens
  misc_RNA (1)...(19): siRNA sense strand
cgggcgugcuggacaagaa

SEQ ID NO: 2198555 - RNA, 19 nt, Homo sapiens
  misc_RNA (1)...(19): siRNA sense strand
ucuauagccugaagacacu

SEQ ID NO: 2198556 - RNA, 19 nt, Homo sapiens
  misc_RNA (1)...(19): siRNA sense strand
ucaaguucauccucaucau

SEQ ID NO: 2198557 - RNA, 19 nt, Homo sapiens
  misc_RNA (1)...(19): siRNA sense strand
cagacuacaucucuaucgu

SEQ ID NO: 2198558 - RNA, 19 nt, Homo sapiens
  misc_RNA (1)...(19): siRNA sense strand
gcgcugcacaucaaguuca

SEQ ID NO: 2198559 - RNA, 19 nt, Homo sapiens
  misc_RNA (1)...(19): siRNA sense strand
ugcagcaacuucugguuca

SEQ ID NO: 2198560 - RNA, 19 nt, Homo sapiens
  misc_RNA (1)...(19): siRNA sense strand
ucaaggugcugcggcucaa

SEQ ID NO: 2198561 - RNA, 19 nt, Homo sapiens
  misc_RNA (1)...(19): siRNA sense strand
caaguucauccucaucauc

SEQ ID NO: 2198562 - RNA, 19 nt, Homo sapiens
  misc_RNA (1)...(19): siRNA sense strand
gcuacaccgucuacuacgu

SEQ ID NO: 2198563 - RNA, 19 nt, Homo sapiens
  misc_RNA (1)...(19): siRNA sense strand
gggcgcugcacaucaaguu

SEQ ID NO: 2198564 - RNA, 19 nt, Homo sapiens
  misc_RNA (1)...(19): siRNA sense strand
ggacacgcagccagcauac

SEQ ID NO: 2198565 - RNA, 19 nt, Homo sapiens
  misc_RNA (1)...(19): siRNA sense strand
ucuacuacgugcacaacau

SEQ ID NO: 2198566 - RNA, 19 nt, Homo sapiens
  misc_RNA (1)...(19): siRNA sense strand
cagcaacuucugguucaaa

SEQ ID NO: 2198567 - RNA, 19 nt, Homo sapiens
  misc_RNA (1)...(19): siRNA sense strand
acaaccacaucgccuacau

SEQ ID NO: 2198568 - RNA, 19 nt, Homo sapiens
  misc_RNA (1)...(19): siRNA sense strand
cugcagaagcuguccauca

SEQ ID NO: 2198569 - RNA, 19 nt, Homo sapiens
  misc_RNA (1)...(19): siRNA sense strand
guggaucuauagccugaag

SEQ ID NO: 2198570 - RNA, 19 nt, Homo sapiens
  misc_RNA (1)...(19): siRNA sense strand
cggacacgcagccagcaua

SEQ ID NO: 2198571 - RNA, 19 nt, Homo sapiens
  misc_RNA (1)...(19): siRNA sense strand
cuggagcacuuugugucua

SEQ ID NO: 2198572 - RNA, 19 nt, Homo sapiens
  misc_RNA (1)...(19): siRNA sense strand
acaucggccuccugcagaa

SEQ ID NO: 2198573 - RNA, 19 nt, Homo sapiens
  misc_RNA (1)...(19): siRNA sense strand
acaacaaccugaccuuccu

SEQ ID NO: 2198574 - RNA, 19 nt, Homo sapiens
  misc_RNA (1)...(19): siRNA sense strand
ucaaggacaacaaccucaa

SEQ ID NO: 2198575 - RNA, 19 nt, Homo sapiens
  misc_RNA (1)...(19): siRNA sense strand
uguauacacugugguggau

SEQ ID NO: 2198576 - RNA, 19 nt, Homo sapiens
  misc_RNA (1)...(19): siRNA sense strand
gaaguuccggacccaugug

SEQ ID NO: 2198577 - RNA, 19 nt, Homo sapiens
  misc_RNA (1)...(19): siRNA sense strand
aagaacgacuucgccuuca

SEQ ID NO: 2198578 - RNA, 19 nt, Homo sapiens
  misc_RNA (1)...(19): siRNA sense strand
uggagcgccucuaccugaa

SEQ ID NO: 2198579 - RNA, 19 nt, Homo sapiens
  misc_RNA (1)...(19): siRNA sense strand
caacagccucaagaagaug

SEQ ID NO: 2198580 - RNA, 19 nt, Homo sapiens
  misc_RNA (1)...(19): siRNA sense strand
ggucacccaagacaagaug

SEQ ID NO: 2198581 - RNA, 19 nt, Homo sapiens
  misc_RNA (1)...(19): siRNA sense strand
gcaaagcucucuacacauu

SEQ ID NO: 2198582 - RNA, 19 nt, Homo sapiens
  misc_RNA (1)...(19): siRNA sense strand
gauaacagccuuucaaauu

SEQ ID NO: 2198583 - RNA, 19 nt, Homo sapiens
  misc_RNA (1)...(19): siRNA sense strand
gcagaaagucgaugaguua

SEQ ID NO: 2198584 - RNA, 19 nt, Homo sapiens
  misc_RNA (1)...(19): siRNA sense strand
gaaagucgaugaguuaaau

SEQ ID NO: 2198585 - RNA, 19 nt, Homo sapiens
  misc_RNA (1)...(19): siRNA sense strand
gaagacauaugcagagguu

SEQ ID NO: 2198586 - RNA, 19 nt, Homo sapiens
  misc_RNA (1)...(19): siRNA sense strand
gagaguccaugaagacaua

SEQ ID NO: 2198587 - RNA, 19 nt, Homo sapiens
  misc_RNA (1)...(19): siRNA sense strand
ucaaagagaugccauaaca

SEQ ID NO: 2198588 - RNA, 19 nt, Homo sapiens
  misc_RNA (1)...(19): siRNA sense strand
ucaaauacgucaccaaaug

SEQ ID NO: 2198589 - RNA, 19 nt, Homo sapiens
  misc_RNA (1)...(19): siRNA sense strand
ugaaagaugucuaccuaaa

SEQ ID NO: 2198590 - RNA, 19 nt, Homo sapiens
  misc_RNA (1)...(19): siRNA sense strand
gcagauuacucauccauuc

SEQ ID NO: 2198591 - RNA, 19 nt, Homo sapiens
  misc_RNA (1)...(19): siRNA sense strand
ggagauggaucaaagagau

SEQ ID NO: 2198592 - RNA, 19 nt, Homo sapiens
  misc_RNA (1)...(19): siRNA sense strand
gaacauggcaucacagauc

SEQ ID NO: 2198593 - RNA, 19 nt, Homo sapiens
  misc_RNA (1)...(19): siRNA sense strand
gugcaaagcucucuacaca

SEQ ID NO: 2198594 - RNA, 19 nt, Homo sapiens
  misc_RNA (1)...(19): siRNA sense strand
ggaagugccuggauggaau

SEQ ID NO: 2198595 - RNA, 19 nt, Homo sapiens
  misc_RNA (1)...(19): siRNA sense strand
caaaccagaccucaaauuu

SEQ ID NO: 2198596 - RNA, 19 nt, Homo sapiens
  misc_RNA (1)...(19): siRNA sense strand
aaagaugucuaccuaaaga

SEQ ID NO: 2198597 - RNA, 19 nt, Homo sapiens
  misc_RNA (1)...(19): siRNA sense strand
ucaaagaaguaccaaccua

SEQ ID NO: 2198598 - RNA, 19 nt, Homo sapiens
  misc_RNA (1)...(19): siRNA sense strand
gcaccgagcucugggauca

SEQ ID NO: 2198599 - RNA, 19 nt, Homo sapiens
  misc_RNA (1)...(19): siRNA sense strand
gaguagagacccagaaauu

SEQ ID NO: 2198600 - RNA, 19 nt, Homo sapiens
  misc_RNA (1)...(19): siRNA sense strand
aaugaaagaugucuaccua

SEQ ID NO: 2198601 - RNA, 19 nt, Homo sapiens
  misc_RNA (1)...(19): siRNA sense strand
gaaagaaaggacagagauu

SEQ ID NO: 2198602 - RNA, 19 nt, Homo sapiens
  misc_RNA (1)...(19): siRNA sense strand
cagcaugaauauuaccaua

SEQ ID NO: 2198603 - RNA, 19 nt, Homo sapiens
  misc_RNA (1)...(19): siRNA sense strand
guaaagcuuucauuuccaa

SEQ ID NO: 2198604 - RNA, 19 nt, Homo sapiens
  misc_RNA (1)...(19): siRNA sense strand
ggagaggaaaucaaacuuu

SEQ ID NO: 2198605 - RNA, 19 nt, Homo sapiens
  misc_RNA (1)...(19): siRNA sense strand
guagagacccagaaauuug

SEQ ID NO: 2198606 - RNA, 19 nt, Homo sapiens
  misc_RNA (1)...(19): siRNA sense strand
caaagaaguaccaaccuaa

SEQ ID NO: 2198607 - RNA, 19 nt, Homo sapiens
  misc_RNA (1)...(19): siRNA sense strand
gaaaggaggauugugagaa

SEQ ID NO: 2198608 - RNA, 19 nt, Homo sapiens
  misc_RNA (1)...(19): siRNA sense strand
gaggaaaggaggauuguga

SEQ ID NO: 2198609 - RNA, 19 nt, Homo sapiens
  misc_RNA (1)...(19): siRNA sense strand
ggacuuggcacgcuauguu

SEQ ID NO: 2198610 - RNA, 19 nt, Homo sapiens
  misc_RNA (1)...(19): siRNA sense strand
ggaaaguuauggccguuca

SEQ ID NO: 2198611 - RNA, 19 nt, Homo sapiens
  misc_RNA (1)...(19): siRNA sense strand
caaauccaaaggaaaguua

SEQ ID NO: 2198612 - RNA, 19 nt, Homo sapiens
  misc_RNA (1)...(19): siRNA sense strand
gaacucagcuaugcaaagc

SEQ ID NO: 2198613 - RNA, 19 nt, Homo sapiens
  misc_RNA (1)...(19): siRNA sense strand
aaagagaugccauaacaaa

SEQ ID NO: 2198614 - RNA, 19 nt, Homo sapiens
  misc_RNA (1)...(19): siRNA sense strand
gugccuggauggaauagua

SEQ ID NO: 2198615 - RNA, 19 nt, Homo sapiens
  misc_RNA (1)...(19): siRNA sense strand
cagcaaagcagauuacuca

SEQ ID NO: 2198616 - RNA, 19 nt, Homo sapiens
  misc_RNA (1)...(19): siRNA sense strand
caaagcaacucaggaaucu

SEQ ID NO: 2198617 - RNA, 19 nt, Homo sapiens
  misc_RNA (1)...(19): siRNA sense strand
cgaaggaggaagaagaaua

SEQ ID NO: 2198618 - RNA, 19 nt, Homo sapiens
  misc_RNA (1)...(19): siRNA sense strand
gaucaaagagaugccauaa

SEQ ID NO: 2198619 - RNA, 19 nt, Homo sapiens
  misc_RNA (1)...(19): siRNA sense strand
acaaguauacgucauguaa

SEQ ID NO: 2198620 - RNA, 19 nt, Homo sapiens
  misc_RNA (1)...(19): siRNA sense strand
gcucaaauacgucaccaaa

SEQ ID NO: 2198621 - RNA, 19 nt, Homo sapiens
  misc_RNA (1)...(19): siRNA sense strand
gcaaaccagaccucaaauu

SEQ ID NO: 2198622 - RNA, 19 nt, Homo sapiens
  misc_RNA (1)...(19): siRNA sense strand
agaaggagauggaucaaag

SEQ ID NO: 2198623 - RNA, 19 nt, Homo sapiens
  misc_RNA (1)...(19): siRNA sense strand
aaaggaggauugugagaau

SEQ ID NO: 2198624 - RNA, 19 nt, Homo sapiens
  misc_RNA (1)...(19): siRNA sense strand
gcaaagcaacucaggaauc

SEQ ID NO: 2198625 - RNA, 19 nt, Homo sapiens
  misc_RNA (1)...(19): siRNA sense strand
acaacaagcucaaauacgu

SEQ ID NO: 2198626 - RNA, 19 nt, Homo sapiens
  misc_RNA (1)...(19): siRNA sense strand
gugcaacaccggaggauuu

SEQ ID NO: 2198627 - RNA, 19 nt, Homo sapiens
  misc_RNA (1)...(19): siRNA sense strand
gaagugccuggauggaaua

SEQ ID NO: 2198628 - RNA, 19 nt, Homo sapiens
  misc_RNA (1)...(19): siRNA sense strand
gcaugaauauuaccauacu

SEQ ID NO: 2198629 - RNA, 19 nt, Homo sapiens
  misc_RNA (1)...(19): siRNA sense strand
gaaggaggaagaagaauac

SEQ ID NO: 2198630 - RNA, 19 nt, Homo sapiens
  misc_RNA (1)...(19): siRNA sense strand
gaucacaaauuagcagaag

SEQ ID NO: 2198631 - RNA, 19 nt, Homo sapiens
  misc_RNA (1)...(19): siRNA sense strand
cuggagacauugaauuuga

SEQ ID NO: 2198632 - RNA, 19 nt, Homo sapiens
  misc_RNA (1)...(19): siRNA sense strand
ggagaaaugaagaugaaga

SEQ ID NO: 2198633 - RNA, 19 nt, Homo sapiens
  misc_RNA (1)...(19): siRNA sense strand
gcagaagucagccaaaaua

SEQ ID NO: 2198634 - RNA, 19 nt, Homo sapiens
  misc_RNA (1)...(19): siRNA sense strand
gaaagaugucuaccuaaag

SEQ ID NO: 2198635 - RNA, 19 nt, Homo sapiens
  misc_RNA (1)...(19): siRNA sense strand
ggauuacacucagccaaug

SEQ ID NO: 2198636 - RNA, 19 nt, Homo sapiens
  misc_RNA (1)...(19): siRNA sense strand
gcgcagcaguacuuugaga

SEQ ID NO: 2198637 - RNA, 19 nt, Homo sapiens
  misc_RNA (1)...(19): siRNA sense strand
ccuaaagaauccucagaug

SEQ ID NO: 2198638 - RNA, 19 nt, Homo sapiens
  misc_RNA (1)...(19): siRNA sense strand
uacaagagauggaggaaag

SEQ ID NO: 2198639 - RNA, 19 nt, Homo sapiens
  misc_RNA (1)...(19): siRNA sense strand
auucacagcugguaauaga

SEQ ID NO: 2198640 - RNA, 19 nt, Homo sapiens
  misc_RNA (1)...(19): siRNA sense strand
auaacagccuuucaaauuc

SEQ ID NO: 2198641 - RNA, 19 nt, Homo sapiens
  misc_RNA (1)...(19): siRNA sense strand
ggaggaagaagaauacaag

SEQ ID NO: 2198642 - RNA, 19 nt, Homo sapiens
  misc_RNA (1)...(19): siRNA sense strand
ucggagaaaugaagaugaa

SEQ ID NO: 2198643 - RNA, 19 nt, Homo sapiens
  misc_RNA (1)...(19): siRNA sense strand
gcaaagcagauuacucauc

SEQ ID NO: 2198644 - RNA, 19 nt, Homo sapiens
  misc_RNA (1)...(19): siRNA sense strand
gggcgcagcaguacuuuga

SEQ ID NO: 2198645 - RNA, 19 nt, Homo sapiens
  misc_RNA (1)...(19): siRNA sense strand
cagaaugaaggaacgauuu

SEQ ID NO: 2198646 - RNA, 19 nt, Homo sapiens
  misc_RNA (1)...(19): siRNA sense strand
aaagcucucuacacauuug

SEQ ID NO: 2198647 - RNA, 19 nt, Homo sapiens
  misc_RNA (1)...(19): siRNA sense strand
gguggcaaauccaaaggaa

SEQ ID NO: 2198648 - RNA, 19 nt, Homo sapiens
  misc_RNA (1)...(19): siRNA sense strand
gacauugaauuugaggauu

SEQ ID NO: 2198649 - RNA, 19 nt, Homo sapiens
  misc_RNA (1)...(19): siRNA sense strand
augagcagcaugaauauua

SEQ ID NO: 2198650 - RNA, 19 nt, Homo sapiens
  misc_RNA (1)...(19): siRNA sense strand
gaaggagauggaucaaaga

SEQ ID NO: 2198651 - RNA, 19 nt, Homo sapiens
  misc_RNA (1)...(19): siRNA sense strand
aaccagaccucaaauuugg

SEQ ID NO: 2198652 - RNA, 19 nt, Homo sapiens
  misc_RNA (1)...(19): siRNA sense strand
aaaccagaccucaaauuug

SEQ ID NO: 2198653 - RNA, 19 nt, Homo sapiens
  misc_RNA (1)...(19): siRNA sense strand
gaagcgcacugugucagau

SEQ ID NO: 2198654 - RNA, 19 nt, Homo sapiens
  misc_RNA (1)...(19): siRNA sense strand
gcuuauaaaucaggguuug

SEQ ID NO: 2198655 - RNA, 19 nt, Homo sapiens
  misc_RNA (1)...(19): siRNA sense strand
gcagcaguacuuugagaaa

SEQ ID NO: 2198656 - RNA, 19 nt, Homo sapiens
  misc_RNA (1)...(19): siRNA sense strand
aauggacgcugacaucaau

SEQ ID NO: 2198657 - RNA, 19 nt, Homo sapiens
  misc_RNA (1)...(19): siRNA sense strand
gagaacauggcaucacaga

SEQ ID NO: 2198658 - RNA, 19 nt, Homo sapiens
  misc_RNA (1)...(19): siRNA sense strand
gaacgauuuccguaguuga

SEQ ID NO: 2198659 - RNA, 19 nt, Homo sapiens
  misc_RNA (1)...(19): siRNA sense strand
uagagaaacugcgaguaga

SEQ ID NO: 2198660 - RNA, 19 nt, Homo sapiens
  misc_RNA (1)...(19): siRNA sense strand
aagcaacucaggaaucuuu

SEQ ID NO: 2198661 - RNA, 19 nt, Homo sapiens
  misc_RNA (1)...(19): siRNA sense strand
ccucccaccugaacaaaga

SEQ ID NO: 2198662 - RNA, 19 nt, Homo sapiens
  misc_RNA (1)...(19): siRNA sense strand
ggaaaggaggauugugaga

SEQ ID NO: 2198663 - RNA, 19 nt, Homo sapiens
  misc_RNA (1)...(19): siRNA sense strand
cagauaacagccuuucaaa

SEQ ID NO: 2198664 - RNA, 19 nt, Homo sapiens
  misc_RNA (1)...(19): siRNA sense strand
gaaggagaaacauuguaug

SEQ ID NO: 2198665 - RNA, 19 nt, Homo sapiens
  misc_RNA (1)...(19): siRNA sense strand
ugaaggagaaacauuguau

SEQ ID NO: 2198666 - RNA, 19 nt, Homo sapiens
  misc_RNA (1)...(19): siRNA sense strand
gaacgaaaugaaugauuac

SEQ ID NO: 2198667 - RNA, 19 nt, Homo sapiens
  misc_RNA (1)...(19): siRNA sense strand
aaagaaguaccaaccuaaa

SEQ ID NO: 2198668 - RNA, 19 nt, Homo sapiens
  misc_RNA (1)...(19): siRNA sense strand
gaagucagccaaaauauag

SEQ ID NO: 2198669 - RNA, 19 nt, Homo sapiens
  misc_RNA (1)...(19): siRNA sense strand
ucagauaacagccuuucaa

SEQ ID NO: 2198670 - RNA, 19 nt, Homo sapiens
  misc_RNA (1)...(19): siRNA sense strand
ccaaugaagcgcacugugu

SEQ ID NO: 2198671 - RNA, 19 nt, Homo sapiens
  misc_RNA (1)...(19): siRNA sense strand
aaagaaaggacagagauug

SEQ ID NO: 2198672 - RNA, 19 nt, Homo sapiens
  misc_RNA (1)...(19): siRNA sense strand
gcagggcagcaugaaguua

SEQ ID NO: 2198673 - RNA, 19 nt, Homo sapiens
  misc_RNA (1)...(19): siRNA sense strand
gaaaauggacgcugacauc

SEQ ID NO: 2198674 - RNA, 19 nt, Homo sapiens
  misc_RNA (1)...(19): siRNA sense strand
gaauauuaccauacucaca

SEQ ID NO: 2198675 - RNA, 19 nt, Homo sapiens
  misc_RNA (1)...(19): siRNA sense strand
ggacagcaaagcagauuac

SEQ ID NO: 2198676 - RNA, 19 nt, Homo sapiens
  misc_RNA (1)...(19): siRNA sense strand
gcaaauccaaaggaaaguu

SEQ ID NO: 2198677 - RNA, 19 nt, Homo sapiens
  misc_RNA (1)...(19): siRNA sense strand
gcgaguagagacccagaaa

SEQ ID NO: 2198678 - RNA, 19 nt, Homo sapiens
  misc_RNA (1)...(19): siRNA sense strand
ggaucaaagagaugccaua

SEQ ID NO: 2198679 - RNA, 19 nt, Homo sapiens
  misc_RNA (1)...(19): siRNA sense strand
acacagaggagcagaguca

SEQ ID NO: 2198680 - RNA, 19 nt, Homo sapiens
  misc_RNA (1)...(19): siRNA sense strand
ggacccgcauucggagaaa

SEQ ID NO: 2198681 - RNA, 19 nt, Homo sapiens
  misc_RNA (1)...(19): siRNA sense strand
gcaaagcucucuacacauu

SEQ ID NO: 2198682 - RNA, 19 nt, Homo sapiens
  misc_RNA (1)...(19): siRNA sense strand
gauaacagccuuucaaauu

SEQ ID NO: 2198683 - RNA, 19 nt, Homo sapiens
  misc_RNA (1)...(19): siRNA sense strand
gcagaaagucgaugaguua

SEQ ID NO: 2198684 - RNA, 19 nt, Homo sapiens
  misc_RNA (1)...(19): siRNA sense strand
gaaagucgaugaguuaaau

SEQ ID NO: 2198685 - RNA, 19 nt, Homo sapiens
  misc_RNA (1)...(19): siRNA sense strand
gaagacauaugcagagguu

SEQ ID NO: 2198686 - RNA, 19 nt, Homo sapiens
  misc_RNA (1)...(19): siRNA sense strand
gagaguccaugaagacaua

SEQ ID NO: 2198687 - RNA, 19 nt, Homo sapiens
  misc_RNA (1)...(19): siRNA sense strand
ucaaagagaugccauaaca

SEQ ID NO: 2198688 - RNA, 19 nt, Homo sapiens
  misc_RNA (1)...(19): siRNA sense strand
ucaaauacgucaccaaaug

SEQ ID NO: 2198689 - RNA, 19 nt, Homo sapiens
  misc_RNA (1)...(19): siRNA sense strand
ugaaagaugucuaccuaaa

SEQ ID NO: 2198690 - RNA, 19 nt, Homo sapiens
  misc_RNA (1)...(19): siRNA sense strand
gcagauuacucauccauuc

SEQ ID NO: 2198691 - RNA, 19 nt, Homo sapiens
  misc_RNA (1)...(19): siRNA sense strand
ggagauggaucaaagagau

SEQ ID NO: 2198692 - RNA, 19 nt, Homo sapiens
  misc_RNA (1)...(19): siRNA sense strand
gaacauggcaucacagauc

SEQ ID NO: 2198693 - RNA, 19 nt, Homo sapiens
  misc_RNA (1)...(19): siRNA sense strand
gugcaaagcucucuacaca

SEQ ID NO: 2198694 - RNA, 19 nt, Homo sapiens
  misc_RNA (1)...(19): siRNA sense strand
ggaagugccuggauggaau

SEQ ID NO: 2198695 - RNA, 19 nt, Homo sapiens
  misc_RNA (1)...(19): siRNA sense strand
caaaccagaccucaaauuu

SEQ ID NO: 2198696 - RNA, 19 nt, Homo sapiens
  misc_RNA (1)...(19): siRNA sense strand
aaagaugucuaccuaaaga

SEQ ID NO: 2198697 - RNA, 19 nt, Homo sapiens
  misc_RNA (1)...(19): siRNA sense strand
ucaaagaaguaccaaccua

SEQ ID NO: 2198698 - RNA, 19 nt, Homo sapiens
  misc_RNA (1)...(19): siRNA sense strand
gcaccgagcucugggauca

SEQ ID NO: 2198699 - RNA, 19 nt, Homo sapiens
  misc_RNA (1)...(19): siRNA sense strand
gaguagagacccagaaauu

SEQ ID NO: 2198700 - RNA, 19 nt, Homo sapiens
  misc_RNA (1)...(19): siRNA sense strand
aaugaaagaugucuaccua

SEQ ID NO: 2198701 - RNA, 19 nt, Homo sapiens
  misc_RNA (1)...(19): siRNA sense strand
gaaagaaaggacagagauu

SEQ ID NO: 2198702 - RNA, 19 nt, Homo sapiens
  misc_RNA (1)...(19): siRNA sense strand
cagcaugaauauuaccaua

SEQ ID NO: 2198703 - RNA, 19 nt, Homo sapiens
  misc_RNA (1)...(19): siRNA sense strand
guaaagcuuucauuuccaa

SEQ ID NO: 2198704 - RNA, 19 nt, Homo sapiens
  misc_RNA (1)...(19): siRNA sense strand
ggagaggaaaucaaacuuu

SEQ ID NO: 2198705 - RNA, 19 nt, Homo sapiens
  misc_RNA (1)...(19): siRNA sense strand
guagagacccagaaauuug

SEQ ID NO: 2198706 - RNA, 19 nt, Homo sapiens
  misc_RNA (1)...(19): siRNA sense strand
caaagaaguaccaaccuaa

SEQ ID NO: 2198707 - RNA, 19 nt, Homo sapiens
  misc_RNA (1)...(19): siRNA sense strand
gaaaggaggauugugagaa

SEQ ID NO: 2198708 - RNA, 19 nt, Homo sapiens
  misc_RNA (1)...(19): siRNA sense strand
gaggaaaggaggauuguga

SEQ ID NO: 2198709 - RNA, 19 nt, Homo sapiens
  misc_RNA (1)...(19): siRNA sense strand
ggacuuggcacgcuauguu

SEQ ID NO: 2198710 - RNA, 19 nt, Homo sapiens
  misc_RNA (1)...(19): siRNA sense strand
ggaaaguuauggccguuca

SEQ ID NO: 2198711 - RNA, 19 nt, Homo sapiens
  misc_RNA (1)...(19): siRNA sense strand
caaauccaaaggaaaguua

SEQ ID NO: 2198712 - RNA, 19 nt, Homo sapiens
  misc_RNA (1)...(19): siRNA sense strand
gaacucagcuaugcaaagc

SEQ ID NO: 2198713 - RNA, 19 nt, Homo sapiens
  misc_RNA (1)...(19): siRNA sense strand
aaagagaugccauaacaaa

SEQ ID NO: 2198714 - RNA, 19 nt, Homo sapiens
  misc_RNA (1)...(19): siRNA sense strand
gugccuggauggaauagua

SEQ ID NO: 2198715 - RNA, 19 nt, Homo sapiens
  misc_RNA (1)...(19): siRNA sense strand
cagcaaagcagauuacuca

SEQ ID NO: 2198716 - RNA, 19 nt, Homo sapiens
  misc_RNA (1)...(19): siRNA sense strand
caaagcaacucaggaaucu

SEQ ID NO: 2198717 - RNA, 19 nt, Homo sapiens
  misc_RNA (1)...(19): siRNA sense strand
cgaaggaggaagaagaaua

SEQ ID NO: 2198718 - RNA, 19 nt, Homo sapiens
  misc_RNA (1)...(19): siRNA sense strand
gaucaaagagaugccauaa

SEQ ID NO: 2198719 - RNA, 19 nt, Homo sapiens
  misc_RNA (1)...(19): siRNA sense strand
acaaguauacgucauguaa

SEQ ID NO: 2198720 - RNA, 19 nt, Homo sapiens
  misc_RNA (1)...(19): siRNA sense strand
gcucaaauacgucaccaaa

SEQ ID NO: 2198721 - RNA, 19 nt, Homo sapiens
  misc_RNA (1)...(19): siRNA sense strand
gcaaaccagaccucaaauu

SEQ ID NO: 2198722 - RNA, 19 nt, Homo sapiens
  misc_RNA (1)...(19): siRNA sense strand
agaaggagauggaucaaag

SEQ ID NO: 2198723 - RNA, 19 nt, Homo sapiens
  misc_RNA (1)...(19): siRNA sense strand
aaaggaggauugugagaau

SEQ ID NO: 2198724 - RNA, 19 nt, Homo sapiens
  misc_RNA (1)...(19): siRNA sense strand
gcaaagcaacucaggaauc

SEQ ID NO: 2198725 - RNA, 19 nt, Homo sapiens
  misc_RNA (1)...(19): siRNA sense strand
acaacaagcucaaauacgu

SEQ ID NO: 2198726 - RNA, 19 nt, Homo sapiens
  misc_RNA (1)...(19): siRNA sense strand
gugcaacaccggaggauuu

SEQ ID NO: 2198727 - RNA, 19 nt, Homo sapiens
  misc_RNA (1)...(19): siRNA sense strand
gaagugccuggauggaaua

SEQ ID NO: 2198728 - RNA, 19 nt, Homo sapiens
  misc_RNA (1)...(19): siRNA sense strand
gcaugaauauuaccauacu

SEQ ID NO: 2198729 - RNA, 19 nt, Homo sapiens
  misc_RNA (1)...(19): siRNA sense strand
gaaggaggaagaagaauac

SEQ ID NO: 2198730 - RNA, 19 nt, Homo sapiens
  misc_RNA (1)...(19): siRNA sense strand
gaucacaaauuagcagaag

SEQ ID NO: 2198731 - RNA, 19 nt, Homo sapiens
  misc_RNA (1)...(19): siRNA sense strand
cuggagacauugaauuuga

SEQ ID NO: 2198732 - RNA, 19 nt, Homo sapiens
  misc_RNA (1)...(19): siRNA sense strand
ggagaaaugaagaugaaga

SEQ ID NO: 2198733 - RNA, 19 nt, Homo sapiens
  misc_RNA (1)...(19): siRNA sense strand
gcagaagucagccaaaaua

SEQ ID NO: 2198734 - RNA, 19 nt, Homo sapiens
  misc_RNA (1)...(19): siRNA sense strand
gaaagaugucuaccuaaag

SEQ ID NO: 2198735 - RNA, 19 nt, Homo sapiens
  misc_RNA (1)...(19): siRNA sense strand
ggauuacacucagccaaug

SEQ ID NO: 2198736 - RNA, 19 nt, Homo sapiens
  misc_RNA (1)...(19): siRNA sense strand
gcgcagcaguacuuugaga

SEQ ID NO: 2198737 - RNA, 19 nt, Homo sapiens
  misc_RNA (1)...(19): siRNA sense strand
ccuaaagaauccucagaug

SEQ ID NO: 2198738 - RNA, 19 nt, Homo sapiens
  misc_RNA (1)...(19): siRNA sense strand
uacaagagauggaggaaag

SEQ ID NO: 2198739 - RNA, 19 nt, Homo sapiens
  misc_RNA (1)...(19): siRNA sense strand
auucacagcugguaauaga

SEQ ID NO: 2198740 - RNA, 19 nt, Homo sapiens
  misc_RNA (1)...(19): siRNA sense strand
auaacagccuuucaaauuc

SEQ ID NO: 2198741 - RNA, 19 nt, Homo sapiens
  misc_RNA (1)...(19): siRNA sense strand
ggaggaagaagaauacaag

SEQ ID NO: 2198742 - RNA, 19 nt, Homo sapiens
  misc_RNA (1)...(19): siRNA sense strand
ucggagaaaugaagaugaa

SEQ ID NO: 2198743 - RNA, 19 nt, Homo sapiens
  misc_RNA (1)...(19): siRNA sense strand
gcaaagcagauuacucauc

SEQ ID NO: 2198744 - RNA, 19 nt, Homo sapiens
  misc_RNA (1)...(19): siRNA sense strand
gggcgcagcaguacuuuga

SEQ ID NO: 2198745 - RNA, 19 nt, Homo sapiens
  misc_RNA (1)...(19): siRNA sense strand
cagaaugaaggaacgauuu

SEQ ID NO: 2198746 - RNA, 19 nt, Homo sapiens
  misc_RNA (1)...(19): siRNA sense strand
aaagcucucuacacauuug

SEQ ID NO: 2198747 - RNA, 19 nt, Homo sapiens
  misc_RNA (1)...(19): siRNA sense strand
gguggcaaauccaaaggaa

SEQ ID NO: 2198748 - RNA, 19 nt, Homo sapiens
  misc_RNA (1)...(19): siRNA sense strand
gacauugaauuugaggauu

SEQ ID NO: 2198749 - RNA, 19 nt, Homo sapiens
  misc_RNA (1)...(19): siRNA sense strand
augagcagcaugaauauua

SEQ ID NO: 2198750 - RNA, 19 nt, Homo sapiens
  misc_RNA (1)...(19): siRNA sense strand
gaaggagauggaucaaaga

SEQ ID NO: 2198751 - RNA, 19 nt, Homo sapiens
  misc_RNA (1)...(19): siRNA sense strand
aaccagaccucaaauuugg

SEQ ID NO: 2198752 - RNA, 19 nt, Homo sapiens
  misc_RNA (1)...(19): siRNA sense strand
aaaccagaccucaaauuug

SEQ ID NO: 2198753 - RNA, 19 nt, Homo sapiens
  misc_RNA (1)...(19): siRNA sense strand
gaagcgcacugugucagau

SEQ ID NO: 2198754 - RNA, 19 nt, Homo sapiens
  misc_RNA (1)...(19): siRNA sense strand
gcuuauaaaucaggguuug

SEQ ID NO: 2198755 - RNA, 19 nt, Homo sapiens
  misc_RNA (1)...(19): siRNA sense strand
gcagcaguacuuugagaaa

SEQ ID NO: 2198756 - RNA, 19 nt, Homo sapiens
  misc_RNA (1)...(19): siRNA sense strand
aauggacgcugacaucaau

SEQ ID NO: 2198757 - RNA, 19 nt, Homo sapiens
  misc_RNA (1)...(19): siRNA sense strand
gagaacauggcaucacaga

SEQ ID NO: 2198758 - RNA, 19 nt, Homo sapiens
  misc_RNA (1)...(19): siRNA sense strand
gaacgauuuccguaguuga

SEQ ID NO: 2198759 - RNA, 19 nt, Homo sapiens
  misc_RNA (1)...(19): siRNA sense strand
uagagaaacugcgaguaga

SEQ ID NO: 2198760 - RNA, 19 nt, Homo sapiens
  misc_RNA (1)...(19): siRNA sense strand
aagcaacucaggaaucuuu

SEQ ID NO: 2198761 - RNA, 19 nt, Homo sapiens
  misc_RNA (1)...(19): siRNA sense strand
ccucccaccugaacaaaga

SEQ ID NO: 2198762 - RNA, 19 nt, Homo sapiens
  misc_RNA (1)...(19): siRNA sense strand
ggaaaggaggauugugaga

SEQ ID NO: 2198763 - RNA, 19 nt, Homo sapiens
  misc_RNA (1)...(19): siRNA sense strand
cagauaacagccuuucaaa

SEQ ID NO: 2198764 - RNA, 19 nt, Homo sapiens
  misc_RNA (1)...(19): siRNA sense strand
gaaggagaaacauuguaug

SEQ ID NO: 2198765 - RNA, 19 nt, Homo sapiens
  misc_RNA (1)...(19): siRNA sense strand
ugaaggagaaacauuguau

SEQ ID NO: 2198766 - RNA, 19 nt, Homo sapiens
  misc_RNA (1)...(19): siRNA sense strand
gaacgaaaugaaugauuac

SEQ ID NO: 2198767 - RNA, 19 nt, Homo sapiens
  misc_RNA (1)...(19): siRNA sense strand
aaagaaguaccaaccuaaa

SEQ ID NO: 2198768 - RNA, 19 nt, Homo sapiens
  misc_RNA (1)...(19): siRNA sense strand
gaagucagccaaaauauag

SEQ ID NO: 2198769 - RNA, 19 nt, Homo sapiens
  misc_RNA (1)...(19): siRNA sense strand
ucagauaacagccuuucaa

SEQ ID NO: 2198770 - RNA, 19 nt, Homo sapiens
  misc_RNA (1)...(19): siRNA sense strand
ccaaugaagcgcacugugu

SEQ ID NO: 2198771 - RNA, 19 nt, Homo sapiens
  misc_RNA (1)...(19): siRNA sense strand
aaagaaaggacagagauug

SEQ ID NO: 2198772 - RNA, 19 nt, Homo sapiens
  misc_RNA (1)...(19): siRNA sense strand
gcagggcagcaugaaguua

SEQ ID NO: 2198773 - RNA, 19 nt, Homo sapiens
  misc_RNA (1)...(19): siRNA sense strand
gaaaauggacgcugacauc

SEQ ID NO: 2198774 - RNA, 19 nt, Homo sapiens
  misc_RNA (1)...(19): siRNA sense strand
gaauauuaccauacucaca

SEQ ID NO: 2198775 - RNA, 19 nt, Homo sapiens
  misc_RNA (1)...(19): siRNA sense strand
ggacagcaaagcagauuac

SEQ ID NO: 2198776 - RNA, 19 nt, Homo sapiens
  misc_RNA (1)...(19): siRNA sense strand
gcaaauccaaaggaaaguu

SEQ ID NO: 2198777 - RNA, 19 nt, Homo sapiens
  misc_RNA (1)...(19): siRNA sense strand
gcgaguagagacccagaaa

SEQ ID NO: 2198778 - RNA, 19 nt, Homo sapiens
  misc_RNA (1)...(19): siRNA sense strand
ggaucaaagagaugccaua

SEQ ID NO: 2198779 - RNA, 19 nt, Homo sapiens
  misc_RNA (1)...(19): siRNA sense strand
acacagaggagcagaguca

SEQ ID NO: 2198780 - RNA, 19 nt, Homo sapiens
  misc_RNA (1)...(19): siRNA sense strand
ggacccgcauucggagaaa

SEQ ID NO: 2198781 - RNA, 19 nt, Homo sapiens
  misc_RNA (1)...(19): siRNA sense strand
ccacaagucuucauucaug

SEQ ID NO: 2198782 - RNA, 19 nt, Homo sapiens
  misc_RNA (1)...(19): siRNA sense strand
gcacugggauuugaaagaa

SEQ ID NO: 2198783 - RNA, 19 nt, Homo sapiens
  misc_RNA (1)...(19): siRNA sense strand
ggaaagcccugcccuagca

SEQ ID NO: 2198784 - RNA, 19 nt, Homo sapiens
  misc_RNA (1)...(19): siRNA sense strand
ccacccaaguuucucuuua

SEQ ID NO: 2198785 - RNA, 19 nt, Homo sapiens
  misc_RNA (1)...(19): siRNA sense strand
gcauguaaaucuagagaag

SEQ ID NO: 2198786 - RNA, 19 nt, Homo sapiens
  misc_RNA (1)...(19): siRNA sense strand
gcacgcauguaaaucuaga

SEQ ID NO: 2198787 - RNA, 19 nt, Homo sapiens
  misc_RNA (1)...(19): siRNA sense strand
gacagugacuccucagcuu

SEQ ID NO: 2198788 - RNA, 19 nt, Homo sapiens
  misc_RNA (1)...(19): siRNA sense strand
gaccugagcacugggauuu

SEQ ID NO: 2198789 - RNA, 19 nt, Homo sapiens
  misc_RNA (1)...(19): siRNA sense strand
gccuacagauccucuaguu

SEQ ID NO: 2198790 - RNA, 19 nt, Homo sapiens
  misc_RNA (1)...(19): siRNA sense strand
gagaagagaagaugauggu

SEQ ID NO: 2198791 - RNA, 19 nt, Homo sapiens
  misc_RNA (1)...(19): siRNA sense strand
guaaaucuagagaagagaa

SEQ ID NO: 2198792 - RNA, 19 nt, Homo sapiens
  misc_RNA (1)...(19): siRNA sense strand
cuucauucaugcuaaagaa

SEQ ID NO: 2198793 - RNA, 19 nt, Homo sapiens
  misc_RNA (1)...(19): siRNA sense strand
ccugagcacugggauuuga

SEQ ID NO: 2198794 - RNA, 19 nt, Homo sapiens
  misc_RNA (1)...(19): siRNA sense strand
cagcgaggaugaggcacua

SEQ ID NO: 2198795 - RNA, 19 nt, Homo sapiens
  misc_RNA (1)...(19): siRNA sense strand
gaaccuggagccacaaguc

SEQ ID NO: 2198796 - RNA, 19 nt, Homo sapiens
  misc_RNA (1)...(19): siRNA sense strand
gcuccucccuccaaugaag

SEQ ID NO: 2198797 - RNA, 19 nt, Homo sapiens
  misc_RNA (1)...(19): siRNA sense strand
gccaaugccgggacccaua

SEQ ID NO: 2198798 - RNA, 19 nt, Homo sapiens
  misc_RNA (1)...(19): siRNA sense strand
ccaaugccgggacccauaa

SEQ ID NO: 2198799 - RNA, 19 nt, Homo sapiens
  misc_RNA (1)...(19): siRNA sense strand
cagcuccucccuccaauga

SEQ ID NO: 2198800 - RNA, 19 nt, Homo sapiens
  misc_RNA (1)...(19): siRNA sense strand
cuucaucccucauucucuu

SEQ ID NO: 2198801 - RNA, 19 nt, Homo sapiens
  misc_RNA (1)...(19): siRNA sense strand
cacccaaguuucucuuuag

SEQ ID NO: 2198802 - RNA, 19 nt, Homo sapiens
  misc_RNA (1)...(19): siRNA sense strand
gcucagcuccccaagauaa

SEQ ID NO: 2198803 - RNA, 19 nt, Homo sapiens
  misc_RNA (1)...(19): siRNA sense strand
ggagccacaagucuucauu

SEQ ID NO: 2198804 - RNA, 19 nt, Homo sapiens
  misc_RNA (1)...(19): siRNA sense strand
acucuggccuuaagaccaa

SEQ ID NO: 2198805 - RNA, 19 nt, Homo sapiens
  misc_RNA (1)...(19): siRNA sense strand
ggugaccccuauucgcuua

SEQ ID NO: 2198806 - RNA, 19 nt, Homo sapiens
  misc_RNA (1)...(19): siRNA sense strand
uuuagagguuggagaaugu

SEQ ID NO: 2198807 - RNA, 19 nt, Homo sapiens
  misc_RNA (1)...(19): siRNA sense strand
gguggucucuucgacaucu

SEQ ID NO: 2198808 - RNA, 19 nt, Homo sapiens
  misc_RNA (1)...(19): siRNA sense strand
caucccucauucucuugua

SEQ ID NO: 2198809 - RNA, 19 nt, Homo sapiens
  misc_RNA (1)...(19): siRNA sense strand
caagucuucauucaugcua

SEQ ID NO: 2198810 - RNA, 19 nt, Homo sapiens
  misc_RNA (1)...(19): siRNA sense strand
ggaccugagcacugggauu

SEQ ID NO: 2198811 - RNA, 19 nt, Homo sapiens
  misc_RNA (1)...(19): siRNA sense strand
agucuucauucaugcuaaa

SEQ ID NO: 2198812 - RNA, 19 nt, Homo sapiens
  misc_RNA (1)...(19): siRNA sense strand
cuuuagagguuggagaaug

SEQ ID NO: 2198813 - RNA, 19 nt, Homo sapiens
  misc_RNA (1)...(19): siRNA sense strand
gagccacaagucuucauuc

SEQ ID NO: 2198814 - RNA, 19 nt, Homo sapiens
  misc_RNA (1)...(19): siRNA sense strand
acagugacuccucagcuuu

SEQ ID NO: 2198815 - RNA, 19 nt, Homo sapiens
  misc_RNA (1)...(19): siRNA sense strand
agccacaagucuucauuca

SEQ ID NO: 2198816 - RNA, 19 nt, Homo sapiens
  misc_RNA (1)...(19): siRNA sense strand
cuagagaagagaagaugau

SEQ ID NO: 2198817 - RNA, 19 nt, Homo sapiens
  misc_RNA (1)...(19): siRNA sense strand
ugacuccucagcuuucuca

SEQ ID NO: 2198818 - RNA, 19 nt, Homo sapiens
  misc_RNA (1)...(19): siRNA sense strand
acccaaguuucucuuuaga

SEQ ID NO: 2198819 - RNA, 19 nt, Homo sapiens
  misc_RNA (1)...(19): siRNA sense strand
ggaacaagaugaaccaaua

SEQ ID NO: 2198820 - RNA, 19 nt, Homo sapiens
  misc_RNA (1)...(19): siRNA sense strand
gaauauagaucacauggaa

SEQ ID NO: 2198821 - RNA, 19 nt, Homo sapiens
  misc_RNA (1)...(19): siRNA sense strand
gcaagagccugaagaaauu

SEQ ID NO: 2198822 - RNA, 19 nt, Homo sapiens
  misc_RNA (1)...(19): siRNA sense strand
guacagaggcuucaucuua

SEQ ID NO: 2198823 - RNA, 19 nt, Homo sapiens
  misc_RNA (1)...(19): siRNA sense strand
gaaaggaguuggacaugaa

SEQ ID NO: 2198824 - RNA, 19 nt, Homo sapiens
  misc_RNA (1)...(19): siRNA sense strand
gaacuggaaucucacuuaa

SEQ ID NO: 2198825 - RNA, 19 nt, Homo sapiens
  misc_RNA (1)...(19): siRNA sense strand
ccaaagaccucccugauau

SEQ ID NO: 2198826 - RNA, 19 nt, Homo sapiens
  misc_RNA (1)...(19): siRNA sense strand
gcagauugcuucuuaguau

SEQ ID NO: 2198827 - RNA, 19 nt, Homo sapiens
  misc_RNA (1)...(19): siRNA sense strand
caagauguuucuccaaaua

SEQ ID NO: 2198828 - RNA, 19 nt, Homo sapiens
  misc_RNA (1)...(19): siRNA sense strand
gguaaugccucgacuauga

SEQ ID NO: 2198829 - RNA, 19 nt, Homo sapiens
  misc_RNA (1)...(19): siRNA sense strand
ccacguagcuuguaacaug

SEQ ID NO: 2198830 - RNA, 19 nt, Homo sapiens
  misc_RNA (1)...(19): siRNA sense strand
gaaagaugcugaaaccaau

SEQ ID NO: 2198831 - RNA, 19 nt, Homo sapiens
  misc_RNA (1)...(19): siRNA sense strand
aaucauggauccugaaaua

SEQ ID NO: 2198832 - RNA, 19 nt, Homo sapiens
  misc_RNA (1)...(19): siRNA sense strand
ugaaauacaugcucaaguu

SEQ ID NO: 2198833 - RNA, 19 nt, Homo sapiens
  misc_RNA (1)...(19): siRNA sense strand
uaaaucaccugggccauua

SEQ ID NO: 2198834 - RNA, 19 nt, Homo sapiens
  misc_RNA (1)...(19): siRNA sense strand
gauggaaggugaagucuug

SEQ ID NO: 2198835 - RNA, 19 nt, Homo sapiens
  misc_RNA (1)...(19): siRNA sense strand
ugaagaaacuggaaaugaa

SEQ ID NO: 2198836 - RNA, 19 nt, Homo sapiens
  misc_RNA (1)...(19): siRNA sense strand
ggaaagguucuacccauua

SEQ ID NO: 2198837 - RNA, 19 nt, Homo sapiens
  misc_RNA (1)...(19): siRNA sense strand
gaaacaagcagucuuaauc

SEQ ID NO: 2198838 - RNA, 19 nt, Homo sapiens
  misc_RNA (1)...(19): siRNA sense strand
gaaagguucuacccauuau

SEQ ID NO: 2198839 - RNA, 19 nt, Homo sapiens
  misc_RNA (1)...(19): siRNA sense strand
caacuuauauugugaacug

SEQ ID NO: 2198840 - RNA, 19 nt, Homo sapiens
  misc_RNA (1)...(19): siRNA sense strand
gacaagauguuucuccaaa

SEQ ID NO: 2198841 - RNA, 19 nt, Homo sapiens
  misc_RNA (1)...(19): siRNA sense strand
gaagcacuuuaaugacuua

SEQ ID NO: 2198842 - RNA, 19 nt, Homo sapiens
  misc_RNA (1)...(19): siRNA sense strand
gagccaaagucaauaaaga

SEQ ID NO: 2198843 - RNA, 19 nt, Homo sapiens
  misc_RNA (1)...(19): siRNA sense strand
gggaagaguuggccacuga

SEQ ID NO: 2198844 - RNA, 19 nt, Homo sapiens
  misc_RNA (1)...(19): siRNA sense strand
ggaaaggaguuggacauga

SEQ ID NO: 2198845 - RNA, 19 nt, Homo sapiens
  misc_RNA (1)...(19): siRNA sense strand
gaucaaagcaaaccuaaau

SEQ ID NO: 2198846 - RNA, 19 nt, Homo sapiens
  misc_RNA (1)...(19): siRNA sense strand
gacaaacacuccauucuca

SEQ ID NO: 2198847 - RNA, 19 nt, Homo sapiens
  misc_RNA (1)...(19): siRNA sense strand
uaccuagacuucagauuua

SEQ ID NO: 2198848 - RNA, 19 nt, Homo sapiens
  misc_RNA (1)...(19): siRNA sense strand
gugaagaacuaguccauga

SEQ ID NO: 2198849 - RNA, 19 nt, Homo sapiens
  misc_RNA (1)...(19): siRNA sense strand
ccacaaugcuuauuaugga

SEQ ID NO: 2198850 - RNA, 19 nt, Homo sapiens
  misc_RNA (1)...(19): siRNA sense strand
gcagggagcagugaucuua

SEQ ID NO: 2198851 - RNA, 19 nt, Homo sapiens
  misc_RNA (1)...(19): siRNA sense strand
gacaagagguugguaguau

SEQ ID NO: 2198852 - RNA, 19 nt, Homo sapiens
  misc_RNA (1)...(19): siRNA sense strand
acacaagauugcaguauuu

SEQ ID NO: 2198853 - RNA, 19 nt, Homo sapiens
  misc_RNA (1)...(19): siRNA sense strand
acuggaaucucacuuaaua

SEQ ID NO: 2198854 - RNA, 19 nt, Homo sapiens
  misc_RNA (1)...(19): siRNA sense strand
caacuagagucagacauuu

SEQ ID NO: 2198855 - RNA, 19 nt, Homo sapiens
  misc_RNA (1)...(19): siRNA sense strand
gagaaacuguaccaacuug

SEQ ID NO: 2198856 - RNA, 19 nt, Homo sapiens
  misc_RNA (1)...(19): siRNA sense strand
guaccuagacuucagauuu

SEQ ID NO: 2198857 - RNA, 19 nt, Homo sapiens
  misc_RNA (1)...(19): siRNA sense strand
ggaguaauguaaacuuugu

SEQ ID NO: 2198858 - RNA, 19 nt, Homo sapiens
  misc_RNA (1)...(19): siRNA sense strand
ggaaguggcuagucuaacu

SEQ ID NO: 2198859 - RNA, 19 nt, Homo sapiens
  misc_RNA (1)...(19): siRNA sense strand
cauuaaggcucguguuauu

SEQ ID NO: 2198860 - RNA, 19 nt, Homo sapiens
  misc_RNA (1)...(19): siRNA sense strand
gagaagcacuuuaaugacu

SEQ ID NO: 2198861 - RNA, 19 nt, Homo sapiens
  misc_RNA (1)...(19): siRNA sense strand
gaucauggccuuaccucua

SEQ ID NO: 2198862 - RNA, 19 nt, Homo sapiens
  misc_RNA (1)...(19): siRNA sense strand
gagauaaccucggcauuuc

SEQ ID NO: 2198863 - RNA, 19 nt, Homo sapiens
  misc_RNA (1)...(19): siRNA sense strand
gaacaucucacagacauug

SEQ ID NO: 2198864 - RNA, 19 nt, Homo sapiens
  misc_RNA (1)...(19): siRNA sense strand
gaacuuaggaacuuggauu

SEQ ID NO: 2198865 - RNA, 19 nt, Homo sapiens
  misc_RNA (1)...(19): siRNA sense strand
cagcauggauuaaucucua

SEQ ID NO: 2198866 - RNA, 19 nt, Homo sapiens
  misc_RNA (1)...(19): siRNA sense strand
gagcagccauugccuugaa

SEQ ID NO: 2198867 - RNA, 19 nt, Homo sapiens
  misc_RNA (1)...(19): siRNA sense strand
ucacagacauugaaauagu

SEQ ID NO: 2198868 - RNA, 19 nt, Homo sapiens
  misc_RNA (1)...(19): siRNA sense strand
ggugauguccuuauuguaa

SEQ ID NO: 2198869 - RNA, 19 nt, Homo sapiens
  misc_RNA (1)...(19): siRNA sense strand
caugaaagcuguggaacaa

SEQ ID NO: 2198870 - RNA, 19 nt, Homo sapiens
  misc_RNA (1)...(19): siRNA sense strand
gaaauacaugcucaaguuu

SEQ ID NO: 2198871 - RNA, 19 nt, Homo sapiens
  misc_RNA (1)...(19): siRNA sense strand
aagcaaaccuaaaugugua

SEQ ID NO: 2198872 - RNA, 19 nt, Homo sapiens
  misc_RNA (1)...(19): siRNA sense strand
ccacauacaggaccucaua

SEQ ID NO: 2198873 - RNA, 19 nt, Homo sapiens
  misc_RNA (1)...(19): siRNA sense strand
ggucagagcauacuagaga

SEQ ID NO: 2198874 - RNA, 19 nt, Homo sapiens
  misc_RNA (1)...(19): siRNA sense strand
uuucagcgcuuuccaauau

SEQ ID NO: 2198875 - RNA, 19 nt, Homo sapiens
  misc_RNA (1)...(19): siRNA sense strand
uauugcagauugcuucuua

SEQ ID NO: 2198876 - RNA, 19 nt, Homo sapiens
  misc_RNA (1)...(19): siRNA sense strand
guaaguggcuugucagaac

SEQ ID NO: 2198877 - RNA, 19 nt, Homo sapiens
  misc_RNA (1)...(19): siRNA sense strand
gaacugccuucucuucauc

SEQ ID NO: 2198878 - RNA, 19 nt, Homo sapiens
  misc_RNA (1)...(19): siRNA sense strand
cauuguggauuacuucaua

SEQ ID NO: 2198879 - RNA, 19 nt, Homo sapiens
  misc_RNA (1)...(19): siRNA sense strand
ccaugagccucucugauuu

SEQ ID NO: 2198880 - RNA, 19 nt, Homo sapiens
  misc_RNA (1)...(19): siRNA sense strand
ucuagucucuguaguauug

SEQ ID NO: 2198881 - RNA, 19 nt, Homo sapiens
  misc_RNA (1)...(19): siRNA sense strand
ugaaagcuguggaacaaga

SEQ ID NO: 2198882 - RNA, 19 nt, Homo sapiens
  misc_RNA (1)...(19): siRNA sense strand
uaaggaagcucugaaugug

SEQ ID NO: 2198883 - RNA, 19 nt, Homo sapiens
  misc_RNA (1)...(19): siRNA sense strand
gcacaaagggaaaggaguu

SEQ ID NO: 2198884 - RNA, 19 nt, Homo sapiens
  misc_RNA (1)...(19): siRNA sense strand
gaacagucucauuccaaua

SEQ ID NO: 2198885 - RNA, 19 nt, Homo sapiens
  misc_RNA (1)...(19): siRNA sense strand
ugucagaaccuacaucuuu

SEQ ID NO: 2198886 - RNA, 19 nt, Homo sapiens
  misc_RNA (1)...(19): siRNA sense strand
uaacaagucagguguguga

SEQ ID NO: 2198887 - RNA, 19 nt, Homo sapiens
  misc_RNA (1)...(19): siRNA sense strand
gaagaagccacagaacaaa

SEQ ID NO: 2198888 - RNA, 19 nt, Homo sapiens
  misc_RNA (1)...(19): siRNA sense strand
gaacgagccaaagucaaua

SEQ ID NO: 2198889 - RNA, 19 nt, Homo sapiens
  misc_RNA (1)...(19): siRNA sense strand
aagaauggauccaacaaga

SEQ ID NO: 2198890 - RNA, 19 nt, Homo sapiens
  misc_RNA (1)...(19): siRNA sense strand
ccaacaacauuugaagauu

SEQ ID NO: 2198891 - RNA, 19 nt, Homo sapiens
  misc_RNA (1)...(19): siRNA sense strand
guggauuacuucauauuga

SEQ ID NO: 2198892 - RNA, 19 nt, Homo sapiens
  misc_RNA (1)...(19): siRNA sense strand
gauuaccucugugaacuuu

SEQ ID NO: 2198893 - RNA, 19 nt, Homo sapiens
  misc_RNA (1)...(19): siRNA sense strand
caauacugcugaucauguu

SEQ ID NO: 2198894 - RNA, 19 nt, Homo sapiens
  misc_RNA (1)...(19): siRNA sense strand
guaaacgcauucuuaacau

SEQ ID NO: 2198895 - RNA, 19 nt, Homo sapiens
  misc_RNA (1)...(19): siRNA sense strand
cacgauaccugcaaacaau

SEQ ID NO: 2198896 - RNA, 19 nt, Homo sapiens
  misc_RNA (1)...(19): siRNA sense strand
aaucacauguucaguauuc

SEQ ID NO: 2198897 - RNA, 19 nt, Homo sapiens
  misc_RNA (1)...(19): siRNA sense strand
cagauugcuucuuaguaua

SEQ ID NO: 2198898 - RNA, 19 nt, Homo sapiens
  misc_RNA (1)...(19): siRNA sense strand
gacaucuaaugaaugcuua

SEQ ID NO: 2198899 - RNA, 19 nt, Homo sapiens
  misc_RNA (1)...(19): siRNA sense strand
gacaaucauuacagugaaa

SEQ ID NO: 2198900 - RNA, 19 nt, Homo sapiens
  misc_RNA (1)...(19): siRNA sense strand
ggccuuaccucuaaagaca

SEQ ID NO: 2198901 - RNA, 19 nt, Homo sapiens
  misc_RNA (1)...(19): siRNA sense strand
aaacacugcucaccucaau

SEQ ID NO: 2198902 - RNA, 19 nt, Homo sapiens
  misc_RNA (1)...(19): siRNA sense strand
gaagaaauugugaucacuu

SEQ ID NO: 2198903 - RNA, 19 nt, Homo sapiens
  misc_RNA (1)...(19): siRNA sense strand
uaagcaacauacagaagaa

SEQ ID NO: 2198904 - RNA, 19 nt, Homo sapiens
  misc_RNA (1)...(19): siRNA sense strand
ggacaagagguugguagua

SEQ ID NO: 2198905 - RNA, 19 nt, Homo sapiens
  misc_RNA (1)...(19): siRNA sense strand
gaauuuccaucagaauguu

SEQ ID NO: 2198906 - RNA, 19 nt, Homo sapiens
  misc_RNA (1)...(19): siRNA sense strand
ucacagaccaugauauuuc

SEQ ID NO: 2198907 - RNA, 19 nt, Homo sapiens
  misc_RNA (1)...(19): siRNA sense strand
gauauuucgucaggcauuu

SEQ ID NO: 2198908 - RNA, 19 nt, Homo sapiens
  misc_RNA (1)...(19): siRNA sense strand
cauguucaguauucagaua

SEQ ID NO: 2198909 - RNA, 19 nt, Homo sapiens
  misc_RNA (1)...(19): siRNA sense strand
ggauugaccacuccauauu

SEQ ID NO: 2198910 - RNA, 19 nt, Homo sapiens
  misc_RNA (1)...(19): siRNA sense strand
ugaagaagccacagaacaa

SEQ ID NO: 2198911 - RNA, 19 nt, Homo sapiens
  misc_RNA (1)...(19): siRNA sense strand
gaagacaaacacuccauuc

SEQ ID NO: 2198912 - RNA, 19 nt, Homo sapiens
  misc_RNA (1)...(19): siRNA sense strand
uuagagaacuuaggaacuu

SEQ ID NO: 2198913 - RNA, 19 nt, Homo sapiens
  misc_RNA (1)...(19): siRNA sense strand
gcacuguuauuacacaucu

SEQ ID NO: 2198914 - RNA, 19 nt, Homo sapiens
  misc_RNA (1)...(19): siRNA sense strand
uaacagaagugaaaacuca

SEQ ID NO: 2198915 - RNA, 19 nt, Homo sapiens
  misc_RNA (1)...(19): siRNA sense strand
gauucucccuugaaaauua

SEQ ID NO: 2198916 - RNA, 19 nt, Homo sapiens
  misc_RNA (1)...(19): siRNA sense strand
gguuugcuuucccaacuua

SEQ ID NO: 2198917 - RNA, 19 nt, Homo sapiens
  misc_RNA (1)...(19): siRNA sense strand
aaacugccuccucuuaaua

SEQ ID NO: 2198918 - RNA, 19 nt, Homo sapiens
  misc_RNA (1)...(19): siRNA sense strand
cgacaaucauuacagugaa

SEQ ID NO: 2198919 - RNA, 19 nt, Homo sapiens
  misc_RNA (1)...(19): siRNA sense strand
ggagaaaacuucaccauuu

SEQ ID NO: 2198920 - RNA, 19 nt, Homo sapiens
  misc_RNA (1)...(19): siRNA sense strand
gaagcaagauuaaaugaag

SEQ ID NO: 2198921 - RNA, 19 nt, Homo sapiens
  misc_RNA (1)...(19): siRNA sense strand
gaauaguacuggaagaaau

SEQ ID NO: 2198922 - RNA, 19 nt, Homo sapiens
  misc_RNA (1)...(19): siRNA sense strand
ggcaacagcacucuuauuu

SEQ ID NO: 2198923 - RNA, 19 nt, Homo sapiens
  misc_RNA (1)...(19): siRNA sense strand
caacagcacucuuauuuug

SEQ ID NO: 2198924 - RNA, 19 nt, Homo sapiens
  misc_RNA (1)...(19): siRNA sense strand
ucaaagaugcuaugaagaa

SEQ ID NO: 2198925 - RNA, 19 nt, Homo sapiens
  misc_RNA (1)...(19): siRNA sense strand
caaagaugcuaugaagaaa

SEQ ID NO: 2198926 - RNA, 19 nt, Homo sapiens
  misc_RNA (1)...(19): siRNA sense strand
gaaacaaggaagucaaaga

SEQ ID NO: 2198927 - RNA, 19 nt, Homo sapiens
  misc_RNA (1)...(19): siRNA sense strand
ccuaaagccuucuucauca

SEQ ID NO: 2198928 - RNA, 19 nt, Homo sapiens
  misc_RNA (1)...(19): siRNA sense strand
ggucagcauucuccucuug

SEQ ID NO: 2198929 - RNA, 19 nt, Homo sapiens
  misc_RNA (1)...(19): siRNA sense strand
gcagaagcaagauuaaaug

SEQ ID NO: 2198930 - RNA, 19 nt, Homo sapiens
  misc_RNA (1)...(19): siRNA sense strand
cuacuuugcuggugaacuu

SEQ ID NO: 2198931 - RNA, 19 nt, Homo sapiens
  misc_RNA (1)...(19): siRNA sense strand
gugggaaucucaucgauca

SEQ ID NO: 2198932 - RNA, 19 nt, Homo sapiens
  misc_RNA (1)...(19): siRNA sense strand
gcucuuaguuugcaucucu

SEQ ID NO: 2198933 - RNA, 19 nt, Homo sapiens
  misc_RNA (1)...(19): siRNA sense strand
uuacacaucugccucuguu

SEQ ID NO: 2198934 - RNA, 19 nt, Homo sapiens
  misc_RNA (1)...(19): siRNA sense strand
gagaaaacuucaccauuug

SEQ ID NO: 2198935 - RNA, 19 nt, Homo sapiens
  misc_RNA (1)...(19): siRNA sense strand
gauggcauaugaccguuau

SEQ ID NO: 2198936 - RNA, 19 nt, Homo sapiens
  misc_RNA (1)...(19): siRNA sense strand
gagugcagaagcaagauua

SEQ ID NO: 2198937 - RNA, 19 nt, Homo sapiens
  misc_RNA (1)...(19): siRNA sense strand
ggaauaguacuggaagaaa

SEQ ID NO: 2198938 - RNA, 19 nt, Homo sapiens
  misc_RNA (1)...(19): siRNA sense strand
gaagggaauaguacuggaa

SEQ ID NO: 2198939 - RNA, 19 nt, Homo sapiens
  misc_RNA (1)...(19): siRNA sense strand
agucaaagaugcuaugaag

SEQ ID NO: 2198940 - RNA, 19 nt, Homo sapiens
  misc_RNA (1)...(19): siRNA sense strand
aaaaucaucucguugcuuu

SEQ ID NO: 2198941 - RNA, 19 nt, Homo sapiens
  misc_RNA (1)...(19): siRNA sense strand
ucuuacaucuucauccuuu

SEQ ID NO: 2198942 - RNA, 19 nt, Homo sapiens
  misc_RNA (1)...(19): siRNA sense strand
ggauauuuguuacacaucu

SEQ ID NO: 2198943 - RNA, 19 nt, Homo sapiens
  misc_RNA (1)...(19): siRNA sense strand
uaacauugcaucaaacaca

SEQ ID NO: 2198944 - RNA, 19 nt, Homo sapiens
  misc_RNA (1)...(19): siRNA sense strand
gaaauucuggcggugcuaa

SEQ ID NO: 2198945 - RNA, 19 nt, Homo sapiens
  misc_RNA (1)...(19): siRNA sense strand
gagauacuccaucaucaug

SEQ ID NO: 2198946 - RNA, 19 nt, Homo sapiens
  misc_RNA (1)...(19): siRNA sense strand
ggaaucucaucgaucacuu

SEQ ID NO: 2198947 - RNA, 19 nt, Homo sapiens
  misc_RNA (1)...(19): siRNA sense strand
aaacaaggaagucaaagau

SEQ ID NO: 2198948 - RNA, 19 nt, Homo sapiens
  misc_RNA (1)...(19): siRNA sense strand
uugcaucucuuacaucuuc

SEQ ID NO: 2198949 - RNA, 19 nt, Homo sapiens
  misc_RNA (1)...(19): siRNA sense strand
gccaugggcuccacagagu

SEQ ID NO: 2198950 - RNA, 19 nt, Homo sapiens
  misc_RNA (1)...(19): siRNA sense strand
ccauuugacuguggugauu

SEQ ID NO: 2198951 - RNA, 19 nt, Homo sapiens
  misc_RNA (1)...(19): siRNA sense strand
ccgcugagauacuccauca

SEQ ID NO: 2198952 - RNA, 19 nt, Homo sapiens
  misc_RNA (1)...(19): siRNA sense strand
cuaaagccuucuucaucaa

SEQ ID NO: 2198953 - RNA, 19 nt, Homo sapiens
  misc_RNA (1)...(19): siRNA sense strand
ccaaugcucuuaguuugca

SEQ ID NO: 2198954 - RNA, 19 nt, Homo sapiens
  misc_RNA (1)...(19): siRNA sense strand
ccagaaaaccauuaucuuu

SEQ ID NO: 2198955 - RNA, 19 nt, Homo sapiens
  misc_RNA (1)...(19): siRNA sense strand
cagaagcaagauuaaauga

SEQ ID NO: 2198956 - RNA, 19 nt, Homo sapiens
  misc_RNA (1)...(19): siRNA sense strand
gaagucaaagaugcuauga

SEQ ID NO: 2198957 - RNA, 19 nt, Homo sapiens
  misc_RNA (1)...(19): siRNA sense strand
guuauguggccauuuguaa

SEQ ID NO: 2198958 - RNA, 19 nt, Homo sapiens
  misc_RNA (1)...(19): siRNA sense strand
gggaauaguacuggaagaa

SEQ ID NO: 2198959 - RNA, 19 nt, Homo sapiens
  misc_RNA (1)...(19): siRNA sense strand
ggaagucaaagaugcuaug

SEQ ID NO: 2198960 - RNA, 19 nt, Homo sapiens
  misc_RNA (1)...(19): siRNA sense strand
uaaaugaagggaauaguac

SEQ ID NO: 2198961 - RNA, 19 nt, Homo sapiens
  misc_RNA (1)...(19): siRNA sense strand
gggcaacagcacucuuauu

SEQ ID NO: 2198962 - RNA, 19 nt, Homo sapiens
  misc_RNA (1)...(19): siRNA sense strand
gcugagauacuccaucauc

SEQ ID NO: 2198963 - RNA, 19 nt, Homo sapiens
  misc_RNA (1)...(19): siRNA sense strand
cuucagccuuguaauguau

SEQ ID NO: 2198964 - RNA, 19 nt, Homo sapiens
  misc_RNA (1)...(19): siRNA sense strand
uaagaaacaaggaagucaa

SEQ ID NO: 2198965 - RNA, 19 nt, Homo sapiens
  misc_RNA (1)...(19): siRNA sense strand
uaaagccuucuucaucaaa

SEQ ID NO: 2198966 - RNA, 19 nt, Homo sapiens
  misc_RNA (1)...(19): siRNA sense strand
ucucuuucauggauauuug

SEQ ID NO: 2198967 - RNA, 19 nt, Homo sapiens
  misc_RNA (1)...(19): siRNA sense strand
uuuguaacccgcugagaua

SEQ ID NO: 2198968 - RNA, 19 nt, Homo sapiens
  misc_RNA (1)...(19): siRNA sense strand
gauauuuguuacacaucug

SEQ ID NO: 2198969 - RNA, 19 nt, Homo sapiens
  misc_RNA (1)...(19): siRNA sense strand
aaaucucucuuucauggau

SEQ ID NO: 2198970 - RNA, 19 nt, Homo sapiens
  misc_RNA (1)...(19): siRNA sense strand
ccccauaauuuacaguuua

SEQ ID NO: 2198971 - RNA, 19 nt, Homo sapiens
  misc_RNA (1)...(19): siRNA sense strand
guacuggaagaaauauaga

SEQ ID NO: 2198972 - RNA, 19 nt, Homo sapiens
  misc_RNA (1)...(19): siRNA sense strand
ugacuguggugauuuugua

SEQ ID NO: 2198973 - RNA, 19 nt, Homo sapiens
  misc_RNA (1)...(19): siRNA sense strand
uuccaaugcucuuaguuug

SEQ ID NO: 2198974 - RNA, 19 nt, Homo sapiens
  misc_RNA (1)...(19): siRNA sense strand
gcauucuccucuugccaau

SEQ ID NO: 2198975 - RNA, 19 nt, Homo sapiens
  misc_RNA (1)...(19): siRNA sense strand
caauuccaaugcucuuagu

SEQ ID NO: 2198976 - RNA, 19 nt, Homo sapiens
  misc_RNA (1)...(19): siRNA sense strand
cuucauccuuuccacuauu

SEQ ID NO: 2198977 - RNA, 19 nt, Homo sapiens
  misc_RNA (1)...(19): siRNA sense strand
gcaacagcacucuuauuuu

SEQ ID NO: 2198978 - RNA, 19 nt, Homo sapiens
  misc_RNA (1)...(19): siRNA sense strand
aagaaacaaggaagucaaa

SEQ ID NO: 2198979 - RNA, 19 nt, Homo sapiens
  misc_RNA (1)...(19): siRNA sense strand
ucuucagccuuguaaugua

SEQ ID NO: 2198980 - RNA, 19 nt, Homo sapiens
  misc_RNA (1)...(19): siRNA sense strand
cugccucuguuccuacuuu

SEQ ID NO: 2198981 - RNA, 19 nt, Homo sapiens
  misc_RNA (1)...(19): siRNA sense strand
uggccgugauggcauauga

SEQ ID NO: 2198982 - RNA, 19 nt, Homo sapiens
  misc_RNA (1)...(19): siRNA sense strand
uaccuguggugcccauuug

SEQ ID NO: 2198983 - RNA, 19 nt, Homo sapiens
  misc_RNA (1)...(19): siRNA sense strand
guuugcaucucuuacaucu

SEQ ID NO: 2198984 - RNA, 19 nt, Homo sapiens
  misc_RNA (1)...(19): siRNA sense strand
guaacccgcugagauacuc

SEQ ID NO: 2198985 - RNA, 19 nt, Homo sapiens
  misc_RNA (1)...(19): siRNA sense strand
gugcagaagcaagauuaaa

SEQ ID NO: 2198986 - RNA, 19 nt, Homo sapiens
  misc_RNA (1)...(19): siRNA sense strand
ugggugugcuguacagaug

SEQ ID NO: 2198987 - RNA, 19 nt, Homo sapiens
  misc_RNA (1)...(19): siRNA sense strand
gcaucaaacacacgaacau

SEQ ID NO: 2198988 - RNA, 19 nt, Homo sapiens
  misc_RNA (1)...(19): siRNA sense strand
guaccuaaagccuucuuca

SEQ ID NO: 2198989 - RNA, 19 nt, Homo sapiens
  misc_RNA (1)...(19): siRNA sense strand
cugagauacuccaucauca

SEQ ID NO: 2198990 - RNA, 19 nt, Homo sapiens
  misc_RNA (1)...(19): siRNA sense strand
ugaucacuauccuagauuc

SEQ ID NO: 2198991 - RNA, 19 nt, Homo sapiens
  misc_RNA (1)...(19): siRNA sense strand
aaagccuucuucaucaaau

SEQ ID NO: 2198992 - RNA, 19 nt, Homo sapiens
  misc_RNA (1)...(19): siRNA sense strand
ugaccgcucugcuggaaac

SEQ ID NO: 2198993 - RNA, 19 nt, Homo sapiens
  misc_RNA (1)...(19): siRNA sense strand
uuugaucacuauccuagau

SEQ ID NO: 2198994 - RNA, 19 nt, Homo sapiens
  misc_RNA (1)...(19): siRNA sense strand
gaaucucaucgaucacuuc

SEQ ID NO: 2198995 - RNA, 19 nt, Homo sapiens
  misc_RNA (1)...(19): siRNA sense strand
ccugaccgcucugcuggaa

SEQ ID NO: 2198996 - RNA, 19 nt, Homo sapiens
  misc_RNA (1)...(19): siRNA sense strand
gccaauuccaaugcucuua

SEQ ID NO: 2198997 - RNA, 19 nt, Homo sapiens
  misc_RNA (1)...(19): siRNA sense strand
cgucuucagccuuguaaug

SEQ ID NO: 2198998 - RNA, 19 nt, Homo sapiens
  misc_RNA (1)...(19): siRNA sense strand
gaaaaugcaaggagaaaac

SEQ ID NO: 2198999 - RNA, 19 nt, Homo sapiens
  misc_RNA (1)...(19): siRNA sense strand
auucuccucuugccaauuc

SEQ ID NO: 2199000 - RNA, 19 nt, Homo sapiens
  misc_RNA (1)...(19): siRNA sense strand
ugcagaagcaagauuaaau

SEQ ID NO: 2199001 - RNA, 19 nt, Homo sapiens
  misc_RNA (1)...(19): siRNA sense strand
gaucacuauccuagauuca

SEQ ID NO: 2199002 - RNA, 19 nt, Homo sapiens
  misc_RNA (1)...(19): siRNA sense strand
acaaguucacugcucauga

SEQ ID NO: 2199003 - RNA, 19 nt, Homo sapiens
  misc_RNA (1)...(19): siRNA sense strand
accguuauguggccauuug

SEQ ID NO: 2199004 - RNA, 19 nt, Homo sapiens
  misc_RNA (1)...(19): siRNA sense strand
gugguucucuucgucuuca

SEQ ID NO: 2199005 - RNA, 19 nt, Homo sapiens
  misc_RNA (1)...(19): siRNA sense strand
aaucucucuuucauggaua

SEQ ID NO: 2199006 - RNA, 19 nt, Homo sapiens
  misc_RNA (1)...(19): siRNA sense strand
cagcagagggaagaaacaa

SEQ ID NO: 2199007 - RNA, 19 nt, Homo sapiens
  misc_RNA (1)...(19): siRNA sense strand
ccaauuccaaugcucuuag

SEQ ID NO: 2199008 - RNA, 19 nt, Homo sapiens
  misc_RNA (1)...(19): siRNA sense strand
gauuaaaugaagggaauag

SEQ ID NO: 2199009 - RNA, 19 nt, Homo sapiens
  misc_RNA (1)...(19): siRNA sense strand
ucaaacacacgaacaucuc

SEQ ID NO: 2199010 - RNA, 19 nt, Homo sapiens
  misc_RNA (1)...(19): siRNA sense strand
gaaauugcaucaagaaaga

SEQ ID NO: 2199011 - RNA, 19 nt, Homo sapiens
  misc_RNA (1)...(19): siRNA sense strand
aaacagcacuucagcuuua

SEQ ID NO: 2199012 - RNA, 19 nt, Homo sapiens
  misc_RNA (1)...(19): siRNA sense strand
acaggcagcugcucuauaa

SEQ ID NO: 2199013 - RNA, 19 nt, Homo sapiens
  misc_RNA (1)...(19): siRNA sense strand
ccucacaggugcuuguuua

SEQ ID NO: 2199014 - RNA, 19 nt, Homo sapiens
  misc_RNA (1)...(19): siRNA sense strand
gaacugcaauaaaugugaa

SEQ ID NO: 2199015 - RNA, 19 nt, Homo sapiens
  misc_RNA (1)...(19): siRNA sense strand
ggaagaugauggcaaugaa

SEQ ID NO: 2199016 - RNA, 19 nt, Homo sapiens
  misc_RNA (1)...(19): siRNA sense strand
gaaagaagacaauaucagu

SEQ ID NO: 2199017 - RNA, 19 nt, Homo sapiens
  misc_RNA (1)...(19): siRNA sense strand
cuacaacccugcagacuau

SEQ ID NO: 2199018 - RNA, 19 nt, Homo sapiens
  misc_RNA (1)...(19): siRNA sense strand
acauggagcucucagcaua

SEQ ID NO: 2199019 - RNA, 19 nt, Homo sapiens
  misc_RNA (1)...(19): siRNA sense strand
ugacgacgcccauacauaa

SEQ ID NO: 2199020 - RNA, 19 nt, Homo sapiens
  misc_RNA (1)...(19): siRNA sense strand
gcccauacauaacuacaaa

SEQ ID NO: 2199021 - RNA, 19 nt, Homo sapiens
  misc_RNA (1)...(19): siRNA sense strand
ugaagaauguaaagaagga

SEQ ID NO: 2199022 - RNA, 19 nt, Homo sapiens
  misc_RNA (1)...(19): siRNA sense strand
ccaucgagcugaaagaaga

SEQ ID NO: 2199023 - RNA, 19 nt, Homo sapiens
  misc_RNA (1)...(19): siRNA sense strand
uaucauggacccaauuuaa

SEQ ID NO: 2199024 - RNA, 19 nt, Homo sapiens
  misc_RNA (1)...(19): siRNA sense strand
gagggaaauugcaucaaga

SEQ ID NO: 2199025 - RNA, 19 nt, Homo sapiens
  misc_RNA (1)...(19): siRNA sense strand
cagaaugggcgcaaacuuu

SEQ ID NO: 2199026 - RNA, 19 nt, Homo sapiens
  misc_RNA (1)...(19): siRNA sense strand
ggcccgaacugcaauaaau

SEQ ID NO: 2199027 - RNA, 19 nt, Homo sapiens
  misc_RNA (1)...(19): siRNA sense strand
agaacugccuagaagguua

SEQ ID NO: 2199028 - RNA, 19 nt, Homo sapiens
  misc_RNA (1)...(19): siRNA sense strand
ggaaauugcaucaagaaag

SEQ ID NO: 2199029 - RNA, 19 nt, Homo sapiens
  misc_RNA (1)...(19): siRNA sense strand
gcacuucgaccaccucuca

SEQ ID NO: 2199030 - RNA, 19 nt, Homo sapiens
  misc_RNA (1)...(19): siRNA sense strand
ccugaagguucuaccauuu

SEQ ID NO: 2199031 - RNA, 19 nt, Homo sapiens
  misc_RNA (1)...(19): siRNA sense strand
guuggaagccugaauguga

SEQ ID NO: 2199032 - RNA, 19 nt, Homo sapiens
  misc_RNA (1)...(19): siRNA sense strand
gaaaugccagugcaaagug

SEQ ID NO: 2199033 - RNA, 19 nt, Homo sapiens
  misc_RNA (1)...(19): siRNA sense strand
uuugaaagcccgcauagua

SEQ ID NO: 2199034 - RNA, 19 nt, Homo sapiens
  misc_RNA (1)...(19): siRNA sense strand
agauggauauuauggcuuu

SEQ ID NO: 2199035 - RNA, 19 nt, Homo sapiens
  misc_RNA (1)...(19): siRNA sense strand
gugcaacaguucugggaaa

SEQ ID NO: 2199036 - RNA, 19 nt, Homo sapiens
  misc_RNA (1)...(19): siRNA sense strand
cagacuaucuuuucaguaa

SEQ ID NO: 2199037 - RNA, 19 nt, Homo sapiens
  misc_RNA (1)...(19): siRNA sense strand
gaagacaauaucaguuuca

SEQ ID NO: 2199038 - RNA, 19 nt, Homo sapiens
  misc_RNA (1)...(19): siRNA sense strand
uaacugcucugugguugga

SEQ ID NO: 2199039 - RNA, 19 nt, Homo sapiens
  misc_RNA (1)...(19): siRNA sense strand
cgagggaaauugcaucaag

SEQ ID NO: 2199040 - RNA, 19 nt, Homo sapiens
  misc_RNA (1)...(19): siRNA sense strand
gucauuggcucuauaugug

SEQ ID NO: 2199041 - RNA, 19 nt, Homo sapiens
  misc_RNA (1)...(19): siRNA sense strand
caacaguucugggaaaugc

SEQ ID NO: 2199042 - RNA, 19 nt, Homo sapiens
  misc_RNA (1)...(19): siRNA sense strand
ugucuucgcugcccuuguu

SEQ ID NO: 2199043 - RNA, 19 nt, Homo sapiens
  misc_RNA (1)...(19): siRNA sense strand
cagcuaccaugacagcauu

SEQ ID NO: 2199044 - RNA, 19 nt, Homo sapiens
  misc_RNA (1)...(19): siRNA sense strand
cgacgcccauacauaacua

SEQ ID NO: 2199045 - RNA, 19 nt, Homo sapiens
  misc_RNA (1)...(19): siRNA sense strand
guuggaagaugauggcaau

SEQ ID NO: 2199046 - RNA, 19 nt, Homo sapiens
  misc_RNA (1)...(19): siRNA sense strand
guagaaagugccaauguca

SEQ ID NO: 2199047 - RNA, 19 nt, Homo sapiens
  misc_RNA (1)...(19): siRNA sense strand
gaaaacagcacuucagcuu

SEQ ID NO: 2199048 - RNA, 19 nt, Homo sapiens
  misc_RNA (1)...(19): siRNA sense strand
ggaaaugccagugcaaagu

SEQ ID NO: 2199049 - RNA, 19 nt, Homo sapiens
  misc_RNA (1)...(19): siRNA sense strand
gcagauguuucgggauugu

SEQ ID NO: 2199050 - RNA, 19 nt, Homo sapiens
  misc_RNA (1)...(19): siRNA sense strand
gaaaauagcaaaggaaauc

SEQ ID NO: 2199051 - RNA, 19 nt, Homo sapiens
  misc_RNA (1)...(19): siRNA sense strand
gagcugaaagaagacaaua

SEQ ID NO: 2199052 - RNA, 19 nt, Homo sapiens
  misc_RNA (1)...(19): siRNA sense strand
ugcaucaacugccuccaua

SEQ ID NO: 2199053 - RNA, 19 nt, Homo sapiens
  misc_RNA (1)...(19): siRNA sense strand
gcugaggaguauguaugua

SEQ ID NO: 2199054 - RNA, 19 nt, Homo sapiens
  misc_RNA (1)...(19): siRNA sense strand
gcugaaagaagacaauauc

SEQ ID NO: 2199055 - RNA, 19 nt, Homo sapiens
  misc_RNA (1)...(19): siRNA sense strand
ugugagaacugccuagaag

SEQ ID NO: 2199056 - RNA, 19 nt, Homo sapiens
  misc_RNA (1)...(19): siRNA sense strand
gaaugugaccaguguaaag

SEQ ID NO: 2199057 - RNA, 19 nt, Homo sapiens
  misc_RNA (1)...(19): siRNA sense strand
uguuuaaacugccaggaaa

SEQ ID NO: 2199058 - RNA, 19 nt, Homo sapiens
  misc_RNA (1)...(19): siRNA sense strand
gaacugccuagaagguuau

SEQ ID NO: 2199059 - RNA, 19 nt, Homo sapiens
  misc_RNA (1)...(19): siRNA sense strand
guucagcagugacaucuac

SEQ ID NO: 2199060 - RNA, 19 nt, Homo sapiens
  misc_RNA (1)...(19): siRNA sense strand
ggacccaauuuaacaucau

SEQ ID NO: 2199061 - RNA, 19 nt, Homo sapiens
  misc_RNA (1)...(19): siRNA sense strand
gugcaaagugggugucauu

SEQ ID NO: 2199062 - RNA, 19 nt, Homo sapiens
  misc_RNA (1)...(19): siRNA sense strand
ugaauuggaaccugaaugu

SEQ ID NO: 2199063 - RNA, 19 nt, Homo sapiens
  misc_RNA (1)...(19): siRNA sense strand
aauaaucggucugccaguu

SEQ ID NO: 2199064 - RNA, 19 nt, Homo sapiens
  misc_RNA (1)...(19): siRNA sense strand
ggauauuauggcuuuagua

SEQ ID NO: 2199065 - RNA, 19 nt, Homo sapiens
  misc_RNA (1)...(19): siRNA sense strand
gugagugucggccagguua

SEQ ID NO: 2199066 - RNA, 19 nt, Homo sapiens
  misc_RNA (1)...(19): siRNA sense strand
gaugccaagauggauauua

SEQ ID NO: 2199067 - RNA, 19 nt, Homo sapiens
  misc_RNA (1)...(19): siRNA sense strand
gcaaagugggugucauugg

SEQ ID NO: 2199068 - RNA, 19 nt, Homo sapiens
  misc_RNA (1)...(19): siRNA sense strand
gaagaugauggcaaugaag

SEQ ID NO: 2199069 - RNA, 19 nt, Homo sapiens
  misc_RNA (1)...(19): siRNA sense strand
cacaggugcuuguuuaaac

SEQ ID NO: 2199070 - RNA, 19 nt, Homo sapiens
  misc_RNA (1)...(19): siRNA sense strand
ucacaggugcuuguuuaaa

SEQ ID NO: 2199071 - RNA, 19 nt, Homo sapiens
  misc_RNA (1)...(19): siRNA sense strand
gggugucauuggcucuaua

SEQ ID NO: 2199072 - RNA, 19 nt, Homo sapiens
  misc_RNA (1)...(19): siRNA sense strand
cagcauaccgugcaacagu

SEQ ID NO: 2199073 - RNA, 19 nt, Homo sapiens
  misc_RNA (1)...(19): siRNA sense strand
augcagauguuucgggauu

SEQ ID NO: 2199074 - RNA, 19 nt, Homo sapiens
  misc_RNA (1)...(19): siRNA sense strand
agaagacaauaucaguuuc

SEQ ID NO: 2199075 - RNA, 19 nt, Homo sapiens
  misc_RNA (1)...(19): siRNA sense strand
gcagagggcaugccaagcu

SEQ ID NO: 2199076 - RNA, 19 nt, Homo sapiens
  misc_RNA (1)...(19): siRNA sense strand
ccauaacaccacuggguuu

SEQ ID NO: 2199077 - RNA, 19 nt, Homo sapiens
  misc_RNA (1)...(19): siRNA sense strand
augccaagauggauauuau

SEQ ID NO: 2199078 - RNA, 19 nt, Homo sapiens
  misc_RNA (1)...(19): siRNA sense strand
cgggauuguuggaagauga

SEQ ID NO: 2199079 - RNA, 19 nt, Homo sapiens
  misc_RNA (1)...(19): siRNA sense strand
gaccaucgagcugaaagaa

SEQ ID NO: 2199080 - RNA, 19 nt, Homo sapiens
  misc_RNA (1)...(19): siRNA sense strand
gauguaucauggacccaau

SEQ ID NO: 2199081 - RNA, 19 nt, Homo sapiens
  misc_RNA (1)...(19): siRNA sense strand
gagaacugccuagaagguu

SEQ ID NO: 2199082 - RNA, 19 nt, Homo sapiens
  misc_RNA (1)...(19): siRNA sense strand
ccauguggacccaguuaaa

SEQ ID NO: 2199083 - RNA, 19 nt, Homo sapiens
  misc_RNA (1)...(19): siRNA sense strand
gauggauauuauggcuuua

SEQ ID NO: 2199084 - RNA, 19 nt, Homo sapiens
  misc_RNA (1)...(19): siRNA sense strand
ggucaaaagcugaggagua

SEQ ID NO: 2199085 - RNA, 19 nt, Homo sapiens
  misc_RNA (1)...(19): siRNA sense strand
gggaaauugcaucaagaaa

SEQ ID NO: 2199086 - RNA, 19 nt, Homo sapiens
  misc_RNA (1)...(19): siRNA sense strand
gucaaaagcugaggaguau

SEQ ID NO: 2199087 - RNA, 19 nt, Homo sapiens
  misc_RNA (1)...(19): siRNA sense strand
ggccauguggacccaguua

SEQ ID NO: 2199088 - RNA, 19 nt, Homo sapiens
  misc_RNA (1)...(19): siRNA sense strand
cgaacugcaauaaauguga

SEQ ID NO: 2199089 - RNA, 19 nt, Homo sapiens
  misc_RNA (1)...(19): siRNA sense strand
uagcaaaggaaaucacugu

SEQ ID NO: 2199090 - RNA, 19 nt, Homo sapiens
  misc_RNA (1)...(19): siRNA sense strand
acagucaucaucauuguug

SEQ ID NO: 2199091 - RNA, 19 nt, Homo sapiens
  misc_RNA (1)...(19): siRNA sense strand
gacccaauuuaacaucauc

SEQ ID NO: 2199092 - RNA, 19 nt, Homo sapiens
  misc_RNA (1)...(19): siRNA sense strand
ccuacaacccugcagacua

SEQ ID NO: 2199093 - RNA, 19 nt, Homo sapiens
  misc_RNA (1)...(19): siRNA sense strand
gcaucaacugccuccauaa

SEQ ID NO: 2199094 - RNA, 19 nt, Homo sapiens
  misc_RNA (1)...(19): siRNA sense strand
aauuggaaccugaauguga

SEQ ID NO: 2199095 - RNA, 19 nt, Homo sapiens
  misc_RNA (1)...(19): siRNA sense strand
ugaugccacuaaagaaugu

SEQ ID NO: 2199096 - RNA, 19 nt, Homo sapiens
  misc_RNA (1)...(19): siRNA sense strand
ugugaagaauguaaagaag

SEQ ID NO: 2199097 - RNA, 19 nt, Homo sapiens
  misc_RNA (1)...(19): siRNA sense strand
guaucauggacccaauuua

SEQ ID NO: 2199098 - RNA, 19 nt, Homo sapiens
  misc_RNA (1)...(19): siRNA sense strand
uguagaaagugccaauguc

SEQ ID NO: 2199099 - RNA, 19 nt, Homo sapiens
  misc_RNA (1)...(19): siRNA sense strand
guccugaugccacuaaaga

SEQ ID NO: 2199100 - RNA, 19 nt, Homo sapiens
  misc_RNA (1)...(19): siRNA sense strand
ccuagaagguuauguucac

SEQ ID NO: 2199101 - RNA, 19 nt, Homo sapiens
  misc_RNA (1)...(19): siRNA sense strand
gcaucaagaaagaaguuau

SEQ ID NO: 2199102 - RNA, 19 nt, Homo sapiens
  misc_RNA (1)...(19): siRNA sense strand
cugaggaguauguauguaa

SEQ ID NO: 2199103 - RNA, 19 nt, Homo sapiens
  misc_RNA (1)...(19): siRNA sense strand
uuggaagccugaaugugaa

SEQ ID NO: 2199104 - RNA, 19 nt, Homo sapiens
  misc_RNA (1)...(19): siRNA sense strand
gggaaaugccagugcaaag

SEQ ID NO: 2199105 - RNA, 19 nt, Homo sapiens
  misc_RNA (1)...(19): siRNA sense strand
ucauggacccaauuuaaca

SEQ ID NO: 2199106 - RNA, 19 nt, Homo sapiens
  misc_RNA (1)...(19): siRNA sense strand
ugugaccgaugccaagaug

SEQ ID NO: 2199107 - RNA, 19 nt, Homo sapiens
  misc_RNA (1)...(19): siRNA sense strand
ugucauuggcucuauaugu

SEQ ID NO: 2199108 - RNA, 19 nt, Homo sapiens
  misc_RNA (1)...(19): siRNA sense strand
gcagcuaccaugacagcau

SEQ ID NO: 2199109 - RNA, 19 nt, Homo sapiens
  misc_RNA (1)...(19): siRNA sense strand
ucaacugccuccauaacac

SEQ ID NO: 2199110 - RNA, 19 nt, Homo sapiens
  misc_RNA (1)...(19): siRNA sense strand
ucacugaucuagacaauuu

SEQ ID NO: 2199111 - RNA, 19 nt, Homo sapiens
  misc_RNA (1)...(19): siRNA sense strand
acaaaucgauccucuauga

SEQ ID NO: 2199112 - RNA, 19 nt, Homo sapiens
  misc_RNA (1)...(19): siRNA sense strand
cuggacagcuuccuuauua

SEQ ID NO: 2199113 - RNA, 19 nt, Homo sapiens
  misc_RNA (1)...(19): siRNA sense strand
gaaagaggcccuugggaaa

SEQ ID NO: 2199114 - RNA, 19 nt, Homo sapiens
  misc_RNA (1)...(19): siRNA sense strand
caacagggcaacagucuua

SEQ ID NO: 2199115 - RNA, 19 nt, Homo sapiens
  misc_RNA (1)...(19): siRNA sense strand
ucagauaucuuccucaaug

SEQ ID NO: 2199116 - RNA, 19 nt, Homo sapiens
  misc_RNA (1)...(19): siRNA sense strand
ccaaagauguuauuaagca

SEQ ID NO: 2199117 - RNA, 19 nt, Homo sapiens
  misc_RNA (1)...(19): siRNA sense strand
gcaacagucuuaucucaau

SEQ ID NO: 2199118 - RNA, 19 nt, Homo sapiens
  misc_RNA (1)...(19): siRNA sense strand
ccacuaauaugcaucuuga

SEQ ID NO: 2199119 - RNA, 19 nt, Homo sapiens
  misc_RNA (1)...(19): siRNA sense strand
uuacaucaauggcauauga

SEQ ID NO: 2199120 - RNA, 19 nt, Homo sapiens
  misc_RNA (1)...(19): siRNA sense strand
ccacuacacugucaucaug

SEQ ID NO: 2199121 - RNA, 19 nt, Homo sapiens
  misc_RNA (1)...(19): siRNA sense strand
gcaguucuauugacaagga

SEQ ID NO: 2199122 - RNA, 19 nt, Homo sapiens
  misc_RNA (1)...(19): siRNA sense strand
ggaaugcauuucucagaug

SEQ ID NO: 2199123 - RNA, 19 nt, Homo sapiens
  misc_RNA (1)...(19): siRNA sense strand
gguaucauauggcuacauu

SEQ ID NO: 2199124 - RNA, 19 nt, Homo sapiens
  misc_RNA (1)...(19): siRNA sense strand
gcauuucucagauguauuu

SEQ ID NO: 2199125 - RNA, 19 nt, Homo sapiens
  misc_RNA (1)...(19): siRNA sense strand
guacaaaucgauccucuau

SEQ ID NO: 2199126 - RNA, 19 nt, Homo sapiens
  misc_RNA (1)...(19): siRNA sense strand
gcucagauaucuuccucaa

SEQ ID NO: 2199127 - RNA, 19 nt, Homo sapiens
  misc_RNA (1)...(19): siRNA sense strand
uaucuuggauucugucuug

SEQ ID NO: 2199128 - RNA, 19 nt, Homo sapiens
  misc_RNA (1)...(19): siRNA sense strand
ucagacaucucccucaaug

SEQ ID NO: 2199129 - RNA, 19 nt, Homo sapiens
  misc_RNA (1)...(19): siRNA sense strand
gggcaacagucuuaucuca

SEQ ID NO: 2199130 - RNA, 19 nt, Homo sapiens
  misc_RNA (1)...(19): siRNA sense strand
guaagcaguucuauugaca

SEQ ID NO: 2199131 - RNA, 19 nt, Homo sapiens
  misc_RNA (1)...(19): siRNA sense strand
cuacaccacuaucaugaaa

SEQ ID NO: 2199132 - RNA, 19 nt, Homo sapiens
  misc_RNA (1)...(19): siRNA sense strand
guaauugccucugugaugu

SEQ ID NO: 2199133 - RNA, 19 nt, Homo sapiens
  misc_RNA (1)...(19): siRNA sense strand
ugaaagagggacuguguaa

SEQ ID NO: 2199134 - RNA, 19 nt, Homo sapiens
  misc_RNA (1)...(19): siRNA sense strand
gaaugcauuucucagaugu

SEQ ID NO: 2199135 - RNA, 19 nt, Homo sapiens
  misc_RNA (1)...(19): siRNA sense strand
gcucagacaucucccucaa

SEQ ID NO: 2199136 - RNA, 19 nt, Homo sapiens
  misc_RNA (1)...(19): siRNA sense strand
ccaaagggauccacaaagc

SEQ ID NO: 2199137 - RNA, 19 nt, Homo sapiens
  misc_RNA (1)...(19): siRNA sense strand
uuacugaccuggacagcuu

SEQ ID NO: 2199138 - RNA, 19 nt, Homo sapiens
  misc_RNA (1)...(19): siRNA sense strand
ucacugacaucucccuuuc

SEQ ID NO: 2199139 - RNA, 19 nt, Homo sapiens
  misc_RNA (1)...(19): siRNA sense strand
agagcucugugucuucuua

SEQ ID NO: 2199140 - RNA, 19 nt, Homo sapiens
  misc_RNA (1)...(19): siRNA sense strand
gagaagacugucagcauga

SEQ ID NO: 2199141 - RNA, 19 nt, Homo sapiens
  misc_RNA (1)...(19): siRNA sense strand
gcaugaagagggagaauca

SEQ ID NO: 2199142 - RNA, 19 nt, Homo sapiens
  misc_RNA (1)...(19): siRNA sense strand
ggacuaaguacaaaucgau

SEQ ID NO: 2199143 - RNA, 19 nt, Homo sapiens
  misc_RNA (1)...(19): siRNA sense strand
ggaacagggacaugaaaga

SEQ ID NO: 2199144 - RNA, 19 nt, Homo sapiens
  misc_RNA (1)...(19): siRNA sense strand
aagcuguccugcucagaua

SEQ ID NO: 2199145 - RNA, 19 nt, Homo sapiens
  misc_RNA (1)...(19): siRNA sense strand
gaccuggacagcuuccuua

SEQ ID NO: 2199146 - RNA, 19 nt, Homo sapiens
  misc_RNA (1)...(19): siRNA sense strand
gaucaauccauucuuuaug

SEQ ID NO: 2199147 - RNA, 19 nt, Homo sapiens
  misc_RNA (1)...(19): siRNA sense strand
ucaaggcuccaucuacuaa

SEQ ID NO: 2199148 - RNA, 19 nt, Homo sapiens
  misc_RNA (1)...(19): siRNA sense strand
gaucucuuauggccacauu

SEQ ID NO: 2199149 - RNA, 19 nt, Homo sapiens
  misc_RNA (1)...(19): siRNA sense strand
acaauuuccuucucacuuc

SEQ ID NO: 2199150 - RNA, 19 nt, Homo sapiens
  misc_RNA (1)...(19): siRNA sense strand
caacagucuuaucucaaug

SEQ ID NO: 2199151 - RNA, 19 nt, Homo sapiens
  misc_RNA (1)...(19): siRNA sense strand
ucccaaagauguuauuaag

SEQ ID NO: 2199152 - RNA, 19 nt, Homo sapiens
  misc_RNA (1)...(19): siRNA sense strand
acaccacuaucaugaaaga

SEQ ID NO: 2199153 - RNA, 19 nt, Homo sapiens
  misc_RNA (1)...(19): siRNA sense strand
ucacuucaauggcauacga

SEQ ID NO: 2199154 - RNA, 19 nt, Homo sapiens
  misc_RNA (1)...(19): siRNA sense strand
gaggaaugcauuucucaga

SEQ ID NO: 2199155 - RNA, 19 nt, Homo sapiens
  misc_RNA (1)...(19): siRNA sense strand
uguguauccugguaucaua

SEQ ID NO: 2199156 - RNA, 19 nt, Homo sapiens
  misc_RNA (1)...(19): siRNA sense strand
cagauaucuuccucaauga

SEQ ID NO: 2199157 - RNA, 19 nt, Homo sapiens
  misc_RNA (1)...(19): siRNA sense strand
ggacagcuuccuuauuaca

SEQ ID NO: 2199158 - RNA, 19 nt, Homo sapiens
  misc_RNA (1)...(19): siRNA sense strand
gagagaagacugucagcau

SEQ ID NO: 2199159 - RNA, 19 nt, Homo sapiens
  misc_RNA (1)...(19): siRNA sense strand
uaaggaacagggacauaaa

SEQ ID NO: 2199160 - RNA, 19 nt, Homo sapiens
  misc_RNA (1)...(19): siRNA sense strand
gaacagggacaugaaagag

SEQ ID NO: 2199161 - RNA, 19 nt, Homo sapiens
  misc_RNA (1)...(19): siRNA sense strand
guguaacucagauguauuu

SEQ ID NO: 2199162 - RNA, 19 nt, Homo sapiens
  misc_RNA (1)...(19): siRNA sense strand
uguggugucucucuauuau

SEQ ID NO: 2199163 - RNA, 19 nt, Homo sapiens
  misc_RNA (1)...(19): siRNA sense strand
agucauuacucuaccacua

SEQ ID NO: 2199164 - RNA, 19 nt, Homo sapiens
  misc_RNA (1)...(19): siRNA sense strand
cccuuuaucuacagccuua

SEQ ID NO: 2199165 - RNA, 19 nt, Homo sapiens
  misc_RNA (1)...(19): siRNA sense strand
ugauggacaugcggacuaa

SEQ ID NO: 2199166 - RNA, 19 nt, Homo sapiens
  misc_RNA (1)...(19): siRNA sense strand
cuaaggaacagggacauaa

SEQ ID NO: 2199167 - RNA, 19 nt, Homo sapiens
  misc_RNA (1)...(19): siRNA sense strand
cuagacaauuuccuucuca

SEQ ID NO: 2199168 - RNA, 19 nt, Homo sapiens
  misc_RNA (1)...(19): siRNA sense strand
ggucaauauuuggccagua

SEQ ID NO: 2199169 - RNA, 19 nt, Homo sapiens
  misc_RNA (1)...(19): siRNA sense strand
gcaucuugaucucuuaugg

SEQ ID NO: 2199170 - RNA, 19 nt, Homo sapiens
  misc_RNA (1)...(19): siRNA sense strand
guguguaacucagauguau

SEQ ID NO: 2199171 - RNA, 19 nt, Homo sapiens
  misc_RNA (1)...(19): siRNA sense strand
ugacaucucccuuucaucu

SEQ ID NO: 2199172 - RNA, 19 nt, Homo sapiens
  misc_RNA (1)...(19): siRNA sense strand
cuaagaugcugauggacau

SEQ ID NO: 2199173 - RNA, 19 nt, Homo sapiens
  misc_RNA (1)...(19): siRNA sense strand
gacaggcagucauuacucu

SEQ ID NO: 2199174 - RNA, 19 nt, Homo sapiens
  misc_RNA (1)...(19): siRNA sense strand
cauuguggcucucauguac

SEQ ID NO: 2199175 - RNA, 19 nt, Homo sapiens
  misc_RNA (1)...(19): siRNA sense strand
gacaauuuccuucucacuu

SEQ ID NO: 2199176 - RNA, 19 nt, Homo sapiens
  misc_RNA (1)...(19): siRNA sense strand
gagaaucagagcagugugu

SEQ ID NO: 2199177 - RNA, 19 nt, Homo sapiens
  misc_RNA (1)...(19): siRNA sense strand
uauuaagcaugcaaacuca

SEQ ID NO: 2199178 - RNA, 19 nt, Homo sapiens
  misc_RNA (1)...(19): siRNA sense strand
ccucaaggcuccaucuacu

SEQ ID NO: 2199179 - RNA, 19 nt, Homo sapiens
  misc_RNA (1)...(19): siRNA sense strand
guaccaaugcccugucuca

SEQ ID NO: 2199180 - RNA, 19 nt, Homo sapiens
  misc_RNA (1)...(19): siRNA sense strand
agagggacuguguaacuua

SEQ ID NO: 2199181 - RNA, 19 nt, Homo sapiens
  misc_RNA (1)...(19): siRNA sense strand
caauuuccuucucacuuca

SEQ ID NO: 2199182 - RNA, 19 nt, Homo sapiens
  misc_RNA (1)...(19): siRNA sense strand
cguaauugccucugugaug

SEQ ID NO: 2199183 - RNA, 19 nt, Homo sapiens
  misc_RNA (1)...(19): siRNA sense strand
uaauaugcaucuugaucuc

SEQ ID NO: 2199184 - RNA, 19 nt, Homo sapiens
  misc_RNA (1)...(19): siRNA sense strand
ggacaggcagucauuacuc

SEQ ID NO: 2199185 - RNA, 19 nt, Homo sapiens
  misc_RNA (1)...(19): siRNA sense strand
caugaaagagggacugugu

SEQ ID NO: 2199186 - RNA, 19 nt, Homo sapiens
  misc_RNA (1)...(19): siRNA sense strand
gucaauauuuggccaguac

SEQ ID NO: 2199187 - RNA, 19 nt, Homo sapiens
  misc_RNA (1)...(19): siRNA sense strand
ucccuaagaugcugaugga

SEQ ID NO: 2199188 - RNA, 19 nt, Homo sapiens
  misc_RNA (1)...(19): siRNA sense strand
gucauuacucuaccacuaa

SEQ ID NO: 2199189 - RNA, 19 nt, Homo sapiens
  misc_RNA (1)...(19): siRNA sense strand
gagcagcguguccgaguuc

SEQ ID NO: 2199190 - RNA, 19 nt, Homo sapiens
  misc_RNA (1)...(19): siRNA sense strand
cuacuaagggcaucuucaa

SEQ ID NO: 2199191 - RNA, 19 nt, Homo sapiens
  misc_RNA (1)...(19): siRNA sense strand
uaugcaucuugaucucuua

SEQ ID NO: 2199192 - RNA, 19 nt, Homo sapiens
  misc_RNA (1)...(19): siRNA sense strand
gauccucuccuguaccaau

SEQ ID NO: 2199193 - RNA, 19 nt, Homo sapiens
  misc_RNA (1)...(19): siRNA sense strand
gcaugcaaacucaggauca

SEQ ID NO: 2199194 - RNA, 19 nt, Homo sapiens
  misc_RNA (1)...(19): siRNA sense strand
uugggaaacucuucaguag

SEQ ID NO: 2199195 - RNA, 19 nt, Homo sapiens
  misc_RNA (1)...(19): siRNA sense strand
cagcuuccuuauuacauca

SEQ ID NO: 2199196 - RNA, 19 nt, Homo sapiens
  misc_RNA (1)...(19): siRNA sense strand
ucucuguggugucucugua

SEQ ID NO: 2199197 - RNA, 19 nt, Homo sapiens
  misc_RNA (1)...(19): siRNA sense strand
aagggcaucuucaaagcuu

SEQ ID NO: 2199198 - RNA, 19 nt, Homo sapiens
  misc_RNA (1)...(19): siRNA sense strand
aagagggacuguguaacuu

SEQ ID NO: 2199199 - RNA, 19 nt, Homo sapiens
  misc_RNA (1)...(19): siRNA sense strand
agaagacugucagcaugaa

SEQ ID NO: 2199200 - RNA, 19 nt, Homo sapiens
  misc_RNA (1)...(19): siRNA sense strand
gucauuacccugccauuca

SEQ ID NO: 2199201 - RNA, 19 nt, Homo sapiens
  misc_RNA (1)...(19): siRNA sense strand
caaccaaagggauccacaa

SEQ ID NO: 2199202 - RNA, 19 nt, Homo sapiens
  misc_RNA (1)...(19): siRNA sense strand
ucacugacaucuccuuuuc

SEQ ID NO: 2199203 - RNA, 19 nt, Homo sapiens
  misc_RNA (1)...(19): siRNA sense strand
aaagagggacuguguaacu

SEQ ID NO: 2199204 - RNA, 19 nt, Homo sapiens
  misc_RNA (1)...(19): siRNA sense strand
caugcaaacucaggaucaa

SEQ ID NO: 2199205 - RNA, 19 nt, Homo sapiens
  misc_RNA (1)...(19): siRNA sense strand
acauguggcucccaucucu

SEQ ID NO: 2199206 - RNA, 19 nt, Homo sapiens
  misc_RNA (1)...(19): siRNA sense strand
ggaaccugcucaucaugcu

SEQ ID NO: 2199207 - RNA, 19 nt, Homo sapiens
  misc_RNA (1)...(19): siRNA sense strand
auucauguguauccuggua

SEQ ID NO: 2199208 - RNA, 19 nt, Homo sapiens
  misc_RNA (1)...(19): siRNA sense strand
ggacaugcggacuaaguac

SEQ ID NO: 2199209 - RNA, 19 nt, Homo sapiens
  misc_RNA (1)...(19): siRNA sense strand
aggaaugcauuucucagau

SEQ ID NO: 2199210 - RNA, 19 nt, Homo sapiens
  misc_RNA (1)...(19): siRNA sense strand
ccaaagagauggagaagga

SEQ ID NO: 2199211 - RNA, 19 nt, Homo sapiens
  misc_RNA (1)...(19): siRNA sense strand
ccaaggagaugaaggaguu

SEQ ID NO: 2199212 - RNA, 19 nt, Homo sapiens
  misc_RNA (1)...(19): siRNA sense strand
cauacaaccuggagaagaa

SEQ ID NO: 2199213 - RNA, 19 nt, Homo sapiens
  misc_RNA (1)...(19): siRNA sense strand
gcaaccaccuggccucuuc

SEQ ID NO: 2199214 - RNA, 19 nt, Homo sapiens
  misc_RNA (1)...(19): siRNA sense strand
gcacacagcagcccugaga

SEQ ID NO: 2199215 - RNA, 19 nt, Homo sapiens
  misc_RNA (1)...(19): siRNA sense strand
uugagcagcuggccaauaa

SEQ ID NO: 2199216 - RNA, 19 nt, Homo sapiens
  misc_RNA (1)...(19): siRNA sense strand
ccaaugaguuccacaaggu

SEQ ID NO: 2199217 - RNA, 19 nt, Homo sapiens
  misc_RNA (1)...(19): siRNA sense strand
gaacuugcagcuagccaaa

SEQ ID NO: 2199218 - RNA, 19 nt, Homo sapiens
  misc_RNA (1)...(19): siRNA sense strand
ggaagcaggagaaugaguu

SEQ ID NO: 2199219 - RNA, 19 nt, Homo sapiens
  misc_RNA (1)...(19): siRNA sense strand
gcagcuagccaaagagaug

SEQ ID NO: 2199220 - RNA, 19 nt, Homo sapiens
  misc_RNA (1)...(19): siRNA sense strand
ucaggcugcugucauauau

SEQ ID NO: 2199221 - RNA, 19 nt, Homo sapiens
  misc_RNA (1)...(19): siRNA sense strand
aaagagaacaacggcauua

SEQ ID NO: 2199222 - RNA, 19 nt, Homo sapiens
  misc_RNA (1)...(19): siRNA sense strand
agcaggaacuggcuaauga

SEQ ID NO: 2199223 - RNA, 19 nt, Homo sapiens
  misc_RNA (1)...(19): siRNA sense strand
gggaccagcuuccuuagca

SEQ ID NO: 2199224 - RNA, 19 nt, Homo sapiens
  misc_RNA (1)...(19): siRNA sense strand
gcagguggaugagaucaca

SEQ ID NO: 2199225 - RNA, 19 nt, Homo sapiens
  misc_RNA (1)...(19): siRNA sense strand
agaaugaguucagggacua

SEQ ID NO: 2199226 - RNA, 19 nt, Homo sapiens
  misc_RNA (1)...(19): siRNA sense strand
gcagaugcaccgcgaugaa

SEQ ID NO: 2199227 - RNA, 19 nt, Homo sapiens
  misc_RNA (1)...(19): siRNA sense strand
ugaaggaguucuaccacau

SEQ ID NO: 2199228 - RNA, 19 nt, Homo sapiens
  misc_RNA (1)...(19): siRNA sense strand
agaacaaucugugcaaaca

SEQ ID NO: 2199229 - RNA, 19 nt, Homo sapiens
  misc_RNA (1)...(19): siRNA sense strand
ggaccagcuuccuuagcaa

SEQ ID NO: 2199230 - RNA, 19 nt, Homo sapiens
  misc_RNA (1)...(19): siRNA sense strand
agaagucggugcuggacaa

SEQ ID NO: 2199231 - RNA, 19 nt, Homo sapiens
  misc_RNA (1)...(19): siRNA sense strand
aagaggaggucacggacaa

SEQ ID NO: 2199232 - RNA, 19 nt, Homo sapiens
  misc_RNA (1)...(19): siRNA sense strand
uggcagcccuggaggaguu

SEQ ID NO: 2199233 - RNA, 19 nt, Homo sapiens
  misc_RNA (1)...(19): siRNA sense strand
ggaggucacggacaaguuc

SEQ ID NO: 2199234 - RNA, 19 nt, Homo sapiens
  misc_RNA (1)...(19): siRNA sense strand
ucacggacaaguucacauu

SEQ ID NO: 2199235 - RNA, 19 nt, Homo sapiens
  misc_RNA (1)...(19): siRNA sense strand
gcgaugaagaggacaguga

SEQ ID NO: 2199236 - RNA, 19 nt, Homo sapiens
  misc_RNA (1)...(19): siRNA sense strand
gcauacaaccuggagaaga

SEQ ID NO: 2199237 - RNA, 19 nt, Homo sapiens
  misc_RNA (1)...(19): siRNA sense strand
ggucauggccaggcacaaa

SEQ ID NO: 2199238 - RNA, 19 nt, Homo sapiens
  misc_RNA (1)...(19): siRNA sense strand
caaagagaacaacggcauu

SEQ ID NO: 2199239 - RNA, 19 nt, Homo sapiens
  misc_RNA (1)...(19): siRNA sense strand
gagcagcuggccaauaaca

SEQ ID NO: 2199240 - RNA, 19 nt, Homo sapiens
  misc_RNA (1)...(19): siRNA sense strand
gaaggaguucuaccacauc

SEQ ID NO: 2199241 - RNA, 19 nt, Homo sapiens
  misc_RNA (1)...(19): siRNA sense strand
ccgcagcucucugacauca

SEQ ID NO: 2199242 - RNA, 19 nt, Homo sapiens
  misc_RNA (1)...(19): siRNA sense strand
ucaaccagcagguggauga

SEQ ID NO: 2199243 - RNA, 19 nt, Homo sapiens
  misc_RNA (1)...(19): siRNA sense strand
ccaccuccuuccuacagaa

SEQ ID NO: 2199244 - RNA, 19 nt, Homo sapiens
  misc_RNA (1)...(19): siRNA sense strand
ccaauaacaagaaggagau

SEQ ID NO: 2199245 - RNA, 19 nt, Homo sapiens
  misc_RNA (1)...(19): siRNA sense strand
aaaguuuagucuuccugaa

SEQ ID NO: 2199246 - RNA, 19 nt, Homo sapiens
  misc_RNA (1)...(19): siRNA sense strand
gaagcaggagaaugaguuc

SEQ ID NO: 2199247 - RNA, 19 nt, Homo sapiens
  misc_RNA (1)...(19): siRNA sense strand
aggcugcugucauauauca

SEQ ID NO: 2199248 - RNA, 19 nt, Homo sapiens
  misc_RNA (1)...(19): siRNA sense strand
gauaaccaggcacugaaga

SEQ ID NO: 2199249 - RNA, 19 nt, Homo sapiens
  misc_RNA (1)...(19): siRNA sense strand
gcagcuggccaauaacaag

SEQ ID NO: 2199250 - RNA, 19 nt, Homo sapiens
  misc_RNA (1)...(19): siRNA sense strand
gauuguggccuuccucaag

SEQ ID NO: 2199251 - RNA, 19 nt, Homo sapiens
  misc_RNA (1)...(19): siRNA sense strand
gauguuccgccaggaguuu

SEQ ID NO: 2199252 - RNA, 19 nt, Homo sapiens
  misc_RNA (1)...(19): siRNA sense strand
aaagaggccaccagaagau

SEQ ID NO: 2199253 - RNA, 19 nt, Homo sapiens
  misc_RNA (1)...(19): siRNA sense strand
guucagggacuaugcauac

SEQ ID NO: 2199254 - RNA, 19 nt, Homo sapiens
  misc_RNA (1)...(19): siRNA sense strand
uacgggaccagcuuccuua

SEQ ID NO: 2199255 - RNA, 19 nt, Homo sapiens
  misc_RNA (1)...(19): siRNA sense strand
ugaagaggacagugacguu

SEQ ID NO: 2199256 - RNA, 19 nt, Homo sapiens
  misc_RNA (1)...(19): siRNA sense strand
caaaagaggccaccagaag

SEQ ID NO: 2199257 - RNA, 19 nt, Homo sapiens
  misc_RNA (1)...(19): siRNA sense strand
guacgggaccagcuuccuu

SEQ ID NO: 2199258 - RNA, 19 nt, Homo sapiens
  misc_RNA (1)...(19): siRNA sense strand
agucggugcuggacaagga

SEQ ID NO: 2199259 - RNA, 19 nt, Homo sapiens
  misc_RNA (1)...(19): siRNA sense strand
uccacaaggugaccacgaa

SEQ ID NO: 2199260 - RNA, 19 nt, Homo sapiens
  misc_RNA (1)...(19): siRNA sense strand
ugaaccucguggccaauga

SEQ ID NO: 2199261 - RNA, 19 nt, Homo sapiens
  misc_RNA (1)...(19): siRNA sense strand
ugcggaagcaggagaauga

SEQ ID NO: 2199262 - RNA, 19 nt, Homo sapiens
  misc_RNA (1)...(19): siRNA sense strand
acacagcagcccugagaug

SEQ ID NO: 2199263 - RNA, 19 nt, Homo sapiens
  misc_RNA (1)...(19): siRNA sense strand
ggaugugggagacaaccaa

SEQ ID NO: 2199264 - RNA, 19 nt, Homo sapiens
  misc_RNA (1)...(19): siRNA sense strand
ccaggccaccuccuuccua

SEQ ID NO: 2199265 - RNA, 19 nt, Homo sapiens
  misc_RNA (1)...(19): siRNA sense strand
guggauaaccaggcacuga

SEQ ID NO: 2199266 - RNA, 19 nt, Homo sapiens
  misc_RNA (1)...(19): siRNA sense strand
acuugcagcuagccaaaga

SEQ ID NO: 2199267 - RNA, 19 nt, Homo sapiens
  misc_RNA (1)...(19): siRNA sense strand
cagcaggaacuggcuaaug

SEQ ID NO: 2199268 - RNA, 19 nt, Homo sapiens
  misc_RNA (1)...(19): siRNA sense strand
gacagacugaggaaagaga

SEQ ID NO: 2199269 - RNA, 19 nt, Homo sapiens
  misc_RNA (1)...(19): siRNA sense strand
guaccggcacccagcaaga

SEQ ID NO: 2199270 - RNA, 19 nt, Homo sapiens
  misc_RNA (1)...(19): siRNA sense strand
gaacacccagaaggucaug

SEQ ID NO: 2199271 - RNA, 19 nt, Homo sapiens
  misc_RNA (1)...(19): siRNA sense strand
caagggaagacagaacaau

SEQ ID NO: 2199272 - RNA, 19 nt, Homo sapiens
  misc_RNA (1)...(19): siRNA sense strand
ccucguggccaaugaguuc

SEQ ID NO: 2199273 - RNA, 19 nt, Homo sapiens
  misc_RNA (1)...(19): siRNA sense strand
ggaguuccggcugcagaaa

SEQ ID NO: 2199274 - RNA, 19 nt, Homo sapiens
  misc_RNA (1)...(19): siRNA sense strand
cagggacuaugcauacaac

SEQ ID NO: 2199275 - RNA, 19 nt, Homo sapiens
  misc_RNA (1)...(19): siRNA sense strand
accucaggcugcugucaua

SEQ ID NO: 2199276 - RNA, 19 nt, Homo sapiens
  misc_RNA (1)...(19): siRNA sense strand
ggauaaccaggcacugaag

SEQ ID NO: 2199277 - RNA, 19 nt, Homo sapiens
  misc_RNA (1)...(19): siRNA sense strand
cagcuggccaauaacaaga

SEQ ID NO: 2199278 - RNA, 19 nt, Homo sapiens
  misc_RNA (1)...(19): siRNA sense strand
ggagaugaaggaguucuac

SEQ ID NO: 2199279 - RNA, 19 nt, Homo sapiens
  misc_RNA (1)...(19): siRNA sense strand
gagcagcagcagguggauu

SEQ ID NO: 2199280 - RNA, 19 nt, Homo sapiens
  misc_RNA (1)...(19): siRNA sense strand
gaaagacccuauauaugua

SEQ ID NO: 2199281 - RNA, 19 nt, Homo sapiens
  misc_RNA (1)...(19): siRNA sense strand
gaagucaggucuccauaua

SEQ ID NO: 2199282 - RNA, 19 nt, Homo sapiens
  misc_RNA (1)...(19): siRNA sense strand
ggaaaccucugcaucauaa

SEQ ID NO: 2199283 - RNA, 19 nt, Homo sapiens
  misc_RNA (1)...(19): siRNA sense strand
ggacguaacuguagacuuc

SEQ ID NO: 2199284 - RNA, 19 nt, Homo sapiens
  misc_RNA (1)...(19): siRNA sense strand
gaucaaaucucuuuacaca

SEQ ID NO: 2199285 - RNA, 19 nt, Homo sapiens
  misc_RNA (1)...(19): siRNA sense strand
gagaaacccuauauuugua

SEQ ID NO: 2199286 - RNA, 19 nt, Homo sapiens
  misc_RNA (1)...(19): siRNA sense strand
gagaaucccuuuauauguu

SEQ ID NO: 2199287 - RNA, 19 nt, Homo sapiens
  misc_RNA (1)...(19): siRNA sense strand
ggaaauaguucauguaaac

SEQ ID NO: 2199288 - RNA, 19 nt, Homo sapiens
  misc_RNA (1)...(19): siRNA sense strand
ggagagaaacccuauauuu

SEQ ID NO: 2199289 - RNA, 19 nt, Homo sapiens
  misc_RNA (1)...(19): siRNA sense strand
ggagaaagacccuauauau

SEQ ID NO: 2199290 - RNA, 19 nt, Homo sapiens
  misc_RNA (1)...(19): siRNA sense strand
ggaaaggccuucaccauca

SEQ ID NO: 2199291 - RNA, 19 nt, Homo sapiens
  misc_RNA (1)...(19): siRNA sense strand
gaaagacgaugaacacaca

SEQ ID NO: 2199292 - RNA, 19 nt, Homo sapiens
  misc_RNA (1)...(19): siRNA sense strand
ggaaauccuucacuaagaa

SEQ ID NO: 2199293 - RNA, 19 nt, Homo sapiens
  misc_RNA (1)...(19): siRNA sense strand
gaaagaauuuggagccuau

SEQ ID NO: 2199294 - RNA, 19 nt, Homo sapiens
  misc_RNA (1)...(19): siRNA sense strand
gaggaugucugaagaaguu

SEQ ID NO: 2199295 - RNA, 19 nt, Homo sapiens
  misc_RNA (1)...(19): siRNA sense strand
ggucaaaucucauuaagca

SEQ ID NO: 2199296 - RNA, 19 nt, Homo sapiens
  misc_RNA (1)...(19): siRNA sense strand
ggagagaaaccauauauau

SEQ ID NO: 2199297 - RNA, 19 nt, Homo sapiens
  misc_RNA (1)...(19): siRNA sense strand
gagagaaaccuuauaaaug

SEQ ID NO: 2199298 - RNA, 19 nt, Homo sapiens
  misc_RNA (1)...(19): siRNA sense strand
gagagaaaccuuauaaaug

SEQ ID NO: 2199299 - RNA, 19 nt, Homo sapiens
  misc_RNA (1)...(19): siRNA sense strand
ggaaagcauucauucagaa

SEQ ID NO: 2199300 - RNA, 19 nt, Homo sapiens
  misc_RNA (1)...(19): siRNA sense strand
acaaggaaaucaacacuaa

SEQ ID NO: 2199301 - RNA, 19 nt, Homo sapiens
  misc_RNA (1)...(19): siRNA sense strand
gagagaaacccuauauuug

SEQ ID NO: 2199302 - RNA, 19 nt, Homo sapiens
  misc_RNA (1)...(19): siRNA sense strand
gaagagccuuuauccagaa

SEQ ID NO: 2199303 - RNA, 19 nt, Homo sapiens
  misc_RNA (1)...(19): siRNA sense strand
ggaaauccuucauccagaa

SEQ ID NO: 2199304 - RNA, 19 nt, Homo sapiens
  misc_RNA (1)...(19): siRNA sense strand
gcaagaaaaucaacacuaa

SEQ ID NO: 2199305 - RNA, 19 nt, Homo sapiens
  misc_RNA (1)...(19): siRNA sense strand
gggaaacacuuugaaugua

SEQ ID NO: 2199306 - RNA, 19 nt, Homo sapiens
  misc_RNA (1)...(19): siRNA sense strand
gacagcaucuuugaauaua

SEQ ID NO: 2199307 - RNA, 19 nt, Homo sapiens
  misc_RNA (1)...(19): siRNA sense strand
ggagagaaaccuuauaaau

SEQ ID NO: 2199308 - RNA, 19 nt, Homo sapiens
  misc_RNA (1)...(19): siRNA sense strand
ggagagaaaccuuauaaau

SEQ ID NO: 2199309 - RNA, 19 nt, Homo sapiens
  misc_RNA (1)...(19): siRNA sense strand
gcaggaauaugcacugaau

SEQ ID NO: 2199310 - RNA, 19 nt, Homo sapiens
  misc_RNA (1)...(19): siRNA sense strand
ugugggaaauccuuuauua

SEQ ID NO: 2199311 - RNA, 19 nt, Homo sapiens
  misc_RNA (1)...(19): siRNA sense strand
ccucagaauucaaaccuua

SEQ ID NO: 2199312 - RNA, 19 nt, Homo sapiens
  misc_RNA (1)...(19): siRNA sense strand
ggaaagccuucacuaggaa

SEQ ID NO: 2199313 - RNA, 19 nt, Homo sapiens
  misc_RNA (1)...(19): siRNA sense strand
gggaaauccuucacuaaga

SEQ ID NO: 2199314 - RNA, 19 nt, Homo sapiens
  misc_RNA (1)...(19): siRNA sense strand
gggaaagccuucacuagga

SEQ ID NO: 2199315 - RNA, 19 nt, Homo sapiens
  misc_RNA (1)...(19): siRNA sense strand
cacaagagaugacccauau

SEQ ID NO: 2199316 - RNA, 19 nt, Homo sapiens
  misc_RNA (1)...(19): siRNA sense strand
uaagcaagcucucauucaa

SEQ ID NO: 2199317 - RNA, 19 nt, Homo sapiens
  misc_RNA (1)...(19): siRNA sense strand
gagagaaucccuuuauaug

SEQ ID NO: 2199318 - RNA, 19 nt, Homo sapiens
  misc_RNA (1)...(19): siRNA sense strand
ggagagaaucccuuuauau

SEQ ID NO: 2199319 - RNA, 19 nt, Homo sapiens
  misc_RNA (1)...(19): siRNA sense strand
gaauuuggagccuaucaua

SEQ ID NO: 2199320 - RNA, 19 nt, Homo sapiens
  misc_RNA (1)...(19): siRNA sense strand
gagagaaacccuaugaaug

SEQ ID NO: 2199321 - RNA, 19 nt, Homo sapiens
  misc_RNA (1)...(19): siRNA sense strand
gagagaaacccuaugaaug

SEQ ID NO: 2199322 - RNA, 19 nt, Homo sapiens
  misc_RNA (1)...(19): siRNA sense strand
gagaaagacccuauauaug

SEQ ID NO: 2199323 - RNA, 19 nt, Homo sapiens
  misc_RNA (1)...(19): siRNA sense strand
ggaaacacuuugaauguac

SEQ ID NO: 2199324 - RNA, 19 nt, Homo sapiens
  misc_RNA (1)...(19): siRNA sense strand
agaaagacccuauauaugu

SEQ ID NO: 2199325 - RNA, 19 nt, Homo sapiens
  misc_RNA (1)...(19): siRNA sense strand
gggaaagcauucauucaga

SEQ ID NO: 2199326 - RNA, 19 nt, Homo sapiens
  misc_RNA (1)...(19): siRNA sense strand
gaaaucaacacuaaguaug

SEQ ID NO: 2199327 - RNA, 19 nt, Homo sapiens
  misc_RNA (1)...(19): siRNA sense strand
ggaaagccuuaaacuggaa

SEQ ID NO: 2199328 - RNA, 19 nt, Homo sapiens
  misc_RNA (1)...(19): siRNA sense strand
gaacaagaagagccaugua

SEQ ID NO: 2199329 - RNA, 19 nt, Homo sapiens
  misc_RNA (1)...(19): siRNA sense strand
gaaaucacagcuccacgua

SEQ ID NO: 2199330 - RNA, 19 nt, Homo sapiens
  misc_RNA (1)...(19): siRNA sense strand
ggagagagacauuaugaau

SEQ ID NO: 2199331 - RNA, 19 nt, Homo sapiens
  misc_RNA (1)...(19): siRNA sense strand
agagaaaccuuauaaaugc

SEQ ID NO: 2199332 - RNA, 19 nt, Homo sapiens
  misc_RNA (1)...(19): siRNA sense strand
ggaaaucaacacuaaguau

SEQ ID NO: 2199333 - RNA, 19 nt, Homo sapiens
  misc_RNA (1)...(19): siRNA sense strand
gaggguuuaugcaggaaua

SEQ ID NO: 2199334 - RNA, 19 nt, Homo sapiens
  misc_RNA (1)...(19): siRNA sense strand
ggagagaaacccuaugaau

SEQ ID NO: 2199335 - RNA, 19 nt, Homo sapiens
  misc_RNA (1)...(19): siRNA sense strand
ggagagaaacccuaugaau

SEQ ID NO: 2199336 - RNA, 19 nt, Homo sapiens
  misc_RNA (1)...(19): siRNA sense strand
gaugacccauauuccauuu

SEQ ID NO: 2199337 - RNA, 19 nt, Homo sapiens
  misc_RNA (1)...(19): siRNA sense strand
caucagaagugucauacug

SEQ ID NO: 2199338 - RNA, 19 nt, Homo sapiens
  misc_RNA (1)...(19): siRNA sense strand
ggaugaguggcaacaauua

SEQ ID NO: 2199339 - RNA, 19 nt, Homo sapiens
  misc_RNA (1)...(19): siRNA sense strand
gggaaauaguucauguaaa

SEQ ID NO: 2199340 - RNA, 19 nt, Homo sapiens
  misc_RNA (1)...(19): siRNA sense strand
caacacuaauuaugcauca

SEQ ID NO: 2199341 - RNA, 19 nt, Homo sapiens
  misc_RNA (1)...(19): siRNA sense strand
ccacguacaucagcagauu

SEQ ID NO: 2199342 - RNA, 19 nt, Homo sapiens
  misc_RNA (1)...(19): siRNA sense strand
uagaaacaaugcaacagaa

SEQ ID NO: 2199343 - RNA, 19 nt, Homo sapiens
  misc_RNA (1)...(19): siRNA sense strand
uaaaugcagugacuaugga

SEQ ID NO: 2199344 - RNA, 19 nt, Homo sapiens
  misc_RNA (1)...(19): siRNA sense strand
gaagucacaugccuuugca

SEQ ID NO: 2199345 - RNA, 19 nt, Homo sapiens
  misc_RNA (1)...(19): siRNA sense strand
gaagucaacauuaaguaug

SEQ ID NO: 2199346 - RNA, 19 nt, Homo sapiens
  misc_RNA (1)...(19): siRNA sense strand
caagagaugacccauauuc

SEQ ID NO: 2199347 - RNA, 19 nt, Homo sapiens
  misc_RNA (1)...(19): siRNA sense strand
aaacagaaacccuauaagu

SEQ ID NO: 2199348 - RNA, 19 nt, Homo sapiens
  misc_RNA (1)...(19): siRNA sense strand
agacacaggagaauucaua

SEQ ID NO: 2199349 - RNA, 19 nt, Homo sapiens
  misc_RNA (1)...(19): siRNA sense strand
gaaaaucauucaccuggaa

SEQ ID NO: 2199350 - RNA, 19 nt, Homo sapiens
  misc_RNA (1)...(19): siRNA sense strand
uauuggagauggugauauu

SEQ ID NO: 2199351 - RNA, 19 nt, Homo sapiens
  misc_RNA (1)...(19): siRNA sense strand
ggagaaaggcauuaugagu

SEQ ID NO: 2199352 - RNA, 19 nt, Homo sapiens
  misc_RNA (1)...(19): siRNA sense strand
gaaaauccauacaggagaa

SEQ ID NO: 2199353 - RNA, 19 nt, Homo sapiens
  misc_RNA (1)...(19): siRNA sense strand
ccaagucccuggaaucagu

SEQ ID NO: 2199354 - RNA, 19 nt, Homo sapiens
  misc_RNA (1)...(19): siRNA sense strand
uguggcaagucuuucauua

SEQ ID NO: 2199355 - RNA, 19 nt, Homo sapiens
  misc_RNA (1)...(19): siRNA sense strand
cuaaacagaaacccuauaa

SEQ ID NO: 2199356 - RNA, 19 nt, Homo sapiens
  misc_RNA (1)...(19): siRNA sense strand
gaguauuugugcugaagaa

SEQ ID NO: 2199357 - RNA, 19 nt, Homo sapiens
  misc_RNA (1)...(19): siRNA sense strand
gcaaucccauacuggagaa

SEQ ID NO: 2199358 - RNA, 19 nt, Homo sapiens
  misc_RNA (1)...(19): siRNA sense strand
ggagagaaacccuauaggu

SEQ ID NO: 2199359 - RNA, 19 nt, Homo sapiens
  misc_RNA (1)...(19): siRNA sense strand
gaggcagucuucacucaga

SEQ ID NO: 2199360 - RNA, 19 nt, Homo sapiens
  misc_RNA (1)...(19): siRNA sense strand
caagaagagccauguaugu

SEQ ID NO: 2199361 - RNA, 19 nt, Homo sapiens
  misc_RNA (1)...(19): siRNA sense strand
aauuagaccuugcucagaa

SEQ ID NO: 2199362 - RNA, 19 nt, Homo sapiens
  misc_RNA (1)...(19): siRNA sense strand
agaagugacugcuugugaa

SEQ ID NO: 2199363 - RNA, 19 nt, Homo sapiens
  misc_RNA (1)...(19): siRNA sense strand
uagaagaauuguggaaaga

SEQ ID NO: 2199364 - RNA, 19 nt, Homo sapiens
  misc_RNA (1)...(19): siRNA sense strand
agagaaacccuauauuugu

SEQ ID NO: 2199365 - RNA, 19 nt, Homo sapiens
  misc_RNA (1)...(19): siRNA sense strand
ucagugggaugucaaguuc

SEQ ID NO: 2199366 - RNA, 19 nt, Homo sapiens
  misc_RNA (1)...(19): siRNA sense strand
guacagugaaugugagaaa

SEQ ID NO: 2199367 - RNA, 19 nt, Homo sapiens
  misc_RNA (1)...(19): siRNA sense strand
gggaaaccucugcaucaua

SEQ ID NO: 2199368 - RNA, 19 nt, Homo sapiens
  misc_RNA (1)...(19): siRNA sense strand
uaacucguguggaaagaau

SEQ ID NO: 2199369 - RNA, 19 nt, Homo sapiens
  misc_RNA (1)...(19): siRNA sense strand
cacaagacaaaucucauua

SEQ ID NO: 2199370 - RNA, 19 nt, Homo sapiens
  misc_RNA (1)...(19): siRNA sense strand
gagggaaacacuuugaaug

SEQ ID NO: 2199371 - RNA, 19 nt, Homo sapiens
  misc_RNA (1)...(19): siRNA sense strand
ucacucauuugaauucuca

SEQ ID NO: 2199372 - RNA, 19 nt, Homo sapiens
  misc_RNA (1)...(19): siRNA sense strand
ccaacuuucuucuaucuag

SEQ ID NO: 2199373 - RNA, 19 nt, Homo sapiens
  misc_RNA (1)...(19): siRNA sense strand
gcacugaauaugagaagga

SEQ ID NO: 2199374 - RNA, 19 nt, Homo sapiens
  misc_RNA (1)...(19): siRNA sense strand
ugacagcaucuuugaauau

SEQ ID NO: 2199375 - RNA, 19 nt, Homo sapiens
  misc_RNA (1)...(19): siRNA sense strand
caucagcaaucccauacug

SEQ ID NO: 2199376 - RNA, 19 nt, Homo sapiens
  misc_RNA (1)...(19): siRNA sense strand
ggaagucaggucuccauau

SEQ ID NO: 2199377 - RNA, 19 nt, Homo sapiens
  misc_RNA (1)...(19): siRNA sense strand
gaaauccuucacuaagaaa

SEQ ID NO: 2199378 - RNA, 19 nt, Homo sapiens
  misc_RNA (1)...(19): siRNA sense strand
aggagagaaucccuuuaua

SEQ ID NO: 2199379 - RNA, 19 nt, Homo sapiens
  misc_RNA (1)...(19): siRNA sense strand
caagucaaaccgucagaaa

SEQ ID NO: 2199380 - RNA, 19 nt, Homo sapiens
  misc_RNA (1)...(19): siRNA sense strand
gaucagaccuuaucaagca

SEQ ID NO: 2199381 - RNA, 19 nt, Homo sapiens
  misc_RNA (1)...(19): siRNA sense strand
gggcacagcuuucgccaaa

SEQ ID NO: 2199382 - RNA, 19 nt, Homo sapiens
  misc_RNA (1)...(19): siRNA sense strand
ggccagaagucacaccuua

SEQ ID NO: 2199383 - RNA, 19 nt, Homo sapiens
  misc_RNA (1)...(19): siRNA sense strand
ccaagaugcucuagugaaa

SEQ ID NO: 2199384 - RNA, 19 nt, Homo sapiens
  misc_RNA (1)...(19): siRNA sense strand
ggagagaagcccugcauuu

SEQ ID NO: 2199385 - RNA, 19 nt, Homo sapiens
  misc_RNA (1)...(19): siRNA sense strand
gggcgacacuucagguaua

SEQ ID NO: 2199386 - RNA, 19 nt, Homo sapiens
  misc_RNA (1)...(19): siRNA sense strand
gaacagagaaggaggaaca

SEQ ID NO: 2199387 - RNA, 19 nt, Homo sapiens
  misc_RNA (1)...(19): siRNA sense strand
ggaggugacuuccaacuag

SEQ ID NO: 2199388 - RNA, 19 nt, Homo sapiens
  misc_RNA (1)...(19): siRNA sense strand
ggagaggcccuuuguaugu

SEQ ID NO: 2199389 - RNA, 19 nt, Homo sapiens
  misc_RNA (1)...(19): siRNA sense strand
gaaggucacccucaucaga

SEQ ID NO: 2199390 - RNA, 19 nt, Homo sapiens
  misc_RNA (1)...(19): siRNA sense strand
gagagaagcccugcauuug

SEQ ID NO: 2199391 - RNA, 19 nt, Homo sapiens
  misc_RNA (1)...(19): siRNA sense strand
gcuccaagaugcucuagug

SEQ ID NO: 2199392 - RNA, 19 nt, Homo sapiens
  misc_RNA (1)...(19): siRNA sense strand
gaaggccucccucuccaua

SEQ ID NO: 2199393 - RNA, 19 nt, Homo sapiens
  misc_RNA (1)...(19): siRNA sense strand
ggacgcacuuggaggagaa

SEQ ID NO: 2199394 - RNA, 19 nt, Homo sapiens
  misc_RNA (1)...(19): siRNA sense strand
gcucgcagcuccucagaca

SEQ ID NO: 2199395 - RNA, 19 nt, Homo sapiens
  misc_RNA (1)...(19): siRNA sense strand
gaacaucuucuggaccuuu

SEQ ID NO: 2199396 - RNA, 19 nt, Homo sapiens
  misc_RNA (1)...(19): siRNA sense strand
agucacaccuuaucucuga

SEQ ID NO: 2199397 - RNA, 19 nt, Homo sapiens
  misc_RNA (1)...(19): siRNA sense strand
cauccucucucacuaauca

SEQ ID NO: 2199398 - RNA, 19 nt, Homo sapiens
  misc_RNA (1)...(19): siRNA sense strand
cccgacagcucauuaagaa

SEQ ID NO: 2199399 - RNA, 19 nt, Homo sapiens
  misc_RNA (1)...(19): siRNA sense strand
agagaagccuuaugucugu

SEQ ID NO: 2199400 - RNA, 19 nt, Homo sapiens
  misc_RNA (1)...(19): siRNA sense strand
gaaggucacccucauugga

SEQ ID NO: 2199401 - RNA, 19 nt, Homo sapiens
  misc_RNA (1)...(19): siRNA sense strand
acacagaucuucccaagcu

SEQ ID NO: 2199402 - RNA, 19 nt, Homo sapiens
  misc_RNA (1)...(19): siRNA sense strand
gggcgugcauuuggcuuua

SEQ ID NO: 2199403 - RNA, 19 nt, Homo sapiens
  misc_RNA (1)...(19): siRNA sense strand
gagcagacacuucagaauc

SEQ ID NO: 2199404 - RNA, 19 nt, Homo sapiens
  misc_RNA (1)...(19): siRNA sense strand
agaaagaggccaagcagaa

SEQ ID NO: 2199405 - RNA, 19 nt, Homo sapiens
  misc_RNA (1)...(19): siRNA sense strand
ugccagagaucagaccuua

SEQ ID NO: 2199406 - RNA, 19 nt, Homo sapiens
  misc_RNA (1)...(19): siRNA sense strand
agucauacguggaaacuau

SEQ ID NO: 2199407 - RNA, 19 nt, Homo sapiens
  misc_RNA (1)...(19): siRNA sense strand
gaaagaggccaagcagaau

SEQ ID NO: 2199408 - RNA, 19 nt, Homo sapiens
  misc_RNA (1)...(19): siRNA sense strand
ggagagaggagaacgaaca

SEQ ID NO: 2199409 - RNA, 19 nt, Homo sapiens
  misc_RNA (1)...(19): siRNA sense strand
gggcguggcuuuggucaga

SEQ ID NO: 2199410 - RNA, 19 nt, Homo sapiens
  misc_RNA (1)...(19): siRNA sense strand
cagaaggaguggaagcuau

SEQ ID NO: 2199411 - RNA, 19 nt, Homo sapiens
  misc_RNA (1)...(19): siRNA sense strand
caucaugugugcccugaau

SEQ ID NO: 2199412 - RNA, 19 nt, Homo sapiens
  misc_RNA (1)...(19): siRNA sense strand
ggagagaagccuuaugucu

SEQ ID NO: 2199413 - RNA, 19 nt, Homo sapiens
  misc_RNA (1)...(19): siRNA sense strand
aggaggagcuuuacguaga

SEQ ID NO: 2199414 - RNA, 19 nt, Homo sapiens
  misc_RNA (1)...(19): siRNA sense strand
gaggugacuuccaacuaga

SEQ ID NO: 2199415 - RNA, 19 nt, Homo sapiens
  misc_RNA (1)...(19): siRNA sense strand
ggagaagccauaccugugu

SEQ ID NO: 2199416 - RNA, 19 nt, Homo sapiens
  misc_RNA (1)...(19): siRNA sense strand
caccuuaucucugaccaaa

SEQ ID NO: 2199417 - RNA, 19 nt, Homo sapiens
  misc_RNA (1)...(19): siRNA sense strand
gcccaaaggaugagucuug

SEQ ID NO: 2199418 - RNA, 19 nt, Homo sapiens
  misc_RNA (1)...(19): siRNA sense strand
gaggagaacgaacaucuuc

SEQ ID NO: 2199419 - RNA, 19 nt, Homo sapiens
  misc_RNA (1)...(19): siRNA sense strand
gggaggugaugcuggagaa

SEQ ID NO: 2199420 - RNA, 19 nt, Homo sapiens
  misc_RNA (1)...(19): siRNA sense strand
ggucagacacaauguugaa

SEQ ID NO: 2199421 - RNA, 19 nt, Homo sapiens
  misc_RNA (1)...(19): siRNA sense strand
acaucaaggugacccagua

SEQ ID NO: 2199422 - RNA, 19 nt, Homo sapiens
  misc_RNA (1)...(19): siRNA sense strand
gagaucagaccuuaucaag

SEQ ID NO: 2199423 - RNA, 19 nt, Homo sapiens
  misc_RNA (1)...(19): siRNA sense strand
gagugugggcgucgguuua

SEQ ID NO: 2199424 - RNA, 19 nt, Homo sapiens
  misc_RNA (1)...(19): siRNA sense strand
gaagucacaccuuaucucu

SEQ ID NO: 2199425 - RNA, 19 nt, Homo sapiens
  misc_RNA (1)...(19): siRNA sense strand
gacagcucauuaagaaaga

SEQ ID NO: 2199426 - RNA, 19 nt, Homo sapiens
  misc_RNA (1)...(19): siRNA sense strand
cagaauuccagccaaguuu

SEQ ID NO: 2199427 - RNA, 19 nt, Homo sapiens
  misc_RNA (1)...(19): siRNA sense strand
acucagaggaggagcuuua

SEQ ID NO: 2199428 - RNA, 19 nt, Homo sapiens
  misc_RNA (1)...(19): siRNA sense strand
cagaaggucacccucauug

SEQ ID NO: 2199429 - RNA, 19 nt, Homo sapiens
  misc_RNA (1)...(19): siRNA sense strand
gagaggcccuuuguauguc

SEQ ID NO: 2199430 - RNA, 19 nt, Homo sapiens
  misc_RNA (1)...(19): siRNA sense strand
gggagaggcccuuuguaug

SEQ ID NO: 2199431 - RNA, 19 nt, Homo sapiens
  misc_RNA (1)...(19): siRNA sense strand
ccagagaucagaccuuauc

SEQ ID NO: 2199432 - RNA, 19 nt, Homo sapiens
  misc_RNA (1)...(19): siRNA sense strand
gaaaguggagagacagaag

SEQ ID NO: 2199433 - RNA, 19 nt, Homo sapiens
  misc_RNA (1)...(19): siRNA sense strand
gagaggagaacgaacaucu

SEQ ID NO: 2199434 - RNA, 19 nt, Homo sapiens
  misc_RNA (1)...(19): siRNA sense strand
caggagagaagccuuaugu

SEQ ID NO: 2199435 - RNA, 19 nt, Homo sapiens
  misc_RNA (1)...(19): siRNA sense strand
aguggaagcuauugaguuc

SEQ ID NO: 2199436 - RNA, 19 nt, Homo sapiens
  misc_RNA (1)...(19): siRNA sense strand
gaaugugggcgacacuuca

SEQ ID NO: 2199437 - RNA, 19 nt, Homo sapiens
  misc_RNA (1)...(19): siRNA sense strand
cgacagcucauuaagaaag

SEQ ID NO: 2199438 - RNA, 19 nt, Homo sapiens
  misc_RNA (1)...(19): siRNA sense strand
cgacaucagcggacccauu

SEQ ID NO: 2199439 - RNA, 19 nt, Homo sapiens
  misc_RNA (1)...(19): siRNA sense strand
ccaacuagaagcuccaaga

SEQ ID NO: 2199440 - RNA, 19 nt, Homo sapiens
  misc_RNA (1)...(19): siRNA sense strand
gacaucagcggacccauuc

SEQ ID NO: 2199441 - RNA, 19 nt, Homo sapiens
  misc_RNA (1)...(19): siRNA sense strand
cagcagucacuccuccuua

SEQ ID NO: 2199442 - RNA, 19 nt, Homo sapiens
  misc_RNA (1)...(19): siRNA sense strand
ucacuaaucacaagaggau

SEQ ID NO: 2199443 - RNA, 19 nt, Homo sapiens
  misc_RNA (1)...(19): siRNA sense strand
uauacauccucucucacua

SEQ ID NO: 2199444 - RNA, 19 nt, Homo sapiens
  misc_RNA (1)...(19): siRNA sense strand
gaguggaagcuauugaguu

SEQ ID NO: 2199445 - RNA, 19 nt, Homo sapiens
  misc_RNA (1)...(19): siRNA sense strand
caacuagaagcuccaagau

SEQ ID NO: 2199446 - RNA, 19 nt, Homo sapiens
  misc_RNA (1)...(19): siRNA sense strand
caagugugggcgugcauuu

SEQ ID NO: 2199447 - RNA, 19 nt, Homo sapiens
  misc_RNA (1)...(19): siRNA sense strand
gguagaagggaacagagaa

SEQ ID NO: 2199448 - RNA, 19 nt, Homo sapiens
  misc_RNA (1)...(19): siRNA sense strand
ggaaugugggcgacacuuc

SEQ ID NO: 2199449 - RNA, 19 nt, Homo sapiens
  misc_RNA (1)...(19): siRNA sense strand
guccagagccuagaacaga

SEQ ID NO: 2199450 - RNA, 19 nt, Homo sapiens
  misc_RNA (1)...(19): siRNA sense strand
ucaaggugacccaguagaa

SEQ ID NO: 2199451 - RNA, 19 nt, Homo sapiens
  misc_RNA (1)...(19): siRNA sense strand
ggaggagcuuuacguagac

SEQ ID NO: 2199452 - RNA, 19 nt, Homo sapiens
  misc_RNA (1)...(19): siRNA sense strand
gagcagucauacguggaaa

SEQ ID NO: 2199453 - RNA, 19 nt, Homo sapiens
  misc_RNA (1)...(19): siRNA sense strand
ggagcagucauacguggaa

SEQ ID NO: 2199454 - RNA, 19 nt, Homo sapiens
  misc_RNA (1)...(19): siRNA sense strand
gagaaaguggagagacaga

SEQ ID NO: 2199455 - RNA, 19 nt, Homo sapiens
  misc_RNA (1)...(19): siRNA sense strand
caggguguguggacaagga

SEQ ID NO: 2199456 - RNA, 19 nt, Homo sapiens
  misc_RNA (1)...(19): siRNA sense strand
cagaaggucacccucauca

SEQ ID NO: 2199457 - RNA, 19 nt, Homo sapiens
  misc_RNA (1)...(19): siRNA sense strand
gaaggaguggaagcuauug

SEQ ID NO: 2199458 - RNA, 19 nt, Homo sapiens
  misc_RNA (1)...(19): siRNA sense strand
aaagaggccaagcagaauu

SEQ ID NO: 2199459 - RNA, 19 nt, Homo sapiens
  misc_RNA (1)...(19): siRNA sense strand
ggagcagacacuucagaau

SEQ ID NO: 2199460 - RNA, 19 nt, Homo sapiens
  misc_RNA (1)...(19): siRNA sense strand
gccagaaggucacccucau

SEQ ID NO: 2199461 - RNA, 19 nt, Homo sapiens
  misc_RNA (1)...(19): siRNA sense strand
auacauccucucucacuaa

SEQ ID NO: 2199462 - RNA, 19 nt, Homo sapiens
  misc_RNA (1)...(19): siRNA sense strand
cagacaauaugcgcuaagu

SEQ ID NO: 2199463 - RNA, 19 nt, Homo sapiens
  misc_RNA (1)...(19): siRNA sense strand
ggagugugggcguggcuuu

SEQ ID NO: 2199464 - RNA, 19 nt, Homo sapiens
  misc_RNA (1)...(19): siRNA sense strand
gcccugcauuugcgaugaa

SEQ ID NO: 2199465 - RNA, 19 nt, Homo sapiens
  misc_RNA (1)...(19): siRNA sense strand
ccagaagucacaccuuauc

SEQ ID NO: 2199466 - RNA, 19 nt, Homo sapiens
  misc_RNA (1)...(19): siRNA sense strand
ggagugugggcgaggcuuu

SEQ ID NO: 2199467 - RNA, 19 nt, Homo sapiens
  misc_RNA (1)...(19): siRNA sense strand
gggagcagacacuucagaa

SEQ ID NO: 2199468 - RNA, 19 nt, Homo sapiens
  misc_RNA (1)...(19): siRNA sense strand
gcucagaggacccuguaca

SEQ ID NO: 2199469 - RNA, 19 nt, Homo sapiens
  misc_RNA (1)...(19): siRNA sense strand
ugcaggaggugacuuccaa

SEQ ID NO: 2199470 - RNA, 19 nt, Homo sapiens
  misc_RNA (1)...(19): siRNA sense strand
gaagcuccaagaugcucua

SEQ ID NO: 2199471 - RNA, 19 nt, Homo sapiens
  misc_RNA (1)...(19): siRNA sense strand
gagugugggcguggcuuua

SEQ ID NO: 2199472 - RNA, 19 nt, Homo sapiens
  misc_RNA (1)...(19): siRNA sense strand
ccagaaggucacccucauu

SEQ ID NO: 2199473 - RNA, 19 nt, Homo sapiens
  misc_RNA (1)...(19): siRNA sense strand
gaccuucgccuggcccaaa

SEQ ID NO: 2199474 - RNA, 19 nt, Homo sapiens
  misc_RNA (1)...(19): siRNA sense strand
caaggugacccaguagaau

SEQ ID NO: 2199475 - RNA, 19 nt, Homo sapiens
  misc_RNA (1)...(19): siRNA sense strand
aacuauagacugggacuua

SEQ ID NO: 2199476 - RNA, 19 nt, Homo sapiens
  misc_RNA (1)...(19): siRNA sense strand
agauagcccuccuucuaca

SEQ ID NO: 2199477 - RNA, 19 nt, Homo sapiens
  misc_RNA (1)...(19): siRNA sense strand
gcaccagagcucacacaca

SEQ ID NO: 2199478 - RNA, 19 nt, Homo sapiens
  misc_RNA (1)...(19): siRNA sense strand
uggaagcuauugaguucug

SEQ ID NO: 2199479 - RNA, 19 nt, Homo sapiens
  misc_RNA (1)...(19): siRNA sense strand
agaggaggagcuuuacgua

SEQ ID NO: 2199480 - RNA, 19 nt, Homo sapiens
  misc_RNA (1)...(19): siRNA sense strand
gaucagaccuuaucaagca

SEQ ID NO: 2199481 - RNA, 19 nt, Homo sapiens
  misc_RNA (1)...(19): siRNA sense strand
gggcacagcuuucgccaaa

SEQ ID NO: 2199482 - RNA, 19 nt, Homo sapiens
  misc_RNA (1)...(19): siRNA sense strand
ggccagaagucacaccuua

SEQ ID NO: 2199483 - RNA, 19 nt, Homo sapiens
  misc_RNA (1)...(19): siRNA sense strand
ccaagaugcucuagugaaa

SEQ ID NO: 2199484 - RNA, 19 nt, Homo sapiens
  misc_RNA (1)...(19): siRNA sense strand
ggagagaagcccugcauuu

SEQ ID NO: 2199485 - RNA, 19 nt, Homo sapiens
  misc_RNA (1)...(19): siRNA sense strand
gggcgacacuucagguaua

SEQ ID NO: 2199486 - RNA, 19 nt, Homo sapiens
  misc_RNA (1)...(19): siRNA sense strand
gaacagagaaggaggaaca

SEQ ID NO: 2199487 - RNA, 19 nt, Homo sapiens
  misc_RNA (1)...(19): siRNA sense strand
ggaggugacuuccaacuag

SEQ ID NO: 2199488 - RNA, 19 nt, Homo sapiens
  misc_RNA (1)...(19): siRNA sense strand
ggagaggcccuuuguaugu

SEQ ID NO: 2199489 - RNA, 19 nt, Homo sapiens
  misc_RNA (1)...(19): siRNA sense strand
gaaggucacccucaucaga

SEQ ID NO: 2199490 - RNA, 19 nt, Homo sapiens
  misc_RNA (1)...(19): siRNA sense strand
gagagaagcccugcauuug

SEQ ID NO: 2199491 - RNA, 19 nt, Homo sapiens
  misc_RNA (1)...(19): siRNA sense strand
gcuccaagaugcucuagug

SEQ ID NO: 2199492 - RNA, 19 nt, Homo sapiens
  misc_RNA (1)...(19): siRNA sense strand
gaaggccucccucuccaua

SEQ ID NO: 2199493 - RNA, 19 nt, Homo sapiens
  misc_RNA (1)...(19): siRNA sense strand
ggacgcacuuggaggagaa

SEQ ID NO: 2199494 - RNA, 19 nt, Homo sapiens
  misc_RNA (1)...(19): siRNA sense strand
gcucgcagcuccucagaca

SEQ ID NO: 2199495 - RNA, 19 nt, Homo sapiens
  misc_RNA (1)...(19): siRNA sense strand
gaacaucuucuggaccuuu

SEQ ID NO: 2199496 - RNA, 19 nt, Homo sapiens
  misc_RNA (1)...(19): siRNA sense strand
agucacaccuuaucucuga

SEQ ID NO: 2199497 - RNA, 19 nt, Homo sapiens
  misc_RNA (1)...(19): siRNA sense strand
cauccucucucacuaauca

SEQ ID NO: 2199498 - RNA, 19 nt, Homo sapiens
  misc_RNA (1)...(19): siRNA sense strand
cccgacagcucauuaagaa

SEQ ID NO: 2199499 - RNA, 19 nt, Homo sapiens
  misc_RNA (1)...(19): siRNA sense strand
agagaagccuuaugucugu

SEQ ID NO: 2199500 - RNA, 19 nt, Homo sapiens
  misc_RNA (1)...(19): siRNA sense strand
gaaggucacccucauugga

SEQ ID NO: 2199501 - RNA, 19 nt, Homo sapiens
  misc_RNA (1)...(19): siRNA sense strand
acacagaucuucccaagcu

SEQ ID NO: 2199502 - RNA, 19 nt, Homo sapiens
  misc_RNA (1)...(19): siRNA sense strand
gggcgugcauuuggcuuua

SEQ ID NO: 2199503 - RNA, 19 nt, Homo sapiens
  misc_RNA (1)...(19): siRNA sense strand
gagcagacacuucagaauc

SEQ ID NO: 2199504 - RNA, 19 nt, Homo sapiens
  misc_RNA (1)...(19): siRNA sense strand
agaaagaggccaagcagaa

SEQ ID NO: 2199505 - RNA, 19 nt, Homo sapiens
  misc_RNA (1)...(19): siRNA sense strand
ugccagagaucagaccuua

SEQ ID NO: 2199506 - RNA, 19 nt, Homo sapiens
  misc_RNA (1)...(19): siRNA sense strand
agucauacguggaaacuau

SEQ ID NO: 2199507 - RNA, 19 nt, Homo sapiens
  misc_RNA (1)...(19): siRNA sense strand
gaaagaggccaagcagaau

SEQ ID NO: 2199508 - RNA, 19 nt, Homo sapiens
  misc_RNA (1)...(19): siRNA sense strand
ggagagaggagaacgaaca

SEQ ID NO: 2199509 - RNA, 19 nt, Homo sapiens
  misc_RNA (1)...(19): siRNA sense strand
gggcguggcuuuggucaga

SEQ ID NO: 2199510 - RNA, 19 nt, Homo sapiens
  misc_RNA (1)...(19): siRNA sense strand
cagaaggaguggaagcuau

SEQ ID NO: 2199511 - RNA, 19 nt, Homo sapiens
  misc_RNA (1)...(19): siRNA sense strand
caucaugugugcccugaau

SEQ ID NO: 2199512 - RNA, 19 nt, Homo sapiens
  misc_RNA (1)...(19): siRNA sense strand
ggagagaagccuuaugucu

SEQ ID NO: 2199513 - RNA, 19 nt, Homo sapiens
  misc_RNA (1)...(19): siRNA sense strand
aggaggagcuuuacguaga

SEQ ID NO: 2199514 - RNA, 19 nt, Homo sapiens
  misc_RNA (1)...(19): siRNA sense strand
gaggugacuuccaacuaga

SEQ ID NO: 2199515 - RNA, 19 nt, Homo sapiens
  misc_RNA (1)...(19): siRNA sense strand
ggagaagccauaccugugu

SEQ ID NO: 2199516 - RNA, 19 nt, Homo sapiens
  misc_RNA (1)...(19): siRNA sense strand
caccuuaucucugaccaaa

SEQ ID NO: 2199517 - RNA, 19 nt, Homo sapiens
  misc_RNA (1)...(19): siRNA sense strand
gcccaaaggaugagucuug

SEQ ID NO: 2199518 - RNA, 19 nt, Homo sapiens
  misc_RNA (1)...(19): siRNA sense strand
gaggagaacgaacaucuuc

SEQ ID NO: 2199519 - RNA, 19 nt, Homo sapiens
  misc_RNA (1)...(19): siRNA sense strand
gggaggugaugcuggagaa

SEQ ID NO: 2199520 - RNA, 19 nt, Homo sapiens
  misc_RNA (1)...(19): siRNA sense strand
ggucagacacaauguugaa

SEQ ID NO: 2199521 - RNA, 19 nt, Homo sapiens
  misc_RNA (1)...(19): siRNA sense strand
acaucaaggugacccagua

SEQ ID NO: 2199522 - RNA, 19 nt, Homo sapiens
  misc_RNA (1)...(19): siRNA sense strand
gagaucagaccuuaucaag

SEQ ID NO: 2199523 - RNA, 19 nt, Homo sapiens
  misc_RNA (1)...(19): siRNA sense strand
gagugugggcgucgguuua

SEQ ID NO: 2199524 - RNA, 19 nt, Homo sapiens
  misc_RNA (1)...(19): siRNA sense strand
gaagucacaccuuaucucu

SEQ ID NO: 2199525 - RNA, 19 nt, Homo sapiens
  misc_RNA (1)...(19): siRNA sense strand
gacagcucauuaagaaaga

SEQ ID NO: 2199526 - RNA, 19 nt, Homo sapiens
  misc_RNA (1)...(19): siRNA sense strand
cagaauuccagccaaguuu

SEQ ID NO: 2199527 - RNA, 19 nt, Homo sapiens
  misc_RNA (1)...(19): siRNA sense strand
acucagaggaggagcuuua

SEQ ID NO: 2199528 - RNA, 19 nt, Homo sapiens
  misc_RNA (1)...(19): siRNA sense strand
cagaaggucacccucauug

SEQ ID NO: 2199529 - RNA, 19 nt, Homo sapiens
  misc_RNA (1)...(19): siRNA sense strand
gagaggcccuuuguauguc

SEQ ID NO: 2199530 - RNA, 19 nt, Homo sapiens
  misc_RNA (1)...(19): siRNA sense strand
gggagaggcccuuuguaug

SEQ ID NO: 2199531 - RNA, 19 nt, Homo sapiens
  misc_RNA (1)...(19): siRNA sense strand
ccagagaucagaccuuauc

SEQ ID NO: 2199532 - RNA, 19 nt, Homo sapiens
  misc_RNA (1)...(19): siRNA sense strand
gaaaguggagagacagaag

SEQ ID NO: 2199533 - RNA, 19 nt, Homo sapiens
  misc_RNA (1)...(19): siRNA sense strand
gagaggagaacgaacaucu

SEQ ID NO: 2199534 - RNA, 19 nt, Homo sapiens
  misc_RNA (1)...(19): siRNA sense strand
aguggaagcuauugaguuc

SEQ ID NO: 2199535 - RNA, 19 nt, Homo sapiens
  misc_RNA (1)...(19): siRNA sense strand
caggagagaagccuuaugu

SEQ ID NO: 2199536 - RNA, 19 nt, Homo sapiens
  misc_RNA (1)...(19): siRNA sense strand
gaaugugggcgacacuuca

SEQ ID NO: 2199537 - RNA, 19 nt, Homo sapiens
  misc_RNA (1)...(19): siRNA sense strand
cgacagcucauuaagaaag

SEQ ID NO: 2199538 - RNA, 19 nt, Homo sapiens
  misc_RNA (1)...(19): siRNA sense strand
cgacaucagcggacccauu

SEQ ID NO: 2199539 - RNA, 19 nt, Homo sapiens
  misc_RNA (1)...(19): siRNA sense strand
ccaacuagaagcuccaaga

SEQ ID NO: 2199540 - RNA, 19 nt, Homo sapiens
  misc_RNA (1)...(19): siRNA sense strand
gacaucagcggacccauuc

SEQ ID NO: 2199541 - RNA, 19 nt, Homo sapiens
  misc_RNA (1)...(19): siRNA sense strand
cagcagucacuccuccuua

SEQ ID NO: 2199542 - RNA, 19 nt, Homo sapiens
  misc_RNA (1)...(19): siRNA sense strand
ucacuaaucacaagaggau

SEQ ID NO: 2199543 - RNA, 19 nt, Homo sapiens
  misc_RNA (1)...(19): siRNA sense strand
uauacauccucucucacua

SEQ ID NO: 2199544 - RNA, 19 nt, Homo sapiens
  misc_RNA (1)...(19): siRNA sense strand
gaguggaagcuauugaguu

SEQ ID NO: 2199545 - RNA, 19 nt, Homo sapiens
  misc_RNA (1)...(19): siRNA sense strand
caacuagaagcuccaagau

SEQ ID NO: 2199546 - RNA, 19 nt, Homo sapiens
  misc_RNA (1)...(19): siRNA sense strand
caagugugggcgugcauuu

SEQ ID NO: 2199547 - RNA, 19 nt, Homo sapiens
  misc_RNA (1)...(19): siRNA sense strand
gguagaagggaacagagaa

SEQ ID NO: 2199548 - RNA, 19 nt, Homo sapiens
  misc_RNA (1)...(19): siRNA sense strand
guccagagccuagaacaga

SEQ ID NO: 2199549 - RNA, 19 nt, Homo sapiens
  misc_RNA (1)...(19): siRNA sense strand
ggaaugugggcgacacuuc

SEQ ID NO: 2199550 - RNA, 19 nt, Homo sapiens
  misc_RNA (1)...(19): siRNA sense strand
ucaaggugacccaguagaa

SEQ ID NO: 2199551 - RNA, 19 nt, Homo sapiens
  misc_RNA (1)...(19): siRNA sense strand
ggaggagcuuuacguagac

SEQ ID NO: 2199552 - RNA, 19 nt, Homo sapiens
  misc_RNA (1)...(19): siRNA sense strand
gagcagucauacguggaaa

SEQ ID NO: 2199553 - RNA, 19 nt, Homo sapiens
  misc_RNA (1)...(19): siRNA sense strand
ggagcagucauacguggaa

SEQ ID NO: 2199554 - RNA, 19 nt, Homo sapiens
  misc_RNA (1)...(19): siRNA sense strand
gagaaaguggagagacaga

SEQ ID NO: 2199555 - RNA, 19 nt, Homo sapiens
  misc_RNA (1)...(19): siRNA sense strand
gaaggaguggaagcuauug

SEQ ID NO: 2199556 - RNA, 19 nt, Homo sapiens
  misc_RNA (1)...(19): siRNA sense strand
caggguguguggacaagga

SEQ ID NO: 2199557 - RNA, 19 nt, Homo sapiens
  misc_RNA (1)...(19): siRNA sense strand
cagaaggucacccucauca

SEQ ID NO: 2199558 - RNA, 19 nt, Homo sapiens
  misc_RNA (1)...(19): siRNA sense strand
aaagaggccaagcagaauu

SEQ ID NO: 2199559 - RNA, 19 nt, Homo sapiens
  misc_RNA (1)...(19): siRNA sense strand
ggagcagacacuucagaau

SEQ ID NO: 2199560 - RNA, 19 nt, Homo sapiens
  misc_RNA (1)...(19): siRNA sense strand
gccagaaggucacccucau

SEQ ID NO: 2199561 - RNA, 19 nt, Homo sapiens
  misc_RNA (1)...(19): siRNA sense strand
auacauccucucucacuaa

SEQ ID NO: 2199562 - RNA, 19 nt, Homo sapiens
  misc_RNA (1)...(19): siRNA sense strand
caaccaggaaggaggcauu

SEQ ID NO: 2199563 - RNA, 19 nt, Homo sapiens
  misc_RNA (1)...(19): siRNA sense strand
cagacaauaugcgcuaagu

SEQ ID NO: 2199564 - RNA, 19 nt, Homo sapiens
  misc_RNA (1)...(19): siRNA sense strand
ggagugugggcguggcuuu

SEQ ID NO: 2199565 - RNA, 19 nt, Homo sapiens
  misc_RNA (1)...(19): siRNA sense strand
gcccugcauuugcgaugaa

SEQ ID NO: 2199566 - RNA, 19 nt, Homo sapiens
  misc_RNA (1)...(19): siRNA sense strand
ccagaagucacaccuuauc

SEQ ID NO: 2199567 - RNA, 19 nt, Homo sapiens
  misc_RNA (1)...(19): siRNA sense strand
ggagugugggcgaggcuuu

SEQ ID NO: 2199568 - RNA, 19 nt, Homo sapiens
  misc_RNA (1)...(19): siRNA sense strand
gcucagaggacccuguaca

SEQ ID NO: 2199569 - RNA, 19 nt, Homo sapiens
  misc_RNA (1)...(19): siRNA sense strand
gggagcagacacuucagaa

SEQ ID NO: 2199570 - RNA, 19 nt, Homo sapiens
  misc_RNA (1)...(19): siRNA sense strand
ugcaggaggugacuuccaa

SEQ ID NO: 2199571 - RNA, 19 nt, Homo sapiens
  misc_RNA (1)...(19): siRNA sense strand
gaagcuccaagaugcucua

SEQ ID NO: 2199572 - RNA, 19 nt, Homo sapiens
  misc_RNA (1)...(19): siRNA sense strand
gagugugggcguggcuuua

SEQ ID NO: 2199573 - RNA, 19 nt, Homo sapiens
  misc_RNA (1)...(19): siRNA sense strand
ccagaaggucacccucauu

SEQ ID NO: 2199574 - RNA, 19 nt, Homo sapiens
  misc_RNA (1)...(19): siRNA sense strand
gaccuucgccuggcccaaa

SEQ ID NO: 2199575 - RNA, 19 nt, Homo sapiens
  misc_RNA (1)...(19): siRNA sense strand
caaggugacccaguagaau

SEQ ID NO: 2199576 - RNA, 19 nt, Homo sapiens
  misc_RNA (1)...(19): siRNA sense strand
aacuauagacugggacuua

SEQ ID NO: 2199577 - RNA, 19 nt, Homo sapiens
  misc_RNA (1)...(19): siRNA sense strand
agauagcccuccuucuaca

SEQ ID NO: 2199578 - RNA, 19 nt, Homo sapiens
  misc_RNA (1)...(19): siRNA sense strand
gcaccagagcucacacaca

SEQ ID NO: 2199579 - RNA, 19 nt, Homo sapiens
  misc_RNA (1)...(19): siRNA sense strand
agaggaggagcuuuacgua

SEQ ID NO: 2199580 - RNA, 19 nt, Homo sapiens
  misc_RNA (1)...(19): siRNA sense strand
gcacagaccuugauccuaa

SEQ ID NO: 2199581 - RNA, 19 nt, Homo sapiens
  misc_RNA (1)...(19): siRNA sense strand
gaagcgaccucucuuugga

SEQ ID NO: 2199582 - RNA, 19 nt, Homo sapiens
  misc_RNA (1)...(19): siRNA sense strand
ccaagagugucuaugagaa

SEQ ID NO: 2199583 - RNA, 19 nt, Homo sapiens
  misc_RNA (1)...(19): siRNA sense strand
gcaggaagaggacgggaua

SEQ ID NO: 2199584 - RNA, 19 nt, Homo sapiens
  misc_RNA (1)...(19): siRNA sense strand
gcaccucccugucuguguu

SEQ ID NO: 2199585 - RNA, 19 nt, Homo sapiens
  misc_RNA (1)...(19): siRNA sense strand
caacgucuuuguccagaug

SEQ ID NO: 2199586 - RNA, 19 nt, Homo sapiens
  misc_RNA (1)...(19): siRNA sense strand
cgaagacccugcugugcuu

SEQ ID NO: 2199587 - RNA, 19 nt, Homo sapiens
  misc_RNA (1)...(19): siRNA sense strand
ggaagaagaagcggcauug

SEQ ID NO: 2199588 - RNA, 19 nt, Homo sapiens
  misc_RNA (1)...(19): siRNA sense strand
uaugagaacuuccgacucu

SEQ ID NO: 2199589 - RNA, 19 nt, Homo sapiens
  misc_RNA (1)...(19): siRNA sense strand
guuugcagcuggccaagaa

SEQ ID NO: 2199590 - RNA, 19 nt, Homo sapiens
  misc_RNA (1)...(19): siRNA sense strand
guucacggcucugcccuuu

SEQ ID NO: 2199591 - RNA, 19 nt, Homo sapiens
  misc_RNA (1)...(19): siRNA sense strand
ccagaguccugacacugaa

SEQ ID NO: 2199592 - RNA, 19 nt, Homo sapiens
  misc_RNA (1)...(19): siRNA sense strand
aagaagaagcggcauugua

SEQ ID NO: 2199593 - RNA, 19 nt, Homo sapiens
  misc_RNA (1)...(19): siRNA sense strand
ggagaugcagauucagaaa

SEQ ID NO: 2199594 - RNA, 19 nt, Homo sapiens
  misc_RNA (1)...(19): siRNA sense strand
ccucgugacugcagugguu

SEQ ID NO: 2199595 - RNA, 19 nt, Homo sapiens
  misc_RNA (1)...(19): siRNA sense strand
agaagaagcggcauuguag

SEQ ID NO: 2199596 - RNA, 19 nt, Homo sapiens
  misc_RNA (1)...(19): siRNA sense strand
gaggagaugcagauucaga

SEQ ID NO: 2199597 - RNA, 19 nt, Homo sapiens
  misc_RNA (1)...(19): siRNA sense strand
aggaggagaugcagauuca

SEQ ID NO: 2199598 - RNA, 19 nt, Homo sapiens
  misc_RNA (1)...(19): siRNA sense strand
caguguaccuucccagcaa

SEQ ID NO: 2199599 - RNA, 19 nt, Homo sapiens
  misc_RNA (1)...(19): siRNA sense strand
cugaaguggugcaggagua

SEQ ID NO: 2199600 - RNA, 19 nt, Homo sapiens
  misc_RNA (1)...(19): siRNA sense strand
caaggucccugaggagauc

SEQ ID NO: 2199601 - RNA, 19 nt, Homo sapiens
  misc_RNA (1)...(19): siRNA sense strand
caagguggaggccgucauu

SEQ ID NO: 2199602 - RNA, 19 nt, Homo sapiens
  misc_RNA (1)...(19): siRNA sense strand
gcagcacacgagcaacuuu

SEQ ID NO: 2199603 - RNA, 19 nt, Homo sapiens
  misc_RNA (1)...(19): siRNA sense strand
gagaugcagauucagaaau

SEQ ID NO: 2199604 - RNA, 19 nt, Homo sapiens
  misc_RNA (1)...(19): siRNA sense strand
ucacggcucugcccuuugc

SEQ ID NO: 2199605 - RNA, 19 nt, Homo sapiens
  misc_RNA (1)...(19): siRNA sense strand
gaagaagaagcggcauugu

SEQ ID NO: 2199606 - RNA, 19 nt, Homo sapiens
  misc_RNA (1)...(19): siRNA sense strand
gaagaggacgggauaaccu

SEQ ID NO: 2199607 - RNA, 19 nt, Homo sapiens
  misc_RNA (1)...(19): siRNA sense strand
agaccuugauccuaacuca

SEQ ID NO: 2199608 - RNA, 19 nt, Homo sapiens
  misc_RNA (1)...(19): siRNA sense strand
agaaaucgcaguggaugaa

SEQ ID NO: 2199609 - RNA, 19 nt, Homo sapiens
  misc_RNA (1)...(19): siRNA sense strand
gagugucuaugagaacuuc

SEQ ID NO: 2199610 - RNA, 19 nt, Homo sapiens
  misc_RNA (1)...(19): siRNA sense strand
aggaagacuuugucaccaa

SEQ ID NO: 2199611 - RNA, 19 nt, Homo sapiens
  misc_RNA (1)...(19): siRNA sense strand
caaagggucagcguggaaa

SEQ ID NO: 2199612 - RNA, 19 nt, Homo sapiens
  misc_RNA (1)...(19): siRNA sense strand
agaagcgccuccuguccuu

SEQ ID NO: 2199613 - RNA, 19 nt, Homo sapiens
  misc_RNA (1)...(19): siRNA sense strand
ggccggacgacuccuguaa

SEQ ID NO: 2199614 - RNA, 19 nt, Homo sapiens
  misc_RNA (1)...(19): siRNA sense strand
gaggaggagaugcagauuc

SEQ ID NO: 2199615 - RNA, 19 nt, Homo sapiens
  misc_RNA (1)...(19): siRNA sense strand
ccuguaaacccaagagugu

SEQ ID NO: 2199616 - RNA, 19 nt, Homo sapiens
  misc_RNA (1)...(19): siRNA sense strand
ucaaguccuucugaguuug

SEQ ID NO: 2199617 - RNA, 19 nt, Homo sapiens
  misc_RNA (1)...(19): siRNA sense strand
cuccugagcuacauugaca

SEQ ID NO: 2199618 - RNA, 19 nt, Homo sapiens
  misc_RNA (1)...(19): siRNA sense strand
ggccucagcccaucaccuu

SEQ ID NO: 2199619 - RNA, 19 nt, Homo sapiens
  misc_RNA (1)...(19): siRNA sense strand
gccaagaagcagcgagaga

SEQ ID NO: 2199620 - RNA, 19 nt, Homo sapiens
  misc_RNA (1)...(19): siRNA sense strand
caagugaggagacggaacu

SEQ ID NO: 2199621 - RNA, 19 nt, Homo sapiens
  misc_RNA (1)...(19): siRNA sense strand
ucccauggccuuccucuuc

SEQ ID NO: 2199622 - RNA, 19 nt, Homo sapiens
  misc_RNA (1)...(19): siRNA sense strand
uggagcagccgcaggaaga

SEQ ID NO: 2199623 - RNA, 19 nt, Homo sapiens
  misc_RNA (1)...(19): siRNA sense strand
cagcacacgagcaacuuug

SEQ ID NO: 2199624 - RNA, 19 nt, Homo sapiens
  misc_RNA (1)...(19): siRNA sense strand
gaagacccugcugugcuuu

SEQ ID NO: 2199625 - RNA, 19 nt, Homo sapiens
  misc_RNA (1)...(19): siRNA sense strand
ccggacgacuccuguaaac

SEQ ID NO: 2199626 - RNA, 19 nt, Homo sapiens
  misc_RNA (1)...(19): siRNA sense strand
cuguggaggugucaugugu

SEQ ID NO: 2199627 - RNA, 19 nt, Homo sapiens
  misc_RNA (1)...(19): siRNA sense strand
cccagaguccugacacuga

SEQ ID NO: 2199628 - RNA, 19 nt, Homo sapiens
  misc_RNA (1)...(19): siRNA sense strand
aacccaagagugucuauga

SEQ ID NO: 2199629 - RNA, 19 nt, Homo sapiens
  misc_RNA (1)...(19): siRNA sense strand
caacuuugaccggaugauc

SEQ ID NO: 2199630 - RNA, 19 nt, Homo sapiens
  misc_RNA (1)...(19): siRNA sense strand
ucccuggcauggucuaugu

SEQ ID NO: 2199631 - RNA, 19 nt, Homo sapiens
  misc_RNA (1)...(19): siRNA sense strand
cagaaaucgcaguggauga

SEQ ID NO: 2199632 - RNA, 19 nt, Homo sapiens
  misc_RNA (1)...(19): siRNA sense strand
cccaagagugucuaugaga

SEQ ID NO: 2199633 - RNA, 19 nt, Homo sapiens
  misc_RNA (1)...(19): siRNA sense strand
acaaagggucagcguggaa

SEQ ID NO: 2199634 - RNA, 19 nt, Homo sapiens
  misc_RNA (1)...(19): siRNA sense strand
ccaaggucccugaggagau

SEQ ID NO: 2199635 - RNA, 19 nt, Homo sapiens
  misc_RNA (1)...(19): siRNA sense strand
cagcauaacucaucaagua

SEQ ID NO: 2199636 - RNA, 19 nt, Homo sapiens
  misc_RNA (1)...(19): siRNA sense strand
ggaagaggcuugugccauu

SEQ ID NO: 2199637 - RNA, 19 nt, Homo sapiens
  misc_RNA (1)...(19): siRNA sense strand
gaagaaccaggcaaauuua

SEQ ID NO: 2199638 - RNA, 19 nt, Homo sapiens
  misc_RNA (1)...(19): siRNA sense strand
gaagaggcuugugccauua

SEQ ID NO: 2199639 - RNA, 19 nt, Homo sapiens
  misc_RNA (1)...(19): siRNA sense strand
caacacugcucuccauuau

SEQ ID NO: 2199640 - RNA, 19 nt, Homo sapiens
  misc_RNA (1)...(19): siRNA sense strand
gaugccagaucaacauaua

SEQ ID NO: 2199641 - RNA, 19 nt, Homo sapiens
  misc_RNA (1)...(19): siRNA sense strand
gaacauggcgccaauccaa

SEQ ID NO: 2199642 - RNA, 19 nt, Homo sapiens
  misc_RNA (1)...(19): siRNA sense strand
gcuaugaagccuugaauuu

SEQ ID NO: 2199643 - RNA, 19 nt, Homo sapiens
  misc_RNA (1)...(19): siRNA sense strand
ugaagaaccaggcaaauuu

SEQ ID NO: 2199644 - RNA, 19 nt, Homo sapiens
  misc_RNA (1)...(19): siRNA sense strand
gcaacacugcucuccauua

SEQ ID NO: 2199645 - RNA, 19 nt, Homo sapiens
  misc_RNA (1)...(19): siRNA sense strand
ccacagggcugccaucaag

SEQ ID NO: 2199646 - RNA, 19 nt, Homo sapiens
  misc_RNA (1)...(19): siRNA sense strand
ggacuucacuggcagaaaa

SEQ ID NO: 2199647 - RNA, 19 nt, Homo sapiens
  misc_RNA (1)...(19): siRNA sense strand
gagggaaacacuccacuuu

SEQ ID NO: 2199648 - RNA, 19 nt, Homo sapiens
  misc_RNA (1)...(19): siRNA sense strand
gaagaugccagaucaacau

SEQ ID NO: 2199649 - RNA, 19 nt, Homo sapiens
  misc_RNA (1)...(19): siRNA sense strand
aaacaggacaccuuuaaug

SEQ ID NO: 2199650 - RNA, 19 nt, Homo sapiens
  misc_RNA (1)...(19): siRNA sense strand
gcaaauauugaagcacuaa

SEQ ID NO: 2199651 - RNA, 19 nt, Homo sapiens
  misc_RNA (1)...(19): siRNA sense strand
gcgccaauccaaacauuaa

SEQ ID NO: 2199652 - RNA, 19 nt, Homo sapiens
  misc_RNA (1)...(19): siRNA sense strand
caaauuuacaugccauuga

SEQ ID NO: 2199653 - RNA, 19 nt, Homo sapiens
  misc_RNA (1)...(19): siRNA sense strand
uuaaggauaucuacagcaa

SEQ ID NO: 2199654 - RNA, 19 nt, Homo sapiens
  misc_RNA (1)...(19): siRNA sense strand
caggacaccuuuaaugaag

SEQ ID NO: 2199655 - RNA, 19 nt, Homo sapiens
  misc_RNA (1)...(19): siRNA sense strand
gggaaacacuccacuuuug

SEQ ID NO: 2199656 - RNA, 19 nt, Homo sapiens
  misc_RNA (1)...(19): siRNA sense strand
gaaccaggcaaauuuacau

SEQ ID NO: 2199657 - RNA, 19 nt, Homo sapiens
  misc_RNA (1)...(19): siRNA sense strand
acacugcucuccauuaugc

SEQ ID NO: 2199658 - RNA, 19 nt, Homo sapiens
  misc_RNA (1)...(19): siRNA sense strand
cagaagaacagcccucaug

SEQ ID NO: 2199659 - RNA, 19 nt, Homo sapiens
  misc_RNA (1)...(19): siRNA sense strand
ggaaguggucacccucuug

SEQ ID NO: 2199660 - RNA, 19 nt, Homo sapiens
  misc_RNA (1)...(19): siRNA sense strand
aaggauaucuacagcaaca

SEQ ID NO: 2199661 - RNA, 19 nt, Homo sapiens
  misc_RNA (1)...(19): siRNA sense strand
gccagacugccgaggauua

SEQ ID NO: 2199662 - RNA, 19 nt, Homo sapiens
  misc_RNA (1)...(19): siRNA sense strand
gagcagaagaugccagauc

SEQ ID NO: 2199663 - RNA, 19 nt, Homo sapiens
  misc_RNA (1)...(19): siRNA sense strand
ggacuguucuacauuugac

SEQ ID NO: 2199664 - RNA, 19 nt, Homo sapiens
  misc_RNA (1)...(19): siRNA sense strand
ucuaggagacagcaaauug

SEQ ID NO: 2199665 - RNA, 19 nt, Homo sapiens
  misc_RNA (1)...(19): siRNA sense strand
gcaaauuuacaugccauug

SEQ ID NO: 2199666 - RNA, 19 nt, Homo sapiens
  misc_RNA (1)...(19): siRNA sense strand
gcauaacucaucaaguauc

SEQ ID NO: 2199667 - RNA, 19 nt, Homo sapiens
  misc_RNA (1)...(19): siRNA sense strand
aagaacagcccucaugcuu

SEQ ID NO: 2199668 - RNA, 19 nt, Homo sapiens
  misc_RNA (1)...(19): siRNA sense strand
uaugaagccuugaauuuug

SEQ ID NO: 2199669 - RNA, 19 nt, Homo sapiens
  misc_RNA (1)...(19): siRNA sense strand
gacuaaacaggacaccuuu

SEQ ID NO: 2199670 - RNA, 19 nt, Homo sapiens
  misc_RNA (1)...(19): siRNA sense strand
aacaggacaccuuuaauga

SEQ ID NO: 2199671 - RNA, 19 nt, Homo sapiens
  misc_RNA (1)...(19): siRNA sense strand
acaggacaccuuuaaugaa

SEQ ID NO: 2199672 - RNA, 19 nt, Homo sapiens
  misc_RNA (1)...(19): siRNA sense strand
caggacuguucuacauuug

SEQ ID NO: 2199673 - RNA, 19 nt, Homo sapiens
  misc_RNA (1)...(19): siRNA sense strand
agcagaagaugccagauca

SEQ ID NO: 2199674 - RNA, 19 nt, Homo sapiens
  misc_RNA (1)...(19): siRNA sense strand
ccauuauucuccuggaaca

SEQ ID NO: 2199675 - RNA, 19 nt, Homo sapiens
  misc_RNA (1)...(19): siRNA sense strand
agacuaaacaggacaccuu

SEQ ID NO: 2199676 - RNA, 19 nt, Homo sapiens
  misc_RNA (1)...(19): siRNA sense strand
gaagaacagcccucaugcu

SEQ ID NO: 2199677 - RNA, 19 nt, Homo sapiens
  misc_RNA (1)...(19): siRNA sense strand
ccacuuuuguuugcuauaa

SEQ ID NO: 2199678 - RNA, 19 nt, Homo sapiens
  misc_RNA (1)...(19): siRNA sense strand
gcagaagaugccagaucaa

SEQ ID NO: 2199679 - RNA, 19 nt, Homo sapiens
  misc_RNA (1)...(19): siRNA sense strand
aaauuuacaugccauugac

SEQ ID NO: 2199680 - RNA, 19 nt, Homo sapiens
  misc_RNA (1)...(19): siRNA sense strand
uggcgccaauccaaacauu

SEQ ID NO: 2199681 - RNA, 19 nt, Homo sapiens
  misc_RNA (1)...(19): siRNA sense strand
ccaugcaaauauugaagca

SEQ ID NO: 2199682 - RNA, 19 nt, Homo sapiens
  misc_RNA (1)...(19): siRNA sense strand
cauaacucaucaaguaucg

SEQ ID NO: 2199683 - RNA, 19 nt, Homo sapiens
  misc_RNA (1)...(19): siRNA sense strand
ccaauccaaacauuaagga

SEQ ID NO: 2199684 - RNA, 19 nt, Homo sapiens
  misc_RNA (1)...(19): siRNA sense strand
acaagaaggugcaaaaggu

SEQ ID NO: 2199685 - RNA, 19 nt, Homo sapiens
  misc_RNA (1)...(19): siRNA sense strand
gcagcuaugaagccuugaa

SEQ ID NO: 2199686 - RNA, 19 nt, Homo sapiens
  misc_RNA (1)...(19): siRNA sense strand
ccuggaacauggcgccaau

SEQ ID NO: 2199687 - RNA, 19 nt, Homo sapiens
  misc_RNA (1)...(19): siRNA sense strand
caguacagcauaacucauc

SEQ ID NO: 2199688 - RNA, 19 nt, Homo sapiens
  misc_RNA (1)...(19): siRNA sense strand
uugaagaaccaggcaaauu

SEQ ID NO: 2199689 - RNA, 19 nt, Homo sapiens
  misc_RNA (1)...(19): siRNA sense strand
gccagaucaacauauauga

SEQ ID NO: 2199690 - RNA, 19 nt, Homo sapiens
  misc_RNA (1)...(19): siRNA sense strand
ccaccaugcaaauauugaa

SEQ ID NO: 2199691 - RNA, 19 nt, Homo sapiens
  misc_RNA (1)...(19): siRNA sense strand
ggcgccaauccaaacauua

SEQ ID NO: 2199692 - RNA, 19 nt, Homo sapiens
  misc_RNA (1)...(19): siRNA sense strand
caagaaggugcaaaaggua

SEQ ID NO: 2199693 - RNA, 19 nt, Homo sapiens
  misc_RNA (1)...(19): siRNA sense strand
agaggcuugugccauuauu

SEQ ID NO: 2199694 - RNA, 19 nt, Homo sapiens
  misc_RNA (1)...(19): siRNA sense strand
ugcaaauauugaagcacua

SEQ ID NO: 2199695 - RNA, 19 nt, Homo sapiens
  misc_RNA (1)...(19): siRNA sense strand
gcagguuccgggacuugga

SEQ ID NO: 2199696 - RNA, 19 nt, Homo sapiens
  misc_RNA (1)...(19): siRNA sense strand
ccagacugccgaggauuau

SEQ ID NO: 2199697 - RNA, 19 nt, Homo sapiens
  misc_RNA (1)...(19): siRNA sense strand
guacagcauaacucaucaa

SEQ ID NO: 2199698 - RNA, 19 nt, Homo sapiens
  misc_RNA (1)...(19): siRNA sense strand
ggaaacacuccacuuuugu

SEQ ID NO: 2199699 - RNA, 19 nt, Homo sapiens
  misc_RNA (1)...(19): siRNA sense strand
gaaaggaagcugaaauuua

SEQ ID NO: 2199700 - RNA, 19 nt, Homo sapiens
  misc_RNA (1)...(19): siRNA sense strand
gaaaggcccuggaaaguga

SEQ ID NO: 2199701 - RNA, 19 nt, Homo sapiens
  misc_RNA (1)...(19): siRNA sense strand
gcacugggauguugucuuu

SEQ ID NO: 2199702 - RNA, 19 nt, Homo sapiens
  misc_RNA (1)...(19): siRNA sense strand
ccaaagagaugaacauuuc

SEQ ID NO: 2199703 - RNA, 19 nt, Homo sapiens
  misc_RNA (1)...(19): siRNA sense strand
gguuauggcuguuuguuua

SEQ ID NO: 2199704 - RNA, 19 nt, Homo sapiens
  misc_RNA (1)...(19): siRNA sense strand
gcaagucguucaaauguug

SEQ ID NO: 2199705 - RNA, 19 nt, Homo sapiens
  misc_RNA (1)...(19): siRNA sense strand
ccaaacagcucuuuaccaa

SEQ ID NO: 2199706 - RNA, 19 nt, Homo sapiens
  misc_RNA (1)...(19): siRNA sense strand
ggaauucccucaucucugu

SEQ ID NO: 2199707 - RNA, 19 nt, Homo sapiens
  misc_RNA (1)...(19): siRNA sense strand
gaagaucacccacagcuuu

SEQ ID NO: 2199708 - RNA, 19 nt, Homo sapiens
  misc_RNA (1)...(19): siRNA sense strand
gggaggaccuggacaguga

SEQ ID NO: 2199709 - RNA, 19 nt, Homo sapiens
  misc_RNA (1)...(19): siRNA sense strand
ggaggaagcugagggaguu

SEQ ID NO: 2199710 - RNA, 19 nt, Homo sapiens
  misc_RNA (1)...(19): siRNA sense strand
ccaaacaucuggaaagaca

SEQ ID NO: 2199711 - RNA, 19 nt, Homo sapiens
  misc_RNA (1)...(19): siRNA sense strand
caucagaaaugcuuacaau

SEQ ID NO: 2199712 - RNA, 19 nt, Homo sapiens
  misc_RNA (1)...(19): siRNA sense strand
gaacucgacuggagagaag

SEQ ID NO: 2199713 - RNA, 19 nt, Homo sapiens
  misc_RNA (1)...(19): siRNA sense strand
ggaagccucugccuggaaa

SEQ ID NO: 2199714 - RNA, 19 nt, Homo sapiens
  misc_RNA (1)...(19): siRNA sense strand
gcaaagacagguccacuga

SEQ ID NO: 2199715 - RNA, 19 nt, Homo sapiens
  misc_RNA (1)...(19): siRNA sense strand
gcacccagcugaccuucuu

SEQ ID NO: 2199716 - RNA, 19 nt, Homo sapiens
  misc_RNA (1)...(19): siRNA sense strand
gaaguuacccagaaggauu

SEQ ID NO: 2199717 - RNA, 19 nt, Homo sapiens
  misc_RNA (1)...(19): siRNA sense strand
gaagaggacaagagcuaua

SEQ ID NO: 2199718 - RNA, 19 nt, Homo sapiens
  misc_RNA (1)...(19): siRNA sense strand
aaagggacaucagcaauuu

SEQ ID NO: 2199719 - RNA, 19 nt, Homo sapiens
  misc_RNA (1)...(19): siRNA sense strand
gaaggcaucucagccauca

SEQ ID NO: 2199720 - RNA, 19 nt, Homo sapiens
  misc_RNA (1)...(19): siRNA sense strand
gaaaaggcauuguacaguu

SEQ ID NO: 2199721 - RNA, 19 nt, Homo sapiens
  misc_RNA (1)...(19): siRNA sense strand
ggaaaggaagcugaaauuu

SEQ ID NO: 2199722 - RNA, 19 nt, Homo sapiens
  misc_RNA (1)...(19): siRNA sense strand
ugagagaaguuacccagaa

SEQ ID NO: 2199723 - RNA, 19 nt, Homo sapiens
  misc_RNA (1)...(19): siRNA sense strand
ggauugggcuguuuguugu

SEQ ID NO: 2199724 - RNA, 19 nt, Homo sapiens
  misc_RNA (1)...(19): siRNA sense strand
ucagaaaugcuuacaauga

SEQ ID NO: 2199725 - RNA, 19 nt, Homo sapiens
  misc_RNA (1)...(19): siRNA sense strand
ucauuaaucuggcgucuug

SEQ ID NO: 2199726 - RNA, 19 nt, Homo sapiens
  misc_RNA (1)...(19): siRNA sense strand
cauugaagcugcugcugua

SEQ ID NO: 2199727 - RNA, 19 nt, Homo sapiens
  misc_RNA (1)...(19): siRNA sense strand
gaugaauacugcagacaau

SEQ ID NO: 2199728 - RNA, 19 nt, Homo sapiens
  misc_RNA (1)...(19): siRNA sense strand
ccacugugcuggcauugaa

SEQ ID NO: 2199729 - RNA, 19 nt, Homo sapiens
  misc_RNA (1)...(19): siRNA sense strand
agagcuauaugcaucuuua

SEQ ID NO: 2199730 - RNA, 19 nt, Homo sapiens
  misc_RNA (1)...(19): siRNA sense strand
gcacugagggcguggauau

SEQ ID NO: 2199731 - RNA, 19 nt, Homo sapiens
  misc_RNA (1)...(19): siRNA sense strand
ggacgggacugugcuagga

SEQ ID NO: 2199732 - RNA, 19 nt, Homo sapiens
  misc_RNA (1)...(19): siRNA sense strand
ggaagguuauggcuguuug

SEQ ID NO: 2199733 - RNA, 19 nt, Homo sapiens
  misc_RNA (1)...(19): siRNA sense strand
aaacagcucuuuaccaaac

SEQ ID NO: 2199734 - RNA, 19 nt, Homo sapiens
  misc_RNA (1)...(19): siRNA sense strand
auagagaacuacagaagaa

SEQ ID NO: 2199735 - RNA, 19 nt, Homo sapiens
  misc_RNA (1)...(19): siRNA sense strand
caacacaacauccagaaga

SEQ ID NO: 2199736 - RNA, 19 nt, Homo sapiens
  misc_RNA (1)...(19): siRNA sense strand
caaaugaagacgugaaaga

SEQ ID NO: 2199737 - RNA, 19 nt, Homo sapiens
  misc_RNA (1)...(19): siRNA sense strand
gggcguggauauuguaaug

SEQ ID NO: 2199738 - RNA, 19 nt, Homo sapiens
  misc_RNA (1)...(19): siRNA sense strand
gcaaugacuacaugcagua

SEQ ID NO: 2199739 - RNA, 19 nt, Homo sapiens
  misc_RNA (1)...(19): siRNA sense strand
aaaccaagaugaacugaca

SEQ ID NO: 2199740 - RNA, 19 nt, Homo sapiens
  misc_RNA (1)...(19): siRNA sense strand
caaggaaagccaagacaaa

SEQ ID NO: 2199741 - RNA, 19 nt, Homo sapiens
  misc_RNA (1)...(19): siRNA sense strand
gcacagaaaggcccuggaa

SEQ ID NO: 2199742 - RNA, 19 nt, Homo sapiens
  misc_RNA (1)...(19): siRNA sense strand
ggacugagcaacccuuugu

SEQ ID NO: 2199743 - RNA, 19 nt, Homo sapiens
  misc_RNA (1)...(19): siRNA sense strand
cuaccugccugaguucuua

SEQ ID NO: 2199744 - RNA, 19 nt, Homo sapiens
  misc_RNA (1)...(19): siRNA sense strand
caagaugaacugacacuga

SEQ ID NO: 2199745 - RNA, 19 nt, Homo sapiens
  misc_RNA (1)...(19): siRNA sense strand
gagaugcugcucaguguaa

SEQ ID NO: 2199746 - RNA, 19 nt, Homo sapiens
  misc_RNA (1)...(19): siRNA sense strand
ccucgagucuggaaacaaa

SEQ ID NO: 2199747 - RNA, 19 nt, Homo sapiens
  misc_RNA (1)...(19): siRNA sense strand
caagaucuccaccaucauu

SEQ ID NO: 2199748 - RNA, 19 nt, Homo sapiens
  misc_RNA (1)...(19): siRNA sense strand
ccagagagaacaugaguga

SEQ ID NO: 2199749 - RNA, 19 nt, Homo sapiens
  misc_RNA (1)...(19): siRNA sense strand
caucagcgauccguucauu

SEQ ID NO: 2199750 - RNA, 19 nt, Homo sapiens
  misc_RNA (1)...(19): siRNA sense strand
gaaguucucccuggugauu

SEQ ID NO: 2199751 - RNA, 19 nt, Homo sapiens
  misc_RNA (1)...(19): siRNA sense strand
gaaggaccagcucgaauga

SEQ ID NO: 2199752 - RNA, 19 nt, Homo sapiens
  misc_RNA (1)...(19): siRNA sense strand
gaagaaaccaagcccuguu

SEQ ID NO: 2199753 - RNA, 19 nt, Homo sapiens
  misc_RNA (1)...(19): siRNA sense strand
agagggaagugaagauuga

SEQ ID NO: 2199754 - RNA, 19 nt, Homo sapiens
  misc_RNA (1)...(19): siRNA sense strand
ccgcauuuguggauguuua

SEQ ID NO: 2199755 - RNA, 19 nt, Homo sapiens
  misc_RNA (1)...(19): siRNA sense strand
gcagauggguaggaagaga

SEQ ID NO: 2199756 - RNA, 19 nt, Homo sapiens
  misc_RNA (1)...(19): siRNA sense strand
gugccaaccuccaccauug

SEQ ID NO: 2199757 - RNA, 19 nt, Homo sapiens
  misc_RNA (1)...(19): siRNA sense strand
ugaaauuuauccagagguu

SEQ ID NO: 2199758 - RNA, 19 nt, Homo sapiens
  misc_RNA (1)...(19): siRNA sense strand
ggcccaagauauuguggua

SEQ ID NO: 2199759 - RNA, 19 nt, Homo sapiens
  misc_RNA (1)...(19): siRNA sense strand
gagaucuucuuccacaaug

SEQ ID NO: 2199760 - RNA, 19 nt, Homo sapiens
  misc_RNA (1)...(19): siRNA sense strand
cagaugaccauaccaugua

SEQ ID NO: 2199761 - RNA, 19 nt, Homo sapiens
  misc_RNA (1)...(19): siRNA sense strand
ggaagggccucuggcaauc

SEQ ID NO: 2199762 - RNA, 19 nt, Homo sapiens
  misc_RNA (1)...(19): siRNA sense strand
gggagaaccugcaaugacu

SEQ ID NO: 2199763 - RNA, 19 nt, Homo sapiens
  misc_RNA (1)...(19): siRNA sense strand
aggaagagauguuucugaa

SEQ ID NO: 2199764 - RNA, 19 nt, Homo sapiens
  misc_RNA (1)...(19): siRNA sense strand
cagcacauccucugcaauu

SEQ ID NO: 2199765 - RNA, 19 nt, Homo sapiens
  misc_RNA (1)...(19): siRNA sense strand
cagaaaugcuuacaaugag

SEQ ID NO: 2199766 - RNA, 19 nt, Homo sapiens
  misc_RNA (1)...(19): siRNA sense strand
acaagguccugaugacauu

SEQ ID NO: 2199767 - RNA, 19 nt, Homo sapiens
  misc_RNA (1)...(19): siRNA sense strand
ggaacugugucgggaaaga

SEQ ID NO: 2199768 - RNA, 19 nt, Homo sapiens
  misc_RNA (1)...(19): siRNA sense strand
gagagaaguuacccagaag

SEQ ID NO: 2199769 - RNA, 19 nt, Homo sapiens
  misc_RNA (1)...(19): siRNA sense strand
gccaacaucuccugcuuca

SEQ ID NO: 2199770 - RNA, 19 nt, Homo sapiens
  misc_RNA (1)...(19): siRNA sense strand
gagcugggcuucaggucau

SEQ ID NO: 2199771 - RNA, 19 nt, Homo sapiens
  misc_RNA (1)...(19): siRNA sense strand
gcacauccucugcaauuuc

SEQ ID NO: 2199772 - RNA, 19 nt, Homo sapiens
  misc_RNA (1)...(19): siRNA sense strand
gaagaccauucuggcugua

SEQ ID NO: 2199773 - RNA, 19 nt, Homo sapiens
  misc_RNA (1)...(19): siRNA sense strand
ggacaucgcccuggagauc

SEQ ID NO: 2199774 - RNA, 19 nt, Homo sapiens
  misc_RNA (1)...(19): siRNA sense strand
gaaugucuacuuaucauca

SEQ ID NO: 2199775 - RNA, 19 nt, Homo sapiens
  misc_RNA (1)...(19): siRNA sense strand
gaaggccucucuccugaac

SEQ ID NO: 2199776 - RNA, 19 nt, Homo sapiens
  misc_RNA (1)...(19): siRNA sense strand
ccagagguuuaaagaaguu

SEQ ID NO: 2199777 - RNA, 19 nt, Homo sapiens
  misc_RNA (1)...(19): siRNA sense strand
gaacuauuccacaugacaa

SEQ ID NO: 2199778 - RNA, 19 nt, Homo sapiens
  misc_RNA (1)...(19): siRNA sense strand
uccaagaucuccaccauca

SEQ ID NO: 2199779 - RNA, 19 nt, Homo sapiens
  misc_RNA (1)...(19): siRNA sense strand
aagcucaucuuccuauuca

SEQ ID NO: 2199780 - RNA, 19 nt, Homo sapiens
  misc_RNA (1)...(19): siRNA sense strand
gaauggaccucagcagcau

SEQ ID NO: 2199781 - RNA, 19 nt, Homo sapiens
  misc_RNA (1)...(19): siRNA sense strand
ggaucaugcugcagaagug

SEQ ID NO: 2199782 - RNA, 19 nt, Homo sapiens
  misc_RNA (1)...(19): siRNA sense strand
ucaaacgcuugucuccuuu

SEQ ID NO: 2199783 - RNA, 19 nt, Homo sapiens
  misc_RNA (1)...(19): siRNA sense strand
ugucauguauagagaacua

SEQ ID NO: 2199784 - RNA, 19 nt, Homo sapiens
  misc_RNA (1)...(19): siRNA sense strand
gcacaccacagcaaaguca

SEQ ID NO: 2199785 - RNA, 19 nt, Homo sapiens
  misc_RNA (1)...(19): siRNA sense strand
ugagugauguccaacacaa

SEQ ID NO: 2199786 - RNA, 19 nt, Homo sapiens
  misc_RNA (1)...(19): siRNA sense strand
caaagagccucagccaagu

SEQ ID NO: 2199787 - RNA, 19 nt, Homo sapiens
  misc_RNA (1)...(19): siRNA sense strand
guuuagagauggccugugu

SEQ ID NO: 2199788 - RNA, 19 nt, Homo sapiens
  misc_RNA (1)...(19): siRNA sense strand
gcucaggauugggcuguuu

SEQ ID NO: 2199789 - RNA, 19 nt, Homo sapiens
  misc_RNA (1)...(19): siRNA sense strand
caucguuuguggaauuuga

SEQ ID NO: 2199790 - RNA, 19 nt, Homo sapiens
  misc_RNA (1)...(19): siRNA sense strand
ccaguaaugccauguguga

SEQ ID NO: 2199791 - RNA, 19 nt, Homo sapiens
  misc_RNA (1)...(19): siRNA sense strand
cagaagagaaggaguuuca

SEQ ID NO: 2199792 - RNA, 19 nt, Homo sapiens
  misc_RNA (1)...(19): siRNA sense strand
caccaacacuucuacaucu

SEQ ID NO: 2199793 - RNA, 19 nt, Homo sapiens
  misc_RNA (1)...(19): siRNA sense strand
ggacaagagcuauaugcau

SEQ ID NO: 2199794 - RNA, 19 nt, Homo sapiens
  misc_RNA (1)...(19): siRNA sense strand
ccaaggacccugagugcaa

SEQ ID NO: 2199795 - RNA, 19 nt, Homo sapiens
  misc_RNA (1)...(19): siRNA sense strand
ucacgcagcuccucuugag

SEQ ID NO: 2199796 - RNA, 19 nt, Homo sapiens
  misc_RNA (1)...(19): siRNA sense strand
ugaagcugcugcuguacuu

SEQ ID NO: 2199797 - RNA, 19 nt, Homo sapiens
  misc_RNA (1)...(19): siRNA sense strand
guuucuaggucuuggaauu

SEQ ID NO: 2199798 - RNA, 19 nt, Homo sapiens
  misc_RNA (1)...(19): siRNA sense strand
uuaccaaguuugagugaug

SEQ ID NO: 2199799 - RNA, 19 nt, Homo sapiens
  misc_RNA (1)...(19): siRNA sense strand
gagcagagcgccagcauga

SEQ ID NO: 2199800 - RNA, 19 nt, Homo sapiens
  misc_RNA (1)...(19): siRNA sense strand
ggaaugcucuuugccagaa

SEQ ID NO: 2199801 - RNA, 19 nt, Homo sapiens
  misc_RNA (1)...(19): siRNA sense strand
gaucaggaggcacuuauuu

SEQ ID NO: 2199802 - RNA, 19 nt, Homo sapiens
  misc_RNA (1)...(19): siRNA sense strand
caucauggagggccuauuu

SEQ ID NO: 2199803 - RNA, 19 nt, Homo sapiens
  misc_RNA (1)...(19): siRNA sense strand
aaaccacaauuucuccaaa

SEQ ID NO: 2199804 - RNA, 19 nt, Homo sapiens
  misc_RNA (1)...(19): siRNA sense strand
guaauuggaaugcucuuug

SEQ ID NO: 2199805 - RNA, 19 nt, Homo sapiens
  misc_RNA (1)...(19): siRNA sense strand
ucaggaggcacuuauuuga

SEQ ID NO: 2199806 - RNA, 19 nt, Homo sapiens
  misc_RNA (1)...(19): siRNA sense strand
gcaagccucgacccucuuu

SEQ ID NO: 2199807 - RNA, 19 nt, Homo sapiens
  misc_RNA (1)...(19): siRNA sense strand
gaaugcucuuugccagaaa

SEQ ID NO: 2199808 - RNA, 19 nt, Homo sapiens
  misc_RNA (1)...(19): siRNA sense strand
ucauggagggccuauuuaa

SEQ ID NO: 2199809 - RNA, 19 nt, Homo sapiens
  misc_RNA (1)...(19): siRNA sense strand
aaaggugaguuguaagagu

SEQ ID NO: 2199810 - RNA, 19 nt, Homo sapiens
  misc_RNA (1)...(19): siRNA sense strand
gacaccaucccgcuaaaga

SEQ ID NO: 2199811 - RNA, 19 nt, Homo sapiens
  misc_RNA (1)...(19): siRNA sense strand
gcagagcgccagcaugaac

SEQ ID NO: 2199812 - RNA, 19 nt, Homo sapiens
  misc_RNA (1)...(19): siRNA sense strand
uaaggcgaaaccacaauuu

SEQ ID NO: 2199813 - RNA, 19 nt, Homo sapiens
  misc_RNA (1)...(19): siRNA sense strand
ggaugagccuugggucaca

SEQ ID NO: 2199814 - RNA, 19 nt, Homo sapiens
  misc_RNA (1)...(19): siRNA sense strand
gcccugaagaucugcauga

SEQ ID NO: 2199815 - RNA, 19 nt, Homo sapiens
  misc_RNA (1)...(19): siRNA sense strand
cuugggaccuuugcacuug

SEQ ID NO: 2199816 - RNA, 19 nt, Homo sapiens
  misc_RNA (1)...(19): siRNA sense strand
cgacucuuccgaccugaaa

SEQ ID NO: 2199817 - RNA, 19 nt, Homo sapiens
  misc_RNA (1)...(19): siRNA sense strand
gugacaccaucccgcuaaa

SEQ ID NO: 2199818 - RNA, 19 nt, Homo sapiens
  misc_RNA (1)...(19): siRNA sense strand
ggauguaggaggagcucaa

SEQ ID NO: 2199819 - RNA, 19 nt, Homo sapiens
  misc_RNA (1)...(19): siRNA sense strand
uaauuggaaugcucuuugc

SEQ ID NO: 2199820 - RNA, 19 nt, Homo sapiens
  misc_RNA (1)...(19): siRNA sense strand
ugggucacauggcucauug

SEQ ID NO: 2199821 - RNA, 19 nt, Homo sapiens
  misc_RNA (1)...(19): siRNA sense strand
caaaaggugaguuguaaga

SEQ ID NO: 2199822 - RNA, 19 nt, Homo sapiens
  misc_RNA (1)...(19): siRNA sense strand
gaccuuugcacuugcuguu

SEQ ID NO: 2199823 - RNA, 19 nt, Homo sapiens
  misc_RNA (1)...(19): siRNA sense strand
uccaaaaggugaguuguaa

SEQ ID NO: 2199824 - RNA, 19 nt, Homo sapiens
  misc_RNA (1)...(19): siRNA sense strand
uuaaggcgaaaccacaauu

SEQ ID NO: 2199825 - RNA, 19 nt, Homo sapiens
  misc_RNA (1)...(19): siRNA sense strand
acaccaucccgcuaaagaa

SEQ ID NO: 2199826 - RNA, 19 nt, Homo sapiens
  misc_RNA (1)...(19): siRNA sense strand
aaucccugcuucaguguca

SEQ ID NO: 2199827 - RNA, 19 nt, Homo sapiens
  misc_RNA (1)...(19): siRNA sense strand
caaagaagcuggcaaguaa

SEQ ID NO: 2199828 - RNA, 19 nt, Homo sapiens
  misc_RNA (1)...(19): siRNA sense strand
caaaugagcuuucuaagga

SEQ ID NO: 2199829 - RNA, 19 nt, Homo sapiens
  misc_RNA (1)...(19): siRNA sense strand
gaaagaaagucuacaagau

SEQ ID NO: 2199830 - RNA, 19 nt, Homo sapiens
  misc_RNA (1)...(19): siRNA sense strand
gaaagugcuugaugagaaa

SEQ ID NO: 2199831 - RNA, 19 nt, Homo sapiens
  misc_RNA (1)...(19): siRNA sense strand
gcaauaagccugucuccaa

SEQ ID NO: 2199832 - RNA, 19 nt, Homo sapiens
  misc_RNA (1)...(19): siRNA sense strand
gagguaagguugauggaaa

SEQ ID NO: 2199833 - RNA, 19 nt, Homo sapiens
  misc_RNA (1)...(19): siRNA sense strand
gcaaagaagcuggcaagua

SEQ ID NO: 2199834 - RNA, 19 nt, Homo sapiens
  misc_RNA (1)...(19): siRNA sense strand
gcaaagcucccaagcacua

SEQ ID NO: 2199835 - RNA, 19 nt, Homo sapiens
  misc_RNA (1)...(19): siRNA sense strand
ugaaagugcuugaugagaa

SEQ ID NO: 2199836 - RNA, 19 nt, Homo sapiens
  misc_RNA (1)...(19): siRNA sense strand
ggaaagcccuccaaaugag

SEQ ID NO: 2199837 - RNA, 19 nt, Homo sapiens
  misc_RNA (1)...(19): siRNA sense strand
caauaagccugucuccaaa

SEQ ID NO: 2199838 - RNA, 19 nt, Homo sapiens
  misc_RNA (1)...(19): siRNA sense strand
ggaaagaaagucuacaaga

SEQ ID NO: 2199839 - RNA, 19 nt, Homo sapiens
  misc_RNA (1)...(19): siRNA sense strand
caaagcugcuggagagaaa

SEQ ID NO: 2199840 - RNA, 19 nt, Homo sapiens
  misc_RNA (1)...(19): siRNA sense strand
caggacagcuaaacggaua

SEQ ID NO: 2199841 - RNA, 19 nt, Homo sapiens
  misc_RNA (1)...(19): siRNA sense strand
gagagaagcaguuaugaga

SEQ ID NO: 2199842 - RNA, 19 nt, Homo sapiens
  misc_RNA (1)...(19): siRNA sense strand
gcagacagcuaucuaacuc

SEQ ID NO: 2199843 - RNA, 19 nt, Homo sapiens
  misc_RNA (1)...(19): siRNA sense strand
gaaagugugucuggaggaa

SEQ ID NO: 2199844 - RNA, 19 nt, Homo sapiens
  misc_RNA (1)...(19): siRNA sense strand
cacaugcuguuuacgauua

SEQ ID NO: 2199845 - RNA, 19 nt, Homo sapiens
  misc_RNA (1)...(19): siRNA sense strand
ggagaagcauggcgaguca

SEQ ID NO: 2199846 - RNA, 19 nt, Homo sapiens
  misc_RNA (1)...(19): siRNA sense strand
gaaauaagaagugcacaga

SEQ ID NO: 2199847 - RNA, 19 nt, Homo sapiens
  misc_RNA (1)...(19): siRNA sense strand
ccaaugggcuugaggaaag

SEQ ID NO: 2199848 - RNA, 19 nt, Homo sapiens
  misc_RNA (1)...(19): siRNA sense strand
caaauucgcuccucuucca

SEQ ID NO: 2199849 - RNA, 19 nt, Homo sapiens
  misc_RNA (1)...(19): siRNA sense strand
guacaucgacacccacuaa

SEQ ID NO: 2199850 - RNA, 19 nt, Homo sapiens
  misc_RNA (1)...(19): siRNA sense strand
agaggaagcuaauuucaga

SEQ ID NO: 2199851 - RNA, 19 nt, Homo sapiens
  misc_RNA (1)...(19): siRNA sense strand
ggaaggaugagcugcagua

SEQ ID NO: 2199852 - RNA, 19 nt, Homo sapiens
  misc_RNA (1)...(19): siRNA sense strand
cagaagaugugguuuacug

SEQ ID NO: 2199853 - RNA, 19 nt, Homo sapiens
  misc_RNA (1)...(19): siRNA sense strand
guuaagagcacauacaguu

SEQ ID NO: 2199854 - RNA, 19 nt, Homo sapiens
  misc_RNA (1)...(19): siRNA sense strand
guaccuuucugcacaguga

SEQ ID NO: 2199855 - RNA, 19 nt, Homo sapiens
  misc_RNA (1)...(19): siRNA sense strand
cagcagaggaagcuaauuu

SEQ ID NO: 2199856 - RNA, 19 nt, Homo sapiens
  misc_RNA (1)...(19): siRNA sense strand
uccaacagcuacccaagua

SEQ ID NO: 2199857 - RNA, 19 nt, Homo sapiens
  misc_RNA (1)...(19): siRNA sense strand
cagcagaagaugugguuua

SEQ ID NO: 2199858 - RNA, 19 nt, Homo sapiens
  misc_RNA (1)...(19): siRNA sense strand
gagaagcaguuaugagaac

SEQ ID NO: 2199859 - RNA, 19 nt, Homo sapiens
  misc_RNA (1)...(19): siRNA sense strand
ccacaaagaggaggaauug

SEQ ID NO: 2199860 - RNA, 19 nt, Homo sapiens
  misc_RNA (1)...(19): siRNA sense strand
ccagaucugugucccaaga

SEQ ID NO: 2199861 - RNA, 19 nt, Homo sapiens
  misc_RNA (1)...(19): siRNA sense strand
gcaaguaagaggaggaaga

SEQ ID NO: 2199862 - RNA, 19 nt, Homo sapiens
  misc_RNA (1)...(19): siRNA sense strand
gaaggagcccagugaaugu

SEQ ID NO: 2199863 - RNA, 19 nt, Homo sapiens
  misc_RNA (1)...(19): siRNA sense strand
gagcgguucugcagacuca

SEQ ID NO: 2199864 - RNA, 19 nt, Homo sapiens
  misc_RNA (1)...(19): siRNA sense strand
gggaagcauugcaaagaga

SEQ ID NO: 2199865 - RNA, 19 nt, Homo sapiens
  misc_RNA (1)...(19): siRNA sense strand
agaaugggcucuccagauc

SEQ ID NO: 2199866 - RNA, 19 nt, Homo sapiens
  misc_RNA (1)...(19): siRNA sense strand
gaacaaggagguggaagga

SEQ ID NO: 2199867 - RNA, 19 nt, Homo sapiens
  misc_RNA (1)...(19): siRNA sense strand
uccaaaguaucaacacuaa

SEQ ID NO: 2199868 - RNA, 19 nt, Homo sapiens
  misc_RNA (1)...(19): siRNA sense strand
gacaacacccucagagcua

SEQ ID NO: 2199869 - RNA, 19 nt, Homo sapiens
  misc_RNA (1)...(19): siRNA sense strand
gaaggcaucagcagaggaa

SEQ ID NO: 2199870 - RNA, 19 nt, Homo sapiens
  misc_RNA (1)...(19): siRNA sense strand
gcucacaaccugauucuca

SEQ ID NO: 2199871 - RNA, 19 nt, Homo sapiens
  misc_RNA (1)...(19): siRNA sense strand
ggaaugcccaccaaccaaa

SEQ ID NO: 2199872 - RNA, 19 nt, Homo sapiens
  misc_RNA (1)...(19): siRNA sense strand
ggacacgaccuugcuaaga

SEQ ID NO: 2199873 - RNA, 19 nt, Homo sapiens
  misc_RNA (1)...(19): siRNA sense strand
gaagagcaaacaccagguu

SEQ ID NO: 2199874 - RNA, 19 nt, Homo sapiens
  misc_RNA (1)...(19): siRNA sense strand
ccagguauuugcuguggaa

SEQ ID NO: 2199875 - RNA, 19 nt, Homo sapiens
  misc_RNA (1)...(19): siRNA sense strand
ggaaagcaagaaccuguga

SEQ ID NO: 2199876 - RNA, 19 nt, Homo sapiens
  misc_RNA (1)...(19): siRNA sense strand
gacacgaccuugcuaagag

SEQ ID NO: 2199877 - RNA, 19 nt, Homo sapiens
  misc_RNA (1)...(19): siRNA sense strand
ucaauccuuugccucauuu

SEQ ID NO: 2199878 - RNA, 19 nt, Homo sapiens
  misc_RNA (1)...(19): siRNA sense strand
acacacauuugaaccagaa

SEQ ID NO: 2199879 - RNA, 19 nt, Homo sapiens
  misc_RNA (1)...(19): siRNA sense strand
gcaguuaugagaacaagga

SEQ ID NO: 2199880 - RNA, 19 nt, Homo sapiens
  misc_RNA (1)...(19): siRNA sense strand
ggccuaaggagcagcaaua

SEQ ID NO: 2199881 - RNA, 19 nt, Homo sapiens
  misc_RNA (1)...(19): siRNA sense strand
caccagcucuucagaucaa

SEQ ID NO: 2199882 - RNA, 19 nt, Homo sapiens
  misc_RNA (1)...(19): siRNA sense strand
ugccaagccucaaagguaa

SEQ ID NO: 2199883 - RNA, 19 nt, Homo sapiens
  misc_RNA (1)...(19): siRNA sense strand
gguauuugcuguggaagga

SEQ ID NO: 2199884 - RNA, 19 nt, Homo sapiens
  misc_RNA (1)...(19): siRNA sense strand
ccagagaggcccaccuuug

SEQ ID NO: 2199885 - RNA, 19 nt, Homo sapiens
  misc_RNA (1)...(19): siRNA sense strand
ccucagcaguggccacaaa

SEQ ID NO: 2199886 - RNA, 19 nt, Homo sapiens
  misc_RNA (1)...(19): siRNA sense strand
ucaaagguaaggccaaauu

SEQ ID NO: 2199887 - RNA, 19 nt, Homo sapiens
  misc_RNA (1)...(19): siRNA sense strand
cuaaacggauaccaagaga

SEQ ID NO: 2199888 - RNA, 19 nt, Homo sapiens
  misc_RNA (1)...(19): siRNA sense strand
aaaucaagaccuucuauga

SEQ ID NO: 2199889 - RNA, 19 nt, Homo sapiens
  misc_RNA (1)...(19): siRNA sense strand
gcacaugcuguuuacgauu

SEQ ID NO: 2199890 - RNA, 19 nt, Homo sapiens
  misc_RNA (1)...(19): siRNA sense strand
ggaaggagaguuggagaug

SEQ ID NO: 2199891 - RNA, 19 nt, Homo sapiens
  misc_RNA (1)...(19): siRNA sense strand
uaagguugauggaaagcaa

SEQ ID NO: 2199892 - RNA, 19 nt, Homo sapiens
  misc_RNA (1)...(19): siRNA sense strand
caaugacacggccaccuua

SEQ ID NO: 2199893 - RNA, 19 nt, Homo sapiens
  misc_RNA (1)...(19): siRNA sense strand
gggugaggauccuggguuu

SEQ ID NO: 2199894 - RNA, 19 nt, Homo sapiens
  misc_RNA (1)...(19): siRNA sense strand
gcagaggaagcuaauuuca

SEQ ID NO: 2199895 - RNA, 19 nt, Homo sapiens
  misc_RNA (1)...(19): siRNA sense strand
gcaaagagaaagggaaagu

SEQ ID NO: 2199896 - RNA, 19 nt, Homo sapiens
  misc_RNA (1)...(19): siRNA sense strand
aggaugagcugcaguacug

SEQ ID NO: 2199897 - RNA, 19 nt, Homo sapiens
  misc_RNA (1)...(19): siRNA sense strand
gaugagaaggagaauguga

SEQ ID NO: 2199898 - RNA, 19 nt, Homo sapiens
  misc_RNA (1)...(19): siRNA sense strand
ggagguggaaggagaguug

SEQ ID NO: 2199899 - RNA, 19 nt, Homo sapiens
  misc_RNA (1)...(19): siRNA sense strand
gagaggcccaccuuuguau

SEQ ID NO: 2199900 - RNA, 19 nt, Homo sapiens
  misc_RNA (1)...(19): siRNA sense strand
ggacacauccuuccaugac

SEQ ID NO: 2199901 - RNA, 19 nt, Homo sapiens
  misc_RNA (1)...(19): siRNA sense strand
cugcuucgauucugccuuu

SEQ ID NO: 2199902 - RNA, 19 nt, Homo sapiens
  misc_RNA (1)...(19): siRNA sense strand
gcaguacugugccuuaagc

SEQ ID NO: 2199903 - RNA, 19 nt, Homo sapiens
  misc_RNA (1)...(19): siRNA sense strand
gcugagagaagcaguuaug

SEQ ID NO: 2199904 - RNA, 19 nt, Homo sapiens
  misc_RNA (1)...(19): siRNA sense strand
agacagcuaucuaacucuu

SEQ ID NO: 2199905 - RNA, 19 nt, Homo sapiens
  misc_RNA (1)...(19): siRNA sense strand
ccucaccucucuugaaagu

SEQ ID NO: 2199906 - RNA, 19 nt, Homo sapiens
  misc_RNA (1)...(19): siRNA sense strand
gagaaggagcccagugaau

SEQ ID NO: 2199907 - RNA, 19 nt, Homo sapiens
  misc_RNA (1)...(19): siRNA sense strand
gcaagcacgcccuggauuc

SEQ ID NO: 2199908 - RNA, 19 nt, Homo sapiens
  misc_RNA (1)...(19): siRNA sense strand
gagggugcccgcugaaguu

SEQ ID NO: 2199909 - RNA, 19 nt, Homo sapiens
  misc_RNA (1)...(19): siRNA sense strand
guacugugccuuaagcaau

SEQ ID NO: 2199910 - RNA, 19 nt, Homo sapiens
  misc_RNA (1)...(19): siRNA sense strand
ccucaaagguaaggccaaa

SEQ ID NO: 2199911 - RNA, 19 nt, Homo sapiens
  misc_RNA (1)...(19): siRNA sense strand
ggacuucagaacacacauu

SEQ ID NO: 2199912 - RNA, 19 nt, Homo sapiens
  misc_RNA (1)...(19): siRNA sense strand
gaggaaaaguaccccaaaa

SEQ ID NO: 2199913 - RNA, 19 nt, Homo sapiens
  misc_RNA (1)...(19): siRNA sense strand
uagaggacuuugccacaga

SEQ ID NO: 2199914 - RNA, 19 nt, Homo sapiens
  misc_RNA (1)...(19): siRNA sense strand
gggaguacuuugucuucga

SEQ ID NO: 2199915 - RNA, 19 nt, Homo sapiens
  misc_RNA (1)...(19): siRNA sense strand
gagguucauugcuggaugu

SEQ ID NO: 2199916 - RNA, 19 nt, Homo sapiens
  misc_RNA (1)...(19): siRNA sense strand
cuucagaacacacauuuga

SEQ ID NO: 2199917 - RNA, 19 nt, Homo sapiens
  misc_RNA (1)...(19): siRNA sense strand
aagaaagucuacaagauac

SEQ ID NO: 2199918 - RNA, 19 nt, Homo sapiens
  misc_RNA (1)...(19): siRNA sense strand
aagccugucuccaaaguau

SEQ ID NO: 2199919 - RNA, 19 nt, Homo sapiens
  misc_RNA (1)...(19): siRNA sense strand
ccagugagagggcgaauuc

SEQ ID NO: 2199920 - RNA, 19 nt, Homo sapiens
  misc_RNA (1)...(19): siRNA sense strand
cgacagguguuugggacuu

SEQ ID NO: 2199921 - RNA, 19 nt, Homo sapiens
  misc_RNA (1)...(19): siRNA sense strand
ugaagugcauggccaacga

SEQ ID NO: 2199922 - RNA, 19 nt, Homo sapiens
  misc_RNA (1)...(19): siRNA sense strand
ggagagacccgcugaugac

SEQ ID NO: 2199923 - RNA, 19 nt, Homo sapiens
  misc_RNA (1)...(19): siRNA sense strand
aggaaagcccuccaaauga

SEQ ID NO: 2199924 - RNA, 19 nt, Homo sapiens
  misc_RNA (1)...(19): siRNA sense strand
guacuuugucuucgacuug

SEQ ID NO: 2199925 - RNA, 19 nt, Homo sapiens
  misc_RNA (1)...(19): siRNA sense strand
ggaagcauugcaaagagaa

SEQ ID NO: 2199926 - RNA, 19 nt, Homo sapiens
  misc_RNA (1)...(19): siRNA sense strand
ugaggaggaagauguguuu

SEQ ID NO: 2199927 - RNA, 19 nt, Homo sapiens
  misc_RNA (1)...(19): siRNA sense strand
gagaagagcucgccaugaa

SEQ ID NO: 2199928 - RNA, 19 nt, Homo sapiens
  misc_RNA (1)...(19): siRNA sense strand
gccaauagcugccuaaaga

SEQ ID NO: 2199929 - RNA, 19 nt, Homo sapiens
  misc_RNA (1)...(19): siRNA sense strand
agacugaacugcaaauuga

SEQ ID NO: 2199930 - RNA, 19 nt, Homo sapiens
  misc_RNA (1)...(19): siRNA sense strand
gagacaaagccuagcauua

SEQ ID NO: 2199931 - RNA, 19 nt, Homo sapiens
  misc_RNA (1)...(19): siRNA sense strand
gaacagaagggccaaaugg

SEQ ID NO: 2199932 - RNA, 19 nt, Homo sapiens
  misc_RNA (1)...(19): siRNA sense strand
gagugcagcuugccaauag

SEQ ID NO: 2199933 - RNA, 19 nt, Homo sapiens
  misc_RNA (1)...(19): siRNA sense strand
ccauguggcuucccucaaa

SEQ ID NO: 2199934 - RNA, 19 nt, Homo sapiens
  misc_RNA (1)...(19): siRNA sense strand
gaacagagcgaggcagaga

SEQ ID NO: 2199935 - RNA, 19 nt, Homo sapiens
  misc_RNA (1)...(19): siRNA sense strand
ggacgacguucacucuuca

SEQ ID NO: 2199936 - RNA, 19 nt, Homo sapiens
  misc_RNA (1)...(19): siRNA sense strand
gaacugcaaauugagauaa

SEQ ID NO: 2199937 - RNA, 19 nt, Homo sapiens
  misc_RNA (1)...(19): siRNA sense strand
caaacacacuauccagaug

SEQ ID NO: 2199938 - RNA, 19 nt, Homo sapiens
  misc_RNA (1)...(19): siRNA sense strand
gaaaauaaaccucacagaa

SEQ ID NO: 2199939 - RNA, 19 nt, Homo sapiens
  misc_RNA (1)...(19): siRNA sense strand
gggccaagcuggagaaggu

SEQ ID NO: 2199940 - RNA, 19 nt, Homo sapiens
  misc_RNA (1)...(19): siRNA sense strand
ccuaaagacugaacugcaa

SEQ ID NO: 2199941 - RNA, 19 nt, Homo sapiens
  misc_RNA (1)...(19): siRNA sense strand
gaccaagcccggaguaaga

SEQ ID NO: 2199942 - RNA, 19 nt, Homo sapiens
  misc_RNA (1)...(19): siRNA sense strand
cacaggcacugcaaccuuu

SEQ ID NO: 2199943 - RNA, 19 nt, Homo sapiens
  misc_RNA (1)...(19): siRNA sense strand
agacaaagccuagcauuag

SEQ ID NO: 2199944 - RNA, 19 nt, Homo sapiens
  misc_RNA (1)...(19): siRNA sense strand
ccaaauggaggaagacaga

SEQ ID NO: 2199945 - RNA, 19 nt, Homo sapiens
  misc_RNA (1)...(19): siRNA sense strand
gcacaggcacugcaaccuu

SEQ ID NO: 2199946 - RNA, 19 nt, Homo sapiens
  misc_RNA (1)...(19): siRNA sense strand
gagacuacuuccugagaca

SEQ ID NO: 2199947 - RNA, 19 nt, Homo sapiens
  misc_RNA (1)...(19): siRNA sense strand
gaagagcucgccaugaaaa

SEQ ID NO: 2199948 - RNA, 19 nt, Homo sapiens
  misc_RNA (1)...(19): siRNA sense strand
ccaaacacacuauccagau

SEQ ID NO: 2199949 - RNA, 19 nt, Homo sapiens
  misc_RNA (1)...(19): siRNA sense strand
auucagaaguggaagauca

SEQ ID NO: 2199950 - RNA, 19 nt, Homo sapiens
  misc_RNA (1)...(19): siRNA sense strand
gacaaagccuagcauuagc

SEQ ID NO: 2199951 - RNA, 19 nt, Homo sapiens
  misc_RNA (1)...(19): siRNA sense strand
cauaacuucucccugaaag

SEQ ID NO: 2199952 - RNA, 19 nt, Homo sapiens
  misc_RNA (1)...(19): siRNA sense strand
cagaaguggaagaucauaa

SEQ ID NO: 2199953 - RNA, 19 nt, Homo sapiens
  misc_RNA (1)...(19): siRNA sense strand
cggacgacguucacucuuc

SEQ ID NO: 2199954 - RNA, 19 nt, Homo sapiens
  misc_RNA (1)...(19): siRNA sense strand
gcucagcuccacauguuca

SEQ ID NO: 2199955 - RNA, 19 nt, Homo sapiens
  misc_RNA (1)...(19): siRNA sense strand
ggaccaagcccggaguaag

SEQ ID NO: 2199956 - RNA, 19 nt, Homo sapiens
  misc_RNA (1)...(19): siRNA sense strand
ggauuuugaugacggguuu

SEQ ID NO: 2199957 - RNA, 19 nt, Homo sapiens
  misc_RNA (1)...(19): siRNA sense strand
uaacuucucccugaaaggu

SEQ ID NO: 2199958 - RNA, 19 nt, Homo sapiens
  misc_RNA (1)...(19): siRNA sense strand
gagcucgccaugaaaauaa

SEQ ID NO: 2199959 - RNA, 19 nt, Homo sapiens
  misc_RNA (1)...(19): siRNA sense strand
gaaguggaagaucauaacu

SEQ ID NO: 2199960 - RNA, 19 nt, Homo sapiens
  misc_RNA (1)...(19): siRNA sense strand
uauugagcauucagaagug

SEQ ID NO: 2199961 - RNA, 19 nt, Homo sapiens
  misc_RNA (1)...(19): siRNA sense strand
ugaacugcaaauugagaua

SEQ ID NO: 2199962 - RNA, 19 nt, Homo sapiens
  misc_RNA (1)...(19): siRNA sense strand
cagaugucuucaccagaga

SEQ ID NO: 2199963 - RNA, 19 nt, Homo sapiens
  misc_RNA (1)...(19): siRNA sense strand
auagcugccuaaagacuga

SEQ ID NO: 2199964 - RNA, 19 nt, Homo sapiens
  misc_RNA (1)...(19): siRNA sense strand
aaacacacuauccagaugu

SEQ ID NO: 2199965 - RNA, 19 nt, Homo sapiens
  misc_RNA (1)...(19): siRNA sense strand
gacaccuccuccagugaga

SEQ ID NO: 2199966 - RNA, 19 nt, Homo sapiens
  misc_RNA (1)...(19): siRNA sense strand
ugagacaaagccuagcauu

SEQ ID NO: 2199967 - RNA, 19 nt, Homo sapiens
  misc_RNA (1)...(19): siRNA sense strand
cuaaagacugaacugcaaa

SEQ ID NO: 2199968 - RNA, 19 nt, Homo sapiens
  misc_RNA (1)...(19): siRNA sense strand
ucauaacuucucccugaaa

SEQ ID NO: 2199969 - RNA, 19 nt, Homo sapiens
  misc_RNA (1)...(19): siRNA sense strand
gcaaauugagauaaaugac

SEQ ID NO: 2199970 - RNA, 19 nt, Homo sapiens
  misc_RNA (1)...(19): siRNA sense strand
uaaagacugaacugcaaau

SEQ ID NO: 2199971 - RNA, 19 nt, Homo sapiens
  misc_RNA (1)...(19): siRNA sense strand
aagacugaacugcaaauug

SEQ ID NO: 2199972 - RNA, 19 nt, Homo sapiens
  misc_RNA (1)...(19): siRNA sense strand
gagcgaggcagagaagagu

SEQ ID NO: 2199973 - RNA, 19 nt, Homo sapiens
  misc_RNA (1)...(19): siRNA sense strand
gaagcucucgaggccguuu

SEQ ID NO: 2199974 - RNA, 19 nt, Homo sapiens
  misc_RNA (1)...(19): siRNA sense strand
gaaaggugcaaggguuugg

SEQ ID NO: 2199975 - RNA, 19 nt, Homo sapiens
  misc_RNA (1)...(19): siRNA sense strand
aaaauaaaccucacagaag

SEQ ID NO: 2199976 - RNA, 19 nt, Homo sapiens
  misc_RNA (1)...(19): siRNA sense strand
agaagagcucgccaugaaa

SEQ ID NO: 2199977 - RNA, 19 nt, Homo sapiens
  misc_RNA (1)...(19): siRNA sense strand
gacuacuuccugagacaaa

SEQ ID NO: 2199978 - RNA, 19 nt, Homo sapiens
  misc_RNA (1)...(19): siRNA sense strand
ucuccuuccuucccaccua

SEQ ID NO: 2199979 - RNA, 19 nt, Homo sapiens
  misc_RNA (1)...(19): siRNA sense strand
ucagaaguggaagaucaua

SEQ ID NO: 2199980 - RNA, 19 nt, Homo sapiens
  misc_RNA (1)...(19): siRNA sense strand
uuauugagcauucagaagu

SEQ ID NO: 2199981 - RNA, 19 nt, Homo sapiens
  misc_RNA (1)...(19): siRNA sense strand
gugcaaggguuugguucca

SEQ ID NO: 2199982 - RNA, 19 nt, Homo sapiens
  misc_RNA (1)...(19): siRNA sense strand
ggcagagaagaguguauga

SEQ ID NO: 2199983 - RNA, 19 nt, Homo sapiens
  misc_RNA (1)...(19): siRNA sense strand
agaccucucccaccaagga

SEQ ID NO: 2199984 - RNA, 19 nt, Homo sapiens
  misc_RNA (1)...(19): siRNA sense strand
gcaaagaccuggacuucua

SEQ ID NO: 2199985 - RNA, 19 nt, Homo sapiens
  misc_RNA (1)...(19): siRNA sense strand
gcaagacccugaaguucua

SEQ ID NO: 2199986 - RNA, 19 nt, Homo sapiens
  misc_RNA (1)...(19): siRNA sense strand
guacugggaugagaaguug

SEQ ID NO: 2199987 - RNA, 19 nt, Homo sapiens
  misc_RNA (1)...(19): siRNA sense strand
gaaguucugugaccuguac

SEQ ID NO: 2199988 - RNA, 19 nt, Homo sapiens
  misc_RNA (1)...(19): siRNA sense strand
gaaagggcagcuagaagaa

SEQ ID NO: 2199989 - RNA, 19 nt, Homo sapiens
  misc_RNA (1)...(19): siRNA sense strand
gcagcuagaagaaaugaaa

SEQ ID NO: 2199990 - RNA, 19 nt, Homo sapiens
  misc_RNA (1)...(19): siRNA sense strand
ugagagaauuccagaagga

SEQ ID NO: 2199991 - RNA, 19 nt, Homo sapiens
  misc_RNA (1)...(19): siRNA sense strand
gggccgacguccacaacua

SEQ ID NO: 2199992 - RNA, 19 nt, Homo sapiens
  misc_RNA (1)...(19): siRNA sense strand
ggaggaauuugccuucgau

SEQ ID NO: 2199993 - RNA, 19 nt, Homo sapiens
  misc_RNA (1)...(19): siRNA sense strand
caucugcgcugcccguaga

SEQ ID NO: 2199994 - RNA, 19 nt, Homo sapiens
  misc_RNA (1)...(19): siRNA sense strand
gaucucaccuuugccacuu

SEQ ID NO: 2199995 - RNA, 19 nt, Homo sapiens
  misc_RNA (1)...(19): siRNA sense strand
gcacccagccuaccugugu

SEQ ID NO: 2199996 - RNA, 19 nt, Homo sapiens
  misc_RNA (1)...(19): siRNA sense strand
ugaaagggcagcuagaaga

SEQ ID NO: 2199997 - RNA, 19 nt, Homo sapiens
  misc_RNA (1)...(19): siRNA sense strand
guacaucuucgccuugaaa

SEQ ID NO: 2199998 - RNA, 19 nt, Homo sapiens
  misc_RNA (1)...(19): siRNA sense strand
aggagaggcugguaacuga

SEQ ID NO: 2199999 - RNA, 19 nt, Homo sapiens
  misc_RNA (1)...(19): siRNA sense strand
gaguacaucuucgccuuga

SEQ ID NO: 2200000 - RNA, 19 nt, Homo sapiens
  misc_RNA (1)...(19): siRNA sense strand
gcacugacccggagguucu

SEQ ID NO: 2200001 - RNA, 19 nt, Homo sapiens
  misc_RNA (1)...(19): siRNA sense strand
gcuggaggcucugaucaug

SEQ ID NO: 2200002 - RNA, 19 nt, Homo sapiens
  misc_RNA (1)...(19): siRNA sense strand
ggaacgugaugaccagagu

SEQ ID NO: 2200003 - RNA, 19 nt, Homo sapiens
  misc_RNA (1)...(19): siRNA sense strand
gcagaggagaggcugguaa

SEQ ID NO: 2200004 - RNA, 19 nt, Homo sapiens
  misc_RNA (1)...(19): siRNA sense strand
gaugagagaauuccagaag

SEQ ID NO: 2200005 - RNA, 19 nt, Homo sapiens
  misc_RNA (1)...(19): siRNA sense strand
gaaaagaggaacaaagguu

SEQ ID NO: 2200006 - RNA, 19 nt, Homo sapiens
  misc_RNA (1)...(19): siRNA sense strand
accagaaacucuuacagaa

SEQ ID NO: 2200007 - RNA, 19 nt, Homo sapiens
  misc_RNA (1)...(19): siRNA sense strand
ucaagaccaugcuguccaa

SEQ ID NO: 2200008 - RNA, 19 nt, Homo sapiens
  misc_RNA (1)...(19): siRNA sense strand
aaagccagcugcccauauc

SEQ ID NO: 2200009 - RNA, 19 nt, Homo sapiens
  misc_RNA (1)...(19): siRNA sense strand
gggagaaggugaggagaag

SEQ ID NO: 2200010 - RNA, 19 nt, Homo sapiens
  misc_RNA (1)...(19): siRNA sense strand
gagaggcugguaacugaaa

SEQ ID NO: 2200011 - RNA, 19 nt, Homo sapiens
  misc_RNA (1)...(19): siRNA sense strand
ggacucggacgcacuguca

SEQ ID NO: 2200012 - RNA, 19 nt, Homo sapiens
  misc_RNA (1)...(19): siRNA sense strand
ucggagcgcugcaggaugu

SEQ ID NO: 2200013 - RNA, 19 nt, Homo sapiens
  misc_RNA (1)...(19): siRNA sense strand
ugaaauccagggugcaauu

SEQ ID NO: 2200014 - RNA, 19 nt, Homo sapiens
  misc_RNA (1)...(19): siRNA sense strand
aaaagaaacuaccgcaaga

SEQ ID NO: 2200015 - RNA, 19 nt, Homo sapiens
  misc_RNA (1)...(19): siRNA sense strand
cagggacgaugagagaauu

SEQ ID NO: 2200016 - RNA, 19 nt, Homo sapiens
  misc_RNA (1)...(19): siRNA sense strand
ggccggaccuugagagcau

SEQ ID NO: 2200017 - RNA, 19 nt, Homo sapiens
  misc_RNA (1)...(19): siRNA sense strand
caggacagcccgagacuuc

SEQ ID NO: 2200018 - RNA, 19 nt, Homo sapiens
  misc_RNA (1)...(19): siRNA sense strand
aacagcagcucaugaugga

SEQ ID NO: 2200019 - RNA, 19 nt, Homo sapiens
  misc_RNA (1)...(19): siRNA sense strand
uaccagaaacucuuacaga

SEQ ID NO: 2200020 - RNA, 19 nt, Homo sapiens
  misc_RNA (1)...(19): siRNA sense strand
gaggagaggcugguaacug

SEQ ID NO: 2200021 - RNA, 19 nt, Homo sapiens
  misc_RNA (1)...(19): siRNA sense strand
gaaauccagggugcaauuc

SEQ ID NO: 2200022 - RNA, 19 nt, Homo sapiens
  misc_RNA (1)...(19): siRNA sense strand
aagggcagcuagaagaaau

SEQ ID NO: 2200023 - RNA, 19 nt, Homo sapiens
  misc_RNA (1)...(19): siRNA sense strand
gaccuguacugggaugaga

SEQ ID NO: 2200024 - RNA, 19 nt, Homo sapiens
  misc_RNA (1)...(19): siRNA sense strand
gagaccaucagccuccaaa

SEQ ID NO: 2200025 - RNA, 19 nt, Homo sapiens
  misc_RNA (1)...(19): siRNA sense strand
ccauuguccucgcgcagaa

SEQ ID NO: 2200026 - RNA, 19 nt, Homo sapiens
  misc_RNA (1)...(19): siRNA sense strand
aaaauggccuuucuagcuu

SEQ ID NO: 2200027 - RNA, 19 nt, Homo sapiens
  misc_RNA (1)...(19): siRNA sense strand
caaagguuccgacgucaag

SEQ ID NO: 2200028 - RNA, 19 nt, Homo sapiens
  misc_RNA (1)...(19): siRNA sense strand
ccagaaacucuuacagaag

SEQ ID NO: 2200029 - RNA, 19 nt, Homo sapiens
  misc_RNA (1)...(19): siRNA sense strand
ggaacagcagcucaugaug

SEQ ID NO: 2200030 - RNA, 19 nt, Homo sapiens
  misc_RNA (1)...(19): siRNA sense strand
gaucccaccuggaguugcu

SEQ ID NO: 2200031 - RNA, 19 nt, Homo sapiens
  misc_RNA (1)...(19): siRNA sense strand
gagacgcccucaggagaag

SEQ ID NO: 2200032 - RNA, 19 nt, Homo sapiens
  misc_RNA (1)...(19): siRNA sense strand
gaaaaggccucuguguacu

SEQ ID NO: 2200033 - RNA, 19 nt, Homo sapiens
  misc_RNA (1)...(19): siRNA sense strand
augagaaguugcugcagaa

SEQ ID NO: 2200034 - RNA, 19 nt, Homo sapiens
  misc_RNA (1)...(19): siRNA sense strand
aaaggccucuguguacugu

SEQ ID NO: 2200035 - RNA, 19 nt, Homo sapiens
  misc_RNA (1)...(19): siRNA sense strand
cugcagaaccucuuuaagg

SEQ ID NO: 2200036 - RNA, 19 nt, Homo sapiens
  misc_RNA (1)...(19): siRNA sense strand
gcacuucaagcccauuguc

SEQ ID NO: 2200037 - RNA, 19 nt, Homo sapiens
  misc_RNA (1)...(19): siRNA sense strand
ugcggaaggugcagacguu

SEQ ID NO: 2200038 - RNA, 19 nt, Homo sapiens
  misc_RNA (1)...(19): siRNA sense strand
cggcaaagaccuggacuuc

SEQ ID NO: 2200039 - RNA, 19 nt, Homo sapiens
  misc_RNA (1)...(19): siRNA sense strand
ccagcgggaacguguguuu

SEQ ID NO: 2200040 - RNA, 19 nt, Homo sapiens
  misc_RNA (1)...(19): siRNA sense strand
ugaccagaguccagacagu

SEQ ID NO: 2200041 - RNA, 19 nt, Homo sapiens
  misc_RNA (1)...(19): siRNA sense strand
ggagaggcugguaacugaa

SEQ ID NO: 2200042 - RNA, 19 nt, Homo sapiens
  misc_RNA (1)...(19): siRNA sense strand
ucaucgcgcugugugaaga

SEQ ID NO: 2200043 - RNA, 19 nt, Homo sapiens
  misc_RNA (1)...(19): siRNA sense strand
gaaacucuuacagaaggaa

SEQ ID NO: 2200044 - RNA, 19 nt, Homo sapiens
  misc_RNA (1)...(19): siRNA sense strand
agaaguugcugcagaaccu

SEQ ID NO: 2200045 - RNA, 19 nt, Homo sapiens
  misc_RNA (1)...(19): siRNA sense strand
ggacgaggagaacgugucu

SEQ ID NO: 2200046 - RNA, 19 nt, Homo sapiens
  misc_RNA (1)...(19): siRNA sense strand
uuccagagccugugcauca

SEQ ID NO: 2200047 - RNA, 19 nt, Homo sapiens
  misc_RNA (1)...(19): siRNA sense strand
gaaaagccagcugcccaua

SEQ ID NO: 2200048 - RNA, 19 nt, Homo sapiens
  misc_RNA (1)...(19): siRNA sense strand
gggcagcuagaagaaauga

SEQ ID NO: 2200049 - RNA, 19 nt, Homo sapiens
  misc_RNA (1)...(19): siRNA sense strand
ugaccgggaacaccuuuga

SEQ ID NO: 2200050 - RNA, 19 nt, Homo sapiens
  misc_RNA (1)...(19): siRNA sense strand
caucaucgcgcugugugaa

SEQ ID NO: 2200051 - RNA, 19 nt, Homo sapiens
  misc_RNA (1)...(19): siRNA sense strand
ccagggacgaugagagaau

SEQ ID NO: 2200052 - RNA, 19 nt, Homo sapiens
  misc_RNA (1)...(19): siRNA sense strand
ccgacacccuggccuucaa

SEQ ID NO: 2200053 - RNA, 19 nt, Homo sapiens
  misc_RNA (1)...(19): siRNA sense strand
guuccgacgucaagaccau

SEQ ID NO: 2200054 - RNA, 19 nt, Homo sapiens
  misc_RNA (1)...(19): siRNA sense strand
ucgagaugcuagcggugaa

SEQ ID NO: 2200055 - RNA, 19 nt, Homo sapiens
  misc_RNA (1)...(19): siRNA sense strand
aaagggcagcuagaagaaa

SEQ ID NO: 2200056 - RNA, 19 nt, Homo sapiens
  misc_RNA (1)...(19): siRNA sense strand
ccuuugaggcgcacaucua

SEQ ID NO: 2200057 - RNA, 19 nt, Homo sapiens
  misc_RNA (1)...(19): siRNA sense strand
gcgggaacguguguuucau

SEQ ID NO: 2200058 - RNA, 19 nt, Homo sapiens
  misc_RNA (1)...(19): siRNA sense strand
agagacgcccucaggagaa

SEQ ID NO: 2200059 - RNA, 19 nt, Homo sapiens
  misc_RNA (1)...(19): siRNA sense strand
uggaacagcagcucaugau

SEQ ID NO: 2200060 - RNA, 19 nt, Homo sapiens
  misc_RNA (1)...(19): siRNA sense strand
cgacuggccagguccaaag

SEQ ID NO: 2200061 - RNA, 19 nt, Homo sapiens
  misc_RNA (1)...(19): siRNA sense strand
gagaacgacugcaucuuug

SEQ ID NO: 2200062 - RNA, 19 nt, Homo sapiens
  misc_RNA (1)...(19): siRNA sense strand
cgacagacacuccaaguuu

SEQ ID NO: 2200063 - RNA, 19 nt, Homo sapiens
  misc_RNA (1)...(19): siRNA sense strand
gagacuaccugucggugaa

SEQ ID NO: 2200064 - RNA, 19 nt, Homo sapiens
  misc_RNA (1)...(19): siRNA sense strand
ggaaagacgagaucagugu

SEQ ID NO: 2200065 - RNA, 19 nt, Homo sapiens
  misc_RNA (1)...(19): siRNA sense strand
ugagaacgacugcaucuuu

SEQ ID NO: 2200066 - RNA, 19 nt, Homo sapiens
  misc_RNA (1)...(19): siRNA sense strand
gaagaucccagcaguaggu

SEQ ID NO: 2200067 - RNA, 19 nt, Homo sapiens
  misc_RNA (1)...(19): siRNA sense strand
guacauauuccaggacaaa

SEQ ID NO: 2200068 - RNA, 19 nt, Homo sapiens
  misc_RNA (1)...(19): siRNA sense strand
cugcaucuuugacaaguuu

SEQ ID NO: 2200069 - RNA, 19 nt, Homo sapiens
  misc_RNA (1)...(19): siRNA sense strand
guagguccuucuucucaga

SEQ ID NO: 2200070 - RNA, 19 nt, Homo sapiens
  misc_RNA (1)...(19): siRNA sense strand
gcucugcucucucuaugag

SEQ ID NO: 2200071 - RNA, 19 nt, Homo sapiens
  misc_RNA (1)...(19): siRNA sense strand
gacagacacuccaaguuuu

SEQ ID NO: 2200072 - RNA, 19 nt, Homo sapiens
  misc_RNA (1)...(19): siRNA sense strand
gguacaugaugaccagaga

SEQ ID NO: 2200073 - RNA, 19 nt, Homo sapiens
  misc_RNA (1)...(19): siRNA sense strand
cauagugggcgguacauga

SEQ ID NO: 2200074 - RNA, 19 nt, Homo sapiens
  misc_RNA (1)...(19): siRNA sense strand
ucggauagcgccaucauga

SEQ ID NO: 2200075 - RNA, 19 nt, Homo sapiens
  misc_RNA (1)...(19): siRNA sense strand
gaggaaagacgagaucagu

SEQ ID NO: 2200076 - RNA, 19 nt, Homo sapiens
  misc_RNA (1)...(19): siRNA sense strand
ucaggauguuugauagaga

SEQ ID NO: 2200077 - RNA, 19 nt, Homo sapiens
  misc_RNA (1)...(19): siRNA sense strand
ugugggaccucaacaugga

SEQ ID NO: 2200078 - RNA, 19 nt, Homo sapiens
  misc_RNA (1)...(19): siRNA sense strand
uugacaaguuugaguguug

SEQ ID NO: 2200079 - RNA, 19 nt, Homo sapiens
  misc_RNA (1)...(19): siRNA sense strand
ggaccauccgccuguguga

SEQ ID NO: 2200080 - RNA, 19 nt, Homo sapiens
  misc_RNA (1)...(19): siRNA sense strand
caacuucuucaggauguuu

SEQ ID NO: 2200081 - RNA, 19 nt, Homo sapiens
  misc_RNA (1)...(19): siRNA sense strand
cauauccgauguaaaauuc

SEQ ID NO: 2200082 - RNA, 19 nt, Homo sapiens
  misc_RNA (1)...(19): siRNA sense strand
cuggaggccucgagagaga

SEQ ID NO: 2200083 - RNA, 19 nt, Homo sapiens
  misc_RNA (1)...(19): siRNA sense strand
caagcucugcucucucuau

SEQ ID NO: 2200084 - RNA, 19 nt, Homo sapiens
  misc_RNA (1)...(19): siRNA sense strand
ggugugggaccucaacaug

SEQ ID NO: 2200085 - RNA, 19 nt, Homo sapiens
  misc_RNA (1)...(19): siRNA sense strand
cgagaucaguguggacagu

SEQ ID NO: 2200086 - RNA, 19 nt, Homo sapiens
  misc_RNA (1)...(19): siRNA sense strand
gcgacagacacuccaaguu

SEQ ID NO: 2200087 - RNA, 19 nt, Homo sapiens
  misc_RNA (1)...(19): siRNA sense strand
gcaacguguucgucuacag

SEQ ID NO: 2200088 - RNA, 19 nt, Homo sapiens
  misc_RNA (1)...(19): siRNA sense strand
cccaccagguccacgagua

SEQ ID NO: 2200089 - RNA, 19 nt, Homo sapiens
  misc_RNA (1)...(19): siRNA sense strand
caguagguccuucuucuca

SEQ ID NO: 2200090 - RNA, 19 nt, Homo sapiens
  misc_RNA (1)...(19): siRNA sense strand
guguucgucuacagcagua

SEQ ID NO: 2200091 - RNA, 19 nt, Homo sapiens
  misc_RNA (1)...(19): siRNA sense strand
gaacgacugcaucuuugac

SEQ ID NO: 2200092 - RNA, 19 nt, Homo sapiens
  misc_RNA (1)...(19): siRNA sense strand
gucuggacuucaacaagaa

SEQ ID NO: 2200093 - RNA, 19 nt, Homo sapiens
  misc_RNA (1)...(19): siRNA sense strand
caccaauaacuuguacaua

SEQ ID NO: 2200094 - RNA, 19 nt, Homo sapiens
  misc_RNA (1)...(19): siRNA sense strand
aagcucugcucucucuaug

SEQ ID NO: 2200095 - RNA, 19 nt, Homo sapiens
  misc_RNA (1)...(19): siRNA sense strand
gacugcaucuuugacaagu

SEQ ID NO: 2200096 - RNA, 19 nt, Homo sapiens
  misc_RNA (1)...(19): siRNA sense strand
ccaccaauaacuuguacau

SEQ ID NO: 2200097 - RNA, 19 nt, Homo sapiens
  misc_RNA (1)...(19): siRNA sense strand
aacaacuucuucaggaugu

SEQ ID NO: 2200098 - RNA, 19 nt, Homo sapiens
  misc_RNA (1)...(19): siRNA sense strand
gguccuauaacaacuucuu

SEQ ID NO: 2200099 - RNA, 19 nt, Homo sapiens
  misc_RNA (1)...(19): siRNA sense strand
auaacaacuucuucaggau

SEQ ID NO: 2200100 - RNA, 19 nt, Homo sapiens
  misc_RNA (1)...(19): siRNA sense strand
agugggcgguacaugauga

SEQ ID NO: 2200101 - RNA, 19 nt, Homo sapiens
  misc_RNA (1)...(19): siRNA sense strand
acgaguaccugcgcagcaa

SEQ ID NO: 2200102 - RNA, 19 nt, Homo sapiens
  misc_RNA (1)...(19): siRNA sense strand
gcaguagguccuucuucuc

SEQ ID NO: 2200103 - RNA, 19 nt, Homo sapiens
  misc_RNA (1)...(19): siRNA sense strand
ccacagagcuacaggauga

SEQ ID NO: 2200104 - RNA, 19 nt, Homo sapiens
  misc_RNA (1)...(19): siRNA sense strand
gaugaaguauugaagcuaa

SEQ ID NO: 2200105 - RNA, 19 nt, Homo sapiens
  misc_RNA (1)...(19): siRNA sense strand
ggagagaaauuuagaagag

SEQ ID NO: 2200106 - RNA, 19 nt, Homo sapiens
  misc_RNA (1)...(19): siRNA sense strand
ggaauuaccuccaaaucuc

SEQ ID NO: 2200107 - RNA, 19 nt, Homo sapiens
  misc_RNA (1)...(19): siRNA sense strand
gcaaaggaaugcccugugu

SEQ ID NO: 2200108 - RNA, 19 nt, Homo sapiens
  misc_RNA (1)...(19): siRNA sense strand
ggauuaaccuugaacaaag

SEQ ID NO: 2200109 - RNA, 19 nt, Homo sapiens
  misc_RNA (1)...(19): siRNA sense strand
gcuacaggaugaaguauug

SEQ ID NO: 2200110 - RNA, 19 nt, Homo sapiens
  misc_RNA (1)...(19): siRNA sense strand
gaacauugagaaagaacua

SEQ ID NO: 2200111 - RNA, 19 nt, Homo sapiens
  misc_RNA (1)...(19): siRNA sense strand
gaaggaagagcucagcaaa

SEQ ID NO: 2200112 - RNA, 19 nt, Homo sapiens
  misc_RNA (1)...(19): siRNA sense strand
gaggaaggcugccgaggau

SEQ ID NO: 2200113 - RNA, 19 nt, Homo sapiens
  misc_RNA (1)...(19): siRNA sense strand
caggaaauguucgcagaua

SEQ ID NO: 2200114 - RNA, 19 nt, Homo sapiens
  misc_RNA (1)...(19): siRNA sense strand
ggaaauugccacagagcua

SEQ ID NO: 2200115 - RNA, 19 nt, Homo sapiens
  misc_RNA (1)...(19): siRNA sense strand
gagagaaauuuagaagaga

SEQ ID NO: 2200116 - RNA, 19 nt, Homo sapiens
  misc_RNA (1)...(19): siRNA sense strand
gauuaaccuugaacaaaga

SEQ ID NO: 2200117 - RNA, 19 nt, Homo sapiens
  misc_RNA (1)...(19): siRNA sense strand
gaaauccaacuucucaaga

SEQ ID NO: 2200118 - RNA, 19 nt, Homo sapiens
  misc_RNA (1)...(19): siRNA sense strand
ccaaaugcgugagcaaaga

SEQ ID NO: 2200119 - RNA, 19 nt, Homo sapiens
  misc_RNA (1)...(19): siRNA sense strand
ugaaagcacugaaccuaag

SEQ ID NO: 2200120 - RNA, 19 nt, Homo sapiens
  misc_RNA (1)...(19): siRNA sense strand
gggauuaaccuugaacaaa

SEQ ID NO: 2200121 - RNA, 19 nt, Homo sapiens
  misc_RNA (1)...(19): siRNA sense strand
aaagagaaaucgccacaag

SEQ ID NO: 2200122 - RNA, 19 nt, Homo sapiens
  misc_RNA (1)...(19): siRNA sense strand
ggagcaugguggcaucaaa

SEQ ID NO: 2200123 - RNA, 19 nt, Homo sapiens
  misc_RNA (1)...(19): siRNA sense strand
gcacugaaccuaagacacu

SEQ ID NO: 2200124 - RNA, 19 nt, Homo sapiens
  misc_RNA (1)...(19): siRNA sense strand
gaggaggucuuuagaaucc

SEQ ID NO: 2200125 - RNA, 19 nt, Homo sapiens
  misc_RNA (1)...(19): siRNA sense strand
gaaaccaagcaaagagaaa

SEQ ID NO: 2200126 - RNA, 19 nt, Homo sapiens
  misc_RNA (1)...(19): siRNA sense strand
gauuggagcucaccagcau

SEQ ID NO: 2200127 - RNA, 19 nt, Homo sapiens
  misc_RNA (1)...(19): siRNA sense strand
caucuuacccgaccucuug

SEQ ID NO: 2200128 - RNA, 19 nt, Homo sapiens
  misc_RNA (1)...(19): siRNA sense strand
aaauugggauuaaccuuga

SEQ ID NO: 2200129 - RNA, 19 nt, Homo sapiens
  misc_RNA (1)...(19): siRNA sense strand
gggcugugaugaaagagaa

SEQ ID NO: 2200130 - RNA, 19 nt, Homo sapiens
  misc_RNA (1)...(19): siRNA sense strand
ucugauagauaacaggaaa

SEQ ID NO: 2200131 - RNA, 19 nt, Homo sapiens
  misc_RNA (1)...(19): siRNA sense strand
uggaggaggucuuuagaau

SEQ ID NO: 2200132 - RNA, 19 nt, Homo sapiens
  misc_RNA (1)...(19): siRNA sense strand
ccacaagcaaguaaagaaa

SEQ ID NO: 2200133 - RNA, 19 nt, Homo sapiens
  misc_RNA (1)...(19): siRNA sense strand
ggaaugcccugugugugau

SEQ ID NO: 2200134 - RNA, 19 nt, Homo sapiens
  misc_RNA (1)...(19): siRNA sense strand
acaagcaaguaaagaaaug

SEQ ID NO: 2200135 - RNA, 19 nt, Homo sapiens
  misc_RNA (1)...(19): siRNA sense strand
caagaggcuccaccgguua

SEQ ID NO: 2200136 - RNA, 19 nt, Homo sapiens
  misc_RNA (1)...(19): siRNA sense strand
aaaguggucugugccguuu

SEQ ID NO: 2200137 - RNA, 19 nt, Homo sapiens
  misc_RNA (1)...(19): siRNA sense strand
gaccuccgguacaauagaa

SEQ ID NO: 2200138 - RNA, 19 nt, Homo sapiens
  misc_RNA (1)...(19): siRNA sense strand
gcugaaagcacugaaccua

SEQ ID NO: 2200139 - RNA, 19 nt, Homo sapiens
  misc_RNA (1)...(19): siRNA sense strand
gagcucaccagcauuugaa

SEQ ID NO: 2200140 - RNA, 19 nt, Homo sapiens
  misc_RNA (1)...(19): siRNA sense strand
aaacagcacguccuccaaa

SEQ ID NO: 2200141 - RNA, 19 nt, Homo sapiens
  misc_RNA (1)...(19): siRNA sense strand
ggaaggaagagcucagcaa

SEQ ID NO: 2200142 - RNA, 19 nt, Homo sapiens
  misc_RNA (1)...(19): siRNA sense strand
gaaagcacugaaccuaaga

SEQ ID NO: 2200143 - RNA, 19 nt, Homo sapiens
  misc_RNA (1)...(19): siRNA sense strand
ggagggugcuggucagacu

SEQ ID NO: 2200144 - RNA, 19 nt, Homo sapiens
  misc_RNA (1)...(19): siRNA sense strand
ccaaagccaagacacguuu

SEQ ID NO: 2200145 - RNA, 19 nt, Homo sapiens
  misc_RNA (1)...(19): siRNA sense strand
ccuugaacauugagaaaga

SEQ ID NO: 2200146 - RNA, 19 nt, Homo sapiens
  misc_RNA (1)...(19): siRNA sense strand
gcucuugacgagggaauua

SEQ ID NO: 2200147 - RNA, 19 nt, Homo sapiens
  misc_RNA (1)...(19): siRNA sense strand
acacugcccucuggaauuc

SEQ ID NO: 2200148 - RNA, 19 nt, Homo sapiens
  misc_RNA (1)...(19): siRNA sense strand
ccacgcgucuaaccaagga

SEQ ID NO: 2200149 - RNA, 19 nt, Homo sapiens
  misc_RNA (1)...(19): siRNA sense strand
gaaaucgccacaagcaagu

SEQ ID NO: 2200150 - RNA, 19 nt, Homo sapiens
  misc_RNA (1)...(19): siRNA sense strand
gagcgagcccagaggauga

SEQ ID NO: 2200151 - RNA, 19 nt, Homo sapiens
  misc_RNA (1)...(19): siRNA sense strand
ugaaagagaaggccagcuu

SEQ ID NO: 2200152 - RNA, 19 nt, Homo sapiens
  misc_RNA (1)...(19): siRNA sense strand
ggagcucaccagcauuuga

SEQ ID NO: 2200153 - RNA, 19 nt, Homo sapiens
  misc_RNA (1)...(19): siRNA sense strand
ccgaggaucuggaaauugc

SEQ ID NO: 2200154 - RNA, 19 nt, Homo sapiens
  misc_RNA (1)...(19): siRNA sense strand
caugguggcaucaaagauu

SEQ ID NO: 2200155 - RNA, 19 nt, Homo sapiens
  misc_RNA (1)...(19): siRNA sense strand
aagcagcuccuacgaaguu

SEQ ID NO: 2200156 - RNA, 19 nt, Homo sapiens
  misc_RNA (1)...(19): siRNA sense strand
gggaauuaccuccaaaucu

SEQ ID NO: 2200157 - RNA, 19 nt, Homo sapiens
  misc_RNA (1)...(19): siRNA sense strand
cacaaaauauggagaauca

SEQ ID NO: 2200158 - RNA, 19 nt, Homo sapiens
  misc_RNA (1)...(19): siRNA sense strand
gcaggagagaaauuuagaa

SEQ ID NO: 2200159 - RNA, 19 nt, Homo sapiens
  misc_RNA (1)...(19): siRNA sense strand
ggagaagcaggcucugaug

SEQ ID NO: 2200160 - RNA, 19 nt, Homo sapiens
  misc_RNA (1)...(19): siRNA sense strand
gaauuaccuccaaaucuca

SEQ ID NO: 2200161 - RNA, 19 nt, Homo sapiens
  misc_RNA (1)...(19): siRNA sense strand
ggaggaggucuuuagaauc

SEQ ID NO: 2200162 - RNA, 19 nt, Homo sapiens
  misc_RNA (1)...(19): siRNA sense strand
gggaagcagcuccuacgaa

SEQ ID NO: 2200163 - RNA, 19 nt, Homo sapiens
  misc_RNA (1)...(19): siRNA sense strand
caaaugcgugagcaaagaa

SEQ ID NO: 2200164 - RNA, 19 nt, Homo sapiens
  misc_RNA (1)...(19): siRNA sense strand
gcccagaggaugaggaaga

SEQ ID NO: 2200165 - RNA, 19 nt, Homo sapiens
  misc_RNA (1)...(19): siRNA sense strand
cuccaaagauguucacaag

SEQ ID NO: 2200166 - RNA, 19 nt, Homo sapiens
  misc_RNA (1)...(19): siRNA sense strand
gacacugcccucuggaauu

SEQ ID NO: 2200167 - RNA, 19 nt, Homo sapiens
  misc_RNA (1)...(19): siRNA sense strand
aggaagagcucagcaaacu

SEQ ID NO: 2200168 - RNA, 19 nt, Homo sapiens
  misc_RNA (1)...(19): siRNA sense strand
gagcagcagagacgagaga

SEQ ID NO: 2200169 - RNA, 19 nt, Homo sapiens
  misc_RNA (1)...(19): siRNA sense strand
gagaaagaacuaccaaagc

SEQ ID NO: 2200170 - RNA, 19 nt, Homo sapiens
  misc_RNA (1)...(19): siRNA sense strand
ugagaaagaacuaccaaag

SEQ ID NO: 2200171 - RNA, 19 nt, Homo sapiens
  misc_RNA (1)...(19): siRNA sense strand
ugugauuccucaagauuuc

SEQ ID NO: 2200172 - RNA, 19 nt, Homo sapiens
  misc_RNA (1)...(19): siRNA sense strand
ggagaaucaggaaauguuc

SEQ ID NO: 2200173 - RNA, 19 nt, Homo sapiens
  misc_RNA (1)...(19): siRNA sense strand
gccacaagcaaguaaagaa

SEQ ID NO: 2200174 - RNA, 19 nt, Homo sapiens
  misc_RNA (1)...(19): siRNA sense strand
ccgguacaauagaauuaaa

SEQ ID NO: 2200175 - RNA, 19 nt, Homo sapiens
  misc_RNA (1)...(19): siRNA sense strand
ugaggaagaggaaggaaga

SEQ ID NO: 2200176 - RNA, 19 nt, Homo sapiens
  misc_RNA (1)...(19): siRNA sense strand
ccacugaauccgccuggaa

SEQ ID NO: 2200177 - RNA, 19 nt, Homo sapiens
  misc_RNA (1)...(19): siRNA sense strand
ucugggagaucagcucuug

SEQ ID NO: 2200178 - RNA, 19 nt, Homo sapiens
  misc_RNA (1)...(19): siRNA sense strand
ccuacgaaguucccucugu

SEQ ID NO: 2200179 - RNA, 19 nt, Homo sapiens
  misc_RNA (1)...(19): siRNA sense strand
gaagcuaaaauugggauua

SEQ ID NO: 2200180 - RNA, 19 nt, Homo sapiens
  misc_RNA (1)...(19): siRNA sense strand
gagaaaucgccacaagcaa

SEQ ID NO: 2200181 - RNA, 19 nt, Homo sapiens
  misc_RNA (1)...(19): siRNA sense strand
acaggaaaguaccacugaa

SEQ ID NO: 2200182 - RNA, 19 nt, Homo sapiens
  misc_RNA (1)...(19): siRNA sense strand
gauagauaacaggaaagua

SEQ ID NO: 2200183 - RNA, 19 nt, Homo sapiens
  misc_RNA (1)...(19): siRNA sense strand
ggaccuccgguacaauaga

SEQ ID NO: 2200184 - RNA, 19 nt, Homo sapiens
  misc_RNA (1)...(19): siRNA sense strand
ggcccucacuggaaaccuu

SEQ ID NO: 2200185 - RNA, 19 nt, Homo sapiens
  misc_RNA (1)...(19): siRNA sense strand
ggaugaaguauugaagcua

SEQ ID NO: 2200186 - RNA, 19 nt, Homo sapiens
  misc_RNA (1)...(19): siRNA sense strand
ggaaggcugccgaggaucu

SEQ ID NO: 2200187 - RNA, 19 nt, Homo sapiens
  misc_RNA (1)...(19): siRNA sense strand
aaaggaaugcccugugugu

SEQ ID NO: 2200188 - RNA, 19 nt, Homo sapiens
  misc_RNA (1)...(19): siRNA sense strand
agaagggauugguggcuau

SEQ ID NO: 2200189 - RNA, 19 nt, Homo sapiens
  misc_RNA (1)...(19): siRNA sense strand
gcgcuuccuucugggauug

SEQ ID NO: 2200190 - RNA, 19 nt, Homo sapiens
  misc_RNA (1)...(19): siRNA sense strand
aaauccaacuucucaagag

SEQ ID NO: 2200191 - RNA, 19 nt, Homo sapiens
  misc_RNA (1)...(19): siRNA sense strand
ggaaaguaccacugaaucc

SEQ ID NO: 2200192 - RNA, 19 nt, Homo sapiens
  misc_RNA (1)...(19): siRNA sense strand
aggaaugcccuguguguga

SEQ ID NO: 2200193 - RNA, 19 nt, Homo sapiens
  misc_RNA (1)...(19): siRNA sense strand
aaauggcgauccgagcaaa

SEQ ID NO: 2200194 - RNA, 19 nt, Homo sapiens
  misc_RNA (1)...(19): siRNA sense strand
uggagaaucaggaaauguu

SEQ ID NO: 2200195 - RNA, 19 nt, Homo sapiens
  misc_RNA (1)...(19): siRNA sense strand
uauggagaaucaggaaaug

SEQ ID NO: 2200196 - RNA, 19 nt, Homo sapiens
  misc_RNA (1)...(19): siRNA sense strand
agagaaaucgccacaagca

SEQ ID NO: 2200197 - RNA, 19 nt, Homo sapiens
  misc_RNA (1)...(19): siRNA sense strand
gagcaugguggcaucaaag

SEQ ID NO: 2200198 - RNA, 19 nt, Homo sapiens
  misc_RNA (1)...(19): siRNA sense strand
gcagcagagacgagagaaa

SEQ ID NO: 2200199 - RNA, 19 nt, Homo sapiens
  misc_RNA (1)...(19): siRNA sense strand
gagcccagaggaugaggaa

SEQ ID NO: 2200200 - RNA, 19 nt, Homo sapiens
  misc_RNA (1)...(19): siRNA sense strand
agagcuacaggaugaagua

SEQ ID NO: 2200201 - RNA, 19 nt, Homo sapiens
  misc_RNA (1)...(19): siRNA sense strand
ugccgaggaucuggaaauu

SEQ ID NO: 2200202 - RNA, 19 nt, Homo sapiens
  misc_RNA (1)...(19): siRNA sense strand
gcagcacagccucaaaaua

SEQ ID NO: 2200203 - RNA, 19 nt, Homo sapiens
  misc_RNA (1)...(19): siRNA sense strand
gcgaaggucucgugguuug

SEQ ID NO: 2200204 - RNA, 19 nt, Homo sapiens
  misc_RNA (1)...(19): siRNA sense strand
ggaaaucagggagcucuua

SEQ ID NO: 2200205 - RNA, 19 nt, Homo sapiens
  misc_RNA (1)...(19): siRNA sense strand
gaaaucagggagcucuuaa

SEQ ID NO: 2200206 - RNA, 19 nt, Homo sapiens
  misc_RNA (1)...(19): siRNA sense strand
cuacgucguucuugucuau

SEQ ID NO: 2200207 - RNA, 19 nt, Homo sapiens
  misc_RNA (1)...(19): siRNA sense strand
aagcgaaggucucgugguu

SEQ ID NO: 2200208 - RNA, 19 nt, Homo sapiens
  misc_RNA (1)...(19): siRNA sense strand
ggauguaucggaaagcuau

SEQ ID NO: 2200209 - RNA, 19 nt, Homo sapiens
  misc_RNA (1)...(19): siRNA sense strand
gcucuuaacccaguuugaa

SEQ ID NO: 2200210 - RNA, 19 nt, Homo sapiens
  misc_RNA (1)...(19): siRNA sense strand
ggagcccggucaucaagau

SEQ ID NO: 2200211 - RNA, 19 nt, Homo sapiens
  misc_RNA (1)...(19): siRNA sense strand
gggguaagauccaugguuu

SEQ ID NO: 2200212 - RNA, 19 nt, Homo sapiens
  misc_RNA (1)...(19): siRNA sense strand
ugaggacgaugacuucaag

SEQ ID NO: 2200213 - RNA, 19 nt, Homo sapiens
  misc_RNA (1)...(19): siRNA sense strand
ccgaggugcuggacagaga

SEQ ID NO: 2200214 - RNA, 19 nt, Homo sapiens
  misc_RNA (1)...(19): siRNA sense strand
cagagaggcucgccaaacg

SEQ ID NO: 2200215 - RNA, 19 nt, Homo sapiens
  misc_RNA (1)...(19): siRNA sense strand
agggagagguggucaagau

SEQ ID NO: 2200216 - RNA, 19 nt, Homo sapiens
  misc_RNA (1)...(19): siRNA sense strand
uaaccgaggcugcaaaugc

SEQ ID NO: 2200217 - RNA, 19 nt, Homo sapiens
  misc_RNA (1)...(19): siRNA sense strand
gccaggugcucugugagaa

SEQ ID NO: 2200218 - RNA, 19 nt, Homo sapiens
  misc_RNA (1)...(19): siRNA sense strand
uuucaaaacucuccccuuu

SEQ ID NO: 2200219 - RNA, 19 nt, Homo sapiens
  misc_RNA (1)...(19): siRNA sense strand
gcggacuugucuucuggaa

SEQ ID NO: 2200220 - RNA, 19 nt, Homo sapiens
  misc_RNA (1)...(19): siRNA sense strand
ucaaaacucuccccuuucu

SEQ ID NO: 2200221 - RNA, 19 nt, Homo sapiens
  misc_RNA (1)...(19): siRNA sense strand
ucaucaagaucuccuacag

SEQ ID NO: 2200222 - RNA, 19 nt, Homo sapiens
  misc_RNA (1)...(19): siRNA sense strand
gcaagggagagguggucaa

SEQ ID NO: 2200223 - RNA, 19 nt, Homo sapiens
  misc_RNA (1)...(19): siRNA sense strand
gacgcgagggcuuggcuuu

SEQ ID NO: 2200224 - RNA, 19 nt, Homo sapiens
  misc_RNA (1)...(19): siRNA sense strand
caggugcucugugagaagu

SEQ ID NO: 2200225 - RNA, 19 nt, Homo sapiens
  misc_RNA (1)...(19): siRNA sense strand
cccguacccucccuacuuc

SEQ ID NO: 2200226 - RNA, 19 nt, Homo sapiens
  misc_RNA (1)...(19): siRNA sense strand
gaaggucucgugguuuggu

SEQ ID NO: 2200227 - RNA, 19 nt, Homo sapiens
  misc_RNA (1)...(19): siRNA sense strand
acgucguucuugucuauuu

SEQ ID NO: 2200228 - RNA, 19 nt, Homo sapiens
  misc_RNA (1)...(19): siRNA sense strand
guaagaagaaggggaugua

SEQ ID NO: 2200229 - RNA, 19 nt, Homo sapiens
  misc_RNA (1)...(19): siRNA sense strand
ggcugcaaaugccgcaaga

SEQ ID NO: 2200230 - RNA, 19 nt, Homo sapiens
  misc_RNA (1)...(19): siRNA sense strand
gauguaucggaaagcuaua

SEQ ID NO: 2200231 - RNA, 19 nt, Homo sapiens
  misc_RNA (1)...(19): siRNA sense strand
agaaggagcuguucaguaa

SEQ ID NO: 2200232 - RNA, 19 nt, Homo sapiens
  misc_RNA (1)...(19): siRNA sense strand
ggaagaggcucggcucaga

SEQ ID NO: 2200233 - RNA, 19 nt, Homo sapiens
  misc_RNA (1)...(19): siRNA sense strand
gauaugaaguggauugaag

SEQ ID NO: 2200234 - RNA, 19 nt, Homo sapiens
  misc_RNA (1)...(19): siRNA sense strand
ugaaguggauugaagagaa

SEQ ID NO: 2200235 - RNA, 19 nt, Homo sapiens
  misc_RNA (1)...(19): siRNA sense strand
gagaaggagcuguucagua

SEQ ID NO: 2200236 - RNA, 19 nt, Homo sapiens
  misc_RNA (1)...(19): siRNA sense strand
uugcggagcugaugaagaa

SEQ ID NO: 2200237 - RNA, 19 nt, Homo sapiens
  misc_RNA (1)...(19): siRNA sense strand
gaaguggauugaagagaag

SEQ ID NO: 2200238 - RNA, 19 nt, Homo sapiens
  misc_RNA (1)...(19): siRNA sense strand
ggacgcagagcgagaaguu

SEQ ID NO: 2200239 - RNA, 19 nt, Homo sapiens
  misc_RNA (1)...(19): siRNA sense strand
uggaagccaugcuguauga

SEQ ID NO: 2200240 - RNA, 19 nt, Homo sapiens
  misc_RNA (1)...(19): siRNA sense strand
ggauagaggaccuggagaa

SEQ ID NO: 2200241 - RNA, 19 nt, Homo sapiens
  misc_RNA (1)...(19): siRNA sense strand
gcacuguaccggagaaauc

SEQ ID NO: 2200242 - RNA, 19 nt, Homo sapiens
  misc_RNA (1)...(19): siRNA sense strand
acgccaaccugaccaauga

SEQ ID NO: 2200243 - RNA, 19 nt, Homo sapiens
  misc_RNA (1)...(19): siRNA sense strand
gaaaagaucaaacaaaugg

SEQ ID NO: 2200244 - RNA, 19 nt, Homo sapiens
  misc_RNA (1)...(19): siRNA sense strand
ugaagaagcuggacauccu

SEQ ID NO: 2200245 - RNA, 19 nt, Homo sapiens
  misc_RNA (1)...(19): siRNA sense strand
ggcaggauaugaaguggau

SEQ ID NO: 2200246 - RNA, 19 nt, Homo sapiens
  misc_RNA (1)...(19): siRNA sense strand
gaagccaugcuguaugaug

SEQ ID NO: 2200247 - RNA, 19 nt, Homo sapiens
  misc_RNA (1)...(19): siRNA sense strand
ccggagaaaucaagagcuu

SEQ ID NO: 2200248 - RNA, 19 nt, Homo sapiens
  misc_RNA (1)...(19): siRNA sense strand
aaaacgagcugcuggaguu

SEQ ID NO: 2200249 - RNA, 19 nt, Homo sapiens
  misc_RNA (1)...(19): siRNA sense strand
gaagagaagcaggcacugu

SEQ ID NO: 2200250 - RNA, 19 nt, Homo sapiens
  misc_RNA (1)...(19): siRNA sense strand
ggagcaggugguugucaua

SEQ ID NO: 2200251 - RNA, 19 nt, Homo sapiens
  misc_RNA (1)...(19): siRNA sense strand
aagagaagcaggcacugua

SEQ ID NO: 2200252 - RNA, 19 nt, Homo sapiens
  misc_RNA (1)...(19): siRNA sense strand
gagcuggacuaccggaaac

SEQ ID NO: 2200253 - RNA, 19 nt, Homo sapiens
  misc_RNA (1)...(19): siRNA sense strand
gcaggacgccagagaccaa

SEQ ID NO: 2200254 - RNA, 19 nt, Homo sapiens
  misc_RNA (1)...(19): siRNA sense strand
ggagcuggacuaccggaaa

SEQ ID NO: 2200255 - RNA, 19 nt, Homo sapiens
  misc_RNA (1)...(19): siRNA sense strand
guccugaccuuggccgaaa

SEQ ID NO: 2200256 - RNA, 19 nt, Homo sapiens
  misc_RNA (1)...(19): siRNA sense strand
acgcagagcgagaaguuaa

SEQ ID NO: 2200257 - RNA, 19 nt, Homo sapiens
  misc_RNA (1)...(19): siRNA sense strand
gaaggugugacggacauug

SEQ ID NO: 2200258 - RNA, 19 nt, Homo sapiens
  misc_RNA (1)...(19): siRNA sense strand
gcuggaagccaugcuguau

SEQ ID NO: 2200259 - RNA, 19 nt, Homo sapiens
  misc_RNA (1)...(19): siRNA sense strand
aaaaguggcuccagcagau

SEQ ID NO: 2200260 - RNA, 19 nt, Homo sapiens
  misc_RNA (1)...(19): siRNA sense strand
ggaagucacccgccaucag

SEQ ID NO: 2200261 - RNA, 19 nt, Homo sapiens
  misc_RNA (1)...(19): siRNA sense strand
gcagcuacaagccgaagug

SEQ ID NO: 2200262 - RNA, 19 nt, Homo sapiens
  misc_RNA (1)...(19): siRNA sense strand
caggauaugaaguggauug

SEQ ID NO: 2200263 - RNA, 19 nt, Homo sapiens
  misc_RNA (1)...(19): siRNA sense strand
gaggagagggagaggaagu

SEQ ID NO: 2200264 - RNA, 19 nt, Homo sapiens
  misc_RNA (1)...(19): siRNA sense strand
ggaaaagaucaaacaaaug

SEQ ID NO: 2200265 - RNA, 19 nt, Homo sapiens
  misc_RNA (1)...(19): siRNA sense strand
ggauaugaaguggauugaa

SEQ ID NO: 2200266 - RNA, 19 nt, Homo sapiens
  misc_RNA (1)...(19): siRNA sense strand
gauagaggaccuggagaag

SEQ ID NO: 2200267 - RNA, 19 nt, Homo sapiens
  misc_RNA (1)...(19): siRNA sense strand
gcacauccuggagcuggaa

SEQ ID NO: 2200268 - RNA, 19 nt, Homo sapiens
  misc_RNA (1)...(19): siRNA sense strand
guacugcgaggccgaaggu

SEQ ID NO: 2200269 - RNA, 19 nt, Homo sapiens
  misc_RNA (1)...(19): siRNA sense strand
ccgaaggugugacggacau

SEQ ID NO: 2200270 - RNA, 19 nt, Homo sapiens
  misc_RNA (1)...(19): siRNA sense strand
ggagagggagaggaaguca

SEQ ID NO: 2200271 - RNA, 19 nt, Homo sapiens
  misc_RNA (1)...(19): siRNA sense strand
gacgcagagcgagaaguua

SEQ ID NO: 2200272 - RNA, 19 nt, Homo sapiens
  misc_RNA (1)...(19): siRNA sense strand
ggacgaggagcuggacuac

SEQ ID NO: 2200273 - RNA, 19 nt, Homo sapiens
  misc_RNA (1)...(19): siRNA sense strand
agaaggagcuguucaguaa

SEQ ID NO: 2200274 - RNA, 19 nt, Homo sapiens
  misc_RNA (1)...(19): siRNA sense strand
ggaagaggcucggcucaga

SEQ ID NO: 2200275 - RNA, 19 nt, Homo sapiens
  misc_RNA (1)...(19): siRNA sense strand
gauaugaaguggauugaag

SEQ ID NO: 2200276 - RNA, 19 nt, Homo sapiens
  misc_RNA (1)...(19): siRNA sense strand
ugaaguggauugaagagaa

SEQ ID NO: 2200277 - RNA, 19 nt, Homo sapiens
  misc_RNA (1)...(19): siRNA sense strand
gagaaggagcuguucagua

SEQ ID NO: 2200278 - RNA, 19 nt, Homo sapiens
  misc_RNA (1)...(19): siRNA sense strand
uugcggagcugaugaagaa

SEQ ID NO: 2200279 - RNA, 19 nt, Homo sapiens
  misc_RNA (1)...(19): siRNA sense strand
gaaguggauugaagagaag

SEQ ID NO: 2200280 - RNA, 19 nt, Homo sapiens
  misc_RNA (1)...(19): siRNA sense strand
ggacgcagagcgagaaguu

SEQ ID NO: 2200281 - RNA, 19 nt, Homo sapiens
  misc_RNA (1)...(19): siRNA sense strand
uggaagccaugcuguauga

SEQ ID NO: 2200282 - RNA, 19 nt, Homo sapiens
  misc_RNA (1)...(19): siRNA sense strand
ggauagaggaccuggagaa

SEQ ID NO: 2200283 - RNA, 19 nt, Homo sapiens
  misc_RNA (1)...(19): siRNA sense strand
gcacuguaccggagaaauc

SEQ ID NO: 2200284 - RNA, 19 nt, Homo sapiens
  misc_RNA (1)...(19): siRNA sense strand
acgccaaccugaccaauga

SEQ ID NO: 2200285 - RNA, 19 nt, Homo sapiens
  misc_RNA (1)...(19): siRNA sense strand
gaaaagaucaaacaaaugg

SEQ ID NO: 2200286 - RNA, 19 nt, Homo sapiens
  misc_RNA (1)...(19): siRNA sense strand
ugaagaagcuggacauccu

SEQ ID NO: 2200287 - RNA, 19 nt, Homo sapiens
  misc_RNA (1)...(19): siRNA sense strand
ggcaggauaugaaguggau

SEQ ID NO: 2200288 - RNA, 19 nt, Homo sapiens
  misc_RNA (1)...(19): siRNA sense strand
gaagccaugcuguaugaug

SEQ ID NO: 2200289 - RNA, 19 nt, Homo sapiens
  misc_RNA (1)...(19): siRNA sense strand
ccggagaaaucaagagcuu

SEQ ID NO: 2200290 - RNA, 19 nt, Homo sapiens
  misc_RNA (1)...(19): siRNA sense strand
aaaacgagcugcuggaguu

SEQ ID NO: 2200291 - RNA, 19 nt, Homo sapiens
  misc_RNA (1)...(19): siRNA sense strand
gaagagaagcaggcacugu

SEQ ID NO: 2200292 - RNA, 19 nt, Homo sapiens
  misc_RNA (1)...(19): siRNA sense strand
ggagcaggugguugucaua

SEQ ID NO: 2200293 - RNA, 19 nt, Homo sapiens
  misc_RNA (1)...(19): siRNA sense strand
aagagaagcaggcacugua

SEQ ID NO: 2200294 - RNA, 19 nt, Homo sapiens
  misc_RNA (1)...(19): siRNA sense strand
gagcuggacuaccggaaac

SEQ ID NO: 2200295 - RNA, 19 nt, Homo sapiens
  misc_RNA (1)...(19): siRNA sense strand
gcaggacgccagagaccaa

SEQ ID NO: 2200296 - RNA, 19 nt, Homo sapiens
  misc_RNA (1)...(19): siRNA sense strand
ggagcuggacuaccggaaa

SEQ ID NO: 2200297 - RNA, 19 nt, Homo sapiens
  misc_RNA (1)...(19): siRNA sense strand
guccugaccuuggccgaaa

SEQ ID NO: 2200298 - RNA, 19 nt, Homo sapiens
  misc_RNA (1)...(19): siRNA sense strand
acgcagagcgagaaguuaa

SEQ ID NO: 2200299 - RNA, 19 nt, Homo sapiens
  misc_RNA (1)...(19): siRNA sense strand
gaaggugugacggacauug

SEQ ID NO: 2200300 - RNA, 19 nt, Homo sapiens
  misc_RNA (1)...(19): siRNA sense strand
gcuggaagccaugcuguau

SEQ ID NO: 2200301 - RNA, 19 nt, Homo sapiens
  misc_RNA (1)...(19): siRNA sense strand
aaaaguggcuccagcagau

SEQ ID NO: 2200302 - RNA, 19 nt, Homo sapiens
  misc_RNA (1)...(19): siRNA sense strand
ggaagucacccgccaucag

SEQ ID NO: 2200303 - RNA, 19 nt, Homo sapiens
  misc_RNA (1)...(19): siRNA sense strand
gcagcuacaagccgaagug

SEQ ID NO: 2200304 - RNA, 19 nt, Homo sapiens
  misc_RNA (1)...(19): siRNA sense strand
caggauaugaaguggauug

SEQ ID NO: 2200305 - RNA, 19 nt, Homo sapiens
  misc_RNA (1)...(19): siRNA sense strand
gaggagagggagaggaagu

SEQ ID NO: 2200306 - RNA, 19 nt, Homo sapiens
  misc_RNA (1)...(19): siRNA sense strand
ggauaugaaguggauugaa

SEQ ID NO: 2200307 - RNA, 19 nt, Homo sapiens
  misc_RNA (1)...(19): siRNA sense strand
ggaaaagaucaaacaaaug

SEQ ID NO: 2200308 - RNA, 19 nt, Homo sapiens
  misc_RNA (1)...(19): siRNA sense strand
gauagaggaccuggagaag

SEQ ID NO: 2200309 - RNA, 19 nt, Homo sapiens
  misc_RNA (1)...(19): siRNA sense strand
gcacauccuggagcuggaa

SEQ ID NO: 2200310 - RNA, 19 nt, Homo sapiens
  misc_RNA (1)...(19): siRNA sense strand
guacugcgaggccgaaggu

SEQ ID NO: 2200311 - RNA, 19 nt, Homo sapiens
  misc_RNA (1)...(19): siRNA sense strand
ccgaaggugugacggacau

SEQ ID NO: 2200312 - RNA, 19 nt, Homo sapiens
  misc_RNA (1)...(19): siRNA sense strand
ggagagggagaggaaguca

SEQ ID NO: 2200313 - RNA, 19 nt, Homo sapiens
  misc_RNA (1)...(19): siRNA sense strand
gacgcagagcgagaaguua

SEQ ID NO: 2200314 - RNA, 19 nt, Homo sapiens
  misc_RNA (1)...(19): siRNA sense strand
ggacgaggagcuggacuac

SEQ ID NO: 2200315 - RNA, 19 nt, Homo sapiens
  misc_RNA (1)...(19): siRNA sense strand
gcaccuggcugcucuguuu

SEQ ID NO: 2200316 - RNA, 19 nt, Homo sapiens
  misc_RNA (1)...(19): siRNA sense strand
ggacuuagccugcucaugu

SEQ ID NO: 2200317 - RNA, 19 nt, Homo sapiens
  misc_RNA (1)...(19): siRNA sense strand
gcccaaacccuggauguua

SEQ ID NO: 2200318 - RNA, 19 nt, Homo sapiens
  misc_RNA (1)...(19): siRNA sense strand
gaccauaucucccuuucca

SEQ ID NO: 2200319 - RNA, 19 nt, Homo sapiens
  misc_RNA (1)...(19): siRNA sense strand
cccaaacccuggauguuaa

SEQ ID NO: 2200320 - RNA, 19 nt, Homo sapiens
  misc_RNA (1)...(19): siRNA sense strand
gcaaccgcgucuucacuga

SEQ ID NO: 2200321 - RNA, 19 nt, Homo sapiens
  misc_RNA (1)...(19): siRNA sense strand
ucacugagggcaccuguaa

SEQ ID NO: 2200322 - RNA, 19 nt, Homo sapiens
  misc_RNA (1)...(19): siRNA sense strand
ccuguaagcugcugaccuu

SEQ ID NO: 2200323 - RNA, 19 nt, Homo sapiens
  misc_RNA (1)...(19): siRNA sense strand
ggagacgccugcacauggu

SEQ ID NO: 2200324 - RNA, 19 nt, Homo sapiens
  misc_RNA (1)...(19): siRNA sense strand
gacuuagccugcucauguu

SEQ ID NO: 2200325 - RNA, 19 nt, Homo sapiens
  misc_RNA (1)...(19): siRNA sense strand
guaagcugcugaccuuggu

SEQ ID NO: 2200326 - RNA, 19 nt, Homo sapiens
  misc_RNA (1)...(19): siRNA sense strand
caacuucuucccucucuuc

SEQ ID NO: 2200327 - RNA, 19 nt, Homo sapiens
  misc_RNA (1)...(19): siRNA sense strand
acgaggaccuggugcugaa

SEQ ID NO: 2200328 - RNA, 19 nt, Homo sapiens
  misc_RNA (1)...(19): siRNA sense strand
uuccagcagucccucauaa

SEQ ID NO: 2200329 - RNA, 19 nt, Homo sapiens
  misc_RNA (1)...(19): siRNA sense strand
caucuguuguccgaccaua

SEQ ID NO: 2200330 - RNA, 19 nt, Homo sapiens
  misc_RNA (1)...(19): siRNA sense strand
ucaacaaccucuacuuccu

SEQ ID NO: 2200331 - RNA, 19 nt, Homo sapiens
  misc_RNA (1)...(19): siRNA sense strand
ccucggcacuccucuuugg

SEQ ID NO: 2200332 - RNA, 19 nt, Homo sapiens
  misc_RNA (1)...(19): siRNA sense strand
ggucuuccacugccacuuc

SEQ ID NO: 2200333 - RNA, 19 nt, Homo sapiens
  misc_RNA (1)...(19): siRNA sense strand
ccacuucaacagcaacuuc

SEQ ID NO: 2200334 - RNA, 19 nt, Homo sapiens
  misc_RNA (1)...(19): siRNA sense strand
gcugcucuguuucuacaca

SEQ ID NO: 2200335 - RNA, 19 nt, Homo sapiens
  misc_RNA (1)...(19): siRNA sense strand
uggcugcucuguuucuaca

SEQ ID NO: 2200336 - RNA, 19 nt, Homo sapiens
  misc_RNA (1)...(19): siRNA sense strand
gcaacuucuucccucucuu

SEQ ID NO: 2200337 - RNA, 19 nt, Homo sapiens
  misc_RNA (1)...(19): siRNA sense strand
aacccuggauguuaagaug

SEQ ID NO: 2200338 - RNA, 19 nt, Homo sapiens
  misc_RNA (1)...(19): siRNA sense strand
uguugggccucuccuaugu

SEQ ID NO: 2200339 - RNA, 19 nt, Homo sapiens
  misc_RNA (1)...(19): siRNA sense strand
ucucaacaaccucuacuuc

SEQ ID NO: 2200340 - RNA, 19 nt, Homo sapiens
  misc_RNA (1)...(19): siRNA sense strand
caagccaggccagaccuuu

SEQ ID NO: 2200341 - RNA, 19 nt, Homo sapiens
  misc_RNA (1)...(19): siRNA sense strand
uuagccugcucauguuguu

SEQ ID NO: 2200342 - RNA, 19 nt, Homo sapiens
  misc_RNA (1)...(19): siRNA sense strand
cugcugugccucuucauug

SEQ ID NO: 2200343 - RNA, 19 nt, Homo sapiens
  misc_RNA (1)...(19): siRNA sense strand
uggaggagcuggccuggaa

SEQ ID NO: 2200344 - RNA, 19 nt, Homo sapiens
  misc_RNA (1)...(19): siRNA sense strand
uggaggagaugguagagaa

SEQ ID NO: 2200345 - RNA, 19 nt, Homo sapiens
  misc_RNA (1)...(19): siRNA sense strand
gugcaacgccgucuagaug

SEQ ID NO: 2200346 - RNA, 19 nt, Homo sapiens
  misc_RNA (1)...(19): siRNA sense strand
gcaacgccgucuagauguc

SEQ ID NO: 2200347 - RNA, 19 nt, Homo sapiens
  misc_RNA (1)...(19): siRNA sense strand
cgaggagacucagcucaga

SEQ ID NO: 2200348 - RNA, 19 nt, Homo sapiens
  misc_RNA (1)...(19): siRNA sense strand
uagagaagaccguggauca

SEQ ID NO: 2200349 - RNA, 19 nt, Homo sapiens
  misc_RNA (1)...(19): siRNA sense strand
gaggagaugguagagaaga

SEQ ID NO: 2200350 - RNA, 19 nt, Homo sapiens
  misc_RNA (1)...(19): siRNA sense strand
uagaugucauggaggagau

SEQ ID NO: 2200351 - RNA, 19 nt, Homo sapiens
  misc_RNA (1)...(19): siRNA sense strand
gaaacaagcuaaacaaauc

SEQ ID NO: 2200352 - RNA, 19 nt, Homo sapiens
  misc_RNA (1)...(19): siRNA sense strand
gaggaaaccugccugcaaa

SEQ ID NO: 2200353 - RNA, 19 nt, Homo sapiens
  misc_RNA (1)...(19): siRNA sense strand
gaaaacugauuccaucuua

SEQ ID NO: 2200354 - RNA, 19 nt, Homo sapiens
  misc_RNA (1)...(19): siRNA sense strand
ccaacgaaauacaucaaua

SEQ ID NO: 2200355 - RNA, 19 nt, Homo sapiens
  misc_RNA (1)...(19): siRNA sense strand
caaagaaggcuaccaagga

SEQ ID NO: 2200356 - RNA, 19 nt, Homo sapiens
  misc_RNA (1)...(19): siRNA sense strand
gaaguggcaugcuccauag

SEQ ID NO: 2200357 - RNA, 19 nt, Homo sapiens
  misc_RNA (1)...(19): siRNA sense strand
agucagcgauugucuuaua

SEQ ID NO: 2200358 - RNA, 19 nt, Homo sapiens
  misc_RNA (1)...(19): siRNA sense strand
ucagagaacuuggugaaga

SEQ ID NO: 2200359 - RNA, 19 nt, Homo sapiens
  misc_RNA (1)...(19): siRNA sense strand
gugaagaaguuuaucaaag

SEQ ID NO: 2200360 - RNA, 19 nt, Homo sapiens
  misc_RNA (1)...(19): siRNA sense strand
ugaagaaguuuaucaaagg

SEQ ID NO: 2200361 - RNA, 19 nt, Homo sapiens
  misc_RNA (1)...(19): siRNA sense strand
gcaagaaacaagcuaaaca

SEQ ID NO: 2200362 - RNA, 19 nt, Homo sapiens
  misc_RNA (1)...(19): siRNA sense strand
ggaaaggcauccugugacu

SEQ ID NO: 2200363 - RNA, 19 nt, Homo sapiens
  misc_RNA (1)...(19): siRNA sense strand
gaaguaggcuagguggaau

SEQ ID NO: 2200364 - RNA, 19 nt, Homo sapiens
  misc_RNA (1)...(19): siRNA sense strand
caacugccuucaagagaga

SEQ ID NO: 2200365 - RNA, 19 nt, Homo sapiens
  misc_RNA (1)...(19): siRNA sense strand
caagaaacaagcuaaacaa

SEQ ID NO: 2200366 - RNA, 19 nt, Homo sapiens
  misc_RNA (1)...(19): siRNA sense strand
gaacgagaggcgcaauuug

SEQ ID NO: 2200367 - RNA, 19 nt, Homo sapiens
  misc_RNA (1)...(19): siRNA sense strand
ccagucagcgauugucuua

SEQ ID NO: 2200368 - RNA, 19 nt, Homo sapiens
  misc_RNA (1)...(19): siRNA sense strand
uuuaauagcuuggagcaaa

SEQ ID NO: 2200369 - RNA, 19 nt, Homo sapiens
  misc_RNA (1)...(19): siRNA sense strand
gguaaaagcuacagucuca

SEQ ID NO: 2200370 - RNA, 19 nt, Homo sapiens
  misc_RNA (1)...(19): siRNA sense strand
caaagagugaagaaguuua

SEQ ID NO: 2200371 - RNA, 19 nt, Homo sapiens
  misc_RNA (1)...(19): siRNA sense strand
gaacuggccagcguagaaa

SEQ ID NO: 2200372 - RNA, 19 nt, Homo sapiens
  misc_RNA (1)...(19): siRNA sense strand
gagacaaaccccuauuuua

SEQ ID NO: 2200373 - RNA, 19 nt, Homo sapiens
  misc_RNA (1)...(19): siRNA sense strand
gcugugguguguugaaaga

SEQ ID NO: 2200374 - RNA, 19 nt, Homo sapiens
  misc_RNA (1)...(19): siRNA sense strand
uguaucaucuuuggaauug

SEQ ID NO: 2200375 - RNA, 19 nt, Homo sapiens
  misc_RNA (1)...(19): siRNA sense strand
gauggcgagugcuuuguga

SEQ ID NO: 2200376 - RNA, 19 nt, Homo sapiens
  misc_RNA (1)...(19): siRNA sense strand
gcacaauggcaaagucaga

SEQ ID NO: 2200377 - RNA, 19 nt, Homo sapiens
  misc_RNA (1)...(19): siRNA sense strand
aaaggcaggugcugucaau

SEQ ID NO: 2200378 - RNA, 19 nt, Homo sapiens
  misc_RNA (1)...(19): siRNA sense strand
ggcaggugcugucaauuuc

SEQ ID NO: 2200379 - RNA, 19 nt, Homo sapiens
  misc_RNA (1)...(19): siRNA sense strand
guauucauccagugguuua

SEQ ID NO: 2200380 - RNA, 19 nt, Homo sapiens
  misc_RNA (1)...(19): siRNA sense strand
auacagcugugguguguug

SEQ ID NO: 2200381 - RNA, 19 nt, Homo sapiens
  misc_RNA (1)...(19): siRNA sense strand
ccauaggaaugccuucaga

SEQ ID NO: 2200382 - RNA, 19 nt, Homo sapiens
  misc_RNA (1)...(19): siRNA sense strand
gcacucgccugaccaccau

SEQ ID NO: 2200383 - RNA, 19 nt, Homo sapiens
  misc_RNA (1)...(19): siRNA sense strand
ggauagaggucaggaagac

SEQ ID NO: 2200384 - RNA, 19 nt, Homo sapiens
  misc_RNA (1)...(19): siRNA sense strand
agaaguggcaugcuccaua

SEQ ID NO: 2200385 - RNA, 19 nt, Homo sapiens
  misc_RNA (1)...(19): siRNA sense strand
caaagcauccagcacaaug

SEQ ID NO: 2200386 - RNA, 19 nt, Homo sapiens
  misc_RNA (1)...(19): siRNA sense strand
ccuccuaccuucacgauuc

SEQ ID NO: 2200387 - RNA, 19 nt, Homo sapiens
  misc_RNA (1)...(19): siRNA sense strand
agacaaaccccuauuuuaa

SEQ ID NO: 2200388 - RNA, 19 nt, Homo sapiens
  misc_RNA (1)...(19): siRNA sense strand
gaugcugccuccucuucuu

SEQ ID NO: 2200389 - RNA, 19 nt, Homo sapiens
  misc_RNA (1)...(19): siRNA sense strand
uaucggauccaaagaguga

SEQ ID NO: 2200390 - RNA, 19 nt, Homo sapiens
  misc_RNA (1)...(19): siRNA sense strand
ccaaagagugaagaaguuu

SEQ ID NO: 2200391 - RNA, 19 nt, Homo sapiens
  misc_RNA (1)...(19): siRNA sense strand
uccaaagagugaagaaguu

SEQ ID NO: 2200392 - RNA, 19 nt, Homo sapiens
  misc_RNA (1)...(19): siRNA sense strand
gaccuugcauacugucuca

SEQ ID NO: 2200393 - RNA, 19 nt, Homo sapiens
  misc_RNA (1)...(19): siRNA sense strand
cgcaauuugucuuaagaaa

SEQ ID NO: 2200394 - RNA, 19 nt, Homo sapiens
  misc_RNA (1)...(19): siRNA sense strand
cgaaguaggcuagguggaa

SEQ ID NO: 2200395 - RNA, 19 nt, Homo sapiens
  misc_RNA (1)...(19): siRNA sense strand
gaagccagucugucaaaca

SEQ ID NO: 2200396 - RNA, 19 nt, Homo sapiens
  misc_RNA (1)...(19): siRNA sense strand
ugaaagaccccuggacuua

SEQ ID NO: 2200397 - RNA, 19 nt, Homo sapiens
  misc_RNA (1)...(19): siRNA sense strand
gaggcgcaauuugucuuaa

SEQ ID NO: 2200398 - RNA, 19 nt, Homo sapiens
  misc_RNA (1)...(19): siRNA sense strand
gcagaacaacaagaaguga

SEQ ID NO: 2200399 - RNA, 19 nt, Homo sapiens
  misc_RNA (1)...(19): siRNA sense strand
ggaaaccugccugcaaaug

SEQ ID NO: 2200400 - RNA, 19 nt, Homo sapiens
  misc_RNA (1)...(19): siRNA sense strand
caaggaguccguugugauc

SEQ ID NO: 2200401 - RNA, 19 nt, Homo sapiens
  misc_RNA (1)...(19): siRNA sense strand
cgaacuggccagcguagaa

SEQ ID NO: 2200402 - RNA, 19 nt, Homo sapiens
  misc_RNA (1)...(19): siRNA sense strand
cuauacagcuguggugugu

SEQ ID NO: 2200403 - RNA, 19 nt, Homo sapiens
  misc_RNA (1)...(19): siRNA sense strand
aaacaccacaggagucuau

SEQ ID NO: 2200404 - RNA, 19 nt, Homo sapiens
  misc_RNA (1)...(19): siRNA sense strand
cauguucugugcagcauuc

SEQ ID NO: 2200405 - RNA, 19 nt, Homo sapiens
  misc_RNA (1)...(19): siRNA sense strand
gcgacugcaucguguggaa

SEQ ID NO: 2200406 - RNA, 19 nt, Homo sapiens
  misc_RNA (1)...(19): siRNA sense strand
guacgugcccaccgaccua

SEQ ID NO: 2200407 - RNA, 19 nt, Homo sapiens
  misc_RNA (1)...(19): siRNA sense strand
agggauuucugaagucaaa

SEQ ID NO: 2200408 - RNA, 19 nt, Homo sapiens
  misc_RNA (1)...(19): siRNA sense strand
guggaaaggcauccuguga

SEQ ID NO: 2200409 - RNA, 19 nt, Homo sapiens
  misc_RNA (1)...(19): siRNA sense strand
cagagaacuuggugaagag

SEQ ID NO: 2200410 - RNA, 19 nt, Homo sapiens
  misc_RNA (1)...(19): siRNA sense strand
gugcagcauucuacuucaa

SEQ ID NO: 2200411 - RNA, 19 nt, Homo sapiens
  misc_RNA (1)...(19): siRNA sense strand
uaaacacugucggugcaaa

SEQ ID NO: 2200412 - RNA, 19 nt, Homo sapiens
  misc_RNA (1)...(19): siRNA sense strand
gagugaagaaguuuaucaa

SEQ ID NO: 2200413 - RNA, 19 nt, Homo sapiens
  misc_RNA (1)...(19): siRNA sense strand
ggcgcaauuugucuuaaga

SEQ ID NO: 2200414 - RNA, 19 nt, Homo sapiens
  misc_RNA (1)...(19): siRNA sense strand
uauagcagaacaacaagaa

SEQ ID NO: 2200415 - RNA, 19 nt, Homo sapiens
  misc_RNA (1)...(19): siRNA sense strand
cagcugugguguguugaaa

SEQ ID NO: 2200416 - RNA, 19 nt, Homo sapiens
  misc_RNA (1)...(19): siRNA sense strand
gaggucaggaagacuauau

SEQ ID NO: 2200417 - RNA, 19 nt, Homo sapiens
  misc_RNA (1)...(19): siRNA sense strand
cagcugaaagugccacaaa

SEQ ID NO: 2200418 - RNA, 19 nt, Homo sapiens
  misc_RNA (1)...(19): siRNA sense strand
gugcaaagaaggcuaccaa

SEQ ID NO: 2200419 - RNA, 19 nt, Homo sapiens
  misc_RNA (1)...(19): siRNA sense strand
gaaaccugccugcaaaugc

SEQ ID NO: 2200420 - RNA, 19 nt, Homo sapiens
  misc_RNA (1)...(19): siRNA sense strand
ggaguccguugugaucaau

SEQ ID NO: 2200421 - RNA, 19 nt, Homo sapiens
  misc_RNA (1)...(19): siRNA sense strand
aaacugauuccaucuuauc

SEQ ID NO: 2200422 - RNA, 19 nt, Homo sapiens
  misc_RNA (1)...(19): siRNA sense strand
ccagggauuucugaaguca

SEQ ID NO: 2200423 - RNA, 19 nt, Homo sapiens
  misc_RNA (1)...(19): siRNA sense strand
ccucaugcuucucaaaugg

SEQ ID NO: 2200424 - RNA, 19 nt, Homo sapiens
  misc_RNA (1)...(19): siRNA sense strand
gaaagaccccuggacuuaa

SEQ ID NO: 2200425 - RNA, 19 nt, Homo sapiens
  misc_RNA (1)...(19): siRNA sense strand
ucauguaucaucuuuggaa

SEQ ID NO: 2200426 - RNA, 19 nt, Homo sapiens
  misc_RNA (1)...(19): siRNA sense strand
caucuuaucggauccaaag

SEQ ID NO: 2200427 - RNA, 19 nt, Homo sapiens
  misc_RNA (1)...(19): siRNA sense strand
uaggcuagguggaauugug

SEQ ID NO: 2200428 - RNA, 19 nt, Homo sapiens
  misc_RNA (1)...(19): siRNA sense strand
uaucaucuuuggaauuguc

SEQ ID NO: 2200429 - RNA, 19 nt, Homo sapiens
  misc_RNA (1)...(19): siRNA sense strand
aggcaggugcugucaauuu

SEQ ID NO: 2200430 - RNA, 19 nt, Homo sapiens
  misc_RNA (1)...(19): siRNA sense strand
agaggaagccagucuguca

SEQ ID NO: 2200431 - RNA, 19 nt, Homo sapiens
  misc_RNA (1)...(19): siRNA sense strand
gaggacagugcaagcgaaa

SEQ ID NO: 2200432 - RNA, 19 nt, Homo sapiens
  misc_RNA (1)...(19): siRNA sense strand
ucuuauagcagaacaacaa

SEQ ID NO: 2200433 - RNA, 19 nt, Homo sapiens
  misc_RNA (1)...(19): siRNA sense strand
cauaucagcaacucgaaga

SEQ ID NO: 2200434 - RNA, 19 nt, Homo sapiens
  misc_RNA (1)...(19): siRNA sense strand
gaauugugggaccagcaua

SEQ ID NO: 2200435 - RNA, 19 nt, Homo sapiens
  misc_RNA (1)...(19): siRNA sense strand
aaagcaagaaacaagcuaa

SEQ ID NO: 2200436 - RNA, 19 nt, Homo sapiens
  misc_RNA (1)...(19): siRNA sense strand
agaacaacaagaagugaaa

SEQ ID NO: 2200437 - RNA, 19 nt, Homo sapiens
  misc_RNA (1)...(19): siRNA sense strand
ucaguggguuuagaggaaa

SEQ ID NO: 2200438 - RNA, 19 nt, Homo sapiens
  misc_RNA (1)...(19): siRNA sense strand
ccacaagggccaguucugu

SEQ ID NO: 2200439 - RNA, 19 nt, Homo sapiens
  misc_RNA (1)...(19): siRNA sense strand
aaagaccccuggacuuaaa

SEQ ID NO: 2200440 - RNA, 19 nt, Homo sapiens
  misc_RNA (1)...(19): siRNA sense strand
uaucccaccugccuauaca

SEQ ID NO: 2200441 - RNA, 19 nt, Homo sapiens
  misc_RNA (1)...(19): siRNA sense strand
ggcauccugugacugcauu

SEQ ID NO: 2200442 - RNA, 19 nt, Homo sapiens
  misc_RNA (1)...(19): siRNA sense strand
agaacgagaggcgcaauuu

SEQ ID NO: 2200443 - RNA, 19 nt, Homo sapiens
  misc_RNA (1)...(19): siRNA sense strand
guggcaugcuccauaggaa

SEQ ID NO: 2200444 - RNA, 19 nt, Homo sapiens
  misc_RNA (1)...(19): siRNA sense strand
gcgauccgagcacuucaaa

SEQ ID NO: 2200445 - RNA, 19 nt, Homo sapiens
  misc_RNA (1)...(19): siRNA sense strand
gagaggcgcaauuugucuu

SEQ ID NO: 2200446 - RNA, 19 nt, Homo sapiens
  misc_RNA (1)...(19): siRNA sense strand
gccucaugcuucucaaaug

SEQ ID NO: 2200447 - RNA, 19 nt, Homo sapiens
  misc_RNA (1)...(19): siRNA sense strand
cagcgauugucuuauagca

SEQ ID NO: 2200448 - RNA, 19 nt, Homo sapiens
  misc_RNA (1)...(19): siRNA sense strand
ucuccaagcccagcucuuu

SEQ ID NO: 2200449 - RNA, 19 nt, Homo sapiens
  misc_RNA (1)...(19): siRNA sense strand
ugccagggauuucugaagu

SEQ ID NO: 2200450 - RNA, 19 nt, Homo sapiens
  misc_RNA (1)...(19): siRNA sense strand
agaggaaaccugccugcaa

SEQ ID NO: 2200451 - RNA, 19 nt, Homo sapiens
  misc_RNA (1)...(19): siRNA sense strand
gcaaagacaugcgcaaguu

SEQ ID NO: 2200452 - RNA, 19 nt, Homo sapiens
  misc_RNA (1)...(19): siRNA sense strand
ggaagagccuuucgugaug

SEQ ID NO: 2200453 - RNA, 19 nt, Homo sapiens
  misc_RNA (1)...(19): siRNA sense strand
gcucugggcuuuaaauaug

SEQ ID NO: 2200454 - RNA, 19 nt, Homo sapiens
  misc_RNA (1)...(19): siRNA sense strand
gcacaucccacaccucuuu

SEQ ID NO: 2200455 - RNA, 19 nt, Homo sapiens
  misc_RNA (1)...(19): siRNA sense strand
ccacaucggugccaucuuc

SEQ ID NO: 2200456 - RNA, 19 nt, Homo sapiens
  misc_RNA (1)...(19): siRNA sense strand
gaacauuagccacguauuc

SEQ ID NO: 2200457 - RNA, 19 nt, Homo sapiens
  misc_RNA (1)...(19): siRNA sense strand
gcacagcgccaucuggauu

SEQ ID NO: 2200458 - RNA, 19 nt, Homo sapiens
  misc_RNA (1)...(19): siRNA sense strand
ccaaggcucugggcuuuaa

SEQ ID NO: 2200459 - RNA, 19 nt, Homo sapiens
  misc_RNA (1)...(19): siRNA sense strand
cuccaaggauugacucuua

SEQ ID NO: 2200460 - RNA, 19 nt, Homo sapiens
  misc_RNA (1)...(19): siRNA sense strand
cagcaaggguuacgggauu

SEQ ID NO: 2200461 - RNA, 19 nt, Homo sapiens
  misc_RNA (1)...(19): siRNA sense strand
caagaacauuagccacgua

SEQ ID NO: 2200462 - RNA, 19 nt, Homo sapiens
  misc_RNA (1)...(19): siRNA sense strand
cuacaaaggguucuccaua

SEQ ID NO: 2200463 - RNA, 19 nt, Homo sapiens
  misc_RNA (1)...(19): siRNA sense strand
caaaggacaaucagaaaug

SEQ ID NO: 2200464 - RNA, 19 nt, Homo sapiens
  misc_RNA (1)...(19): siRNA sense strand
gaaucccuauguccaguuu

SEQ ID NO: 2200465 - RNA, 19 nt, Homo sapiens
  misc_RNA (1)...(19): siRNA sense strand
gcagaucuccaaccucuau

SEQ ID NO: 2200466 - RNA, 19 nt, Homo sapiens
  misc_RNA (1)...(19): siRNA sense strand
gcgagaagaucaccuacuc

SEQ ID NO: 2200467 - RNA, 19 nt, Homo sapiens
  misc_RNA (1)...(19): siRNA sense strand
ggccaaggcucugggcuuu

SEQ ID NO: 2200468 - RNA, 19 nt, Homo sapiens
  misc_RNA (1)...(19): siRNA sense strand
ggaagccugugaccucaug

SEQ ID NO: 2200469 - RNA, 19 nt, Homo sapiens
  misc_RNA (1)...(19): siRNA sense strand
gcaaaggacaaucagaaau

SEQ ID NO: 2200470 - RNA, 19 nt, Homo sapiens
  misc_RNA (1)...(19): siRNA sense strand
acaaaggguucuccauaga

SEQ ID NO: 2200471 - RNA, 19 nt, Homo sapiens
  misc_RNA (1)...(19): siRNA sense strand
ggacagccacugggucuuu

SEQ ID NO: 2200472 - RNA, 19 nt, Homo sapiens
  misc_RNA (1)...(19): siRNA sense strand
ccaaacaaguggaaauguc

SEQ ID NO: 2200473 - RNA, 19 nt, Homo sapiens
  misc_RNA (1)...(19): siRNA sense strand
ggcagaaguucgucauguu

SEQ ID NO: 2200474 - RNA, 19 nt, Homo sapiens
  misc_RNA (1)...(19): siRNA sense strand
ggagagcguuguggacuuc

SEQ ID NO: 2200475 - RNA, 19 nt, Homo sapiens
  misc_RNA (1)...(19): siRNA sense strand
gggauucugcuguauauga

SEQ ID NO: 2200476 - RNA, 19 nt, Homo sapiens
  misc_RNA (1)...(19): siRNA sense strand
ccacaucacuggccucacu

SEQ ID NO: 2200477 - RNA, 19 nt, Homo sapiens
  misc_RNA (1)...(19): siRNA sense strand
uuaagaagcccgaggagaa

SEQ ID NO: 2200478 - RNA, 19 nt, Homo sapiens
  misc_RNA (1)...(19): siRNA sense strand
ucaccacgaugaagacaga

SEQ ID NO: 2200479 - RNA, 19 nt, Homo sapiens
  misc_RNA (1)...(19): siRNA sense strand
ucuccaaccucuaucugua

SEQ ID NO: 2200480 - RNA, 19 nt, Homo sapiens
  misc_RNA (1)...(19): siRNA sense strand
gaccggaaguggcauagca

SEQ ID NO: 2200481 - RNA, 19 nt, Homo sapiens
  misc_RNA (1)...(19): siRNA sense strand
ccacgggaccuccaucuga

SEQ ID NO: 2200482 - RNA, 19 nt, Homo sapiens
  misc_RNA (1)...(19): siRNA sense strand
ggaaggcuaccuccagaug

SEQ ID NO: 2200483 - RNA, 19 nt, Homo sapiens
  misc_RNA (1)...(19): siRNA sense strand
gagcaggacagcacguuug

SEQ ID NO: 2200484 - RNA, 19 nt, Homo sapiens
  misc_RNA (1)...(19): siRNA sense strand
uacaaaggguucuccauag

SEQ ID NO: 2200485 - RNA, 19 nt, Homo sapiens
  misc_RNA (1)...(19): siRNA sense strand
aauggcagcuugcaagaga

SEQ ID NO: 2200486 - RNA, 19 nt, Homo sapiens
  misc_RNA (1)...(19): siRNA sense strand
agaccaaccuggcuuccaa

SEQ ID NO: 2200487 - RNA, 19 nt, Homo sapiens
  misc_RNA (1)...(19): siRNA sense strand
gugcugauauuuguguuga

SEQ ID NO: 2200488 - RNA, 19 nt, Homo sapiens
  misc_RNA (1)...(19): siRNA sense strand
aaaggguucuccauagaug

SEQ ID NO: 2200489 - RNA, 19 nt, Homo sapiens
  misc_RNA (1)...(19): siRNA sense strand
gcagccgccuccaaggauu

SEQ ID NO: 2200490 - RNA, 19 nt, Homo sapiens
  misc_RNA (1)...(19): siRNA sense strand
guaugacaguguucugaug

SEQ ID NO: 2200491 - RNA, 19 nt, Homo sapiens
  misc_RNA (1)...(19): siRNA sense strand
ugaaugaggaaaucaguga

SEQ ID NO: 2200492 - RNA, 19 nt, Homo sapiens
  misc_RNA (1)...(19): siRNA sense strand
gcagaaguucgucauguuc

SEQ ID NO: 2200493 - RNA, 19 nt, Homo sapiens
  misc_RNA (1)...(19): siRNA sense strand
acgcagcccugacggauga

SEQ ID NO: 2200494 - RNA, 19 nt, Homo sapiens
  misc_RNA (1)...(19): siRNA sense strand
gagcagacuuggccaucuc

SEQ ID NO: 2200495 - RNA, 19 nt, Homo sapiens
  misc_RNA (1)...(19): siRNA sense strand
cgacaugggacucagagaa

SEQ ID NO: 2200496 - RNA, 19 nt, Homo sapiens
  misc_RNA (1)...(19): siRNA sense strand
gaagacagaggagcugaau

SEQ ID NO: 2200497 - RNA, 19 nt, Homo sapiens
  misc_RNA (1)...(19): siRNA sense strand
aggauugacucuuaaagug

SEQ ID NO: 2200498 - RNA, 19 nt, Homo sapiens
  misc_RNA (1)...(19): siRNA sense strand
uaagaagcccgaggagaaa

SEQ ID NO: 2200499 - RNA, 19 nt, Homo sapiens
  misc_RNA (1)...(19): siRNA sense strand
cuugacgucucuuuacaaa

SEQ ID NO: 2200500 - RNA, 19 nt, Homo sapiens
  misc_RNA (1)...(19): siRNA sense strand
gggagagcguuguggacuu

SEQ ID NO: 2200501 - RNA, 19 nt, Homo sapiens
  misc_RNA (1)...(19): siRNA sense strand
ggaccuggaugugcugaag

SEQ ID NO: 2200502 - RNA, 19 nt, Homo sapiens
  misc_RNA (1)...(19): siRNA sense strand
gaacucuggcggaccauca

SEQ ID NO: 2200503 - RNA, 19 nt, Homo sapiens
  misc_RNA (1)...(19): siRNA sense strand
uacaaaagguggacaagaa

SEQ ID NO: 2200504 - RNA, 19 nt, Homo sapiens
  misc_RNA (1)...(19): siRNA sense strand
cagcaucuucucccucuuu

SEQ ID NO: 2200505 - RNA, 19 nt, Homo sapiens
  misc_RNA (1)...(19): siRNA sense strand
gcauacggaaauccacuaa

SEQ ID NO: 2200506 - RNA, 19 nt, Homo sapiens
  misc_RNA (1)...(19): siRNA sense strand
cgacagcgaguaugauauc

SEQ ID NO: 2200507 - RNA, 19 nt, Homo sapiens
  misc_RNA (1)...(19): siRNA sense strand
gcaacagcaucagcagcaa

SEQ ID NO: 2200508 - RNA, 19 nt, Homo sapiens
  misc_RNA (1)...(19): siRNA sense strand
ccgggauucugcuguauau

SEQ ID NO: 2200509 - RNA, 19 nt, Homo sapiens
  misc_RNA (1)...(19): siRNA sense strand
cgacaggguguuccaguug

SEQ ID NO: 2200510 - RNA, 19 nt, Homo sapiens
  misc_RNA (1)...(19): siRNA sense strand
ccucuuugcuccauuugau

SEQ ID NO: 2200511 - RNA, 19 nt, Homo sapiens
  misc_RNA (1)...(19): siRNA sense strand
ggacaguucgaaucccuau

SEQ ID NO: 2200512 - RNA, 19 nt, Homo sapiens
  misc_RNA (1)...(19): siRNA sense strand
caugcuggauaccaucaaa

SEQ ID NO: 2200513 - RNA, 19 nt, Homo sapiens
  misc_RNA (1)...(19): siRNA sense strand
ccaaggaggacaaagaagu

SEQ ID NO: 2200514 - RNA, 19 nt, Homo sapiens
  misc_RNA (1)...(19): siRNA sense strand
ggauucugcuguauaugag

SEQ ID NO: 2200515 - RNA, 19 nt, Homo sapiens
  misc_RNA (1)...(19): siRNA sense strand
cuaccuauagugagacuuu

SEQ ID NO: 2200516 - RNA, 19 nt, Homo sapiens
  misc_RNA (1)...(19): siRNA sense strand
aagaucaccuacuccauca

SEQ ID NO: 2200517 - RNA, 19 nt, Homo sapiens
  misc_RNA (1)...(19): siRNA sense strand
caaggaggacaaagaagug

SEQ ID NO: 2200518 - RNA, 19 nt, Homo sapiens
  misc_RNA (1)...(19): siRNA sense strand
gggccuugacgucucuuua

SEQ ID NO: 2200519 - RNA, 19 nt, Homo sapiens
  misc_RNA (1)...(19): siRNA sense strand
acagcaagguggcgaaucu

SEQ ID NO: 2200520 - RNA, 19 nt, Homo sapiens
  misc_RNA (1)...(19): siRNA sense strand
caaaggguucuccauagau

SEQ ID NO: 2200521 - RNA, 19 nt, Homo sapiens
  misc_RNA (1)...(19): siRNA sense strand
uuaaaguggugacugucuu

SEQ ID NO: 2200522 - RNA, 19 nt, Homo sapiens
  misc_RNA (1)...(19): siRNA sense strand
caaagacaugcgcaaguug

SEQ ID NO: 2200523 - RNA, 19 nt, Homo sapiens
  misc_RNA (1)...(19): siRNA sense strand
ccaacgccuuucacaggaa

SEQ ID NO: 2200524 - RNA, 19 nt, Homo sapiens
  misc_RNA (1)...(19): siRNA sense strand
gaugcuggccaacgccuuu

SEQ ID NO: 2200525 - RNA, 19 nt, Homo sapiens
  misc_RNA (1)...(19): siRNA sense strand
gcaagcgguacauggacua

SEQ ID NO: 2200526 - RNA, 19 nt, Homo sapiens
  misc_RNA (1)...(19): siRNA sense strand
ggagcaggacagcacguuu

SEQ ID NO: 2200527 - RNA, 19 nt, Homo sapiens
  misc_RNA (1)...(19): siRNA sense strand
caucuggauugucuaugga

SEQ ID NO: 2200528 - RNA, 19 nt, Homo sapiens
  misc_RNA (1)...(19): siRNA sense strand
gccacugggucuuugugaa

SEQ ID NO: 2200529 - RNA, 19 nt, Homo sapiens
  misc_RNA (1)...(19): siRNA sense strand
ugaagacauugcucacaag

SEQ ID NO: 2200530 - RNA, 19 nt, Homo sapiens
  misc_RNA (1)...(19): siRNA sense strand
caaguggaaaugucuuaug

SEQ ID NO: 2200531 - RNA, 19 nt, Homo sapiens
  misc_RNA (1)...(19): siRNA sense strand
uggaagagccuuucgugau

SEQ ID NO: 2200532 - RNA, 19 nt, Homo sapiens
  misc_RNA (1)...(19): siRNA sense strand
uccaaggauugacucuuaa

SEQ ID NO: 2200533 - RNA, 19 nt, Homo sapiens
  misc_RNA (1)...(19): siRNA sense strand
ccacugggucuuugugaau

SEQ ID NO: 2200534 - RNA, 19 nt, Homo sapiens
  misc_RNA (1)...(19): siRNA sense strand
uacgacagcgaguaugaua

SEQ ID NO: 2200535 - RNA, 19 nt, Homo sapiens
  misc_RNA (1)...(19): siRNA sense strand
augaagacauugcucacaa

SEQ ID NO: 2200536 - RNA, 19 nt, Homo sapiens
  misc_RNA (1)...(19): siRNA sense strand
ggauguggccgugguggaa

SEQ ID NO: 2200537 - RNA, 19 nt, Homo sapiens
  misc_RNA (1)...(19): siRNA sense strand
uggcgaaucuuccgugaac

SEQ ID NO: 2200538 - RNA, 19 nt, Homo sapiens
  misc_RNA (1)...(19): siRNA sense strand
ccaaggauugacucuuaaa

SEQ ID NO: 2200539 - RNA, 19 nt, Homo sapiens
  misc_RNA (1)...(19): siRNA sense strand
uggcagaaguucgucaugu

SEQ ID NO: 2200540 - RNA, 19 nt, Homo sapiens
  misc_RNA (1)...(19): siRNA sense strand
cagagaagggcuugaaugg

SEQ ID NO: 2200541 - RNA, 19 nt, Homo sapiens
  misc_RNA (1)...(19): siRNA sense strand
ucagagaagggcuugaaug

SEQ ID NO: 2200542 - RNA, 19 nt, Homo sapiens
  misc_RNA (1)...(19): siRNA sense strand
gacagccacugggucuuug

SEQ ID NO: 2200543 - RNA, 19 nt, Homo sapiens
  misc_RNA (1)...(19): siRNA sense strand
gauauccgugggcuucaaa

SEQ ID NO: 2200544 - RNA, 19 nt, Homo sapiens
  misc_RNA (1)...(19): siRNA sense strand
gcaucagcagcaaggguua

SEQ ID NO: 2200545 - RNA, 19 nt, Homo sapiens
  misc_RNA (1)...(19): siRNA sense strand
gcaucaggaaggcaaagaa

SEQ ID NO: 2200546 - RNA, 19 nt, Homo sapiens
  misc_RNA (1)...(19): siRNA sense strand
uguccgggauucugcugua

SEQ ID NO: 2200547 - RNA, 19 nt, Homo sapiens
  misc_RNA (1)...(19): siRNA sense strand
caaacaaguggaaaugucu

SEQ ID NO: 2200548 - RNA, 19 nt, Homo sapiens
  misc_RNA (1)...(19): siRNA sense strand
gaucaccuacuccaucaag

SEQ ID NO: 2200549 - RNA, 19 nt, Homo sapiens
  misc_RNA (1)...(19): siRNA sense strand
cgacacgggaguaccagaa

SEQ ID NO: 2200550 - RNA, 19 nt, Homo sapiens
  misc_RNA (1)...(19): siRNA sense strand
uaaaguggugacugucuug

SEQ ID NO: 2200551 - RNA, 19 nt, Homo sapiens
  misc_RNA (1)...(19): siRNA sense strand
gaacauggaucuugauaga

SEQ ID NO: 2200552 - RNA, 19 nt, Homo sapiens
  misc_RNA (1)...(19): siRNA sense strand
caaccgggcuuccuauuua

SEQ ID NO: 2200553 - RNA, 19 nt, Homo sapiens
  misc_RNA (1)...(19): siRNA sense strand
gaagaaaccuaaaguggaa

SEQ ID NO: 2200554 - RNA, 19 nt, Homo sapiens
  misc_RNA (1)...(19): siRNA sense strand
ggagauaaaucaaaggaaa

SEQ ID NO: 2200555 - RNA, 19 nt, Homo sapiens
  misc_RNA (1)...(19): siRNA sense strand
gaauguaacuaaccaugua

SEQ ID NO: 2200556 - RNA, 19 nt, Homo sapiens
  misc_RNA (1)...(19): siRNA sense strand
ugaagaagcccauaaauaa

SEQ ID NO: 2200557 - RNA, 19 nt, Homo sapiens
  misc_RNA (1)...(19): siRNA sense strand
gagcagagauuugauauuc

SEQ ID NO: 2200558 - RNA, 19 nt, Homo sapiens
  misc_RNA (1)...(19): siRNA sense strand
gcaaacacauggaggauug

SEQ ID NO: 2200559 - RNA, 19 nt, Homo sapiens
  misc_RNA (1)...(19): siRNA sense strand
cagauaaaguggagaauuu

SEQ ID NO: 2200560 - RNA, 19 nt, Homo sapiens
  misc_RNA (1)...(19): siRNA sense strand
agaaacaaguggagaaaua

SEQ ID NO: 2200561 - RNA, 19 nt, Homo sapiens
  misc_RNA (1)...(19): siRNA sense strand
gaaggagacuuuucaauaa

SEQ ID NO: 2200562 - RNA, 19 nt, Homo sapiens
  misc_RNA (1)...(19): siRNA sense strand
gaugauaguuuaaggauag

SEQ ID NO: 2200563 - RNA, 19 nt, Homo sapiens
  misc_RNA (1)...(19): siRNA sense strand
gaacugguuuguuugaaug

SEQ ID NO: 2200564 - RNA, 19 nt, Homo sapiens
  misc_RNA (1)...(19): siRNA sense strand
gaagaagcccauaaauaaa

SEQ ID NO: 2200565 - RNA, 19 nt, Homo sapiens
  misc_RNA (1)...(19): siRNA sense strand
ggacuacccuuagcacaaa

SEQ ID NO: 2200566 - RNA, 19 nt, Homo sapiens
  misc_RNA (1)...(19): siRNA sense strand
gaaaguccaaucaauguaa

SEQ ID NO: 2200567 - RNA, 19 nt, Homo sapiens
  misc_RNA (1)...(19): siRNA sense strand
ucagaaauaucuccaauca

SEQ ID NO: 2200568 - RNA, 19 nt, Homo sapiens
  misc_RNA (1)...(19): siRNA sense strand
guacagaagagaaacauaa

SEQ ID NO: 2200569 - RNA, 19 nt, Homo sapiens
  misc_RNA (1)...(19): siRNA sense strand
gggcuuaggucugcugaua

SEQ ID NO: 2200570 - RNA, 19 nt, Homo sapiens
  misc_RNA (1)...(19): siRNA sense strand
gaagaggcccaauuucaaa

SEQ ID NO: 2200571 - RNA, 19 nt, Homo sapiens
  misc_RNA (1)...(19): siRNA sense strand
ggaggaggaugaagaacuu

SEQ ID NO: 2200572 - RNA, 19 nt, Homo sapiens
  misc_RNA (1)...(19): siRNA sense strand
agaaauaucuccaaucaag

SEQ ID NO: 2200573 - RNA, 19 nt, Homo sapiens
  misc_RNA (1)...(19): siRNA sense strand
gauaaaugcuucccuuugg

SEQ ID NO: 2200574 - RNA, 19 nt, Homo sapiens
  misc_RNA (1)...(19): siRNA sense strand
ugauaaaucuaguggagua

SEQ ID NO: 2200575 - RNA, 19 nt, Homo sapiens
  misc_RNA (1)...(19): siRNA sense strand
gcaggagacugguuuaaag

SEQ ID NO: 2200576 - RNA, 19 nt, Homo sapiens
  misc_RNA (1)...(19): siRNA sense strand
cagccaagcuacugaauga

SEQ ID NO: 2200577 - RNA, 19 nt, Homo sapiens
  misc_RNA (1)...(19): siRNA sense strand
gugaagaagcccauaaaua

SEQ ID NO: 2200578 - RNA, 19 nt, Homo sapiens
  misc_RNA (1)...(19): siRNA sense strand
gaguaaagauggccugaau

SEQ ID NO: 2200579 - RNA, 19 nt, Homo sapiens
  misc_RNA (1)...(19): siRNA sense strand
cagaugaguugaucaaaga

SEQ ID NO: 2200580 - RNA, 19 nt, Homo sapiens
  misc_RNA (1)...(19): siRNA sense strand
gaagauaucagaucagaag

SEQ ID NO: 2200581 - RNA, 19 nt, Homo sapiens
  misc_RNA (1)...(19): siRNA sense strand
gagagauguuuacgaguuu

SEQ ID NO: 2200582 - RNA, 19 nt, Homo sapiens
  misc_RNA (1)...(19): siRNA sense strand
gacaggaggugaugaagga

SEQ ID NO: 2200583 - RNA, 19 nt, Homo sapiens
  misc_RNA (1)...(19): siRNA sense strand
gcuaaagcauuacagcauu

SEQ ID NO: 2200584 - RNA, 19 nt, Homo sapiens
  misc_RNA (1)...(19): siRNA sense strand
caaaccagauauccaagaa

SEQ ID NO: 2200585 - RNA, 19 nt, Homo sapiens
  misc_RNA (1)...(19): siRNA sense strand
gagacauuauuaucccuua

SEQ ID NO: 2200586 - RNA, 19 nt, Homo sapiens
  misc_RNA (1)...(19): siRNA sense strand
cagcugcccucauguauau

SEQ ID NO: 2200587 - RNA, 19 nt, Homo sapiens
  misc_RNA (1)...(19): siRNA sense strand
gcaccaccauccaaaguga

SEQ ID NO: 2200588 - RNA, 19 nt, Homo sapiens
  misc_RNA (1)...(19): siRNA sense strand
gaucuaaugauucgacuuu

SEQ ID NO: 2200589 - RNA, 19 nt, Homo sapiens
  misc_RNA (1)...(19): siRNA sense strand
gcagagauuugauauucga

SEQ ID NO: 2200590 - RNA, 19 nt, Homo sapiens
  misc_RNA (1)...(19): siRNA sense strand
uguuagaacugguuuguuu

SEQ ID NO: 2200591 - RNA, 19 nt, Homo sapiens
  misc_RNA (1)...(19): siRNA sense strand
gaaggagguucuggaaguu

SEQ ID NO: 2200592 - RNA, 19 nt, Homo sapiens
  misc_RNA (1)...(19): siRNA sense strand
gcuuaggucugcugauaaa

SEQ ID NO: 2200593 - RNA, 19 nt, Homo sapiens
  misc_RNA (1)...(19): siRNA sense strand
uauaacgacugggcauuua

SEQ ID NO: 2200594 - RNA, 19 nt, Homo sapiens
  misc_RNA (1)...(19): siRNA sense strand
aaacuacaguggcuucuga

SEQ ID NO: 2200595 - RNA, 19 nt, Homo sapiens
  misc_RNA (1)...(19): siRNA sense strand
gaagauauuguacaaagug

SEQ ID NO: 2200596 - RNA, 19 nt, Homo sapiens
  misc_RNA (1)...(19): siRNA sense strand
ggagagaccacauuuaugg

SEQ ID NO: 2200597 - RNA, 19 nt, Homo sapiens
  misc_RNA (1)...(19): siRNA sense strand
ggccagaaaucuaucucua

SEQ ID NO: 2200598 - RNA, 19 nt, Homo sapiens
  misc_RNA (1)...(19): siRNA sense strand
aaggauagguggacaaguu

SEQ ID NO: 2200599 - RNA, 19 nt, Homo sapiens
  misc_RNA (1)...(19): siRNA sense strand
ggaugauaguuuaaggaua

SEQ ID NO: 2200600 - RNA, 19 nt, Homo sapiens
  misc_RNA (1)...(19): siRNA sense strand
ugauagagcuagcuuagau

SEQ ID NO: 2200601 - RNA, 19 nt, Homo sapiens
  misc_RNA (1)...(19): siRNA sense strand
caagggaucuguuagaacu

SEQ ID NO: 2200602 - RNA, 19 nt, Homo sapiens
  misc_RNA (1)...(19): siRNA sense strand
ugacauugaguacuuguua

SEQ ID NO: 2200603 - RNA, 19 nt, Homo sapiens
  misc_RNA (1)...(19): siRNA sense strand
ugaggaagauauuguacaa

SEQ ID NO: 2200604 - RNA, 19 nt, Homo sapiens
  misc_RNA (1)...(19): siRNA sense strand
gaacaacuggccagaaauc

SEQ ID NO: 2200605 - RNA, 19 nt, Homo sapiens
  misc_RNA (1)...(19): siRNA sense strand
agagagauguuuacgaguu

SEQ ID NO: 2200606 - RNA, 19 nt, Homo sapiens
  misc_RNA (1)...(19): siRNA sense strand
gacuagagauuacacuguu

SEQ ID NO: 2200607 - RNA, 19 nt, Homo sapiens
  misc_RNA (1)...(19): siRNA sense strand
guaaagauggccugaauca

SEQ ID NO: 2200608 - RNA, 19 nt, Homo sapiens
  misc_RNA (1)...(19): siRNA sense strand
uagugaagcugcucaguug

SEQ ID NO: 2200609 - RNA, 19 nt, Homo sapiens
  misc_RNA (1)...(19): siRNA sense strand
gaaucucacuugugcuguu

SEQ ID NO: 2200610 - RNA, 19 nt, Homo sapiens
  misc_RNA (1)...(19): siRNA sense strand
gcaagaaacaaguggagaa

SEQ ID NO: 2200611 - RNA, 19 nt, Homo sapiens
  misc_RNA (1)...(19): siRNA sense strand
gagacugguuuaaagaaga

SEQ ID NO: 2200612 - RNA, 19 nt, Homo sapiens
  misc_RNA (1)...(19): siRNA sense strand
agaguucacugaugacauu

SEQ ID NO: 2200613 - RNA, 19 nt, Homo sapiens
  misc_RNA (1)...(19): siRNA sense strand
gcccauaaauaaacaagga

SEQ ID NO: 2200614 - RNA, 19 nt, Homo sapiens
  misc_RNA (1)...(19): siRNA sense strand
ugaaggagguucuggaagu

SEQ ID NO: 2200615 - RNA, 19 nt, Homo sapiens
  misc_RNA (1)...(19): siRNA sense strand
gaugaaggaugacgauuuu

SEQ ID NO: 2200616 - RNA, 19 nt, Homo sapiens
  misc_RNA (1)...(19): siRNA sense strand
agaaucaccaucagaaaua

SEQ ID NO: 2200617 - RNA, 19 nt, Homo sapiens
  misc_RNA (1)...(19): siRNA sense strand
gaaaucaaggaaacaaaug

SEQ ID NO: 2200618 - RNA, 19 nt, Homo sapiens
  misc_RNA (1)...(19): siRNA sense strand
ucucuagagugauugaaua

SEQ ID NO: 2200619 - RNA, 19 nt, Homo sapiens
  misc_RNA (1)...(19): siRNA sense strand
uggaacaacuggccagaaa

SEQ ID NO: 2200620 - RNA, 19 nt, Homo sapiens
  misc_RNA (1)...(19): siRNA sense strand
ccaggaaaguccaaucaau

SEQ ID NO: 2200621 - RNA, 19 nt, Homo sapiens
  misc_RNA (1)...(19): siRNA sense strand
gacauugaguacuuguuaa

SEQ ID NO: 2200622 - RNA, 19 nt, Homo sapiens
  misc_RNA (1)...(19): siRNA sense strand
ccaagaaauuccgaagaaa

SEQ ID NO: 2200623 - RNA, 19 nt, Homo sapiens
  misc_RNA (1)...(19): siRNA sense strand
ggaaaguccaaucaaugua

SEQ ID NO: 2200624 - RNA, 19 nt, Homo sapiens
  misc_RNA (1)...(19): siRNA sense strand
gagaugaggaugaagagaa

SEQ ID NO: 2200625 - RNA, 19 nt, Homo sapiens
  misc_RNA (1)...(19): siRNA sense strand
gaguagagaucguuugaac

SEQ ID NO: 2200626 - RNA, 19 nt, Homo sapiens
  misc_RNA (1)...(19): siRNA sense strand
gcaaacagugaaucgagua

SEQ ID NO: 2200627 - RNA, 19 nt, Homo sapiens
  misc_RNA (1)...(19): siRNA sense strand
ccaaucaagggaucuguua

SEQ ID NO: 2200628 - RNA, 19 nt, Homo sapiens
  misc_RNA (1)...(19): siRNA sense strand
uaagaaacccaaugcagaa

SEQ ID NO: 2200629 - RNA, 19 nt, Homo sapiens
  misc_RNA (1)...(19): siRNA sense strand
gaaucaccaucagaaauau

SEQ ID NO: 2200630 - RNA, 19 nt, Homo sapiens
  misc_RNA (1)...(19): siRNA sense strand
gaaauacagugggugucaa

SEQ ID NO: 2200631 - RNA, 19 nt, Homo sapiens
  misc_RNA (1)...(19): siRNA sense strand
gagagcacaugggauggua

SEQ ID NO: 2200632 - RNA, 19 nt, Homo sapiens
  misc_RNA (1)...(19): siRNA sense strand
cuaaacacacguugccuua

SEQ ID NO: 2200633 - RNA, 19 nt, Homo sapiens
  misc_RNA (1)...(19): siRNA sense strand
gaggcugucuucaaaggaa

SEQ ID NO: 2200634 - RNA, 19 nt, Homo sapiens
  misc_RNA (1)...(19): siRNA sense strand
cagugaggcugucuucaaa

SEQ ID NO: 2200635 - RNA, 19 nt, Homo sapiens
  misc_RNA (1)...(19): siRNA sense strand
ccagaaagcaaugauaauu

SEQ ID NO: 2200636 - RNA, 19 nt, Homo sapiens
  misc_RNA (1)...(19): siRNA sense strand
ggaagauauuguacaaagu

SEQ ID NO: 2200637 - RNA, 19 nt, Homo sapiens
  misc_RNA (1)...(19): siRNA sense strand
gcagauauugcaacuucua

SEQ ID NO: 2200638 - RNA, 19 nt, Homo sapiens
  misc_RNA (1)...(19): siRNA sense strand
gaaaguguaacugugcaua

SEQ ID NO: 2200639 - RNA, 19 nt, Homo sapiens
  misc_RNA (1)...(19): siRNA sense strand
gcauuuagcuauggagaca

SEQ ID NO: 2200640 - RNA, 19 nt, Homo sapiens
  misc_RNA (1)...(19): siRNA sense strand
acgagaagacaaagaauua

SEQ ID NO: 2200641 - RNA, 19 nt, Homo sapiens
  misc_RNA (1)...(19): siRNA sense strand
uauaguuacugcacugaaa

SEQ ID NO: 2200642 - RNA, 19 nt, Homo sapiens
  misc_RNA (1)...(19): siRNA sense strand
ucaaaggaaccaaaucaaa

SEQ ID NO: 2200643 - RNA, 19 nt, Homo sapiens
  misc_RNA (1)...(19): siRNA sense strand
ccacaaaagcuguauauaa

SEQ ID NO: 2200644 - RNA, 19 nt, Homo sapiens
  misc_RNA (1)...(19): siRNA sense strand
gcgaagaugaugaagauga

SEQ ID NO: 2200645 - RNA, 19 nt, Homo sapiens
  misc_RNA (1)...(19): siRNA sense strand
aagcgaagaugaugaagau

SEQ ID NO: 2200646 - RNA, 19 nt, Homo sapiens
  misc_RNA (1)...(19): siRNA sense strand
guucuggaaguucuaauua

SEQ ID NO: 2200647 - RNA, 19 nt, Homo sapiens
  misc_RNA (1)...(19): siRNA sense strand
caucagaaauaucuccaau

SEQ ID NO: 2200648 - RNA, 19 nt, Homo sapiens
  misc_RNA (1)...(19): siRNA sense strand
caacuggccagaaaucuau

SEQ ID NO: 2200649 - RNA, 19 nt, Homo sapiens
  misc_RNA (1)...(19): siRNA sense strand
uucaucagcuaaagcauua

SEQ ID NO: 2200650 - RNA, 19 nt, Homo sapiens
  misc_RNA (1)...(19): siRNA sense strand
ugaugaagaugaugacugu

SEQ ID NO: 2200651 - RNA, 19 nt, Homo sapiens
  misc_RNA (1)...(19): siRNA sense strand
gcaagacccugaugaagaa

SEQ ID NO: 2200652 - RNA, 19 nt, Homo sapiens
  misc_RNA (1)...(19): siRNA sense strand
ggacagaauucaugcaaga

SEQ ID NO: 2200653 - RNA, 19 nt, Homo sapiens
  misc_RNA (1)...(19): siRNA sense strand
gagaaagacuacaucaauc

SEQ ID NO: 2200654 - RNA, 19 nt, Homo sapiens
  misc_RNA (1)...(19): siRNA sense strand
gcacgacaccugcuucauu

SEQ ID NO: 2200655 - RNA, 19 nt, Homo sapiens
  misc_RNA (1)...(19): siRNA sense strand
cacgacaccugcuucauuu

SEQ ID NO: 2200656 - RNA, 19 nt, Homo sapiens
  misc_RNA (1)...(19): siRNA sense strand
cgagaaagacuacaucaau

SEQ ID NO: 2200657 - RNA, 19 nt, Homo sapiens
  misc_RNA (1)...(19): siRNA sense strand
agaacaacguuuacuguga

SEQ ID NO: 2200658 - RNA, 19 nt, Homo sapiens
  misc_RNA (1)...(19): siRNA sense strand
gaacagccucuuccacaug

SEQ ID NO: 2200659 - RNA, 19 nt, Homo sapiens
  misc_RNA (1)...(19): siRNA sense strand
gaaaucaaagcgucccauu

SEQ ID NO: 2200660 - RNA, 19 nt, Homo sapiens
  misc_RNA (1)...(19): siRNA sense strand
gaacaagccagaagaugag

SEQ ID NO: 2200661 - RNA, 19 nt, Homo sapiens
  misc_RNA (1)...(19): siRNA sense strand
ccagagggcugagcgauuc

SEQ ID NO: 2200662 - RNA, 19 nt, Homo sapiens
  misc_RNA (1)...(19): siRNA sense strand
gcagaacaacguuuacugu

SEQ ID NO: 2200663 - RNA, 19 nt, Homo sapiens
  misc_RNA (1)...(19): siRNA sense strand
gcacacaccaucaacuugu

SEQ ID NO: 2200664 - RNA, 19 nt, Homo sapiens
  misc_RNA (1)...(19): siRNA sense strand
gaagagcagaacaacguuu

SEQ ID NO: 2200665 - RNA, 19 nt, Homo sapiens
  misc_RNA (1)...(19): siRNA sense strand
agacuucccuggcagaugu

SEQ ID NO: 2200666 - RNA, 19 nt, Homo sapiens
  misc_RNA (1)...(19): siRNA sense strand
gggcaaggacuucaacaug

SEQ ID NO: 2200667 - RNA, 19 nt, Homo sapiens
  misc_RNA (1)...(19): siRNA sense strand
agaacaagccagaagauga

SEQ ID NO: 2200668 - RNA, 19 nt, Homo sapiens
  misc_RNA (1)...(19): siRNA sense strand
cagcauguauucccaggau

SEQ ID NO: 2200669 - RNA, 19 nt, Homo sapiens
  misc_RNA (1)...(19): siRNA sense strand
ccaaggcagugacuucagu

SEQ ID NO: 2200670 - RNA, 19 nt, Homo sapiens
  misc_RNA (1)...(19): siRNA sense strand
gaaguaaugcaugccuuga

SEQ ID NO: 2200671 - RNA, 19 nt, Homo sapiens
  misc_RNA (1)...(19): siRNA sense strand
gaaagacuacaucaaucug

SEQ ID NO: 2200672 - RNA, 19 nt, Homo sapiens
  misc_RNA (1)...(19): siRNA sense strand
gaggcuggcgacaaguuua

SEQ ID NO: 2200673 - RNA, 19 nt, Homo sapiens
  misc_RNA (1)...(19): siRNA sense strand
cacacaccaucaacuugua

SEQ ID NO: 2200674 - RNA, 19 nt, Homo sapiens
  misc_RNA (1)...(19): siRNA sense strand
gaagaagcucugcgaaggu

SEQ ID NO: 2200675 - RNA, 19 nt, Homo sapiens
  misc_RNA (1)...(19): siRNA sense strand
ggaggcuggcgacaaguuu

SEQ ID NO: 2200676 - RNA, 19 nt, Homo sapiens
  misc_RNA (1)...(19): siRNA sense strand
ugagcgauguuaugagcaa

SEQ ID NO: 2200677 - RNA, 19 nt, Homo sapiens
  misc_RNA (1)...(19): siRNA sense strand
aagagcagaacaacguuua

SEQ ID NO: 2200678 - RNA, 19 nt, Homo sapiens
  misc_RNA (1)...(19): siRNA sense strand
aguaaugcaugccuugaga

SEQ ID NO: 2200679 - RNA, 19 nt, Homo sapiens
  misc_RNA (1)...(19): siRNA sense strand
gcgauguuaugagcaauuc

SEQ ID NO: 2200680 - RNA, 19 nt, Homo sapiens
  misc_RNA (1)...(19): siRNA sense strand
gauguuaugagcaauucuu

SEQ ID NO: 2200681 - RNA, 19 nt, Homo sapiens
  misc_RNA (1)...(19): siRNA sense strand
aagacuacaucaaucuguu

SEQ ID NO: 2200682 - RNA, 19 nt, Homo sapiens
  misc_RNA (1)...(19): siRNA sense strand
ggaagagcagaacaacguu

SEQ ID NO: 2200683 - RNA, 19 nt, Homo sapiens
  misc_RNA (1)...(19): siRNA sense strand
augcaugccuugagacaga

SEQ ID NO: 2200684 - RNA, 19 nt, Homo sapiens
  misc_RNA (1)...(19): siRNA sense strand
ugcaagacccugaugaaga

SEQ ID NO: 2200685 - RNA, 19 nt, Homo sapiens
  misc_RNA (1)...(19): siRNA sense strand
gaaggugguagucaacucu

SEQ ID NO: 2200686 - RNA, 19 nt, Homo sapiens
  misc_RNA (1)...(19): siRNA sense strand
gcgagaaagacuacaucaa

SEQ ID NO: 2200687 - RNA, 19 nt, Homo sapiens
  misc_RNA (1)...(19): siRNA sense strand
uggcagaugugugcuuugu

SEQ ID NO: 2200688 - RNA, 19 nt, Homo sapiens
  misc_RNA (1)...(19): siRNA sense strand
cauccggccuucugucuac

SEQ ID NO: 2200689 - RNA, 19 nt, Homo sapiens
  misc_RNA (1)...(19): siRNA sense strand
caccaugacccaccuggaa

SEQ ID NO: 2200690 - RNA, 19 nt, Homo sapiens
  misc_RNA (1)...(19): siRNA sense strand
cuaccaggcugugauuaag

SEQ ID NO: 2200691 - RNA, 19 nt, Homo sapiens
  misc_RNA (1)...(19): siRNA sense strand
gagccucacccugcagaaa

SEQ ID NO: 2200692 - RNA, 19 nt, Homo sapiens
  misc_RNA (1)...(19): siRNA sense strand
ugauuaagagccagaacaa

SEQ ID NO: 2200693 - RNA, 19 nt, Homo sapiens
  misc_RNA (1)...(19): siRNA sense strand
ccuggcagaugugugcuuu

SEQ ID NO: 2200694 - RNA, 19 nt, Homo sapiens
  misc_RNA (1)...(19): siRNA sense strand
gcaagagcaccaccuccau

SEQ ID NO: 2200695 - RNA, 19 nt, Homo sapiens
  misc_RNA (1)...(19): siRNA sense strand
caugcaagacccugaugaa

SEQ ID NO: 2200696 - RNA, 19 nt, Homo sapiens
  misc_RNA (1)...(19): siRNA sense strand
caucauccaugcgcaguac

SEQ ID NO: 2200697 - RNA, 19 nt, Homo sapiens
  misc_RNA (1)...(19): siRNA sense strand
agaaagacuacaucaaucu

SEQ ID NO: 2200698 - RNA, 19 nt, Homo sapiens
  misc_RNA (1)...(19): siRNA sense strand
ucuaccaggcugugauuaa

SEQ ID NO: 2200699 - RNA, 19 nt, Homo sapiens
  misc_RNA (1)...(19): siRNA sense strand
acacgcccaucagcaugua

SEQ ID NO: 2200700 - RNA, 19 nt, Homo sapiens
  misc_RNA (1)...(19): siRNA sense strand
gaagcucugcgaaggucaa

SEQ ID NO: 2200701 - RNA, 19 nt, Homo sapiens
  misc_RNA (1)...(19): siRNA sense strand
ccagaacaagccagaagau

SEQ ID NO: 2200702 - RNA, 19 nt, Homo sapiens
  misc_RNA (1)...(19): siRNA sense strand
ggagcccuacugcgagaaa

SEQ ID NO: 2200703 - RNA, 19 nt, Homo sapiens
  misc_RNA (1)...(19): siRNA sense strand
gcauccggccuucugucua

SEQ ID NO: 2200704 - RNA, 19 nt, Homo sapiens
  misc_RNA (1)...(19): siRNA sense strand
acaagcccaucgaggugaa

SEQ ID NO: 2200705 - RNA, 19 nt, Homo sapiens
  misc_RNA (1)...(19): siRNA sense strand
ucugccagcuacaacuuga

SEQ ID NO: 2200706 - RNA, 19 nt, Homo sapiens
  misc_RNA (1)...(19): siRNA sense strand
gcccagaacaagaucaagu

SEQ ID NO: 2200707 - RNA, 19 nt, Homo sapiens
  misc_RNA (1)...(19): siRNA sense strand
uggaagagcagaacaacgu

SEQ ID NO: 2200708 - RNA, 19 nt, Homo sapiens
  misc_RNA (1)...(19): siRNA sense strand
cucacuaucucccggauca

SEQ ID NO: 2200709 - RNA, 19 nt, Homo sapiens
  misc_RNA (1)...(19): siRNA sense strand
gcaaggccaccaucaucca

SEQ ID NO: 2200710 - RNA, 19 nt, Homo sapiens
  misc_RNA (1)...(19): siRNA sense strand
gccagaacaagccagaaga

SEQ ID NO: 2200711 - RNA, 19 nt, Homo sapiens
  misc_RNA (1)...(19): siRNA sense strand
cagccguucuacuccaaga

SEQ ID NO: 2200712 - RNA, 19 nt, Homo sapiens
  misc_RNA (1)...(19): siRNA sense strand
cggcaaggccaccaucauc

SEQ ID NO: 2200713 - RNA, 19 nt, Homo sapiens
  misc_RNA (1)...(19): siRNA sense strand
ggcagccguucuacuccaa

SEQ ID NO: 2200714 - RNA, 19 nt, Homo sapiens
  misc_RNA (1)...(19): siRNA sense strand
gagcagaacaacguuuacu

SEQ ID NO: 2200715 - RNA, 19 nt, Homo sapiens
  misc_RNA (1)...(19): siRNA sense strand
ugcggucacugcaacaaug

SEQ ID NO: 2200716 - RNA, 19 nt, Homo sapiens
  misc_RNA (1)...(19): siRNA sense strand
gcaccaccuccaucagcaa

SEQ ID NO: 2200717 - RNA, 19 nt, Homo sapiens
  misc_RNA (1)...(19): siRNA sense strand
cagaacaagccagaagaug

SEQ ID NO: 2200718 - RNA, 19 nt, Homo sapiens
  misc_RNA (1)...(19): siRNA sense strand
ggucacugcaacaauguca

SEQ ID NO: 2200719 - RNA, 19 nt, Homo sapiens
  misc_RNA (1)...(19): siRNA sense strand
ggaaagagaugcagauaga

SEQ ID NO: 2200720 - RNA, 19 nt, Homo sapiens
  misc_RNA (1)...(19): siRNA sense strand
ggaaauggcugaagacaug

SEQ ID NO: 2200721 - RNA, 19 nt, Homo sapiens
  misc_RNA (1)...(19): siRNA sense strand
ggaaagcccuggagaguca

SEQ ID NO: 2200722 - RNA, 19 nt, Homo sapiens
  misc_RNA (1)...(19): siRNA sense strand
gaacaguuauacucauuug

SEQ ID NO: 2200723 - RNA, 19 nt, Homo sapiens
  misc_RNA (1)...(19): siRNA sense strand
ggccaaacgugccacuuua

SEQ ID NO: 2200724 - RNA, 19 nt, Homo sapiens
  misc_RNA (1)...(19): siRNA sense strand
gcacagccagccagcauua

SEQ ID NO: 2200725 - RNA, 19 nt, Homo sapiens
  misc_RNA (1)...(19): siRNA sense strand
gcaauggccuauccaagga

SEQ ID NO: 2200726 - RNA, 19 nt, Homo sapiens
  misc_RNA (1)...(19): siRNA sense strand
ggaggugggaguuuaaaua

SEQ ID NO: 2200727 - RNA, 19 nt, Homo sapiens
  misc_RNA (1)...(19): siRNA sense strand
gaaaagcaccaacaacuua

SEQ ID NO: 2200728 - RNA, 19 nt, Homo sapiens
  misc_RNA (1)...(19): siRNA sense strand
agaaacaccuaaagaagaa

SEQ ID NO: 2200729 - RNA, 19 nt, Homo sapiens
  misc_RNA (1)...(19): siRNA sense strand
ggaagguuaugucaucuau

SEQ ID NO: 2200730 - RNA, 19 nt, Homo sapiens
  misc_RNA (1)...(19): siRNA sense strand
cauacuugaugaacaguua

SEQ ID NO: 2200731 - RNA, 19 nt, Homo sapiens
  misc_RNA (1)...(19): siRNA sense strand
ugaaguagcagaucuggua

SEQ ID NO: 2200732 - RNA, 19 nt, Homo sapiens
  misc_RNA (1)...(19): siRNA sense strand
gcacccaucuccagcucua

SEQ ID NO: 2200733 - RNA, 19 nt, Homo sapiens
  misc_RNA (1)...(19): siRNA sense strand
caauacagcucguguucga

SEQ ID NO: 2200734 - RNA, 19 nt, Homo sapiens
  misc_RNA (1)...(19): siRNA sense strand
aaacagggcaugcucuuaa

SEQ ID NO: 2200735 - RNA, 19 nt, Homo sapiens
  misc_RNA (1)...(19): siRNA sense strand
gaggugggaguuuaaauaa

SEQ ID NO: 2200736 - RNA, 19 nt, Homo sapiens
  misc_RNA (1)...(19): siRNA sense strand
gacauuaacaugaugauug

SEQ ID NO: 2200737 - RNA, 19 nt, Homo sapiens
  misc_RNA (1)...(19): siRNA sense strand
aagcuuaggugauuauaug

SEQ ID NO: 2200738 - RNA, 19 nt, Homo sapiens
  misc_RNA (1)...(19): siRNA sense strand
ggacaucuaccaucaaagu

SEQ ID NO: 2200739 - RNA, 19 nt, Homo sapiens
  misc_RNA (1)...(19): siRNA sense strand
cagccagcauuaucuuaua

SEQ ID NO: 2200740 - RNA, 19 nt, Homo sapiens
  misc_RNA (1)...(19): siRNA sense strand
ucaacgugcuucugcagua

SEQ ID NO: 2200741 - RNA, 19 nt, Homo sapiens
  misc_RNA (1)...(19): siRNA sense strand
aaauggaggugggaguuua

SEQ ID NO: 2200742 - RNA, 19 nt, Homo sapiens
  misc_RNA (1)...(19): siRNA sense strand
gguccaaccuguuuacauc

SEQ ID NO: 2200743 - RNA, 19 nt, Homo sapiens
  misc_RNA (1)...(19): siRNA sense strand
aagguuaugucaucuauug

SEQ ID NO: 2200744 - RNA, 19 nt, Homo sapiens
  misc_RNA (1)...(19): siRNA sense strand
gaacuugggaguccucaug

SEQ ID NO: 2200745 - RNA, 19 nt, Homo sapiens
  misc_RNA (1)...(19): siRNA sense strand
ucaggaagguuaugucauc

SEQ ID NO: 2200746 - RNA, 19 nt, Homo sapiens
  misc_RNA (1)...(19): siRNA sense strand
ggaagaagaagaaaaguuu

SEQ ID NO: 2200747 - RNA, 19 nt, Homo sapiens
  misc_RNA (1)...(19): siRNA sense strand
ggaauccaccgcagucuug

SEQ ID NO: 2200748 - RNA, 19 nt, Homo sapiens
  misc_RNA (1)...(19): siRNA sense strand
gccaggaggaccuuuauuu

SEQ ID NO: 2200749 - RNA, 19 nt, Homo sapiens
  misc_RNA (1)...(19): siRNA sense strand
cauggaagcucugcauaug

SEQ ID NO: 2200750 - RNA, 19 nt, Homo sapiens
  misc_RNA (1)...(19): siRNA sense strand
gaaauggaggugggaguuu

SEQ ID NO: 2200751 - RNA, 19 nt, Homo sapiens
  misc_RNA (1)...(19): siRNA sense strand
caccuauuauucaagcuua

SEQ ID NO: 2200752 - RNA, 19 nt, Homo sapiens
  misc_RNA (1)...(19): siRNA sense strand
gcagagccauccccauuaa

SEQ ID NO: 2200753 - RNA, 19 nt, Homo sapiens
  misc_RNA (1)...(19): siRNA sense strand
ggugugacauuaacaugau

SEQ ID NO: 2200754 - RNA, 19 nt, Homo sapiens
  misc_RNA (1)...(19): siRNA sense strand
gcagacgaaacccucaaua

SEQ ID NO: 2200755 - RNA, 19 nt, Homo sapiens
  misc_RNA (1)...(19): siRNA sense strand
ggaguccucauguguauug

SEQ ID NO: 2200756 - RNA, 19 nt, Homo sapiens
  misc_RNA (1)...(19): siRNA sense strand
ggaccuuuauuucaguguu

SEQ ID NO: 2200757 - RNA, 19 nt, Homo sapiens
  misc_RNA (1)...(19): siRNA sense strand
agacgaaacccucaauaga

SEQ ID NO: 2200758 - RNA, 19 nt, Homo sapiens
  misc_RNA (1)...(19): siRNA sense strand
uaauaucugugaccuugga

SEQ ID NO: 2200759 - RNA, 19 nt, Homo sapiens
  misc_RNA (1)...(19): siRNA sense strand
ggaggaccuuuauuucagu

SEQ ID NO: 2200760 - RNA, 19 nt, Homo sapiens
  misc_RNA (1)...(19): siRNA sense strand
gaucuuugaccauacuuga

SEQ ID NO: 2200761 - RNA, 19 nt, Homo sapiens
  misc_RNA (1)...(19): siRNA sense strand
gaccauacuugaugaacag

SEQ ID NO: 2200762 - RNA, 19 nt, Homo sapiens
  misc_RNA (1)...(19): siRNA sense strand
gcauaugucagccaauuca

SEQ ID NO: 2200763 - RNA, 19 nt, Homo sapiens
  misc_RNA (1)...(19): siRNA sense strand
ugauugaucuggcugaagu

SEQ ID NO: 2200764 - RNA, 19 nt, Homo sapiens
  misc_RNA (1)...(19): siRNA sense strand
ccucauguguauugaaugu

SEQ ID NO: 2200765 - RNA, 19 nt, Homo sapiens
  misc_RNA (1)...(19): siRNA sense strand
ccaaacgugccacuuuaaa

SEQ ID NO: 2200766 - RNA, 19 nt, Homo sapiens
  misc_RNA (1)...(19): siRNA sense strand
uuaaagccacgacguauga

SEQ ID NO: 2200767 - RNA, 19 nt, Homo sapiens
  misc_RNA (1)...(19): siRNA sense strand
uaacuauuccuccuccauu

SEQ ID NO: 2200768 - RNA, 19 nt, Homo sapiens
  misc_RNA (1)...(19): siRNA sense strand
gacgaaacccucaauagag

SEQ ID NO: 2200769 - RNA, 19 nt, Homo sapiens
  misc_RNA (1)...(19): siRNA sense strand
guugagcucaggaagguua

SEQ ID NO: 2200770 - RNA, 19 nt, Homo sapiens
  misc_RNA (1)...(19): siRNA sense strand
aagaaacaccuaaagaaga

SEQ ID NO: 2200771 - RNA, 19 nt, Homo sapiens
  misc_RNA (1)...(19): siRNA sense strand
gggcugguccaaccuguuu

SEQ ID NO: 2200772 - RNA, 19 nt, Homo sapiens
  misc_RNA (1)...(19): siRNA sense strand
ucggacaucuaccaucaaa

SEQ ID NO: 2200773 - RNA, 19 nt, Homo sapiens
  misc_RNA (1)...(19): siRNA sense strand
uauucaagcuuaggugauu

SEQ ID NO: 2200774 - RNA, 19 nt, Homo sapiens
  misc_RNA (1)...(19): siRNA sense strand
gaggaaagcccuggagagu

SEQ ID NO: 2200775 - RNA, 19 nt, Homo sapiens
  misc_RNA (1)...(19): siRNA sense strand
guuauacucauuugcguuu

SEQ ID NO: 2200776 - RNA, 19 nt, Homo sapiens
  misc_RNA (1)...(19): siRNA sense strand
gcacugcugaggaagaaga

SEQ ID NO: 2200777 - RNA, 19 nt, Homo sapiens
  misc_RNA (1)...(19): siRNA sense strand
cgacucaccauuauugaau

SEQ ID NO: 2200778 - RNA, 19 nt, Homo sapiens
  misc_RNA (1)...(19): siRNA sense strand
aaagaaacaccuaaagaag

SEQ ID NO: 2200779 - RNA, 19 nt, Homo sapiens
  misc_RNA (1)...(19): siRNA sense strand
gaugauugaucuggcugaa

SEQ ID NO: 2200780 - RNA, 19 nt, Homo sapiens
  misc_RNA (1)...(19): siRNA sense strand
uaaacagggcaugcucuua

SEQ ID NO: 2200781 - RNA, 19 nt, Homo sapiens
  misc_RNA (1)...(19): siRNA sense strand
ucauguguauugaauguuc

SEQ ID NO: 2200782 - RNA, 19 nt, Homo sapiens
  misc_RNA (1)...(19): siRNA sense strand
cugcauaugucagccaauu

SEQ ID NO: 2200783 - RNA, 19 nt, Homo sapiens
  misc_RNA (1)...(19): siRNA sense strand
ggacauggaagcucugcau

SEQ ID NO: 2200784 - RNA, 19 nt, Homo sapiens
  misc_RNA (1)...(19): siRNA sense strand
caggaggaccuuuauuuca

SEQ ID NO: 2200785 - RNA, 19 nt, Homo sapiens
  misc_RNA (1)...(19): siRNA sense strand
cagcucguguucgacaaua

SEQ ID NO: 2200786 - RNA, 19 nt, Homo sapiens
  misc_RNA (1)...(19): siRNA sense strand
ccaucaaagucccaggaaa

SEQ ID NO: 2200787 - RNA, 19 nt, Homo sapiens
  misc_RNA (1)...(19): siRNA sense strand
guucgacaauauuccuuga

SEQ ID NO: 2200788 - RNA, 19 nt, Homo sapiens
  misc_RNA (1)...(19): siRNA sense strand
ggagugacccagacaaagg

SEQ ID NO: 2200789 - RNA, 19 nt, Homo sapiens
  misc_RNA (1)...(19): siRNA sense strand
gaaauaugucacccugugu

SEQ ID NO: 2200790 - RNA, 19 nt, Homo sapiens
  misc_RNA (1)...(19): siRNA sense strand
gcccugcagucgauccaaa

SEQ ID NO: 2200791 - RNA, 19 nt, Homo sapiens
  misc_RNA (1)...(19): siRNA sense strand
ccaggaggaccuuuauuuc

SEQ ID NO: 2200792 - RNA, 19 nt, Homo sapiens
  misc_RNA (1)...(19): siRNA sense strand
acgaaacccucaauagagu

SEQ ID NO: 2200793 - RNA, 19 nt, Homo sapiens
  misc_RNA (1)...(19): siRNA sense strand
gccaaacgugccacuuuaa

SEQ ID NO: 2200794 - RNA, 19 nt, Homo sapiens
  misc_RNA (1)...(19): siRNA sense strand
aagcuccgacucaccauua

SEQ ID NO: 2200795 - RNA, 19 nt, Homo sapiens
  misc_RNA (1)...(19): siRNA sense strand
ucgacaauauuccuugaug

SEQ ID NO: 2200796 - RNA, 19 nt, Homo sapiens
  misc_RNA (1)...(19): siRNA sense strand
gauagaucuuugaccauac

SEQ ID NO: 2200797 - RNA, 19 nt, Homo sapiens
  misc_RNA (1)...(19): siRNA sense strand
uggaagcucugcauauguc

SEQ ID NO: 2200798 - RNA, 19 nt, Homo sapiens
  misc_RNA (1)...(19): siRNA sense strand
ggccaucccuagccacauc

SEQ ID NO: 2200799 - RNA, 19 nt, Homo sapiens
  misc_RNA (1)...(19): siRNA sense strand
cuucggacaucuaccauca

SEQ ID NO: 2200800 - RNA, 19 nt, Homo sapiens
  misc_RNA (1)...(19): siRNA sense strand
gagauugaccuucggacau

SEQ ID NO: 2200801 - RNA, 19 nt, Homo sapiens
  misc_RNA (1)...(19): siRNA sense strand
gaccuuuauuucaguguuc

SEQ ID NO: 2200802 - RNA, 19 nt, Homo sapiens
  misc_RNA (1)...(19): siRNA sense strand
ugaccauacuugaugaaca

SEQ ID NO: 2200803 - RNA, 19 nt, Homo sapiens
  misc_RNA (1)...(19): siRNA sense strand
ccaaccuguuuacaucuga

SEQ ID NO: 2200804 - RNA, 19 nt, Homo sapiens
  misc_RNA (1)...(19): siRNA sense strand
gacauggaagcucugcaua

SEQ ID NO: 2200805 - RNA, 19 nt, Homo sapiens
  misc_RNA (1)...(19): siRNA sense strand
caucaaagucccaggaaag

SEQ ID NO: 2200806 - RNA, 19 nt, Homo sapiens
  misc_RNA (1)...(19): siRNA sense strand
gcguuucagucaacaauac

SEQ ID NO: 2200807 - RNA, 19 nt, Homo sapiens
  misc_RNA (1)...(19): siRNA sense strand
gaaacccucaauagaguca

SEQ ID NO: 2200808 - RNA, 19 nt, Homo sapiens
  misc_RNA (1)...(19): siRNA sense strand
guccucauguguauugaau

SEQ ID NO: 2200809 - RNA, 19 nt, Homo sapiens
  misc_RNA (1)...(19): siRNA sense strand
gaaguagcagaucugguau

SEQ ID NO: 2200810 - RNA, 19 nt, Homo sapiens
  misc_RNA (1)...(19): siRNA sense strand
caacacacccacgcccauu

SEQ ID NO: 2200811 - RNA, 19 nt, Homo sapiens
  misc_RNA (1)...(19): siRNA sense strand
gcucguguucgacaauauu

SEQ ID NO: 2200812 - RNA, 19 nt, Homo sapiens
  misc_RNA (1)...(19): siRNA sense strand
caacgagggaagagaagga

SEQ ID NO: 2200813 - RNA, 19 nt, Homo sapiens
  misc_RNA (1)...(19): siRNA sense strand
ugaucuggcugaaguagca

SEQ ID NO: 2200814 - RNA, 19 nt, Homo sapiens
  misc_RNA (1)...(19): siRNA sense strand
gcucaggaagguuauguca

SEQ ID NO: 2200815 - RNA, 19 nt, Homo sapiens
  misc_RNA (1)...(19): siRNA sense strand
ugggaguccucauguguau

SEQ ID NO: 2200816 - RNA, 19 nt, Homo sapiens
  misc_RNA (1)...(19): siRNA sense strand
gugagacccagaauccuaa

SEQ ID NO: 2200817 - RNA, 19 nt, Homo sapiens
  misc_RNA (1)...(19): siRNA sense strand
aacagggcaugcucuuaaa

SEQ ID NO: 2200818 - RNA, 19 nt, Homo sapiens
  misc_RNA (1)...(19): siRNA sense strand
caaacgugccacuuuaaag

SEQ ID NO: 2200819 - RNA, 19 nt, Homo sapiens
  misc_RNA (1)...(19): siRNA sense strand
gaagcgaccucucuuugga

SEQ ID NO: 2200820 - RNA, 19 nt, Homo sapiens
  misc_RNA (1)...(19): siRNA sense strand
gagaagaggccucaaccua

SEQ ID NO: 2200821 - RNA, 19 nt, Homo sapiens
  misc_RNA (1)...(19): siRNA sense strand
gaaccuguuuacuuucaaa

SEQ ID NO: 2200822 - RNA, 19 nt, Homo sapiens
  misc_RNA (1)...(19): siRNA sense strand
gcaccucccugucuguguu

SEQ ID NO: 2200823 - RNA, 19 nt, Homo sapiens
  misc_RNA (1)...(19): siRNA sense strand
cagaaguggugcaggagua

SEQ ID NO: 2200824 - RNA, 19 nt, Homo sapiens
  misc_RNA (1)...(19): siRNA sense strand
ggacucaaguucuucuaag

SEQ ID NO: 2200825 - RNA, 19 nt, Homo sapiens
  misc_RNA (1)...(19): siRNA sense strand
caacgucuuuguccagaug

SEQ ID NO: 2200826 - RNA, 19 nt, Homo sapiens
  misc_RNA (1)...(19): siRNA sense strand
caagcuguguucccagaaa

SEQ ID NO: 2200827 - RNA, 19 nt, Homo sapiens
  misc_RNA (1)...(19): siRNA sense strand
uaugagaacuuccgacucu

SEQ ID NO: 2200828 - RNA, 19 nt, Homo sapiens
  misc_RNA (1)...(19): siRNA sense strand
ccaggagugucuaugagaa

SEQ ID NO: 2200829 - RNA, 19 nt, Homo sapiens
  misc_RNA (1)...(19): siRNA sense strand
agaaagacuucgucaccaa

SEQ ID NO: 2200830 - RNA, 19 nt, Homo sapiens
  misc_RNA (1)...(19): siRNA sense strand
ugagucagaaggacaauuu

SEQ ID NO: 2200831 - RNA, 19 nt, Homo sapiens
  misc_RNA (1)...(19): siRNA sense strand
cucaaguucuucuaaguuu

SEQ ID NO: 2200832 - RNA, 19 nt, Homo sapiens
  misc_RNA (1)...(19): siRNA sense strand
ggaagagggcgaagugaag

SEQ ID NO: 2200833 - RNA, 19 nt, Homo sapiens
  misc_RNA (1)...(19): siRNA sense strand
ggagaugcagauucagaaa

SEQ ID NO: 2200834 - RNA, 19 nt, Homo sapiens
  misc_RNA (1)...(19): siRNA sense strand
gaagggaaacucagguucu

SEQ ID NO: 2200835 - RNA, 19 nt, Homo sapiens
  misc_RNA (1)...(19): siRNA sense strand
gaggagaugcagauucaga

SEQ ID NO: 2200836 - RNA, 19 nt, Homo sapiens
  misc_RNA (1)...(19): siRNA sense strand
aggaggagaugcagauuca

SEQ ID NO: 2200837 - RNA, 19 nt, Homo sapiens
  misc_RNA (1)...(19): siRNA sense strand
gggaagagggcgaagugaa

SEQ ID NO: 2200838 - RNA, 19 nt, Homo sapiens
  misc_RNA (1)...(19): siRNA sense strand
caguguaccuucccagcaa

SEQ ID NO: 2200839 - RNA, 19 nt, Homo sapiens
  misc_RNA (1)...(19): siRNA sense strand
caaggucccugaggagauc

SEQ ID NO: 2200840 - RNA, 19 nt, Homo sapiens
  misc_RNA (1)...(19): siRNA sense strand
guuugcagcuggccaagga

SEQ ID NO: 2200841 - RNA, 19 nt, Homo sapiens
  misc_RNA (1)...(19): siRNA sense strand
gucagaaggacaauuuaaa

SEQ ID NO: 2200842 - RNA, 19 nt, Homo sapiens
  misc_RNA (1)...(19): siRNA sense strand
caagguggaggccgucauu

SEQ ID NO: 2200843 - RNA, 19 nt, Homo sapiens
  misc_RNA (1)...(19): siRNA sense strand
ugaagcagccacaggaaga

SEQ ID NO: 2200844 - RNA, 19 nt, Homo sapiens
  misc_RNA (1)...(19): siRNA sense strand
ccagaugacuccuguaacc

SEQ ID NO: 2200845 - RNA, 19 nt, Homo sapiens
  misc_RNA (1)...(19): siRNA sense strand
ggaaccuguuuacuuucaa

SEQ ID NO: 2200846 - RNA, 19 nt, Homo sapiens
  misc_RNA (1)...(19): siRNA sense strand
gcagcacacgagcaacuuu

SEQ ID NO: 2200847 - RNA, 19 nt, Homo sapiens
  misc_RNA (1)...(19): siRNA sense strand
ucaaguucuucuaaguuug

SEQ ID NO: 2200848 - RNA, 19 nt, Homo sapiens
  misc_RNA (1)...(19): siRNA sense strand
gagucagaaggacaauuua

SEQ ID NO: 2200849 - RNA, 19 nt, Homo sapiens
  misc_RNA (1)...(19): siRNA sense strand
cagccuggccuuccucuug

SEQ ID NO: 2200850 - RNA, 19 nt, Homo sapiens
  misc_RNA (1)...(19): siRNA sense strand
gacucaaguucuucuaagu

SEQ ID NO: 2200851 - RNA, 19 nt, Homo sapiens
  misc_RNA (1)...(19): siRNA sense strand
gagaugcagauucagaaau

SEQ ID NO: 2200852 - RNA, 19 nt, Homo sapiens
  misc_RNA (1)...(19): siRNA sense strand
ggggauggcuucaaaugga

SEQ ID NO: 2200853 - RNA, 19 nt, Homo sapiens
  misc_RNA (1)...(19): siRNA sense strand
gcuccuguggugccuguua

SEQ ID NO: 2200854 - RNA, 19 nt, Homo sapiens
  misc_RNA (1)...(19): siRNA sense strand
aaaaguuccuggaguuuga

SEQ ID NO: 2200855 - RNA, 19 nt, Homo sapiens
  misc_RNA (1)...(19): siRNA sense strand
gagugucuaugagaacuuc

SEQ ID NO: 2200856 - RNA, 19 nt, Homo sapiens
  misc_RNA (1)...(19): siRNA sense strand
ggacgaggcagagcacaca

SEQ ID NO: 2200857 - RNA, 19 nt, Homo sapiens
  misc_RNA (1)...(19): siRNA sense strand
auucagaaaucgcaaugga

SEQ ID NO: 2200858 - RNA, 19 nt, Homo sapiens
  misc_RNA (1)...(19): siRNA sense strand
gaggaggagaugcagauuc

SEQ ID NO: 2200859 - RNA, 19 nt, Homo sapiens
  misc_RNA (1)...(19): siRNA sense strand
agucagaaggacaauuuaa

SEQ ID NO: 2200860 - RNA, 19 nt, Homo sapiens
  misc_RNA (1)...(19): siRNA sense strand
ccaggaaggagaagaagca

SEQ ID NO: 2200861 - RNA, 19 nt, Homo sapiens
  misc_RNA (1)...(19): siRNA sense strand
aggaaccuguuuacuuuca

SEQ ID NO: 2200862 - RNA, 19 nt, Homo sapiens
  misc_RNA (1)...(19): siRNA sense strand
aagggaaacucagguucuu

SEQ ID NO: 2200863 - RNA, 19 nt, Homo sapiens
  misc_RNA (1)...(19): siRNA sense strand
gaaaaguuccuggaguuug

SEQ ID NO: 2200864 - RNA, 19 nt, Homo sapiens
  misc_RNA (1)...(19): siRNA sense strand
cuccugagcuacacugaca

SEQ ID NO: 2200865 - RNA, 19 nt, Homo sapiens
  misc_RNA (1)...(19): siRNA sense strand
agaaaucgcaauggaugaa

SEQ ID NO: 2200866 - RNA, 19 nt, Homo sapiens
  misc_RNA (1)...(19): siRNA sense strand
caccuucuccugccaacaa

SEQ ID NO: 2200867 - RNA, 19 nt, Homo sapiens
  misc_RNA (1)...(19): siRNA sense strand
caagugaggaggaggaacu

SEQ ID NO: 2200868 - RNA, 19 nt, Homo sapiens
  misc_RNA (1)...(19): siRNA sense strand
cagaaaucgcaauggauga

SEQ ID NO: 2200869 - RNA, 19 nt, Homo sapiens
  misc_RNA (1)...(19): siRNA sense strand
cagcacacgagcaacuuug

SEQ ID NO: 2200870 - RNA, 19 nt, Homo sapiens
  misc_RNA (1)...(19): siRNA sense strand
cgguuggacucaaguucuu

SEQ ID NO: 2200871 - RNA, 19 nt, Homo sapiens
  misc_RNA (1)...(19): siRNA sense strand
gguggaggccgucauucau

SEQ ID NO: 2200872 - RNA, 19 nt, Homo sapiens
  misc_RNA (1)...(19): siRNA sense strand
cucagguucuugccuaaug

SEQ ID NO: 2200873 - RNA, 19 nt, Homo sapiens
  misc_RNA (1)...(19): siRNA sense strand
ucccagggccuuccucuuc

SEQ ID NO: 2200874 - RNA, 19 nt, Homo sapiens
  misc_RNA (1)...(19): siRNA sense strand
caacuuugaccggaugauc

SEQ ID NO: 2200875 - RNA, 19 nt, Homo sapiens
  misc_RNA (1)...(19): siRNA sense strand
ucacggcucugcccuucac

SEQ ID NO: 2200876 - RNA, 19 nt, Homo sapiens
  misc_RNA (1)...(19): siRNA sense strand
acucaaguucuucuaaguu

SEQ ID NO: 2200877 - RNA, 19 nt, Homo sapiens
  misc_RNA (1)...(19): siRNA sense strand
ccaaggucccugaggagau

SEQ ID NO: 2200878 - RNA, 19 nt, Homo sapiens
  misc_RNA (1)...(19): siRNA sense strand
gaaaucgcaauggaugaag

SEQ ID NO: 2200879 - RNA, 19 nt, Homo sapiens
  misc_RNA (1)...(19): siRNA sense strand
ggacauaucccguacauuu

SEQ ID NO: 2200880 - RNA, 19 nt, Homo sapiens
  misc_RNA (1)...(19): siRNA sense strand
gcaaaucacuaccacuuga

SEQ ID NO: 2200881 - RNA, 19 nt, Homo sapiens
  misc_RNA (1)...(19): siRNA sense strand
cagauggacuuuauucaua

SEQ ID NO: 2200882 - RNA, 19 nt, Homo sapiens
  misc_RNA (1)...(19): siRNA sense strand
caaaggaacucaaaucagu

SEQ ID NO: 2200883 - RNA, 19 nt, Homo sapiens
  misc_RNA (1)...(19): siRNA sense strand
caugaugucuugcauagua

SEQ ID NO: 2200884 - RNA, 19 nt, Homo sapiens
  misc_RNA (1)...(19): siRNA sense strand
gaagauaucacaucggaaa

SEQ ID NO: 2200885 - RNA, 19 nt, Homo sapiens
  misc_RNA (1)...(19): siRNA sense strand
gaacaguaguccugcuuug

SEQ ID NO: 2200886 - RNA, 19 nt, Homo sapiens
  misc_RNA (1)...(19): siRNA sense strand
gaaaagcuguucaguugua

SEQ ID NO: 2200887 - RNA, 19 nt, Homo sapiens
  misc_RNA (1)...(19): siRNA sense strand
gaaacaaguucagagaaug

SEQ ID NO: 2200888 - RNA, 19 nt, Homo sapiens
  misc_RNA (1)...(19): siRNA sense strand
aagaagaguucgagaauug

SEQ ID NO: 2200889 - RNA, 19 nt, Homo sapiens
  misc_RNA (1)...(19): siRNA sense strand
caagugcaaugguaauuug

SEQ ID NO: 2200890 - RNA, 19 nt, Homo sapiens
  misc_RNA (1)...(19): siRNA sense strand
uaacuaaauugccagaaga

SEQ ID NO: 2200891 - RNA, 19 nt, Homo sapiens
  misc_RNA (1)...(19): siRNA sense strand
gaaguaaugcguaguacaa

SEQ ID NO: 2200892 - RNA, 19 nt, Homo sapiens
  misc_RNA (1)...(19): siRNA sense strand
gaucgaccaucaaaucuuc

SEQ ID NO: 2200893 - RNA, 19 nt, Homo sapiens
  misc_RNA (1)...(19): siRNA sense strand
gaaauuaaggaagcacaua

SEQ ID NO: 2200894 - RNA, 19 nt, Homo sapiens
  misc_RNA (1)...(19): siRNA sense strand
ggacaaaggaacucaaauc

SEQ ID NO: 2200895 - RNA, 19 nt, Homo sapiens
  misc_RNA (1)...(19): siRNA sense strand
ccagauauauacuugauag

SEQ ID NO: 2200896 - RNA, 19 nt, Homo sapiens
  misc_RNA (1)...(19): siRNA sense strand
gagucuagcuguaggaaau

SEQ ID NO: 2200897 - RNA, 19 nt, Homo sapiens
  misc_RNA (1)...(19): siRNA sense strand
caagaagaguucgagaauu

SEQ ID NO: 2200898 - RNA, 19 nt, Homo sapiens
  misc_RNA (1)...(19): siRNA sense strand
ucagaagggugguccauau

SEQ ID NO: 2200899 - RNA, 19 nt, Homo sapiens
  misc_RNA (1)...(19): siRNA sense strand
ucaaaucaguuguccauag

SEQ ID NO: 2200900 - RNA, 19 nt, Homo sapiens
  misc_RNA (1)...(19): siRNA sense strand
gacuggaucuucacacuau

SEQ ID NO: 2200901 - RNA, 19 nt, Homo sapiens
  misc_RNA (1)...(19): siRNA sense strand
aaauaucacuccugaacuu

SEQ ID NO: 2200902 - RNA, 19 nt, Homo sapiens
  misc_RNA (1)...(19): siRNA sense strand
caaaucaguuguccauagu

SEQ ID NO: 2200903 - RNA, 19 nt, Homo sapiens
  misc_RNA (1)...(19): siRNA sense strand
gaauaagccaugccaguug

SEQ ID NO: 2200904 - RNA, 19 nt, Homo sapiens
  misc_RNA (1)...(19): siRNA sense strand
gcaguacucauucucaauu

SEQ ID NO: 2200905 - RNA, 19 nt, Homo sapiens
  misc_RNA (1)...(19): siRNA sense strand
gaaggagacaagaacagua

SEQ ID NO: 2200906 - RNA, 19 nt, Homo sapiens
  misc_RNA (1)...(19): siRNA sense strand
uugccaaucuccugaauaa

SEQ ID NO: 2200907 - RNA, 19 nt, Homo sapiens
  misc_RNA (1)...(19): siRNA sense strand
gaugguggcugaggcuaaa

SEQ ID NO: 2200908 - RNA, 19 nt, Homo sapiens
  misc_RNA (1)...(19): siRNA sense strand
uaugaaaucuuccucucaa

SEQ ID NO: 2200909 - RNA, 19 nt, Homo sapiens
  misc_RNA (1)...(19): siRNA sense strand
uagagagaaucuucagaaa

SEQ ID NO: 2200910 - RNA, 19 nt, Homo sapiens
  misc_RNA (1)...(19): siRNA sense strand
gcaagugcaaugguaauuu

SEQ ID NO: 2200911 - RNA, 19 nt, Homo sapiens
  misc_RNA (1)...(19): siRNA sense strand
gaucuggccugucgagucu

SEQ ID NO: 2200912 - RNA, 19 nt, Homo sapiens
  misc_RNA (1)...(19): siRNA sense strand
acagcaugauguugaaaua

SEQ ID NO: 2200913 - RNA, 19 nt, Homo sapiens
  misc_RNA (1)...(19): siRNA sense strand
cggaaaagcuguucaguug

SEQ ID NO: 2200914 - RNA, 19 nt, Homo sapiens
  misc_RNA (1)...(19): siRNA sense strand
gacaaaggaacucaaauca

SEQ ID NO: 2200915 - RNA, 19 nt, Homo sapiens
  misc_RNA (1)...(19): siRNA sense strand
ggacuuuauucauauagca

SEQ ID NO: 2200916 - RNA, 19 nt, Homo sapiens
  misc_RNA (1)...(19): siRNA sense strand
cuucaaaucuuacagucuu

SEQ ID NO: 2200917 - RNA, 19 nt, Homo sapiens
  misc_RNA (1)...(19): siRNA sense strand
gaggaucgaccaucaaauc

SEQ ID NO: 2200918 - RNA, 19 nt, Homo sapiens
  misc_RNA (1)...(19): siRNA sense strand
gaaggauauuaaagaagga

SEQ ID NO: 2200919 - RNA, 19 nt, Homo sapiens
  misc_RNA (1)...(19): siRNA sense strand
gaagggugguccauaucau

SEQ ID NO: 2200920 - RNA, 19 nt, Homo sapiens
  misc_RNA (1)...(19): siRNA sense strand
guaaagucccuccuagaga

SEQ ID NO: 2200921 - RNA, 19 nt, Homo sapiens
  misc_RNA (1)...(19): siRNA sense strand
gcagauggacuuuauucau

SEQ ID NO: 2200922 - RNA, 19 nt, Homo sapiens
  misc_RNA (1)...(19): siRNA sense strand
gggaaaguuuggagucuag

SEQ ID NO: 2200923 - RNA, 19 nt, Homo sapiens
  misc_RNA (1)...(19): siRNA sense strand
gcuccugguuggaaauuau

SEQ ID NO: 2200924 - RNA, 19 nt, Homo sapiens
  misc_RNA (1)...(19): siRNA sense strand
guucagagaaugauacaga

SEQ ID NO: 2200925 - RNA, 19 nt, Homo sapiens
  misc_RNA (1)...(19): siRNA sense strand
gcaaugguaauuuggauca

SEQ ID NO: 2200926 - RNA, 19 nt, Homo sapiens
  misc_RNA (1)...(19): siRNA sense strand
ccacugccuugauucuuga

SEQ ID NO: 2200927 - RNA, 19 nt, Homo sapiens
  misc_RNA (1)...(19): siRNA sense strand
gaauuugagccgcuuucua

SEQ ID NO: 2200928 - RNA, 19 nt, Homo sapiens
  misc_RNA (1)...(19): siRNA sense strand
cagaaaacauccaaaauca

SEQ ID NO: 2200929 - RNA, 19 nt, Homo sapiens
  misc_RNA (1)...(19): siRNA sense strand
gagagaaucuucagaaaac

SEQ ID NO: 2200930 - RNA, 19 nt, Homo sapiens
  misc_RNA (1)...(19): siRNA sense strand
uaucacuccugaacuuuau

SEQ ID NO: 2200931 - RNA, 19 nt, Homo sapiens
  misc_RNA (1)...(19): siRNA sense strand
ggaagcacauaaaagaaaa

SEQ ID NO: 2200932 - RNA, 19 nt, Homo sapiens
  misc_RNA (1)...(19): siRNA sense strand
ugccaaaucuguggaagaa

SEQ ID NO: 2200933 - RNA, 19 nt, Homo sapiens
  misc_RNA (1)...(19): siRNA sense strand
caucuguaaugaaggauau

SEQ ID NO: 2200934 - RNA, 19 nt, Homo sapiens
  misc_RNA (1)...(19): siRNA sense strand
guaaugcguaguacaagaa

SEQ ID NO: 2200935 - RNA, 19 nt, Homo sapiens
  misc_RNA (1)...(19): siRNA sense strand
caguaguccugcuuugaaa

SEQ ID NO: 2200936 - RNA, 19 nt, Homo sapiens
  misc_RNA (1)...(19): siRNA sense strand
cuucaagacgcaagaauuu

SEQ ID NO: 2200937 - RNA, 19 nt, Homo sapiens
  misc_RNA (1)...(19): siRNA sense strand
cuaaauugccagaagauau

SEQ ID NO: 2200938 - RNA, 19 nt, Homo sapiens
  misc_RNA (1)...(19): siRNA sense strand
cuacaggccugauguuggu

SEQ ID NO: 2200939 - RNA, 19 nt, Homo sapiens
  misc_RNA (1)...(19): siRNA sense strand
aaacaaguucagagaauga

SEQ ID NO: 2200940 - RNA, 19 nt, Homo sapiens
  misc_RNA (1)...(19): siRNA sense strand
ggcagcuccuucagcguua

SEQ ID NO: 2200941 - RNA, 19 nt, Homo sapiens
  misc_RNA (1)...(19): siRNA sense strand
cgacaagaauacgaugaga

SEQ ID NO: 2200942 - RNA, 19 nt, Homo sapiens
  misc_RNA (1)...(19): siRNA sense strand
cuagagagaaucuucagaa

SEQ ID NO: 2200943 - RNA, 19 nt, Homo sapiens
  misc_RNA (1)...(19): siRNA sense strand
cagcaguacucauucucaa

SEQ ID NO: 2200944 - RNA, 19 nt, Homo sapiens
  misc_RNA (1)...(19): siRNA sense strand
cuccugaacuuuaugaaau

SEQ ID NO: 2200945 - RNA, 19 nt, Homo sapiens
  misc_RNA (1)...(19): siRNA sense strand
ugaaagaacgauuuaagca

SEQ ID NO: 2200946 - RNA, 19 nt, Homo sapiens
  misc_RNA (1)...(19): siRNA sense strand
ggucuuugcaucuguaaug

SEQ ID NO: 2200947 - RNA, 19 nt, Homo sapiens
  misc_RNA (1)...(19): siRNA sense strand
caccagauauauacuugau

SEQ ID NO: 2200948 - RNA, 19 nt, Homo sapiens
  misc_RNA (1)...(19): siRNA sense strand
caguacucauucucaauuu

SEQ ID NO: 2200949 - RNA, 19 nt, Homo sapiens
  misc_RNA (1)...(19): siRNA sense strand
ggccugauguugguuaugu

SEQ ID NO: 2200950 - RNA, 19 nt, Homo sapiens
  misc_RNA (1)...(19): siRNA sense strand
aaagaacgguggaaaaguu

SEQ ID NO: 2200951 - RNA, 19 nt, Homo sapiens
  misc_RNA (1)...(19): siRNA sense strand
guacauuuccaucucucua

SEQ ID NO: 2200952 - RNA, 19 nt, Homo sapiens
  misc_RNA (1)...(19): siRNA sense strand
uaaauugccagaagauauc

SEQ ID NO: 2200953 - RNA, 19 nt, Homo sapiens
  misc_RNA (1)...(19): siRNA sense strand
cuaacuaaauugccagaag

SEQ ID NO: 2200954 - RNA, 19 nt, Homo sapiens
  misc_RNA (1)...(19): siRNA sense strand
gguaaagucccuccuagag

SEQ ID NO: 2200955 - RNA, 19 nt, Homo sapiens
  misc_RNA (1)...(19): siRNA sense strand
cauauagcacaguuucuaa

SEQ ID NO: 2200956 - RNA, 19 nt, Homo sapiens
  misc_RNA (1)...(19): siRNA sense strand
cacacuauauagcaaauca

SEQ ID NO: 2200957 - RNA, 19 nt, Homo sapiens
  misc_RNA (1)...(19): siRNA sense strand
gcaaaagaacgguggaaaa

SEQ ID NO: 2200958 - RNA, 19 nt, Homo sapiens
  misc_RNA (1)...(19): siRNA sense strand
augaaauacugcccaauug

SEQ ID NO: 2200959 - RNA, 19 nt, Homo sapiens
  misc_RNA (1)...(19): siRNA sense strand
ggaagaaaauauugcaagu

SEQ ID NO: 2200960 - RNA, 19 nt, Homo sapiens
  misc_RNA (1)...(19): siRNA sense strand
acaagaauacgaugagaug

SEQ ID NO: 2200961 - RNA, 19 nt, Homo sapiens
  misc_RNA (1)...(19): siRNA sense strand
gaacggggaggaccuguaa

SEQ ID NO: 2200962 - RNA, 19 nt, Homo sapiens
  misc_RNA (1)...(19): siRNA sense strand
ucaggucuuugcaucugua

SEQ ID NO: 2200963 - RNA, 19 nt, Homo sapiens
  misc_RNA (1)...(19): siRNA sense strand
ucauauagcacaguuucua

SEQ ID NO: 2200964 - RNA, 19 nt, Homo sapiens
  misc_RNA (1)...(19): siRNA sense strand
uagcaaaucacuaccacuu

SEQ ID NO: 2200965 - RNA, 19 nt, Homo sapiens
  misc_RNA (1)...(19): siRNA sense strand
ugaauaagccaugccaguu

SEQ ID NO: 2200966 - RNA, 19 nt, Homo sapiens
  misc_RNA (1)...(19): siRNA sense strand
aaugaaauacugcccaauu

SEQ ID NO: 2200967 - RNA, 19 nt, Homo sapiens
  misc_RNA (1)...(19): siRNA sense strand
uaaggaagcacauaaaaga

SEQ ID NO: 2200968 - RNA, 19 nt, Homo sapiens
  misc_RNA (1)...(19): siRNA sense strand
uaaagaaggagacaagaac

SEQ ID NO: 2200969 - RNA, 19 nt, Homo sapiens
  misc_RNA (1)...(19): siRNA sense strand
aaaauggacucaggucuuu

SEQ ID NO: 2200970 - RNA, 19 nt, Homo sapiens
  misc_RNA (1)...(19): siRNA sense strand
gaugcagaauagcaccaaa

SEQ ID NO: 2200971 - RNA, 19 nt, Homo sapiens
  misc_RNA (1)...(19): siRNA sense strand
gaagaguucgagaauugug

SEQ ID NO: 2200972 - RNA, 19 nt, Homo sapiens
  misc_RNA (1)...(19): siRNA sense strand
acaagaagaguucgagaau

SEQ ID NO: 2200973 - RNA, 19 nt, Homo sapiens
  misc_RNA (1)...(19): siRNA sense strand
caaaucuuccugccaaauc

SEQ ID NO: 2200974 - RNA, 19 nt, Homo sapiens
  misc_RNA (1)...(19): siRNA sense strand
ggccaggacaggaagguaa

SEQ ID NO: 2200975 - RNA, 19 nt, Homo sapiens
  misc_RNA (1)...(19): siRNA sense strand
ggugguccauaucaugaug

SEQ ID NO: 2200976 - RNA, 19 nt, Homo sapiens
  misc_RNA (1)...(19): siRNA sense strand
uuaaagaaggagacaagaa

SEQ ID NO: 2200977 - RNA, 19 nt, Homo sapiens
  misc_RNA (1)...(19): siRNA sense strand
ggacugucgcgaucuggaa

SEQ ID NO: 2200978 - RNA, 19 nt, Homo sapiens
  misc_RNA (1)...(19): siRNA sense strand
ugcaacauuugaaguauuc

SEQ ID NO: 2200979 - RNA, 19 nt, Homo sapiens
  misc_RNA (1)...(19): siRNA sense strand
gggcuuaacucauauauuu

SEQ ID NO: 2200980 - RNA, 19 nt, Homo sapiens
  misc_RNA (1)...(19): siRNA sense strand
gaagcaaucucagugguua

SEQ ID NO: 2200981 - RNA, 19 nt, Homo sapiens
  misc_RNA (1)...(19): siRNA sense strand
gagaagagauaaaguaaag

SEQ ID NO: 2200982 - RNA, 19 nt, Homo sapiens
  misc_RNA (1)...(19): siRNA sense strand
guuuggaccugcauuauua

SEQ ID NO: 2200983 - RNA, 19 nt, Homo sapiens
  misc_RNA (1)...(19): siRNA sense strand
gcagaagaauuccucaaug

SEQ ID NO: 2200984 - RNA, 19 nt, Homo sapiens
  misc_RNA (1)...(19): siRNA sense strand
acaauuugcugcugaauau

SEQ ID NO: 2200985 - RNA, 19 nt, Homo sapiens
  misc_RNA (1)...(19): siRNA sense strand
gaagaacuacugagcagaa

SEQ ID NO: 2200986 - RNA, 19 nt, Homo sapiens
  misc_RNA (1)...(19): siRNA sense strand
gagacaagcagaagaauuc

SEQ ID NO: 2200987 - RNA, 19 nt, Homo sapiens
  misc_RNA (1)...(19): siRNA sense strand
ccaaagcucagaguauuua

SEQ ID NO: 2200988 - RNA, 19 nt, Homo sapiens
  misc_RNA (1)...(19): siRNA sense strand
gcaaugcuccguugagaga

SEQ ID NO: 2200989 - RNA, 19 nt, Homo sapiens
  misc_RNA (1)...(19): siRNA sense strand
ggagagcgcgcuuaguaaa

SEQ ID NO: 2200990 - RNA, 19 nt, Homo sapiens
  misc_RNA (1)...(19): siRNA sense strand
cgaaugauccaacaauuug

SEQ ID NO: 2200991 - RNA, 19 nt, Homo sapiens
  misc_RNA (1)...(19): siRNA sense strand
gcgaaugauccaacaauuu

SEQ ID NO: 2200992 - RNA, 19 nt, Homo sapiens
  misc_RNA (1)...(19): siRNA sense strand
uaaagacugugaaccugaa

SEQ ID NO: 2200993 - RNA, 19 nt, Homo sapiens
  misc_RNA (1)...(19): siRNA sense strand
ggugaucaguacagcuaua

SEQ ID NO: 2200994 - RNA, 19 nt, Homo sapiens
  misc_RNA (1)...(19): siRNA sense strand
uaagggcuauucuuccaaa

SEQ ID NO: 2200995 - RNA, 19 nt, Homo sapiens
  misc_RNA (1)...(19): siRNA sense strand
cagaaagucucagucagaa

SEQ ID NO: 2200996 - RNA, 19 nt, Homo sapiens
  misc_RNA (1)...(19): siRNA sense strand
gcucgaucccugcagauua

SEQ ID NO: 2200997 - RNA, 19 nt, Homo sapiens
  misc_RNA (1)...(19): siRNA sense strand
acacuggaguacaaaguaa

SEQ ID NO: 2200998 - RNA, 19 nt, Homo sapiens
  misc_RNA (1)...(19): siRNA sense strand
uacuugaucuguccacuaa

SEQ ID NO: 2200999 - RNA, 19 nt, Homo sapiens
  misc_RNA (1)...(19): siRNA sense strand
aaauggcacuucaagcaaa

SEQ ID NO: 2201000 - RNA, 19 nt, Homo sapiens
  misc_RNA (1)...(19): siRNA sense strand
gguaauggguucacaaacg

SEQ ID NO: 2201001 - RNA, 19 nt, Homo sapiens
  misc_RNA (1)...(19): siRNA sense strand
ggaccuuacugucagaaag

SEQ ID NO: 2201002 - RNA, 19 nt, Homo sapiens
  misc_RNA (1)...(19): siRNA sense strand
gaaaagagggcguuacaga

SEQ ID NO: 2201003 - RNA, 19 nt, Homo sapiens
  misc_RNA (1)...(19): siRNA sense strand
gaaucauggacaacacuua

SEQ ID NO: 2201004 - RNA, 19 nt, Homo sapiens
  misc_RNA (1)...(19): siRNA sense strand
ggacagccauaucccacau

SEQ ID NO: 2201005 - RNA, 19 nt, Homo sapiens
  misc_RNA (1)...(19): siRNA sense strand
cagaagaauuccucaaugc

SEQ ID NO: 2201006 - RNA, 19 nt, Homo sapiens
  misc_RNA (1)...(19): siRNA sense strand
caagcagccucggaagaaa

SEQ ID NO: 2201007 - RNA, 19 nt, Homo sapiens
  misc_RNA (1)...(19): siRNA sense strand
ucuccaggcugcuccagua

SEQ ID NO: 2201008 - RNA, 19 nt, Homo sapiens
  misc_RNA (1)...(19): siRNA sense strand
uuaaagauaccacaaguuc

SEQ ID NO: 2201009 - RNA, 19 nt, Homo sapiens
  misc_RNA (1)...(19): siRNA sense strand
cgagagacaagcagaagaa

SEQ ID NO: 2201010 - RNA, 19 nt, Homo sapiens
  misc_RNA (1)...(19): siRNA sense strand
ucauggacaacacuuaaua

SEQ ID NO: 2201011 - RNA, 19 nt, Homo sapiens
  misc_RNA (1)...(19): siRNA sense strand
cgaacaagacgguguacuu

SEQ ID NO: 2201012 - RNA, 19 nt, Homo sapiens
  misc_RNA (1)...(19): siRNA sense strand
ccaacaauuugcugcugaa

SEQ ID NO: 2201013 - RNA, 19 nt, Homo sapiens
  misc_RNA (1)...(19): siRNA sense strand
ccaagcagccucggaagaa

SEQ ID NO: 2201014 - RNA, 19 nt, Homo sapiens
  misc_RNA (1)...(19): siRNA sense strand
cuauagcucuuugguaaug

SEQ ID NO: 2201015 - RNA, 19 nt, Homo sapiens
  misc_RNA (1)...(19): siRNA sense strand
gaaauggugcacucagcaa

SEQ ID NO: 2201016 - RNA, 19 nt, Homo sapiens
  misc_RNA (1)...(19): siRNA sense strand
ucagaaagucucagucaga

SEQ ID NO: 2201017 - RNA, 19 nt, Homo sapiens
  misc_RNA (1)...(19): siRNA sense strand
caagcucauucacugugua

SEQ ID NO: 2201018 - RNA, 19 nt, Homo sapiens
  misc_RNA (1)...(19): siRNA sense strand
gaaccaaagccugccgaaa

SEQ ID NO: 2201019 - RNA, 19 nt, Homo sapiens
  misc_RNA (1)...(19): siRNA sense strand
gucagaaccuagcgaacaa

SEQ ID NO: 2201020 - RNA, 19 nt, Homo sapiens
  misc_RNA (1)...(19): siRNA sense strand
ggaagcaaucucagugguu

SEQ ID NO: 2201021 - RNA, 19 nt, Homo sapiens
  misc_RNA (1)...(19): siRNA sense strand
ccgaaagcaucuccaguca

SEQ ID NO: 2201022 - RNA, 19 nt, Homo sapiens
  misc_RNA (1)...(19): siRNA sense strand
cuacugagcagaaaccaau

SEQ ID NO: 2201023 - RNA, 19 nt, Homo sapiens
  misc_RNA (1)...(19): siRNA sense strand
gaggaauggaucuuucuug

SEQ ID NO: 2201024 - RNA, 19 nt, Homo sapiens
  misc_RNA (1)...(19): siRNA sense strand
ucucauggcugaccaagac

SEQ ID NO: 2201025 - RNA, 19 nt, Homo sapiens
  misc_RNA (1)...(19): siRNA sense strand
uuccaaagcucagaguauu

SEQ ID NO: 2201026 - RNA, 19 nt, Homo sapiens
  misc_RNA (1)...(19): siRNA sense strand
acggagagcgcgcuuagua

SEQ ID NO: 2201027 - RNA, 19 nt, Homo sapiens
  misc_RNA (1)...(19): siRNA sense strand
caacaucagugaccuuccu

SEQ ID NO: 2201028 - RNA, 19 nt, Homo sapiens
  misc_RNA (1)...(19): siRNA sense strand
guacuugaucuguccacua

SEQ ID NO: 2201029 - RNA, 19 nt, Homo sapiens
  misc_RNA (1)...(19): siRNA sense strand
gcuguuuggaccugcauua

SEQ ID NO: 2201030 - RNA, 19 nt, Homo sapiens
  misc_RNA (1)...(19): siRNA sense strand
ggagaggcagcacaaagug

SEQ ID NO: 2201031 - RNA, 19 nt, Homo sapiens
  misc_RNA (1)...(19): siRNA sense strand
aggagaggcugggcacuuu

SEQ ID NO: 2201032 - RNA, 19 nt, Homo sapiens
  misc_RNA (1)...(19): siRNA sense strand
cuugaucuguccacuaaga

SEQ ID NO: 2201033 - RNA, 19 nt, Homo sapiens
  misc_RNA (1)...(19): siRNA sense strand
ucagaguauuuaugggauu

SEQ ID NO: 2201034 - RNA, 19 nt, Homo sapiens
  misc_RNA (1)...(19): siRNA sense strand
aaagauaccacaaguucga

SEQ ID NO: 2201035 - RNA, 19 nt, Homo sapiens
  misc_RNA (1)...(19): siRNA sense strand
aaucauggacaacacuuaa

SEQ ID NO: 2201036 - RNA, 19 nt, Homo sapiens
  misc_RNA (1)...(19): siRNA sense strand
ggacacuccacaucacuca

SEQ ID NO: 2201037 - RNA, 19 nt, Homo sapiens
  misc_RNA (1)...(19): siRNA sense strand
aaagagggcguuacagaca

SEQ ID NO: 2201038 - RNA, 19 nt, Homo sapiens
  misc_RNA (1)...(19): siRNA sense strand
cacaucggaucaagaagga

SEQ ID NO: 2201039 - RNA, 19 nt, Homo sapiens
  misc_RNA (1)...(19): siRNA sense strand
cuugagaagagauaaagua

SEQ ID NO: 2201040 - RNA, 19 nt, Homo sapiens
  misc_RNA (1)...(19): siRNA sense strand
acaaagugcaaaugaauca

SEQ ID NO: 2201041 - RNA, 19 nt, Homo sapiens
  misc_RNA (1)...(19): siRNA sense strand
gggagaggcagcacaaagu

SEQ ID NO: 2201042 - RNA, 19 nt, Homo sapiens
  misc_RNA (1)...(19): siRNA sense strand
gagaggcugggcacuuuga

SEQ ID NO: 2201043 - RNA, 19 nt, Homo sapiens
  misc_RNA (1)...(19): siRNA sense strand
aaauuaagggcuauucuuc

SEQ ID NO: 2201044 - RNA, 19 nt, Homo sapiens
  misc_RNA (1)...(19): siRNA sense strand
gcucagcaaacuucucaug

SEQ ID NO: 2201045 - RNA, 19 nt, Homo sapiens
  misc_RNA (1)...(19): siRNA sense strand
ggaccugcauuauuaaaag

SEQ ID NO: 2201046 - RNA, 19 nt, Homo sapiens
  misc_RNA (1)...(19): siRNA sense strand
cugugaaccugaaagcauu

SEQ ID NO: 2201047 - RNA, 19 nt, Homo sapiens
  misc_RNA (1)...(19): siRNA sense strand
ggacuucggaguggugaug

SEQ ID NO: 2201048 - RNA, 19 nt, Homo sapiens
  misc_RNA (1)...(19): siRNA sense strand
ggaagccucuugggcaaaa

SEQ ID NO: 2201049 - RNA, 19 nt, Homo sapiens
  misc_RNA (1)...(19): siRNA sense strand
ucaaugcagucuuuuauag

SEQ ID NO: 2201050 - RNA, 19 nt, Homo sapiens
  misc_RNA (1)...(19): siRNA sense strand
uuuauucuguugcuugaga

SEQ ID NO: 2201051 - RNA, 19 nt, Homo sapiens
  misc_RNA (1)...(19): siRNA sense strand
gcauuucugauuggacuuu

SEQ ID NO: 2201052 - RNA, 19 nt, Homo sapiens
  misc_RNA (1)...(19): siRNA sense strand
agacucaccucuggaccuu

SEQ ID NO: 2201053 - RNA, 19 nt, Homo sapiens
  misc_RNA (1)...(19): siRNA sense strand
aaccaaagccugccgaaag

SEQ ID NO: 2201054 - RNA, 19 nt, Homo sapiens
  misc_RNA (1)...(19): siRNA sense strand
cagaguauuuaugggauuc

SEQ ID NO: 2201055 - RNA, 19 nt, Homo sapiens
  misc_RNA (1)...(19): siRNA sense strand
acaguacaacagugagaua

SEQ ID NO: 2201056 - RNA, 19 nt, Homo sapiens
  misc_RNA (1)...(19): siRNA sense strand
aagaacuacugagcagaaa

SEQ ID NO: 2201057 - RNA, 19 nt, Homo sapiens
  misc_RNA (1)...(19): siRNA sense strand
gaucccugcagauuaguga

SEQ ID NO: 2201058 - RNA, 19 nt, Homo sapiens
  misc_RNA (1)...(19): siRNA sense strand
uuaaacaagagcaagcaaa

SEQ ID NO: 2201059 - RNA, 19 nt, Homo sapiens
  misc_RNA (1)...(19): siRNA sense strand
gguuugaaaguauucuuga

SEQ ID NO: 2201060 - RNA, 19 nt, Homo sapiens
  misc_RNA (1)...(19): siRNA sense strand
cagcgaaugauccaacaau

SEQ ID NO: 2201061 - RNA, 19 nt, Homo sapiens
  misc_RNA (1)...(19): siRNA sense strand
gaggcugggcacuuugaaa

SEQ ID NO: 2201062 - RNA, 19 nt, Homo sapiens
  misc_RNA (1)...(19): siRNA sense strand
cggagagcgcgcuuaguaa

SEQ ID NO: 2201063 - RNA, 19 nt, Homo sapiens
  misc_RNA (1)...(19): siRNA sense strand
aaacggagagcgcgcuuag

SEQ ID NO: 2201064 - RNA, 19 nt, Homo sapiens
  misc_RNA (1)...(19): siRNA sense strand
cauggacaacacuuaauau

SEQ ID NO: 2201065 - RNA, 19 nt, Homo sapiens
  misc_RNA (1)...(19): siRNA sense strand
agagacaagcagaagaauu

SEQ ID NO: 2201066 - RNA, 19 nt, Homo sapiens
  misc_RNA (1)...(19): siRNA sense strand
ggagaggcugggcacuuug

SEQ ID NO: 2201067 - RNA, 19 nt, Homo sapiens
  misc_RNA (1)...(19): siRNA sense strand
gauacuggaggaagcaauc

SEQ ID NO: 2201068 - RNA, 19 nt, Homo sapiens
  misc_RNA (1)...(19): siRNA sense strand
acagacaguacaacaguga

SEQ ID NO: 2201069 - RNA, 19 nt, Homo sapiens
  misc_RNA (1)...(19): siRNA sense strand
gagccauucaucuccugua

SEQ ID NO: 2201070 - RNA, 19 nt, Homo sapiens
  misc_RNA (1)...(19): siRNA sense strand
acacuccacaucacucaaa

SEQ ID NO: 2201071 - RNA, 19 nt, Homo sapiens
  misc_RNA (1)...(19): siRNA sense strand
ccucuggaccuuacuguca

SEQ ID NO: 2201072 - RNA, 19 nt, Homo sapiens
  misc_RNA (1)...(19): siRNA sense strand
aacaauuugcugcugaaua

SEQ ID NO: 2201073 - RNA, 19 nt, Homo sapiens
  misc_RNA (1)...(19): siRNA sense strand
uagcgaacaagacggugua

SEQ ID NO: 2201074 - RNA, 19 nt, Homo sapiens
  misc_RNA (1)...(19): siRNA sense strand
ccagggagaggcagcacaa

SEQ ID NO: 2201075 - RNA, 19 nt, Homo sapiens
  misc_RNA (1)...(19): siRNA sense strand
gcaaucucagugguuauga

SEQ ID NO: 2201076 - RNA, 19 nt, Homo sapiens
  misc_RNA (1)...(19): siRNA sense strand
uuacagacaguacaacagu

SEQ ID NO: 2201077 - RNA, 19 nt, Homo sapiens
  misc_RNA (1)...(19): siRNA sense strand
guucgaggaauggaucuuu

SEQ ID NO: 2201078 - RNA, 19 nt, Homo sapiens
  misc_RNA (1)...(19): siRNA sense strand
gaacuacugagcagaaacc

SEQ ID NO: 2201079 - RNA, 19 nt, Homo sapiens
  misc_RNA (1)...(19): siRNA sense strand
caagaugacugcauuguua

SEQ ID NO: 2201080 - RNA, 19 nt, Homo sapiens
  misc_RNA (1)...(19): siRNA sense strand
ggacaggcaucuuuccuua

SEQ ID NO: 2201081 - RNA, 19 nt, Homo sapiens
  misc_RNA (1)...(19): siRNA sense strand
gcacugaccuggacucgaa

SEQ ID NO: 2201082 - RNA, 19 nt, Homo sapiens
  misc_RNA (1)...(19): siRNA sense strand
gagccugacugcauuauuu

SEQ ID NO: 2201083 - RNA, 19 nt, Homo sapiens
  misc_RNA (1)...(19): siRNA sense strand
gaagagagccaaggucaua

SEQ ID NO: 2201084 - RNA, 19 nt, Homo sapiens
  misc_RNA (1)...(19): siRNA sense strand
ucaaggaaaucaacguuaa

SEQ ID NO: 2201085 - RNA, 19 nt, Homo sapiens
  misc_RNA (1)...(19): siRNA sense strand
ggaaaucaacguuaacauu

SEQ ID NO: 2201086 - RNA, 19 nt, Homo sapiens
  misc_RNA (1)...(19): siRNA sense strand
ggagaacaccuuaggagua

SEQ ID NO: 2201087 - RNA, 19 nt, Homo sapiens
  misc_RNA (1)...(19): siRNA sense strand
gaucucaaguucugugaaa

SEQ ID NO: 2201088 - RNA, 19 nt, Homo sapiens
  misc_RNA (1)...(19): siRNA sense strand
gagggaacauacaagauuu

SEQ ID NO: 2201089 - RNA, 19 nt, Homo sapiens
  misc_RNA (1)...(19): siRNA sense strand
gagccaaggucauagaaga

SEQ ID NO: 2201090 - RNA, 19 nt, Homo sapiens
  misc_RNA (1)...(19): siRNA sense strand
gaacauacaagauuuacug

SEQ ID NO: 2201091 - RNA, 19 nt, Homo sapiens
  misc_RNA (1)...(19): siRNA sense strand
gaacuucaaugcugcucaa

SEQ ID NO: 2201092 - RNA, 19 nt, Homo sapiens
  misc_RNA (1)...(19): siRNA sense strand
caaaggaugugcaagaaca

SEQ ID NO: 2201093 - RNA, 19 nt, Homo sapiens
  misc_RNA (1)...(19): siRNA sense strand
gcacagguaccaaacauug

SEQ ID NO: 2201094 - RNA, 19 nt, Homo sapiens
  misc_RNA (1)...(19): siRNA sense strand
ucaagauccucgaguuuaa

SEQ ID NO: 2201095 - RNA, 19 nt, Homo sapiens
  misc_RNA (1)...(19): siRNA sense strand
ggaaagaaggaggauguua

SEQ ID NO: 2201096 - RNA, 19 nt, Homo sapiens
  misc_RNA (1)...(19): siRNA sense strand
cagaaccgcuggcugauug

SEQ ID NO: 2201097 - RNA, 19 nt, Homo sapiens
  misc_RNA (1)...(19): siRNA sense strand
ucagagagauuggagauga

SEQ ID NO: 2201098 - RNA, 19 nt, Homo sapiens
  misc_RNA (1)...(19): siRNA sense strand
gaugugaucaccauuauug

SEQ ID NO: 2201099 - RNA, 19 nt, Homo sapiens
  misc_RNA (1)...(19): siRNA sense strand
ggagagaggcuguuugugu

SEQ ID NO: 2201100 - RNA, 19 nt, Homo sapiens
  misc_RNA (1)...(19): siRNA sense strand
cacaacagcugaucgaguu

SEQ ID NO: 2201101 - RNA, 19 nt, Homo sapiens
  misc_RNA (1)...(19): siRNA sense strand
uggaugagcugcccaaguu

SEQ ID NO: 2201102 - RNA, 19 nt, Homo sapiens
  misc_RNA (1)...(19): siRNA sense strand
ggagggcccuggucauaug

SEQ ID NO: 2201103 - RNA, 19 nt, Homo sapiens
  misc_RNA (1)...(19): siRNA sense strand
gagaacaccuuaggaguag

SEQ ID NO: 2201104 - RNA, 19 nt, Homo sapiens
  misc_RNA (1)...(19): siRNA sense strand
guguacagcucuuuccuaa

SEQ ID NO: 2201105 - RNA, 19 nt, Homo sapiens
  misc_RNA (1)...(19): siRNA sense strand
uaauggaguugcugaauuc

SEQ ID NO: 2201106 - RNA, 19 nt, Homo sapiens
  misc_RNA (1)...(19): siRNA sense strand
cuucaggcauccagaaaua

SEQ ID NO: 2201107 - RNA, 19 nt, Homo sapiens
  misc_RNA (1)...(19): siRNA sense strand
agauguagcuagagaugua

SEQ ID NO: 2201108 - RNA, 19 nt, Homo sapiens
  misc_RNA (1)...(19): siRNA sense strand
gaacauccacuccaucauc

SEQ ID NO: 2201109 - RNA, 19 nt, Homo sapiens
  misc_RNA (1)...(19): siRNA sense strand
caagaaauccaaccgaguu

SEQ ID NO: 2201110 - RNA, 19 nt, Homo sapiens
  misc_RNA (1)...(19): siRNA sense strand
gaagagcacagcagaguuc

SEQ ID NO: 2201111 - RNA, 19 nt, Homo sapiens
  misc_RNA (1)...(19): siRNA sense strand
cccauaagcugguacagaa

SEQ ID NO: 2201112 - RNA, 19 nt, Homo sapiens
  misc_RNA (1)...(19): siRNA sense strand
gcagucaccugaagcaucu

SEQ ID NO: 2201113 - RNA, 19 nt, Homo sapiens
  misc_RNA (1)...(19): siRNA sense strand
gaaguagucaaugguauuu

SEQ ID NO: 2201114 - RNA, 19 nt, Homo sapiens
  misc_RNA (1)...(19): siRNA sense strand
gagcgggacuuggauaugu

SEQ ID NO: 2201115 - RNA, 19 nt, Homo sapiens
  misc_RNA (1)...(19): siRNA sense strand
cuaauggaguugcugaauu

SEQ ID NO: 2201116 - RNA, 19 nt, Homo sapiens
  misc_RNA (1)...(19): siRNA sense strand
gaccagcucuucacaaacu

SEQ ID NO: 2201117 - RNA, 19 nt, Homo sapiens
  misc_RNA (1)...(19): siRNA sense strand
gaaagaaggaggauguuac

SEQ ID NO: 2201118 - RNA, 19 nt, Homo sapiens
  misc_RNA (1)...(19): siRNA sense strand
uggcuuugcuccucagaua

SEQ ID NO: 2201119 - RNA, 19 nt, Homo sapiens
  misc_RNA (1)...(19): siRNA sense strand
caguagagcucaagaagag

SEQ ID NO: 2201120 - RNA, 19 nt, Homo sapiens
  misc_RNA (1)...(19): siRNA sense strand
ggaaacuucuuuggauugu

SEQ ID NO: 2201121 - RNA, 19 nt, Homo sapiens
  misc_RNA (1)...(19): siRNA sense strand
gggaugugaucaccauuau

SEQ ID NO: 2201122 - RNA, 19 nt, Homo sapiens
  misc_RNA (1)...(19): siRNA sense strand
gaauggggaugcacaaauu

SEQ ID NO: 2201123 - RNA, 19 nt, Homo sapiens
  misc_RNA (1)...(19): siRNA sense strand
gcacagagccagauaaaau

SEQ ID NO: 2201124 - RNA, 19 nt, Homo sapiens
  misc_RNA (1)...(19): siRNA sense strand
caucuuuccuuaccgguuu

SEQ ID NO: 2201125 - RNA, 19 nt, Homo sapiens
  misc_RNA (1)...(19): siRNA sense strand
gaauucacaucccaagagu

SEQ ID NO: 2201126 - RNA, 19 nt, Homo sapiens
  misc_RNA (1)...(19): siRNA sense strand
uacguucccuccaauuaua

SEQ ID NO: 2201127 - RNA, 19 nt, Homo sapiens
  misc_RNA (1)...(19): siRNA sense strand
gaagcagccucaagaugca

SEQ ID NO: 2201128 - RNA, 19 nt, Homo sapiens
  misc_RNA (1)...(19): siRNA sense strand
guacagaaacgcuuugaca

SEQ ID NO: 2201129 - RNA, 19 nt, Homo sapiens
  misc_RNA (1)...(19): siRNA sense strand
ccauugcgcugcuugaaau

SEQ ID NO: 2201130 - RNA, 19 nt, Homo sapiens
  misc_RNA (1)...(19): siRNA sense strand
gaaaggagaaaggcccuaa

SEQ ID NO: 2201131 - RNA, 19 nt, Homo sapiens
  misc_RNA (1)...(19): siRNA sense strand
acacagacagaaacucuua

SEQ ID NO: 2201132 - RNA, 19 nt, Homo sapiens
  misc_RNA (1)...(19): siRNA sense strand
gaacaaagacaugaaacca

SEQ ID NO: 2201133 - RNA, 19 nt, Homo sapiens
  misc_RNA (1)...(19): siRNA sense strand
cgaggagccugacugcauu

SEQ ID NO: 2201134 - RNA, 19 nt, Homo sapiens
  misc_RNA (1)...(19): siRNA sense strand
gcuacguucccuccaauua

SEQ ID NO: 2201135 - RNA, 19 nt, Homo sapiens
  misc_RNA (1)...(19): siRNA sense strand
gaacuucaggcauccagaa

SEQ ID NO: 2201136 - RNA, 19 nt, Homo sapiens
  misc_RNA (1)...(19): siRNA sense strand
gaauauaaacggcgaaagg

SEQ ID NO: 2201137 - RNA, 19 nt, Homo sapiens
  misc_RNA (1)...(19): siRNA sense strand
gaucuggaaauguguauug

SEQ ID NO: 2201138 - RNA, 19 nt, Homo sapiens
  misc_RNA (1)...(19): siRNA sense strand
ggacuucuauaacuguaca

SEQ ID NO: 2201139 - RNA, 19 nt, Homo sapiens
  misc_RNA (1)...(19): siRNA sense strand
aaaucaagaugacugcauu

SEQ ID NO: 2201140 - RNA, 19 nt, Homo sapiens
  misc_RNA (1)...(19): siRNA sense strand
gaaaugggcaaagucaaga

SEQ ID NO: 2201141 - RNA, 19 nt, Homo sapiens
  misc_RNA (1)...(19): siRNA sense strand
gcagcacccugaccuucaa

SEQ ID NO: 2201142 - RNA, 19 nt, Homo sapiens
  misc_RNA (1)...(19): siRNA sense strand
aagauagccuuauggagaa

SEQ ID NO: 2201143 - RNA, 19 nt, Homo sapiens
  misc_RNA (1)...(19): siRNA sense strand
cagaaucccacccagauaa

SEQ ID NO: 2201144 - RNA, 19 nt, Homo sapiens
  misc_RNA (1)...(19): siRNA sense strand
caucaaaccaguacagaga

SEQ ID NO: 2201145 - RNA, 19 nt, Homo sapiens
  misc_RNA (1)...(19): siRNA sense strand
ggaagcagcaacacauuca

SEQ ID NO: 2201146 - RNA, 19 nt, Homo sapiens
  misc_RNA (1)...(19): siRNA sense strand
gggcaggacaggcaucuuu

SEQ ID NO: 2201147 - RNA, 19 nt, Homo sapiens
  misc_RNA (1)...(19): siRNA sense strand
ggaguuagagggccgaaga

SEQ ID NO: 2201148 - RNA, 19 nt, Homo sapiens
  misc_RNA (1)...(19): siRNA sense strand
uccacaaccuagcaaguua

SEQ ID NO: 2201149 - RNA, 19 nt, Homo sapiens
  misc_RNA (1)...(19): siRNA sense strand
gcagagagggaaaccuuau

SEQ ID NO: 2201150 - RNA, 19 nt, Homo sapiens
  misc_RNA (1)...(19): siRNA sense strand
ggaguccgcaugugugaaa

SEQ ID NO: 2201151 - RNA, 19 nt, Homo sapiens
  misc_RNA (1)...(19): siRNA sense strand
ggagaagcaggaugaauca

SEQ ID NO: 2201152 - RNA, 19 nt, Homo sapiens
  misc_RNA (1)...(19): siRNA sense strand
ggacuuggauauguacagu

SEQ ID NO: 2201153 - RNA, 19 nt, Homo sapiens
  misc_RNA (1)...(19): siRNA sense strand
gcacagcagagaacgaaug

SEQ ID NO: 2201154 - RNA, 19 nt, Homo sapiens
  misc_RNA (1)...(19): siRNA sense strand
gucaagaccucgucaaagg

SEQ ID NO: 2201155 - RNA, 19 nt, Homo sapiens
  misc_RNA (1)...(19): siRNA sense strand
gaaauaugcagauggugau

SEQ ID NO: 2201156 - RNA, 19 nt, Homo sapiens
  misc_RNA (1)...(19): siRNA sense strand
ggaaauggagcgggacuug

SEQ ID NO: 2201157 - RNA, 19 nt, Homo sapiens
  misc_RNA (1)...(19): siRNA sense strand
ccuagcaaguuauacuaaa

SEQ ID NO: 2201158 - RNA, 19 nt, Homo sapiens
  misc_RNA (1)...(19): siRNA sense strand
ugaagagccuauacaacga

SEQ ID NO: 2201159 - RNA, 19 nt, Homo sapiens
  misc_RNA (1)...(19): siRNA sense strand
acucgaagcugacacaaca

SEQ ID NO: 2201160 - RNA, 19 nt, Homo sapiens
  misc_RNA (1)...(19): siRNA sense strand
gaucaccauuauuggaguu

SEQ ID NO: 2201161 - RNA, 19 nt, Homo sapiens
  misc_RNA (1)...(19): siRNA sense strand
ccacugcuuucguuacuca

SEQ ID NO: 2201162 - RNA, 19 nt, Homo sapiens
  misc_RNA (1)...(19): siRNA sense strand
gaagagccuauacaacgaa

SEQ ID NO: 2201163 - RNA, 19 nt, Homo sapiens
  misc_RNA (1)...(19): siRNA sense strand
ugagggaacauacaagauu

SEQ ID NO: 2201164 - RNA, 19 nt, Homo sapiens
  misc_RNA (1)...(19): siRNA sense strand
guacuccgguauccacuuc

SEQ ID NO: 2201165 - RNA, 19 nt, Homo sapiens
  misc_RNA (1)...(19): siRNA sense strand
ucauggacuuuaacucuga

SEQ ID NO: 2201166 - RNA, 19 nt, Homo sapiens
  misc_RNA (1)...(19): siRNA sense strand
gaggaacaaagacaugaaa

SEQ ID NO: 2201167 - RNA, 19 nt, Homo sapiens
  misc_RNA (1)...(19): siRNA sense strand
cugcucagcuggaugaaga

SEQ ID NO: 2201168 - RNA, 19 nt, Homo sapiens
  misc_RNA (1)...(19): siRNA sense strand
gucaaaggaugugcaagaa

SEQ ID NO: 2201169 - RNA, 19 nt, Homo sapiens
  misc_RNA (1)...(19): siRNA sense strand
gaaaccuuauugccaucuu

SEQ ID NO: 2201170 - RNA, 19 nt, Homo sapiens
  misc_RNA (1)...(19): siRNA sense strand
gaagcccacugugacuuug

SEQ ID NO: 2201171 - RNA, 19 nt, Homo sapiens
  misc_RNA (1)...(19): siRNA sense strand
ugaugaagauagccuuaug

SEQ ID NO: 2201172 - RNA, 19 nt, Homo sapiens
  misc_RNA (1)...(19): siRNA sense strand
uaaggucucgaagcaauua

SEQ ID NO: 2201173 - RNA, 19 nt, Homo sapiens
  misc_RNA (1)...(19): siRNA sense strand
ugauuaaggucucgaagca

SEQ ID NO: 2201174 - RNA, 19 nt, Homo sapiens
  misc_RNA (1)...(19): siRNA sense strand
auaugcagauggugauuaa

SEQ ID NO: 2201175 - RNA, 19 nt, Homo sapiens
  misc_RNA (1)...(19): siRNA sense strand
gacagaaagagacuacauu

SEQ ID NO: 2201176 - RNA, 19 nt, Homo sapiens
  misc_RNA (1)...(19): siRNA sense strand
agccagugcucccucuuua

SEQ ID NO: 2201177 - RNA, 19 nt, Homo sapiens
  misc_RNA (1)...(19): siRNA sense strand
cagaaguagucaaugguau

SEQ ID NO: 2201178 - RNA, 19 nt, Homo sapiens
  misc_RNA (1)...(19): siRNA sense strand
uguaggagaagaagagaua

SEQ ID NO: 2201179 - RNA, 19 nt, Homo sapiens
  misc_RNA (1)...(19): siRNA sense strand
aggaacaucuugccaauuu

SEQ ID NO: 2201180 - RNA, 19 nt, Homo sapiens
  misc_RNA (1)...(19): siRNA sense strand
gaaauauacagccuuguug

SEQ ID NO: 2201181 - RNA, 19 nt, Homo sapiens
  misc_RNA (1)...(19): siRNA sense strand
ggagaccagugcccuguug

SEQ ID NO: 2201182 - RNA, 19 nt, Homo sapiens
  misc_RNA (1)...(19): siRNA sense strand
gaacaucuugccaauuuca

SEQ ID NO: 2201183 - RNA, 19 nt, Homo sapiens
  misc_RNA (1)...(19): siRNA sense strand
gugaggagauccaccuaug

SEQ ID NO: 2201184 - RNA, 19 nt, Homo sapiens
  misc_RNA (1)...(19): siRNA sense strand
gcaaaacacacuaaagauu

SEQ ID NO: 2201185 - RNA, 19 nt, Homo sapiens
  misc_RNA (1)...(19): siRNA sense strand
ugaaauauacagccuuguu

SEQ ID NO: 2201186 - RNA, 19 nt, Homo sapiens
  misc_RNA (1)...(19): siRNA sense strand
gaggagauccaccuaugau

SEQ ID NO: 2201187 - RNA, 19 nt, Homo sapiens
  misc_RNA (1)...(19): siRNA sense strand
ggaacaucuugccaauuuc

SEQ ID NO: 2201188 - RNA, 19 nt, Homo sapiens
  misc_RNA (1)...(19): siRNA sense strand
caaaacacacuaaagauug

SEQ ID NO: 2201189 - RNA, 19 nt, Homo sapiens
  misc_RNA (1)...(19): siRNA sense strand
gcucacacaaagccuguuu

SEQ ID NO: 2201190 - RNA, 19 nt, Homo sapiens
  misc_RNA (1)...(19): siRNA sense strand
ccaaccagcccaaggaaca

SEQ ID NO: 2201191 - RNA, 19 nt, Homo sapiens
  misc_RNA (1)...(19): siRNA sense strand
gacauuuggugcugaagac

SEQ ID NO: 2201192 - RNA, 19 nt, Homo sapiens
  misc_RNA (1)...(19): siRNA sense strand
cagcaaaacacacuaaaga

SEQ ID NO: 2201193 - RNA, 19 nt, Homo sapiens
  misc_RNA (1)...(19): siRNA sense strand
ccuguuuggugguuucuuc

SEQ ID NO: 2201194 - RNA, 19 nt, Homo sapiens
  misc_RNA (1)...(19): siRNA sense strand
gaccaaccagcccaaggaa

SEQ ID NO: 2201195 - RNA, 19 nt, Homo sapiens
  misc_RNA (1)...(19): siRNA sense strand
ugaggagauccaccuauga

SEQ ID NO: 2201196 - RNA, 19 nt, Homo sapiens
  misc_RNA (1)...(19): siRNA sense strand
ugacauuuggugcugaaga

SEQ ID NO: 2201197 - RNA, 19 nt, Homo sapiens
  misc_RNA (1)...(19): siRNA sense strand
agaccaaccagcccaagga

SEQ ID NO: 2201198 - RNA, 19 nt, Homo sapiens
  misc_RNA (1)...(19): siRNA sense strand
ggagaaagcugggcaguug

SEQ ID NO: 2201199 - RNA, 19 nt, Homo sapiens
  misc_RNA (1)...(19): siRNA sense strand
cuggaaagcuggagaagaa

SEQ ID NO: 2201200 - RNA, 19 nt, Homo sapiens
  misc_RNA (1)...(19): siRNA sense strand
aggcagagcuggugcagaa

SEQ ID NO: 2201201 - RNA, 19 nt, Homo sapiens
  misc_RNA (1)...(19): siRNA sense strand
agaagaacauggagaagau

SEQ ID NO: 2201202 - RNA, 19 nt, Homo sapiens
  misc_RNA (1)...(19): siRNA sense strand
agaagcagcugcagcacaa

SEQ ID NO: 2201203 - RNA, 19 nt, Homo sapiens
  misc_RNA (1)...(19): siRNA sense strand
gagaagaacauggagaaga

SEQ ID NO: 2201204 - RNA, 19 nt, Homo sapiens
  misc_RNA (1)...(19): siRNA sense strand
gggacagucuggacgagaa

SEQ ID NO: 2201205 - RNA, 19 nt, Homo sapiens
  misc_RNA (1)...(19): siRNA sense strand
cuacaucaaugaggacuuc

SEQ ID NO: 2201206 - RNA, 19 nt, Homo sapiens
  misc_RNA (1)...(19): siRNA sense strand
cccacaagcuccagucaug

SEQ ID NO: 2201207 - RNA, 19 nt, Homo sapiens
  misc_RNA (1)...(19): siRNA sense strand
gagcagcgggcacacaaug

SEQ ID NO: 2201208 - RNA, 19 nt, Homo sapiens
  misc_RNA (1)...(19): siRNA sense strand
gcaauugcaggacgacuuc

SEQ ID NO: 2201209 - RNA, 19 nt, Homo sapiens
  misc_RNA (1)...(19): siRNA sense strand
gguagugugagcagccuua

SEQ ID NO: 2201210 - RNA, 19 nt, Homo sapiens
  misc_RNA (1)...(19): siRNA sense strand
gagagcagcgggcacacaa

SEQ ID NO: 2201211 - RNA, 19 nt, Homo sapiens
  misc_RNA (1)...(19): siRNA sense strand
ccagaaaucaggcgagauc

SEQ ID NO: 2201212 - RNA, 19 nt, Homo sapiens
  misc_RNA (1)...(19): siRNA sense strand
gagaaugaggcuaccaugu

SEQ ID NO: 2201213 - RNA, 19 nt, Homo sapiens
  misc_RNA (1)...(19): siRNA sense strand
cagcuucaccuacaucaau

SEQ ID NO: 2201214 - RNA, 19 nt, Homo sapiens
  misc_RNA (1)...(19): siRNA sense strand
agaaugaggcuaccaugug

SEQ ID NO: 2201215 - RNA, 19 nt, Homo sapiens
  misc_RNA (1)...(19): siRNA sense strand
ucacugcuacugagaucua

SEQ ID NO: 2201216 - RNA, 19 nt, Homo sapiens
  misc_RNA (1)...(19): siRNA sense strand
ggaaagcuggagaagaaca

SEQ ID NO: 2201217 - RNA, 19 nt, Homo sapiens
  misc_RNA (1)...(19): siRNA sense strand
ccaaagcucaucccugucu

SEQ ID NO: 2201218 - RNA, 19 nt, Homo sapiens
  misc_RNA (1)...(19): siRNA sense strand
gagcagcgggacagcuuug

SEQ ID NO: 2201219 - RNA, 19 nt, Homo sapiens
  misc_RNA (1)...(19): siRNA sense strand
ggaggugugccagaaauca

SEQ ID NO: 2201220 - RNA, 19 nt, Homo sapiens
  misc_RNA (1)...(19): siRNA sense strand
aagcagugauguugaggau

SEQ ID NO: 2201221 - RNA, 19 nt, Homo sapiens
  misc_RNA (1)...(19): siRNA sense strand
gaaagcuggagaagaacau

SEQ ID NO: 2201222 - RNA, 19 nt, Homo sapiens
  misc_RNA (1)...(19): siRNA sense strand
gaggagaucacugcuacug

SEQ ID NO: 2201223 - RNA, 19 nt, Homo sapiens
  misc_RNA (1)...(19): siRNA sense strand
ugccaccgcugacccauuc

SEQ ID NO: 2201224 - RNA, 19 nt, Homo sapiens
  misc_RNA (1)...(19): siRNA sense strand
gcugcacuguguccuggaa

SEQ ID NO: 2201225 - RNA, 19 nt, Homo sapiens
  misc_RNA (1)...(19): siRNA sense strand
gacaaaccccuggcauuua

SEQ ID NO: 2201226 - RNA, 19 nt, Homo sapiens
  misc_RNA (1)...(19): siRNA sense strand
gcaggagaagcggcaauug

SEQ ID NO: 2201227 - RNA, 19 nt, Homo sapiens
  misc_RNA (1)...(19): siRNA sense strand
ugacaaaccccuggcauuu

SEQ ID NO: 2201228 - RNA, 19 nt, Homo sapiens
  misc_RNA (1)...(19): siRNA sense strand
uguccagccugcccaccua

SEQ ID NO: 2201229 - RNA, 19 nt, Homo sapiens
  misc_RNA (1)...(19): siRNA sense strand
ccagucauggguaguguga

SEQ ID NO: 2201230 - RNA, 19 nt, Homo sapiens
  misc_RNA (1)...(19): siRNA sense strand
gagaucacugcuacugaga

SEQ ID NO: 2201231 - RNA, 19 nt, Homo sapiens
  misc_RNA (1)...(19): siRNA sense strand
uggagaagaacauggagaa

SEQ ID NO: 2201232 - RNA, 19 nt, Homo sapiens
  misc_RNA (1)...(19): siRNA sense strand
gaagaacauggagaagauc

SEQ ID NO: 2201233 - RNA, 19 nt, Homo sapiens
  misc_RNA (1)...(19): siRNA sense strand
cugagcagcugcgggagaa

SEQ ID NO: 2201234 - RNA, 19 nt, Homo sapiens
  misc_RNA (1)...(19): siRNA sense strand
gucaccagcuucaccuaca

SEQ ID NO: 2201235 - RNA, 19 nt, Homo sapiens
  misc_RNA (1)...(19): siRNA sense strand
ggagcagcgggacagcuuu

SEQ ID NO: 2201236 - RNA, 19 nt, Homo sapiens
  misc_RNA (1)...(19): siRNA sense strand
gggagaaagcugggcaguu

SEQ ID NO: 2201237 - RNA, 19 nt, Homo sapiens
  misc_RNA (1)...(19): siRNA sense strand
ugggaggugugccagaaau

SEQ ID NO: 2201238 - RNA, 19 nt, Homo sapiens
  misc_RNA (1)...(19): siRNA sense strand
ggacagucuggacgagaau

SEQ ID NO: 2201239 - RNA, 19 nt, Homo sapiens
  misc_RNA (1)...(19): siRNA sense strand
gcccaagcagugauguuga

SEQ ID NO: 2201240 - RNA, 19 nt, Homo sapiens
  misc_RNA (1)...(19): siRNA sense strand
ggcaauugcaggacgacuu

SEQ ID NO: 2201241 - RNA, 19 nt, Homo sapiens
  misc_RNA (1)...(19): siRNA sense strand
gcucggaacugcccagaac

SEQ ID NO: 2201242 - RNA, 19 nt, Homo sapiens
  misc_RNA (1)...(19): siRNA sense strand
gcaauagacagccgaugga

SEQ ID NO: 2201243 - RNA, 19 nt, Homo sapiens
  misc_RNA (1)...(19): siRNA sense strand
ggacauuggccgaguacug

SEQ ID NO: 2201244 - RNA, 19 nt, Homo sapiens
  misc_RNA (1)...(19): siRNA sense strand
ucaggacauuggccgagua

SEQ ID NO: 2201245 - RNA, 19 nt, Homo sapiens
  misc_RNA (1)...(19): siRNA sense strand
ccaaagcgagaaaaucuua

SEQ ID NO: 2201246 - RNA, 19 nt, Homo sapiens
  misc_RNA (1)...(19): siRNA sense strand
gagaagugguuuucguugu

SEQ ID NO: 2201247 - RNA, 19 nt, Homo sapiens
  misc_RNA (1)...(19): siRNA sense strand
gaagugguuuucguuguga

SEQ ID NO: 2201248 - RNA, 19 nt, Homo sapiens
  misc_RNA (1)...(19): siRNA sense strand
cgauggagccaccgaugga

SEQ ID NO: 2201249 - RNA, 19 nt, Homo sapiens
  misc_RNA (1)...(19): siRNA sense strand
caguggcucucgcguccuu

SEQ ID NO: 2201250 - RNA, 19 nt, Homo sapiens
  misc_RNA (1)...(19): siRNA sense strand
ccaaggccaaagcgagaaa

SEQ ID NO: 2201251 - RNA, 19 nt, Homo sapiens
  misc_RNA (1)...(19): siRNA sense strand
gcucucgcguccuucacau

SEQ ID NO: 2201252 - RNA, 19 nt, Homo sapiens
  misc_RNA (1)...(19): siRNA sense strand
gaacaacccuaaugccuuu

SEQ ID NO: 2201253 - RNA, 19 nt, Homo sapiens
  misc_RNA (1)...(19): siRNA sense strand
gaaacaagccugaauggua

SEQ ID NO: 2201254 - RNA, 19 nt, Homo sapiens
  misc_RNA (1)...(19): siRNA sense strand
ccaaagacaucagacauga

SEQ ID NO: 2201255 - RNA, 19 nt, Homo sapiens
  misc_RNA (1)...(19): siRNA sense strand
aaugucaacugaucuauga

SEQ ID NO: 2201256 - RNA, 19 nt, Homo sapiens
  misc_RNA (1)...(19): siRNA sense strand
guaccuggaugaugcuuau

SEQ ID NO: 2201257 - RNA, 19 nt, Homo sapiens
  misc_RNA (1)...(19): siRNA sense strand
gaaccuguauauccaugau

SEQ ID NO: 2201258 - RNA, 19 nt, Homo sapiens
  misc_RNA (1)...(19): siRNA sense strand
gacaugaaguggucaacau

SEQ ID NO: 2201259 - RNA, 19 nt, Homo sapiens
  misc_RNA (1)...(19): siRNA sense strand
caacugaucuaugaaucug

SEQ ID NO: 2201260 - RNA, 19 nt, Homo sapiens
  misc_RNA (1)...(19): siRNA sense strand
gggagagaaugcacuaauc

SEQ ID NO: 2201261 - RNA, 19 nt, Homo sapiens
  misc_RNA (1)...(19): siRNA sense strand
uuuguaaggucccacauuu

SEQ ID NO: 2201262 - RNA, 19 nt, Homo sapiens
  misc_RNA (1)...(19): siRNA sense strand
gagaaugcacuaaucugaa

SEQ ID NO: 2201263 - RNA, 19 nt, Homo sapiens
  misc_RNA (1)...(19): siRNA sense strand
caugaaguggucaacauua

SEQ ID NO: 2201264 - RNA, 19 nt, Homo sapiens
  misc_RNA (1)...(19): siRNA sense strand
gugcucuucucauggauaa

SEQ ID NO: 2201265 - RNA, 19 nt, Homo sapiens
  misc_RNA (1)...(19): siRNA sense strand
ggucaacauuaaccugaga

SEQ ID NO: 2201266 - RNA, 19 nt, Homo sapiens
  misc_RNA (1)...(19): siRNA sense strand
ccuaaugccuuugacuuug

SEQ ID NO: 2201267 - RNA, 19 nt, Homo sapiens
  misc_RNA (1)...(19): siRNA sense strand
gaugaugcuuauccaggaa

SEQ ID NO: 2201268 - RNA, 19 nt, Homo sapiens
  misc_RNA (1)...(19): siRNA sense strand
ggaauucagcaaccuggaa

SEQ ID NO: 2201269 - RNA, 19 nt, Homo sapiens
  misc_RNA (1)...(19): siRNA sense strand
ggagagaaugcacuaaucu

SEQ ID NO: 2201270 - RNA, 19 nt, Homo sapiens
  misc_RNA (1)...(19): siRNA sense strand
ggauaucagccaugaagug

SEQ ID NO: 2201271 - RNA, 19 nt, Homo sapiens
  misc_RNA (1)...(19): siRNA sense strand
ucagcaaccuggaagagau

SEQ ID NO: 2201272 - RNA, 19 nt, Homo sapiens
  misc_RNA (1)...(19): siRNA sense strand
augaaguggucaacauuaa

SEQ ID NO: 2201273 - RNA, 19 nt, Homo sapiens
  misc_RNA (1)...(19): siRNA sense strand
uguaaggucccacauuuga

SEQ ID NO: 2201274 - RNA, 19 nt, Homo sapiens
  misc_RNA (1)...(19): siRNA sense strand
gauguuauuggagcuauuu

SEQ ID NO: 2201275 - RNA, 19 nt, Homo sapiens
  misc_RNA (1)...(19): siRNA sense strand
acauuaaccugagaaacaa

SEQ ID NO: 2201276 - RNA, 19 nt, Homo sapiens
  misc_RNA (1)...(19): siRNA sense strand
agaaugcacuaaucugaag

SEQ ID NO: 2201277 - RNA, 19 nt, Homo sapiens
  misc_RNA (1)...(19): siRNA sense strand
gagaaacaagccugaaugg

SEQ ID NO: 2201278 - RNA, 19 nt, Homo sapiens
  misc_RNA (1)...(19): siRNA sense strand
guugagaugugggagagaa

SEQ ID NO: 2201279 - RNA, 19 nt, Homo sapiens
  misc_RNA (1)...(19): siRNA sense strand
cagccaaugucaacugauc

SEQ ID NO: 2201280 - RNA, 19 nt, Homo sapiens
  misc_RNA (1)...(19): siRNA sense strand
gaaugguacuauacaaagc

SEQ ID NO: 2201281 - RNA, 19 nt, Homo sapiens
  misc_RNA (1)...(19): siRNA sense strand
aagccugaaugguacuaua

SEQ ID NO: 2201282 - RNA, 19 nt, Homo sapiens
  misc_RNA (1)...(19): siRNA sense strand
aaucuguuauugcuuguga

SEQ ID NO: 2201283 - RNA, 19 nt, Homo sapiens
  misc_RNA (1)...(19): siRNA sense strand
agagaaugcacuaaucuga

SEQ ID NO: 2201284 - RNA, 19 nt, Homo sapiens
  misc_RNA (1)...(19): siRNA sense strand
ugagaaacaagccugaaug

SEQ ID NO: 2201285 - RNA, 19 nt, Homo sapiens
  misc_RNA (1)...(19): siRNA sense strand
gccaaagacaucagacaug

SEQ ID NO: 2201286 - RNA, 19 nt, Homo sapiens
  misc_RNA (1)...(19): siRNA sense strand
gggcugauccgcaucuaca

SEQ ID NO: 2201287 - RNA, 19 nt, Homo sapiens
  misc_RNA (1)...(19): siRNA sense strand
agucugugcucuucucaug

SEQ ID NO: 2201288 - RNA, 19 nt, Homo sapiens
  misc_RNA (1)...(19): siRNA sense strand
aacauuaaccugagaaaca

SEQ ID NO: 2201289 - RNA, 19 nt, Homo sapiens
  misc_RNA (1)...(19): siRNA sense strand
ugaacgagcucgccaaaag

SEQ ID NO: 2201290 - RNA, 19 nt, Homo sapiens
  misc_RNA (1)...(19): siRNA sense strand
caaagacaucagacaugaa

SEQ ID NO: 2201291 - RNA, 19 nt, Homo sapiens
  misc_RNA (1)...(19): siRNA sense strand
ccugaaugguacuauacaa

SEQ ID NO: 2201292 - RNA, 19 nt, Homo sapiens
  misc_RNA (1)...(19): siRNA sense strand
uuccagggcuucuugaauc

SEQ ID NO: 2201293 - RNA, 19 nt, Homo sapiens
  misc_RNA (1)...(19): siRNA sense strand
uugagcggcuggaugugua

SEQ ID NO: 2201294 - RNA, 19 nt, Homo sapiens
  misc_RNA (1)...(19): siRNA sense strand
gagagaaugcacuaaucug

SEQ ID NO: 2201295 - RNA, 19 nt, Homo sapiens
  misc_RNA (1)...(19): siRNA sense strand
gaagcuguuuccauaugac

SEQ ID NO: 2201296 - RNA, 19 nt, Homo sapiens
  misc_RNA (1)...(19): siRNA sense strand
cuaugaaucuguuauugcu

SEQ ID NO: 2201297 - RNA, 19 nt, Homo sapiens
  misc_RNA (1)...(19): siRNA sense strand
aaagacaucagacaugaag

SEQ ID NO: 2201298 - RNA, 19 nt, Homo sapiens
  misc_RNA (1)...(19): siRNA sense strand
ucucauggauaagagcauu

SEQ ID NO: 2201299 - RNA, 19 nt, Homo sapiens
  misc_RNA (1)...(19): siRNA sense strand
gccaaugucaacugaucua

SEQ ID NO: 2201300 - RNA, 19 nt, Homo sapiens
  misc_RNA (1)...(19): siRNA sense strand
ugaaugguacuauacaaag

SEQ ID NO: 2201301 - RNA, 19 nt, Homo sapiens
  misc_RNA (1)...(19): siRNA sense strand
cuaaugccuuugacuuugg

SEQ ID NO: 2201302 - RNA, 19 nt, Homo sapiens
  misc_RNA (1)...(19): siRNA sense strand
gguuugagcggcuggaugu

SEQ ID NO: 2201303 - RNA, 19 nt, Homo sapiens
  misc_RNA (1)...(19): siRNA sense strand
ucugugcucuucucaugga

SEQ ID NO: 2201304 - RNA, 19 nt, Homo sapiens
  misc_RNA (1)...(19): siRNA sense strand
acugaucuaugaaucuguu

SEQ ID NO: 2201305 - RNA, 19 nt, Homo sapiens
  misc_RNA (1)...(19): siRNA sense strand
gcccugcggcucuggauau

SEQ ID NO: 2201306 - RNA, 19 nt, Homo sapiens
  misc_RNA (1)...(19): siRNA sense strand
ccucaaggccaaagacauc

SEQ ID NO: 2201307 - RNA, 19 nt, Homo sapiens
  misc_RNA (1)...(19): siRNA sense strand
ggagaccagccaaugucaa

SEQ ID NO: 2201308 - RNA, 19 nt, Homo sapiens
  misc_RNA (1)...(19): siRNA sense strand
gcaucuacagcaugagguu

SEQ ID NO: 2201309 - RNA, 19 nt, Homo sapiens
  misc_RNA (1)...(19): siRNA sense strand
agacaucagacaugaagug

SEQ ID NO: 2201310 - RNA, 19 nt, Homo sapiens
  misc_RNA (1)...(19): siRNA sense strand
gucaacugaucuaugaauc

SEQ ID NO: 2201311 - RNA, 19 nt, Homo sapiens
  misc_RNA (1)...(19): siRNA sense strand
caaugucaacugaucuaug

SEQ ID NO: 2201312 - RNA, 19 nt, Homo sapiens
  misc_RNA (1)...(19): siRNA sense strand
uguuauugcuugugaguac

SEQ ID NO: 2201313 - RNA, 19 nt, Homo sapiens
  misc_RNA (1)...(19): siRNA sense strand
gaacgagcucgccaaaaga

SEQ ID NO: 2201314 - RNA, 19 nt, Homo sapiens
  misc_RNA (1)...(19): siRNA sense strand
auaugacccuuaugaacga

SEQ ID NO: 2201315 - RNA, 19 nt, Homo sapiens
  misc_RNA (1)...(19): siRNA sense strand
ggccaaagacaucagacau

SEQ ID NO: 2201316 - RNA, 19 nt, Homo sapiens
  misc_RNA (1)...(19): siRNA sense strand
cagcaaccuggaagagauu

SEQ ID NO: 2201317 - RNA, 19 nt, Homo sapiens
  misc_RNA (1)...(19): siRNA sense strand
cugaaugguacuauacaaa

SEQ ID NO: 2201318 - RNA, 19 nt, Homo sapiens
  misc_RNA (1)...(19): siRNA sense strand
cccuaaugccuuugacuuu

SEQ ID NO: 2201319 - RNA, 19 nt, Homo sapiens
  misc_RNA (1)...(19): siRNA sense strand
uuucagaacaacccuaaug

SEQ ID NO: 2201320 - RNA, 19 nt, Homo sapiens
  misc_RNA (1)...(19): siRNA sense strand
gagaccagccaaugucaac

SEQ ID NO: 2201321 - RNA, 19 nt, Homo sapiens
  misc_RNA (1)...(19): siRNA sense strand
gcuucuugaaucucuauuu

SEQ ID NO: 2201322 - RNA, 19 nt, Homo sapiens
  misc_RNA (1)...(19): siRNA sense strand
ggaaccuguauauccauga

SEQ ID NO: 2201323 - RNA, 19 nt, Homo sapiens
  misc_RNA (1)...(19): siRNA sense strand
gagauucuugaguaucaga

SEQ ID NO: 2201324 - RNA, 19 nt, Homo sapiens
  misc_RNA (1)...(19): siRNA sense strand
uaugaacgagcucgccaaa

SEQ ID NO: 2201325 - RNA, 19 nt, Homo sapiens
  misc_RNA (1)...(19): siRNA sense strand
gaccagccaaugucaacug

SEQ ID NO: 2201326 - RNA, 19 nt, Homo sapiens
  misc_RNA (1)...(19): siRNA sense strand
gaaguggucaacauuaacc

SEQ ID NO: 2201327 - RNA, 19 nt, Homo sapiens
  misc_RNA (1)...(19): siRNA sense strand
gggauacuggacuguguga

SEQ ID NO: 2201328 - RNA, 19 nt, Homo sapiens
  misc_RNA (1)...(19): siRNA sense strand
ucccacauuugaccaagga

SEQ ID NO: 2201329 - RNA, 19 nt, Homo sapiens
  misc_RNA (1)...(19): siRNA sense strand
acaugaaguggucaacauu

SEQ ID NO: 2201330 - RNA, 19 nt, Homo sapiens
  misc_RNA (1)...(19): siRNA sense strand
accuguauauccaugauug

SEQ ID NO: 2201331 - RNA, 19 nt, Homo sapiens
  misc_RNA (1)...(19): siRNA sense strand
gaacaacccuaaugccuuu

SEQ ID NO: 2201332 - RNA, 19 nt, Homo sapiens
  misc_RNA (1)...(19): siRNA sense strand
gaaacaagccugaauggua

SEQ ID NO: 2201333 - RNA, 19 nt, Homo sapiens
  misc_RNA (1)...(19): siRNA sense strand
ccaaagacaucagacauga

SEQ ID NO: 2201334 - RNA, 19 nt, Homo sapiens
  misc_RNA (1)...(19): siRNA sense strand
aaugucaacugaucuauga

SEQ ID NO: 2201335 - RNA, 19 nt, Homo sapiens
  misc_RNA (1)...(19): siRNA sense strand
guaccuggaugaugcuuau

SEQ ID NO: 2201336 - RNA, 19 nt, Homo sapiens
  misc_RNA (1)...(19): siRNA sense strand
gaaccuguauauccaugau

SEQ ID NO: 2201337 - RNA, 19 nt, Homo sapiens
  misc_RNA (1)...(19): siRNA sense strand
gacaugaaguggucaacau

SEQ ID NO: 2201338 - RNA, 19 nt, Homo sapiens
  misc_RNA (1)...(19): siRNA sense strand
caacugaucuaugaaucug

SEQ ID NO: 2201339 - RNA, 19 nt, Homo sapiens
  misc_RNA (1)...(19): siRNA sense strand
gggagagaaugcacuaauc

SEQ ID NO: 2201340 - RNA, 19 nt, Homo sapiens
  misc_RNA (1)...(19): siRNA sense strand
uuuguaaggucccacauuu

SEQ ID NO: 2201341 - RNA, 19 nt, Homo sapiens
  misc_RNA (1)...(19): siRNA sense strand
gagaaugcacuaaucugaa

SEQ ID NO: 2201342 - RNA, 19 nt, Homo sapiens
  misc_RNA (1)...(19): siRNA sense strand
caugaaguggucaacauua

SEQ ID NO: 2201343 - RNA, 19 nt, Homo sapiens
  misc_RNA (1)...(19): siRNA sense strand
gugcucuucucauggauaa

SEQ ID NO: 2201344 - RNA, 19 nt, Homo sapiens
  misc_RNA (1)...(19): siRNA sense strand
ggucaacauuaaccugaga

SEQ ID NO: 2201345 - RNA, 19 nt, Homo sapiens
  misc_RNA (1)...(19): siRNA sense strand
ccuaaugccuuugacuuug

SEQ ID NO: 2201346 - RNA, 19 nt, Homo sapiens
  misc_RNA (1)...(19): siRNA sense strand
gaugaugcuuauccaggaa

SEQ ID NO: 2201347 - RNA, 19 nt, Homo sapiens
  misc_RNA (1)...(19): siRNA sense strand
ggaauucagcaaccuggaa

SEQ ID NO: 2201348 - RNA, 19 nt, Homo sapiens
  misc_RNA (1)...(19): siRNA sense strand
ggagagaaugcacuaaucu

SEQ ID NO: 2201349 - RNA, 19 nt, Homo sapiens
  misc_RNA (1)...(19): siRNA sense strand
ggauaucagccaugaagug

SEQ ID NO: 2201350 - RNA, 19 nt, Homo sapiens
  misc_RNA (1)...(19): siRNA sense strand
ucagcaaccuggaagagau

SEQ ID NO: 2201351 - RNA, 19 nt, Homo sapiens
  misc_RNA (1)...(19): siRNA sense strand
augaaguggucaacauuaa

SEQ ID NO: 2201352 - RNA, 19 nt, Homo sapiens
  misc_RNA (1)...(19): siRNA sense strand
uguaaggucccacauuuga

SEQ ID NO: 2201353 - RNA, 19 nt, Homo sapiens
  misc_RNA (1)...(19): siRNA sense strand
gauguuauuggagcuauuu

SEQ ID NO: 2201354 - RNA, 19 nt, Homo sapiens
  misc_RNA (1)...(19): siRNA sense strand
acauuaaccugagaaacaa

SEQ ID NO: 2201355 - RNA, 19 nt, Homo sapiens
  misc_RNA (1)...(19): siRNA sense strand
agaaugcacuaaucugaag

SEQ ID NO: 2201356 - RNA, 19 nt, Homo sapiens
  misc_RNA (1)...(19): siRNA sense strand
gagaaacaagccugaaugg

SEQ ID NO: 2201357 - RNA, 19 nt, Homo sapiens
  misc_RNA (1)...(19): siRNA sense strand
guugagaugugggagagaa

SEQ ID NO: 2201358 - RNA, 19 nt, Homo sapiens
  misc_RNA (1)...(19): siRNA sense strand
cagccaaugucaacugauc

SEQ ID NO: 2201359 - RNA, 19 nt, Homo sapiens
  misc_RNA (1)...(19): siRNA sense strand
gaaugguacuauacaaagc

SEQ ID NO: 2201360 - RNA, 19 nt, Homo sapiens
  misc_RNA (1)...(19): siRNA sense strand
aagccugaaugguacuaua

SEQ ID NO: 2201361 - RNA, 19 nt, Homo sapiens
  misc_RNA (1)...(19): siRNA sense strand
aaucuguuauugcuuguga

SEQ ID NO: 2201362 - RNA, 19 nt, Homo sapiens
  misc_RNA (1)...(19): siRNA sense strand
agagaaugcacuaaucuga

SEQ ID NO: 2201363 - RNA, 19 nt, Homo sapiens
  misc_RNA (1)...(19): siRNA sense strand
ugagaaacaagccugaaug

SEQ ID NO: 2201364 - RNA, 19 nt, Homo sapiens
  misc_RNA (1)...(19): siRNA sense strand
gccaaagacaucagacaug

SEQ ID NO: 2201365 - RNA, 19 nt, Homo sapiens
  misc_RNA (1)...(19): siRNA sense strand
gggcugauccgcaucuaca

SEQ ID NO: 2201366 - RNA, 19 nt, Homo sapiens
  misc_RNA (1)...(19): siRNA sense strand
agucugugcucuucucaug

SEQ ID NO: 2201367 - RNA, 19 nt, Homo sapiens
  misc_RNA (1)...(19): siRNA sense strand
aacauuaaccugagaaaca

SEQ ID NO: 2201368 - RNA, 19 nt, Homo sapiens
  misc_RNA (1)...(19): siRNA sense strand
ugaacgagcucgccaaaag

SEQ ID NO: 2201369 - RNA, 19 nt, Homo sapiens
  misc_RNA (1)...(19): siRNA sense strand
caaagacaucagacaugaa

SEQ ID NO: 2201370 - RNA, 19 nt, Homo sapiens
  misc_RNA (1)...(19): siRNA sense strand
ccugaaugguacuauacaa

SEQ ID NO: 2201371 - RNA, 19 nt, Homo sapiens
  misc_RNA (1)...(19): siRNA sense strand
uuccagggcuucuugaauc

SEQ ID NO: 2201372 - RNA, 19 nt, Homo sapiens
  misc_RNA (1)...(19): siRNA sense strand
uugagcggcuggaugugua

SEQ ID NO: 2201373 - RNA, 19 nt, Homo sapiens
  misc_RNA (1)...(19): siRNA sense strand
gagagaaugcacuaaucug

SEQ ID NO: 2201374 - RNA, 19 nt, Homo sapiens
  misc_RNA (1)...(19): siRNA sense strand
gaagcuguuuccauaugac

SEQ ID NO: 2201375 - RNA, 19 nt, Homo sapiens
  misc_RNA (1)...(19): siRNA sense strand
cuaugaaucuguuauugcu

SEQ ID NO: 2201376 - RNA, 19 nt, Homo sapiens
  misc_RNA (1)...(19): siRNA sense strand
aaagacaucagacaugaag

SEQ ID NO: 2201377 - RNA, 19 nt, Homo sapiens
  misc_RNA (1)...(19): siRNA sense strand
ucucauggauaagagcauu

SEQ ID NO: 2201378 - RNA, 19 nt, Homo sapiens
  misc_RNA (1)...(19): siRNA sense strand
gccaaugucaacugaucua

SEQ ID NO: 2201379 - RNA, 19 nt, Homo sapiens
  misc_RNA (1)...(19): siRNA sense strand
ugaaugguacuauacaaag

SEQ ID NO: 2201380 - RNA, 19 nt, Homo sapiens
  misc_RNA (1)...(19): siRNA sense strand
cuaaugccuuugacuuugg

SEQ ID NO: 2201381 - RNA, 19 nt, Homo sapiens
  misc_RNA (1)...(19): siRNA sense strand
gguuugagcggcuggaugu

SEQ ID NO: 2201382 - RNA, 19 nt, Homo sapiens
  misc_RNA (1)...(19): siRNA sense strand
ucugugcucuucucaugga

SEQ ID NO: 2201383 - RNA, 19 nt, Homo sapiens
  misc_RNA (1)...(19): siRNA sense strand
acugaucuaugaaucuguu

SEQ ID NO: 2201384 - RNA, 19 nt, Homo sapiens
  misc_RNA (1)...(19): siRNA sense strand
gcccugcggcucuggauau

SEQ ID NO: 2201385 - RNA, 19 nt, Homo sapiens
  misc_RNA (1)...(19): siRNA sense strand
ccucaaggccaaagacauc

SEQ ID NO: 2201386 - RNA, 19 nt, Homo sapiens
  misc_RNA (1)...(19): siRNA sense strand
ggagaccagccaaugucaa

SEQ ID NO: 2201387 - RNA, 19 nt, Homo sapiens
  misc_RNA (1)...(19): siRNA sense strand
gcaucuacagcaugagguu

SEQ ID NO: 2201388 - RNA, 19 nt, Homo sapiens
  misc_RNA (1)...(19): siRNA sense strand
agacaucagacaugaagug

SEQ ID NO: 2201389 - RNA, 19 nt, Homo sapiens
  misc_RNA (1)...(19): siRNA sense strand
gucaacugaucuaugaauc

SEQ ID NO: 2201390 - RNA, 19 nt, Homo sapiens
  misc_RNA (1)...(19): siRNA sense strand
caaugucaacugaucuaug

SEQ ID NO: 2201391 - RNA, 19 nt, Homo sapiens
  misc_RNA (1)...(19): siRNA sense strand
uguuauugcuugugaguac

SEQ ID NO: 2201392 - RNA, 19 nt, Homo sapiens
  misc_RNA (1)...(19): siRNA sense strand
gaacgagcucgccaaaaga

SEQ ID NO: 2201393 - RNA, 19 nt, Homo sapiens
  misc_RNA (1)...(19): siRNA sense strand
auaugacccuuaugaacga

SEQ ID NO: 2201394 - RNA, 19 nt, Homo sapiens
  misc_RNA (1)...(19): siRNA sense strand
ggccaaagacaucagacau

SEQ ID NO: 2201395 - RNA, 19 nt, Homo sapiens
  misc_RNA (1)...(19): siRNA sense strand
cagcaaccuggaagagauu

SEQ ID NO: 2201396 - RNA, 19 nt, Homo sapiens
  misc_RNA (1)...(19): siRNA sense strand
cugaaugguacuauacaaa

SEQ ID NO: 2201397 - RNA, 19 nt, Homo sapiens
  misc_RNA (1)...(19): siRNA sense strand
cccuaaugccuuugacuuu

SEQ ID NO: 2201398 - RNA, 19 nt, Homo sapiens
  misc_RNA (1)...(19): siRNA sense strand
uuucagaacaacccuaaug

SEQ ID NO: 2201399 - RNA, 19 nt, Homo sapiens
  misc_RNA (1)...(19): siRNA sense strand
gagaccagccaaugucaac

SEQ ID NO: 2201400 - RNA, 19 nt, Homo sapiens
  misc_RNA (1)...(19): siRNA sense strand
gcuucuugaaucucuauuu

SEQ ID NO: 2201401 - RNA, 19 nt, Homo sapiens
  misc_RNA (1)...(19): siRNA sense strand
ggaaccuguauauccauga

SEQ ID NO: 2201402 - RNA, 19 nt, Homo sapiens
  misc_RNA (1)...(19): siRNA sense strand
gagauucuugaguaucaga

SEQ ID NO: 2201403 - RNA, 19 nt, Homo sapiens
  misc_RNA (1)...(19): siRNA sense strand
uaugaacgagcucgccaaa

SEQ ID NO: 2201404 - RNA, 19 nt, Homo sapiens
  misc_RNA (1)...(19): siRNA sense strand
gaccagccaaugucaacug

SEQ ID NO: 2201405 - RNA, 19 nt, Homo sapiens
  misc_RNA (1)...(19): siRNA sense strand
gaaguggucaacauuaacc

SEQ ID NO: 2201406 - RNA, 19 nt, Homo sapiens
  misc_RNA (1)...(19): siRNA sense strand
gggauacuggacuguguga

SEQ ID NO: 2201407 - RNA, 19 nt, Homo sapiens
  misc_RNA (1)...(19): siRNA sense strand
ucccacauuugaccaagga

SEQ ID NO: 2201408 - RNA, 19 nt, Homo sapiens
  misc_RNA (1)...(19): siRNA sense strand
acaugaaguggucaacauu

SEQ ID NO: 2201409 - RNA, 19 nt, Homo sapiens
  misc_RNA (1)...(19): siRNA sense strand
accuguauauccaugauug

SEQ ID NO: 2201410 - RNA, 19 nt, Homo sapiens
  misc_RNA (1)...(19): siRNA sense strand
ccaaugagcuccagaauuu

SEQ ID NO: 2201411 - RNA, 19 nt, Homo sapiens
  misc_RNA (1)...(19): siRNA sense strand
gcaagaagcugaagagaga

SEQ ID NO: 2201412 - RNA, 19 nt, Homo sapiens
  misc_RNA (1)...(19): siRNA sense strand
ggaagaaucugcauuugaa

SEQ ID NO: 2201413 - RNA, 19 nt, Homo sapiens
  misc_RNA (1)...(19): siRNA sense strand
caaaggaacucgagcaauu

SEQ ID NO: 2201414 - RNA, 19 nt, Homo sapiens
  misc_RNA (1)...(19): siRNA sense strand
gaaagggacauacuaaaua

SEQ ID NO: 2201415 - RNA, 19 nt, Homo sapiens
  misc_RNA (1)...(19): siRNA sense strand
gguagaggcuucaaagaaa

SEQ ID NO: 2201416 - RNA, 19 nt, Homo sapiens
  misc_RNA (1)...(19): siRNA sense strand
gauaacaccuucuuaaugg

SEQ ID NO: 2201417 - RNA, 19 nt, Homo sapiens
  misc_RNA (1)...(19): siRNA sense strand
uagagaaacuuaccaauga

SEQ ID NO: 2201418 - RNA, 19 nt, Homo sapiens
  misc_RNA (1)...(19): siRNA sense strand
cauaugagcugauacagaa

SEQ ID NO: 2201419 - RNA, 19 nt, Homo sapiens
  misc_RNA (1)...(19): siRNA sense strand
gaaagcaaguccuggaaga

SEQ ID NO: 2201420 - RNA, 19 nt, Homo sapiens
  misc_RNA (1)...(19): siRNA sense strand
ugagagagcugcaaaggaa

SEQ ID NO: 2201421 - RNA, 19 nt, Homo sapiens
  misc_RNA (1)...(19): siRNA sense strand
ggacucagccuaugacaaa

SEQ ID NO: 2201422 - RNA, 19 nt, Homo sapiens
  misc_RNA (1)...(19): siRNA sense strand
gaugagaaaugcuaaacuu

SEQ ID NO: 2201423 - RNA, 19 nt, Homo sapiens
  misc_RNA (1)...(19): siRNA sense strand
gaacagcagcgaauagaaa

SEQ ID NO: 2201424 - RNA, 19 nt, Homo sapiens
  misc_RNA (1)...(19): siRNA sense strand
uagaugagcugaaagaaga

SEQ ID NO: 2201425 - RNA, 19 nt, Homo sapiens
  misc_RNA (1)...(19): siRNA sense strand
agaaauaccucgcucagaa

SEQ ID NO: 2201426 - RNA, 19 nt, Homo sapiens
  misc_RNA (1)...(19): siRNA sense strand
aagcagaacuugacagaaa

SEQ ID NO: 2201427 - RNA, 19 nt, Homo sapiens
  misc_RNA (1)...(19): siRNA sense strand
agaaagagcucaagcagau

SEQ ID NO: 2201428 - RNA, 19 nt, Homo sapiens
  misc_RNA (1)...(19): siRNA sense strand
cagaagauauugaaugaga

SEQ ID NO: 2201429 - RNA, 19 nt, Homo sapiens
  misc_RNA (1)...(19): siRNA sense strand
gagaccagcucuuaucaga

SEQ ID NO: 2201430 - RNA, 19 nt, Homo sapiens
  misc_RNA (1)...(19): siRNA sense strand
ggaagaaguccaucaaaug

SEQ ID NO: 2201431 - RNA, 19 nt, Homo sapiens
  misc_RNA (1)...(19): siRNA sense strand
guacagagcaaagaauaua

SEQ ID NO: 2201432 - RNA, 19 nt, Homo sapiens
  misc_RNA (1)...(19): siRNA sense strand
caacagaaccuauaugaag

SEQ ID NO: 2201433 - RNA, 19 nt, Homo sapiens
  misc_RNA (1)...(19): siRNA sense strand
gaagaaauggaaagagauu

SEQ ID NO: 2201434 - RNA, 19 nt, Homo sapiens
  misc_RNA (1)...(19): siRNA sense strand
gaguauggcuaauguugaa

SEQ ID NO: 2201435 - RNA, 19 nt, Homo sapiens
  misc_RNA (1)...(19): siRNA sense strand
gaucaucuuucaucuggaa

SEQ ID NO: 2201436 - RNA, 19 nt, Homo sapiens
  misc_RNA (1)...(19): siRNA sense strand
gagcagcuaucccaggaaa

SEQ ID NO: 2201437 - RNA, 19 nt, Homo sapiens
  misc_RNA (1)...(19): siRNA sense strand
gaagacaucucugccaaag

SEQ ID NO: 2201438 - RNA, 19 nt, Homo sapiens
  misc_RNA (1)...(19): siRNA sense strand
ugaguuagcuuugcucuau

SEQ ID NO: 2201439 - RNA, 19 nt, Homo sapiens
  misc_RNA (1)...(19): siRNA sense strand
gcaaugaugaguuagcuuu

SEQ ID NO: 2201440 - RNA, 19 nt, Homo sapiens
  misc_RNA (1)...(19): siRNA sense strand
ggauaacaccuucuuaaug

SEQ ID NO: 2201441 - RNA, 19 nt, Homo sapiens
  misc_RNA (1)...(19): siRNA sense strand
gcucaaagccaaagaggaa

SEQ ID NO: 2201442 - RNA, 19 nt, Homo sapiens
  misc_RNA (1)...(19): siRNA sense strand
ugaaggagcagaagauauu

SEQ ID NO: 2201443 - RNA, 19 nt, Homo sapiens
  misc_RNA (1)...(19): siRNA sense strand
aaagagaauuguugaagga

SEQ ID NO: 2201444 - RNA, 19 nt, Homo sapiens
  misc_RNA (1)...(19): siRNA sense strand
gaaauaccucgcucagaaa

SEQ ID NO: 2201445 - RNA, 19 nt, Homo sapiens
  misc_RNA (1)...(19): siRNA sense strand
gaccagcucuuaucagaag

SEQ ID NO: 2201446 - RNA, 19 nt, Homo sapiens
  misc_RNA (1)...(19): siRNA sense strand
gaacauggaagacauaaaa

SEQ ID NO: 2201447 - RNA, 19 nt, Homo sapiens
  misc_RNA (1)...(19): siRNA sense strand
gcaaggaggagcuucagaa

SEQ ID NO: 2201448 - RNA, 19 nt, Homo sapiens
  misc_RNA (1)...(19): siRNA sense strand
gaacaugccaucagucagu

SEQ ID NO: 2201449 - RNA, 19 nt, Homo sapiens
  misc_RNA (1)...(19): siRNA sense strand
gcucuuaucagaaguggua

SEQ ID NO: 2201450 - RNA, 19 nt, Homo sapiens
  misc_RNA (1)...(19): siRNA sense strand
gcaauggacgagcuucuaa

SEQ ID NO: 2201451 - RNA, 19 nt, Homo sapiens
  misc_RNA (1)...(19): siRNA sense strand
aagaagaagugacaaagga

SEQ ID NO: 2201452 - RNA, 19 nt, Homo sapiens
  misc_RNA (1)...(19): siRNA sense strand
ucagaaacguaaagaacaa

SEQ ID NO: 2201453 - RNA, 19 nt, Homo sapiens
  misc_RNA (1)...(19): siRNA sense strand
gagcagaagauauugaaug

SEQ ID NO: 2201454 - RNA, 19 nt, Homo sapiens
  misc_RNA (1)...(19): siRNA sense strand
acacagcacccauggauaa

SEQ ID NO: 2201455 - RNA, 19 nt, Homo sapiens
  misc_RNA (1)...(19): siRNA sense strand
guagagaaacuuaccaaug

SEQ ID NO: 2201456 - RNA, 19 nt, Homo sapiens
  misc_RNA (1)...(19): siRNA sense strand
ggagaaacucuacauggaa

SEQ ID NO: 2201457 - RNA, 19 nt, Homo sapiens
  misc_RNA (1)...(19): siRNA sense strand
gagaaagggacauacuaaa

SEQ ID NO: 2201458 - RNA, 19 nt, Homo sapiens
  misc_RNA (1)...(19): siRNA sense strand
ggucuggacugucaaugga

SEQ ID NO: 2201459 - RNA, 19 nt, Homo sapiens
  misc_RNA (1)...(19): siRNA sense strand
ggacacagcacccauggau

SEQ ID NO: 2201460 - RNA, 19 nt, Homo sapiens
  misc_RNA (1)...(19): siRNA sense strand
caaugcauaugagcugaua

SEQ ID NO: 2201461 - RNA, 19 nt, Homo sapiens
  misc_RNA (1)...(19): siRNA sense strand
gaagcagacagacuuggua

SEQ ID NO: 2201462 - RNA, 19 nt, Homo sapiens
  misc_RNA (1)...(19): siRNA sense strand
agaaugaacagcacaguuu

SEQ ID NO: 2201463 - RNA, 19 nt, Homo sapiens
  misc_RNA (1)...(19): siRNA sense strand
gaagaaguccaucaaaugc

SEQ ID NO: 2201464 - RNA, 19 nt, Homo sapiens
  misc_RNA (1)...(19): siRNA sense strand
uagcuuugcucuaugagaa

SEQ ID NO: 2201465 - RNA, 19 nt, Homo sapiens
  misc_RNA (1)...(19): siRNA sense strand
uuacugagguucaaagaag

SEQ ID NO: 2201466 - RNA, 19 nt, Homo sapiens
  misc_RNA (1)...(19): siRNA sense strand
gaaucugcauuugaagaaa

SEQ ID NO: 2201467 - RNA, 19 nt, Homo sapiens
  misc_RNA (1)...(19): siRNA sense strand
gaagauauugaaugagaga

SEQ ID NO: 2201468 - RNA, 19 nt, Homo sapiens
  misc_RNA (1)...(19): siRNA sense strand
gcaggcagacagaaauaaa

SEQ ID NO: 2201469 - RNA, 19 nt, Homo sapiens
  misc_RNA (1)...(19): siRNA sense strand
ggaaaaggguggaaagcaa

SEQ ID NO: 2201470 - RNA, 19 nt, Homo sapiens
  misc_RNA (1)...(19): siRNA sense strand
gcaaagagaauuguugaag

SEQ ID NO: 2201471 - RNA, 19 nt, Homo sapiens
  misc_RNA (1)...(19): siRNA sense strand
uggacgagcuucuaagaga

SEQ ID NO: 2201472 - RNA, 19 nt, Homo sapiens
  misc_RNA (1)...(19): siRNA sense strand
gaaccugaccaaacuagug

SEQ ID NO: 2201473 - RNA, 19 nt, Homo sapiens
  misc_RNA (1)...(19): siRNA sense strand
ggaacuaaagcacgucuug

SEQ ID NO: 2201474 - RNA, 19 nt, Homo sapiens
  misc_RNA (1)...(19): siRNA sense strand
ccaggaguauggcuaaugu

SEQ ID NO: 2201475 - RNA, 19 nt, Homo sapiens
  misc_RNA (1)...(19): siRNA sense strand
ugaacuuucuggagacaaa

SEQ ID NO: 2201476 - RNA, 19 nt, Homo sapiens
  misc_RNA (1)...(19): siRNA sense strand
ggagaaauccagaacuaca

SEQ ID NO: 2201477 - RNA, 19 nt, Homo sapiens
  misc_RNA (1)...(19): siRNA sense strand
gagaaaugcuaaacuucag

SEQ ID NO: 2201478 - RNA, 19 nt, Homo sapiens
  misc_RNA (1)...(19): siRNA sense strand
aacaagcccuggagacaaa

SEQ ID NO: 2201479 - RNA, 19 nt, Homo sapiens
  misc_RNA (1)...(19): siRNA sense strand
gcucagaagcagagaaaga

SEQ ID NO: 2201480 - RNA, 19 nt, Homo sapiens
  misc_RNA (1)...(19): siRNA sense strand
gcacaaagaaacccuaaaa

SEQ ID NO: 2201481 - RNA, 19 nt, Homo sapiens
  misc_RNA (1)...(19): siRNA sense strand
uagcaacauccgagauuua

SEQ ID NO: 2201482 - RNA, 19 nt, Homo sapiens
  misc_RNA (1)...(19): siRNA sense strand
uugaagaaauggaaagaga

SEQ ID NO: 2201483 - RNA, 19 nt, Homo sapiens
  misc_RNA (1)...(19): siRNA sense strand
gacagaagaaggaauuaga

SEQ ID NO: 2201484 - RNA, 19 nt, Homo sapiens
  misc_RNA (1)...(19): siRNA sense strand
gcaacagaaccuauaugaa

SEQ ID NO: 2201485 - RNA, 19 nt, Homo sapiens
  misc_RNA (1)...(19): siRNA sense strand
agggagaaauccagaacua

SEQ ID NO: 2201486 - RNA, 19 nt, Homo sapiens
  misc_RNA (1)...(19): siRNA sense strand
gggacauacuaaauaagaa

SEQ ID NO: 2201487 - RNA, 19 nt, Homo sapiens
  misc_RNA (1)...(19): siRNA sense strand
agagcuaaaugcagagauu

SEQ ID NO: 2201488 - RNA, 19 nt, Homo sapiens
  misc_RNA (1)...(19): siRNA sense strand
gaaccuggagggagaaauc

SEQ ID NO: 2201489 - RNA, 19 nt, Homo sapiens
  misc_RNA (1)...(19): siRNA sense strand
gaaugaacagcacaguuug

SEQ ID NO: 2201490 - RNA, 19 nt, Homo sapiens
  misc_RNA (1)...(19): siRNA sense strand
agcagaagauauugaauga

SEQ ID NO: 2201491 - RNA, 19 nt, Homo sapiens
  misc_RNA (1)...(19): siRNA sense strand
gggauuagagagagaggua

SEQ ID NO: 2201492 - RNA, 19 nt, Homo sapiens
  misc_RNA (1)...(19): siRNA sense strand
gcauaugagcugauacaga

SEQ ID NO: 2201493 - RNA, 19 nt, Homo sapiens
  misc_RNA (1)...(19): siRNA sense strand
caaagaguccgcacuugug

SEQ ID NO: 2201494 - RNA, 19 nt, Homo sapiens
  misc_RNA (1)...(19): siRNA sense strand
ccagugaccuuacgcaaaa

SEQ ID NO: 2201495 - RNA, 19 nt, Homo sapiens
  misc_RNA (1)...(19): siRNA sense strand
gagcgugaccgguacauca

SEQ ID NO: 2201496 - RNA, 19 nt, Homo sapiens
  misc_RNA (1)...(19): siRNA sense strand
gagaaauccagaacuacaa

SEQ ID NO: 2201497 - RNA, 19 nt, Homo sapiens
  misc_RNA (1)...(19): siRNA sense strand
ugguaaagcuccaugaaca

SEQ ID NO: 2201498 - RNA, 19 nt, Homo sapiens
  misc_RNA (1)...(19): siRNA sense strand
gagauuuacugagguucaa

SEQ ID NO: 2201499 - RNA, 19 nt, Homo sapiens
  misc_RNA (1)...(19): siRNA sense strand
gaaguacagagcaaagaau

SEQ ID NO: 2201500 - RNA, 19 nt, Homo sapiens
  misc_RNA (1)...(19): siRNA sense strand
gcacgcugcaugacaagaa

SEQ ID NO: 2201501 - RNA, 19 nt, Homo sapiens
  misc_RNA (1)...(19): siRNA sense strand
ggaguauggcuaauguuga

SEQ ID NO: 2201502 - RNA, 19 nt, Homo sapiens
  misc_RNA (1)...(19): siRNA sense strand
caaccaagccagugaccuu

SEQ ID NO: 2201503 - RNA, 19 nt, Homo sapiens
  misc_RNA (1)...(19): siRNA sense strand
agagaaagggacauacuaa

SEQ ID NO: 2201504 - RNA, 19 nt, Homo sapiens
  misc_RNA (1)...(19): siRNA sense strand
aggaagaaguccaucaaau

SEQ ID NO: 2201505 - RNA, 19 nt, Homo sapiens
  misc_RNA (1)...(19): siRNA sense strand
ucagucaguuccaacaaga

SEQ ID NO: 2201506 - RNA, 19 nt, Homo sapiens
  misc_RNA (1)...(19): siRNA sense strand
gaucagaccaccauugcau

SEQ ID NO: 2201507 - RNA, 19 nt, Homo sapiens
  misc_RNA (1)...(19): siRNA sense strand
ucaaagaagaagugacaaa

SEQ ID NO: 2201508 - RNA, 19 nt, Homo sapiens
  misc_RNA (1)...(19): siRNA sense strand
gaggaagaaguccaucaaa

SEQ ID NO: 2201509 - RNA, 19 nt, Homo sapiens
  misc_RNA (1)...(19): siRNA sense strand
caggaugaaauaacagaua

SEQ ID NO: 2201510 - RNA, 19 nt, Homo sapiens
  misc_RNA (1)...(19): siRNA sense strand
ggaagaagauccauuauuu

SEQ ID NO: 2201511 - RNA, 19 nt, Homo sapiens
  misc_RNA (1)...(19): siRNA sense strand
ggaaggcaauuacccauua

SEQ ID NO: 2201512 - RNA, 19 nt, Homo sapiens
  misc_RNA (1)...(19): siRNA sense strand
gaagauccauuauuuacug

SEQ ID NO: 2201513 - RNA, 19 nt, Homo sapiens
  misc_RNA (1)...(19): siRNA sense strand
gaaccucaauuaaugcaaa

SEQ ID NO: 2201514 - RNA, 19 nt, Homo sapiens
  misc_RNA (1)...(19): siRNA sense strand
caagugaccucugauguuu

SEQ ID NO: 2201515 - RNA, 19 nt, Homo sapiens
  misc_RNA (1)...(19): siRNA sense strand
aaacagaauuggaagauga

SEQ ID NO: 2201516 - RNA, 19 nt, Homo sapiens
  misc_RNA (1)...(19): siRNA sense strand
gaacagagggaaccagaaa

SEQ ID NO: 2201517 - RNA, 19 nt, Homo sapiens
  misc_RNA (1)...(19): siRNA sense strand
guaaggagcuggcggcaau

SEQ ID NO: 2201518 - RNA, 19 nt, Homo sapiens
  misc_RNA (1)...(19): siRNA sense strand
gccauaugauguaaacuua

SEQ ID NO: 2201519 - RNA, 19 nt, Homo sapiens
  misc_RNA (1)...(19): siRNA sense strand
gaaccugaaggcccuauua

SEQ ID NO: 2201520 - RNA, 19 nt, Homo sapiens
  misc_RNA (1)...(19): siRNA sense strand
gauguuagauauacugguu

SEQ ID NO: 2201521 - RNA, 19 nt, Homo sapiens
  misc_RNA (1)...(19): siRNA sense strand
guagaucucucuucucugu

SEQ ID NO: 2201522 - RNA, 19 nt, Homo sapiens
  misc_RNA (1)...(19): siRNA sense strand
gcacauucuuuacaacuug

SEQ ID NO: 2201523 - RNA, 19 nt, Homo sapiens
  misc_RNA (1)...(19): siRNA sense strand
gcaaagugccuuacacaga

SEQ ID NO: 2201524 - RNA, 19 nt, Homo sapiens
  misc_RNA (1)...(19): siRNA sense strand
gaaagcgguuacuugguuu

SEQ ID NO: 2201525 - RNA, 19 nt, Homo sapiens
  misc_RNA (1)...(19): siRNA sense strand
gcacaggauaugacacuua

SEQ ID NO: 2201526 - RNA, 19 nt, Homo sapiens
  misc_RNA (1)...(19): siRNA sense strand
uauggaaccucaauuaaug

SEQ ID NO: 2201527 - RNA, 19 nt, Homo sapiens
  misc_RNA (1)...(19): siRNA sense strand
gaaaucagcagacauccuu

SEQ ID NO: 2201528 - RNA, 19 nt, Homo sapiens
  misc_RNA (1)...(19): siRNA sense strand
gugaucagcucauuaagga

SEQ ID NO: 2201529 - RNA, 19 nt, Homo sapiens
  misc_RNA (1)...(19): siRNA sense strand
gaugagauaagcauaauga

SEQ ID NO: 2201530 - RNA, 19 nt, Homo sapiens
  misc_RNA (1)...(19): siRNA sense strand
gaauggagcaaacagaauu

SEQ ID NO: 2201531 - RNA, 19 nt, Homo sapiens
  misc_RNA (1)...(19): siRNA sense strand
cuacugugcuaucugcuua

SEQ ID NO: 2201532 - RNA, 19 nt, Homo sapiens
  misc_RNA (1)...(19): siRNA sense strand
gaacgggaaucuggagaga

SEQ ID NO: 2201533 - RNA, 19 nt, Homo sapiens
  misc_RNA (1)...(19): siRNA sense strand
agaaagcgguuacuugguu

SEQ ID NO: 2201534 - RNA, 19 nt, Homo sapiens
  misc_RNA (1)...(19): siRNA sense strand
caaaggaguaccaaaugua

SEQ ID NO: 2201535 - RNA, 19 nt, Homo sapiens
  misc_RNA (1)...(19): siRNA sense strand
gcaagugaccucugauguu

SEQ ID NO: 2201536 - RNA, 19 nt, Homo sapiens
  misc_RNA (1)...(19): siRNA sense strand
ugccaaagcuguucaugaa

SEQ ID NO: 2201537 - RNA, 19 nt, Homo sapiens
  misc_RNA (1)...(19): siRNA sense strand
caguagaucuggaagaaga

SEQ ID NO: 2201538 - RNA, 19 nt, Homo sapiens
  misc_RNA (1)...(19): siRNA sense strand
ccaaaggaguaccaaaugu

SEQ ID NO: 2201539 - RNA, 19 nt, Homo sapiens
  misc_RNA (1)...(19): siRNA sense strand
ccagaggccucgguuguuu

SEQ ID NO: 2201540 - RNA, 19 nt, Homo sapiens
  misc_RNA (1)...(19): siRNA sense strand
gguagaaaauggauugaua

SEQ ID NO: 2201541 - RNA, 19 nt, Homo sapiens
  misc_RNA (1)...(19): siRNA sense strand
ccagugaccgauacaaaua

SEQ ID NO: 2201542 - RNA, 19 nt, Homo sapiens
  misc_RNA (1)...(19): siRNA sense strand
ggagagacagggccaugua

SEQ ID NO: 2201543 - RNA, 19 nt, Homo sapiens
  misc_RNA (1)...(19): siRNA sense strand
ccaaagcuguucaugaaag

SEQ ID NO: 2201544 - RNA, 19 nt, Homo sapiens
  misc_RNA (1)...(19): siRNA sense strand
gcagaaaucagcagacauc

SEQ ID NO: 2201545 - RNA, 19 nt, Homo sapiens
  misc_RNA (1)...(19): siRNA sense strand
ggaacuaucuggugcuacu

SEQ ID NO: 2201546 - RNA, 19 nt, Homo sapiens
  misc_RNA (1)...(19): siRNA sense strand
ggaaaacgagccuuaauuu

SEQ ID NO: 2201547 - RNA, 19 nt, Homo sapiens
  misc_RNA (1)...(19): siRNA sense strand
ccacuacuuccacacauua

SEQ ID NO: 2201548 - RNA, 19 nt, Homo sapiens
  misc_RNA (1)...(19): siRNA sense strand
gagauaagcauaaugacau

SEQ ID NO: 2201549 - RNA, 19 nt, Homo sapiens
  misc_RNA (1)...(19): siRNA sense strand
caaagcuguucaugaaaga

SEQ ID NO: 2201550 - RNA, 19 nt, Homo sapiens
  misc_RNA (1)...(19): siRNA sense strand
gcaauuacccauuacuaca

SEQ ID NO: 2201551 - RNA, 19 nt, Homo sapiens
  misc_RNA (1)...(19): siRNA sense strand
agauaaagaugugguagaa

SEQ ID NO: 2201552 - RNA, 19 nt, Homo sapiens
  misc_RNA (1)...(19): siRNA sense strand
aaacgagccuuaauuucau

SEQ ID NO: 2201553 - RNA, 19 nt, Homo sapiens
  misc_RNA (1)...(19): siRNA sense strand
gugcagaaauuaauuagac

SEQ ID NO: 2201554 - RNA, 19 nt, Homo sapiens
  misc_RNA (1)...(19): siRNA sense strand
ccugaaggcccuauuauug

SEQ ID NO: 2201555 - RNA, 19 nt, Homo sapiens
  misc_RNA (1)...(19): siRNA sense strand
cauagagacuucagaugau

SEQ ID NO: 2201556 - RNA, 19 nt, Homo sapiens
  misc_RNA (1)...(19): siRNA sense strand
gagauucaguuucuuugca

SEQ ID NO: 2201557 - RNA, 19 nt, Homo sapiens
  misc_RNA (1)...(19): siRNA sense strand
gaggaacuaucuggugcua

SEQ ID NO: 2201558 - RNA, 19 nt, Homo sapiens
  misc_RNA (1)...(19): siRNA sense strand
ucaguguuaucuagacuuu

SEQ ID NO: 2201559 - RNA, 19 nt, Homo sapiens
  misc_RNA (1)...(19): siRNA sense strand
ggagcaaacagaauuggaa

SEQ ID NO: 2201560 - RNA, 19 nt, Homo sapiens
  misc_RNA (1)...(19): siRNA sense strand
ccagugcagaaauuaauua

SEQ ID NO: 2201561 - RNA, 19 nt, Homo sapiens
  misc_RNA (1)...(19): siRNA sense strand
uagauauacugguucaaga

SEQ ID NO: 2201562 - RNA, 19 nt, Homo sapiens
  misc_RNA (1)...(19): siRNA sense strand
gcaaacagaauuggaagau

SEQ ID NO: 2201563 - RNA, 19 nt, Homo sapiens
  misc_RNA (1)...(19): siRNA sense strand
uggaauauuugcuucauca

SEQ ID NO: 2201564 - RNA, 19 nt, Homo sapiens
  misc_RNA (1)...(19): siRNA sense strand
aaaggaguaccaaauguaa

SEQ ID NO: 2201565 - RNA, 19 nt, Homo sapiens
  misc_RNA (1)...(19): siRNA sense strand
gcgguuacuugguuuggaa

SEQ ID NO: 2201566 - RNA, 19 nt, Homo sapiens
  misc_RNA (1)...(19): siRNA sense strand
cgacagaaugggaagaauu

SEQ ID NO: 2201567 - RNA, 19 nt, Homo sapiens
  misc_RNA (1)...(19): siRNA sense strand
acauagagacuucagauga

SEQ ID NO: 2201568 - RNA, 19 nt, Homo sapiens
  misc_RNA (1)...(19): siRNA sense strand
caaacagaauuggaagaug

SEQ ID NO: 2201569 - RNA, 19 nt, Homo sapiens
  misc_RNA (1)...(19): siRNA sense strand
agaucucucuucucuguaa

SEQ ID NO: 2201570 - RNA, 19 nt, Homo sapiens
  misc_RNA (1)...(19): siRNA sense strand
uauacugguucaagaagaa

SEQ ID NO: 2201571 - RNA, 19 nt, Homo sapiens
  misc_RNA (1)...(19): siRNA sense strand
auagagacuucagaugaua

SEQ ID NO: 2201572 - RNA, 19 nt, Homo sapiens
  misc_RNA (1)...(19): siRNA sense strand
uaucuagacuuucucucuu

SEQ ID NO: 2201573 - RNA, 19 nt, Homo sapiens
  misc_RNA (1)...(19): siRNA sense strand
guuauggaaccucaauuaa

SEQ ID NO: 2201574 - RNA, 19 nt, Homo sapiens
  misc_RNA (1)...(19): siRNA sense strand
guggauccguuagauauug

SEQ ID NO: 2201575 - RNA, 19 nt, Homo sapiens
  misc_RNA (1)...(19): siRNA sense strand
gaaggcaauuacccauuac

SEQ ID NO: 2201576 - RNA, 19 nt, Homo sapiens
  misc_RNA (1)...(19): siRNA sense strand
acaacuuggucuugagaaa

SEQ ID NO: 2201577 - RNA, 19 nt, Homo sapiens
  misc_RNA (1)...(19): siRNA sense strand
gcggcaaucgcauuuguaa

SEQ ID NO: 2201578 - RNA, 19 nt, Homo sapiens
  misc_RNA (1)...(19): siRNA sense strand
aaugcaaacuucugagaug

SEQ ID NO: 2201579 - RNA, 19 nt, Homo sapiens
  misc_RNA (1)...(19): siRNA sense strand
ggaauggagcaaacagaau

SEQ ID NO: 2201580 - RNA, 19 nt, Homo sapiens
  misc_RNA (1)...(19): siRNA sense strand
caccuucucuuccuuuaca

SEQ ID NO: 2201581 - RNA, 19 nt, Homo sapiens
  misc_RNA (1)...(19): siRNA sense strand
aggcauagguuaauugaac

SEQ ID NO: 2201582 - RNA, 19 nt, Homo sapiens
  misc_RNA (1)...(19): siRNA sense strand
uguuauggaaccucaauua

SEQ ID NO: 2201583 - RNA, 19 nt, Homo sapiens
  misc_RNA (1)...(19): siRNA sense strand
gaaaccguggaagcaauua

SEQ ID NO: 2201584 - RNA, 19 nt, Homo sapiens
  misc_RNA (1)...(19): siRNA sense strand
gccacuacuuccacacauu

SEQ ID NO: 2201585 - RNA, 19 nt, Homo sapiens
  misc_RNA (1)...(19): siRNA sense strand
aaccaagaguggcuuaguu

SEQ ID NO: 2201586 - RNA, 19 nt, Homo sapiens
  misc_RNA (1)...(19): siRNA sense strand
gauccauuauuuacugaca

SEQ ID NO: 2201587 - RNA, 19 nt, Homo sapiens
  misc_RNA (1)...(19): siRNA sense strand
gaauauuugcuucaucaca

SEQ ID NO: 2201588 - RNA, 19 nt, Homo sapiens
  misc_RNA (1)...(19): siRNA sense strand
guaauugucaggguuguug

SEQ ID NO: 2201589 - RNA, 19 nt, Homo sapiens
  misc_RNA (1)...(19): siRNA sense strand
caaaagcauuggaaaagug

SEQ ID NO: 2201590 - RNA, 19 nt, Homo sapiens
  misc_RNA (1)...(19): siRNA sense strand
ugugugaacuacugacaga

SEQ ID NO: 2201591 - RNA, 19 nt, Homo sapiens
  misc_RNA (1)...(19): siRNA sense strand
gcuagagggugugauugug

SEQ ID NO: 2201592 - RNA, 19 nt, Homo sapiens
  misc_RNA (1)...(19): siRNA sense strand
agacuuuacucccaagcuu

SEQ ID NO: 2201593 - RNA, 19 nt, Homo sapiens
  misc_RNA (1)...(19): siRNA sense strand
gauagcaggagcaguagau

SEQ ID NO: 2201594 - RNA, 19 nt, Homo sapiens
  misc_RNA (1)...(19): siRNA sense strand
uaaggcauagguuaauuga

SEQ ID NO: 2201595 - RNA, 19 nt, Homo sapiens
  misc_RNA (1)...(19): siRNA sense strand
ccaaaagacugcugcuguu

SEQ ID NO: 2201596 - RNA, 19 nt, Homo sapiens
  misc_RNA (1)...(19): siRNA sense strand
acaggccagugcagaaauu

SEQ ID NO: 2201597 - RNA, 19 nt, Homo sapiens
  misc_RNA (1)...(19): siRNA sense strand
cugaaggcccuauuauuga

SEQ ID NO: 2201598 - RNA, 19 nt, Homo sapiens
  misc_RNA (1)...(19): siRNA sense strand
gaucaccuguccacaagcu

SEQ ID NO: 2201599 - RNA, 19 nt, Homo sapiens
  misc_RNA (1)...(19): siRNA sense strand
agacuugccucccuguaca

SEQ ID NO: 2201600 - RNA, 19 nt, Homo sapiens
  misc_RNA (1)...(19): siRNA sense strand
gcuccuggcuguagaucuc

SEQ ID NO: 2201601 - RNA, 19 nt, Homo sapiens
  misc_RNA (1)...(19): siRNA sense strand
ggaaaagugcaauuuagaa

SEQ ID NO: 2201602 - RNA, 19 nt, Homo sapiens
  misc_RNA (1)...(19): siRNA sense strand
aaucagcagacauccuuua

SEQ ID NO: 2201603 - RNA, 19 nt, Homo sapiens
  misc_RNA (1)...(19): siRNA sense strand
uuucauuucuuuccugguu

SEQ ID NO: 2201604 - RNA, 19 nt, Homo sapiens
  misc_RNA (1)...(19): siRNA sense strand
caguggauccguuagauau

SEQ ID NO: 2201605 - RNA, 19 nt, Homo sapiens
  misc_RNA (1)...(19): siRNA sense strand
gagccuuaauuucauuucu

SEQ ID NO: 2201606 - RNA, 19 nt, Homo sapiens
  misc_RNA (1)...(19): siRNA sense strand
uagagggugugauuguguu

SEQ ID NO: 2201607 - RNA, 19 nt, Homo sapiens
  misc_RNA (1)...(19): siRNA sense strand
ccaaaccaagaguggcuua

SEQ ID NO: 2201608 - RNA, 19 nt, Homo sapiens
  misc_RNA (1)...(19): siRNA sense strand
gauaaagaugugguagaaa

SEQ ID NO: 2201609 - RNA, 19 nt, Homo sapiens
  misc_RNA (1)...(19): siRNA sense strand
uuucauugguguuauggaa

SEQ ID NO: 2201610 - RNA, 19 nt, Homo sapiens
  misc_RNA (1)...(19): siRNA sense strand
gaacaaauauggauugguu

SEQ ID NO: 2201611 - RNA, 19 nt, Homo sapiens
  misc_RNA (1)...(19): siRNA sense strand
gcacuugcaucaauaauaa

SEQ ID NO: 2201612 - RNA, 19 nt, Homo sapiens
  misc_RNA (1)...(19): siRNA sense strand
ggagaaggauggagucaua

SEQ ID NO: 2201613 - RNA, 19 nt, Homo sapiens
  misc_RNA (1)...(19): siRNA sense strand
ugacauagcuugugaugaa

SEQ ID NO: 2201614 - RNA, 19 nt, Homo sapiens
  misc_RNA (1)...(19): siRNA sense strand
ggaaagcagugucaagauu

SEQ ID NO: 2201615 - RNA, 19 nt, Homo sapiens
  misc_RNA (1)...(19): siRNA sense strand
uaaaggagcuauuguacaa

SEQ ID NO: 2201616 - RNA, 19 nt, Homo sapiens
  misc_RNA (1)...(19): siRNA sense strand
caaauggccuugucuguga

SEQ ID NO: 2201617 - RNA, 19 nt, Homo sapiens
  misc_RNA (1)...(19): siRNA sense strand
ggacauagcacuugcauca

SEQ ID NO: 2201618 - RNA, 19 nt, Homo sapiens
  misc_RNA (1)...(19): siRNA sense strand
ugacagauguuacagauau

SEQ ID NO: 2201619 - RNA, 19 nt, Homo sapiens
  misc_RNA (1)...(19): siRNA sense strand
caacagaaagcuucagaua

SEQ ID NO: 2201620 - RNA, 19 nt, Homo sapiens
  misc_RNA (1)...(19): siRNA sense strand
ggacauucagcacauauua

SEQ ID NO: 2201621 - RNA, 19 nt, Homo sapiens
  misc_RNA (1)...(19): siRNA sense strand
guggaaaucuugcuucauu

SEQ ID NO: 2201622 - RNA, 19 nt, Homo sapiens
  misc_RNA (1)...(19): siRNA sense strand
gacacucucuugcuuuaua

SEQ ID NO: 2201623 - RNA, 19 nt, Homo sapiens
  misc_RNA (1)...(19): siRNA sense strand
gcaauggcauggaguguau

SEQ ID NO: 2201624 - RNA, 19 nt, Homo sapiens
  misc_RNA (1)...(19): siRNA sense strand
uaacauacauagucaguca

SEQ ID NO: 2201625 - RNA, 19 nt, Homo sapiens
  misc_RNA (1)...(19): siRNA sense strand
gaggaaauacccauaauga

SEQ ID NO: 2201626 - RNA, 19 nt, Homo sapiens
  misc_RNA (1)...(19): siRNA sense strand
caauuuaccuucagcuuau

SEQ ID NO: 2201627 - RNA, 19 nt, Homo sapiens
  misc_RNA (1)...(19): siRNA sense strand
gcuauaaucuuaguggaaa

SEQ ID NO: 2201628 - RNA, 19 nt, Homo sapiens
  misc_RNA (1)...(19): siRNA sense strand
gaaaaucgcuauguuggua

SEQ ID NO: 2201629 - RNA, 19 nt, Homo sapiens
  misc_RNA (1)...(19): siRNA sense strand
gaaacgauguguugacucu

SEQ ID NO: 2201630 - RNA, 19 nt, Homo sapiens
  misc_RNA (1)...(19): siRNA sense strand
ggaaauacccauaaugaca

SEQ ID NO: 2201631 - RNA, 19 nt, Homo sapiens
  misc_RNA (1)...(19): siRNA sense strand
caaugucacagaugaauua

SEQ ID NO: 2201632 - RNA, 19 nt, Homo sapiens
  misc_RNA (1)...(19): siRNA sense strand
acagaaagcuucagauagu

SEQ ID NO: 2201633 - RNA, 19 nt, Homo sapiens
  misc_RNA (1)...(19): siRNA sense strand
guacaucuauggcaaaugg

SEQ ID NO: 2201634 - RNA, 19 nt, Homo sapiens
  misc_RNA (1)...(19): siRNA sense strand
gcaaauaguaacugcagua

SEQ ID NO: 2201635 - RNA, 19 nt, Homo sapiens
  misc_RNA (1)...(19): siRNA sense strand
ggauguggcuggugcaaug

SEQ ID NO: 2201636 - RNA, 19 nt, Homo sapiens
  misc_RNA (1)...(19): siRNA sense strand
gcugguggcugcuguggua

SEQ ID NO: 2201637 - RNA, 19 nt, Homo sapiens
  misc_RNA (1)...(19): siRNA sense strand
ggaauaccauaucucauca

SEQ ID NO: 2201638 - RNA, 19 nt, Homo sapiens
  misc_RNA (1)...(19): siRNA sense strand
ccaauuaugugacucugaa

SEQ ID NO: 2201639 - RNA, 19 nt, Homo sapiens
  misc_RNA (1)...(19): siRNA sense strand
aauaguaacugcaguaugu

SEQ ID NO: 2201640 - RNA, 19 nt, Homo sapiens
  misc_RNA (1)...(19): siRNA sense strand
gaugacagauguuacagau

SEQ ID NO: 2201641 - RNA, 19 nt, Homo sapiens
  misc_RNA (1)...(19): siRNA sense strand
guagagauguugucaugau

SEQ ID NO: 2201642 - RNA, 19 nt, Homo sapiens
  misc_RNA (1)...(19): siRNA sense strand
ggaaaucuugcuucauuaa

SEQ ID NO: 2201643 - RNA, 19 nt, Homo sapiens
  misc_RNA (1)...(19): siRNA sense strand
gcaagaaugccaggcuuua

SEQ ID NO: 2201644 - RNA, 19 nt, Homo sapiens
  misc_RNA (1)...(19): siRNA sense strand
ucauagagaugucaacaga

SEQ ID NO: 2201645 - RNA, 19 nt, Homo sapiens
  misc_RNA (1)...(19): siRNA sense strand
caaaguccauuuauguuca

SEQ ID NO: 2201646 - RNA, 19 nt, Homo sapiens
  misc_RNA (1)...(19): siRNA sense strand
uaccauaucucaucaaaca

SEQ ID NO: 2201647 - RNA, 19 nt, Homo sapiens
  misc_RNA (1)...(19): siRNA sense strand
gaaaguggguuugccagau

SEQ ID NO: 2201648 - RNA, 19 nt, Homo sapiens
  misc_RNA (1)...(19): siRNA sense strand
caacagauuuggacacucu

SEQ ID NO: 2201649 - RNA, 19 nt, Homo sapiens
  misc_RNA (1)...(19): siRNA sense strand
aaaguggguuugccagaua

SEQ ID NO: 2201650 - RNA, 19 nt, Homo sapiens
  misc_RNA (1)...(19): siRNA sense strand
caauggagcuaugcuuauu

SEQ ID NO: 2201651 - RNA, 19 nt, Homo sapiens
  misc_RNA (1)...(19): siRNA sense strand
acuaagacuuggacuauuu

SEQ ID NO: 2201652 - RNA, 19 nt, Homo sapiens
  misc_RNA (1)...(19): siRNA sense strand
uagaagcaauccuaacauu

SEQ ID NO: 2201653 - RNA, 19 nt, Homo sapiens
  misc_RNA (1)...(19): siRNA sense strand
gaagaugaucgccaccaua

SEQ ID NO: 2201654 - RNA, 19 nt, Homo sapiens
  misc_RNA (1)...(19): siRNA sense strand
gaaagcagugucaagauug

SEQ ID NO: 2201655 - RNA, 19 nt, Homo sapiens
  misc_RNA (1)...(19): siRNA sense strand
uguaaaagcuguucacuaa

SEQ ID NO: 2201656 - RNA, 19 nt, Homo sapiens
  misc_RNA (1)...(19): siRNA sense strand
aaccaaaucuucauagaga

SEQ ID NO: 2201657 - RNA, 19 nt, Homo sapiens
  misc_RNA (1)...(19): siRNA sense strand
uuacagauaugcagauugu

SEQ ID NO: 2201658 - RNA, 19 nt, Homo sapiens
  misc_RNA (1)...(19): siRNA sense strand
uucaacagcuggaacaaua

SEQ ID NO: 2201659 - RNA, 19 nt, Homo sapiens
  misc_RNA (1)...(19): siRNA sense strand
gcaaugauccuaguaauac

SEQ ID NO: 2201660 - RNA, 19 nt, Homo sapiens
  misc_RNA (1)...(19): siRNA sense strand
gcuaauccuuguacaucua

SEQ ID NO: 2201661 - RNA, 19 nt, Homo sapiens
  misc_RNA (1)...(19): siRNA sense strand
cauagucagucauggagua

SEQ ID NO: 2201662 - RNA, 19 nt, Homo sapiens
  misc_RNA (1)...(19): siRNA sense strand
cauagcacuugcaucaaua

SEQ ID NO: 2201663 - RNA, 19 nt, Homo sapiens
  misc_RNA (1)...(19): siRNA sense strand
ccaaaugucaugugagaaa

SEQ ID NO: 2201664 - RNA, 19 nt, Homo sapiens
  misc_RNA (1)...(19): siRNA sense strand
acagaugaauuauggguuu

SEQ ID NO: 2201665 - RNA, 19 nt, Homo sapiens
  misc_RNA (1)...(19): siRNA sense strand
cugcacaacuaaaggaaua

SEQ ID NO: 2201666 - RNA, 19 nt, Homo sapiens
  misc_RNA (1)...(19): siRNA sense strand
uauacaagccuccaaauug

SEQ ID NO: 2201667 - RNA, 19 nt, Homo sapiens
  misc_RNA (1)...(19): siRNA sense strand
gauguugucaugaucauaa

SEQ ID NO: 2201668 - RNA, 19 nt, Homo sapiens
  misc_RNA (1)...(19): siRNA sense strand
guaugucugucaagaacua

SEQ ID NO: 2201669 - RNA, 19 nt, Homo sapiens
  misc_RNA (1)...(19): siRNA sense strand
gaagcaauccuaacauuac

SEQ ID NO: 2201670 - RNA, 19 nt, Homo sapiens
  misc_RNA (1)...(19): siRNA sense strand
acagugagaugguucuuga

SEQ ID NO: 2201671 - RNA, 19 nt, Homo sapiens
  misc_RNA (1)...(19): siRNA sense strand
gaagaggacauugcauuga

SEQ ID NO: 2201672 - RNA, 19 nt, Homo sapiens
  misc_RNA (1)...(19): siRNA sense strand
ggaagaggacauugcauug

SEQ ID NO: 2201673 - RNA, 19 nt, Homo sapiens
  misc_RNA (1)...(19): siRNA sense strand
gaaguauacacaacagaaa

SEQ ID NO: 2201674 - RNA, 19 nt, Homo sapiens
  misc_RNA (1)...(19): siRNA sense strand
gaucagagacagcaagaau

SEQ ID NO: 2201675 - RNA, 19 nt, Homo sapiens
  misc_RNA (1)...(19): siRNA sense strand
caccaaaugucaugugaga

SEQ ID NO: 2201676 - RNA, 19 nt, Homo sapiens
  misc_RNA (1)...(19): siRNA sense strand
gaaagcaguauauggaaug

SEQ ID NO: 2201677 - RNA, 19 nt, Homo sapiens
  misc_RNA (1)...(19): siRNA sense strand
aagauuguaugccagguua

SEQ ID NO: 2201678 - RNA, 19 nt, Homo sapiens
  misc_RNA (1)...(19): siRNA sense strand
uggaugaaauacagaagua

SEQ ID NO: 2201679 - RNA, 19 nt, Homo sapiens
  misc_RNA (1)...(19): siRNA sense strand
gagcaaagugcccuccuaa

SEQ ID NO: 2201680 - RNA, 19 nt, Homo sapiens
  misc_RNA (1)...(19): siRNA sense strand
auagagaugucaacagauu

SEQ ID NO: 2201681 - RNA, 19 nt, Homo sapiens
  misc_RNA (1)...(19): siRNA sense strand
guuaaacccuucaguccuu

SEQ ID NO: 2201682 - RNA, 19 nt, Homo sapiens
  misc_RNA (1)...(19): siRNA sense strand
gaaacuaaaggagcuauug

SEQ ID NO: 2201683 - RNA, 19 nt, Homo sapiens
  misc_RNA (1)...(19): siRNA sense strand
caaaugguccuaaauuaca

SEQ ID NO: 2201684 - RNA, 19 nt, Homo sapiens
  misc_RNA (1)...(19): siRNA sense strand
gcagucaggccuugcaauu

SEQ ID NO: 2201685 - RNA, 19 nt, Homo sapiens
  misc_RNA (1)...(19): siRNA sense strand
ucaauuuaccuucagcuua

SEQ ID NO: 2201686 - RNA, 19 nt, Homo sapiens
  misc_RNA (1)...(19): siRNA sense strand
gaaggauggagucauauug

SEQ ID NO: 2201687 - RNA, 19 nt, Homo sapiens
  misc_RNA (1)...(19): siRNA sense strand
gagaugaagaacuuuguaa

SEQ ID NO: 2201688 - RNA, 19 nt, Homo sapiens
  misc_RNA (1)...(19): siRNA sense strand
gcaaggcuuucagagauga

SEQ ID NO: 2201689 - RNA, 19 nt, Homo sapiens
  misc_RNA (1)...(19): siRNA sense strand
cuaguguacuccuuaauga

SEQ ID NO: 2201690 - RNA, 19 nt, Homo sapiens
  misc_RNA (1)...(19): siRNA sense strand
caagcagcauacaggaaua

SEQ ID NO: 2201691 - RNA, 19 nt, Homo sapiens
  misc_RNA (1)...(19): siRNA sense strand
ugaaacaaaugauggcaau

SEQ ID NO: 2201692 - RNA, 19 nt, Homo sapiens
  misc_RNA (1)...(19): siRNA sense strand
gaggcagaauugaaacaaa

SEQ ID NO: 2201693 - RNA, 19 nt, Homo sapiens
  misc_RNA (1)...(19): siRNA sense strand
ggaguuggauaguagagau

SEQ ID NO: 2201694 - RNA, 19 nt, Homo sapiens
  misc_RNA (1)...(19): siRNA sense strand
ccagugcccuaauagauau

SEQ ID NO: 2201695 - RNA, 19 nt, Homo sapiens
  misc_RNA (1)...(19): siRNA sense strand
gagcugcuguucugacugu

SEQ ID NO: 2201696 - RNA, 19 nt, Homo sapiens
  misc_RNA (1)...(19): siRNA sense strand
gcaguggccaugcaaauau

SEQ ID NO: 2201697 - RNA, 19 nt, Homo sapiens
  misc_RNA (1)...(19): siRNA sense strand
uaguagagauguugucaug

SEQ ID NO: 2201698 - RNA, 19 nt, Homo sapiens
  misc_RNA (1)...(19): siRNA sense strand
cagaaagcuucagauagua

SEQ ID NO: 2201699 - RNA, 19 nt, Homo sapiens
  misc_RNA (1)...(19): siRNA sense strand
caacagaaaguaucaccuu

SEQ ID NO: 2201700 - RNA, 19 nt, Homo sapiens
  misc_RNA (1)...(19): siRNA sense strand
gaaucugggaauacuaaua

SEQ ID NO: 2201701 - RNA, 19 nt, Homo sapiens
  misc_RNA (1)...(19): siRNA sense strand
ggagggacauucagcacau

SEQ ID NO: 2201702 - RNA, 19 nt, Homo sapiens
  misc_RNA (1)...(19): siRNA sense strand
gucaagaacuacaccaaau

SEQ ID NO: 2201703 - RNA, 19 nt, Homo sapiens
  misc_RNA (1)...(19): siRNA sense strand
uggacacucucuugcuuua

SEQ ID NO: 2201704 - RNA, 19 nt, Homo sapiens
  misc_RNA (1)...(19): siRNA sense strand
gccagugcccuaauagaua

SEQ ID NO: 2201705 - RNA, 19 nt, Homo sapiens
  misc_RNA (1)...(19): siRNA sense strand
ucauggaccuugugcaguu

SEQ ID NO: 2201706 - RNA, 19 nt, Homo sapiens
  misc_RNA (1)...(19): siRNA sense strand
ggacagugcacagcuugua

SEQ ID NO: 2201707 - RNA, 19 nt, Homo sapiens
  misc_RNA (1)...(19): siRNA sense strand
uggaaaucuugcuucauua

SEQ ID NO: 2201708 - RNA, 19 nt, Homo sapiens
  misc_RNA (1)...(19): siRNA sense strand
aaauguuucugcacaacua

SEQ ID NO: 2201709 - RNA, 19 nt, Homo sapiens
  misc_RNA (1)...(19): siRNA sense strand
ggaaugcaccacagugaga

SEQ ID NO: 2201710 - RNA, 19 nt, Homo sapiens
  misc_RNA (1)...(19): siRNA sense strand
caacauagcuggauggaaa

SEQ ID NO: 2201711 - RNA, 19 nt, Homo sapiens
  misc_RNA (1)...(19): siRNA sense strand
gagcagaaauggugauaaa

SEQ ID NO: 2201712 - RNA, 19 nt, Homo sapiens
  misc_RNA (1)...(19): siRNA sense strand
gcagaaauggugauaaaua

SEQ ID NO: 2201713 - RNA, 19 nt, Homo sapiens
  misc_RNA (1)...(19): siRNA sense strand
gugcugagguggcuuauuu

SEQ ID NO: 2201714 - RNA, 19 nt, Homo sapiens
  misc_RNA (1)...(19): siRNA sense strand
gaauuuggauuguugcauu

SEQ ID NO: 2201715 - RNA, 19 nt, Homo sapiens
  misc_RNA (1)...(19): siRNA sense strand
gccaggaugugaagacuua

SEQ ID NO: 2201716 - RNA, 19 nt, Homo sapiens
  misc_RNA (1)...(19): siRNA sense strand
gaaaagaaguuugcuauga

SEQ ID NO: 2201717 - RNA, 19 nt, Homo sapiens
  misc_RNA (1)...(19): siRNA sense strand
ccacaacacuccaaaggaa

SEQ ID NO: 2201718 - RNA, 19 nt, Homo sapiens
  misc_RNA (1)...(19): siRNA sense strand
gaaauggcuuccuucuuug

SEQ ID NO: 2201719 - RNA, 19 nt, Homo sapiens
  misc_RNA (1)...(19): siRNA sense strand
gcugauagauuucacuuca

SEQ ID NO: 2201720 - RNA, 19 nt, Homo sapiens
  misc_RNA (1)...(19): siRNA sense strand
caaauugucuguuaaacuc

SEQ ID NO: 2201721 - RNA, 19 nt, Homo sapiens
  misc_RNA (1)...(19): siRNA sense strand
gaucacccguaucaacaua

SEQ ID NO: 2201722 - RNA, 19 nt, Homo sapiens
  misc_RNA (1)...(19): siRNA sense strand
ucaaggaacugucuuucuu

SEQ ID NO: 2201723 - RNA, 19 nt, Homo sapiens
  misc_RNA (1)...(19): siRNA sense strand
gaaaacagauggcaaaugg

SEQ ID NO: 2201724 - RNA, 19 nt, Homo sapiens
  misc_RNA (1)...(19): siRNA sense strand
ggaaauugcuucuuuuguu

SEQ ID NO: 2201725 - RNA, 19 nt, Homo sapiens
  misc_RNA (1)...(19): siRNA sense strand
gaccaggacuuucucaaca

SEQ ID NO: 2201726 - RNA, 19 nt, Homo sapiens
  misc_RNA (1)...(19): siRNA sense strand
gcgguuaauucuucaacua

SEQ ID NO: 2201727 - RNA, 19 nt, Homo sapiens
  misc_RNA (1)...(19): siRNA sense strand
ggauauaaaucuaccuucu

SEQ ID NO: 2201728 - RNA, 19 nt, Homo sapiens
  misc_RNA (1)...(19): siRNA sense strand
gcugaaagcauucuuaauc

SEQ ID NO: 2201729 - RNA, 19 nt, Homo sapiens
  misc_RNA (1)...(19): siRNA sense strand
gacaagaucacccguauca

SEQ ID NO: 2201730 - RNA, 19 nt, Homo sapiens
  misc_RNA (1)...(19): siRNA sense strand
gaagcugggucaaggauac

SEQ ID NO: 2201731 - RNA, 19 nt, Homo sapiens
  misc_RNA (1)...(19): siRNA sense strand
gcucuacacuauacacaau

SEQ ID NO: 2201732 - RNA, 19 nt, Homo sapiens
  misc_RNA (1)...(19): siRNA sense strand
cagaaauggugauaaauac

SEQ ID NO: 2201733 - RNA, 19 nt, Homo sapiens
  misc_RNA (1)...(19): siRNA sense strand
ggaugugaagacuuaauua

SEQ ID NO: 2201734 - RNA, 19 nt, Homo sapiens
  misc_RNA (1)...(19): siRNA sense strand
caaaggaagucaggcuaga

SEQ ID NO: 2201735 - RNA, 19 nt, Homo sapiens
  misc_RNA (1)...(19): siRNA sense strand
ucagugcgguuaauucuuc

SEQ ID NO: 2201736 - RNA, 19 nt, Homo sapiens
  misc_RNA (1)...(19): siRNA sense strand
ggagaucagugcgguuaau

SEQ ID NO: 2201737 - RNA, 19 nt, Homo sapiens
  misc_RNA (1)...(19): siRNA sense strand
gaaccugaaaccaugcuaa

SEQ ID NO: 2201738 - RNA, 19 nt, Homo sapiens
  misc_RNA (1)...(19): siRNA sense strand
cagacaagaucacccguau

SEQ ID NO: 2201739 - RNA, 19 nt, Homo sapiens
  misc_RNA (1)...(19): siRNA sense strand
gaaguuugcuaugaaaggu

SEQ ID NO: 2201740 - RNA, 19 nt, Homo sapiens
  misc_RNA (1)...(19): siRNA sense strand
cgaugcagauguuaacguu

SEQ ID NO: 2201741 - RNA, 19 nt, Homo sapiens
  misc_RNA (1)...(19): siRNA sense strand
gauaaauacaucugggaaa

SEQ ID NO: 2201742 - RNA, 19 nt, Homo sapiens
  misc_RNA (1)...(19): siRNA sense strand
gaaauugcuucuuuuguuc

SEQ ID NO: 2201743 - RNA, 19 nt, Homo sapiens
  misc_RNA (1)...(19): siRNA sense strand
uaugaagacuaauggauca

SEQ ID NO: 2201744 - RNA, 19 nt, Homo sapiens
  misc_RNA (1)...(19): siRNA sense strand
cgaagucacucaaggaacu

SEQ ID NO: 2201745 - RNA, 19 nt, Homo sapiens
  misc_RNA (1)...(19): siRNA sense strand
gagaagauaaacacucguu

SEQ ID NO: 2201746 - RNA, 19 nt, Homo sapiens
  misc_RNA (1)...(19): siRNA sense strand
cauccaugcuguaaacaau

SEQ ID NO: 2201747 - RNA, 19 nt, Homo sapiens
  misc_RNA (1)...(19): siRNA sense strand
gaagacuaauggaucacau

SEQ ID NO: 2201748 - RNA, 19 nt, Homo sapiens
  misc_RNA (1)...(19): siRNA sense strand
gcaggaaauugcuucuuuu

SEQ ID NO: 2201749 - RNA, 19 nt, Homo sapiens
  misc_RNA (1)...(19): siRNA sense strand
ugcccgaaguuaucaauuu

SEQ ID NO: 2201750 - RNA, 19 nt, Homo sapiens
  misc_RNA (1)...(19): siRNA sense strand
caacuauccaagccucaua

SEQ ID NO: 2201751 - RNA, 19 nt, Homo sapiens
  misc_RNA (1)...(19): siRNA sense strand
cugaugcauuuauugcuua

SEQ ID NO: 2201752 - RNA, 19 nt, Homo sapiens
  misc_RNA (1)...(19): siRNA sense strand
ugagguggcuuauuuuauu

SEQ ID NO: 2201753 - RNA, 19 nt, Homo sapiens
  misc_RNA (1)...(19): siRNA sense strand
guuaggguguuucaaagau

SEQ ID NO: 2201754 - RNA, 19 nt, Homo sapiens
  misc_RNA (1)...(19): siRNA sense strand
uaugaaagguuaggguguu

SEQ ID NO: 2201755 - RNA, 19 nt, Homo sapiens
  misc_RNA (1)...(19): siRNA sense strand
gcuggaagauauaaauugc

SEQ ID NO: 2201756 - RNA, 19 nt, Homo sapiens
  misc_RNA (1)...(19): siRNA sense strand
ucuuaauccugaugcauuu

SEQ ID NO: 2201757 - RNA, 19 nt, Homo sapiens
  misc_RNA (1)...(19): siRNA sense strand
cauuacaaguguucaguuc

SEQ ID NO: 2201758 - RNA, 19 nt, Homo sapiens
  misc_RNA (1)...(19): siRNA sense strand
ccaggacuuucucaacaga

SEQ ID NO: 2201759 - RNA, 19 nt, Homo sapiens
  misc_RNA (1)...(19): siRNA sense strand
cagcucgcauccucuuuga

SEQ ID NO: 2201760 - RNA, 19 nt, Homo sapiens
  misc_RNA (1)...(19): siRNA sense strand
gcaaauggcagagagacau

SEQ ID NO: 2201761 - RNA, 19 nt, Homo sapiens
  misc_RNA (1)...(19): siRNA sense strand
gaucagugcgguuaauucu

SEQ ID NO: 2201762 - RNA, 19 nt, Homo sapiens
  misc_RNA (1)...(19): siRNA sense strand
caggagaucagugcgguua

SEQ ID NO: 2201763 - RNA, 19 nt, Homo sapiens
  misc_RNA (1)...(19): siRNA sense strand
caagaucacccguaucaac

SEQ ID NO: 2201764 - RNA, 19 nt, Homo sapiens
  misc_RNA (1)...(19): siRNA sense strand
uaaguugggagcagaaaug

SEQ ID NO: 2201765 - RNA, 19 nt, Homo sapiens
  misc_RNA (1)...(19): siRNA sense strand
auuaaucgaugcagauguu

SEQ ID NO: 2201766 - RNA, 19 nt, Homo sapiens
  misc_RNA (1)...(19): siRNA sense strand
gcagcucgcauccucuuug

SEQ ID NO: 2201767 - RNA, 19 nt, Homo sapiens
  misc_RNA (1)...(19): siRNA sense strand
gauaccaggccuuggaaga

SEQ ID NO: 2201768 - RNA, 19 nt, Homo sapiens
  misc_RNA (1)...(19): siRNA sense strand
ggaagcugggucaaggaua

SEQ ID NO: 2201769 - RNA, 19 nt, Homo sapiens
  misc_RNA (1)...(19): siRNA sense strand
gauauaaaucuaccuucug

SEQ ID NO: 2201770 - RNA, 19 nt, Homo sapiens
  misc_RNA (1)...(19): siRNA sense strand
gguuaauucuucaacuauc

SEQ ID NO: 2201771 - RNA, 19 nt, Homo sapiens
  misc_RNA (1)...(19): siRNA sense strand
gaauaaguugggagcagaa

SEQ ID NO: 2201772 - RNA, 19 nt, Homo sapiens
  misc_RNA (1)...(19): siRNA sense strand
uuacaaguguucaguucau

SEQ ID NO: 2201773 - RNA, 19 nt, Homo sapiens
  misc_RNA (1)...(19): siRNA sense strand
guuaacguuggaaacauua

SEQ ID NO: 2201774 - RNA, 19 nt, Homo sapiens
  misc_RNA (1)...(19): siRNA sense strand
ccugaugcauuuauugcuu

SEQ ID NO: 2201775 - RNA, 19 nt, Homo sapiens
  misc_RNA (1)...(19): siRNA sense strand
ugcuacagcuggaagauau

SEQ ID NO: 2201776 - RNA, 19 nt, Homo sapiens
  misc_RNA (1)...(19): siRNA sense strand
gcagagagacaugugcaau

SEQ ID NO: 2201777 - RNA, 19 nt, Homo sapiens
  misc_RNA (1)...(19): siRNA sense strand
uuggaaacauuacaagugu

SEQ ID NO: 2201778 - RNA, 19 nt, Homo sapiens
  misc_RNA (1)...(19): siRNA sense strand
gagaucagugcgguuaauu

SEQ ID NO: 2201779 - RNA, 19 nt, Homo sapiens
  misc_RNA (1)...(19): siRNA sense strand
aguuugcuaugaaagguua

SEQ ID NO: 2201780 - RNA, 19 nt, Homo sapiens
  misc_RNA (1)...(19): siRNA sense strand
caucugggaaauauggaua

SEQ ID NO: 2201781 - RNA, 19 nt, Homo sapiens
  misc_RNA (1)...(19): siRNA sense strand
gaugugaagacuuaauuac

SEQ ID NO: 2201782 - RNA, 19 nt, Homo sapiens
  misc_RNA (1)...(19): siRNA sense strand
cuuggaauuuggauuguug

SEQ ID NO: 2201783 - RNA, 19 nt, Homo sapiens
  misc_RNA (1)...(19): siRNA sense strand
guuggaaacauuacaagug

SEQ ID NO: 2201784 - RNA, 19 nt, Homo sapiens
  misc_RNA (1)...(19): siRNA sense strand
caaggaacugucuuucuuc

SEQ ID NO: 2201785 - RNA, 19 nt, Homo sapiens
  misc_RNA (1)...(19): siRNA sense strand
ggaguuugccauugucagu

SEQ ID NO: 2201786 - RNA, 19 nt, Homo sapiens
  misc_RNA (1)...(19): siRNA sense strand
uauccaagccucauauuuu

SEQ ID NO: 2201787 - RNA, 19 nt, Homo sapiens
  misc_RNA (1)...(19): siRNA sense strand
ggaccaggacuuucucaac

SEQ ID NO: 2201788 - RNA, 19 nt, Homo sapiens
  misc_RNA (1)...(19): siRNA sense strand
gagccaggcaugacuuaca

SEQ ID NO: 2201789 - RNA, 19 nt, Homo sapiens
  misc_RNA (1)...(19): siRNA sense strand
gcccgaaguuaucaauuuu

SEQ ID NO: 2201790 - RNA, 19 nt, Homo sapiens
  misc_RNA (1)...(19): siRNA sense strand
gaagacuuaauuacaccuu

SEQ ID NO: 2201791 - RNA, 19 nt, Homo sapiens
  misc_RNA (1)...(19): siRNA sense strand
gaagaauaacuggguugga

SEQ ID NO: 2201792 - RNA, 19 nt, Homo sapiens
  misc_RNA (1)...(19): siRNA sense strand
aagguuaggguguuucaaa

SEQ ID NO: 2201793 - RNA, 19 nt, Homo sapiens
  misc_RNA (1)...(19): siRNA sense strand
gacguuauucauacaaaug

SEQ ID NO: 2201794 - RNA, 19 nt, Homo sapiens
  misc_RNA (1)...(19): siRNA sense strand
uaccaggccuuggaagaau

SEQ ID NO: 2201795 - RNA, 19 nt, Homo sapiens
  misc_RNA (1)...(19): siRNA sense strand
cagcuggaagauauaaauu

SEQ ID NO: 2201796 - RNA, 19 nt, Homo sapiens
  misc_RNA (1)...(19): siRNA sense strand
guugcauucuuguucuuug

SEQ ID NO: 2201797 - RNA, 19 nt, Homo sapiens
  misc_RNA (1)...(19): siRNA sense strand
gcauuuauugcuuauccuu

SEQ ID NO: 2201798 - RNA, 19 nt, Homo sapiens
  misc_RNA (1)...(19): siRNA sense strand
cagagagacaugugcaaug

SEQ ID NO: 2201799 - RNA, 19 nt, Homo sapiens
  misc_RNA (1)...(19): siRNA sense strand
gauuguugcauucuuguuc

SEQ ID NO: 2201800 - RNA, 19 nt, Homo sapiens
  misc_RNA (1)...(19): siRNA sense strand
cuacagcuggaagauauaa

SEQ ID NO: 2201801 - RNA, 19 nt, Homo sapiens
  misc_RNA (1)...(19): siRNA sense strand
ggagcagaaauggugauaa

SEQ ID NO: 2201802 - RNA, 19 nt, Homo sapiens
  misc_RNA (1)...(19): siRNA sense strand
guguucaguucaucuggaa

SEQ ID NO: 2201803 - RNA, 19 nt, Homo sapiens
  misc_RNA (1)...(19): siRNA sense strand
gggaagcacaugccaggau

SEQ ID NO: 2201804 - RNA, 19 nt, Homo sapiens
  misc_RNA (1)...(19): siRNA sense strand
gcuuggaauuuggauuguu

SEQ ID NO: 2201805 - RNA, 19 nt, Homo sapiens
  misc_RNA (1)...(19): siRNA sense strand
uaugggaccuaauauucuc

SEQ ID NO: 2201806 - RNA, 19 nt, Homo sapiens
  misc_RNA (1)...(19): siRNA sense strand
gggagcagaaauggugaua

SEQ ID NO: 2201807 - RNA, 19 nt, Homo sapiens
  misc_RNA (1)...(19): siRNA sense strand
aggcaugacuuacacaaaa

SEQ ID NO: 2201808 - RNA, 19 nt, Homo sapiens
  misc_RNA (1)...(19): siRNA sense strand
ugugaagacuuaauuacac

SEQ ID NO: 2201809 - RNA, 19 nt, Homo sapiens
  misc_RNA (1)...(19): siRNA sense strand
caaauggcagagagacaug

SEQ ID NO: 2201810 - RNA, 19 nt, Homo sapiens
  misc_RNA (1)...(19): siRNA sense strand
ggaggaaggugauaaguau

SEQ ID NO: 2201811 - RNA, 19 nt, Homo sapiens
  misc_RNA (1)...(19): siRNA sense strand
ggaucgacuucuuaaauua

SEQ ID NO: 2201812 - RNA, 19 nt, Homo sapiens
  misc_RNA (1)...(19): siRNA sense strand
gggaucgacuucuuaaauu

SEQ ID NO: 2201813 - RNA, 19 nt, Homo sapiens
  misc_RNA (1)...(19): siRNA sense strand
gaacuaacccgcugaacau

SEQ ID NO: 2201814 - RNA, 19 nt, Homo sapiens
  misc_RNA (1)...(19): siRNA sense strand
gaucaaagccacagccauu

SEQ ID NO: 2201815 - RNA, 19 nt, Homo sapiens
  misc_RNA (1)...(19): siRNA sense strand
gaccaucgauagcaucauu

SEQ ID NO: 2201816 - RNA, 19 nt, Homo sapiens
  misc_RNA (1)...(19): siRNA sense strand
cuauggaucuuuaggagua

SEQ ID NO: 2201817 - RNA, 19 nt, Homo sapiens
  misc_RNA (1)...(19): siRNA sense strand
gcaaauggcaagaaaguca

SEQ ID NO: 2201818 - RNA, 19 nt, Homo sapiens
  misc_RNA (1)...(19): siRNA sense strand
gcaccgacgucuuugacaa

SEQ ID NO: 2201819 - RNA, 19 nt, Homo sapiens
  misc_RNA (1)...(19): siRNA sense strand
gcaagcacccgccugagaa

SEQ ID NO: 2201820 - RNA, 19 nt, Homo sapiens
  misc_RNA (1)...(19): siRNA sense strand
ggagggacaccuuaaggaa

SEQ ID NO: 2201821 - RNA, 19 nt, Homo sapiens
  misc_RNA (1)...(19): siRNA sense strand
caagggugccguccucuuu

SEQ ID NO: 2201822 - RNA, 19 nt, Homo sapiens
  misc_RNA (1)...(19): siRNA sense strand
cagcggcagugacacagua

SEQ ID NO: 2201823 - RNA, 19 nt, Homo sapiens
  misc_RNA (1)...(19): siRNA sense strand
uuaaggaacuguauaaagc

SEQ ID NO: 2201824 - RNA, 19 nt, Homo sapiens
  misc_RNA (1)...(19): siRNA sense strand
gagaaugucauaggagaaa

SEQ ID NO: 2201825 - RNA, 19 nt, Homo sapiens
  misc_RNA (1)...(19): siRNA sense strand
ggugguggccgucgacuuu

SEQ ID NO: 2201826 - RNA, 19 nt, Homo sapiens
  misc_RNA (1)...(19): siRNA sense strand
aggaguagauuaugaguuc

SEQ ID NO: 2201827 - RNA, 19 nt, Homo sapiens
  misc_RNA (1)...(19): siRNA sense strand
ggcagcaaauggcaagaaa

SEQ ID NO: 2201828 - RNA, 19 nt, Homo sapiens
  misc_RNA (1)...(19): siRNA sense strand
ggcuguaccuggagaaguu

SEQ ID NO: 2201829 - RNA, 19 nt, Homo sapiens
  misc_RNA (1)...(19): siRNA sense strand
ggaacuguauaaagcaaca

SEQ ID NO: 2201830 - RNA, 19 nt, Homo sapiens
  misc_RNA (1)...(19): siRNA sense strand
cuggagaaguucaagauga

SEQ ID NO: 2201831 - RNA, 19 nt, Homo sapiens
  misc_RNA (1)...(19): siRNA sense strand
gauauagccacuucgaaga

SEQ ID NO: 2201832 - RNA, 19 nt, Homo sapiens
  misc_RNA (1)...(19): siRNA sense strand
cugagaagcugcuggugaa

SEQ ID NO: 2201833 - RNA, 19 nt, Homo sapiens
  misc_RNA (1)...(19): siRNA sense strand
ccaagcaguucaugagaca

SEQ ID NO: 2201834 - RNA, 19 nt, Homo sapiens
  misc_RNA (1)...(19): siRNA sense strand
uggguugacuuaaugauug

SEQ ID NO: 2201835 - RNA, 19 nt, Homo sapiens
  misc_RNA (1)...(19): siRNA sense strand
cgacgucuuugacaaguuc

SEQ ID NO: 2201836 - RNA, 19 nt, Homo sapiens
  misc_RNA (1)...(19): siRNA sense strand
gguggagaaugucauagga

SEQ ID NO: 2201837 - RNA, 19 nt, Homo sapiens
  misc_RNA (1)...(19): siRNA sense strand
gagaaacggcucccacauc

SEQ ID NO: 2201838 - RNA, 19 nt, Homo sapiens
  misc_RNA (1)...(19): siRNA sense strand
agaaacggcucccacaucu

SEQ ID NO: 2201839 - RNA, 19 nt, Homo sapiens
  misc_RNA (1)...(19): siRNA sense strand
ccaaggagccggaaugcau

SEQ ID NO: 2201840 - RNA, 19 nt, Homo sapiens
  misc_RNA (1)...(19): siRNA sense strand
cccuugaaaucuuugcuua

SEQ ID NO: 2201841 - RNA, 19 nt, Homo sapiens
  misc_RNA (1)...(19): siRNA sense strand
cuugaaaucuuugcuuaug

SEQ ID NO: 2201842 - RNA, 19 nt, Homo sapiens
  misc_RNA (1)...(19): siRNA sense strand
ucucagaacagcagucauu

SEQ ID NO: 2201843 - RNA, 19 nt, Homo sapiens
  misc_RNA (1)...(19): siRNA sense strand
ccauugauauagccacuuc

SEQ ID NO: 2201844 - RNA, 19 nt, Homo sapiens
  misc_RNA (1)...(19): siRNA sense strand
ucccacaucugcauauuca

SEQ ID NO: 2201845 - RNA, 19 nt, Homo sapiens
  misc_RNA (1)...(19): siRNA sense strand
gaccagugccggaucauca

SEQ ID NO: 2201846 - RNA, 19 nt, Homo sapiens
  misc_RNA (1)...(19): siRNA sense strand
gagcacgccuugcggaaaa

SEQ ID NO: 2201847 - RNA, 19 nt, Homo sapiens
  misc_RNA (1)...(19): siRNA sense strand
gcaaggcagccgucaaugg

SEQ ID NO: 2201848 - RNA, 19 nt, Homo sapiens
  misc_RNA (1)...(19): siRNA sense strand
ccacagccauugauauagc

SEQ ID NO: 2201849 - RNA, 19 nt, Homo sapiens
  misc_RNA (1)...(19): siRNA sense strand
ggaaaagcaauguggauuu

SEQ ID NO: 2201850 - RNA, 19 nt, Homo sapiens
  misc_RNA (1)...(19): siRNA sense strand
cagccuggguugacuuaau

SEQ ID NO: 2201851 - RNA, 19 nt, Homo sapiens
  misc_RNA (1)...(19): siRNA sense strand
ggaaggugauaaguaugug

SEQ ID NO: 2201852 - RNA, 19 nt, Homo sapiens
  misc_RNA (1)...(19): siRNA sense strand
agaagcugcuggugaagga

SEQ ID NO: 2201853 - RNA, 19 nt, Homo sapiens
  misc_RNA (1)...(19): siRNA sense strand
gcaacaggcggacccuaug

SEQ ID NO: 2201854 - RNA, 19 nt, Homo sapiens
  misc_RNA (1)...(19): siRNA sense strand
ccucccagcuggucauugu

SEQ ID NO: 2201855 - RNA, 19 nt, Homo sapiens
  misc_RNA (1)...(19): siRNA sense strand
cuuaugcccugcaguacuu

SEQ ID NO: 2201856 - RNA, 19 nt, Homo sapiens
  misc_RNA (1)...(19): siRNA sense strand
cagcaaauggcaagaaagu

SEQ ID NO: 2201857 - RNA, 19 nt, Homo sapiens
  misc_RNA (1)...(19): siRNA sense strand
cagcaaggcagccgucaau

SEQ ID NO: 2201858 - RNA, 19 nt, Homo sapiens
  misc_RNA (1)...(19): siRNA sense strand
cggacccuauggaucuuua

SEQ ID NO: 2201859 - RNA, 19 nt, Homo sapiens
  misc_RNA (1)...(19): siRNA sense strand
guacagcggcagugacaca

SEQ ID NO: 2201860 - RNA, 19 nt, Homo sapiens
  misc_RNA (1)...(19): siRNA sense strand
gcucccacaucugcauauu

SEQ ID NO: 2201861 - RNA, 19 nt, Homo sapiens
  misc_RNA (1)...(19): siRNA sense strand
uggaggaaggugauaagua

SEQ ID NO: 2201862 - RNA, 19 nt, Homo sapiens
  misc_RNA (1)...(19): siRNA sense strand
ggagaaugucauaggagaa

SEQ ID NO: 2201863 - RNA, 19 nt, Homo sapiens
  misc_RNA (1)...(19): siRNA sense strand
gagaggauuuuauugaaca

SEQ ID NO: 2201864 - RNA, 19 nt, Homo sapiens
  misc_RNA (1)...(19): siRNA sense strand
agccacagccauugauaua

SEQ ID NO: 2201865 - RNA, 19 nt, Homo sapiens
  misc_RNA (1)...(19): siRNA sense strand
guggugcaccgacgucuuu

SEQ ID NO: 2201866 - RNA, 19 nt, Homo sapiens
  misc_RNA (1)...(19): siRNA sense strand
aguaggagcuggguuuaca

SEQ ID NO: 2201867 - RNA, 19 nt, Homo sapiens
  misc_RNA (1)...(19): siRNA sense strand
ucgaagagugucaaaguug

SEQ ID NO: 2201868 - RNA, 19 nt, Homo sapiens
  misc_RNA (1)...(19): siRNA sense strand
uccagacccuuaugcaguu

SEQ ID NO: 2201869 - RNA, 19 nt, Homo sapiens
  misc_RNA (1)...(19): siRNA sense strand
uccgggaccuguuucagaa

SEQ ID NO: 2201870 - RNA, 19 nt, Homo sapiens
  misc_RNA (1)...(19): siRNA sense strand
ggagcacgccuugcggaaa

SEQ ID NO: 2201871 - RNA, 19 nt, Homo sapiens
  misc_RNA (1)...(19): siRNA sense strand
uuaaggagcaggcgcugaa

SEQ ID NO: 2201872 - RNA, 19 nt, Homo sapiens
  misc_RNA (1)...(19): siRNA sense strand
gaucgacuucuuaaauuac

SEQ ID NO: 2201873 - RNA, 19 nt, Homo sapiens
  misc_RNA (1)...(19): siRNA sense strand
gacaacgucagcuucauca

SEQ ID NO: 2201874 - RNA, 19 nt, Homo sapiens
  misc_RNA (1)...(19): siRNA sense strand
ucauugucaucaacaucua

SEQ ID NO: 2201875 - RNA, 19 nt, Homo sapiens
  misc_RNA (1)...(19): siRNA sense strand
ccacaucugcauauucauc

SEQ ID NO: 2201876 - RNA, 19 nt, Homo sapiens
  misc_RNA (1)...(19): siRNA sense strand
uuacacaggcuaaggaaca

SEQ ID NO: 2201877 - RNA, 19 nt, Homo sapiens
  misc_RNA (1)...(19): siRNA sense strand
cacaguaggagcuggguuu

SEQ ID NO: 2201878 - RNA, 19 nt, Homo sapiens
  misc_RNA (1)...(19): siRNA sense strand
cuuuaggaguagauuauga

SEQ ID NO: 2201879 - RNA, 19 nt, Homo sapiens
  misc_RNA (1)...(19): siRNA sense strand
ggagauccagacccuuaug

SEQ ID NO: 2201880 - RNA, 19 nt, Homo sapiens
  misc_RNA (1)...(19): siRNA sense strand
caaauggcaagaaagucaa

SEQ ID NO: 2201881 - RNA, 19 nt, Homo sapiens
  misc_RNA (1)...(19): siRNA sense strand
ugggaucgacuucuuaaau

SEQ ID NO: 2201882 - RNA, 19 nt, Homo sapiens
  misc_RNA (1)...(19): siRNA sense strand
cggaaugcauccaugugau

SEQ ID NO: 2201883 - RNA, 19 nt, Homo sapiens
  misc_RNA (1)...(19): siRNA sense strand
ugacuuaaugauugcguuu

SEQ ID NO: 2201884 - RNA, 19 nt, Homo sapiens
  misc_RNA (1)...(19): siRNA sense strand
ggaggugacccuggugugu

SEQ ID NO: 2201885 - RNA, 19 nt, Homo sapiens
  misc_RNA (1)...(19): siRNA sense strand
gaaugucauaggagaaauc

SEQ ID NO: 2201886 - RNA, 19 nt, Homo sapiens
  misc_RNA (1)...(19): siRNA sense strand
ugaccuggaucccaaugag

SEQ ID NO: 2201887 - RNA, 19 nt, Homo sapiens
  misc_RNA (1)...(19): siRNA sense strand
ccugguguguccaaucaga

SEQ ID NO: 2201888 - RNA, 19 nt, Homo sapiens
  misc_RNA (1)...(19): siRNA sense strand
guugggaucgacuucuuaa

SEQ ID NO: 2201889 - RNA, 19 nt, Homo sapiens
  misc_RNA (1)...(19): siRNA sense strand
acuuaaugauugcguuuga

SEQ ID NO: 2201890 - RNA, 19 nt, Homo sapiens
  misc_RNA (1)...(19): siRNA sense strand
ccagggacuuuuaccauga

SEQ ID NO: 2201891 - RNA, 19 nt, Homo sapiens
  misc_RNA (1)...(19): siRNA sense strand
agaacuaacccgcugaaca

SEQ ID NO: 2201892 - RNA, 19 nt, Homo sapiens
  misc_RNA (1)...(19): siRNA sense strand
aaggaacuguauaaagcaa

SEQ ID NO: 2201893 - RNA, 19 nt, Homo sapiens
  misc_RNA (1)...(19): siRNA sense strand
aaagccacagccauugaua

SEQ ID NO: 2201894 - RNA, 19 nt, Homo sapiens
  misc_RNA (1)...(19): siRNA sense strand
caaagccacagccauugau

SEQ ID NO: 2201895 - RNA, 19 nt, Homo sapiens
  misc_RNA (1)...(19): siRNA sense strand
caacgucagcuucaucacu

SEQ ID NO: 2201896 - RNA, 19 nt, Homo sapiens
  misc_RNA (1)...(19): siRNA sense strand
caccuuaaggaacuguaua

SEQ ID NO: 2201897 - RNA, 19 nt, Homo sapiens
  misc_RNA (1)...(19): siRNA sense strand
cgacaacgucagcuucauc

SEQ ID NO: 2201898 - RNA, 19 nt, Homo sapiens
  misc_RNA (1)...(19): siRNA sense strand
ucuccuucauugacuacua

SEQ ID NO: 2201899 - RNA, 19 nt, Homo sapiens
  misc_RNA (1)...(19): siRNA sense strand
cggcuacaccagaugauug

SEQ ID NO: 2201900 - RNA, 19 nt, Homo sapiens
  misc_RNA (1)...(19): siRNA sense strand
ugaacgacacugacuccaa

SEQ ID NO: 2201901 - RNA, 19 nt, Homo sapiens
  misc_RNA (1)...(19): siRNA sense strand
ucaccaaggagccggaaug

SEQ ID NO: 2201902 - RNA, 19 nt, Homo sapiens
  misc_RNA (1)...(19): siRNA sense strand
uaaggaacuguauaaagca

SEQ ID NO: 2201903 - RNA, 19 nt, Homo sapiens
  misc_RNA (1)...(19): siRNA sense strand
ugauaaguaugugguugug

SEQ ID NO: 2201904 - RNA, 19 nt, Homo sapiens
  misc_RNA (1)...(19): siRNA sense strand
gagcuggaggaaggugaua

SEQ ID NO: 2201905 - RNA, 19 nt, Homo sapiens
  misc_RNA (1)...(19): siRNA sense strand
ggcuacaccagaugauuga

SEQ ID NO: 2201906 - RNA, 19 nt, Homo sapiens
  misc_RNA (1)...(19): siRNA sense strand
ccggaaugcauccauguga

SEQ ID NO: 2201907 - RNA, 19 nt, Homo sapiens
  misc_RNA (1)...(19): siRNA sense strand
ggcuaugccuacagcuuca

SEQ ID NO: 2201908 - RNA, 19 nt, Homo sapiens
  misc_RNA (1)...(19): siRNA sense strand
gcaucuccgggaccuguuu

SEQ ID NO: 2201909 - RNA, 19 nt, Homo sapiens
  misc_RNA (1)...(19): siRNA sense strand
caacaggcggacccuaugg

SEQ ID NO: 2201910 - RNA, 19 nt, Homo sapiens
  misc_RNA (1)...(19): siRNA sense strand
caacacagcuugccauaaa

SEQ ID NO: 2201911 - RNA, 19 nt, Homo sapiens
  misc_RNA (1)...(19): siRNA sense strand
gaacagacaagacugaaau

SEQ ID NO: 2201912 - RNA, 19 nt, Homo sapiens
  misc_RNA (1)...(19): siRNA sense strand
cagcauccauuccuccuuu

SEQ ID NO: 2201913 - RNA, 19 nt, Homo sapiens
  misc_RNA (1)...(19): siRNA sense strand
aagcaucacuggcaagauu

SEQ ID NO: 2201914 - RNA, 19 nt, Homo sapiens
  misc_RNA (1)...(19): siRNA sense strand
agacaagacugaaauuaag

SEQ ID NO: 2201915 - RNA, 19 nt, Homo sapiens
  misc_RNA (1)...(19): siRNA sense strand
cagacaagacugaaauuaa

SEQ ID NO: 2201916 - RNA, 19 nt, Homo sapiens
  misc_RNA (1)...(19): siRNA sense strand
ggagucaucggccucauuu

SEQ ID NO: 2201917 - RNA, 19 nt, Homo sapiens
  misc_RNA (1)...(19): siRNA sense strand
cagccucacugaagaaaga

SEQ ID NO: 2201918 - RNA, 19 nt, Homo sapiens
  misc_RNA (1)...(19): siRNA sense strand
ggugcaaucagauaacaua

SEQ ID NO: 2201919 - RNA, 19 nt, Homo sapiens
  misc_RNA (1)...(19): siRNA sense strand
gcaaucagauaacauaccu

SEQ ID NO: 2201920 - RNA, 19 nt, Homo sapiens
  misc_RNA (1)...(19): siRNA sense strand
guccuuggcucuugcuuug

SEQ ID NO: 2201921 - RNA, 19 nt, Homo sapiens
  misc_RNA (1)...(19): siRNA sense strand
ugaauggagucugcacaaa

SEQ ID NO: 2201922 - RNA, 19 nt, Homo sapiens
  misc_RNA (1)...(19): siRNA sense strand
guacugcgccaugaugauu

SEQ ID NO: 2201923 - RNA, 19 nt, Homo sapiens
  misc_RNA (1)...(19): siRNA sense strand
ugccauaaacccuacguua

SEQ ID NO: 2201924 - RNA, 19 nt, Homo sapiens
  misc_RNA (1)...(19): siRNA sense strand
acagacaagacugaaauua

SEQ ID NO: 2201925 - RNA, 19 nt, Homo sapiens
  misc_RNA (1)...(19): siRNA sense strand
ccauaaacccuacguuagu

SEQ ID NO: 2201926 - RNA, 19 nt, Homo sapiens
  misc_RNA (1)...(19): siRNA sense strand
gugaugaacucggaaaugc

SEQ ID NO: 2201927 - RNA, 19 nt, Homo sapiens
  misc_RNA (1)...(19): siRNA sense strand
aauggagucugcacaaaca

SEQ ID NO: 2201928 - RNA, 19 nt, Homo sapiens
  misc_RNA (1)...(19): siRNA sense strand
cauaaacccuacguuaguc

SEQ ID NO: 2201929 - RNA, 19 nt, Homo sapiens
  misc_RNA (1)...(19): siRNA sense strand
ggagucugcacaaacacua

SEQ ID NO: 2201930 - RNA, 19 nt, Homo sapiens
  misc_RNA (1)...(19): siRNA sense strand
cgccucauguuugcaauuu

SEQ ID NO: 2201931 - RNA, 19 nt, Homo sapiens
  misc_RNA (1)...(19): siRNA sense strand
gaauggagucugcacaaac

SEQ ID NO: 2201932 - RNA, 19 nt, Homo sapiens
  misc_RNA (1)...(19): siRNA sense strand
gccauaaacccuacguuag

SEQ ID NO: 2201933 - RNA, 19 nt, Homo sapiens
  misc_RNA (1)...(19): siRNA sense strand
gccaacacagcuugccaua

SEQ ID NO: 2201934 - RNA, 19 nt, Homo sapiens
  misc_RNA (1)...(19): siRNA sense strand
ccuuggcucuugcuuugaa

SEQ ID NO: 2201935 - RNA, 19 nt, Homo sapiens
  misc_RNA (1)...(19): siRNA sense strand
gcucuucggagucuucguu

SEQ ID NO: 2201936 - RNA, 19 nt, Homo sapiens
  misc_RNA (1)...(19): siRNA sense strand
ucacuggcaagauuccuuu

SEQ ID NO: 2201937 - RNA, 19 nt, Homo sapiens
  misc_RNA (1)...(19): siRNA sense strand
ggagcuggccauugagauc

SEQ ID NO: 2201938 - RNA, 19 nt, Homo sapiens
  misc_RNA (1)...(19): siRNA sense strand
gaugaacucggaaaugcau

SEQ ID NO: 2201939 - RNA, 19 nt, Homo sapiens
  misc_RNA (1)...(19): siRNA sense strand
ccucauguuugcaauuucu

SEQ ID NO: 2201940 - RNA, 19 nt, Homo sapiens
  misc_RNA (1)...(19): siRNA sense strand
cgaacagacaagacugaaa

SEQ ID NO: 2201941 - RNA, 19 nt, Homo sapiens
  misc_RNA (1)...(19): siRNA sense strand
gcgguguccuuggcucuug

SEQ ID NO: 2201942 - RNA, 19 nt, Homo sapiens
  misc_RNA (1)...(19): siRNA sense strand
gucccagccucacugaaga

SEQ ID NO: 2201943 - RNA, 19 nt, Homo sapiens
  misc_RNA (1)...(19): siRNA sense strand
ccauuccuccuuugccuuu

SEQ ID NO: 2201944 - RNA, 19 nt, Homo sapiens
  misc_RNA (1)...(19): siRNA sense strand
ccaacacagcuugccauaa

SEQ ID NO: 2201945 - RNA, 19 nt, Homo sapiens
  misc_RNA (1)...(19): siRNA sense strand
ugcaauuucuuuccucaca

SEQ ID NO: 2201946 - RNA, 19 nt, Homo sapiens
  misc_RNA (1)...(19): siRNA sense strand
uaccgcugcuuuccagaug

SEQ ID NO: 2201947 - RNA, 19 nt, Homo sapiens
  misc_RNA (1)...(19): siRNA sense strand
caagacugaaauuaaggaa

SEQ ID NO: 2201948 - RNA, 19 nt, Homo sapiens
  misc_RNA (1)...(19): siRNA sense strand
ucacaccccuggcuguuau

SEQ ID NO: 2201949 - RNA, 19 nt, Homo sapiens
  misc_RNA (1)...(19): siRNA sense strand
cuggcaagauuccuuugug

SEQ ID NO: 2201950 - RNA, 19 nt, Homo sapiens
  misc_RNA (1)...(19): siRNA sense strand
cugcacaaacacuauuaaa

SEQ ID NO: 2201951 - RNA, 19 nt, Homo sapiens
  misc_RNA (1)...(19): siRNA sense strand
gcgaacagacaagacugaa

SEQ ID NO: 2201952 - RNA, 19 nt, Homo sapiens
  misc_RNA (1)...(19): siRNA sense strand
ggcgaacagacaagacuga

SEQ ID NO: 2201953 - RNA, 19 nt, Homo sapiens
  misc_RNA (1)...(19): siRNA sense strand
cugccauccugcccuugua

SEQ ID NO: 2201954 - RNA, 19 nt, Homo sapiens
  misc_RNA (1)...(19): siRNA sense strand
gcaaaagcuuccccagcau

SEQ ID NO: 2201955 - RNA, 19 nt, Homo sapiens
  misc_RNA (1)...(19): siRNA sense strand
ugaacucggaaaugcauug

SEQ ID NO: 2201956 - RNA, 19 nt, Homo sapiens
  misc_RNA (1)...(19): siRNA sense strand
ucagcaggaugucauauua

SEQ ID NO: 2201957 - RNA, 19 nt, Homo sapiens
  misc_RNA (1)...(19): siRNA sense strand
gaagccaagucuauauuug

SEQ ID NO: 2201958 - RNA, 19 nt, Homo sapiens
  misc_RNA (1)...(19): siRNA sense strand
gaaccaagauuugaacaca

SEQ ID NO: 2201959 - RNA, 19 nt, Homo sapiens
  misc_RNA (1)...(19): siRNA sense strand
gcaauuaaacccucucaga

SEQ ID NO: 2201960 - RNA, 19 nt, Homo sapiens
  misc_RNA (1)...(19): siRNA sense strand
gcagagccgugucaagaug

SEQ ID NO: 2201961 - RNA, 19 nt, Homo sapiens
  misc_RNA (1)...(19): siRNA sense strand
gaacaaaacccaaggcaaa

SEQ ID NO: 2201962 - RNA, 19 nt, Homo sapiens
  misc_RNA (1)...(19): siRNA sense strand
ccaagucuauauuugauga

SEQ ID NO: 2201963 - RNA, 19 nt, Homo sapiens
  misc_RNA (1)...(19): siRNA sense strand
ugauaucuuugcugacuua

SEQ ID NO: 2201964 - RNA, 19 nt, Homo sapiens
  misc_RNA (1)...(19): siRNA sense strand
caaagucucugggucauuc

SEQ ID NO: 2201965 - RNA, 19 nt, Homo sapiens
  misc_RNA (1)...(19): siRNA sense strand
gaucagaaagucaagaaga

SEQ ID NO: 2201966 - RNA, 19 nt, Homo sapiens
  misc_RNA (1)...(19): siRNA sense strand
ggaagccaagucuauauuu

SEQ ID NO: 2201967 - RNA, 19 nt, Homo sapiens
  misc_RNA (1)...(19): siRNA sense strand
gaugaccucuuuacagauc

SEQ ID NO: 2201968 - RNA, 19 nt, Homo sapiens
  misc_RNA (1)...(19): siRNA sense strand
ucaagaagaaugagacaaa

SEQ ID NO: 2201969 - RNA, 19 nt, Homo sapiens
  misc_RNA (1)...(19): siRNA sense strand
caauuaaacccucucagaa

SEQ ID NO: 2201970 - RNA, 19 nt, Homo sapiens
  misc_RNA (1)...(19): siRNA sense strand
caagguguccaacaucuuu

SEQ ID NO: 2201971 - RNA, 19 nt, Homo sapiens
  misc_RNA (1)...(19): siRNA sense strand
gcaaagagccccauguuuc

SEQ ID NO: 2201972 - RNA, 19 nt, Homo sapiens
  misc_RNA (1)...(19): siRNA sense strand
aggaugaccucuuuacaga

SEQ ID NO: 2201973 - RNA, 19 nt, Homo sapiens
  misc_RNA (1)...(19): siRNA sense strand
gaaaguggaagccaagucu

SEQ ID NO: 2201974 - RNA, 19 nt, Homo sapiens
  misc_RNA (1)...(19): siRNA sense strand
gcaccugaaccaagauuug

SEQ ID NO: 2201975 - RNA, 19 nt, Homo sapiens
  misc_RNA (1)...(19): siRNA sense strand
gagaaaacauuggaaucua

SEQ ID NO: 2201976 - RNA, 19 nt, Homo sapiens
  misc_RNA (1)...(19): siRNA sense strand
aggcaaagauagcagagaa

SEQ ID NO: 2201977 - RNA, 19 nt, Homo sapiens
  misc_RNA (1)...(19): siRNA sense strand
ggccgcaccugaaccaaga

SEQ ID NO: 2201978 - RNA, 19 nt, Homo sapiens
  misc_RNA (1)...(19): siRNA sense strand
gcaaagauagcagagaauc

SEQ ID NO: 2201979 - RNA, 19 nt, Homo sapiens
  misc_RNA (1)...(19): siRNA sense strand
cagugaugaugaucucuuu

SEQ ID NO: 2201980 - RNA, 19 nt, Homo sapiens
  misc_RNA (1)...(19): siRNA sense strand
uaucuuugcugacuuaacu

SEQ ID NO: 2201981 - RNA, 19 nt, Homo sapiens
  misc_RNA (1)...(19): siRNA sense strand
aauuaaacccucucagaaa

SEQ ID NO: 2201982 - RNA, 19 nt, Homo sapiens
  misc_RNA (1)...(19): siRNA sense strand
gcuaagacaaccaaaccaa

SEQ ID NO: 2201983 - RNA, 19 nt, Homo sapiens
  misc_RNA (1)...(19): siRNA sense strand
caggaugucauauuaacaa

SEQ ID NO: 2201984 - RNA, 19 nt, Homo sapiens
  misc_RNA (1)...(19): siRNA sense strand
gaugucauauuaacaacac

SEQ ID NO: 2201985 - RNA, 19 nt, Homo sapiens
  misc_RNA (1)...(19): siRNA sense strand
ggccagcagugaugaugau

SEQ ID NO: 2201986 - RNA, 19 nt, Homo sapiens
  misc_RNA (1)...(19): siRNA sense strand
gaggaugauauauuugcua

SEQ ID NO: 2201987 - RNA, 19 nt, Homo sapiens
  misc_RNA (1)...(19): siRNA sense strand
cagcaggaugucauauuaa

SEQ ID NO: 2201988 - RNA, 19 nt, Homo sapiens
  misc_RNA (1)...(19): siRNA sense strand
caagaagaaugagacaaaa

SEQ ID NO: 2201989 - RNA, 19 nt, Homo sapiens
  misc_RNA (1)...(19): siRNA sense strand
uuugcugacuuaacuguaa

SEQ ID NO: 2201990 - RNA, 19 nt, Homo sapiens
  misc_RNA (1)...(19): siRNA sense strand
uuacagaucagaaagucaa

SEQ ID NO: 2201991 - RNA, 19 nt, Homo sapiens
  misc_RNA (1)...(19): siRNA sense strand
gcagugaugaugaucucuu

SEQ ID NO: 2201992 - RNA, 19 nt, Homo sapiens
  misc_RNA (1)...(19): siRNA sense strand
ugacuuaacuguaaaacca

SEQ ID NO: 2201993 - RNA, 19 nt, Homo sapiens
  misc_RNA (1)...(19): siRNA sense strand
gagagaaggagaaaacauu

SEQ ID NO: 2201994 - RNA, 19 nt, Homo sapiens
  misc_RNA (1)...(19): siRNA sense strand
agaaagucaagaagaauga

SEQ ID NO: 2201995 - RNA, 19 nt, Homo sapiens
  misc_RNA (1)...(19): siRNA sense strand
cagaaagucaagaagaaug

SEQ ID NO: 2201996 - RNA, 19 nt, Homo sapiens
  misc_RNA (1)...(19): siRNA sense strand
cuaagacaaccaaaccaaa

SEQ ID NO: 2201997 - RNA, 19 nt, Homo sapiens
  misc_RNA (1)...(19): siRNA sense strand
cagagcagccaguggagaa

SEQ ID NO: 2201998 - RNA, 19 nt, Homo sapiens
  misc_RNA (1)...(19): siRNA sense strand
cacaagguguccaacaucu

SEQ ID NO: 2201999 - RNA, 19 nt, Homo sapiens
  misc_RNA (1)...(19): siRNA sense strand
gcaaagucucugggucauu

SEQ ID NO: 2202000 - RNA, 19 nt, Homo sapiens
  misc_RNA (1)...(19): siRNA sense strand
cagcagugaugaugaucuc

SEQ ID NO: 2202001 - RNA, 19 nt, Homo sapiens
  misc_RNA (1)...(19): siRNA sense strand
aagccaagucuauauuuga

SEQ ID NO: 2202002 - RNA, 19 nt, Homo sapiens
  misc_RNA (1)...(19): siRNA sense strand
aucagaaagucaagaagaa

SEQ ID NO: 2202003 - RNA, 19 nt, Homo sapiens
  misc_RNA (1)...(19): siRNA sense strand
cagaucagaaagucaagaa

SEQ ID NO: 2202004 - RNA, 19 nt, Homo sapiens
  misc_RNA (1)...(19): siRNA sense strand
gaugaugaucucuuucagu

SEQ ID NO: 2202005 - RNA, 19 nt, Homo sapiens
  misc_RNA (1)...(19): siRNA sense strand
gugaugaugaucucuuuca

SEQ ID NO: 2202006 - RNA, 19 nt, Homo sapiens
  misc_RNA (1)...(19): siRNA sense strand
guggaagccaagucuauau

SEQ ID NO: 2202007 - RNA, 19 nt, Homo sapiens
  misc_RNA (1)...(19): siRNA sense strand
gcaggaugucauauuaaca

SEQ ID NO: 2202008 - RNA, 19 nt, Homo sapiens
  misc_RNA (1)...(19): siRNA sense strand
uaagacaaccaaaccaaaa

SEQ ID NO: 2202009 - RNA, 19 nt, Homo sapiens
  misc_RNA (1)...(19): siRNA sense strand
aaccaagauuugaacacaa

SEQ ID NO: 2202010 - RNA, 19 nt, Homo sapiens
  misc_RNA (1)...(19): siRNA sense strand
caccugaaccaagauuuga

SEQ ID NO: 2202011 - RNA, 19 nt, Homo sapiens
  misc_RNA (1)...(19): siRNA sense strand
uugcagagccgugucaaga

SEQ ID NO: 2202012 - RNA, 19 nt, Homo sapiens
  misc_RNA (1)...(19): siRNA sense strand
gagcagccaguggagaaga

SEQ ID NO: 2202013 - RNA, 19 nt, Homo sapiens
  misc_RNA (1)...(19): siRNA sense strand
gaggggaggcugaccuuuu

SEQ ID NO: 2202014 - RNA, 19 nt, Homo sapiens
  misc_RNA (1)...(19): siRNA sense strand
ccucuuuacagaucagaaa

SEQ ID NO: 2202015 - RNA, 19 nt, Homo sapiens
  misc_RNA (1)...(19): siRNA sense strand
agccaagucuauauuugau

SEQ ID NO: 2202016 - RNA, 19 nt, Homo sapiens
  misc_RNA (1)...(19): siRNA sense strand
uggaagccaagucuauauu

SEQ ID NO: 2202017 - RNA, 19 nt, Homo sapiens
  misc_RNA (1)...(19): siRNA sense strand
ucagaaagucaagaagaau

SEQ ID NO: 2202018 - RNA, 19 nt, Homo sapiens
  misc_RNA (1)...(19): siRNA sense strand
gucagcaggaugucauauu

SEQ ID NO: 2202019 - RNA, 19 nt, Homo sapiens
  misc_RNA (1)...(19): siRNA sense strand
ccaaaaccagcaaagaaaa

SEQ ID NO: 2202020 - RNA, 19 nt, Homo sapiens
  misc_RNA (1)...(19): siRNA sense strand
accaagauuugaacacaag

SEQ ID NO: 2202021 - RNA, 19 nt, Homo sapiens
  misc_RNA (1)...(19): siRNA sense strand
gaugagagggaagcguaga

SEQ ID NO: 2202022 - RNA, 19 nt, Homo sapiens
  misc_RNA (1)...(19): siRNA sense strand
uugcugacuuaacuguaaa

SEQ ID NO: 2202023 - RNA, 19 nt, Homo sapiens
  misc_RNA (1)...(19): siRNA sense strand
ggagaaaacauuggaaucu

SEQ ID NO: 2202024 - RNA, 19 nt, Homo sapiens
  misc_RNA (1)...(19): siRNA sense strand
gagaauaagucaagagaaa

SEQ ID NO: 2202025 - RNA, 19 nt, Homo sapiens
  misc_RNA (1)...(19): siRNA sense strand
gagaaucuaugauaacuug

SEQ ID NO: 2202026 - RNA, 19 nt, Homo sapiens
  misc_RNA (1)...(19): siRNA sense strand
ucacagagcauuugcguua

SEQ ID NO: 2202027 - RNA, 19 nt, Homo sapiens
  misc_RNA (1)...(19): siRNA sense strand
gagaucaaauugcccuuaa

SEQ ID NO: 2202028 - RNA, 19 nt, Homo sapiens
  misc_RNA (1)...(19): siRNA sense strand
gaagaagcuugaacacaug

SEQ ID NO: 2202029 - RNA, 19 nt, Homo sapiens
  misc_RNA (1)...(19): siRNA sense strand
agacaaugguguucagaua

SEQ ID NO: 2202030 - RNA, 19 nt, Homo sapiens
  misc_RNA (1)...(19): siRNA sense strand
caucaaagcuuccugaaac

SEQ ID NO: 2202031 - RNA, 19 nt, Homo sapiens
  misc_RNA (1)...(19): siRNA sense strand
ugaagaagcuugaacacau

SEQ ID NO: 2202032 - RNA, 19 nt, Homo sapiens
  misc_RNA (1)...(19): siRNA sense strand
caaacugucuggagaagga

SEQ ID NO: 2202033 - RNA, 19 nt, Homo sapiens
  misc_RNA (1)...(19): siRNA sense strand
gaucuaagagaaucuauga

SEQ ID NO: 2202034 - RNA, 19 nt, Homo sapiens
  misc_RNA (1)...(19): siRNA sense strand
gcaaacgccugcaagaucu

SEQ ID NO: 2202035 - RNA, 19 nt, Homo sapiens
  misc_RNA (1)...(19): siRNA sense strand
gcaagaagcacuggaaguu

SEQ ID NO: 2202036 - RNA, 19 nt, Homo sapiens
  misc_RNA (1)...(19): siRNA sense strand
gcaagaagcaguucacgau

SEQ ID NO: 2202037 - RNA, 19 nt, Homo sapiens
  misc_RNA (1)...(19): siRNA sense strand
gaacagagagccaauaagc

SEQ ID NO: 2202038 - RNA, 19 nt, Homo sapiens
  misc_RNA (1)...(19): siRNA sense strand
cauaugcgaucuaagagaa

SEQ ID NO: 2202039 - RNA, 19 nt, Homo sapiens
  misc_RNA (1)...(19): siRNA sense strand
acacagaauuggcaaaugu

SEQ ID NO: 2202040 - RNA, 19 nt, Homo sapiens
  misc_RNA (1)...(19): siRNA sense strand
agggugaucuuacaaagua

SEQ ID NO: 2202041 - RNA, 19 nt, Homo sapiens
  misc_RNA (1)...(19): siRNA sense strand
gaacggugcauuucagaga

SEQ ID NO: 2202042 - RNA, 19 nt, Homo sapiens
  misc_RNA (1)...(19): siRNA sense strand
ucaaaggaaugcggucuaa

SEQ ID NO: 2202043 - RNA, 19 nt, Homo sapiens
  misc_RNA (1)...(19): siRNA sense strand
gaaagagcccgcugguguu

SEQ ID NO: 2202044 - RNA, 19 nt, Homo sapiens
  misc_RNA (1)...(19): siRNA sense strand
gaacagaagcccacuagac

SEQ ID NO: 2202045 - RNA, 19 nt, Homo sapiens
  misc_RNA (1)...(19): siRNA sense strand
gcaacaaggagaaguaugu

SEQ ID NO: 2202046 - RNA, 19 nt, Homo sapiens
  misc_RNA (1)...(19): siRNA sense strand
ccaaccaacuguccauuca

SEQ ID NO: 2202047 - RNA, 19 nt, Homo sapiens
  misc_RNA (1)...(19): siRNA sense strand
acagagagacgacaucaaa

SEQ ID NO: 2202048 - RNA, 19 nt, Homo sapiens
  misc_RNA (1)...(19): siRNA sense strand
cgggacagcuaccacagua

SEQ ID NO: 2202049 - RNA, 19 nt, Homo sapiens
  misc_RNA (1)...(19): siRNA sense strand
ggaaaagggugaucuuaca

SEQ ID NO: 2202050 - RNA, 19 nt, Homo sapiens
  misc_RNA (1)...(19): siRNA sense strand
gcagaggguuugcauccau

SEQ ID NO: 2202051 - RNA, 19 nt, Homo sapiens
  misc_RNA (1)...(19): siRNA sense strand
gaagcccacuagacauuuc

SEQ ID NO: 2202052 - RNA, 19 nt, Homo sapiens
  misc_RNA (1)...(19): siRNA sense strand
gcacaucacgccaagcaau

SEQ ID NO: 2202053 - RNA, 19 nt, Homo sapiens
  misc_RNA (1)...(19): siRNA sense strand
ccaagucacuguaagaaaa

SEQ ID NO: 2202054 - RNA, 19 nt, Homo sapiens
  misc_RNA (1)...(19): siRNA sense strand
caacauucacagagcauuu

SEQ ID NO: 2202055 - RNA, 19 nt, Homo sapiens
  misc_RNA (1)...(19): siRNA sense strand
ccagaugauugaugagaau

SEQ ID NO: 2202056 - RNA, 19 nt, Homo sapiens
  misc_RNA (1)...(19): siRNA sense strand
gcugugacuugguuguaaa

SEQ ID NO: 2202057 - RNA, 19 nt, Homo sapiens
  misc_RNA (1)...(19): siRNA sense strand
acaaugguguucagauaga

SEQ ID NO: 2202058 - RNA, 19 nt, Homo sapiens
  misc_RNA (1)...(19): siRNA sense strand
caaggagaaguauguauga

SEQ ID NO: 2202059 - RNA, 19 nt, Homo sapiens
  misc_RNA (1)...(19): siRNA sense strand
gcagcggagucaacauuca

SEQ ID NO: 2202060 - RNA, 19 nt, Homo sapiens
  misc_RNA (1)...(19): siRNA sense strand
caaagaacggugcauuuca

SEQ ID NO: 2202061 - RNA, 19 nt, Homo sapiens
  misc_RNA (1)...(19): siRNA sense strand
uggaguagauggccuagug

SEQ ID NO: 2202062 - RNA, 19 nt, Homo sapiens
  misc_RNA (1)...(19): siRNA sense strand
ggaagacaaugguguucag

SEQ ID NO: 2202063 - RNA, 19 nt, Homo sapiens
  misc_RNA (1)...(19): siRNA sense strand
caacaaggagaaguaugua

SEQ ID NO: 2202064 - RNA, 19 nt, Homo sapiens
  misc_RNA (1)...(19): siRNA sense strand
guucauuucucgcucacaa

SEQ ID NO: 2202065 - RNA, 19 nt, Homo sapiens
  misc_RNA (1)...(19): siRNA sense strand
gcaggaagacaaugguguu

SEQ ID NO: 2202066 - RNA, 19 nt, Homo sapiens
  misc_RNA (1)...(19): siRNA sense strand
ucucagcaguguccagauu

SEQ ID NO: 2202067 - RNA, 19 nt, Homo sapiens
  misc_RNA (1)...(19): siRNA sense strand
cacaagaacggcugaagaa

SEQ ID NO: 2202068 - RNA, 19 nt, Homo sapiens
  misc_RNA (1)...(19): siRNA sense strand
gugaacagagagccaauaa

SEQ ID NO: 2202069 - RNA, 19 nt, Homo sapiens
  misc_RNA (1)...(19): siRNA sense strand
aagaagcaguucacgauuc

SEQ ID NO: 2202070 - RNA, 19 nt, Homo sapiens
  misc_RNA (1)...(19): siRNA sense strand
uggcaaaugugggagcuaa

SEQ ID NO: 2202071 - RNA, 19 nt, Homo sapiens
  misc_RNA (1)...(19): siRNA sense strand
cagagaaggagaugcauau

SEQ ID NO: 2202072 - RNA, 19 nt, Homo sapiens
  misc_RNA (1)...(19): siRNA sense strand
ccaaagaacggugcauuuc

SEQ ID NO: 2202073 - RNA, 19 nt, Homo sapiens
  misc_RNA (1)...(19): siRNA sense strand
cagaagcccacuagacauu

SEQ ID NO: 2202074 - RNA, 19 nt, Homo sapiens
  misc_RNA (1)...(19): siRNA sense strand
gaugauugaugagaauaag

SEQ ID NO: 2202075 - RNA, 19 nt, Homo sapiens
  misc_RNA (1)...(19): siRNA sense strand
gaggcaacaaggagaagua

SEQ ID NO: 2202076 - RNA, 19 nt, Homo sapiens
  misc_RNA (1)...(19): siRNA sense strand
ucucccagaugauugauga

SEQ ID NO: 2202077 - RNA, 19 nt, Homo sapiens
  misc_RNA (1)...(19): siRNA sense strand
agacauuuccuucccauug

SEQ ID NO: 2202078 - RNA, 19 nt, Homo sapiens
  misc_RNA (1)...(19): siRNA sense strand
uaaccaagucacuguaaga

SEQ ID NO: 2202079 - RNA, 19 nt, Homo sapiens
  misc_RNA (1)...(19): siRNA sense strand
gcuaaccaagucacuguaa

SEQ ID NO: 2202080 - RNA, 19 nt, Homo sapiens
  misc_RNA (1)...(19): siRNA sense strand
gagcuaaccaagucacugu

SEQ ID NO: 2202081 - RNA, 19 nt, Homo sapiens
  misc_RNA (1)...(19): siRNA sense strand
gacauuuccuucccauugg

SEQ ID NO: 2202082 - RNA, 19 nt, Homo sapiens
  misc_RNA (1)...(19): siRNA sense strand
caagaagcaguucacgauu

SEQ ID NO: 2202083 - RNA, 19 nt, Homo sapiens
  misc_RNA (1)...(19): siRNA sense strand
ggaaagcccagcggaagga

SEQ ID NO: 2202084 - RNA, 19 nt, Homo sapiens
  misc_RNA (1)...(19): siRNA sense strand
gugcagggcugaggacaca

SEQ ID NO: 2202085 - RNA, 19 nt, Homo sapiens
  misc_RNA (1)...(19): siRNA sense strand
caguagaagagaucaaauu

SEQ ID NO: 2202086 - RNA, 19 nt, Homo sapiens
  misc_RNA (1)...(19): siRNA sense strand
aaagaacggugcauuucag

SEQ ID NO: 2202087 - RNA, 19 nt, Homo sapiens
  misc_RNA (1)...(19): siRNA sense strand
ucacaagaacggcugaaga

SEQ ID NO: 2202088 - RNA, 19 nt, Homo sapiens
  misc_RNA (1)...(19): siRNA sense strand
ccaaaggagauuacacaug

SEQ ID NO: 2202089 - RNA, 19 nt, Homo sapiens
  misc_RNA (1)...(19): siRNA sense strand
gaaagcaaguuccccaaag

SEQ ID NO: 2202090 - RNA, 19 nt, Homo sapiens
  misc_RNA (1)...(19): siRNA sense strand
gaucaugccaaccaacugu

SEQ ID NO: 2202091 - RNA, 19 nt, Homo sapiens
  misc_RNA (1)...(19): siRNA sense strand
guagauggccuagugaaca

SEQ ID NO: 2202092 - RNA, 19 nt, Homo sapiens
  misc_RNA (1)...(19): siRNA sense strand
caauuguaguucccacaga

SEQ ID NO: 2202093 - RNA, 19 nt, Homo sapiens
  misc_RNA (1)...(19): siRNA sense strand
agugauaacuuguucaaac

SEQ ID NO: 2202094 - RNA, 19 nt, Homo sapiens
  misc_RNA (1)...(19): siRNA sense strand
aaucugacuucaccaagga

SEQ ID NO: 2202095 - RNA, 19 nt, Homo sapiens
  misc_RNA (1)...(19): siRNA sense strand
caacuguccauucacauuc

SEQ ID NO: 2202096 - RNA, 19 nt, Homo sapiens
  misc_RNA (1)...(19): siRNA sense strand
ccaacuguccauucacauu

SEQ ID NO: 2202097 - RNA, 19 nt, Homo sapiens
  misc_RNA (1)...(19): siRNA sense strand
gcauaugcgaucuaagaga

SEQ ID NO: 2202098 - RNA, 19 nt, Homo sapiens
  misc_RNA (1)...(19): siRNA sense strand
caagaggcaacaaggagaa

SEQ ID NO: 2202099 - RNA, 19 nt, Homo sapiens
  misc_RNA (1)...(19): siRNA sense strand
ccaagcaaucucuggcuaa

SEQ ID NO: 2202100 - RNA, 19 nt, Homo sapiens
  misc_RNA (1)...(19): siRNA sense strand
aaagggugaucuuacaaag

SEQ ID NO: 2202101 - RNA, 19 nt, Homo sapiens
  misc_RNA (1)...(19): siRNA sense strand
ucagagaaggagaugcaua

SEQ ID NO: 2202102 - RNA, 19 nt, Homo sapiens
  misc_RNA (1)...(19): siRNA sense strand
gcucaaacugucuggagaa

SEQ ID NO: 2202103 - RNA, 19 nt, Homo sapiens
  misc_RNA (1)...(19): siRNA sense strand
ucagauagaaagcaaguuc

SEQ ID NO: 2202104 - RNA, 19 nt, Homo sapiens
  misc_RNA (1)...(19): siRNA sense strand
cagauuaacagcagaugga

SEQ ID NO: 2202105 - RNA, 19 nt, Homo sapiens
  misc_RNA (1)...(19): siRNA sense strand
ucgcucaaccucaauugua

SEQ ID NO: 2202106 - RNA, 19 nt, Homo sapiens
  misc_RNA (1)...(19): siRNA sense strand
gaucaaauugcccuuaaaa

SEQ ID NO: 2202107 - RNA, 19 nt, Homo sapiens
  misc_RNA (1)...(19): siRNA sense strand
guaagccucaguucauuuc

SEQ ID NO: 2202108 - RNA, 19 nt, Homo sapiens
  misc_RNA (1)...(19): siRNA sense strand
gaaguauguaugacugugu

SEQ ID NO: 2202109 - RNA, 19 nt, Homo sapiens
  misc_RNA (1)...(19): siRNA sense strand
ugugggagcuaaccaaguc

SEQ ID NO: 2202110 - RNA, 19 nt, Homo sapiens
  misc_RNA (1)...(19): siRNA sense strand
caaugguguucagauagaa

SEQ ID NO: 2202111 - RNA, 19 nt, Homo sapiens
  misc_RNA (1)...(19): siRNA sense strand
gaagacaaugguguucaga

SEQ ID NO: 2202112 - RNA, 19 nt, Homo sapiens
  misc_RNA (1)...(19): siRNA sense strand
acaaggagaaguauguaug

SEQ ID NO: 2202113 - RNA, 19 nt, Homo sapiens
  misc_RNA (1)...(19): siRNA sense strand
ggaguagauggccuaguga

SEQ ID NO: 2202114 - RNA, 19 nt, Homo sapiens
  misc_RNA (1)...(19): siRNA sense strand
aagaacggcugaagaagcu

SEQ ID NO: 2202115 - RNA, 19 nt, Homo sapiens
  misc_RNA (1)...(19): siRNA sense strand
gacaaugguguucagauag

SEQ ID NO: 2202116 - RNA, 19 nt, Homo sapiens
  misc_RNA (1)...(19): siRNA sense strand
acagggcaguacacacaaa

SEQ ID NO: 2202117 - RNA, 19 nt, Homo sapiens
  misc_RNA (1)...(19): siRNA sense strand
gauccguccugucgcucaa

SEQ ID NO: 2202118 - RNA, 19 nt, Homo sapiens
  misc_RNA (1)...(19): siRNA sense strand
gagaaggagaugcauaugc

SEQ ID NO: 2202119 - RNA, 19 nt, Homo sapiens
  misc_RNA (1)...(19): siRNA sense strand
caagaagcacuggaaguuc

SEQ ID NO: 2202120 - RNA, 19 nt, Homo sapiens
  misc_RNA (1)...(19): siRNA sense strand
agaucaaauugcccuuaaa

SEQ ID NO: 2202121 - RNA, 19 nt, Homo sapiens
  misc_RNA (1)...(19): siRNA sense strand
aaacacagaauuggcaaau

SEQ ID NO: 2202122 - RNA, 19 nt, Homo sapiens
  misc_RNA (1)...(19): siRNA sense strand
aacagcagauggaguagau

SEQ ID NO: 2202123 - RNA, 19 nt, Homo sapiens
  misc_RNA (1)...(19): siRNA sense strand
auuaacagcagauggagua

SEQ ID NO: 2202124 - RNA, 19 nt, Homo sapiens
  misc_RNA (1)...(19): siRNA sense strand
caacaacuuuccugauuua

SEQ ID NO: 2202125 - RNA, 19 nt, Homo sapiens
  misc_RNA (1)...(19): siRNA sense strand
gaagugagauccacaacaa

SEQ ID NO: 2202126 - RNA, 19 nt, Homo sapiens
  misc_RNA (1)...(19): siRNA sense strand
gaauggaucuggagacaug

SEQ ID NO: 2202127 - RNA, 19 nt, Homo sapiens
  misc_RNA (1)...(19): siRNA sense strand
gauuucagcuaccuucaua

SEQ ID NO: 2202128 - RNA, 19 nt, Homo sapiens
  misc_RNA (1)...(19): siRNA sense strand
gaagugauaaccacaauga

SEQ ID NO: 2202129 - RNA, 19 nt, Homo sapiens
  misc_RNA (1)...(19): siRNA sense strand
gaagugauaaccacaauga

SEQ ID NO: 2202130 - RNA, 19 nt, Homo sapiens
  misc_RNA (1)...(19): siRNA sense strand
ggaaugaugaccacaauga

SEQ ID NO: 2202131 - RNA, 19 nt, Homo sapiens
  misc_RNA (1)...(19): siRNA sense strand
aaugaaaugugucccaaua

SEQ ID NO: 2202132 - RNA, 19 nt, Homo sapiens
  misc_RNA (1)...(19): siRNA sense strand
gcaccacaauuauaaggaa

SEQ ID NO: 2202133 - RNA, 19 nt, Homo sapiens
  misc_RNA (1)...(19): siRNA sense strand
cagggaagaugucaccaua

SEQ ID NO: 2202134 - RNA, 19 nt, Homo sapiens
  misc_RNA (1)...(19): siRNA sense strand
gaacaaggcaggugaugau

SEQ ID NO: 2202135 - RNA, 19 nt, Homo sapiens
  misc_RNA (1)...(19): siRNA sense strand
gaaaugcgccaguguagug

SEQ ID NO: 2202136 - RNA, 19 nt, Homo sapiens
  misc_RNA (1)...(19): siRNA sense strand
ucgaggacccugauuauua

SEQ ID NO: 2202137 - RNA, 19 nt, Homo sapiens
  misc_RNA (1)...(19): siRNA sense strand
gaugaaaguugugaaugaa

SEQ ID NO: 2202138 - RNA, 19 nt, Homo sapiens
  misc_RNA (1)...(19): siRNA sense strand
gaucacaaccaaagaggua

SEQ ID NO: 2202139 - RNA, 19 nt, Homo sapiens
  misc_RNA (1)...(19): siRNA sense strand
gggaaucucugaucguguu

SEQ ID NO: 2202140 - RNA, 19 nt, Homo sapiens
  misc_RNA (1)...(19): siRNA sense strand
ucagcuaccuucauacaaa

SEQ ID NO: 2202141 - RNA, 19 nt, Homo sapiens
  misc_RNA (1)...(19): siRNA sense strand
ugaugaaaguugugaauga

SEQ ID NO: 2202142 - RNA, 19 nt, Homo sapiens
  misc_RNA (1)...(19): siRNA sense strand
ggaaugaugaccacaaaga

SEQ ID NO: 2202143 - RNA, 19 nt, Homo sapiens
  misc_RNA (1)...(19): siRNA sense strand
gaaccaagagcucugagaa

SEQ ID NO: 2202144 - RNA, 19 nt, Homo sapiens
  misc_RNA (1)...(19): siRNA sense strand
gggagcaucugcaugagaa

SEQ ID NO: 2202145 - RNA, 19 nt, Homo sapiens
  misc_RNA (1)...(19): siRNA sense strand
ccucaguccugguuugaua

SEQ ID NO: 2202146 - RNA, 19 nt, Homo sapiens
  misc_RNA (1)...(19): siRNA sense strand
caacuuuccugauuuaaac

SEQ ID NO: 2202147 - RNA, 19 nt, Homo sapiens
  misc_RNA (1)...(19): siRNA sense strand
uagaaggcauuaaccauga

SEQ ID NO: 2202148 - RNA, 19 nt, Homo sapiens
  misc_RNA (1)...(19): siRNA sense strand
gagcugauaaccacaauga

SEQ ID NO: 2202149 - RNA, 19 nt, Homo sapiens
  misc_RNA (1)...(19): siRNA sense strand
caccagaauuuacaacauu

SEQ ID NO: 2202150 - RNA, 19 nt, Homo sapiens
  misc_RNA (1)...(19): siRNA sense strand
acacgugggucacuguuaa

SEQ ID NO: 2202151 - RNA, 19 nt, Homo sapiens
  misc_RNA (1)...(19): siRNA sense strand
gaaaugugucccaauauca

SEQ ID NO: 2202152 - RNA, 19 nt, Homo sapiens
  misc_RNA (1)...(19): siRNA sense strand
gauaaucacaaccaauuga

SEQ ID NO: 2202153 - RNA, 19 nt, Homo sapiens
  misc_RNA (1)...(19): siRNA sense strand
gagagaucauggagaaguu

SEQ ID NO: 2202154 - RNA, 19 nt, Homo sapiens
  misc_RNA (1)...(19): siRNA sense strand
cagcaaaggccgaagguuu

SEQ ID NO: 2202155 - RNA, 19 nt, Homo sapiens
  misc_RNA (1)...(19): siRNA sense strand
gaaaguucccaaucacuau

SEQ ID NO: 2202156 - RNA, 19 nt, Homo sapiens
  misc_RNA (1)...(19): siRNA sense strand
gagcugaugaccacaauga

SEQ ID NO: 2202157 - RNA, 19 nt, Homo sapiens
  misc_RNA (1)...(19): siRNA sense strand
aacaacaacuuuccugauu

SEQ ID NO: 2202158 - RNA, 19 nt, Homo sapiens
  misc_RNA (1)...(19): siRNA sense strand
cggaagaucuagagacuca

SEQ ID NO: 2202159 - RNA, 19 nt, Homo sapiens
  misc_RNA (1)...(19): siRNA sense strand
gauaaauacccacaugaga

SEQ ID NO: 2202160 - RNA, 19 nt, Homo sapiens
  misc_RNA (1)...(19): siRNA sense strand
acaacaacuuuccugauuu

SEQ ID NO: 2202161 - RNA, 19 nt, Homo sapiens
  misc_RNA (1)...(19): siRNA sense strand
ugagaaggcugccaacgau

SEQ ID NO: 2202162 - RNA, 19 nt, Homo sapiens
  misc_RNA (1)...(19): siRNA sense strand
ugaaaugugucccaauauc

SEQ ID NO: 2202163 - RNA, 19 nt, Homo sapiens
  misc_RNA (1)...(19): siRNA sense strand
gcacaucgagggagacuca

SEQ ID NO: 2202164 - RNA, 19 nt, Homo sapiens
  misc_RNA (1)...(19): siRNA sense strand
cuggaagucugaacgauuu

SEQ ID NO: 2202165 - RNA, 19 nt, Homo sapiens
  misc_RNA (1)...(19): siRNA sense strand
cccaauaucaccagaauuu

SEQ ID NO: 2202166 - RNA, 19 nt, Homo sapiens
  misc_RNA (1)...(19): siRNA sense strand
ccagggaggugauaacuac

SEQ ID NO: 2202167 - RNA, 19 nt, Homo sapiens
  misc_RNA (1)...(19): siRNA sense strand
ccagggaggugauaacuac

SEQ ID NO: 2202168 - RNA, 19 nt, Homo sapiens
  misc_RNA (1)...(19): siRNA sense strand
gggaagaugucaccauaac

SEQ ID NO: 2202169 - RNA, 19 nt, Homo sapiens
  misc_RNA (1)...(19): siRNA sense strand
ggagugaugaccacaaaga

SEQ ID NO: 2202170 - RNA, 19 nt, Homo sapiens
  misc_RNA (1)...(19): siRNA sense strand
gagguaaugaccacaguaa

SEQ ID NO: 2202171 - RNA, 19 nt, Homo sapiens
  misc_RNA (1)...(19): siRNA sense strand
gaagaugucagagagaguu

SEQ ID NO: 2202172 - RNA, 19 nt, Homo sapiens
  misc_RNA (1)...(19): siRNA sense strand
ccagggaggugacaacuac

SEQ ID NO: 2202173 - RNA, 19 nt, Homo sapiens
  misc_RNA (1)...(19): siRNA sense strand
ccacugaugaccuggauuu

SEQ ID NO: 2202174 - RNA, 19 nt, Homo sapiens
  misc_RNA (1)...(19): siRNA sense strand
gagaugaccaccacugaug

SEQ ID NO: 2202175 - RNA, 19 nt, Homo sapiens
  misc_RNA (1)...(19): siRNA sense strand
cagauucacuggugucauc

SEQ ID NO: 2202176 - RNA, 19 nt, Homo sapiens
  misc_RNA (1)...(19): siRNA sense strand
ugacaucaacaacaacuuu

SEQ ID NO: 2202177 - RNA, 19 nt, Homo sapiens
  misc_RNA (1)...(19): siRNA sense strand
gaagaugucaccauaacca

SEQ ID NO: 2202178 - RNA, 19 nt, Homo sapiens
  misc_RNA (1)...(19): siRNA sense strand
caauaaagaagcaggaaau

SEQ ID NO: 2202179 - RNA, 19 nt, Homo sapiens
  misc_RNA (1)...(19): siRNA sense strand
gcaauaaagaagcaggaaa

SEQ ID NO: 2202180 - RNA, 19 nt, Homo sapiens
  misc_RNA (1)...(19): siRNA sense strand
cuggagacaugauauuuga

SEQ ID NO: 2202181 - RNA, 19 nt, Homo sapiens
  misc_RNA (1)...(19): siRNA sense strand
gcuucgaacuguccaucua

SEQ ID NO: 2202182 - RNA, 19 nt, Homo sapiens
  misc_RNA (1)...(19): siRNA sense strand
ccugaacccuggagaguau

SEQ ID NO: 2202183 - RNA, 19 nt, Homo sapiens
  misc_RNA (1)...(19): siRNA sense strand
ucacuggugucaucacuca

SEQ ID NO: 2202184 - RNA, 19 nt, Homo sapiens
  misc_RNA (1)...(19): siRNA sense strand
gcagguucaucguggcauu

SEQ ID NO: 2202185 - RNA, 19 nt, Homo sapiens
  misc_RNA (1)...(19): siRNA sense strand
cgaggacccugauuauuac

SEQ ID NO: 2202186 - RNA, 19 nt, Homo sapiens
  misc_RNA (1)...(19): siRNA sense strand
ccagggagguggugacuac

SEQ ID NO: 2202187 - RNA, 19 nt, Homo sapiens
  misc_RNA (1)...(19): siRNA sense strand
gcagugauaaccagaacaa

SEQ ID NO: 2202188 - RNA, 19 nt, Homo sapiens
  misc_RNA (1)...(19): siRNA sense strand
uaagggaagugauaaccau

SEQ ID NO: 2202189 - RNA, 19 nt, Homo sapiens
  misc_RNA (1)...(19): siRNA sense strand
uaagggaagugauaaccau

SEQ ID NO: 2202190 - RNA, 19 nt, Homo sapiens
  misc_RNA (1)...(19): siRNA sense strand
gggaagugauaaccacaau

SEQ ID NO: 2202191 - RNA, 19 nt, Homo sapiens
  misc_RNA (1)...(19): siRNA sense strand
gagaggugauaaccacaau

SEQ ID NO: 2202192 - RNA, 19 nt, Homo sapiens
  misc_RNA (1)...(19): siRNA sense strand
gggaagugauaaccacaau

SEQ ID NO: 2202193 - RNA, 19 nt, Homo sapiens
  misc_RNA (1)...(19): siRNA sense strand
ucuagagacucacaucaga

SEQ ID NO: 2202194 - RNA, 19 nt, Homo sapiens
  misc_RNA (1)...(19): siRNA sense strand
ggaaagugauaaccaugac

SEQ ID NO: 2202195 - RNA, 19 nt, Homo sapiens
  misc_RNA (1)...(19): siRNA sense strand
ggcagaggaucgacagaau

SEQ ID NO: 2202196 - RNA, 19 nt, Homo sapiens
  misc_RNA (1)...(19): siRNA sense strand
gaaaguugugaaugaaaug

SEQ ID NO: 2202197 - RNA, 19 nt, Homo sapiens
  misc_RNA (1)...(19): siRNA sense strand
gcaguggauugaaguggau

SEQ ID NO: 2202198 - RNA, 19 nt, Homo sapiens
  misc_RNA (1)...(19): siRNA sense strand
gucauagccuggauggaaa

SEQ ID NO: 2202199 - RNA, 19 nt, Homo sapiens
  misc_RNA (1)...(19): siRNA sense strand
caacgaaggaggugaugau

SEQ ID NO: 2202200 - RNA, 19 nt, Homo sapiens
  misc_RNA (1)...(19): siRNA sense strand
gaggugagaaccacaacaa

SEQ ID NO: 2202201 - RNA, 19 nt, Homo sapiens
  misc_RNA (1)...(19): siRNA sense strand
guagugagugggcaauaaa

SEQ ID NO: 2202202 - RNA, 19 nt, Homo sapiens
  misc_RNA (1)...(19): siRNA sense strand
gaucuggagacaugauauu

SEQ ID NO: 2202203 - RNA, 19 nt, Homo sapiens
  misc_RNA (1)...(19): siRNA sense strand
gugggucacuguuaagaau

SEQ ID NO: 2202204 - RNA, 19 nt, Homo sapiens
  misc_RNA (1)...(19): siRNA sense strand
ccacaauuauaaggaaaug

SEQ ID NO: 2202205 - RNA, 19 nt, Homo sapiens
  misc_RNA (1)...(19): siRNA sense strand
ccaauaucaccagaauuua

SEQ ID NO: 2202206 - RNA, 19 nt, Homo sapiens
  misc_RNA (1)...(19): siRNA sense strand
gugagaaccacaacaguga

SEQ ID NO: 2202207 - RNA, 19 nt, Homo sapiens
  misc_RNA (1)...(19): siRNA sense strand
caggacacauugcccaguu

SEQ ID NO: 2202208 - RNA, 19 nt, Homo sapiens
  misc_RNA (1)...(19): siRNA sense strand
gugacugggugacauccua

SEQ ID NO: 2202209 - RNA, 19 nt, Homo sapiens
  misc_RNA (1)...(19): siRNA sense strand
caacaacaacuuuccugau

SEQ ID NO: 2202210 - RNA, 19 nt, Homo sapiens
  misc_RNA (1)...(19): siRNA sense strand
acaauaacagcgauaagaa

SEQ ID NO: 2202211 - RNA, 19 nt, Homo sapiens
  misc_RNA (1)...(19): siRNA sense strand
ccacugccagauccuaaua

SEQ ID NO: 2202212 - RNA, 19 nt, Homo sapiens
  misc_RNA (1)...(19): siRNA sense strand
caacaaaggaagugauaac

SEQ ID NO: 2202213 - RNA, 19 nt, Homo sapiens
  misc_RNA (1)...(19): siRNA sense strand
uccgagagaucauggagaa

SEQ ID NO: 2202214 - RNA, 19 nt, Homo sapiens
  misc_RNA (1)...(19): siRNA sense strand
aaaccaacauggccaggau

SEQ ID NO: 2202215 - RNA, 19 nt, Homo sapiens
  misc_RNA (1)...(19): siRNA sense strand
uuaaaggcuuggugagaga

SEQ ID NO: 2202216 - RNA, 19 nt, Homo sapiens
  misc_RNA (1)...(19): siRNA sense strand
cuacgugggcugugauaaa

SEQ ID NO: 2202217 - RNA, 19 nt, Homo sapiens
  misc_RNA (1)...(19): siRNA sense strand
gggaggugauaacugcaaa

SEQ ID NO: 2202218 - RNA, 19 nt, Homo sapiens
  misc_RNA (1)...(19): siRNA sense strand
gaagugauaaccacaacca

SEQ ID NO: 2202219 - RNA, 19 nt, Homo sapiens
  misc_RNA (1)...(19): siRNA sense strand
gaagugauaaccacaacca

SEQ ID NO: 2202220 - RNA, 19 nt, Homo sapiens
  misc_RNA (1)...(19): siRNA sense strand
agagagguguuaaccacaa

SEQ ID NO: 2202221 - RNA, 19 nt, Homo sapiens
  misc_RNA (1)...(19): siRNA sense strand
gccauuaucuccguagaag

SEQ ID NO: 2202222 - RNA, 19 nt, Homo sapiens
  misc_RNA (1)...(19): siRNA sense strand
gcagaggaucgacagaaug

SEQ ID NO: 2202223 - RNA, 19 nt, Homo sapiens
  misc_RNA (1)...(19): siRNA sense strand
ucaggaaagugauaaccau

SEQ ID NO: 2202224 - RNA, 19 nt, Homo sapiens
  misc_RNA (1)...(19): siRNA sense strand
gcuaagaucuuuaccuuua

SEQ ID NO: 2202225 - RNA, 19 nt, Homo sapiens
  misc_RNA (1)...(19): siRNA sense strand
gauguacucuccuguguua

SEQ ID NO: 2202226 - RNA, 19 nt, Homo sapiens
  misc_RNA (1)...(19): siRNA sense strand
ggaaacagguacacaaaga

SEQ ID NO: 2202227 - RNA, 19 nt, Homo sapiens
  misc_RNA (1)...(19): siRNA sense strand
ccagaucucuucacaguaa

SEQ ID NO: 2202228 - RNA, 19 nt, Homo sapiens
  misc_RNA (1)...(19): siRNA sense strand
caaaaucgcugcauaguaa

SEQ ID NO: 2202229 - RNA, 19 nt, Homo sapiens
  misc_RNA (1)...(19): siRNA sense strand
ggaccuggguuauuagaaa

SEQ ID NO: 2202230 - RNA, 19 nt, Homo sapiens
  misc_RNA (1)...(19): siRNA sense strand
caacagagaacgcugauuu

SEQ ID NO: 2202231 - RNA, 19 nt, Homo sapiens
  misc_RNA (1)...(19): siRNA sense strand
gggagaaccuugcuaguga

SEQ ID NO: 2202232 - RNA, 19 nt, Homo sapiens
  misc_RNA (1)...(19): siRNA sense strand
gaccagaguuuacauucua

SEQ ID NO: 2202233 - RNA, 19 nt, Homo sapiens
  misc_RNA (1)...(19): siRNA sense strand
ggaacgagcuggcaguuuc

SEQ ID NO: 2202234 - RNA, 19 nt, Homo sapiens
  misc_RNA (1)...(19): siRNA sense strand
gaagacagaggacuuguuu

SEQ ID NO: 2202235 - RNA, 19 nt, Homo sapiens
  misc_RNA (1)...(19): siRNA sense strand
gaaguagaagcacuauuua

SEQ ID NO: 2202236 - RNA, 19 nt, Homo sapiens
  misc_RNA (1)...(19): siRNA sense strand
gcagagauuugucagagaa

SEQ ID NO: 2202237 - RNA, 19 nt, Homo sapiens
  misc_RNA (1)...(19): siRNA sense strand
gaagagagacuuuauuugg

SEQ ID NO: 2202238 - RNA, 19 nt, Homo sapiens
  misc_RNA (1)...(19): siRNA sense strand
caacgaugauuucuacuug

SEQ ID NO: 2202239 - RNA, 19 nt, Homo sapiens
  misc_RNA (1)...(19): siRNA sense strand
cgaauccucuccugguuua

SEQ ID NO: 2202240 - RNA, 19 nt, Homo sapiens
  misc_RNA (1)...(19): siRNA sense strand
gcaagcaggucaaacuaga

SEQ ID NO: 2202241 - RNA, 19 nt, Homo sapiens
  misc_RNA (1)...(19): siRNA sense strand
gaucagcaaugucaggauu

SEQ ID NO: 2202242 - RNA, 19 nt, Homo sapiens
  misc_RNA (1)...(19): siRNA sense strand
gagugacccucaaagguua

SEQ ID NO: 2202243 - RNA, 19 nt, Homo sapiens
  misc_RNA (1)...(19): siRNA sense strand
gcaguaagauuuggaagug

SEQ ID NO: 2202244 - RNA, 19 nt, Homo sapiens
  misc_RNA (1)...(19): siRNA sense strand
guaaaucggugcaggugaa

SEQ ID NO: 2202245 - RNA, 19 nt, Homo sapiens
  misc_RNA (1)...(19): siRNA sense strand
gcacugauguggacuugau

SEQ ID NO: 2202246 - RNA, 19 nt, Homo sapiens
  misc_RNA (1)...(19): siRNA sense strand
caaaggcaauagcuauaaa

SEQ ID NO: 2202247 - RNA, 19 nt, Homo sapiens
  misc_RNA (1)...(19): siRNA sense strand
ggcaauagcuauaaacaca

SEQ ID NO: 2202248 - RNA, 19 nt, Homo sapiens
  misc_RNA (1)...(19): siRNA sense strand
gacaagaauucagauauug

SEQ ID NO: 2202249 - RNA, 19 nt, Homo sapiens
  misc_RNA (1)...(19): siRNA sense strand
ggacagaauuggcguuugg

SEQ ID NO: 2202250 - RNA, 19 nt, Homo sapiens
  misc_RNA (1)...(19): siRNA sense strand
gauaauaggaccauccaaa

SEQ ID NO: 2202251 - RNA, 19 nt, Homo sapiens
  misc_RNA (1)...(19): siRNA sense strand
acagaggacuuguuugaaa

SEQ ID NO: 2202252 - RNA, 19 nt, Homo sapiens
  misc_RNA (1)...(19): siRNA sense strand
gaaccuugcuagugacaug

SEQ ID NO: 2202253 - RNA, 19 nt, Homo sapiens
  misc_RNA (1)...(19): siRNA sense strand
gcuagugacauguaucuua

SEQ ID NO: 2202254 - RNA, 19 nt, Homo sapiens
  misc_RNA (1)...(19): siRNA sense strand
gaggagaaguuuacaagca

SEQ ID NO: 2202255 - RNA, 19 nt, Homo sapiens
  misc_RNA (1)...(19): siRNA sense strand
acagauggccuaaagcuua

SEQ ID NO: 2202256 - RNA, 19 nt, Homo sapiens
  misc_RNA (1)...(19): siRNA sense strand
gaacacccuuccuguagug

SEQ ID NO: 2202257 - RNA, 19 nt, Homo sapiens
  misc_RNA (1)...(19): siRNA sense strand
ucaaagagaaguuucauga

SEQ ID NO: 2202258 - RNA, 19 nt, Homo sapiens
  misc_RNA (1)...(19): siRNA sense strand
ccucaaagguuagaaggua

SEQ ID NO: 2202259 - RNA, 19 nt, Homo sapiens
  misc_RNA (1)...(19): siRNA sense strand
ggcagaagcuugcacugaa

SEQ ID NO: 2202260 - RNA, 19 nt, Homo sapiens
  misc_RNA (1)...(19): siRNA sense strand
gaacagguaccagcaacua

SEQ ID NO: 2202261 - RNA, 19 nt, Homo sapiens
  misc_RNA (1)...(19): siRNA sense strand
caaguuccaucccaccuuu

SEQ ID NO: 2202262 - RNA, 19 nt, Homo sapiens
  misc_RNA (1)...(19): siRNA sense strand
gcaaaggcaauagcuauaa

SEQ ID NO: 2202263 - RNA, 19 nt, Homo sapiens
  misc_RNA (1)...(19): siRNA sense strand
cacaacaggcuuacaaaua

SEQ ID NO: 2202264 - RNA, 19 nt, Homo sapiens
  misc_RNA (1)...(19): siRNA sense strand
gaggacagauggccuaaag

SEQ ID NO: 2202265 - RNA, 19 nt, Homo sapiens
  misc_RNA (1)...(19): siRNA sense strand
gcacaaacagggucauaga

SEQ ID NO: 2202266 - RNA, 19 nt, Homo sapiens
  misc_RNA (1)...(19): siRNA sense strand
agaaguagaagcacuauuu

SEQ ID NO: 2202267 - RNA, 19 nt, Homo sapiens
  misc_RNA (1)...(19): siRNA sense strand
ggagaaagauaguauugac

SEQ ID NO: 2202268 - RNA, 19 nt, Homo sapiens
  misc_RNA (1)...(19): siRNA sense strand
ucugguaucuuugguaaua

SEQ ID NO: 2202269 - RNA, 19 nt, Homo sapiens
  misc_RNA (1)...(19): siRNA sense strand
ggaggaagccuuugugagu

SEQ ID NO: 2202270 - RNA, 19 nt, Homo sapiens
  misc_RNA (1)...(19): siRNA sense strand
gaagauggucguagauuca

SEQ ID NO: 2202271 - RNA, 19 nt, Homo sapiens
  misc_RNA (1)...(19): siRNA sense strand
cagaaggaaucaaagagaa

SEQ ID NO: 2202272 - RNA, 19 nt, Homo sapiens
  misc_RNA (1)...(19): siRNA sense strand
uaagagacaacgaugauuu

SEQ ID NO: 2202273 - RNA, 19 nt, Homo sapiens
  misc_RNA (1)...(19): siRNA sense strand
gugcuaagaucuuuaccuu

SEQ ID NO: 2202274 - RNA, 19 nt, Homo sapiens
  misc_RNA (1)...(19): siRNA sense strand
uggaugagauugccuuuga

SEQ ID NO: 2202275 - RNA, 19 nt, Homo sapiens
  misc_RNA (1)...(19): siRNA sense strand
gagcuccacuauaccauga

SEQ ID NO: 2202276 - RNA, 19 nt, Homo sapiens
  misc_RNA (1)...(19): siRNA sense strand
ugacuucucucagacagua

SEQ ID NO: 2202277 - RNA, 19 nt, Homo sapiens
  misc_RNA (1)...(19): siRNA sense strand
ggaagaaguagaagcacua

SEQ ID NO: 2202278 - RNA, 19 nt, Homo sapiens
  misc_RNA (1)...(19): siRNA sense strand
aagaaucacugcaagcaaa

SEQ ID NO: 2202279 - RNA, 19 nt, Homo sapiens
  misc_RNA (1)...(19): siRNA sense strand
aaaguaaggccaaaucaaa

SEQ ID NO: 2202280 - RNA, 19 nt, Homo sapiens
  misc_RNA (1)...(19): siRNA sense strand
gagaguccguuguccagaa

SEQ ID NO: 2202281 - RNA, 19 nt, Homo sapiens
  misc_RNA (1)...(19): siRNA sense strand
gaugaaugguccuauaucu

SEQ ID NO: 2202282 - RNA, 19 nt, Homo sapiens
  misc_RNA (1)...(19): siRNA sense strand
uaacuucacugcagaucga

SEQ ID NO: 2202283 - RNA, 19 nt, Homo sapiens
  misc_RNA (1)...(19): siRNA sense strand
gacuuuaaauggugaaaug

SEQ ID NO: 2202284 - RNA, 19 nt, Homo sapiens
  misc_RNA (1)...(19): siRNA sense strand
gaagaggaagagagacuuu

SEQ ID NO: 2202285 - RNA, 19 nt, Homo sapiens
  misc_RNA (1)...(19): siRNA sense strand
gcagaagcuugcacugaau

SEQ ID NO: 2202286 - RNA, 19 nt, Homo sapiens
  misc_RNA (1)...(19): siRNA sense strand
ccaagaagaggacagaauu

SEQ ID NO: 2202287 - RNA, 19 nt, Homo sapiens
  misc_RNA (1)...(19): siRNA sense strand
gaggggaccuggguuauua

SEQ ID NO: 2202288 - RNA, 19 nt, Homo sapiens
  misc_RNA (1)...(19): siRNA sense strand
gccaaagaauggauuuaga

SEQ ID NO: 2202289 - RNA, 19 nt, Homo sapiens
  misc_RNA (1)...(19): siRNA sense strand
ugaacccucuuuccucuuu

SEQ ID NO: 2202290 - RNA, 19 nt, Homo sapiens
  misc_RNA (1)...(19): siRNA sense strand
ccaauuaaggcacggauaa

SEQ ID NO: 2202291 - RNA, 19 nt, Homo sapiens
  misc_RNA (1)...(19): siRNA sense strand
uaaagaagaggaagagaga

SEQ ID NO: 2202292 - RNA, 19 nt, Homo sapiens
  misc_RNA (1)...(19): siRNA sense strand
ggugaaauaugugugaaga

SEQ ID NO: 2202293 - RNA, 19 nt, Homo sapiens
  misc_RNA (1)...(19): siRNA sense strand
aaacagagggugaaauaug

SEQ ID NO: 2202294 - RNA, 19 nt, Homo sapiens
  misc_RNA (1)...(19): siRNA sense strand
agacaacgaugauuucuac

SEQ ID NO: 2202295 - RNA, 19 nt, Homo sapiens
  misc_RNA (1)...(19): siRNA sense strand
guggccaucugcacuguua

SEQ ID NO: 2202296 - RNA, 19 nt, Homo sapiens
  misc_RNA (1)...(19): siRNA sense strand
gaaacccuguugguauuga

SEQ ID NO: 2202297 - RNA, 19 nt, Homo sapiens
  misc_RNA (1)...(19): siRNA sense strand
gaaguuucaugaacagaag

SEQ ID NO: 2202298 - RNA, 19 nt, Homo sapiens
  misc_RNA (1)...(19): siRNA sense strand
acaacaggcuuacaaauac

SEQ ID NO: 2202299 - RNA, 19 nt, Homo sapiens
  misc_RNA (1)...(19): siRNA sense strand
gcugaacccuaaugcagaa

SEQ ID NO: 2202300 - RNA, 19 nt, Homo sapiens
  misc_RNA (1)...(19): siRNA sense strand
ggaagagagacuuuauuug

SEQ ID NO: 2202301 - RNA, 19 nt, Homo sapiens
  misc_RNA (1)...(19): siRNA sense strand
gaaacaagcccaggugaca

SEQ ID NO: 2202302 - RNA, 19 nt, Homo sapiens
  misc_RNA (1)...(19): siRNA sense strand
ugaccuacucccugaauua

SEQ ID NO: 2202303 - RNA, 19 nt, Homo sapiens
  misc_RNA (1)...(19): siRNA sense strand
gauacaguuuacacaauug

SEQ ID NO: 2202304 - RNA, 19 nt, Homo sapiens
  misc_RNA (1)...(19): siRNA sense strand
gaaaugcuaaggugagguu

SEQ ID NO: 2202305 - RNA, 19 nt, Homo sapiens
  misc_RNA (1)...(19): siRNA sense strand
gagauugccuuugaucauc

SEQ ID NO: 2202306 - RNA, 19 nt, Homo sapiens
  misc_RNA (1)...(19): siRNA sense strand
gugaugagaguaagucuuu

SEQ ID NO: 2202307 - RNA, 19 nt, Homo sapiens
  misc_RNA (1)...(19): siRNA sense strand
aaagagaaguuucaugaac

SEQ ID NO: 2202308 - RNA, 19 nt, Homo sapiens
  misc_RNA (1)...(19): siRNA sense strand
ucaaaccacuucucagaca

SEQ ID NO: 2202309 - RNA, 19 nt, Homo sapiens
  misc_RNA (1)...(19): siRNA sense strand
gcacaccauuucaaagaag

SEQ ID NO: 2202310 - RNA, 19 nt, Homo sapiens
  misc_RNA (1)...(19): siRNA sense strand
guagagaauucuguuagug

SEQ ID NO: 2202311 - RNA, 19 nt, Homo sapiens
  misc_RNA (1)...(19): siRNA sense strand
caagcaaaguauagugaga

SEQ ID NO: 2202312 - RNA, 19 nt, Homo sapiens
  misc_RNA (1)...(19): siRNA sense strand
caaaacagagggugaaaua

SEQ ID NO: 2202313 - RNA, 19 nt, Homo sapiens
  misc_RNA (1)...(19): siRNA sense strand
gaauuuaucacaagcagau

SEQ ID NO: 2202314 - RNA, 19 nt, Homo sapiens
  misc_RNA (1)...(19): siRNA sense strand
gauggaaacccuguuggua

SEQ ID NO: 2202315 - RNA, 19 nt, Homo sapiens
  misc_RNA (1)...(19): siRNA sense strand
agacagaggacuuguuuga

SEQ ID NO: 2202316 - RNA, 19 nt, Homo sapiens
  misc_RNA (1)...(19): siRNA sense strand
cuagugacauguaucuuau

SEQ ID NO: 2202317 - RNA, 19 nt, Homo sapiens
  misc_RNA (1)...(19): siRNA sense strand
acagaagucagaaauagua

SEQ ID NO: 2202318 - RNA, 19 nt, Homo sapiens
  misc_RNA (1)...(19): siRNA sense strand
ugaaauaugugugaagagu

SEQ ID NO: 2202319 - RNA, 19 nt, Homo sapiens
  misc_RNA (1)...(19): siRNA sense strand
uggaaacccuguugguauu

SEQ ID NO: 2202320 - RNA, 19 nt, Homo sapiens
  misc_RNA (1)...(19): siRNA sense strand
guacugacacugcacauuc

SEQ ID NO: 2202321 - RNA, 19 nt, Homo sapiens
  misc_RNA (1)...(19): siRNA sense strand
gcacaacaggcuuacaaau

SEQ ID NO: 2202322 - RNA, 19 nt, Homo sapiens
  misc_RNA (1)...(19): siRNA sense strand
gacaagugaagaugacaua

SEQ ID NO: 2202323 - RNA, 19 nt, Homo sapiens
  misc_RNA (1)...(19): siRNA sense strand
gccuaucacugcaguaaga

SEQ ID NO: 2202324 - RNA, 19 nt, Homo sapiens
  misc_RNA (1)...(19): siRNA sense strand
gcaaacacaucuaggaaua

SEQ ID NO: 2202325 - RNA, 19 nt, Homo sapiens
  misc_RNA (1)...(19): siRNA sense strand
gaaggucgcuuacagcauu

SEQ ID NO: 2202326 - RNA, 19 nt, Homo sapiens
  misc_RNA (1)...(19): siRNA sense strand
gaaggaaucuuaugugcuu

SEQ ID NO: 2202327 - RNA, 19 nt, Homo sapiens
  misc_RNA (1)...(19): siRNA sense strand
ggagagaucccacaguuua

SEQ ID NO: 2202328 - RNA, 19 nt, Homo sapiens
  misc_RNA (1)...(19): siRNA sense strand
gcagauagguuucuugcuu

SEQ ID NO: 2202329 - RNA, 19 nt, Homo sapiens
  misc_RNA (1)...(19): siRNA sense strand
gaauggagcugccgugguu

SEQ ID NO: 2202330 - RNA, 19 nt, Homo sapiens
  misc_RNA (1)...(19): siRNA sense strand
gcgguuauuucacuauuua

SEQ ID NO: 2202331 - RNA, 19 nt, Homo sapiens
  misc_RNA (1)...(19): siRNA sense strand
aagaagaggucaaaguuaa

SEQ ID NO: 2202332 - RNA, 19 nt, Homo sapiens
  misc_RNA (1)...(19): siRNA sense strand
ucucaaagcuguuuaagga

SEQ ID NO: 2202333 - RNA, 19 nt, Homo sapiens
  misc_RNA (1)...(19): siRNA sense strand
ccauuaagcugcaguguga

SEQ ID NO: 2202334 - RNA, 19 nt, Homo sapiens
  misc_RNA (1)...(19): siRNA sense strand
ggccaaagcugcugugguu

SEQ ID NO: 2202335 - RNA, 19 nt, Homo sapiens
  misc_RNA (1)...(19): siRNA sense strand
ggacugcgcugcugacaca

SEQ ID NO: 2202336 - RNA, 19 nt, Homo sapiens
  misc_RNA (1)...(19): siRNA sense strand
caagagagcugagaagauc

SEQ ID NO: 2202337 - RNA, 19 nt, Homo sapiens
  misc_RNA (1)...(19): siRNA sense strand
gcugauggcugccgccuuu

SEQ ID NO: 2202338 - RNA, 19 nt, Homo sapiens
  misc_RNA (1)...(19): siRNA sense strand
caagauggauggccucaug

SEQ ID NO: 2202339 - RNA, 19 nt, Homo sapiens
  misc_RNA (1)...(19): siRNA sense strand
cgaugacuuugaagaauua

SEQ ID NO: 2202340 - RNA, 19 nt, Homo sapiens
  misc_RNA (1)...(19): siRNA sense strand
gauggaaucgggaaagaua

SEQ ID NO: 2202341 - RNA, 19 nt, Homo sapiens
  misc_RNA (1)...(19): siRNA sense strand
gaugcuagcuggcguaaag

SEQ ID NO: 2202342 - RNA, 19 nt, Homo sapiens
  misc_RNA (1)...(19): siRNA sense strand
uaacgacacugcguauauu

SEQ ID NO: 2202343 - RNA, 19 nt, Homo sapiens
  misc_RNA (1)...(19): siRNA sense strand
gcacaacgccgacgacauc

SEQ ID NO: 2202344 - RNA, 19 nt, Homo sapiens
  misc_RNA (1)...(19): siRNA sense strand
gcucacagaugcaaaugga

SEQ ID NO: 2202345 - RNA, 19 nt, Homo sapiens
  misc_RNA (1)...(19): siRNA sense strand
guguuuaccuggacaaauu

SEQ ID NO: 2202346 - RNA, 19 nt, Homo sapiens
  misc_RNA (1)...(19): siRNA sense strand
gagaauucuuugucgauga

SEQ ID NO: 2202347 - RNA, 19 nt, Homo sapiens
  misc_RNA (1)...(19): siRNA sense strand
gcccagaucugcaaaccuu

SEQ ID NO: 2202348 - RNA, 19 nt, Homo sapiens
  misc_RNA (1)...(19): siRNA sense strand
gaaguaugaaggucgcuua

SEQ ID NO: 2202349 - RNA, 19 nt, Homo sapiens
  misc_RNA (1)...(19): siRNA sense strand
gaaggagucagcaucauug

SEQ ID NO: 2202350 - RNA, 19 nt, Homo sapiens
  misc_RNA (1)...(19): siRNA sense strand
gaagaggucaaaguuaauu

SEQ ID NO: 2202351 - RNA, 19 nt, Homo sapiens
  misc_RNA (1)...(19): siRNA sense strand
ccucugagcuggaaaccaa

SEQ ID NO: 2202352 - RNA, 19 nt, Homo sapiens
  misc_RNA (1)...(19): siRNA sense strand
cucaaugucuuccaaagua

SEQ ID NO: 2202353 - RNA, 19 nt, Homo sapiens
  misc_RNA (1)...(19): siRNA sense strand
cuuggaagcuguggaguua

SEQ ID NO: 2202354 - RNA, 19 nt, Homo sapiens
  misc_RNA (1)...(19): siRNA sense strand
ccacauagagcaaacauca

SEQ ID NO: 2202355 - RNA, 19 nt, Homo sapiens
  misc_RNA (1)...(19): siRNA sense strand
ggaaggagucagcaucauu

SEQ ID NO: 2202356 - RNA, 19 nt, Homo sapiens
  misc_RNA (1)...(19): siRNA sense strand
cacggaagcugaaaccauu

SEQ ID NO: 2202357 - RNA, 19 nt, Homo sapiens
  misc_RNA (1)...(19): siRNA sense strand
aaagaagaggucaaaguua

SEQ ID NO: 2202358 - RNA, 19 nt, Homo sapiens
  misc_RNA (1)...(19): siRNA sense strand
gaaacgaccaccuuuacga

SEQ ID NO: 2202359 - RNA, 19 nt, Homo sapiens
  misc_RNA (1)...(19): siRNA sense strand
agaaggcugugcuguguuu

SEQ ID NO: 2202360 - RNA, 19 nt, Homo sapiens
  misc_RNA (1)...(19): siRNA sense strand
gggugaaccuggcgauuug

SEQ ID NO: 2202361 - RNA, 19 nt, Homo sapiens
  misc_RNA (1)...(19): siRNA sense strand
ggcaagcuguggacaagaa

SEQ ID NO: 2202362 - RNA, 19 nt, Homo sapiens
  misc_RNA (1)...(19): siRNA sense strand
gaggucaucuguccuugug

SEQ ID NO: 2202363 - RNA, 19 nt, Homo sapiens
  misc_RNA (1)...(19): siRNA sense strand
caaagaggcagcacuggaa

SEQ ID NO: 2202364 - RNA, 19 nt, Homo sapiens
  misc_RNA (1)...(19): siRNA sense strand
cuacugcugucuucauuug

SEQ ID NO: 2202365 - RNA, 19 nt, Homo sapiens
  misc_RNA (1)...(19): siRNA sense strand
gcaggcgauugacaguaua

SEQ ID NO: 2202366 - RNA, 19 nt, Homo sapiens
  misc_RNA (1)...(19): siRNA sense strand
cucaugauguguuucuuua

SEQ ID NO: 2202367 - RNA, 19 nt, Homo sapiens
  misc_RNA (1)...(19): siRNA sense strand
ucagaucacuucaacucaa

SEQ ID NO: 2202368 - RNA, 19 nt, Homo sapiens
  misc_RNA (1)...(19): siRNA sense strand
uuacagcauucuacacaaa

SEQ ID NO: 2202369 - RNA, 19 nt, Homo sapiens
  misc_RNA (1)...(19): siRNA sense strand
gcagggagccagcagauag

SEQ ID NO: 2202370 - RNA, 19 nt, Homo sapiens
  misc_RNA (1)...(19): siRNA sense strand
gggcuccgaucagugaaua

SEQ ID NO: 2202371 - RNA, 19 nt, Homo sapiens
  misc_RNA (1)...(19): siRNA sense strand
ucaaugucuuccaaaguaa

SEQ ID NO: 2202372 - RNA, 19 nt, Homo sapiens
  misc_RNA (1)...(19): siRNA sense strand
ccaucugccuggacccuua

SEQ ID NO: 2202373 - RNA, 19 nt, Homo sapiens
  misc_RNA (1)...(19): siRNA sense strand
gccaucauguguucaguga

SEQ ID NO: 2202374 - RNA, 19 nt, Homo sapiens
  misc_RNA (1)...(19): siRNA sense strand
ggagagauuuggguucaca

SEQ ID NO: 2202375 - RNA, 19 nt, Homo sapiens
  misc_RNA (1)...(19): siRNA sense strand
ggagccagcagauagguuu

SEQ ID NO: 2202376 - RNA, 19 nt, Homo sapiens
  misc_RNA (1)...(19): siRNA sense strand
cacuucaacucaagacuaa

SEQ ID NO: 2202377 - RNA, 19 nt, Homo sapiens
  misc_RNA (1)...(19): siRNA sense strand
ggaagaggcuuuaaaacca

SEQ ID NO: 2202378 - RNA, 19 nt, Homo sapiens
  misc_RNA (1)...(19): siRNA sense strand
ugggucagaucgaagauaa

SEQ ID NO: 2202379 - RNA, 19 nt, Homo sapiens
  misc_RNA (1)...(19): siRNA sense strand
gacagaagcagccagaaau

SEQ ID NO: 2202380 - RNA, 19 nt, Homo sapiens
  misc_RNA (1)...(19): siRNA sense strand
cgacagaagcagccagaaa

SEQ ID NO: 2202381 - RNA, 19 nt, Homo sapiens
  misc_RNA (1)...(19): siRNA sense strand
gcgaaccccuggucuauuu

SEQ ID NO: 2202382 - RNA, 19 nt, Homo sapiens
  misc_RNA (1)...(19): siRNA sense strand
caaauuuguuggugguugu

SEQ ID NO: 2202383 - RNA, 19 nt, Homo sapiens
  misc_RNA (1)...(19): siRNA sense strand
ggacagcaaacacaucuag

SEQ ID NO: 2202384 - RNA, 19 nt, Homo sapiens
  misc_RNA (1)...(19): siRNA sense strand
ucacacagucguucucaaa

SEQ ID NO: 2202385 - RNA, 19 nt, Homo sapiens
  misc_RNA (1)...(19): siRNA sense strand
gcaaacagagucccucaag

SEQ ID NO: 2202386 - RNA, 19 nt, Homo sapiens
  misc_RNA (1)...(19): siRNA sense strand
ccacggaagaggacaguuu

SEQ ID NO: 2202387 - RNA, 19 nt, Homo sapiens
  misc_RNA (1)...(19): siRNA sense strand
ucgaugacuuugaagaauu

SEQ ID NO: 2202388 - RNA, 19 nt, Homo sapiens
  misc_RNA (1)...(19): siRNA sense strand
gggauccauuuaucagaaa

SEQ ID NO: 2202389 - RNA, 19 nt, Homo sapiens
  misc_RNA (1)...(19): siRNA sense strand
ugugugaaaucgagggaua

SEQ ID NO: 2202390 - RNA, 19 nt, Homo sapiens
  misc_RNA (1)...(19): siRNA sense strand
gagagaucccacaguuuaa

SEQ ID NO: 2202391 - RNA, 19 nt, Homo sapiens
  misc_RNA (1)...(19): siRNA sense strand
caugauguguuucuuuaca

SEQ ID NO: 2202392 - RNA, 19 nt, Homo sapiens
  misc_RNA (1)...(19): siRNA sense strand
gcggagaacugagcucaca

SEQ ID NO: 2202393 - RNA, 19 nt, Homo sapiens
  misc_RNA (1)...(19): siRNA sense strand
ggacaugagagcccugaga

SEQ ID NO: 2202394 - RNA, 19 nt, Homo sapiens
  misc_RNA (1)...(19): siRNA sense strand
caguauacaucaaguugga

SEQ ID NO: 2202395 - RNA, 19 nt, Homo sapiens
  misc_RNA (1)...(19): siRNA sense strand
guagaacccaugaaguuug

SEQ ID NO: 2202396 - RNA, 19 nt, Homo sapiens
  misc_RNA (1)...(19): siRNA sense strand
cauuaaagaugccaauaac

SEQ ID NO: 2202397 - RNA, 19 nt, Homo sapiens
  misc_RNA (1)...(19): siRNA sense strand
ggacaagaaguaugaaggu

SEQ ID NO: 2202398 - RNA, 19 nt, Homo sapiens
  misc_RNA (1)...(19): siRNA sense strand
ggagugaugcugugcuaga

SEQ ID NO: 2202399 - RNA, 19 nt, Homo sapiens
  misc_RNA (1)...(19): siRNA sense strand
gcaaacacccuccccaaaa

SEQ ID NO: 2202400 - RNA, 19 nt, Homo sapiens
  misc_RNA (1)...(19): siRNA sense strand
gacaguauacaucaaguug

SEQ ID NO: 2202401 - RNA, 19 nt, Homo sapiens
  misc_RNA (1)...(19): siRNA sense strand
gaaggucugccaguacaaa

SEQ ID NO: 2202402 - RNA, 19 nt, Homo sapiens
  misc_RNA (1)...(19): siRNA sense strand
cagaaaaucucaugaugug

SEQ ID NO: 2202403 - RNA, 19 nt, Homo sapiens
  misc_RNA (1)...(19): siRNA sense strand
gagugaugcugugcuagaa

SEQ ID NO: 2202404 - RNA, 19 nt, Homo sapiens
  misc_RNA (1)...(19): siRNA sense strand
cagacacucuugcauaucu

SEQ ID NO: 2202405 - RNA, 19 nt, Homo sapiens
  misc_RNA (1)...(19): siRNA sense strand
gaagcugaaaccauuguga

SEQ ID NO: 2202406 - RNA, 19 nt, Homo sapiens
  misc_RNA (1)...(19): siRNA sense strand
cagcauucuacacaaauua

SEQ ID NO: 2202407 - RNA, 19 nt, Homo sapiens
  misc_RNA (1)...(19): siRNA sense strand
gaaggagcgccgaggagaa

SEQ ID NO: 2202408 - RNA, 19 nt, Homo sapiens
  misc_RNA (1)...(19): siRNA sense strand
guaugaaggucgcuuacag

SEQ ID NO: 2202409 - RNA, 19 nt, Homo sapiens
  misc_RNA (1)...(19): siRNA sense strand
cugcguauauugaguacaa

SEQ ID NO: 2202410 - RNA, 19 nt, Homo sapiens
  misc_RNA (1)...(19): siRNA sense strand
agagaaggcugugcugugu

SEQ ID NO: 2202411 - RNA, 19 nt, Homo sapiens
  misc_RNA (1)...(19): siRNA sense strand
caaaguccgagacacguuu

SEQ ID NO: 2202412 - RNA, 19 nt, Homo sapiens
  misc_RNA (1)...(19): siRNA sense strand
uaacaaggcauuuccaaaa

SEQ ID NO: 2202413 - RNA, 19 nt, Homo sapiens
  misc_RNA (1)...(19): siRNA sense strand
ggaaccggccucuguuuua

SEQ ID NO: 2202414 - RNA, 19 nt, Homo sapiens
  misc_RNA (1)...(19): siRNA sense strand
acgaaucccuccagucaga

SEQ ID NO: 2202415 - RNA, 19 nt, Homo sapiens
  misc_RNA (1)...(19): siRNA sense strand
cccagacacucuugcauau

SEQ ID NO: 2202416 - RNA, 19 nt, Homo sapiens
  misc_RNA (1)...(19): siRNA sense strand
ugucacggaugcugaguug

SEQ ID NO: 2202417 - RNA, 19 nt, Homo sapiens
  misc_RNA (1)...(19): siRNA sense strand
gagaagcgcgugucgucuu

SEQ ID NO: 2202418 - RNA, 19 nt, Homo sapiens
  misc_RNA (1)...(19): siRNA sense strand
ucacagagucuaaacaucu

SEQ ID NO: 2202419 - RNA, 19 nt, Homo sapiens
  misc_RNA (1)...(19): siRNA sense strand
gaaaaucucaugauguguu

SEQ ID NO: 2202420 - RNA, 19 nt, Homo sapiens
  misc_RNA (1)...(19): siRNA sense strand
ggagaacugagcucacaga

SEQ ID NO: 2202421 - RNA, 19 nt, Homo sapiens
  misc_RNA (1)...(19): siRNA sense strand
ggaugggucggaacaagaa

SEQ ID NO: 2202422 - RNA, 19 nt, Homo sapiens
  misc_RNA (1)...(19): siRNA sense strand
gaaaagaagaggucaaagu

SEQ ID NO: 2202423 - RNA, 19 nt, Homo sapiens
  misc_RNA (1)...(19): siRNA sense strand
gugaugcugugcuagaaau

SEQ ID NO: 2202424 - RNA, 19 nt, Homo sapiens
  misc_RNA (1)...(19): siRNA sense strand
gagcugacaucaauucuaa

SEQ ID NO: 2202425 - RNA, 19 nt, Homo sapiens
  misc_RNA (1)...(19): siRNA sense strand
aaagauggcuggaacaguu

SEQ ID NO: 2202426 - RNA, 19 nt, Homo sapiens
  misc_RNA (1)...(19): siRNA sense strand
ggacauacaaguacaauuc

SEQ ID NO: 2202427 - RNA, 19 nt, Homo sapiens
  misc_RNA (1)...(19): siRNA sense strand
ggacgaagccauccgauuc

SEQ ID NO: 2202428 - RNA, 19 nt, Homo sapiens
  misc_RNA (1)...(19): siRNA sense strand
gaaggauucugaagacauc

SEQ ID NO: 2202429 - RNA, 19 nt, Homo sapiens
  misc_RNA (1)...(19): siRNA sense strand
ccaauccacuccugaagaa

SEQ ID NO: 2202430 - RNA, 19 nt, Homo sapiens
  misc_RNA (1)...(19): siRNA sense strand
gaaccagacuacagagaca

SEQ ID NO: 2202431 - RNA, 19 nt, Homo sapiens
  misc_RNA (1)...(19): siRNA sense strand
cgacuggacuccucugaug

SEQ ID NO: 2202432 - RNA, 19 nt, Homo sapiens
  misc_RNA (1)...(19): siRNA sense strand
ucacagcacuucauuaugc

SEQ ID NO: 2202433 - RNA, 19 nt, Homo sapiens
  misc_RNA (1)...(19): siRNA sense strand
gcagucaaggugcuucuua

SEQ ID NO: 2202434 - RNA, 19 nt, Homo sapiens
  misc_RNA (1)...(19): siRNA sense strand
ggaaggacauacaaguaca

SEQ ID NO: 2202435 - RNA, 19 nt, Homo sapiens
  misc_RNA (1)...(19): siRNA sense strand
cuuaagaggugccaauaug

SEQ ID NO: 2202436 - RNA, 19 nt, Homo sapiens
  misc_RNA (1)...(19): siRNA sense strand
gaacuuggcgucgauguag

SEQ ID NO: 2202437 - RNA, 19 nt, Homo sapiens
  misc_RNA (1)...(19): siRNA sense strand
ucaaggugcuucuuaagag

SEQ ID NO: 2202438 - RNA, 19 nt, Homo sapiens
  misc_RNA (1)...(19): siRNA sense strand
caaguacaauucagacucu

SEQ ID NO: 2202439 - RNA, 19 nt, Homo sapiens
  misc_RNA (1)...(19): siRNA sense strand
cagucaaggugcuucuuaa

SEQ ID NO: 2202440 - RNA, 19 nt, Homo sapiens
  misc_RNA (1)...(19): siRNA sense strand
gcacuucauuaugcagcua

SEQ ID NO: 2202441 - RNA, 19 nt, Homo sapiens
  misc_RNA (1)...(19): siRNA sense strand
cuugggagcugacaucaau

SEQ ID NO: 2202442 - RNA, 19 nt, Homo sapiens
  misc_RNA (1)...(19): siRNA sense strand
uaagaggugccaauaugaa

SEQ ID NO: 2202443 - RNA, 19 nt, Homo sapiens
  misc_RNA (1)...(19): siRNA sense strand
gaacauggggcuugccuuu

SEQ ID NO: 2202444 - RNA, 19 nt, Homo sapiens
  misc_RNA (1)...(19): siRNA sense strand
ccucacagcacuucauuau

SEQ ID NO: 2202445 - RNA, 19 nt, Homo sapiens
  misc_RNA (1)...(19): siRNA sense strand
ggagcugacaucaauucua

SEQ ID NO: 2202446 - RNA, 19 nt, Homo sapiens
  misc_RNA (1)...(19): siRNA sense strand
ccacauugccagucgagaa

SEQ ID NO: 2202447 - RNA, 19 nt, Homo sapiens
  misc_RNA (1)...(19): siRNA sense strand
gaaggacauacaaguacaa

SEQ ID NO: 2202448 - RNA, 19 nt, Homo sapiens
  misc_RNA (1)...(19): siRNA sense strand
gguggaacauggcgccaau

SEQ ID NO: 2202449 - RNA, 19 nt, Homo sapiens
  misc_RNA (1)...(19): siRNA sense strand
gaagacagagagcaaaauu

SEQ ID NO: 2202450 - RNA, 19 nt, Homo sapiens
  misc_RNA (1)...(19): siRNA sense strand
cgagaaggcgacccucuga

SEQ ID NO: 2202451 - RNA, 19 nt, Homo sapiens
  misc_RNA (1)...(19): siRNA sense strand
gcggucgacugccugaaga

SEQ ID NO: 2202452 - RNA, 19 nt, Homo sapiens
  misc_RNA (1)...(19): siRNA sense strand
cuaggcugcuccucgauga

SEQ ID NO: 2202453 - RNA, 19 nt, Homo sapiens
  misc_RNA (1)...(19): siRNA sense strand
gcuaaggaaggacauacaa

SEQ ID NO: 2202454 - RNA, 19 nt, Homo sapiens
  misc_RNA (1)...(19): siRNA sense strand
gggacgugcuggccuaucu

SEQ ID NO: 2202455 - RNA, 19 nt, Homo sapiens
  misc_RNA (1)...(19): siRNA sense strand
aaggaaggacauacaagua

SEQ ID NO: 2202456 - RNA, 19 nt, Homo sapiens
  misc_RNA (1)...(19): siRNA sense strand
uaaggaaggacauacaagu

SEQ ID NO: 2202457 - RNA, 19 nt, Homo sapiens
  misc_RNA (1)...(19): siRNA sense strand
caauucagacucucuuauc

SEQ ID NO: 2202458 - RNA, 19 nt, Homo sapiens
  misc_RNA (1)...(19): siRNA sense strand
ggccauagcgcaaugacau

SEQ ID NO: 2202459 - RNA, 19 nt, Homo sapiens
  misc_RNA (1)...(19): siRNA sense strand
gcucagcagcucccaagga

SEQ ID NO: 2202460 - RNA, 19 nt, Homo sapiens
  misc_RNA (1)...(19): siRNA sense strand
ggacugaaggauucugaag

SEQ ID NO: 2202461 - RNA, 19 nt, Homo sapiens
  misc_RNA (1)...(19): siRNA sense strand
gucaaggugcuucuuaaga

SEQ ID NO: 2202462 - RNA, 19 nt, Homo sapiens
  misc_RNA (1)...(19): siRNA sense strand
ccauagcgcaaugacauaa

SEQ ID NO: 2202463 - RNA, 19 nt, Homo sapiens
  misc_RNA (1)...(19): siRNA sense strand
gccauagcgcaaugacaua

SEQ ID NO: 2202464 - RNA, 19 nt, Homo sapiens
  misc_RNA (1)...(19): siRNA sense strand
guacaauucagacucucuu

SEQ ID NO: 2202465 - RNA, 19 nt, Homo sapiens
  misc_RNA (1)...(19): siRNA sense strand
gacauacaaguacaauuca

SEQ ID NO: 2202466 - RNA, 19 nt, Homo sapiens
  misc_RNA (1)...(19): siRNA sense strand
uuaagaggugccaauauga

SEQ ID NO: 2202467 - RNA, 19 nt, Homo sapiens
  misc_RNA (1)...(19): siRNA sense strand
gccaauaugaaccagacua

SEQ ID NO: 2202468 - RNA, 19 nt, Homo sapiens
  misc_RNA (1)...(19): siRNA sense strand
gccaauccacuccugaaga

SEQ ID NO: 2202469 - RNA, 19 nt, Homo sapiens
  misc_RNA (1)...(19): siRNA sense strand
uggcgucgauguagaugug

SEQ ID NO: 2202470 - RNA, 19 nt, Homo sapiens
  misc_RNA (1)...(19): siRNA sense strand
gcagcuaaggaaggacaua

SEQ ID NO: 2202471 - RNA, 19 nt, Homo sapiens
  misc_RNA (1)...(19): siRNA sense strand
cauacaaguacaauucaga

SEQ ID NO: 2202472 - RNA, 19 nt, Homo sapiens
  misc_RNA (1)...(19): siRNA sense strand
gacugaaggauucugaaga

SEQ ID NO: 2202473 - RNA, 19 nt, Homo sapiens
  misc_RNA (1)...(19): siRNA sense strand
gcugacaucaauucuaaag

SEQ ID NO: 2202474 - RNA, 19 nt, Homo sapiens
  misc_RNA (1)...(19): siRNA sense strand
ugaacuuggcgucgaugua

SEQ ID NO: 2202475 - RNA, 19 nt, Homo sapiens
  misc_RNA (1)...(19): siRNA sense strand
ccaccaaccgagacuacaa

SEQ ID NO: 2202476 - RNA, 19 nt, Homo sapiens
  misc_RNA (1)...(19): siRNA sense strand
augauggccugcacaagga

SEQ ID NO: 2202477 - RNA, 19 nt, Homo sapiens
  misc_RNA (1)...(19): siRNA sense strand
gcgccaauccacuccugaa

SEQ ID NO: 2202478 - RNA, 19 nt, Homo sapiens
  misc_RNA (1)...(19): siRNA sense strand
cgaagccauccgauucuug

SEQ ID NO: 2202479 - RNA, 19 nt, Homo sapiens
  misc_RNA (1)...(19): siRNA sense strand
acagagagcaaaauuagaa

SEQ ID NO: 2202480 - RNA, 19 nt, Homo sapiens
  misc_RNA (1)...(19): siRNA sense strand
uacaauucagacucucuua

SEQ ID NO: 2202481 - RNA, 19 nt, Homo sapiens
  misc_RNA (1)...(19): siRNA sense strand
uuaugcagcuaaggaagga

SEQ ID NO: 2202482 - RNA, 19 nt, Homo sapiens
  misc_RNA (1)...(19): siRNA sense strand
ugaaggauucugaagacau

SEQ ID NO: 2202483 - RNA, 19 nt, Homo sapiens
  misc_RNA (1)...(19): siRNA sense strand
gacuggacuccucugauga

SEQ ID NO: 2202484 - RNA, 19 nt, Homo sapiens
  misc_RNA (1)...(19): siRNA sense strand
acugaaggauucugaagac

SEQ ID NO: 2202485 - RNA, 19 nt, Homo sapiens
  misc_RNA (1)...(19): siRNA sense strand
uucagacucucuuauccuu

SEQ ID NO: 2202486 - RNA, 19 nt, Homo sapiens
  misc_RNA (1)...(19): siRNA sense strand
acaauucagacucucuuau

SEQ ID NO: 2202487 - RNA, 19 nt, Homo sapiens
  misc_RNA (1)...(19): siRNA sense strand
agaaggcgacccucugauc

SEQ ID NO: 2202488 - RNA, 19 nt, Homo sapiens
  misc_RNA (1)...(19): siRNA sense strand
gagaacugcuccauucaua

SEQ ID NO: 2202489 - RNA, 19 nt, Homo sapiens
  misc_RNA (1)...(19): siRNA sense strand
caaagaacaugaaacuuga

SEQ ID NO: 2202490 - RNA, 19 nt, Homo sapiens
  misc_RNA (1)...(19): siRNA sense strand
uaauagaacuucaggauuc

SEQ ID NO: 2202491 - RNA, 19 nt, Homo sapiens
  misc_RNA (1)...(19): siRNA sense strand
gaaaauaccucaugaccuu

SEQ ID NO: 2202492 - RNA, 19 nt, Homo sapiens
  misc_RNA (1)...(19): siRNA sense strand
ucagaaaucuauccuuuga

SEQ ID NO: 2202493 - RNA, 19 nt, Homo sapiens
  misc_RNA (1)...(19): siRNA sense strand
gagaauaaauacagaaugg

SEQ ID NO: 2202494 - RNA, 19 nt, Homo sapiens
  misc_RNA (1)...(19): siRNA sense strand
gaagauggccucugaaugg

SEQ ID NO: 2202495 - RNA, 19 nt, Homo sapiens
  misc_RNA (1)...(19): siRNA sense strand
ccagagaacugcuccauuc

SEQ ID NO: 2202496 - RNA, 19 nt, Homo sapiens
  misc_RNA (1)...(19): siRNA sense strand
ggaugaagcuugagacagu

SEQ ID NO: 2202497 - RNA, 19 nt, Homo sapiens
  misc_RNA (1)...(19): siRNA sense strand
ggaaggguauuaagagaau

SEQ ID NO: 2202498 - RNA, 19 nt, Homo sapiens
  misc_RNA (1)...(19): siRNA sense strand
caaauuuccucuuccaaug

SEQ ID NO: 2202499 - RNA, 19 nt, Homo sapiens
  misc_RNA (1)...(19): siRNA sense strand
ggacccaccuucagaaauc

SEQ ID NO: 2202500 - RNA, 19 nt, Homo sapiens
  misc_RNA (1)...(19): siRNA sense strand
cuagagugcuguccaaauu

SEQ ID NO: 2202501 - RNA, 19 nt, Homo sapiens
  misc_RNA (1)...(19): siRNA sense strand
ggaaguggcuaauaagaac

SEQ ID NO: 2202502 - RNA, 19 nt, Homo sapiens
  misc_RNA (1)...(19): siRNA sense strand
ggaggaaacuggcuuuaac

SEQ ID NO: 2202503 - RNA, 19 nt, Homo sapiens
  misc_RNA (1)...(19): siRNA sense strand
ggacagaggacacgaaaca

SEQ ID NO: 2202504 - RNA, 19 nt, Homo sapiens
  misc_RNA (1)...(19): siRNA sense strand
caauggaaguguuuaagga

SEQ ID NO: 2202505 - RNA, 19 nt, Homo sapiens
  misc_RNA (1)...(19): siRNA sense strand
ggugugaagccaauucuua

SEQ ID NO: 2202506 - RNA, 19 nt, Homo sapiens
  misc_RNA (1)...(19): siRNA sense strand
ccaguacaguggugccuua

SEQ ID NO: 2202507 - RNA, 19 nt, Homo sapiens
  misc_RNA (1)...(19): siRNA sense strand
cuucagaaaucuauccuuu

SEQ ID NO: 2202508 - RNA, 19 nt, Homo sapiens
  misc_RNA (1)...(19): siRNA sense strand
ggaaauggagaccuugauu

SEQ ID NO: 2202509 - RNA, 19 nt, Homo sapiens
  misc_RNA (1)...(19): siRNA sense strand
acaaagaacaugaaacuug

SEQ ID NO: 2202510 - RNA, 19 nt, Homo sapiens
  misc_RNA (1)...(19): siRNA sense strand
uuucaguacuggauaguua

SEQ ID NO: 2202511 - RNA, 19 nt, Homo sapiens
  misc_RNA (1)...(19): siRNA sense strand
cauuacaguugguuccuua

SEQ ID NO: 2202512 - RNA, 19 nt, Homo sapiens
  misc_RNA (1)...(19): siRNA sense strand
uacaguugguuccuuaaua

SEQ ID NO: 2202513 - RNA, 19 nt, Homo sapiens
  misc_RNA (1)...(19): siRNA sense strand
uauugaugcugccaaauuu

SEQ ID NO: 2202514 - RNA, 19 nt, Homo sapiens
  misc_RNA (1)...(19): siRNA sense strand
gcaaaugcgugcugguucu

SEQ ID NO: 2202515 - RNA, 19 nt, Homo sapiens
  misc_RNA (1)...(19): siRNA sense strand
caaguaaacugucaaugcu

SEQ ID NO: 2202516 - RNA, 19 nt, Homo sapiens
  misc_RNA (1)...(19): siRNA sense strand
ccuaagaccugaaccaagu

SEQ ID NO: 2202517 - RNA, 19 nt, Homo sapiens
  misc_RNA (1)...(19): siRNA sense strand
ucaaagagaaguacacaga

SEQ ID NO: 2202518 - RNA, 19 nt, Homo sapiens
  misc_RNA (1)...(19): siRNA sense strand
gauggccucugaauggaaa

SEQ ID NO: 2202519 - RNA, 19 nt, Homo sapiens
  misc_RNA (1)...(19): siRNA sense strand
gaaauggagaccuugauuc

SEQ ID NO: 2202520 - RNA, 19 nt, Homo sapiens
  misc_RNA (1)...(19): siRNA sense strand
ggaaagagaaagaagaucu

SEQ ID NO: 2202521 - RNA, 19 nt, Homo sapiens
  misc_RNA (1)...(19): siRNA sense strand
aauuggaaguggcuaauaa

SEQ ID NO: 2202522 - RNA, 19 nt, Homo sapiens
  misc_RNA (1)...(19): siRNA sense strand
ggucauuguugauguggaa

SEQ ID NO: 2202523 - RNA, 19 nt, Homo sapiens
  misc_RNA (1)...(19): siRNA sense strand
cuauagaccucauuacagu

SEQ ID NO: 2202524 - RNA, 19 nt, Homo sapiens
  misc_RNA (1)...(19): siRNA sense strand
gaauggacccaccuucaga

SEQ ID NO: 2202525 - RNA, 19 nt, Homo sapiens
  misc_RNA (1)...(19): siRNA sense strand
gaagccaauucuuauccuu

SEQ ID NO: 2202526 - RNA, 19 nt, Homo sapiens
  misc_RNA (1)...(19): siRNA sense strand
guacaguggugccuuaaaa

SEQ ID NO: 2202527 - RNA, 19 nt, Homo sapiens
  misc_RNA (1)...(19): siRNA sense strand
gacuauugaugaccuaaga

SEQ ID NO: 2202528 - RNA, 19 nt, Homo sapiens
  misc_RNA (1)...(19): siRNA sense strand
gcacacagaacaacaaggu

SEQ ID NO: 2202529 - RNA, 19 nt, Homo sapiens
  misc_RNA (1)...(19): siRNA sense strand
aauuacagcugguagaaga

SEQ ID NO: 2202530 - RNA, 19 nt, Homo sapiens
  misc_RNA (1)...(19): siRNA sense strand
uuaaggaucacgcagauuu

SEQ ID NO: 2202531 - RNA, 19 nt, Homo sapiens
  misc_RNA (1)...(19): siRNA sense strand
agaaaucuauccuuugaag

SEQ ID NO: 2202532 - RNA, 19 nt, Homo sapiens
  misc_RNA (1)...(19): siRNA sense strand
uuacagacuucgaccaguu

SEQ ID NO: 2202533 - RNA, 19 nt, Homo sapiens
  misc_RNA (1)...(19): siRNA sense strand
uuacuuggauuacagacuu

SEQ ID NO: 2202534 - RNA, 19 nt, Homo sapiens
  misc_RNA (1)...(19): siRNA sense strand
gcaaccagagaaacaauug

SEQ ID NO: 2202535 - RNA, 19 nt, Homo sapiens
  misc_RNA (1)...(19): siRNA sense strand
ucacuccucccaaagguua

SEQ ID NO: 2202536 - RNA, 19 nt, Homo sapiens
  misc_RNA (1)...(19): siRNA sense strand
ggugucaagagaauaaaua

SEQ ID NO: 2202537 - RNA, 19 nt, Homo sapiens
  misc_RNA (1)...(19): siRNA sense strand
uaauggaaauggagaccuu

SEQ ID NO: 2202538 - RNA, 19 nt, Homo sapiens
  misc_RNA (1)...(19): siRNA sense strand
guccugugcugauaucuga

SEQ ID NO: 2202539 - RNA, 19 nt, Homo sapiens
  misc_RNA (1)...(19): siRNA sense strand
auggagaccuugauucuga

SEQ ID NO: 2202540 - RNA, 19 nt, Homo sapiens
  misc_RNA (1)...(19): siRNA sense strand
ccucaugaccuuuguuuau

SEQ ID NO: 2202541 - RNA, 19 nt, Homo sapiens
  misc_RNA (1)...(19): siRNA sense strand
gaacaugaaacuugaagcu

SEQ ID NO: 2202542 - RNA, 19 nt, Homo sapiens
  misc_RNA (1)...(19): siRNA sense strand
auacgugacuugacugguu

SEQ ID NO: 2202543 - RNA, 19 nt, Homo sapiens
  misc_RNA (1)...(19): siRNA sense strand
gaagagacaggagcaagug

SEQ ID NO: 2202544 - RNA, 19 nt, Homo sapiens
  misc_RNA (1)...(19): siRNA sense strand
gagagcacuuugucagcuu

SEQ ID NO: 2202545 - RNA, 19 nt, Homo sapiens
  misc_RNA (1)...(19): siRNA sense strand
gcugaaggccaaauacaga

SEQ ID NO: 2202546 - RNA, 19 nt, Homo sapiens
  misc_RNA (1)...(19): siRNA sense strand
guccucagcucuucaucaa

SEQ ID NO: 2202547 - RNA, 19 nt, Homo sapiens
  misc_RNA (1)...(19): siRNA sense strand
guacacagacuggacagaa

SEQ ID NO: 2202548 - RNA, 19 nt, Homo sapiens
  misc_RNA (1)...(19): siRNA sense strand
acaguugguuccuuaauag

SEQ ID NO: 2202549 - RNA, 19 nt, Homo sapiens
  misc_RNA (1)...(19): siRNA sense strand
agagugcuguccaaauuug

SEQ ID NO: 2202550 - RNA, 19 nt, Homo sapiens
  misc_RNA (1)...(19): siRNA sense strand
ucacaaagaacaugaaacu

SEQ ID NO: 2202551 - RNA, 19 nt, Homo sapiens
  misc_RNA (1)...(19): siRNA sense strand
cggcucagcuaauggaaau

SEQ ID NO: 2202552 - RNA, 19 nt, Homo sapiens
  misc_RNA (1)...(19): siRNA sense strand
gauaguuagugugauugaa

SEQ ID NO: 2202553 - RNA, 19 nt, Homo sapiens
  misc_RNA (1)...(19): siRNA sense strand
ggagaauauuuggaagaga

SEQ ID NO: 2202554 - RNA, 19 nt, Homo sapiens
  misc_RNA (1)...(19): siRNA sense strand
gaauaugugcgagcccuuu

SEQ ID NO: 2202555 - RNA, 19 nt, Homo sapiens
  misc_RNA (1)...(19): siRNA sense strand
ggaaauguacucuggaaaa

SEQ ID NO: 2202556 - RNA, 19 nt, Homo sapiens
  misc_RNA (1)...(19): siRNA sense strand
agaacaacccggacacgua

SEQ ID NO: 2202557 - RNA, 19 nt, Homo sapiens
  misc_RNA (1)...(19): siRNA sense strand
gggagaauauuuggaagag

SEQ ID NO: 2202558 - RNA, 19 nt, Homo sapiens
  misc_RNA (1)...(19): siRNA sense strand
gaacaaaggaaggauugca

SEQ ID NO: 2202559 - RNA, 19 nt, Homo sapiens
  misc_RNA (1)...(19): siRNA sense strand
cagccucacuccucccaaa

SEQ ID NO: 2202560 - RNA, 19 nt, Homo sapiens
  misc_RNA (1)...(19): siRNA sense strand
ggaagagacaggagcaagu

SEQ ID NO: 2202561 - RNA, 19 nt, Homo sapiens
  misc_RNA (1)...(19): siRNA sense strand
gaaggguauuaagagaauu

SEQ ID NO: 2202562 - RNA, 19 nt, Homo sapiens
  misc_RNA (1)...(19): siRNA sense strand
uuccagaggucauuguuga

SEQ ID NO: 2202563 - RNA, 19 nt, Homo sapiens
  misc_RNA (1)...(19): siRNA sense strand
gauuacgccuucgcuaugu

SEQ ID NO: 2202564 - RNA, 19 nt, Homo sapiens
  misc_RNA (1)...(19): siRNA sense strand
gaaauuggaaguggcuaau

SEQ ID NO: 2202565 - RNA, 19 nt, Homo sapiens
  misc_RNA (1)...(19): siRNA sense strand
ccaaauuuccucuuccaau

SEQ ID NO: 2202566 - RNA, 19 nt, Homo sapiens
  misc_RNA (1)...(19): siRNA sense strand
caaguuaugccaccagauc

SEQ ID NO: 2202567 - RNA, 19 nt, Homo sapiens
  misc_RNA (1)...(19): siRNA sense strand
caaaagaagagaaagauug

SEQ ID NO: 2202568 - RNA, 19 nt, Homo sapiens
  misc_RNA (1)...(19): siRNA sense strand
ccaaguaaacugucaaugc

SEQ ID NO: 2202569 - RNA, 19 nt, Homo sapiens
  misc_RNA (1)...(19): siRNA sense strand
gcagauuugcgaagccauu

SEQ ID NO: 2202570 - RNA, 19 nt, Homo sapiens
  misc_RNA (1)...(19): siRNA sense strand
cuggauaguuagugugauu

SEQ ID NO: 2202571 - RNA, 19 nt, Homo sapiens
  misc_RNA (1)...(19): siRNA sense strand
ggccugccaucaaguuaug

SEQ ID NO: 2202572 - RNA, 19 nt, Homo sapiens
  misc_RNA (1)...(19): siRNA sense strand
gacguggugagguucauua

SEQ ID NO: 2202573 - RNA, 19 nt, Homo sapiens
  misc_RNA (1)...(19): siRNA sense strand
cugaccaagucgcaaauuu

SEQ ID NO: 2202574 - RNA, 19 nt, Homo sapiens
  misc_RNA (1)...(19): siRNA sense strand
gaaaucuauccuuugaaga

SEQ ID NO: 2202575 - RNA, 19 nt, Homo sapiens
  misc_RNA (1)...(19): siRNA sense strand
aaagagaaguacacagacu

SEQ ID NO: 2202576 - RNA, 19 nt, Homo sapiens
  misc_RNA (1)...(19): siRNA sense strand
cucaugaccuuuguuuauu

SEQ ID NO: 2202577 - RNA, 19 nt, Homo sapiens
  misc_RNA (1)...(19): siRNA sense strand
aaaacagucucacaaaaga

SEQ ID NO: 2202578 - RNA, 19 nt, Homo sapiens
  misc_RNA (1)...(19): siRNA sense strand
caguugggaugaagcuuga

SEQ ID NO: 2202579 - RNA, 19 nt, Homo sapiens
  misc_RNA (1)...(19): siRNA sense strand
cgacuucuggugugacgua

SEQ ID NO: 2202580 - RNA, 19 nt, Homo sapiens
  misc_RNA (1)...(19): siRNA sense strand
cuauuacuauggaaagaga

SEQ ID NO: 2202581 - RNA, 19 nt, Homo sapiens
  misc_RNA (1)...(19): siRNA sense strand
uuugucagcuuccaauaug

SEQ ID NO: 2202582 - RNA, 19 nt, Homo sapiens
  misc_RNA (1)...(19): siRNA sense strand
guuuaguccugugcugaua

SEQ ID NO: 2202583 - RNA, 19 nt, Homo sapiens
  misc_RNA (1)...(19): siRNA sense strand
gaagauccccacuggaauu

SEQ ID NO: 2202584 - RNA, 19 nt, Homo sapiens
  misc_RNA (1)...(19): siRNA sense strand
gagaauuacagcugguaga

SEQ ID NO: 2202585 - RNA, 19 nt, Homo sapiens
  misc_RNA (1)...(19): siRNA sense strand
ucaugaccuuuguuuauuc

SEQ ID NO: 2202586 - RNA, 19 nt, Homo sapiens
  misc_RNA (1)...(19): siRNA sense strand
acaaaacagucucacaaaa

SEQ ID NO: 2202587 - RNA, 19 nt, Homo sapiens
  misc_RNA (1)...(19): siRNA sense strand
guggugagguucauuaagc

SEQ ID NO: 2202588 - RNA, 19 nt, Homo sapiens
  misc_RNA (1)...(19): siRNA sense strand
gaagcaaacucaccauuca

SEQ ID NO: 2202589 - RNA, 19 nt, Homo sapiens
  misc_RNA (1)...(19): siRNA sense strand
ggaauggcuuucauacuuu

SEQ ID NO: 2202590 - RNA, 19 nt, Homo sapiens
  misc_RNA (1)...(19): siRNA sense strand
gaaguaaugaugccaguuu

SEQ ID NO: 2202591 - RNA, 19 nt, Homo sapiens
  misc_RNA (1)...(19): siRNA sense strand
ggaagacgaugaugaugau

SEQ ID NO: 2202592 - RNA, 19 nt, Homo sapiens
  misc_RNA (1)...(19): siRNA sense strand
ggaaggaacggaaguaaug

SEQ ID NO: 2202593 - RNA, 19 nt, Homo sapiens
  misc_RNA (1)...(19): siRNA sense strand
gaagaugucguccaaauag

SEQ ID NO: 2202594 - RNA, 19 nt, Homo sapiens
  misc_RNA (1)...(19): siRNA sense strand
gcucugagguugccugaga

SEQ ID NO: 2202595 - RNA, 19 nt, Homo sapiens
  misc_RNA (1)...(19): siRNA sense strand
gaaaaucuauggaaagaga

SEQ ID NO: 2202596 - RNA, 19 nt, Homo sapiens
  misc_RNA (1)...(19): siRNA sense strand
agccagaucuccuuugaua

SEQ ID NO: 2202597 - RNA, 19 nt, Homo sapiens
  misc_RNA (1)...(19): siRNA sense strand
ucacagccuuuauuugaaa

SEQ ID NO: 2202598 - RNA, 19 nt, Homo sapiens
  misc_RNA (1)...(19): siRNA sense strand
cccaagaggugacguuaaa

SEQ ID NO: 2202599 - RNA, 19 nt, Homo sapiens
  misc_RNA (1)...(19): siRNA sense strand
ugacagcguuuacaggaaa

SEQ ID NO: 2202600 - RNA, 19 nt, Homo sapiens
  misc_RNA (1)...(19): siRNA sense strand
gcaagaaaaucuauggaaa

SEQ ID NO: 2202601 - RNA, 19 nt, Homo sapiens
  misc_RNA (1)...(19): siRNA sense strand
gggaaagacuaccauaagu

SEQ ID NO: 2202602 - RNA, 19 nt, Homo sapiens
  misc_RNA (1)...(19): siRNA sense strand
gaacagagugguagcgaau

SEQ ID NO: 2202603 - RNA, 19 nt, Homo sapiens
  misc_RNA (1)...(19): siRNA sense strand
ccaauccgguuaccuguau

SEQ ID NO: 2202604 - RNA, 19 nt, Homo sapiens
  misc_RNA (1)...(19): siRNA sense strand
aggaauggcuuucauacuu

SEQ ID NO: 2202605 - RNA, 19 nt, Homo sapiens
  misc_RNA (1)...(19): siRNA sense strand
cacaggacauuaccacgua

SEQ ID NO: 2202606 - RNA, 19 nt, Homo sapiens
  misc_RNA (1)...(19): siRNA sense strand
cugauggcguuuaacauua

SEQ ID NO: 2202607 - RNA, 19 nt, Homo sapiens
  misc_RNA (1)...(19): siRNA sense strand
ccaaggagaagacaagaaa

SEQ ID NO: 2202608 - RNA, 19 nt, Homo sapiens
  misc_RNA (1)...(19): siRNA sense strand
guaccuggaugacguggaa

SEQ ID NO: 2202609 - RNA, 19 nt, Homo sapiens
  misc_RNA (1)...(19): siRNA sense strand
cuucggagguggacaguuu

SEQ ID NO: 2202610 - RNA, 19 nt, Homo sapiens
  misc_RNA (1)...(19): siRNA sense strand
ccacucuaaugguauauga

SEQ ID NO: 2202611 - RNA, 19 nt, Homo sapiens
  misc_RNA (1)...(19): siRNA sense strand
ggaaggcggugaccaagac

SEQ ID NO: 2202612 - RNA, 19 nt, Homo sapiens
  misc_RNA (1)...(19): siRNA sense strand
ucucacagccuuuauuuga

SEQ ID NO: 2202613 - RNA, 19 nt, Homo sapiens
  misc_RNA (1)...(19): siRNA sense strand
auacauugaucuccaaaga

SEQ ID NO: 2202614 - RNA, 19 nt, Homo sapiens
  misc_RNA (1)...(19): siRNA sense strand
cguuagacauucauacauu

SEQ ID NO: 2202615 - RNA, 19 nt, Homo sapiens
  misc_RNA (1)...(19): siRNA sense strand
ccaaauaguaucaggauuc

SEQ ID NO: 2202616 - RNA, 19 nt, Homo sapiens
  misc_RNA (1)...(19): siRNA sense strand
ggaagcaaacucaccauuc

SEQ ID NO: 2202617 - RNA, 19 nt, Homo sapiens
  misc_RNA (1)...(19): siRNA sense strand
caucccaggucccguugua

SEQ ID NO: 2202618 - RNA, 19 nt, Homo sapiens
  misc_RNA (1)...(19): siRNA sense strand
guuagacauucauacauug

SEQ ID NO: 2202619 - RNA, 19 nt, Homo sapiens
  misc_RNA (1)...(19): siRNA sense strand
gcucucacagccuuuauuu

SEQ ID NO: 2202620 - RNA, 19 nt, Homo sapiens
  misc_RNA (1)...(19): siRNA sense strand
uggcucagaugaacaguga

SEQ ID NO: 2202621 - RNA, 19 nt, Homo sapiens
  misc_RNA (1)...(19): siRNA sense strand
ugaagaugucguccaaaua

SEQ ID NO: 2202622 - RNA, 19 nt, Homo sapiens
  misc_RNA (1)...(19): siRNA sense strand
gaaggaacggaaguaauga

SEQ ID NO: 2202623 - RNA, 19 nt, Homo sapiens
  misc_RNA (1)...(19): siRNA sense strand
ggaaauggaacaggaaaca

SEQ ID NO: 2202624 - RNA, 19 nt, Homo sapiens
  misc_RNA (1)...(19): siRNA sense strand
ccacacccguccucacaga

SEQ ID NO: 2202625 - RNA, 19 nt, Homo sapiens
  misc_RNA (1)...(19): siRNA sense strand
gugcagcuccugacugaaa

SEQ ID NO: 2202626 - RNA, 19 nt, Homo sapiens
  misc_RNA (1)...(19): siRNA sense strand
gcagacccacugaauguau

SEQ ID NO: 2202627 - RNA, 19 nt, Homo sapiens
  misc_RNA (1)...(19): siRNA sense strand
cagcugacguggacauaca

SEQ ID NO: 2202628 - RNA, 19 nt, Homo sapiens
  misc_RNA (1)...(19): siRNA sense strand
ggcagucaguugauuguca

SEQ ID NO: 2202629 - RNA, 19 nt, Homo sapiens
  misc_RNA (1)...(19): siRNA sense strand
cacauuaacuugcuguuuu

SEQ ID NO: 2202630 - RNA, 19 nt, Homo sapiens
  misc_RNA (1)...(19): siRNA sense strand
ggauuagacggaaauggaa

SEQ ID NO: 2202631 - RNA, 19 nt, Homo sapiens
  misc_RNA (1)...(19): siRNA sense strand
ggaagaggaagacgaugau

SEQ ID NO: 2202632 - RNA, 19 nt, Homo sapiens
  misc_RNA (1)...(19): siRNA sense strand
gaaacagcaccaggcauga

SEQ ID NO: 2202633 - RNA, 19 nt, Homo sapiens
  misc_RNA (1)...(19): siRNA sense strand
ggacaguuuuccuuauuug

SEQ ID NO: 2202634 - RNA, 19 nt, Homo sapiens
  misc_RNA (1)...(19): siRNA sense strand
ccugauggcguuuaacauu

SEQ ID NO: 2202635 - RNA, 19 nt, Homo sapiens
  misc_RNA (1)...(19): siRNA sense strand
aguauaagcugggcaguca

SEQ ID NO: 2202636 - RNA, 19 nt, Homo sapiens
  misc_RNA (1)...(19): siRNA sense strand
caaacucaccauucaggaa

SEQ ID NO: 2202637 - RNA, 19 nt, Homo sapiens
  misc_RNA (1)...(19): siRNA sense strand
cuacagcaccucccaggaa

SEQ ID NO: 2202638 - RNA, 19 nt, Homo sapiens
  misc_RNA (1)...(19): siRNA sense strand
cugcaggacuggagaguuc

SEQ ID NO: 2202639 - RNA, 19 nt, Homo sapiens
  misc_RNA (1)...(19): siRNA sense strand
gacauuaccacguaucaca

SEQ ID NO: 2202640 - RNA, 19 nt, Homo sapiens
  misc_RNA (1)...(19): siRNA sense strand
gaaaagccccuggcagaaa

SEQ ID NO: 2202641 - RNA, 19 nt, Homo sapiens
  misc_RNA (1)...(19): siRNA sense strand
gaucugcccacgaggaaga

SEQ ID NO: 2202642 - RNA, 19 nt, Homo sapiens
  misc_RNA (1)...(19): siRNA sense strand
agaacgcucugccacucua

SEQ ID NO: 2202643 - RNA, 19 nt, Homo sapiens
  misc_RNA (1)...(19): siRNA sense strand
cagcaccucccaggaauuu

SEQ ID NO: 2202644 - RNA, 19 nt, Homo sapiens
  misc_RNA (1)...(19): siRNA sense strand
gaccugaccgcguuucuca

SEQ ID NO: 2202645 - RNA, 19 nt, Homo sapiens
  misc_RNA (1)...(19): siRNA sense strand
gaauggcuuucauacuuuu

SEQ ID NO: 2202646 - RNA, 19 nt, Homo sapiens
  misc_RNA (1)...(19): siRNA sense strand
gggcgugguucgucuccuu

SEQ ID NO: 2202647 - RNA, 19 nt, Homo sapiens
  misc_RNA (1)...(19): siRNA sense strand
cuucaucaccugagaaaga

SEQ ID NO: 2202648 - RNA, 19 nt, Homo sapiens
  misc_RNA (1)...(19): siRNA sense strand
gcaccucccaggaauuuag

SEQ ID NO: 2202649 - RNA, 19 nt, Homo sapiens
  misc_RNA (1)...(19): siRNA sense strand
ggaggaauggcuuucauac

SEQ ID NO: 2202650 - RNA, 19 nt, Homo sapiens
  misc_RNA (1)...(19): siRNA sense strand
ccgcagacccacugaaugu

SEQ ID NO: 2202651 - RNA, 19 nt, Homo sapiens
  misc_RNA (1)...(19): siRNA sense strand
ggacucuggcguagauaug

SEQ ID NO: 2202652 - RNA, 19 nt, Homo sapiens
  misc_RNA (1)...(19): siRNA sense strand
augaagaugucguccaaau

SEQ ID NO: 2202653 - RNA, 19 nt, Homo sapiens
  misc_RNA (1)...(19): siRNA sense strand
guaaugaugccaguuugga

SEQ ID NO: 2202654 - RNA, 19 nt, Homo sapiens
  misc_RNA (1)...(19): siRNA sense strand
ccucagaacgcauccaugu

SEQ ID NO: 2202655 - RNA, 19 nt, Homo sapiens
  misc_RNA (1)...(19): siRNA sense strand
gcugggcagucaguugauu

SEQ ID NO: 2202656 - RNA, 19 nt, Homo sapiens
  misc_RNA (1)...(19): siRNA sense strand
gaucaccucgagagaccua

SEQ ID NO: 2202657 - RNA, 19 nt, Homo sapiens
  misc_RNA (1)...(19): siRNA sense strand
gaugucguccaaauaguau

SEQ ID NO: 2202658 - RNA, 19 nt, Homo sapiens
  misc_RNA (1)...(19): siRNA sense strand
auaugaagaugucguccaa

SEQ ID NO: 2202659 - RNA, 19 nt, Homo sapiens
  misc_RNA (1)...(19): siRNA sense strand
acagagugguagcgaaugu

SEQ ID NO: 2202660 - RNA, 19 nt, Homo sapiens
  misc_RNA (1)...(19): siRNA sense strand
caagagcaccagcagaaag

SEQ ID NO: 2202661 - RNA, 19 nt, Homo sapiens
  misc_RNA (1)...(19): siRNA sense strand
caucccagcuucccugaac

SEQ ID NO: 2202662 - RNA, 19 nt, Homo sapiens
  misc_RNA (1)...(19): siRNA sense strand
gaucagcagcuugagauag

SEQ ID NO: 2202663 - RNA, 19 nt, Homo sapiens
  misc_RNA (1)...(19): siRNA sense strand
gggaagcaaacucaccauu

SEQ ID NO: 2202664 - RNA, 19 nt, Homo sapiens
  misc_RNA (1)...(19): siRNA sense strand
ccagaucuccuuugauaac

SEQ ID NO: 2202665 - RNA, 19 nt, Homo sapiens
  misc_RNA (1)...(19): siRNA sense strand
gcacgaaggaacugaugag

SEQ ID NO: 2202666 - RNA, 19 nt, Homo sapiens
  misc_RNA (1)...(19): siRNA sense strand
ugaugaugaugaccaagga

SEQ ID NO: 2202667 - RNA, 19 nt, Homo sapiens
  misc_RNA (1)...(19): siRNA sense strand
cgaugaugaugaugaccaa

SEQ ID NO: 2202668 - RNA, 19 nt, Homo sapiens
  misc_RNA (1)...(19): siRNA sense strand
uggcguagauaugaaugaa

SEQ ID NO: 2202669 - RNA, 19 nt, Homo sapiens
  misc_RNA (1)...(19): siRNA sense strand
gaacgcucugccacucuaa

SEQ ID NO: 2202670 - RNA, 19 nt, Homo sapiens
  misc_RNA (1)...(19): siRNA sense strand
guuguaacacaggacauua

SEQ ID NO: 2202671 - RNA, 19 nt, Homo sapiens
  misc_RNA (1)...(19): siRNA sense strand
agacauucauacauugauc

SEQ ID NO: 2202672 - RNA, 19 nt, Homo sapiens
  misc_RNA (1)...(19): siRNA sense strand
cugccacucuaaugguaua

SEQ ID NO: 2202673 - RNA, 19 nt, Homo sapiens
  misc_RNA (1)...(19): siRNA sense strand
gaccgcagacccacugaau

SEQ ID NO: 2202674 - RNA, 19 nt, Homo sapiens
  misc_RNA (1)...(19): siRNA sense strand
cuaaugguauaugaagaug

SEQ ID NO: 2202675 - RNA, 19 nt, Homo sapiens
  misc_RNA (1)...(19): siRNA sense strand
aggcugagcuguccaaucc

SEQ ID NO: 2202676 - RNA, 19 nt, Homo sapiens
  misc_RNA (1)...(19): siRNA sense strand
cagacccacugaauguaug

SEQ ID NO: 2202677 - RNA, 19 nt, Homo sapiens
  misc_RNA (1)...(19): siRNA sense strand
caaauaguaucaggauucc

SEQ ID NO: 2202678 - RNA, 19 nt, Homo sapiens
  misc_RNA (1)...(19): siRNA sense strand
aaugguauaugaagauguc

SEQ ID NO: 2202679 - RNA, 19 nt, Homo sapiens
  misc_RNA (1)...(19): siRNA sense strand
agaugucguccaaauagua

SEQ ID NO: 2202680 - RNA, 19 nt, Homo sapiens
  misc_RNA (1)...(19): siRNA sense strand
uccaagagcaccagcagaa

SEQ ID NO: 2202681 - RNA, 19 nt, Homo sapiens
  misc_RNA (1)...(19): siRNA sense strand
aggugcagcuccugacuga

SEQ ID NO: 2202682 - RNA, 19 nt, Homo sapiens
  misc_RNA (1)...(19): siRNA sense strand
aauaguaucaggauuccaa

SEQ ID NO: 2202683 - RNA, 19 nt, Homo sapiens
  misc_RNA (1)...(19): siRNA sense strand
acacauuaacuugcuguuu

SEQ ID NO: 2202684 - RNA, 19 nt, Homo sapiens
  misc_RNA (1)...(19): siRNA sense strand
gaagaggaagacgaugaug

SEQ ID NO: 2202685 - RNA, 19 nt, Homo sapiens
  misc_RNA (1)...(19): siRNA sense strand
gcccaagaggugacguuaa

SEQ ID NO: 2202686 - RNA, 19 nt, Homo sapiens
  misc_RNA (1)...(19): siRNA sense strand
cgaggaagaggaagacgau

SEQ ID NO: 2202687 - RNA, 19 nt, Homo sapiens
  misc_RNA (1)...(19): siRNA sense strand
agaggaagacgaugaugau

SEQ ID NO: 2202688 - RNA, 19 nt, Homo sapiens
  misc_RNA (1)...(19): siRNA sense strand
gcaaagugcucauuuauaa

SEQ ID NO: 2202689 - RNA, 19 nt, Homo sapiens
  misc_RNA (1)...(19): siRNA sense strand
gcaauuagauucccugaaa

SEQ ID NO: 2202690 - RNA, 19 nt, Homo sapiens
  misc_RNA (1)...(19): siRNA sense strand
gaacaaagauggcuuaaac

SEQ ID NO: 2202691 - RNA, 19 nt, Homo sapiens
  misc_RNA (1)...(19): siRNA sense strand
guacaaauaucgaguguuu

SEQ ID NO: 2202692 - RNA, 19 nt, Homo sapiens
  misc_RNA (1)...(19): siRNA sense strand
gaaggaagcauaguaauua

SEQ ID NO: 2202693 - RNA, 19 nt, Homo sapiens
  misc_RNA (1)...(19): siRNA sense strand
ggauuuggcuuuacuuuaa

SEQ ID NO: 2202694 - RNA, 19 nt, Homo sapiens
  misc_RNA (1)...(19): siRNA sense strand
gggaacagcugacaaauga

SEQ ID NO: 2202695 - RNA, 19 nt, Homo sapiens
  misc_RNA (1)...(19): siRNA sense strand
gaaacugaauuccgagaua

SEQ ID NO: 2202696 - RNA, 19 nt, Homo sapiens
  misc_RNA (1)...(19): siRNA sense strand
gaaccaagauggauacaau

SEQ ID NO: 2202697 - RNA, 19 nt, Homo sapiens
  misc_RNA (1)...(19): siRNA sense strand
gaagaugccuuauacagau

SEQ ID NO: 2202698 - RNA, 19 nt, Homo sapiens
  misc_RNA (1)...(19): siRNA sense strand
ggauauguuuccaucauua

SEQ ID NO: 2202699 - RNA, 19 nt, Homo sapiens
  misc_RNA (1)...(19): siRNA sense strand
gauaugacguuuauucaga

SEQ ID NO: 2202700 - RNA, 19 nt, Homo sapiens
  misc_RNA (1)...(19): siRNA sense strand
gaagagggauguacaugug

SEQ ID NO: 2202701 - RNA, 19 nt, Homo sapiens
  misc_RNA (1)...(19): siRNA sense strand
gaggcaaagugcucauuua

SEQ ID NO: 2202702 - RNA, 19 nt, Homo sapiens
  misc_RNA (1)...(19): siRNA sense strand
gaaagucaggucacgauua

SEQ ID NO: 2202703 - RNA, 19 nt, Homo sapiens
  misc_RNA (1)...(19): siRNA sense strand
gaagugaaaccaauauuga

SEQ ID NO: 2202704 - RNA, 19 nt, Homo sapiens
  misc_RNA (1)...(19): siRNA sense strand
aagaggagauucagacaua

SEQ ID NO: 2202705 - RNA, 19 nt, Homo sapiens
  misc_RNA (1)...(19): siRNA sense strand
uaucagauguuaacaguga

SEQ ID NO: 2202706 - RNA, 19 nt, Homo sapiens
  misc_RNA (1)...(19): siRNA sense strand
gggcaaaucuaccuguauu

SEQ ID NO: 2202707 - RNA, 19 nt, Homo sapiens
  misc_RNA (1)...(19): siRNA sense strand
ggacgaauccaccuuuaaa

SEQ ID NO: 2202708 - RNA, 19 nt, Homo sapiens
  misc_RNA (1)...(19): siRNA sense strand
gcagauaucauugcaaauu

SEQ ID NO: 2202709 - RNA, 19 nt, Homo sapiens
  misc_RNA (1)...(19): siRNA sense strand
uaacuucgaucuccaaauc

SEQ ID NO: 2202710 - RNA, 19 nt, Homo sapiens
  misc_RNA (1)...(19): siRNA sense strand
gcugaacucuuuguaauga

SEQ ID NO: 2202711 - RNA, 19 nt, Homo sapiens
  misc_RNA (1)...(19): siRNA sense strand
ccaaagaaccuaucgaguu

SEQ ID NO: 2202712 - RNA, 19 nt, Homo sapiens
  misc_RNA (1)...(19): siRNA sense strand
uuuaugagcugcacaauau

SEQ ID NO: 2202713 - RNA, 19 nt, Homo sapiens
  misc_RNA (1)...(19): siRNA sense strand
aaacagaaaggagcuauua

SEQ ID NO: 2202714 - RNA, 19 nt, Homo sapiens
  misc_RNA (1)...(19): siRNA sense strand
gcaggcagauaccguuuga

SEQ ID NO: 2202715 - RNA, 19 nt, Homo sapiens
  misc_RNA (1)...(19): siRNA sense strand
ggaugaauuucuucucuau

SEQ ID NO: 2202716 - RNA, 19 nt, Homo sapiens
  misc_RNA (1)...(19): siRNA sense strand
auaugaagcugaacucuuu

SEQ ID NO: 2202717 - RNA, 19 nt, Homo sapiens
  misc_RNA (1)...(19): siRNA sense strand
cgucuucccucuugugaua

SEQ ID NO: 2202718 - RNA, 19 nt, Homo sapiens
  misc_RNA (1)...(19): siRNA sense strand
acagaaagaucagaguuaa

SEQ ID NO: 2202719 - RNA, 19 nt, Homo sapiens
  misc_RNA (1)...(19): siRNA sense strand
ggaggagguuggaccauug

SEQ ID NO: 2202720 - RNA, 19 nt, Homo sapiens
  misc_RNA (1)...(19): siRNA sense strand
gccaggauuucaucguuua

SEQ ID NO: 2202721 - RNA, 19 nt, Homo sapiens
  misc_RNA (1)...(19): siRNA sense strand
cuacggauaugacguuuau

SEQ ID NO: 2202722 - RNA, 19 nt, Homo sapiens
  misc_RNA (1)...(19): siRNA sense strand
ggaaauaagaggaguguca

SEQ ID NO: 2202723 - RNA, 19 nt, Homo sapiens
  misc_RNA (1)...(19): siRNA sense strand
ggaagugaaaccaauauug

SEQ ID NO: 2202724 - RNA, 19 nt, Homo sapiens
  misc_RNA (1)...(19): siRNA sense strand
gaagcugaacucuuuguaa

SEQ ID NO: 2202725 - RNA, 19 nt, Homo sapiens
  misc_RNA (1)...(19): siRNA sense strand
uaggagaccugaaccaaga

SEQ ID NO: 2202726 - RNA, 19 nt, Homo sapiens
  misc_RNA (1)...(19): siRNA sense strand
aaacugaauuccgagauaa

SEQ ID NO: 2202727 - RNA, 19 nt, Homo sapiens
  misc_RNA (1)...(19): siRNA sense strand
caagauggauacaaugaca

SEQ ID NO: 2202728 - RNA, 19 nt, Homo sapiens
  misc_RNA (1)...(19): siRNA sense strand
ggccugugcuccuuuauau

SEQ ID NO: 2202729 - RNA, 19 nt, Homo sapiens
  misc_RNA (1)...(19): siRNA sense strand
ggaagcauaguaauuaaga

SEQ ID NO: 2202730 - RNA, 19 nt, Homo sapiens
  misc_RNA (1)...(19): siRNA sense strand
aaagucaggucacgauuau

SEQ ID NO: 2202731 - RNA, 19 nt, Homo sapiens
  misc_RNA (1)...(19): siRNA sense strand
caccaagccuucccaaguu

SEQ ID NO: 2202732 - RNA, 19 nt, Homo sapiens
  misc_RNA (1)...(19): siRNA sense strand
gaauccaccuuuaaagaag

SEQ ID NO: 2202733 - RNA, 19 nt, Homo sapiens
  misc_RNA (1)...(19): siRNA sense strand
uggcagaggugcaauuaga

SEQ ID NO: 2202734 - RNA, 19 nt, Homo sapiens
  misc_RNA (1)...(19): siRNA sense strand
gaauggagaccuuauugug

SEQ ID NO: 2202735 - RNA, 19 nt, Homo sapiens
  misc_RNA (1)...(19): siRNA sense strand
gggaugaauuucuucucua

SEQ ID NO: 2202736 - RNA, 19 nt, Homo sapiens
  misc_RNA (1)...(19): siRNA sense strand
uagauucccugaaacagaa

SEQ ID NO: 2202737 - RNA, 19 nt, Homo sapiens
  misc_RNA (1)...(19): siRNA sense strand
caagaccgguugugacugu

SEQ ID NO: 2202738 - RNA, 19 nt, Homo sapiens
  misc_RNA (1)...(19): siRNA sense strand
caagaaugauuacccagau

SEQ ID NO: 2202739 - RNA, 19 nt, Homo sapiens
  misc_RNA (1)...(19): siRNA sense strand
caagaggagcacagaauuu

SEQ ID NO: 2202740 - RNA, 19 nt, Homo sapiens
  misc_RNA (1)...(19): siRNA sense strand
uagcaauacuucuuggauu

SEQ ID NO: 2202741 - RNA, 19 nt, Homo sapiens
  misc_RNA (1)...(19): siRNA sense strand
ggcaaagugcucauuuaua

SEQ ID NO: 2202742 - RNA, 19 nt, Homo sapiens
  misc_RNA (1)...(19): siRNA sense strand
gaacagcugacaaaugaca

SEQ ID NO: 2202743 - RNA, 19 nt, Homo sapiens
  misc_RNA (1)...(19): siRNA sense strand
ccagaaggaagcauaguaa

SEQ ID NO: 2202744 - RNA, 19 nt, Homo sapiens
  misc_RNA (1)...(19): siRNA sense strand
ccacugagcugugaguaca

SEQ ID NO: 2202745 - RNA, 19 nt, Homo sapiens
  misc_RNA (1)...(19): siRNA sense strand
ggaaggagcauaugaagcu

SEQ ID NO: 2202746 - RNA, 19 nt, Homo sapiens
  misc_RNA (1)...(19): siRNA sense strand
gaagacaaucuguguguuc

SEQ ID NO: 2202747 - RNA, 19 nt, Homo sapiens
  misc_RNA (1)...(19): siRNA sense strand
gaauuacaguuuggacgaa

SEQ ID NO: 2202748 - RNA, 19 nt, Homo sapiens
  misc_RNA (1)...(19): siRNA sense strand
ggacgcucuuccuugauaa

SEQ ID NO: 2202749 - RNA, 19 nt, Homo sapiens
  misc_RNA (1)...(19): siRNA sense strand
caaauccaaucagugguuu

SEQ ID NO: 2202750 - RNA, 19 nt, Homo sapiens
  misc_RNA (1)...(19): siRNA sense strand
uugcgaaacucuacuauuc

SEQ ID NO: 2202751 - RNA, 19 nt, Homo sapiens
  misc_RNA (1)...(19): siRNA sense strand
cggacgcucuuccuugaua

SEQ ID NO: 2202752 - RNA, 19 nt, Homo sapiens
  misc_RNA (1)...(19): siRNA sense strand
gacaucugcugccugcuuu

SEQ ID NO: 2202753 - RNA, 19 nt, Homo sapiens
  misc_RNA (1)...(19): siRNA sense strand
gagauucgguagugcuaug

SEQ ID NO: 2202754 - RNA, 19 nt, Homo sapiens
  misc_RNA (1)...(19): siRNA sense strand
gggcaccucucuuuaugga

SEQ ID NO: 2202755 - RNA, 19 nt, Homo sapiens
  misc_RNA (1)...(19): siRNA sense strand
aagcugaacucuuuguaau

SEQ ID NO: 2202756 - RNA, 19 nt, Homo sapiens
  misc_RNA (1)...(19): siRNA sense strand
gaagaggcagauuauguug

SEQ ID NO: 2202757 - RNA, 19 nt, Homo sapiens
  misc_RNA (1)...(19): siRNA sense strand
caacagaaagaucagaguu

SEQ ID NO: 2202758 - RNA, 19 nt, Homo sapiens
  misc_RNA (1)...(19): siRNA sense strand
gcauaguaauuaagacauc

SEQ ID NO: 2202759 - RNA, 19 nt, Homo sapiens
  misc_RNA (1)...(19): siRNA sense strand
gaggugggcuggccuuucu

SEQ ID NO: 2202760 - RNA, 19 nt, Homo sapiens
  misc_RNA (1)...(19): siRNA sense strand
gagaagacaaucugugugu

SEQ ID NO: 2202761 - RNA, 19 nt, Homo sapiens
  misc_RNA (1)...(19): siRNA sense strand
cgaauccaccuuuaaagaa

SEQ ID NO: 2202762 - RNA, 19 nt, Homo sapiens
  misc_RNA (1)...(19): siRNA sense strand
gcagaggugcaauuagauu

SEQ ID NO: 2202763 - RNA, 19 nt, Homo sapiens
  misc_RNA (1)...(19): siRNA sense strand
gauggcagaggugcaauua

SEQ ID NO: 2202764 - RNA, 19 nt, Homo sapiens
  misc_RNA (1)...(19): siRNA sense strand
gugauggacuggaugaugu

SEQ ID NO: 2202765 - RNA, 19 nt, Homo sapiens
  misc_RNA (1)...(19): siRNA sense strand
agaaagcgcaguccugaaa

SEQ ID NO: 2202766 - RNA, 19 nt, Homo sapiens
  misc_RNA (1)...(19): siRNA sense strand
ggauguacauguggucgaa

SEQ ID NO: 2202767 - RNA, 19 nt, Homo sapiens
  misc_RNA (1)...(19): siRNA sense strand
caaccaaauccuaauauca

SEQ ID NO: 2202768 - RNA, 19 nt, Homo sapiens
  misc_RNA (1)...(19): siRNA sense strand
cagaagaggcagauuaugu

SEQ ID NO: 2202769 - RNA, 19 nt, Homo sapiens
  misc_RNA (1)...(19): siRNA sense strand
acagaaaggagcuauuaaa

SEQ ID NO: 2202770 - RNA, 19 nt, Homo sapiens
  misc_RNA (1)...(19): siRNA sense strand
ggaagagggauguacaugu

SEQ ID NO: 2202771 - RNA, 19 nt, Homo sapiens
  misc_RNA (1)...(19): siRNA sense strand
caucgcgucuucccucuug

SEQ ID NO: 2202772 - RNA, 19 nt, Homo sapiens
  misc_RNA (1)...(19): siRNA sense strand
gaccaaguaccaucaguga

SEQ ID NO: 2202773 - RNA, 19 nt, Homo sapiens
  misc_RNA (1)...(19): siRNA sense strand
gaaucgaacgcaacaacaa

SEQ ID NO: 2202774 - RNA, 19 nt, Homo sapiens
  misc_RNA (1)...(19): siRNA sense strand
ccagauaagcaucagguaa

SEQ ID NO: 2202775 - RNA, 19 nt, Homo sapiens
  misc_RNA (1)...(19): siRNA sense strand
ugaaagcucacaaaggaaa

SEQ ID NO: 2202776 - RNA, 19 nt, Homo sapiens
  misc_RNA (1)...(19): siRNA sense strand
uaucgaguguuuacaaauc

SEQ ID NO: 2202777 - RNA, 19 nt, Homo sapiens
  misc_RNA (1)...(19): siRNA sense strand
aaucagaaguuccaacaag

SEQ ID NO: 2202778 - RNA, 19 nt, Homo sapiens
  misc_RNA (1)...(19): siRNA sense strand
ccaggauggugguguguga

SEQ ID NO: 2202779 - RNA, 19 nt, Homo sapiens
  misc_RNA (1)...(19): siRNA sense strand
caaauuacucauucaagga

SEQ ID NO: 2202780 - RNA, 19 nt, Homo sapiens
  misc_RNA (1)...(19): siRNA sense strand
uggaaaagcucacagugua

SEQ ID NO: 2202781 - RNA, 19 nt, Homo sapiens
  misc_RNA (1)...(19): siRNA sense strand
uaccagaagaggcagauua

SEQ ID NO: 2202782 - RNA, 19 nt, Homo sapiens
  misc_RNA (1)...(19): siRNA sense strand
aagaaggccuggaagugaa

SEQ ID NO: 2202783 - RNA, 19 nt, Homo sapiens
  misc_RNA (1)...(19): siRNA sense strand
aaagaaggccuggaaguga

SEQ ID NO: 2202784 - RNA, 19 nt, Homo sapiens
  misc_RNA (1)...(19): siRNA sense strand
gaaacagaaaggagcuauu

SEQ ID NO: 2202785 - RNA, 19 nt, Homo sapiens
  misc_RNA (1)...(19): siRNA sense strand
caggaaaagucgcuguuua

SEQ ID NO: 2202786 - RNA, 19 nt, Homo sapiens
  misc_RNA (1)...(19): siRNA sense strand
gauugugggugcauuugga

SEQ ID NO: 2202787 - RNA, 19 nt, Homo sapiens
  misc_RNA (1)...(19): siRNA sense strand
agaaggaagcauaguaauu

SEQ ID NO: 2202788 - RNA, 19 nt, Homo sapiens
  misc_RNA (1)...(19): siRNA sense strand
guaaagauguuggcaguaa

SEQ ID NO: 2202789 - RNA, 19 nt, Homo sapiens
  misc_RNA (1)...(19): siRNA sense strand
ucacagauauacagaguug

SEQ ID NO: 2202790 - RNA, 19 nt, Homo sapiens
  misc_RNA (1)...(19): siRNA sense strand
gaacgacuaccuucagauu

SEQ ID NO: 2202791 - RNA, 19 nt, Homo sapiens
  misc_RNA (1)...(19): siRNA sense strand
gcagaagaauaugcaaauu

SEQ ID NO: 2202792 - RNA, 19 nt, Homo sapiens
  misc_RNA (1)...(19): siRNA sense strand
ccaaguaccugaaagaucu

SEQ ID NO: 2202793 - RNA, 19 nt, Homo sapiens
  misc_RNA (1)...(19): siRNA sense strand
ggacuaauaugaguuacga

SEQ ID NO: 2202794 - RNA, 19 nt, Homo sapiens
  misc_RNA (1)...(19): siRNA sense strand
cuaaaggugugacugcaua

SEQ ID NO: 2202795 - RNA, 19 nt, Homo sapiens
  misc_RNA (1)...(19): siRNA sense strand
uaugggaacuuaaaggaaa

SEQ ID NO: 2202796 - RNA, 19 nt, Homo sapiens
  misc_RNA (1)...(19): siRNA sense strand
gagaacgacuaccuucaga

SEQ ID NO: 2202797 - RNA, 19 nt, Homo sapiens
  misc_RNA (1)...(19): siRNA sense strand
cgaagagucuaaagcaaga

SEQ ID NO: 2202798 - RNA, 19 nt, Homo sapiens
  misc_RNA (1)...(19): siRNA sense strand
cacaggagauguuaguaaa

SEQ ID NO: 2202799 - RNA, 19 nt, Homo sapiens
  misc_RNA (1)...(19): siRNA sense strand
ggacuacccuuauaaucag

SEQ ID NO: 2202800 - RNA, 19 nt, Homo sapiens
  misc_RNA (1)...(19): siRNA sense strand
ucugaaauaugggaacuua

SEQ ID NO: 2202801 - RNA, 19 nt, Homo sapiens
  misc_RNA (1)...(19): siRNA sense strand
cagaauaacacuccaguug

SEQ ID NO: 2202802 - RNA, 19 nt, Homo sapiens
  misc_RNA (1)...(19): siRNA sense strand
acaacaagcuaccuaaaca

SEQ ID NO: 2202803 - RNA, 19 nt, Homo sapiens
  misc_RNA (1)...(19): siRNA sense strand
caggagauguuaguaaaga

SEQ ID NO: 2202804 - RNA, 19 nt, Homo sapiens
  misc_RNA (1)...(19): siRNA sense strand
uaaagauguuggcaguaaa

SEQ ID NO: 2202805 - RNA, 19 nt, Homo sapiens
  misc_RNA (1)...(19): siRNA sense strand
ccacaggagauguuaguaa

SEQ ID NO: 2202806 - RNA, 19 nt, Homo sapiens
  misc_RNA (1)...(19): siRNA sense strand
gaaaucccaauuaagaaga

SEQ ID NO: 2202807 - RNA, 19 nt, Homo sapiens
  misc_RNA (1)...(19): siRNA sense strand
caacacggguaccucuuuc

SEQ ID NO: 2202808 - RNA, 19 nt, Homo sapiens
  misc_RNA (1)...(19): siRNA sense strand
ggaggacauugcaaccuau

SEQ ID NO: 2202809 - RNA, 19 nt, Homo sapiens
  misc_RNA (1)...(19): siRNA sense strand
ccaagcaucauaacucuga

SEQ ID NO: 2202810 - RNA, 19 nt, Homo sapiens
  misc_RNA (1)...(19): siRNA sense strand
ggaaacggcaagcagaaga

SEQ ID NO: 2202811 - RNA, 19 nt, Homo sapiens
  misc_RNA (1)...(19): siRNA sense strand
gaaacggcaagcagaagaa

SEQ ID NO: 2202812 - RNA, 19 nt, Homo sapiens
  misc_RNA (1)...(19): siRNA sense strand
gauucuggcccuucucuaa

SEQ ID NO: 2202813 - RNA, 19 nt, Homo sapiens
  misc_RNA (1)...(19): siRNA sense strand
auacagaguuguccaugga

SEQ ID NO: 2202814 - RNA, 19 nt, Homo sapiens
  misc_RNA (1)...(19): siRNA sense strand
ugucagccaucacuauuau

SEQ ID NO: 2202815 - RNA, 19 nt, Homo sapiens
  misc_RNA (1)...(19): siRNA sense strand
ccaguugggacuaauauga

SEQ ID NO: 2202816 - RNA, 19 nt, Homo sapiens
  misc_RNA (1)...(19): siRNA sense strand
guuacgagguggaaagcaa

SEQ ID NO: 2202817 - RNA, 19 nt, Homo sapiens
  misc_RNA (1)...(19): siRNA sense strand
uggaggacauugcaaccua

SEQ ID NO: 2202818 - RNA, 19 nt, Homo sapiens
  misc_RNA (1)...(19): siRNA sense strand
uuucauauguuuccagugu

SEQ ID NO: 2202819 - RNA, 19 nt, Homo sapiens
  misc_RNA (1)...(19): siRNA sense strand
caaaugugaagucgccuaa

SEQ ID NO: 2202820 - RNA, 19 nt, Homo sapiens
  misc_RNA (1)...(19): siRNA sense strand
acgacuaccuucagauuau

SEQ ID NO: 2202821 - RNA, 19 nt, Homo sapiens
  misc_RNA (1)...(19): siRNA sense strand
gaaauaugggaacuuaaag

SEQ ID NO: 2202822 - RNA, 19 nt, Homo sapiens
  misc_RNA (1)...(19): siRNA sense strand
gcaucauaacucugaaaua

SEQ ID NO: 2202823 - RNA, 19 nt, Homo sapiens
  misc_RNA (1)...(19): siRNA sense strand
gauaaauccgacuucguuu

SEQ ID NO: 2202824 - RNA, 19 nt, Homo sapiens
  misc_RNA (1)...(19): siRNA sense strand
ggacauugcaaccuaugga

SEQ ID NO: 2202825 - RNA, 19 nt, Homo sapiens
  misc_RNA (1)...(19): siRNA sense strand
caagcuaccuaaacauggu

SEQ ID NO: 2202826 - RNA, 19 nt, Homo sapiens
  misc_RNA (1)...(19): siRNA sense strand
agauaaauccgacuucguu

SEQ ID NO: 2202827 - RNA, 19 nt, Homo sapiens
  misc_RNA (1)...(19): siRNA sense strand
caaagaauacagccagauc

SEQ ID NO: 2202828 - RNA, 19 nt, Homo sapiens
  misc_RNA (1)...(19): siRNA sense strand
gcaagcagaagaauaugca

SEQ ID NO: 2202829 - RNA, 19 nt, Homo sapiens
  misc_RNA (1)...(19): siRNA sense strand
ggagauguuaguaaagaug

SEQ ID NO: 2202830 - RNA, 19 nt, Homo sapiens
  misc_RNA (1)...(19): siRNA sense strand
ccaacacggguaccucuuu

SEQ ID NO: 2202831 - RNA, 19 nt, Homo sapiens
  misc_RNA (1)...(19): siRNA sense strand
agaaagggagcaccaauca

SEQ ID NO: 2202832 - RNA, 19 nt, Homo sapiens
  misc_RNA (1)...(19): siRNA sense strand
gcucgaagagucuaaagca

SEQ ID NO: 2202833 - RNA, 19 nt, Homo sapiens
  misc_RNA (1)...(19): siRNA sense strand
uagcaucaaguguguacua

SEQ ID NO: 2202834 - RNA, 19 nt, Homo sapiens
  misc_RNA (1)...(19): siRNA sense strand
caaacugcaauuuagcaaa

SEQ ID NO: 2202835 - RNA, 19 nt, Homo sapiens
  misc_RNA (1)...(19): siRNA sense strand
ugacaacaagcuaccuaaa

SEQ ID NO: 2202836 - RNA, 19 nt, Homo sapiens
  misc_RNA (1)...(19): siRNA sense strand
ucacuauuaugacaacaag

SEQ ID NO: 2202837 - RNA, 19 nt, Homo sapiens
  misc_RNA (1)...(19): siRNA sense strand
uuuguggacuacccuuaua

SEQ ID NO: 2202838 - RNA, 19 nt, Homo sapiens
  misc_RNA (1)...(19): siRNA sense strand
acagaguuguccauggaaa

SEQ ID NO: 2202839 - RNA, 19 nt, Homo sapiens
  misc_RNA (1)...(19): siRNA sense strand
aaagggagcaccaaucagu

SEQ ID NO: 2202840 - RNA, 19 nt, Homo sapiens
  misc_RNA (1)...(19): siRNA sense strand
uggacuacccuuauaauca

SEQ ID NO: 2202841 - RNA, 19 nt, Homo sapiens
  misc_RNA (1)...(19): siRNA sense strand
ucagccaucacuauuauga

SEQ ID NO: 2202842 - RNA, 19 nt, Homo sapiens
  misc_RNA (1)...(19): siRNA sense strand
acacuccaguugggacuaa

SEQ ID NO: 2202843 - RNA, 19 nt, Homo sapiens
  misc_RNA (1)...(19): siRNA sense strand
cacaaguguugcaguggaa

SEQ ID NO: 2202844 - RNA, 19 nt, Homo sapiens
  misc_RNA (1)...(19): siRNA sense strand
cuguggaacugaaauagau

SEQ ID NO: 2202845 - RNA, 19 nt, Homo sapiens
  misc_RNA (1)...(19): siRNA sense strand
gacaacaagcuaccuaaac

SEQ ID NO: 2202846 - RNA, 19 nt, Homo sapiens
  misc_RNA (1)...(19): siRNA sense strand
augugaagcuguauggauu

SEQ ID NO: 2202847 - RNA, 19 nt, Homo sapiens
  misc_RNA (1)...(19): siRNA sense strand
gccagauccuccaacuuca

SEQ ID NO: 2202848 - RNA, 19 nt, Homo sapiens
  misc_RNA (1)...(19): siRNA sense strand
caaccuauggagaugcauu

SEQ ID NO: 2202849 - RNA, 19 nt, Homo sapiens
  misc_RNA (1)...(19): siRNA sense strand
ucagaugcccaaagaauac

SEQ ID NO: 2202850 - RNA, 19 nt, Homo sapiens
  misc_RNA (1)...(19): siRNA sense strand
caacaagcuaccuaaacau

SEQ ID NO: 2202851 - RNA, 19 nt, Homo sapiens
  misc_RNA (1)...(19): siRNA sense strand
ccaaccacaggagauguua

SEQ ID NO: 2202852 - RNA, 19 nt, Homo sapiens
  misc_RNA (1)...(19): siRNA sense strand
gagauguuaguaaagaugu

SEQ ID NO: 2202853 - RNA, 19 nt, Homo sapiens
  misc_RNA (1)...(19): siRNA sense strand
cgacuaccuucagauuauc

SEQ ID NO: 2202854 - RNA, 19 nt, Homo sapiens
  misc_RNA (1)...(19): siRNA sense strand
guggaacugaaauagauaa

SEQ ID NO: 2202855 - RNA, 19 nt, Homo sapiens
  misc_RNA (1)...(19): siRNA sense strand
ggaauccucaaacugcaau

SEQ ID NO: 2202856 - RNA, 19 nt, Homo sapiens
  misc_RNA (1)...(19): siRNA sense strand
aggcgucucugccacguau

SEQ ID NO: 2202857 - RNA, 19 nt, Homo sapiens
  misc_RNA (1)...(19): siRNA sense strand
gauguuaguaaagauguug

SEQ ID NO: 2202858 - RNA, 19 nt, Homo sapiens
  misc_RNA (1)...(19): siRNA sense strand
cagaaagggagcaccaauc

SEQ ID NO: 2202859 - RNA, 19 nt, Homo sapiens
  misc_RNA (1)...(19): siRNA sense strand
gugcaguggucggaaaugg

SEQ ID NO: 2202860 - RNA, 19 nt, Homo sapiens
  misc_RNA (1)...(19): siRNA sense strand
uauacuacacgcucgaaga

SEQ ID NO: 2202861 - RNA, 19 nt, Homo sapiens
  misc_RNA (1)...(19): siRNA sense strand
aauaugggaacuuaaagga

SEQ ID NO: 2202862 - RNA, 19 nt, Homo sapiens
  misc_RNA (1)...(19): siRNA sense strand
caagcaucauaacucugaa

SEQ ID NO: 2202863 - RNA, 19 nt, Homo sapiens
  misc_RNA (1)...(19): siRNA sense strand
aacgacuaccuucagauua

SEQ ID NO: 2202864 - RNA, 19 nt, Homo sapiens
  misc_RNA (1)...(19): siRNA sense strand
gauccuccaacuucacaug

SEQ ID NO: 2202865 - RNA, 19 nt, Homo sapiens
  misc_RNA (1)...(19): siRNA sense strand
aagcagaagaauaugcaaa

SEQ ID NO: 2202866 - RNA, 19 nt, Homo sapiens
  misc_RNA (1)...(19): siRNA sense strand
gaaagggagcaccaaucag

SEQ ID NO: 2202867 - RNA, 19 nt, Homo sapiens
  misc_RNA (1)...(19): siRNA sense strand
agaaaucccaauuaagaag

SEQ ID NO: 2202868 - RNA, 19 nt, Homo sapiens
  misc_RNA (1)...(19): siRNA sense strand
ccacguauucagagaacga

SEQ ID NO: 2202869 - RNA, 19 nt, Homo sapiens
  misc_RNA (1)...(19): siRNA sense strand
agccagauccuccaacuuc

SEQ ID NO: 2202870 - RNA, 19 nt, Homo sapiens
  misc_RNA (1)...(19): siRNA sense strand
uaugacaacaagcuaccua

SEQ ID NO: 2202871 - RNA, 19 nt, Homo sapiens
  misc_RNA (1)...(19): siRNA sense strand
agccaucacuauuaugaca

SEQ ID NO: 2202872 - RNA, 19 nt, Homo sapiens
  misc_RNA (1)...(19): siRNA sense strand
gauauacagaguuguccau

SEQ ID NO: 2202873 - RNA, 19 nt, Homo sapiens
  misc_RNA (1)...(19): siRNA sense strand
gaugaucacaaguguugca

SEQ ID NO: 2202874 - RNA, 19 nt, Homo sapiens
  misc_RNA (1)...(19): siRNA sense strand
acggcaagcagaagaauau

SEQ ID NO: 2202875 - RNA, 19 nt, Homo sapiens
  misc_RNA (1)...(19): siRNA sense strand
gcccuucucuaaaacugua

SEQ ID NO: 2202876 - RNA, 19 nt, Homo sapiens
  misc_RNA (1)...(19): siRNA sense strand
cagagaacgacuaccuuca

SEQ ID NO: 2202877 - RNA, 19 nt, Homo sapiens
  misc_RNA (1)...(19): siRNA sense strand
ucaaacugcaauuuagcaa

SEQ ID NO: 2202878 - RNA, 19 nt, Homo sapiens
  misc_RNA (1)...(19): siRNA sense strand
ccugucagccaucacuauu

SEQ ID NO: 2202879 - RNA, 19 nt, Homo sapiens
  misc_RNA (1)...(19): siRNA sense strand
ggaagaagaugaugaauug

SEQ ID NO: 2202880 - RNA, 19 nt, Homo sapiens
  misc_RNA (1)...(19): siRNA sense strand
ccacucagcucaauaaaua

SEQ ID NO: 2202881 - RNA, 19 nt, Homo sapiens
  misc_RNA (1)...(19): siRNA sense strand
gaagaaagauagagagaaa

SEQ ID NO: 2202882 - RNA, 19 nt, Homo sapiens
  misc_RNA (1)...(19): siRNA sense strand
gcagaucccuacaaguuua

SEQ ID NO: 2202883 - RNA, 19 nt, Homo sapiens
  misc_RNA (1)...(19): siRNA sense strand
gaagcggccucggcuauua

SEQ ID NO: 2202884 - RNA, 19 nt, Homo sapiens
  misc_RNA (1)...(19): siRNA sense strand
uaaagagacuauccaggua

SEQ ID NO: 2202885 - RNA, 19 nt, Homo sapiens
  misc_RNA (1)...(19): siRNA sense strand
gggaacaccuucaaauaug

SEQ ID NO: 2202886 - RNA, 19 nt, Homo sapiens
  misc_RNA (1)...(19): siRNA sense strand
gagaaaggcaagaaagaua

SEQ ID NO: 2202887 - RNA, 19 nt, Homo sapiens
  misc_RNA (1)...(19): siRNA sense strand
caaagucauuuacaccuaa

SEQ ID NO: 2202888 - RNA, 19 nt, Homo sapiens
  misc_RNA (1)...(19): siRNA sense strand
gauaaaggcagagaagaua

SEQ ID NO: 2202889 - RNA, 19 nt, Homo sapiens
  misc_RNA (1)...(19): siRNA sense strand
gauaagagagagaaagaaa

SEQ ID NO: 2202890 - RNA, 19 nt, Homo sapiens
  misc_RNA (1)...(19): siRNA sense strand
gcacagaguccaccugaga

SEQ ID NO: 2202891 - RNA, 19 nt, Homo sapiens
  misc_RNA (1)...(19): siRNA sense strand
cacgcuagauguuguguua

SEQ ID NO: 2202892 - RNA, 19 nt, Homo sapiens
  misc_RNA (1)...(19): siRNA sense strand
gccagauccuuucgaauuu

SEQ ID NO: 2202893 - RNA, 19 nt, Homo sapiens
  misc_RNA (1)...(19): siRNA sense strand
gaaacaaagucauuuacac

SEQ ID NO: 2202894 - RNA, 19 nt, Homo sapiens
  misc_RNA (1)...(19): siRNA sense strand
gaggaggaagaaauuauua

SEQ ID NO: 2202895 - RNA, 19 nt, Homo sapiens
  misc_RNA (1)...(19): siRNA sense strand
caacuuuccuuauaucucu

SEQ ID NO: 2202896 - RNA, 19 nt, Homo sapiens
  misc_RNA (1)...(19): siRNA sense strand
ggcaagagaccacuggaua

SEQ ID NO: 2202897 - RNA, 19 nt, Homo sapiens
  misc_RNA (1)...(19): siRNA sense strand
gcagagaagauaagaugaa

SEQ ID NO: 2202898 - RNA, 19 nt, Homo sapiens
  misc_RNA (1)...(19): siRNA sense strand
agaaagagaagcauaaaga

SEQ ID NO: 2202899 - RNA, 19 nt, Homo sapiens
  misc_RNA (1)...(19): siRNA sense strand
gaaagagaagcauaaagau

SEQ ID NO: 2202900 - RNA, 19 nt, Homo sapiens
  misc_RNA (1)...(19): siRNA sense strand
cagagaagauaagaugaaa

SEQ ID NO: 2202901 - RNA, 19 nt, Homo sapiens
  misc_RNA (1)...(19): siRNA sense strand
gaaaggcaagaaagauaaa

SEQ ID NO: 2202902 - RNA, 19 nt, Homo sapiens
  misc_RNA (1)...(19): siRNA sense strand
gcaauggucggaaguccua

SEQ ID NO: 2202903 - RNA, 19 nt, Homo sapiens
  misc_RNA (1)...(19): siRNA sense strand
ggaggaggaagaaauuauu

SEQ ID NO: 2202904 - RNA, 19 nt, Homo sapiens
  misc_RNA (1)...(19): siRNA sense strand
ggauaguccugaagcugaa

SEQ ID NO: 2202905 - RNA, 19 nt, Homo sapiens
  misc_RNA (1)...(19): siRNA sense strand
aguuagagcuuuaucaguu

SEQ ID NO: 2202906 - RNA, 19 nt, Homo sapiens
  misc_RNA (1)...(19): siRNA sense strand
gagagaaaggcaagaaaga

SEQ ID NO: 2202907 - RNA, 19 nt, Homo sapiens
  misc_RNA (1)...(19): siRNA sense strand
uugaugagguuguacguaa

SEQ ID NO: 2202908 - RNA, 19 nt, Homo sapiens
  misc_RNA (1)...(19): siRNA sense strand
gaaauugaaagauggacuu

SEQ ID NO: 2202909 - RNA, 19 nt, Homo sapiens
  misc_RNA (1)...(19): siRNA sense strand
acaaagucauuuacaccua

SEQ ID NO: 2202910 - RNA, 19 nt, Homo sapiens
  misc_RNA (1)...(19): siRNA sense strand
caagguguaugaggagaaa

SEQ ID NO: 2202911 - RNA, 19 nt, Homo sapiens
  misc_RNA (1)...(19): siRNA sense strand
gaagaacugccagccauga

SEQ ID NO: 2202912 - RNA, 19 nt, Homo sapiens
  misc_RNA (1)...(19): siRNA sense strand
ggagaaagagaagcauaaa

SEQ ID NO: 2202913 - RNA, 19 nt, Homo sapiens
  misc_RNA (1)...(19): siRNA sense strand
ggcaagaaagauaaagaua

SEQ ID NO: 2202914 - RNA, 19 nt, Homo sapiens
  misc_RNA (1)...(19): siRNA sense strand
gagagaaagauacauguuc

SEQ ID NO: 2202915 - RNA, 19 nt, Homo sapiens
  misc_RNA (1)...(19): siRNA sense strand
aagauggacuugugaggaa

SEQ ID NO: 2202916 - RNA, 19 nt, Homo sapiens
  misc_RNA (1)...(19): siRNA sense strand
gcgaagaagcuaaauccuu

SEQ ID NO: 2202917 - RNA, 19 nt, Homo sapiens
  misc_RNA (1)...(19): siRNA sense strand
ggucggaaguccuauucga

SEQ ID NO: 2202918 - RNA, 19 nt, Homo sapiens
  misc_RNA (1)...(19): siRNA sense strand
gcaucuaccugacuuuagg

SEQ ID NO: 2202919 - RNA, 19 nt, Homo sapiens
  misc_RNA (1)...(19): siRNA sense strand
gcaagagaccacuggauag

SEQ ID NO: 2202920 - RNA, 19 nt, Homo sapiens
  misc_RNA (1)...(19): siRNA sense strand
gcuagauguuguguuauug

SEQ ID NO: 2202921 - RNA, 19 nt, Homo sapiens
  misc_RNA (1)...(19): siRNA sense strand
guuagagcuuuaucaguug

SEQ ID NO: 2202922 - RNA, 19 nt, Homo sapiens
  misc_RNA (1)...(19): siRNA sense strand
gaaagauaaaggcagagaa

SEQ ID NO: 2202923 - RNA, 19 nt, Homo sapiens
  misc_RNA (1)...(19): siRNA sense strand
agaaaggcaagaaagauaa

SEQ ID NO: 2202924 - RNA, 19 nt, Homo sapiens
  misc_RNA (1)...(19): siRNA sense strand
ucacaaaugccaacugcaa

SEQ ID NO: 2202925 - RNA, 19 nt, Homo sapiens
  misc_RNA (1)...(19): siRNA sense strand
ugagguguguggcgaagaa

SEQ ID NO: 2202926 - RNA, 19 nt, Homo sapiens
  misc_RNA (1)...(19): siRNA sense strand
ggagaaagagaagcaucua

SEQ ID NO: 2202927 - RNA, 19 nt, Homo sapiens
  misc_RNA (1)...(19): siRNA sense strand
ggaacaccuucaaauaugc

SEQ ID NO: 2202928 - RNA, 19 nt, Homo sapiens
  misc_RNA (1)...(19): siRNA sense strand
gcaaaaccauuagaaacaa

SEQ ID NO: 2202929 - RNA, 19 nt, Homo sapiens
  misc_RNA (1)...(19): siRNA sense strand
gauacauguucuuggauca

SEQ ID NO: 2202930 - RNA, 19 nt, Homo sapiens
  misc_RNA (1)...(19): siRNA sense strand
ggaaggagaaagagaagca

SEQ ID NO: 2202931 - RNA, 19 nt, Homo sapiens
  misc_RNA (1)...(19): siRNA sense strand
ugaagauguugaucccaaa

SEQ ID NO: 2202932 - RNA, 19 nt, Homo sapiens
  misc_RNA (1)...(19): siRNA sense strand
aagagcaggugcccacuga

SEQ ID NO: 2202933 - RNA, 19 nt, Homo sapiens
  misc_RNA (1)...(19): siRNA sense strand
guggaggaauuucuuaaag

SEQ ID NO: 2202934 - RNA, 19 nt, Homo sapiens
  misc_RNA (1)...(19): siRNA sense strand
ccacuccucugccucuuuc

SEQ ID NO: 2202935 - RNA, 19 nt, Homo sapiens
  misc_RNA (1)...(19): siRNA sense strand
ccucggcuauuaagcacua

SEQ ID NO: 2202936 - RNA, 19 nt, Homo sapiens
  misc_RNA (1)...(19): siRNA sense strand
gagcaggugcccacugaug

SEQ ID NO: 2202937 - RNA, 19 nt, Homo sapiens
  misc_RNA (1)...(19): siRNA sense strand
aggcagaucccuacaaguu

SEQ ID NO: 2202938 - RNA, 19 nt, Homo sapiens
  misc_RNA (1)...(19): siRNA sense strand
gggacacgcuagauguugu

SEQ ID NO: 2202939 - RNA, 19 nt, Homo sapiens
  misc_RNA (1)...(19): siRNA sense strand
agaagcaucuaccugacuu

SEQ ID NO: 2202940 - RNA, 19 nt, Homo sapiens
  misc_RNA (1)...(19): siRNA sense strand
gagaagauaagaugaaagc

SEQ ID NO: 2202941 - RNA, 19 nt, Homo sapiens
  misc_RNA (1)...(19): siRNA sense strand
cgcuagauguuguguuauu

SEQ ID NO: 2202942 - RNA, 19 nt, Homo sapiens
  misc_RNA (1)...(19): siRNA sense strand
gaagaagcuaaauccuuga

SEQ ID NO: 2202943 - RNA, 19 nt, Homo sapiens
  misc_RNA (1)...(19): siRNA sense strand
ccaaagugaaauugaaaga

SEQ ID NO: 2202944 - RNA, 19 nt, Homo sapiens
  misc_RNA (1)...(19): siRNA sense strand
ggaaucugaaggagacauu

SEQ ID NO: 2202945 - RNA, 19 nt, Homo sapiens
  misc_RNA (1)...(19): siRNA sense strand
aagagacuauccagguaaa

SEQ ID NO: 2202946 - RNA, 19 nt, Homo sapiens
  misc_RNA (1)...(19): siRNA sense strand
gaagacuaaaucaccuaaa

SEQ ID NO: 2202947 - RNA, 19 nt, Homo sapiens
  misc_RNA (1)...(19): siRNA sense strand
ugggaacaccuucaaauau

SEQ ID NO: 2202948 - RNA, 19 nt, Homo sapiens
  misc_RNA (1)...(19): siRNA sense strand
aaagagacuauccagguaa

SEQ ID NO: 2202949 - RNA, 19 nt, Homo sapiens
  misc_RNA (1)...(19): siRNA sense strand
ugaugagguuguacguaaa

SEQ ID NO: 2202950 - RNA, 19 nt, Homo sapiens
  misc_RNA (1)...(19): siRNA sense strand
auggagaguuagagcuuua

SEQ ID NO: 2202951 - RNA, 19 nt, Homo sapiens
  misc_RNA (1)...(19): siRNA sense strand
gaucccaaagugaaauuga

SEQ ID NO: 2202952 - RNA, 19 nt, Homo sapiens
  misc_RNA (1)...(19): siRNA sense strand
caaggucacgacucacauu

SEQ ID NO: 2202953 - RNA, 19 nt, Homo sapiens
  misc_RNA (1)...(19): siRNA sense strand
uggaagaagaugaugaauu

SEQ ID NO: 2202954 - RNA, 19 nt, Homo sapiens
  misc_RNA (1)...(19): siRNA sense strand
gagaauuuccugggcaaga

SEQ ID NO: 2202955 - RNA, 19 nt, Homo sapiens
  misc_RNA (1)...(19): siRNA sense strand
ugaggaaggagaaagagaa

SEQ ID NO: 2202956 - RNA, 19 nt, Homo sapiens
  misc_RNA (1)...(19): siRNA sense strand
gauguugaucccaaaguga

SEQ ID NO: 2202957 - RNA, 19 nt, Homo sapiens
  misc_RNA (1)...(19): siRNA sense strand
ggcagaucccuacaaguuu

SEQ ID NO: 2202958 - RNA, 19 nt, Homo sapiens
  misc_RNA (1)...(19): siRNA sense strand
cugggaacaccuucaaaua

SEQ ID NO: 2202959 - RNA, 19 nt, Homo sapiens
  misc_RNA (1)...(19): siRNA sense strand
agagccagauccuuucgaa

SEQ ID NO: 2202960 - RNA, 19 nt, Homo sapiens
  misc_RNA (1)...(19): siRNA sense strand
ccaugcagguucccuugga

SEQ ID NO: 2202961 - RNA, 19 nt, Homo sapiens
  misc_RNA (1)...(19): siRNA sense strand
caaaagaucccaccaaugc

SEQ ID NO: 2202962 - RNA, 19 nt, Homo sapiens
  misc_RNA (1)...(19): siRNA sense strand
agccagauccuuucgaauu

SEQ ID NO: 2202963 - RNA, 19 nt, Homo sapiens
  misc_RNA (1)...(19): siRNA sense strand
gauugaggccucuaucgau

SEQ ID NO: 2202964 - RNA, 19 nt, Homo sapiens
  misc_RNA (1)...(19): siRNA sense strand
cggaaguccuauucgauca

SEQ ID NO: 2202965 - RNA, 19 nt, Homo sapiens
  misc_RNA (1)...(19): siRNA sense strand
ggacagaagacuaaaucac

SEQ ID NO: 2202966 - RNA, 19 nt, Homo sapiens
  misc_RNA (1)...(19): siRNA sense strand
ggaggcacaucagcagaag

SEQ ID NO: 2202967 - RNA, 19 nt, Homo sapiens
  misc_RNA (1)...(19): siRNA sense strand
gagaaagagaagcauaaag

SEQ ID NO: 2202968 - RNA, 19 nt, Homo sapiens
  misc_RNA (1)...(19): siRNA sense strand
acaggacaguacagacuug

SEQ ID NO: 2202969 - RNA, 19 nt, Homo sapiens
  misc_RNA (1)...(19): siRNA sense strand
gagaguuagagcuuuauca

SEQ ID NO: 2202970 - RNA, 19 nt, Homo sapiens
  misc_RNA (1)...(19): siRNA sense strand
caagagaccacuggauagu

SEQ ID NO: 2202971 - RNA, 19 nt, Homo sapiens
  misc_RNA (1)...(19): siRNA sense strand
gauaaagauaagagagaga

SEQ ID NO: 2202972 - RNA, 19 nt, Homo sapiens
  misc_RNA (1)...(19): siRNA sense strand
auugaaagauggacuugug

SEQ ID NO: 2202973 - RNA, 19 nt, Homo sapiens
  misc_RNA (1)...(19): siRNA sense strand
uuacuagcccuaagagaau

SEQ ID NO: 2202974 - RNA, 19 nt, Homo sapiens
  misc_RNA (1)...(19): siRNA sense strand
gagguuguacguaaagcaa

SEQ ID NO: 2202975 - RNA, 19 nt, Homo sapiens
  misc_RNA (1)...(19): siRNA sense strand
aagcaucuaccugacuuua

SEQ ID NO: 2202976 - RNA, 19 nt, Homo sapiens
  misc_RNA (1)...(19): siRNA sense strand
aagauaagagagagaaaga

SEQ ID NO: 2202977 - RNA, 19 nt, Homo sapiens
  misc_RNA (1)...(19): siRNA sense strand
agagaagcauaaagauaag

SEQ ID NO: 2202978 - RNA, 19 nt, Homo sapiens
  misc_RNA (1)...(19): siRNA sense strand
agaggcagaucccuacaag

SEQ ID NO: 2202979 - RNA, 19 nt, Homo sapiens
  misc_RNA (1)...(19): siRNA sense strand
gaaacgggaugaaguuauu

SEQ ID NO: 2202980 - RNA, 19 nt, Homo sapiens
  misc_RNA (1)...(19): siRNA sense strand
gaagucagcuugaacaaag

SEQ ID NO: 2202981 - RNA, 19 nt, Homo sapiens
  misc_RNA (1)...(19): siRNA sense strand
ggaccugacuggagaauau

SEQ ID NO: 2202982 - RNA, 19 nt, Homo sapiens
  misc_RNA (1)...(19): siRNA sense strand
caaccaguaucgacaauaa

SEQ ID NO: 2202983 - RNA, 19 nt, Homo sapiens
  misc_RNA (1)...(19): siRNA sense strand
gaaaggcaauucaacagau

SEQ ID NO: 2202984 - RNA, 19 nt, Homo sapiens
  misc_RNA (1)...(19): siRNA sense strand
ccaaagagcugccuucaac

SEQ ID NO: 2202985 - RNA, 19 nt, Homo sapiens
  misc_RNA (1)...(19): siRNA sense strand
ggauugaccuuuauaugug

SEQ ID NO: 2202986 - RNA, 19 nt, Homo sapiens
  misc_RNA (1)...(19): siRNA sense strand
gaaacaagguucccagcau

SEQ ID NO: 2202987 - RNA, 19 nt, Homo sapiens
  misc_RNA (1)...(19): siRNA sense strand
ccacugugauuauuuguug

SEQ ID NO: 2202988 - RNA, 19 nt, Homo sapiens
  misc_RNA (1)...(19): siRNA sense strand
ggaguacucuauugaaguc

SEQ ID NO: 2202989 - RNA, 19 nt, Homo sapiens
  misc_RNA (1)...(19): siRNA sense strand
uaacuggauugaccuuuau

SEQ ID NO: 2202990 - RNA, 19 nt, Homo sapiens
  misc_RNA (1)...(19): siRNA sense strand
auaacuggauugaccuuua

SEQ ID NO: 2202991 - RNA, 19 nt, Homo sapiens
  misc_RNA (1)...(19): siRNA sense strand
gaucagauaacagcaauug

SEQ ID NO: 2202992 - RNA, 19 nt, Homo sapiens
  misc_RNA (1)...(19): siRNA sense strand
ggguguggcugauuauaau

SEQ ID NO: 2202993 - RNA, 19 nt, Homo sapiens
  misc_RNA (1)...(19): siRNA sense strand
gaacaaaggcaaaacauuc

SEQ ID NO: 2202994 - RNA, 19 nt, Homo sapiens
  misc_RNA (1)...(19): siRNA sense strand
gaggaguacucuauugaag

SEQ ID NO: 2202995 - RNA, 19 nt, Homo sapiens
  misc_RNA (1)...(19): siRNA sense strand
ccacucaccucagacaaga

SEQ ID NO: 2202996 - RNA, 19 nt, Homo sapiens
  misc_RNA (1)...(19): siRNA sense strand
gcaauucaacagaucgaaa

SEQ ID NO: 2202997 - RNA, 19 nt, Homo sapiens
  misc_RNA (1)...(19): siRNA sense strand
ccauggauguguugucaga

SEQ ID NO: 2202998 - RNA, 19 nt, Homo sapiens
  misc_RNA (1)...(19): siRNA sense strand
uucaacagaucgaaaguuu

SEQ ID NO: 2202999 - RNA, 19 nt, Homo sapiens
  misc_RNA (1)...(19): siRNA sense strand
uaaagaaacgggaugaagu

SEQ ID NO: 2203000 - RNA, 19 nt, Homo sapiens
  misc_RNA (1)...(19): siRNA sense strand
aaagaaacgggaugaaguu

SEQ ID NO: 2203001 - RNA, 19 nt, Homo sapiens
  misc_RNA (1)...(19): siRNA sense strand
ccacauguacugucaagga

SEQ ID NO: 2203002 - RNA, 19 nt, Homo sapiens
  misc_RNA (1)...(19): siRNA sense strand
uuccaaagcccaaauauuc

SEQ ID NO: 2203003 - RNA, 19 nt, Homo sapiens
  misc_RNA (1)...(19): siRNA sense strand
gcccaaauauucggaugug

SEQ ID NO: 2203004 - RNA, 19 nt, Homo sapiens
  misc_RNA (1)...(19): siRNA sense strand
guucccagcaugauuauug

SEQ ID NO: 2203005 - RNA, 19 nt, Homo sapiens
  misc_RNA (1)...(19): siRNA sense strand
aaaggucugucuugaugug

SEQ ID NO: 2203006 - RNA, 19 nt, Homo sapiens
  misc_RNA (1)...(19): siRNA sense strand
cauuugaccucuacuucau

SEQ ID NO: 2203007 - RNA, 19 nt, Homo sapiens
  misc_RNA (1)...(19): siRNA sense strand
ugucaaccauaacagagaa

SEQ ID NO: 2203008 - RNA, 19 nt, Homo sapiens
  misc_RNA (1)...(19): siRNA sense strand
caaccuuccugucaaccau

SEQ ID NO: 2203009 - RNA, 19 nt, Homo sapiens
  misc_RNA (1)...(19): siRNA sense strand
gaugaaaagccaaccagua

SEQ ID NO: 2203010 - RNA, 19 nt, Homo sapiens
  misc_RNA (1)...(19): siRNA sense strand
uggauugaccuuuauaugu

SEQ ID NO: 2203011 - RNA, 19 nt, Homo sapiens
  misc_RNA (1)...(19): siRNA sense strand
gcccugagaagcaccauug

SEQ ID NO: 2203012 - RNA, 19 nt, Homo sapiens
  misc_RNA (1)...(19): siRNA sense strand
aagguucccagcaugauua

SEQ ID NO: 2203013 - RNA, 19 nt, Homo sapiens
  misc_RNA (1)...(19): siRNA sense strand
caaauauucggaugugcuu

SEQ ID NO: 2203014 - RNA, 19 nt, Homo sapiens
  misc_RNA (1)...(19): siRNA sense strand
cgugaacaauaacuggauu

SEQ ID NO: 2203015 - RNA, 19 nt, Homo sapiens
  misc_RNA (1)...(19): siRNA sense strand
gcaggcaggauuuagaaag

SEQ ID NO: 2203016 - RNA, 19 nt, Homo sapiens
  misc_RNA (1)...(19): siRNA sense strand
guuccaaagcccaaauauu

SEQ ID NO: 2203017 - RNA, 19 nt, Homo sapiens
  misc_RNA (1)...(19): siRNA sense strand
ucuggcagcgugaacaaua

SEQ ID NO: 2203018 - RNA, 19 nt, Homo sapiens
  misc_RNA (1)...(19): siRNA sense strand
ggagugccucgcccucaaa

SEQ ID NO: 2203019 - RNA, 19 nt, Homo sapiens
  misc_RNA (1)...(19): siRNA sense strand
ggagugccuuucccuacca

SEQ ID NO: 2203020 - RNA, 19 nt, Homo sapiens
  misc_RNA (1)...(19): siRNA sense strand
ucagauaacagcaauugca

SEQ ID NO: 2203021 - RNA, 19 nt, Homo sapiens
  misc_RNA (1)...(19): siRNA sense strand
aaaggcaauucaacagauc

SEQ ID NO: 2203022 - RNA, 19 nt, Homo sapiens
  misc_RNA (1)...(19): siRNA sense strand
ggauuuagaaaggcaauuc

SEQ ID NO: 2203023 - RNA, 19 nt, Homo sapiens
  misc_RNA (1)...(19): siRNA sense strand
gaacugguggcacaugcau

SEQ ID NO: 2203024 - RNA, 19 nt, Homo sapiens
  misc_RNA (1)...(19): siRNA sense strand
caagguucccagcaugauu

SEQ ID NO: 2203025 - RNA, 19 nt, Homo sapiens
  misc_RNA (1)...(19): siRNA sense strand
gggcucauuugaccucuac

SEQ ID NO: 2203026 - RNA, 19 nt, Homo sapiens
  misc_RNA (1)...(19): siRNA sense strand
acacagcccggaguacuuu

SEQ ID NO: 2203027 - RNA, 19 nt, Homo sapiens
  misc_RNA (1)...(19): siRNA sense strand
gauagagggcaaucuggau

SEQ ID NO: 2203028 - RNA, 19 nt, Homo sapiens
  misc_RNA (1)...(19): siRNA sense strand
aggaaacaguggcgagguu

SEQ ID NO: 2203029 - RNA, 19 nt, Homo sapiens
  misc_RNA (1)...(19): siRNA sense strand
cgguggagccuuccucuga

SEQ ID NO: 2203030 - RNA, 19 nt, Homo sapiens
  misc_RNA (1)...(19): siRNA sense strand
ugaccucuacuucaucuug

SEQ ID NO: 2203031 - RNA, 19 nt, Homo sapiens
  misc_RNA (1)...(19): siRNA sense strand
agaaaggcaauucaacaga

SEQ ID NO: 2203032 - RNA, 19 nt, Homo sapiens
  misc_RNA (1)...(19): siRNA sense strand
ccucagacaagaauagaau

SEQ ID NO: 2203033 - RNA, 19 nt, Homo sapiens
  misc_RNA (1)...(19): siRNA sense strand
cagaugccagggcucauuu

SEQ ID NO: 2203034 - RNA, 19 nt, Homo sapiens
  misc_RNA (1)...(19): siRNA sense strand
ugaagucagcuugaacaaa

SEQ ID NO: 2203035 - RNA, 19 nt, Homo sapiens
  misc_RNA (1)...(19): siRNA sense strand
cuauugaagucagcuugaa

SEQ ID NO: 2203036 - RNA, 19 nt, Homo sapiens
  misc_RNA (1)...(19): siRNA sense strand
aagaaacgggaugaaguua

SEQ ID NO: 2203037 - RNA, 19 nt, Homo sapiens
  misc_RNA (1)...(19): siRNA sense strand
cugagaagcaccauugaug

SEQ ID NO: 2203038 - RNA, 19 nt, Homo sapiens
  misc_RNA (1)...(19): siRNA sense strand
gaugccagggcucauuuga

SEQ ID NO: 2203039 - RNA, 19 nt, Homo sapiens
  misc_RNA (1)...(19): siRNA sense strand
uuagaaaggcaauucaaca

SEQ ID NO: 2203040 - RNA, 19 nt, Homo sapiens
  misc_RNA (1)...(19): siRNA sense strand
cuggcagcgugaacaauaa

SEQ ID NO: 2203041 - RNA, 19 nt, Homo sapiens
  misc_RNA (1)...(19): siRNA sense strand
cccuggguguggcugauua

SEQ ID NO: 2203042 - RNA, 19 nt, Homo sapiens
  misc_RNA (1)...(19): siRNA sense strand
caggugccauggauguguu

SEQ ID NO: 2203043 - RNA, 19 nt, Homo sapiens
  misc_RNA (1)...(19): siRNA sense strand
auagagggcaaucuggaua

SEQ ID NO: 2203044 - RNA, 19 nt, Homo sapiens
  misc_RNA (1)...(19): siRNA sense strand
caggcaggauuuagaaagg

SEQ ID NO: 2203045 - RNA, 19 nt, Homo sapiens
  misc_RNA (1)...(19): siRNA sense strand
ugagacacagcccggagua

SEQ ID NO: 2203046 - RNA, 19 nt, Homo sapiens
  misc_RNA (1)...(19): siRNA sense strand
gccaaccaguaucgacaau

SEQ ID NO: 2203047 - RNA, 19 nt, Homo sapiens
  misc_RNA (1)...(19): siRNA sense strand
gauuauugcuaugacugau

SEQ ID NO: 2203048 - RNA, 19 nt, Homo sapiens
  misc_RNA (1)...(19): siRNA sense strand
ugcuaugacugauggagaa

SEQ ID NO: 2203049 - RNA, 19 nt, Homo sapiens
  misc_RNA (1)...(19): siRNA sense strand
gacacagcccggaguacuu

SEQ ID NO: 2203050 - RNA, 19 nt, Homo sapiens
  misc_RNA (1)...(19): siRNA sense strand
uggaucagauaacagcaau

SEQ ID NO: 2203051 - RNA, 19 nt, Homo sapiens
  misc_RNA (1)...(19): siRNA sense strand
ucaaaaggcucggaaacug

SEQ ID NO: 2203052 - RNA, 19 nt, Homo sapiens
  misc_RNA (1)...(19): siRNA sense strand
caauucaacagaucgaaag

SEQ ID NO: 2203053 - RNA, 19 nt, Homo sapiens
  misc_RNA (1)...(19): siRNA sense strand
caaccauaacagagaauuc

SEQ ID NO: 2203054 - RNA, 19 nt, Homo sapiens
  misc_RNA (1)...(19): siRNA sense strand
caacuccggaaacaagguu

SEQ ID NO: 2203055 - RNA, 19 nt, Homo sapiens
  misc_RNA (1)...(19): siRNA sense strand
ggagaacugguggcacaug

SEQ ID NO: 2203056 - RNA, 19 nt, Homo sapiens
  misc_RNA (1)...(19): siRNA sense strand
caccacauguacugucaag

SEQ ID NO: 2203057 - RNA, 19 nt, Homo sapiens
  misc_RNA (1)...(19): siRNA sense strand
ccaaccaguaucgacaaua

SEQ ID NO: 2203058 - RNA, 19 nt, Homo sapiens
  misc_RNA (1)...(19): siRNA sense strand
agaaacgggaugaaguuau

SEQ ID NO: 2203059 - RNA, 19 nt, Homo sapiens
  misc_RNA (1)...(19): siRNA sense strand
uggguguggcugauuauaa

SEQ ID NO: 2203060 - RNA, 19 nt, Homo sapiens
  misc_RNA (1)...(19): siRNA sense strand
gcucauuugaccucuacuu

SEQ ID NO: 2203061 - RNA, 19 nt, Homo sapiens
  misc_RNA (1)...(19): siRNA sense strand
ugccauggauguguuguca

SEQ ID NO: 2203062 - RNA, 19 nt, Homo sapiens
  misc_RNA (1)...(19): siRNA sense strand
gaugaaguuauuugcagau

SEQ ID NO: 2203063 - RNA, 19 nt, Homo sapiens
  misc_RNA (1)...(19): siRNA sense strand
cuaaagaaacgggaugaag

SEQ ID NO: 2203064 - RNA, 19 nt, Homo sapiens
  misc_RNA (1)...(19): siRNA sense strand
gcaugauuauugcuaugac

SEQ ID NO: 2203065 - RNA, 19 nt, Homo sapiens
  misc_RNA (1)...(19): siRNA sense strand
gauuuagaaaggcaauuca

SEQ ID NO: 2203066 - RNA, 19 nt, Homo sapiens
  misc_RNA (1)...(19): siRNA sense strand
aaauggcuuucagaaucua

SEQ ID NO: 2203067 - RNA, 19 nt, Homo sapiens
  misc_RNA (1)...(19): siRNA sense strand
acugguggcacaugcauuu

SEQ ID NO: 2203068 - RNA, 19 nt, Homo sapiens
  misc_RNA (1)...(19): siRNA sense strand
uaugacugauggagaacug

SEQ ID NO: 2203069 - RNA, 19 nt, Homo sapiens
  misc_RNA (1)...(19): siRNA sense strand
cagcuugaacaaaggcaaa

SEQ ID NO: 2203070 - RNA, 19 nt, Homo sapiens
  misc_RNA (1)...(19): siRNA sense strand
ucauuugaccucuacuuca

SEQ ID NO: 2203071 - RNA, 19 nt, Homo sapiens
  misc_RNA (1)...(19): siRNA sense strand
agggcaaucuggauaccuu

SEQ ID NO: 2203072 - RNA, 19 nt, Homo sapiens
  misc_RNA (1)...(19): siRNA sense strand
caugcaggcaggauuuaga

SEQ ID NO: 2203073 - RNA, 19 nt, Homo sapiens
  misc_RNA (1)...(19): siRNA sense strand
gggcaaucuggauaccuuu

SEQ ID NO: 2203074 - RNA, 19 nt, Homo sapiens
  misc_RNA (1)...(19): siRNA sense strand
ccaguaucgacaauaauuc

SEQ ID NO: 2203075 - RNA, 19 nt, Homo sapiens
  misc_RNA (1)...(19): siRNA sense strand
accaguaucgacaauaauu

SEQ ID NO: 2203076 - RNA, 19 nt, Homo sapiens
  misc_RNA (1)...(19): siRNA sense strand
ggacuuaaaugaggaagaa

SEQ ID NO: 2203077 - RNA, 19 nt, Homo sapiens
  misc_RNA (1)...(19): siRNA sense strand
cuagaaaccuguuguguga

SEQ ID NO: 2203078 - RNA, 19 nt, Homo sapiens
  misc_RNA (1)...(19): siRNA sense strand
guaaacagcucaaagaacu

SEQ ID NO: 2203079 - RNA, 19 nt, Homo sapiens
  misc_RNA (1)...(19): siRNA sense strand
gaagauaggauaccaaugg

SEQ ID NO: 2203080 - RNA, 19 nt, Homo sapiens
  misc_RNA (1)...(19): siRNA sense strand
ggacugccauuucgccaaa

SEQ ID NO: 2203081 - RNA, 19 nt, Homo sapiens
  misc_RNA (1)...(19): siRNA sense strand
ccaggaggauucuaaggua

SEQ ID NO: 2203082 - RNA, 19 nt, Homo sapiens
  misc_RNA (1)...(19): siRNA sense strand
uaugaccgauacagaauua

SEQ ID NO: 2203083 - RNA, 19 nt, Homo sapiens
  misc_RNA (1)...(19): siRNA sense strand
gcagaugaguauuaugaau

SEQ ID NO: 2203084 - RNA, 19 nt, Homo sapiens
  misc_RNA (1)...(19): siRNA sense strand
ccacaaagaugggcagaau

SEQ ID NO: 2203085 - RNA, 19 nt, Homo sapiens
  misc_RNA (1)...(19): siRNA sense strand
gcggaaagccuuaagagaa

SEQ ID NO: 2203086 - RNA, 19 nt, Homo sapiens
  misc_RNA (1)...(19): siRNA sense strand
uaacuaagcaagacaagaa

SEQ ID NO: 2203087 - RNA, 19 nt, Homo sapiens
  misc_RNA (1)...(19): siRNA sense strand
gauccagucucucuacaug

SEQ ID NO: 2203088 - RNA, 19 nt, Homo sapiens
  misc_RNA (1)...(19): siRNA sense strand
gcucaaagaacuaaagcua

SEQ ID NO: 2203089 - RNA, 19 nt, Homo sapiens
  misc_RNA (1)...(19): siRNA sense strand
ggagacagagcauguggua

SEQ ID NO: 2203090 - RNA, 19 nt, Homo sapiens
  misc_RNA (1)...(19): siRNA sense strand
gucaacaccuucccuuauu

SEQ ID NO: 2203091 - RNA, 19 nt, Homo sapiens
  misc_RNA (1)...(19): siRNA sense strand
ggauaccaauggcagauga

SEQ ID NO: 2203092 - RNA, 19 nt, Homo sapiens
  misc_RNA (1)...(19): siRNA sense strand
ggaaagccuuaagagaauu

SEQ ID NO: 2203093 - RNA, 19 nt, Homo sapiens
  misc_RNA (1)...(19): siRNA sense strand
ugacgaagauccagucucu

SEQ ID NO: 2203094 - RNA, 19 nt, Homo sapiens
  misc_RNA (1)...(19): siRNA sense strand
cggaaagccuuaagagaau

SEQ ID NO: 2203095 - RNA, 19 nt, Homo sapiens
  misc_RNA (1)...(19): siRNA sense strand
gcacucagcaguuuaugau

SEQ ID NO: 2203096 - RNA, 19 nt, Homo sapiens
  misc_RNA (1)...(19): siRNA sense strand
gcaagacaagaaccucaua

SEQ ID NO: 2203097 - RNA, 19 nt, Homo sapiens
  misc_RNA (1)...(19): siRNA sense strand
caauggcagaugaguauua

SEQ ID NO: 2203098 - RNA, 19 nt, Homo sapiens
  misc_RNA (1)...(19): siRNA sense strand
gagaaagucaggagacaga

SEQ ID NO: 2203099 - RNA, 19 nt, Homo sapiens
  misc_RNA (1)...(19): siRNA sense strand
gaugaaugauuuggcuaaa

SEQ ID NO: 2203100 - RNA, 19 nt, Homo sapiens
  misc_RNA (1)...(19): siRNA sense strand
uaacagagugugacgaaga

SEQ ID NO: 2203101 - RNA, 19 nt, Homo sapiens
  misc_RNA (1)...(19): siRNA sense strand
caagcaagauguggccaaa

SEQ ID NO: 2203102 - RNA, 19 nt, Homo sapiens
  misc_RNA (1)...(19): siRNA sense strand
acaaagaugggcagaauga

SEQ ID NO: 2203103 - RNA, 19 nt, Homo sapiens
  misc_RNA (1)...(19): siRNA sense strand
aaacuagggcugacaagaa

SEQ ID NO: 2203104 - RNA, 19 nt, Homo sapiens
  misc_RNA (1)...(19): siRNA sense strand
gaaagccuuaagagaauuu

SEQ ID NO: 2203105 - RNA, 19 nt, Homo sapiens
  misc_RNA (1)...(19): siRNA sense strand
gcaaggagccacagaccau

SEQ ID NO: 2203106 - RNA, 19 nt, Homo sapiens
  misc_RNA (1)...(19): siRNA sense strand
ggaugaaugauuuggcuaa

SEQ ID NO: 2203107 - RNA, 19 nt, Homo sapiens
  misc_RNA (1)...(19): siRNA sense strand
caggaggauucuaagguaa

SEQ ID NO: 2203108 - RNA, 19 nt, Homo sapiens
  misc_RNA (1)...(19): siRNA sense strand
gaaacuagggcugacaaga

SEQ ID NO: 2203109 - RNA, 19 nt, Homo sapiens
  misc_RNA (1)...(19): siRNA sense strand
caagaaacagugcgacuuc

SEQ ID NO: 2203110 - RNA, 19 nt, Homo sapiens
  misc_RNA (1)...(19): siRNA sense strand
caacaauucaggaggaaga

SEQ ID NO: 2203111 - RNA, 19 nt, Homo sapiens
  misc_RNA (1)...(19): siRNA sense strand
gacaagaaccucauaaagc

SEQ ID NO: 2203112 - RNA, 19 nt, Homo sapiens
  misc_RNA (1)...(19): siRNA sense strand
gaccagaggacugccauuu

SEQ ID NO: 2203113 - RNA, 19 nt, Homo sapiens
  misc_RNA (1)...(19): siRNA sense strand
caagacaagaaccucauaa

SEQ ID NO: 2203114 - RNA, 19 nt, Homo sapiens
  misc_RNA (1)...(19): siRNA sense strand
ugaaugauuuggcuaaagg

SEQ ID NO: 2203115 - RNA, 19 nt, Homo sapiens
  misc_RNA (1)...(19): siRNA sense strand
ucacccagcucaccaagca

SEQ ID NO: 2203116 - RNA, 19 nt, Homo sapiens
  misc_RNA (1)...(19): siRNA sense strand
guccugaaauggaugaaug

SEQ ID NO: 2203117 - RNA, 19 nt, Homo sapiens
  misc_RNA (1)...(19): siRNA sense strand
aagcaaaucuugucaacac

SEQ ID NO: 2203118 - RNA, 19 nt, Homo sapiens
  misc_RNA (1)...(19): siRNA sense strand
cgacuucaaccaagaauag

SEQ ID NO: 2203119 - RNA, 19 nt, Homo sapiens
  misc_RNA (1)...(19): siRNA sense strand
uaccaugccuguacuucuu

SEQ ID NO: 2203120 - RNA, 19 nt, Homo sapiens
  misc_RNA (1)...(19): siRNA sense strand
ccagcucucuccaugucua

SEQ ID NO: 2203121 - RNA, 19 nt, Homo sapiens
  misc_RNA (1)...(19): siRNA sense strand
caccucaccuacucuaaug

SEQ ID NO: 2203122 - RNA, 19 nt, Homo sapiens
  misc_RNA (1)...(19): siRNA sense strand
caagacuucuaauccugaa

SEQ ID NO: 2203123 - RNA, 19 nt, Homo sapiens
  misc_RNA (1)...(19): siRNA sense strand
ccagaggacugccauuucg

SEQ ID NO: 2203124 - RNA, 19 nt, Homo sapiens
  misc_RNA (1)...(19): siRNA sense strand
gaagauccagucucucuac

SEQ ID NO: 2203125 - RNA, 19 nt, Homo sapiens
  misc_RNA (1)...(19): siRNA sense strand
guuucagccuucaggauaa

SEQ ID NO: 2203126 - RNA, 19 nt, Homo sapiens
  misc_RNA (1)...(19): siRNA sense strand
aaacucggcaggacuuaaa

SEQ ID NO: 2203127 - RNA, 19 nt, Homo sapiens
  misc_RNA (1)...(19): siRNA sense strand
gaaacucggcaggacuuaa

SEQ ID NO: 2203128 - RNA, 19 nt, Homo sapiens
  misc_RNA (1)...(19): siRNA sense strand
ugacaagacuucuaauccu

SEQ ID NO: 2203129 - RNA, 19 nt, Homo sapiens
  misc_RNA (1)...(19): siRNA sense strand
uggcagaugaguauuauga

SEQ ID NO: 2203130 - RNA, 19 nt, Homo sapiens
  misc_RNA (1)...(19): siRNA sense strand
aaacaaacaggaagaaguc

SEQ ID NO: 2203131 - RNA, 19 nt, Homo sapiens
  misc_RNA (1)...(19): siRNA sense strand
caaaucuugucaacaccuu

SEQ ID NO: 2203132 - RNA, 19 nt, Homo sapiens
  misc_RNA (1)...(19): siRNA sense strand
aaacagcucaaagaacuaa

SEQ ID NO: 2203133 - RNA, 19 nt, Homo sapiens
  misc_RNA (1)...(19): siRNA sense strand
gcccaaguccaucuucaaa

SEQ ID NO: 2203134 - RNA, 19 nt, Homo sapiens
  misc_RNA (1)...(19): siRNA sense strand
ccucaccaguccacaaaga

SEQ ID NO: 2203135 - RNA, 19 nt, Homo sapiens
  misc_RNA (1)...(19): siRNA sense strand
gcucaugagaguccacaaa

SEQ ID NO: 2203136 - RNA, 19 nt, Homo sapiens
  misc_RNA (1)...(19): siRNA sense strand
ccaaguccaucuucaaagc

SEQ ID NO: 2203137 - RNA, 19 nt, Homo sapiens
  misc_RNA (1)...(19): siRNA sense strand
uaaacaaacaggaagaagu

SEQ ID NO: 2203138 - RNA, 19 nt, Homo sapiens
  misc_RNA (1)...(19): siRNA sense strand
gcaucucaccuuccuguug

SEQ ID NO: 2203139 - RNA, 19 nt, Homo sapiens
  misc_RNA (1)...(19): siRNA sense strand
ucaacaccuucccuuauuc

SEQ ID NO: 2203140 - RNA, 19 nt, Homo sapiens
  misc_RNA (1)...(19): siRNA sense strand
agacagagcaugugguauc

SEQ ID NO: 2203141 - RNA, 19 nt, Homo sapiens
  misc_RNA (1)...(19): siRNA sense strand
gggaggagccacggagaaa

SEQ ID NO: 2203142 - RNA, 19 nt, Homo sapiens
  misc_RNA (1)...(19): siRNA sense strand
ggagagaagagagcaacuu

SEQ ID NO: 2203143 - RNA, 19 nt, Homo sapiens
  misc_RNA (1)...(19): siRNA sense strand
ccacugcugucgccacgau

SEQ ID NO: 2203144 - RNA, 19 nt, Homo sapiens
  misc_RNA (1)...(19): siRNA sense strand
caugaagaccagacugauu

SEQ ID NO: 2203145 - RNA, 19 nt, Homo sapiens
  misc_RNA (1)...(19): siRNA sense strand
agaaauaccggccuucaca

SEQ ID NO: 2203146 - RNA, 19 nt, Homo sapiens
  misc_RNA (1)...(19): siRNA sense strand
gccagagauucaacuuaga

SEQ ID NO: 2203147 - RNA, 19 nt, Homo sapiens
  misc_RNA (1)...(19): siRNA sense strand
ccaggaagcccaaguccau

SEQ ID NO: 2203148 - RNA, 19 nt, Homo sapiens
  misc_RNA (1)...(19): siRNA sense strand
acaggaagaaguccacaaa

SEQ ID NO: 2203149 - RNA, 19 nt, Homo sapiens
  misc_RNA (1)...(19): siRNA sense strand
gagaaacuagggcugacaa

SEQ ID NO: 2203150 - RNA, 19 nt, Homo sapiens
  misc_RNA (1)...(19): siRNA sense strand
ggccgacagugcaccagaa

SEQ ID NO: 2203151 - RNA, 19 nt, Homo sapiens
  misc_RNA (1)...(19): siRNA sense strand
aagccaaacugagacuauu

SEQ ID NO: 2203152 - RNA, 19 nt, Homo sapiens
  misc_RNA (1)...(19): siRNA sense strand
gaagaaguccacaaaagga

SEQ ID NO: 2203153 - RNA, 19 nt, Homo sapiens
  misc_RNA (1)...(19): siRNA sense strand
caccagcucucuccauguc

SEQ ID NO: 2203154 - RNA, 19 nt, Homo sapiens
  misc_RNA (1)...(19): siRNA sense strand
uaagguaacuaagcaagac

SEQ ID NO: 2203155 - RNA, 19 nt, Homo sapiens
  misc_RNA (1)...(19): siRNA sense strand
gcuaaagcugucagaagaa

SEQ ID NO: 2203156 - RNA, 19 nt, Homo sapiens
  misc_RNA (1)...(19): siRNA sense strand
ggcuaaaggucguaaacag

SEQ ID NO: 2203157 - RNA, 19 nt, Homo sapiens
  misc_RNA (1)...(19): siRNA sense strand
gaaauaccggccuucacau

SEQ ID NO: 2203158 - RNA, 19 nt, Homo sapiens
  misc_RNA (1)...(19): siRNA sense strand
uccagucucucuacaugaa

SEQ ID NO: 2203159 - RNA, 19 nt, Homo sapiens
  misc_RNA (1)...(19): siRNA sense strand
agccagagauucaacuuag

SEQ ID NO: 2203160 - RNA, 19 nt, Homo sapiens
  misc_RNA (1)...(19): siRNA sense strand
gcaggaacaccagcucaug

SEQ ID NO: 2203161 - RNA, 19 nt, Homo sapiens
  misc_RNA (1)...(19): siRNA sense strand
agacaagaaccucauaaag

SEQ ID NO: 2203162 - RNA, 19 nt, Homo sapiens
  misc_RNA (1)...(19): siRNA sense strand
gaaguccugaaauggauga

SEQ ID NO: 2203163 - RNA, 19 nt, Homo sapiens
  misc_RNA (1)...(19): siRNA sense strand
caggaacaccagcucauga

SEQ ID NO: 2203164 - RNA, 19 nt, Homo sapiens
  misc_RNA (1)...(19): siRNA sense strand
gaaacagugcgacuucaac

SEQ ID NO: 2203165 - RNA, 19 nt, Homo sapiens
  misc_RNA (1)...(19): siRNA sense strand
ggaacaccagcucaugaga

SEQ ID NO: 2203166 - RNA, 19 nt, Homo sapiens
  misc_RNA (1)...(19): siRNA sense strand
cauaaaagccaaacugaga

SEQ ID NO: 2203167 - RNA, 19 nt, Homo sapiens
  misc_RNA (1)...(19): siRNA sense strand
uaaugagacugagccuguu

SEQ ID NO: 2203168 - RNA, 19 nt, Homo sapiens
  misc_RNA (1)...(19): siRNA sense strand
gaggagccacggagaaagu

SEQ ID NO: 2203169 - RNA, 19 nt, Homo sapiens
  misc_RNA (1)...(19): siRNA sense strand
gccuucaagugccaagaaa

SEQ ID NO: 2203170 - RNA, 19 nt, Homo sapiens
  misc_RNA (1)...(19): siRNA sense strand
cagcagcaccacuguaaca

SEQ ID NO: 2203171 - RNA, 19 nt, Homo sapiens
  misc_RNA (1)...(19): siRNA sense strand
aauggcagaugaguauuau

SEQ ID NO: 2203172 - RNA, 19 nt, Homo sapiens
  misc_RNA (1)...(19): siRNA sense strand
aagaagagacugcggaaag

SEQ ID NO: 2203173 - RNA, 19 nt, Homo sapiens
  misc_RNA (1)...(19): siRNA sense strand
caacuuagaccccgaguca

SEQ ID NO: 2203174 - RNA, 19 nt, Homo sapiens
  misc_RNA (1)...(19): siRNA sense strand
ugucaacaccuucccuuau

SEQ ID NO: 2203175 - RNA, 19 nt, Homo sapiens
  misc_RNA (1)...(19): siRNA sense strand
acccagcacucagcaguuu

SEQ ID NO: 2203176 - RNA, 19 nt, Homo sapiens
  misc_RNA (1)...(19): siRNA sense strand
ggacuuaaaugaggaagaa

SEQ ID NO: 2203177 - RNA, 19 nt, Homo sapiens
  misc_RNA (1)...(19): siRNA sense strand
cuagaaaccuguuguguga

SEQ ID NO: 2203178 - RNA, 19 nt, Homo sapiens
  misc_RNA (1)...(19): siRNA sense strand
guaaacagcucaaagaacu

SEQ ID NO: 2203179 - RNA, 19 nt, Homo sapiens
  misc_RNA (1)...(19): siRNA sense strand
gaagauaggauaccaaugg

SEQ ID NO: 2203180 - RNA, 19 nt, Homo sapiens
  misc_RNA (1)...(19): siRNA sense strand
ggacugccauuucgccaaa

SEQ ID NO: 2203181 - RNA, 19 nt, Homo sapiens
  misc_RNA (1)...(19): siRNA sense strand
ccaggaggauucuaaggua

SEQ ID NO: 2203182 - RNA, 19 nt, Homo sapiens
  misc_RNA (1)...(19): siRNA sense strand
uaugaccgauacagaauua

SEQ ID NO: 2203183 - RNA, 19 nt, Homo sapiens
  misc_RNA (1)...(19): siRNA sense strand
gcagaugaguauuaugaau

SEQ ID NO: 2203184 - RNA, 19 nt, Homo sapiens
  misc_RNA (1)...(19): siRNA sense strand
ccacaaagaugggcagaau

SEQ ID NO: 2203185 - RNA, 19 nt, Homo sapiens
  misc_RNA (1)...(19): siRNA sense strand
gcggaaagccuuaagagaa

SEQ ID NO: 2203186 - RNA, 19 nt, Homo sapiens
  misc_RNA (1)...(19): siRNA sense strand
uaacuaagcaagacaagaa

SEQ ID NO: 2203187 - RNA, 19 nt, Homo sapiens
  misc_RNA (1)...(19): siRNA sense strand
gauccagucucucuacaug

SEQ ID NO: 2203188 - RNA, 19 nt, Homo sapiens
  misc_RNA (1)...(19): siRNA sense strand
gcucaaagaacuaaagcua

SEQ ID NO: 2203189 - RNA, 19 nt, Homo sapiens
  misc_RNA (1)...(19): siRNA sense strand
ggagacagagcauguggua

SEQ ID NO: 2203190 - RNA, 19 nt, Homo sapiens
  misc_RNA (1)...(19): siRNA sense strand
gucaacaccuucccuuauu

SEQ ID NO: 2203191 - RNA, 19 nt, Homo sapiens
  misc_RNA (1)...(19): siRNA sense strand
ggauaccaauggcagauga

SEQ ID NO: 2203192 - RNA, 19 nt, Homo sapiens
  misc_RNA (1)...(19): siRNA sense strand
ggaaagccuuaagagaauu

SEQ ID NO: 2203193 - RNA, 19 nt, Homo sapiens
  misc_RNA (1)...(19): siRNA sense strand
ugacgaagauccagucucu

SEQ ID NO: 2203194 - RNA, 19 nt, Homo sapiens
  misc_RNA (1)...(19): siRNA sense strand
cggaaagccuuaagagaau

SEQ ID NO: 2203195 - RNA, 19 nt, Homo sapiens
  misc_RNA (1)...(19): siRNA sense strand
gcacucagcaguuuaugau

SEQ ID NO: 2203196 - RNA, 19 nt, Homo sapiens
  misc_RNA (1)...(19): siRNA sense strand
gcaagacaagaaccucaua

SEQ ID NO: 2203197 - RNA, 19 nt, Homo sapiens
  misc_RNA (1)...(19): siRNA sense strand
caauggcagaugaguauua

SEQ ID NO: 2203198 - RNA, 19 nt, Homo sapiens
  misc_RNA (1)...(19): siRNA sense strand
gagaaagucaggagacaga

SEQ ID NO: 2203199 - RNA, 19 nt, Homo sapiens
  misc_RNA (1)...(19): siRNA sense strand
gaugaaugauuuggcuaaa

SEQ ID NO: 2203200 - RNA, 19 nt, Homo sapiens
  misc_RNA (1)...(19): siRNA sense strand
uaacagagugugacgaaga

SEQ ID NO: 2203201 - RNA, 19 nt, Homo sapiens
  misc_RNA (1)...(19): siRNA sense strand
caagcaagauguggccaaa

SEQ ID NO: 2203202 - RNA, 19 nt, Homo sapiens
  misc_RNA (1)...(19): siRNA sense strand
acaaagaugggcagaauga

SEQ ID NO: 2203203 - RNA, 19 nt, Homo sapiens
  misc_RNA (1)...(19): siRNA sense strand
aaacuagggcugacaagaa

SEQ ID NO: 2203204 - RNA, 19 nt, Homo sapiens
  misc_RNA (1)...(19): siRNA sense strand
gaaagccuuaagagaauuu

SEQ ID NO: 2203205 - RNA, 19 nt, Homo sapiens
  misc_RNA (1)...(19): siRNA sense strand
gcaaggagccacagaccau

SEQ ID NO: 2203206 - RNA, 19 nt, Homo sapiens
  misc_RNA (1)...(19): siRNA sense strand
ggaugaaugauuuggcuaa

SEQ ID NO: 2203207 - RNA, 19 nt, Homo sapiens
  misc_RNA (1)...(19): siRNA sense strand
caggaggauucuaagguaa

SEQ ID NO: 2203208 - RNA, 19 nt, Homo sapiens
  misc_RNA (1)...(19): siRNA sense strand
gaaacuagggcugacaaga

SEQ ID NO: 2203209 - RNA, 19 nt, Homo sapiens
  misc_RNA (1)...(19): siRNA sense strand
caagaaacagugcgacuuc

SEQ ID NO: 2203210 - RNA, 19 nt, Homo sapiens
  misc_RNA (1)...(19): siRNA sense strand
caacaauucaggaggaaga

SEQ ID NO: 2203211 - RNA, 19 nt, Homo sapiens
  misc_RNA (1)...(19): siRNA sense strand
gacaagaaccucauaaagc

SEQ ID NO: 2203212 - RNA, 19 nt, Homo sapiens
  misc_RNA (1)...(19): siRNA sense strand
gaccagaggacugccauuu

SEQ ID NO: 2203213 - RNA, 19 nt, Homo sapiens
  misc_RNA (1)...(19): siRNA sense strand
caagacaagaaccucauaa

SEQ ID NO: 2203214 - RNA, 19 nt, Homo sapiens
  misc_RNA (1)...(19): siRNA sense strand
ugaaugauuuggcuaaagg

SEQ ID NO: 2203215 - RNA, 19 nt, Homo sapiens
  misc_RNA (1)...(19): siRNA sense strand
ucacccagcucaccaagca

SEQ ID NO: 2203216 - RNA, 19 nt, Homo sapiens
  misc_RNA (1)...(19): siRNA sense strand
guccugaaauggaugaaug

SEQ ID NO: 2203217 - RNA, 19 nt, Homo sapiens
  misc_RNA (1)...(19): siRNA sense strand
aagcaaaucuugucaacac

SEQ ID NO: 2203218 - RNA, 19 nt, Homo sapiens
  misc_RNA (1)...(19): siRNA sense strand
cgacuucaaccaagaauag

SEQ ID NO: 2203219 - RNA, 19 nt, Homo sapiens
  misc_RNA (1)...(19): siRNA sense strand
uaccaugccuguacuucuu

SEQ ID NO: 2203220 - RNA, 19 nt, Homo sapiens
  misc_RNA (1)...(19): siRNA sense strand
ccagcucucuccaugucua

SEQ ID NO: 2203221 - RNA, 19 nt, Homo sapiens
  misc_RNA (1)...(19): siRNA sense strand
caccucaccuacucuaaug

SEQ ID NO: 2203222 - RNA, 19 nt, Homo sapiens
  misc_RNA (1)...(19): siRNA sense strand
caagacuucuaauccugaa

SEQ ID NO: 2203223 - RNA, 19 nt, Homo sapiens
  misc_RNA (1)...(19): siRNA sense strand
gaagauccagucucucuac

SEQ ID NO: 2203224 - RNA, 19 nt, Homo sapiens
  misc_RNA (1)...(19): siRNA sense strand
guuucagccuucaggauaa

SEQ ID NO: 2203225 - RNA, 19 nt, Homo sapiens
  misc_RNA (1)...(19): siRNA sense strand
aaacucggcaggacuuaaa

SEQ ID NO: 2203226 - RNA, 19 nt, Homo sapiens
  misc_RNA (1)...(19): siRNA sense strand
gaaacucggcaggacuuaa

SEQ ID NO: 2203227 - RNA, 19 nt, Homo sapiens
  misc_RNA (1)...(19): siRNA sense strand
ccagaggacugccauuucg

SEQ ID NO: 2203228 - RNA, 19 nt, Homo sapiens
  misc_RNA (1)...(19): siRNA sense strand
ugacaagacuucuaauccu

SEQ ID NO: 2203229 - RNA, 19 nt, Homo sapiens
  misc_RNA (1)...(19): siRNA sense strand
uggcagaugaguauuauga

SEQ ID NO: 2203230 - RNA, 19 nt, Homo sapiens
  misc_RNA (1)...(19): siRNA sense strand
aaacaaacaggaagaaguc

SEQ ID NO: 2203231 - RNA, 19 nt, Homo sapiens
  misc_RNA (1)...(19): siRNA sense strand
caaaucuugucaacaccuu

SEQ ID NO: 2203232 - RNA, 19 nt, Homo sapiens
  misc_RNA (1)...(19): siRNA sense strand
aaacagcucaaagaacuaa

SEQ ID NO: 2203233 - RNA, 19 nt, Homo sapiens
  misc_RNA (1)...(19): siRNA sense strand
gcccaaguccaucuucaaa

SEQ ID NO: 2203234 - RNA, 19 nt, Homo sapiens
  misc_RNA (1)...(19): siRNA sense strand
ccucaccaguccacaaaga

SEQ ID NO: 2203235 - RNA, 19 nt, Homo sapiens
  misc_RNA (1)...(19): siRNA sense strand
gcucaugagaguccacaaa

SEQ ID NO: 2203236 - RNA, 19 nt, Homo sapiens
  misc_RNA (1)...(19): siRNA sense strand
ccaaguccaucuucaaagc

SEQ ID NO: 2203237 - RNA, 19 nt, Homo sapiens
  misc_RNA (1)...(19): siRNA sense strand
uaaacaaacaggaagaagu

SEQ ID NO: 2203238 - RNA, 19 nt, Homo sapiens
  misc_RNA (1)...(19): siRNA sense strand
gcaucucaccuuccuguug

SEQ ID NO: 2203239 - RNA, 19 nt, Homo sapiens
  misc_RNA (1)...(19): siRNA sense strand
ucaacaccuucccuuauuc

SEQ ID NO: 2203240 - RNA, 19 nt, Homo sapiens
  misc_RNA (1)...(19): siRNA sense strand
agacagagcaugugguauc

SEQ ID NO: 2203241 - RNA, 19 nt, Homo sapiens
  misc_RNA (1)...(19): siRNA sense strand
gggaggagccacggagaaa

SEQ ID NO: 2203242 - RNA, 19 nt, Homo sapiens
  misc_RNA (1)...(19): siRNA sense strand
ggagagaagagagcaacuu

SEQ ID NO: 2203243 - RNA, 19 nt, Homo sapiens
  misc_RNA (1)...(19): siRNA sense strand
caugaagaccagacugauu

SEQ ID NO: 2203244 - RNA, 19 nt, Homo sapiens
  misc_RNA (1)...(19): siRNA sense strand
agaaauaccggccuucaca

SEQ ID NO: 2203245 - RNA, 19 nt, Homo sapiens
  misc_RNA (1)...(19): siRNA sense strand
gccagagauucaacuuaga

SEQ ID NO: 2203246 - RNA, 19 nt, Homo sapiens
  misc_RNA (1)...(19): siRNA sense strand
ccacugcugucgccacgau

SEQ ID NO: 2203247 - RNA, 19 nt, Homo sapiens
  misc_RNA (1)...(19): siRNA sense strand
ccaggaagcccaaguccau

SEQ ID NO: 2203248 - RNA, 19 nt, Homo sapiens
  misc_RNA (1)...(19): siRNA sense strand
acaggaagaaguccacaaa

SEQ ID NO: 2203249 - RNA, 19 nt, Homo sapiens
  misc_RNA (1)...(19): siRNA sense strand
gagaaacuagggcugacaa

SEQ ID NO: 2203250 - RNA, 19 nt, Homo sapiens
  misc_RNA (1)...(19): siRNA sense strand
ggccgacagugcaccagaa

SEQ ID NO: 2203251 - RNA, 19 nt, Homo sapiens
  misc_RNA (1)...(19): siRNA sense strand
aagccaaacugagacuauu

SEQ ID NO: 2203252 - RNA, 19 nt, Homo sapiens
  misc_RNA (1)...(19): siRNA sense strand
gaagaaguccacaaaagga

SEQ ID NO: 2203253 - RNA, 19 nt, Homo sapiens
  misc_RNA (1)...(19): siRNA sense strand
uccagucucucuacaugaa

SEQ ID NO: 2203254 - RNA, 19 nt, Homo sapiens
  misc_RNA (1)...(19): siRNA sense strand
caccagcucucuccauguc

SEQ ID NO: 2203255 - RNA, 19 nt, Homo sapiens
  misc_RNA (1)...(19): siRNA sense strand
uaagguaacuaagcaagac

SEQ ID NO: 2203256 - RNA, 19 nt, Homo sapiens
  misc_RNA (1)...(19): siRNA sense strand
gcuaaagcugucagaagaa

SEQ ID NO: 2203257 - RNA, 19 nt, Homo sapiens
  misc_RNA (1)...(19): siRNA sense strand
agacuuggcugauguuuuc

SEQ ID NO: 2203258 - RNA, 19 nt, Homo sapiens
  misc_RNA (1)...(19): siRNA sense strand
ggcuaaaggucguaaacag

SEQ ID NO: 2203259 - RNA, 19 nt, Homo sapiens
  misc_RNA (1)...(19): siRNA sense strand
gaaauaccggccuucacau

SEQ ID NO: 2203260 - RNA, 19 nt, Homo sapiens
  misc_RNA (1)...(19): siRNA sense strand
agccagagauucaacuuag

SEQ ID NO: 2203261 - RNA, 19 nt, Homo sapiens
  misc_RNA (1)...(19): siRNA sense strand
gcaggaacaccagcucaug

SEQ ID NO: 2203262 - RNA, 19 nt, Homo sapiens
  misc_RNA (1)...(19): siRNA sense strand
agacaagaaccucauaaag

SEQ ID NO: 2203263 - RNA, 19 nt, Homo sapiens
  misc_RNA (1)...(19): siRNA sense strand
gaaguccugaaauggauga

SEQ ID NO: 2203264 - RNA, 19 nt, Homo sapiens
  misc_RNA (1)...(19): siRNA sense strand
caggaacaccagcucauga

SEQ ID NO: 2203265 - RNA, 19 nt, Homo sapiens
  misc_RNA (1)...(19): siRNA sense strand
gaaacagugcgacuucaac

SEQ ID NO: 2203266 - RNA, 19 nt, Homo sapiens
  misc_RNA (1)...(19): siRNA sense strand
ggaacaccagcucaugaga

SEQ ID NO: 2203267 - RNA, 19 nt, Homo sapiens
  misc_RNA (1)...(19): siRNA sense strand
cauaaaagccaaacugaga

SEQ ID NO: 2203268 - RNA, 19 nt, Homo sapiens
  misc_RNA (1)...(19): siRNA sense strand
uaaugagacugagccuguu

SEQ ID NO: 2203269 - RNA, 19 nt, Homo sapiens
  misc_RNA (1)...(19): siRNA sense strand
gaggagccacggagaaagu

SEQ ID NO: 2203270 - RNA, 19 nt, Homo sapiens
  misc_RNA (1)...(19): siRNA sense strand
gccuucaagugccaagaaa

SEQ ID NO: 2203271 - RNA, 19 nt, Homo sapiens
  misc_RNA (1)...(19): siRNA sense strand
aagaagagacugcggaaag

SEQ ID NO: 2203272 - RNA, 19 nt, Homo sapiens
  misc_RNA (1)...(19): siRNA sense strand
aauggcagaugaguauuau

SEQ ID NO: 2203273 - RNA, 19 nt, Homo sapiens
  misc_RNA (1)...(19): siRNA sense strand
cagcagcaccacuguaaca

SEQ ID NO: 2203274 - RNA, 19 nt, Homo sapiens
  misc_RNA (1)...(19): siRNA sense strand
acccagcacucagcaguuu

SEQ ID NO: 2203275 - RNA, 19 nt, Homo sapiens
  misc_RNA (1)...(19): siRNA sense strand
ugucaacaccuucccuuau

SEQ ID NO: 2203276 - RNA, 19 nt, Homo sapiens
  misc_RNA (1)...(19): siRNA sense strand
gggcaaggauaaacucuua

SEQ ID NO: 2203277 - RNA, 19 nt, Homo sapiens
  misc_RNA (1)...(19): siRNA sense strand
gggaggauaugaaacaaua

SEQ ID NO: 2203278 - RNA, 19 nt, Homo sapiens
  misc_RNA (1)...(19): siRNA sense strand
uaacagcauuuacccuuua

SEQ ID NO: 2203279 - RNA, 19 nt, Homo sapiens
  misc_RNA (1)...(19): siRNA sense strand
gaccaucaaugacaucuuu

SEQ ID NO: 2203280 - RNA, 19 nt, Homo sapiens
  misc_RNA (1)...(19): siRNA sense strand
gaaggcaaaccaagaauuu

SEQ ID NO: 2203281 - RNA, 19 nt, Homo sapiens
  misc_RNA (1)...(19): siRNA sense strand
gcaaaggcaucucccaguu

SEQ ID NO: 2203282 - RNA, 19 nt, Homo sapiens
  misc_RNA (1)...(19): siRNA sense strand
ggaagaaacgaacgugaua

SEQ ID NO: 2203283 - RNA, 19 nt, Homo sapiens
  misc_RNA (1)...(19): siRNA sense strand
gaaggaagcucugcugaag

SEQ ID NO: 2203284 - RNA, 19 nt, Homo sapiens
  misc_RNA (1)...(19): siRNA sense strand
ccaaagcacugaccauaug

SEQ ID NO: 2203285 - RNA, 19 nt, Homo sapiens
  misc_RNA (1)...(19): siRNA sense strand
cagcagagguuucaucaga

SEQ ID NO: 2203286 - RNA, 19 nt, Homo sapiens
  misc_RNA (1)...(19): siRNA sense strand
ugaccaagccgaagaauaa

SEQ ID NO: 2203287 - RNA, 19 nt, Homo sapiens
  misc_RNA (1)...(19): siRNA sense strand
gauaagccaucuuccauuc

SEQ ID NO: 2203288 - RNA, 19 nt, Homo sapiens
  misc_RNA (1)...(19): siRNA sense strand
ucaaagacguucucaagga

SEQ ID NO: 2203289 - RNA, 19 nt, Homo sapiens
  misc_RNA (1)...(19): siRNA sense strand
gaucugagccuucccaaga

SEQ ID NO: 2203290 - RNA, 19 nt, Homo sapiens
  misc_RNA (1)...(19): siRNA sense strand
gaaagaccaucaaugacau

SEQ ID NO: 2203291 - RNA, 19 nt, Homo sapiens
  misc_RNA (1)...(19): siRNA sense strand
gaagcaagcccucggaaga

SEQ ID NO: 2203292 - RNA, 19 nt, Homo sapiens
  misc_RNA (1)...(19): siRNA sense strand
gaacagacauccaaauacc

SEQ ID NO: 2203293 - RNA, 19 nt, Homo sapiens
  misc_RNA (1)...(19): siRNA sense strand
ccgcagacauuaugaaaga

SEQ ID NO: 2203294 - RNA, 19 nt, Homo sapiens
  misc_RNA (1)...(19): siRNA sense strand
ccaaacgcaucaaacauga

SEQ ID NO: 2203295 - RNA, 19 nt, Homo sapiens
  misc_RNA (1)...(19): siRNA sense strand
aaacaagaauccaaacugu

SEQ ID NO: 2203296 - RNA, 19 nt, Homo sapiens
  misc_RNA (1)...(19): siRNA sense strand
gaaccaaacgcaucaaaca

SEQ ID NO: 2203297 - RNA, 19 nt, Homo sapiens
  misc_RNA (1)...(19): siRNA sense strand
ggaaggagaaggccucuga

SEQ ID NO: 2203298 - RNA, 19 nt, Homo sapiens
  misc_RNA (1)...(19): siRNA sense strand
gauuaauccuaccauauga

SEQ ID NO: 2203299 - RNA, 19 nt, Homo sapiens
  misc_RNA (1)...(19): siRNA sense strand
agagaaagaccaucaauga

SEQ ID NO: 2203300 - RNA, 19 nt, Homo sapiens
  misc_RNA (1)...(19): siRNA sense strand
gaagagagaaagaccauca

SEQ ID NO: 2203301 - RNA, 19 nt, Homo sapiens
  misc_RNA (1)...(19): siRNA sense strand
gcacggaccuuacauuuuc

SEQ ID NO: 2203302 - RNA, 19 nt, Homo sapiens
  misc_RNA (1)...(19): siRNA sense strand
gaguauaugcgaugaguuu

SEQ ID NO: 2203303 - RNA, 19 nt, Homo sapiens
  misc_RNA (1)...(19): siRNA sense strand
aggaagcucugcugaagua

SEQ ID NO: 2203304 - RNA, 19 nt, Homo sapiens
  misc_RNA (1)...(19): siRNA sense strand
ucaaugacaucuuuaagca

SEQ ID NO: 2203305 - RNA, 19 nt, Homo sapiens
  misc_RNA (1)...(19): siRNA sense strand
ucaaguggguacauucuga

SEQ ID NO: 2203306 - RNA, 19 nt, Homo sapiens
  misc_RNA (1)...(19): siRNA sense strand
aagaagagauucauucagu

SEQ ID NO: 2203307 - RNA, 19 nt, Homo sapiens
  misc_RNA (1)...(19): siRNA sense strand
uaagccaucuuccauucua

SEQ ID NO: 2203308 - RNA, 19 nt, Homo sapiens
  misc_RNA (1)...(19): siRNA sense strand
cagauuaaccuuuggacua

SEQ ID NO: 2203309 - RNA, 19 nt, Homo sapiens
  misc_RNA (1)...(19): siRNA sense strand
gaaaccaugcccacaaaga

SEQ ID NO: 2203310 - RNA, 19 nt, Homo sapiens
  misc_RNA (1)...(19): siRNA sense strand
caacaauuccgauggcaaa

SEQ ID NO: 2203311 - RNA, 19 nt, Homo sapiens
  misc_RNA (1)...(19): siRNA sense strand
ugguggcacuuuauaaaua

SEQ ID NO: 2203312 - RNA, 19 nt, Homo sapiens
  misc_RNA (1)...(19): siRNA sense strand
cuacaaggcuuuucaauuc

SEQ ID NO: 2203313 - RNA, 19 nt, Homo sapiens
  misc_RNA (1)...(19): siRNA sense strand
gaagaauaaccauaacugu

SEQ ID NO: 2203314 - RNA, 19 nt, Homo sapiens
  misc_RNA (1)...(19): siRNA sense strand
cgagaaccauggacuuaau

SEQ ID NO: 2203315 - RNA, 19 nt, Homo sapiens
  misc_RNA (1)...(19): siRNA sense strand
agaaggguaucaggaauuu

SEQ ID NO: 2203316 - RNA, 19 nt, Homo sapiens
  misc_RNA (1)...(19): siRNA sense strand
uaacggaccaguuugcauu

SEQ ID NO: 2203317 - RNA, 19 nt, Homo sapiens
  misc_RNA (1)...(19): siRNA sense strand
gaacgagaaccauggacuu

SEQ ID NO: 2203318 - RNA, 19 nt, Homo sapiens
  misc_RNA (1)...(19): siRNA sense strand
caaagaagagauucauuca

SEQ ID NO: 2203319 - RNA, 19 nt, Homo sapiens
  misc_RNA (1)...(19): siRNA sense strand
uuauccagcucuaaacuuu

SEQ ID NO: 2203320 - RNA, 19 nt, Homo sapiens
  misc_RNA (1)...(19): siRNA sense strand
ggauuuggaccuugugauu

SEQ ID NO: 2203321 - RNA, 19 nt, Homo sapiens
  misc_RNA (1)...(19): siRNA sense strand
ugacuuguguuccaguuug

SEQ ID NO: 2203322 - RNA, 19 nt, Homo sapiens
  misc_RNA (1)...(19): siRNA sense strand
cagauuacauugccaacug

SEQ ID NO: 2203323 - RNA, 19 nt, Homo sapiens
  misc_RNA (1)...(19): siRNA sense strand
aaaaguaucuggaaccaaa

SEQ ID NO: 2203324 - RNA, 19 nt, Homo sapiens
  misc_RNA (1)...(19): siRNA sense strand
ccacccgacucucauagaa

SEQ ID NO: 2203325 - RNA, 19 nt, Homo sapiens
  misc_RNA (1)...(19): siRNA sense strand
agaaugagacggaggauga

SEQ ID NO: 2203326 - RNA, 19 nt, Homo sapiens
  misc_RNA (1)...(19): siRNA sense strand
aagaaaccaugcccacaaa

SEQ ID NO: 2203327 - RNA, 19 nt, Homo sapiens
  misc_RNA (1)...(19): siRNA sense strand
gagaguauaugcgaugagu

SEQ ID NO: 2203328 - RNA, 19 nt, Homo sapiens
  misc_RNA (1)...(19): siRNA sense strand
uuacaucaccgacaaauuc

SEQ ID NO: 2203329 - RNA, 19 nt, Homo sapiens
  misc_RNA (1)...(19): siRNA sense strand
aagaaaagcuccauguaaa

SEQ ID NO: 2203330 - RNA, 19 nt, Homo sapiens
  misc_RNA (1)...(19): siRNA sense strand
ccuaccauaugaaagauuu

SEQ ID NO: 2203331 - RNA, 19 nt, Homo sapiens
  misc_RNA (1)...(19): siRNA sense strand
gcagacauuaugaaagauu

SEQ ID NO: 2203332 - RNA, 19 nt, Homo sapiens
  misc_RNA (1)...(19): siRNA sense strand
caagcugccuuuccaucuu

SEQ ID NO: 2203333 - RNA, 19 nt, Homo sapiens
  misc_RNA (1)...(19): siRNA sense strand
gcaaggauaaacucuuaga

SEQ ID NO: 2203334 - RNA, 19 nt, Homo sapiens
  misc_RNA (1)...(19): siRNA sense strand
gggaaggaauggacagaag

SEQ ID NO: 2203335 - RNA, 19 nt, Homo sapiens
  misc_RNA (1)...(19): siRNA sense strand
agagagcccugaaagugaa

SEQ ID NO: 2203336 - RNA, 19 nt, Homo sapiens
  misc_RNA (1)...(19): siRNA sense strand
ggauaagccaucuuccauu

SEQ ID NO: 2203337 - RNA, 19 nt, Homo sapiens
  misc_RNA (1)...(19): siRNA sense strand
ggccaaagcacugaccaua

SEQ ID NO: 2203338 - RNA, 19 nt, Homo sapiens
  misc_RNA (1)...(19): siRNA sense strand
caacgaaacagaccaaggu

SEQ ID NO: 2203339 - RNA, 19 nt, Homo sapiens
  misc_RNA (1)...(19): siRNA sense strand
caucaaacaugaaauaccu

SEQ ID NO: 2203340 - RNA, 19 nt, Homo sapiens
  misc_RNA (1)...(19): siRNA sense strand
guggguacauucugauuuc

SEQ ID NO: 2203341 - RNA, 19 nt, Homo sapiens
  misc_RNA (1)...(19): siRNA sense strand
gaaaagcuccauguaaauu

SEQ ID NO: 2203342 - RNA, 19 nt, Homo sapiens
  misc_RNA (1)...(19): siRNA sense strand
gagagaaagaccaucaaug

SEQ ID NO: 2203343 - RNA, 19 nt, Homo sapiens
  misc_RNA (1)...(19): siRNA sense strand
acaagagacuuuaauaagc

SEQ ID NO: 2203344 - RNA, 19 nt, Homo sapiens
  misc_RNA (1)...(19): siRNA sense strand
uaaaggagaagaagauaag

SEQ ID NO: 2203345 - RNA, 19 nt, Homo sapiens
  misc_RNA (1)...(19): siRNA sense strand
aaacugggaggauaugaaa

SEQ ID NO: 2203346 - RNA, 19 nt, Homo sapiens
  misc_RNA (1)...(19): siRNA sense strand
gaaggaauggacagaagga

SEQ ID NO: 2203347 - RNA, 19 nt, Homo sapiens
  misc_RNA (1)...(19): siRNA sense strand
caagaaaagcuccauguaa

SEQ ID NO: 2203348 - RNA, 19 nt, Homo sapiens
  misc_RNA (1)...(19): siRNA sense strand
caccagcgcugccacuugu

SEQ ID NO: 2203349 - RNA, 19 nt, Homo sapiens
  misc_RNA (1)...(19): siRNA sense strand
gcagucaacccuaaacagu

SEQ ID NO: 2203350 - RNA, 19 nt, Homo sapiens
  misc_RNA (1)...(19): siRNA sense strand
ucagugguguuaaggauuc

SEQ ID NO: 2203351 - RNA, 19 nt, Homo sapiens
  misc_RNA (1)...(19): siRNA sense strand
ggacaacgaaacagaccaa

SEQ ID NO: 2203352 - RNA, 19 nt, Homo sapiens
  misc_RNA (1)...(19): siRNA sense strand
agauuaaccuuuggacuau

SEQ ID NO: 2203353 - RNA, 19 nt, Homo sapiens
  misc_RNA (1)...(19): siRNA sense strand
cagagagcccugaaaguga

SEQ ID NO: 2203354 - RNA, 19 nt, Homo sapiens
  misc_RNA (1)...(19): siRNA sense strand
acaguggacucaacuucaa

SEQ ID NO: 2203355 - RNA, 19 nt, Homo sapiens
  misc_RNA (1)...(19): siRNA sense strand
caaagccugucggguauca

SEQ ID NO: 2203356 - RNA, 19 nt, Homo sapiens
  misc_RNA (1)...(19): siRNA sense strand
agaaagaccaucaaugaca

SEQ ID NO: 2203357 - RNA, 19 nt, Homo sapiens
  misc_RNA (1)...(19): siRNA sense strand
guccagaguuucagaagca

SEQ ID NO: 2203358 - RNA, 19 nt, Homo sapiens
  misc_RNA (1)...(19): siRNA sense strand
gaugacuuguguuccaguu

SEQ ID NO: 2203359 - RNA, 19 nt, Homo sapiens
  misc_RNA (1)...(19): siRNA sense strand
uaagauguacgccaaagga

SEQ ID NO: 2203360 - RNA, 19 nt, Homo sapiens
  misc_RNA (1)...(19): siRNA sense strand
gacggaggaugacaaacug

SEQ ID NO: 2203361 - RNA, 19 nt, Homo sapiens
  misc_RNA (1)...(19): siRNA sense strand
agaccaagguuccaacagu

SEQ ID NO: 2203362 - RNA, 19 nt, Homo sapiens
  misc_RNA (1)...(19): siRNA sense strand
cgccgucaguggaaacaua

SEQ ID NO: 2203363 - RNA, 19 nt, Homo sapiens
  misc_RNA (1)...(19): siRNA sense strand
acaaagaagagauucauuc

SEQ ID NO: 2203364 - RNA, 19 nt, Homo sapiens
  misc_RNA (1)...(19): siRNA sense strand
aaagaaaccaugcccacaa

SEQ ID NO: 2203365 - RNA, 19 nt, Homo sapiens
  misc_RNA (1)...(19): siRNA sense strand
gcuuuccacucgcuuguga

SEQ ID NO: 2203366 - RNA, 19 nt, Homo sapiens
  misc_RNA (1)...(19): siRNA sense strand
gagaaccauggacuuaauu

SEQ ID NO: 2203367 - RNA, 19 nt, Homo sapiens
  misc_RNA (1)...(19): siRNA sense strand
gaguagacccagagaagga

SEQ ID NO: 2203368 - RNA, 19 nt, Homo sapiens
  misc_RNA (1)...(19): siRNA sense strand
gggcagaaauagcgaccau

SEQ ID NO: 2203369 - RNA, 19 nt, Homo sapiens
  misc_RNA (1)...(19): siRNA sense strand
aaaccaugcccacaaagaa

SEQ ID NO: 2203370 - RNA, 19 nt, Homo sapiens
  misc_RNA (1)...(19): siRNA sense strand
gagcaccaucuucauaaug

SEQ ID NO: 2203371 - RNA, 19 nt, Homo sapiens
  misc_RNA (1)...(19): siRNA sense strand
gaccuuacauuuucuacaa

SEQ ID NO: 2203372 - RNA, 19 nt, Homo sapiens
  misc_RNA (1)...(19): siRNA sense strand
aaacgcaucaaacaugaaa

SEQ ID NO: 2203373 - RNA, 19 nt, Homo sapiens
  misc_RNA (1)...(19): siRNA sense strand
uugccaaggugaaauguga

SEQ ID NO: 2203374 - RNA, 19 nt, Homo sapiens
  misc_RNA (1)...(19): siRNA sense strand
gugcagggcagaugaacaa

SEQ ID NO: 2203375 - RNA, 19 nt, Homo sapiens
  misc_RNA (1)...(19): siRNA sense strand
gaccaugucaggcccuaaa

SEQ ID NO: 2203376 - RNA, 19 nt, Homo sapiens
  misc_RNA (1)...(19): siRNA sense strand
guaauaagcugaccuauga

SEQ ID NO: 2203377 - RNA, 19 nt, Homo sapiens
  misc_RNA (1)...(19): siRNA sense strand
gaugaagccucucaaauua

SEQ ID NO: 2203378 - RNA, 19 nt, Homo sapiens
  misc_RNA (1)...(19): siRNA sense strand
gaagaaaggucacuguuug

SEQ ID NO: 2203379 - RNA, 19 nt, Homo sapiens
  misc_RNA (1)...(19): siRNA sense strand
agacacagcuugcuucuuu

SEQ ID NO: 2203380 - RNA, 19 nt, Homo sapiens
  misc_RNA (1)...(19): siRNA sense strand
gagaagagcuguccugagu

SEQ ID NO: 2203381 - RNA, 19 nt, Homo sapiens
  misc_RNA (1)...(19): siRNA sense strand
gaauaagagugcuguugua

SEQ ID NO: 2203382 - RNA, 19 nt, Homo sapiens
  misc_RNA (1)...(19): siRNA sense strand
gaagagcuguccugaguga

SEQ ID NO: 2203383 - RNA, 19 nt, Homo sapiens
  misc_RNA (1)...(19): siRNA sense strand
ggaauaaaccauccaauau

SEQ ID NO: 2203384 - RNA, 19 nt, Homo sapiens
  misc_RNA (1)...(19): siRNA sense strand
gaacaaagagggaaacugu

SEQ ID NO: 2203385 - RNA, 19 nt, Homo sapiens
  misc_RNA (1)...(19): siRNA sense strand
ggaugaagccucucaaauu

SEQ ID NO: 2203386 - RNA, 19 nt, Homo sapiens
  misc_RNA (1)...(19): siRNA sense strand
gaagaacucuacaauaguc

SEQ ID NO: 2203387 - RNA, 19 nt, Homo sapiens
  misc_RNA (1)...(19): siRNA sense strand
gaagaaacccagcaucuga

SEQ ID NO: 2203388 - RNA, 19 nt, Homo sapiens
  misc_RNA (1)...(19): siRNA sense strand
aaagaacuaugcauccuua

SEQ ID NO: 2203389 - RNA, 19 nt, Homo sapiens
  misc_RNA (1)...(19): siRNA sense strand
gcaaacacacuuagaauau

SEQ ID NO: 2203390 - RNA, 19 nt, Homo sapiens
  misc_RNA (1)...(19): siRNA sense strand
caggagauaucauucauuu

SEQ ID NO: 2203391 - RNA, 19 nt, Homo sapiens
  misc_RNA (1)...(19): siRNA sense strand
gggaauaaaccauccaaua

SEQ ID NO: 2203392 - RNA, 19 nt, Homo sapiens
  misc_RNA (1)...(19): siRNA sense strand
gauauguacucucguaaga

SEQ ID NO: 2203393 - RNA, 19 nt, Homo sapiens
  misc_RNA (1)...(19): siRNA sense strand
caacauguaugggaauaaa

SEQ ID NO: 2203394 - RNA, 19 nt, Homo sapiens
  misc_RNA (1)...(19): siRNA sense strand
gaaguuagccaaguuuaaa

SEQ ID NO: 2203395 - RNA, 19 nt, Homo sapiens
  misc_RNA (1)...(19): siRNA sense strand
ggucgaaguuaauacagua

SEQ ID NO: 2203396 - RNA, 19 nt, Homo sapiens
  misc_RNA (1)...(19): siRNA sense strand
gaugggcaauauuuacaua

SEQ ID NO: 2203397 - RNA, 19 nt, Homo sapiens
  misc_RNA (1)...(19): siRNA sense strand
ggaaauguaccgcuuaaau

SEQ ID NO: 2203398 - RNA, 19 nt, Homo sapiens
  misc_RNA (1)...(19): siRNA sense strand
ggauggaacuguuggugaa

SEQ ID NO: 2203399 - RNA, 19 nt, Homo sapiens
  misc_RNA (1)...(19): siRNA sense strand
gaucaaaguccauuaaauc

SEQ ID NO: 2203400 - RNA, 19 nt, Homo sapiens
  misc_RNA (1)...(19): siRNA sense strand
guagucagguuguucugua

SEQ ID NO: 2203401 - RNA, 19 nt, Homo sapiens
  misc_RNA (1)...(19): siRNA sense strand
gcaggagauuucaugcaua

SEQ ID NO: 2203402 - RNA, 19 nt, Homo sapiens
  misc_RNA (1)...(19): siRNA sense strand
caggagauuucaugcauaa

SEQ ID NO: 2203403 - RNA, 19 nt, Homo sapiens
  misc_RNA (1)...(19): siRNA sense strand
ucaagaggcuggagcagaa

SEQ ID NO: 2203404 - RNA, 19 nt, Homo sapiens
  misc_RNA (1)...(19): siRNA sense strand
caagaaauuugcagaucaa

SEQ ID NO: 2203405 - RNA, 19 nt, Homo sapiens
  misc_RNA (1)...(19): siRNA sense strand
gaagcaaacacacuuagaa

SEQ ID NO: 2203406 - RNA, 19 nt, Homo sapiens
  misc_RNA (1)...(19): siRNA sense strand
gaaggaaauguaccgcuua

SEQ ID NO: 2203407 - RNA, 19 nt, Homo sapiens
  misc_RNA (1)...(19): siRNA sense strand
aaaccuacgucacuuuaaa

SEQ ID NO: 2203408 - RNA, 19 nt, Homo sapiens
  misc_RNA (1)...(19): siRNA sense strand
caaaguccauuaaauccuu

SEQ ID NO: 2203409 - RNA, 19 nt, Homo sapiens
  misc_RNA (1)...(19): siRNA sense strand
caguuuauauccuaccuua

SEQ ID NO: 2203410 - RNA, 19 nt, Homo sapiens
  misc_RNA (1)...(19): siRNA sense strand
gaaauguaccgcuuaaauc

SEQ ID NO: 2203411 - RNA, 19 nt, Homo sapiens
  misc_RNA (1)...(19): siRNA sense strand
gaggauaugugaaggagau

SEQ ID NO: 2203412 - RNA, 19 nt, Homo sapiens
  misc_RNA (1)...(19): siRNA sense strand
acaguugccugcauucuaa

SEQ ID NO: 2203413 - RNA, 19 nt, Homo sapiens
  misc_RNA (1)...(19): siRNA sense strand
ugacagaguuauuguaagu

SEQ ID NO: 2203414 - RNA, 19 nt, Homo sapiens
  misc_RNA (1)...(19): siRNA sense strand
cuacgucacuuuaaagaug

SEQ ID NO: 2203415 - RNA, 19 nt, Homo sapiens
  misc_RNA (1)...(19): siRNA sense strand
gcuaaaccgugaagcaaga

SEQ ID NO: 2203416 - RNA, 19 nt, Homo sapiens
  misc_RNA (1)...(19): siRNA sense strand
gcagaucaaaguccauuaa

SEQ ID NO: 2203417 - RNA, 19 nt, Homo sapiens
  misc_RNA (1)...(19): siRNA sense strand
gcaauugugcucuuuauag

SEQ ID NO: 2203418 - RNA, 19 nt, Homo sapiens
  misc_RNA (1)...(19): siRNA sense strand
ggauacaguugccugcauu

SEQ ID NO: 2203419 - RNA, 19 nt, Homo sapiens
  misc_RNA (1)...(19): siRNA sense strand
ggagauaucauucauuugg

SEQ ID NO: 2203420 - RNA, 19 nt, Homo sapiens
  misc_RNA (1)...(19): siRNA sense strand
uggcaugagugaaagcuua

SEQ ID NO: 2203421 - RNA, 19 nt, Homo sapiens
  misc_RNA (1)...(19): siRNA sense strand
guaaagauaguuugugaug

SEQ ID NO: 2203422 - RNA, 19 nt, Homo sapiens
  misc_RNA (1)...(19): siRNA sense strand
ggacuaucuuccuucguuu

SEQ ID NO: 2203423 - RNA, 19 nt, Homo sapiens
  misc_RNA (1)...(19): siRNA sense strand
uaaugccgcuggaacuuaa

SEQ ID NO: 2203424 - RNA, 19 nt, Homo sapiens
  misc_RNA (1)...(19): siRNA sense strand
cagauuagaccaagaagaa

SEQ ID NO: 2203425 - RNA, 19 nt, Homo sapiens
  misc_RNA (1)...(19): siRNA sense strand
gaauggaacauguaaagau

SEQ ID NO: 2203426 - RNA, 19 nt, Homo sapiens
  misc_RNA (1)...(19): siRNA sense strand
caaaauaucuggcuaaugc

SEQ ID NO: 2203427 - RNA, 19 nt, Homo sapiens
  misc_RNA (1)...(19): siRNA sense strand
uaauaaggauggaacuguu

SEQ ID NO: 2203428 - RNA, 19 nt, Homo sapiens
  misc_RNA (1)...(19): siRNA sense strand
cagcauagccaguaguauu

SEQ ID NO: 2203429 - RNA, 19 nt, Homo sapiens
  misc_RNA (1)...(19): siRNA sense strand
guagacaaauaccaaggaa

SEQ ID NO: 2203430 - RNA, 19 nt, Homo sapiens
  misc_RNA (1)...(19): siRNA sense strand
caacagauggauuguaguu

SEQ ID NO: 2203431 - RNA, 19 nt, Homo sapiens
  misc_RNA (1)...(19): siRNA sense strand
gaaaccagauggcauucuc

SEQ ID NO: 2203432 - RNA, 19 nt, Homo sapiens
  misc_RNA (1)...(19): siRNA sense strand
uaagaaaccagauggcauu

SEQ ID NO: 2203433 - RNA, 19 nt, Homo sapiens
  misc_RNA (1)...(19): siRNA sense strand
ccagcuauccagcaauuua

SEQ ID NO: 2203434 - RNA, 19 nt, Homo sapiens
  misc_RNA (1)...(19): siRNA sense strand
cggcggagcuauuucagaa

SEQ ID NO: 2203435 - RNA, 19 nt, Homo sapiens
  misc_RNA (1)...(19): siRNA sense strand
ccagauggcauucucauug

SEQ ID NO: 2203436 - RNA, 19 nt, Homo sapiens
  misc_RNA (1)...(19): siRNA sense strand
ggugacagaguuauuguaa

SEQ ID NO: 2203437 - RNA, 19 nt, Homo sapiens
  misc_RNA (1)...(19): siRNA sense strand
gcaaaucugcuacuagaca

SEQ ID NO: 2203438 - RNA, 19 nt, Homo sapiens
  misc_RNA (1)...(19): siRNA sense strand
gcggagcuauuucagaaga

SEQ ID NO: 2203439 - RNA, 19 nt, Homo sapiens
  misc_RNA (1)...(19): siRNA sense strand
cauauugggugacuuucaa

SEQ ID NO: 2203440 - RNA, 19 nt, Homo sapiens
  misc_RNA (1)...(19): siRNA sense strand
ccacauauugggugacuuu

SEQ ID NO: 2203441 - RNA, 19 nt, Homo sapiens
  misc_RNA (1)...(19): siRNA sense strand
cacaaucgaaggauaauaa

SEQ ID NO: 2203442 - RNA, 19 nt, Homo sapiens
  misc_RNA (1)...(19): siRNA sense strand
ccucaagacuggucagaug

SEQ ID NO: 2203443 - RNA, 19 nt, Homo sapiens
  misc_RNA (1)...(19): siRNA sense strand
uuacagagcaagaaauuug

SEQ ID NO: 2203444 - RNA, 19 nt, Homo sapiens
  misc_RNA (1)...(19): siRNA sense strand
guauuguccuaguaucuuu

SEQ ID NO: 2203445 - RNA, 19 nt, Homo sapiens
  misc_RNA (1)...(19): siRNA sense strand
gagauaucauucauuugga

SEQ ID NO: 2203446 - RNA, 19 nt, Homo sapiens
  misc_RNA (1)...(19): siRNA sense strand
gcucuuggcaugagugaaa

SEQ ID NO: 2203447 - RNA, 19 nt, Homo sapiens
  misc_RNA (1)...(19): siRNA sense strand
uuucuaagcuuucuguguu

SEQ ID NO: 2203448 - RNA, 19 nt, Homo sapiens
  misc_RNA (1)...(19): siRNA sense strand
guucuguucuuccacauga

SEQ ID NO: 2203449 - RNA, 19 nt, Homo sapiens
  misc_RNA (1)...(19): siRNA sense strand
gauaugugaaggagauuaa

SEQ ID NO: 2203450 - RNA, 19 nt, Homo sapiens
  misc_RNA (1)...(19): siRNA sense strand
uagcagagcaguugaacaa

SEQ ID NO: 2203451 - RNA, 19 nt, Homo sapiens
  misc_RNA (1)...(19): siRNA sense strand
guaaggauaauucaacaug

SEQ ID NO: 2203452 - RNA, 19 nt, Homo sapiens
  misc_RNA (1)...(19): siRNA sense strand
caagagaacaugaaagucu

SEQ ID NO: 2203453 - RNA, 19 nt, Homo sapiens
  misc_RNA (1)...(19): siRNA sense strand
gauaaaccuacgucacuuu

SEQ ID NO: 2203454 - RNA, 19 nt, Homo sapiens
  misc_RNA (1)...(19): siRNA sense strand
ugauauagauaccccauua

SEQ ID NO: 2203455 - RNA, 19 nt, Homo sapiens
  misc_RNA (1)...(19): siRNA sense strand
gaaucaacuuuguucagau

SEQ ID NO: 2203456 - RNA, 19 nt, Homo sapiens
  misc_RNA (1)...(19): siRNA sense strand
guaguucagucccaauugu

SEQ ID NO: 2203457 - RNA, 19 nt, Homo sapiens
  misc_RNA (1)...(19): siRNA sense strand
guagcuuccuuuccaagaa

SEQ ID NO: 2203458 - RNA, 19 nt, Homo sapiens
  misc_RNA (1)...(19): siRNA sense strand
uaacauugaagucgugaaa

SEQ ID NO: 2203459 - RNA, 19 nt, Homo sapiens
  misc_RNA (1)...(19): siRNA sense strand
cuaaauugcuauccuccuu

SEQ ID NO: 2203460 - RNA, 19 nt, Homo sapiens
  misc_RNA (1)...(19): siRNA sense strand
ccuguuuguuuccuuaaua

SEQ ID NO: 2203461 - RNA, 19 nt, Homo sapiens
  misc_RNA (1)...(19): siRNA sense strand
gaagcuggaacuggaauuu

SEQ ID NO: 2203462 - RNA, 19 nt, Homo sapiens
  misc_RNA (1)...(19): siRNA sense strand
agaaucaacuuuguucaga

SEQ ID NO: 2203463 - RNA, 19 nt, Homo sapiens
  misc_RNA (1)...(19): siRNA sense strand
gaaggagauuaacaugaca

SEQ ID NO: 2203464 - RNA, 19 nt, Homo sapiens
  misc_RNA (1)...(19): siRNA sense strand
ugaaggagauuaacaugac

SEQ ID NO: 2203465 - RNA, 19 nt, Homo sapiens
  misc_RNA (1)...(19): siRNA sense strand
ccuuuggugucuaauguua

SEQ ID NO: 2203466 - RNA, 19 nt, Homo sapiens
  misc_RNA (1)...(19): siRNA sense strand
acagauggauuguaguuca

SEQ ID NO: 2203467 - RNA, 19 nt, Homo sapiens
  misc_RNA (1)...(19): siRNA sense strand
gaacuugcuuuucaaacaa

SEQ ID NO: 2203468 - RNA, 19 nt, Homo sapiens
  misc_RNA (1)...(19): siRNA sense strand
ugugugcccucacuaaauu

SEQ ID NO: 2203469 - RNA, 19 nt, Homo sapiens
  misc_RNA (1)...(19): siRNA sense strand
ugccauaccugucacaaau

SEQ ID NO: 2203470 - RNA, 19 nt, Homo sapiens
  misc_RNA (1)...(19): siRNA sense strand
ucaauacuguacagaacaa

SEQ ID NO: 2203471 - RNA, 19 nt, Homo sapiens
  misc_RNA (1)...(19): siRNA sense strand
uaaccagagccaaacauaa

SEQ ID NO: 2203472 - RNA, 19 nt, Homo sapiens
  misc_RNA (1)...(19): siRNA sense strand
ggaugcagucccucugaua

SEQ ID NO: 2203473 - RNA, 19 nt, Homo sapiens
  misc_RNA (1)...(19): siRNA sense strand
uaugcugacuauucugaua

SEQ ID NO: 2203474 - RNA, 19 nt, Homo sapiens
  misc_RNA (1)...(19): siRNA sense strand
gagaagaaaggucacuguu

SEQ ID NO: 2203475 - RNA, 19 nt, Homo sapiens
  misc_RNA (1)...(19): siRNA sense strand
caaaaguauuguccuagua

SEQ ID NO: 2203476 - RNA, 19 nt, Homo sapiens
  misc_RNA (1)...(19): siRNA sense strand
ggaaagagauccacgacuu

SEQ ID NO: 2203477 - RNA, 19 nt, Homo sapiens
  misc_RNA (1)...(19): siRNA sense strand
gaaggaggaugguggaaga

SEQ ID NO: 2203478 - RNA, 19 nt, Homo sapiens
  misc_RNA (1)...(19): siRNA sense strand
gaaagaggcgcaagaaaug

SEQ ID NO: 2203479 - RNA, 19 nt, Homo sapiens
  misc_RNA (1)...(19): siRNA sense strand
gaggacgacuugcauguga

SEQ ID NO: 2203480 - RNA, 19 nt, Homo sapiens
  misc_RNA (1)...(19): siRNA sense strand
cagaagaaguuagaaggua

SEQ ID NO: 2203481 - RNA, 19 nt, Homo sapiens
  misc_RNA (1)...(19): siRNA sense strand
cgaaagaggcgcaagaaau

SEQ ID NO: 2203482 - RNA, 19 nt, Homo sapiens
  misc_RNA (1)...(19): siRNA sense strand
cauaccauguguaccauaa

SEQ ID NO: 2203483 - RNA, 19 nt, Homo sapiens
  misc_RNA (1)...(19): siRNA sense strand
cgaguugcaugaccugaaa

SEQ ID NO: 2203484 - RNA, 19 nt, Homo sapiens
  misc_RNA (1)...(19): siRNA sense strand
cuacacaccucgagacaag

SEQ ID NO: 2203485 - RNA, 19 nt, Homo sapiens
  misc_RNA (1)...(19): siRNA sense strand
ggaugucacugagaagaug

SEQ ID NO: 2203486 - RNA, 19 nt, Homo sapiens
  misc_RNA (1)...(19): siRNA sense strand
gcaaggaggaguuccagau

SEQ ID NO: 2203487 - RNA, 19 nt, Homo sapiens
  misc_RNA (1)...(19): siRNA sense strand
agaagaaguuagaagguau

SEQ ID NO: 2203488 - RNA, 19 nt, Homo sapiens
  misc_RNA (1)...(19): siRNA sense strand
ggacggacauagggagugu

SEQ ID NO: 2203489 - RNA, 19 nt, Homo sapiens
  misc_RNA (1)...(19): siRNA sense strand
aagcagaaccuucaugaga

SEQ ID NO: 2203490 - RNA, 19 nt, Homo sapiens
  misc_RNA (1)...(19): siRNA sense strand
aggaggagcucgugagugu

SEQ ID NO: 2203491 - RNA, 19 nt, Homo sapiens
  misc_RNA (1)...(19): siRNA sense strand
gcacuagcuugcauaacag

SEQ ID NO: 2203492 - RNA, 19 nt, Homo sapiens
  misc_RNA (1)...(19): siRNA sense strand
gcagaaccuucaugagaac

SEQ ID NO: 2203493 - RNA, 19 nt, Homo sapiens
  misc_RNA (1)...(19): siRNA sense strand
gagacaagcagaaccuuca

SEQ ID NO: 2203494 - RNA, 19 nt, Homo sapiens
  misc_RNA (1)...(19): siRNA sense strand
uccagaaacuccagaagga

SEQ ID NO: 2203495 - RNA, 19 nt, Homo sapiens
  misc_RNA (1)...(19): siRNA sense strand
gaauuucagguaguaauga

SEQ ID NO: 2203496 - RNA, 19 nt, Homo sapiens
  misc_RNA (1)...(19): siRNA sense strand
ggacgccuuugucaguguu

SEQ ID NO: 2203497 - RNA, 19 nt, Homo sapiens
  misc_RNA (1)...(19): siRNA sense strand
acgcagcgcuggacacugu

SEQ ID NO: 2203498 - RNA, 19 nt, Homo sapiens
  misc_RNA (1)...(19): siRNA sense strand
ucacugagaagauggaugu

SEQ ID NO: 2203499 - RNA, 19 nt, Homo sapiens
  misc_RNA (1)...(19): siRNA sense strand
cagcugaaggcccaucuaa

SEQ ID NO: 2203500 - RNA, 19 nt, Homo sapiens
  misc_RNA (1)...(19): siRNA sense strand
agcagaaccuucaugagaa

SEQ ID NO: 2203501 - RNA, 19 nt, Homo sapiens
  misc_RNA (1)...(19): siRNA sense strand
gcgugcagaugaggacuuu

SEQ ID NO: 2203502 - RNA, 19 nt, Homo sapiens
  misc_RNA (1)...(19): siRNA sense strand
uguggagccuggagcgaua

SEQ ID NO: 2203503 - RNA, 19 nt, Homo sapiens
  misc_RNA (1)...(19): siRNA sense strand
gcgaaagaggcgcaagaaa

SEQ ID NO: 2203504 - RNA, 19 nt, Homo sapiens
  misc_RNA (1)...(19): siRNA sense strand
ccagagcacuagcuugcau

SEQ ID NO: 2203505 - RNA, 19 nt, Homo sapiens
  misc_RNA (1)...(19): siRNA sense strand
ucuacgagauccuuaacga

SEQ ID NO: 2203506 - RNA, 19 nt, Homo sapiens
  misc_RNA (1)...(19): siRNA sense strand
ugacggaggagguguacaa

SEQ ID NO: 2203507 - RNA, 19 nt, Homo sapiens
  misc_RNA (1)...(19): siRNA sense strand
gggagugugucaucuucug

SEQ ID NO: 2203508 - RNA, 19 nt, Homo sapiens
  misc_RNA (1)...(19): siRNA sense strand
ggagcuggccauccggaaa

SEQ ID NO: 2203509 - RNA, 19 nt, Homo sapiens
  misc_RNA (1)...(19): siRNA sense strand
agcacuagcuugcauaaca

SEQ ID NO: 2203510 - RNA, 19 nt, Homo sapiens
  misc_RNA (1)...(19): siRNA sense strand
ggaggaaccugugcuuuuc

SEQ ID NO: 2203511 - RNA, 19 nt, Homo sapiens
  misc_RNA (1)...(19): siRNA sense strand
ucaaggcucauuacacguu

SEQ ID NO: 2203512 - RNA, 19 nt, Homo sapiens
  misc_RNA (1)...(19): siRNA sense strand
ugcaggagguggcaucgaa

SEQ ID NO: 2203513 - RNA, 19 nt, Homo sapiens
  misc_RNA (1)...(19): siRNA sense strand
ugcaugaccugaaagaagu

SEQ ID NO: 2203514 - RNA, 19 nt, Homo sapiens
  misc_RNA (1)...(19): siRNA sense strand
acaagcagaaccuucauga

SEQ ID NO: 2203515 - RNA, 19 nt, Homo sapiens
  misc_RNA (1)...(19): siRNA sense strand
gaagaaguuagaagguauc

SEQ ID NO: 2203516 - RNA, 19 nt, Homo sapiens
  misc_RNA (1)...(19): siRNA sense strand
agauggauguggccaacuu

SEQ ID NO: 2203517 - RNA, 19 nt, Homo sapiens
  misc_RNA (1)...(19): siRNA sense strand
gaugccaaguucacuaagg

SEQ ID NO: 2203518 - RNA, 19 nt, Homo sapiens
  misc_RNA (1)...(19): siRNA sense strand
ucaggcggguccuccagaa

SEQ ID NO: 2203519 - RNA, 19 nt, Homo sapiens
  misc_RNA (1)...(19): siRNA sense strand
caucgaaggcuggcaucua

SEQ ID NO: 2203520 - RNA, 19 nt, Homo sapiens
  misc_RNA (1)...(19): siRNA sense strand
gcacuggcuucguguucag

SEQ ID NO: 2203521 - RNA, 19 nt, Homo sapiens
  misc_RNA (1)...(19): siRNA sense strand
uagggagugugucaucuuc

SEQ ID NO: 2203522 - RNA, 19 nt, Homo sapiens
  misc_RNA (1)...(19): siRNA sense strand
gcugaaggcccaucuaagc

SEQ ID NO: 2203523 - RNA, 19 nt, Homo sapiens
  misc_RNA (1)...(19): siRNA sense strand
gcaguacccgcuggccuuu

SEQ ID NO: 2203524 - RNA, 19 nt, Homo sapiens
  misc_RNA (1)...(19): siRNA sense strand
uaccauguguaccauaaca

SEQ ID NO: 2203525 - RNA, 19 nt, Homo sapiens
  misc_RNA (1)...(19): siRNA sense strand
gcagaugaggacuuugugu

SEQ ID NO: 2203526 - RNA, 19 nt, Homo sapiens
  misc_RNA (1)...(19): siRNA sense strand
gggaggaaccugugcuuuu

SEQ ID NO: 2203527 - RNA, 19 nt, Homo sapiens
  misc_RNA (1)...(19): siRNA sense strand
gaagguggugcagcugcua

SEQ ID NO: 2203528 - RNA, 19 nt, Homo sapiens
  misc_RNA (1)...(19): siRNA sense strand
gauccuguuuaacuacuac

SEQ ID NO: 2203529 - RNA, 19 nt, Homo sapiens
  misc_RNA (1)...(19): siRNA sense strand
ggaaaaccagaagaaguua

SEQ ID NO: 2203530 - RNA, 19 nt, Homo sapiens
  misc_RNA (1)...(19): siRNA sense strand
caaggaggaguuccagauc

SEQ ID NO: 2203531 - RNA, 19 nt, Homo sapiens
  misc_RNA (1)...(19): siRNA sense strand
gugcagaugaggacuuugu

SEQ ID NO: 2203532 - RNA, 19 nt, Homo sapiens
  misc_RNA (1)...(19): siRNA sense strand
gagccuggagcgauacuuc

SEQ ID NO: 2203533 - RNA, 19 nt, Homo sapiens
  misc_RNA (1)...(19): siRNA sense strand
uaacuacuaccuucaugag

SEQ ID NO: 2203534 - RNA, 19 nt, Homo sapiens
  misc_RNA (1)...(19): siRNA sense strand
ucuaccugauccuguuuaa

SEQ ID NO: 2203535 - RNA, 19 nt, Homo sapiens
  misc_RNA (1)...(19): siRNA sense strand
ggugcaaggccgcuacuuc

SEQ ID NO: 2203536 - RNA, 19 nt, Homo sapiens
  misc_RNA (1)...(19): siRNA sense strand
cgcuaugucugccugauuc

SEQ ID NO: 2203537 - RNA, 19 nt, Homo sapiens
  misc_RNA (1)...(19): siRNA sense strand
gaugggcaccgugugaaga

SEQ ID NO: 2203538 - RNA, 19 nt, Homo sapiens
  misc_RNA (1)...(19): siRNA sense strand
agaccugccuuaccaugca

SEQ ID NO: 2203539 - RNA, 19 nt, Homo sapiens
  misc_RNA (1)...(19): siRNA sense strand
gagcuggccauccggaaag

SEQ ID NO: 2203540 - RNA, 19 nt, Homo sapiens
  misc_RNA (1)...(19): siRNA sense strand
gcgcuaugucugccugauu

SEQ ID NO: 2203541 - RNA, 19 nt, Homo sapiens
  misc_RNA (1)...(19): siRNA sense strand
guacuuggagcgcuauguc

SEQ ID NO: 2203542 - RNA, 19 nt, Homo sapiens
  misc_RNA (1)...(19): siRNA sense strand
ggcacuggcuucguguuca

SEQ ID NO: 2203543 - RNA, 19 nt, Homo sapiens
  misc_RNA (1)...(19): siRNA sense strand
gcacccucauccugcuuca

SEQ ID NO: 2203544 - RNA, 19 nt, Homo sapiens
  misc_RNA (1)...(19): siRNA sense strand
agggugggcucacuguguu

SEQ ID NO: 2203545 - RNA, 19 nt, Homo sapiens
  misc_RNA (1)...(19): siRNA sense strand
uaccugauccuguuuaacu

SEQ ID NO: 2203546 - RNA, 19 nt, Homo sapiens
  misc_RNA (1)...(19): siRNA sense strand
ccagaaggacggacauagg

SEQ ID NO: 2203547 - RNA, 19 nt, Homo sapiens
  misc_RNA (1)...(19): siRNA sense strand
cagcgaaagaggcgcaaga

SEQ ID NO: 2203548 - RNA, 19 nt, Homo sapiens
  misc_RNA (1)...(19): siRNA sense strand
gcaaggccaaguccaucau

SEQ ID NO: 2203549 - RNA, 19 nt, Homo sapiens
  misc_RNA (1)...(19): siRNA sense strand
agaggaggcugcggaaggu

SEQ ID NO: 2203550 - RNA, 19 nt, Homo sapiens
  misc_RNA (1)...(19): siRNA sense strand
ccagaagaaguuagaaggu

SEQ ID NO: 2203551 - RNA, 19 nt, Homo sapiens
  misc_RNA (1)...(19): siRNA sense strand
guuggacgccuuugucagu

SEQ ID NO: 2203552 - RNA, 19 nt, Homo sapiens
  misc_RNA (1)...(19): siRNA sense strand
gacaagcagaaccuucaug

SEQ ID NO: 2203553 - RNA, 19 nt, Homo sapiens
  misc_RNA (1)...(19): siRNA sense strand
uuccagaccugccuuacca

SEQ ID NO: 2203554 - RNA, 19 nt, Homo sapiens
  misc_RNA (1)...(19): siRNA sense strand
ugcgggaugucacugagaa

SEQ ID NO: 2203555 - RNA, 19 nt, Homo sapiens
  misc_RNA (1)...(19): siRNA sense strand
cauagggagugugucaucu

SEQ ID NO: 2203556 - RNA, 19 nt, Homo sapiens
  misc_RNA (1)...(19): siRNA sense strand
cccgagaggaggacuuuga

SEQ ID NO: 2203557 - RNA, 19 nt, Homo sapiens
  misc_RNA (1)...(19): siRNA sense strand
caggugauccagagcuuuc

SEQ ID NO: 2203558 - RNA, 19 nt, Homo sapiens
  misc_RNA (1)...(19): siRNA sense strand
cagagcacuagcuugcaua

SEQ ID NO: 2203559 - RNA, 19 nt, Homo sapiens
  misc_RNA (1)...(19): siRNA sense strand
gcaagagacuccaauaugg

SEQ ID NO: 2203560 - RNA, 19 nt, Homo sapiens
  misc_RNA (1)...(19): siRNA sense strand
ggagauaaagcucuacaua

SEQ ID NO: 2203561 - RNA, 19 nt, Homo sapiens
  misc_RNA (1)...(19): siRNA sense strand
gaaacaacaucggauaguu

SEQ ID NO: 2203562 - RNA, 19 nt, Homo sapiens
  misc_RNA (1)...(19): siRNA sense strand
gagauaaagcucuacauaa

SEQ ID NO: 2203563 - RNA, 19 nt, Homo sapiens
  misc_RNA (1)...(19): siRNA sense strand
cgagagagccagacacaua

SEQ ID NO: 2203564 - RNA, 19 nt, Homo sapiens
  misc_RNA (1)...(19): siRNA sense strand
gauaacagguuggugguau

SEQ ID NO: 2203565 - RNA, 19 nt, Homo sapiens
  misc_RNA (1)...(19): siRNA sense strand
gaucuuagacaaacucuug

SEQ ID NO: 2203566 - RNA, 19 nt, Homo sapiens
  misc_RNA (1)...(19): siRNA sense strand
gaugugaacuccauguauc

SEQ ID NO: 2203567 - RNA, 19 nt, Homo sapiens
  misc_RNA (1)...(19): siRNA sense strand
agauaaagcucuacauaag

SEQ ID NO: 2203568 - RNA, 19 nt, Homo sapiens
  misc_RNA (1)...(19): siRNA sense strand
ggcgaagacuguugaaguu

SEQ ID NO: 2203569 - RNA, 19 nt, Homo sapiens
  misc_RNA (1)...(19): siRNA sense strand
ggaagaggccuacccacuu

SEQ ID NO: 2203570 - RNA, 19 nt, Homo sapiens
  misc_RNA (1)...(19): siRNA sense strand
uagcacuaaugaucacuua

SEQ ID NO: 2203571 - RNA, 19 nt, Homo sapiens
  misc_RNA (1)...(19): siRNA sense strand
gugagggucuuccaucuga

SEQ ID NO: 2203572 - RNA, 19 nt, Homo sapiens
  misc_RNA (1)...(19): siRNA sense strand
gagagagccagacacauaa

SEQ ID NO: 2203573 - RNA, 19 nt, Homo sapiens
  misc_RNA (1)...(19): siRNA sense strand
gauaaagcucuacauaaga

SEQ ID NO: 2203574 - RNA, 19 nt, Homo sapiens
  misc_RNA (1)...(19): siRNA sense strand
ccucaccuaugaacagaua

SEQ ID NO: 2203575 - RNA, 19 nt, Homo sapiens
  misc_RNA (1)...(19): siRNA sense strand
gaagggugaccuggcauua

SEQ ID NO: 2203576 - RNA, 19 nt, Homo sapiens
  misc_RNA (1)...(19): siRNA sense strand
gagaggaggaugaugacua

SEQ ID NO: 2203577 - RNA, 19 nt, Homo sapiens
  misc_RNA (1)...(19): siRNA sense strand
cacagacgcugaguucuuu

SEQ ID NO: 2203578 - RNA, 19 nt, Homo sapiens
  misc_RNA (1)...(19): siRNA sense strand
ccagaggucuccuucaaag

SEQ ID NO: 2203579 - RNA, 19 nt, Homo sapiens
  misc_RNA (1)...(19): siRNA sense strand
ugacuauacugguagaaug

SEQ ID NO: 2203580 - RNA, 19 nt, Homo sapiens
  misc_RNA (1)...(19): siRNA sense strand
cuacacugaugaugucaaa

SEQ ID NO: 2203581 - RNA, 19 nt, Homo sapiens
  misc_RNA (1)...(19): siRNA sense strand
ucaacgacauccuacagaa

SEQ ID NO: 2203582 - RNA, 19 nt, Homo sapiens
  misc_RNA (1)...(19): siRNA sense strand
cagcaugugugacgagaug

SEQ ID NO: 2203583 - RNA, 19 nt, Homo sapiens
  misc_RNA (1)...(19): siRNA sense strand
ggacuacgacgacuuugug

SEQ ID NO: 2203584 - RNA, 19 nt, Homo sapiens
  misc_RNA (1)...(19): siRNA sense strand
gcaagaagaacaagguauc

SEQ ID NO: 2203585 - RNA, 19 nt, Homo sapiens
  misc_RNA (1)...(19): siRNA sense strand
ggaggagcacgaccuguuu

SEQ ID NO: 2203586 - RNA, 19 nt, Homo sapiens
  misc_RNA (1)...(19): siRNA sense strand
caacugaaggugauugaga

SEQ ID NO: 2203587 - RNA, 19 nt, Homo sapiens
  misc_RNA (1)...(19): siRNA sense strand
gcacuaaugaucacuuaca

SEQ ID NO: 2203588 - RNA, 19 nt, Homo sapiens
  misc_RNA (1)...(19): siRNA sense strand
ggcaagagacuccaauaug

SEQ ID NO: 2203589 - RNA, 19 nt, Homo sapiens
  misc_RNA (1)...(19): siRNA sense strand
caaccuggccuuccgaguu

SEQ ID NO: 2203590 - RNA, 19 nt, Homo sapiens
  misc_RNA (1)...(19): siRNA sense strand
cgaagacagugcugaucaa

SEQ ID NO: 2203591 - RNA, 19 nt, Homo sapiens
  misc_RNA (1)...(19): siRNA sense strand
agaggcagcugcacacuuc

SEQ ID NO: 2203592 - RNA, 19 nt, Homo sapiens
  misc_RNA (1)...(19): siRNA sense strand
gcuggccaguuucaucuuu

SEQ ID NO: 2203593 - RNA, 19 nt, Homo sapiens
  misc_RNA (1)...(19): siRNA sense strand
gcaguucaacgacauccua

SEQ ID NO: 2203594 - RNA, 19 nt, Homo sapiens
  misc_RNA (1)...(19): siRNA sense strand
ggaugaggagcuuggauuu

SEQ ID NO: 2203595 - RNA, 19 nt, Homo sapiens
  misc_RNA (1)...(19): siRNA sense strand
gagaugagccuggaugaca

SEQ ID NO: 2203596 - RNA, 19 nt, Homo sapiens
  misc_RNA (1)...(19): siRNA sense strand
caagugagaugaguaccau

SEQ ID NO: 2203597 - RNA, 19 nt, Homo sapiens
  misc_RNA (1)...(19): siRNA sense strand
gcgcagcccugacuauacu

SEQ ID NO: 2203598 - RNA, 19 nt, Homo sapiens
  misc_RNA (1)...(19): siRNA sense strand
gacacucacugacaacauc

SEQ ID NO: 2203599 - RNA, 19 nt, Homo sapiens
  misc_RNA (1)...(19): siRNA sense strand
cguguacccugaaguguug

SEQ ID NO: 2203600 - RNA, 19 nt, Homo sapiens
  misc_RNA (1)...(19): siRNA sense strand
cgaccucccuucuacagau

SEQ ID NO: 2203601 - RNA, 19 nt, Homo sapiens
  misc_RNA (1)...(19): siRNA sense strand
gagaagaaugugccugaga

SEQ ID NO: 2203602 - RNA, 19 nt, Homo sapiens
  misc_RNA (1)...(19): siRNA sense strand
ccacagacgcugaguucuu

SEQ ID NO: 2203603 - RNA, 19 nt, Homo sapiens
  misc_RNA (1)...(19): siRNA sense strand
aggccaagcuuaagaagau

SEQ ID NO: 2203604 - RNA, 19 nt, Homo sapiens
  misc_RNA (1)...(19): siRNA sense strand
aaaagacacugcacaaguu

SEQ ID NO: 2203605 - RNA, 19 nt, Homo sapiens
  misc_RNA (1)...(19): siRNA sense strand
ggcagaacauccccucuua

SEQ ID NO: 2203606 - RNA, 19 nt, Homo sapiens
  misc_RNA (1)...(19): siRNA sense strand
uggcugcccugcucaagaa

SEQ ID NO: 2203607 - RNA, 19 nt, Homo sapiens
  misc_RNA (1)...(19): siRNA sense strand
cugaugaugucaaaugguu

SEQ ID NO: 2203608 - RNA, 19 nt, Homo sapiens
  misc_RNA (1)...(19): siRNA sense strand
caacagcagcacuuccauu

SEQ ID NO: 2203609 - RNA, 19 nt, Homo sapiens
  misc_RNA (1)...(19): siRNA sense strand
guacuugguaucuggauga

SEQ ID NO: 2203610 - RNA, 19 nt, Homo sapiens
  misc_RNA (1)...(19): siRNA sense strand
acugagggcuucacagaga

SEQ ID NO: 2203611 - RNA, 19 nt, Homo sapiens
  misc_RNA (1)...(19): siRNA sense strand
ccacugagggcuucacaga

SEQ ID NO: 2203612 - RNA, 19 nt, Homo sapiens
  misc_RNA (1)...(19): siRNA sense strand
gcauggagguacuguuugc

SEQ ID NO: 2203613 - RNA, 19 nt, Homo sapiens
  misc_RNA (1)...(19): siRNA sense strand
gggcaagagacuccaauau

SEQ ID NO: 2203614 - RNA, 19 nt, Homo sapiens
  misc_RNA (1)...(19): siRNA sense strand
gaacagauaacagguuggu

SEQ ID NO: 2203615 - RNA, 19 nt, Homo sapiens
  misc_RNA (1)...(19): siRNA sense strand
ucaggacagugacagcauu

SEQ ID NO: 2203616 - RNA, 19 nt, Homo sapiens
  misc_RNA (1)...(19): siRNA sense strand
caggacggccuaagaagaa

SEQ ID NO: 2203617 - RNA, 19 nt, Homo sapiens
  misc_RNA (1)...(19): siRNA sense strand
aaucgacacucacugacaa

SEQ ID NO: 2203618 - RNA, 19 nt, Homo sapiens
  misc_RNA (1)...(19): siRNA sense strand
gggaugaggagcuuggauu

SEQ ID NO: 2203619 - RNA, 19 nt, Homo sapiens
  misc_RNA (1)...(19): siRNA sense strand
cccagauacuuaugaagaa

SEQ ID NO: 2203620 - RNA, 19 nt, Homo sapiens
  misc_RNA (1)...(19): siRNA sense strand
gcgaagacagugcugauca

SEQ ID NO: 2203621 - RNA, 19 nt, Homo sapiens
  misc_RNA (1)...(19): siRNA sense strand
gggcgaagacuguugaagu

SEQ ID NO: 2203622 - RNA, 19 nt, Homo sapiens
  misc_RNA (1)...(19): siRNA sense strand
augaggagcuuggauuuga

SEQ ID NO: 2203623 - RNA, 19 nt, Homo sapiens
  misc_RNA (1)...(19): siRNA sense strand
cuacagaggccuccagcuu

SEQ ID NO: 2203624 - RNA, 19 nt, Homo sapiens
  misc_RNA (1)...(19): siRNA sense strand
cuuccgaguuggcauguuu

SEQ ID NO: 2203625 - RNA, 19 nt, Homo sapiens
  misc_RNA (1)...(19): siRNA sense strand
guggaggccugcuacuuca

SEQ ID NO: 2203626 - RNA, 19 nt, Homo sapiens
  misc_RNA (1)...(19): siRNA sense strand
gggaggagcacgaccuguu

SEQ ID NO: 2203627 - RNA, 19 nt, Homo sapiens
  misc_RNA (1)...(19): siRNA sense strand
auaacagguuggugguaua

SEQ ID NO: 2203628 - RNA, 19 nt, Homo sapiens
  misc_RNA (1)...(19): siRNA sense strand
ccuguggucuucagugaug

SEQ ID NO: 2203629 - RNA, 19 nt, Homo sapiens
  misc_RNA (1)...(19): siRNA sense strand
ccaaggagccugggaccaa

SEQ ID NO: 2203630 - RNA, 19 nt, Homo sapiens
  misc_RNA (1)...(19): siRNA sense strand
accagugccucaccuauga

SEQ ID NO: 2203631 - RNA, 19 nt, Homo sapiens
  misc_RNA (1)...(19): siRNA sense strand
acacugaugaugucaaaug

SEQ ID NO: 2203632 - RNA, 19 nt, Homo sapiens
  misc_RNA (1)...(19): siRNA sense strand
gggcaucacgggcaagaga

SEQ ID NO: 2203633 - RNA, 19 nt, Homo sapiens
  misc_RNA (1)...(19): siRNA sense strand
cagcgcagcccugacuaua

SEQ ID NO: 2203634 - RNA, 19 nt, Homo sapiens
  misc_RNA (1)...(19): siRNA sense strand
aaacaacaucggauaguuc

SEQ ID NO: 2203635 - RNA, 19 nt, Homo sapiens
  misc_RNA (1)...(19): siRNA sense strand
ucagugaugugaacuccau

SEQ ID NO: 2203636 - RNA, 19 nt, Homo sapiens
  misc_RNA (1)...(19): siRNA sense strand
uggcauaccaggagucuga

SEQ ID NO: 2203637 - RNA, 19 nt, Homo sapiens
  misc_RNA (1)...(19): siRNA sense strand
gguggaggccugcuacuuc

SEQ ID NO: 2203638 - RNA, 19 nt, Homo sapiens
  misc_RNA (1)...(19): siRNA sense strand
gaccaggccaagcuuaaga

SEQ ID NO: 2203639 - RNA, 19 nt, Homo sapiens
  misc_RNA (1)...(19): siRNA sense strand
gcacuuccauuuucacaca

SEQ ID NO: 2203640 - RNA, 19 nt, Homo sapiens
  misc_RNA (1)...(19): siRNA sense strand
cuugguaucuggaugaauc

SEQ ID NO: 2203641 - RNA, 19 nt, Homo sapiens
  misc_RNA (1)...(19): siRNA sense strand
uaccaggcguacuaucuga

SEQ ID NO: 2203642 - RNA, 19 nt, Homo sapiens
  misc_RNA (1)...(19): siRNA sense strand
acccugaaguguuguuuga

SEQ ID NO: 2203643 - RNA, 19 nt, Homo sapiens
  misc_RNA (1)...(19): siRNA sense strand
gcaaggaacaggacaaccu

SEQ ID NO: 2203644 - RNA, 19 nt, Homo sapiens
  misc_RNA (1)...(19): siRNA sense strand
gaccagugccucaccuaug

SEQ ID NO: 2203645 - RNA, 19 nt, Homo sapiens
  misc_RNA (1)...(19): siRNA sense strand
ugaccuggcauuagcacua

SEQ ID NO: 2203646 - RNA, 19 nt, Homo sapiens
  misc_RNA (1)...(19): siRNA sense strand
ugaggagcuuggauuugaa

SEQ ID NO: 2203647 - RNA, 19 nt, Homo sapiens
  misc_RNA (1)...(19): siRNA sense strand
aaccuggccuuccgaguug

SEQ ID NO: 2203648 - RNA, 19 nt, Homo sapiens
  misc_RNA (1)...(19): siRNA sense strand
gggcaagaagaacaaggua

SEQ ID NO: 2203649 - RNA, 19 nt, Homo sapiens
  misc_RNA (1)...(19): siRNA sense strand
agaggaggaugaugacuac

SEQ ID NO: 2203650 - RNA, 19 nt, Homo sapiens
  misc_RNA (1)...(19): siRNA sense strand
cuacgacgacuuugugaau

SEQ ID NO: 2203651 - RNA, 19 nt, Homo sapiens
  misc_RNA (1)...(19): siRNA sense strand
gaaucgacacucacugaca

SEQ ID NO: 2203652 - RNA, 19 nt, Homo sapiens
  misc_RNA (1)...(19): siRNA sense strand
ucccacguuuccuggauua

SEQ ID NO: 2203653 - RNA, 19 nt, Homo sapiens
  misc_RNA (1)...(19): siRNA sense strand
cagcagcacuuccauuuuc

SEQ ID NO: 2203654 - RNA, 19 nt, Homo sapiens
  misc_RNA (1)...(19): siRNA sense strand
ccugaaacaacaucggaua

SEQ ID NO: 2203655 - RNA, 19 nt, Homo sapiens
  misc_RNA (1)...(19): siRNA sense strand
gaagaucuuagacaaacuc

SEQ ID NO: 2203656 - RNA, 19 nt, Homo sapiens
  misc_RNA (1)...(19): siRNA sense strand
gaugaggagcuuggauuug

SEQ ID NO: 2203657 - RNA, 19 nt, Homo sapiens
  misc_RNA (1)...(19): siRNA sense strand
uguuggaaauccucacuga

SEQ ID NO: 2203658 - RNA, 19 nt, Homo sapiens
  misc_RNA (1)...(19): siRNA sense strand
ucgcauggagguacuguuu

SEQ ID NO: 2203659 - RNA, 19 nt, Homo sapiens
  misc_RNA (1)...(19): siRNA sense strand
ggagaaggcugaagugauu

SEQ ID NO: 2203660 - RNA, 19 nt, Homo sapiens
  misc_RNA (1)...(19): siRNA sense strand
gaacaagaacuccaauaaa

SEQ ID NO: 2203661 - RNA, 19 nt, Homo sapiens
  misc_RNA (1)...(19): siRNA sense strand
guaaucagcacaaagaaua

SEQ ID NO: 2203662 - RNA, 19 nt, Homo sapiens
  misc_RNA (1)...(19): siRNA sense strand
guacacugcuuaucauuau

SEQ ID NO: 2203663 - RNA, 19 nt, Homo sapiens
  misc_RNA (1)...(19): siRNA sense strand
gaacaaaucacaagacagu

SEQ ID NO: 2203664 - RNA, 19 nt, Homo sapiens
  misc_RNA (1)...(19): siRNA sense strand
ggauucaccuuauggaaga

SEQ ID NO: 2203665 - RNA, 19 nt, Homo sapiens
  misc_RNA (1)...(19): siRNA sense strand
gcuguucccuugccuauga

SEQ ID NO: 2203666 - RNA, 19 nt, Homo sapiens
  misc_RNA (1)...(19): siRNA sense strand
gugauuauguugugucuga

SEQ ID NO: 2203667 - RNA, 19 nt, Homo sapiens
  misc_RNA (1)...(19): siRNA sense strand
gaacuuccuguaccacaua

SEQ ID NO: 2203668 - RNA, 19 nt, Homo sapiens
  misc_RNA (1)...(19): siRNA sense strand
acaaggauguucccacaaa

SEQ ID NO: 2203669 - RNA, 19 nt, Homo sapiens
  misc_RNA (1)...(19): siRNA sense strand
caugggaaauggauucaaa

SEQ ID NO: 2203670 - RNA, 19 nt, Homo sapiens
  misc_RNA (1)...(19): siRNA sense strand
gaacaucaugggaaugcua

SEQ ID NO: 2203671 - RNA, 19 nt, Homo sapiens
  misc_RNA (1)...(19): siRNA sense strand
gaagauacagguuugagau

SEQ ID NO: 2203672 - RNA, 19 nt, Homo sapiens
  misc_RNA (1)...(19): siRNA sense strand
uaagcaauauaacguguga

SEQ ID NO: 2203673 - RNA, 19 nt, Homo sapiens
  misc_RNA (1)...(19): siRNA sense strand
gagaacaagaacuccaaua

SEQ ID NO: 2203674 - RNA, 19 nt, Homo sapiens
  misc_RNA (1)...(19): siRNA sense strand
cccaagaacugaauauaca

SEQ ID NO: 2203675 - RNA, 19 nt, Homo sapiens
  misc_RNA (1)...(19): siRNA sense strand
caauauaacgugugacuca

SEQ ID NO: 2203676 - RNA, 19 nt, Homo sapiens
  misc_RNA (1)...(19): siRNA sense strand
agaacaagaacuccaauaa

SEQ ID NO: 2203677 - RNA, 19 nt, Homo sapiens
  misc_RNA (1)...(19): siRNA sense strand
caaaggaucgcauuacaca

SEQ ID NO: 2203678 - RNA, 19 nt, Homo sapiens
  misc_RNA (1)...(19): siRNA sense strand
uagaagucauuuacacuga

SEQ ID NO: 2203679 - RNA, 19 nt, Homo sapiens
  misc_RNA (1)...(19): siRNA sense strand
acaaguugauggugauuau

SEQ ID NO: 2203680 - RNA, 19 nt, Homo sapiens
  misc_RNA (1)...(19): siRNA sense strand
gcagccaucugucaaggau

SEQ ID NO: 2203681 - RNA, 19 nt, Homo sapiens
  misc_RNA (1)...(19): siRNA sense strand
uagcagagauggaagaacu

SEQ ID NO: 2203682 - RNA, 19 nt, Homo sapiens
  misc_RNA (1)...(19): siRNA sense strand
gaaagaucccagcugcaaa

SEQ ID NO: 2203683 - RNA, 19 nt, Homo sapiens
  misc_RNA (1)...(19): siRNA sense strand
gcaggacgcaugcuuaagu

SEQ ID NO: 2203684 - RNA, 19 nt, Homo sapiens
  misc_RNA (1)...(19): siRNA sense strand
uaucaguguuggacguuaa

SEQ ID NO: 2203685 - RNA, 19 nt, Homo sapiens
  misc_RNA (1)...(19): siRNA sense strand
gcagcgccuuccucaacua

SEQ ID NO: 2203686 - RNA, 19 nt, Homo sapiens
  misc_RNA (1)...(19): siRNA sense strand
gaauggagugaaauuauag

SEQ ID NO: 2203687 - RNA, 19 nt, Homo sapiens
  misc_RNA (1)...(19): siRNA sense strand
ggaagauacagguuugaga

SEQ ID NO: 2203688 - RNA, 19 nt, Homo sapiens
  misc_RNA (1)...(19): siRNA sense strand
uauggaagauacagguuug

SEQ ID NO: 2203689 - RNA, 19 nt, Homo sapiens
  misc_RNA (1)...(19): siRNA sense strand
cugcagcacugaauucaau

SEQ ID NO: 2203690 - RNA, 19 nt, Homo sapiens
  misc_RNA (1)...(19): siRNA sense strand
ggacuucuacuguauguac

SEQ ID NO: 2203691 - RNA, 19 nt, Homo sapiens
  misc_RNA (1)...(19): siRNA sense strand
guauguacacugcuuauca

SEQ ID NO: 2203692 - RNA, 19 nt, Homo sapiens
  misc_RNA (1)...(19): siRNA sense strand
gcgccuuccucaacuaaau

SEQ ID NO: 2203693 - RNA, 19 nt, Homo sapiens
  misc_RNA (1)...(19): siRNA sense strand
uauaacgugugacucauuc

SEQ ID NO: 2203694 - RNA, 19 nt, Homo sapiens
  misc_RNA (1)...(19): siRNA sense strand
gcagaaaucacuggucauc

SEQ ID NO: 2203695 - RNA, 19 nt, Homo sapiens
  misc_RNA (1)...(19): siRNA sense strand
caggacgcaugcuuaaguu

SEQ ID NO: 2203696 - RNA, 19 nt, Homo sapiens
  misc_RNA (1)...(19): siRNA sense strand
acaagaaagagaacaagaa

SEQ ID NO: 2203697 - RNA, 19 nt, Homo sapiens
  misc_RNA (1)...(19): siRNA sense strand
agaaaucacuggucaucag

SEQ ID NO: 2203698 - RNA, 19 nt, Homo sapiens
  misc_RNA (1)...(19): siRNA sense strand
agauacagguuugagauug

SEQ ID NO: 2203699 - RNA, 19 nt, Homo sapiens
  misc_RNA (1)...(19): siRNA sense strand
gcaccgcagacuauucaaa

SEQ ID NO: 2203700 - RNA, 19 nt, Homo sapiens
  misc_RNA (1)...(19): siRNA sense strand
gcaaaugcaaagaaagauc

SEQ ID NO: 2203701 - RNA, 19 nt, Homo sapiens
  misc_RNA (1)...(19): siRNA sense strand
agccaucugucaaggauaa

SEQ ID NO: 2203702 - RNA, 19 nt, Homo sapiens
  misc_RNA (1)...(19): siRNA sense strand
ugaauucaauacuggaaag

SEQ ID NO: 2203703 - RNA, 19 nt, Homo sapiens
  misc_RNA (1)...(19): siRNA sense strand
gauacagguuugagauugc

SEQ ID NO: 2203704 - RNA, 19 nt, Homo sapiens
  misc_RNA (1)...(19): siRNA sense strand
ccauggcucuccuaucagu

SEQ ID NO: 2203705 - RNA, 19 nt, Homo sapiens
  misc_RNA (1)...(19): siRNA sense strand
caucagcucaugaguuugu

SEQ ID NO: 2203706 - RNA, 19 nt, Homo sapiens
  misc_RNA (1)...(19): siRNA sense strand
caagaaagagaacaagaac

SEQ ID NO: 2203707 - RNA, 19 nt, Homo sapiens
  misc_RNA (1)...(19): siRNA sense strand
gaagauggggugcugguuu

SEQ ID NO: 2203708 - RNA, 19 nt, Homo sapiens
  misc_RNA (1)...(19): siRNA sense strand
uguacacugcuuaucauua

SEQ ID NO: 2203709 - RNA, 19 nt, Homo sapiens
  misc_RNA (1)...(19): siRNA sense strand
acaagacaguggcauagca

SEQ ID NO: 2203710 - RNA, 19 nt, Homo sapiens
  misc_RNA (1)...(19): siRNA sense strand
agaaagagaacaagaacuc

SEQ ID NO: 2203711 - RNA, 19 nt, Homo sapiens
  misc_RNA (1)...(19): siRNA sense strand
ugcaaaaccuguaauauca

SEQ ID NO: 2203712 - RNA, 19 nt, Homo sapiens
  misc_RNA (1)...(19): siRNA sense strand
gcauagcagagauggaaga

SEQ ID NO: 2203713 - RNA, 19 nt, Homo sapiens
  misc_RNA (1)...(19): siRNA sense strand
ucgagaacaucaugggaau

SEQ ID NO: 2203714 - RNA, 19 nt, Homo sapiens
  misc_RNA (1)...(19): siRNA sense strand
uauguacacugcuuaucau

SEQ ID NO: 2203715 - RNA, 19 nt, Homo sapiens
  misc_RNA (1)...(19): siRNA sense strand
agaaagaucccagcugcaa

SEQ ID NO: 2203716 - RNA, 19 nt, Homo sapiens
  misc_RNA (1)...(19): siRNA sense strand
gggaucaccaggagaugaa

SEQ ID NO: 2203717 - RNA, 19 nt, Homo sapiens
  misc_RNA (1)...(19): siRNA sense strand
gcccaagaacugaauauac

SEQ ID NO: 2203718 - RNA, 19 nt, Homo sapiens
  misc_RNA (1)...(19): siRNA sense strand
gaucaccaggagaugaauu

SEQ ID NO: 2203719 - RNA, 19 nt, Homo sapiens
  misc_RNA (1)...(19): siRNA sense strand
ugugacucauucaagauuu

SEQ ID NO: 2203720 - RNA, 19 nt, Homo sapiens
  misc_RNA (1)...(19): siRNA sense strand
ggacgcaugcuuaaguuuu

SEQ ID NO: 2203721 - RNA, 19 nt, Homo sapiens
  misc_RNA (1)...(19): siRNA sense strand
gcuaugcagccaucuguca

SEQ ID NO: 2203722 - RNA, 19 nt, Homo sapiens
  misc_RNA (1)...(19): siRNA sense strand
acacugacccuguggaucu

SEQ ID NO: 2203723 - RNA, 19 nt, Homo sapiens
  misc_RNA (1)...(19): siRNA sense strand
ggagaugaauuuuguaagc

SEQ ID NO: 2203724 - RNA, 19 nt, Homo sapiens
  misc_RNA (1)...(19): siRNA sense strand
ggaucgcauuacacacuau

SEQ ID NO: 2203725 - RNA, 19 nt, Homo sapiens
  misc_RNA (1)...(19): siRNA sense strand
uaaccccaauacuaacuua

SEQ ID NO: 2203726 - RNA, 19 nt, Homo sapiens
  misc_RNA (1)...(19): siRNA sense strand
gcucuccuaucaguggaaa

SEQ ID NO: 2203727 - RNA, 19 nt, Homo sapiens
  misc_RNA (1)...(19): siRNA sense strand
aaaucaaaggaucgcauua

SEQ ID NO: 2203728 - RNA, 19 nt, Homo sapiens
  misc_RNA (1)...(19): siRNA sense strand
aagauggggugcugguuua

SEQ ID NO: 2203729 - RNA, 19 nt, Homo sapiens
  misc_RNA (1)...(19): siRNA sense strand
gaucgcauuacacacuauu

SEQ ID NO: 2203730 - RNA, 19 nt, Homo sapiens
  misc_RNA (1)...(19): siRNA sense strand
ucaacaagaaagagaacaa

SEQ ID NO: 2203731 - RNA, 19 nt, Homo sapiens
  misc_RNA (1)...(19): siRNA sense strand
uggcauagcagagauggaa

SEQ ID NO: 2203732 - RNA, 19 nt, Homo sapiens
  misc_RNA (1)...(19): siRNA sense strand
gaccucaacaagaaagaga

SEQ ID NO: 2203733 - RNA, 19 nt, Homo sapiens
  misc_RNA (1)...(19): siRNA sense strand
gugacucauucaagauuuc

SEQ ID NO: 2203734 - RNA, 19 nt, Homo sapiens
  misc_RNA (1)...(19): siRNA sense strand
uaacgugugacucauucaa

SEQ ID NO: 2203735 - RNA, 19 nt, Homo sapiens
  misc_RNA (1)...(19): siRNA sense strand
gagaacaucaugggaaugc

SEQ ID NO: 2203736 - RNA, 19 nt, Homo sapiens
  misc_RNA (1)...(19): siRNA sense strand
cugaauggagugaaauuau

SEQ ID NO: 2203737 - RNA, 19 nt, Homo sapiens
  misc_RNA (1)...(19): siRNA sense strand
ugauggugauuauguugug

SEQ ID NO: 2203738 - RNA, 19 nt, Homo sapiens
  misc_RNA (1)...(19): siRNA sense strand
uguaccacauaacaucaaa

SEQ ID NO: 2203739 - RNA, 19 nt, Homo sapiens
  misc_RNA (1)...(19): siRNA sense strand
gacaguggcauagcagaga

SEQ ID NO: 2203740 - RNA, 19 nt, Homo sapiens
  misc_RNA (1)...(19): siRNA sense strand
guucaucuaacacaauugu

SEQ ID NO: 2203741 - RNA, 19 nt, Homo sapiens
  misc_RNA (1)...(19): siRNA sense strand
caacaagaaagagaacaag

SEQ ID NO: 2203742 - RNA, 19 nt, Homo sapiens
  misc_RNA (1)...(19): siRNA sense strand
caaaauugguggcaaaagc

SEQ ID NO: 2203743 - RNA, 19 nt, Homo sapiens
  misc_RNA (1)...(19): siRNA sense strand
gaaagccaccccaggauuc

SEQ ID NO: 2203744 - RNA, 19 nt, Homo sapiens
  misc_RNA (1)...(19): siRNA sense strand
ucugaauggagugaaauua

SEQ ID NO: 2203745 - RNA, 19 nt, Homo sapiens
  misc_RNA (1)...(19): siRNA sense strand
gugucugaauggagugaaa

SEQ ID NO: 2203746 - RNA, 19 nt, Homo sapiens
  misc_RNA (1)...(19): siRNA sense strand
gcucaugaguuugucuacu

SEQ ID NO: 2203747 - RNA, 19 nt, Homo sapiens
  misc_RNA (1)...(19): siRNA sense strand
ggaaagccaccccaggauu

SEQ ID NO: 2203748 - RNA, 19 nt, Homo sapiens
  misc_RNA (1)...(19): siRNA sense strand
caaggauguucccacaaaa

SEQ ID NO: 2203749 - RNA, 19 nt, Homo sapiens
  misc_RNA (1)...(19): siRNA sense strand
gauggugauuauguugugu

SEQ ID NO: 2203750 - RNA, 19 nt, Homo sapiens
  misc_RNA (1)...(19): siRNA sense strand
cucaugaguuugucuacug

SEQ ID NO: 2203751 - RNA, 19 nt, Homo sapiens
  misc_RNA (1)...(19): siRNA sense strand
ucacaagacaguggcauag

SEQ ID NO: 2203752 - RNA, 19 nt, Homo sapiens
  misc_RNA (1)...(19): siRNA sense strand
acgugugacucauucaaga

SEQ ID NO: 2203753 - RNA, 19 nt, Homo sapiens
  misc_RNA (1)...(19): siRNA sense strand
aggaucgcauuacacacua

SEQ ID NO: 2203754 - RNA, 19 nt, Homo sapiens
  misc_RNA (1)...(19): siRNA sense strand
aagauacagguuugagauu

SEQ ID NO: 2203755 - RNA, 19 nt, Homo sapiens
  misc_RNA (1)...(19): siRNA sense strand
caaaaccuguaauaucagu

SEQ ID NO: 2203756 - RNA, 19 nt, Homo sapiens
  misc_RNA (1)...(19): siRNA sense strand
gaccuguacagaagaagau

SEQ ID NO: 2203757 - RNA, 19 nt, Homo sapiens
  misc_RNA (1)...(19): siRNA sense strand
uccuaucaguggaaaauua

SEQ ID NO: 2203758 - RNA, 19 nt, Homo sapiens
  misc_RNA (1)...(19): siRNA sense strand
cagcugcagcacugaauuc

SEQ ID NO: 2203759 - RNA, 19 nt, Homo sapiens
  misc_RNA (1)...(19): siRNA sense strand
ggagaaggcugaagugauu

SEQ ID NO: 2203760 - RNA, 19 nt, Homo sapiens
  misc_RNA (1)...(19): siRNA sense strand
gaacaagaacuccaauaaa

SEQ ID NO: 2203761 - RNA, 19 nt, Homo sapiens
  misc_RNA (1)...(19): siRNA sense strand
guaaucagcacaaagaaua

SEQ ID NO: 2203762 - RNA, 19 nt, Homo sapiens
  misc_RNA (1)...(19): siRNA sense strand
guacacugcuuaucauuau

SEQ ID NO: 2203763 - RNA, 19 nt, Homo sapiens
  misc_RNA (1)...(19): siRNA sense strand
gaacaaaucacaagacagu

SEQ ID NO: 2203764 - RNA, 19 nt, Homo sapiens
  misc_RNA (1)...(19): siRNA sense strand
ggauucaccuuauggaaga

SEQ ID NO: 2203765 - RNA, 19 nt, Homo sapiens
  misc_RNA (1)...(19): siRNA sense strand
gcuguucccuugccuauga

SEQ ID NO: 2203766 - RNA, 19 nt, Homo sapiens
  misc_RNA (1)...(19): siRNA sense strand
gugauuauguugugucuga

SEQ ID NO: 2203767 - RNA, 19 nt, Homo sapiens
  misc_RNA (1)...(19): siRNA sense strand
gaacuuccuguaccacaua

SEQ ID NO: 2203768 - RNA, 19 nt, Homo sapiens
  misc_RNA (1)...(19): siRNA sense strand
acaaggauguucccacaaa

SEQ ID NO: 2203769 - RNA, 19 nt, Homo sapiens
  misc_RNA (1)...(19): siRNA sense strand
caugggaaauggauucaaa

SEQ ID NO: 2203770 - RNA, 19 nt, Homo sapiens
  misc_RNA (1)...(19): siRNA sense strand
gaacaucaugggaaugcua

SEQ ID NO: 2203771 - RNA, 19 nt, Homo sapiens
  misc_RNA (1)...(19): siRNA sense strand
gaagauacagguuugagau

SEQ ID NO: 2203772 - RNA, 19 nt, Homo sapiens
  misc_RNA (1)...(19): siRNA sense strand
uaagcaauauaacguguga

SEQ ID NO: 2203773 - RNA, 19 nt, Homo sapiens
  misc_RNA (1)...(19): siRNA sense strand
gagaacaagaacuccaaua

SEQ ID NO: 2203774 - RNA, 19 nt, Homo sapiens
  misc_RNA (1)...(19): siRNA sense strand
cccaagaacugaauauaca

SEQ ID NO: 2203775 - RNA, 19 nt, Homo sapiens
  misc_RNA (1)...(19): siRNA sense strand
caauauaacgugugacuca

SEQ ID NO: 2203776 - RNA, 19 nt, Homo sapiens
  misc_RNA (1)...(19): siRNA sense strand
agaacaagaacuccaauaa

SEQ ID NO: 2203777 - RNA, 19 nt, Homo sapiens
  misc_RNA (1)...(19): siRNA sense strand
caaaggaucgcauuacaca

SEQ ID NO: 2203778 - RNA, 19 nt, Homo sapiens
  misc_RNA (1)...(19): siRNA sense strand
uagaagucauuuacacuga

SEQ ID NO: 2203779 - RNA, 19 nt, Homo sapiens
  misc_RNA (1)...(19): siRNA sense strand
acaaguugauggugauuau

SEQ ID NO: 2203780 - RNA, 19 nt, Homo sapiens
  misc_RNA (1)...(19): siRNA sense strand
gcagccaucugucaaggau

SEQ ID NO: 2203781 - RNA, 19 nt, Homo sapiens
  misc_RNA (1)...(19): siRNA sense strand
uagcagagauggaagaacu

SEQ ID NO: 2203782 - RNA, 19 nt, Homo sapiens
  misc_RNA (1)...(19): siRNA sense strand
gaaagaucccagcugcaaa

SEQ ID NO: 2203783 - RNA, 19 nt, Homo sapiens
  misc_RNA (1)...(19): siRNA sense strand
gcaggacgcaugcuuaagu

SEQ ID NO: 2203784 - RNA, 19 nt, Homo sapiens
  misc_RNA (1)...(19): siRNA sense strand
uaucaguguuggacguuaa

SEQ ID NO: 2203785 - RNA, 19 nt, Homo sapiens
  misc_RNA (1)...(19): siRNA sense strand
gcagcgccuuccucaacua

SEQ ID NO: 2203786 - RNA, 19 nt, Homo sapiens
  misc_RNA (1)...(19): siRNA sense strand
gaauggagugaaauuauag

SEQ ID NO: 2203787 - RNA, 19 nt, Homo sapiens
  misc_RNA (1)...(19): siRNA sense strand
ggaagauacagguuugaga

SEQ ID NO: 2203788 - RNA, 19 nt, Homo sapiens
  misc_RNA (1)...(19): siRNA sense strand
uauggaagauacagguuug

SEQ ID NO: 2203789 - RNA, 19 nt, Homo sapiens
  misc_RNA (1)...(19): siRNA sense strand
cugcagcacugaauucaau

SEQ ID NO: 2203790 - RNA, 19 nt, Homo sapiens
  misc_RNA (1)...(19): siRNA sense strand
ggacuucuacuguauguac

SEQ ID NO: 2203791 - RNA, 19 nt, Homo sapiens
  misc_RNA (1)...(19): siRNA sense strand
guauguacacugcuuauca

SEQ ID NO: 2203792 - RNA, 19 nt, Homo sapiens
  misc_RNA (1)...(19): siRNA sense strand
gcgccuuccucaacuaaau

SEQ ID NO: 2203793 - RNA, 19 nt, Homo sapiens
  misc_RNA (1)...(19): siRNA sense strand
uauaacgugugacucauuc

SEQ ID NO: 2203794 - RNA, 19 nt, Homo sapiens
  misc_RNA (1)...(19): siRNA sense strand
gcagaaaucacuggucauc

SEQ ID NO: 2203795 - RNA, 19 nt, Homo sapiens
  misc_RNA (1)...(19): siRNA sense strand
caggacgcaugcuuaaguu

SEQ ID NO: 2203796 - RNA, 19 nt, Homo sapiens
  misc_RNA (1)...(19): siRNA sense strand
acaagaaagagaacaagaa

SEQ ID NO: 2203797 - RNA, 19 nt, Homo sapiens
  misc_RNA (1)...(19): siRNA sense strand
agaaaucacuggucaucag

SEQ ID NO: 2203798 - RNA, 19 nt, Homo sapiens
  misc_RNA (1)...(19): siRNA sense strand
agauacagguuugagauug

SEQ ID NO: 2203799 - RNA, 19 nt, Homo sapiens
  misc_RNA (1)...(19): siRNA sense strand
gcaccgcagacuauucaaa

SEQ ID NO: 2203800 - RNA, 19 nt, Homo sapiens
  misc_RNA (1)...(19): siRNA sense strand
gcaaaugcaaagaaagauc

SEQ ID NO: 2203801 - RNA, 19 nt, Homo sapiens
  misc_RNA (1)...(19): siRNA sense strand
agccaucugucaaggauaa

SEQ ID NO: 2203802 - RNA, 19 nt, Homo sapiens
  misc_RNA (1)...(19): siRNA sense strand
ugaauucaauacuggaaag

SEQ ID NO: 2203803 - RNA, 19 nt, Homo sapiens
  misc_RNA (1)...(19): siRNA sense strand
gauacagguuugagauugc

SEQ ID NO: 2203804 - RNA, 19 nt, Homo sapiens
  misc_RNA (1)...(19): siRNA sense strand
ccauggcucuccuaucagu

SEQ ID NO: 2203805 - RNA, 19 nt, Homo sapiens
  misc_RNA (1)...(19): siRNA sense strand
caucagcucaugaguuugu

SEQ ID NO: 2203806 - RNA, 19 nt, Homo sapiens
  misc_RNA (1)...(19): siRNA sense strand
caagaaagagaacaagaac

SEQ ID NO: 2203807 - RNA, 19 nt, Homo sapiens
  misc_RNA (1)...(19): siRNA sense strand
gaagauggggugcugguuu

SEQ ID NO: 2203808 - RNA, 19 nt, Homo sapiens
  misc_RNA (1)...(19): siRNA sense strand
uguacacugcuuaucauua

SEQ ID NO: 2203809 - RNA, 19 nt, Homo sapiens
  misc_RNA (1)...(19): siRNA sense strand
acaagacaguggcauagca

SEQ ID NO: 2203810 - RNA, 19 nt, Homo sapiens
  misc_RNA (1)...(19): siRNA sense strand
agaaagagaacaagaacuc

SEQ ID NO: 2203811 - RNA, 19 nt, Homo sapiens
  misc_RNA (1)...(19): siRNA sense strand
ugcaaaaccuguaauauca

SEQ ID NO: 2203812 - RNA, 19 nt, Homo sapiens
  misc_RNA (1)...(19): siRNA sense strand
gcauagcagagauggaaga

SEQ ID NO: 2203813 - RNA, 19 nt, Homo sapiens
  misc_RNA (1)...(19): siRNA sense strand
ucgagaacaucaugggaau

SEQ ID NO: 2203814 - RNA, 19 nt, Homo sapiens
  misc_RNA (1)...(19): siRNA sense strand
uauguacacugcuuaucau

SEQ ID NO: 2203815 - RNA, 19 nt, Homo sapiens
  misc_RNA (1)...(19): siRNA sense strand
agaaagaucccagcugcaa

SEQ ID NO: 2203816 - RNA, 19 nt, Homo sapiens
  misc_RNA (1)...(19): siRNA sense strand
gggaucaccaggagaugaa

SEQ ID NO: 2203817 - RNA, 19 nt, Homo sapiens
  misc_RNA (1)...(19): siRNA sense strand
gcccaagaacugaauauac

SEQ ID NO: 2203818 - RNA, 19 nt, Homo sapiens
  misc_RNA (1)...(19): siRNA sense strand
gaucaccaggagaugaauu

SEQ ID NO: 2203819 - RNA, 19 nt, Homo sapiens
  misc_RNA (1)...(19): siRNA sense strand
ugugacucauucaagauuu

SEQ ID NO: 2203820 - RNA, 19 nt, Homo sapiens
  misc_RNA (1)...(19): siRNA sense strand
ggacgcaugcuuaaguuuu

SEQ ID NO: 2203821 - RNA, 19 nt, Homo sapiens
  misc_RNA (1)...(19): siRNA sense strand
gcuaugcagccaucuguca

SEQ ID NO: 2203822 - RNA, 19 nt, Homo sapiens
  misc_RNA (1)...(19): siRNA sense strand
acacugacccuguggaucu

SEQ ID NO: 2203823 - RNA, 19 nt, Homo sapiens
  misc_RNA (1)...(19): siRNA sense strand
ggagaugaauuuuguaagc

SEQ ID NO: 2203824 - RNA, 19 nt, Homo sapiens
  misc_RNA (1)...(19): siRNA sense strand
ggaucgcauuacacacuau

SEQ ID NO: 2203825 - RNA, 19 nt, Homo sapiens
  misc_RNA (1)...(19): siRNA sense strand
uaaccccaauacuaacuua

SEQ ID NO: 2203826 - RNA, 19 nt, Homo sapiens
  misc_RNA (1)...(19): siRNA sense strand
gcucuccuaucaguggaaa

SEQ ID NO: 2203827 - RNA, 19 nt, Homo sapiens
  misc_RNA (1)...(19): siRNA sense strand
aaaucaaaggaucgcauua

SEQ ID NO: 2203828 - RNA, 19 nt, Homo sapiens
  misc_RNA (1)...(19): siRNA sense strand
aagauggggugcugguuua

SEQ ID NO: 2203829 - RNA, 19 nt, Homo sapiens
  misc_RNA (1)...(19): siRNA sense strand
gaucgcauuacacacuauu

SEQ ID NO: 2203830 - RNA, 19 nt, Homo sapiens
  misc_RNA (1)...(19): siRNA sense strand
ucaacaagaaagagaacaa

SEQ ID NO: 2203831 - RNA, 19 nt, Homo sapiens
  misc_RNA (1)...(19): siRNA sense strand
uggcauagcagagauggaa

SEQ ID NO: 2203832 - RNA, 19 nt, Homo sapiens
  misc_RNA (1)...(19): siRNA sense strand
gaccucaacaagaaagaga

SEQ ID NO: 2203833 - RNA, 19 nt, Homo sapiens
  misc_RNA (1)...(19): siRNA sense strand
gugacucauucaagauuuc

SEQ ID NO: 2203834 - RNA, 19 nt, Homo sapiens
  misc_RNA (1)...(19): siRNA sense strand
uaacgugugacucauucaa

SEQ ID NO: 2203835 - RNA, 19 nt, Homo sapiens
  misc_RNA (1)...(19): siRNA sense strand
gagaacaucaugggaaugc

SEQ ID NO: 2203836 - RNA, 19 nt, Homo sapiens
  misc_RNA (1)...(19): siRNA sense strand
cugaauggagugaaauuau

SEQ ID NO: 2203837 - RNA, 19 nt, Homo sapiens
  misc_RNA (1)...(19): siRNA sense strand
ugauggugauuauguugug

SEQ ID NO: 2203838 - RNA, 19 nt, Homo sapiens
  misc_RNA (1)...(19): siRNA sense strand
uguaccacauaacaucaaa

SEQ ID NO: 2203839 - RNA, 19 nt, Homo sapiens
  misc_RNA (1)...(19): siRNA sense strand
gacaguggcauagcagaga

SEQ ID NO: 2203840 - RNA, 19 nt, Homo sapiens
  misc_RNA (1)...(19): siRNA sense strand
guucaucuaacacaauugu

SEQ ID NO: 2203841 - RNA, 19 nt, Homo sapiens
  misc_RNA (1)...(19): siRNA sense strand
caacaagaaagagaacaag

SEQ ID NO: 2203842 - RNA, 19 nt, Homo sapiens
  misc_RNA (1)...(19): siRNA sense strand
caaaauugguggcaaaagc

SEQ ID NO: 2203843 - RNA, 19 nt, Homo sapiens
  misc_RNA (1)...(19): siRNA sense strand
gaaagccaccccaggauuc

SEQ ID NO: 2203844 - RNA, 19 nt, Homo sapiens
  misc_RNA (1)...(19): siRNA sense strand
ucugaauggagugaaauua

SEQ ID NO: 2203845 - RNA, 19 nt, Homo sapiens
  misc_RNA (1)...(19): siRNA sense strand
gugucugaauggagugaaa

SEQ ID NO: 2203846 - RNA, 19 nt, Homo sapiens
  misc_RNA (1)...(19): siRNA sense strand
gcucaugaguuugucuacu

SEQ ID NO: 2203847 - RNA, 19 nt, Homo sapiens
  misc_RNA (1)...(19): siRNA sense strand
ggaaagccaccccaggauu

SEQ ID NO: 2203848 - RNA, 19 nt, Homo sapiens
  misc_RNA (1)...(19): siRNA sense strand
caaggauguucccacaaaa

SEQ ID NO: 2203849 - RNA, 19 nt, Homo sapiens
  misc_RNA (1)...(19): siRNA sense strand
gauggugauuauguugugu

SEQ ID NO: 2203850 - RNA, 19 nt, Homo sapiens
  misc_RNA (1)...(19): siRNA sense strand
cucaugaguuugucuacug

SEQ ID NO: 2203851 - RNA, 19 nt, Homo sapiens
  misc_RNA (1)...(19): siRNA sense strand
ucacaagacaguggcauag

SEQ ID NO: 2203852 - RNA, 19 nt, Homo sapiens
  misc_RNA (1)...(19): siRNA sense strand
acgugugacucauucaaga

SEQ ID NO: 2203853 - RNA, 19 nt, Homo sapiens
  misc_RNA (1)...(19): siRNA sense strand
aggaucgcauuacacacua

SEQ ID NO: 2203854 - RNA, 19 nt, Homo sapiens
  misc_RNA (1)...(19): siRNA sense strand
aagauacagguuugagauu

SEQ ID NO: 2203855 - RNA, 19 nt, Homo sapiens
  misc_RNA (1)...(19): siRNA sense strand
caaaaccuguaauaucagu

SEQ ID NO: 2203856 - RNA, 19 nt, Homo sapiens
  misc_RNA (1)...(19): siRNA sense strand
gaccuguacagaagaagau

SEQ ID NO: 2203857 - RNA, 19 nt, Homo sapiens
  misc_RNA (1)...(19): siRNA sense strand
uccuaucaguggaaaauua

SEQ ID NO: 2203858 - RNA, 19 nt, Homo sapiens
  misc_RNA (1)...(19): siRNA sense strand
cagcugcagcacugaauuc

SEQ ID NO: 2203859 - RNA, 19 nt, Homo sapiens
  misc_RNA (1)...(19): siRNA sense strand
ggaaguggcaguuauauaa

SEQ ID NO: 2203860 - RNA, 19 nt, Homo sapiens
  misc_RNA (1)...(19): siRNA sense strand
gaaagaaucuggaagaaaa

SEQ ID NO: 2203861 - RNA, 19 nt, Homo sapiens
  misc_RNA (1)...(19): siRNA sense strand
caagacagccuacuucaua

SEQ ID NO: 2203862 - RNA, 19 nt, Homo sapiens
  misc_RNA (1)...(19): siRNA sense strand
gaagaagaguuuauuaugc

SEQ ID NO: 2203863 - RNA, 19 nt, Homo sapiens
  misc_RNA (1)...(19): siRNA sense strand
aaaguugccucuaauguuu

SEQ ID NO: 2203864 - RNA, 19 nt, Homo sapiens
  misc_RNA (1)...(19): siRNA sense strand
guacaaaguugccucuaau

SEQ ID NO: 2203865 - RNA, 19 nt, Homo sapiens
  misc_RNA (1)...(19): siRNA sense strand
ccacuuauuuccauuauag

SEQ ID NO: 2203866 - RNA, 19 nt, Homo sapiens
  misc_RNA (1)...(19): siRNA sense strand
gauggaugcuugcugauug

SEQ ID NO: 2203867 - RNA, 19 nt, Homo sapiens
  misc_RNA (1)...(19): siRNA sense strand
caaaagagccugaaacgua

SEQ ID NO: 2203868 - RNA, 19 nt, Homo sapiens
  misc_RNA (1)...(19): siRNA sense strand
gaagauguagcaagaaguu

SEQ ID NO: 2203869 - RNA, 19 nt, Homo sapiens
  misc_RNA (1)...(19): siRNA sense strand
ucuuggaugugguuuauua

SEQ ID NO: 2203870 - RNA, 19 nt, Homo sapiens
  misc_RNA (1)...(19): siRNA sense strand
gaaacaagacagccuacuu

SEQ ID NO: 2203871 - RNA, 19 nt, Homo sapiens
  misc_RNA (1)...(19): siRNA sense strand
gauacuggcugacuucaag

SEQ ID NO: 2203872 - RNA, 19 nt, Homo sapiens
  misc_RNA (1)...(19): siRNA sense strand
ggaaagaaucuggaagaaa

SEQ ID NO: 2203873 - RNA, 19 nt, Homo sapiens
  misc_RNA (1)...(19): siRNA sense strand
gaccuaugauauugcauuu

SEQ ID NO: 2203874 - RNA, 19 nt, Homo sapiens
  misc_RNA (1)...(19): siRNA sense strand
ucaaguggauuaauaccuu

SEQ ID NO: 2203875 - RNA, 19 nt, Homo sapiens
  misc_RNA (1)...(19): siRNA sense strand
gaaguggcaguuauauaaa

SEQ ID NO: 2203876 - RNA, 19 nt, Homo sapiens
  misc_RNA (1)...(19): siRNA sense strand
caaaguugccucuaauguu

SEQ ID NO: 2203877 - RNA, 19 nt, Homo sapiens
  misc_RNA (1)...(19): siRNA sense strand
gagcaagaccugucacaau

SEQ ID NO: 2203878 - RNA, 19 nt, Homo sapiens
  misc_RNA (1)...(19): siRNA sense strand
uauggaagauguagcaaga

SEQ ID NO: 2203879 - RNA, 19 nt, Homo sapiens
  misc_RNA (1)...(19): siRNA sense strand
gaaaguugcagaacagaca

SEQ ID NO: 2203880 - RNA, 19 nt, Homo sapiens
  misc_RNA (1)...(19): siRNA sense strand
ggacccagaccuaugauau

SEQ ID NO: 2203881 - RNA, 19 nt, Homo sapiens
  misc_RNA (1)...(19): siRNA sense strand
gguaauugguccaucuuuc

SEQ ID NO: 2203882 - RNA, 19 nt, Homo sapiens
  misc_RNA (1)...(19): siRNA sense strand
ggucuuggaugugguuuau

SEQ ID NO: 2203883 - RNA, 19 nt, Homo sapiens
  misc_RNA (1)...(19): siRNA sense strand
ggaugugguuuauuauaca

SEQ ID NO: 2203884 - RNA, 19 nt, Homo sapiens
  misc_RNA (1)...(19): siRNA sense strand
ugugggugcuuuagcuuua

SEQ ID NO: 2203885 - RNA, 19 nt, Homo sapiens
  misc_RNA (1)...(19): siRNA sense strand
uguacaaaguugccucuaa

SEQ ID NO: 2203886 - RNA, 19 nt, Homo sapiens
  misc_RNA (1)...(19): siRNA sense strand
ggccugauguugagcaguu

SEQ ID NO: 2203887 - RNA, 19 nt, Homo sapiens
  misc_RNA (1)...(19): siRNA sense strand
guugcuaccuuaaucauca

SEQ ID NO: 2203888 - RNA, 19 nt, Homo sapiens
  misc_RNA (1)...(19): siRNA sense strand
aaagaaaguugcagaacag

SEQ ID NO: 2203889 - RNA, 19 nt, Homo sapiens
  misc_RNA (1)...(19): siRNA sense strand
cccaauaucuacuuucugu

SEQ ID NO: 2203890 - RNA, 19 nt, Homo sapiens
  misc_RNA (1)...(19): siRNA sense strand
uugcagaacagacauauuu

SEQ ID NO: 2203891 - RNA, 19 nt, Homo sapiens
  misc_RNA (1)...(19): siRNA sense strand
cgaagacugugggaauuga

SEQ ID NO: 2203892 - RNA, 19 nt, Homo sapiens
  misc_RNA (1)...(19): siRNA sense strand
gaguuuauuaugccacuua

SEQ ID NO: 2203893 - RNA, 19 nt, Homo sapiens
  misc_RNA (1)...(19): siRNA sense strand
cgugaaagaagaagaguuu

SEQ ID NO: 2203894 - RNA, 19 nt, Homo sapiens
  misc_RNA (1)...(19): siRNA sense strand
caagaggaaguggcaguua

SEQ ID NO: 2203895 - RNA, 19 nt, Homo sapiens
  misc_RNA (1)...(19): siRNA sense strand
aaacaagacagccuacuuc

SEQ ID NO: 2203896 - RNA, 19 nt, Homo sapiens
  misc_RNA (1)...(19): siRNA sense strand
ccuaugggauauuaauguu

SEQ ID NO: 2203897 - RNA, 19 nt, Homo sapiens
  misc_RNA (1)...(19): siRNA sense strand
gcgcuuggccugauuucaa

SEQ ID NO: 2203898 - RNA, 19 nt, Homo sapiens
  misc_RNA (1)...(19): siRNA sense strand
caagccagcuccaacaacu

SEQ ID NO: 2203899 - RNA, 19 nt, Homo sapiens
  misc_RNA (1)...(19): siRNA sense strand
guucuuugcuggacuugga

SEQ ID NO: 2203900 - RNA, 19 nt, Homo sapiens
  misc_RNA (1)...(19): siRNA sense strand
aaacuacuguggugaaacu

SEQ ID NO: 2203901 - RNA, 19 nt, Homo sapiens
  misc_RNA (1)...(19): siRNA sense strand
aagacagccuacuucauaa

SEQ ID NO: 2203902 - RNA, 19 nt, Homo sapiens
  misc_RNA (1)...(19): siRNA sense strand
agaggaugcugguugaguu

SEQ ID NO: 2203903 - RNA, 19 nt, Homo sapiens
  misc_RNA (1)...(19): siRNA sense strand
ggaugcugguugaguucua

SEQ ID NO: 2203904 - RNA, 19 nt, Homo sapiens
  misc_RNA (1)...(19): siRNA sense strand
aagaggaaguggcaguuau

SEQ ID NO: 2203905 - RNA, 19 nt, Homo sapiens
  misc_RNA (1)...(19): siRNA sense strand
ggccuagccuugugugcaa

SEQ ID NO: 2203906 - RNA, 19 nt, Homo sapiens
  misc_RNA (1)...(19): siRNA sense strand
ggaguccuguacauagaau

SEQ ID NO: 2203907 - RNA, 19 nt, Homo sapiens
  misc_RNA (1)...(19): siRNA sense strand
gcuggaggccugauguuga

SEQ ID NO: 2203908 - RNA, 19 nt, Homo sapiens
  misc_RNA (1)...(19): siRNA sense strand
gccuugcccucuugggaua

SEQ ID NO: 2203909 - RNA, 19 nt, Homo sapiens
  misc_RNA (1)...(19): siRNA sense strand
gacccagaccuaugauauu

SEQ ID NO: 2203910 - RNA, 19 nt, Homo sapiens
  misc_RNA (1)...(19): siRNA sense strand
ggauauuaauguucuuugc

SEQ ID NO: 2203911 - RNA, 19 nt, Homo sapiens
  misc_RNA (1)...(19): siRNA sense strand
gggauccuaggguuucuua

SEQ ID NO: 2203912 - RNA, 19 nt, Homo sapiens
  misc_RNA (1)...(19): siRNA sense strand
ccacagugacacacacaaa

SEQ ID NO: 2203913 - RNA, 19 nt, Homo sapiens
  misc_RNA (1)...(19): siRNA sense strand
cacgaagacugugggaauu

SEQ ID NO: 2203914 - RNA, 19 nt, Homo sapiens
  misc_RNA (1)...(19): siRNA sense strand
guacauagaauggcuggau

SEQ ID NO: 2203915 - RNA, 19 nt, Homo sapiens
  misc_RNA (1)...(19): siRNA sense strand
agaggaaguggcaguuaua

SEQ ID NO: 2203916 - RNA, 19 nt, Homo sapiens
  misc_RNA (1)...(19): siRNA sense strand
uaugacagcaguugguaaa

SEQ ID NO: 2203917 - RNA, 19 nt, Homo sapiens
  misc_RNA (1)...(19): siRNA sense strand
agcaagaccugucacaauc

SEQ ID NO: 2203918 - RNA, 19 nt, Homo sapiens
  misc_RNA (1)...(19): siRNA sense strand
gccacuuauuuccauuaua

SEQ ID NO: 2203919 - RNA, 19 nt, Homo sapiens
  misc_RNA (1)...(19): siRNA sense strand
ggauggaugcuugcugauu

SEQ ID NO: 2203920 - RNA, 19 nt, Homo sapiens
  misc_RNA (1)...(19): siRNA sense strand
acccagaccuaugauauug

SEQ ID NO: 2203921 - RNA, 19 nt, Homo sapiens
  misc_RNA (1)...(19): siRNA sense strand
aaucuucaguggcuucaug

SEQ ID NO: 2203922 - RNA, 19 nt, Homo sapiens
  misc_RNA (1)...(19): siRNA sense strand
gcguuggccuuuucauaua

SEQ ID NO: 2203923 - RNA, 19 nt, Homo sapiens
  misc_RNA (1)...(19): siRNA sense strand
aaaauuagcccaugccuau

SEQ ID NO: 2203924 - RNA, 19 nt, Homo sapiens
  misc_RNA (1)...(19): siRNA sense strand
gaugcugguugaguucuau

SEQ ID NO: 2203925 - RNA, 19 nt, Homo sapiens
  misc_RNA (1)...(19): siRNA sense strand
gaccauuacgugccaguau

SEQ ID NO: 2203926 - RNA, 19 nt, Homo sapiens
  misc_RNA (1)...(19): siRNA sense strand
ccagaccuaugauauugca

SEQ ID NO: 2203927 - RNA, 19 nt, Homo sapiens
  misc_RNA (1)...(19): siRNA sense strand
ccaccuucauuacuuaugg

SEQ ID NO: 2203928 - RNA, 19 nt, Homo sapiens
  misc_RNA (1)...(19): siRNA sense strand
uuuccaccuucauuacuua

SEQ ID NO: 2203929 - RNA, 19 nt, Homo sapiens
  misc_RNA (1)...(19): siRNA sense strand
ugaguucuauggacuggau

SEQ ID NO: 2203930 - RNA, 19 nt, Homo sapiens
  misc_RNA (1)...(19): siRNA sense strand
uggaugugguuuauuauac

SEQ ID NO: 2203931 - RNA, 19 nt, Homo sapiens
  misc_RNA (1)...(19): siRNA sense strand
gaagacugugggaauugaa

SEQ ID NO: 2203932 - RNA, 19 nt, Homo sapiens
  misc_RNA (1)...(19): siRNA sense strand
gauugugggugcuuuagcu

SEQ ID NO: 2203933 - RNA, 19 nt, Homo sapiens
  misc_RNA (1)...(19): siRNA sense strand
ccauuacgugccaguauuu

SEQ ID NO: 2203934 - RNA, 19 nt, Homo sapiens
  misc_RNA (1)...(19): siRNA sense strand
uguuguaggucuuggaugu

SEQ ID NO: 2203935 - RNA, 19 nt, Homo sapiens
  misc_RNA (1)...(19): siRNA sense strand
uuccauaugugaccacgaa

SEQ ID NO: 2203936 - RNA, 19 nt, Homo sapiens
  misc_RNA (1)...(19): siRNA sense strand
uggaagauguagcaagaag

SEQ ID NO: 2203937 - RNA, 19 nt, Homo sapiens
  misc_RNA (1)...(19): siRNA sense strand
gaggaaguggcaguuauau

SEQ ID NO: 2203938 - RNA, 19 nt, Homo sapiens
  misc_RNA (1)...(19): siRNA sense strand
aaaagaaaguugcagaaca

SEQ ID NO: 2203939 - RNA, 19 nt, Homo sapiens
  misc_RNA (1)...(19): siRNA sense strand
aggaaagaaucuggaagaa

SEQ ID NO: 2203940 - RNA, 19 nt, Homo sapiens
  misc_RNA (1)...(19): siRNA sense strand
gcugauugugggugcuuua

SEQ ID NO: 2203941 - RNA, 19 nt, Homo sapiens
  misc_RNA (1)...(19): siRNA sense strand
aaggaaagaaucuggaaga

SEQ ID NO: 2203942 - RNA, 19 nt, Homo sapiens
  misc_RNA (1)...(19): siRNA sense strand
ggagcaagaccugucacaa

SEQ ID NO: 2203943 - RNA, 19 nt, Homo sapiens
  misc_RNA (1)...(19): siRNA sense strand
acccaucguugguugguuu

SEQ ID NO: 2203944 - RNA, 19 nt, Homo sapiens
  misc_RNA (1)...(19): siRNA sense strand
guuuccaccuucauuacuu

SEQ ID NO: 2203945 - RNA, 19 nt, Homo sapiens
  misc_RNA (1)...(19): siRNA sense strand
cugauuguccuuugccuaa

SEQ ID NO: 2203946 - RNA, 19 nt, Homo sapiens
  misc_RNA (1)...(19): siRNA sense strand
aauggugacuggaaacaag

SEQ ID NO: 2203947 - RNA, 19 nt, Homo sapiens
  misc_RNA (1)...(19): siRNA sense strand
acaaaguugccucuaaugu

SEQ ID NO: 2203948 - RNA, 19 nt, Homo sapiens
  misc_RNA (1)...(19): siRNA sense strand
ggauacaugcaacaagcaa

SEQ ID NO: 2203949 - RNA, 19 nt, Homo sapiens
  misc_RNA (1)...(19): siRNA sense strand
gaggguuuccaccuucauu

SEQ ID NO: 2203950 - RNA, 19 nt, Homo sapiens
  misc_RNA (1)...(19): siRNA sense strand
gugaaacuguggcucuuuu

SEQ ID NO: 2203951 - RNA, 19 nt, Homo sapiens
  misc_RNA (1)...(19): siRNA sense strand
gcaagaccugucacaaucu

SEQ ID NO: 2203952 - RNA, 19 nt, Homo sapiens
  misc_RNA (1)...(19): siRNA sense strand
ugcagaggaugcugguuga

SEQ ID NO: 2203953 - RNA, 19 nt, Homo sapiens
  misc_RNA (1)...(19): siRNA sense strand
gguccaucuuuccauaugu

SEQ ID NO: 2203954 - RNA, 19 nt, Homo sapiens
  misc_RNA (1)...(19): siRNA sense strand
ucacauuggcguugcuuuc

SEQ ID NO: 2203955 - RNA, 19 nt, Homo sapiens
  misc_RNA (1)...(19): siRNA sense strand
ucuuuauguugcuaccuua

SEQ ID NO: 2203956 - RNA, 19 nt, Homo sapiens
  misc_RNA (1)...(19): siRNA sense strand
gaaucuggaagaaaacaua

SEQ ID NO: 2203957 - RNA, 19 nt, Homo sapiens
  misc_RNA (1)...(19): siRNA sense strand
cauuauaggcauuaugaca

SEQ ID NO: 2203958 - RNA, 19 nt, Homo sapiens
  misc_RNA (1)...(19): siRNA sense strand
guccaucuuuccauaugug

SEQ ID NO: 2203959 - RNA, 19 nt, Homo sapiens
  misc_RNA (1)...(19): siRNA sense strand
ggaaguggcaguuauauaa

SEQ ID NO: 2203960 - RNA, 19 nt, Homo sapiens
  misc_RNA (1)...(19): siRNA sense strand
gaaagaaucuggaagaaaa

SEQ ID NO: 2203961 - RNA, 19 nt, Homo sapiens
  misc_RNA (1)...(19): siRNA sense strand
caagacagccuacuucaua

SEQ ID NO: 2203962 - RNA, 19 nt, Homo sapiens
  misc_RNA (1)...(19): siRNA sense strand
gaagaagaguuuauuaugc

SEQ ID NO: 2203963 - RNA, 19 nt, Homo sapiens
  misc_RNA (1)...(19): siRNA sense strand
aaaguugccucuaauguuu

SEQ ID NO: 2203964 - RNA, 19 nt, Homo sapiens
  misc_RNA (1)...(19): siRNA sense strand
guacaaaguugccucuaau

SEQ ID NO: 2203965 - RNA, 19 nt, Homo sapiens
  misc_RNA (1)...(19): siRNA sense strand
ccacuuauuuccauuauag

SEQ ID NO: 2203966 - RNA, 19 nt, Homo sapiens
  misc_RNA (1)...(19): siRNA sense strand
gauggaugcuugcugauug

SEQ ID NO: 2203967 - RNA, 19 nt, Homo sapiens
  misc_RNA (1)...(19): siRNA sense strand
caaaagagccugaaacgua

SEQ ID NO: 2203968 - RNA, 19 nt, Homo sapiens
  misc_RNA (1)...(19): siRNA sense strand
gaagauguagcaagaaguu

SEQ ID NO: 2203969 - RNA, 19 nt, Homo sapiens
  misc_RNA (1)...(19): siRNA sense strand
ucuuggaugugguuuauua

SEQ ID NO: 2203970 - RNA, 19 nt, Homo sapiens
  misc_RNA (1)...(19): siRNA sense strand
gaaacaagacagccuacuu

SEQ ID NO: 2203971 - RNA, 19 nt, Homo sapiens
  misc_RNA (1)...(19): siRNA sense strand
gauacuggcugacuucaag

SEQ ID NO: 2203972 - RNA, 19 nt, Homo sapiens
  misc_RNA (1)...(19): siRNA sense strand
ggaaagaaucuggaagaaa

SEQ ID NO: 2203973 - RNA, 19 nt, Homo sapiens
  misc_RNA (1)...(19): siRNA sense strand
gaccuaugauauugcauuu

SEQ ID NO: 2203974 - RNA, 19 nt, Homo sapiens
  misc_RNA (1)...(19): siRNA sense strand
ucaaguggauuaauaccuu

SEQ ID NO: 2203975 - RNA, 19 nt, Homo sapiens
  misc_RNA (1)...(19): siRNA sense strand
gaaguggcaguuauauaaa

SEQ ID NO: 2203976 - RNA, 19 nt, Homo sapiens
  misc_RNA (1)...(19): siRNA sense strand
caaaguugccucuaauguu

SEQ ID NO: 2203977 - RNA, 19 nt, Homo sapiens
  misc_RNA (1)...(19): siRNA sense strand
gagcaagaccugucacaau

SEQ ID NO: 2203978 - RNA, 19 nt, Homo sapiens
  misc_RNA (1)...(19): siRNA sense strand
uauggaagauguagcaaga

SEQ ID NO: 2203979 - RNA, 19 nt, Homo sapiens
  misc_RNA (1)...(19): siRNA sense strand
gaaaguugcagaacagaca

SEQ ID NO: 2203980 - RNA, 19 nt, Homo sapiens
  misc_RNA (1)...(19): siRNA sense strand
ggacccagaccuaugauau

SEQ ID NO: 2203981 - RNA, 19 nt, Homo sapiens
  misc_RNA (1)...(19): siRNA sense strand
gguaauugguccaucuuuc

SEQ ID NO: 2203982 - RNA, 19 nt, Homo sapiens
  misc_RNA (1)...(19): siRNA sense strand
ggucuuggaugugguuuau

SEQ ID NO: 2203983 - RNA, 19 nt, Homo sapiens
  misc_RNA (1)...(19): siRNA sense strand
ggaugugguuuauuauaca

SEQ ID NO: 2203984 - RNA, 19 nt, Homo sapiens
  misc_RNA (1)...(19): siRNA sense strand
ugugggugcuuuagcuuua

SEQ ID NO: 2203985 - RNA, 19 nt, Homo sapiens
  misc_RNA (1)...(19): siRNA sense strand
uguacaaaguugccucuaa

SEQ ID NO: 2203986 - RNA, 19 nt, Homo sapiens
  misc_RNA (1)...(19): siRNA sense strand
ggccugauguugagcaguu

SEQ ID NO: 2203987 - RNA, 19 nt, Homo sapiens
  misc_RNA (1)...(19): siRNA sense strand
guugcuaccuuaaucauca

SEQ ID NO: 2203988 - RNA, 19 nt, Homo sapiens
  misc_RNA (1)...(19): siRNA sense strand
aaagaaaguugcagaacag

SEQ ID NO: 2203989 - RNA, 19 nt, Homo sapiens
  misc_RNA (1)...(19): siRNA sense strand
cccaauaucuacuuucugu

SEQ ID NO: 2203990 - RNA, 19 nt, Homo sapiens
  misc_RNA (1)...(19): siRNA sense strand
uugcagaacagacauauuu

SEQ ID NO: 2203991 - RNA, 19 nt, Homo sapiens
  misc_RNA (1)...(19): siRNA sense strand
cgaagacugugggaauuga

SEQ ID NO: 2203992 - RNA, 19 nt, Homo sapiens
  misc_RNA (1)...(19): siRNA sense strand
gaguuuauuaugccacuua

SEQ ID NO: 2203993 - RNA, 19 nt, Homo sapiens
  misc_RNA (1)...(19): siRNA sense strand
cgugaaagaagaagaguuu

SEQ ID NO: 2203994 - RNA, 19 nt, Homo sapiens
  misc_RNA (1)...(19): siRNA sense strand
caagaggaaguggcaguua

SEQ ID NO: 2203995 - RNA, 19 nt, Homo sapiens
  misc_RNA (1)...(19): siRNA sense strand
aaacaagacagccuacuuc

SEQ ID NO: 2203996 - RNA, 19 nt, Homo sapiens
  misc_RNA (1)...(19): siRNA sense strand
ccuaugggauauuaauguu

SEQ ID NO: 2203997 - RNA, 19 nt, Homo sapiens
  misc_RNA (1)...(19): siRNA sense strand
gcgcuuggccugauuucaa

SEQ ID NO: 2203998 - RNA, 19 nt, Homo sapiens
  misc_RNA (1)...(19): siRNA sense strand
caagccagcuccaacaacu

SEQ ID NO: 2203999 - RNA, 19 nt, Homo sapiens
  misc_RNA (1)...(19): siRNA sense strand
guucuuugcuggacuugga

SEQ ID NO: 2204000 - RNA, 19 nt, Homo sapiens
  misc_RNA (1)...(19): siRNA sense strand
aaacuacuguggugaaacu

SEQ ID NO: 2204001 - RNA, 19 nt, Homo sapiens
  misc_RNA (1)...(19): siRNA sense strand
aagacagccuacuucauaa

SEQ ID NO: 2204002 - RNA, 19 nt, Homo sapiens
  misc_RNA (1)...(19): siRNA sense strand
agaggaugcugguugaguu

SEQ ID NO: 2204003 - RNA, 19 nt, Homo sapiens
  misc_RNA (1)...(19): siRNA sense strand
ggaugcugguugaguucua

SEQ ID NO: 2204004 - RNA, 19 nt, Homo sapiens
  misc_RNA (1)...(19): siRNA sense strand
aagaggaaguggcaguuau

SEQ ID NO: 2204005 - RNA, 19 nt, Homo sapiens
  misc_RNA (1)...(19): siRNA sense strand
ggccuagccuugugugcaa

SEQ ID NO: 2204006 - RNA, 19 nt, Homo sapiens
  misc_RNA (1)...(19): siRNA sense strand
ggaguccuguacauagaau

SEQ ID NO: 2204007 - RNA, 19 nt, Homo sapiens
  misc_RNA (1)...(19): siRNA sense strand
gcuggaggccugauguuga

SEQ ID NO: 2204008 - RNA, 19 nt, Homo sapiens
  misc_RNA (1)...(19): siRNA sense strand
gccuugcccucuugggaua

SEQ ID NO: 2204009 - RNA, 19 nt, Homo sapiens
  misc_RNA (1)...(19): siRNA sense strand
gacccagaccuaugauauu

SEQ ID NO: 2204010 - RNA, 19 nt, Homo sapiens
  misc_RNA (1)...(19): siRNA sense strand
ggauauuaauguucuuugc

SEQ ID NO: 2204011 - RNA, 19 nt, Homo sapiens
  misc_RNA (1)...(19): siRNA sense strand
gggauccuaggguuucuua

SEQ ID NO: 2204012 - RNA, 19 nt, Homo sapiens
  misc_RNA (1)...(19): siRNA sense strand
ccacagugacacacacaaa

SEQ ID NO: 2204013 - RNA, 19 nt, Homo sapiens
  misc_RNA (1)...(19): siRNA sense strand
cacgaagacugugggaauu

SEQ ID NO: 2204014 - RNA, 19 nt, Homo sapiens
  misc_RNA (1)...(19): siRNA sense strand
guacauagaauggcuggau

SEQ ID NO: 2204015 - RNA, 19 nt, Homo sapiens
  misc_RNA (1)...(19): siRNA sense strand
agaggaaguggcaguuaua

SEQ ID NO: 2204016 - RNA, 19 nt, Homo sapiens
  misc_RNA (1)...(19): siRNA sense strand
uaugacagcaguugguaaa

SEQ ID NO: 2204017 - RNA, 19 nt, Homo sapiens
  misc_RNA (1)...(19): siRNA sense strand
agcaagaccugucacaauc

SEQ ID NO: 2204018 - RNA, 19 nt, Homo sapiens
  misc_RNA (1)...(19): siRNA sense strand
gccacuuauuuccauuaua

SEQ ID NO: 2204019 - RNA, 19 nt, Homo sapiens
  misc_RNA (1)...(19): siRNA sense strand
ggauggaugcuugcugauu

SEQ ID NO: 2204020 - RNA, 19 nt, Homo sapiens
  misc_RNA (1)...(19): siRNA sense strand
acccagaccuaugauauug

SEQ ID NO: 2204021 - RNA, 19 nt, Homo sapiens
  misc_RNA (1)...(19): siRNA sense strand
aaucuucaguggcuucaug

SEQ ID NO: 2204022 - RNA, 19 nt, Homo sapiens
  misc_RNA (1)...(19): siRNA sense strand
gcguuggccuuuucauaua

SEQ ID NO: 2204023 - RNA, 19 nt, Homo sapiens
  misc_RNA (1)...(19): siRNA sense strand
aaaauuagcccaugccuau

SEQ ID NO: 2204024 - RNA, 19 nt, Homo sapiens
  misc_RNA (1)...(19): siRNA sense strand
gaugcugguugaguucuau

SEQ ID NO: 2204025 - RNA, 19 nt, Homo sapiens
  misc_RNA (1)...(19): siRNA sense strand
gaccauuacgugccaguau

SEQ ID NO: 2204026 - RNA, 19 nt, Homo sapiens
  misc_RNA (1)...(19): siRNA sense strand
ccagaccuaugauauugca

SEQ ID NO: 2204027 - RNA, 19 nt, Homo sapiens
  misc_RNA (1)...(19): siRNA sense strand
ccaccuucauuacuuaugg

SEQ ID NO: 2204028 - RNA, 19 nt, Homo sapiens
  misc_RNA (1)...(19): siRNA sense strand
uuuccaccuucauuacuua

SEQ ID NO: 2204029 - RNA, 19 nt, Homo sapiens
  misc_RNA (1)...(19): siRNA sense strand
ugaguucuauggacuggau

SEQ ID NO: 2204030 - RNA, 19 nt, Homo sapiens
  misc_RNA (1)...(19): siRNA sense strand
uggaugugguuuauuauac

SEQ ID NO: 2204031 - RNA, 19 nt, Homo sapiens
  misc_RNA (1)...(19): siRNA sense strand
gaagacugugggaauugaa

SEQ ID NO: 2204032 - RNA, 19 nt, Homo sapiens
  misc_RNA (1)...(19): siRNA sense strand
gauugugggugcuuuagcu

SEQ ID NO: 2204033 - RNA, 19 nt, Homo sapiens
  misc_RNA (1)...(19): siRNA sense strand
ccauuacgugccaguauuu

SEQ ID NO: 2204034 - RNA, 19 nt, Homo sapiens
  misc_RNA (1)...(19): siRNA sense strand
uguuguaggucuuggaugu

SEQ ID NO: 2204035 - RNA, 19 nt, Homo sapiens
  misc_RNA (1)...(19): siRNA sense strand
uuccauaugugaccacgaa

SEQ ID NO: 2204036 - RNA, 19 nt, Homo sapiens
  misc_RNA (1)...(19): siRNA sense strand
uggaagauguagcaagaag

SEQ ID NO: 2204037 - RNA, 19 nt, Homo sapiens
  misc_RNA (1)...(19): siRNA sense strand
gaggaaguggcaguuauau

SEQ ID NO: 2204038 - RNA, 19 nt, Homo sapiens
  misc_RNA (1)...(19): siRNA sense strand
aaaagaaaguugcagaaca

SEQ ID NO: 2204039 - RNA, 19 nt, Homo sapiens
  misc_RNA (1)...(19): siRNA sense strand
aggaaagaaucuggaagaa

SEQ ID NO: 2204040 - RNA, 19 nt, Homo sapiens
  misc_RNA (1)...(19): siRNA sense strand
gcugauugugggugcuuua

SEQ ID NO: 2204041 - RNA, 19 nt, Homo sapiens
  misc_RNA (1)...(19): siRNA sense strand
aaggaaagaaucuggaaga

SEQ ID NO: 2204042 - RNA, 19 nt, Homo sapiens
  misc_RNA (1)...(19): siRNA sense strand
ggagcaagaccugucacaa

SEQ ID NO: 2204043 - RNA, 19 nt, Homo sapiens
  misc_RNA (1)...(19): siRNA sense strand
acccaucguugguugguuu

SEQ ID NO: 2204044 - RNA, 19 nt, Homo sapiens
  misc_RNA (1)...(19): siRNA sense strand
guuuccaccuucauuacuu

SEQ ID NO: 2204045 - RNA, 19 nt, Homo sapiens
  misc_RNA (1)...(19): siRNA sense strand
cugauuguccuuugccuaa

SEQ ID NO: 2204046 - RNA, 19 nt, Homo sapiens
  misc_RNA (1)...(19): siRNA sense strand
aauggugacuggaaacaag

SEQ ID NO: 2204047 - RNA, 19 nt, Homo sapiens
  misc_RNA (1)...(19): siRNA sense strand
acaaaguugccucuaaugu

SEQ ID NO: 2204048 - RNA, 19 nt, Homo sapiens
  misc_RNA (1)...(19): siRNA sense strand
ggauacaugcaacaagcaa

SEQ ID NO: 2204049 - RNA, 19 nt, Homo sapiens
  misc_RNA (1)...(19): siRNA sense strand
gaggguuuccaccuucauu

SEQ ID NO: 2204050 - RNA, 19 nt, Homo sapiens
  misc_RNA (1)...(19): siRNA sense strand
gugaaacuguggcucuuuu

SEQ ID NO: 2204051 - RNA, 19 nt, Homo sapiens
  misc_RNA (1)...(19): siRNA sense strand
gcaagaccugucacaaucu

SEQ ID NO: 2204052 - RNA, 19 nt, Homo sapiens
  misc_RNA (1)...(19): siRNA sense strand
ugcagaggaugcugguuga

SEQ ID NO: 2204053 - RNA, 19 nt, Homo sapiens
  misc_RNA (1)...(19): siRNA sense strand
gguccaucuuuccauaugu

SEQ ID NO: 2204054 - RNA, 19 nt, Homo sapiens
  misc_RNA (1)...(19): siRNA sense strand
ucacauuggcguugcuuuc

SEQ ID NO: 2204055 - RNA, 19 nt, Homo sapiens
  misc_RNA (1)...(19): siRNA sense strand
ucuuuauguugcuaccuua

SEQ ID NO: 2204056 - RNA, 19 nt, Homo sapiens
  misc_RNA (1)...(19): siRNA sense strand
gaaucuggaagaaaacaua

SEQ ID NO: 2204057 - RNA, 19 nt, Homo sapiens
  misc_RNA (1)...(19): siRNA sense strand
cauuauaggcauuaugaca

SEQ ID NO: 2204058 - RNA, 19 nt, Homo sapiens
  misc_RNA (1)...(19): siRNA sense strand
guccaucuuuccauaugug

SEQ ID NO: 2204059 - RNA, 19 nt, Homo sapiens
  misc_RNA (1)...(19): siRNA sense strand
gaacggagcugaacaaguu

SEQ ID NO: 2204060 - RNA, 19 nt, Homo sapiens
  misc_RNA (1)...(19): siRNA sense strand
gcagaaaugucuauuauga

SEQ ID NO: 2204061 - RNA, 19 nt, Homo sapiens
  misc_RNA (1)...(19): siRNA sense strand
ggaaugugaugaggaauua

SEQ ID NO: 2204062 - RNA, 19 nt, Homo sapiens
  misc_RNA (1)...(19): siRNA sense strand
gaagacagaugcaggaaca

SEQ ID NO: 2204063 - RNA, 19 nt, Homo sapiens
  misc_RNA (1)...(19): siRNA sense strand
ggaaaucaguggcaaagug

SEQ ID NO: 2204064 - RNA, 19 nt, Homo sapiens
  misc_RNA (1)...(19): siRNA sense strand
gcaaagugauggaaacaau

SEQ ID NO: 2204065 - RNA, 19 nt, Homo sapiens
  misc_RNA (1)...(19): siRNA sense strand
gaauggaaguucaagcaaa

SEQ ID NO: 2204066 - RNA, 19 nt, Homo sapiens
  misc_RNA (1)...(19): siRNA sense strand
gacaacagguggaaacaaa

SEQ ID NO: 2204067 - RNA, 19 nt, Homo sapiens
  misc_RNA (1)...(19): siRNA sense strand
ggaaaucugauguugaaua

SEQ ID NO: 2204068 - RNA, 19 nt, Homo sapiens
  misc_RNA (1)...(19): siRNA sense strand
gcacaugcguuuaaucaca

SEQ ID NO: 2204069 - RNA, 19 nt, Homo sapiens
  misc_RNA (1)...(19): siRNA sense strand
ggaaagaguuugagaagcu

SEQ ID NO: 2204070 - RNA, 19 nt, Homo sapiens
  misc_RNA (1)...(19): siRNA sense strand
ccaaggagaagaagaauuu

SEQ ID NO: 2204071 - RNA, 19 nt, Homo sapiens
  misc_RNA (1)...(19): siRNA sense strand
gagagaagcguuccuagaa

SEQ ID NO: 2204072 - RNA, 19 nt, Homo sapiens
  misc_RNA (1)...(19): siRNA sense strand
gaagacauacagacgguua

SEQ ID NO: 2204073 - RNA, 19 nt, Homo sapiens
  misc_RNA (1)...(19): siRNA sense strand
gcagagagaacuuguuuau

SEQ ID NO: 2204074 - RNA, 19 nt, Homo sapiens
  misc_RNA (1)...(19): siRNA sense strand
gaaagaggaauggagaaua

SEQ ID NO: 2204075 - RNA, 19 nt, Homo sapiens
  misc_RNA (1)...(19): siRNA sense strand
agacagaaaucaaggaaau

SEQ ID NO: 2204076 - RNA, 19 nt, Homo sapiens
  misc_RNA (1)...(19): siRNA sense strand
guacggaaaucugauguug

SEQ ID NO: 2204077 - RNA, 19 nt, Homo sapiens
  misc_RNA (1)...(19): siRNA sense strand
ggaagaagaagaagaagga

SEQ ID NO: 2204078 - RNA, 19 nt, Homo sapiens
  misc_RNA (1)...(19): siRNA sense strand
gcagccagccgauugguua

SEQ ID NO: 2204079 - RNA, 19 nt, Homo sapiens
  misc_RNA (1)...(19): siRNA sense strand
aagagaagaucgucaagaa

SEQ ID NO: 2204080 - RNA, 19 nt, Homo sapiens
  misc_RNA (1)...(19): siRNA sense strand
uaauggaagugcuaagaaa

SEQ ID NO: 2204081 - RNA, 19 nt, Homo sapiens
  misc_RNA (1)...(19): siRNA sense strand
ggaggugcaugauauuguu

SEQ ID NO: 2204082 - RNA, 19 nt, Homo sapiens
  misc_RNA (1)...(19): siRNA sense strand
gaacgccuuucuaauggaa

SEQ ID NO: 2204083 - RNA, 19 nt, Homo sapiens
  misc_RNA (1)...(19): siRNA sense strand
gagauucuguugcaaguuc

SEQ ID NO: 2204084 - RNA, 19 nt, Homo sapiens
  misc_RNA (1)...(19): siRNA sense strand
uaauaacacuucccagaug

SEQ ID NO: 2204085 - RNA, 19 nt, Homo sapiens
  misc_RNA (1)...(19): siRNA sense strand
ggaggaagaagaagaagaa

SEQ ID NO: 2204086 - RNA, 19 nt, Homo sapiens
  misc_RNA (1)...(19): siRNA sense strand
gaccagagcuacaaaauau

SEQ ID NO: 2204087 - RNA, 19 nt, Homo sapiens
  misc_RNA (1)...(19): siRNA sense strand
caacaaggauccugcacau

SEQ ID NO: 2204088 - RNA, 19 nt, Homo sapiens
  misc_RNA (1)...(19): siRNA sense strand
caaaggcaaucugcaugua

SEQ ID NO: 2204089 - RNA, 19 nt, Homo sapiens
  misc_RNA (1)...(19): siRNA sense strand
gaaaucaguggcaaaguga

SEQ ID NO: 2204090 - RNA, 19 nt, Homo sapiens
  misc_RNA (1)...(19): siRNA sense strand
acggagcgcugcaggauua

SEQ ID NO: 2204091 - RNA, 19 nt, Homo sapiens
  misc_RNA (1)...(19): siRNA sense strand
augcagagcuuguucauug

SEQ ID NO: 2204092 - RNA, 19 nt, Homo sapiens
  misc_RNA (1)...(19): siRNA sense strand
ggauguaaauucaaacagu

SEQ ID NO: 2204093 - RNA, 19 nt, Homo sapiens
  misc_RNA (1)...(19): siRNA sense strand
ggaaaugcauauggaacaa

SEQ ID NO: 2204094 - RNA, 19 nt, Homo sapiens
  misc_RNA (1)...(19): siRNA sense strand
guugauaccucauguucuu

SEQ ID NO: 2204095 - RNA, 19 nt, Homo sapiens
  misc_RNA (1)...(19): siRNA sense strand
ccaugaagauguacggaaa

SEQ ID NO: 2204096 - RNA, 19 nt, Homo sapiens
  misc_RNA (1)...(19): siRNA sense strand
gaagaaggccgagcuggaa

SEQ ID NO: 2204097 - RNA, 19 nt, Homo sapiens
  misc_RNA (1)...(19): siRNA sense strand
gaagagagaagcguuccua

SEQ ID NO: 2204098 - RNA, 19 nt, Homo sapiens
  misc_RNA (1)...(19): siRNA sense strand
aaccaucgauugcuucuaa

SEQ ID NO: 2204099 - RNA, 19 nt, Homo sapiens
  misc_RNA (1)...(19): siRNA sense strand
ccagaugucucauaagaag

SEQ ID NO: 2204100 - RNA, 19 nt, Homo sapiens
  misc_RNA (1)...(19): siRNA sense strand
aaagaggaauggagaauag

SEQ ID NO: 2204101 - RNA, 19 nt, Homo sapiens
  misc_RNA (1)...(19): siRNA sense strand
gaaaagaaaugggaggaaa

SEQ ID NO: 2204102 - RNA, 19 nt, Homo sapiens
  misc_RNA (1)...(19): siRNA sense strand
agagagaacuuguuuaugc

SEQ ID NO: 2204103 - RNA, 19 nt, Homo sapiens
  misc_RNA (1)...(19): siRNA sense strand
gaaauacugggaaugcaaa

SEQ ID NO: 2204104 - RNA, 19 nt, Homo sapiens
  misc_RNA (1)...(19): siRNA sense strand
uuucagagccucacucaua

SEQ ID NO: 2204105 - RNA, 19 nt, Homo sapiens
  misc_RNA (1)...(19): siRNA sense strand
aaacagggaagaagacuuu

SEQ ID NO: 2204106 - RNA, 19 nt, Homo sapiens
  misc_RNA (1)...(19): siRNA sense strand
ggaauuagagagaaugaug

SEQ ID NO: 2204107 - RNA, 19 nt, Homo sapiens
  misc_RNA (1)...(19): siRNA sense strand
uaaugaggauggagaauca

SEQ ID NO: 2204108 - RNA, 19 nt, Homo sapiens
  misc_RNA (1)...(19): siRNA sense strand
ccagaaguguuccuuuaug

SEQ ID NO: 2204109 - RNA, 19 nt, Homo sapiens
  misc_RNA (1)...(19): siRNA sense strand
uaauggcucuuugaaguuu

SEQ ID NO: 2204110 - RNA, 19 nt, Homo sapiens
  misc_RNA (1)...(19): siRNA sense strand
caauauugccuucaugauu

SEQ ID NO: 2204111 - RNA, 19 nt, Homo sapiens
  misc_RNA (1)...(19): siRNA sense strand
gaugaaagcagaaaugucu

SEQ ID NO: 2204112 - RNA, 19 nt, Homo sapiens
  misc_RNA (1)...(19): siRNA sense strand
uggcagaacuccaggcauu

SEQ ID NO: 2204113 - RNA, 19 nt, Homo sapiens
  misc_RNA (1)...(19): siRNA sense strand
gaacccugcucagaacuug

SEQ ID NO: 2204114 - RNA, 19 nt, Homo sapiens
  misc_RNA (1)...(19): siRNA sense strand
gagaagaucgucaagaagu

SEQ ID NO: 2204115 - RNA, 19 nt, Homo sapiens
  misc_RNA (1)...(19): siRNA sense strand
gcaaguucaucccacauag

SEQ ID NO: 2204116 - RNA, 19 nt, Homo sapiens
  misc_RNA (1)...(19): siRNA sense strand
agaaccagacgcugaauua

SEQ ID NO: 2204117 - RNA, 19 nt, Homo sapiens
  misc_RNA (1)...(19): siRNA sense strand
gacaauacccaaagacaga

SEQ ID NO: 2204118 - RNA, 19 nt, Homo sapiens
  misc_RNA (1)...(19): siRNA sense strand
ucuaauggcucuuugaagu

SEQ ID NO: 2204119 - RNA, 19 nt, Homo sapiens
  misc_RNA (1)...(19): siRNA sense strand
ccaaagcccuaguugauac

SEQ ID NO: 2204120 - RNA, 19 nt, Homo sapiens
  misc_RNA (1)...(19): siRNA sense strand
ggacaggaaaugaacagaa

SEQ ID NO: 2204121 - RNA, 19 nt, Homo sapiens
  misc_RNA (1)...(19): siRNA sense strand
ugaggaaugugaugaggaa

SEQ ID NO: 2204122 - RNA, 19 nt, Homo sapiens
  misc_RNA (1)...(19): siRNA sense strand
gagguuaucacgacagauu

SEQ ID NO: 2204123 - RNA, 19 nt, Homo sapiens
  misc_RNA (1)...(19): siRNA sense strand
ccacagauacccaugaaug

SEQ ID NO: 2204124 - RNA, 19 nt, Homo sapiens
  misc_RNA (1)...(19): siRNA sense strand
caaccaaccagacgaaaga

SEQ ID NO: 2204125 - RNA, 19 nt, Homo sapiens
  misc_RNA (1)...(19): siRNA sense strand
gaugaggaauuagagagaa

SEQ ID NO: 2204126 - RNA, 19 nt, Homo sapiens
  misc_RNA (1)...(19): siRNA sense strand
gaaauaaacaaagggucua

SEQ ID NO: 2204127 - RNA, 19 nt, Homo sapiens
  misc_RNA (1)...(19): siRNA sense strand
uugagaagcuccuagaaga

SEQ ID NO: 2204128 - RNA, 19 nt, Homo sapiens
  misc_RNA (1)...(19): siRNA sense strand
agacagaucacuccucaaa

SEQ ID NO: 2204129 - RNA, 19 nt, Homo sapiens
  misc_RNA (1)...(19): siRNA sense strand
cacagcagcucaccaugaa

SEQ ID NO: 2204130 - RNA, 19 nt, Homo sapiens
  misc_RNA (1)...(19): siRNA sense strand
gccaauaucgucaggcuaa

SEQ ID NO: 2204131 - RNA, 19 nt, Homo sapiens
  misc_RNA (1)...(19): siRNA sense strand
guacaucuccgauuucaag

SEQ ID NO: 2204132 - RNA, 19 nt, Homo sapiens
  misc_RNA (1)...(19): siRNA sense strand
uaagagacuuucaacuauc

SEQ ID NO: 2204133 - RNA, 19 nt, Homo sapiens
  misc_RNA (1)...(19): siRNA sense strand
ggucagcgagugcuuauug

SEQ ID NO: 2204134 - RNA, 19 nt, Homo sapiens
  misc_RNA (1)...(19): siRNA sense strand
gagagaacuuguuuaugca

SEQ ID NO: 2204135 - RNA, 19 nt, Homo sapiens
  misc_RNA (1)...(19): siRNA sense strand
acagaucacuccucaaagu

SEQ ID NO: 2204136 - RNA, 19 nt, Homo sapiens
  misc_RNA (1)...(19): siRNA sense strand
gaacauucaagacagauca

SEQ ID NO: 2204137 - RNA, 19 nt, Homo sapiens
  misc_RNA (1)...(19): siRNA sense strand
gcucuaaccucccuaaucc

SEQ ID NO: 2204138 - RNA, 19 nt, Homo sapiens
  misc_RNA (1)...(19): siRNA sense strand
gauggagaaucaaguucaa

SEQ ID NO: 2204139 - RNA, 19 nt, Homo sapiens
  misc_RNA (1)...(19): siRNA sense strand
acggaaaucugauguugaa

SEQ ID NO: 2204140 - RNA, 19 nt, Homo sapiens
  misc_RNA (1)...(19): siRNA sense strand
cagaaguccugaagaguca

SEQ ID NO: 2204141 - RNA, 19 nt, Homo sapiens
  misc_RNA (1)...(19): siRNA sense strand
ccacgccucugcaaucaug

SEQ ID NO: 2204142 - RNA, 19 nt, Homo sapiens
  misc_RNA (1)...(19): siRNA sense strand
caaauucccuaagaagcaa

SEQ ID NO: 2204143 - RNA, 19 nt, Homo sapiens
  misc_RNA (1)...(19): siRNA sense strand
caucaagaacaucagaaua

SEQ ID NO: 2204144 - RNA, 19 nt, Homo sapiens
  misc_RNA (1)...(19): siRNA sense strand
uuccagaaguguuccuuua

SEQ ID NO: 2204145 - RNA, 19 nt, Homo sapiens
  misc_RNA (1)...(19): siRNA sense strand
ggcagugucuaucgagaaa

SEQ ID NO: 2204146 - RNA, 19 nt, Homo sapiens
  misc_RNA (1)...(19): siRNA sense strand
gaagagaagaucgucaaga

SEQ ID NO: 2204147 - RNA, 19 nt, Homo sapiens
  misc_RNA (1)...(19): siRNA sense strand
ugagggcaaugaugaagaa

SEQ ID NO: 2204148 - RNA, 19 nt, Homo sapiens
  misc_RNA (1)...(19): siRNA sense strand
guaaggaacauucaagaca

SEQ ID NO: 2204149 - RNA, 19 nt, Homo sapiens
  misc_RNA (1)...(19): siRNA sense strand
gacguccgcugauucuuug

SEQ ID NO: 2204150 - RNA, 19 nt, Homo sapiens
  misc_RNA (1)...(19): siRNA sense strand
aaacagucgugguucaguu

SEQ ID NO: 2204151 - RNA, 19 nt, Homo sapiens
  misc_RNA (1)...(19): siRNA sense strand
gaauuagagagaaugauga

SEQ ID NO: 2204152 - RNA, 19 nt, Homo sapiens
  misc_RNA (1)...(19): siRNA sense strand
ggaaauacugggaaugcaa

SEQ ID NO: 2204153 - RNA, 19 nt, Homo sapiens
  misc_RNA (1)...(19): siRNA sense strand
gaagaaggagacaaaauaa

SEQ ID NO: 2204154 - RNA, 19 nt, Homo sapiens
  misc_RNA (1)...(19): siRNA sense strand
ggacaagguggaacuuuca

SEQ ID NO: 2204155 - RNA, 19 nt, Homo sapiens
  misc_RNA (1)...(19): siRNA sense strand
aggagaauuuccaaccuua

SEQ ID NO: 2204156 - RNA, 19 nt, Homo sapiens
  misc_RNA (1)...(19): siRNA sense strand
ucccagaugucucauaaga

SEQ ID NO: 2204157 - RNA, 19 nt, Homo sapiens
  misc_RNA (1)...(19): siRNA sense strand
gcacagaauggaaguucaa

SEQ ID NO: 2204158 - RNA, 19 nt, Homo sapiens
  misc_RNA (1)...(19): siRNA sense strand
gaguacaucuccgauuuca

SEQ ID NO: 2204159 - RNA, 19 nt, Homo sapiens
  misc_RNA (1)...(19): siRNA sense strand
gaaagaagaugaucacaaa

SEQ ID NO: 2204160 - RNA, 19 nt, Homo sapiens
  misc_RNA (1)...(19): siRNA sense strand
gaagagaucugggauaguu

SEQ ID NO: 2204161 - RNA, 19 nt, Homo sapiens
  misc_RNA (1)...(19): siRNA sense strand
gaacagcaguaucaauuca

SEQ ID NO: 2204162 - RNA, 19 nt, Homo sapiens
  misc_RNA (1)...(19): siRNA sense strand
gagaugauauugcuacaga

SEQ ID NO: 2204163 - RNA, 19 nt, Homo sapiens
  misc_RNA (1)...(19): siRNA sense strand
caucaucucugcuauauuc

SEQ ID NO: 2204164 - RNA, 19 nt, Homo sapiens
  misc_RNA (1)...(19): siRNA sense strand
caagaaagccucagaaauc

SEQ ID NO: 2204165 - RNA, 19 nt, Homo sapiens
  misc_RNA (1)...(19): siRNA sense strand
gcacugcccucaucaggaa

SEQ ID NO: 2204166 - RNA, 19 nt, Homo sapiens
  misc_RNA (1)...(19): siRNA sense strand
ccaggaagauaaguauuua

SEQ ID NO: 2204167 - RNA, 19 nt, Homo sapiens
  misc_RNA (1)...(19): siRNA sense strand
ggauguugaugcuguauuu

SEQ ID NO: 2204168 - RNA, 19 nt, Homo sapiens
  misc_RNA (1)...(19): siRNA sense strand
uggaagaaguguagcuuua

SEQ ID NO: 2204169 - RNA, 19 nt, Homo sapiens
  misc_RNA (1)...(19): siRNA sense strand
caacgaauuccauauauga

SEQ ID NO: 2204170 - RNA, 19 nt, Homo sapiens
  misc_RNA (1)...(19): siRNA sense strand
gaccaaugcucaagugaug

SEQ ID NO: 2204171 - RNA, 19 nt, Homo sapiens
  misc_RNA (1)...(19): siRNA sense strand
ccauggacguggccucuua

SEQ ID NO: 2204172 - RNA, 19 nt, Homo sapiens
  misc_RNA (1)...(19): siRNA sense strand
cagaguguaugccaauuaa

SEQ ID NO: 2204173 - RNA, 19 nt, Homo sapiens
  misc_RNA (1)...(19): siRNA sense strand
gaucaccucaucuucaaua

SEQ ID NO: 2204174 - RNA, 19 nt, Homo sapiens
  misc_RNA (1)...(19): siRNA sense strand
gugaacaacuuucggagaa

SEQ ID NO: 2204175 - RNA, 19 nt, Homo sapiens
  misc_RNA (1)...(19): siRNA sense strand
cagcauauuucaggaagua

SEQ ID NO: 2204176 - RNA, 19 nt, Homo sapiens
  misc_RNA (1)...(19): siRNA sense strand
ccaaagcuguagcaucaaa

SEQ ID NO: 2204177 - RNA, 19 nt, Homo sapiens
  misc_RNA (1)...(19): siRNA sense strand
gaaggacaacuuugacauu

SEQ ID NO: 2204178 - RNA, 19 nt, Homo sapiens
  misc_RNA (1)...(19): siRNA sense strand
gcucaacgaauuccauaua

SEQ ID NO: 2204179 - RNA, 19 nt, Homo sapiens
  misc_RNA (1)...(19): siRNA sense strand
gaucucugcuccuauacuu

SEQ ID NO: 2204180 - RNA, 19 nt, Homo sapiens
  misc_RNA (1)...(19): siRNA sense strand
ccagcaaccuuuaacauca

SEQ ID NO: 2204181 - RNA, 19 nt, Homo sapiens
  misc_RNA (1)...(19): siRNA sense strand
ccaagcacauuucgcugua

SEQ ID NO: 2204182 - RNA, 19 nt, Homo sapiens
  misc_RNA (1)...(19): siRNA sense strand
guaauacucuugguagugu

SEQ ID NO: 2204183 - RNA, 19 nt, Homo sapiens
  misc_RNA (1)...(19): siRNA sense strand
caaaagaugugucagaaga

SEQ ID NO: 2204184 - RNA, 19 nt, Homo sapiens
  misc_RNA (1)...(19): siRNA sense strand
cuauauggcuguugcaguu

SEQ ID NO: 2204185 - RNA, 19 nt, Homo sapiens
  misc_RNA (1)...(19): siRNA sense strand
gaaaucacucaaauucuga

SEQ ID NO: 2204186 - RNA, 19 nt, Homo sapiens
  misc_RNA (1)...(19): siRNA sense strand
gcaauaacccacgagauga

SEQ ID NO: 2204187 - RNA, 19 nt, Homo sapiens
  misc_RNA (1)...(19): siRNA sense strand
gaaaguggacauugaccaa

SEQ ID NO: 2204188 - RNA, 19 nt, Homo sapiens
  misc_RNA (1)...(19): siRNA sense strand
ccaaauaggacaccaggaa

SEQ ID NO: 2204189 - RNA, 19 nt, Homo sapiens
  misc_RNA (1)...(19): siRNA sense strand
caccucaucuucaauaugu

SEQ ID NO: 2204190 - RNA, 19 nt, Homo sapiens
  misc_RNA (1)...(19): siRNA sense strand
gggcucgucuucucgguuu

SEQ ID NO: 2204191 - RNA, 19 nt, Homo sapiens
  misc_RNA (1)...(19): siRNA sense strand
gaaugugcguggcuccuau

SEQ ID NO: 2204192 - RNA, 19 nt, Homo sapiens
  misc_RNA (1)...(19): siRNA sense strand
aaucagaagcgcauagaua

SEQ ID NO: 2204193 - RNA, 19 nt, Homo sapiens
  misc_RNA (1)...(19): siRNA sense strand
uggaaucccugucggguaa

SEQ ID NO: 2204194 - RNA, 19 nt, Homo sapiens
  misc_RNA (1)...(19): siRNA sense strand
ccaaacagcagguguggaa

SEQ ID NO: 2204195 - RNA, 19 nt, Homo sapiens
  misc_RNA (1)...(19): siRNA sense strand
uauuguggcuucugaaaug

SEQ ID NO: 2204196 - RNA, 19 nt, Homo sapiens
  misc_RNA (1)...(19): siRNA sense strand
uaacuuccagcaaccuuua

SEQ ID NO: 2204197 - RNA, 19 nt, Homo sapiens
  misc_RNA (1)...(19): siRNA sense strand
gauaaagagacaaacagaa

SEQ ID NO: 2204198 - RNA, 19 nt, Homo sapiens
  misc_RNA (1)...(19): siRNA sense strand
uaaggcagcugagguuugu

SEQ ID NO: 2204199 - RNA, 19 nt, Homo sapiens
  misc_RNA (1)...(19): siRNA sense strand
acagaaaucacucaaauuc

SEQ ID NO: 2204200 - RNA, 19 nt, Homo sapiens
  misc_RNA (1)...(19): siRNA sense strand
gcaaagcaggauucuauca

SEQ ID NO: 2204201 - RNA, 19 nt, Homo sapiens
  misc_RNA (1)...(19): siRNA sense strand
gcgcauagauaaggcugaa

SEQ ID NO: 2204202 - RNA, 19 nt, Homo sapiens
  misc_RNA (1)...(19): siRNA sense strand
acgaacggcucaacgaauu

SEQ ID NO: 2204203 - RNA, 19 nt, Homo sapiens
  misc_RNA (1)...(19): siRNA sense strand
gcucuaagugcaaauaaga

SEQ ID NO: 2204204 - RNA, 19 nt, Homo sapiens
  misc_RNA (1)...(19): siRNA sense strand
cuaaaucccagaaaccuuu

SEQ ID NO: 2204205 - RNA, 19 nt, Homo sapiens
  misc_RNA (1)...(19): siRNA sense strand
agaagaugaucacaaacaa

SEQ ID NO: 2204206 - RNA, 19 nt, Homo sapiens
  misc_RNA (1)...(19): siRNA sense strand
ucaacgaauuccauauaug

SEQ ID NO: 2204207 - RNA, 19 nt, Homo sapiens
  misc_RNA (1)...(19): siRNA sense strand
caaauaggacaccaggaaa

SEQ ID NO: 2204208 - RNA, 19 nt, Homo sapiens
  misc_RNA (1)...(19): siRNA sense strand
gagcucaucaucucugcua

SEQ ID NO: 2204209 - RNA, 19 nt, Homo sapiens
  misc_RNA (1)...(19): siRNA sense strand
gaauuuggagaaacagauu

SEQ ID NO: 2204210 - RNA, 19 nt, Homo sapiens
  misc_RNA (1)...(19): siRNA sense strand
gaggaugcuggcaguaaua

SEQ ID NO: 2204211 - RNA, 19 nt, Homo sapiens
  misc_RNA (1)...(19): siRNA sense strand
ggacaagagccacuucaag

SEQ ID NO: 2204212 - RNA, 19 nt, Homo sapiens
  misc_RNA (1)...(19): siRNA sense strand
agaaaucccacagcacuua

SEQ ID NO: 2204213 - RNA, 19 nt, Homo sapiens
  misc_RNA (1)...(19): siRNA sense strand
gcuguauucuccuaagaug

SEQ ID NO: 2204214 - RNA, 19 nt, Homo sapiens
  misc_RNA (1)...(19): siRNA sense strand
caucgggccuuauccuguu

SEQ ID NO: 2204215 - RNA, 19 nt, Homo sapiens
  misc_RNA (1)...(19): siRNA sense strand
caaguggucuccgccuuau

SEQ ID NO: 2204216 - RNA, 19 nt, Homo sapiens
  misc_RNA (1)...(19): siRNA sense strand
aagaagagaucugggauag

SEQ ID NO: 2204217 - RNA, 19 nt, Homo sapiens
  misc_RNA (1)...(19): siRNA sense strand
gugcguggcuccuauaacu

SEQ ID NO: 2204218 - RNA, 19 nt, Homo sapiens
  misc_RNA (1)...(19): siRNA sense strand
agauaaggcugaaguaugc

SEQ ID NO: 2204219 - RNA, 19 nt, Homo sapiens
  misc_RNA (1)...(19): siRNA sense strand
ccacccagaugaaggacaa

SEQ ID NO: 2204220 - RNA, 19 nt, Homo sapiens
  misc_RNA (1)...(19): siRNA sense strand
ccaagaaagccucagaaau

SEQ ID NO: 2204221 - RNA, 19 nt, Homo sapiens
  misc_RNA (1)...(19): siRNA sense strand
gcucaucaucucugcuaua

SEQ ID NO: 2204222 - RNA, 19 nt, Homo sapiens
  misc_RNA (1)...(19): siRNA sense strand
ggccuuauccuguuggaaa

SEQ ID NO: 2204223 - RNA, 19 nt, Homo sapiens
  misc_RNA (1)...(19): siRNA sense strand
ccucaacaauucagagugu

SEQ ID NO: 2204224 - RNA, 19 nt, Homo sapiens
  misc_RNA (1)...(19): siRNA sense strand
ucagaguguaugccaauua

SEQ ID NO: 2204225 - RNA, 19 nt, Homo sapiens
  misc_RNA (1)...(19): siRNA sense strand
gaucugggauaguuuuaaa

SEQ ID NO: 2204226 - RNA, 19 nt, Homo sapiens
  misc_RNA (1)...(19): siRNA sense strand
gcuccuauaacucaaguaa

SEQ ID NO: 2204227 - RNA, 19 nt, Homo sapiens
  misc_RNA (1)...(19): siRNA sense strand
caaaagcacguaucuauug

SEQ ID NO: 2204228 - RNA, 19 nt, Homo sapiens
  misc_RNA (1)...(19): siRNA sense strand
ccagaugaaggacaacuuu

SEQ ID NO: 2204229 - RNA, 19 nt, Homo sapiens
  misc_RNA (1)...(19): siRNA sense strand
cuaggucguuccaucauga

SEQ ID NO: 2204230 - RNA, 19 nt, Homo sapiens
  misc_RNA (1)...(19): siRNA sense strand
gccagaauuuggagaaaca

SEQ ID NO: 2204231 - RNA, 19 nt, Homo sapiens
  misc_RNA (1)...(19): siRNA sense strand
ucaaguggucuccgccuua

SEQ ID NO: 2204232 - RNA, 19 nt, Homo sapiens
  misc_RNA (1)...(19): siRNA sense strand
uuggaucucugcuccuaua

SEQ ID NO: 2204233 - RNA, 19 nt, Homo sapiens
  misc_RNA (1)...(19): siRNA sense strand
aggacgaccuggauuggua

SEQ ID NO: 2204234 - RNA, 19 nt, Homo sapiens
  misc_RNA (1)...(19): siRNA sense strand
gaaugaaaaucucaaccaa

SEQ ID NO: 2204235 - RNA, 19 nt, Homo sapiens
  misc_RNA (1)...(19): siRNA sense strand
gaugagaagcuuuugauuu

SEQ ID NO: 2204236 - RNA, 19 nt, Homo sapiens
  misc_RNA (1)...(19): siRNA sense strand
cuaucauccuggagucuua

SEQ ID NO: 2204237 - RNA, 19 nt, Homo sapiens
  misc_RNA (1)...(19): siRNA sense strand
ucaaccaaaugcuggaaga

SEQ ID NO: 2204238 - RNA, 19 nt, Homo sapiens
  misc_RNA (1)...(19): siRNA sense strand
ugucagcaauccaaucaga

SEQ ID NO: 2204239 - RNA, 19 nt, Homo sapiens
  misc_RNA (1)...(19): siRNA sense strand
aaggacaacuuugacauug

SEQ ID NO: 2204240 - RNA, 19 nt, Homo sapiens
  misc_RNA (1)...(19): siRNA sense strand
ggccuaggauucguucuug

SEQ ID NO: 2204241 - RNA, 19 nt, Homo sapiens
  misc_RNA (1)...(19): siRNA sense strand
gaaaaucucaaccaaauag

SEQ ID NO: 2204242 - RNA, 19 nt, Homo sapiens
  misc_RNA (1)...(19): siRNA sense strand
uaacacagagacuaaagau

SEQ ID NO: 2204243 - RNA, 19 nt, Homo sapiens
  misc_RNA (1)...(19): siRNA sense strand
caaacagaaaucacucaaa

SEQ ID NO: 2204244 - RNA, 19 nt, Homo sapiens
  misc_RNA (1)...(19): siRNA sense strand
ccgaucaccucaucuucaa

SEQ ID NO: 2204245 - RNA, 19 nt, Homo sapiens
  misc_RNA (1)...(19): siRNA sense strand
aaagcaggauucuaucauc

SEQ ID NO: 2204246 - RNA, 19 nt, Homo sapiens
  misc_RNA (1)...(19): siRNA sense strand
gauagcagggccuaggaaa

SEQ ID NO: 2204247 - RNA, 19 nt, Homo sapiens
  misc_RNA (1)...(19): siRNA sense strand
uaucuauuguggcuucuga

SEQ ID NO: 2204248 - RNA, 19 nt, Homo sapiens
  misc_RNA (1)...(19): siRNA sense strand
gggauuaugaaacaacaaa

SEQ ID NO: 2204249 - RNA, 19 nt, Homo sapiens
  misc_RNA (1)...(19): siRNA sense strand
gccaagaaagccucagaaa

SEQ ID NO: 2204250 - RNA, 19 nt, Homo sapiens
  misc_RNA (1)...(19): siRNA sense strand
cauacucauuugacuguga

SEQ ID NO: 2204251 - RNA, 19 nt, Homo sapiens
  misc_RNA (1)...(19): siRNA sense strand
uaaaugccaccucaacaau

SEQ ID NO: 2204252 - RNA, 19 nt, Homo sapiens
  misc_RNA (1)...(19): siRNA sense strand
aaagaagagaucugggaua

SEQ ID NO: 2204253 - RNA, 19 nt, Homo sapiens
  misc_RNA (1)...(19): siRNA sense strand
ucacucaaauucugauaac

SEQ ID NO: 2204254 - RNA, 19 nt, Homo sapiens
  misc_RNA (1)...(19): siRNA sense strand
gaggaggagacaacagaaa

SEQ ID NO: 2204255 - RNA, 19 nt, Homo sapiens
  misc_RNA (1)...(19): siRNA sense strand
ggagugagcacagcuugga

SEQ ID NO: 2204256 - RNA, 19 nt, Homo sapiens
  misc_RNA (1)...(19): siRNA sense strand
gaagaaguguagcuuuacc

SEQ ID NO: 2204257 - RNA, 19 nt, Homo sapiens
  misc_RNA (1)...(19): siRNA sense strand
gcaccacccagaugaagga

SEQ ID NO: 2204258 - RNA, 19 nt, Homo sapiens
  misc_RNA (1)...(19): siRNA sense strand
gaaaucccacagcacuuau

SEQ ID NO: 2204259 - RNA, 19 nt, Homo sapiens
  misc_RNA (1)...(19): siRNA sense strand
gcucucagcuccagacuua

SEQ ID NO: 2204260 - RNA, 19 nt, Homo sapiens
  misc_RNA (1)...(19): siRNA sense strand
gaagaagaauugcgaaugu

SEQ ID NO: 2204261 - RNA, 19 nt, Homo sapiens
  misc_RNA (1)...(19): siRNA sense strand
acauaaagcuugacgauaa

SEQ ID NO: 2204262 - RNA, 19 nt, Homo sapiens
  misc_RNA (1)...(19): siRNA sense strand
gauacaagcugucaagaga

SEQ ID NO: 2204263 - RNA, 19 nt, Homo sapiens
  misc_RNA (1)...(19): siRNA sense strand
gaaauucccauuccauuaa

SEQ ID NO: 2204264 - RNA, 19 nt, Homo sapiens
  misc_RNA (1)...(19): siRNA sense strand
ccaaagugauugaaaguuu

SEQ ID NO: 2204265 - RNA, 19 nt, Homo sapiens
  misc_RNA (1)...(19): siRNA sense strand
ggacaacaaugacuuaaag

SEQ ID NO: 2204266 - RNA, 19 nt, Homo sapiens
  misc_RNA (1)...(19): siRNA sense strand
gagcauggaucaagacuuc

SEQ ID NO: 2204267 - RNA, 19 nt, Homo sapiens
  misc_RNA (1)...(19): siRNA sense strand
ggaaacagcccggaaauga

SEQ ID NO: 2204268 - RNA, 19 nt, Homo sapiens
  misc_RNA (1)...(19): siRNA sense strand
gaagcaagcacaauagaaa

SEQ ID NO: 2204269 - RNA, 19 nt, Homo sapiens
  misc_RNA (1)...(19): siRNA sense strand
guacagagaucagcaaaca

SEQ ID NO: 2204270 - RNA, 19 nt, Homo sapiens
  misc_RNA (1)...(19): siRNA sense strand
gaagaaagcagcaguagca

SEQ ID NO: 2204271 - RNA, 19 nt, Homo sapiens
  misc_RNA (1)...(19): siRNA sense strand
gaagacagacaaacaaaug

SEQ ID NO: 2204272 - RNA, 19 nt, Homo sapiens
  misc_RNA (1)...(19): siRNA sense strand
acaaggagcuccaggaaga

SEQ ID NO: 2204273 - RNA, 19 nt, Homo sapiens
  misc_RNA (1)...(19): siRNA sense strand
ggaaaggacaugugaguga

SEQ ID NO: 2204274 - RNA, 19 nt, Homo sapiens
  misc_RNA (1)...(19): siRNA sense strand
gaagaagacagacaaacaa

SEQ ID NO: 2204275 - RNA, 19 nt, Homo sapiens
  misc_RNA (1)...(19): siRNA sense strand
acagagaacucaagcauuc

SEQ ID NO: 2204276 - RNA, 19 nt, Homo sapiens
  misc_RNA (1)...(19): siRNA sense strand
gauccacgguuacgacauu

SEQ ID NO: 2204277 - RNA, 19 nt, Homo sapiens
  misc_RNA (1)...(19): siRNA sense strand
gggagagacuguuucaaga

SEQ ID NO: 2204278 - RNA, 19 nt, Homo sapiens
  misc_RNA (1)...(19): siRNA sense strand
ggucagagcaugugaugaa

SEQ ID NO: 2204279 - RNA, 19 nt, Homo sapiens
  misc_RNA (1)...(19): siRNA sense strand
gaagacacggugcccauaa

SEQ ID NO: 2204280 - RNA, 19 nt, Homo sapiens
  misc_RNA (1)...(19): siRNA sense strand
gaaagacauucaccuaaaa

SEQ ID NO: 2204281 - RNA, 19 nt, Homo sapiens
  misc_RNA (1)...(19): siRNA sense strand
gaaccagccaaggaaauua

SEQ ID NO: 2204282 - RNA, 19 nt, Homo sapiens
  misc_RNA (1)...(19): siRNA sense strand
cauaaagcuugacgauaaa

SEQ ID NO: 2204283 - RNA, 19 nt, Homo sapiens
  misc_RNA (1)...(19): siRNA sense strand
gcaaggauccugggcauug

SEQ ID NO: 2204284 - RNA, 19 nt, Homo sapiens
  misc_RNA (1)...(19): siRNA sense strand
gaacugggaaugaguaugg

SEQ ID NO: 2204285 - RNA, 19 nt, Homo sapiens
  misc_RNA (1)...(19): siRNA sense strand
gugaagacauaaagcuuga

SEQ ID NO: 2204286 - RNA, 19 nt, Homo sapiens
  misc_RNA (1)...(19): siRNA sense strand
cagagcaugugaugaagaa

SEQ ID NO: 2204287 - RNA, 19 nt, Homo sapiens
  misc_RNA (1)...(19): siRNA sense strand
gaccaagccuaccggagaa

SEQ ID NO: 2204288 - RNA, 19 nt, Homo sapiens
  misc_RNA (1)...(19): siRNA sense strand
ggguuucugugaagacaua

SEQ ID NO: 2204289 - RNA, 19 nt, Homo sapiens
  misc_RNA (1)...(19): siRNA sense strand
gaagccaguuugggaagaa

SEQ ID NO: 2204290 - RNA, 19 nt, Homo sapiens
  misc_RNA (1)...(19): siRNA sense strand
ggaggacgccgaggaauug

SEQ ID NO: 2204291 - RNA, 19 nt, Homo sapiens
  misc_RNA (1)...(19): siRNA sense strand
caacaguaaacaacucuuu

SEQ ID NO: 2204292 - RNA, 19 nt, Homo sapiens
  misc_RNA (1)...(19): siRNA sense strand
gcacagagaacucaagcau

SEQ ID NO: 2204293 - RNA, 19 nt, Homo sapiens
  misc_RNA (1)...(19): siRNA sense strand
gaggugagaguaagucuga

SEQ ID NO: 2204294 - RNA, 19 nt, Homo sapiens
  misc_RNA (1)...(19): siRNA sense strand
ucagucaguuagaaaguuu

SEQ ID NO: 2204295 - RNA, 19 nt, Homo sapiens
  misc_RNA (1)...(19): siRNA sense strand
gauugaaaguuuacaagag

SEQ ID NO: 2204296 - RNA, 19 nt, Homo sapiens
  misc_RNA (1)...(19): siRNA sense strand
ugaaagaggugagcucagu

SEQ ID NO: 2204297 - RNA, 19 nt, Homo sapiens
  misc_RNA (1)...(19): siRNA sense strand
ggaagaagaauugcgaaug

SEQ ID NO: 2204298 - RNA, 19 nt, Homo sapiens
  misc_RNA (1)...(19): siRNA sense strand
gcuggcagguagcccauuu

SEQ ID NO: 2204299 - RNA, 19 nt, Homo sapiens
  misc_RNA (1)...(19): siRNA sense strand
auagagauauggacaacaa

SEQ ID NO: 2204300 - RNA, 19 nt, Homo sapiens
  misc_RNA (1)...(19): siRNA sense strand
gagaagaggacggcaagaa

SEQ ID NO: 2204301 - RNA, 19 nt, Homo sapiens
  misc_RNA (1)...(19): siRNA sense strand
gguguccacugaugccuuu

SEQ ID NO: 2204302 - RNA, 19 nt, Homo sapiens
  misc_RNA (1)...(19): siRNA sense strand
gagauauggacaacaauga

SEQ ID NO: 2204303 - RNA, 19 nt, Homo sapiens
  misc_RNA (1)...(19): siRNA sense strand
ggaaccagccaaggaaauu

SEQ ID NO: 2204304 - RNA, 19 nt, Homo sapiens
  misc_RNA (1)...(19): siRNA sense strand
cagcaucacgcgaggauaa

SEQ ID NO: 2204305 - RNA, 19 nt, Homo sapiens
  misc_RNA (1)...(19): siRNA sense strand
aagaaugggucugauaaga

SEQ ID NO: 2204306 - RNA, 19 nt, Homo sapiens
  misc_RNA (1)...(19): siRNA sense strand
uaacaaggagcuccaggaa

SEQ ID NO: 2204307 - RNA, 19 nt, Homo sapiens
  misc_RNA (1)...(19): siRNA sense strand
gguagcccauuuccuguga

SEQ ID NO: 2204308 - RNA, 19 nt, Homo sapiens
  misc_RNA (1)...(19): siRNA sense strand
gaaauuagggaggcagaug

SEQ ID NO: 2204309 - RNA, 19 nt, Homo sapiens
  misc_RNA (1)...(19): siRNA sense strand
agaagagcauggaucaaga

SEQ ID NO: 2204310 - RNA, 19 nt, Homo sapiens
  misc_RNA (1)...(19): siRNA sense strand
gagaagagcauggaucaag

SEQ ID NO: 2204311 - RNA, 19 nt, Homo sapiens
  misc_RNA (1)...(19): siRNA sense strand
aaaaggauguggaaacaaa

SEQ ID NO: 2204312 - RNA, 19 nt, Homo sapiens
  misc_RNA (1)...(19): siRNA sense strand
acaaaugaccucaguuuca

SEQ ID NO: 2204313 - RNA, 19 nt, Homo sapiens
  misc_RNA (1)...(19): siRNA sense strand
acaaacaaaugaccucagu

SEQ ID NO: 2204314 - RNA, 19 nt, Homo sapiens
  misc_RNA (1)...(19): siRNA sense strand
uagaagaccuccugaucuc

SEQ ID NO: 2204315 - RNA, 19 nt, Homo sapiens
  misc_RNA (1)...(19): siRNA sense strand
ccacuugcgcaccaaauuu

SEQ ID NO: 2204316 - RNA, 19 nt, Homo sapiens
  misc_RNA (1)...(19): siRNA sense strand
gggaagaggugagaguaag

SEQ ID NO: 2204317 - RNA, 19 nt, Homo sapiens
  misc_RNA (1)...(19): siRNA sense strand
gcuugacgauaaaucauau

SEQ ID NO: 2204318 - RNA, 19 nt, Homo sapiens
  misc_RNA (1)...(19): siRNA sense strand
ggaagacacggugcccaua

SEQ ID NO: 2204319 - RNA, 19 nt, Homo sapiens
  misc_RNA (1)...(19): siRNA sense strand
gggaaugaguaugguguga

SEQ ID NO: 2204320 - RNA, 19 nt, Homo sapiens
  misc_RNA (1)...(19): siRNA sense strand
caaggauccugggcauuga

SEQ ID NO: 2204321 - RNA, 19 nt, Homo sapiens
  misc_RNA (1)...(19): siRNA sense strand
ggauuugaucagucaguua

SEQ ID NO: 2204322 - RNA, 19 nt, Homo sapiens
  misc_RNA (1)...(19): siRNA sense strand
ggacaguggccugauguga

SEQ ID NO: 2204323 - RNA, 19 nt, Homo sapiens
  misc_RNA (1)...(19): siRNA sense strand
gacauaaagcuugacgaua

SEQ ID NO: 2204324 - RNA, 19 nt, Homo sapiens
  misc_RNA (1)...(19): siRNA sense strand
acaguggccugaugugaga

SEQ ID NO: 2204325 - RNA, 19 nt, Homo sapiens
  misc_RNA (1)...(19): siRNA sense strand
gggugaagcaagcacaaua

SEQ ID NO: 2204326 - RNA, 19 nt, Homo sapiens
  misc_RNA (1)...(19): siRNA sense strand
gaggaagaaagcagcagua

SEQ ID NO: 2204327 - RNA, 19 nt, Homo sapiens
  misc_RNA (1)...(19): siRNA sense strand
guacauucccuuugaugau

SEQ ID NO: 2204328 - RNA, 19 nt, Homo sapiens
  misc_RNA (1)...(19): siRNA sense strand
ggaugagaguccugagcuu

SEQ ID NO: 2204329 - RNA, 19 nt, Homo sapiens
  misc_RNA (1)...(19): siRNA sense strand
gguccacuuuauuccauuu

SEQ ID NO: 2204330 - RNA, 19 nt, Homo sapiens
  misc_RNA (1)...(19): siRNA sense strand
ggaaccagaagaagacaga

SEQ ID NO: 2204331 - RNA, 19 nt, Homo sapiens
  misc_RNA (1)...(19): siRNA sense strand
gaauccacagagcuuaaua

SEQ ID NO: 2204332 - RNA, 19 nt, Homo sapiens
  misc_RNA (1)...(19): siRNA sense strand
uucaagaccuguacccauu

SEQ ID NO: 2204333 - RNA, 19 nt, Homo sapiens
  misc_RNA (1)...(19): siRNA sense strand
ugacgagaaugucuucaag

SEQ ID NO: 2204334 - RNA, 19 nt, Homo sapiens
  misc_RNA (1)...(19): siRNA sense strand
caagaccuguacccauuca

SEQ ID NO: 2204335 - RNA, 19 nt, Homo sapiens
  misc_RNA (1)...(19): siRNA sense strand
gcagauggacgccuauguc

SEQ ID NO: 2204336 - RNA, 19 nt, Homo sapiens
  misc_RNA (1)...(19): siRNA sense strand
caagaucaagugacgcaaa

SEQ ID NO: 2204337 - RNA, 19 nt, Homo sapiens
  misc_RNA (1)...(19): siRNA sense strand
gaaacagcccggaaaugag

SEQ ID NO: 2204338 - RNA, 19 nt, Homo sapiens
  misc_RNA (1)...(19): siRNA sense strand
gucagacccuggauuggaa

SEQ ID NO: 2204339 - RNA, 19 nt, Homo sapiens
  misc_RNA (1)...(19): siRNA sense strand
guagaagaccuccugaucu

SEQ ID NO: 2204340 - RNA, 19 nt, Homo sapiens
  misc_RNA (1)...(19): siRNA sense strand
gaggguccaugggaaguug

SEQ ID NO: 2204341 - RNA, 19 nt, Homo sapiens
  misc_RNA (1)...(19): siRNA sense strand
caccguauccucccacuug

SEQ ID NO: 2204342 - RNA, 19 nt, Homo sapiens
  misc_RNA (1)...(19): siRNA sense strand
ccugaucucucauggauac

SEQ ID NO: 2204343 - RNA, 19 nt, Homo sapiens
  misc_RNA (1)...(19): siRNA sense strand
gggauuugaucagucaguu

SEQ ID NO: 2204344 - RNA, 19 nt, Homo sapiens
  misc_RNA (1)...(19): siRNA sense strand
caaaagaaugggucugaua

SEQ ID NO: 2204345 - RNA, 19 nt, Homo sapiens
  misc_RNA (1)...(19): siRNA sense strand
gaacgagacuauauuuugc

SEQ ID NO: 2204346 - RNA, 19 nt, Homo sapiens
  misc_RNA (1)...(19): siRNA sense strand
aagacacggugcccauaaa

SEQ ID NO: 2204347 - RNA, 19 nt, Homo sapiens
  misc_RNA (1)...(19): siRNA sense strand
gaauugaaggccaccacaa

SEQ ID NO: 2204348 - RNA, 19 nt, Homo sapiens
  misc_RNA (1)...(19): siRNA sense strand
cagcaaacacaaaccaguu

SEQ ID NO: 2204349 - RNA, 19 nt, Homo sapiens
  misc_RNA (1)...(19): siRNA sense strand
gagagcaccugcgaaacuc

SEQ ID NO: 2204350 - RNA, 19 nt, Homo sapiens
  misc_RNA (1)...(19): siRNA sense strand
ggaggaaugcagccugaug

SEQ ID NO: 2204351 - RNA, 19 nt, Homo sapiens
  misc_RNA (1)...(19): siRNA sense strand
gcagaacgucagccuggaa

SEQ ID NO: 2204352 - RNA, 19 nt, Homo sapiens
  misc_RNA (1)...(19): siRNA sense strand
agaagaagacagacaaaca

SEQ ID NO: 2204353 - RNA, 19 nt, Homo sapiens
  misc_RNA (1)...(19): siRNA sense strand
ggcgagagcaccugcgaaa

SEQ ID NO: 2204354 - RNA, 19 nt, Homo sapiens
  misc_RNA (1)...(19): siRNA sense strand
gcagaacgggcaugaggau

SEQ ID NO: 2204355 - RNA, 19 nt, Homo sapiens
  misc_RNA (1)...(19): siRNA sense strand
ugagagaggccuggucuug

SEQ ID NO: 2204356 - RNA, 19 nt, Homo sapiens
  misc_RNA (1)...(19): siRNA sense strand
cagcaacagugcguucuca

SEQ ID NO: 2204357 - RNA, 19 nt, Homo sapiens
  misc_RNA (1)...(19): siRNA sense strand
acacggugcccauaaaugu

SEQ ID NO: 2204358 - RNA, 19 nt, Homo sapiens
  misc_RNA (1)...(19): siRNA sense strand
uauggacaacaaugacuua

SEQ ID NO: 2204359 - RNA, 19 nt, Homo sapiens
  misc_RNA (1)...(19): siRNA sense strand
gagauuagaccguauauau

SEQ ID NO: 2204360 - RNA, 19 nt, Homo sapiens
  misc_RNA (1)...(19): siRNA sense strand
cuacagcucuuccaaauau

SEQ ID NO: 2204361 - RNA, 19 nt, Homo sapiens
  misc_RNA (1)...(19): siRNA sense strand
ccaaggaacuuaagcaaag

SEQ ID NO: 2204362 - RNA, 19 nt, Homo sapiens
  misc_RNA (1)...(19): siRNA sense strand
gaucaugccuaauccacaa

SEQ ID NO: 2204363 - RNA, 19 nt, Homo sapiens
  misc_RNA (1)...(19): siRNA sense strand
gaccguauauaucuaaaug

SEQ ID NO: 2204364 - RNA, 19 nt, Homo sapiens
  misc_RNA (1)...(19): siRNA sense strand
gcaaugcaaggaaaucuaa

SEQ ID NO: 2204365 - RNA, 19 nt, Homo sapiens
  misc_RNA (1)...(19): siRNA sense strand
ucagcaaccugcagucauu

SEQ ID NO: 2204366 - RNA, 19 nt, Homo sapiens
  misc_RNA (1)...(19): siRNA sense strand
gaacaggaacuuucaacca

SEQ ID NO: 2204367 - RNA, 19 nt, Homo sapiens
  misc_RNA (1)...(19): siRNA sense strand
ccuaauccacaacuaaaua

SEQ ID NO: 2204368 - RNA, 19 nt, Homo sapiens
  misc_RNA (1)...(19): siRNA sense strand
gcacagcaaaggcaaggaa

SEQ ID NO: 2204369 - RNA, 19 nt, Homo sapiens
  misc_RNA (1)...(19): siRNA sense strand
gauuagaccguauauaucu

SEQ ID NO: 2204370 - RNA, 19 nt, Homo sapiens
  misc_RNA (1)...(19): siRNA sense strand
gacaucaucucgcaaugca

SEQ ID NO: 2204371 - RNA, 19 nt, Homo sapiens
  misc_RNA (1)...(19): siRNA sense strand
ggcggaagaugaugagcuu

SEQ ID NO: 2204372 - RNA, 19 nt, Homo sapiens
  misc_RNA (1)...(19): siRNA sense strand
ggacuuccagcacagcaaa

SEQ ID NO: 2204373 - RNA, 19 nt, Homo sapiens
  misc_RNA (1)...(19): siRNA sense strand
cugcugaggucaccauugu

SEQ ID NO: 2204374 - RNA, 19 nt, Homo sapiens
  misc_RNA (1)...(19): siRNA sense strand
caaauaugccacugaccuu

SEQ ID NO: 2204375 - RNA, 19 nt, Homo sapiens
  misc_RNA (1)...(19): siRNA sense strand
cagcucaucuggacaucau

SEQ ID NO: 2204376 - RNA, 19 nt, Homo sapiens
  misc_RNA (1)...(19): siRNA sense strand
ucagagauuagaccguaua

SEQ ID NO: 2204377 - RNA, 19 nt, Homo sapiens
  misc_RNA (1)...(19): siRNA sense strand
ucuaaaugcugggaucaug

SEQ ID NO: 2204378 - RNA, 19 nt, Homo sapiens
  misc_RNA (1)...(19): siRNA sense strand
gcugggaucaugccuaauc

SEQ ID NO: 2204379 - RNA, 19 nt, Homo sapiens
  misc_RNA (1)...(19): siRNA sense strand
cccuacagcucuuccaaau

SEQ ID NO: 2204380 - RNA, 19 nt, Homo sapiens
  misc_RNA (1)...(19): siRNA sense strand
augcugggaucaugccuaa

SEQ ID NO: 2204381 - RNA, 19 nt, Homo sapiens
  misc_RNA (1)...(19): siRNA sense strand
cuaaauaucaaagcacuuc

SEQ ID NO: 2204382 - RNA, 19 nt, Homo sapiens
  misc_RNA (1)...(19): siRNA sense strand
gaauaugagcaaggcagaa

SEQ ID NO: 2204383 - RNA, 19 nt, Homo sapiens
  misc_RNA (1)...(19): siRNA sense strand
uguuuggcgugcaggaaua

SEQ ID NO: 2204384 - RNA, 19 nt, Homo sapiens
  misc_RNA (1)...(19): siRNA sense strand
gagccucuccucugucaca

SEQ ID NO: 2204385 - RNA, 19 nt, Homo sapiens
  misc_RNA (1)...(19): siRNA sense strand
caaccugcagucauucuuc

SEQ ID NO: 2204386 - RNA, 19 nt, Homo sapiens
  misc_RNA (1)...(19): siRNA sense strand
caauccaucucagcucauc

SEQ ID NO: 2204387 - RNA, 19 nt, Homo sapiens
  misc_RNA (1)...(19): siRNA sense strand
ccuacagcucuuccaaaua

SEQ ID NO: 2204388 - RNA, 19 nt, Homo sapiens
  misc_RNA (1)...(19): siRNA sense strand
ccacaacuaaauaucaaag

SEQ ID NO: 2204389 - RNA, 19 nt, Homo sapiens
  misc_RNA (1)...(19): siRNA sense strand
ggacaucaucucgcaaugc

SEQ ID NO: 2204390 - RNA, 19 nt, Homo sapiens
  misc_RNA (1)...(19): siRNA sense strand
gcuuugaacaggaacuuuc

SEQ ID NO: 2204391 - RNA, 19 nt, Homo sapiens
  misc_RNA (1)...(19): siRNA sense strand
gcaaccugcagucauucuu

SEQ ID NO: 2204392 - RNA, 19 nt, Homo sapiens
  misc_RNA (1)...(19): siRNA sense strand
gagcuucaucuguguuugg

SEQ ID NO: 2204393 - RNA, 19 nt, Homo sapiens
  misc_RNA (1)...(19): siRNA sense strand
aaauaugccacugaccuuu

SEQ ID NO: 2204394 - RNA, 19 nt, Homo sapiens
  misc_RNA (1)...(19): siRNA sense strand
ccguauauaucuaaaugcu

SEQ ID NO: 2204395 - RNA, 19 nt, Homo sapiens
  misc_RNA (1)...(19): siRNA sense strand
gacuucaggagguguuuga

SEQ ID NO: 2204396 - RNA, 19 nt, Homo sapiens
  misc_RNA (1)...(19): siRNA sense strand
aaggaacccuacagcucuu

SEQ ID NO: 2204397 - RNA, 19 nt, Homo sapiens
  misc_RNA (1)...(19): siRNA sense strand
gagauuagaccguauauau

SEQ ID NO: 2204398 - RNA, 19 nt, Homo sapiens
  misc_RNA (1)...(19): siRNA sense strand
cuacagcucuuccaaauau

SEQ ID NO: 2204399 - RNA, 19 nt, Homo sapiens
  misc_RNA (1)...(19): siRNA sense strand
gaagauggaccuagaugaa

SEQ ID NO: 2204400 - RNA, 19 nt, Homo sapiens
  misc_RNA (1)...(19): siRNA sense strand
ccaaggaacuuaagcaaag

SEQ ID NO: 2204401 - RNA, 19 nt, Homo sapiens
  misc_RNA (1)...(19): siRNA sense strand
gaucaugccuaauccacaa

SEQ ID NO: 2204402 - RNA, 19 nt, Homo sapiens
  misc_RNA (1)...(19): siRNA sense strand
gaccguauauaucuaaaug

SEQ ID NO: 2204403 - RNA, 19 nt, Homo sapiens
  misc_RNA (1)...(19): siRNA sense strand
gcaaugcaaggaaaucuaa

SEQ ID NO: 2204404 - RNA, 19 nt, Homo sapiens
  misc_RNA (1)...(19): siRNA sense strand
ggaccuagaugaagacacu

SEQ ID NO: 2204405 - RNA, 19 nt, Homo sapiens
  misc_RNA (1)...(19): siRNA sense strand
ucagcaaccugcagucauu

SEQ ID NO: 2204406 - RNA, 19 nt, Homo sapiens
  misc_RNA (1)...(19): siRNA sense strand
gaacaggaacuuucaacca

SEQ ID NO: 2204407 - RNA, 19 nt, Homo sapiens
  misc_RNA (1)...(19): siRNA sense strand
ccuaauccacaacuaaaua

SEQ ID NO: 2204408 - RNA, 19 nt, Homo sapiens
  misc_RNA (1)...(19): siRNA sense strand
gcacagcaaaggcaaggaa

SEQ ID NO: 2204409 - RNA, 19 nt, Homo sapiens
  misc_RNA (1)...(19): siRNA sense strand
gauuagaccguauauaucu

SEQ ID NO: 2204410 - RNA, 19 nt, Homo sapiens
  misc_RNA (1)...(19): siRNA sense strand
gacaucaucucgcaaugca

SEQ ID NO: 2204411 - RNA, 19 nt, Homo sapiens
  misc_RNA (1)...(19): siRNA sense strand
ggcggaagaugaugagcuu

SEQ ID NO: 2204412 - RNA, 19 nt, Homo sapiens
  misc_RNA (1)...(19): siRNA sense strand
ggacuuccagcacagcaaa

SEQ ID NO: 2204413 - RNA, 19 nt, Homo sapiens
  misc_RNA (1)...(19): siRNA sense strand
gcacauuagggucacuauu

SEQ ID NO: 2204414 - RNA, 19 nt, Homo sapiens
  misc_RNA (1)...(19): siRNA sense strand
gaacuggaaaagcacauua

SEQ ID NO: 2204415 - RNA, 19 nt, Homo sapiens
  misc_RNA (1)...(19): siRNA sense strand
agauggaccuagaugaaga

SEQ ID NO: 2204416 - RNA, 19 nt, Homo sapiens
  misc_RNA (1)...(19): siRNA sense strand
gaugaagacacugcugaaa

SEQ ID NO: 2204417 - RNA, 19 nt, Homo sapiens
  misc_RNA (1)...(19): siRNA sense strand
cugcugaggucaccauugu

SEQ ID NO: 2204418 - RNA, 19 nt, Homo sapiens
  misc_RNA (1)...(19): siRNA sense strand
caaauaugccacugaccuu

SEQ ID NO: 2204419 - RNA, 19 nt, Homo sapiens
  misc_RNA (1)...(19): siRNA sense strand
cagcucaucuggacaucau

SEQ ID NO: 2204420 - RNA, 19 nt, Homo sapiens
  misc_RNA (1)...(19): siRNA sense strand
ucagagauuagaccguaua

SEQ ID NO: 2204421 - RNA, 19 nt, Homo sapiens
  misc_RNA (1)...(19): siRNA sense strand
acauuagggucacuauuca

SEQ ID NO: 2204422 - RNA, 19 nt, Homo sapiens
  misc_RNA (1)...(19): siRNA sense strand
cccagaagauggaccuaga

SEQ ID NO: 2204423 - RNA, 19 nt, Homo sapiens
  misc_RNA (1)...(19): siRNA sense strand
cacauuagggucacuauuc

SEQ ID NO: 2204424 - RNA, 19 nt, Homo sapiens
  misc_RNA (1)...(19): siRNA sense strand
ucuaaaugcugggaucaug

SEQ ID NO: 2204425 - RNA, 19 nt, Homo sapiens
  misc_RNA (1)...(19): siRNA sense strand
gaaucugucaauccucuga

SEQ ID NO: 2204426 - RNA, 19 nt, Homo sapiens
  misc_RNA (1)...(19): siRNA sense strand
gcugggaucaugccuaauc

SEQ ID NO: 2204427 - RNA, 19 nt, Homo sapiens
  misc_RNA (1)...(19): siRNA sense strand
cccuacagcucuuccaaau

SEQ ID NO: 2204428 - RNA, 19 nt, Homo sapiens
  misc_RNA (1)...(19): siRNA sense strand
augcugggaucaugccuaa

SEQ ID NO: 2204429 - RNA, 19 nt, Homo sapiens
  misc_RNA (1)...(19): siRNA sense strand
caguggcucaugccuauaa

SEQ ID NO: 2204430 - RNA, 19 nt, Homo sapiens
  misc_RNA (1)...(19): siRNA sense strand
cucaguggcucaugccuau

SEQ ID NO: 2204431 - RNA, 19 nt, Homo sapiens
  misc_RNA (1)...(19): siRNA sense strand
cuaaauaucaaagcacuuc

SEQ ID NO: 2204432 - RNA, 19 nt, Homo sapiens
  misc_RNA (1)...(19): siRNA sense strand
gaauaugagcaaggcagaa

SEQ ID NO: 2204433 - RNA, 19 nt, Homo sapiens
  misc_RNA (1)...(19): siRNA sense strand
uguuuggcgugcaggaaua

SEQ ID NO: 2204434 - RNA, 19 nt, Homo sapiens
  misc_RNA (1)...(19): siRNA sense strand
gagccucuccucugucaca

SEQ ID NO: 2204435 - RNA, 19 nt, Homo sapiens
  misc_RNA (1)...(19): siRNA sense strand
cagaagauggaccuagaug

SEQ ID NO: 2204436 - RNA, 19 nt, Homo sapiens
  misc_RNA (1)...(19): siRNA sense strand
caaccugcagucauucuuc

SEQ ID NO: 2204437 - RNA, 19 nt, Homo sapiens
  misc_RNA (1)...(19): siRNA sense strand
caauccaucucagcucauc

SEQ ID NO: 2204438 - RNA, 19 nt, Homo sapiens
  misc_RNA (1)...(19): siRNA sense strand
ccuacagcucuuccaaaua

SEQ ID NO: 2204439 - RNA, 19 nt, Homo sapiens
  misc_RNA (1)...(19): siRNA sense strand
ccacaacuaaauaucaaag

SEQ ID NO: 2204440 - RNA, 19 nt, Homo sapiens
  misc_RNA (1)...(19): siRNA sense strand
ggacaucaucucgcaaugc

SEQ ID NO: 2204441 - RNA, 19 nt, Homo sapiens
  misc_RNA (1)...(19): siRNA sense strand
gcuuugaacaggaacuuuc

SEQ ID NO: 2204442 - RNA, 19 nt, Homo sapiens
  misc_RNA (1)...(19): siRNA sense strand
aaauaugccacugaccuuu

SEQ ID NO: 2204443 - RNA, 19 nt, Homo sapiens
  misc_RNA (1)...(19): siRNA sense strand
gcaaccugcagucauucuu

SEQ ID NO: 2204444 - RNA, 19 nt, Homo sapiens
  misc_RNA (1)...(19): siRNA sense strand
gagcuucaucuguguuugg

SEQ ID NO: 2204445 - RNA, 19 nt, Homo sapiens
  misc_RNA (1)...(19): siRNA sense strand
agaagauggaccuagauga

SEQ ID NO: 2204446 - RNA, 19 nt, Homo sapiens
  misc_RNA (1)...(19): siRNA sense strand
ccguauauaucuaaaugcu

SEQ ID NO: 2204447 - RNA, 19 nt, Homo sapiens
  misc_RNA (1)...(19): siRNA sense strand
gacuucaggagguguuuga

SEQ ID NO: 2204448 - RNA, 19 nt, Homo sapiens
  misc_RNA (1)...(19): siRNA sense strand
aaggaacccuacagcucuu

SEQ ID NO: 2204449 - RNA, 19 nt, Homo sapiens
  misc_RNA (1)...(19): siRNA sense strand
ggucagaggugcaaaguug

SEQ ID NO: 2204450 - RNA, 19 nt, Homo sapiens
  misc_RNA (1)...(19): siRNA sense strand
gaggagcacuugacaaaga

SEQ ID NO: 2204451 - RNA, 19 nt, Homo sapiens
  misc_RNA (1)...(19): siRNA sense strand
caaacaaacucaagugcaa

SEQ ID NO: 2204452 - RNA, 19 nt, Homo sapiens
  misc_RNA (1)...(19): siRNA sense strand
ccaccuaccuugaguaaug

SEQ ID NO: 2204453 - RNA, 19 nt, Homo sapiens
  misc_RNA (1)...(19): siRNA sense strand
acacuaugaugcuguauuu

SEQ ID NO: 2204454 - RNA, 19 nt, Homo sapiens
  misc_RNA (1)...(19): siRNA sense strand
caacagaugcucaacaaau

SEQ ID NO: 2204455 - RNA, 19 nt, Homo sapiens
  misc_RNA (1)...(19): siRNA sense strand
acgagaagcuggcccuaua

SEQ ID NO: 2204456 - RNA, 19 nt, Homo sapiens
  misc_RNA (1)...(19): siRNA sense strand
ggaugggcccuaagugaua

SEQ ID NO: 2204457 - RNA, 19 nt, Homo sapiens
  misc_RNA (1)...(19): siRNA sense strand
aaacucaagugcaaaggaa

SEQ ID NO: 2204458 - RNA, 19 nt, Homo sapiens
  misc_RNA (1)...(19): siRNA sense strand
gaaacgcgacgaagaacuu

SEQ ID NO: 2204459 - RNA, 19 nt, Homo sapiens
  misc_RNA (1)...(19): siRNA sense strand
gggcagaugcugaauguga

SEQ ID NO: 2204460 - RNA, 19 nt, Homo sapiens
  misc_RNA (1)...(19): siRNA sense strand
gacaacuggugcaaacaaa

SEQ ID NO: 2204461 - RNA, 19 nt, Homo sapiens
  misc_RNA (1)...(19): siRNA sense strand
acgaagaacuugccaaauc

SEQ ID NO: 2204462 - RNA, 19 nt, Homo sapiens
  misc_RNA (1)...(19): siRNA sense strand
caguuaggcuggagaaaug

SEQ ID NO: 2204463 - RNA, 19 nt, Homo sapiens
  misc_RNA (1)...(19): siRNA sense strand
cgaagaacuugccaaaucu

SEQ ID NO: 2204464 - RNA, 19 nt, Homo sapiens
  misc_RNA (1)...(19): siRNA sense strand
ccuaagugauacugcauuu

SEQ ID NO: 2204465 - RNA, 19 nt, Homo sapiens
  misc_RNA (1)...(19): siRNA sense strand
gaacuugccaaaucuaugg

SEQ ID NO: 2204466 - RNA, 19 nt, Homo sapiens
  misc_RNA (1)...(19): siRNA sense strand
gaagaacuugccaaaucua

SEQ ID NO: 2204467 - RNA, 19 nt, Homo sapiens
  misc_RNA (1)...(19): siRNA sense strand
gaacaccagcuaaugaaag

SEQ ID NO: 2204468 - RNA, 19 nt, Homo sapiens
  misc_RNA (1)...(19): siRNA sense strand
uggagaagcaggacaagua

SEQ ID NO: 2204469 - RNA, 19 nt, Homo sapiens
  misc_RNA (1)...(19): siRNA sense strand
gcaaaggaaacgcgacgaa

SEQ ID NO: 2204470 - RNA, 19 nt, Homo sapiens
  misc_RNA (1)...(19): siRNA sense strand
ggagaaaugagacagaaca

SEQ ID NO: 2204471 - RNA, 19 nt, Homo sapiens
  misc_RNA (1)...(19): siRNA sense strand
cgacgaagaacuugccaaa

SEQ ID NO: 2204472 - RNA, 19 nt, Homo sapiens
  misc_RNA (1)...(19): siRNA sense strand
ggagaagcaggacaaguau

SEQ ID NO: 2204473 - RNA, 19 nt, Homo sapiens
  misc_RNA (1)...(19): siRNA sense strand
ucucuggacuguuucuuga

SEQ ID NO: 2204474 - RNA, 19 nt, Homo sapiens
  misc_RNA (1)...(19): siRNA sense strand
gcaguuaggcuggagaaau

SEQ ID NO: 2204475 - RNA, 19 nt, Homo sapiens
  misc_RNA (1)...(19): siRNA sense strand
ggcagaugcugaaugugaa

SEQ ID NO: 2204476 - RNA, 19 nt, Homo sapiens
  misc_RNA (1)...(19): siRNA sense strand
ugaaagaguuaagcgugaa

SEQ ID NO: 2204477 - RNA, 19 nt, Homo sapiens
  misc_RNA (1)...(19): siRNA sense strand
ccaaauggcauaggucaga

SEQ ID NO: 2204478 - RNA, 19 nt, Homo sapiens
  misc_RNA (1)...(19): siRNA sense strand
acagaacaccagcuaauga

SEQ ID NO: 2204479 - RNA, 19 nt, Homo sapiens
  misc_RNA (1)...(19): siRNA sense strand
ggccauauccuugucuaaa

SEQ ID NO: 2204480 - RNA, 19 nt, Homo sapiens
  misc_RNA (1)...(19): siRNA sense strand
ccuaguauuuggcucaguu

SEQ ID NO: 2204481 - RNA, 19 nt, Homo sapiens
  misc_RNA (1)...(19): siRNA sense strand
guaccgauuccacaucauu

SEQ ID NO: 2204482 - RNA, 19 nt, Homo sapiens
  misc_RNA (1)...(19): siRNA sense strand
uuugaucacuccuauccua

SEQ ID NO: 2204483 - RNA, 19 nt, Homo sapiens
  misc_RNA (1)...(19): siRNA sense strand
cagaacaccagcuaaugaa

SEQ ID NO: 2204484 - RNA, 19 nt, Homo sapiens
  misc_RNA (1)...(19): siRNA sense strand
uggaggagcacuugacaaa

SEQ ID NO: 2204485 - RNA, 19 nt, Homo sapiens
  misc_RNA (1)...(19): siRNA sense strand
ucccugaggccuaguauuu

SEQ ID NO: 2204486 - RNA, 19 nt, Homo sapiens
  misc_RNA (1)...(19): siRNA sense strand
uggcucaguuggcucagua

SEQ ID NO: 2204487 - RNA, 19 nt, Homo sapiens
  misc_RNA (1)...(19): siRNA sense strand
gggagcagacggugcacua

SEQ ID NO: 2204488 - RNA, 19 nt, Homo sapiens
  misc_RNA (1)...(19): siRNA sense strand
aaaggaaacgcgacgaaga

SEQ ID NO: 2204489 - RNA, 19 nt, Homo sapiens
  misc_RNA (1)...(19): siRNA sense strand
ugguaaagcugcauucaac

SEQ ID NO: 2204490 - RNA, 19 nt, Homo sapiens
  misc_RNA (1)...(19): siRNA sense strand
cgacaacuggugcaaacaa

SEQ ID NO: 2204491 - RNA, 19 nt, Homo sapiens
  misc_RNA (1)...(19): siRNA sense strand
agacagaacaccagcuaau

SEQ ID NO: 2204492 - RNA, 19 nt, Homo sapiens
  misc_RNA (1)...(19): siRNA sense strand
uaagugauacugcauuugg

SEQ ID NO: 2204493 - RNA, 19 nt, Homo sapiens
  misc_RNA (1)...(19): siRNA sense strand
aacagaugcucaacaaauc

SEQ ID NO: 2204494 - RNA, 19 nt, Homo sapiens
  misc_RNA (1)...(19): siRNA sense strand
aacaccagcuaaugaaaga

SEQ ID NO: 2204495 - RNA, 19 nt, Homo sapiens
  misc_RNA (1)...(19): siRNA sense strand
agagaacccugguaaagcu

SEQ ID NO: 2204496 - RNA, 19 nt, Homo sapiens
  misc_RNA (1)...(19): siRNA sense strand
cacggugucuaccaugauu

SEQ ID NO: 2204497 - RNA, 19 nt, Homo sapiens
  misc_RNA (1)...(19): siRNA sense strand
gcaacagaugcucaacaaa

SEQ ID NO: 2204498 - RNA, 19 nt, Homo sapiens
  misc_RNA (1)...(19): siRNA sense strand
ugagacagaacaccagcua

SEQ ID NO: 2204499 - RNA, 19 nt, Homo sapiens
  misc_RNA (1)...(19): siRNA sense strand
uguauuugaucacuccuau

SEQ ID NO: 2204500 - RNA, 19 nt, Homo sapiens
  misc_RNA (1)...(19): siRNA sense strand
acacccaucucucccuuuc

SEQ ID NO: 2204501 - RNA, 19 nt, Homo sapiens
  misc_RNA (1)...(19): siRNA sense strand
gacagaacaccagcuaaug

SEQ ID NO: 2204502 - RNA, 19 nt, Homo sapiens
  misc_RNA (1)...(19): siRNA sense strand
ucagagaacccugguaaag

SEQ ID NO: 2204503 - RNA, 19 nt, Homo sapiens
  misc_RNA (1)...(19): siRNA sense strand
cuaugaugcuguauuugau

SEQ ID NO: 2204504 - RNA, 19 nt, Homo sapiens
  misc_RNA (1)...(19): siRNA sense strand
gcucaguaacggacacuau

SEQ ID NO: 2204505 - RNA, 19 nt, Homo sapiens
  misc_RNA (1)...(19): siRNA sense strand
ccagcuaaugaaagaguua

SEQ ID NO: 2204506 - RNA, 19 nt, Homo sapiens
  misc_RNA (1)...(19): siRNA sense strand
acuaugaugcuguauuuga

SEQ ID NO: 2204507 - RNA, 19 nt, Homo sapiens
  misc_RNA (1)...(19): siRNA sense strand
cggacacuaugaugcugua

SEQ ID NO: 2204508 - RNA, 19 nt, Homo sapiens
  misc_RNA (1)...(19): siRNA sense strand
gagcagacggugcacuaca

SEQ ID NO: 2204509 - RNA, 19 nt, Homo sapiens
  misc_RNA (1)...(19): siRNA sense strand
gccauauccuugucuaaaa

SEQ ID NO: 2204510 - RNA, 19 nt, Homo sapiens
  misc_RNA (1)...(19): siRNA sense strand
aaggaaacgcgacgaagaa

SEQ ID NO: 2204511 - RNA, 19 nt, Homo sapiens
  misc_RNA (1)...(19): siRNA sense strand
caaacucaagugcaaagga

SEQ ID NO: 2204512 - RNA, 19 nt, Homo sapiens
  misc_RNA (1)...(19): siRNA sense strand
ucaguaacggacacuauga

SEQ ID NO: 2204513 - RNA, 19 nt, Homo sapiens
  misc_RNA (1)...(19): siRNA sense strand
gagacagaacaccagcuaa

SEQ ID NO: 2204514 - RNA, 19 nt, Homo sapiens
  misc_RNA (1)...(19): siRNA sense strand
gaguaauggccacaggaaa

SEQ ID NO: 2204515 - RNA, 19 nt, Homo sapiens
  misc_RNA (1)...(19): siRNA sense strand
uuucagagaacccugguaa

SEQ ID NO: 2204516 - RNA, 19 nt, Homo sapiens
  misc_RNA (1)...(19): siRNA sense strand
ccaaggaugggcccuaagu

SEQ ID NO: 2204517 - RNA, 19 nt, Homo sapiens
  misc_RNA (1)...(19): siRNA sense strand
cugagaaagcuuguuuaua

SEQ ID NO: 2204518 - RNA, 19 nt, Homo sapiens
  misc_RNA (1)...(19): siRNA sense strand
aaggaugggcccuaaguga

SEQ ID NO: 2204519 - RNA, 19 nt, Homo sapiens
  misc_RNA (1)...(19): siRNA sense strand
guacgacaacuggugcaaa

SEQ ID NO: 2204520 - RNA, 19 nt, Homo sapiens
  misc_RNA (1)...(19): siRNA sense strand
gacacuaugaugcuguauu

SEQ ID NO: 2204521 - RNA, 19 nt, Homo sapiens
  misc_RNA (1)...(19): siRNA sense strand
guaaagcugcauucaacuc

SEQ ID NO: 2204522 - RNA, 19 nt, Homo sapiens
  misc_RNA (1)...(19): siRNA sense strand
ggccacaggaaacaagauu

SEQ ID NO: 2204523 - RNA, 19 nt, Homo sapiens
  misc_RNA (1)...(19): siRNA sense strand
cuggagaaaugagacagaa

SEQ ID NO: 2204524 - RNA, 19 nt, Homo sapiens
  misc_RNA (1)...(19): siRNA sense strand
aaacaaacucaagugcaaa

SEQ ID NO: 2204525 - RNA, 19 nt, Homo sapiens
  misc_RNA (1)...(19): siRNA sense strand
guaauggccacaggaaaca

SEQ ID NO: 2204526 - RNA, 19 nt, Homo sapiens
  misc_RNA (1)...(19): siRNA sense strand
gaugcugaaugugaauauc

SEQ ID NO: 2204527 - RNA, 19 nt, Homo sapiens
  misc_RNA (1)...(19): siRNA sense strand
cuacaucgccgaccaucuc

SEQ ID NO: 2204528 - RNA, 19 nt, Homo sapiens
  misc_RNA (1)...(19): siRNA sense strand
gaugggcccuaagugauac

SEQ ID NO: 2204529 - RNA, 19 nt, Homo sapiens
  misc_RNA (1)...(19): siRNA sense strand
acccaucucucccuuucuu

SEQ ID NO: 2204530 - RNA, 19 nt, Homo sapiens
  misc_RNA (1)...(19): siRNA sense strand
ccugaggccuaguauuugg

SEQ ID NO: 2204531 - RNA, 19 nt, Homo sapiens
  misc_RNA (1)...(19): siRNA sense strand
ccgaccaucucgaccacuu

SEQ ID NO: 2204532 - RNA, 19 nt, Homo sapiens
  misc_RNA (1)...(19): siRNA sense strand
gaaagaguuaagcgugaag

SEQ ID NO: 2204533 - RNA, 19 nt, Homo sapiens
  misc_RNA (1)...(19): siRNA sense strand
gugcaaacaaacucaagug

SEQ ID NO: 2204534 - RNA, 19 nt, Homo sapiens
  misc_RNA (1)...(19): siRNA sense strand
caacuggugcaaacaaacu

SEQ ID NO: 2204535 - RNA, 19 nt, Homo sapiens
  misc_RNA (1)...(19): siRNA sense strand
uaacggacacuaugaugcu

SEQ ID NO: 2204536 - RNA, 19 nt, Homo sapiens
  misc_RNA (1)...(19): siRNA sense strand
ucagcaagacgguguaugg

SEQ ID NO: 2204537 - RNA, 19 nt, Homo sapiens
  misc_RNA (1)...(19): siRNA sense strand
ugaguaauggccacaggaa

SEQ ID NO: 2204538 - RNA, 19 nt, Homo sapiens
  misc_RNA (1)...(19): siRNA sense strand
ucugagaaagcuuguuuau

SEQ ID NO: 2204539 - RNA, 19 nt, Homo sapiens
  misc_RNA (1)...(19): siRNA sense strand
aaguaccgauuccacauca

SEQ ID NO: 2204540 - RNA, 19 nt, Homo sapiens
  misc_RNA (1)...(19): siRNA sense strand
gcagaugcugaaugugaau

SEQ ID NO: 2204541 - RNA, 19 nt, Homo sapiens
  misc_RNA (1)...(19): siRNA sense strand
uggccgagguggagaagca

SEQ ID NO: 2204542 - RNA, 19 nt, Homo sapiens
  misc_RNA (1)...(19): siRNA sense strand
gaacaaaaugcaugcucuu

SEQ ID NO: 2204543 - RNA, 19 nt, Homo sapiens
  misc_RNA (1)...(19): siRNA sense strand
uacgacaacuggugcaaac

SEQ ID NO: 2204544 - RNA, 19 nt, Homo sapiens
  misc_RNA (1)...(19): siRNA sense strand
agaggaauaaguaccgauu

SEQ ID NO: 2204545 - RNA, 19 nt, Homo sapiens
  misc_RNA (1)...(19): siRNA sense strand
gaccaucucgaccacuuca

SEQ ID NO: 2204546 - RNA, 19 nt, Homo sapiens
  misc_RNA (1)...(19): siRNA sense strand
gaucacuccuauccuaacc

SEQ ID NO: 2204547 - RNA, 19 nt, Homo sapiens
  misc_RNA (1)...(19): siRNA sense strand
gagagucccacggugucua

SEQ ID NO: 2204548 - RNA, 19 nt, Homo sapiens
  misc_RNA (1)...(19): siRNA sense strand
uaaagcugcauucaacucu

SEQ ID NO: 2204549 - RNA, 19 nt, Homo sapiens
  misc_RNA (1)...(19): siRNA sense strand
ccagagaacucauauaaga

SEQ ID NO: 2204550 - RNA, 19 nt, Homo sapiens
  misc_RNA (1)...(19): siRNA sense strand
ggagagaccuuauggaugu

SEQ ID NO: 2204551 - RNA, 19 nt, Homo sapiens
  misc_RNA (1)...(19): siRNA sense strand
gagaaacccuauaaaugua

SEQ ID NO: 2204552 - RNA, 19 nt, Homo sapiens
  misc_RNA (1)...(19): siRNA sense strand
gcaaacacauccaagagaa

SEQ ID NO: 2204553 - RNA, 19 nt, Homo sapiens
  misc_RNA (1)...(19): siRNA sense strand
ugagaaaccuuaugaaugu

SEQ ID NO: 2204554 - RNA, 19 nt, Homo sapiens
  misc_RNA (1)...(19): siRNA sense strand
ggagaaacccuauaaaugu

SEQ ID NO: 2204555 - RNA, 19 nt, Homo sapiens
  misc_RNA (1)...(19): siRNA sense strand
gggaaaaccuucucauuua

SEQ ID NO: 2204556 - RNA, 19 nt, Homo sapiens
  misc_RNA (1)...(19): siRNA sense strand
ggagaaacccuaugaaugu

SEQ ID NO: 2204557 - RNA, 19 nt, Homo sapiens
  misc_RNA (1)...(19): siRNA sense strand
ggagaaaccauaugaaugu

SEQ ID NO: 2204558 - RNA, 19 nt, Homo sapiens
  misc_RNA (1)...(19): siRNA sense strand
gagaaacccuaugaaugua

SEQ ID NO: 2204559 - RNA, 19 nt, Homo sapiens
  misc_RNA (1)...(19): siRNA sense strand
agaggaaccuucugaauau

SEQ ID NO: 2204560 - RNA, 19 nt, Homo sapiens
  misc_RNA (1)...(19): siRNA sense strand
cagagaacccacucaauua

SEQ ID NO: 2204561 - RNA, 19 nt, Homo sapiens
  misc_RNA (1)...(19): siRNA sense strand
cagaaaaccugcaaauaua

SEQ ID NO: 2204562 - RNA, 19 nt, Homo sapiens
  misc_RNA (1)...(19): siRNA sense strand
gaagucagcccacacaaga

SEQ ID NO: 2204563 - RNA, 19 nt, Homo sapiens
  misc_RNA (1)...(19): siRNA sense strand
aaucagaccucauuaaaca

SEQ ID NO: 2204564 - RNA, 19 nt, Homo sapiens
  misc_RNA (1)...(19): siRNA sense strand
gaagucaacccuuacuaaa

SEQ ID NO: 2204565 - RNA, 19 nt, Homo sapiens
  misc_RNA (1)...(19): siRNA sense strand
gaauucagaccucauuaaa

SEQ ID NO: 2204566 - RNA, 19 nt, Homo sapiens
  misc_RNA (1)...(19): siRNA sense strand
uaacaaagguggaaaaugu

SEQ ID NO: 2204567 - RNA, 19 nt, Homo sapiens
  misc_RNA (1)...(19): siRNA sense strand
gaacucauauaagacagaa

SEQ ID NO: 2204568 - RNA, 19 nt, Homo sapiens
  misc_RNA (1)...(19): siRNA sense strand
gggagaaacccuauaaaug

SEQ ID NO: 2204569 - RNA, 19 nt, Homo sapiens
  misc_RNA (1)...(19): siRNA sense strand
gagaacacauacaggagaa

SEQ ID NO: 2204570 - RNA, 19 nt, Homo sapiens
  misc_RNA (1)...(19): siRNA sense strand
ggaaaaccuucucauuuaa

SEQ ID NO: 2204571 - RNA, 19 nt, Homo sapiens
  misc_RNA (1)...(19): siRNA sense strand
ggagaaaccuuuuggaugu

SEQ ID NO: 2204572 - RNA, 19 nt, Homo sapiens
  misc_RNA (1)...(19): siRNA sense strand
ucugagaagucaacccuua

SEQ ID NO: 2204573 - RNA, 19 nt, Homo sapiens
  misc_RNA (1)...(19): siRNA sense strand
gggagaagcccuaugaaug

SEQ ID NO: 2204574 - RNA, 19 nt, Homo sapiens
  misc_RNA (1)...(19): siRNA sense strand
caccagagaacucauauaa

SEQ ID NO: 2204575 - RNA, 19 nt, Homo sapiens
  misc_RNA (1)...(19): siRNA sense strand
gguaaugaauguggagaaa

SEQ ID NO: 2204576 - RNA, 19 nt, Homo sapiens
  misc_RNA (1)...(19): siRNA sense strand
gaggaaccuucugaauaua

SEQ ID NO: 2204577 - RNA, 19 nt, Homo sapiens
  misc_RNA (1)...(19): siRNA sense strand
ucagagaacccacucaauu

SEQ ID NO: 2204578 - RNA, 19 nt, Homo sapiens
  misc_RNA (1)...(19): siRNA sense strand
aagaggaaccuucugaaua

SEQ ID NO: 2204579 - RNA, 19 nt, Homo sapiens
  misc_RNA (1)...(19): siRNA sense strand
ucaaugaguuuaacaaagg

SEQ ID NO: 2204580 - RNA, 19 nt, Homo sapiens
  misc_RNA (1)...(19): siRNA sense strand
ggaacaaucuuuugaauac

SEQ ID NO: 2204581 - RNA, 19 nt, Homo sapiens
  misc_RNA (1)...(19): siRNA sense strand
gaaacccuaugaauguaau

SEQ ID NO: 2204582 - RNA, 19 nt, Homo sapiens
  misc_RNA (1)...(19): siRNA sense strand
gagaaaccuuaugaaugua

SEQ ID NO: 2204583 - RNA, 19 nt, Homo sapiens
  misc_RNA (1)...(19): siRNA sense strand
gggagaaacccuaugaaug

SEQ ID NO: 2204584 - RNA, 19 nt, Homo sapiens
  misc_RNA (1)...(19): siRNA sense strand
gaacaucugagaagacaca

SEQ ID NO: 2204585 - RNA, 19 nt, Homo sapiens
  misc_RNA (1)...(19): siRNA sense strand
ggaaccuucugaauauaau

SEQ ID NO: 2204586 - RNA, 19 nt, Homo sapiens
  misc_RNA (1)...(19): siRNA sense strand
gaaacccuauggauguaau

SEQ ID NO: 2204587 - RNA, 19 nt, Homo sapiens
  misc_RNA (1)...(19): siRNA sense strand
cagaaacccuauggaugua

SEQ ID NO: 2204588 - RNA, 19 nt, Homo sapiens
  misc_RNA (1)...(19): siRNA sense strand
gaaaaccugugauauguca

SEQ ID NO: 2204589 - RNA, 19 nt, Homo sapiens
  misc_RNA (1)...(19): siRNA sense strand
ccacuaugguaaugaaugu

SEQ ID NO: 2204590 - RNA, 19 nt, Homo sapiens
  misc_RNA (1)...(19): siRNA sense strand
gaagcccuaugaaugcuau

SEQ ID NO: 2204591 - RNA, 19 nt, Homo sapiens
  misc_RNA (1)...(19): siRNA sense strand
ggaaaaucauucuguguga

SEQ ID NO: 2204592 - RNA, 19 nt, Homo sapiens
  misc_RNA (1)...(19): siRNA sense strand
gaaaaucagaccucauuaa

SEQ ID NO: 2204593 - RNA, 19 nt, Homo sapiens
  misc_RNA (1)...(19): siRNA sense strand
agaauucacucuuccuugu

SEQ ID NO: 2204594 - RNA, 19 nt, Homo sapiens
  misc_RNA (1)...(19): siRNA sense strand
gugagaaaccuuaugaaug

SEQ ID NO: 2204595 - RNA, 19 nt, Homo sapiens
  misc_RNA (1)...(19): siRNA sense strand
ggagaagcccuaugaaugc

SEQ ID NO: 2204596 - RNA, 19 nt, Homo sapiens
  misc_RNA (1)...(19): siRNA sense strand
auucagaccucauuaaaca

SEQ ID NO: 2204597 - RNA, 19 nt, Homo sapiens
  misc_RNA (1)...(19): siRNA sense strand
gaauucacucuuccuugua

SEQ ID NO: 2204598 - RNA, 19 nt, Homo sapiens
  misc_RNA (1)...(19): siRNA sense strand
caacagagaacacauacag

SEQ ID NO: 2204599 - RNA, 19 nt, Homo sapiens
  misc_RNA (1)...(19): siRNA sense strand
gggagaaaccauaugaaug

SEQ ID NO: 2204600 - RNA, 19 nt, Homo sapiens
  misc_RNA (1)...(19): siRNA sense strand
gaaguucaaugaguuuaac

SEQ ID NO: 2204601 - RNA, 19 nt, Homo sapiens
  misc_RNA (1)...(19): siRNA sense strand
cuaaacaucuaagaacuca

SEQ ID NO: 2204602 - RNA, 19 nt, Homo sapiens
  misc_RNA (1)...(19): siRNA sense strand
agucaacccuuacuaaaca

SEQ ID NO: 2204603 - RNA, 19 nt, Homo sapiens
  misc_RNA (1)...(19): siRNA sense strand
ggugagaaaccuuaugaau

SEQ ID NO: 2204604 - RNA, 19 nt, Homo sapiens
  misc_RNA (1)...(19): siRNA sense strand
agagaacccacucaauuaa

SEQ ID NO: 2204605 - RNA, 19 nt, Homo sapiens
  misc_RNA (1)...(19): siRNA sense strand
gaauguaauguuuguggaa

SEQ ID NO: 2204606 - RNA, 19 nt, Homo sapiens
  misc_RNA (1)...(19): siRNA sense strand
acagaaacccuauggaugu

SEQ ID NO: 2204607 - RNA, 19 nt, Homo sapiens
  misc_RNA (1)...(19): siRNA sense strand
cuacuccgguuucacagaa

SEQ ID NO: 2204608 - RNA, 19 nt, Homo sapiens
  misc_RNA (1)...(19): siRNA sense strand
gggaaaaccugugauaugu

SEQ ID NO: 2204609 - RNA, 19 nt, Homo sapiens
  misc_RNA (1)...(19): siRNA sense strand
agaagucaacccuuacuaa

SEQ ID NO: 2204610 - RNA, 19 nt, Homo sapiens
  misc_RNA (1)...(19): siRNA sense strand
uuacaacagagaacacaua

SEQ ID NO: 2204611 - RNA, 19 nt, Homo sapiens
  misc_RNA (1)...(19): siRNA sense strand
uuaaaucucacuccaauuc

SEQ ID NO: 2204612 - RNA, 19 nt, Homo sapiens
  misc_RNA (1)...(19): siRNA sense strand
gaauauaaugaguguggaa

SEQ ID NO: 2204613 - RNA, 19 nt, Homo sapiens
  misc_RNA (1)...(19): siRNA sense strand
gaccucauuuggcaucaga

SEQ ID NO: 2204614 - RNA, 19 nt, Homo sapiens
  misc_RNA (1)...(19): siRNA sense strand
uaagaauucagaccucauu

SEQ ID NO: 2204615 - RNA, 19 nt, Homo sapiens
  misc_RNA (1)...(19): siRNA sense strand
uuauggaugucaugaaugu

SEQ ID NO: 2204616 - RNA, 19 nt, Homo sapiens
  misc_RNA (1)...(19): siRNA sense strand
gagaagucaacccuuacua

SEQ ID NO: 2204617 - RNA, 19 nt, Homo sapiens
  misc_RNA (1)...(19): siRNA sense strand
aaacucauugcacaucaua

SEQ ID NO: 2204618 - RNA, 19 nt, Homo sapiens
  misc_RNA (1)...(19): siRNA sense strand
gaaacccuauaaauguagu

SEQ ID NO: 2204619 - RNA, 19 nt, Homo sapiens
  misc_RNA (1)...(19): siRNA sense strand
ucagaguguuuacccauuc

SEQ ID NO: 2204620 - RNA, 19 nt, Homo sapiens
  misc_RNA (1)...(19): siRNA sense strand
guaguaaacgagggaaauu

SEQ ID NO: 2204621 - RNA, 19 nt, Homo sapiens
  misc_RNA (1)...(19): siRNA sense strand
cccuaugaauguaauguuu

SEQ ID NO: 2204622 - RNA, 19 nt, Homo sapiens
  misc_RNA (1)...(19): siRNA sense strand
uaaugaaugugggaaguca

SEQ ID NO: 2204623 - RNA, 19 nt, Homo sapiens
  misc_RNA (1)...(19): siRNA sense strand
uuucaucacucaucagcaa

SEQ ID NO: 2204624 - RNA, 19 nt, Homo sapiens
  misc_RNA (1)...(19): siRNA sense strand
cuauggauguaaucaaugu

SEQ ID NO: 2204625 - RNA, 19 nt, Homo sapiens
  misc_RNA (1)...(19): siRNA sense strand
agucaacccuuacucaaca

SEQ ID NO: 2204626 - RNA, 19 nt, Homo sapiens
  misc_RNA (1)...(19): siRNA sense strand
ccuuauggaugucaugaau

SEQ ID NO: 2204627 - RNA, 19 nt, Homo sapiens
  misc_RNA (1)...(19): siRNA sense strand
gggaaaacccuaugaaugu

SEQ ID NO: 2204628 - RNA, 19 nt, Homo sapiens
  misc_RNA (1)...(19): siRNA sense strand
ccauucagccagaaguuaa

SEQ ID NO: 2204629 - RNA, 19 nt, Homo sapiens
  misc_RNA (1)...(19): siRNA sense strand
caaacacauccaagagaaa

SEQ ID NO: 2204630 - RNA, 19 nt, Homo sapiens
  misc_RNA (1)...(19): siRNA sense strand
agccagaaguuaaaucuca

SEQ ID NO: 2204631 - RNA, 19 nt, Homo sapiens
  misc_RNA (1)...(19): siRNA sense strand
ccuaauuguucaccagaga

SEQ ID NO: 2204632 - RNA, 19 nt, Homo sapiens
  misc_RNA (1)...(19): siRNA sense strand
agaacccacucaauuaaca

SEQ ID NO: 2204633 - RNA, 19 nt, Homo sapiens
  misc_RNA (1)...(19): siRNA sense strand
gaacccacucaauuaacaa

SEQ ID NO: 2204634 - RNA, 19 nt, Homo sapiens
  misc_RNA (1)...(19): siRNA sense strand
gcacaucauagaacacaca

SEQ ID NO: 2204635 - RNA, 19 nt, Homo sapiens
  misc_RNA (1)...(19): siRNA sense strand
gaaaaucauucugugugaa

SEQ ID NO: 2204636 - RNA, 19 nt, Homo sapiens
  misc_RNA (1)...(19): siRNA sense strand
gagaaaccauaugaauguc

SEQ ID NO: 2204637 - RNA, 19 nt, Homo sapiens
  misc_RNA (1)...(19): siRNA sense strand
caucaaagaauucauacag

SEQ ID NO: 2204638 - RNA, 19 nt, Homo sapiens
  misc_RNA (1)...(19): siRNA sense strand
agaauucagaccucauuaa

SEQ ID NO: 2204639 - RNA, 19 nt, Homo sapiens
  misc_RNA (1)...(19): siRNA sense strand
ccacacaagacaucagaga

SEQ ID NO: 2204640 - RNA, 19 nt, Homo sapiens
  misc_RNA (1)...(19): siRNA sense strand
cccacucaauuaacaauau

SEQ ID NO: 2204641 - RNA, 19 nt, Homo sapiens
  misc_RNA (1)...(19): siRNA sense strand
uaguaaacgagggaaauua

SEQ ID NO: 2204642 - RNA, 19 nt, Homo sapiens
  misc_RNA (1)...(19): siRNA sense strand
aguuaaaucucacuccaau

SEQ ID NO: 2204643 - RNA, 19 nt, Homo sapiens
  misc_RNA (1)...(19): siRNA sense strand
aaacuaacuguacaucaga

SEQ ID NO: 2204644 - RNA, 19 nt, Homo sapiens
  misc_RNA (1)...(19): siRNA sense strand
agacagaaacccuauggau

SEQ ID NO: 2204645 - RNA, 19 nt, Homo sapiens
  misc_RNA (1)...(19): siRNA sense strand
cacaagacaucagagaaca

SEQ ID NO: 2204646 - RNA, 19 nt, Homo sapiens
  misc_RNA (1)...(19): siRNA sense strand
guacauaagagagguuaca

SEQ ID NO: 2204647 - RNA, 19 nt, Homo sapiens
  misc_RNA (1)...(19): siRNA sense strand
uaacuguacaucagagaau

SEQ ID NO: 2204648 - RNA, 19 nt, Homo sapiens
  misc_RNA (1)...(19): siRNA sense strand
cugcaaauauacugaacau

SEQ ID NO: 2204649 - RNA, 19 nt, Homo sapiens
  misc_RNA (1)...(19): siRNA sense strand
gcacuagcaugaauggaua

SEQ ID NO: 2204650 - RNA, 19 nt, Homo sapiens
  misc_RNA (1)...(19): siRNA sense strand
ugaagucgguggcauauuu

SEQ ID NO: 2204651 - RNA, 19 nt, Homo sapiens
  misc_RNA (1)...(19): siRNA sense strand
aaucagaacuguuugaaga

SEQ ID NO: 2204652 - RNA, 19 nt, Homo sapiens
  misc_RNA (1)...(19): siRNA sense strand
ccaaggagguguuacugaa

SEQ ID NO: 2204653 - RNA, 19 nt, Homo sapiens
  misc_RNA (1)...(19): siRNA sense strand
gcaggcaacccucgagaua

SEQ ID NO: 2204654 - RNA, 19 nt, Homo sapiens
  misc_RNA (1)...(19): siRNA sense strand
aaccauagauuacggcuuu

SEQ ID NO: 2204655 - RNA, 19 nt, Homo sapiens
  misc_RNA (1)...(19): siRNA sense strand
ucacuuugaugaacuaaug

SEQ ID NO: 2204656 - RNA, 19 nt, Homo sapiens
  misc_RNA (1)...(19): siRNA sense strand
gaaacgaaacgcccucaga

SEQ ID NO: 2204657 - RNA, 19 nt, Homo sapiens
  misc_RNA (1)...(19): siRNA sense strand
gcacaacaauuccaaacac

SEQ ID NO: 2204658 - RNA, 19 nt, Homo sapiens
  misc_RNA (1)...(19): siRNA sense strand
acaacggcauccacuauaa

SEQ ID NO: 2204659 - RNA, 19 nt, Homo sapiens
  misc_RNA (1)...(19): siRNA sense strand
caacaacggcauccacuau

SEQ ID NO: 2204660 - RNA, 19 nt, Homo sapiens
  misc_RNA (1)...(19): siRNA sense strand
caacgggaauggacugcaa

SEQ ID NO: 2204661 - RNA, 19 nt, Homo sapiens
  misc_RNA (1)...(19): siRNA sense strand
gaagugacccucuccuaca

SEQ ID NO: 2204662 - RNA, 19 nt, Homo sapiens
  misc_RNA (1)...(19): siRNA sense strand
gaagacaaacuggcccuuu

SEQ ID NO: 2204663 - RNA, 19 nt, Homo sapiens
  misc_RNA (1)...(19): siRNA sense strand
aaaaggaacuggaaagcua

SEQ ID NO: 2204664 - RNA, 19 nt, Homo sapiens
  misc_RNA (1)...(19): siRNA sense strand
gaaaaguuguggcaauaga

SEQ ID NO: 2204665 - RNA, 19 nt, Homo sapiens
  misc_RNA (1)...(19): siRNA sense strand
agaaagagccaaacaacga

SEQ ID NO: 2204666 - RNA, 19 nt, Homo sapiens
  misc_RNA (1)...(19): siRNA sense strand
gcauauuucacuuugauga

SEQ ID NO: 2204667 - RNA, 19 nt, Homo sapiens
  misc_RNA (1)...(19): siRNA sense strand
ccaaacaggccaucgucua

SEQ ID NO: 2204668 - RNA, 19 nt, Homo sapiens
  misc_RNA (1)...(19): siRNA sense strand
gguggcauauuucacuuug

SEQ ID NO: 2204669 - RNA, 19 nt, Homo sapiens
  misc_RNA (1)...(19): siRNA sense strand
gcaguccaauuacaacaca

SEQ ID NO: 2204670 - RNA, 19 nt, Homo sapiens
  misc_RNA (1)...(19): siRNA sense strand
guacagcaacggagucaga

SEQ ID NO: 2204671 - RNA, 19 nt, Homo sapiens
  misc_RNA (1)...(19): siRNA sense strand
uagcaugaauggauaugga

SEQ ID NO: 2204672 - RNA, 19 nt, Homo sapiens
  misc_RNA (1)...(19): siRNA sense strand
gagauuccagguuguugua

SEQ ID NO: 2204673 - RNA, 19 nt, Homo sapiens
  misc_RNA (1)...(19): siRNA sense strand
uagauucaaugaccaaaca

SEQ ID NO: 2204674 - RNA, 19 nt, Homo sapiens
  misc_RNA (1)...(19): siRNA sense strand
ggaccugguggaagccuua

SEQ ID NO: 2204675 - RNA, 19 nt, Homo sapiens
  misc_RNA (1)...(19): siRNA sense strand
caacggcauccacuauaaa

SEQ ID NO: 2204676 - RNA, 19 nt, Homo sapiens
  misc_RNA (1)...(19): siRNA sense strand
gcagaaagugaucccaaga

SEQ ID NO: 2204677 - RNA, 19 nt, Homo sapiens
  misc_RNA (1)...(19): siRNA sense strand
gcaacggagucagaacaga

SEQ ID NO: 2204678 - RNA, 19 nt, Homo sapiens
  misc_RNA (1)...(19): siRNA sense strand
gagcaagaucuguauguuc

SEQ ID NO: 2204679 - RNA, 19 nt, Homo sapiens
  misc_RNA (1)...(19): siRNA sense strand
cuacaccgcccuuaaugaa

SEQ ID NO: 2204680 - RNA, 19 nt, Homo sapiens
  misc_RNA (1)...(19): siRNA sense strand
gcaaucagaacuguuugaa

SEQ ID NO: 2204681 - RNA, 19 nt, Homo sapiens
  misc_RNA (1)...(19): siRNA sense strand
agaaagugaucccaagaca

SEQ ID NO: 2204682 - RNA, 19 nt, Homo sapiens
  misc_RNA (1)...(19): siRNA sense strand
caagugcaaucagaacugu

SEQ ID NO: 2204683 - RNA, 19 nt, Homo sapiens
  misc_RNA (1)...(19): siRNA sense strand
gaacuggaaagcuaugucu

SEQ ID NO: 2204684 - RNA, 19 nt, Homo sapiens
  misc_RNA (1)...(19): siRNA sense strand
gacaagaacccggagaugu

SEQ ID NO: 2204685 - RNA, 19 nt, Homo sapiens
  misc_RNA (1)...(19): siRNA sense strand
gcugggugcugaggacgua

SEQ ID NO: 2204686 - RNA, 19 nt, Homo sapiens
  misc_RNA (1)...(19): siRNA sense strand
gcagccagcuagccgucaa

SEQ ID NO: 2204687 - RNA, 19 nt, Homo sapiens
  misc_RNA (1)...(19): siRNA sense strand
aaagugaucccaagacauc

SEQ ID NO: 2204688 - RNA, 19 nt, Homo sapiens
  misc_RNA (1)...(19): siRNA sense strand
caucauaauuggcgacaac

SEQ ID NO: 2204689 - RNA, 19 nt, Homo sapiens
  misc_RNA (1)...(19): siRNA sense strand
ggacaagaacccggagaug

SEQ ID NO: 2204690 - RNA, 19 nt, Homo sapiens
  misc_RNA (1)...(19): siRNA sense strand
ggcagccgguggagauuga

SEQ ID NO: 2204691 - RNA, 19 nt, Homo sapiens
  misc_RNA (1)...(19): siRNA sense strand
aggcaacccucgagauaug

SEQ ID NO: 2204692 - RNA, 19 nt, Homo sapiens
  misc_RNA (1)...(19): siRNA sense strand
ucagaacuguuugaagaau

SEQ ID NO: 2204693 - RNA, 19 nt, Homo sapiens
  misc_RNA (1)...(19): siRNA sense strand
caagaaaaguuguggcaau

SEQ ID NO: 2204694 - RNA, 19 nt, Homo sapiens
  misc_RNA (1)...(19): siRNA sense strand
agaaagagaaagagccaaa

SEQ ID NO: 2204695 - RNA, 19 nt, Homo sapiens
  misc_RNA (1)...(19): siRNA sense strand
ucgccuggauuucuuaaug

SEQ ID NO: 2204696 - RNA, 19 nt, Homo sapiens
  misc_RNA (1)...(19): siRNA sense strand
uuaaugaaccaaccauaga

SEQ ID NO: 2204697 - RNA, 19 nt, Homo sapiens
  misc_RNA (1)...(19): siRNA sense strand
ggccaucagucccagugaa

SEQ ID NO: 2204698 - RNA, 19 nt, Homo sapiens
  misc_RNA (1)...(19): siRNA sense strand
cagaacuguuugaagaaug

SEQ ID NO: 2204699 - RNA, 19 nt, Homo sapiens
  misc_RNA (1)...(19): siRNA sense strand
uggcauauuucacuuugau

SEQ ID NO: 2204700 - RNA, 19 nt, Homo sapiens
  misc_RNA (1)...(19): siRNA sense strand
ugucaucuccgcagugaaa

SEQ ID NO: 2204701 - RNA, 19 nt, Homo sapiens
  misc_RNA (1)...(19): siRNA sense strand
uaacucucccuacggcaua

SEQ ID NO: 2204702 - RNA, 19 nt, Homo sapiens
  misc_RNA (1)...(19): siRNA sense strand
cucagacccuguaaucauu

SEQ ID NO: 2204703 - RNA, 19 nt, Homo sapiens
  misc_RNA (1)...(19): siRNA sense strand
cggaaugccucacaacaac

SEQ ID NO: 2204704 - RNA, 19 nt, Homo sapiens
  misc_RNA (1)...(19): siRNA sense strand
gaaagugaucccaagacau

SEQ ID NO: 2204705 - RNA, 19 nt, Homo sapiens
  misc_RNA (1)...(19): siRNA sense strand
agagcaagaucuguauguu

SEQ ID NO: 2204706 - RNA, 19 nt, Homo sapiens
  misc_RNA (1)...(19): siRNA sense strand
acagucagcacuagcauga

SEQ ID NO: 2204707 - RNA, 19 nt, Homo sapiens
  misc_RNA (1)...(19): siRNA sense strand
cauaauuggcgacaacuuc

SEQ ID NO: 2204708 - RNA, 19 nt, Homo sapiens
  misc_RNA (1)...(19): siRNA sense strand
acaagaacccggagaugug

SEQ ID NO: 2204709 - RNA, 19 nt, Homo sapiens
  misc_RNA (1)...(19): siRNA sense strand
ccggugcugugacaagaaa

SEQ ID NO: 2204710 - RNA, 19 nt, Homo sapiens
  misc_RNA (1)...(19): siRNA sense strand
ccgaaagguuacccaagga

SEQ ID NO: 2204711 - RNA, 19 nt, Homo sapiens
  misc_RNA (1)...(19): siRNA sense strand
cuacaaauccaagcaguuc

SEQ ID NO: 2204712 - RNA, 19 nt, Homo sapiens
  misc_RNA (1)...(19): siRNA sense strand
aagaaaaguuguggcaaua

SEQ ID NO: 2204713 - RNA, 19 nt, Homo sapiens
  misc_RNA (1)...(19): siRNA sense strand
gaagucgguggcauauuuc

SEQ ID NO: 2204714 - RNA, 19 nt, Homo sapiens
  misc_RNA (1)...(19): siRNA sense strand
agucagcacuagcaugaau

SEQ ID NO: 2204715 - RNA, 19 nt, Homo sapiens
  misc_RNA (1)...(19): siRNA sense strand
caaacaggccaucgucuac

SEQ ID NO: 2204716 - RNA, 19 nt, Homo sapiens
  misc_RNA (1)...(19): siRNA sense strand
ggagauuccagguuguugu

SEQ ID NO: 2204717 - RNA, 19 nt, Homo sapiens
  misc_RNA (1)...(19): siRNA sense strand
aaaguuguggcaauagaaa

SEQ ID NO: 2204718 - RNA, 19 nt, Homo sapiens
  misc_RNA (1)...(19): siRNA sense strand
gauuccagguuguuguauc

SEQ ID NO: 2204719 - RNA, 19 nt, Homo sapiens
  misc_RNA (1)...(19): siRNA sense strand
cacccucccuucaaacugu

SEQ ID NO: 2204720 - RNA, 19 nt, Homo sapiens
  misc_RNA (1)...(19): siRNA sense strand
ccucagacccuguaaucau

SEQ ID NO: 2204721 - RNA, 19 nt, Homo sapiens
  misc_RNA (1)...(19): siRNA sense strand
aaugucaucuccgcaguga

SEQ ID NO: 2204722 - RNA, 19 nt, Homo sapiens
  misc_RNA (1)...(19): siRNA sense strand
gggugaucccgaaagguua

SEQ ID NO: 2204723 - RNA, 19 nt, Homo sapiens
  misc_RNA (1)...(19): siRNA sense strand
ccaacaacggcauccacua

SEQ ID NO: 2204724 - RNA, 19 nt, Homo sapiens
  misc_RNA (1)...(19): siRNA sense strand
gugacccucuccuacaaau

SEQ ID NO: 2204725 - RNA, 19 nt, Homo sapiens
  misc_RNA (1)...(19): siRNA sense strand
guguggagcgagcugauaa

SEQ ID NO: 2204726 - RNA, 19 nt, Homo sapiens
  misc_RNA (1)...(19): siRNA sense strand
aaagagaaagagccaaaca

SEQ ID NO: 2204727 - RNA, 19 nt, Homo sapiens
  misc_RNA (1)...(19): siRNA sense strand
gugcuggcgcucuacgaua

SEQ ID NO: 2204728 - RNA, 19 nt, Homo sapiens
  misc_RNA (1)...(19): siRNA sense strand
gugccaccgucaucauaau

SEQ ID NO: 2204729 - RNA, 19 nt, Homo sapiens
  misc_RNA (1)...(19): siRNA sense strand
uagcagcacacacggcauu

SEQ ID NO: 2204730 - RNA, 19 nt, Homo sapiens
  misc_RNA (1)...(19): siRNA sense strand
uaaugaaccaaccauagau

SEQ ID NO: 2204731 - RNA, 19 nt, Homo sapiens
  misc_RNA (1)...(19): siRNA sense strand
gcccucagacccuguaauc

SEQ ID NO: 2204732 - RNA, 19 nt, Homo sapiens
  misc_RNA (1)...(19): siRNA sense strand
aacaacggcauccacuaua

SEQ ID NO: 2204733 - RNA, 19 nt, Homo sapiens
  misc_RNA (1)...(19): siRNA sense strand
cggcuacagucgcaauaca

SEQ ID NO: 2204734 - RNA, 19 nt, Homo sapiens
  misc_RNA (1)...(19): siRNA sense strand
uauacggaaugccucacaa

SEQ ID NO: 2204735 - RNA, 19 nt, Homo sapiens
  misc_RNA (1)...(19): siRNA sense strand
aauccaauuucuuccacuu

SEQ ID NO: 2204736 - RNA, 19 nt, Homo sapiens
  misc_RNA (1)...(19): siRNA sense strand
augaaccaaccauagauua

SEQ ID NO: 2204737 - RNA, 19 nt, Homo sapiens
  misc_RNA (1)...(19): siRNA sense strand
aagugacccucuccuacaa

SEQ ID NO: 2204738 - RNA, 19 nt, Homo sapiens
  misc_RNA (1)...(19): siRNA sense strand
gaagccacuccgugcauca

SEQ ID NO: 2204739 - RNA, 19 nt, Homo sapiens
  misc_RNA (1)...(19): siRNA sense strand
cagacccuguaaucauuga

SEQ ID NO: 2204740 - RNA, 19 nt, Homo sapiens
  misc_RNA (1)...(19): siRNA sense strand
gaaccaaccauagauuacg

SEQ ID NO: 2204741 - RNA, 19 nt, Homo sapiens
  misc_RNA (1)...(19): siRNA sense strand
ccaccgucaucauaauugg

SEQ ID NO: 2204742 - RNA, 19 nt, Homo sapiens
  misc_RNA (1)...(19): siRNA sense strand
caacaaccaggagaucauc

SEQ ID NO: 2204743 - RNA, 19 nt, Homo sapiens
  misc_RNA (1)...(19): siRNA sense strand
ggaagccuuauacggaaug

SEQ ID NO: 2204744 - RNA, 19 nt, Homo sapiens
  misc_RNA (1)...(19): siRNA sense strand
cagcaacggagucagaaca

SEQ ID NO: 2204745 - RNA, 19 nt, Homo sapiens
  misc_RNA (1)...(19): siRNA sense strand
gguguggagcgagcugaua

SEQ ID NO: 2204746 - RNA, 19 nt, Homo sapiens
  misc_RNA (1)...(19): siRNA sense strand
aagacaaacuggcccuuuu

SEQ ID NO: 2204747 - RNA, 19 nt, Homo sapiens
  misc_RNA (1)...(19): siRNA sense strand
gaaagagaaagagccaaac

SEQ ID NO: 2204748 - RNA, 19 nt, Homo sapiens
  misc_RNA (1)...(19): siRNA sense strand
ucuccgcagugaaacagaa

SEQ ID NO: 2204749 - RNA, 19 nt, Homo sapiens
  misc_RNA (1)...(19): siRNA sense strand
gaacccaucuugauaauua

SEQ ID NO: 2204750 - RNA, 19 nt, Homo sapiens
  misc_RNA (1)...(19): siRNA sense strand
gaacuuacaucuuguggua

SEQ ID NO: 2204751 - RNA, 19 nt, Homo sapiens
  misc_RNA (1)...(19): siRNA sense strand
gaagcaaagcuacaaauua

SEQ ID NO: 2204752 - RNA, 19 nt, Homo sapiens
  misc_RNA (1)...(19): siRNA sense strand
ggaagaaacuaaaccagaa

SEQ ID NO: 2204753 - RNA, 19 nt, Homo sapiens
  misc_RNA (1)...(19): siRNA sense strand
uaagaucaguggcuuguua

SEQ ID NO: 2204754 - RNA, 19 nt, Homo sapiens
  misc_RNA (1)...(19): siRNA sense strand
guacaugguuuacuugaaa

SEQ ID NO: 2204755 - RNA, 19 nt, Homo sapiens
  misc_RNA (1)...(19): siRNA sense strand
gaagauaacauaugaguca

SEQ ID NO: 2204756 - RNA, 19 nt, Homo sapiens
  misc_RNA (1)...(19): siRNA sense strand
cagaagaucccuuacaaua

SEQ ID NO: 2204757 - RNA, 19 nt, Homo sapiens
  misc_RNA (1)...(19): siRNA sense strand
cauaacagcugguuccaaa

SEQ ID NO: 2204758 - RNA, 19 nt, Homo sapiens
  misc_RNA (1)...(19): siRNA sense strand
ccacaauccugcagcauuu

SEQ ID NO: 2204759 - RNA, 19 nt, Homo sapiens
  misc_RNA (1)...(19): siRNA sense strand
agagaaaucuggucuaaug

SEQ ID NO: 2204760 - RNA, 19 nt, Homo sapiens
  misc_RNA (1)...(19): siRNA sense strand
gagcaagaguuuccaucua

SEQ ID NO: 2204761 - RNA, 19 nt, Homo sapiens
  misc_RNA (1)...(19): siRNA sense strand
caucagugcucccuuguuu

SEQ ID NO: 2204762 - RNA, 19 nt, Homo sapiens
  misc_RNA (1)...(19): siRNA sense strand
gaauauauaugucguuguc

SEQ ID NO: 2204763 - RNA, 19 nt, Homo sapiens
  misc_RNA (1)...(19): siRNA sense strand
auacagaacuggguagaua

SEQ ID NO: 2204764 - RNA, 19 nt, Homo sapiens
  misc_RNA (1)...(19): siRNA sense strand
cgacaaggaucuccaauac

SEQ ID NO: 2204765 - RNA, 19 nt, Homo sapiens
  misc_RNA (1)...(19): siRNA sense strand
gaaauugaacccaucuuga

SEQ ID NO: 2204766 - RNA, 19 nt, Homo sapiens
  misc_RNA (1)...(19): siRNA sense strand
gugaucagcuuccgucuug

SEQ ID NO: 2204767 - RNA, 19 nt, Homo sapiens
  misc_RNA (1)...(19): siRNA sense strand
ugaaagggaucgugugguu

SEQ ID NO: 2204768 - RNA, 19 nt, Homo sapiens
  misc_RNA (1)...(19): siRNA sense strand
gcaaagcuacaaauuaaga

SEQ ID NO: 2204769 - RNA, 19 nt, Homo sapiens
  misc_RNA (1)...(19): siRNA sense strand
cagagaauccagucacuua

SEQ ID NO: 2204770 - RNA, 19 nt, Homo sapiens
  misc_RNA (1)...(19): siRNA sense strand
guggauagccuuaaauuug

SEQ ID NO: 2204771 - RNA, 19 nt, Homo sapiens
  misc_RNA (1)...(19): siRNA sense strand
gaucaguucucagguuauu

SEQ ID NO: 2204772 - RNA, 19 nt, Homo sapiens
  misc_RNA (1)...(19): siRNA sense strand
ggacuaucgugcugucauu

SEQ ID NO: 2204773 - RNA, 19 nt, Homo sapiens
  misc_RNA (1)...(19): siRNA sense strand
uuagaguucuucagucaua

SEQ ID NO: 2204774 - RNA, 19 nt, Homo sapiens
  misc_RNA (1)...(19): siRNA sense strand
gaaagugccuccuccuaac

SEQ ID NO: 2204775 - RNA, 19 nt, Homo sapiens
  misc_RNA (1)...(19): siRNA sense strand
caauaucgcucgcucaucu

SEQ ID NO: 2204776 - RNA, 19 nt, Homo sapiens
  misc_RNA (1)...(19): siRNA sense strand
ggagacauguuacggaaag

SEQ ID NO: 2204777 - RNA, 19 nt, Homo sapiens
  misc_RNA (1)...(19): siRNA sense strand
ggauagccuuaaauuugua

SEQ ID NO: 2204778 - RNA, 19 nt, Homo sapiens
  misc_RNA (1)...(19): siRNA sense strand
ccaauacugucauucauca

SEQ ID NO: 2204779 - RNA, 19 nt, Homo sapiens
  misc_RNA (1)...(19): siRNA sense strand
gaaagaagcggagaguguu

SEQ ID NO: 2204780 - RNA, 19 nt, Homo sapiens
  misc_RNA (1)...(19): siRNA sense strand
acaaggaucuccaauacug

SEQ ID NO: 2204781 - RNA, 19 nt, Homo sapiens
  misc_RNA (1)...(19): siRNA sense strand
gaagaucccuuacaauacc

SEQ ID NO: 2204782 - RNA, 19 nt, Homo sapiens
  misc_RNA (1)...(19): siRNA sense strand
gcuaagaccggacagauug

SEQ ID NO: 2204783 - RNA, 19 nt, Homo sapiens
  misc_RNA (1)...(19): siRNA sense strand
ugaaacacuugaccuauca

SEQ ID NO: 2204784 - RNA, 19 nt, Homo sapiens
  misc_RNA (1)...(19): siRNA sense strand
guacaacauuauugacaga

SEQ ID NO: 2204785 - RNA, 19 nt, Homo sapiens
  misc_RNA (1)...(19): siRNA sense strand
caucuauccuugcaaagaa

SEQ ID NO: 2204786 - RNA, 19 nt, Homo sapiens
  misc_RNA (1)...(19): siRNA sense strand
caucagaggaacuacuuua

SEQ ID NO: 2204787 - RNA, 19 nt, Homo sapiens
  misc_RNA (1)...(19): siRNA sense strand
ucaggaacuucaagaacua

SEQ ID NO: 2204788 - RNA, 19 nt, Homo sapiens
  misc_RNA (1)...(19): siRNA sense strand
ggaaauugaacccaucuug

SEQ ID NO: 2204789 - RNA, 19 nt, Homo sapiens
  misc_RNA (1)...(19): siRNA sense strand
aaagcugacucucaacaaa

SEQ ID NO: 2204790 - RNA, 19 nt, Homo sapiens
  misc_RNA (1)...(19): siRNA sense strand
caauauugauguuccaugu

SEQ ID NO: 2204791 - RNA, 19 nt, Homo sapiens
  misc_RNA (1)...(19): siRNA sense strand
agucauaccugaagcaguu

SEQ ID NO: 2204792 - RNA, 19 nt, Homo sapiens
  misc_RNA (1)...(19): siRNA sense strand
ggaauuuguacaugguuua

SEQ ID NO: 2204793 - RNA, 19 nt, Homo sapiens
  misc_RNA (1)...(19): siRNA sense strand
gagacuggcucuguuugaa

SEQ ID NO: 2204794 - RNA, 19 nt, Homo sapiens
  misc_RNA (1)...(19): siRNA sense strand
aagagacacuggaaauuga

SEQ ID NO: 2204795 - RNA, 19 nt, Homo sapiens
  misc_RNA (1)...(19): siRNA sense strand
uaacagcugguuccaaauu

SEQ ID NO: 2204796 - RNA, 19 nt, Homo sapiens
  misc_RNA (1)...(19): siRNA sense strand
ggaugcaugugguccauau

SEQ ID NO: 2204797 - RNA, 19 nt, Homo sapiens
  misc_RNA (1)...(19): siRNA sense strand
gaaaucuggucuaaugaac

SEQ ID NO: 2204798 - RNA, 19 nt, Homo sapiens
  misc_RNA (1)...(19): siRNA sense strand
gaaagggaucgugugguua

SEQ ID NO: 2204799 - RNA, 19 nt, Homo sapiens
  misc_RNA (1)...(19): siRNA sense strand
gcuauucguuuaguacaaa

SEQ ID NO: 2204800 - RNA, 19 nt, Homo sapiens
  misc_RNA (1)...(19): siRNA sense strand
caucccaacuuuacuccua

SEQ ID NO: 2204801 - RNA, 19 nt, Homo sapiens
  misc_RNA (1)...(19): siRNA sense strand
gcaucucuuugccuguuua

SEQ ID NO: 2204802 - RNA, 19 nt, Homo sapiens
  misc_RNA (1)...(19): siRNA sense strand
aaaccagaauucaaaccua

SEQ ID NO: 2204803 - RNA, 19 nt, Homo sapiens
  misc_RNA (1)...(19): siRNA sense strand
gaggacguauagacaacua

SEQ ID NO: 2204804 - RNA, 19 nt, Homo sapiens
  misc_RNA (1)...(19): siRNA sense strand
agaacuagcuaaugcugaa

SEQ ID NO: 2204805 - RNA, 19 nt, Homo sapiens
  misc_RNA (1)...(19): siRNA sense strand
cagaggaacuacuuuacug

SEQ ID NO: 2204806 - RNA, 19 nt, Homo sapiens
  misc_RNA (1)...(19): siRNA sense strand
gaucuccaauacugucauu

SEQ ID NO: 2204807 - RNA, 19 nt, Homo sapiens
  misc_RNA (1)...(19): siRNA sense strand
gaaacuaaaccagaauuca

SEQ ID NO: 2204808 - RNA, 19 nt, Homo sapiens
  misc_RNA (1)...(19): siRNA sense strand
caacauuauugacagacuu

SEQ ID NO: 2204809 - RNA, 19 nt, Homo sapiens
  misc_RNA (1)...(19): siRNA sense strand
gaacuucaagaacuagcua

SEQ ID NO: 2204810 - RNA, 19 nt, Homo sapiens
  misc_RNA (1)...(19): siRNA sense strand
gcaagaagcaaagcuacaa

SEQ ID NO: 2204811 - RNA, 19 nt, Homo sapiens
  misc_RNA (1)...(19): siRNA sense strand
gggaauuuguacaugguuu

SEQ ID NO: 2204812 - RNA, 19 nt, Homo sapiens
  misc_RNA (1)...(19): siRNA sense strand
uuacuacagucaagucuga

SEQ ID NO: 2204813 - RNA, 19 nt, Homo sapiens
  misc_RNA (1)...(19): siRNA sense strand
gaaaaggaauugaauacuc

SEQ ID NO: 2204814 - RNA, 19 nt, Homo sapiens
  misc_RNA (1)...(19): siRNA sense strand
gcaagaguuuccaucuauc

SEQ ID NO: 2204815 - RNA, 19 nt, Homo sapiens
  misc_RNA (1)...(19): siRNA sense strand
ggaaaggucgacugcaaga

SEQ ID NO: 2204816 - RNA, 19 nt, Homo sapiens
  misc_RNA (1)...(19): siRNA sense strand
gauguacaaugggaauuug

SEQ ID NO: 2204817 - RNA, 19 nt, Homo sapiens
  misc_RNA (1)...(19): siRNA sense strand
ucaagcugauuuagcaauu

SEQ ID NO: 2204818 - RNA, 19 nt, Homo sapiens
  misc_RNA (1)...(19): siRNA sense strand
caaagagacacuggaaauu

SEQ ID NO: 2204819 - RNA, 19 nt, Homo sapiens
  misc_RNA (1)...(19): siRNA sense strand
gaaagcugacucucaacaa

SEQ ID NO: 2204820 - RNA, 19 nt, Homo sapiens
  misc_RNA (1)...(19): siRNA sense strand
caugaucaguucucagguu

SEQ ID NO: 2204821 - RNA, 19 nt, Homo sapiens
  misc_RNA (1)...(19): siRNA sense strand
cauccagacacauuucuua

SEQ ID NO: 2204822 - RNA, 19 nt, Homo sapiens
  misc_RNA (1)...(19): siRNA sense strand
ccagaauucaaaccuaaua

SEQ ID NO: 2204823 - RNA, 19 nt, Homo sapiens
  misc_RNA (1)...(19): siRNA sense strand
aaccagaauucaaaccuaa

SEQ ID NO: 2204824 - RNA, 19 nt, Homo sapiens
  misc_RNA (1)...(19): siRNA sense strand
guucucagguuauuucaca

SEQ ID NO: 2204825 - RNA, 19 nt, Homo sapiens
  misc_RNA (1)...(19): siRNA sense strand
ugccaaagauguacaaugg

SEQ ID NO: 2204826 - RNA, 19 nt, Homo sapiens
  misc_RNA (1)...(19): siRNA sense strand
agaaagugccuccuccuaa

SEQ ID NO: 2204827 - RNA, 19 nt, Homo sapiens
  misc_RNA (1)...(19): siRNA sense strand
ccuaauacaucagaaagug

SEQ ID NO: 2204828 - RNA, 19 nt, Homo sapiens
  misc_RNA (1)...(19): siRNA sense strand
gauguucgcuuugcauuuu

SEQ ID NO: 2204829 - RNA, 19 nt, Homo sapiens
  misc_RNA (1)...(19): siRNA sense strand
uggauagccuuaaauuugu

SEQ ID NO: 2204830 - RNA, 19 nt, Homo sapiens
  misc_RNA (1)...(19): siRNA sense strand
cccagaagaucccuuacaa

SEQ ID NO: 2204831 - RNA, 19 nt, Homo sapiens
  misc_RNA (1)...(19): siRNA sense strand
gaagaaacuaaaccagaau

SEQ ID NO: 2204832 - RNA, 19 nt, Homo sapiens
  misc_RNA (1)...(19): siRNA sense strand
gaauacucuucaaccuaaa

SEQ ID NO: 2204833 - RNA, 19 nt, Homo sapiens
  misc_RNA (1)...(19): siRNA sense strand
aaagagacacuggaaauug

SEQ ID NO: 2204834 - RNA, 19 nt, Homo sapiens
  misc_RNA (1)...(19): siRNA sense strand
guggcaacauuaaagauug

SEQ ID NO: 2204835 - RNA, 19 nt, Homo sapiens
  misc_RNA (1)...(19): siRNA sense strand
gcagcucuguggcguacuu

SEQ ID NO: 2204836 - RNA, 19 nt, Homo sapiens
  misc_RNA (1)...(19): siRNA sense strand
gaucaguggcuuguuacua

SEQ ID NO: 2204837 - RNA, 19 nt, Homo sapiens
  misc_RNA (1)...(19): siRNA sense strand
cagguuauuucacaguuga

SEQ ID NO: 2204838 - RNA, 19 nt, Homo sapiens
  misc_RNA (1)...(19): siRNA sense strand
caugcucucuucagucuug

SEQ ID NO: 2204839 - RNA, 19 nt, Homo sapiens
  misc_RNA (1)...(19): siRNA sense strand
gucugaagauaacauauga

SEQ ID NO: 2204840 - RNA, 19 nt, Homo sapiens
  misc_RNA (1)...(19): siRNA sense strand
aaacaaacaggauucugaa

SEQ ID NO: 2204841 - RNA, 19 nt, Homo sapiens
  misc_RNA (1)...(19): siRNA sense strand
auuggcaagugcuuuauua

SEQ ID NO: 2204842 - RNA, 19 nt, Homo sapiens
  misc_RNA (1)...(19): siRNA sense strand
gacuggcucuguuugaaga

SEQ ID NO: 2204843 - RNA, 19 nt, Homo sapiens
  misc_RNA (1)...(19): siRNA sense strand
ugaaagaagcggagagugu

SEQ ID NO: 2204844 - RNA, 19 nt, Homo sapiens
  misc_RNA (1)...(19): siRNA sense strand
ucagcagauucuuguagua

SEQ ID NO: 2204845 - RNA, 19 nt, Homo sapiens
  misc_RNA (1)...(19): siRNA sense strand
acagucaagucugaagaua

SEQ ID NO: 2204846 - RNA, 19 nt, Homo sapiens
  misc_RNA (1)...(19): siRNA sense strand
caagaccaguggauucagu

SEQ ID NO: 2204847 - RNA, 19 nt, Homo sapiens
  misc_RNA (1)...(19): siRNA sense strand
agaauccagucacuuauca

SEQ ID NO: 2204848 - RNA, 19 nt, Homo sapiens
  misc_RNA (1)...(19): siRNA sense strand
caaacaggauucugaaaau

SEQ ID NO: 2204849 - RNA, 19 nt, Homo sapiens
  misc_RNA (1)...(19): siRNA sense strand
gaacugagcugccuagaag

SEQ ID NO: 2204850 - RNA, 19 nt, Homo sapiens
  misc_RNA (1)...(19): siRNA sense strand
ccaaaggccaggacagaaa

SEQ ID NO: 2204851 - RNA, 19 nt, Homo sapiens
  misc_RNA (1)...(19): siRNA sense strand
ccaaggcucuucccuacag

SEQ ID NO: 2204852 - RNA, 19 nt, Homo sapiens
  misc_RNA (1)...(19): siRNA sense strand
gccaaugccugagagaagu

SEQ ID NO: 2204853 - RNA, 19 nt, Homo sapiens
  misc_RNA (1)...(19): siRNA sense strand
acagaaacgccgagaggaa

SEQ ID NO: 2204854 - RNA, 19 nt, Homo sapiens
  misc_RNA (1)...(19): siRNA sense strand
ucccacaccuuccuaugga

SEQ ID NO: 2204855 - RNA, 19 nt, Homo sapiens
  misc_RNA (1)...(19): siRNA sense strand
caacugacaugccccaucu

SEQ ID NO: 2204856 - RNA, 19 nt, Homo sapiens
  misc_RNA (1)...(19): siRNA sense strand
ugaacugagcugccuagaa

SEQ ID NO: 2204857 - RNA, 19 nt, Homo sapiens
  misc_RNA (1)...(19): siRNA sense strand
cgugcucgauuccggaaga

SEQ ID NO: 2204858 - RNA, 19 nt, Homo sapiens
  misc_RNA (1)...(19): siRNA sense strand
ccgagaggaaccaagauga

SEQ ID NO: 2204859 - RNA, 19 nt, Homo sapiens
  misc_RNA (1)...(19): siRNA sense strand
caccuccuccuucuuguga

SEQ ID NO: 2204860 - RNA, 19 nt, Homo sapiens
  misc_RNA (1)...(19): siRNA sense strand
gccaaaggccaggacagaa

SEQ ID NO: 2204861 - RNA, 19 nt, Homo sapiens
  misc_RNA (1)...(19): siRNA sense strand
cagaaccacugaugacuua

SEQ ID NO: 2204862 - RNA, 19 nt, Homo sapiens
  misc_RNA (1)...(19): siRNA sense strand
caagacagaugcagaauca

SEQ ID NO: 2204863 - RNA, 19 nt, Homo sapiens
  misc_RNA (1)...(19): siRNA sense strand
gaaaagagcuucugcuucu

SEQ ID NO: 2204864 - RNA, 19 nt, Homo sapiens
  misc_RNA (1)...(19): siRNA sense strand
uaaagcaucuggucaaagu

SEQ ID NO: 2204865 - RNA, 19 nt, Homo sapiens
  misc_RNA (1)...(19): siRNA sense strand
ccauagaccuagucaagaa

SEQ ID NO: 2204866 - RNA, 19 nt, Homo sapiens
  misc_RNA (1)...(19): siRNA sense strand
gauaacaagugggcugaaa

SEQ ID NO: 2204867 - RNA, 19 nt, Homo sapiens
  misc_RNA (1)...(19): siRNA sense strand
gagcuacaguggaucuauu

SEQ ID NO: 2204868 - RNA, 19 nt, Homo sapiens
  misc_RNA (1)...(19): siRNA sense strand
gcugcuaugaugaauauua

SEQ ID NO: 2204869 - RNA, 19 nt, Homo sapiens
  misc_RNA (1)...(19): siRNA sense strand
ugaaucaaguuccagagaa

SEQ ID NO: 2204870 - RNA, 19 nt, Homo sapiens
  misc_RNA (1)...(19): siRNA sense strand
gaaucaaguuccagagaag

SEQ ID NO: 2204871 - RNA, 19 nt, Homo sapiens
  misc_RNA (1)...(19): siRNA sense strand
uacaguggaucuauucaaa

SEQ ID NO: 2204872 - RNA, 19 nt, Homo sapiens
  misc_RNA (1)...(19): siRNA sense strand
cgagcaaucugccucucua

SEQ ID NO: 2204873 - RNA, 19 nt, Homo sapiens
  misc_RNA (1)...(19): siRNA sense strand
gguuaaaggcaacuuauga

SEQ ID NO: 2204874 - RNA, 19 nt, Homo sapiens
  misc_RNA (1)...(19): siRNA sense strand
ucucaugacugucucaaau

SEQ ID NO: 2204875 - RNA, 19 nt, Homo sapiens
  misc_RNA (1)...(19): siRNA sense strand
gacaauaagacgauaacaa

SEQ ID NO: 2204876 - RNA, 19 nt, Homo sapiens
  misc_RNA (1)...(19): siRNA sense strand
aagcuuaacuucuguaggu

SEQ ID NO: 2204877 - RNA, 19 nt, Homo sapiens
  misc_RNA (1)...(19): siRNA sense strand
aaauagcacuacaaaguca

SEQ ID NO: 2204878 - RNA, 19 nt, Homo sapiens
  misc_RNA (1)...(19): siRNA sense strand
caaaauagcacuacaaagu

SEQ ID NO: 2204879 - RNA, 19 nt, Homo sapiens
  misc_RNA (1)...(19): siRNA sense strand
gacacugccucaagcaaug

SEQ ID NO: 2204880 - RNA, 19 nt, Homo sapiens
  misc_RNA (1)...(19): siRNA sense strand
gaacugugggacaauaaga

SEQ ID NO: 2204881 - RNA, 19 nt, Homo sapiens
  misc_RNA (1)...(19): siRNA sense strand
caacuaguccugaaucaag

SEQ ID NO: 2204882 - RNA, 19 nt, Homo sapiens
  misc_RNA (1)...(19): siRNA sense strand
ggagggauuccuuggauug

SEQ ID NO: 2204883 - RNA, 19 nt, Homo sapiens
  misc_RNA (1)...(19): siRNA sense strand
ucauugcuguuaaaucuga

SEQ ID NO: 2204884 - RNA, 19 nt, Homo sapiens
  misc_RNA (1)...(19): siRNA sense strand
ggagcaauauuuucuaaug

SEQ ID NO: 2204885 - RNA, 19 nt, Homo sapiens
  misc_RNA (1)...(19): siRNA sense strand
auucaaagcuuaacuucug

SEQ ID NO: 2204886 - RNA, 19 nt, Homo sapiens
  misc_RNA (1)...(19): siRNA sense strand
gagcuuuccuucccacaag

SEQ ID NO: 2204887 - RNA, 19 nt, Homo sapiens
  misc_RNA (1)...(19): siRNA sense strand
gcucaguaguggcagcaaa

SEQ ID NO: 2204888 - RNA, 19 nt, Homo sapiens
  misc_RNA (1)...(19): siRNA sense strand
gcacaaauugccggagaaa

SEQ ID NO: 2204889 - RNA, 19 nt, Homo sapiens
  misc_RNA (1)...(19): siRNA sense strand
uggcugcuaugaugaauau

SEQ ID NO: 2204890 - RNA, 19 nt, Homo sapiens
  misc_RNA (1)...(19): siRNA sense strand
gcagaaccacugaugacuu

SEQ ID NO: 2204891 - RNA, 19 nt, Homo sapiens
  misc_RNA (1)...(19): siRNA sense strand
gacaacuaguccugaauca

SEQ ID NO: 2204892 - RNA, 19 nt, Homo sapiens
  misc_RNA (1)...(19): siRNA sense strand
uaauaaagcaucuggucaa

SEQ ID NO: 2204893 - RNA, 19 nt, Homo sapiens
  misc_RNA (1)...(19): siRNA sense strand
acagagagaugcuggacau

SEQ ID NO: 2204894 - RNA, 19 nt, Homo sapiens
  misc_RNA (1)...(19): siRNA sense strand
acaaguugcacaaagauuu

SEQ ID NO: 2204895 - RNA, 19 nt, Homo sapiens
  misc_RNA (1)...(19): siRNA sense strand
gguggaggcuguacaugca

SEQ ID NO: 2204896 - RNA, 19 nt, Homo sapiens
  misc_RNA (1)...(19): siRNA sense strand
ucagcggccuggcucagua

SEQ ID NO: 2204897 - RNA, 19 nt, Homo sapiens
  misc_RNA (1)...(19): siRNA sense strand
gaaaaugugcaggagauua

SEQ ID NO: 2204898 - RNA, 19 nt, Homo sapiens
  misc_RNA (1)...(19): siRNA sense strand
aacaagagcuacaguggau

SEQ ID NO: 2204899 - RNA, 19 nt, Homo sapiens
  misc_RNA (1)...(19): siRNA sense strand
aauaaagcaucuggucaaa

SEQ ID NO: 2204900 - RNA, 19 nt, Homo sapiens
  misc_RNA (1)...(19): siRNA sense strand
gaugguuaaaggcaacuua

SEQ ID NO: 2204901 - RNA, 19 nt, Homo sapiens
  misc_RNA (1)...(19): siRNA sense strand
gaagaaacuguggcugcua

SEQ ID NO: 2204902 - RNA, 19 nt, Homo sapiens
  misc_RNA (1)...(19): siRNA sense strand
ucacuacacagccaacaaa

SEQ ID NO: 2204903 - RNA, 19 nt, Homo sapiens
  misc_RNA (1)...(19): siRNA sense strand
acaauaagacgauaacaag

SEQ ID NO: 2204904 - RNA, 19 nt, Homo sapiens
  misc_RNA (1)...(19): siRNA sense strand
agcaaaagcucaacuguuu

SEQ ID NO: 2204905 - RNA, 19 nt, Homo sapiens
  misc_RNA (1)...(19): siRNA sense strand
ggagacacccaaagcuuca

SEQ ID NO: 2204906 - RNA, 19 nt, Homo sapiens
  misc_RNA (1)...(19): siRNA sense strand
gaaggaaacaagagcuaca

SEQ ID NO: 2204907 - RNA, 19 nt, Homo sapiens
  misc_RNA (1)...(19): siRNA sense strand
gaaacuguggcugcuauga

SEQ ID NO: 2204908 - RNA, 19 nt, Homo sapiens
  misc_RNA (1)...(19): siRNA sense strand
aagaaacuguggcugcuau

SEQ ID NO: 2204909 - RNA, 19 nt, Homo sapiens
  misc_RNA (1)...(19): siRNA sense strand
guuaaaggcaacuuaugaa

SEQ ID NO: 2204910 - RNA, 19 nt, Homo sapiens
  misc_RNA (1)...(19): siRNA sense strand
guggaucuauucaaagcuu

SEQ ID NO: 2204911 - RNA, 19 nt, Homo sapiens
  misc_RNA (1)...(19): siRNA sense strand
gcuguuaaaucugaugauc

SEQ ID NO: 2204912 - RNA, 19 nt, Homo sapiens
  misc_RNA (1)...(19): siRNA sense strand
ugcaggagauuaagacuag

SEQ ID NO: 2204913 - RNA, 19 nt, Homo sapiens
  misc_RNA (1)...(19): siRNA sense strand
cuuacaaguugcacaaaga

SEQ ID NO: 2204914 - RNA, 19 nt, Homo sapiens
  misc_RNA (1)...(19): siRNA sense strand
gacccaagcauuccucuuc

SEQ ID NO: 2204915 - RNA, 19 nt, Homo sapiens
  misc_RNA (1)...(19): siRNA sense strand
ccagacagcacaccuaugg

SEQ ID NO: 2204916 - RNA, 19 nt, Homo sapiens
  misc_RNA (1)...(19): siRNA sense strand
guaaagcagagcacaguca

SEQ ID NO: 2204917 - RNA, 19 nt, Homo sapiens
  misc_RNA (1)...(19): siRNA sense strand
aaauguugguucaccuaaa

SEQ ID NO: 2204918 - RNA, 19 nt, Homo sapiens
  misc_RNA (1)...(19): siRNA sense strand
uaaauccccuccugauauu

SEQ ID NO: 2204919 - RNA, 19 nt, Homo sapiens
  misc_RNA (1)...(19): siRNA sense strand
gaacaaaauagcacuacaa

SEQ ID NO: 2204920 - RNA, 19 nt, Homo sapiens
  misc_RNA (1)...(19): siRNA sense strand
gucaaaguaucacuacaca

SEQ ID NO: 2204921 - RNA, 19 nt, Homo sapiens
  misc_RNA (1)...(19): siRNA sense strand
gccauguacuccuguaaag

SEQ ID NO: 2204922 - RNA, 19 nt, Homo sapiens
  misc_RNA (1)...(19): siRNA sense strand
gggauuccuuggauugcaa

SEQ ID NO: 2204923 - RNA, 19 nt, Homo sapiens
  misc_RNA (1)...(19): siRNA sense strand
ucucauuccucugaacaaa

SEQ ID NO: 2204924 - RNA, 19 nt, Homo sapiens
  misc_RNA (1)...(19): siRNA sense strand
aagcagagcacagucauga

SEQ ID NO: 2204925 - RNA, 19 nt, Homo sapiens
  misc_RNA (1)...(19): siRNA sense strand
agacagaugcagaaucaga

SEQ ID NO: 2204926 - RNA, 19 nt, Homo sapiens
  misc_RNA (1)...(19): siRNA sense strand
acccaaagcuucaccaaac

SEQ ID NO: 2204927 - RNA, 19 nt, Homo sapiens
  misc_RNA (1)...(19): siRNA sense strand
gaaccacugaugacuuaca

SEQ ID NO: 2204928 - RNA, 19 nt, Homo sapiens
  misc_RNA (1)...(19): siRNA sense strand
ccacaaggagcaauauuuu

SEQ ID NO: 2204929 - RNA, 19 nt, Homo sapiens
  misc_RNA (1)...(19): siRNA sense strand
uggcccaacucuaaugaga

SEQ ID NO: 2204930 - RNA, 19 nt, Homo sapiens
  misc_RNA (1)...(19): siRNA sense strand
ggcaacuuaugaaggcaaa

SEQ ID NO: 2204931 - RNA, 19 nt, Homo sapiens
  misc_RNA (1)...(19): siRNA sense strand
gagcacagucaugagcuuu

SEQ ID NO: 2204932 - RNA, 19 nt, Homo sapiens
  misc_RNA (1)...(19): siRNA sense strand
uaacuucuguagguuccaa

SEQ ID NO: 2204933 - RNA, 19 nt, Homo sapiens
  misc_RNA (1)...(19): siRNA sense strand
gagaagaugcaaccaagac

SEQ ID NO: 2204934 - RNA, 19 nt, Homo sapiens
  misc_RNA (1)...(19): siRNA sense strand
ccagagaagaugcaaccaa

SEQ ID NO: 2204935 - RNA, 19 nt, Homo sapiens
  misc_RNA (1)...(19): siRNA sense strand
aauaagacgauaacaagug

SEQ ID NO: 2204936 - RNA, 19 nt, Homo sapiens
  misc_RNA (1)...(19): siRNA sense strand
ucaugacugucucaaaucu

SEQ ID NO: 2204937 - RNA, 19 nt, Homo sapiens
  misc_RNA (1)...(19): siRNA sense strand
cccacaaggagcaauauuu

SEQ ID NO: 2204938 - RNA, 19 nt, Homo sapiens
  misc_RNA (1)...(19): siRNA sense strand
gaaaauguugguucaccua

SEQ ID NO: 2204939 - RNA, 19 nt, Homo sapiens
  misc_RNA (1)...(19): siRNA sense strand
ggaucuauucaaagcuuaa

SEQ ID NO: 2204940 - RNA, 19 nt, Homo sapiens
  misc_RNA (1)...(19): siRNA sense strand
ucaagaaagagccuuaugg

SEQ ID NO: 2204941 - RNA, 19 nt, Homo sapiens
  misc_RNA (1)...(19): siRNA sense strand
aaugagagcacaggaagaa

SEQ ID NO: 2204942 - RNA, 19 nt, Homo sapiens
  misc_RNA (1)...(19): siRNA sense strand
ucagaauauugugguagaa

SEQ ID NO: 2204943 - RNA, 19 nt, Homo sapiens
  misc_RNA (1)...(19): siRNA sense strand
aaagccauguacuccugua

SEQ ID NO: 2204944 - RNA, 19 nt, Homo sapiens
  misc_RNA (1)...(19): siRNA sense strand
gagauuaagacuagacacu

SEQ ID NO: 2204945 - RNA, 19 nt, Homo sapiens
  misc_RNA (1)...(19): siRNA sense strand
gagcuucugcuucuucucu

SEQ ID NO: 2204946 - RNA, 19 nt, Homo sapiens
  misc_RNA (1)...(19): siRNA sense strand
gcaaucugccucucuacag

SEQ ID NO: 2204947 - RNA, 19 nt, Homo sapiens
  misc_RNA (1)...(19): siRNA sense strand
cagaauauugugguagaaa

SEQ ID NO: 2204948 - RNA, 19 nt, Homo sapiens
  misc_RNA (1)...(19): siRNA sense strand
caaaucuuggugucauauu

SEQ ID NO: 2204949 - RNA, 19 nt, Homo sapiens
  misc_RNA (1)...(19): siRNA sense strand
gugcaggagauuaagacua

SEQ ID NO: 2204950 - RNA, 19 nt, Homo sapiens
  misc_RNA (1)...(19): siRNA sense strand
cuuggucuguggacaacua

SEQ ID NO: 2204951 - RNA, 19 nt, Homo sapiens
  misc_RNA (1)...(19): siRNA sense strand
gcuccagacccaagcauuc

SEQ ID NO: 2204952 - RNA, 19 nt, Homo sapiens
  misc_RNA (1)...(19): siRNA sense strand
aacaaaaucucaugacugu

SEQ ID NO: 2204953 - RNA, 19 nt, Homo sapiens
  misc_RNA (1)...(19): siRNA sense strand
ugcuggacaucuuaauaaa

SEQ ID NO: 2204954 - RNA, 19 nt, Homo sapiens
  misc_RNA (1)...(19): siRNA sense strand
uggccgaaccugauaguga

SEQ ID NO: 2204955 - RNA, 19 nt, Homo sapiens
  misc_RNA (1)...(19): siRNA sense strand
gaaggacacgagcaaucug

SEQ ID NO: 2204956 - RNA, 19 nt, Homo sapiens
  misc_RNA (1)...(19): siRNA sense strand
ucucaaaucuuggugucau

SEQ ID NO: 2204957 - RNA, 19 nt, Homo sapiens
  misc_RNA (1)...(19): siRNA sense strand
augacugucucaaaucuug

SEQ ID NO: 2204958 - RNA, 19 nt, Homo sapiens
  misc_RNA (1)...(19): siRNA sense strand
uggaucuauucaaagcuua

SEQ ID NO: 2204959 - RNA, 19 nt, Homo sapiens
  misc_RNA (1)...(19): siRNA sense strand
gcaggagauuaagacuaga

SEQ ID NO: 2204960 - RNA, 19 nt, Homo sapiens
  misc_RNA (1)...(19): siRNA sense strand
caauaagacgauaacaagu

SEQ ID NO: 2204961 - RNA, 19 nt, Homo sapiens
  misc_RNA (1)...(19): siRNA sense strand
gauagucaauucagagaaa

SEQ ID NO: 2204962 - RNA, 19 nt, Homo sapiens
  misc_RNA (1)...(19): siRNA sense strand
gcagaguccugaauuugaa

SEQ ID NO: 2204963 - RNA, 19 nt, Homo sapiens
  misc_RNA (1)...(19): siRNA sense strand
gagaaaccguccuuggaaa

SEQ ID NO: 2204964 - RNA, 19 nt, Homo sapiens
  misc_RNA (1)...(19): siRNA sense strand
ggaugaaggccaacauuaa

SEQ ID NO: 2204965 - RNA, 19 nt, Homo sapiens
  misc_RNA (1)...(19): siRNA sense strand
gcucguaaauauugagaaa

SEQ ID NO: 2204966 - RNA, 19 nt, Homo sapiens
  misc_RNA (1)...(19): siRNA sense strand
cugagaagcugcagauuga

SEQ ID NO: 2204967 - RNA, 19 nt, Homo sapiens
  misc_RNA (1)...(19): siRNA sense strand
gcagguggauccuuaacug

SEQ ID NO: 2204968 - RNA, 19 nt, Homo sapiens
  misc_RNA (1)...(19): siRNA sense strand
cauauucaccacauuguua

SEQ ID NO: 2204969 - RNA, 19 nt, Homo sapiens
  misc_RNA (1)...(19): siRNA sense strand
gagcacuuaugaagagaaa

SEQ ID NO: 2204970 - RNA, 19 nt, Homo sapiens
  misc_RNA (1)...(19): siRNA sense strand
ccaagcagcucaauacaac

SEQ ID NO: 2204971 - RNA, 19 nt, Homo sapiens
  misc_RNA (1)...(19): siRNA sense strand
ggaagagauugcacagugu

SEQ ID NO: 2204972 - RNA, 19 nt, Homo sapiens
  misc_RNA (1)...(19): siRNA sense strand
ggacagaggugaaaagaag

SEQ ID NO: 2204973 - RNA, 19 nt, Homo sapiens
  misc_RNA (1)...(19): siRNA sense strand
cauagaaacagagaaguua

SEQ ID NO: 2204974 - RNA, 19 nt, Homo sapiens
  misc_RNA (1)...(19): siRNA sense strand
ggaugacucucucacugaa

SEQ ID NO: 2204975 - RNA, 19 nt, Homo sapiens
  misc_RNA (1)...(19): siRNA sense strand
caacauauucaccacauug

SEQ ID NO: 2204976 - RNA, 19 nt, Homo sapiens
  misc_RNA (1)...(19): siRNA sense strand
gcacuuaugaagagaaaga

SEQ ID NO: 2204977 - RNA, 19 nt, Homo sapiens
  misc_RNA (1)...(19): siRNA sense strand
gcagcucaauacaacaauu

SEQ ID NO: 2204978 - RNA, 19 nt, Homo sapiens
  misc_RNA (1)...(19): siRNA sense strand
gcugguugguucaggauuu

SEQ ID NO: 2204979 - RNA, 19 nt, Homo sapiens
  misc_RNA (1)...(19): siRNA sense strand
aagauuggauuccgaaaug

SEQ ID NO: 2204980 - RNA, 19 nt, Homo sapiens
  misc_RNA (1)...(19): siRNA sense strand
gguuacagauagucaauuc

SEQ ID NO: 2204981 - RNA, 19 nt, Homo sapiens
  misc_RNA (1)...(19): siRNA sense strand
ccgaaaggcugcagguaga

SEQ ID NO: 2204982 - RNA, 19 nt, Homo sapiens
  misc_RNA (1)...(19): siRNA sense strand
ggacauagaaacagagaag

SEQ ID NO: 2204983 - RNA, 19 nt, Homo sapiens
  misc_RNA (1)...(19): siRNA sense strand
gcuaagagagguacagaug

SEQ ID NO: 2204984 - RNA, 19 nt, Homo sapiens
  misc_RNA (1)...(19): siRNA sense strand
gcgaauggcuugggaagag

SEQ ID NO: 2204985 - RNA, 19 nt, Homo sapiens
  misc_RNA (1)...(19): siRNA sense strand
ggaggaggaagaaauguug

SEQ ID NO: 2204986 - RNA, 19 nt, Homo sapiens
  misc_RNA (1)...(19): siRNA sense strand
gagaagcugcagauugaaa

SEQ ID NO: 2204987 - RNA, 19 nt, Homo sapiens
  misc_RNA (1)...(19): siRNA sense strand
caugaaaucgggagugaaa

SEQ ID NO: 2204988 - RNA, 19 nt, Homo sapiens
  misc_RNA (1)...(19): siRNA sense strand
aagagaggcugcggcauuu

SEQ ID NO: 2204989 - RNA, 19 nt, Homo sapiens
  misc_RNA (1)...(19): siRNA sense strand
cagcucaauacaacaauua

SEQ ID NO: 2204990 - RNA, 19 nt, Homo sapiens
  misc_RNA (1)...(19): siRNA sense strand
aaagagaggcugcggcauu

SEQ ID NO: 2204991 - RNA, 19 nt, Homo sapiens
  misc_RNA (1)...(19): siRNA sense strand
gaaaaggaacgccuacaaa

SEQ ID NO: 2204992 - RNA, 19 nt, Homo sapiens
  misc_RNA (1)...(19): siRNA sense strand
ggacagggacagaggugaa

SEQ ID NO: 2204993 - RNA, 19 nt, Homo sapiens
  misc_RNA (1)...(19): siRNA sense strand
cagauggguugccugacua

SEQ ID NO: 2204994 - RNA, 19 nt, Homo sapiens
  misc_RNA (1)...(19): siRNA sense strand
caagaaacucagacccuuu

SEQ ID NO: 2204995 - RNA, 19 nt, Homo sapiens
  misc_RNA (1)...(19): siRNA sense strand
ucacugaagagauagauga

SEQ ID NO: 2204996 - RNA, 19 nt, Homo sapiens
  misc_RNA (1)...(19): siRNA sense strand
gaugaaggccaacauuaag

SEQ ID NO: 2204997 - RNA, 19 nt, Homo sapiens
  misc_RNA (1)...(19): siRNA sense strand
aaucgggagugaaagcuaa

SEQ ID NO: 2204998 - RNA, 19 nt, Homo sapiens
  misc_RNA (1)...(19): siRNA sense strand
aauggaggcagaagucuua

SEQ ID NO: 2204999 - RNA, 19 nt, Homo sapiens
  misc_RNA (1)...(19): siRNA sense strand
cuacaaaucgagaaagaga

SEQ ID NO: 2205000 - RNA, 19 nt, Homo sapiens
  misc_RNA (1)...(19): siRNA sense strand
gaaaaggaaagaagucauu

SEQ ID NO: 2205001 - RNA, 19 nt, Homo sapiens
  misc_RNA (1)...(19): siRNA sense strand
gaaaaugaacuucccgauu

SEQ ID NO: 2205002 - RNA, 19 nt, Homo sapiens
  misc_RNA (1)...(19): siRNA sense strand
ugugaaugcuguaggagaa

SEQ ID NO: 2205003 - RNA, 19 nt, Homo sapiens
  misc_RNA (1)...(19): siRNA sense strand
gccuacaaaucgagaaaga

SEQ ID NO: 2205004 - RNA, 19 nt, Homo sapiens
  misc_RNA (1)...(19): siRNA sense strand
gaaaggcugcagguagaaa

SEQ ID NO: 2205005 - RNA, 19 nt, Homo sapiens
  misc_RNA (1)...(19): siRNA sense strand
aggaagaaauguugucauc

SEQ ID NO: 2205006 - RNA, 19 nt, Homo sapiens
  misc_RNA (1)...(19): siRNA sense strand
aaaguugagguuacagaua

SEQ ID NO: 2205007 - RNA, 19 nt, Homo sapiens
  misc_RNA (1)...(19): siRNA sense strand
ggcgagcacuuaugaagag

SEQ ID NO: 2205008 - RNA, 19 nt, Homo sapiens
  misc_RNA (1)...(19): siRNA sense strand
gaggaugaaggccaacauu

SEQ ID NO: 2205009 - RNA, 19 nt, Homo sapiens
  misc_RNA (1)...(19): siRNA sense strand
cacaggacauagaaacaga

SEQ ID NO: 2205010 - RNA, 19 nt, Homo sapiens
  misc_RNA (1)...(19): siRNA sense strand
uaacucaacaccaucuaga

SEQ ID NO: 2205011 - RNA, 19 nt, Homo sapiens
  misc_RNA (1)...(19): siRNA sense strand
cagagaaaccguccuugga

SEQ ID NO: 2205012 - RNA, 19 nt, Homo sapiens
  misc_RNA (1)...(19): siRNA sense strand
caucuagaucugcauauga

SEQ ID NO: 2205013 - RNA, 19 nt, Homo sapiens
  misc_RNA (1)...(19): siRNA sense strand
agagaaaccguccuuggaa

SEQ ID NO: 2205014 - RNA, 19 nt, Homo sapiens
  misc_RNA (1)...(19): siRNA sense strand
aaguugagguuacagauag

SEQ ID NO: 2205015 - RNA, 19 nt, Homo sapiens
  misc_RNA (1)...(19): siRNA sense strand
aaaggaacgccuacaaauc

SEQ ID NO: 2205016 - RNA, 19 nt, Homo sapiens
  misc_RNA (1)...(19): siRNA sense strand
gaaguuugaaucugagaag

SEQ ID NO: 2205017 - RNA, 19 nt, Homo sapiens
  misc_RNA (1)...(19): siRNA sense strand
gagcggcugcagauugaaa

SEQ ID NO: 2205018 - RNA, 19 nt, Homo sapiens
  misc_RNA (1)...(19): siRNA sense strand
aggagcggcugcagauuga

SEQ ID NO: 2205019 - RNA, 19 nt, Homo sapiens
  misc_RNA (1)...(19): siRNA sense strand
aggaugaaggccaacauua

SEQ ID NO: 2205020 - RNA, 19 nt, Homo sapiens
  misc_RNA (1)...(19): siRNA sense strand
cccaaucacucacagaucu

SEQ ID NO: 2205021 - RNA, 19 nt, Homo sapiens
  misc_RNA (1)...(19): siRNA sense strand
ggcugcagauugaaagaga

SEQ ID NO: 2205022 - RNA, 19 nt, Homo sapiens
  misc_RNA (1)...(19): siRNA sense strand
ccaucuagaucugcauaug

SEQ ID NO: 2205023 - RNA, 19 nt, Homo sapiens
  misc_RNA (1)...(19): siRNA sense strand
ccagauuccaggagagaaa

SEQ ID NO: 2205024 - RNA, 19 nt, Homo sapiens
  misc_RNA (1)...(19): siRNA sense strand
uuaaugugaugaagcgaau

SEQ ID NO: 2205025 - RNA, 19 nt, Homo sapiens
  misc_RNA (1)...(19): siRNA sense strand
agaaagggauccgcagagu

SEQ ID NO: 2205026 - RNA, 19 nt, Homo sapiens
  misc_RNA (1)...(19): siRNA sense strand
ggucaagguggaagaggaa

SEQ ID NO: 2205027 - RNA, 19 nt, Homo sapiens
  misc_RNA (1)...(19): siRNA sense strand
ccuccugccugaagaaagu

SEQ ID NO: 2205028 - RNA, 19 nt, Homo sapiens
  misc_RNA (1)...(19): siRNA sense strand
gagaaaaguugagguuaca

SEQ ID NO: 2205029 - RNA, 19 nt, Homo sapiens
  misc_RNA (1)...(19): siRNA sense strand
gcugcggcauuuagacaug

SEQ ID NO: 2205030 - RNA, 19 nt, Homo sapiens
  misc_RNA (1)...(19): siRNA sense strand
gagaggcugcggcauuuag

SEQ ID NO: 2205031 - RNA, 19 nt, Homo sapiens
  misc_RNA (1)...(19): siRNA sense strand
ggaggaagaaauguuguca

SEQ ID NO: 2205032 - RNA, 19 nt, Homo sapiens
  misc_RNA (1)...(19): siRNA sense strand
gaagagaaagaggaugaag

SEQ ID NO: 2205033 - RNA, 19 nt, Homo sapiens
  misc_RNA (1)...(19): siRNA sense strand
cgaauggcuugggaagaga

SEQ ID NO: 2205034 - RNA, 19 nt, Homo sapiens
  misc_RNA (1)...(19): siRNA sense strand
caaaguccaagcucuucuu

SEQ ID NO: 2205035 - RNA, 19 nt, Homo sapiens
  misc_RNA (1)...(19): siRNA sense strand
gaaaaggaacgcuuacagu

SEQ ID NO: 2205036 - RNA, 19 nt, Homo sapiens
  misc_RNA (1)...(19): siRNA sense strand
aauguugucauccgucaua

SEQ ID NO: 2205037 - RNA, 19 nt, Homo sapiens
  misc_RNA (1)...(19): siRNA sense strand
cugaagagauagaugaaaa

SEQ ID NO: 2205038 - RNA, 19 nt, Homo sapiens
  misc_RNA (1)...(19): siRNA sense strand
acagauggguugccugacu

SEQ ID NO: 2205039 - RNA, 19 nt, Homo sapiens
  misc_RNA (1)...(19): siRNA sense strand
aacaugaaaucgggaguga

SEQ ID NO: 2205040 - RNA, 19 nt, Homo sapiens
  misc_RNA (1)...(19): siRNA sense strand
gcugcagauugaaagagaa

SEQ ID NO: 2205041 - RNA, 19 nt, Homo sapiens
  misc_RNA (1)...(19): siRNA sense strand
gaaggagcggcugcagauu

SEQ ID NO: 2205042 - RNA, 19 nt, Homo sapiens
  misc_RNA (1)...(19): siRNA sense strand
agaaggagcggcugcagau

SEQ ID NO: 2205043 - RNA, 19 nt, Homo sapiens
  misc_RNA (1)...(19): siRNA sense strand
cuagaucugcauaugauga

SEQ ID NO: 2205044 - RNA, 19 nt, Homo sapiens
  misc_RNA (1)...(19): siRNA sense strand
caagguggaagaggaagaa

SEQ ID NO: 2205045 - RNA, 19 nt, Homo sapiens
  misc_RNA (1)...(19): siRNA sense strand
ugaggaggaggaagaaaug

SEQ ID NO: 2205046 - RNA, 19 nt, Homo sapiens
  misc_RNA (1)...(19): siRNA sense strand
uacaacauauucaccacau

SEQ ID NO: 2205047 - RNA, 19 nt, Homo sapiens
  misc_RNA (1)...(19): siRNA sense strand
gaacgcuugcaacuggaaa

SEQ ID NO: 2205048 - RNA, 19 nt, Homo sapiens
  misc_RNA (1)...(19): siRNA sense strand
acauagaaacagagaaguu

SEQ ID NO: 2205049 - RNA, 19 nt, Homo sapiens
  misc_RNA (1)...(19): siRNA sense strand
aaauugaggaggaggaaga

SEQ ID NO: 2205050 - RNA, 19 nt, Homo sapiens
  misc_RNA (1)...(19): siRNA sense strand
gagguuacagauagucaau

SEQ ID NO: 2205051 - RNA, 19 nt, Homo sapiens
  misc_RNA (1)...(19): siRNA sense strand
ucaacaccaucuagaucug

SEQ ID NO: 2205052 - RNA, 19 nt, Homo sapiens
  misc_RNA (1)...(19): siRNA sense strand
cgcagaguccugaauuuga

SEQ ID NO: 2205053 - RNA, 19 nt, Homo sapiens
  misc_RNA (1)...(19): siRNA sense strand
acaacauauucaccacauu

SEQ ID NO: 2205054 - RNA, 19 nt, Homo sapiens
  misc_RNA (1)...(19): siRNA sense strand
cugaagaaaguaacaugaa

SEQ ID NO: 2205055 - RNA, 19 nt, Homo sapiens
  misc_RNA (1)...(19): siRNA sense strand
caaccacaggacauagaaa

SEQ ID NO: 2205056 - RNA, 19 nt, Homo sapiens
  misc_RNA (1)...(19): siRNA sense strand
uacagauagucaauucaga

SEQ ID NO: 2205057 - RNA, 19 nt, Homo sapiens
  misc_RNA (1)...(19): siRNA sense strand
ggauaucgaggccgaaagg

SEQ ID NO: 2205058 - RNA, 19 nt, Homo sapiens
  misc_RNA (1)...(19): siRNA sense strand
gagaaacagaaacuagagu

SEQ ID NO: 2205059 - RNA, 19 nt, Homo sapiens
  misc_RNA (1)...(19): siRNA sense strand
ggaggcagaagucuuacca

SEQ ID NO: 2205060 - RNA, 19 nt, Homo sapiens
  misc_RNA (1)...(19): siRNA sense strand
gggagugaaagcuaagaga

SEQ ID NO: 2205061 - RNA, 19 nt, Homo sapiens
  misc_RNA (1)...(19): siRNA sense strand
guacagccauuucggauug

SEQ ID NO: 2205062 - RNA, 19 nt, Homo sapiens
  misc_RNA (1)...(19): siRNA sense strand
caaauacugugcauucuuc

SEQ ID NO: 2205063 - RNA, 19 nt, Homo sapiens
  misc_RNA (1)...(19): siRNA sense strand
gcaagaggaucaagcuaca

SEQ ID NO: 2205064 - RNA, 19 nt, Homo sapiens
  misc_RNA (1)...(19): siRNA sense strand
cuacaaauguugaagaauc

SEQ ID NO: 2205065 - RNA, 19 nt, Homo sapiens
  misc_RNA (1)...(19): siRNA sense strand
caaaggaugcuacaaaugu

SEQ ID NO: 2205066 - RNA, 19 nt, Homo sapiens
  misc_RNA (1)...(19): siRNA sense strand
gagcgguucagaucaauaa

SEQ ID NO: 2205067 - RNA, 19 nt, Homo sapiens
  misc_RNA (1)...(19): siRNA sense strand
gaaagauuggcuagaagaa

SEQ ID NO: 2205068 - RNA, 19 nt, Homo sapiens
  misc_RNA (1)...(19): siRNA sense strand
gcaaaggaugcuacaaaug

SEQ ID NO: 2205069 - RNA, 19 nt, Homo sapiens
  misc_RNA (1)...(19): siRNA sense strand
ugauuuagcuucacaacgu

SEQ ID NO: 2205070 - RNA, 19 nt, Homo sapiens
  misc_RNA (1)...(19): siRNA sense strand
guaaagcccaggaaagaau

SEQ ID NO: 2205071 - RNA, 19 nt, Homo sapiens
  misc_RNA (1)...(19): siRNA sense strand
ugugaaagauuggcuagaa

SEQ ID NO: 2205072 - RNA, 19 nt, Homo sapiens
  misc_RNA (1)...(19): siRNA sense strand
aaaggaugcuacaaauguu

SEQ ID NO: 2205073 - RNA, 19 nt, Homo sapiens
  misc_RNA (1)...(19): siRNA sense strand
gacgagagacauauaugaa

SEQ ID NO: 2205074 - RNA, 19 nt, Homo sapiens
  misc_RNA (1)...(19): siRNA sense strand
caggagcgguucagaucaa

SEQ ID NO: 2205075 - RNA, 19 nt, Homo sapiens
  misc_RNA (1)...(19): siRNA sense strand
ggacaggagcgguucagau

SEQ ID NO: 2205076 - RNA, 19 nt, Homo sapiens
  misc_RNA (1)...(19): siRNA sense strand
uugaacaugugaaagauug

SEQ ID NO: 2205077 - RNA, 19 nt, Homo sapiens
  misc_RNA (1)...(19): siRNA sense strand
cgagagacauauaugaacu

SEQ ID NO: 2205078 - RNA, 19 nt, Homo sapiens
  misc_RNA (1)...(19): siRNA sense strand
ucagcagacuguggaauga

SEQ ID NO: 2205079 - RNA, 19 nt, Homo sapiens
  misc_RNA (1)...(19): siRNA sense strand
gacaggagcgguucagauc

SEQ ID NO: 2205080 - RNA, 19 nt, Homo sapiens
  misc_RNA (1)...(19): siRNA sense strand
gcaguaaagcccaggaaag

SEQ ID NO: 2205081 - RNA, 19 nt, Homo sapiens
  misc_RNA (1)...(19): siRNA sense strand
ugacgagagacauauauga

SEQ ID NO: 2205082 - RNA, 19 nt, Homo sapiens
  misc_RNA (1)...(19): siRNA sense strand
ucacaaucuugacgagaga

SEQ ID NO: 2205083 - RNA, 19 nt, Homo sapiens
  misc_RNA (1)...(19): siRNA sense strand
caguaaagcccaggaaaga

SEQ ID NO: 2205084 - RNA, 19 nt, Homo sapiens
  misc_RNA (1)...(19): siRNA sense strand
ugaaagauuggcuagaaga

SEQ ID NO: 2205085 - RNA, 19 nt, Homo sapiens
  misc_RNA (1)...(19): siRNA sense strand
uauagaaaccucagcaaag

SEQ ID NO: 2205086 - RNA, 19 nt, Homo sapiens
  misc_RNA (1)...(19): siRNA sense strand
gauuguauuucugcuagug

SEQ ID NO: 2205087 - RNA, 19 nt, Homo sapiens
  misc_RNA (1)...(19): siRNA sense strand
ccaaauacugugcauucuu

SEQ ID NO: 2205088 - RNA, 19 nt, Homo sapiens
  misc_RNA (1)...(19): siRNA sense strand
gggagaaauuuguauucag

SEQ ID NO: 2205089 - RNA, 19 nt, Homo sapiens
  misc_RNA (1)...(19): siRNA sense strand
acuguggaaugaaguauau

SEQ ID NO: 2205090 - RNA, 19 nt, Homo sapiens
  misc_RNA (1)...(19): siRNA sense strand
gugaaagauuggcuagaag

SEQ ID NO: 2205091 - RNA, 19 nt, Homo sapiens
  misc_RNA (1)...(19): siRNA sense strand
gcuucacaacgucaaguua

SEQ ID NO: 2205092 - RNA, 19 nt, Homo sapiens
  misc_RNA (1)...(19): siRNA sense strand
ggagcgguucagaucaaua

SEQ ID NO: 2205093 - RNA, 19 nt, Homo sapiens
  misc_RNA (1)...(19): siRNA sense strand
gagagacauauaugaacuu

SEQ ID NO: 2205094 - RNA, 19 nt, Homo sapiens
  misc_RNA (1)...(19): siRNA sense strand
auagaaaccucagcaaagg

SEQ ID NO: 2205095 - RNA, 19 nt, Homo sapiens
  misc_RNA (1)...(19): siRNA sense strand
gacuguggaaugaaguaua

SEQ ID NO: 2205096 - RNA, 19 nt, Homo sapiens
  misc_RNA (1)...(19): siRNA sense strand
aaucuugacgagagacaua

SEQ ID NO: 2205097 - RNA, 19 nt, Homo sapiens
  misc_RNA (1)...(19): siRNA sense strand
agggagaaauuuguauuca

SEQ ID NO: 2205098 - RNA, 19 nt, Homo sapiens
  misc_RNA (1)...(19): siRNA sense strand
ugcuacaaauguugaagaa

SEQ ID NO: 2205099 - RNA, 19 nt, Homo sapiens
  misc_RNA (1)...(19): siRNA sense strand
uuacuaaccgacgaucuuu

SEQ ID NO: 2205100 - RNA, 19 nt, Homo sapiens
  misc_RNA (1)...(19): siRNA sense strand
auacugugcauucuucuga

SEQ ID NO: 2205101 - RNA, 19 nt, Homo sapiens
  misc_RNA (1)...(19): siRNA sense strand
gggcaagaggaucaagcua

SEQ ID NO: 2205102 - RNA, 19 nt, Homo sapiens
  misc_RNA (1)...(19): siRNA sense strand
cauuucggauuguauuucu

SEQ ID NO: 2205103 - RNA, 19 nt, Homo sapiens
  misc_RNA (1)...(19): siRNA sense strand
uaaagcccaggaaagaaug

SEQ ID NO: 2205104 - RNA, 19 nt, Homo sapiens
  misc_RNA (1)...(19): siRNA sense strand
auauagaaaccucagcaaa

SEQ ID NO: 2205105 - RNA, 19 nt, Homo sapiens
  misc_RNA (1)...(19): siRNA sense strand
ggauuguauuucugcuagu

SEQ ID NO: 2205106 - RNA, 19 nt, Homo sapiens
  misc_RNA (1)...(19): siRNA sense strand
ucacaacgucaaguuacaa

SEQ ID NO: 2205107 - RNA, 19 nt, Homo sapiens
  misc_RNA (1)...(19): siRNA sense strand
guggaaugaaguauauaga

SEQ ID NO: 2205108 - RNA, 19 nt, Homo sapiens
  misc_RNA (1)...(19): siRNA sense strand
gcacuuaaguuagguuauu

SEQ ID NO: 2205109 - RNA, 19 nt, Homo sapiens
  misc_RNA (1)...(19): siRNA sense strand
ggaguuugcacuuaaguua

SEQ ID NO: 2205110 - RNA, 19 nt, Homo sapiens
  misc_RNA (1)...(19): siRNA sense strand
uaaacaaacuugguacuga

SEQ ID NO: 2205111 - RNA, 19 nt, Homo sapiens
  misc_RNA (1)...(19): siRNA sense strand
ggacuuggcuaaugagaag

SEQ ID NO: 2205112 - RNA, 19 nt, Homo sapiens
  misc_RNA (1)...(19): siRNA sense strand
gcaaagaaaccaccugaug

SEQ ID NO: 2205113 - RNA, 19 nt, Homo sapiens
  misc_RNA (1)...(19): siRNA sense strand
gaacaauuggguagcauuu

SEQ ID NO: 2205114 - RNA, 19 nt, Homo sapiens
  misc_RNA (1)...(19): siRNA sense strand
aaucugagaccaauaguua

SEQ ID NO: 2205115 - RNA, 19 nt, Homo sapiens
  misc_RNA (1)...(19): siRNA sense strand
ggagaguggugugcuauga

SEQ ID NO: 2205116 - RNA, 19 nt, Homo sapiens
  misc_RNA (1)...(19): siRNA sense strand
guacuaaacaaacuuggua

SEQ ID NO: 2205117 - RNA, 19 nt, Homo sapiens
  misc_RNA (1)...(19): siRNA sense strand
gaaagaggccacaaagaca

SEQ ID NO: 2205118 - RNA, 19 nt, Homo sapiens
  misc_RNA (1)...(19): siRNA sense strand
ggaggagaguggugugcua

SEQ ID NO: 2205119 - RNA, 19 nt, Homo sapiens
  misc_RNA (1)...(19): siRNA sense strand
ccacaaagacauuacaguu

SEQ ID NO: 2205120 - RNA, 19 nt, Homo sapiens
  misc_RNA (1)...(19): siRNA sense strand
gaacuugucaaacuuggaa

SEQ ID NO: 2205121 - RNA, 19 nt, Homo sapiens
  misc_RNA (1)...(19): siRNA sense strand
ggaaagaggccacaaagac

SEQ ID NO: 2205122 - RNA, 19 nt, Homo sapiens
  misc_RNA (1)...(19): siRNA sense strand
gaucaaacgguuaguacaa

SEQ ID NO: 2205123 - RNA, 19 nt, Homo sapiens
  misc_RNA (1)...(19): siRNA sense strand
gcaagagauuguaacagau

SEQ ID NO: 2205124 - RNA, 19 nt, Homo sapiens
  misc_RNA (1)...(19): siRNA sense strand
gaucaugagucagaacaau

SEQ ID NO: 2205125 - RNA, 19 nt, Homo sapiens
  misc_RNA (1)...(19): siRNA sense strand
caaagaaaccaccugaugu

SEQ ID NO: 2205126 - RNA, 19 nt, Homo sapiens
  misc_RNA (1)...(19): siRNA sense strand
gcaaugagccauggaaaca

SEQ ID NO: 2205127 - RNA, 19 nt, Homo sapiens
  misc_RNA (1)...(19): siRNA sense strand
caaacgguuaguacaauua

SEQ ID NO: 2205128 - RNA, 19 nt, Homo sapiens
  misc_RNA (1)...(19): siRNA sense strand
gggagaacuugucaaacuu

SEQ ID NO: 2205129 - RNA, 19 nt, Homo sapiens
  misc_RNA (1)...(19): siRNA sense strand
uaacuaagacucacagaca

SEQ ID NO: 2205130 - RNA, 19 nt, Homo sapiens
  misc_RNA (1)...(19): siRNA sense strand
uggaagaaguucauagaug

SEQ ID NO: 2205131 - RNA, 19 nt, Homo sapiens
  misc_RNA (1)...(19): siRNA sense strand
ugcaagagauuguaacaga

SEQ ID NO: 2205132 - RNA, 19 nt, Homo sapiens
  misc_RNA (1)...(19): siRNA sense strand
gcaagacuuuaaaccugaa

SEQ ID NO: 2205133 - RNA, 19 nt, Homo sapiens
  misc_RNA (1)...(19): siRNA sense strand
cauuacagaucaggaaauu

SEQ ID NO: 2205134 - RNA, 19 nt, Homo sapiens
  misc_RNA (1)...(19): siRNA sense strand
ucaaacgguuaguacaauu

SEQ ID NO: 2205135 - RNA, 19 nt, Homo sapiens
  misc_RNA (1)...(19): siRNA sense strand
aaacaaacuugguacugau

SEQ ID NO: 2205136 - RNA, 19 nt, Homo sapiens
  misc_RNA (1)...(19): siRNA sense strand
acacaaauucugaucauga

SEQ ID NO: 2205137 - RNA, 19 nt, Homo sapiens
  misc_RNA (1)...(19): siRNA sense strand
acagggacuuggcuaauga

SEQ ID NO: 2205138 - RNA, 19 nt, Homo sapiens
  misc_RNA (1)...(19): siRNA sense strand
cacaaagacauuacaguuu

SEQ ID NO: 2205139 - RNA, 19 nt, Homo sapiens
  misc_RNA (1)...(19): siRNA sense strand
uguaacagaugauggugaa

SEQ ID NO: 2205140 - RNA, 19 nt, Homo sapiens
  misc_RNA (1)...(19): siRNA sense strand
acaauuggguagcauuuca

SEQ ID NO: 2205141 - RNA, 19 nt, Homo sapiens
  misc_RNA (1)...(19): siRNA sense strand
aaugagccauggaaacaaa

SEQ ID NO: 2205142 - RNA, 19 nt, Homo sapiens
  misc_RNA (1)...(19): siRNA sense strand
ggagaacuugucaaacuug

SEQ ID NO: 2205143 - RNA, 19 nt, Homo sapiens
  misc_RNA (1)...(19): siRNA sense strand
guaccuuggucaacaguag

SEQ ID NO: 2205144 - RNA, 19 nt, Homo sapiens
  misc_RNA (1)...(19): siRNA sense strand
caagagauuguaacagaug

SEQ ID NO: 2205145 - RNA, 19 nt, Homo sapiens
  misc_RNA (1)...(19): siRNA sense strand
gcagcaauguggcaaugag

SEQ ID NO: 2205146 - RNA, 19 nt, Homo sapiens
  misc_RNA (1)...(19): siRNA sense strand
gagcaaucccgaccugaug

SEQ ID NO: 2205147 - RNA, 19 nt, Homo sapiens
  misc_RNA (1)...(19): siRNA sense strand
ugggagaacuugucaaacu

SEQ ID NO: 2205148 - RNA, 19 nt, Homo sapiens
  misc_RNA (1)...(19): siRNA sense strand
cugaugcucucauuacaga

SEQ ID NO: 2205149 - RNA, 19 nt, Homo sapiens
  misc_RNA (1)...(19): siRNA sense strand
ccauggaaacaaagaagua

SEQ ID NO: 2205150 - RNA, 19 nt, Homo sapiens
  misc_RNA (1)...(19): siRNA sense strand
aaagaaaccaccugaugug

SEQ ID NO: 2205151 - RNA, 19 nt, Homo sapiens
  misc_RNA (1)...(19): siRNA sense strand
cuaaugagaagccagaaug

SEQ ID NO: 2205152 - RNA, 19 nt, Homo sapiens
  misc_RNA (1)...(19): siRNA sense strand
aaagaggcgucugaagaga

SEQ ID NO: 2205153 - RNA, 19 nt, Homo sapiens
  misc_RNA (1)...(19): siRNA sense strand
guaaauuagagaaggagaa

SEQ ID NO: 2205154 - RNA, 19 nt, Homo sapiens
  misc_RNA (1)...(19): siRNA sense strand
gaaaaucugagaccaauag

SEQ ID NO: 2205155 - RNA, 19 nt, Homo sapiens
  misc_RNA (1)...(19): siRNA sense strand
gaaaacccaaguauggaua

SEQ ID NO: 2205156 - RNA, 19 nt, Homo sapiens
  misc_RNA (1)...(19): siRNA sense strand
gaauggaagaaguucauag

SEQ ID NO: 2205157 - RNA, 19 nt, Homo sapiens
  misc_RNA (1)...(19): siRNA sense strand
gugcgagaauaccaaacaa

SEQ ID NO: 2205158 - RNA, 19 nt, Homo sapiens
  misc_RNA (1)...(19): siRNA sense strand
cgaccugaugcucucauua

SEQ ID NO: 2205159 - RNA, 19 nt, Homo sapiens
  misc_RNA (1)...(19): siRNA sense strand
ucaugagucagaacaauug

SEQ ID NO: 2205160 - RNA, 19 nt, Homo sapiens
  misc_RNA (1)...(19): siRNA sense strand
gagaagccagaauggaaga

SEQ ID NO: 2205161 - RNA, 19 nt, Homo sapiens
  misc_RNA (1)...(19): siRNA sense strand
agguucagcuuguacuaaa

SEQ ID NO: 2205162 - RNA, 19 nt, Homo sapiens
  misc_RNA (1)...(19): siRNA sense strand
cacaaauucugaucaugag

SEQ ID NO: 2205163 - RNA, 19 nt, Homo sapiens
  misc_RNA (1)...(19): siRNA sense strand
uacagggacuuggcuaaug

SEQ ID NO: 2205164 - RNA, 19 nt, Homo sapiens
  misc_RNA (1)...(19): siRNA sense strand
agaggcgucugaagagaau

SEQ ID NO: 2205165 - RNA, 19 nt, Homo sapiens
  misc_RNA (1)...(19): siRNA sense strand
guagaaaacccaaguaugg

SEQ ID NO: 2205166 - RNA, 19 nt, Homo sapiens
  misc_RNA (1)...(19): siRNA sense strand
gucugaaucuccaaugcaa

SEQ ID NO: 2205167 - RNA, 19 nt, Homo sapiens
  misc_RNA (1)...(19): siRNA sense strand
gcugaucaaacgguuagua

SEQ ID NO: 2205168 - RNA, 19 nt, Homo sapiens
  misc_RNA (1)...(19): siRNA sense strand
gaucaggaaauuuuacgua

SEQ ID NO: 2205169 - RNA, 19 nt, Homo sapiens
  misc_RNA (1)...(19): siRNA sense strand
gaccugaugcucucauuac

SEQ ID NO: 2205170 - RNA, 19 nt, Homo sapiens
  misc_RNA (1)...(19): siRNA sense strand
ucagaacaauuggguagca

SEQ ID NO: 2205171 - RNA, 19 nt, Homo sapiens
  misc_RNA (1)...(19): siRNA sense strand
ucuggugacucugaagaaa

SEQ ID NO: 2205172 - RNA, 19 nt, Homo sapiens
  misc_RNA (1)...(19): siRNA sense strand
cuacauccaaggaagcaaa

SEQ ID NO: 2205173 - RNA, 19 nt, Homo sapiens
  misc_RNA (1)...(19): siRNA sense strand
uaacacgggaaacuucuuc

SEQ ID NO: 2205174 - RNA, 19 nt, Homo sapiens
  misc_RNA (1)...(19): siRNA sense strand
aaagugaggcugaucaaac

SEQ ID NO: 2205175 - RNA, 19 nt, Homo sapiens
  misc_RNA (1)...(19): siRNA sense strand
acuugguacugaugcuuua

SEQ ID NO: 2205176 - RNA, 19 nt, Homo sapiens
  misc_RNA (1)...(19): siRNA sense strand
aaauucugaucaugaguca

SEQ ID NO: 2205177 - RNA, 19 nt, Homo sapiens
  misc_RNA (1)...(19): siRNA sense strand
ugaccucggccaccuuuau

SEQ ID NO: 2205178 - RNA, 19 nt, Homo sapiens
  misc_RNA (1)...(19): siRNA sense strand
aagagauuguaacagauga

SEQ ID NO: 2205179 - RNA, 19 nt, Homo sapiens
  misc_RNA (1)...(19): siRNA sense strand
caagcgcaaugaaauuuug

SEQ ID NO: 2205180 - RNA, 19 nt, Homo sapiens
  misc_RNA (1)...(19): siRNA sense strand
cauccaaggaagcaaagaa

SEQ ID NO: 2205181 - RNA, 19 nt, Homo sapiens
  misc_RNA (1)...(19): siRNA sense strand
ugagucggacgguaucauu

SEQ ID NO: 2205182 - RNA, 19 nt, Homo sapiens
  misc_RNA (1)...(19): siRNA sense strand
gggcuugaaggaucaccua

SEQ ID NO: 2205183 - RNA, 19 nt, Homo sapiens
  misc_RNA (1)...(19): siRNA sense strand
gcgagaauaccaaacaaaa

SEQ ID NO: 2205184 - RNA, 19 nt, Homo sapiens
  misc_RNA (1)...(19): siRNA sense strand
cugauguggugcgagaaua

SEQ ID NO: 2205185 - RNA, 19 nt, Homo sapiens
  misc_RNA (1)...(19): siRNA sense strand
guuuagagccucacauacu

SEQ ID NO: 2205186 - RNA, 19 nt, Homo sapiens
  misc_RNA (1)...(19): siRNA sense strand
auacucaagcgcaaugaaa

SEQ ID NO: 2205187 - RNA, 19 nt, Homo sapiens
  misc_RNA (1)...(19): siRNA sense strand
gagauuguaacagaugaug

SEQ ID NO: 2205188 - RNA, 19 nt, Homo sapiens
  misc_RNA (1)...(19): siRNA sense strand
aauggaagaaguucauaga

SEQ ID NO: 2205189 - RNA, 19 nt, Homo sapiens
  misc_RNA (1)...(19): siRNA sense strand
ugcaagcucuggugacucu

SEQ ID NO: 2205190 - RNA, 19 nt, Homo sapiens
  misc_RNA (1)...(19): siRNA sense strand
gaccucggccaccuuuaug

SEQ ID NO: 2205191 - RNA, 19 nt, Homo sapiens
  misc_RNA (1)...(19): siRNA sense strand
gauuguaacagaugauggu

SEQ ID NO: 2205192 - RNA, 19 nt, Homo sapiens
  misc_RNA (1)...(19): siRNA sense strand
ggguagcauuucaguagag

SEQ ID NO: 2205193 - RNA, 19 nt, Homo sapiens
  misc_RNA (1)...(19): siRNA sense strand
gaggagaguggugugcuau

SEQ ID NO: 2205194 - RNA, 19 nt, Homo sapiens
  misc_RNA (1)...(19): siRNA sense strand
caagcucuggugacucuga

SEQ ID NO: 2205195 - RNA, 19 nt, Homo sapiens
  misc_RNA (1)...(19): siRNA sense strand
ggugcgagaauaccaaaca

SEQ ID NO: 2205196 - RNA, 19 nt, Homo sapiens
  misc_RNA (1)...(19): siRNA sense strand
gaggcugaucaaacgguua

SEQ ID NO: 2205197 - RNA, 19 nt, Homo sapiens
  misc_RNA (1)...(19): siRNA sense strand
cagaauggaagaaguucau

SEQ ID NO: 2205198 - RNA, 19 nt, Homo sapiens
  misc_RNA (1)...(19): siRNA sense strand
gcucuggugacucugaaga

SEQ ID NO: 2205199 - RNA, 19 nt, Homo sapiens
  misc_RNA (1)...(19): siRNA sense strand
gugaaaaucugagaccaau

SEQ ID NO: 2205200 - RNA, 19 nt, Homo sapiens
  misc_RNA (1)...(19): siRNA sense strand
cagguucagcuuguacuaa

SEQ ID NO: 2205201 - RNA, 19 nt, Homo sapiens
  misc_RNA (1)...(19): siRNA sense strand
gcuaaugagaagccagaau

SEQ ID NO: 2205202 - RNA, 19 nt, Homo sapiens
  misc_RNA (1)...(19): siRNA sense strand
gggacuuggcuaaugagaa

SEQ ID NO: 2205203 - RNA, 19 nt, Homo sapiens
  misc_RNA (1)...(19): siRNA sense strand
gagaaaauccugguguuca

SEQ ID NO: 2205204 - RNA, 19 nt, Homo sapiens
  misc_RNA (1)...(19): siRNA sense strand
uacguaaauuagagaagga

SEQ ID NO: 2205205 - RNA, 19 nt, Homo sapiens
  misc_RNA (1)...(19): siRNA sense strand
gaugcucucauuacagauc

SEQ ID NO: 2205206 - RNA, 19 nt, Homo sapiens
  misc_RNA (1)...(19): siRNA sense strand
uggcagcaauguggcaaug

SEQ ID NO: 2205207 - RNA, 19 nt, Homo sapiens
  misc_RNA (1)...(19): siRNA sense strand
cuauaacacgggaaacuuc

SEQ ID NO: 2205208 - RNA, 19 nt, Homo sapiens
  misc_RNA (1)...(19): siRNA sense strand
gaaaauagcuucuccaaaa

SEQ ID NO: 2205209 - RNA, 19 nt, Homo sapiens
  misc_RNA (1)...(19): siRNA sense strand
ggacagcucuuuggaauuu

SEQ ID NO: 2205210 - RNA, 19 nt, Homo sapiens
  misc_RNA (1)...(19): siRNA sense strand
gaaaugguguggccaguuu

SEQ ID NO: 2205211 - RNA, 19 nt, Homo sapiens
  misc_RNA (1)...(19): siRNA sense strand
gagaaugccucagauauuu

SEQ ID NO: 2205212 - RNA, 19 nt, Homo sapiens
  misc_RNA (1)...(19): siRNA sense strand
gcacauuucugucaucauu

SEQ ID NO: 2205213 - RNA, 19 nt, Homo sapiens
  misc_RNA (1)...(19): siRNA sense strand
gaagucacaugaggaaaua

SEQ ID NO: 2205214 - RNA, 19 nt, Homo sapiens
  misc_RNA (1)...(19): siRNA sense strand
ggaaaucacgugaaacuuu

SEQ ID NO: 2205215 - RNA, 19 nt, Homo sapiens
  misc_RNA (1)...(19): siRNA sense strand
gaagaucuaucauaaacug

SEQ ID NO: 2205216 - RNA, 19 nt, Homo sapiens
  misc_RNA (1)...(19): siRNA sense strand
ggcagaagcucauuaauca

SEQ ID NO: 2205217 - RNA, 19 nt, Homo sapiens
  misc_RNA (1)...(19): siRNA sense strand
ugagagagauuaccaguug

SEQ ID NO: 2205218 - RNA, 19 nt, Homo sapiens
  misc_RNA (1)...(19): siRNA sense strand
ggacagaaacugcugcuaa

SEQ ID NO: 2205219 - RNA, 19 nt, Homo sapiens
  misc_RNA (1)...(19): siRNA sense strand
gcacucaccuggacaacuu

SEQ ID NO: 2205220 - RNA, 19 nt, Homo sapiens
  misc_RNA (1)...(19): siRNA sense strand
gagaagaucuaucauaaac

SEQ ID NO: 2205221 - RNA, 19 nt, Homo sapiens
  misc_RNA (1)...(19): siRNA sense strand
ggaggcagcugcaccaaga

SEQ ID NO: 2205222 - RNA, 19 nt, Homo sapiens
  misc_RNA (1)...(19): siRNA sense strand
gauagcaucugucuuaaag

SEQ ID NO: 2205223 - RNA, 19 nt, Homo sapiens
  misc_RNA (1)...(19): siRNA sense strand
gcaaagcccucugcgugua

SEQ ID NO: 2205224 - RNA, 19 nt, Homo sapiens
  misc_RNA (1)...(19): siRNA sense strand
gcagugacuugguaaagaa

SEQ ID NO: 2205225 - RNA, 19 nt, Homo sapiens
  misc_RNA (1)...(19): siRNA sense strand
caacaccaaugccaugaaa

SEQ ID NO: 2205226 - RNA, 19 nt, Homo sapiens
  misc_RNA (1)...(19): siRNA sense strand
ugaaggaaaucacgugaaa

SEQ ID NO: 2205227 - RNA, 19 nt, Homo sapiens
  misc_RNA (1)...(19): siRNA sense strand
gcaaucagccaaugugaaa

SEQ ID NO: 2205228 - RNA, 19 nt, Homo sapiens
  misc_RNA (1)...(19): siRNA sense strand
gcaaagaagaggcuccaua

SEQ ID NO: 2205229 - RNA, 19 nt, Homo sapiens
  misc_RNA (1)...(19): siRNA sense strand
gccaugaaauccuuuguuu

SEQ ID NO: 2205230 - RNA, 19 nt, Homo sapiens
  misc_RNA (1)...(19): siRNA sense strand
gaaugaaguuaucaacaug

SEQ ID NO: 2205231 - RNA, 19 nt, Homo sapiens
  misc_RNA (1)...(19): siRNA sense strand
gcauaagucuuugcaaaug

SEQ ID NO: 2205232 - RNA, 19 nt, Homo sapiens
  misc_RNA (1)...(19): siRNA sense strand
ucaaugaucuguuuguugu

SEQ ID NO: 2205233 - RNA, 19 nt, Homo sapiens
  misc_RNA (1)...(19): siRNA sense strand
ggaauugugccuacucuaa

SEQ ID NO: 2205234 - RNA, 19 nt, Homo sapiens
  misc_RNA (1)...(19): siRNA sense strand
ccaaucagaugacugcauu

SEQ ID NO: 2205235 - RNA, 19 nt, Homo sapiens
  misc_RNA (1)...(19): siRNA sense strand
aggagaagaucuaucauaa

SEQ ID NO: 2205236 - RNA, 19 nt, Homo sapiens
  misc_RNA (1)...(19): siRNA sense strand
gagaauugccuuaggauau

SEQ ID NO: 2205237 - RNA, 19 nt, Homo sapiens
  misc_RNA (1)...(19): siRNA sense strand
caacauuccucauccaauc

SEQ ID NO: 2205238 - RNA, 19 nt, Homo sapiens
  misc_RNA (1)...(19): siRNA sense strand
agaaaucacuucccucuuc

SEQ ID NO: 2205239 - RNA, 19 nt, Homo sapiens
  misc_RNA (1)...(19): siRNA sense strand
ccauuucuguggcaucuua

SEQ ID NO: 2205240 - RNA, 19 nt, Homo sapiens
  misc_RNA (1)...(19): siRNA sense strand
gaaaucacuucccucuuca

SEQ ID NO: 2205241 - RNA, 19 nt, Homo sapiens
  misc_RNA (1)...(19): siRNA sense strand
cgaaugaaguuaucaacau

SEQ ID NO: 2205242 - RNA, 19 nt, Homo sapiens
  misc_RNA (1)...(19): siRNA sense strand
gaaaucacgugaaacuuuu

SEQ ID NO: 2205243 - RNA, 19 nt, Homo sapiens
  misc_RNA (1)...(19): siRNA sense strand
ucagaugacugcauuuaau

SEQ ID NO: 2205244 - RNA, 19 nt, Homo sapiens
  misc_RNA (1)...(19): siRNA sense strand
gggauuuguuugaagauuu

SEQ ID NO: 2205245 - RNA, 19 nt, Homo sapiens
  misc_RNA (1)...(19): siRNA sense strand
ucaguaagcucccaagaca

SEQ ID NO: 2205246 - RNA, 19 nt, Homo sapiens
  misc_RNA (1)...(19): siRNA sense strand
ugugauagcaucugucuua

SEQ ID NO: 2205247 - RNA, 19 nt, Homo sapiens
  misc_RNA (1)...(19): siRNA sense strand
caaaugaaacggccucuug

SEQ ID NO: 2205248 - RNA, 19 nt, Homo sapiens
  misc_RNA (1)...(19): siRNA sense strand
gcccaaagguguaguucuu

SEQ ID NO: 2205249 - RNA, 19 nt, Homo sapiens
  misc_RNA (1)...(19): siRNA sense strand
gcacaugguugagaaaugg

SEQ ID NO: 2205250 - RNA, 19 nt, Homo sapiens
  misc_RNA (1)...(19): siRNA sense strand
gcucauuaaucagaguuua

SEQ ID NO: 2205251 - RNA, 19 nt, Homo sapiens
  misc_RNA (1)...(19): siRNA sense strand
ucacaaaugcauucuguaa

SEQ ID NO: 2205252 - RNA, 19 nt, Homo sapiens
  misc_RNA (1)...(19): siRNA sense strand
caauaggacucugcugauu

SEQ ID NO: 2205253 - RNA, 19 nt, Homo sapiens
  misc_RNA (1)...(19): siRNA sense strand
cggcauaagucuuugcaaa

SEQ ID NO: 2205254 - RNA, 19 nt, Homo sapiens
  misc_RNA (1)...(19): siRNA sense strand
gcaucugucuuaaaggauu

SEQ ID NO: 2205255 - RNA, 19 nt, Homo sapiens
  misc_RNA (1)...(19): siRNA sense strand
aaagguaucuucaggcaau

SEQ ID NO: 2205256 - RNA, 19 nt, Homo sapiens
  misc_RNA (1)...(19): siRNA sense strand
ccuauucaaugaucuguuu

SEQ ID NO: 2205257 - RNA, 19 nt, Homo sapiens
  misc_RNA (1)...(19): siRNA sense strand
gaaaaggacuacccgaaga

SEQ ID NO: 2205258 - RNA, 19 nt, Homo sapiens
  misc_RNA (1)...(19): siRNA sense strand
gcagagaacuaaaagagaa

SEQ ID NO: 2205259 - RNA, 19 nt, Homo sapiens
  misc_RNA (1)...(19): siRNA sense strand
ggagaagaucuaucauaaa

SEQ ID NO: 2205260 - RNA, 19 nt, Homo sapiens
  misc_RNA (1)...(19): siRNA sense strand
ucaaacggcauaagucuuu

SEQ ID NO: 2205261 - RNA, 19 nt, Homo sapiens
  misc_RNA (1)...(19): siRNA sense strand
aagaaaagcuugucuggua

SEQ ID NO: 2205262 - RNA, 19 nt, Homo sapiens
  misc_RNA (1)...(19): siRNA sense strand
gaaacggccucuugaaucc

SEQ ID NO: 2205263 - RNA, 19 nt, Homo sapiens
  misc_RNA (1)...(19): siRNA sense strand
aagcauggacucugucuua

SEQ ID NO: 2205264 - RNA, 19 nt, Homo sapiens
  misc_RNA (1)...(19): siRNA sense strand
gagagaaugccucagauau

SEQ ID NO: 2205265 - RNA, 19 nt, Homo sapiens
  misc_RNA (1)...(19): siRNA sense strand
agaggaggauuaucucaaa

SEQ ID NO: 2205266 - RNA, 19 nt, Homo sapiens
  misc_RNA (1)...(19): siRNA sense strand
gaauugugccuacucuaaa

SEQ ID NO: 2205267 - RNA, 19 nt, Homo sapiens
  misc_RNA (1)...(19): siRNA sense strand
uaggauauuuggagaagaa

SEQ ID NO: 2205268 - RNA, 19 nt, Homo sapiens
  misc_RNA (1)...(19): siRNA sense strand
gaauugccuuaggauauuu

SEQ ID NO: 2205269 - RNA, 19 nt, Homo sapiens
  misc_RNA (1)...(19): siRNA sense strand
caggacagcucuuuggaau

SEQ ID NO: 2205270 - RNA, 19 nt, Homo sapiens
  misc_RNA (1)...(19): siRNA sense strand
ucaaggaaaugaugaagag

SEQ ID NO: 2205271 - RNA, 19 nt, Homo sapiens
  misc_RNA (1)...(19): siRNA sense strand
gaaggaaagacauguuuua

SEQ ID NO: 2205272 - RNA, 19 nt, Homo sapiens
  misc_RNA (1)...(19): siRNA sense strand
ucgacuaucuggauucaaa

SEQ ID NO: 2205273 - RNA, 19 nt, Homo sapiens
  misc_RNA (1)...(19): siRNA sense strand
ccucagauauuucuugcuu

SEQ ID NO: 2205274 - RNA, 19 nt, Homo sapiens
  misc_RNA (1)...(19): siRNA sense strand
ucauuagugugcuccaaua

SEQ ID NO: 2205275 - RNA, 19 nt, Homo sapiens
  misc_RNA (1)...(19): siRNA sense strand
ggaaauagagccugguagu

SEQ ID NO: 2205276 - RNA, 19 nt, Homo sapiens
  misc_RNA (1)...(19): siRNA sense strand
agaauugccuuaggauauu

SEQ ID NO: 2205277 - RNA, 19 nt, Homo sapiens
  misc_RNA (1)...(19): siRNA sense strand
uagcaucugucuuaaagga

SEQ ID NO: 2205278 - RNA, 19 nt, Homo sapiens
  misc_RNA (1)...(19): siRNA sense strand
gaaauccugcagagaacua

SEQ ID NO: 2205279 - RNA, 19 nt, Homo sapiens
  misc_RNA (1)...(19): siRNA sense strand
ccaagaaccagcccuuuga

SEQ ID NO: 2205280 - RNA, 19 nt, Homo sapiens
  misc_RNA (1)...(19): siRNA sense strand
guccacagcugcagcaaau

SEQ ID NO: 2205281 - RNA, 19 nt, Homo sapiens
  misc_RNA (1)...(19): siRNA sense strand
ugacuuggcccauucuaaa

SEQ ID NO: 2205282 - RNA, 19 nt, Homo sapiens
  misc_RNA (1)...(19): siRNA sense strand
uguaauggaucaaggaaau

SEQ ID NO: 2205283 - RNA, 19 nt, Homo sapiens
  misc_RNA (1)...(19): siRNA sense strand
ccaaugccaugaaauccuu

SEQ ID NO: 2205284 - RNA, 19 nt, Homo sapiens
  misc_RNA (1)...(19): siRNA sense strand
gacuuaagcugugcaugaa

SEQ ID NO: 2205285 - RNA, 19 nt, Homo sapiens
  misc_RNA (1)...(19): siRNA sense strand
ucagauauuucuugcuuuc

SEQ ID NO: 2205286 - RNA, 19 nt, Homo sapiens
  misc_RNA (1)...(19): siRNA sense strand
gaaugacaaucugcccaaa

SEQ ID NO: 2205287 - RNA, 19 nt, Homo sapiens
  misc_RNA (1)...(19): siRNA sense strand
gcaagaguagugccacaaa

SEQ ID NO: 2205288 - RNA, 19 nt, Homo sapiens
  misc_RNA (1)...(19): siRNA sense strand
gggcagaagcucauuaauc

SEQ ID NO: 2205289 - RNA, 19 nt, Homo sapiens
  misc_RNA (1)...(19): siRNA sense strand
gaaccagcccuuugaugug

SEQ ID NO: 2205290 - RNA, 19 nt, Homo sapiens
  misc_RNA (1)...(19): siRNA sense strand
ggagaaggcaacaccaaug

SEQ ID NO: 2205291 - RNA, 19 nt, Homo sapiens
  misc_RNA (1)...(19): siRNA sense strand
gcugggauuuguuugaaga

SEQ ID NO: 2205292 - RNA, 19 nt, Homo sapiens
  misc_RNA (1)...(19): siRNA sense strand
gagaugcagugccaguuca

SEQ ID NO: 2205293 - RNA, 19 nt, Homo sapiens
  misc_RNA (1)...(19): siRNA sense strand
caacauagaagaccagaac

SEQ ID NO: 2205294 - RNA, 19 nt, Homo sapiens
  misc_RNA (1)...(19): siRNA sense strand
guguagaauucaugacaaa

SEQ ID NO: 2205295 - RNA, 19 nt, Homo sapiens
  misc_RNA (1)...(19): siRNA sense strand
caaagaaggacaccaugga

SEQ ID NO: 2205296 - RNA, 19 nt, Homo sapiens
  misc_RNA (1)...(19): siRNA sense strand
ccauccggcucaucaguaa

SEQ ID NO: 2205297 - RNA, 19 nt, Homo sapiens
  misc_RNA (1)...(19): siRNA sense strand
gggcugggauuuguuugaa

SEQ ID NO: 2205298 - RNA, 19 nt, Homo sapiens
  misc_RNA (1)...(19): siRNA sense strand
agaccuuucuccugacuuu

SEQ ID NO: 2205299 - RNA, 19 nt, Homo sapiens
  misc_RNA (1)...(19): siRNA sense strand
ugaaugacuccuccuauga

SEQ ID NO: 2205300 - RNA, 19 nt, Homo sapiens
  misc_RNA (1)...(19): siRNA sense strand
gaagagcauuccccucaaa

SEQ ID NO: 2205301 - RNA, 19 nt, Homo sapiens
  misc_RNA (1)...(19): siRNA sense strand
acaaaugcauucuguaacu

SEQ ID NO: 2205302 - RNA, 19 nt, Homo sapiens
  misc_RNA (1)...(19): siRNA sense strand
gugaugcaauucuuucuca

SEQ ID NO: 2205303 - RNA, 19 nt, Homo sapiens
  misc_RNA (1)...(19): siRNA sense strand
cagagagguuucagugaga

SEQ ID NO: 2205304 - RNA, 19 nt, Homo sapiens
  misc_RNA (1)...(19): siRNA sense strand
uaucuggauucaaagcuuu

SEQ ID NO: 2205305 - RNA, 19 nt, Homo sapiens
  misc_RNA (1)...(19): siRNA sense strand
cacuguagcucuccauuca

SEQ ID NO: 2205306 - RNA, 19 nt, Homo sapiens
  misc_RNA (1)...(19): siRNA sense strand
aaagagaguagccaugaaa

SEQ ID NO: 2205307 - RNA, 19 nt, Homo sapiens
  misc_RNA (1)...(19): siRNA sense strand
guccagcugugaugcaauu

SEQ ID NO: 2205308 - RNA, 19 nt, Homo sapiens
  misc_RNA (1)...(19): siRNA sense strand
gaaacaaacugugacaucu

SEQ ID NO: 2205309 - RNA, 19 nt, Homo sapiens
  misc_RNA (1)...(19): siRNA sense strand
cauaugcuccagagaauua

SEQ ID NO: 2205310 - RNA, 19 nt, Homo sapiens
  misc_RNA (1)...(19): siRNA sense strand
cagugcagcugccuucaua

SEQ ID NO: 2205311 - RNA, 19 nt, Homo sapiens
  misc_RNA (1)...(19): siRNA sense strand
ccaguuguguuucauguga

SEQ ID NO: 2205312 - RNA, 19 nt, Homo sapiens
  misc_RNA (1)...(19): siRNA sense strand
gaucuuugauuccuaccuu

SEQ ID NO: 2205313 - RNA, 19 nt, Homo sapiens
  misc_RNA (1)...(19): siRNA sense strand
ggaaacaaacugugacauc

SEQ ID NO: 2205314 - RNA, 19 nt, Homo sapiens
  misc_RNA (1)...(19): siRNA sense strand
ugugacaucugcuauaguu

SEQ ID NO: 2205315 - RNA, 19 nt, Homo sapiens
  misc_RNA (1)...(19): siRNA sense strand
ugacaucugcuauaguuaa

SEQ ID NO: 2205316 - RNA, 19 nt, Homo sapiens
  misc_RNA (1)...(19): siRNA sense strand
gaagaggcacaaacagaga

SEQ ID NO: 2205317 - RNA, 19 nt, Homo sapiens
  misc_RNA (1)...(19): siRNA sense strand
aaacagagaggcacaaagu

SEQ ID NO: 2205318 - RNA, 19 nt, Homo sapiens
  misc_RNA (1)...(19): siRNA sense strand
ucaaauuccuccauucucu

SEQ ID NO: 2205319 - RNA, 19 nt, Homo sapiens
  misc_RNA (1)...(19): siRNA sense strand
caggaucaccuucaaauuc

SEQ ID NO: 2205320 - RNA, 19 nt, Homo sapiens
  misc_RNA (1)...(19): siRNA sense strand
cauucucucuggcuccuua

SEQ ID NO: 2205321 - RNA, 19 nt, Homo sapiens
  misc_RNA (1)...(19): siRNA sense strand
ccagugauuucuauaagag

SEQ ID NO: 2205322 - RNA, 19 nt, Homo sapiens
  misc_RNA (1)...(19): siRNA sense strand
ccaccagugauuucuauaa

SEQ ID NO: 2205323 - RNA, 19 nt, Homo sapiens
  misc_RNA (1)...(19): siRNA sense strand
ccacuguuguguccugaga

SEQ ID NO: 2205324 - RNA, 19 nt, Homo sapiens
  misc_RNA (1)...(19): siRNA sense strand
acaaagugcuccacaccau

SEQ ID NO: 2205325 - RNA, 19 nt, Homo sapiens
  misc_RNA (1)...(19): siRNA sense strand
caagcugccucgaccagau

SEQ ID NO: 2205326 - RNA, 19 nt, Homo sapiens
  misc_RNA (1)...(19): siRNA sense strand
aaagugcuccacaccauuu

SEQ ID NO: 2205327 - RNA, 19 nt, Homo sapiens
  misc_RNA (1)...(19): siRNA sense strand
gcagcaguguccaccuuuc

SEQ ID NO: 2205328 - RNA, 19 nt, Homo sapiens
  misc_RNA (1)...(19): siRNA sense strand
agaagaccauuccuaccaa

SEQ ID NO: 2205329 - RNA, 19 nt, Homo sapiens
  misc_RNA (1)...(19): siRNA sense strand
cuuccacgcccaauuauuu

SEQ ID NO: 2205330 - RNA, 19 nt, Homo sapiens
  misc_RNA (1)...(19): siRNA sense strand
agucaaggcaugcgaguaa

SEQ ID NO: 2205331 - RNA, 19 nt, Homo sapiens
  misc_RNA (1)...(19): siRNA sense strand
ucuauaagagggaaacaaa

SEQ ID NO: 2205332 - RNA, 19 nt, Homo sapiens
  misc_RNA (1)...(19): siRNA sense strand
ccacguauccacuguugug

SEQ ID NO: 2205333 - RNA, 19 nt, Homo sapiens
  misc_RNA (1)...(19): siRNA sense strand
ggacuuggccuggcacucu

SEQ ID NO: 2205334 - RNA, 19 nt, Homo sapiens
  misc_RNA (1)...(19): siRNA sense strand
gaccagaucuuugauuccu

SEQ ID NO: 2205335 - RNA, 19 nt, Homo sapiens
  misc_RNA (1)...(19): siRNA sense strand
caccagugauuucuauaag

SEQ ID NO: 2205336 - RNA, 19 nt, Homo sapiens
  misc_RNA (1)...(19): siRNA sense strand
caaagugcuccacaccauu

SEQ ID NO: 2205337 - RNA, 19 nt, Homo sapiens
  misc_RNA (1)...(19): siRNA sense strand
gcagcugccuucauaugcu

SEQ ID NO: 2205338 - RNA, 19 nt, Homo sapiens
  misc_RNA (1)...(19): siRNA sense strand
uuucuuccacgcccaauua

SEQ ID NO: 2205339 - RNA, 19 nt, Homo sapiens
  misc_RNA (1)...(19): siRNA sense strand
ccacaccauuucccagaca

SEQ ID NO: 2205340 - RNA, 19 nt, Homo sapiens
  misc_RNA (1)...(19): siRNA sense strand
ucgaccagaucuuugauuc

SEQ ID NO: 2205341 - RNA, 19 nt, Homo sapiens
  misc_RNA (1)...(19): siRNA sense strand
caaacugugacaucugcua

SEQ ID NO: 2205342 - RNA, 19 nt, Homo sapiens
  misc_RNA (1)...(19): siRNA sense strand
cuccucaccuuccaaauca

SEQ ID NO: 2205343 - RNA, 19 nt, Homo sapiens
  misc_RNA (1)...(19): siRNA sense strand
caagguguccgagugaaga

SEQ ID NO: 2205344 - RNA, 19 nt, Homo sapiens
  misc_RNA (1)...(19): siRNA sense strand
acagagaggcacaaaguca

SEQ ID NO: 2205345 - RNA, 19 nt, Homo sapiens
  misc_RNA (1)...(19): siRNA sense strand
cagaagaccauuccuacca

SEQ ID NO: 2205346 - RNA, 19 nt, Homo sapiens
  misc_RNA (1)...(19): siRNA sense strand
ccaggaucaccuucaaauu

SEQ ID NO: 2205347 - RNA, 19 nt, Homo sapiens
  misc_RNA (1)...(19): siRNA sense strand
gcaguguccaccuuucaga

SEQ ID NO: 2205348 - RNA, 19 nt, Homo sapiens
  misc_RNA (1)...(19): siRNA sense strand
ggggagaauuuuccaguug

SEQ ID NO: 2205349 - RNA, 19 nt, Homo sapiens
  misc_RNA (1)...(19): siRNA sense strand
uaagagggaaacaaacugu

SEQ ID NO: 2205350 - RNA, 19 nt, Homo sapiens
  misc_RNA (1)...(19): siRNA sense strand
gcucaauuccacacaaagu

SEQ ID NO: 2205351 - RNA, 19 nt, Homo sapiens
  misc_RNA (1)...(19): siRNA sense strand
uggaagaggcacaaacaga

SEQ ID NO: 2205352 - RNA, 19 nt, Homo sapiens
  misc_RNA (1)...(19): siRNA sense strand
cuucauaugcuccagagaa

SEQ ID NO: 2205353 - RNA, 19 nt, Homo sapiens
  misc_RNA (1)...(19): siRNA sense strand
gcuccuuagacuacaguua

SEQ ID NO: 2205354 - RNA, 19 nt, Homo sapiens
  misc_RNA (1)...(19): siRNA sense strand
auuccuaccuucagacaga

SEQ ID NO: 2205355 - RNA, 19 nt, Homo sapiens
  misc_RNA (1)...(19): siRNA sense strand
cgccaccagugauuucuau

SEQ ID NO: 2205356 - RNA, 19 nt, Homo sapiens
  misc_RNA (1)...(19): siRNA sense strand
gaccauuccuaccaacacu

SEQ ID NO: 2205357 - RNA, 19 nt, Homo sapiens
  misc_RNA (1)...(19): siRNA sense strand
uaucaagguguccgaguga

SEQ ID NO: 2205358 - RNA, 19 nt, Homo sapiens
  misc_RNA (1)...(19): siRNA sense strand
cauggaagaggcacaaaca

SEQ ID NO: 2205359 - RNA, 19 nt, Homo sapiens
  misc_RNA (1)...(19): siRNA sense strand
gagccugaaccaauuucuu

SEQ ID NO: 2205360 - RNA, 19 nt, Homo sapiens
  misc_RNA (1)...(19): siRNA sense strand
agagggaaacaaacuguga

SEQ ID NO: 2205361 - RNA, 19 nt, Homo sapiens
  misc_RNA (1)...(19): siRNA sense strand
gugcagcugccuucauaug

SEQ ID NO: 2205362 - RNA, 19 nt, Homo sapiens
  misc_RNA (1)...(19): siRNA sense strand
cugcaggacuguauuuuga

SEQ ID NO: 2205363 - RNA, 19 nt, Homo sapiens
  misc_RNA (1)...(19): siRNA sense strand
cagagaggcacaaagucaa

SEQ ID NO: 2205364 - RNA, 19 nt, Homo sapiens
  misc_RNA (1)...(19): siRNA sense strand
aaacaaacugugacaucug

SEQ ID NO: 2205365 - RNA, 19 nt, Homo sapiens
  misc_RNA (1)...(19): siRNA sense strand
uauaagagggaaacaaacu

SEQ ID NO: 2205366 - RNA, 19 nt, Homo sapiens
  misc_RNA (1)...(19): siRNA sense strand
gaauuuuccaguuguguuu

SEQ ID NO: 2205367 - RNA, 19 nt, Homo sapiens
  misc_RNA (1)...(19): siRNA sense strand
uugcucaauuccacacaaa

SEQ ID NO: 2205368 - RNA, 19 nt, Homo sapiens
  misc_RNA (1)...(19): siRNA sense strand
ucccacguauccacuguug

SEQ ID NO: 2205369 - RNA, 19 nt, Homo sapiens
  misc_RNA (1)...(19): siRNA sense strand
gcagccgccaccagugauu

SEQ ID NO: 2205370 - RNA, 19 nt, Homo sapiens
  misc_RNA (1)...(19): siRNA sense strand
ggccaccccuuucugcuuu

SEQ ID NO: 2205371 - RNA, 19 nt, Homo sapiens
  misc_RNA (1)...(19): siRNA sense strand
accagugauuucuauaaga

SEQ ID NO: 2205372 - RNA, 19 nt, Homo sapiens
  misc_RNA (1)...(19): siRNA sense strand
aaacugugacaucugcuau

SEQ ID NO: 2205373 - RNA, 19 nt, Homo sapiens
  misc_RNA (1)...(19): siRNA sense strand
aggcagcaguguccaccuu

SEQ ID NO: 2205374 - RNA, 19 nt, Homo sapiens
  misc_RNA (1)...(19): siRNA sense strand
ccaggcagcagaguacuuc

SEQ ID NO: 2205375 - RNA, 19 nt, Homo sapiens
  misc_RNA (1)...(19): siRNA sense strand
uucauaugcuccagagaau

SEQ ID NO: 2205376 - RNA, 19 nt, Homo sapiens
  misc_RNA (1)...(19): siRNA sense strand
ccacaaaccuccauccuaa

SEQ ID NO: 2205377 - RNA, 19 nt, Homo sapiens
  misc_RNA (1)...(19): siRNA sense strand
gcagagaucuuaucacuag

SEQ ID NO: 2205378 - RNA, 19 nt, Homo sapiens
  misc_RNA (1)...(19): siRNA sense strand
guaaguagccaaacaauaa

SEQ ID NO: 2205379 - RNA, 19 nt, Homo sapiens
  misc_RNA (1)...(19): siRNA sense strand
gaaucaggauggcgaaaua

SEQ ID NO: 2205380 - RNA, 19 nt, Homo sapiens
  misc_RNA (1)...(19): siRNA sense strand
gaagagaggugugggaaau

SEQ ID NO: 2205381 - RNA, 19 nt, Homo sapiens
  misc_RNA (1)...(19): siRNA sense strand
gaacauugcuguacagacu

SEQ ID NO: 2205382 - RNA, 19 nt, Homo sapiens
  misc_RNA (1)...(19): siRNA sense strand
gaauguucgugaccaauuu

SEQ ID NO: 2205383 - RNA, 19 nt, Homo sapiens
  misc_RNA (1)...(19): siRNA sense strand
gcacaaggaguguaucaaa

SEQ ID NO: 2205384 - RNA, 19 nt, Homo sapiens
  misc_RNA (1)...(19): siRNA sense strand
gcagaauccugguucauca

SEQ ID NO: 2205385 - RNA, 19 nt, Homo sapiens
  misc_RNA (1)...(19): siRNA sense strand
gaagagaaauccccacaaa

SEQ ID NO: 2205386 - RNA, 19 nt, Homo sapiens
  misc_RNA (1)...(19): siRNA sense strand
agaagaagauagagaaaga

SEQ ID NO: 2205387 - RNA, 19 nt, Homo sapiens
  misc_RNA (1)...(19): siRNA sense strand
gaagaacucgccucuguug

SEQ ID NO: 2205388 - RNA, 19 nt, Homo sapiens
  misc_RNA (1)...(19): siRNA sense strand
gaaacuagaagaagcagaa

SEQ ID NO: 2205389 - RNA, 19 nt, Homo sapiens
  misc_RNA (1)...(19): siRNA sense strand
gaauggaguucggauaaug

SEQ ID NO: 2205390 - RNA, 19 nt, Homo sapiens
  misc_RNA (1)...(19): siRNA sense strand
caaagaagaagauagagaa

SEQ ID NO: 2205391 - RNA, 19 nt, Homo sapiens
  misc_RNA (1)...(19): siRNA sense strand
ccagugagcugcauccaau

SEQ ID NO: 2205392 - RNA, 19 nt, Homo sapiens
  misc_RNA (1)...(19): siRNA sense strand
agagaacccuguugaaaga

SEQ ID NO: 2205393 - RNA, 19 nt, Homo sapiens
  misc_RNA (1)...(19): siRNA sense strand
cagaauugcaccuuacuua

SEQ ID NO: 2205394 - RNA, 19 nt, Homo sapiens
  misc_RNA (1)...(19): siRNA sense strand
gagaagaggaaaugaagaa

SEQ ID NO: 2205395 - RNA, 19 nt, Homo sapiens
  misc_RNA (1)...(19): siRNA sense strand
ggaaucuucuaguuuaugu

SEQ ID NO: 2205396 - RNA, 19 nt, Homo sapiens
  misc_RNA (1)...(19): siRNA sense strand
gaagaaacaaagaagaaga

SEQ ID NO: 2205397 - RNA, 19 nt, Homo sapiens
  misc_RNA (1)...(19): siRNA sense strand
gaggcagaauugcaccuua

SEQ ID NO: 2205398 - RNA, 19 nt, Homo sapiens
  misc_RNA (1)...(19): siRNA sense strand
ccaaggagaauaacagaaa

SEQ ID NO: 2205399 - RNA, 19 nt, Homo sapiens
  misc_RNA (1)...(19): siRNA sense strand
uaaaggcuauucaggaugu

SEQ ID NO: 2205400 - RNA, 19 nt, Homo sapiens
  misc_RNA (1)...(19): siRNA sense strand
cagcuugccuccaggaauu

SEQ ID NO: 2205401 - RNA, 19 nt, Homo sapiens
  misc_RNA (1)...(19): siRNA sense strand
caggauggcgaaauaaaua

SEQ ID NO: 2205402 - RNA, 19 nt, Homo sapiens
  misc_RNA (1)...(19): siRNA sense strand
caaggaguguaucaaauuc

SEQ ID NO: 2205403 - RNA, 19 nt, Homo sapiens
  misc_RNA (1)...(19): siRNA sense strand
guaaacacagaucaagaua

SEQ ID NO: 2205404 - RNA, 19 nt, Homo sapiens
  misc_RNA (1)...(19): siRNA sense strand
gaagauagagaaagagaag

SEQ ID NO: 2205405 - RNA, 19 nt, Homo sapiens
  misc_RNA (1)...(19): siRNA sense strand
aagaggaaaugaagaauca

SEQ ID NO: 2205406 - RNA, 19 nt, Homo sapiens
  misc_RNA (1)...(19): siRNA sense strand
uccggaaucuucuaguuua

SEQ ID NO: 2205407 - RNA, 19 nt, Homo sapiens
  misc_RNA (1)...(19): siRNA sense strand
ggagagaagaggaaaugaa

SEQ ID NO: 2205408 - RNA, 19 nt, Homo sapiens
  misc_RNA (1)...(19): siRNA sense strand
gagcagccuuccucaaauc

SEQ ID NO: 2205409 - RNA, 19 nt, Homo sapiens
  misc_RNA (1)...(19): siRNA sense strand
guucgugaccaauuuaaua

SEQ ID NO: 2205410 - RNA, 19 nt, Homo sapiens
  misc_RNA (1)...(19): siRNA sense strand
ggaaagaguuacugguacu

SEQ ID NO: 2205411 - RNA, 19 nt, Homo sapiens
  misc_RNA (1)...(19): siRNA sense strand
caauaaccaaggagaauaa

SEQ ID NO: 2205412 - RNA, 19 nt, Homo sapiens
  misc_RNA (1)...(19): siRNA sense strand
gggaagaaacaaagaagaa

SEQ ID NO: 2205413 - RNA, 19 nt, Homo sapiens
  misc_RNA (1)...(19): siRNA sense strand
gaagaaucaccaggagaua

SEQ ID NO: 2205414 - RNA, 19 nt, Homo sapiens
  misc_RNA (1)...(19): siRNA sense strand
gagagaacccuguugaaag

SEQ ID NO: 2205415 - RNA, 19 nt, Homo sapiens
  misc_RNA (1)...(19): siRNA sense strand
uggauagacucaagaauca

SEQ ID NO: 2205416 - RNA, 19 nt, Homo sapiens
  misc_RNA (1)...(19): siRNA sense strand
gcaaaggagagaagaggaa

SEQ ID NO: 2205417 - RNA, 19 nt, Homo sapiens
  misc_RNA (1)...(19): siRNA sense strand
uagacaaacuggagaagau

SEQ ID NO: 2205418 - RNA, 19 nt, Homo sapiens
  misc_RNA (1)...(19): siRNA sense strand
caaggagaauaacagaaau

SEQ ID NO: 2205419 - RNA, 19 nt, Homo sapiens
  misc_RNA (1)...(19): siRNA sense strand
uguaagcuaugucuaaugu

SEQ ID NO: 2205420 - RNA, 19 nt, Homo sapiens
  misc_RNA (1)...(19): siRNA sense strand
uggagaagauccuggagaa

SEQ ID NO: 2205421 - RNA, 19 nt, Homo sapiens
  misc_RNA (1)...(19): siRNA sense strand
gaaggcagagaucuuauca

SEQ ID NO: 2205422 - RNA, 19 nt, Homo sapiens
  misc_RNA (1)...(19): siRNA sense strand
gaaggagcaggaucugaaa

SEQ ID NO: 2205423 - RNA, 19 nt, Homo sapiens
  misc_RNA (1)...(19): siRNA sense strand
ccacagcccuuugucuuuc

SEQ ID NO: 2205424 - RNA, 19 nt, Homo sapiens
  misc_RNA (1)...(19): siRNA sense strand
gaagaggaaaugaagaauc

SEQ ID NO: 2205425 - RNA, 19 nt, Homo sapiens
  misc_RNA (1)...(19): siRNA sense strand
cggaugcccuucuccauug

SEQ ID NO: 2205426 - RNA, 19 nt, Homo sapiens
  misc_RNA (1)...(19): siRNA sense strand
gcaccuuacuuaccucaag

SEQ ID NO: 2205427 - RNA, 19 nt, Homo sapiens
  misc_RNA (1)...(19): siRNA sense strand
ggaacuggauagacucaag

SEQ ID NO: 2205428 - RNA, 19 nt, Homo sapiens
  misc_RNA (1)...(19): siRNA sense strand
ucugaaagcugaaauugag

SEQ ID NO: 2205429 - RNA, 19 nt, Homo sapiens
  misc_RNA (1)...(19): siRNA sense strand
gaucugaaagcugaaauug

SEQ ID NO: 2205430 - RNA, 19 nt, Homo sapiens
  misc_RNA (1)...(19): siRNA sense strand
ggaaauggaacuggauaga

SEQ ID NO: 2205431 - RNA, 19 nt, Homo sapiens
  misc_RNA (1)...(19): siRNA sense strand
agaaagagaagaaggaguu

SEQ ID NO: 2205432 - RNA, 19 nt, Homo sapiens
  misc_RNA (1)...(19): siRNA sense strand
gaaacaaagaagaagauag

SEQ ID NO: 2205433 - RNA, 19 nt, Homo sapiens
  misc_RNA (1)...(19): siRNA sense strand
acaaggaguguaucaaauu

SEQ ID NO: 2205434 - RNA, 19 nt, Homo sapiens
  misc_RNA (1)...(19): siRNA sense strand
agacagacuucaugcuuca

SEQ ID NO: 2205435 - RNA, 19 nt, Homo sapiens
  misc_RNA (1)...(19): siRNA sense strand
gaaagagaagaaggaguuu

SEQ ID NO: 2205436 - RNA, 19 nt, Homo sapiens
  misc_RNA (1)...(19): siRNA sense strand
gguaaacacagaucaagau

SEQ ID NO: 2205437 - RNA, 19 nt, Homo sapiens
  misc_RNA (1)...(19): siRNA sense strand
cacaaggaguguaucaaau

SEQ ID NO: 2205438 - RNA, 19 nt, Homo sapiens
  misc_RNA (1)...(19): siRNA sense strand
gagaucuuaucacuagaga

SEQ ID NO: 2205439 - RNA, 19 nt, Homo sapiens
  misc_RNA (1)...(19): siRNA sense strand
gaacuggauagacucaaga

SEQ ID NO: 2205440 - RNA, 19 nt, Homo sapiens
  misc_RNA (1)...(19): siRNA sense strand
gaaucaccaggagauauua

SEQ ID NO: 2205441 - RNA, 19 nt, Homo sapiens
  misc_RNA (1)...(19): siRNA sense strand
gagagaagaggaaaugaag

SEQ ID NO: 2205442 - RNA, 19 nt, Homo sapiens
  misc_RNA (1)...(19): siRNA sense strand
ggacacaagcuuggauuuc

SEQ ID NO: 2205443 - RNA, 19 nt, Homo sapiens
  misc_RNA (1)...(19): siRNA sense strand
ucacaaugcccaugguuau

SEQ ID NO: 2205444 - RNA, 19 nt, Homo sapiens
  misc_RNA (1)...(19): siRNA sense strand
gccaaacaauaaccaagga

SEQ ID NO: 2205445 - RNA, 19 nt, Homo sapiens
  misc_RNA (1)...(19): siRNA sense strand
guacagacugacuuuaaga

SEQ ID NO: 2205446 - RNA, 19 nt, Homo sapiens
  misc_RNA (1)...(19): siRNA sense strand
gaagguaacagggacacaa

SEQ ID NO: 2205447 - RNA, 19 nt, Homo sapiens
  misc_RNA (1)...(19): siRNA sense strand
gaguguaaguagccaaaca

SEQ ID NO: 2205448 - RNA, 19 nt, Homo sapiens
  misc_RNA (1)...(19): siRNA sense strand
gcaauaaggcccagaugac

SEQ ID NO: 2205449 - RNA, 19 nt, Homo sapiens
  misc_RNA (1)...(19): siRNA sense strand
auaggaacauuauggaaga

SEQ ID NO: 2205450 - RNA, 19 nt, Homo sapiens
  misc_RNA (1)...(19): siRNA sense strand
caauaaagcgggaagaaac

SEQ ID NO: 2205451 - RNA, 19 nt, Homo sapiens
  misc_RNA (1)...(19): siRNA sense strand
ccagccaccuguaagcuau

SEQ ID NO: 2205452 - RNA, 19 nt, Homo sapiens
  misc_RNA (1)...(19): siRNA sense strand
cuagagagccggaaagagu

SEQ ID NO: 2205453 - RNA, 19 nt, Homo sapiens
  misc_RNA (1)...(19): siRNA sense strand
uugagaagcuuugugagaa

SEQ ID NO: 2205454 - RNA, 19 nt, Homo sapiens
  misc_RNA (1)...(19): siRNA sense strand
uuuaugugcuuccaaauca

SEQ ID NO: 2205455 - RNA, 19 nt, Homo sapiens
  misc_RNA (1)...(19): siRNA sense strand
ccagucacucggucucuua

SEQ ID NO: 2205456 - RNA, 19 nt, Homo sapiens
  misc_RNA (1)...(19): siRNA sense strand
uaguuuaugugcuuccaaa

SEQ ID NO: 2205457 - RNA, 19 nt, Homo sapiens
  misc_RNA (1)...(19): siRNA sense strand
gcacagaagcagaagaacu

SEQ ID NO: 2205458 - RNA, 19 nt, Homo sapiens
  misc_RNA (1)...(19): siRNA sense strand
caaguuucauauccuggaa

SEQ ID NO: 2205459 - RNA, 19 nt, Homo sapiens
  misc_RNA (1)...(19): siRNA sense strand
ccaauguucuugccuucug

SEQ ID NO: 2205460 - RNA, 19 nt, Homo sapiens
  misc_RNA (1)...(19): siRNA sense strand
ccggaaagaguuacuggua

SEQ ID NO: 2205461 - RNA, 19 nt, Homo sapiens
  misc_RNA (1)...(19): siRNA sense strand
aaauggaacuggauagacu

SEQ ID NO: 2205462 - RNA, 19 nt, Homo sapiens
  misc_RNA (1)...(19): siRNA sense strand
aaauugagaagcuuuguga

SEQ ID NO: 2205463 - RNA, 19 nt, Homo sapiens
  misc_RNA (1)...(19): siRNA sense strand
agagagaacccuguugaaa

SEQ ID NO: 2205464 - RNA, 19 nt, Homo sapiens
  misc_RNA (1)...(19): siRNA sense strand
uguagugucuccagcaaau

SEQ ID NO: 2205465 - RNA, 19 nt, Homo sapiens
  misc_RNA (1)...(19): siRNA sense strand
agaggcaaguggagaauca

SEQ ID NO: 2205466 - RNA, 19 nt, Homo sapiens
  misc_RNA (1)...(19): siRNA sense strand
gaaauugagaagcuuugug

SEQ ID NO: 2205467 - RNA, 19 nt, Homo sapiens
  misc_RNA (1)...(19): siRNA sense strand
agaaggagcaggaucugaa

SEQ ID NO: 2205468 - RNA, 19 nt, Homo sapiens
  misc_RNA (1)...(19): siRNA sense strand
agucauauccaguuaguga

SEQ ID NO: 2205469 - RNA, 19 nt, Homo sapiens
  misc_RNA (1)...(19): siRNA sense strand
aaagaauguucgugaccaa

SEQ ID NO: 2205470 - RNA, 19 nt, Homo sapiens
  misc_RNA (1)...(19): siRNA sense strand
ugagguugcugguguugug

SEQ ID NO: 2205471 - RNA, 19 nt, Homo sapiens
  misc_RNA (1)...(19): siRNA sense strand
auucagagguaaacacaga

SEQ ID NO: 2205472 - RNA, 19 nt, Homo sapiens
  misc_RNA (1)...(19): siRNA sense strand
ccaacauucuucagcagau

SEQ ID NO: 2205473 - RNA, 19 nt, Homo sapiens
  misc_RNA (1)...(19): siRNA sense strand
uguuaaggcuucugcugaa

SEQ ID NO: 2205474 - RNA, 19 nt, Homo sapiens
  misc_RNA (1)...(19): siRNA sense strand
aaacaauaaccaaggagaa

SEQ ID NO: 2205475 - RNA, 19 nt, Homo sapiens
  misc_RNA (1)...(19): siRNA sense strand
gacaauaaagcgggaagaa

SEQ ID NO: 2205476 - RNA, 19 nt, Homo sapiens
  misc_RNA (1)...(19): siRNA sense strand
ggacaagaaugccuccuua

SEQ ID NO: 2205477 - RNA, 19 nt, Homo sapiens
  misc_RNA (1)...(19): siRNA sense strand
gaagacacauauugaguca

SEQ ID NO: 2205478 - RNA, 19 nt, Homo sapiens
  misc_RNA (1)...(19): siRNA sense strand
ugaagggagucaucuauuu

SEQ ID NO: 2205479 - RNA, 19 nt, Homo sapiens
  misc_RNA (1)...(19): siRNA sense strand
gacaacaagugauugaaga

SEQ ID NO: 2205480 - RNA, 19 nt, Homo sapiens
  misc_RNA (1)...(19): siRNA sense strand
gaaccugugugccgaauac

SEQ ID NO: 2205481 - RNA, 19 nt, Homo sapiens
  misc_RNA (1)...(19): siRNA sense strand
gaagggacaacaagugauu

SEQ ID NO: 2205482 - RNA, 19 nt, Homo sapiens
  misc_RNA (1)...(19): siRNA sense strand
gcucccugcuguagacuua

SEQ ID NO: 2205483 - RNA, 19 nt, Homo sapiens
  misc_RNA (1)...(19): siRNA sense strand
ucaaagagauggagaagcu

SEQ ID NO: 2205484 - RNA, 19 nt, Homo sapiens
  misc_RNA (1)...(19): siRNA sense strand
uggagaagaugcugaaaga

SEQ ID NO: 2205485 - RNA, 19 nt, Homo sapiens
  misc_RNA (1)...(19): siRNA sense strand
gagaaggaccugcaagaga

SEQ ID NO: 2205486 - RNA, 19 nt, Homo sapiens
  misc_RNA (1)...(19): siRNA sense strand
uggcugagcugaagcagaa

SEQ ID NO: 2205487 - RNA, 19 nt, Homo sapiens
  misc_RNA (1)...(19): siRNA sense strand
gaaacaagauuggcacacu

SEQ ID NO: 2205488 - RNA, 19 nt, Homo sapiens
  misc_RNA (1)...(19): siRNA sense strand
ccacaucgacccucaaaga

SEQ ID NO: 2205489 - RNA, 19 nt, Homo sapiens
  misc_RNA (1)...(19): siRNA sense strand
cagaggcccuggagacuga

SEQ ID NO: 2205490 - RNA, 19 nt, Homo sapiens
  misc_RNA (1)...(19): siRNA sense strand
gcccucaccuucugcguaa

SEQ ID NO: 2205491 - RNA, 19 nt, Homo sapiens
  misc_RNA (1)...(19): siRNA sense strand
gaagcugacugugcuggaa

SEQ ID NO: 2205492 - RNA, 19 nt, Homo sapiens
  misc_RNA (1)...(19): siRNA sense strand
agaaggaccugcaagagau

SEQ ID NO: 2205493 - RNA, 19 nt, Homo sapiens
  misc_RNA (1)...(19): siRNA sense strand
gaagggagucaucuauuuc

SEQ ID NO: 2205494 - RNA, 19 nt, Homo sapiens
  misc_RNA (1)...(19): siRNA sense strand
ggaagaagcgcugguuugu

SEQ ID NO: 2205495 - RNA, 19 nt, Homo sapiens
  misc_RNA (1)...(19): siRNA sense strand
cccgucagcugcagguuua

SEQ ID NO: 2205496 - RNA, 19 nt, Homo sapiens
  misc_RNA (1)...(19): siRNA sense strand
ggucugccguggcuacuug

SEQ ID NO: 2205497 - RNA, 19 nt, Homo sapiens
  misc_RNA (1)...(19): siRNA sense strand
ggugagcacgccuaugaua

SEQ ID NO: 2205498 - RNA, 19 nt, Homo sapiens
  misc_RNA (1)...(19): siRNA sense strand
cuggugagcucuauugaga

SEQ ID NO: 2205499 - RNA, 19 nt, Homo sapiens
  misc_RNA (1)...(19): siRNA sense strand
agacacauauugagucauc

SEQ ID NO: 2205500 - RNA, 19 nt, Homo sapiens
  misc_RNA (1)...(19): siRNA sense strand
ggaaaggagauaccacuca

SEQ ID NO: 2205501 - RNA, 19 nt, Homo sapiens
  misc_RNA (1)...(19): siRNA sense strand
guauggagcgcucagauga

SEQ ID NO: 2205502 - RNA, 19 nt, Homo sapiens
  misc_RNA (1)...(19): siRNA sense strand
gaagggaggacggugauug

SEQ ID NO: 2205503 - RNA, 19 nt, Homo sapiens
  misc_RNA (1)...(19): siRNA sense strand
aagaagcgcugguuugucu

SEQ ID NO: 2205504 - RNA, 19 nt, Homo sapiens
  misc_RNA (1)...(19): siRNA sense strand
gaccugaagacacauauug

SEQ ID NO: 2205505 - RNA, 19 nt, Homo sapiens
  misc_RNA (1)...(19): siRNA sense strand
gcagaagggacaacaagug

SEQ ID NO: 2205506 - RNA, 19 nt, Homo sapiens
  misc_RNA (1)...(19): siRNA sense strand
agacaggcauccagaagga

SEQ ID NO: 2205507 - RNA, 19 nt, Homo sapiens
  misc_RNA (1)...(19): siRNA sense strand
uggaucagcugcaggagaa

SEQ ID NO: 2205508 - RNA, 19 nt, Homo sapiens
  misc_RNA (1)...(19): siRNA sense strand
caacgccuaugggagagua

SEQ ID NO: 2205509 - RNA, 19 nt, Homo sapiens
  misc_RNA (1)...(19): siRNA sense strand
caucgacccucaaagagau

SEQ ID NO: 2205510 - RNA, 19 nt, Homo sapiens
  misc_RNA (1)...(19): siRNA sense strand
gggcuacacucaguucaug

SEQ ID NO: 2205511 - RNA, 19 nt, Homo sapiens
  misc_RNA (1)...(19): siRNA sense strand
ucgaggagauggagaagau

SEQ ID NO: 2205512 - RNA, 19 nt, Homo sapiens
  misc_RNA (1)...(19): siRNA sense strand
ggacaacaagugauugaag

SEQ ID NO: 2205513 - RNA, 19 nt, Homo sapiens
  misc_RNA (1)...(19): siRNA sense strand
ccaccuuccuucgcuuuaa

SEQ ID NO: 2205514 - RNA, 19 nt, Homo sapiens
  misc_RNA (1)...(19): siRNA sense strand
gcgcacccuuuccuauuau

SEQ ID NO: 2205515 - RNA, 19 nt, Homo sapiens
  misc_RNA (1)...(19): siRNA sense strand
ggugagcucuauugagaag

SEQ ID NO: 2205516 - RNA, 19 nt, Homo sapiens
  misc_RNA (1)...(19): siRNA sense strand
ccuauuauguggacaagca

SEQ ID NO: 2205517 - RNA, 19 nt, Homo sapiens
  misc_RNA (1)...(19): siRNA sense strand
cagaagggacaacaaguga

SEQ ID NO: 2205518 - RNA, 19 nt, Homo sapiens
  misc_RNA (1)...(19): siRNA sense strand
gcagaggccaugcguaucu

SEQ ID NO: 2205519 - RNA, 19 nt, Homo sapiens
  misc_RNA (1)...(19): siRNA sense strand
gaagccaaguggaugaaaa

SEQ ID NO: 2205520 - RNA, 19 nt, Homo sapiens
  misc_RNA (1)...(19): siRNA sense strand
ggaggacuuugaccugaag

SEQ ID NO: 2205521 - RNA, 19 nt, Homo sapiens
  misc_RNA (1)...(19): siRNA sense strand
ggacaguaugcgagaacua

SEQ ID NO: 2205522 - RNA, 19 nt, Homo sapiens
  misc_RNA (1)...(19): siRNA sense strand
acucagggcugcauguugu

SEQ ID NO: 2205523 - RNA, 19 nt, Homo sapiens
  misc_RNA (1)...(19): siRNA sense strand
agcgcacccuuuccuauua

SEQ ID NO: 2205524 - RNA, 19 nt, Homo sapiens
  misc_RNA (1)...(19): siRNA sense strand
gaaagugcaaacggacaaa

SEQ ID NO: 2205525 - RNA, 19 nt, Homo sapiens
  misc_RNA (1)...(19): siRNA sense strand
gcugaagggagucaucuau

SEQ ID NO: 2205526 - RNA, 19 nt, Homo sapiens
  misc_RNA (1)...(19): siRNA sense strand
gaugcgggagaaacaauuu

SEQ ID NO: 2205527 - RNA, 19 nt, Homo sapiens
  misc_RNA (1)...(19): siRNA sense strand
aacggaggcugcagaguga

SEQ ID NO: 2205528 - RNA, 19 nt, Homo sapiens
  misc_RNA (1)...(19): siRNA sense strand
gcgcucuacucacccagaa

SEQ ID NO: 2205529 - RNA, 19 nt, Homo sapiens
  misc_RNA (1)...(19): siRNA sense strand
gaccacaucgacccucaaa

SEQ ID NO: 2205530 - RNA, 19 nt, Homo sapiens
  misc_RNA (1)...(19): siRNA sense strand
caagaaugccuccuuacag

SEQ ID NO: 2205531 - RNA, 19 nt, Homo sapiens
  misc_RNA (1)...(19): siRNA sense strand
ugagcucuauugagaagga

SEQ ID NO: 2205532 - RNA, 19 nt, Homo sapiens
  misc_RNA (1)...(19): siRNA sense strand
cgagaaggaggucaagaug

SEQ ID NO: 2205533 - RNA, 19 nt, Homo sapiens
  misc_RNA (1)...(19): siRNA sense strand
gcaccacucuauccuacac

SEQ ID NO: 2205534 - RNA, 19 nt, Homo sapiens
  misc_RNA (1)...(19): siRNA sense strand
ggagacaggcauccagaag

SEQ ID NO: 2205535 - RNA, 19 nt, Homo sapiens
  misc_RNA (1)...(19): siRNA sense strand
agucugggcucucuuacug

SEQ ID NO: 2205536 - RNA, 19 nt, Homo sapiens
  misc_RNA (1)...(19): siRNA sense strand
gccgcaaccucuccacugu

SEQ ID NO: 2205537 - RNA, 19 nt, Homo sapiens
  misc_RNA (1)...(19): siRNA sense strand
gagauaccacucacucaca

SEQ ID NO: 2205538 - RNA, 19 nt, Homo sapiens
  misc_RNA (1)...(19): siRNA sense strand
gcuaccaucuggcccuaca

SEQ ID NO: 2205539 - RNA, 19 nt, Homo sapiens
  misc_RNA (1)...(19): siRNA sense strand
gcucuacucacccagaaug

SEQ ID NO: 2205540 - RNA, 19 nt, Homo sapiens
  misc_RNA (1)...(19): siRNA sense strand
agaaggagagggacaagga

SEQ ID NO: 2205541 - RNA, 19 nt, Homo sapiens
  misc_RNA (1)...(19): siRNA sense strand
ggugcuagcccuggaagaa

SEQ ID NO: 2205542 - RNA, 19 nt, Homo sapiens
  misc_RNA (1)...(19): siRNA sense strand
gcagugagcgggugcuaac

SEQ ID NO: 2205543 - RNA, 19 nt, Homo sapiens
  misc_RNA (1)...(19): siRNA sense strand
ugucaccgauggcuaaugg

SEQ ID NO: 2205544 - RNA, 19 nt, Homo sapiens
  misc_RNA (1)...(19): siRNA sense strand
ccauugaggaaguguacua

SEQ ID NO: 2205545 - RNA, 19 nt, Homo sapiens
  misc_RNA (1)...(19): siRNA sense strand
caagcgcacccuuuccuau

SEQ ID NO: 2205546 - RNA, 19 nt, Homo sapiens
  misc_RNA (1)...(19): siRNA sense strand
gcugaagccaaguggauga

SEQ ID NO: 2205547 - RNA, 19 nt, Homo sapiens
  misc_RNA (1)...(19): siRNA sense strand
agaaggagaagcugacugu

SEQ ID NO: 2205548 - RNA, 19 nt, Homo sapiens
  misc_RNA (1)...(19): siRNA sense strand
cgcaaccucuccacuguca

SEQ ID NO: 2205549 - RNA, 19 nt, Homo sapiens
  misc_RNA (1)...(19): siRNA sense strand
gcgacuggcugagcugaag

SEQ ID NO: 2205550 - RNA, 19 nt, Homo sapiens
  misc_RNA (1)...(19): siRNA sense strand
agacagcccugcagcuacu

SEQ ID NO: 2205551 - RNA, 19 nt, Homo sapiens
  misc_RNA (1)...(19): siRNA sense strand
ucugugggcuccagcuaug

SEQ ID NO: 2205552 - RNA, 19 nt, Homo sapiens
  misc_RNA (1)...(19): siRNA sense strand
gcaagagccaggaccuucu

SEQ ID NO: 2205553 - RNA, 19 nt, Homo sapiens
  misc_RNA (1)...(19): siRNA sense strand
gcuacacucaguucaugaa

SEQ ID NO: 2205554 - RNA, 19 nt, Homo sapiens
  misc_RNA (1)...(19): siRNA sense strand
gaagaagcgcugguuuguc

SEQ ID NO: 2205555 - RNA, 19 nt, Homo sapiens
  misc_RNA (1)...(19): siRNA sense strand
agagaucagugacaaugag

SEQ ID NO: 2205556 - RNA, 19 nt, Homo sapiens
  misc_RNA (1)...(19): siRNA sense strand
acagacagcccugcagcua

SEQ ID NO: 2205557 - RNA, 19 nt, Homo sapiens
  misc_RNA (1)...(19): siRNA sense strand
gcagugcagccaagaagag

SEQ ID NO: 2205558 - RNA, 19 nt, Homo sapiens
  misc_RNA (1)...(19): siRNA sense strand
ucaagaugcgggagaaaca

SEQ ID NO: 2205559 - RNA, 19 nt, Homo sapiens
  misc_RNA (1)...(19): siRNA sense strand
agaagaaccggcucaugga

SEQ ID NO: 2205560 - RNA, 19 nt, Homo sapiens
  misc_RNA (1)...(19): siRNA sense strand
acaagaaugccuccuuaca

SEQ ID NO: 2205561 - RNA, 19 nt, Homo sapiens
  misc_RNA (1)...(19): siRNA sense strand
ccacaagggcagcuucagu

SEQ ID NO: 2205562 - RNA, 19 nt, Homo sapiens
  misc_RNA (1)...(19): siRNA sense strand
ccagaucccaagcuaaaca

SEQ ID NO: 2205563 - RNA, 19 nt, Homo sapiens
  misc_RNA (1)...(19): siRNA sense strand
cgacucagcacagccauca

SEQ ID NO: 2205564 - RNA, 19 nt, Homo sapiens
  misc_RNA (1)...(19): siRNA sense strand
uugaggaaguguacuacga

SEQ ID NO: 2205565 - RNA, 19 nt, Homo sapiens
  misc_RNA (1)...(19): siRNA sense strand
uggaagaagcgcugguuug

SEQ ID NO: 2205566 - RNA, 19 nt, Homo sapiens
  misc_RNA (1)...(19): siRNA sense strand
ggacuuugaccugaagaca

SEQ ID NO: 2205567 - RNA, 19 nt, Homo sapiens
  misc_RNA (1)...(19): siRNA sense strand
gcugaaagaggcucaugca

SEQ ID NO: 2205568 - RNA, 19 nt, Homo sapiens
  misc_RNA (1)...(19): siRNA sense strand
agggugagcacgccuauga

SEQ ID NO: 2205569 - RNA, 19 nt, Homo sapiens
  misc_RNA (1)...(19): siRNA sense strand
uacagucugggcucucuua

SEQ ID NO: 2205570 - RNA, 19 nt, Homo sapiens
  misc_RNA (1)...(19): siRNA sense strand
cugcagaggccaugcguau

SEQ ID NO: 2205571 - RNA, 19 nt, Homo sapiens
  misc_RNA (1)...(19): siRNA sense strand
cccaugaccggcuguacua

SEQ ID NO: 2205572 - RNA, 19 nt, Homo sapiens
  misc_RNA (1)...(19): siRNA sense strand
ggcaggccuuucccgaaga

SEQ ID NO: 2205573 - RNA, 19 nt, Homo sapiens
  misc_RNA (1)...(19): siRNA sense strand
gcucaagguccgugugaag

SEQ ID NO: 2205574 - RNA, 19 nt, Homo sapiens
  misc_RNA (1)...(19): siRNA sense strand
gaaggaccugcaagagauc

SEQ ID NO: 2205575 - RNA, 19 nt, Homo sapiens
  misc_RNA (1)...(19): siRNA sense strand
acagagaucagugacaaug

SEQ ID NO: 2205576 - RNA, 19 nt, Homo sapiens
  misc_RNA (1)...(19): siRNA sense strand
ggacaagaaugccuccuua

SEQ ID NO: 2205577 - RNA, 19 nt, Homo sapiens
  misc_RNA (1)...(19): siRNA sense strand
gaagacacauauugaguca

SEQ ID NO: 2205578 - RNA, 19 nt, Homo sapiens
  misc_RNA (1)...(19): siRNA sense strand
ugaagggagucaucuauuu

SEQ ID NO: 2205579 - RNA, 19 nt, Homo sapiens
  misc_RNA (1)...(19): siRNA sense strand
gacaacaagugauugaaga

SEQ ID NO: 2205580 - RNA, 19 nt, Homo sapiens
  misc_RNA (1)...(19): siRNA sense strand
gaaccugugugccgaauac

SEQ ID NO: 2205581 - RNA, 19 nt, Homo sapiens
  misc_RNA (1)...(19): siRNA sense strand
gaagggacaacaagugauu

SEQ ID NO: 2205582 - RNA, 19 nt, Homo sapiens
  misc_RNA (1)...(19): siRNA sense strand
gcucccugcuguagacuua

SEQ ID NO: 2205583 - RNA, 19 nt, Homo sapiens
  misc_RNA (1)...(19): siRNA sense strand
ucaaagagauggagaagcu

SEQ ID NO: 2205584 - RNA, 19 nt, Homo sapiens
  misc_RNA (1)...(19): siRNA sense strand
uggagaagaugcugaaaga

SEQ ID NO: 2205585 - RNA, 19 nt, Homo sapiens
  misc_RNA (1)...(19): siRNA sense strand
gagaaggaccugcaagaga

SEQ ID NO: 2205586 - RNA, 19 nt, Homo sapiens
  misc_RNA (1)...(19): siRNA sense strand
uggcugagcugaagcagaa

SEQ ID NO: 2205587 - RNA, 19 nt, Homo sapiens
  misc_RNA (1)...(19): siRNA sense strand
gaaacaagauuggcacacu

SEQ ID NO: 2205588 - RNA, 19 nt, Homo sapiens
  misc_RNA (1)...(19): siRNA sense strand
ccacaucgacccucaaaga

SEQ ID NO: 2205589 - RNA, 19 nt, Homo sapiens
  misc_RNA (1)...(19): siRNA sense strand
cagaggcccuggagacuga

SEQ ID NO: 2205590 - RNA, 19 nt, Homo sapiens
  misc_RNA (1)...(19): siRNA sense strand
gcccucaccuucugcguaa

SEQ ID NO: 2205591 - RNA, 19 nt, Homo sapiens
  misc_RNA (1)...(19): siRNA sense strand
gaagcugacugugcuggaa

SEQ ID NO: 2205592 - RNA, 19 nt, Homo sapiens
  misc_RNA (1)...(19): siRNA sense strand
agaaggaccugcaagagau

SEQ ID NO: 2205593 - RNA, 19 nt, Homo sapiens
  misc_RNA (1)...(19): siRNA sense strand
gaagggagucaucuauuuc

SEQ ID NO: 2205594 - RNA, 19 nt, Homo sapiens
  misc_RNA (1)...(19): siRNA sense strand
ggaagaagcgcugguuugu

SEQ ID NO: 2205595 - RNA, 19 nt, Homo sapiens
  misc_RNA (1)...(19): siRNA sense strand
cccgucagcugcagguuua

SEQ ID NO: 2205596 - RNA, 19 nt, Homo sapiens
  misc_RNA (1)...(19): siRNA sense strand
ggucugccguggcuacuug

SEQ ID NO: 2205597 - RNA, 19 nt, Homo sapiens
  misc_RNA (1)...(19): siRNA sense strand
ggugagcacgccuaugaua

SEQ ID NO: 2205598 - RNA, 19 nt, Homo sapiens
  misc_RNA (1)...(19): siRNA sense strand
cuggugagcucuauugaga

SEQ ID NO: 2205599 - RNA, 19 nt, Homo sapiens
  misc_RNA (1)...(19): siRNA sense strand
agacacauauugagucauc

SEQ ID NO: 2205600 - RNA, 19 nt, Homo sapiens
  misc_RNA (1)...(19): siRNA sense strand
ggaaaggagauaccacuca

SEQ ID NO: 2205601 - RNA, 19 nt, Homo sapiens
  misc_RNA (1)...(19): siRNA sense strand
guauggagcgcucagauga

SEQ ID NO: 2205602 - RNA, 19 nt, Homo sapiens
  misc_RNA (1)...(19): siRNA sense strand
gaagggaggacggugauug

SEQ ID NO: 2205603 - RNA, 19 nt, Homo sapiens
  misc_RNA (1)...(19): siRNA sense strand
aagaagcgcugguuugucu

SEQ ID NO: 2205604 - RNA, 19 nt, Homo sapiens
  misc_RNA (1)...(19): siRNA sense strand
gaccugaagacacauauug

SEQ ID NO: 2205605 - RNA, 19 nt, Homo sapiens
  misc_RNA (1)...(19): siRNA sense strand
gcagaagggacaacaagug

SEQ ID NO: 2205606 - RNA, 19 nt, Homo sapiens
  misc_RNA (1)...(19): siRNA sense strand
agacaggcauccagaagga

SEQ ID NO: 2205607 - RNA, 19 nt, Homo sapiens
  misc_RNA (1)...(19): siRNA sense strand
uggaucagcugcaggagaa

SEQ ID NO: 2205608 - RNA, 19 nt, Homo sapiens
  misc_RNA (1)...(19): siRNA sense strand
caacgccuaugggagagua

SEQ ID NO: 2205609 - RNA, 19 nt, Homo sapiens
  misc_RNA (1)...(19): siRNA sense strand
caucgacccucaaagagau

SEQ ID NO: 2205610 - RNA, 19 nt, Homo sapiens
  misc_RNA (1)...(19): siRNA sense strand
gggcuacacucaguucaug

SEQ ID NO: 2205611 - RNA, 19 nt, Homo sapiens
  misc_RNA (1)...(19): siRNA sense strand
ucgaggagauggagaagau

SEQ ID NO: 2205612 - RNA, 19 nt, Homo sapiens
  misc_RNA (1)...(19): siRNA sense strand
ggacaacaagugauugaag

SEQ ID NO: 2205613 - RNA, 19 nt, Homo sapiens
  misc_RNA (1)...(19): siRNA sense strand
ccaccuuccuucgcuuuaa

SEQ ID NO: 2205614 - RNA, 19 nt, Homo sapiens
  misc_RNA (1)...(19): siRNA sense strand
gcgcacccuuuccuauuau

SEQ ID NO: 2205615 - RNA, 19 nt, Homo sapiens
  misc_RNA (1)...(19): siRNA sense strand
ggugagcucuauugagaag

SEQ ID NO: 2205616 - RNA, 19 nt, Homo sapiens
  misc_RNA (1)...(19): siRNA sense strand
ccuauuauguggacaagca

SEQ ID NO: 2205617 - RNA, 19 nt, Homo sapiens
  misc_RNA (1)...(19): siRNA sense strand
cagaagggacaacaaguga

SEQ ID NO: 2205618 - RNA, 19 nt, Homo sapiens
  misc_RNA (1)...(19): siRNA sense strand
gcagaggccaugcguaucu

SEQ ID NO: 2205619 - RNA, 19 nt, Homo sapiens
  misc_RNA (1)...(19): siRNA sense strand
gaagccaaguggaugaaaa

SEQ ID NO: 2205620 - RNA, 19 nt, Homo sapiens
  misc_RNA (1)...(19): siRNA sense strand
ggaggacuuugaccugaag

SEQ ID NO: 2205621 - RNA, 19 nt, Homo sapiens
  misc_RNA (1)...(19): siRNA sense strand
ggacaguaugcgagaacua

SEQ ID NO: 2205622 - RNA, 19 nt, Homo sapiens
  misc_RNA (1)...(19): siRNA sense strand
acucagggcugcauguugu

SEQ ID NO: 2205623 - RNA, 19 nt, Homo sapiens
  misc_RNA (1)...(19): siRNA sense strand
agcgcacccuuuccuauua

SEQ ID NO: 2205624 - RNA, 19 nt, Homo sapiens
  misc_RNA (1)...(19): siRNA sense strand
gaaagugcaaacggacaaa

SEQ ID NO: 2205625 - RNA, 19 nt, Homo sapiens
  misc_RNA (1)...(19): siRNA sense strand
gcugaagggagucaucuau

SEQ ID NO: 2205626 - RNA, 19 nt, Homo sapiens
  misc_RNA (1)...(19): siRNA sense strand
gaugcgggagaaacaauuu

SEQ ID NO: 2205627 - RNA, 19 nt, Homo sapiens
  misc_RNA (1)...(19): siRNA sense strand
gcgcucuacucacccagaa

SEQ ID NO: 2205628 - RNA, 19 nt, Homo sapiens
  misc_RNA (1)...(19): siRNA sense strand
gaccacaucgacccucaaa

SEQ ID NO: 2205629 - RNA, 19 nt, Homo sapiens
  misc_RNA (1)...(19): siRNA sense strand
caagaaugccuccuuacag

SEQ ID NO: 2205630 - RNA, 19 nt, Homo sapiens
  misc_RNA (1)...(19): siRNA sense strand
ugagcucuauugagaagga

SEQ ID NO: 2205631 - RNA, 19 nt, Homo sapiens
  misc_RNA (1)...(19): siRNA sense strand
cgagaaggaggucaagaug

SEQ ID NO: 2205632 - RNA, 19 nt, Homo sapiens
  misc_RNA (1)...(19): siRNA sense strand
gcaccacucuauccuacac

SEQ ID NO: 2205633 - RNA, 19 nt, Homo sapiens
  misc_RNA (1)...(19): siRNA sense strand
ggagacaggcauccagaag

SEQ ID NO: 2205634 - RNA, 19 nt, Homo sapiens
  misc_RNA (1)...(19): siRNA sense strand
agucugggcucucuuacug

SEQ ID NO: 2205635 - RNA, 19 nt, Homo sapiens
  misc_RNA (1)...(19): siRNA sense strand
gccgcaaccucuccacugu

SEQ ID NO: 2205636 - RNA, 19 nt, Homo sapiens
  misc_RNA (1)...(19): siRNA sense strand
gagauaccacucacucaca

SEQ ID NO: 2205637 - RNA, 19 nt, Homo sapiens
  misc_RNA (1)...(19): siRNA sense strand
gcuaccaucuggcccuaca

SEQ ID NO: 2205638 - RNA, 19 nt, Homo sapiens
  misc_RNA (1)...(19): siRNA sense strand
gcucuacucacccagaaug

SEQ ID NO: 2205639 - RNA, 19 nt, Homo sapiens
  misc_RNA (1)...(19): siRNA sense strand
agaaggagagggacaagga

SEQ ID NO: 2205640 - RNA, 19 nt, Homo sapiens
  misc_RNA (1)...(19): siRNA sense strand
ggugcuagcccuggaagaa

SEQ ID NO: 2205641 - RNA, 19 nt, Homo sapiens
  misc_RNA (1)...(19): siRNA sense strand
gcagugagcgggugcuaac

SEQ ID NO: 2205642 - RNA, 19 nt, Homo sapiens
  misc_RNA (1)...(19): siRNA sense strand
ugucaccgauggcuaaugg

SEQ ID NO: 2205643 - RNA, 19 nt, Homo sapiens
  misc_RNA (1)...(19): siRNA sense strand
ccauugaggaaguguacua

SEQ ID NO: 2205644 - RNA, 19 nt, Homo sapiens
  misc_RNA (1)...(19): siRNA sense strand
caagcgcacccuuuccuau

SEQ ID NO: 2205645 - RNA, 19 nt, Homo sapiens
  misc_RNA (1)...(19): siRNA sense strand
gcugaagccaaguggauga

SEQ ID NO: 2205646 - RNA, 19 nt, Homo sapiens
  misc_RNA (1)...(19): siRNA sense strand
agaaggagaagcugacugu

SEQ ID NO: 2205647 - RNA, 19 nt, Homo sapiens
  misc_RNA (1)...(19): siRNA sense strand
cgcaaccucuccacuguca

SEQ ID NO: 2205648 - RNA, 19 nt, Homo sapiens
  misc_RNA (1)...(19): siRNA sense strand
gcgacuggcugagcugaag

SEQ ID NO: 2205649 - RNA, 19 nt, Homo sapiens
  misc_RNA (1)...(19): siRNA sense strand
agacagcccugcagcuacu

SEQ ID NO: 2205650 - RNA, 19 nt, Homo sapiens
  misc_RNA (1)...(19): siRNA sense strand
ucugugggcuccagcuaug

SEQ ID NO: 2205651 - RNA, 19 nt, Homo sapiens
  misc_RNA (1)...(19): siRNA sense strand
gcaagagccaggaccuucu

SEQ ID NO: 2205652 - RNA, 19 nt, Homo sapiens
  misc_RNA (1)...(19): siRNA sense strand
gcuacacucaguucaugaa

SEQ ID NO: 2205653 - RNA, 19 nt, Homo sapiens
  misc_RNA (1)...(19): siRNA sense strand
gaagaagcgcugguuuguc

SEQ ID NO: 2205654 - RNA, 19 nt, Homo sapiens
  misc_RNA (1)...(19): siRNA sense strand
agagaucagugacaaugag

SEQ ID NO: 2205655 - RNA, 19 nt, Homo sapiens
  misc_RNA (1)...(19): siRNA sense strand
acagacagcccugcagcua

SEQ ID NO: 2205656 - RNA, 19 nt, Homo sapiens
  misc_RNA (1)...(19): siRNA sense strand
gcagugcagccaagaagag

SEQ ID NO: 2205657 - RNA, 19 nt, Homo sapiens
  misc_RNA (1)...(19): siRNA sense strand
ucaagaugcgggagaaaca

SEQ ID NO: 2205658 - RNA, 19 nt, Homo sapiens
  misc_RNA (1)...(19): siRNA sense strand
agaagaaccggcucaugga

SEQ ID NO: 2205659 - RNA, 19 nt, Homo sapiens
  misc_RNA (1)...(19): siRNA sense strand
acaagaaugccuccuuaca

SEQ ID NO: 2205660 - RNA, 19 nt, Homo sapiens
  misc_RNA (1)...(19): siRNA sense strand
ccacaagggcagcuucagu

SEQ ID NO: 2205661 - RNA, 19 nt, Homo sapiens
  misc_RNA (1)...(19): siRNA sense strand
ccagaucccaagcuaaaca

SEQ ID NO: 2205662 - RNA, 19 nt, Homo sapiens
  misc_RNA (1)...(19): siRNA sense strand
cgacucagcacagccauca

SEQ ID NO: 2205663 - RNA, 19 nt, Homo sapiens
  misc_RNA (1)...(19): siRNA sense strand
uugaggaaguguacuacga

SEQ ID NO: 2205664 - RNA, 19 nt, Homo sapiens
  misc_RNA (1)...(19): siRNA sense strand
uggaagaagcgcugguuug

SEQ ID NO: 2205665 - RNA, 19 nt, Homo sapiens
  misc_RNA (1)...(19): siRNA sense strand
ggacuuugaccugaagaca

SEQ ID NO: 2205666 - RNA, 19 nt, Homo sapiens
  misc_RNA (1)...(19): siRNA sense strand
gcugaaagaggcucaugca

SEQ ID NO: 2205667 - RNA, 19 nt, Homo sapiens
  misc_RNA (1)...(19): siRNA sense strand
agggugagcacgccuauga

SEQ ID NO: 2205668 - RNA, 19 nt, Homo sapiens
  misc_RNA (1)...(19): siRNA sense strand
uacagucugggcucucuua

SEQ ID NO: 2205669 - RNA, 19 nt, Homo sapiens
  misc_RNA (1)...(19): siRNA sense strand
cugcagaggccaugcguau

SEQ ID NO: 2205670 - RNA, 19 nt, Homo sapiens
  misc_RNA (1)...(19): siRNA sense strand
cccaugaccggcuguacua

SEQ ID NO: 2205671 - RNA, 19 nt, Homo sapiens
  misc_RNA (1)...(19): siRNA sense strand
ggcaggccuuucccgaaga

SEQ ID NO: 2205672 - RNA, 19 nt, Homo sapiens
  misc_RNA (1)...(19): siRNA sense strand
gcucaagguccgugugaag

SEQ ID NO: 2205673 - RNA, 19 nt, Homo sapiens
  misc_RNA (1)...(19): siRNA sense strand
gaaggaccugcaagagauc

SEQ ID NO: 2205674 - RNA, 19 nt, Homo sapiens
  misc_RNA (1)...(19): siRNA sense strand
acagagaucagugacaaug

SEQ ID NO: 2205675 - RNA, 19 nt, Homo sapiens
  misc_RNA (1)...(19): siRNA sense strand
gaagcugaagggagucauc

SEQ ID NO: 2205676 - RNA, 19 nt, Homo sapiens
  misc_RNA (1)...(19): siRNA sense strand
gaagacagcuccucuaugg

SEQ ID NO: 2205677 - RNA, 19 nt, Homo sapiens
  misc_RNA (1)...(19): siRNA sense strand
caacagaucuacaguuuca

SEQ ID NO: 2205678 - RNA, 19 nt, Homo sapiens
  misc_RNA (1)...(19): siRNA sense strand
ccggaaggcuggaagaaua

SEQ ID NO: 2205679 - RNA, 19 nt, Homo sapiens
  misc_RNA (1)...(19): siRNA sense strand
gcagaaacuugccagguau

SEQ ID NO: 2205680 - RNA, 19 nt, Homo sapiens
  misc_RNA (1)...(19): siRNA sense strand
gaucuugccucuggaaguu

SEQ ID NO: 2205681 - RNA, 19 nt, Homo sapiens
  misc_RNA (1)...(19): siRNA sense strand
gguauaaacuccgaauugu

SEQ ID NO: 2205682 - RNA, 19 nt, Homo sapiens
  misc_RNA (1)...(19): siRNA sense strand
ccacucggcuagaaaguau

SEQ ID NO: 2205683 - RNA, 19 nt, Homo sapiens
  misc_RNA (1)...(19): siRNA sense strand
ugcaacagaucuacaguuu

SEQ ID NO: 2205684 - RNA, 19 nt, Homo sapiens
  misc_RNA (1)...(19): siRNA sense strand
ccugggagcucacagaaga

SEQ ID NO: 2205685 - RNA, 19 nt, Homo sapiens
  misc_RNA (1)...(19): siRNA sense strand
caaggagggucuucuuaag

SEQ ID NO: 2205686 - RNA, 19 nt, Homo sapiens
  misc_RNA (1)...(19): siRNA sense strand
gcacacggccucgaucuug

SEQ ID NO: 2205687 - RNA, 19 nt, Homo sapiens
  misc_RNA (1)...(19): siRNA sense strand
uaaggaugguccagauuau

SEQ ID NO: 2205688 - RNA, 19 nt, Homo sapiens
  misc_RNA (1)...(19): siRNA sense strand
gcgcgguccugaagagauu

SEQ ID NO: 2205689 - RNA, 19 nt, Homo sapiens
  misc_RNA (1)...(19): siRNA sense strand
ucaaggagggucuucuuaa

SEQ ID NO: 2205690 - RNA, 19 nt, Homo sapiens
  misc_RNA (1)...(19): siRNA sense strand
gauuaaaggcgucaaaugg

SEQ ID NO: 2205691 - RNA, 19 nt, Homo sapiens
  misc_RNA (1)...(19): siRNA sense strand
gugaugcccuuccucuuug

SEQ ID NO: 2205692 - RNA, 19 nt, Homo sapiens
  misc_RNA (1)...(19): siRNA sense strand
agcagaaacuugccaggua

SEQ ID NO: 2205693 - RNA, 19 nt, Homo sapiens
  misc_RNA (1)...(19): siRNA sense strand
gaagagggaggaccugaca

SEQ ID NO: 2205694 - RNA, 19 nt, Homo sapiens
  misc_RNA (1)...(19): siRNA sense strand
gaaacuugccagguauaaa

SEQ ID NO: 2205695 - RNA, 19 nt, Homo sapiens
  misc_RNA (1)...(19): siRNA sense strand
auaaggaugguccagauua

SEQ ID NO: 2205696 - RNA, 19 nt, Homo sapiens
  misc_RNA (1)...(19): siRNA sense strand
ggguaaaucccaacauugu

SEQ ID NO: 2205697 - RNA, 19 nt, Homo sapiens
  misc_RNA (1)...(19): siRNA sense strand
guaaaucccaacauugugu

SEQ ID NO: 2205698 - RNA, 19 nt, Homo sapiens
  misc_RNA (1)...(19): siRNA sense strand
gauaaggaugguccagauu

SEQ ID NO: 2205699 - RNA, 19 nt, Homo sapiens
  misc_RNA (1)...(19): siRNA sense strand
ggaagacagcuccucuaug

SEQ ID NO: 2205700 - RNA, 19 nt, Homo sapiens
  misc_RNA (1)...(19): siRNA sense strand
ugauaaggaugguccagau

SEQ ID NO: 2205701 - RNA, 19 nt, Homo sapiens
  misc_RNA (1)...(19): siRNA sense strand
gcccuggcauuaagaaaca

SEQ ID NO: 2205702 - RNA, 19 nt, Homo sapiens
  misc_RNA (1)...(19): siRNA sense strand
guauaaacuccgaauuguu

SEQ ID NO: 2205703 - RNA, 19 nt, Homo sapiens
  misc_RNA (1)...(19): siRNA sense strand
aaaauuaccccuagagaaa

SEQ ID NO: 2205704 - RNA, 19 nt, Homo sapiens
  misc_RNA (1)...(19): siRNA sense strand
gcuagaaaguauccaacag

SEQ ID NO: 2205705 - RNA, 19 nt, Homo sapiens
  misc_RNA (1)...(19): siRNA sense strand
ccgccaagcuaacucaauc

SEQ ID NO: 2205706 - RNA, 19 nt, Homo sapiens
  misc_RNA (1)...(19): siRNA sense strand
cucaauuacuuccaccuaa

SEQ ID NO: 2205707 - RNA, 19 nt, Homo sapiens
  misc_RNA (1)...(19): siRNA sense strand
gucaaggagggucuucuua

SEQ ID NO: 2205708 - RNA, 19 nt, Homo sapiens
  misc_RNA (1)...(19): siRNA sense strand
ugugaugcccuuccucuuu

SEQ ID NO: 2205709 - RNA, 19 nt, Homo sapiens
  misc_RNA (1)...(19): siRNA sense strand
gcauguaaggguagaguca

SEQ ID NO: 2205710 - RNA, 19 nt, Homo sapiens
  misc_RNA (1)...(19): siRNA sense strand
gagcccaaccucuggaugu

SEQ ID NO: 2205711 - RNA, 19 nt, Homo sapiens
  misc_RNA (1)...(19): siRNA sense strand
gcaccugggagcucacaga

SEQ ID NO: 2205712 - RNA, 19 nt, Homo sapiens
  misc_RNA (1)...(19): siRNA sense strand
uaaaucccaacauugugua

SEQ ID NO: 2205713 - RNA, 19 nt, Homo sapiens
  misc_RNA (1)...(19): siRNA sense strand
gagauuaaaggcgucaaau

SEQ ID NO: 2205714 - RNA, 19 nt, Homo sapiens
  misc_RNA (1)...(19): siRNA sense strand
cagaaacuugccagguaua

SEQ ID NO: 2205715 - RNA, 19 nt, Homo sapiens
  misc_RNA (1)...(19): siRNA sense strand
cuuccucuuugaucuuuaa

SEQ ID NO: 2205716 - RNA, 19 nt, Homo sapiens
  misc_RNA (1)...(19): siRNA sense strand
aaacuugccagguauaaac

SEQ ID NO: 2205717 - RNA, 19 nt, Homo sapiens
  misc_RNA (1)...(19): siRNA sense strand
gcaacagaucuacaguuuc

SEQ ID NO: 2205718 - RNA, 19 nt, Homo sapiens
  misc_RNA (1)...(19): siRNA sense strand
cuggaggucucaggacgua

SEQ ID NO: 2205719 - RNA, 19 nt, Homo sapiens
  misc_RNA (1)...(19): siRNA sense strand
caaaauuaccccuagagaa

SEQ ID NO: 2205720 - RNA, 19 nt, Homo sapiens
  misc_RNA (1)...(19): siRNA sense strand
gaauuguuaagccaccaaa

SEQ ID NO: 2205721 - RNA, 19 nt, Homo sapiens
  misc_RNA (1)...(19): siRNA sense strand
gagccagccagaugugaug

SEQ ID NO: 2205722 - RNA, 19 nt, Homo sapiens
  misc_RNA (1)...(19): siRNA sense strand
gcuccaacaccucgacuuc

SEQ ID NO: 2205723 - RNA, 19 nt, Homo sapiens
  misc_RNA (1)...(19): siRNA sense strand
gguaaaucccaacauugug

SEQ ID NO: 2205724 - RNA, 19 nt, Homo sapiens
  misc_RNA (1)...(19): siRNA sense strand
gcaugagccagccagaugu

SEQ ID NO: 2205725 - RNA, 19 nt, Homo sapiens
  misc_RNA (1)...(19): siRNA sense strand
gaauacuguccgucacaau

SEQ ID NO: 2205726 - RNA, 19 nt, Homo sapiens
  misc_RNA (1)...(19): siRNA sense strand
ggaagcgguuugccuuuuc

SEQ ID NO: 2205727 - RNA, 19 nt, Homo sapiens
  misc_RNA (1)...(19): siRNA sense strand
agaauacuguccgucacaa

SEQ ID NO: 2205728 - RNA, 19 nt, Homo sapiens
  misc_RNA (1)...(19): siRNA sense strand
agguauaaacuccgaauug

SEQ ID NO: 2205729 - RNA, 19 nt, Homo sapiens
  misc_RNA (1)...(19): siRNA sense strand
gugcaacagaucuacaguu

SEQ ID NO: 2205730 - RNA, 19 nt, Homo sapiens
  misc_RNA (1)...(19): siRNA sense strand
acccaacccugauaaggau

SEQ ID NO: 2205731 - RNA, 19 nt, Homo sapiens
  misc_RNA (1)...(19): siRNA sense strand
guaaggguagagucaagga

SEQ ID NO: 2205732 - RNA, 19 nt, Homo sapiens
  misc_RNA (1)...(19): siRNA sense strand
aggaugguccagauuauga

SEQ ID NO: 2205733 - RNA, 19 nt, Homo sapiens
  misc_RNA (1)...(19): siRNA sense strand
uccaacaccucgacuucug

SEQ ID NO: 2205734 - RNA, 19 nt, Homo sapiens
  misc_RNA (1)...(19): siRNA sense strand
cuagaaaguauccaacagu

SEQ ID NO: 2205735 - RNA, 19 nt, Homo sapiens
  misc_RNA (1)...(19): siRNA sense strand
agaaagugccugucagcau

SEQ ID NO: 2205736 - RNA, 19 nt, Homo sapiens
  misc_RNA (1)...(19): siRNA sense strand
agaaacuugccagguauaa

SEQ ID NO: 2205737 - RNA, 19 nt, Homo sapiens
  misc_RNA (1)...(19): siRNA sense strand
ucgagacagcuuugagaaa

SEQ ID NO: 2205738 - RNA, 19 nt, Homo sapiens
  misc_RNA (1)...(19): siRNA sense strand
ggccucaacgugcaacaga

SEQ ID NO: 2205739 - RNA, 19 nt, Homo sapiens
  misc_RNA (1)...(19): siRNA sense strand
agauuaaaggcgucaaaug

SEQ ID NO: 2205740 - RNA, 19 nt, Homo sapiens
  misc_RNA (1)...(19): siRNA sense strand
gcagaaugcucuccuugaa

SEQ ID NO: 2205741 - RNA, 19 nt, Homo sapiens
  misc_RNA (1)...(19): siRNA sense strand
gauaggacauauaugauga

SEQ ID NO: 2205742 - RNA, 19 nt, Homo sapiens
  misc_RNA (1)...(19): siRNA sense strand
ggagugggcuggaggacua

SEQ ID NO: 2205743 - RNA, 19 nt, Homo sapiens
  misc_RNA (1)...(19): siRNA sense strand
aaagacaucuguuccauga

SEQ ID NO: 2205744 - RNA, 19 nt, Homo sapiens
  misc_RNA (1)...(19): siRNA sense strand
gagugaauguuacgugaua

SEQ ID NO: 2205745 - RNA, 19 nt, Homo sapiens
  misc_RNA (1)...(19): siRNA sense strand
ggagggaaaucaucaaauc

SEQ ID NO: 2205746 - RNA, 19 nt, Homo sapiens
  misc_RNA (1)...(19): siRNA sense strand
ggaagagaaugaagugaau

SEQ ID NO: 2205747 - RNA, 19 nt, Homo sapiens
  misc_RNA (1)...(19): siRNA sense strand
aaacggagagcacuuauuu

SEQ ID NO: 2205748 - RNA, 19 nt, Homo sapiens
  misc_RNA (1)...(19): siRNA sense strand
gaaaagcacuucuucacuu

SEQ ID NO: 2205749 - RNA, 19 nt, Homo sapiens
  misc_RNA (1)...(19): siRNA sense strand
gaguugguauaauguguua

SEQ ID NO: 2205750 - RNA, 19 nt, Homo sapiens
  misc_RNA (1)...(19): siRNA sense strand
ggacuacuuccgccauuua

SEQ ID NO: 2205751 - RNA, 19 nt, Homo sapiens
  misc_RNA (1)...(19): siRNA sense strand
gcacuuauuuggcugagau

SEQ ID NO: 2205752 - RNA, 19 nt, Homo sapiens
  misc_RNA (1)...(19): siRNA sense strand
gggagaagauugagaugau

SEQ ID NO: 2205753 - RNA, 19 nt, Homo sapiens
  misc_RNA (1)...(19): siRNA sense strand
ggagacgggucccuggaaa

SEQ ID NO: 2205754 - RNA, 19 nt, Homo sapiens
  misc_RNA (1)...(19): siRNA sense strand
gcacagacaaucucccaaa

SEQ ID NO: 2205755 - RNA, 19 nt, Homo sapiens
  misc_RNA (1)...(19): siRNA sense strand
guccacagcugcccaagaa

SEQ ID NO: 2205756 - RNA, 19 nt, Homo sapiens
  misc_RNA (1)...(19): siRNA sense strand
gauaucaucuuccauccau

SEQ ID NO: 2205757 - RNA, 19 nt, Homo sapiens
  misc_RNA (1)...(19): siRNA sense strand
gaugaucgcuccugugaac

SEQ ID NO: 2205758 - RNA, 19 nt, Homo sapiens
  misc_RNA (1)...(19): siRNA sense strand
gagaugaucgcuccuguga

SEQ ID NO: 2205759 - RNA, 19 nt, Homo sapiens
  misc_RNA (1)...(19): siRNA sense strand
ggucuaaggcuccaagaaa

SEQ ID NO: 2205760 - RNA, 19 nt, Homo sapiens
  misc_RNA (1)...(19): siRNA sense strand
gggaaacucugcugacagu

SEQ ID NO: 2205761 - RNA, 19 nt, Homo sapiens
  misc_RNA (1)...(19): siRNA sense strand
caacaaaaguaccacgaua

SEQ ID NO: 2205762 - RNA, 19 nt, Homo sapiens
  misc_RNA (1)...(19): siRNA sense strand
ccacagagcugcgcuaucg

SEQ ID NO: 2205763 - RNA, 19 nt, Homo sapiens
  misc_RNA (1)...(19): siRNA sense strand
gccaggagagugaauguua

SEQ ID NO: 2205764 - RNA, 19 nt, Homo sapiens
  misc_RNA (1)...(19): siRNA sense strand
ccaaggagcucuggcacuu

SEQ ID NO: 2205765 - RNA, 19 nt, Homo sapiens
  misc_RNA (1)...(19): siRNA sense strand
aaaaggagcucgccauuga

SEQ ID NO: 2205766 - RNA, 19 nt, Homo sapiens
  misc_RNA (1)...(19): siRNA sense strand
ggacuucaaugacaaugag

SEQ ID NO: 2205767 - RNA, 19 nt, Homo sapiens
  misc_RNA (1)...(19): siRNA sense strand
gcgcuucucugauaucauc

SEQ ID NO: 2205768 - RNA, 19 nt, Homo sapiens
  misc_RNA (1)...(19): siRNA sense strand
ccaaugccauccaaguuug

SEQ ID NO: 2205769 - RNA, 19 nt, Homo sapiens
  misc_RNA (1)...(19): siRNA sense strand
gcgagucccucaccuggaa

SEQ ID NO: 2205770 - RNA, 19 nt, Homo sapiens
  misc_RNA (1)...(19): siRNA sense strand
cggcaagaauuccaagaaa

SEQ ID NO: 2205771 - RNA, 19 nt, Homo sapiens
  misc_RNA (1)...(19): siRNA sense strand
ucacuggacuucaaugaca

SEQ ID NO: 2205772 - RNA, 19 nt, Homo sapiens
  misc_RNA (1)...(19): siRNA sense strand
gagaagggcucagaucacu

SEQ ID NO: 2205773 - RNA, 19 nt, Homo sapiens
  misc_RNA (1)...(19): siRNA sense strand
gagaaggccagcaagacua

SEQ ID NO: 2205774 - RNA, 19 nt, Homo sapiens
  misc_RNA (1)...(19): siRNA sense strand
aaacguucaucgagaagaa

SEQ ID NO: 2205775 - RNA, 19 nt, Homo sapiens
  misc_RNA (1)...(19): siRNA sense strand
agaaugggcccagcucuua

SEQ ID NO: 2205776 - RNA, 19 nt, Homo sapiens
  misc_RNA (1)...(19): siRNA sense strand
caugugcacuccaaagaga

SEQ ID NO: 2205777 - RNA, 19 nt, Homo sapiens
  misc_RNA (1)...(19): siRNA sense strand
ggauaggacauauaugaug

SEQ ID NO: 2205778 - RNA, 19 nt, Homo sapiens
  misc_RNA (1)...(19): siRNA sense strand
cgugauagaugccgaaguc

SEQ ID NO: 2205779 - RNA, 19 nt, Homo sapiens
  misc_RNA (1)...(19): siRNA sense strand
ucagcugugugaucuguuu

SEQ ID NO: 2205780 - RNA, 19 nt, Homo sapiens
  misc_RNA (1)...(19): siRNA sense strand
ccaagcugcugcugguuau

SEQ ID NO: 2205781 - RNA, 19 nt, Homo sapiens
  misc_RNA (1)...(19): siRNA sense strand
cagacaaucucccaaagag

SEQ ID NO: 2205782 - RNA, 19 nt, Homo sapiens
  misc_RNA (1)...(19): siRNA sense strand
gaggacuacuuccgccauu

SEQ ID NO: 2205783 - RNA, 19 nt, Homo sapiens
  misc_RNA (1)...(19): siRNA sense strand
cgggauaggacauauauga

SEQ ID NO: 2205784 - RNA, 19 nt, Homo sapiens
  misc_RNA (1)...(19): siRNA sense strand
ccaaagagaaggccagcaa

SEQ ID NO: 2205785 - RNA, 19 nt, Homo sapiens
  misc_RNA (1)...(19): siRNA sense strand
gggauacugugaagagauc

SEQ ID NO: 2205786 - RNA, 19 nt, Homo sapiens
  misc_RNA (1)...(19): siRNA sense strand
gacgacgacuucaacacaa

SEQ ID NO: 2205787 - RNA, 19 nt, Homo sapiens
  misc_RNA (1)...(19): siRNA sense strand
ggagaagauugagaugauc

SEQ ID NO: 2205788 - RNA, 19 nt, Homo sapiens
  misc_RNA (1)...(19): siRNA sense strand
agacacagaccauguacaa

SEQ ID NO: 2205789 - RNA, 19 nt, Homo sapiens
  misc_RNA (1)...(19): siRNA sense strand
gcacuucuucacuucguuu

SEQ ID NO: 2205790 - RNA, 19 nt, Homo sapiens
  misc_RNA (1)...(19): siRNA sense strand
gggagacacagaccaugua

SEQ ID NO: 2205791 - RNA, 19 nt, Homo sapiens
  misc_RNA (1)...(19): siRNA sense strand
ggaaaccagagccgaguga

SEQ ID NO: 2205792 - RNA, 19 nt, Homo sapiens
  misc_RNA (1)...(19): siRNA sense strand
ggcaguacgugaaugaagu

SEQ ID NO: 2205793 - RNA, 19 nt, Homo sapiens
  misc_RNA (1)...(19): siRNA sense strand
cgacacacacgaugaagga

SEQ ID NO: 2205794 - RNA, 19 nt, Homo sapiens
  misc_RNA (1)...(19): siRNA sense strand
agccagaguugguauaaug

SEQ ID NO: 2205795 - RNA, 19 nt, Homo sapiens
  misc_RNA (1)...(19): siRNA sense strand
ucaccacgcccacagauga

SEQ ID NO: 2205796 - RNA, 19 nt, Homo sapiens
  misc_RNA (1)...(19): siRNA sense strand
ugaaagacaucuguuccau

SEQ ID NO: 2205797 - RNA, 19 nt, Homo sapiens
  misc_RNA (1)...(19): siRNA sense strand
gcugacaguccguuugaaa

SEQ ID NO: 2205798 - RNA, 19 nt, Homo sapiens
  misc_RNA (1)...(19): siRNA sense strand
ccucagugaugcuccuuga

SEQ ID NO: 2205799 - RNA, 19 nt, Homo sapiens
  misc_RNA (1)...(19): siRNA sense strand
aaggagcucuggcacuuug

SEQ ID NO: 2205800 - RNA, 19 nt, Homo sapiens
  misc_RNA (1)...(19): siRNA sense strand
gagaaugaagugaaugaca

SEQ ID NO: 2205801 - RNA, 19 nt, Homo sapiens
  misc_RNA (1)...(19): siRNA sense strand
gaggaaucgcuaucauuga

SEQ ID NO: 2205802 - RNA, 19 nt, Homo sapiens
  misc_RNA (1)...(19): siRNA sense strand
gcccuaccaugacuacuuc

SEQ ID NO: 2205803 - RNA, 19 nt, Homo sapiens
  misc_RNA (1)...(19): siRNA sense strand
ugacaguccguuugaaaga

SEQ ID NO: 2205804 - RNA, 19 nt, Homo sapiens
  misc_RNA (1)...(19): siRNA sense strand
agaggaaucgcuaucauug

SEQ ID NO: 2205805 - RNA, 19 nt, Homo sapiens
  misc_RNA (1)...(19): siRNA sense strand
aaagaggaaucgcuaucau

SEQ ID NO: 2205806 - RNA, 19 nt, Homo sapiens
  misc_RNA (1)...(19): siRNA sense strand
acaugaugcucuucuacaa

SEQ ID NO: 2205807 - RNA, 19 nt, Homo sapiens
  misc_RNA (1)...(19): siRNA sense strand
gccacaggaucaaacaugu

SEQ ID NO: 2205808 - RNA, 19 nt, Homo sapiens
  misc_RNA (1)...(19): siRNA sense strand
uggcugagaugcacagaca

SEQ ID NO: 2205809 - RNA, 19 nt, Homo sapiens
  misc_RNA (1)...(19): siRNA sense strand
gaauguuacgugauagaug

SEQ ID NO: 2205810 - RNA, 19 nt, Homo sapiens
  misc_RNA (1)...(19): siRNA sense strand
ccucauuguugauuacuca

SEQ ID NO: 2205811 - RNA, 19 nt, Homo sapiens
  misc_RNA (1)...(19): siRNA sense strand
ccacagcugcccaagaaau

SEQ ID NO: 2205812 - RNA, 19 nt, Homo sapiens
  misc_RNA (1)...(19): siRNA sense strand
agaaugcucuccuugaaaa

SEQ ID NO: 2205813 - RNA, 19 nt, Homo sapiens
  misc_RNA (1)...(19): siRNA sense strand
uuaacaugaugcucuucua

SEQ ID NO: 2205814 - RNA, 19 nt, Homo sapiens
  misc_RNA (1)...(19): siRNA sense strand
ccacacagacgcggcauau

SEQ ID NO: 2205815 - RNA, 19 nt, Homo sapiens
  misc_RNA (1)...(19): siRNA sense strand
agaaauccaucaccaacag

SEQ ID NO: 2205816 - RNA, 19 nt, Homo sapiens
  misc_RNA (1)...(19): siRNA sense strand
gacaucuguuccaugacua

SEQ ID NO: 2205817 - RNA, 19 nt, Homo sapiens
  misc_RNA (1)...(19): siRNA sense strand
acacggagcgccucauugu

SEQ ID NO: 2205818 - RNA, 19 nt, Homo sapiens
  misc_RNA (1)...(19): siRNA sense strand
cagaguugguauaaugugu

SEQ ID NO: 2205819 - RNA, 19 nt, Homo sapiens
  misc_RNA (1)...(19): siRNA sense strand
caacacaaugggauacugu

SEQ ID NO: 2205820 - RNA, 19 nt, Homo sapiens
  misc_RNA (1)...(19): siRNA sense strand
cagaaugcucuccuugaaa

SEQ ID NO: 2205821 - RNA, 19 nt, Homo sapiens
  misc_RNA (1)...(19): siRNA sense strand
ucuguuccaugacuaaaga

SEQ ID NO: 2205822 - RNA, 19 nt, Homo sapiens
  misc_RNA (1)...(19): siRNA sense strand
agacaucuguuccaugacu

SEQ ID NO: 2205823 - RNA, 19 nt, Homo sapiens
  misc_RNA (1)...(19): siRNA sense strand
gaaggacucgcucaucaac

SEQ ID NO: 2205824 - RNA, 19 nt, Homo sapiens
  misc_RNA (1)...(19): siRNA sense strand
ccaccuacaagcagagaaa

SEQ ID NO: 2205825 - RNA, 19 nt, Homo sapiens
  misc_RNA (1)...(19): siRNA sense strand
aaagagaaggccagcaaga

SEQ ID NO: 2205826 - RNA, 19 nt, Homo sapiens
  misc_RNA (1)...(19): siRNA sense strand
uuacucaugugcacuccaa

SEQ ID NO: 2205827 - RNA, 19 nt, Homo sapiens
  misc_RNA (1)...(19): siRNA sense strand
caugacuacuucuacacaa

SEQ ID NO: 2205828 - RNA, 19 nt, Homo sapiens
  misc_RNA (1)...(19): siRNA sense strand
agagccgagugauucuuua

SEQ ID NO: 2205829 - RNA, 19 nt, Homo sapiens
  misc_RNA (1)...(19): siRNA sense strand
ggcaagaauuccaagaaaa

SEQ ID NO: 2205830 - RNA, 19 nt, Homo sapiens
  misc_RNA (1)...(19): siRNA sense strand
ccaagaaauccaucaccaa

SEQ ID NO: 2205831 - RNA, 19 nt, Homo sapiens
  misc_RNA (1)...(19): siRNA sense strand
gaagagaaugaagugaaug

SEQ ID NO: 2205832 - RNA, 19 nt, Homo sapiens
  misc_RNA (1)...(19): siRNA sense strand
acaaugggauacugugaag

SEQ ID NO: 2205833 - RNA, 19 nt, Homo sapiens
  misc_RNA (1)...(19): siRNA sense strand
cggagcgccucauuguuga

SEQ ID NO: 2205834 - RNA, 19 nt, Homo sapiens
  misc_RNA (1)...(19): siRNA sense strand
ccuacaagcagagaaauga

SEQ ID NO: 2205835 - RNA, 19 nt, Homo sapiens
  misc_RNA (1)...(19): siRNA sense strand
ucuacaaacucuggauguu

SEQ ID NO: 2205836 - RNA, 19 nt, Homo sapiens
  misc_RNA (1)...(19): siRNA sense strand
cgacucuaccucucugaaa

SEQ ID NO: 2205837 - RNA, 19 nt, Homo sapiens
  misc_RNA (1)...(19): siRNA sense strand
gcggcaagaauuccaagaa

SEQ ID NO: 2205838 - RNA, 19 nt, Homo sapiens
  misc_RNA (1)...(19): siRNA sense strand
gucuaaggcuccaagaaag

SEQ ID NO: 2205839 - RNA, 19 nt, Homo sapiens
  misc_RNA (1)...(19): siRNA sense strand
ccacgauacugagcuccaa

SEQ ID NO: 2205840 - RNA, 19 nt, Homo sapiens
  misc_RNA (1)...(19): siRNA sense strand
cugcugaccuuccuaauuu

SEQ ID NO: 2205841 - RNA, 19 nt, Homo sapiens
  misc_RNA (1)...(19): siRNA sense strand
ggacaacgccuuccucauc

SEQ ID NO: 2205842 - RNA, 19 nt, Homo sapiens
  misc_RNA (1)...(19): siRNA sense strand
uugccaagcuggucaguua

SEQ ID NO: 2205843 - RNA, 19 nt, Homo sapiens
  misc_RNA (1)...(19): siRNA sense strand
ccaggaagccuaucaguau

SEQ ID NO: 2205844 - RNA, 19 nt, Homo sapiens
  misc_RNA (1)...(19): siRNA sense strand
ggaccugucuacacucuuc

SEQ ID NO: 2205845 - RNA, 19 nt, Homo sapiens
  misc_RNA (1)...(19): siRNA sense strand
caauguggcucacuuuagu

SEQ ID NO: 2205846 - RNA, 19 nt, Homo sapiens
  misc_RNA (1)...(19): siRNA sense strand
uggcagggcucgucucuga

SEQ ID NO: 2205847 - RNA, 19 nt, Homo sapiens
  misc_RNA (1)...(19): siRNA sense strand
gcuaucacauguccaggaa

SEQ ID NO: 2205848 - RNA, 19 nt, Homo sapiens
  misc_RNA (1)...(19): siRNA sense strand
caucauuacugccgucaug

SEQ ID NO: 2205849 - RNA, 19 nt, Homo sapiens
  misc_RNA (1)...(19): siRNA sense strand
gagcagaucaaacccauca

SEQ ID NO: 2205850 - RNA, 19 nt, Homo sapiens
  misc_RNA (1)...(19): siRNA sense strand
ggaauucccacacaucugu

SEQ ID NO: 2205851 - RNA, 19 nt, Homo sapiens
  misc_RNA (1)...(19): siRNA sense strand
gaacagucccugcucuauc

SEQ ID NO: 2205852 - RNA, 19 nt, Homo sapiens
  misc_RNA (1)...(19): siRNA sense strand
ugauguuccuguacaacua

SEQ ID NO: 2205853 - RNA, 19 nt, Homo sapiens
  misc_RNA (1)...(19): siRNA sense strand
cacgagcucugguacuuug

SEQ ID NO: 2205854 - RNA, 19 nt, Homo sapiens
  misc_RNA (1)...(19): siRNA sense strand
ugacggcaccggcuccaua

SEQ ID NO: 2205855 - RNA, 19 nt, Homo sapiens
  misc_RNA (1)...(19): siRNA sense strand
gcagaucaaacccaucaau

SEQ ID NO: 2205856 - RNA, 19 nt, Homo sapiens
  misc_RNA (1)...(19): siRNA sense strand
ugucuacacucuucgaugu

SEQ ID NO: 2205857 - RNA, 19 nt, Homo sapiens
  misc_RNA (1)...(19): siRNA sense strand
caucaccacugcugucucu

SEQ ID NO: 2205858 - RNA, 19 nt, Homo sapiens
  misc_RNA (1)...(19): siRNA sense strand
gcugcugaccuuccuaauu

SEQ ID NO: 2205859 - RNA, 19 nt, Homo sapiens
  misc_RNA (1)...(19): siRNA sense strand
aacagucccugcucuauca

SEQ ID NO: 2205860 - RNA, 19 nt, Homo sapiens
  misc_RNA (1)...(19): siRNA sense strand
ggaacagucccugcucuau

SEQ ID NO: 2205861 - RNA, 19 nt, Homo sapiens
  misc_RNA (1)...(19): siRNA sense strand
caucuggaauucccacaca

SEQ ID NO: 2205862 - RNA, 19 nt, Homo sapiens
  misc_RNA (1)...(19): siRNA sense strand
agaucaaacccaucaauga

SEQ ID NO: 2205863 - RNA, 19 nt, Homo sapiens
  misc_RNA (1)...(19): siRNA sense strand
gauacucacagucucaaug

SEQ ID NO: 2205864 - RNA, 19 nt, Homo sapiens
  misc_RNA (1)...(19): siRNA sense strand
cgucaucaccuuccucuuc

SEQ ID NO: 2205865 - RNA, 19 nt, Homo sapiens
  misc_RNA (1)...(19): siRNA sense strand
ucaaugauacucacagucu

SEQ ID NO: 2205866 - RNA, 19 nt, Homo sapiens
  misc_RNA (1)...(19): siRNA sense strand
caggaagccuaucaguauc

SEQ ID NO: 2205867 - RNA, 19 nt, Homo sapiens
  misc_RNA (1)...(19): siRNA sense strand
gcuggaacaaugucuucua

SEQ ID NO: 2205868 - RNA, 19 nt, Homo sapiens
  misc_RNA (1)...(19): siRNA sense strand
ggagagcggccuugagacu

SEQ ID NO: 2205869 - RNA, 19 nt, Homo sapiens
  misc_RNA (1)...(19): siRNA sense strand
caucgaacacccagaagau

SEQ ID NO: 2205870 - RNA, 19 nt, Homo sapiens
  misc_RNA (1)...(19): siRNA sense strand
ugacaaggacaacuauaag

SEQ ID NO: 2205871 - RNA, 19 nt, Homo sapiens
  misc_RNA (1)...(19): siRNA sense strand
ucaguuacaccuuccucua

SEQ ID NO: 2205872 - RNA, 19 nt, Homo sapiens
  misc_RNA (1)...(19): siRNA sense strand
ucuuuggccugggauauuu

SEQ ID NO: 2205873 - RNA, 19 nt, Homo sapiens
  misc_RNA (1)...(19): siRNA sense strand
acaaggacaacuauaagga

SEQ ID NO: 2205874 - RNA, 19 nt, Homo sapiens
  misc_RNA (1)...(19): siRNA sense strand
cagaucaaacccaucaaug

SEQ ID NO: 2205875 - RNA, 19 nt, Homo sapiens
  misc_RNA (1)...(19): siRNA sense strand
ccaauguggcucacuuuag

SEQ ID NO: 2205876 - RNA, 19 nt, Homo sapiens
  misc_RNA (1)...(19): siRNA sense strand
uugacaaggacaacuauaa

SEQ ID NO: 2205877 - RNA, 19 nt, Homo sapiens
  misc_RNA (1)...(19): siRNA sense strand
ccaugauguuccuguacaa

SEQ ID NO: 2205878 - RNA, 19 nt, Homo sapiens
  misc_RNA (1)...(19): siRNA sense strand
cuagccugcuugcuccuuu

SEQ ID NO: 2205879 - RNA, 19 nt, Homo sapiens
  misc_RNA (1)...(19): siRNA sense strand
cccacgggcuggaacaaug

SEQ ID NO: 2205880 - RNA, 19 nt, Homo sapiens
  misc_RNA (1)...(19): siRNA sense strand
cagcugagaaccaggacaa

SEQ ID NO: 2205881 - RNA, 19 nt, Homo sapiens
  misc_RNA (1)...(19): siRNA sense strand
ucuacacucuucgauguug

SEQ ID NO: 2205882 - RNA, 19 nt, Homo sapiens
  misc_RNA (1)...(19): siRNA sense strand
agagcggccuugagacugu

SEQ ID NO: 2205883 - RNA, 19 nt, Homo sapiens
  misc_RNA (1)...(19): siRNA sense strand
uaauuuacgccugcuauca

SEQ ID NO: 2205884 - RNA, 19 nt, Homo sapiens
  misc_RNA (1)...(19): siRNA sense strand
gggauugccagcuccauag

SEQ ID NO: 2205885 - RNA, 19 nt, Homo sapiens
  misc_RNA (1)...(19): siRNA sense strand
cauuugacaaggacaacua

SEQ ID NO: 2205886 - RNA, 19 nt, Homo sapiens
  misc_RNA (1)...(19): siRNA sense strand
uugagacuguggccaaaug

SEQ ID NO: 2205887 - RNA, 19 nt, Homo sapiens
  misc_RNA (1)...(19): siRNA sense strand
ccucuguggugaccugugu

SEQ ID NO: 2205888 - RNA, 19 nt, Homo sapiens
  misc_RNA (1)...(19): siRNA sense strand
gacaaggacaacuauaagg

SEQ ID NO: 2205889 - RNA, 19 nt, Homo sapiens
  misc_RNA (1)...(19): siRNA sense strand
guuaguauacaaagagauc

SEQ ID NO: 2205890 - RNA, 19 nt, Homo sapiens
  misc_RNA (1)...(19): siRNA sense strand
gcugugucaugcucaucuu

SEQ ID NO: 2205891 - RNA, 19 nt, Homo sapiens
  misc_RNA (1)...(19): siRNA sense strand
auacucacagucucaauga

SEQ ID NO: 2205892 - RNA, 19 nt, Homo sapiens
  misc_RNA (1)...(19): siRNA sense strand
ccucaucgaacacccagaa

SEQ ID NO: 2205893 - RNA, 19 nt, Homo sapiens
  misc_RNA (1)...(19): siRNA sense strand
ggcuuccgcuccguuacua

SEQ ID NO: 2205894 - RNA, 19 nt, Homo sapiens
  misc_RNA (1)...(19): siRNA sense strand
ccacgagcucugguacuuu

SEQ ID NO: 2205895 - RNA, 19 nt, Homo sapiens
  misc_RNA (1)...(19): siRNA sense strand
auugccagcuccauaguga

SEQ ID NO: 2205896 - RNA, 19 nt, Homo sapiens
  misc_RNA (1)...(19): siRNA sense strand
caucaugggcaucuggaau

SEQ ID NO: 2205897 - RNA, 19 nt, Homo sapiens
  misc_RNA (1)...(19): siRNA sense strand
uccacgagcucugguacuu

SEQ ID NO: 2205898 - RNA, 19 nt, Homo sapiens
  misc_RNA (1)...(19): siRNA sense strand
gccgguuaguauacaaaga

SEQ ID NO: 2205899 - RNA, 19 nt, Homo sapiens
  misc_RNA (1)...(19): siRNA sense strand
caucucugccgacguccua

SEQ ID NO: 2205900 - RNA, 19 nt, Homo sapiens
  misc_RNA (1)...(19): siRNA sense strand
cccaugauguuccuguaca

SEQ ID NO: 2205901 - RNA, 19 nt, Homo sapiens
  misc_RNA (1)...(19): siRNA sense strand
ggaagccuaucaguaucgu

SEQ ID NO: 2205902 - RNA, 19 nt, Homo sapiens
  misc_RNA (1)...(19): siRNA sense strand
uccaggaagccuaucagua

SEQ ID NO: 2205903 - RNA, 19 nt, Homo sapiens
  misc_RNA (1)...(19): siRNA sense strand
ugcugaccuuccuaauuua

SEQ ID NO: 2205904 - RNA, 19 nt, Homo sapiens
  misc_RNA (1)...(19): siRNA sense strand
ucaugggcaucuggaauuc

SEQ ID NO: 2205905 - RNA, 19 nt, Homo sapiens
  misc_RNA (1)...(19): siRNA sense strand
ggucauccaggucuguaau

SEQ ID NO: 2205906 - RNA, 19 nt, Homo sapiens
  misc_RNA (1)...(19): siRNA sense strand
ugaggacccugggaacagu

SEQ ID NO: 2205907 - RNA, 19 nt, Homo sapiens
  misc_RNA (1)...(19): siRNA sense strand
cgggauugccagcuccaua

SEQ ID NO: 2205908 - RNA, 19 nt, Homo sapiens
  misc_RNA (1)...(19): siRNA sense strand
gaagagccugcugccauca

SEQ ID NO: 2205909 - RNA, 19 nt, Homo sapiens
  misc_RNA (1)...(19): siRNA sense strand
gccaucggcauguucauca

SEQ ID NO: 2205910 - RNA, 19 nt, Homo sapiens
  misc_RNA (1)...(19): siRNA sense strand
gggcuggaacaaugucuuc

SEQ ID NO: 2205911 - RNA, 19 nt, Homo sapiens
  misc_RNA (1)...(19): siRNA sense strand
ucaugggcgucaucaccuu

SEQ ID NO: 2205912 - RNA, 19 nt, Homo sapiens
  misc_RNA (1)...(19): siRNA sense strand
agggagagcggccuugaga

SEQ ID NO: 2205913 - RNA, 19 nt, Homo sapiens
  misc_RNA (1)...(19): siRNA sense strand
cuggaacaaugucuucuac

SEQ ID NO: 2205914 - RNA, 19 nt, Homo sapiens
  misc_RNA (1)...(19): siRNA sense strand
ggacucacaagagccugaa

SEQ ID NO: 2205915 - RNA, 19 nt, Homo sapiens
  misc_RNA (1)...(19): siRNA sense strand
ucccaggcguggucgaguu

SEQ ID NO: 2205916 - RNA, 19 nt, Homo sapiens
  misc_RNA (1)...(19): siRNA sense strand
cugcugaccuuccuaauuu

SEQ ID NO: 2205917 - RNA, 19 nt, Homo sapiens
  misc_RNA (1)...(19): siRNA sense strand
ggacaacgccuuccucauc

SEQ ID NO: 2205918 - RNA, 19 nt, Homo sapiens
  misc_RNA (1)...(19): siRNA sense strand
uugccaagcuggucaguua

SEQ ID NO: 2205919 - RNA, 19 nt, Homo sapiens
  misc_RNA (1)...(19): siRNA sense strand
ccaggaagccuaucaguau

SEQ ID NO: 2205920 - RNA, 19 nt, Homo sapiens
  misc_RNA (1)...(19): siRNA sense strand
ggaccugucuacacucuuc

SEQ ID NO: 2205921 - RNA, 19 nt, Homo sapiens
  misc_RNA (1)...(19): siRNA sense strand
caauguggcucacuuuagu

SEQ ID NO: 2205922 - RNA, 19 nt, Homo sapiens
  misc_RNA (1)...(19): siRNA sense strand
uggcagggcucgucucuga

SEQ ID NO: 2205923 - RNA, 19 nt, Homo sapiens
  misc_RNA (1)...(19): siRNA sense strand
gcuaucacauguccaggaa

SEQ ID NO: 2205924 - RNA, 19 nt, Homo sapiens
  misc_RNA (1)...(19): siRNA sense strand
caucauuacugccgucaug

SEQ ID NO: 2205925 - RNA, 19 nt, Homo sapiens
  misc_RNA (1)...(19): siRNA sense strand
gagcagaucaaacccauca

SEQ ID NO: 2205926 - RNA, 19 nt, Homo sapiens
  misc_RNA (1)...(19): siRNA sense strand
ggaauucccacacaucugu

SEQ ID NO: 2205927 - RNA, 19 nt, Homo sapiens
  misc_RNA (1)...(19): siRNA sense strand
gaacagucccugcucuauc

SEQ ID NO: 2205928 - RNA, 19 nt, Homo sapiens
  misc_RNA (1)...(19): siRNA sense strand
ugauguuccuguacaacua

SEQ ID NO: 2205929 - RNA, 19 nt, Homo sapiens
  misc_RNA (1)...(19): siRNA sense strand
cacgagcucugguacuuug

SEQ ID NO: 2205930 - RNA, 19 nt, Homo sapiens
  misc_RNA (1)...(19): siRNA sense strand
ugacggcaccggcuccaua

SEQ ID NO: 2205931 - RNA, 19 nt, Homo sapiens
  misc_RNA (1)...(19): siRNA sense strand
gcagaucaaacccaucaau

SEQ ID NO: 2205932 - RNA, 19 nt, Homo sapiens
  misc_RNA (1)...(19): siRNA sense strand
ugucuacacucuucgaugu

SEQ ID NO: 2205933 - RNA, 19 nt, Homo sapiens
  misc_RNA (1)...(19): siRNA sense strand
caucaccacugcugucucu

SEQ ID NO: 2205934 - RNA, 19 nt, Homo sapiens
  misc_RNA (1)...(19): siRNA sense strand
gcugcugaccuuccuaauu

SEQ ID NO: 2205935 - RNA, 19 nt, Homo sapiens
  misc_RNA (1)...(19): siRNA sense strand
aacagucccugcucuauca

SEQ ID NO: 2205936 - RNA, 19 nt, Homo sapiens
  misc_RNA (1)...(19): siRNA sense strand
ggaacagucccugcucuau

SEQ ID NO: 2205937 - RNA, 19 nt, Homo sapiens
  misc_RNA (1)...(19): siRNA sense strand
caucuggaauucccacaca

SEQ ID NO: 2205938 - RNA, 19 nt, Homo sapiens
  misc_RNA (1)...(19): siRNA sense strand
agaucaaacccaucaauga

SEQ ID NO: 2205939 - RNA, 19 nt, Homo sapiens
  misc_RNA (1)...(19): siRNA sense strand
gauacucacagucucaaug

SEQ ID NO: 2205940 - RNA, 19 nt, Homo sapiens
  misc_RNA (1)...(19): siRNA sense strand
cgucaucaccuuccucuuc

SEQ ID NO: 2205941 - RNA, 19 nt, Homo sapiens
  misc_RNA (1)...(19): siRNA sense strand
ucaaugauacucacagucu

SEQ ID NO: 2205942 - RNA, 19 nt, Homo sapiens
  misc_RNA (1)...(19): siRNA sense strand
caggaagccuaucaguauc

SEQ ID NO: 2205943 - RNA, 19 nt, Homo sapiens
  misc_RNA (1)...(19): siRNA sense strand
gcuggaacaaugucuucua

SEQ ID NO: 2205944 - RNA, 19 nt, Homo sapiens
  misc_RNA (1)...(19): siRNA sense strand
ggagagcggccuugagacu

SEQ ID NO: 2205945 - RNA, 19 nt, Homo sapiens
  misc_RNA (1)...(19): siRNA sense strand
caucgaacacccagaagau

SEQ ID NO: 2205946 - RNA, 19 nt, Homo sapiens
  misc_RNA (1)...(19): siRNA sense strand
ugacaaggacaacuauaag

SEQ ID NO: 2205947 - RNA, 19 nt, Homo sapiens
  misc_RNA (1)...(19): siRNA sense strand
ucaguuacaccuuccucua

SEQ ID NO: 2205948 - RNA, 19 nt, Homo sapiens
  misc_RNA (1)...(19): siRNA sense strand
ucuuuggccugggauauuu

SEQ ID NO: 2205949 - RNA, 19 nt, Homo sapiens
  misc_RNA (1)...(19): siRNA sense strand
acaaggacaacuauaagga

SEQ ID NO: 2205950 - RNA, 19 nt, Homo sapiens
  misc_RNA (1)...(19): siRNA sense strand
cagaucaaacccaucaaug

SEQ ID NO: 2205951 - RNA, 19 nt, Homo sapiens
  misc_RNA (1)...(19): siRNA sense strand
ccaauguggcucacuuuag

SEQ ID NO: 2205952 - RNA, 19 nt, Homo sapiens
  misc_RNA (1)...(19): siRNA sense strand
uugacaaggacaacuauaa

SEQ ID NO: 2205953 - RNA, 19 nt, Homo sapiens
  misc_RNA (1)...(19): siRNA sense strand
ccaugauguuccuguacaa

SEQ ID NO: 2205954 - RNA, 19 nt, Homo sapiens
  misc_RNA (1)...(19): siRNA sense strand
cuagccugcuugcuccuuu

SEQ ID NO: 2205955 - RNA, 19 nt, Homo sapiens
  misc_RNA (1)...(19): siRNA sense strand
cccacgggcuggaacaaug

SEQ ID NO: 2205956 - RNA, 19 nt, Homo sapiens
  misc_RNA (1)...(19): siRNA sense strand
cagcugagaaccaggacaa

SEQ ID NO: 2205957 - RNA, 19 nt, Homo sapiens
  misc_RNA (1)...(19): siRNA sense strand
ucuacacucuucgauguug

SEQ ID NO: 2205958 - RNA, 19 nt, Homo sapiens
  misc_RNA (1)...(19): siRNA sense strand
agagcggccuugagacugu

SEQ ID NO: 2205959 - RNA, 19 nt, Homo sapiens
  misc_RNA (1)...(19): siRNA sense strand
uaauuuacgccugcuauca

SEQ ID NO: 2205960 - RNA, 19 nt, Homo sapiens
  misc_RNA (1)...(19): siRNA sense strand
gggauugccagcuccauag

SEQ ID NO: 2205961 - RNA, 19 nt, Homo sapiens
  misc_RNA (1)...(19): siRNA sense strand
cauuugacaaggacaacua

SEQ ID NO: 2205962 - RNA, 19 nt, Homo sapiens
  misc_RNA (1)...(19): siRNA sense strand
uugagacuguggccaaaug

SEQ ID NO: 2205963 - RNA, 19 nt, Homo sapiens
  misc_RNA (1)...(19): siRNA sense strand
ccucuguggugaccugugu

SEQ ID NO: 2205964 - RNA, 19 nt, Homo sapiens
  misc_RNA (1)...(19): siRNA sense strand
gacaaggacaacuauaagg

SEQ ID NO: 2205965 - RNA, 19 nt, Homo sapiens
  misc_RNA (1)...(19): siRNA sense strand
guuaguauacaaagagauc

SEQ ID NO: 2205966 - RNA, 19 nt, Homo sapiens
  misc_RNA (1)...(19): siRNA sense strand
gcugugucaugcucaucuu

SEQ ID NO: 2205967 - RNA, 19 nt, Homo sapiens
  misc_RNA (1)...(19): siRNA sense strand
auacucacagucucaauga

SEQ ID NO: 2205968 - RNA, 19 nt, Homo sapiens
  misc_RNA (1)...(19): siRNA sense strand
ccucaucgaacacccagaa

SEQ ID NO: 2205969 - RNA, 19 nt, Homo sapiens
  misc_RNA (1)...(19): siRNA sense strand
ggcuuccgcuccguuacua

SEQ ID NO: 2205970 - RNA, 19 nt, Homo sapiens
  misc_RNA (1)...(19): siRNA sense strand
ccacgagcucugguacuuu

SEQ ID NO: 2205971 - RNA, 19 nt, Homo sapiens
  misc_RNA (1)...(19): siRNA sense strand
auugccagcuccauaguga

SEQ ID NO: 2205972 - RNA, 19 nt, Homo sapiens
  misc_RNA (1)...(19): siRNA sense strand
caucaugggcaucuggaau

SEQ ID NO: 2205973 - RNA, 19 nt, Homo sapiens
  misc_RNA (1)...(19): siRNA sense strand
uccacgagcucugguacuu

SEQ ID NO: 2205974 - RNA, 19 nt, Homo sapiens
  misc_RNA (1)...(19): siRNA sense strand
gccgguuaguauacaaaga

SEQ ID NO: 2205975 - RNA, 19 nt, Homo sapiens
  misc_RNA (1)...(19): siRNA sense strand
caucucugccgacguccua

SEQ ID NO: 2205976 - RNA, 19 nt, Homo sapiens
  misc_RNA (1)...(19): siRNA sense strand
cccaugauguuccuguaca

SEQ ID NO: 2205977 - RNA, 19 nt, Homo sapiens
  misc_RNA (1)...(19): siRNA sense strand
ggaagccuaucaguaucgu

SEQ ID NO: 2205978 - RNA, 19 nt, Homo sapiens
  misc_RNA (1)...(19): siRNA sense strand
uccaggaagccuaucagua

SEQ ID NO: 2205979 - RNA, 19 nt, Homo sapiens
  misc_RNA (1)...(19): siRNA sense strand
ugcugaccuuccuaauuua

SEQ ID NO: 2205980 - RNA, 19 nt, Homo sapiens
  misc_RNA (1)...(19): siRNA sense strand
ucaugggcaucuggaauuc

SEQ ID NO: 2205981 - RNA, 19 nt, Homo sapiens
  misc_RNA (1)...(19): siRNA sense strand
ggucauccaggucuguaau

SEQ ID NO: 2205982 - RNA, 19 nt, Homo sapiens
  misc_RNA (1)...(19): siRNA sense strand
ugaggacccugggaacagu

SEQ ID NO: 2205983 - RNA, 19 nt, Homo sapiens
  misc_RNA (1)...(19): siRNA sense strand
cgggauugccagcuccaua

SEQ ID NO: 2205984 - RNA, 19 nt, Homo sapiens
  misc_RNA (1)...(19): siRNA sense strand
gaagagccugcugccauca

SEQ ID NO: 2205985 - RNA, 19 nt, Homo sapiens
  misc_RNA (1)...(19): siRNA sense strand
gccaucggcauguucauca

SEQ ID NO: 2205986 - RNA, 19 nt, Homo sapiens
  misc_RNA (1)...(19): siRNA sense strand
gggcuggaacaaugucuuc

SEQ ID NO: 2205987 - RNA, 19 nt, Homo sapiens
  misc_RNA (1)...(19): siRNA sense strand
ucaugggcgucaucaccuu

SEQ ID NO: 2205988 - RNA, 19 nt, Homo sapiens
  misc_RNA (1)...(19): siRNA sense strand
agggagagcggccuugaga

SEQ ID NO: 2205989 - RNA, 19 nt, Homo sapiens
  misc_RNA (1)...(19): siRNA sense strand
cuggaacaaugucuucuac

SEQ ID NO: 2205990 - RNA, 19 nt, Homo sapiens
  misc_RNA (1)...(19): siRNA sense strand
ggacucacaagagccugaa

SEQ ID NO: 2205991 - RNA, 19 nt, Homo sapiens
  misc_RNA (1)...(19): siRNA sense strand
ucccaggcguggucgaguu

SEQ ID NO: 2205992 - RNA, 19 nt, Homo sapiens
  misc_RNA (1)...(19): siRNA sense strand
ggaggccucuucuugguuu

SEQ ID NO: 2205993 - RNA, 19 nt, Homo sapiens
  misc_RNA (1)...(19): siRNA sense strand
ccaaaccacugcacuccua

SEQ ID NO: 2205994 - RNA, 19 nt, Homo sapiens
  misc_RNA (1)...(19): siRNA sense strand
gaaguggaaguuaagauug

SEQ ID NO: 2205995 - RNA, 19 nt, Homo sapiens
  misc_RNA (1)...(19): siRNA sense strand
gcuauguccugcuggcuuu

SEQ ID NO: 2205996 - RNA, 19 nt, Homo sapiens
  misc_RNA (1)...(19): siRNA sense strand
gcgagguucucugucauuu

SEQ ID NO: 2205997 - RNA, 19 nt, Homo sapiens
  misc_RNA (1)...(19): siRNA sense strand
aaguuaagauuguggauga

SEQ ID NO: 2205998 - RNA, 19 nt, Homo sapiens
  misc_RNA (1)...(19): siRNA sense strand
caucacaucaguucuguug

SEQ ID NO: 2205999 - RNA, 19 nt, Homo sapiens
  misc_RNA (1)...(19): siRNA sense strand
gcggcgagguucucuguca

SEQ ID NO: 2206000 - RNA, 19 nt, Homo sapiens
  misc_RNA (1)...(19): siRNA sense strand
gaucaucacaucaguucug

SEQ ID NO: 2206001 - RNA, 19 nt, Homo sapiens
  misc_RNA (1)...(19): siRNA sense strand
uaagauuguggaugacuuu

SEQ ID NO: 2206002 - RNA, 19 nt, Homo sapiens
  misc_RNA (1)...(19): siRNA sense strand
agaaguggaaguuaagauu

SEQ ID NO: 2206003 - RNA, 19 nt, Homo sapiens
  misc_RNA (1)...(19): siRNA sense strand
cccgcgagcuggugaauuc

SEQ ID NO: 2206004 - RNA, 19 nt, Homo sapiens
  misc_RNA (1)...(19): siRNA sense strand
caucaguucuguugcuuuu

SEQ ID NO: 2206005 - RNA, 19 nt, Homo sapiens
  misc_RNA (1)...(19): siRNA sense strand
ucacaucaguucuguugcu

SEQ ID NO: 2206006 - RNA, 19 nt, Homo sapiens
  misc_RNA (1)...(19): siRNA sense strand
aaguggaaguuaagauugu

SEQ ID NO: 2206007 - RNA, 19 nt, Homo sapiens
  misc_RNA (1)...(19): siRNA sense strand
uuaagauuguggaugacuu

SEQ ID NO: 2206008 - RNA, 19 nt, Homo sapiens
  misc_RNA (1)...(19): siRNA sense strand
gagccgaucuaugccaaac

SEQ ID NO: 2206009 - RNA, 19 nt, Homo sapiens
  misc_RNA (1)...(19): siRNA sense strand
ccugcuggcuuuccuuagu

SEQ ID NO: 2206010 - RNA, 19 nt, Homo sapiens
  misc_RNA (1)...(19): siRNA sense strand
gccgaucuaugccaaacca

SEQ ID NO: 2206011 - RNA, 19 nt, Homo sapiens
  misc_RNA (1)...(19): siRNA sense strand
ccccagaaguggaaguuaa

SEQ ID NO: 2206012 - RNA, 19 nt, Homo sapiens
  misc_RNA (1)...(19): siRNA sense strand
ccuuggaggccucuucuug

SEQ ID NO: 2206013 - RNA, 19 nt, Homo sapiens
  misc_RNA (1)...(19): siRNA sense strand
guccugcuggcuuuccuua

SEQ ID NO: 2206014 - RNA, 19 nt, Homo sapiens
  misc_RNA (1)...(19): siRNA sense strand
gagcaaaggcaccaacaga

SEQ ID NO: 2206015 - RNA, 19 nt, Homo sapiens
  misc_RNA (1)...(19): siRNA sense strand
gcacaagaaaccacggauu

SEQ ID NO: 2206016 - RNA, 19 nt, Homo sapiens
  misc_RNA (1)...(19): siRNA sense strand
gcuccucgauggccguuca

SEQ ID NO: 2206017 - RNA, 19 nt, Homo sapiens
  misc_RNA (1)...(19): siRNA sense strand
cacaagaaaccacggauuc

SEQ ID NO: 2206018 - RNA, 19 nt, Homo sapiens
  misc_RNA (1)...(19): siRNA sense strand
gcaccggcaggccuugaaa

SEQ ID NO: 2206019 - RNA, 19 nt, Homo sapiens
  misc_RNA (1)...(19): siRNA sense strand
guuuggauccugcacaaga

SEQ ID NO: 2206020 - RNA, 19 nt, Homo sapiens
  misc_RNA (1)...(19): siRNA sense strand
uuuggauccugcacaagaa

SEQ ID NO: 2206021 - RNA, 19 nt, Homo sapiens
  misc_RNA (1)...(19): siRNA sense strand
acagagggguuccagagaa

SEQ ID NO: 2206022 - RNA, 19 nt, Homo sapiens
  misc_RNA (1)...(19): siRNA sense strand
gagcagacauucucaguuu

SEQ ID NO: 2206023 - RNA, 19 nt, Homo sapiens
  misc_RNA (1)...(19): siRNA sense strand
agaaggagcugucgcugua

SEQ ID NO: 2206024 - RNA, 19 nt, Homo sapiens
  misc_RNA (1)...(19): siRNA sense strand
gcauaccugugcugccuua

SEQ ID NO: 2206025 - RNA, 19 nt, Homo sapiens
  misc_RNA (1)...(19): siRNA sense strand
gcagagaugucagagauca

SEQ ID NO: 2206026 - RNA, 19 nt, Homo sapiens
  misc_RNA (1)...(19): siRNA sense strand
cagggaagcugcagagaga

SEQ ID NO: 2206027 - RNA, 19 nt, Homo sapiens
  misc_RNA (1)...(19): siRNA sense strand
gauggacccugccgagaug

SEQ ID NO: 2206028 - RNA, 19 nt, Homo sapiens
  misc_RNA (1)...(19): siRNA sense strand
gcagucagcuuuucucgaa

SEQ ID NO: 2206029 - RNA, 19 nt, Homo sapiens
  misc_RNA (1)...(19): siRNA sense strand
ggacagcuuggacguguuu

SEQ ID NO: 2206030 - RNA, 19 nt, Homo sapiens
  misc_RNA (1)...(19): siRNA sense strand
gaaccagcgccuucaguga

SEQ ID NO: 2206031 - RNA, 19 nt, Homo sapiens
  misc_RNA (1)...(19): siRNA sense strand
gaauugaggaggccacaga

SEQ ID NO: 2206032 - RNA, 19 nt, Homo sapiens
  misc_RNA (1)...(19): siRNA sense strand
ggaugaagcgggcacaguu

SEQ ID NO: 2206033 - RNA, 19 nt, Homo sapiens
  misc_RNA (1)...(19): siRNA sense strand
gggaaugugucgccaccaa

SEQ ID NO: 2206034 - RNA, 19 nt, Homo sapiens
  misc_RNA (1)...(19): siRNA sense strand
ugugaacacuuuagcauuc

SEQ ID NO: 2206035 - RNA, 19 nt, Homo sapiens
  misc_RNA (1)...(19): siRNA sense strand
caagggcagcugcgacaua

SEQ ID NO: 2206036 - RNA, 19 nt, Homo sapiens
  misc_RNA (1)...(19): siRNA sense strand
ggacagaccuaugcaaccu

SEQ ID NO: 2206037 - RNA, 19 nt, Homo sapiens
  misc_RNA (1)...(19): siRNA sense strand
acuuuagcauucccuauua

SEQ ID NO: 2206038 - RNA, 19 nt, Homo sapiens
  misc_RNA (1)...(19): siRNA sense strand
gcaguuccgugcccugagu

SEQ ID NO: 2206039 - RNA, 19 nt, Homo sapiens
  misc_RNA (1)...(19): siRNA sense strand
cgaggagaauggagagaau

SEQ ID NO: 2206040 - RNA, 19 nt, Homo sapiens
  misc_RNA (1)...(19): siRNA sense strand
cacccuggcugccugcuuu

SEQ ID NO: 2206041 - RNA, 19 nt, Homo sapiens
  misc_RNA (1)...(19): siRNA sense strand
gaugaagcgggcacaguuu

SEQ ID NO: 2206042 - RNA, 19 nt, Homo sapiens
  misc_RNA (1)...(19): siRNA sense strand
aggaggcucuuggcacuua

SEQ ID NO: 2206043 - RNA, 19 nt, Homo sapiens
  misc_RNA (1)...(19): siRNA sense strand
guccaggucuccaugacaa

SEQ ID NO: 2206044 - RNA, 19 nt, Homo sapiens
  misc_RNA (1)...(19): siRNA sense strand
ccacccacguuaccuacuu

SEQ ID NO: 2206045 - RNA, 19 nt, Homo sapiens
  misc_RNA (1)...(19): siRNA sense strand
aggcagagaugucagagau

SEQ ID NO: 2206046 - RNA, 19 nt, Homo sapiens
  misc_RNA (1)...(19): siRNA sense strand
ccgaggagacggacaugua

SEQ ID NO: 2206047 - RNA, 19 nt, Homo sapiens
  misc_RNA (1)...(19): siRNA sense strand
ggaaccaggcuaugaugga

SEQ ID NO: 2206048 - RNA, 19 nt, Homo sapiens
  misc_RNA (1)...(19): siRNA sense strand
gagaguucuuugccaagga

SEQ ID NO: 2206049 - RNA, 19 nt, Homo sapiens
  misc_RNA (1)...(19): siRNA sense strand
gagcccaguuuacaucaag

SEQ ID NO: 2206050 - RNA, 19 nt, Homo sapiens
  misc_RNA (1)...(19): siRNA sense strand
acaagcagcgcaagcguaa

SEQ ID NO: 2206051 - RNA, 19 nt, Homo sapiens
  misc_RNA (1)...(19): siRNA sense strand
gcacgcugcccuugacuca

SEQ ID NO: 2206052 - RNA, 19 nt, Homo sapiens
  misc_RNA (1)...(19): siRNA sense strand
gcacccaccucaccgucau

SEQ ID NO: 2206053 - RNA, 19 nt, Homo sapiens
  misc_RNA (1)...(19): siRNA sense strand
ggacacgugguaugaguuc

SEQ ID NO: 2206054 - RNA, 19 nt, Homo sapiens
  misc_RNA (1)...(19): siRNA sense strand
ugagacagcguaccaguuc

SEQ ID NO: 2206055 - RNA, 19 nt, Homo sapiens
  misc_RNA (1)...(19): siRNA sense strand
guagggaagcccagcagaa

SEQ ID NO: 2206056 - RNA, 19 nt, Homo sapiens
  misc_RNA (1)...(19): siRNA sense strand
ggagagaaugcauccaaca

SEQ ID NO: 2206057 - RNA, 19 nt, Homo sapiens
  misc_RNA (1)...(19): siRNA sense strand
gggcagcugcgacauacaa

SEQ ID NO: 2206058 - RNA, 19 nt, Homo sapiens
  misc_RNA (1)...(19): siRNA sense strand
cugcgaggcuuguccugaa

SEQ ID NO: 2206059 - RNA, 19 nt, Homo sapiens
  misc_RNA (1)...(19): siRNA sense strand
caccauggccaguauuaug

SEQ ID NO: 2206060 - RNA, 19 nt, Homo sapiens
  misc_RNA (1)...(19): siRNA sense strand
gcagacauucucaguuugg

SEQ ID NO: 2206061 - RNA, 19 nt, Homo sapiens
  misc_RNA (1)...(19): siRNA sense strand
caggacacgugguaugagu

SEQ ID NO: 2206062 - RNA, 19 nt, Homo sapiens
  misc_RNA (1)...(19): siRNA sense strand
acgcugcccuugacucaga

SEQ ID NO: 2206063 - RNA, 19 nt, Homo sapiens
  misc_RNA (1)...(19): siRNA sense strand
ucccggcucucaccucuga

SEQ ID NO: 2206064 - RNA, 19 nt, Homo sapiens
  misc_RNA (1)...(19): siRNA sense strand
gagacagcguaccaguuca

SEQ ID NO: 2206065 - RNA, 19 nt, Homo sapiens
  misc_RNA (1)...(19): siRNA sense strand
ucacaggacacgugguaug

SEQ ID NO: 2206066 - RNA, 19 nt, Homo sapiens
  misc_RNA (1)...(19): siRNA sense strand
ugucaucacuuggagaaag

SEQ ID NO: 2206067 - RNA, 19 nt, Homo sapiens
  misc_RNA (1)...(19): siRNA sense strand
gaggcuacgagcagacauu

SEQ ID NO: 2206068 - RNA, 19 nt, Homo sapiens
  misc_RNA (1)...(19): siRNA sense strand
gagcugucgcuguacaaga

SEQ ID NO: 2206069 - RNA, 19 nt, Homo sapiens
  misc_RNA (1)...(19): siRNA sense strand
gggaagcccagcagaagca

SEQ ID NO: 2206070 - RNA, 19 nt, Homo sapiens
  misc_RNA (1)...(19): siRNA sense strand
ccaccacccacguuaccua

SEQ ID NO: 2206071 - RNA, 19 nt, Homo sapiens
  misc_RNA (1)...(19): siRNA sense strand
ucucaccucugacccaaag

SEQ ID NO: 2206072 - RNA, 19 nt, Homo sapiens
  misc_RNA (1)...(19): siRNA sense strand
ccuaugcaaccucugguaa

SEQ ID NO: 2206073 - RNA, 19 nt, Homo sapiens
  misc_RNA (1)...(19): siRNA sense strand
gagaauggagagaaugcau

SEQ ID NO: 2206074 - RNA, 19 nt, Homo sapiens
  misc_RNA (1)...(19): siRNA sense strand
gguaugaguuccggguucu

SEQ ID NO: 2206075 - RNA, 19 nt, Homo sapiens
  misc_RNA (1)...(19): siRNA sense strand
caccgaaggagaguucuuu

SEQ ID NO: 2206076 - RNA, 19 nt, Homo sapiens
  misc_RNA (1)...(19): siRNA sense strand
gagcacucucuaaacugua

SEQ ID NO: 2206077 - RNA, 19 nt, Homo sapiens
  misc_RNA (1)...(19): siRNA sense strand
gcaggacagaccuaugcaa

SEQ ID NO: 2206078 - RNA, 19 nt, Homo sapiens
  misc_RNA (1)...(19): siRNA sense strand
auaccugugugccuuacaa

SEQ ID NO: 2206079 - RNA, 19 nt, Homo sapiens
  misc_RNA (1)...(19): siRNA sense strand
gagagaaugcauccaacag

SEQ ID NO: 2206080 - RNA, 19 nt, Homo sapiens
  misc_RNA (1)...(19): siRNA sense strand
ggaggcucuuggcacuuau

SEQ ID NO: 2206081 - RNA, 19 nt, Homo sapiens
  misc_RNA (1)...(19): siRNA sense strand
cacuuuagcauucccuauu

SEQ ID NO: 2206082 - RNA, 19 nt, Homo sapiens
  misc_RNA (1)...(19): siRNA sense strand
caucgaccgcuacaucaug

SEQ ID NO: 2206083 - RNA, 19 nt, Homo sapiens
  misc_RNA (1)...(19): siRNA sense strand
gcagcaggcagagauguca

SEQ ID NO: 2206084 - RNA, 19 nt, Homo sapiens
  misc_RNA (1)...(19): siRNA sense strand
ggacauguaccccgaguuc

SEQ ID NO: 2206085 - RNA, 19 nt, Homo sapiens
  misc_RNA (1)...(19): siRNA sense strand
agauggagcccucgcugaa

SEQ ID NO: 2206086 - RNA, 19 nt, Homo sapiens
  misc_RNA (1)...(19): siRNA sense strand
agcugucgcuguacaagaa

SEQ ID NO: 2206087 - RNA, 19 nt, Homo sapiens
  misc_RNA (1)...(19): siRNA sense strand
cacaggacacgugguauga

SEQ ID NO: 2206088 - RNA, 19 nt, Homo sapiens
  misc_RNA (1)...(19): siRNA sense strand
gaggcucuuggcacuuaua

SEQ ID NO: 2206089 - RNA, 19 nt, Homo sapiens
  misc_RNA (1)...(19): siRNA sense strand
gcaccgaaggagaguucuu

SEQ ID NO: 2206090 - RNA, 19 nt, Homo sapiens
  misc_RNA (1)...(19): siRNA sense strand
cccugcagguugagaagaa

SEQ ID NO: 2206091 - RNA, 19 nt, Homo sapiens
  misc_RNA (1)...(19): siRNA sense strand
ggaaucguagcuaccaucu

SEQ ID NO: 2206092 - RNA, 19 nt, Homo sapiens
  misc_RNA (1)...(19): siRNA sense strand
gaagcugcagagagacaga

SEQ ID NO: 2206093 - RNA, 19 nt, Homo sapiens
  misc_RNA (1)...(19): siRNA sense strand
gcgccgagcccaguuuaca

SEQ ID NO: 2206094 - RNA, 19 nt, Homo sapiens
  misc_RNA (1)...(19): siRNA sense strand
gccaucagcagcaagaagu

SEQ ID NO: 2206095 - RNA, 19 nt, Homo sapiens
  misc_RNA (1)...(19): siRNA sense strand
gcagcugccauccuguuca

SEQ ID NO: 2206096 - RNA, 19 nt, Homo sapiens
  misc_RNA (1)...(19): siRNA sense strand
caacguguccugggaacca

SEQ ID NO: 2206097 - RNA, 19 nt, Homo sapiens
  misc_RNA (1)...(19): siRNA sense strand
gggacagcuuggacguguu

SEQ ID NO: 2206098 - RNA, 19 nt, Homo sapiens
  misc_RNA (1)...(19): siRNA sense strand
ccagugggagccugcaguu

SEQ ID NO: 2206099 - RNA, 19 nt, Homo sapiens
  misc_RNA (1)...(19): siRNA sense strand
cgagcccaguuuacaucaa

SEQ ID NO: 2206100 - RNA, 19 nt, Homo sapiens
  misc_RNA (1)...(19): siRNA sense strand
gaggagaauggagagaaug

SEQ ID NO: 2206101 - RNA, 19 nt, Homo sapiens
  misc_RNA (1)...(19): siRNA sense strand
gcgcaagcguaagcucaag

SEQ ID NO: 2206102 - RNA, 19 nt, Homo sapiens
  misc_RNA (1)...(19): siRNA sense strand
cgagcagacauucucaguu

SEQ ID NO: 2206103 - RNA, 19 nt, Homo sapiens
  misc_RNA (1)...(19): siRNA sense strand
gcuacgagcagacauucuc

SEQ ID NO: 2206104 - RNA, 19 nt, Homo sapiens
  misc_RNA (1)...(19): siRNA sense strand
uagcuaccaucugcuucuu

SEQ ID NO: 2206105 - RNA, 19 nt, Homo sapiens
  misc_RNA (1)...(19): siRNA sense strand
auggagcccucgcugaaga

SEQ ID NO: 2206106 - RNA, 19 nt, Homo sapiens
  misc_RNA (1)...(19): siRNA sense strand
gaacugagccgauauuuaa

SEQ ID NO: 2206107 - RNA, 19 nt, Homo sapiens
  misc_RNA (1)...(19): siRNA sense strand
caucagagcuugaguauga

SEQ ID NO: 2206108 - RNA, 19 nt, Homo sapiens
  misc_RNA (1)...(19): siRNA sense strand
gaacagcgauucaacauca

SEQ ID NO: 2206109 - RNA, 19 nt, Homo sapiens
  misc_RNA (1)...(19): siRNA sense strand
gaagaggaauuucauagaa

SEQ ID NO: 2206110 - RNA, 19 nt, Homo sapiens
  misc_RNA (1)...(19): siRNA sense strand
ucaaggaaaugacaucuua

SEQ ID NO: 2206111 - RNA, 19 nt, Homo sapiens
  misc_RNA (1)...(19): siRNA sense strand
gagauaaggucaucaguug

SEQ ID NO: 2206112 - RNA, 19 nt, Homo sapiens
  misc_RNA (1)...(19): siRNA sense strand
gcagucaggugucuucaua

SEQ ID NO: 2206113 - RNA, 19 nt, Homo sapiens
  misc_RNA (1)...(19): siRNA sense strand
gagaugagcucaaggacuu

SEQ ID NO: 2206114 - RNA, 19 nt, Homo sapiens
  misc_RNA (1)...(19): siRNA sense strand
gagaagauauugagaugga

SEQ ID NO: 2206115 - RNA, 19 nt, Homo sapiens
  misc_RNA (1)...(19): siRNA sense strand
ggaauacgcuauguucauu

SEQ ID NO: 2206116 - RNA, 19 nt, Homo sapiens
  misc_RNA (1)...(19): siRNA sense strand
ucaaacaccuuaggacaua

SEQ ID NO: 2206117 - RNA, 19 nt, Homo sapiens
  misc_RNA (1)...(19): siRNA sense strand
gagagaagauauugagaug

SEQ ID NO: 2206118 - RNA, 19 nt, Homo sapiens
  misc_RNA (1)...(19): siRNA sense strand
gaacuggauuucacagaga

SEQ ID NO: 2206119 - RNA, 19 nt, Homo sapiens
  misc_RNA (1)...(19): siRNA sense strand
ggacauauucucuguguga

SEQ ID NO: 2206120 - RNA, 19 nt, Homo sapiens
  misc_RNA (1)...(19): siRNA sense strand
acaaacagcuggcaucaga

SEQ ID NO: 2206121 - RNA, 19 nt, Homo sapiens
  misc_RNA (1)...(19): siRNA sense strand
gaaggaggaucagggauga

SEQ ID NO: 2206122 - RNA, 19 nt, Homo sapiens
  misc_RNA (1)...(19): siRNA sense strand
gggaggugaugcaggauua

SEQ ID NO: 2206123 - RNA, 19 nt, Homo sapiens
  misc_RNA (1)...(19): siRNA sense strand
ggacuacagcagaauaaua

SEQ ID NO: 2206124 - RNA, 19 nt, Homo sapiens
  misc_RNA (1)...(19): siRNA sense strand
gaaacacugugaugucuca

SEQ ID NO: 2206125 - RNA, 19 nt, Homo sapiens
  misc_RNA (1)...(19): siRNA sense strand
uaagaagaaugucagugua

SEQ ID NO: 2206126 - RNA, 19 nt, Homo sapiens
  misc_RNA (1)...(19): siRNA sense strand
gaaugucaguguacaguau

SEQ ID NO: 2206127 - RNA, 19 nt, Homo sapiens
  misc_RNA (1)...(19): siRNA sense strand
gcaaggcacuguccagcuu

SEQ ID NO: 2206128 - RNA, 19 nt, Homo sapiens
  misc_RNA (1)...(19): siRNA sense strand
acaaagaccuccuuaugga

SEQ ID NO: 2206129 - RNA, 19 nt, Homo sapiens
  misc_RNA (1)...(19): siRNA sense strand
guauagaggucuuuguuuc

SEQ ID NO: 2206130 - RNA, 19 nt, Homo sapiens
  misc_RNA (1)...(19): siRNA sense strand
agaagaagcucaucucaca

SEQ ID NO: 2206131 - RNA, 19 nt, Homo sapiens
  misc_RNA (1)...(19): siRNA sense strand
ggaacugagccgauauuua

SEQ ID NO: 2206132 - RNA, 19 nt, Homo sapiens
  misc_RNA (1)...(19): siRNA sense strand
gaagggaaagucaaacaaa

SEQ ID NO: 2206133 - RNA, 19 nt, Homo sapiens
  misc_RNA (1)...(19): siRNA sense strand
gaucuaaaccagacaaaga

SEQ ID NO: 2206134 - RNA, 19 nt, Homo sapiens
  misc_RNA (1)...(19): siRNA sense strand
gcaggaagcucagaagaag

SEQ ID NO: 2206135 - RNA, 19 nt, Homo sapiens
  misc_RNA (1)...(19): siRNA sense strand
gaaagaaagaacagccuaa

SEQ ID NO: 2206136 - RNA, 19 nt, Homo sapiens
  misc_RNA (1)...(19): siRNA sense strand
gcagaauaauacaaucuug

SEQ ID NO: 2206137 - RNA, 19 nt, Homo sapiens
  misc_RNA (1)...(19): siRNA sense strand
gugccaaggugguagauaa

SEQ ID NO: 2206138 - RNA, 19 nt, Homo sapiens
  misc_RNA (1)...(19): siRNA sense strand
caucaaaugcucaguguaa

SEQ ID NO: 2206139 - RNA, 19 nt, Homo sapiens
  misc_RNA (1)...(19): siRNA sense strand
gauuaacaguccuacguuu

SEQ ID NO: 2206140 - RNA, 19 nt, Homo sapiens
  misc_RNA (1)...(19): siRNA sense strand
ucacagagacugagccuuu

SEQ ID NO: 2206141 - RNA, 19 nt, Homo sapiens
  misc_RNA (1)...(19): siRNA sense strand
gaugagaagaccaacguua

SEQ ID NO: 2206142 - RNA, 19 nt, Homo sapiens
  misc_RNA (1)...(19): siRNA sense strand
gagaguaucuggaccuucu

SEQ ID NO: 2206143 - RNA, 19 nt, Homo sapiens
  misc_RNA (1)...(19): siRNA sense strand
ggcaagugcuggccaugua

SEQ ID NO: 2206144 - RNA, 19 nt, Homo sapiens
  misc_RNA (1)...(19): siRNA sense strand
gaacaagaagaugagaaua

SEQ ID NO: 2206145 - RNA, 19 nt, Homo sapiens
  misc_RNA (1)...(19): siRNA sense strand
gcuguuaccucccaaguca

SEQ ID NO: 2206146 - RNA, 19 nt, Homo sapiens
  misc_RNA (1)...(19): siRNA sense strand
gaucauagagacuggauug

SEQ ID NO: 2206147 - RNA, 19 nt, Homo sapiens
  misc_RNA (1)...(19): siRNA sense strand
aguaugacaugaagaagua

SEQ ID NO: 2206148 - RNA, 19 nt, Homo sapiens
  misc_RNA (1)...(19): siRNA sense strand
ccaggaaucuaacuugaau

SEQ ID NO: 2206149 - RNA, 19 nt, Homo sapiens
  misc_RNA (1)...(19): siRNA sense strand
ugucuuagcucuguuagaa

SEQ ID NO: 2206150 - RNA, 19 nt, Homo sapiens
  misc_RNA (1)...(19): siRNA sense strand
agaggucuuuguuucauua

SEQ ID NO: 2206151 - RNA, 19 nt, Homo sapiens
  misc_RNA (1)...(19): siRNA sense strand
gagucacccugguaccuua

SEQ ID NO: 2206152 - RNA, 19 nt, Homo sapiens
  misc_RNA (1)...(19): siRNA sense strand
uugccuggcuuuacaaaua

SEQ ID NO: 2206153 - RNA, 19 nt, Homo sapiens
  misc_RNA (1)...(19): siRNA sense strand
ugucuggaguugacuguua

SEQ ID NO: 2206154 - RNA, 19 nt, Homo sapiens
  misc_RNA (1)...(19): siRNA sense strand
agaaagccguggagucaaa

SEQ ID NO: 2206155 - RNA, 19 nt, Homo sapiens
  misc_RNA (1)...(19): siRNA sense strand
caacaucacuuccaaaauc

SEQ ID NO: 2206156 - RNA, 19 nt, Homo sapiens
  misc_RNA (1)...(19): siRNA sense strand
cauagaagcagagaucaua

SEQ ID NO: 2206157 - RNA, 19 nt, Homo sapiens
  misc_RNA (1)...(19): siRNA sense strand
caagaaagccguggaguca

SEQ ID NO: 2206158 - RNA, 19 nt, Homo sapiens
  misc_RNA (1)...(19): siRNA sense strand
gaagaggaacccugucaug

SEQ ID NO: 2206159 - RNA, 19 nt, Homo sapiens
  misc_RNA (1)...(19): siRNA sense strand
gaaggaagaccuguggauu

SEQ ID NO: 2206160 - RNA, 19 nt, Homo sapiens
  misc_RNA (1)...(19): siRNA sense strand
ggagauaaggucaucaguu

SEQ ID NO: 2206161 - RNA, 19 nt, Homo sapiens
  misc_RNA (1)...(19): siRNA sense strand
gcauucagacucuaaagaa

SEQ ID NO: 2206162 - RNA, 19 nt, Homo sapiens
  misc_RNA (1)...(19): siRNA sense strand
aaaauaagaucccagcuuu

SEQ ID NO: 2206163 - RNA, 19 nt, Homo sapiens
  misc_RNA (1)...(19): siRNA sense strand
cuagagcacuucacagaug

SEQ ID NO: 2206164 - RNA, 19 nt, Homo sapiens
  misc_RNA (1)...(19): siRNA sense strand
gagaauggaacagggaaua

SEQ ID NO: 2206165 - RNA, 19 nt, Homo sapiens
  misc_RNA (1)...(19): siRNA sense strand
cauauucucugugugauug

SEQ ID NO: 2206166 - RNA, 19 nt, Homo sapiens
  misc_RNA (1)...(19): siRNA sense strand
uuucauaucugguccaaga

SEQ ID NO: 2206167 - RNA, 19 nt, Homo sapiens
  misc_RNA (1)...(19): siRNA sense strand
guuagaaguuggugaagga

SEQ ID NO: 2206168 - RNA, 19 nt, Homo sapiens
  misc_RNA (1)...(19): siRNA sense strand
gaacuggcuuauuauggau

SEQ ID NO: 2206169 - RNA, 19 nt, Homo sapiens
  misc_RNA (1)...(19): siRNA sense strand
uauguuugaucguugcuua

SEQ ID NO: 2206170 - RNA, 19 nt, Homo sapiens
  misc_RNA (1)...(19): siRNA sense strand
gccaggaacugagccgaua

SEQ ID NO: 2206171 - RNA, 19 nt, Homo sapiens
  misc_RNA (1)...(19): siRNA sense strand
guacacugguggcauuguu

SEQ ID NO: 2206172 - RNA, 19 nt, Homo sapiens
  misc_RNA (1)...(19): siRNA sense strand
gcaggaggaauuugugaaa

SEQ ID NO: 2206173 - RNA, 19 nt, Homo sapiens
  misc_RNA (1)...(19): siRNA sense strand
agaacuggcuuauuaugga

SEQ ID NO: 2206174 - RNA, 19 nt, Homo sapiens
  misc_RNA (1)...(19): siRNA sense strand
agacaaagaccuccuuaug

SEQ ID NO: 2206175 - RNA, 19 nt, Homo sapiens
  misc_RNA (1)...(19): siRNA sense strand
cuacaaauuucuucuagag

SEQ ID NO: 2206176 - RNA, 19 nt, Homo sapiens
  misc_RNA (1)...(19): siRNA sense strand
acgaggaucuggcaaagaa

SEQ ID NO: 2206177 - RNA, 19 nt, Homo sapiens
  misc_RNA (1)...(19): siRNA sense strand
gucaugcccucugugauua

SEQ ID NO: 2206178 - RNA, 19 nt, Homo sapiens
  misc_RNA (1)...(19): siRNA sense strand
aguguaagcugaauggauu

SEQ ID NO: 2206179 - RNA, 19 nt, Homo sapiens
  misc_RNA (1)...(19): siRNA sense strand
gaaaccaggcgguccaguu

SEQ ID NO: 2206180 - RNA, 19 nt, Homo sapiens
  misc_RNA (1)...(19): siRNA sense strand
ccugguaccuuacugagaa

SEQ ID NO: 2206181 - RNA, 19 nt, Homo sapiens
  misc_RNA (1)...(19): siRNA sense strand
gaacucaugcacuaucuca

SEQ ID NO: 2206182 - RNA, 19 nt, Homo sapiens
  misc_RNA (1)...(19): siRNA sense strand
gcucaccuguuacugaaga

SEQ ID NO: 2206183 - RNA, 19 nt, Homo sapiens
  misc_RNA (1)...(19): siRNA sense strand
aagcgcaucuuccuucuga

SEQ ID NO: 2206184 - RNA, 19 nt, Homo sapiens
  misc_RNA (1)...(19): siRNA sense strand
ggauauagcccagcugugu

SEQ ID NO: 2206185 - RNA, 19 nt, Homo sapiens
  misc_RNA (1)...(19): siRNA sense strand
ucaaaugcucaguguaaua

SEQ ID NO: 2206186 - RNA, 19 nt, Homo sapiens
  misc_RNA (1)...(19): siRNA sense strand
gacauggccuuggcaaaug

SEQ ID NO: 2206187 - RNA, 19 nt, Homo sapiens
  misc_RNA (1)...(19): siRNA sense strand
uugccuggcucaccuguua

SEQ ID NO: 2206188 - RNA, 19 nt, Homo sapiens
  misc_RNA (1)...(19): siRNA sense strand
gaagcagacacucaucuug

SEQ ID NO: 2206189 - RNA, 19 nt, Homo sapiens
  misc_RNA (1)...(19): siRNA sense strand
acaaguauauucccaacau

SEQ ID NO: 2206190 - RNA, 19 nt, Homo sapiens
  misc_RNA (1)...(19): siRNA sense strand
cagcaguggugaaacaguu

SEQ ID NO: 2206191 - RNA, 19 nt, Homo sapiens
  misc_RNA (1)...(19): siRNA sense strand
caaaugcucaguguaauau

SEQ ID NO: 2206192 - RNA, 19 nt, Homo sapiens
  misc_RNA (1)...(19): siRNA sense strand
ggaccuuucucaaauucga

SEQ ID NO: 2206193 - RNA, 19 nt, Homo sapiens
  misc_RNA (1)...(19): siRNA sense strand
ugaagacugugcuggagaa

SEQ ID NO: 2206194 - RNA, 19 nt, Homo sapiens
  misc_RNA (1)...(19): siRNA sense strand
gcacucugaucgauucaca

SEQ ID NO: 2206195 - RNA, 19 nt, Homo sapiens
  misc_RNA (1)...(19): siRNA sense strand
gcacgaggaucuggcaaag

SEQ ID NO: 2206196 - RNA, 19 nt, Homo sapiens
  misc_RNA (1)...(19): siRNA sense strand
ggauuucaguggucucuag

SEQ ID NO: 2206197 - RNA, 19 nt, Homo sapiens
  misc_RNA (1)...(19): siRNA sense strand
gauguugucuuagcucugu

SEQ ID NO: 2206198 - RNA, 19 nt, Homo sapiens
  misc_RNA (1)...(19): siRNA sense strand
aaagagagguggauaacac

SEQ ID NO: 2206199 - RNA, 19 nt, Homo sapiens
  misc_RNA (1)...(19): siRNA sense strand
gugcugccuuucacuuuaa

SEQ ID NO: 2206200 - RNA, 19 nt, Homo sapiens
  misc_RNA (1)...(19): siRNA sense strand
guagcaguaucaucuccua

SEQ ID NO: 2206201 - RNA, 19 nt, Homo sapiens
  misc_RNA (1)...(19): siRNA sense strand
caaagagagacgaaugaaa

SEQ ID NO: 2206202 - RNA, 19 nt, Homo sapiens
  misc_RNA (1)...(19): siRNA sense strand
ccaugugucugaaggauuc

SEQ ID NO: 2206203 - RNA, 19 nt, Homo sapiens
  misc_RNA (1)...(19): siRNA sense strand
cagggaauauggacgaaga

SEQ ID NO: 2206204 - RNA, 19 nt, Homo sapiens
  misc_RNA (1)...(19): siRNA sense strand
ggagaaggcccuggaguuc

SEQ ID NO: 2206205 - RNA, 19 nt, Homo sapiens
  misc_RNA (1)...(19): siRNA sense strand
agacagcaguggugaaaca

SEQ ID NO: 2206206 - RNA, 19 nt, Homo sapiens
  misc_RNA (1)...(19): siRNA sense strand
guacuaaagugcucuauuu

SEQ ID NO: 2206207 - RNA, 19 nt, Homo sapiens
  misc_RNA (1)...(19): siRNA sense strand
gcaaagagcgaguccauua

SEQ ID NO: 2206208 - RNA, 19 nt, Homo sapiens
  misc_RNA (1)...(19): siRNA sense strand
gggcaaauauggacaaaga

SEQ ID NO: 2206209 - RNA, 19 nt, Homo sapiens
  misc_RNA (1)...(19): siRNA sense strand
ggaaggaaaucaccgguau

SEQ ID NO: 2206210 - RNA, 19 nt, Homo sapiens
  misc_RNA (1)...(19): siRNA sense strand
ucacagagcucuccaacug

SEQ ID NO: 2206211 - RNA, 19 nt, Homo sapiens
  misc_RNA (1)...(19): siRNA sense strand
acaagaagccagaaacuua

SEQ ID NO: 2206212 - RNA, 19 nt, Homo sapiens
  misc_RNA (1)...(19): siRNA sense strand
agaaggaacugcugaaaug

SEQ ID NO: 2206213 - RNA, 19 nt, Homo sapiens
  misc_RNA (1)...(19): siRNA sense strand
gaacagaagggacagauuc

SEQ ID NO: 2206214 - RNA, 19 nt, Homo sapiens
  misc_RNA (1)...(19): siRNA sense strand
gaacagaacaggccucaca

SEQ ID NO: 2206215 - RNA, 19 nt, Homo sapiens
  misc_RNA (1)...(19): siRNA sense strand
gcugaaauguaaacaagaa

SEQ ID NO: 2206216 - RNA, 19 nt, Homo sapiens
  misc_RNA (1)...(19): siRNA sense strand
ggacacaucuguucuucag

SEQ ID NO: 2206217 - RNA, 19 nt, Homo sapiens
  misc_RNA (1)...(19): siRNA sense strand
gaggugacguuaaaggauu

SEQ ID NO: 2206218 - RNA, 19 nt, Homo sapiens
  misc_RNA (1)...(19): siRNA sense strand
gaacucaaguagguaguga

SEQ ID NO: 2206219 - RNA, 19 nt, Homo sapiens
  misc_RNA (1)...(19): siRNA sense strand
ucacaacucucaaagcaau

SEQ ID NO: 2206220 - RNA, 19 nt, Homo sapiens
  misc_RNA (1)...(19): siRNA sense strand
gaaggcagauuuugugauu

SEQ ID NO: 2206221 - RNA, 19 nt, Homo sapiens
  misc_RNA (1)...(19): siRNA sense strand
cagaagagaaggcagauuu

SEQ ID NO: 2206222 - RNA, 19 nt, Homo sapiens
  misc_RNA (1)...(19): siRNA sense strand
agggacagauucuccauua

SEQ ID NO: 2206223 - RNA, 19 nt, Homo sapiens
  misc_RNA (1)...(19): siRNA sense strand
gaagaaacaagaaagaaag

SEQ ID NO: 2206224 - RNA, 19 nt, Homo sapiens
  misc_RNA (1)...(19): siRNA sense strand
ucaaguagguagugaauac

SEQ ID NO: 2206225 - RNA, 19 nt, Homo sapiens
  misc_RNA (1)...(19): siRNA sense strand
gaaacaagaaagaaagguu

SEQ ID NO: 2206226 - RNA, 19 nt, Homo sapiens
  misc_RNA (1)...(19): siRNA sense strand
gaaaucaccgguaucacuu

SEQ ID NO: 2206227 - RNA, 19 nt, Homo sapiens
  misc_RNA (1)...(19): siRNA sense strand
gauaggugcucggcgaauu

SEQ ID NO: 2206228 - RNA, 19 nt, Homo sapiens
  misc_RNA (1)...(19): siRNA sense strand
gcaaauauggacaaagaug

SEQ ID NO: 2206229 - RNA, 19 nt, Homo sapiens
  misc_RNA (1)...(19): siRNA sense strand
ggacagauucuccauuauc

SEQ ID NO: 2206230 - RNA, 19 nt, Homo sapiens
  misc_RNA (1)...(19): siRNA sense strand
uggaggaggugacguuaaa

SEQ ID NO: 2206231 - RNA, 19 nt, Homo sapiens
  misc_RNA (1)...(19): siRNA sense strand
gcagaagaaacaagaaaga

SEQ ID NO: 2206232 - RNA, 19 nt, Homo sapiens
  misc_RNA (1)...(19): siRNA sense strand
gguaaugcauucugaagca

SEQ ID NO: 2206233 - RNA, 19 nt, Homo sapiens
  misc_RNA (1)...(19): siRNA sense strand
aaagagcgaguccauuaua

SEQ ID NO: 2206234 - RNA, 19 nt, Homo sapiens
  misc_RNA (1)...(19): siRNA sense strand
cagaugaggcgaccaacua

SEQ ID NO: 2206235 - RNA, 19 nt, Homo sapiens
  misc_RNA (1)...(19): siRNA sense strand
ggaaaucaccgguaucacu

SEQ ID NO: 2206236 - RNA, 19 nt, Homo sapiens
  misc_RNA (1)...(19): siRNA sense strand
gaaggaauagagaacagaa

SEQ ID NO: 2206237 - RNA, 19 nt, Homo sapiens
  misc_RNA (1)...(19): siRNA sense strand
aggaacugcugaaauguaa

SEQ ID NO: 2206238 - RNA, 19 nt, Homo sapiens
  misc_RNA (1)...(19): siRNA sense strand
caaauauggacaaagauga

SEQ ID NO: 2206239 - RNA, 19 nt, Homo sapiens
  misc_RNA (1)...(19): siRNA sense strand
aagagcgaguccauuauaa

SEQ ID NO: 2206240 - RNA, 19 nt, Homo sapiens
  misc_RNA (1)...(19): siRNA sense strand
uagcuuggguggaagaaga

SEQ ID NO: 2206241 - RNA, 19 nt, Homo sapiens
  misc_RNA (1)...(19): siRNA sense strand
ucaccgguaucacuucaaa

SEQ ID NO: 2206242 - RNA, 19 nt, Homo sapiens
  misc_RNA (1)...(19): siRNA sense strand
gaacaacugaaugagguaa

SEQ ID NO: 2206243 - RNA, 19 nt, Homo sapiens
  misc_RNA (1)...(19): siRNA sense strand
aagaugagcugcacaacca

SEQ ID NO: 2206244 - RNA, 19 nt, Homo sapiens
  misc_RNA (1)...(19): siRNA sense strand
gaagaagaccauggagaga

SEQ ID NO: 2206245 - RNA, 19 nt, Homo sapiens
  misc_RNA (1)...(19): siRNA sense strand
ccucuuggcucacuguaug

SEQ ID NO: 2206246 - RNA, 19 nt, Homo sapiens
  misc_RNA (1)...(19): siRNA sense strand
gggcauuucuagccucaug

SEQ ID NO: 2206247 - RNA, 19 nt, Homo sapiens
  misc_RNA (1)...(19): siRNA sense strand
gcucuugggagaauauaaa

SEQ ID NO: 2206248 - RNA, 19 nt, Homo sapiens
  misc_RNA (1)...(19): siRNA sense strand
cagcagcaccuguacuaaa

SEQ ID NO: 2206249 - RNA, 19 nt, Homo sapiens
  misc_RNA (1)...(19): siRNA sense strand
aaagaaagguucgggucaa

SEQ ID NO: 2206250 - RNA, 19 nt, Homo sapiens
  misc_RNA (1)...(19): siRNA sense strand
agaagaagcacuccggaaa

SEQ ID NO: 2206251 - RNA, 19 nt, Homo sapiens
  misc_RNA (1)...(19): siRNA sense strand
caauggauccuuaccugaa

SEQ ID NO: 2206252 - RNA, 19 nt, Homo sapiens
  misc_RNA (1)...(19): siRNA sense strand
caaaguugccucacucaca

SEQ ID NO: 2206253 - RNA, 19 nt, Homo sapiens
  misc_RNA (1)...(19): siRNA sense strand
gcagcaccaggccaaguua

SEQ ID NO: 2206254 - RNA, 19 nt, Homo sapiens
  misc_RNA (1)...(19): siRNA sense strand
cuacaacagucacaacucu

SEQ ID NO: 2206255 - RNA, 19 nt, Homo sapiens
  misc_RNA (1)...(19): siRNA sense strand
guaaacaagaagccagaaa

SEQ ID NO: 2206256 - RNA, 19 nt, Homo sapiens
  misc_RNA (1)...(19): siRNA sense strand
gauccuuaccugaagauga

SEQ ID NO: 2206257 - RNA, 19 nt, Homo sapiens
  misc_RNA (1)...(19): siRNA sense strand
agaagaccauggagagaau

SEQ ID NO: 2206258 - RNA, 19 nt, Homo sapiens
  misc_RNA (1)...(19): siRNA sense strand
cggaaacucucugauguca

SEQ ID NO: 2206259 - RNA, 19 nt, Homo sapiens
  misc_RNA (1)...(19): siRNA sense strand
gcaccaggccaaguuagaa

SEQ ID NO: 2206260 - RNA, 19 nt, Homo sapiens
  misc_RNA (1)...(19): siRNA sense strand
gagcuacugagggcaaaua

SEQ ID NO: 2206261 - RNA, 19 nt, Homo sapiens
  misc_RNA (1)...(19): siRNA sense strand
caaagagcgaguccauuau

SEQ ID NO: 2206262 - RNA, 19 nt, Homo sapiens
  misc_RNA (1)...(19): siRNA sense strand
gaaagguucgggucaaguc

SEQ ID NO: 2206263 - RNA, 19 nt, Homo sapiens
  misc_RNA (1)...(19): siRNA sense strand
gaagaagcacuccggaaac

SEQ ID NO: 2206264 - RNA, 19 nt, Homo sapiens
  misc_RNA (1)...(19): siRNA sense strand
ccagcgaccugcagcuugu

SEQ ID NO: 2206265 - RNA, 19 nt, Homo sapiens
  misc_RNA (1)...(19): siRNA sense strand
gggacagauucuccauuau

SEQ ID NO: 2206266 - RNA, 19 nt, Homo sapiens
  misc_RNA (1)...(19): siRNA sense strand
agucacaacucucaaagca

SEQ ID NO: 2206267 - RNA, 19 nt, Homo sapiens
  misc_RNA (1)...(19): siRNA sense strand
gagggcaaauauggacaaa

SEQ ID NO: 2206268 - RNA, 19 nt, Homo sapiens
  misc_RNA (1)...(19): siRNA sense strand
ggaacaacugaaugaggua

SEQ ID NO: 2206269 - RNA, 19 nt, Homo sapiens
  misc_RNA (1)...(19): siRNA sense strand
gagggacgcaagucaaaug

SEQ ID NO: 2206270 - RNA, 19 nt, Homo sapiens
  misc_RNA (1)...(19): siRNA sense strand
gggagggacgcaagucaaa

SEQ ID NO: 2206271 - RNA, 19 nt, Homo sapiens
  misc_RNA (1)...(19): siRNA sense strand
ccucagcaccacacuauug

SEQ ID NO: 2206272 - RNA, 19 nt, Homo sapiens
  misc_RNA (1)...(19): siRNA sense strand
gaagcacuccggaaacucu

SEQ ID NO: 2206273 - RNA, 19 nt, Homo sapiens
  misc_RNA (1)...(19): siRNA sense strand
gcaggacacaucuguucuu

SEQ ID NO: 2206274 - RNA, 19 nt, Homo sapiens
  misc_RNA (1)...(19): siRNA sense strand
gaaauggaggaagcaaaga

SEQ ID NO: 2206275 - RNA, 19 nt, Homo sapiens
  misc_RNA (1)...(19): siRNA sense strand
guaaugcauucugaagcaa

SEQ ID NO: 2206276 - RNA, 19 nt, Homo sapiens
  misc_RNA (1)...(19): siRNA sense strand
ggaggugacguuaaaggau

SEQ ID NO: 2206277 - RNA, 19 nt, Homo sapiens
  misc_RNA (1)...(19): siRNA sense strand
cagaagaaacaagaaagaa

SEQ ID NO: 2206278 - RNA, 19 nt, Homo sapiens
  misc_RNA (1)...(19): siRNA sense strand
gaaggaacugcugaaaugu

SEQ ID NO: 2206279 - RNA, 19 nt, Homo sapiens
  misc_RNA (1)...(19): siRNA sense strand
gaacugcugaaauguaaac

SEQ ID NO: 2206280 - RNA, 19 nt, Homo sapiens
  misc_RNA (1)...(19): siRNA sense strand
aagaggagauuuuccauga

SEQ ID NO: 2206281 - RNA, 19 nt, Homo sapiens
  misc_RNA (1)...(19): siRNA sense strand
cuaaagugcucuauuucac

SEQ ID NO: 2206282 - RNA, 19 nt, Homo sapiens
  misc_RNA (1)...(19): siRNA sense strand
auggagcgccugcauguua

SEQ ID NO: 2206283 - RNA, 19 nt, Homo sapiens
  misc_RNA (1)...(19): siRNA sense strand
ggaucuagagcgagagcua

SEQ ID NO: 2206284 - RNA, 19 nt, Homo sapiens
  misc_RNA (1)...(19): siRNA sense strand
gagaguccagucugugcua

SEQ ID NO: 2206285 - RNA, 19 nt, Homo sapiens
  misc_RNA (1)...(19): siRNA sense strand
aauuguagcuuggguggaa

SEQ ID NO: 2206286 - RNA, 19 nt, Homo sapiens
  misc_RNA (1)...(19): siRNA sense strand
gaggagauuuuccaugaug

SEQ ID NO: 2206287 - RNA, 19 nt, Homo sapiens
  misc_RNA (1)...(19): siRNA sense strand
gagcuagaacacaaagaug

SEQ ID NO: 2206288 - RNA, 19 nt, Homo sapiens
  misc_RNA (1)...(19): siRNA sense strand
caucuguucuucagcucaa

SEQ ID NO: 2206289 - RNA, 19 nt, Homo sapiens
  misc_RNA (1)...(19): siRNA sense strand
ccgaggaacaacugaauga

SEQ ID NO: 2206290 - RNA, 19 nt, Homo sapiens
  misc_RNA (1)...(19): siRNA sense strand
ggagaccucaugggaagaa

SEQ ID NO: 2206291 - RNA, 19 nt, Homo sapiens
  misc_RNA (1)...(19): siRNA sense strand
cagcaccuguacuaaagug

SEQ ID NO: 2206292 - RNA, 19 nt, Homo sapiens
  misc_RNA (1)...(19): siRNA sense strand
acccagaacucaaguaggu

SEQ ID NO: 2206293 - RNA, 19 nt, Homo sapiens
  misc_RNA (1)...(19): siRNA sense strand
cuacugagggcaaauaugg

SEQ ID NO: 2206294 - RNA, 19 nt, Homo sapiens
  misc_RNA (1)...(19): siRNA sense strand
cagcaggacacaucuguuc

SEQ ID NO: 2206295 - RNA, 19 nt, Homo sapiens
  misc_RNA (1)...(19): siRNA sense strand
cagaaggaacugcugaaau

SEQ ID NO: 2206296 - RNA, 19 nt, Homo sapiens
  misc_RNA (1)...(19): siRNA sense strand
gaaaaugauaucaggacua

SEQ ID NO: 2206297 - RNA, 19 nt, Homo sapiens
  misc_RNA (1)...(19): siRNA sense strand
caagaagccagaaacuuac

SEQ ID NO: 2206298 - RNA, 19 nt, Homo sapiens
  misc_RNA (1)...(19): siRNA sense strand
cugcugaaauguaaacaag

SEQ ID NO: 2206299 - RNA, 19 nt, Homo sapiens
  misc_RNA (1)...(19): siRNA sense strand
caggacacaucuguucuuc

SEQ ID NO: 2206300 - RNA, 19 nt, Homo sapiens
  misc_RNA (1)...(19): siRNA sense strand
gauuauucccgcugaagga

SEQ ID NO: 2206301 - RNA, 19 nt, Homo sapiens
  misc_RNA (1)...(19): siRNA sense strand
gaaaagagaggcagaugag

SEQ ID NO: 2206302 - RNA, 19 nt, Homo sapiens
  misc_RNA (1)...(19): siRNA sense strand
uccggaaacucucugaugu

SEQ ID NO: 2206303 - RNA, 19 nt, Homo sapiens
  misc_RNA (1)...(19): siRNA sense strand
gucagcagcaccuguacua

SEQ ID NO: 2206304 - RNA, 19 nt, Homo sapiens
  misc_RNA (1)...(19): siRNA sense strand
gaaaaggagcuacuucagu

SEQ ID NO: 2206305 - RNA, 19 nt, Homo sapiens
  misc_RNA (1)...(19): siRNA sense strand
cauuauaacccagucagaa

SEQ ID NO: 2206306 - RNA, 19 nt, Homo sapiens
  misc_RNA (1)...(19): siRNA sense strand
gaagucaucuauugagguu

SEQ ID NO: 2206307 - RNA, 19 nt, Homo sapiens
  misc_RNA (1)...(19): siRNA sense strand
gagcaggucuggcuauaag

SEQ ID NO: 2206308 - RNA, 19 nt, Homo sapiens
  misc_RNA (1)...(19): siRNA sense strand
ccacacaguaucaauauuu

SEQ ID NO: 2206309 - RNA, 19 nt, Homo sapiens
  misc_RNA (1)...(19): siRNA sense strand
gcaccaugcuuuccucugu

SEQ ID NO: 2206310 - RNA, 19 nt, Homo sapiens
  misc_RNA (1)...(19): siRNA sense strand
gguuggaaauguauacaaa

SEQ ID NO: 2206311 - RNA, 19 nt, Homo sapiens
  misc_RNA (1)...(19): siRNA sense strand
cuauugagguuuccgauga

SEQ ID NO: 2206312 - RNA, 19 nt, Homo sapiens
  misc_RNA (1)...(19): siRNA sense strand
caaaggggaugcaucuaua

SEQ ID NO: 2206313 - RNA, 19 nt, Homo sapiens
  misc_RNA (1)...(19): siRNA sense strand
gcuauaagaagucaucuau

SEQ ID NO: 2206314 - RNA, 19 nt, Homo sapiens
  misc_RNA (1)...(19): siRNA sense strand
gagcuaacagucacagaaa

SEQ ID NO: 2206315 - RNA, 19 nt, Homo sapiens
  misc_RNA (1)...(19): siRNA sense strand
uaagcaacccuaccauaaa

SEQ ID NO: 2206316 - RNA, 19 nt, Homo sapiens
  misc_RNA (1)...(19): siRNA sense strand
uauaagcaacccuaccaua

SEQ ID NO: 2206317 - RNA, 19 nt, Homo sapiens
  misc_RNA (1)...(19): siRNA sense strand
auaagcaacccuaccauaa

SEQ ID NO: 2206318 - RNA, 19 nt, Homo sapiens
  misc_RNA (1)...(19): siRNA sense strand
gugccuggauucagacuau

SEQ ID NO: 2206319 - RNA, 19 nt, Homo sapiens
  misc_RNA (1)...(19): siRNA sense strand
ggggaugcaucuauaagua

SEQ ID NO: 2206320 - RNA, 19 nt, Homo sapiens
  misc_RNA (1)...(19): siRNA sense strand
gcaggucuggcuauaagaa

SEQ ID NO: 2206321 - RNA, 19 nt, Homo sapiens
  misc_RNA (1)...(19): siRNA sense strand
aagcaacccuaccauaaag

SEQ ID NO: 2206322 - RNA, 19 nt, Homo sapiens
  misc_RNA (1)...(19): siRNA sense strand
cagcagcagccacacagua

SEQ ID NO: 2206323 - RNA, 19 nt, Homo sapiens
  misc_RNA (1)...(19): siRNA sense strand
cagccacacaguaucaaua

SEQ ID NO: 2206324 - RNA, 19 nt, Homo sapiens
  misc_RNA (1)...(19): siRNA sense strand
ggagcaggucuggcuauaa

SEQ ID NO: 2206325 - RNA, 19 nt, Homo sapiens
  misc_RNA (1)...(19): siRNA sense strand
aaccacagcaggcacauuu

SEQ ID NO: 2206326 - RNA, 19 nt, Homo sapiens
  misc_RNA (1)...(19): siRNA sense strand
gaaggcugcugggcugaag

SEQ ID NO: 2206327 - RNA, 19 nt, Homo sapiens
  misc_RNA (1)...(19): siRNA sense strand
acuauagacuggacauauc

SEQ ID NO: 2206328 - RNA, 19 nt, Homo sapiens
  misc_RNA (1)...(19): siRNA sense strand
gggaugcaucuauaaguau

SEQ ID NO: 2206329 - RNA, 19 nt, Homo sapiens
  misc_RNA (1)...(19): siRNA sense strand
uguccgagguuauguugga

SEQ ID NO: 2206330 - RNA, 19 nt, Homo sapiens
  misc_RNA (1)...(19): siRNA sense strand
cacacaguaucaauauuuc

SEQ ID NO: 2206331 - RNA, 19 nt, Homo sapiens
  misc_RNA (1)...(19): siRNA sense strand
gccacacaguaucaauauu

SEQ ID NO: 2206332 - RNA, 19 nt, Homo sapiens
  misc_RNA (1)...(19): siRNA sense strand
gcaacccuaccauaaagga

SEQ ID NO: 2206333 - RNA, 19 nt, Homo sapiens
  misc_RNA (1)...(19): siRNA sense strand
gagguuauguuggagaaaa

SEQ ID NO: 2206334 - RNA, 19 nt, Homo sapiens
  misc_RNA (1)...(19): siRNA sense strand
agucaucuauugagguuuc

SEQ ID NO: 2206335 - RNA, 19 nt, Homo sapiens
  misc_RNA (1)...(19): siRNA sense strand
uaagaagucaucuauugag

SEQ ID NO: 2206336 - RNA, 19 nt, Homo sapiens
  misc_RNA (1)...(19): siRNA sense strand
cugcugggcugaagaagag

SEQ ID NO: 2206337 - RNA, 19 nt, Homo sapiens
  misc_RNA (1)...(19): siRNA sense strand
ggaggaagaggcguguaug

SEQ ID NO: 2206338 - RNA, 19 nt, Homo sapiens
  misc_RNA (1)...(19): siRNA sense strand
cagcagccacacaguauca

SEQ ID NO: 2206339 - RNA, 19 nt, Homo sapiens
  misc_RNA (1)...(19): siRNA sense strand
gcgcugagugccuggauuc

SEQ ID NO: 2206340 - RNA, 19 nt, Homo sapiens
  misc_RNA (1)...(19): siRNA sense strand
aggagcaggucuggcuaua

SEQ ID NO: 2206341 - RNA, 19 nt, Homo sapiens
  misc_RNA (1)...(19): siRNA sense strand
ccgagguuauguuggagaa

SEQ ID NO: 2206342 - RNA, 19 nt, Homo sapiens
  misc_RNA (1)...(19): siRNA sense strand
gaggagcaggucuggcuau

SEQ ID NO: 2206343 - RNA, 19 nt, Homo sapiens
  misc_RNA (1)...(19): siRNA sense strand
gaggaagaggcguguaugg

SEQ ID NO: 2206344 - RNA, 19 nt, Homo sapiens
  misc_RNA (1)...(19): siRNA sense strand
gcugugcugugaagaaucc

SEQ ID NO: 2206345 - RNA, 19 nt, Homo sapiens
  misc_RNA (1)...(19): siRNA sense strand
ggaaggcugcugggcugaa

SEQ ID NO: 2206346 - RNA, 19 nt, Homo sapiens
  misc_RNA (1)...(19): siRNA sense strand
gcccauguccgagguuaug

SEQ ID NO: 2206347 - RNA, 19 nt, Homo sapiens
  misc_RNA (1)...(19): siRNA sense strand
gcuaacagucacagaaagg

SEQ ID NO: 2206348 - RNA, 19 nt, Homo sapiens
  misc_RNA (1)...(19): siRNA sense strand
agagcuaacagucacagaa

SEQ ID NO: 2206349 - RNA, 19 nt, Homo sapiens
  misc_RNA (1)...(19): siRNA sense strand
auaauauucccaugacaga

SEQ ID NO: 2206350 - RNA, 19 nt, Homo sapiens
  misc_RNA (1)...(19): siRNA sense strand
gcagccacacaguaucaau

SEQ ID NO: 2206351 - RNA, 19 nt, Homo sapiens
  misc_RNA (1)...(19): siRNA sense strand
gcugcugggcugaagaaga

SEQ ID NO: 2206352 - RNA, 19 nt, Homo sapiens
  misc_RNA (1)...(19): siRNA sense strand
gaagucaucuauugagguu

SEQ ID NO: 2206353 - RNA, 19 nt, Homo sapiens
  misc_RNA (1)...(19): siRNA sense strand
gagcaggucuggcuauaag

SEQ ID NO: 2206354 - RNA, 19 nt, Homo sapiens
  misc_RNA (1)...(19): siRNA sense strand
ccacacaguaucaauauuu

SEQ ID NO: 2206355 - RNA, 19 nt, Homo sapiens
  misc_RNA (1)...(19): siRNA sense strand
gcaccaugcuuuccucugu

SEQ ID NO: 2206356 - RNA, 19 nt, Homo sapiens
  misc_RNA (1)...(19): siRNA sense strand
gguuggaaauguauacaaa

SEQ ID NO: 2206357 - RNA, 19 nt, Homo sapiens
  misc_RNA (1)...(19): siRNA sense strand
cuauugagguuuccgauga

SEQ ID NO: 2206358 - RNA, 19 nt, Homo sapiens
  misc_RNA (1)...(19): siRNA sense strand
caaaggggaugcaucuaua

SEQ ID NO: 2206359 - RNA, 19 nt, Homo sapiens
  misc_RNA (1)...(19): siRNA sense strand
gcuauaagaagucaucuau

SEQ ID NO: 2206360 - RNA, 19 nt, Homo sapiens
  misc_RNA (1)...(19): siRNA sense strand
gagcuaacagucacagaaa

SEQ ID NO: 2206361 - RNA, 19 nt, Homo sapiens
  misc_RNA (1)...(19): siRNA sense strand
uaagcaacccuaccauaaa

SEQ ID NO: 2206362 - RNA, 19 nt, Homo sapiens
  misc_RNA (1)...(19): siRNA sense strand
uauaagcaacccuaccaua

SEQ ID NO: 2206363 - RNA, 19 nt, Homo sapiens
  misc_RNA (1)...(19): siRNA sense strand
auaagcaacccuaccauaa

SEQ ID NO: 2206364 - RNA, 19 nt, Homo sapiens
  misc_RNA (1)...(19): siRNA sense strand
gugccuggauucagacuau

SEQ ID NO: 2206365 - RNA, 19 nt, Homo sapiens
  misc_RNA (1)...(19): siRNA sense strand
ggggaugcaucuauaagua

SEQ ID NO: 2206366 - RNA, 19 nt, Homo sapiens
  misc_RNA (1)...(19): siRNA sense strand
gcaggucuggcuauaagaa

SEQ ID NO: 2206367 - RNA, 19 nt, Homo sapiens
  misc_RNA (1)...(19): siRNA sense strand
aagcaacccuaccauaaag

SEQ ID NO: 2206368 - RNA, 19 nt, Homo sapiens
  misc_RNA (1)...(19): siRNA sense strand
cagcagcagccacacagua

SEQ ID NO: 2206369 - RNA, 19 nt, Homo sapiens
  misc_RNA (1)...(19): siRNA sense strand
cagccacacaguaucaaua

SEQ ID NO: 2206370 - RNA, 19 nt, Homo sapiens
  misc_RNA (1)...(19): siRNA sense strand
ggagcaggucuggcuauaa

SEQ ID NO: 2206371 - RNA, 19 nt, Homo sapiens
  misc_RNA (1)...(19): siRNA sense strand
aaccacagcaggcacauuu

SEQ ID NO: 2206372 - RNA, 19 nt, Homo sapiens
  misc_RNA (1)...(19): siRNA sense strand
gaaggcugcugggcugaag

SEQ ID NO: 2206373 - RNA, 19 nt, Homo sapiens
  misc_RNA (1)...(19): siRNA sense strand
acuauagacuggacauauc

SEQ ID NO: 2206374 - RNA, 19 nt, Homo sapiens
  misc_RNA (1)...(19): siRNA sense strand
gggaugcaucuauaaguau

SEQ ID NO: 2206375 - RNA, 19 nt, Homo sapiens
  misc_RNA (1)...(19): siRNA sense strand
uguccgagguuauguugga

SEQ ID NO: 2206376 - RNA, 19 nt, Homo sapiens
  misc_RNA (1)...(19): siRNA sense strand
cacacaguaucaauauuuc

SEQ ID NO: 2206377 - RNA, 19 nt, Homo sapiens
  misc_RNA (1)...(19): siRNA sense strand
gccacacaguaucaauauu

SEQ ID NO: 2206378 - RNA, 19 nt, Homo sapiens
  misc_RNA (1)...(19): siRNA sense strand
gcaacccuaccauaaagga

SEQ ID NO: 2206379 - RNA, 19 nt, Homo sapiens
  misc_RNA (1)...(19): siRNA sense strand
gagguuauguuggagaaaa

SEQ ID NO: 2206380 - RNA, 19 nt, Homo sapiens
  misc_RNA (1)...(19): siRNA sense strand
agucaucuauugagguuuc

SEQ ID NO: 2206381 - RNA, 19 nt, Homo sapiens
  misc_RNA (1)...(19): siRNA sense strand
uaagaagucaucuauugag

SEQ ID NO: 2206382 - RNA, 19 nt, Homo sapiens
  misc_RNA (1)...(19): siRNA sense strand
cugcugggcugaagaagag

SEQ ID NO: 2206383 - RNA, 19 nt, Homo sapiens
  misc_RNA (1)...(19): siRNA sense strand
ggaggaagaggcguguaug

SEQ ID NO: 2206384 - RNA, 19 nt, Homo sapiens
  misc_RNA (1)...(19): siRNA sense strand
cagcagccacacaguauca

SEQ ID NO: 2206385 - RNA, 19 nt, Homo sapiens
  misc_RNA (1)...(19): siRNA sense strand
gcgcugagugccuggauuc

SEQ ID NO: 2206386 - RNA, 19 nt, Homo sapiens
  misc_RNA (1)...(19): siRNA sense strand
aggagcaggucuggcuaua

SEQ ID NO: 2206387 - RNA, 19 nt, Homo sapiens
  misc_RNA (1)...(19): siRNA sense strand
ccgagguuauguuggagaa

SEQ ID NO: 2206388 - RNA, 19 nt, Homo sapiens
  misc_RNA (1)...(19): siRNA sense strand
gaggagcaggucuggcuau

SEQ ID NO: 2206389 - RNA, 19 nt, Homo sapiens
  misc_RNA (1)...(19): siRNA sense strand
gaggaagaggcguguaugg

SEQ ID NO: 2206390 - RNA, 19 nt, Homo sapiens
  misc_RNA (1)...(19): siRNA sense strand
gcugugcugugaagaaucc

SEQ ID NO: 2206391 - RNA, 19 nt, Homo sapiens
  misc_RNA (1)...(19): siRNA sense strand
ggaaggcugcugggcugaa

SEQ ID NO: 2206392 - RNA, 19 nt, Homo sapiens
  misc_RNA (1)...(19): siRNA sense strand
gcccauguccgagguuaug

SEQ ID NO: 2206393 - RNA, 19 nt, Homo sapiens
  misc_RNA (1)...(19): siRNA sense strand
gcuaacagucacagaaagg

SEQ ID NO: 2206394 - RNA, 19 nt, Homo sapiens
  misc_RNA (1)...(19): siRNA sense strand
agagcuaacagucacagaa

SEQ ID NO: 2206395 - RNA, 19 nt, Homo sapiens
  misc_RNA (1)...(19): siRNA sense strand
auaauauucccaugacaga

SEQ ID NO: 2206396 - RNA, 19 nt, Homo sapiens
  misc_RNA (1)...(19): siRNA sense strand
gcagccacacaguaucaau

SEQ ID NO: 2206397 - RNA, 19 nt, Homo sapiens
  misc_RNA (1)...(19): siRNA sense strand
gcugcugggcugaagaaga

SEQ ID NO: 2206398 - RNA, 19 nt, Homo sapiens
  misc_RNA (1)...(19): siRNA sense strand
gaaggucaccgucaaguau

SEQ ID NO: 2206399 - RNA, 19 nt, Homo sapiens
  misc_RNA (1)...(19): siRNA sense strand
ggaagcgccucaaccuaga

SEQ ID NO: 2206400 - RNA, 19 nt, Homo sapiens
  misc_RNA (1)...(19): siRNA sense strand
ccacagaggccuucauuuc

SEQ ID NO: 2206401 - RNA, 19 nt, Homo sapiens
  misc_RNA (1)...(19): siRNA sense strand
ggaaggucaccgucaagua

SEQ ID NO: 2206402 - RNA, 19 nt, Homo sapiens
  misc_RNA (1)...(19): siRNA sense strand
ccacgcgucuacuuucaga

SEQ ID NO: 2206403 - RNA, 19 nt, Homo sapiens
  misc_RNA (1)...(19): siRNA sense strand
gaccacgcgucuacuuuca

SEQ ID NO: 2206404 - RNA, 19 nt, Homo sapiens
  misc_RNA (1)...(19): siRNA sense strand
ggaccacgcgucuacuuuc

SEQ ID NO: 2206405 - RNA, 19 nt, Homo sapiens
  misc_RNA (1)...(19): siRNA sense strand
ggaagaggagaucccagaa

SEQ ID NO: 2206406 - RNA, 19 nt, Homo sapiens
  misc_RNA (1)...(19): siRNA sense strand
ggacauggagagugacgau

SEQ ID NO: 2206407 - RNA, 19 nt, Homo sapiens
  misc_RNA (1)...(19): siRNA sense strand
aagaggagaucccagaacu

SEQ ID NO: 2206408 - RNA, 19 nt, Homo sapiens
  misc_RNA (1)...(19): siRNA sense strand
gcugguugacuguuacaaa

SEQ ID NO: 2206409 - RNA, 19 nt, Homo sapiens
  misc_RNA (1)...(19): siRNA sense strand
gaagaggagaucccagaac

SEQ ID NO: 2206410 - RNA, 19 nt, Homo sapiens
  misc_RNA (1)...(19): siRNA sense strand
aagggaaggucaccgucaa

SEQ ID NO: 2206411 - RNA, 19 nt, Homo sapiens
  misc_RNA (1)...(19): siRNA sense strand
cacagaggccuucauuucu

SEQ ID NO: 2206412 - RNA, 19 nt, Homo sapiens
  misc_RNA (1)...(19): siRNA sense strand
ccucuacgacugccaggaa

SEQ ID NO: 2206413 - RNA, 19 nt, Homo sapiens
  misc_RNA (1)...(19): siRNA sense strand
ggucaaggagcugcugguu

SEQ ID NO: 2206414 - RNA, 19 nt, Homo sapiens
  misc_RNA (1)...(19): siRNA sense strand
uuucuggccugcuggacaa

SEQ ID NO: 2206415 - RNA, 19 nt, Homo sapiens
  misc_RNA (1)...(19): siRNA sense strand
gcaauuauguuucucuuug

SEQ ID NO: 2206416 - RNA, 19 nt, Homo sapiens
  misc_RNA (1)...(19): siRNA sense strand
gaagacaauuguaaucaga

SEQ ID NO: 2206417 - RNA, 19 nt, Homo sapiens
  misc_RNA (1)...(19): siRNA sense strand
ggacuaagccuguaugugu

SEQ ID NO: 2206418 - RNA, 19 nt, Homo sapiens
  misc_RNA (1)...(19): siRNA sense strand
gcagauaacugugaagauc

SEQ ID NO: 2206419 - RNA, 19 nt, Homo sapiens
  misc_RNA (1)...(19): siRNA sense strand
gcaauggaagccuaucuua

SEQ ID NO: 2206420 - RNA, 19 nt, Homo sapiens
  misc_RNA (1)...(19): siRNA sense strand
uaaugaggauaguagcuua

SEQ ID NO: 2206421 - RNA, 19 nt, Homo sapiens
  misc_RNA (1)...(19): siRNA sense strand
ggacaaggaagaugauuuc

SEQ ID NO: 2206422 - RNA, 19 nt, Homo sapiens
  misc_RNA (1)...(19): siRNA sense strand
gaagaccaccuacagcaaa

SEQ ID NO: 2206423 - RNA, 19 nt, Homo sapiens
  misc_RNA (1)...(19): siRNA sense strand
gaaagagaagacaauugua

SEQ ID NO: 2206424 - RNA, 19 nt, Homo sapiens
  misc_RNA (1)...(19): siRNA sense strand
caccuaccauguacaagua

SEQ ID NO: 2206425 - RNA, 19 nt, Homo sapiens
  misc_RNA (1)...(19): siRNA sense strand
ggaagccuaucuuaugaca

SEQ ID NO: 2206426 - RNA, 19 nt, Homo sapiens
  misc_RNA (1)...(19): siRNA sense strand
aaucagaccucccuuccuu

SEQ ID NO: 2206427 - RNA, 19 nt, Homo sapiens
  misc_RNA (1)...(19): siRNA sense strand
caucuacaaugcaauuaug

SEQ ID NO: 2206428 - RNA, 19 nt, Homo sapiens
  misc_RNA (1)...(19): siRNA sense strand
caaagaaagagaagacaau

SEQ ID NO: 2206429 - RNA, 19 nt, Homo sapiens
  misc_RNA (1)...(19): siRNA sense strand
gagaagacaauuguaauca

SEQ ID NO: 2206430 - RNA, 19 nt, Homo sapiens
  misc_RNA (1)...(19): siRNA sense strand
gaaggagccaaccucaauu

SEQ ID NO: 2206431 - RNA, 19 nt, Homo sapiens
  misc_RNA (1)...(19): siRNA sense strand
gcuuuggccuccuuuaugu

SEQ ID NO: 2206432 - RNA, 19 nt, Homo sapiens
  misc_RNA (1)...(19): siRNA sense strand
cugugaagaucauggauaa

SEQ ID NO: 2206433 - RNA, 19 nt, Homo sapiens
  misc_RNA (1)...(19): siRNA sense strand
gaaccuccaccuccuccua

SEQ ID NO: 2206434 - RNA, 19 nt, Homo sapiens
  misc_RNA (1)...(19): siRNA sense strand
gagcugaggagaacaaagu

SEQ ID NO: 2206435 - RNA, 19 nt, Homo sapiens
  misc_RNA (1)...(19): siRNA sense strand
ccgcacggcugucacaaug

SEQ ID NO: 2206436 - RNA, 19 nt, Homo sapiens
  misc_RNA (1)...(19): siRNA sense strand
agaaagagaagacaauugu

SEQ ID NO: 2206437 - RNA, 19 nt, Homo sapiens
  misc_RNA (1)...(19): siRNA sense strand
guguguggcuggcuuauuc

SEQ ID NO: 2206438 - RNA, 19 nt, Homo sapiens
  misc_RNA (1)...(19): siRNA sense strand
ugaaggagccaaccucaau

SEQ ID NO: 2206439 - RNA, 19 nt, Homo sapiens
  misc_RNA (1)...(19): siRNA sense strand
gguaccaccuaugagauuu

SEQ ID NO: 2206440 - RNA, 19 nt, Homo sapiens
  misc_RNA (1)...(19): siRNA sense strand
cagaagaaguggccuugca

SEQ ID NO: 2206441 - RNA, 19 nt, Homo sapiens
  misc_RNA (1)...(19): siRNA sense strand
ugacaacuguguggaggaa

SEQ ID NO: 2206442 - RNA, 19 nt, Homo sapiens
  misc_RNA (1)...(19): siRNA sense strand
ccaccuccaccuccuauaa

SEQ ID NO: 2206443 - RNA, 19 nt, Homo sapiens
  misc_RNA (1)...(19): siRNA sense strand
uagcuggccucacgggauu

SEQ ID NO: 2206444 - RNA, 19 nt, Homo sapiens
  misc_RNA (1)...(19): siRNA sense strand
gcagugcccaucuacaaug

SEQ ID NO: 2206445 - RNA, 19 nt, Homo sapiens
  misc_RNA (1)...(19): siRNA sense strand
uaagggaagccuggagaua

SEQ ID NO: 2206446 - RNA, 19 nt, Homo sapiens
  misc_RNA (1)...(19): siRNA sense strand
acaacuguguggaggaauu

SEQ ID NO: 2206447 - RNA, 19 nt, Homo sapiens
  misc_RNA (1)...(19): siRNA sense strand
agccagaccugagccguua

SEQ ID NO: 2206448 - RNA, 19 nt, Homo sapiens
  misc_RNA (1)...(19): siRNA sense strand
acacucuucuuugccuuua

SEQ ID NO: 2206449 - RNA, 19 nt, Homo sapiens
  misc_RNA (1)...(19): siRNA sense strand
agacccaccuuuaggcuau

SEQ ID NO: 2206450 - RNA, 19 nt, Homo sapiens
  misc_RNA (1)...(19): siRNA sense strand
aauggaagccuaucuuaug

SEQ ID NO: 2206451 - RNA, 19 nt, Homo sapiens
  misc_RNA (1)...(19): siRNA sense strand
gugaagaucauggauaaug

SEQ ID NO: 2206452 - RNA, 19 nt, Homo sapiens
  misc_RNA (1)...(19): siRNA sense strand
gauucaaacccagcaagua

SEQ ID NO: 2206453 - RNA, 19 nt, Homo sapiens
  misc_RNA (1)...(19): siRNA sense strand
accaauggcugcuguaaca

SEQ ID NO: 2206454 - RNA, 19 nt, Homo sapiens
  misc_RNA (1)...(19): siRNA sense strand
cgccggaacuaccguuauu

SEQ ID NO: 2206455 - RNA, 19 nt, Homo sapiens
  misc_RNA (1)...(19): siRNA sense strand
ugaagaucauggauaaugg

SEQ ID NO: 2206456 - RNA, 19 nt, Homo sapiens
  misc_RNA (1)...(19): siRNA sense strand
ggagagcugaggagaacaa

SEQ ID NO: 2206457 - RNA, 19 nt, Homo sapiens
  misc_RNA (1)...(19): siRNA sense strand
cuacgacacucuucuuugc

SEQ ID NO: 2206458 - RNA, 19 nt, Homo sapiens
  misc_RNA (1)...(19): siRNA sense strand
ucagaugauucaaagagau

SEQ ID NO: 2206459 - RNA, 19 nt, Homo sapiens
  misc_RNA (1)...(19): siRNA sense strand
caauggaagccuaucuuau

SEQ ID NO: 2206460 - RNA, 19 nt, Homo sapiens
  misc_RNA (1)...(19): siRNA sense strand
ucacuucgauccacuaucc

SEQ ID NO: 2206461 - RNA, 19 nt, Homo sapiens
  misc_RNA (1)...(19): siRNA sense strand
ugaggauaguagcuuauug

SEQ ID NO: 2206462 - RNA, 19 nt, Homo sapiens
  misc_RNA (1)...(19): siRNA sense strand
ggagaccaaagaaagagaa

SEQ ID NO: 2206463 - RNA, 19 nt, Homo sapiens
  misc_RNA (1)...(19): siRNA sense strand
ccaaagaaagagaagacaa

SEQ ID NO: 2206464 - RNA, 19 nt, Homo sapiens
  misc_RNA (1)...(19): siRNA sense strand
acaaaacaguggagauaaa

SEQ ID NO: 2206465 - RNA, 19 nt, Homo sapiens
  misc_RNA (1)...(19): siRNA sense strand
gaugaaguacagcugaaga

SEQ ID NO: 2206466 - RNA, 19 nt, Homo sapiens
  misc_RNA (1)...(19): siRNA sense strand
gaggauaguagcuuauugg

SEQ ID NO: 2206467 - RNA, 19 nt, Homo sapiens
  misc_RNA (1)...(19): siRNA sense strand
caccucggcuuggcuacua

SEQ ID NO: 2206468 - RNA, 19 nt, Homo sapiens
  misc_RNA (1)...(19): siRNA sense strand
aagggaagccuggagauaa

SEQ ID NO: 2206469 - RNA, 19 nt, Homo sapiens
  misc_RNA (1)...(19): siRNA sense strand
guggcuggcuuauucuuca

SEQ ID NO: 2206470 - RNA, 19 nt, Homo sapiens
  misc_RNA (1)...(19): siRNA sense strand
caauggcaguaaugugugu

SEQ ID NO: 2206471 - RNA, 19 nt, Homo sapiens
  misc_RNA (1)...(19): siRNA sense strand
ccugacagcccacauuaug

SEQ ID NO: 2206472 - RNA, 19 nt, Homo sapiens
  misc_RNA (1)...(19): siRNA sense strand
ugagccagacccaccuuua

SEQ ID NO: 2206473 - RNA, 19 nt, Homo sapiens
  misc_RNA (1)...(19): siRNA sense strand
auggaagccuaucuuauga

SEQ ID NO: 2206474 - RNA, 19 nt, Homo sapiens
  misc_RNA (1)...(19): siRNA sense strand
cgacaccuaccauguacaa

SEQ ID NO: 2206475 - RNA, 19 nt, Homo sapiens
  misc_RNA (1)...(19): siRNA sense strand
cagaugggcagauaacugu

SEQ ID NO: 2206476 - RNA, 19 nt, Homo sapiens
  misc_RNA (1)...(19): siRNA sense strand
gcuacgacacucuucuuug

SEQ ID NO: 2206477 - RNA, 19 nt, Homo sapiens
  misc_RNA (1)...(19): siRNA sense strand
ggccagccaccucucagua

SEQ ID NO: 2206478 - RNA, 19 nt, Homo sapiens
  misc_RNA (1)...(19): siRNA sense strand
gagaggcacccacguuugg

SEQ ID NO: 2206479 - RNA, 19 nt, Homo sapiens
  misc_RNA (1)...(19): siRNA sense strand
gcugagaggcacccacguu

SEQ ID NO: 2206480 - RNA, 19 nt, Homo sapiens
  misc_RNA (1)...(19): siRNA sense strand
caacuguguggaggaauuu

SEQ ID NO: 2206481 - RNA, 19 nt, Homo sapiens
  misc_RNA (1)...(19): siRNA sense strand
aagaugaaguacagcugaa

SEQ ID NO: 2206482 - RNA, 19 nt, Homo sapiens
  misc_RNA (1)...(19): siRNA sense strand
guacuaguuccuccucaga

SEQ ID NO: 2206483 - RNA, 19 nt, Homo sapiens
  misc_RNA (1)...(19): siRNA sense strand
gagccagacccaccuuuag

SEQ ID NO: 2206484 - RNA, 19 nt, Homo sapiens
  misc_RNA (1)...(19): siRNA sense strand
caccugcagugcccaucua

SEQ ID NO: 2206485 - RNA, 19 nt, Homo sapiens
  misc_RNA (1)...(19): siRNA sense strand
gaugggcagauaacuguga

SEQ ID NO: 2206486 - RNA, 19 nt, Homo sapiens
  misc_RNA (1)...(19): siRNA sense strand
gagcuacgacacucuucuu

SEQ ID NO: 2206487 - RNA, 19 nt, Homo sapiens
  misc_RNA (1)...(19): siRNA sense strand
gcauccaggugcgcaugaa

SEQ ID NO: 2206488 - RNA, 19 nt, Homo sapiens
  misc_RNA (1)...(19): siRNA sense strand
uuacugacacccaaagaug

SEQ ID NO: 2206489 - RNA, 19 nt, Homo sapiens
  misc_RNA (1)...(19): siRNA sense strand
gccgaucgaugucuuacag

SEQ ID NO: 2206490 - RNA, 19 nt, Homo sapiens
  misc_RNA (1)...(19): siRNA sense strand
ugaggagaacaaagucuaa

SEQ ID NO: 2206491 - RNA, 19 nt, Homo sapiens
  misc_RNA (1)...(19): siRNA sense strand
ggaggaugaggacaaggaa

SEQ ID NO: 2206492 - RNA, 19 nt, Homo sapiens
  misc_RNA (1)...(19): siRNA sense strand
caguugcaauccauucguu

SEQ ID NO: 2206493 - RNA, 19 nt, Homo sapiens
  misc_RNA (1)...(19): siRNA sense strand
gcccaucuacaaugcaauu

SEQ ID NO: 2206494 - RNA, 19 nt, Homo sapiens
  misc_RNA (1)...(19): siRNA sense strand
gagagccagucugcagaug

SEQ ID NO: 2206495 - RNA, 19 nt, Homo sapiens
  misc_RNA (1)...(19): siRNA sense strand
gggcagauaacugugaaga

SEQ ID NO: 2206496 - RNA, 19 nt, Homo sapiens
  misc_RNA (1)...(19): siRNA sense strand
gagccagucugcagaugcu

SEQ ID NO: 2206497 - RNA, 19 nt, Homo sapiens
  misc_RNA (1)...(19): siRNA sense strand
gauaacagagagccagucu

SEQ ID NO: 2206498 - RNA, 19 nt, Homo sapiens
  misc_RNA (1)...(19): siRNA sense strand
agaagacaauuguaaucag

SEQ ID NO: 2206499 - RNA, 19 nt, Homo sapiens
  misc_RNA (1)...(19): siRNA sense strand
acccaaagaugaaguacag

SEQ ID NO: 2206500 - RNA, 19 nt, Homo sapiens
  misc_RNA (1)...(19): siRNA sense strand
gaaguugcugcgccaguca

SEQ ID NO: 2206501 - RNA, 19 nt, Homo sapiens
  misc_RNA (1)...(19): siRNA sense strand
gacccaccuuuaggcuaua

SEQ ID NO: 2206502 - RNA, 19 nt, Homo sapiens
  misc_RNA (1)...(19): siRNA sense strand
caaccagacacgcaaugga

SEQ ID NO: 2206503 - RNA, 19 nt, Homo sapiens
  misc_RNA (1)...(19): siRNA sense strand
gcaccaccuccaccuccua

SEQ ID NO: 2206504 - RNA, 19 nt, Homo sapiens
  misc_RNA (1)...(19): siRNA sense strand
cggcuuggcuacuaaugag

SEQ ID NO: 2206505 - RNA, 19 nt, Homo sapiens
  misc_RNA (1)...(19): siRNA sense strand
gugcccaucuacaaugcaa

SEQ ID NO: 2206506 - RNA, 19 nt, Homo sapiens
  misc_RNA (1)...(19): siRNA sense strand
ggagccaaccucaauugca

SEQ ID NO: 2206507 - RNA, 19 nt, Homo sapiens
  misc_RNA (1)...(19): siRNA sense strand
caauggcugcuguaacaau

SEQ ID NO: 2206508 - RNA, 19 nt, Homo sapiens
  misc_RNA (1)...(19): siRNA sense strand
gguuacaguagcagcagua

SEQ ID NO: 2206509 - RNA, 19 nt, Homo sapiens
  misc_RNA (1)...(19): siRNA sense strand
acacaggguugcgaacaca

SEQ ID NO: 2206510 - RNA, 19 nt, Homo sapiens
  misc_RNA (1)...(19): siRNA sense strand
uaacugugaagaucaugga

SEQ ID NO: 2206511 - RNA, 19 nt, Homo sapiens
  misc_RNA (1)...(19): siRNA sense strand
ucaaacccagcaaguaugu

SEQ ID NO: 2206512 - RNA, 19 nt, Homo sapiens
  misc_RNA (1)...(19): siRNA sense strand
gaccaaagaaagagaagac

SEQ ID NO: 2206513 - RNA, 19 nt, Homo sapiens
  misc_RNA (1)...(19): siRNA sense strand
aauggcugcuguaacaaug

SEQ ID NO: 2206514 - RNA, 19 nt, Homo sapiens
  misc_RNA (1)...(19): siRNA sense strand
auaagagccuggccaacca

SEQ ID NO: 2206515 - RNA, 19 nt, Homo sapiens
  misc_RNA (1)...(19): siRNA sense strand
gaacgagaccuuccucuuu

SEQ ID NO: 2206516 - RNA, 19 nt, Homo sapiens
  misc_RNA (1)...(19): siRNA sense strand
ggcaaacgcuacaagaauu

SEQ ID NO: 2206517 - RNA, 19 nt, Homo sapiens
  misc_RNA (1)...(19): siRNA sense strand
agaagacggugacgaugaa

SEQ ID NO: 2206518 - RNA, 19 nt, Homo sapiens
  misc_RNA (1)...(19): siRNA sense strand
gcagugagaagaaggcuau

SEQ ID NO: 2206519 - RNA, 19 nt, Homo sapiens
  misc_RNA (1)...(19): siRNA sense strand
gcacuggaaggacaugauu

SEQ ID NO: 2206520 - RNA, 19 nt, Homo sapiens
  misc_RNA (1)...(19): siRNA sense strand
gggcaaacgcuacaagaau

SEQ ID NO: 2206521 - RNA, 19 nt, Homo sapiens
  misc_RNA (1)...(19): siRNA sense strand
gugaagguauggcugaugu

SEQ ID NO: 2206522 - RNA, 19 nt, Homo sapiens
  misc_RNA (1)...(19): siRNA sense strand
acaagcggguggagaagaa

SEQ ID NO: 2206523 - RNA, 19 nt, Homo sapiens
  misc_RNA (1)...(19): siRNA sense strand
aacgagaccuuccucuuug

SEQ ID NO: 2206524 - RNA, 19 nt, Homo sapiens
  misc_RNA (1)...(19): siRNA sense strand
gcuggucucugccaucauc

SEQ ID NO: 2206525 - RNA, 19 nt, Homo sapiens
  misc_RNA (1)...(19): siRNA sense strand
gagacgaccaucaucauca

SEQ ID NO: 2206526 - RNA, 19 nt, Homo sapiens
  misc_RNA (1)...(19): siRNA sense strand
ucucagaccucgucaacuc

SEQ ID NO: 2206527 - RNA, 19 nt, Homo sapiens
  misc_RNA (1)...(19): siRNA sense strand
gcaaacgcuacaagaauuc

SEQ ID NO: 2206528 - RNA, 19 nt, Homo sapiens
  misc_RNA (1)...(19): siRNA sense strand
ccaacuccaucaucgugaa

SEQ ID NO: 2206529 - RNA, 19 nt, Homo sapiens
  misc_RNA (1)...(19): siRNA sense strand
ugacccagaugcagaccuu

SEQ ID NO: 2206530 - RNA, 19 nt, Homo sapiens
  misc_RNA (1)...(19): siRNA sense strand
agguauggcugauguacaa

SEQ ID NO: 2206531 - RNA, 19 nt, Homo sapiens
  misc_RNA (1)...(19): siRNA sense strand
ccacuggugucagcgcaaa

SEQ ID NO: 2206532 - RNA, 19 nt, Homo sapiens
  misc_RNA (1)...(19): siRNA sense strand
agaucuaccuguccuggaa

SEQ ID NO: 2206533 - RNA, 19 nt, Homo sapiens
  misc_RNA (1)...(19): siRNA sense strand
gacaagcucagccgcaaug

SEQ ID NO: 2206534 - RNA, 19 nt, Homo sapiens
  misc_RNA (1)...(19): siRNA sense strand
agaagaagacggugacgau

SEQ ID NO: 2206535 - RNA, 19 nt, Homo sapiens
  misc_RNA (1)...(19): siRNA sense strand
ggagacgaccaucaucauc

SEQ ID NO: 2206536 - RNA, 19 nt, Homo sapiens
  misc_RNA (1)...(19): siRNA sense strand
aagaagacggugacgauga

SEQ ID NO: 2206537 - RNA, 19 nt, Homo sapiens
  misc_RNA (1)...(19): siRNA sense strand
cgaccaucaucaucacugu

SEQ ID NO: 2206538 - RNA, 19 nt, Homo sapiens
  misc_RNA (1)...(19): siRNA sense strand
caucgugaacaucaucaaa

SEQ ID NO: 2206539 - RNA, 19 nt, Homo sapiens
  misc_RNA (1)...(19): siRNA sense strand
gaagguauggcugauguac

SEQ ID NO: 2206540 - RNA, 19 nt, Homo sapiens
  misc_RNA (1)...(19): siRNA sense strand
gugagaagaaggcuaucaa

SEQ ID NO: 2206541 - RNA, 19 nt, Homo sapiens
  misc_RNA (1)...(19): siRNA sense strand
agaagguggugcagaggau

SEQ ID NO: 2206542 - RNA, 19 nt, Homo sapiens
  misc_RNA (1)...(19): siRNA sense strand
cggugacgaugaagaggaa

SEQ ID NO: 2206543 - RNA, 19 nt, Homo sapiens
  misc_RNA (1)...(19): siRNA sense strand
agcacaagcuggagaccaa

SEQ ID NO: 2206544 - RNA, 19 nt, Homo sapiens
  misc_RNA (1)...(19): siRNA sense strand
gaggguugcagccgagaga

SEQ ID NO: 2206545 - RNA, 19 nt, Homo sapiens
  misc_RNA (1)...(19): siRNA sense strand
ggacaagcucagccgcaau

SEQ ID NO: 2206546 - RNA, 19 nt, Homo sapiens
  misc_RNA (1)...(19): siRNA sense strand
ucaaagcccggaaccucaa

SEQ ID NO: 2206547 - RNA, 19 nt, Homo sapiens
  misc_RNA (1)...(19): siRNA sense strand
cgaugaagaggaaccugaa

SEQ ID NO: 2206548 - RNA, 19 nt, Homo sapiens
  misc_RNA (1)...(19): siRNA sense strand
acgagaccuuccucuuuga

SEQ ID NO: 2206549 - RNA, 19 nt, Homo sapiens
  misc_RNA (1)...(19): siRNA sense strand
ccucaaagccauggacauc

SEQ ID NO: 2206550 - RNA, 19 nt, Homo sapiens
  misc_RNA (1)...(19): siRNA sense strand
gauccucuaccuccaaguc

SEQ ID NO: 2206551 - RNA, 19 nt, Homo sapiens
  misc_RNA (1)...(19): siRNA sense strand
gggagacgaccaucaucau

SEQ ID NO: 2206552 - RNA, 19 nt, Homo sapiens
  misc_RNA (1)...(19): siRNA sense strand
guccuucgccuucgauauc

SEQ ID NO: 2206553 - RNA, 19 nt, Homo sapiens
  misc_RNA (1)...(19): siRNA sense strand
gacaagcggguggagaaga

SEQ ID NO: 2206554 - RNA, 19 nt, Homo sapiens
  misc_RNA (1)...(19): siRNA sense strand
uauggcugauguacaagga

SEQ ID NO: 2206555 - RNA, 19 nt, Homo sapiens
  misc_RNA (1)...(19): siRNA sense strand
caaagcccggaaccucaaa

SEQ ID NO: 2206556 - RNA, 19 nt, Homo sapiens
  misc_RNA (1)...(19): siRNA sense strand
gagggaaggcggugaacac

SEQ ID NO: 2206557 - RNA, 19 nt, Homo sapiens
  misc_RNA (1)...(19): siRNA sense strand
ugagggagacgaccaucau

SEQ ID NO: 2206558 - RNA, 19 nt, Homo sapiens
  misc_RNA (1)...(19): siRNA sense strand
gaacgagaccuuccucuuu

SEQ ID NO: 2206559 - RNA, 19 nt, Homo sapiens
  misc_RNA (1)...(19): siRNA sense strand
ggcaaacgcuacaagaauu

SEQ ID NO: 2206560 - RNA, 19 nt, Homo sapiens
  misc_RNA (1)...(19): siRNA sense strand
agaagacggugacgaugaa

SEQ ID NO: 2206561 - RNA, 19 nt, Homo sapiens
  misc_RNA (1)...(19): siRNA sense strand
gcagugagaagaaggcuau

SEQ ID NO: 2206562 - RNA, 19 nt, Homo sapiens
  misc_RNA (1)...(19): siRNA sense strand
gcacuggaaggacaugauu

SEQ ID NO: 2206563 - RNA, 19 nt, Homo sapiens
  misc_RNA (1)...(19): siRNA sense strand
gggcaaacgcuacaagaau

SEQ ID NO: 2206564 - RNA, 19 nt, Homo sapiens
  misc_RNA (1)...(19): siRNA sense strand
gugaagguauggcugaugu

SEQ ID NO: 2206565 - RNA, 19 nt, Homo sapiens
  misc_RNA (1)...(19): siRNA sense strand
acaagcggguggagaagaa

SEQ ID NO: 2206566 - RNA, 19 nt, Homo sapiens
  misc_RNA (1)...(19): siRNA sense strand
aacgagaccuuccucuuug

SEQ ID NO: 2206567 - RNA, 19 nt, Homo sapiens
  misc_RNA (1)...(19): siRNA sense strand
gcuggucucugccaucauc

SEQ ID NO: 2206568 - RNA, 19 nt, Homo sapiens
  misc_RNA (1)...(19): siRNA sense strand
gagacgaccaucaucauca

SEQ ID NO: 2206569 - RNA, 19 nt, Homo sapiens
  misc_RNA (1)...(19): siRNA sense strand
ucucagaccucgucaacuc

SEQ ID NO: 2206570 - RNA, 19 nt, Homo sapiens
  misc_RNA (1)...(19): siRNA sense strand
gcaaacgcuacaagaauuc

SEQ ID NO: 2206571 - RNA, 19 nt, Homo sapiens
  misc_RNA (1)...(19): siRNA sense strand
ccaacuccaucaucgugaa

SEQ ID NO: 2206572 - RNA, 19 nt, Homo sapiens
  misc_RNA (1)...(19): siRNA sense strand
ugacccagaugcagaccuu

SEQ ID NO: 2206573 - RNA, 19 nt, Homo sapiens
  misc_RNA (1)...(19): siRNA sense strand
agguauggcugauguacaa

SEQ ID NO: 2206574 - RNA, 19 nt, Homo sapiens
  misc_RNA (1)...(19): siRNA sense strand
ccacuggugucagcgcaaa

SEQ ID NO: 2206575 - RNA, 19 nt, Homo sapiens
  misc_RNA (1)...(19): siRNA sense strand
agaucuaccuguccuggaa

SEQ ID NO: 2206576 - RNA, 19 nt, Homo sapiens
  misc_RNA (1)...(19): siRNA sense strand
gacaagcucagccgcaaug

SEQ ID NO: 2206577 - RNA, 19 nt, Homo sapiens
  misc_RNA (1)...(19): siRNA sense strand
agaagaagacggugacgau

SEQ ID NO: 2206578 - RNA, 19 nt, Homo sapiens
  misc_RNA (1)...(19): siRNA sense strand
ggagacgaccaucaucauc

SEQ ID NO: 2206579 - RNA, 19 nt, Homo sapiens
  misc_RNA (1)...(19): siRNA sense strand
aagaagacggugacgauga

SEQ ID NO: 2206580 - RNA, 19 nt, Homo sapiens
  misc_RNA (1)...(19): siRNA sense strand
cgaccaucaucaucacugu

SEQ ID NO: 2206581 - RNA, 19 nt, Homo sapiens
  misc_RNA (1)...(19): siRNA sense strand
caucgugaacaucaucaaa

SEQ ID NO: 2206582 - RNA, 19 nt, Homo sapiens
  misc_RNA (1)...(19): siRNA sense strand
gaagguauggcugauguac

SEQ ID NO: 2206583 - RNA, 19 nt, Homo sapiens
  misc_RNA (1)...(19): siRNA sense strand
gugagaagaaggcuaucaa

SEQ ID NO: 2206584 - RNA, 19 nt, Homo sapiens
  misc_RNA (1)...(19): siRNA sense strand
agaagguggugcagaggau

SEQ ID NO: 2206585 - RNA, 19 nt, Homo sapiens
  misc_RNA (1)...(19): siRNA sense strand
cggugacgaugaagaggaa

SEQ ID NO: 2206586 - RNA, 19 nt, Homo sapiens
  misc_RNA (1)...(19): siRNA sense strand
agcacaagcuggagaccaa

SEQ ID NO: 2206587 - RNA, 19 nt, Homo sapiens
  misc_RNA (1)...(19): siRNA sense strand
gaggguugcagccgagaga

SEQ ID NO: 2206588 - RNA, 19 nt, Homo sapiens
  misc_RNA (1)...(19): siRNA sense strand
ggacaagcucagccgcaau

SEQ ID NO: 2206589 - RNA, 19 nt, Homo sapiens
  misc_RNA (1)...(19): siRNA sense strand
ucaaagcccggaaccucaa

SEQ ID NO: 2206590 - RNA, 19 nt, Homo sapiens
  misc_RNA (1)...(19): siRNA sense strand
cgaugaagaggaaccugaa

SEQ ID NO: 2206591 - RNA, 19 nt, Homo sapiens
  misc_RNA (1)...(19): siRNA sense strand
acgagaccuuccucuuuga

SEQ ID NO: 2206592 - RNA, 19 nt, Homo sapiens
  misc_RNA (1)...(19): siRNA sense strand
ccucaaagccauggacauc

SEQ ID NO: 2206593 - RNA, 19 nt, Homo sapiens
  misc_RNA (1)...(19): siRNA sense strand
gauccucuaccuccaaguc

SEQ ID NO: 2206594 - RNA, 19 nt, Homo sapiens
  misc_RNA (1)...(19): siRNA sense strand
gggagacgaccaucaucau

SEQ ID NO: 2206595 - RNA, 19 nt, Homo sapiens
  misc_RNA (1)...(19): siRNA sense strand
guccuucgccuucgauauc

SEQ ID NO: 2206596 - RNA, 19 nt, Homo sapiens
  misc_RNA (1)...(19): siRNA sense strand
gacaagcggguggagaaga

SEQ ID NO: 2206597 - RNA, 19 nt, Homo sapiens
  misc_RNA (1)...(19): siRNA sense strand
uauggcugauguacaagga

SEQ ID NO: 2206598 - RNA, 19 nt, Homo sapiens
  misc_RNA (1)...(19): siRNA sense strand
caaagcccggaaccucaaa

SEQ ID NO: 2206599 - RNA, 19 nt, Homo sapiens
  misc_RNA (1)...(19): siRNA sense strand
gagggaaggcggugaacac

SEQ ID NO: 2206600 - RNA, 19 nt, Homo sapiens
  misc_RNA (1)...(19): siRNA sense strand
ugagggagacgaccaucau

SEQ ID NO: 2206601 - RNA, 19 nt, Homo sapiens
  misc_RNA (1)...(19): siRNA sense strand
gagaggagcuggacaacau

SEQ ID NO: 2206602 - RNA, 19 nt, Homo sapiens
  misc_RNA (1)...(19): siRNA sense strand
ggagggauuuggucaguuu

SEQ ID NO: 2206603 - RNA, 19 nt, Homo sapiens
  misc_RNA (1)...(19): siRNA sense strand
guacauuaauggacaucua

SEQ ID NO: 2206604 - RNA, 19 nt, Homo sapiens
  misc_RNA (1)...(19): siRNA sense strand
ggagagacguuacgauugg

SEQ ID NO: 2206605 - RNA, 19 nt, Homo sapiens
  misc_RNA (1)...(19): siRNA sense strand
ggaggcauccugcaccuua

SEQ ID NO: 2206606 - RNA, 19 nt, Homo sapiens
  misc_RNA (1)...(19): siRNA sense strand
caagauugccucaguugua

SEQ ID NO: 2206607 - RNA, 19 nt, Homo sapiens
  misc_RNA (1)...(19): siRNA sense strand
guggaugccuugcuggaua

SEQ ID NO: 2206608 - RNA, 19 nt, Homo sapiens
  misc_RNA (1)...(19): siRNA sense strand
cuggagagcuuguggauug

SEQ ID NO: 2206609 - RNA, 19 nt, Homo sapiens
  misc_RNA (1)...(19): siRNA sense strand
ugagaggugucuuugauga

SEQ ID NO: 2206610 - RNA, 19 nt, Homo sapiens
  misc_RNA (1)...(19): siRNA sense strand
caacuuggcacugcuagua

SEQ ID NO: 2206611 - RNA, 19 nt, Homo sapiens
  misc_RNA (1)...(19): siRNA sense strand
ccgaagcccugaagaguug

SEQ ID NO: 2206612 - RNA, 19 nt, Homo sapiens
  misc_RNA (1)...(19): siRNA sense strand
cugcgaauguuccaugaua

SEQ ID NO: 2206613 - RNA, 19 nt, Homo sapiens
  misc_RNA (1)...(19): siRNA sense strand
gaguuuggccacccaguua

SEQ ID NO: 2206614 - RNA, 19 nt, Homo sapiens
  misc_RNA (1)...(19): siRNA sense strand
gacgggagcuccugcgaau

SEQ ID NO: 2206615 - RNA, 19 nt, Homo sapiens
  misc_RNA (1)...(19): siRNA sense strand
gcagucaugucaccagcuu

SEQ ID NO: 2206616 - RNA, 19 nt, Homo sapiens
  misc_RNA (1)...(19): siRNA sense strand
ggagagcuguguggagaga

SEQ ID NO: 2206617 - RNA, 19 nt, Homo sapiens
  misc_RNA (1)...(19): siRNA sense strand
agcaggaagugaucuauaa

SEQ ID NO: 2206618 - RNA, 19 nt, Homo sapiens
  misc_RNA (1)...(19): siRNA sense strand
ucagcauucuccacacuuu

SEQ ID NO: 2206619 - RNA, 19 nt, Homo sapiens
  misc_RNA (1)...(19): siRNA sense strand
caacaucgaccgccuaggu

SEQ ID NO: 2206620 - RNA, 19 nt, Homo sapiens
  misc_RNA (1)...(19): siRNA sense strand
gagaaacgggugcccaaga

SEQ ID NO: 2206621 - RNA, 19 nt, Homo sapiens
  misc_RNA (1)...(19): siRNA sense strand
cccaggaaaucaaggcuuu

SEQ ID NO: 2206622 - RNA, 19 nt, Homo sapiens
  misc_RNA (1)...(19): siRNA sense strand
gaaacgggugcccaagauu

SEQ ID NO: 2206623 - RNA, 19 nt, Homo sapiens
  misc_RNA (1)...(19): siRNA sense strand
ggauaccucuguucagcau

SEQ ID NO: 2206624 - RNA, 19 nt, Homo sapiens
  misc_RNA (1)...(19): siRNA sense strand
agaaacgggugcccaagau

SEQ ID NO: 2206625 - RNA, 19 nt, Homo sapiens
  misc_RNA (1)...(19): siRNA sense strand
gaacagccccugcucuuug

SEQ ID NO: 2206626 - RNA, 19 nt, Homo sapiens
  misc_RNA (1)...(19): siRNA sense strand
guggagagacguuacgauu

SEQ ID NO: 2206627 - RNA, 19 nt, Homo sapiens
  misc_RNA (1)...(19): siRNA sense strand
gcaaguagauggggacaau

SEQ ID NO: 2206628 - RNA, 19 nt, Homo sapiens
  misc_RNA (1)...(19): siRNA sense strand
ccacuugagaggugucuuu

SEQ ID NO: 2206629 - RNA, 19 nt, Homo sapiens
  misc_RNA (1)...(19): siRNA sense strand
caugggcccuugccucaga

SEQ ID NO: 2206630 - RNA, 19 nt, Homo sapiens
  misc_RNA (1)...(19): siRNA sense strand
caggagcugucccaggaaa

SEQ ID NO: 2206631 - RNA, 19 nt, Homo sapiens
  misc_RNA (1)...(19): siRNA sense strand
caggugcugucugaguuua

SEQ ID NO: 2206632 - RNA, 19 nt, Homo sapiens
  misc_RNA (1)...(19): siRNA sense strand
cuacuggcgcucuuaauga

SEQ ID NO: 2206633 - RNA, 19 nt, Homo sapiens
  misc_RNA (1)...(19): siRNA sense strand
gguaauaugcaugaaguau

SEQ ID NO: 2206634 - RNA, 19 nt, Homo sapiens
  misc_RNA (1)...(19): siRNA sense strand
cagcaggaagugaucuaua

SEQ ID NO: 2206635 - RNA, 19 nt, Homo sapiens
  misc_RNA (1)...(19): siRNA sense strand
gcuacuggcgcucuuaaug

SEQ ID NO: 2206636 - RNA, 19 nt, Homo sapiens
  misc_RNA (1)...(19): siRNA sense strand
ugaaguauuuagccaacug

SEQ ID NO: 2206637 - RNA, 19 nt, Homo sapiens
  misc_RNA (1)...(19): siRNA sense strand
gcccaagauugccucaguu

SEQ ID NO: 2206638 - RNA, 19 nt, Homo sapiens
  misc_RNA (1)...(19): siRNA sense strand
gcacauauuggcuccucuu

SEQ ID NO: 2206639 - RNA, 19 nt, Homo sapiens
  misc_RNA (1)...(19): siRNA sense strand
cuugagaggugucuuugau

SEQ ID NO: 2206640 - RNA, 19 nt, Homo sapiens
  misc_RNA (1)...(19): siRNA sense strand
uaaagccacccaaguuugu

SEQ ID NO: 2206641 - RNA, 19 nt, Homo sapiens
  misc_RNA (1)...(19): siRNA sense strand
gcccugaagaguugaguuu

SEQ ID NO: 2206642 - RNA, 19 nt, Homo sapiens
  misc_RNA (1)...(19): siRNA sense strand
gcagcuggcagucauguca

SEQ ID NO: 2206643 - RNA, 19 nt, Homo sapiens
  misc_RNA (1)...(19): siRNA sense strand
cauauuggcuccucuuuuc

SEQ ID NO: 2206644 - RNA, 19 nt, Homo sapiens
  misc_RNA (1)...(19): siRNA sense strand
gcaggugcugucugaguuu

SEQ ID NO: 2206645 - RNA, 19 nt, Homo sapiens
  misc_RNA (1)...(19): siRNA sense strand
ugagccagcugcagcaaca

SEQ ID NO: 2206646 - RNA, 19 nt, Homo sapiens
  misc_RNA (1)...(19): siRNA sense strand
caacugagcagcacguacu

SEQ ID NO: 2206647 - RNA, 19 nt, Homo sapiens
  misc_RNA (1)...(19): siRNA sense strand
ggaugugguucaggaagug

SEQ ID NO: 2206648 - RNA, 19 nt, Homo sapiens
  misc_RNA (1)...(19): siRNA sense strand
caucggccguggcuuaaag

SEQ ID NO: 2206649 - RNA, 19 nt, Homo sapiens
  misc_RNA (1)...(19): siRNA sense strand
agaggugucuuugaugaga

SEQ ID NO: 2206650 - RNA, 19 nt, Homo sapiens
  misc_RNA (1)...(19): siRNA sense strand
ggccugcugucugucuaua

SEQ ID NO: 2206651 - RNA, 19 nt, Homo sapiens
  misc_RNA (1)...(19): siRNA sense strand
aaacgggugcccaagauug

SEQ ID NO: 2206652 - RNA, 19 nt, Homo sapiens
  misc_RNA (1)...(19): siRNA sense strand
agucaucggccguggcuua

SEQ ID NO: 2206653 - RNA, 19 nt, Homo sapiens
  misc_RNA (1)...(19): siRNA sense strand
uacuggcgcucuuaaugaa

SEQ ID NO: 2206654 - RNA, 19 nt, Homo sapiens
  misc_RNA (1)...(19): siRNA sense strand
gcccuugccucagaaguuc

SEQ ID NO: 2206655 - RNA, 19 nt, Homo sapiens
  misc_RNA (1)...(19): siRNA sense strand
cuuaaagccacccaaguuu

SEQ ID NO: 2206656 - RNA, 19 nt, Homo sapiens
  misc_RNA (1)...(19): siRNA sense strand
ggccacgcguacauuaaug

SEQ ID NO: 2206657 - RNA, 19 nt, Homo sapiens
  misc_RNA (1)...(19): siRNA sense strand
auugguagcugcccagaug

SEQ ID NO: 2206658 - RNA, 19 nt, Homo sapiens
  misc_RNA (1)...(19): siRNA sense strand
ggagguggagcuggcagua

SEQ ID NO: 2206659 - RNA, 19 nt, Homo sapiens
  misc_RNA (1)...(19): siRNA sense strand
ggccugggcaccugugauu

SEQ ID NO: 2206660 - RNA, 19 nt, Homo sapiens
  misc_RNA (1)...(19): siRNA sense strand
guucucuccuguggccuua

SEQ ID NO: 2206661 - RNA, 19 nt, Homo sapiens
  misc_RNA (1)...(19): siRNA sense strand
ccuguggccuuaaggacuu

SEQ ID NO: 2206662 - RNA, 19 nt, Homo sapiens
  misc_RNA (1)...(19): siRNA sense strand
gagagacguuacgauugga

SEQ ID NO: 2206663 - RNA, 19 nt, Homo sapiens
  misc_RNA (1)...(19): siRNA sense strand
aagauugccucaguuguag

SEQ ID NO: 2206664 - RNA, 19 nt, Homo sapiens
  misc_RNA (1)...(19): siRNA sense strand
ugaccuugguggagagugu

SEQ ID NO: 2206665 - RNA, 19 nt, Homo sapiens
  misc_RNA (1)...(19): siRNA sense strand
uuaaagccacccaaguuug

SEQ ID NO: 2206666 - RNA, 19 nt, Homo sapiens
  misc_RNA (1)...(19): siRNA sense strand
cgaaaucagcaggaaguga

SEQ ID NO: 2206667 - RNA, 19 nt, Homo sapiens
  misc_RNA (1)...(19): siRNA sense strand
uggguaauaugcaugaagu

SEQ ID NO: 2206668 - RNA, 19 nt, Homo sapiens
  misc_RNA (1)...(19): siRNA sense strand
gggccacgcguacauuaau

SEQ ID NO: 2206669 - RNA, 19 nt, Homo sapiens
  misc_RNA (1)...(19): siRNA sense strand
ggccucagccugucagcuu

SEQ ID NO: 2206670 - RNA, 19 nt, Homo sapiens
  misc_RNA (1)...(19): siRNA sense strand
ccugaagaguugaguuugg

SEQ ID NO: 2206671 - RNA, 19 nt, Homo sapiens
  misc_RNA (1)...(19): siRNA sense strand
caugcucgcuguggucuuc

SEQ ID NO: 2206672 - RNA, 19 nt, Homo sapiens
  misc_RNA (1)...(19): siRNA sense strand
ccucucuccuggccauuug

SEQ ID NO: 2206673 - RNA, 19 nt, Homo sapiens
  misc_RNA (1)...(19): siRNA sense strand
uagggccacgcguacauua

SEQ ID NO: 2206674 - RNA, 19 nt, Homo sapiens
  misc_RNA (1)...(19): siRNA sense strand
gaggcauccugcaccuuag

SEQ ID NO: 2206675 - RNA, 19 nt, Homo sapiens
  misc_RNA (1)...(19): siRNA sense strand
ccucucggcucucauuggu

SEQ ID NO: 2206676 - RNA, 19 nt, Homo sapiens
  misc_RNA (1)...(19): siRNA sense strand
cugcugugcuugaccacuu

SEQ ID NO: 2206677 - RNA, 19 nt, Homo sapiens
  misc_RNA (1)...(19): siRNA sense strand
cccuggaucuccugccauu

SEQ ID NO: 2206678 - RNA, 19 nt, Homo sapiens
  misc_RNA (1)...(19): siRNA sense strand
auaccucuguucagcauuc

SEQ ID NO: 2206679 - RNA, 19 nt, Homo sapiens
  misc_RNA (1)...(19): siRNA sense strand
ggagcugucccaggaaauc

SEQ ID NO: 2206680 - RNA, 19 nt, Homo sapiens
  misc_RNA (1)...(19): siRNA sense strand
cgggagcuccugcgaaugu

SEQ ID NO: 2206681 - RNA, 19 nt, Homo sapiens
  misc_RNA (1)...(19): siRNA sense strand
ggugcugucugaguuuauc

SEQ ID NO: 2206682 - RNA, 19 nt, Homo sapiens
  misc_RNA (1)...(19): siRNA sense strand
gcgcaacuuggcacugcua

SEQ ID NO: 2206683 - RNA, 19 nt, Homo sapiens
  misc_RNA (1)...(19): siRNA sense strand
guucagcauucuccacacu

SEQ ID NO: 2206684 - RNA, 19 nt, Homo sapiens
  misc_RNA (1)...(19): siRNA sense strand
ggcccuugccucagaaguu

SEQ ID NO: 2206685 - RNA, 19 nt, Homo sapiens
  misc_RNA (1)...(19): siRNA sense strand
gcaccuuaguggcugucau

SEQ ID NO: 2206686 - RNA, 19 nt, Homo sapiens
  misc_RNA (1)...(19): siRNA sense strand
gagugugugucccgaugca

SEQ ID NO: 2206687 - RNA, 19 nt, Homo sapiens
  misc_RNA (1)...(19): siRNA sense strand
caggaagugaucuauaaca

SEQ ID NO: 2206688 - RNA, 19 nt, Homo sapiens
  misc_RNA (1)...(19): siRNA sense strand
gcuccucuccugcuacauc

SEQ ID NO: 2206689 - RNA, 19 nt, Homo sapiens
  misc_RNA (1)...(19): siRNA sense strand
ccacgcuacuggcgcucuu

SEQ ID NO: 2206690 - RNA, 19 nt, Homo sapiens
  misc_RNA (1)...(19): siRNA sense strand
ggugcaugcagggacauua

SEQ ID NO: 2206691 - RNA, 19 nt, Homo sapiens
  misc_RNA (1)...(19): siRNA sense strand
uggagagacguuacgauug

SEQ ID NO: 2206692 - RNA, 19 nt, Homo sapiens
  misc_RNA (1)...(19): siRNA sense strand
gggagcuccugcgaauguu

SEQ ID NO: 2206693 - RNA, 19 nt, Homo sapiens
  misc_RNA (1)...(19): siRNA sense strand
gcaggaagugaucuauaac

SEQ ID NO: 2206694 - RNA, 19 nt, Homo sapiens
  misc_RNA (1)...(19): siRNA sense strand
guuuggccacccaguuaua

SEQ ID NO: 2206695 - RNA, 19 nt, Homo sapiens
  misc_RNA (1)...(19): siRNA sense strand
gcccgaagcccugaagagu

SEQ ID NO: 2206696 - RNA, 19 nt, Homo sapiens
  misc_RNA (1)...(19): siRNA sense strand
gaacuuuccuucuccaaga

SEQ ID NO: 2206697 - RNA, 19 nt, Homo sapiens
  misc_RNA (1)...(19): siRNA sense strand
gaauuaaacuucggucaga

SEQ ID NO: 2206698 - RNA, 19 nt, Homo sapiens
  misc_RNA (1)...(19): siRNA sense strand
ggaggaagcucagcccauu

SEQ ID NO: 2206699 - RNA, 19 nt, Homo sapiens
  misc_RNA (1)...(19): siRNA sense strand
guuauuggcugcuuugcua

SEQ ID NO: 2206700 - RNA, 19 nt, Homo sapiens
  misc_RNA (1)...(19): siRNA sense strand
gggagacuaugaucgauuu

SEQ ID NO: 2206701 - RNA, 19 nt, Homo sapiens
  misc_RNA (1)...(19): siRNA sense strand
ggacagagaccgauacuac

SEQ ID NO: 2206702 - RNA, 19 nt, Homo sapiens
  misc_RNA (1)...(19): siRNA sense strand
gagaugaugugccugaauc

SEQ ID NO: 2206703 - RNA, 19 nt, Homo sapiens
  misc_RNA (1)...(19): siRNA sense strand
ggaaagugguggugguugu

SEQ ID NO: 2206704 - RNA, 19 nt, Homo sapiens
  misc_RNA (1)...(19): siRNA sense strand
gagaugaccaggauaguga

SEQ ID NO: 2206705 - RNA, 19 nt, Homo sapiens
  misc_RNA (1)...(19): siRNA sense strand
caacagauacagagacuau

SEQ ID NO: 2206706 - RNA, 19 nt, Homo sapiens
  misc_RNA (1)...(19): siRNA sense strand
gagcaaagaccgcuaugga

SEQ ID NO: 2206707 - RNA, 19 nt, Homo sapiens
  misc_RNA (1)...(19): siRNA sense strand
ggaagaagaggcuggaguu

SEQ ID NO: 2206708 - RNA, 19 nt, Homo sapiens
  misc_RNA (1)...(19): siRNA sense strand
ugaauucucuuacgguuuc

SEQ ID NO: 2206709 - RNA, 19 nt, Homo sapiens
  misc_RNA (1)...(19): siRNA sense strand
ggacaaaucgccgaaacaa

SEQ ID NO: 2206710 - RNA, 19 nt, Homo sapiens
  misc_RNA (1)...(19): siRNA sense strand
ggaggaggaucaaacucuu

SEQ ID NO: 2206711 - RNA, 19 nt, Homo sapiens
  misc_RNA (1)...(19): siRNA sense strand
caacuucucuuugccugaa

SEQ ID NO: 2206712 - RNA, 19 nt, Homo sapiens
  misc_RNA (1)...(19): siRNA sense strand
ugaugugccugaaucuaua

SEQ ID NO: 2206713 - RNA, 19 nt, Homo sapiens
  misc_RNA (1)...(19): siRNA sense strand
cgaguuggguggucuguug

SEQ ID NO: 2206714 - RNA, 19 nt, Homo sapiens
  misc_RNA (1)...(19): siRNA sense strand
ggaacuuuauucuugauca

SEQ ID NO: 2206715 - RNA, 19 nt, Homo sapiens
  misc_RNA (1)...(19): siRNA sense strand
gaggaagauuggaagaaga

SEQ ID NO: 2206716 - RNA, 19 nt, Homo sapiens
  misc_RNA (1)...(19): siRNA sense strand
acagauacagagacuauua

SEQ ID NO: 2206717 - RNA, 19 nt, Homo sapiens
  misc_RNA (1)...(19): siRNA sense strand
agacugugcucaaucaaau

SEQ ID NO: 2206718 - RNA, 19 nt, Homo sapiens
  misc_RNA (1)...(19): siRNA sense strand
gauacuacaggaauuacua

SEQ ID NO: 2206719 - RNA, 19 nt, Homo sapiens
  misc_RNA (1)...(19): siRNA sense strand
gaugaaagccaacuucucu

SEQ ID NO: 2206720 - RNA, 19 nt, Homo sapiens
  misc_RNA (1)...(19): siRNA sense strand
cagaagaguuuguguucau

SEQ ID NO: 2206721 - RNA, 19 nt, Homo sapiens
  misc_RNA (1)...(19): siRNA sense strand
ggaaguagagggagaugau

SEQ ID NO: 2206722 - RNA, 19 nt, Homo sapiens
  misc_RNA (1)...(19): siRNA sense strand
gaacauggccgagcuuacu

SEQ ID NO: 2206723 - RNA, 19 nt, Homo sapiens
  misc_RNA (1)...(19): siRNA sense strand
uggccgagcuuacuaugaa

SEQ ID NO: 2206724 - RNA, 19 nt, Homo sapiens
  misc_RNA (1)...(19): siRNA sense strand
ggaucaaacucuugugaac

SEQ ID NO: 2206725 - RNA, 19 nt, Homo sapiens
  misc_RNA (1)...(19): siRNA sense strand
auacagagacuauuacaga

SEQ ID NO: 2206726 - RNA, 19 nt, Homo sapiens
  misc_RNA (1)...(19): siRNA sense strand
ggacuacccggaucuggaa

SEQ ID NO: 2206727 - RNA, 19 nt, Homo sapiens
  misc_RNA (1)...(19): siRNA sense strand
cccagaaucucccaaugaa

SEQ ID NO: 2206728 - RNA, 19 nt, Homo sapiens
  misc_RNA (1)...(19): siRNA sense strand
gaccgauacuacaggaauu

SEQ ID NO: 2206729 - RNA, 19 nt, Homo sapiens
  misc_RNA (1)...(19): siRNA sense strand
cuauaaugcuggagaugaa

SEQ ID NO: 2206730 - RNA, 19 nt, Homo sapiens
  misc_RNA (1)...(19): siRNA sense strand
gaguuuguguucauucaug

SEQ ID NO: 2206731 - RNA, 19 nt, Homo sapiens
  misc_RNA (1)...(19): siRNA sense strand
uggaugaggugacauaugg

SEQ ID NO: 2206732 - RNA, 19 nt, Homo sapiens
  misc_RNA (1)...(19): siRNA sense strand
ccaagaccauagaggaaug

SEQ ID NO: 2206733 - RNA, 19 nt, Homo sapiens
  misc_RNA (1)...(19): siRNA sense strand
cagagacuauuacagacaa

SEQ ID NO: 2206734 - RNA, 19 nt, Homo sapiens
  misc_RNA (1)...(19): siRNA sense strand
agaggaacuuuauucuuga

SEQ ID NO: 2206735 - RNA, 19 nt, Homo sapiens
  misc_RNA (1)...(19): siRNA sense strand
gguaaaugguggcgaagag

SEQ ID NO: 2206736 - RNA, 19 nt, Homo sapiens
  misc_RNA (1)...(19): siRNA sense strand
gaccuucucucggaaagug

SEQ ID NO: 2206737 - RNA, 19 nt, Homo sapiens
  misc_RNA (1)...(19): siRNA sense strand
ggcggaagcuauugcuguu

SEQ ID NO: 2206738 - RNA, 19 nt, Homo sapiens
  misc_RNA (1)...(19): siRNA sense strand
gugaagcggcugaaaguga

SEQ ID NO: 2206739 - RNA, 19 nt, Homo sapiens
  misc_RNA (1)...(19): siRNA sense strand
gaggaucaaacucuuguga

SEQ ID NO: 2206740 - RNA, 19 nt, Homo sapiens
  misc_RNA (1)...(19): siRNA sense strand
ucaaucaaaugaggaugaa

SEQ ID NO: 2206741 - RNA, 19 nt, Homo sapiens
  misc_RNA (1)...(19): siRNA sense strand
guccacagcuuggugaaga

SEQ ID NO: 2206742 - RNA, 19 nt, Homo sapiens
  misc_RNA (1)...(19): siRNA sense strand
caagagggaggaagacgaa

SEQ ID NO: 2206743 - RNA, 19 nt, Homo sapiens
  misc_RNA (1)...(19): siRNA sense strand
gcaaagguaacccagaauc

SEQ ID NO: 2206744 - RNA, 19 nt, Homo sapiens
  misc_RNA (1)...(19): siRNA sense strand
guacuuacggagugacaaa

SEQ ID NO: 2206745 - RNA, 19 nt, Homo sapiens
  misc_RNA (1)...(19): siRNA sense strand
ggagaugaaagccaacuuc

SEQ ID NO: 2206746 - RNA, 19 nt, Homo sapiens
  misc_RNA (1)...(19): siRNA sense strand
agaagaggcuggaguugag

SEQ ID NO: 2206747 - RNA, 19 nt, Homo sapiens
  misc_RNA (1)...(19): siRNA sense strand
gaacuuuauucuugaucag

SEQ ID NO: 2206748 - RNA, 19 nt, Homo sapiens
  misc_RNA (1)...(19): siRNA sense strand
aggcaaagguaacccagaa

SEQ ID NO: 2206749 - RNA, 19 nt, Homo sapiens
  misc_RNA (1)...(19): siRNA sense strand
gaauggagaagaccuaggu

SEQ ID NO: 2206750 - RNA, 19 nt, Homo sapiens
  misc_RNA (1)...(19): siRNA sense strand
gaagaagaggcuggaguug

SEQ ID NO: 2206751 - RNA, 19 nt, Homo sapiens
  misc_RNA (1)...(19): siRNA sense strand
gagacugugcucaaucaaa

SEQ ID NO: 2206752 - RNA, 19 nt, Homo sapiens
  misc_RNA (1)...(19): siRNA sense strand
gguguggcauucuggauca

SEQ ID NO: 2206753 - RNA, 19 nt, Homo sapiens
  misc_RNA (1)...(19): siRNA sense strand
acagggagaugaccaggau

SEQ ID NO: 2206754 - RNA, 19 nt, Homo sapiens
  misc_RNA (1)...(19): siRNA sense strand
gggauuggcagaguuacua

SEQ ID NO: 2206755 - RNA, 19 nt, Homo sapiens
  misc_RNA (1)...(19): siRNA sense strand
caagaauggagaagaccua

SEQ ID NO: 2206756 - RNA, 19 nt, Homo sapiens
  misc_RNA (1)...(19): siRNA sense strand
gauuaugaguacaacagau

SEQ ID NO: 2206757 - RNA, 19 nt, Homo sapiens
  misc_RNA (1)...(19): siRNA sense strand
gaggaacuuuauucuugau

SEQ ID NO: 2206758 - RNA, 19 nt, Homo sapiens
  misc_RNA (1)...(19): siRNA sense strand
agaggaaugugaggugauu

SEQ ID NO: 2206759 - RNA, 19 nt, Homo sapiens
  misc_RNA (1)...(19): siRNA sense strand
cagaaucucccaaugaaag

SEQ ID NO: 2206760 - RNA, 19 nt, Homo sapiens
  misc_RNA (1)...(19): siRNA sense strand
ugaggaagauuggaagaag

SEQ ID NO: 2206761 - RNA, 19 nt, Homo sapiens
  misc_RNA (1)...(19): siRNA sense strand
cggaagcuauugcuguuca

SEQ ID NO: 2206762 - RNA, 19 nt, Homo sapiens
  misc_RNA (1)...(19): siRNA sense strand
gaagcucagcccauuguca

SEQ ID NO: 2206763 - RNA, 19 nt, Homo sapiens
  misc_RNA (1)...(19): siRNA sense strand
ccagaagaguuuguguuca

SEQ ID NO: 2206764 - RNA, 19 nt, Homo sapiens
  misc_RNA (1)...(19): siRNA sense strand
gguugucccuaaugaggaa

SEQ ID NO: 2206765 - RNA, 19 nt, Homo sapiens
  misc_RNA (1)...(19): siRNA sense strand
gaagaguuuguguucauuc

SEQ ID NO: 2206766 - RNA, 19 nt, Homo sapiens
  misc_RNA (1)...(19): siRNA sense strand
gaucugcauuuucaaguga

SEQ ID NO: 2206767 - RNA, 19 nt, Homo sapiens
  misc_RNA (1)...(19): siRNA sense strand
gggaugagaaggaugaaca

SEQ ID NO: 2206768 - RNA, 19 nt, Homo sapiens
  misc_RNA (1)...(19): siRNA sense strand
ggaagcuauugcuguucaa

SEQ ID NO: 2206769 - RNA, 19 nt, Homo sapiens
  misc_RNA (1)...(19): siRNA sense strand
ggagaugaccaggauagug

SEQ ID NO: 2206770 - RNA, 19 nt, Homo sapiens
  misc_RNA (1)...(19): siRNA sense strand
agaccuagguguggcauuc

SEQ ID NO: 2206771 - RNA, 19 nt, Homo sapiens
  misc_RNA (1)...(19): siRNA sense strand
agaagaguuuguguucauu

SEQ ID NO: 2206772 - RNA, 19 nt, Homo sapiens
  misc_RNA (1)...(19): siRNA sense strand
uugugaaccuggacacgua

SEQ ID NO: 2206773 - RNA, 19 nt, Homo sapiens
  misc_RNA (1)...(19): siRNA sense strand
gaugaugugccugaaucua

SEQ ID NO: 2206774 - RNA, 19 nt, Homo sapiens
  misc_RNA (1)...(19): siRNA sense strand
uaaagagacagcgggauga

SEQ ID NO: 2206775 - RNA, 19 nt, Homo sapiens
  misc_RNA (1)...(19): siRNA sense strand
agagacagcgggaugagaa

SEQ ID NO: 2206776 - RNA, 19 nt, Homo sapiens
  misc_RNA (1)...(19): siRNA sense strand
aaugugaggugauucugau

SEQ ID NO: 2206777 - RNA, 19 nt, Homo sapiens
  misc_RNA (1)...(19): siRNA sense strand
gaugugccugaaucuauaa

SEQ ID NO: 2206778 - RNA, 19 nt, Homo sapiens
  misc_RNA (1)...(19): siRNA sense strand
cuaaugaggaagauuggaa

SEQ ID NO: 2206779 - RNA, 19 nt, Homo sapiens
  misc_RNA (1)...(19): siRNA sense strand
acaaggaggaggcaaggaa

SEQ ID NO: 2206780 - RNA, 19 nt, Homo sapiens
  misc_RNA (1)...(19): siRNA sense strand
gagauuaugaguacaacag

SEQ ID NO: 2206781 - RNA, 19 nt, Homo sapiens
  misc_RNA (1)...(19): siRNA sense strand
uaccguaauuucuaugauc

SEQ ID NO: 2206782 - RNA, 19 nt, Homo sapiens
  misc_RNA (1)...(19): siRNA sense strand
gaauuuggccagacuuuug

SEQ ID NO: 2206783 - RNA, 19 nt, Homo sapiens
  misc_RNA (1)...(19): siRNA sense strand
gcucagcccauugucacua

SEQ ID NO: 2206784 - RNA, 19 nt, Homo sapiens
  misc_RNA (1)...(19): siRNA sense strand
uaccacagccgcucaaagu

SEQ ID NO: 2206785 - RNA, 19 nt, Homo sapiens
  misc_RNA (1)...(19): siRNA sense strand
ggagaugaugugccugaau

SEQ ID NO: 2206786 - RNA, 19 nt, Homo sapiens
  misc_RNA (1)...(19): siRNA sense strand
gguggugguugucccuaau

SEQ ID NO: 2206787 - RNA, 19 nt, Homo sapiens
  misc_RNA (1)...(19): siRNA sense strand
ggacgaggaggaggacgaa

SEQ ID NO: 2206788 - RNA, 19 nt, Homo sapiens
  misc_RNA (1)...(19): siRNA sense strand
agaaaacccugagaaaaga

SEQ ID NO: 2206789 - RNA, 19 nt, Homo sapiens
  misc_RNA (1)...(19): siRNA sense strand
caaaagaaaacccugagaa

SEQ ID NO: 2206790 - RNA, 19 nt, Homo sapiens
  misc_RNA (1)...(19): siRNA sense strand
gaggaggaucaaacucuug

SEQ ID NO: 2206791 - RNA, 19 nt, Homo sapiens
  misc_RNA (1)...(19): siRNA sense strand
gcggacaaaucgccgaaac

SEQ ID NO: 2206792 - RNA, 19 nt, Homo sapiens
  misc_RNA (1)...(19): siRNA sense strand
gaaguagagggagaugaug

SEQ ID NO: 2206793 - RNA, 19 nt, Homo sapiens
  misc_RNA (1)...(19): siRNA sense strand
cuugaucaguguaaugugu

SEQ ID NO: 2206794 - RNA, 19 nt, Homo sapiens
  misc_RNA (1)...(19): siRNA sense strand
gauguuauuggcugcuuug

SEQ ID NO: 2206795 - RNA, 19 nt, Homo sapiens
  misc_RNA (1)...(19): siRNA sense strand
caaagguaacccagaaucu

SEQ ID NO: 2206796 - RNA, 19 nt, Homo sapiens
  misc_RNA (1)...(19): siRNA sense strand
ccacagagccaggaaauaa

SEQ ID NO: 2206797 - RNA, 19 nt, Homo sapiens
  misc_RNA (1)...(19): siRNA sense strand
gggaagagccagucagaaa

SEQ ID NO: 2206798 - RNA, 19 nt, Homo sapiens
  misc_RNA (1)...(19): siRNA sense strand
gaagagccagucagaaaga

SEQ ID NO: 2206799 - RNA, 19 nt, Homo sapiens
  misc_RNA (1)...(19): siRNA sense strand
gaccugagcccuucugaga

SEQ ID NO: 2206800 - RNA, 19 nt, Homo sapiens
  misc_RNA (1)...(19): siRNA sense strand
cgaagcagcaggugucuug

SEQ ID NO: 2206801 - RNA, 19 nt, Homo sapiens
  misc_RNA (1)...(19): siRNA sense strand
gcaaggacucacccaaaga

SEQ ID NO: 2206802 - RNA, 19 nt, Homo sapiens
  misc_RNA (1)...(19): siRNA sense strand
cagcaaggacucacccaaa

SEQ ID NO: 2206803 - RNA, 19 nt, Homo sapiens
  misc_RNA (1)...(19): siRNA sense strand
ggaagagccagucagaaag

SEQ ID NO: 2206804 - RNA, 19 nt, Homo sapiens
  misc_RNA (1)...(19): siRNA sense strand
aaaagggaauggaguguaa

SEQ ID NO: 2206805 - RNA, 19 nt, Homo sapiens
  misc_RNA (1)...(19): siRNA sense strand
gaaaagaggcagaccuaug

SEQ ID NO: 2206806 - RNA, 19 nt, Homo sapiens
  misc_RNA (1)...(19): siRNA sense strand
cccagacgcugccagaaug

SEQ ID NO: 2206807 - RNA, 19 nt, Homo sapiens
  misc_RNA (1)...(19): siRNA sense strand
uaacccaucccucccuaaa

SEQ ID NO: 2206808 - RNA, 19 nt, Homo sapiens
  misc_RNA (1)...(19): siRNA sense strand
cgaaaucgucguucuccuu

SEQ ID NO: 2206809 - RNA, 19 nt, Homo sapiens
  misc_RNA (1)...(19): siRNA sense strand
cagaaugccagccgaaauc

SEQ ID NO: 2206810 - RNA, 19 nt, Homo sapiens
  misc_RNA (1)...(19): siRNA sense strand
gcuucgaggugacgcugaa

SEQ ID NO: 2206811 - RNA, 19 nt, Homo sapiens
  misc_RNA (1)...(19): siRNA sense strand
aggcagaccuaugaccaaa

SEQ ID NO: 2206812 - RNA, 19 nt, Homo sapiens
  misc_RNA (1)...(19): siRNA sense strand
aaaagaggcagaccuauga

SEQ ID NO: 2206813 - RNA, 19 nt, Homo sapiens
  misc_RNA (1)...(19): siRNA sense strand
ccagaaugccagccgaaau

SEQ ID NO: 2206814 - RNA, 19 nt, Homo sapiens
  misc_RNA (1)...(19): siRNA sense strand
acagcucgcucgcacaucu

SEQ ID NO: 2206815 - RNA, 19 nt, Homo sapiens
  misc_RNA (1)...(19): siRNA sense strand
acagagccaggaaauaaga

SEQ ID NO: 2206816 - RNA, 19 nt, Homo sapiens
  misc_RNA (1)...(19): siRNA sense strand
gaggcagaccuaugaccaa

SEQ ID NO: 2206817 - RNA, 19 nt, Homo sapiens
  misc_RNA (1)...(19): siRNA sense strand
cagccgagguccgacacuu

SEQ ID NO: 2206818 - RNA, 19 nt, Homo sapiens
  misc_RNA (1)...(19): siRNA sense strand
cagccgaaaucgucguucu

SEQ ID NO: 2206819 - RNA, 19 nt, Homo sapiens
  misc_RNA (1)...(19): siRNA sense strand
gcuagaggcaggcagugau

SEQ ID NO: 2206820 - RNA, 19 nt, Homo sapiens
  misc_RNA (1)...(19): siRNA sense strand
agcaaggacucacccaaag

SEQ ID NO: 2206821 - RNA, 19 nt, Homo sapiens
  misc_RNA (1)...(19): siRNA sense strand
cagaauccagcaccacugu

SEQ ID NO: 2206822 - RNA, 19 nt, Homo sapiens
  misc_RNA (1)...(19): siRNA sense strand
gccacagagccaggaaaua

SEQ ID NO: 2206823 - RNA, 19 nt, Homo sapiens
  misc_RNA (1)...(19): siRNA sense strand
cauggugguggccguaauu

SEQ ID NO: 2206824 - RNA, 19 nt, Homo sapiens
  misc_RNA (1)...(19): siRNA sense strand
ggagaaggcuggccguaga

SEQ ID NO: 2206825 - RNA, 19 nt, Homo sapiens
  misc_RNA (1)...(19): siRNA sense strand
ccaaggcgcugcuggaaga

SEQ ID NO: 2206826 - RNA, 19 nt, Homo sapiens
  misc_RNA (1)...(19): siRNA sense strand
ggcaggagcuggaggagaa

SEQ ID NO: 2206827 - RNA, 19 nt, Homo sapiens
  misc_RNA (1)...(19): siRNA sense strand
gggaggagguggcacaguu

SEQ ID NO: 2206828 - RNA, 19 nt, Homo sapiens
  misc_RNA (1)...(19): siRNA sense strand
gggaccggcuggagcauuu

SEQ ID NO: 2206829 - RNA, 19 nt, Homo sapiens
  misc_RNA (1)...(19): siRNA sense strand
gagcgucaguacaguguga

SEQ ID NO: 2206830 - RNA, 19 nt, Homo sapiens
  misc_RNA (1)...(19): siRNA sense strand
cagaaugugcggcuuauug

SEQ ID NO: 2206831 - RNA, 19 nt, Homo sapiens
  misc_RNA (1)...(19): siRNA sense strand
ccucagggcuugguucaga

SEQ ID NO: 2206832 - RNA, 19 nt, Homo sapiens
  misc_RNA (1)...(19): siRNA sense strand
gauuugacccucucucaga

SEQ ID NO: 2206833 - RNA, 19 nt, Homo sapiens
  misc_RNA (1)...(19): siRNA sense strand
gguaucccgugcaguguga

SEQ ID NO: 2206834 - RNA, 19 nt, Homo sapiens
  misc_RNA (1)...(19): siRNA sense strand
gagagaggacccuguucuu

SEQ ID NO: 2206835 - RNA, 19 nt, Homo sapiens
  misc_RNA (1)...(19): siRNA sense strand
ggguuuggaggccgaaaua

SEQ ID NO: 2206836 - RNA, 19 nt, Homo sapiens
  misc_RNA (1)...(19): siRNA sense strand
gcaaggaggaggcgcugau

SEQ ID NO: 2206837 - RNA, 19 nt, Homo sapiens
  misc_RNA (1)...(19): siRNA sense strand
ggaggagguggcacaguug

SEQ ID NO: 2206838 - RNA, 19 nt, Homo sapiens
  misc_RNA (1)...(19): siRNA sense strand
uggcagagaaggcagcuuu

SEQ ID NO: 2206839 - RNA, 19 nt, Homo sapiens
  misc_RNA (1)...(19): siRNA sense strand
agaaugugcggcuuauuga

SEQ ID NO: 2206840 - RNA, 19 nt, Homo sapiens
  misc_RNA (1)...(19): siRNA sense strand
aaagccagcaccagaggua

SEQ ID NO: 2206841 - RNA, 19 nt, Homo sapiens
  misc_RNA (1)...(19): siRNA sense strand
agaagucugugcuggagau

SEQ ID NO: 2206842 - RNA, 19 nt, Homo sapiens
  misc_RNA (1)...(19): siRNA sense strand
gagguggagcgcaguguga

SEQ ID NO: 2206843 - RNA, 19 nt, Homo sapiens
  misc_RNA (1)...(19): siRNA sense strand
aggccgaggugcaggguuu

SEQ ID NO: 2206844 - RNA, 19 nt, Homo sapiens
  misc_RNA (1)...(19): siRNA sense strand
uggcacaguugaggagaaa

SEQ ID NO: 2206845 - RNA, 19 nt, Homo sapiens
  misc_RNA (1)...(19): siRNA sense strand
agucugugcuggagauuca

SEQ ID NO: 2206846 - RNA, 19 nt, Homo sapiens
  misc_RNA (1)...(19): siRNA sense strand
aggccgagcugcugcuaga

SEQ ID NO: 2206847 - RNA, 19 nt, Homo sapiens
  misc_RNA (1)...(19): siRNA sense strand
gcaccgggaacucuucauc

SEQ ID NO: 2206848 - RNA, 19 nt, Homo sapiens
  misc_RNA (1)...(19): siRNA sense strand
ccaccuggcuauugcuaac

SEQ ID NO: 2206849 - RNA, 19 nt, Homo sapiens
  misc_RNA (1)...(19): siRNA sense strand
aggcggagcuggagaaagc

SEQ ID NO: 2206850 - RNA, 19 nt, Homo sapiens
  misc_RNA (1)...(19): siRNA sense strand
gaggagguggcacaguuga

SEQ ID NO: 2206851 - RNA, 19 nt, Homo sapiens
  misc_RNA (1)...(19): siRNA sense strand
ccccagaccuccagacauu

SEQ ID NO: 2206852 - RNA, 19 nt, Homo sapiens
  misc_RNA (1)...(19): siRNA sense strand
gggauuugacccucucuca

SEQ ID NO: 2206853 - RNA, 19 nt, Homo sapiens
  misc_RNA (1)...(19): siRNA sense strand
cuccagacauugggauuug

SEQ ID NO: 2206854 - RNA, 19 nt, Homo sapiens
  misc_RNA (1)...(19): siRNA sense strand
augcggagcuggacucucu

SEQ ID NO: 2206855 - RNA, 19 nt, Homo sapiens
  misc_RNA (1)...(19): siRNA sense strand
ggagucugcgucccaggaa

SEQ ID NO: 2206856 - RNA, 19 nt, Homo sapiens
  misc_RNA (1)...(19): siRNA sense strand
cugaggcccuuggagauga

SEQ ID NO: 2206857 - RNA, 19 nt, Homo sapiens
  misc_RNA (1)...(19): siRNA sense strand
gcacaguugaggagaaagg

SEQ ID NO: 2206858 - RNA, 19 nt, Homo sapiens
  misc_RNA (1)...(19): siRNA sense strand
gacaagcagaggccagaga

SEQ ID NO: 2206859 - RNA, 19 nt, Homo sapiens
  misc_RNA (1)...(19): siRNA sense strand
gacccucucucagaagaag

SEQ ID NO: 2206860 - RNA, 19 nt, Homo sapiens
  misc_RNA (1)...(19): siRNA sense strand
gaaggccgagcugcugcua

SEQ ID NO: 2206861 - RNA, 19 nt, Homo sapiens
  misc_RNA (1)...(19): siRNA sense strand
aaccacagcagaagucaga

SEQ ID NO: 2206862 - RNA, 19 nt, Homo sapiens
  misc_RNA (1)...(19): siRNA sense strand
uuuggaggccgaaauaaga

SEQ ID NO: 2206863 - RNA, 19 nt, Homo sapiens
  misc_RNA (1)...(19): siRNA sense strand
ccuuggagaugagcuggaa

SEQ ID NO: 2206864 - RNA, 19 nt, Homo sapiens
  misc_RNA (1)...(19): siRNA sense strand
gagaaggcuggccguagau

SEQ ID NO: 2206865 - RNA, 19 nt, Homo sapiens
  misc_RNA (1)...(19): siRNA sense strand
ggcccaggcucagagacuu

SEQ ID NO: 2206866 - RNA, 19 nt, Homo sapiens
  misc_RNA (1)...(19): siRNA sense strand
cgagagaggacccuguucu

SEQ ID NO: 2206867 - RNA, 19 nt, Homo sapiens
  misc_RNA (1)...(19): siRNA sense strand
gcugaggcccuuggagaug

SEQ ID NO: 2206868 - RNA, 19 nt, Homo sapiens
  misc_RNA (1)...(19): siRNA sense strand
guggcacaguugaggagaa

SEQ ID NO: 2206869 - RNA, 19 nt, Homo sapiens
  misc_RNA (1)...(19): siRNA sense strand
cgaggcaucagcugagugu

SEQ ID NO: 2206870 - RNA, 19 nt, Homo sapiens
  misc_RNA (1)...(19): siRNA sense strand
agaggacccuguucuucca

SEQ ID NO: 2206871 - RNA, 19 nt, Homo sapiens
  misc_RNA (1)...(19): siRNA sense strand
gcgcugauggagcucaaga

SEQ ID NO: 2206872 - RNA, 19 nt, Homo sapiens
  misc_RNA (1)...(19): siRNA sense strand
gcagcuggaaggcguucuu

SEQ ID NO: 2206873 - RNA, 19 nt, Homo sapiens
  misc_RNA (1)...(19): siRNA sense strand
cgaugcugguggcagagaa

SEQ ID NO: 2206874 - RNA, 19 nt, Homo sapiens
  misc_RNA (1)...(19): siRNA sense strand
gcagggagaugcugaagga

SEQ ID NO: 2206875 - RNA, 19 nt, Homo sapiens
  misc_RNA (1)...(19): siRNA sense strand
ggaaccagcuggcagagaa

SEQ ID NO: 2206876 - RNA, 19 nt, Homo sapiens
  misc_RNA (1)...(19): siRNA sense strand
caacacagccucuacagaa

SEQ ID NO: 2206877 - RNA, 19 nt, Homo sapiens
  misc_RNA (1)...(19): siRNA sense strand
gcagagagaugacuuugag

SEQ ID NO: 2206878 - RNA, 19 nt, Homo sapiens
  misc_RNA (1)...(19): siRNA sense strand
gaaccauccuuucuucgaa

SEQ ID NO: 2206879 - RNA, 19 nt, Homo sapiens
  misc_RNA (1)...(19): siRNA sense strand
caacuucaaccaccuagua

SEQ ID NO: 2206880 - RNA, 19 nt, Homo sapiens
  misc_RNA (1)...(19): siRNA sense strand
gaagagaagggccgaguug

SEQ ID NO: 2206881 - RNA, 19 nt, Homo sapiens
  misc_RNA (1)...(19): siRNA sense strand
caaggacccuggcaucuca

SEQ ID NO: 2206882 - RNA, 19 nt, Homo sapiens
  misc_RNA (1)...(19): siRNA sense strand
gaacuccaucgauguguuu

SEQ ID NO: 2206883 - RNA, 19 nt, Homo sapiens
  misc_RNA (1)...(19): siRNA sense strand
uaucaaaggugaaagaacu

SEQ ID NO: 2206884 - RNA, 19 nt, Homo sapiens
  misc_RNA (1)...(19): siRNA sense strand
caaggaggcuuacgacaac

SEQ ID NO: 2206885 - RNA, 19 nt, Homo sapiens
  misc_RNA (1)...(19): siRNA sense strand
gcacagcccugggaguaca

SEQ ID NO: 2206886 - RNA, 19 nt, Homo sapiens
  misc_RNA (1)...(19): siRNA sense strand
ggaccugccacgcaucuuu

SEQ ID NO: 2206887 - RNA, 19 nt, Homo sapiens
  misc_RNA (1)...(19): siRNA sense strand
gagggacacugggcagauu

SEQ ID NO: 2206888 - RNA, 19 nt, Homo sapiens
  misc_RNA (1)...(19): siRNA sense strand
guccuggccucugauguua

SEQ ID NO: 2206889 - RNA, 19 nt, Homo sapiens
  misc_RNA (1)...(19): siRNA sense strand
gguagcaggugccaagauc

SEQ ID NO: 2206890 - RNA, 19 nt, Homo sapiens
  misc_RNA (1)...(19): siRNA sense strand
ucagcugggugaaugauga

SEQ ID NO: 2206891 - RNA, 19 nt, Homo sapiens
  misc_RNA (1)...(19): siRNA sense strand
gaccugccacgcaucuuua

SEQ ID NO: 2206892 - RNA, 19 nt, Homo sapiens
  misc_RNA (1)...(19): siRNA sense strand
gggaugugcucgugaaagg

SEQ ID NO: 2206893 - RNA, 19 nt, Homo sapiens
  misc_RNA (1)...(19): siRNA sense strand
uggcggagcuggagaacau

SEQ ID NO: 2206894 - RNA, 19 nt, Homo sapiens
  misc_RNA (1)...(19): siRNA sense strand
ucaaggaggcuuacgacaa

SEQ ID NO: 2206895 - RNA, 19 nt, Homo sapiens
  misc_RNA (1)...(19): siRNA sense strand
gaaggacgaguucgacauc

SEQ ID NO: 2206896 - RNA, 19 nt, Homo sapiens
  misc_RNA (1)...(19): siRNA sense strand
guggugggcuggaugacuu

SEQ ID NO: 2206897 - RNA, 19 nt, Homo sapiens
  misc_RNA (1)...(19): siRNA sense strand
ggugaccacucugcacuau

SEQ ID NO: 2206898 - RNA, 19 nt, Homo sapiens
  misc_RNA (1)...(19): siRNA sense strand
ggacaccuccaacuuugau

SEQ ID NO: 2206899 - RNA, 19 nt, Homo sapiens
  misc_RNA (1)...(19): siRNA sense strand
ggaaccauccuuucuucga

SEQ ID NO: 2206900 - RNA, 19 nt, Homo sapiens
  misc_RNA (1)...(19): siRNA sense strand
ggaaaccuacggcaagauc

SEQ ID NO: 2206901 - RNA, 19 nt, Homo sapiens
  misc_RNA (1)...(19): siRNA sense strand
ccaacggcaugguggauuc

SEQ ID NO: 2206902 - RNA, 19 nt, Homo sapiens
  misc_RNA (1)...(19): siRNA sense strand
gcacuaugccuuccaagac

SEQ ID NO: 2206903 - RNA, 19 nt, Homo sapiens
  misc_RNA (1)...(19): siRNA sense strand
ugaaaaugcugcacaagug

SEQ ID NO: 2206904 - RNA, 19 nt, Homo sapiens
  misc_RNA (1)...(19): siRNA sense strand
uagggacgccggacuauau

SEQ ID NO: 2206905 - RNA, 19 nt, Homo sapiens
  misc_RNA (1)...(19): siRNA sense strand
ugaccacucugcacuaugc

SEQ ID NO: 2206906 - RNA, 19 nt, Homo sapiens
  misc_RNA (1)...(19): siRNA sense strand
guggaaaccuacggcaaga

SEQ ID NO: 2206907 - RNA, 19 nt, Homo sapiens
  misc_RNA (1)...(19): siRNA sense strand
gcugaguccuugguggaaa

SEQ ID NO: 2206908 - RNA, 19 nt, Homo sapiens
  misc_RNA (1)...(19): siRNA sense strand
gcgcagcaacgacaucuuc

SEQ ID NO: 2206909 - RNA, 19 nt, Homo sapiens
  misc_RNA (1)...(19): siRNA sense strand
gggagacgcccuucuaugc

SEQ ID NO: 2206910 - RNA, 19 nt, Homo sapiens
  misc_RNA (1)...(19): siRNA sense strand
ccggaaccauccuuucuuc

SEQ ID NO: 2206911 - RNA, 19 nt, Homo sapiens
  misc_RNA (1)...(19): siRNA sense strand
gagagaugacuuugagauc

SEQ ID NO: 2206912 - RNA, 19 nt, Homo sapiens
  misc_RNA (1)...(19): siRNA sense strand
ggauucaucaguggcagua

SEQ ID NO: 2206913 - RNA, 19 nt, Homo sapiens
  misc_RNA (1)...(19): siRNA sense strand
guagggacgccggacuaua

SEQ ID NO: 2206914 - RNA, 19 nt, Homo sapiens
  misc_RNA (1)...(19): siRNA sense strand
ggaggagagccagaucuga

SEQ ID NO: 2206915 - RNA, 19 nt, Homo sapiens
  misc_RNA (1)...(19): siRNA sense strand
ugacaguguucagcgagaa

SEQ ID NO: 2206916 - RNA, 19 nt, Homo sapiens
  misc_RNA (1)...(19): siRNA sense strand
gaucggccgaggagccuuu

SEQ ID NO: 2206917 - RNA, 19 nt, Homo sapiens
  misc_RNA (1)...(19): siRNA sense strand
gagcaggagcggcuagaag

SEQ ID NO: 2206918 - RNA, 19 nt, Homo sapiens
  misc_RNA (1)...(19): siRNA sense strand
gaaaccuacggcaagauca

SEQ ID NO: 2206919 - RNA, 19 nt, Homo sapiens
  misc_RNA (1)...(19): siRNA sense strand
gcucgacggccuccuagau

SEQ ID NO: 2206920 - RNA, 19 nt, Homo sapiens
  misc_RNA (1)...(19): siRNA sense strand
gcgagaacuccaucgaugu

SEQ ID NO: 2206921 - RNA, 19 nt, Homo sapiens
  misc_RNA (1)...(19): siRNA sense strand
agaacuccaucgauguguu

SEQ ID NO: 2206922 - RNA, 19 nt, Homo sapiens
  misc_RNA (1)...(19): siRNA sense strand
gagggccaguggacaccaa

SEQ ID NO: 2206923 - RNA, 19 nt, Homo sapiens
  misc_RNA (1)...(19): siRNA sense strand
ugaccuaccucaggaacca

SEQ ID NO: 2206924 - RNA, 19 nt, Homo sapiens
  misc_RNA (1)...(19): siRNA sense strand
cgagaacuccaucgaugug

SEQ ID NO: 2206925 - RNA, 19 nt, Homo sapiens
  misc_RNA (1)...(19): siRNA sense strand
gcugcugugucgccaggaa

SEQ ID NO: 2206926 - RNA, 19 nt, Homo sapiens
  misc_RNA (1)...(19): siRNA sense strand
ucccggaccucaccgacaa

SEQ ID NO: 2206927 - RNA, 19 nt, Homo sapiens
  misc_RNA (1)...(19): siRNA sense strand
uggcagagaaggacgaguu

SEQ ID NO: 2206928 - RNA, 19 nt, Homo sapiens
  misc_RNA (1)...(19): siRNA sense strand
gcuggagaacauagaggua

SEQ ID NO: 2206929 - RNA, 19 nt, Homo sapiens
  misc_RNA (1)...(19): siRNA sense strand
gcccucaaacucccugauu

SEQ ID NO: 2206930 - RNA, 19 nt, Homo sapiens
  misc_RNA (1)...(19): siRNA sense strand
acaccaagcccucaaacuc

SEQ ID NO: 2206931 - RNA, 19 nt, Homo sapiens
  misc_RNA (1)...(19): siRNA sense strand
acaacguccugcuggaugu

SEQ ID NO: 2206932 - RNA, 19 nt, Homo sapiens
  misc_RNA (1)...(19): siRNA sense strand
caccacugcuggcaucuac

SEQ ID NO: 2206933 - RNA, 19 nt, Homo sapiens
  misc_RNA (1)...(19): siRNA sense strand
ccucagcgaguuccugcua

SEQ ID NO: 2206934 - RNA, 19 nt, Homo sapiens
  misc_RNA (1)...(19): siRNA sense strand
gagcaggaagcaccaagag

SEQ ID NO: 2206935 - RNA, 19 nt, Homo sapiens
  misc_RNA (1)...(19): siRNA sense strand
caacuuugauguggaugac

SEQ ID NO: 2206936 - RNA, 19 nt, Homo sapiens
  misc_RNA (1)...(19): siRNA sense strand
ccaacacagccucuacaga

SEQ ID NO: 2206937 - RNA, 19 nt, Homo sapiens
  misc_RNA (1)...(19): siRNA sense strand
ccugcaaccucccuaaugc

SEQ ID NO: 2206938 - RNA, 19 nt, Homo sapiens
  misc_RNA (1)...(19): siRNA sense strand
gccaucaccugccauucgu

SEQ ID NO: 2206939 - RNA, 19 nt, Homo sapiens
  misc_RNA (1)...(19): siRNA sense strand
gauguuauccaugcccaau

SEQ ID NO: 2206940 - RNA, 19 nt, Homo sapiens
  misc_RNA (1)...(19): siRNA sense strand
gccguugggugaccacucu

SEQ ID NO: 2206941 - RNA, 19 nt, Homo sapiens
  misc_RNA (1)...(19): siRNA sense strand
cgaagagaagggccgaguu

SEQ ID NO: 2206942 - RNA, 19 nt, Homo sapiens
  misc_RNA (1)...(19): siRNA sense strand
cggaggagcagcagaagca

SEQ ID NO: 2206943 - RNA, 19 nt, Homo sapiens
  misc_RNA (1)...(19): siRNA sense strand
agugggagaugcugaagag

SEQ ID NO: 2206944 - RNA, 19 nt, Homo sapiens
  misc_RNA (1)...(19): siRNA sense strand
agaccgugccgcucaagaa

SEQ ID NO: 2206945 - RNA, 19 nt, Homo sapiens
  misc_RNA (1)...(19): siRNA sense strand
acuuugagaucuugaaggu

SEQ ID NO: 2206946 - RNA, 19 nt, Homo sapiens
  misc_RNA (1)...(19): siRNA sense strand
cguguuugcugcccugagu

SEQ ID NO: 2206947 - RNA, 19 nt, Homo sapiens
  misc_RNA (1)...(19): siRNA sense strand
ggagcucagagaaggauuc

SEQ ID NO: 2206948 - RNA, 19 nt, Homo sapiens
  misc_RNA (1)...(19): siRNA sense strand
caggaggagcugcuucaga

SEQ ID NO: 2206949 - RNA, 19 nt, Homo sapiens
  misc_RNA (1)...(19): siRNA sense strand
uggagcagcuacggaagga

SEQ ID NO: 2206950 - RNA, 19 nt, Homo sapiens
  misc_RNA (1)...(19): siRNA sense strand
caguagggacgccggacua

SEQ ID NO: 2206951 - RNA, 19 nt, Homo sapiens
  misc_RNA (1)...(19): siRNA sense strand
cagcuguuccgcaccaaga

SEQ ID NO: 2206952 - RNA, 19 nt, Homo sapiens
  misc_RNA (1)...(19): siRNA sense strand
cagagaaggacgaguucga

SEQ ID NO: 2206953 - RNA, 19 nt, Homo sapiens
  misc_RNA (1)...(19): siRNA sense strand
acucacgccugcugcuguu

SEQ ID NO: 2206954 - RNA, 19 nt, Homo sapiens
  misc_RNA (1)...(19): siRNA sense strand
aacaggagcucgccaugcu

SEQ ID NO: 2206955 - RNA, 19 nt, Homo sapiens
  misc_RNA (1)...(19): siRNA sense strand
ggcagucacaguccugaga

SEQ ID NO: 2206956 - RNA, 19 nt, Homo sapiens
  misc_RNA (1)...(19): siRNA sense strand
ugacgacacccucaaccau

SEQ ID NO: 2206957 - RNA, 19 nt, Homo sapiens
  misc_RNA (1)...(19): siRNA sense strand
agagagaugacuuugagau

SEQ ID NO: 2206958 - RNA, 19 nt, Homo sapiens
  misc_RNA (1)...(19): siRNA sense strand
ggagacgcccuucuaugcu

SEQ ID NO: 2206959 - RNA, 19 nt, Homo sapiens
  misc_RNA (1)...(19): siRNA sense strand
ccuggccucugauguuauc

SEQ ID NO: 2206960 - RNA, 19 nt, Homo sapiens
  misc_RNA (1)...(19): siRNA sense strand
ccuaaugcaggucucagaa

SEQ ID NO: 2206961 - RNA, 19 nt, Homo sapiens
  misc_RNA (1)...(19): siRNA sense strand
gccgguggcuuugcacucu

SEQ ID NO: 2206962 - RNA, 19 nt, Homo sapiens
  misc_RNA (1)...(19): siRNA sense strand
gaagaccuguggcugauug

SEQ ID NO: 2206963 - RNA, 19 nt, Homo sapiens
  misc_RNA (1)...(19): siRNA sense strand
ggauaacacugaccucuuc

SEQ ID NO: 2206964 - RNA, 19 nt, Homo sapiens
  misc_RNA (1)...(19): siRNA sense strand
cuacuuaggucacuucuuc

SEQ ID NO: 2206965 - RNA, 19 nt, Homo sapiens
  misc_RNA (1)...(19): siRNA sense strand
ggcaagaacuggccucuca

SEQ ID NO: 2206966 - RNA, 19 nt, Homo sapiens
  misc_RNA (1)...(19): siRNA sense strand
gagacacccuggacaguga

SEQ ID NO: 2206967 - RNA, 19 nt, Homo sapiens
  misc_RNA (1)...(19): siRNA sense strand
cgaccuacaugguaucuau

SEQ ID NO: 2206968 - RNA, 19 nt, Homo sapiens
  misc_RNA (1)...(19): siRNA sense strand
ggaccaggaugcccucuuc

SEQ ID NO: 2206969 - RNA, 19 nt, Homo sapiens
  misc_RNA (1)...(19): siRNA sense strand
acaagaaugugaaggaguu

SEQ ID NO: 2206970 - RNA, 19 nt, Homo sapiens
  misc_RNA (1)...(19): siRNA sense strand
gcaagcacgucacgaugga

SEQ ID NO: 2206971 - RNA, 19 nt, Homo sapiens
  misc_RNA (1)...(19): siRNA sense strand
gagggacgguuacuucuca

SEQ ID NO: 2206972 - RNA, 19 nt, Homo sapiens
  misc_RNA (1)...(19): siRNA sense strand
ccacccagcuggcaagaug

SEQ ID NO: 2206973 - RNA, 19 nt, Homo sapiens
  misc_RNA (1)...(19): siRNA sense strand
cagcugagaccguguauga

SEQ ID NO: 2206974 - RNA, 19 nt, Homo sapiens
  misc_RNA (1)...(19): siRNA sense strand
gcacugggcgcaaguacuu

SEQ ID NO: 2206975 - RNA, 19 nt, Homo sapiens
  misc_RNA (1)...(19): siRNA sense strand
cuggaaaucuggucuguga

SEQ ID NO: 2206976 - RNA, 19 nt, Homo sapiens
  misc_RNA (1)...(19): siRNA sense strand
cgagagggcaucuuggaua

SEQ ID NO: 2206977 - RNA, 19 nt, Homo sapiens
  misc_RNA (1)...(19): siRNA sense strand
ucuuggaacuugugauuaa

SEQ ID NO: 2206978 - RNA, 19 nt, Homo sapiens
  misc_RNA (1)...(19): siRNA sense strand
cacgacagcuuuaagaugu

SEQ ID NO: 2206979 - RNA, 19 nt, Homo sapiens
  misc_RNA (1)...(19): siRNA sense strand
aaacugagccagccacuau

SEQ ID NO: 2206980 - RNA, 19 nt, Homo sapiens
  misc_RNA (1)...(19): siRNA sense strand
acacggagauccugaccuu

SEQ ID NO: 2206981 - RNA, 19 nt, Homo sapiens
  misc_RNA (1)...(19): siRNA sense strand
gcuacuugcugcaccacua

SEQ ID NO: 2206982 - RNA, 19 nt, Homo sapiens
  misc_RNA (1)...(19): siRNA sense strand
ugacgaggaugcccacuuc

SEQ ID NO: 2206983 - RNA, 19 nt, Homo sapiens
  misc_RNA (1)...(19): siRNA sense strand
gcacgacagcuuuaagaug

SEQ ID NO: 2206984 - RNA, 19 nt, Homo sapiens
  misc_RNA (1)...(19): siRNA sense strand
cuaagaggaccauguauga

SEQ ID NO: 2206985 - RNA, 19 nt, Homo sapiens
  misc_RNA (1)...(19): siRNA sense strand
gcucagaggagaaggaaga

SEQ ID NO: 2206986 - RNA, 19 nt, Homo sapiens
  misc_RNA (1)...(19): siRNA sense strand
ucaaggacuucuucacuag

SEQ ID NO: 2206987 - RNA, 19 nt, Homo sapiens
  misc_RNA (1)...(19): siRNA sense strand
acauggagcugauggugaa

SEQ ID NO: 2206988 - RNA, 19 nt, Homo sapiens
  misc_RNA (1)...(19): siRNA sense strand
gcuccgaccuacaugguau

SEQ ID NO: 2206989 - RNA, 19 nt, Homo sapiens
  misc_RNA (1)...(19): siRNA sense strand
gagagggcaucuuggauac

SEQ ID NO: 2206990 - RNA, 19 nt, Homo sapiens
  misc_RNA (1)...(19): siRNA sense strand
gcggcgagauuaugucugu

SEQ ID NO: 2206991 - RNA, 19 nt, Homo sapiens
  misc_RNA (1)...(19): siRNA sense strand
gagcugauggugaaguuga

SEQ ID NO: 2206992 - RNA, 19 nt, Homo sapiens
  misc_RNA (1)...(19): siRNA sense strand
ggucaaacugugugaaaga

SEQ ID NO: 2206993 - RNA, 19 nt, Homo sapiens
  misc_RNA (1)...(19): siRNA sense strand
cagaggagaaggaagauga

SEQ ID NO: 2206994 - RNA, 19 nt, Homo sapiens
  misc_RNA (1)...(19): siRNA sense strand
caacaacgaccugcucaug

SEQ ID NO: 2206995 - RNA, 19 nt, Homo sapiens
  misc_RNA (1)...(19): siRNA sense strand
acaacgaccugcucaugug

SEQ ID NO: 2206996 - RNA, 19 nt, Homo sapiens
  misc_RNA (1)...(19): siRNA sense strand
ucacagagcugggccucau

SEQ ID NO: 2206997 - RNA, 19 nt, Homo sapiens
  misc_RNA (1)...(19): siRNA sense strand
cucaaggacuucuucacua

SEQ ID NO: 2206998 - RNA, 19 nt, Homo sapiens
  misc_RNA (1)...(19): siRNA sense strand
ccucccagaucaacaaguu

SEQ ID NO: 2206999 - RNA, 19 nt, Homo sapiens
  misc_RNA (1)...(19): siRNA sense strand
ggagcacgguacccucuuc

SEQ ID NO: 2207000 - RNA, 19 nt, Homo sapiens
  misc_RNA (1)...(19): siRNA sense strand
acacugaccucuucuucuc

SEQ ID NO: 2207001 - RNA, 19 nt, Homo sapiens
  misc_RNA (1)...(19): siRNA sense strand
ccagcaacaucaucaugga

SEQ ID NO: 2207002 - RNA, 19 nt, Homo sapiens
  misc_RNA (1)...(19): siRNA sense strand
ggagaaggaagaugaaagg

SEQ ID NO: 2207003 - RNA, 19 nt, Homo sapiens
  misc_RNA (1)...(19): siRNA sense strand
gagauuaugucuguguuuu

SEQ ID NO: 2207004 - RNA, 19 nt, Homo sapiens
  misc_RNA (1)...(19): siRNA sense strand
gcccaucuccgucuaccua

SEQ ID NO: 2207005 - RNA, 19 nt, Homo sapiens
  misc_RNA (1)...(19): siRNA sense strand
ccauugagcaguacaggaa

SEQ ID NO: 2207006 - RNA, 19 nt, Homo sapiens
  misc_RNA (1)...(19): siRNA sense strand
cgaggcagcuccagcaacu

SEQ ID NO: 2207007 - RNA, 19 nt, Homo sapiens
  misc_RNA (1)...(19): siRNA sense strand
uaacaugcucaccaucaaa

SEQ ID NO: 2207008 - RNA, 19 nt, Homo sapiens
  misc_RNA (1)...(19): siRNA sense strand
ggacaaccagcauggaagu

SEQ ID NO: 2207009 - RNA, 19 nt, Homo sapiens
  misc_RNA (1)...(19): siRNA sense strand
cuaacaugcucaccaucaa

SEQ ID NO: 2207010 - RNA, 19 nt, Homo sapiens
  misc_RNA (1)...(19): siRNA sense strand
acacugcgguugcacaaag

SEQ ID NO: 2207011 - RNA, 19 nt, Homo sapiens
  misc_RNA (1)...(19): siRNA sense strand
acaacaggaucaacaacga

SEQ ID NO: 2207012 - RNA, 19 nt, Homo sapiens
  misc_RNA (1)...(19): siRNA sense strand
uacaugguaucuaugaaga

SEQ ID NO: 2207013 - RNA, 19 nt, Homo sapiens
  misc_RNA (1)...(19): siRNA sense strand
gcaccucugagccugagua

SEQ ID NO: 2207014 - RNA, 19 nt, Homo sapiens
  misc_RNA (1)...(19): siRNA sense strand
ggaagaggagggcgaugga

SEQ ID NO: 2207015 - RNA, 19 nt, Homo sapiens
  misc_RNA (1)...(19): siRNA sense strand
cugacaagcugaacaagag

SEQ ID NO: 2207016 - RNA, 19 nt, Homo sapiens
  misc_RNA (1)...(19): siRNA sense strand
caacaaguuccuguaccua

SEQ ID NO: 2207017 - RNA, 19 nt, Homo sapiens
  misc_RNA (1)...(19): siRNA sense strand
gcgagauuaugucuguguu

SEQ ID NO: 2207018 - RNA, 19 nt, Homo sapiens
  misc_RNA (1)...(19): siRNA sense strand
uaacacugaccucuucuuc

SEQ ID NO: 2207019 - RNA, 19 nt, Homo sapiens
  misc_RNA (1)...(19): siRNA sense strand
gcugagaccguguaugaca

SEQ ID NO: 2207020 - RNA, 19 nt, Homo sapiens
  misc_RNA (1)...(19): siRNA sense strand
ggagacggcccucaucaac

SEQ ID NO: 2207021 - RNA, 19 nt, Homo sapiens
  misc_RNA (1)...(19): siRNA sense strand
guugaccucuuggaacuug

SEQ ID NO: 2207022 - RNA, 19 nt, Homo sapiens
  misc_RNA (1)...(19): siRNA sense strand
gcuuuaagaugugcaaguc

SEQ ID NO: 2207023 - RNA, 19 nt, Homo sapiens
  misc_RNA (1)...(19): siRNA sense strand
auccugaccuuuccuggua

SEQ ID NO: 2207024 - RNA, 19 nt, Homo sapiens
  misc_RNA (1)...(19): siRNA sense strand
ggaaaucuggucugugaac

SEQ ID NO: 2207025 - RNA, 19 nt, Homo sapiens
  misc_RNA (1)...(19): siRNA sense strand
gaucaacaaguuccuguac

SEQ ID NO: 2207026 - RNA, 19 nt, Homo sapiens
  misc_RNA (1)...(19): siRNA sense strand
gcugacaagcugaacaaga

SEQ ID NO: 2207027 - RNA, 19 nt, Homo sapiens
  misc_RNA (1)...(19): siRNA sense strand
gccaacugcuuugaucuca

SEQ ID NO: 2207028 - RNA, 19 nt, Homo sapiens
  misc_RNA (1)...(19): siRNA sense strand
ccacagcugagaccgugua

SEQ ID NO: 2207029 - RNA, 19 nt, Homo sapiens
  misc_RNA (1)...(19): siRNA sense strand
agacuggaguacugugaug

SEQ ID NO: 2207030 - RNA, 19 nt, Homo sapiens
  misc_RNA (1)...(19): siRNA sense strand
caucaaagcgcugcaugug

SEQ ID NO: 2207031 - RNA, 19 nt, Homo sapiens
  misc_RNA (1)...(19): siRNA sense strand
agacggcccucaucaacca

SEQ ID NO: 2207032 - RNA, 19 nt, Homo sapiens
  misc_RNA (1)...(19): siRNA sense strand
ugaccuuccuggacacugu

SEQ ID NO: 2207033 - RNA, 19 nt, Homo sapiens
  misc_RNA (1)...(19): siRNA sense strand
gggcaugcgcaaccagauu

SEQ ID NO: 2207034 - RNA, 19 nt, Homo sapiens
  misc_RNA (1)...(19): siRNA sense strand
uggucaaccugcuccagua

SEQ ID NO: 2207035 - RNA, 19 nt, Homo sapiens
  misc_RNA (1)...(19): siRNA sense strand
ggauguugaccucuuggaa

SEQ ID NO: 2207036 - RNA, 19 nt, Homo sapiens
  misc_RNA (1)...(19): siRNA sense strand
cgaggaugcccacuucuuc

SEQ ID NO: 2207037 - RNA, 19 nt, Homo sapiens
  misc_RNA (1)...(19): siRNA sense strand
ccaggaugcccucuucuuc

SEQ ID NO: 2207038 - RNA, 19 nt, Homo sapiens
  misc_RNA (1)...(19): siRNA sense strand
gaacgaggugcuggaguca

SEQ ID NO: 2207039 - RNA, 19 nt, Homo sapiens
  misc_RNA (1)...(19): siRNA sense strand
ucugugagaccaaggauga

SEQ ID NO: 2207040 - RNA, 19 nt, Homo sapiens
  misc_RNA (1)...(19): siRNA sense strand
ccgaagaccuguggcugau

SEQ ID NO: 2207041 - RNA, 19 nt, Homo sapiens
  misc_RNA (1)...(19): siRNA sense strand
gagggcaucuuggauacag

SEQ ID NO: 2207042 - RNA, 19 nt, Homo sapiens
  misc_RNA (1)...(19): siRNA sense strand
ccaucuggcuggauuacca

SEQ ID NO: 2207043 - RNA, 19 nt, Homo sapiens
  misc_RNA (1)...(19): siRNA sense strand
cgacgugcccacucuaaca

SEQ ID NO: 2207044 - RNA, 19 nt, Homo sapiens
  misc_RNA (1)...(19): siRNA sense strand
gaggagaaggaagaugaaa

SEQ ID NO: 2207045 - RNA, 19 nt, Homo sapiens
  misc_RNA (1)...(19): siRNA sense strand
ggaccugcggcgagauuau

SEQ ID NO: 2207046 - RNA, 19 nt, Homo sapiens
  misc_RNA (1)...(19): siRNA sense strand
gcaagucagccuucaagcu

SEQ ID NO: 2207047 - RNA, 19 nt, Homo sapiens
  misc_RNA (1)...(19): siRNA sense strand
gcccaguguccacaucuuu

SEQ ID NO: 2207048 - RNA, 19 nt, Homo sapiens
  misc_RNA (1)...(19): siRNA sense strand
aagaggaccauguaugaga

SEQ ID NO: 2207049 - RNA, 19 nt, Homo sapiens
  misc_RNA (1)...(19): siRNA sense strand
gcggacaaccagcauggaa

SEQ ID NO: 2207050 - RNA, 19 nt, Homo sapiens
  misc_RNA (1)...(19): siRNA sense strand
agacuuccaucaccuucga

SEQ ID NO: 2207051 - RNA, 19 nt, Homo sapiens
  misc_RNA (1)...(19): siRNA sense strand
cugacucgcugcugaagau

SEQ ID NO: 2207052 - RNA, 19 nt, Homo sapiens
  misc_RNA (1)...(19): siRNA sense strand
cugaggagaugaggacguu

SEQ ID NO: 2207053 - RNA, 19 nt, Homo sapiens
  misc_RNA (1)...(19): siRNA sense strand
ggacaaggugcugggcuau

SEQ ID NO: 2207054 - RNA, 19 nt, Homo sapiens
  misc_RNA (1)...(19): siRNA sense strand
caggguacauggagcugau

SEQ ID NO: 2207055 - RNA, 19 nt, Homo sapiens
  misc_RNA (1)...(19): siRNA sense strand
gcucggacagugcccaaga

SEQ ID NO: 2207056 - RNA, 19 nt, Homo sapiens
  misc_RNA (1)...(19): siRNA sense strand
gauguuugcccagaccauu

SEQ ID NO: 2207057 - RNA, 19 nt, Homo sapiens
  misc_RNA (1)...(19): siRNA sense strand
ccucuuggaacuugugauu

SEQ ID NO: 2207058 - RNA, 19 nt, Homo sapiens
  misc_RNA (1)...(19): siRNA sense strand
caguuccggucagagcuua

SEQ ID NO: 2207059 - RNA, 19 nt, Homo sapiens
  misc_RNA (1)...(19): siRNA sense strand
cuccauggcuggccucaca

SEQ ID NO: 2207060 - RNA, 19 nt, Homo sapiens
  misc_RNA (1)...(19): siRNA sense strand
ccaucuccgucuaccuauu

SEQ ID NO: 2207061 - RNA, 19 nt, Homo sapiens
  misc_RNA (1)...(19): siRNA sense strand
ccuggacagugaugaguuc

SEQ ID NO: 2207062 - RNA, 19 nt, Homo sapiens
  misc_RNA (1)...(19): siRNA sense strand
gacccaauguguauaaauu

SEQ ID NO: 2207063 - RNA, 19 nt, Homo sapiens
  misc_RNA (1)...(19): siRNA sense strand
gagacgagguuucuucaug

SEQ ID NO: 2207064 - RNA, 19 nt, Homo sapiens
  misc_RNA (1)...(19): siRNA sense strand
ggagaaauagggaaagaaa

SEQ ID NO: 2207065 - RNA, 19 nt, Homo sapiens
  misc_RNA (1)...(19): siRNA sense strand
guggaaaccaggagaaaua

SEQ ID NO: 2207066 - RNA, 19 nt, Homo sapiens
  misc_RNA (1)...(19): siRNA sense strand
ucacugauguccagaaaca

SEQ ID NO: 2207067 - RNA, 19 nt, Homo sapiens
  misc_RNA (1)...(19): siRNA sense strand
caacucaccuccaccuaag

SEQ ID NO: 2207068 - RNA, 19 nt, Homo sapiens
  misc_RNA (1)...(19): siRNA sense strand
caggagaaauagggaaaga

SEQ ID NO: 2207069 - RNA, 19 nt, Homo sapiens
  misc_RNA (1)...(19): siRNA sense strand
ucagauaugggaagaguau

SEQ ID NO: 2207070 - RNA, 19 nt, Homo sapiens
  misc_RNA (1)...(19): siRNA sense strand
uaggagcugugaugaggaa

SEQ ID NO: 2207071 - RNA, 19 nt, Homo sapiens
  misc_RNA (1)...(19): siRNA sense strand
aggagacucuggccucuga

SEQ ID NO: 2207072 - RNA, 19 nt, Homo sapiens
  misc_RNA (1)...(19): siRNA sense strand
gagacucuggccucugaua

SEQ ID NO: 2207073 - RNA, 19 nt, Homo sapiens
  misc_RNA (1)...(19): siRNA sense strand
ggucccaguugagaagaaa

SEQ ID NO: 2207074 - RNA, 19 nt, Homo sapiens
  misc_RNA (1)...(19): siRNA sense strand
gcaguaggagcugugauga

SEQ ID NO: 2207075 - RNA, 19 nt, Homo sapiens
  misc_RNA (1)...(19): siRNA sense strand
ccagagacgagguuucuuc

SEQ ID NO: 2207076 - RNA, 19 nt, Homo sapiens
  misc_RNA (1)...(19): siRNA sense strand
ggacccaauguguauaaau

SEQ ID NO: 2207077 - RNA, 19 nt, Homo sapiens
  misc_RNA (1)...(19): siRNA sense strand
acaacucaccuccaccuaa

SEQ ID NO: 2207078 - RNA, 19 nt, Homo sapiens
  misc_RNA (1)...(19): siRNA sense strand
cagaggagaagagauagaa

SEQ ID NO: 2207079 - RNA, 19 nt, Homo sapiens
  misc_RNA (1)...(19): siRNA sense strand
gaagaguaucagaggagaa

SEQ ID NO: 2207080 - RNA, 19 nt, Homo sapiens
  misc_RNA (1)...(19): siRNA sense strand
aaucagauaugggaagagu

SEQ ID NO: 2207081 - RNA, 19 nt, Homo sapiens
  misc_RNA (1)...(19): siRNA sense strand
cccaauguguauaaauuca

SEQ ID NO: 2207082 - RNA, 19 nt, Homo sapiens
  misc_RNA (1)...(19): siRNA sense strand
gcaggacccaauguguaua

SEQ ID NO: 2207083 - RNA, 19 nt, Homo sapiens
  misc_RNA (1)...(19): siRNA sense strand
gggccaagauagggacuuc

SEQ ID NO: 2207084 - RNA, 19 nt, Homo sapiens
  misc_RNA (1)...(19): siRNA sense strand
caggacccaauguguauaa

SEQ ID NO: 2207085 - RNA, 19 nt, Homo sapiens
  misc_RNA (1)...(19): siRNA sense strand
ggagaagagauagaaaaua

SEQ ID NO: 2207086 - RNA, 19 nt, Homo sapiens
  misc_RNA (1)...(19): siRNA sense strand
ggaggucccaguugagaag

SEQ ID NO: 2207087 - RNA, 19 nt, Homo sapiens
  misc_RNA (1)...(19): siRNA sense strand
gcuggacagggccaagaua

SEQ ID NO: 2207088 - RNA, 19 nt, Homo sapiens
  misc_RNA (1)...(19): siRNA sense strand
gcugugaugaggaaacgaa

SEQ ID NO: 2207089 - RNA, 19 nt, Homo sapiens
  misc_RNA (1)...(19): siRNA sense strand
acucuggccucugauauca

SEQ ID NO: 2207090 - RNA, 19 nt, Homo sapiens
  misc_RNA (1)...(19): siRNA sense strand
gacgagguuucuucaugca

SEQ ID NO: 2207091 - RNA, 19 nt, Homo sapiens
  misc_RNA (1)...(19): siRNA sense strand
gaggagaagagauagaaaa

SEQ ID NO: 2207092 - RNA, 19 nt, Homo sapiens
  misc_RNA (1)...(19): siRNA sense strand
ugagaagaaagcaguagga

SEQ ID NO: 2207093 - RNA, 19 nt, Homo sapiens
  misc_RNA (1)...(19): siRNA sense strand
gaaaauaaggaagucauca

SEQ ID NO: 2207094 - RNA, 19 nt, Homo sapiens
  misc_RNA (1)...(19): siRNA sense strand
gagcugugaugaggaaacg

SEQ ID NO: 2207095 - RNA, 19 nt, Homo sapiens
  misc_RNA (1)...(19): siRNA sense strand
gaagagauagaaaauaagg

SEQ ID NO: 2207096 - RNA, 19 nt, Homo sapiens
  misc_RNA (1)...(19): siRNA sense strand
ucucuucccguuucgauau

SEQ ID NO: 2207097 - RNA, 19 nt, Homo sapiens
  misc_RNA (1)...(19): siRNA sense strand
cagagacgagguuucuuca

SEQ ID NO: 2207098 - RNA, 19 nt, Homo sapiens
  misc_RNA (1)...(19): siRNA sense strand
gaacaaaucugguacuuuu

SEQ ID NO: 2207099 - RNA, 19 nt, Homo sapiens
  misc_RNA (1)...(19): siRNA sense strand
gaagagaguucagcaguuu

SEQ ID NO: 2207100 - RNA, 19 nt, Homo sapiens
  misc_RNA (1)...(19): siRNA sense strand
ggagugcucucaaauauga

SEQ ID NO: 2207101 - RNA, 19 nt, Homo sapiens
  misc_RNA (1)...(19): siRNA sense strand
gaaagaagcagcaagauca

SEQ ID NO: 2207102 - RNA, 19 nt, Homo sapiens
  misc_RNA (1)...(19): siRNA sense strand
gccaaagaguggacauuua

SEQ ID NO: 2207103 - RNA, 19 nt, Homo sapiens
  misc_RNA (1)...(19): siRNA sense strand
gaguggacauuuauuauug

SEQ ID NO: 2207104 - RNA, 19 nt, Homo sapiens
  misc_RNA (1)...(19): siRNA sense strand
gcagagaggcaaacacuaa

SEQ ID NO: 2207105 - RNA, 19 nt, Homo sapiens
  misc_RNA (1)...(19): siRNA sense strand
ggagauaucuggggauuua

SEQ ID NO: 2207106 - RNA, 19 nt, Homo sapiens
  misc_RNA (1)...(19): siRNA sense strand
caacagggauccaggugaa

SEQ ID NO: 2207107 - RNA, 19 nt, Homo sapiens
  misc_RNA (1)...(19): siRNA sense strand
guuagaagcugauacaaca

SEQ ID NO: 2207108 - RNA, 19 nt, Homo sapiens
  misc_RNA (1)...(19): siRNA sense strand
gagcagggcccuucuguug

SEQ ID NO: 2207109 - RNA, 19 nt, Homo sapiens
  misc_RNA (1)...(19): siRNA sense strand
ugagacauguggacacuaa

SEQ ID NO: 2207110 - RNA, 19 nt, Homo sapiens
  misc_RNA (1)...(19): siRNA sense strand
gauaacagcuagggauuca

SEQ ID NO: 2207111 - RNA, 19 nt, Homo sapiens
  misc_RNA (1)...(19): siRNA sense strand
gagagagggugcagaagug

SEQ ID NO: 2207112 - RNA, 19 nt, Homo sapiens
  misc_RNA (1)...(19): siRNA sense strand
ggucaaaggugagacaugu

SEQ ID NO: 2207113 - RNA, 19 nt, Homo sapiens
  misc_RNA (1)...(19): siRNA sense strand
ggagaaagaagcagcaaga

SEQ ID NO: 2207114 - RNA, 19 nt, Homo sapiens
  misc_RNA (1)...(19): siRNA sense strand
cugaagagauggacacuga

SEQ ID NO: 2207115 - RNA, 19 nt, Homo sapiens
  misc_RNA (1)...(19): siRNA sense strand
gauagaagauacaauacag

SEQ ID NO: 2207116 - RNA, 19 nt, Homo sapiens
  misc_RNA (1)...(19): siRNA sense strand
gagaacaaaucugguacuu

SEQ ID NO: 2207117 - RNA, 19 nt, Homo sapiens
  misc_RNA (1)...(19): siRNA sense strand
ggucagaacgagcuaauga

SEQ ID NO: 2207118 - RNA, 19 nt, Homo sapiens
  misc_RNA (1)...(19): siRNA sense strand
guucagagguuccagagau

SEQ ID NO: 2207119 - RNA, 19 nt, Homo sapiens
  misc_RNA (1)...(19): siRNA sense strand
gcagggcccuucuguugga

SEQ ID NO: 2207120 - RNA, 19 nt, Homo sapiens
  misc_RNA (1)...(19): siRNA sense strand
ggagagagagggugcagaa

SEQ ID NO: 2207121 - RNA, 19 nt, Homo sapiens
  misc_RNA (1)...(19): siRNA sense strand
agagauagaagcagagaua

SEQ ID NO: 2207122 - RNA, 19 nt, Homo sapiens
  misc_RNA (1)...(19): siRNA sense strand
cagcagaaacugagauauu

SEQ ID NO: 2207123 - RNA, 19 nt, Homo sapiens
  misc_RNA (1)...(19): siRNA sense strand
ggagucaggugccaacaag

SEQ ID NO: 2207124 - RNA, 19 nt, Homo sapiens
  misc_RNA (1)...(19): siRNA sense strand
gagcagaggcagauagaug

SEQ ID NO: 2207125 - RNA, 19 nt, Homo sapiens
  misc_RNA (1)...(19): siRNA sense strand
ccaaagaguggacauuuau

SEQ ID NO: 2207126 - RNA, 19 nt, Homo sapiens
  misc_RNA (1)...(19): siRNA sense strand
ccggaaaccucaccagaga

SEQ ID NO: 2207127 - RNA, 19 nt, Homo sapiens
  misc_RNA (1)...(19): siRNA sense strand
ggacagaagcuaaaauauu

SEQ ID NO: 2207128 - RNA, 19 nt, Homo sapiens
  misc_RNA (1)...(19): siRNA sense strand
gcccgagcauugaggauaa

SEQ ID NO: 2207129 - RNA, 19 nt, Homo sapiens
  misc_RNA (1)...(19): siRNA sense strand
gaugguaccugagaaugug

SEQ ID NO: 2207130 - RNA, 19 nt, Homo sapiens
  misc_RNA (1)...(19): siRNA sense strand
acucaaggcugaagagaug

SEQ ID NO: 2207131 - RNA, 19 nt, Homo sapiens
  misc_RNA (1)...(19): siRNA sense strand
gacaagaacuacgauagca

SEQ ID NO: 2207132 - RNA, 19 nt, Homo sapiens
  misc_RNA (1)...(19): siRNA sense strand
ugggagugcucucaaauau

SEQ ID NO: 2207133 - RNA, 19 nt, Homo sapiens
  misc_RNA (1)...(19): siRNA sense strand
caacuuggaugacuuugcu

SEQ ID NO: 2207134 - RNA, 19 nt, Homo sapiens
  misc_RNA (1)...(19): siRNA sense strand
caaggguccuggagucaga

SEQ ID NO: 2207135 - RNA, 19 nt, Homo sapiens
  misc_RNA (1)...(19): siRNA sense strand
gcaagccucaugaguguga

SEQ ID NO: 2207136 - RNA, 19 nt, Homo sapiens
  misc_RNA (1)...(19): siRNA sense strand
guacugaugacccguaaga

SEQ ID NO: 2207137 - RNA, 19 nt, Homo sapiens
  misc_RNA (1)...(19): siRNA sense strand
gauagcaucuagggauuca

SEQ ID NO: 2207138 - RNA, 19 nt, Homo sapiens
  misc_RNA (1)...(19): siRNA sense strand
ggaaaccucaccagagaug

SEQ ID NO: 2207139 - RNA, 19 nt, Homo sapiens
  misc_RNA (1)...(19): siRNA sense strand
gcagaggcccgaguacuga

SEQ ID NO: 2207140 - RNA, 19 nt, Homo sapiens
  misc_RNA (1)...(19): siRNA sense strand
gaaccagcgcgaugagcua

SEQ ID NO: 2207141 - RNA, 19 nt, Homo sapiens
  misc_RNA (1)...(19): siRNA sense strand
cagacaagauugacuaugc

SEQ ID NO: 2207142 - RNA, 19 nt, Homo sapiens
  misc_RNA (1)...(19): siRNA sense strand
gcagagauuucaggaguac

SEQ ID NO: 2207143 - RNA, 19 nt, Homo sapiens
  misc_RNA (1)...(19): siRNA sense strand
gcagacaagaacuacgaua

SEQ ID NO: 2207144 - RNA, 19 nt, Homo sapiens
  misc_RNA (1)...(19): siRNA sense strand
acgcggaccugcucaagaa

SEQ ID NO: 2207145 - RNA, 19 nt, Homo sapiens
  misc_RNA (1)...(19): siRNA sense strand
gagauaacagcuagggauu

SEQ ID NO: 2207146 - RNA, 19 nt, Homo sapiens
  misc_RNA (1)...(19): siRNA sense strand
ccacugaagauagaagaua

SEQ ID NO: 2207147 - RNA, 19 nt, Homo sapiens
  misc_RNA (1)...(19): siRNA sense strand
caccagagaugaggucuuc

SEQ ID NO: 2207148 - RNA, 19 nt, Homo sapiens
  misc_RNA (1)...(19): siRNA sense strand
gaguacugaugacccguaa

SEQ ID NO: 2207149 - RNA, 19 nt, Homo sapiens
  misc_RNA (1)...(19): siRNA sense strand
ggaccaguaugaggccaaa

SEQ ID NO: 2207150 - RNA, 19 nt, Homo sapiens
  misc_RNA (1)...(19): siRNA sense strand
ucgcaagccucaugagugu

SEQ ID NO: 2207151 - RNA, 19 nt, Homo sapiens
  misc_RNA (1)...(19): siRNA sense strand
ucccagggcuagaaucuga

SEQ ID NO: 2207152 - RNA, 19 nt, Homo sapiens
  misc_RNA (1)...(19): siRNA sense strand
gauagaagcagagauagca

SEQ ID NO: 2207153 - RNA, 19 nt, Homo sapiens
  misc_RNA (1)...(19): siRNA sense strand
gauagcagagacugaggua

SEQ ID NO: 2207154 - RNA, 19 nt, Homo sapiens
  misc_RNA (1)...(19): siRNA sense strand
gcaguugccagcccuucua

SEQ ID NO: 2207155 - RNA, 19 nt, Homo sapiens
  misc_RNA (1)...(19): siRNA sense strand
ugacguaccugugccagau

SEQ ID NO: 2207156 - RNA, 19 nt, Homo sapiens
  misc_RNA (1)...(19): siRNA sense strand
gaagcagagaugaagguuu

SEQ ID NO: 2207157 - RNA, 19 nt, Homo sapiens
  misc_RNA (1)...(19): siRNA sense strand
ggaagcagagacuagaguu

SEQ ID NO: 2207158 - RNA, 19 nt, Homo sapiens
  misc_RNA (1)...(19): siRNA sense strand
gauagcaucuaggaguuca

SEQ ID NO: 2207159 - RNA, 19 nt, Homo sapiens
  misc_RNA (1)...(19): siRNA sense strand
cagcagaaggugcgauauu

SEQ ID NO: 2207160 - RNA, 19 nt, Homo sapiens
  misc_RNA (1)...(19): siRNA sense strand
aagcagagaugaagguuuu

SEQ ID NO: 2207161 - RNA, 19 nt, Homo sapiens
  misc_RNA (1)...(19): siRNA sense strand
ggucagagacucaaguucu

SEQ ID NO: 2207162 - RNA, 19 nt, Homo sapiens
  misc_RNA (1)...(19): siRNA sense strand
ggccaaagaguggacauuu

SEQ ID NO: 2207163 - RNA, 19 nt, Homo sapiens
  misc_RNA (1)...(19): siRNA sense strand
gacagcagaaacugagaua

SEQ ID NO: 2207164 - RNA, 19 nt, Homo sapiens
  misc_RNA (1)...(19): siRNA sense strand
uaagaggucaggagucaga

SEQ ID NO: 2207165 - RNA, 19 nt, Homo sapiens
  misc_RNA (1)...(19): siRNA sense strand
gcagcucguucucgaugga

SEQ ID NO: 2207166 - RNA, 19 nt, Homo sapiens
  misc_RNA (1)...(19): siRNA sense strand
gaaggaagaggcucagacu

SEQ ID NO: 2207167 - RNA, 19 nt, Homo sapiens
  misc_RNA (1)...(19): siRNA sense strand
agcagaaacugagauauug

SEQ ID NO: 2207168 - RNA, 19 nt, Homo sapiens
  misc_RNA (1)...(19): siRNA sense strand
caaagaguggacauuuauu

SEQ ID NO: 2207169 - RNA, 19 nt, Homo sapiens
  misc_RNA (1)...(19): siRNA sense strand
gaacccaggagaaagaagu

SEQ ID NO: 2207170 - RNA, 19 nt, Homo sapiens
  misc_RNA (1)...(19): siRNA sense strand
gaagcagagacuagaguug

SEQ ID NO: 2207171 - RNA, 19 nt, Homo sapiens
  misc_RNA (1)...(19): siRNA sense strand
aagauacaauacagucuga

SEQ ID NO: 2207172 - RNA, 19 nt, Homo sapiens
  misc_RNA (1)...(19): siRNA sense strand
gauacaauacagucugaga

SEQ ID NO: 2207173 - RNA, 19 nt, Homo sapiens
  misc_RNA (1)...(19): siRNA sense strand
aagcugagccggcaguuga

SEQ ID NO: 2207174 - RNA, 19 nt, Homo sapiens
  misc_RNA (1)...(19): siRNA sense strand
caucgaagacuggcagaaa

SEQ ID NO: 2207175 - RNA, 19 nt, Homo sapiens
  misc_RNA (1)...(19): siRNA sense strand
ggagauagaggugggacuu

SEQ ID NO: 2207176 - RNA, 19 nt, Homo sapiens
  misc_RNA (1)...(19): siRNA sense strand
gggcaacuuggaugacuuu

SEQ ID NO: 2207177 - RNA, 19 nt, Homo sapiens
  misc_RNA (1)...(19): siRNA sense strand
caagaagaacgcucucauc

SEQ ID NO: 2207178 - RNA, 19 nt, Homo sapiens
  misc_RNA (1)...(19): siRNA sense strand
acuaagaggucaggaguca

SEQ ID NO: 2207179 - RNA, 19 nt, Homo sapiens
  misc_RNA (1)...(19): siRNA sense strand
ucaaauaugaggcuuuaag

SEQ ID NO: 2207180 - RNA, 19 nt, Homo sapiens
  misc_RNA (1)...(19): siRNA sense strand
ggaggaggaaggccaagga

SEQ ID NO: 2207181 - RNA, 19 nt, Homo sapiens
  misc_RNA (1)...(19): siRNA sense strand
gaaaugagaaggggaaaga

SEQ ID NO: 2207182 - RNA, 19 nt, Homo sapiens
  misc_RNA (1)...(19): siRNA sense strand
ccguaagacagaaauuaua

SEQ ID NO: 2207183 - RNA, 19 nt, Homo sapiens
  misc_RNA (1)...(19): siRNA sense strand
ggaugguaccugagaaugu

SEQ ID NO: 2207184 - RNA, 19 nt, Homo sapiens
  misc_RNA (1)...(19): siRNA sense strand
ggucagagagauagaagca

SEQ ID NO: 2207185 - RNA, 19 nt, Homo sapiens
  misc_RNA (1)...(19): siRNA sense strand
ggaugacuuugcugagagu

SEQ ID NO: 2207186 - RNA, 19 nt, Homo sapiens
  misc_RNA (1)...(19): siRNA sense strand
ggaguacaagggucagaga

SEQ ID NO: 2207187 - RNA, 19 nt, Homo sapiens
  misc_RNA (1)...(19): siRNA sense strand
gauuuagggccacugaaga

SEQ ID NO: 2207188 - RNA, 19 nt, Homo sapiens
  misc_RNA (1)...(19): siRNA sense strand
gagcugaagacgcuuugug

SEQ ID NO: 2207189 - RNA, 19 nt, Homo sapiens
  misc_RNA (1)...(19): siRNA sense strand
ucacccuggucaacaagaa

SEQ ID NO: 2207190 - RNA, 19 nt, Homo sapiens
  misc_RNA (1)...(19): siRNA sense strand
gguucacccuggucaacaa

SEQ ID NO: 2207191 - RNA, 19 nt, Homo sapiens
  misc_RNA (1)...(19): siRNA sense strand
cggcugagguggagaugca

SEQ ID NO: 2207192 - RNA, 19 nt, Homo sapiens
  misc_RNA (1)...(19): siRNA sense strand
ucaccaacuucaccacauc

SEQ ID NO: 2207193 - RNA, 19 nt, Homo sapiens
  misc_RNA (1)...(19): siRNA sense strand
agcagaaggugcgauauug

SEQ ID NO: 2207194 - RNA, 19 nt, Homo sapiens
  misc_RNA (1)...(19): siRNA sense strand
gagauagaggugggacuuu

SEQ ID NO: 2207195 - RNA, 19 nt, Homo sapiens
  misc_RNA (1)...(19): siRNA sense strand
uagggccacugaagauaga

SEQ ID NO: 2207196 - RNA, 19 nt, Homo sapiens
  misc_RNA (1)...(19): siRNA sense strand
caacaagcaggccuucgau

SEQ ID NO: 2207197 - RNA, 19 nt, Homo sapiens
  misc_RNA (1)...(19): siRNA sense strand
cuagugaugugggcaacuu

SEQ ID NO: 2207198 - RNA, 19 nt, Homo sapiens
  misc_RNA (1)...(19): siRNA sense strand
gaugagacaggcuuuauua

SEQ ID NO: 2207199 - RNA, 19 nt, Homo sapiens
  misc_RNA (1)...(19): siRNA sense strand
caggagaucugucugauga

SEQ ID NO: 2207200 - RNA, 19 nt, Homo sapiens
  misc_RNA (1)...(19): siRNA sense strand
gaaggaacaugagcucuug

SEQ ID NO: 2207201 - RNA, 19 nt, Homo sapiens
  misc_RNA (1)...(19): siRNA sense strand
gaucaacccacauuuauga

SEQ ID NO: 2207202 - RNA, 19 nt, Homo sapiens
  misc_RNA (1)...(19): siRNA sense strand
gaagcgggcagcuguguua

SEQ ID NO: 2207203 - RNA, 19 nt, Homo sapiens
  misc_RNA (1)...(19): siRNA sense strand
cugaagaaccugaaauuua

SEQ ID NO: 2207204 - RNA, 19 nt, Homo sapiens
  misc_RNA (1)...(19): siRNA sense strand
gaaccaaugcugcugaauu

SEQ ID NO: 2207205 - RNA, 19 nt, Homo sapiens
  misc_RNA (1)...(19): siRNA sense strand
ugaagaaccugaaauuuac

SEQ ID NO: 2207206 - RNA, 19 nt, Homo sapiens
  misc_RNA (1)...(19): siRNA sense strand
ggaagaaagugaugaagac

SEQ ID NO: 2207207 - RNA, 19 nt, Homo sapiens
  misc_RNA (1)...(19): siRNA sense strand
cagcugauguugagauuga

SEQ ID NO: 2207208 - RNA, 19 nt, Homo sapiens
  misc_RNA (1)...(19): siRNA sense strand
gagagaaaguucggccuaa

SEQ ID NO: 2207209 - RNA, 19 nt, Homo sapiens
  misc_RNA (1)...(19): siRNA sense strand
ccugagagcuguuccuuug

SEQ ID NO: 2207210 - RNA, 19 nt, Homo sapiens
  misc_RNA (1)...(19): siRNA sense strand
gagaggcccugcaggagaa

SEQ ID NO: 2207211 - RNA, 19 nt, Homo sapiens
  misc_RNA (1)...(19): siRNA sense strand
agaaagugaugaagacaaa

SEQ ID NO: 2207212 - RNA, 19 nt, Homo sapiens
  misc_RNA (1)...(19): siRNA sense strand
ugaagaauccucagaagaa

SEQ ID NO: 2207213 - RNA, 19 nt, Homo sapiens
  misc_RNA (1)...(19): siRNA sense strand
aaccaaugcugcugaauuu

SEQ ID NO: 2207214 - RNA, 19 nt, Homo sapiens
  misc_RNA (1)...(19): siRNA sense strand
gcacaggcauccaggagau

SEQ ID NO: 2207215 - RNA, 19 nt, Homo sapiens
  misc_RNA (1)...(19): siRNA sense strand
gaccaagacugaggaagaa

SEQ ID NO: 2207216 - RNA, 19 nt, Homo sapiens
  misc_RNA (1)...(19): siRNA sense strand
gagcuccgauccaggguaa

SEQ ID NO: 2207217 - RNA, 19 nt, Homo sapiens
  misc_RNA (1)...(19): siRNA sense strand
gaacagaagaccaugaagu

SEQ ID NO: 2207218 - RNA, 19 nt, Homo sapiens
  misc_RNA (1)...(19): siRNA sense strand
cagagaaacuugacaaacu

SEQ ID NO: 2207219 - RNA, 19 nt, Homo sapiens
  misc_RNA (1)...(19): siRNA sense strand
uaugacauguccacgguua

SEQ ID NO: 2207220 - RNA, 19 nt, Homo sapiens
  misc_RNA (1)...(19): siRNA sense strand
gcacagcucccuggaauuc

SEQ ID NO: 2207221 - RNA, 19 nt, Homo sapiens
  misc_RNA (1)...(19): siRNA sense strand
gcagcaggcucaaguagag

SEQ ID NO: 2207222 - RNA, 19 nt, Homo sapiens
  misc_RNA (1)...(19): siRNA sense strand
ucauugagcugaggaagaa

SEQ ID NO: 2207223 - RNA, 19 nt, Homo sapiens
  misc_RNA (1)...(19): siRNA sense strand
gaagaauccucagaagaag

SEQ ID NO: 2207224 - RNA, 19 nt, Homo sapiens
  misc_RNA (1)...(19): siRNA sense strand
ugacaucgacuaccagaaa

SEQ ID NO: 2207225 - RNA, 19 nt, Homo sapiens
  misc_RNA (1)...(19): siRNA sense strand
ggaggaagaggaaauggaa

SEQ ID NO: 2207226 - RNA, 19 nt, Homo sapiens
  misc_RNA (1)...(19): siRNA sense strand
agaagaccaugaagucaaa

SEQ ID NO: 2207227 - RNA, 19 nt, Homo sapiens
  misc_RNA (1)...(19): siRNA sense strand
ggccuuggcuuuccuaugg

SEQ ID NO: 2207228 - RNA, 19 nt, Homo sapiens
  misc_RNA (1)...(19): siRNA sense strand
gaugaagaauccucagaag

SEQ ID NO: 2207229 - RNA, 19 nt, Homo sapiens
  misc_RNA (1)...(19): siRNA sense strand
aaagagaggacguggcaua

SEQ ID NO: 2207230 - RNA, 19 nt, Homo sapiens
  misc_RNA (1)...(19): siRNA sense strand
agacacgacugaaggagaa

SEQ ID NO: 2207231 - RNA, 19 nt, Homo sapiens
  misc_RNA (1)...(19): siRNA sense strand
gaagaagggauuugaagag

SEQ ID NO: 2207232 - RNA, 19 nt, Homo sapiens
  misc_RNA (1)...(19): siRNA sense strand
gaagaacagaagaccauga

SEQ ID NO: 2207233 - RNA, 19 nt, Homo sapiens
  misc_RNA (1)...(19): siRNA sense strand
gcaggagauugccaagaug

SEQ ID NO: 2207234 - RNA, 19 nt, Homo sapiens
  misc_RNA (1)...(19): siRNA sense strand
ccucagcucuucacugugu

SEQ ID NO: 2207235 - RNA, 19 nt, Homo sapiens
  misc_RNA (1)...(19): siRNA sense strand
gcaggacccuaagcucuug

SEQ ID NO: 2207236 - RNA, 19 nt, Homo sapiens
  misc_RNA (1)...(19): siRNA sense strand
ugacagcgcaggacccuaa

SEQ ID NO: 2207237 - RNA, 19 nt, Homo sapiens
  misc_RNA (1)...(19): siRNA sense strand
gcccaacuuuaucuucuuu

SEQ ID NO: 2207238 - RNA, 19 nt, Homo sapiens
  misc_RNA (1)...(19): siRNA sense strand
aagaggaaauggaaacaga

SEQ ID NO: 2207239 - RNA, 19 nt, Homo sapiens
  misc_RNA (1)...(19): siRNA sense strand
gggaucaacccacauuuau

SEQ ID NO: 2207240 - RNA, 19 nt, Homo sapiens
  misc_RNA (1)...(19): siRNA sense strand
caccucagcucuucacugu

SEQ ID NO: 2207241 - RNA, 19 nt, Homo sapiens
  misc_RNA (1)...(19): siRNA sense strand
gaagacaaaccagaugaga

SEQ ID NO: 2207242 - RNA, 19 nt, Homo sapiens
  misc_RNA (1)...(19): siRNA sense strand
caugaugccuucuucaagu

SEQ ID NO: 2207243 - RNA, 19 nt, Homo sapiens
  misc_RNA (1)...(19): siRNA sense strand
gcacaaggacagugaugau

SEQ ID NO: 2207244 - RNA, 19 nt, Homo sapiens
  misc_RNA (1)...(19): siRNA sense strand
gagaaaguucggccuaaga

SEQ ID NO: 2207245 - RNA, 19 nt, Homo sapiens
  misc_RNA (1)...(19): siRNA sense strand
cggcacagcucccuggaau

SEQ ID NO: 2207246 - RNA, 19 nt, Homo sapiens
  misc_RNA (1)...(19): siRNA sense strand
ccacgccacugguguuuua

SEQ ID NO: 2207247 - RNA, 19 nt, Homo sapiens
  misc_RNA (1)...(19): siRNA sense strand
ugaagaaggagaaagagaa

SEQ ID NO: 2207248 - RNA, 19 nt, Homo sapiens
  misc_RNA (1)...(19): siRNA sense strand
guaggaaccgaaagaagaa

SEQ ID NO: 2207249 - RNA, 19 nt, Homo sapiens
  misc_RNA (1)...(19): siRNA sense strand
gcagacaguggccuuauca

SEQ ID NO: 2207250 - RNA, 19 nt, Homo sapiens
  misc_RNA (1)...(19): siRNA sense strand
uaagcucacugaugaugug

SEQ ID NO: 2207251 - RNA, 19 nt, Homo sapiens
  misc_RNA (1)...(19): siRNA sense strand
gagcccaacuuuaucuucu

SEQ ID NO: 2207252 - RNA, 19 nt, Homo sapiens
  misc_RNA (1)...(19): siRNA sense strand
gaagaagccaggagaucug

SEQ ID NO: 2207253 - RNA, 19 nt, Homo sapiens
  misc_RNA (1)...(19): siRNA sense strand
ugaggaagaagaagauuga

SEQ ID NO: 2207254 - RNA, 19 nt, Homo sapiens
  misc_RNA (1)...(19): siRNA sense strand
ggagaccccugaacucauu

SEQ ID NO: 2207255 - RNA, 19 nt, Homo sapiens
  misc_RNA (1)...(19): siRNA sense strand
gaagaggaagaaagugaug

SEQ ID NO: 2207256 - RNA, 19 nt, Homo sapiens
  misc_RNA (1)...(19): siRNA sense strand
gaaggagagccgccaggaa

SEQ ID NO: 2207257 - RNA, 19 nt, Homo sapiens
  misc_RNA (1)...(19): siRNA sense strand
gcuggcgccugaagaguug

SEQ ID NO: 2207258 - RNA, 19 nt, Homo sapiens
  misc_RNA (1)...(19): siRNA sense strand
gaugaugacagcagugaug

SEQ ID NO: 2207259 - RNA, 19 nt, Homo sapiens
  misc_RNA (1)...(19): siRNA sense strand
agagaaacuugacaaacug

SEQ ID NO: 2207260 - RNA, 19 nt, Homo sapiens
  misc_RNA (1)...(19): siRNA sense strand
caacccacauuuaugacau

SEQ ID NO: 2207261 - RNA, 19 nt, Homo sapiens
  misc_RNA (1)...(19): siRNA sense strand
gagcugaggaagaagaaga

SEQ ID NO: 2207262 - RNA, 19 nt, Homo sapiens
  misc_RNA (1)...(19): siRNA sense strand
caagaagaagggauuugaa

SEQ ID NO: 2207263 - RNA, 19 nt, Homo sapiens
  misc_RNA (1)...(19): siRNA sense strand
ccaagaagaagggauuuga

SEQ ID NO: 2207264 - RNA, 19 nt, Homo sapiens
  misc_RNA (1)...(19): siRNA sense strand
gacugaagaaccugaaauu

SEQ ID NO: 2207265 - RNA, 19 nt, Homo sapiens
  misc_RNA (1)...(19): siRNA sense strand
caucguaucccaaccugaa

SEQ ID NO: 2207266 - RNA, 19 nt, Homo sapiens
  misc_RNA (1)...(19): siRNA sense strand
ugauugccaugcagcgaua

SEQ ID NO: 2207267 - RNA, 19 nt, Homo sapiens
  misc_RNA (1)...(19): siRNA sense strand
ggagaaggaagaacagaag

SEQ ID NO: 2207268 - RNA, 19 nt, Homo sapiens
  misc_RNA (1)...(19): siRNA sense strand
caagacaugggccagauug

SEQ ID NO: 2207269 - RNA, 19 nt, Homo sapiens
  misc_RNA (1)...(19): siRNA sense strand
uggagaagacgacauuuga

SEQ ID NO: 2207270 - RNA, 19 nt, Homo sapiens
  misc_RNA (1)...(19): siRNA sense strand
ggagaugcacgaugugaca

SEQ ID NO: 2207271 - RNA, 19 nt, Homo sapiens
  misc_RNA (1)...(19): siRNA sense strand
cugaugaugugaagaagga

SEQ ID NO: 2207272 - RNA, 19 nt, Homo sapiens
  misc_RNA (1)...(19): siRNA sense strand
gaaccgaaagaagaagaaa

SEQ ID NO: 2207273 - RNA, 19 nt, Homo sapiens
  misc_RNA (1)...(19): siRNA sense strand
cguaggaaccgaaagaaga

SEQ ID NO: 2207274 - RNA, 19 nt, Homo sapiens
  misc_RNA (1)...(19): siRNA sense strand
gaacgacagcaggagauug

SEQ ID NO: 2207275 - RNA, 19 nt, Homo sapiens
  misc_RNA (1)...(19): siRNA sense strand
gaggaggcuuaguggagaa

SEQ ID NO: 2207276 - RNA, 19 nt, Homo sapiens
  misc_RNA (1)...(19): siRNA sense strand
gaaaguucggccuaagaug

SEQ ID NO: 2207277 - RNA, 19 nt, Homo sapiens
  misc_RNA (1)...(19): siRNA sense strand
gaagaaguugcgccgaaug

SEQ ID NO: 2207278 - RNA, 19 nt, Homo sapiens
  misc_RNA (1)...(19): siRNA sense strand
agaagaagaggaagaggaa

SEQ ID NO: 2207279 - RNA, 19 nt, Homo sapiens
  misc_RNA (1)...(19): siRNA sense strand
agacaaaccagaugagaca

SEQ ID NO: 2207280 - RNA, 19 nt, Homo sapiens
  misc_RNA (1)...(19): siRNA sense strand
gaccgagaccugcgcacua

SEQ ID NO: 2207281 - RNA, 19 nt, Homo sapiens
  misc_RNA (1)...(19): siRNA sense strand
ucacuguguugccagagaa

SEQ ID NO: 2207282 - RNA, 19 nt, Homo sapiens
  misc_RNA (1)...(19): siRNA sense strand
ggaagaggaagaaagugau

SEQ ID NO: 2207283 - RNA, 19 nt, Homo sapiens
  misc_RNA (1)...(19): siRNA sense strand
gaagaggaagaggaagaaa

SEQ ID NO: 2207284 - RNA, 19 nt, Homo sapiens
  misc_RNA (1)...(19): siRNA sense strand
gaggaaauggaaacagaug

SEQ ID NO: 2207285 - RNA, 19 nt, Homo sapiens
  misc_RNA (1)...(19): siRNA sense strand
ggaucaacccacauuuaug

SEQ ID NO: 2207286 - RNA, 19 nt, Homo sapiens
  misc_RNA (1)...(19): siRNA sense strand
gaugaagacaaaccagaug

SEQ ID NO: 2207287 - RNA, 19 nt, Homo sapiens
  misc_RNA (1)...(19): siRNA sense strand
gaccaaaugcccacaaggu

SEQ ID NO: 2207288 - RNA, 19 nt, Homo sapiens
  misc_RNA (1)...(19): siRNA sense strand
cagaagaccaugaagucaa

SEQ ID NO: 2207289 - RNA, 19 nt, Homo sapiens
  misc_RNA (1)...(19): siRNA sense strand
acccuaagcucuugguuca

SEQ ID NO: 2207290 - RNA, 19 nt, Homo sapiens
  misc_RNA (1)...(19): siRNA sense strand
acaaggacagugaugauga

SEQ ID NO: 2207291 - RNA, 19 nt, Homo sapiens
  misc_RNA (1)...(19): siRNA sense strand
uugaguaugugacugaaga

SEQ ID NO: 2207292 - RNA, 19 nt, Homo sapiens
  misc_RNA (1)...(19): siRNA sense strand
agaagauccugcagcugaa

SEQ ID NO: 2207293 - RNA, 19 nt, Homo sapiens
  misc_RNA (1)...(19): siRNA sense strand
aaggaggacuucagugaca

SEQ ID NO: 2207294 - RNA, 19 nt, Homo sapiens
  misc_RNA (1)...(19): siRNA sense strand
gaagaaagugaugaagaca

SEQ ID NO: 2207295 - RNA, 19 nt, Homo sapiens
  misc_RNA (1)...(19): siRNA sense strand
gagaagaagccaggagauc

SEQ ID NO: 2207296 - RNA, 19 nt, Homo sapiens
  misc_RNA (1)...(19): siRNA sense strand
uggagcggcugcagagcua

SEQ ID NO: 2207297 - RNA, 19 nt, Homo sapiens
  misc_RNA (1)...(19): siRNA sense strand
gagaaggaagaacagaaga

SEQ ID NO: 2207298 - RNA, 19 nt, Homo sapiens
  misc_RNA (1)...(19): siRNA sense strand
gagugucucuggcacaguu

SEQ ID NO: 2207299 - RNA, 19 nt, Homo sapiens
  misc_RNA (1)...(19): siRNA sense strand
gggaugggaucaccuucca

SEQ ID NO: 2207300 - RNA, 19 nt, Homo sapiens
  misc_RNA (1)...(19): siRNA sense strand
cugcuucccuggcucaugu

SEQ ID NO: 2207301 - RNA, 19 nt, Homo sapiens
  misc_RNA (1)...(19): siRNA sense strand
gccuggagcuggcuuacgu

SEQ ID NO: 2207302 - RNA, 19 nt, Homo sapiens
  misc_RNA (1)...(19): siRNA sense strand
gggcuuacugcuaccaaug

SEQ ID NO: 2207303 - RNA, 19 nt, Homo sapiens
  misc_RNA (1)...(19): siRNA sense strand
gcucacaggcagagugucu

SEQ ID NO: 2207304 - RNA, 19 nt, Homo sapiens
  misc_RNA (1)...(19): siRNA sense strand
gagaagauggaaacuguua

SEQ ID NO: 2207305 - RNA, 19 nt, Homo sapiens
  misc_RNA (1)...(19): siRNA sense strand
gcacggagcaccucucuga

SEQ ID NO: 2207306 - RNA, 19 nt, Homo sapiens
  misc_RNA (1)...(19): siRNA sense strand
gagaggaacaaauguggua

SEQ ID NO: 2207307 - RNA, 19 nt, Homo sapiens
  misc_RNA (1)...(19): siRNA sense strand
cggaggagcuucaucuuca

SEQ ID NO: 2207308 - RNA, 19 nt, Homo sapiens
  misc_RNA (1)...(19): siRNA sense strand
gaacugcucaacaaacuuc

SEQ ID NO: 2207309 - RNA, 19 nt, Homo sapiens
  misc_RNA (1)...(19): siRNA sense strand
cgagauguccagcaaagua

SEQ ID NO: 2207310 - RNA, 19 nt, Homo sapiens
  misc_RNA (1)...(19): siRNA sense strand
gaaccggcaucgcgaacug

SEQ ID NO: 2207311 - RNA, 19 nt, Homo sapiens
  misc_RNA (1)...(19): siRNA sense strand
ggugagagccugcgaguag

SEQ ID NO: 2207312 - RNA, 19 nt, Homo sapiens
  misc_RNA (1)...(19): siRNA sense strand
gcaggaggaggaggacuua

SEQ ID NO: 2207313 - RNA, 19 nt, Homo sapiens
  misc_RNA (1)...(19): siRNA sense strand
caucagcaacgcucacuuu

SEQ ID NO: 2207314 - RNA, 19 nt, Homo sapiens
  misc_RNA (1)...(19): siRNA sense strand
ggaggagcuucaucuucaa

SEQ ID NO: 2207315 - RNA, 19 nt, Homo sapiens
  misc_RNA (1)...(19): siRNA sense strand
ugggaaaccuggagucugu

SEQ ID NO: 2207316 - RNA, 19 nt, Homo sapiens
  misc_RNA (1)...(19): siRNA sense strand
cugagaagauggaaacugu

SEQ ID NO: 2207317 - RNA, 19 nt, Homo sapiens
  misc_RNA (1)...(19): siRNA sense strand
acgaugaccuccugcaguu

SEQ ID NO: 2207318 - RNA, 19 nt, Homo sapiens
  misc_RNA (1)...(19): siRNA sense strand
cggagcaccucucugauca

SEQ ID NO: 2207319 - RNA, 19 nt, Homo sapiens
  misc_RNA (1)...(19): siRNA sense strand
gcuacgaggccaaggugua

SEQ ID NO: 2207320 - RNA, 19 nt, Homo sapiens
  misc_RNA (1)...(19): siRNA sense strand
gggaagcccugaccaacac

SEQ ID NO: 2207321 - RNA, 19 nt, Homo sapiens
  misc_RNA (1)...(19): siRNA sense strand
ggccacgguuuaugaggaa

SEQ ID NO: 2207322 - RNA, 19 nt, Homo sapiens
  misc_RNA (1)...(19): siRNA sense strand
ccagcaaaguacagagguu

SEQ ID NO: 2207323 - RNA, 19 nt, Homo sapiens
  misc_RNA (1)...(19): siRNA sense strand
ggacaagucgaggagcaaa

SEQ ID NO: 2207324 - RNA, 19 nt, Homo sapiens
  misc_RNA (1)...(19): siRNA sense strand
aaauugagauuccccuuuu

SEQ ID NO: 2207325 - RNA, 19 nt, Homo sapiens
  misc_RNA (1)...(19): siRNA sense strand
ggaaaccuggagucuguga

SEQ ID NO: 2207326 - RNA, 19 nt, Homo sapiens
  misc_RNA (1)...(19): siRNA sense strand
ggauggcgcagcagcauuc

SEQ ID NO: 2207327 - RNA, 19 nt, Homo sapiens
  misc_RNA (1)...(19): siRNA sense strand
caaccuguguggcugugau

SEQ ID NO: 2207328 - RNA, 19 nt, Homo sapiens
  misc_RNA (1)...(19): siRNA sense strand
gcaaaguacagagguucaa

SEQ ID NO: 2207329 - RNA, 19 nt, Homo sapiens
  misc_RNA (1)...(19): siRNA sense strand
uuccggaacugcucaacaa

SEQ ID NO: 2207330 - RNA, 19 nt, Homo sapiens
  misc_RNA (1)...(19): siRNA sense strand
ccuggacacucguaaugug

SEQ ID NO: 2207331 - RNA, 19 nt, Homo sapiens
  misc_RNA (1)...(19): siRNA sense strand
cggaacugcucaacaaacu

SEQ ID NO: 2207332 - RNA, 19 nt, Homo sapiens
  misc_RNA (1)...(19): siRNA sense strand
gaagauggaaacuguuagc

SEQ ID NO: 2207333 - RNA, 19 nt, Homo sapiens
  misc_RNA (1)...(19): siRNA sense strand
gugagagccugcgaguaga

SEQ ID NO: 2207334 - RNA, 19 nt, Homo sapiens
  misc_RNA (1)...(19): siRNA sense strand
caacuucagccuggaguca

SEQ ID NO: 2207335 - RNA, 19 nt, Homo sapiens
  misc_RNA (1)...(19): siRNA sense strand
ggucugagaagauggaaac

SEQ ID NO: 2207336 - RNA, 19 nt, Homo sapiens
  misc_RNA (1)...(19): siRNA sense strand
gccaccagcacgacauuga

SEQ ID NO: 2207337 - RNA, 19 nt, Homo sapiens
  misc_RNA (1)...(19): siRNA sense strand
cucguaauguggccuuuga

SEQ ID NO: 2207338 - RNA, 19 nt, Homo sapiens
  misc_RNA (1)...(19): siRNA sense strand
ggaacugcucaacaaacuu

SEQ ID NO: 2207339 - RNA, 19 nt, Homo sapiens
  misc_RNA (1)...(19): siRNA sense strand
caacgugggcaaagagaac

SEQ ID NO: 2207340 - RNA, 19 nt, Homo sapiens
  misc_RNA (1)...(19): siRNA sense strand
aaaccuggagucugugaga

SEQ ID NO: 2207341 - RNA, 19 nt, Homo sapiens
  misc_RNA (1)...(19): siRNA sense strand
ccaccagcacgacauugaa

SEQ ID NO: 2207342 - RNA, 19 nt, Homo sapiens
  misc_RNA (1)...(19): siRNA sense strand
cgauuucuacguugagaug

SEQ ID NO: 2207343 - RNA, 19 nt, Homo sapiens
  misc_RNA (1)...(19): siRNA sense strand
ggaggaggaggacuuacag

SEQ ID NO: 2207344 - RNA, 19 nt, Homo sapiens
  misc_RNA (1)...(19): siRNA sense strand
gagauguccagcaaaguac

SEQ ID NO: 2207345 - RNA, 19 nt, Homo sapiens
  misc_RNA (1)...(19): siRNA sense strand
gaggaacaaaugugguauc

SEQ ID NO: 2207346 - RNA, 19 nt, Homo sapiens
  misc_RNA (1)...(19): siRNA sense strand
caccuggacacucguaaug

SEQ ID NO: 2207347 - RNA, 19 nt, Homo sapiens
  misc_RNA (1)...(19): siRNA sense strand
gagcccuggugauggaagu

SEQ ID NO: 2207348 - RNA, 19 nt, Homo sapiens
  misc_RNA (1)...(19): siRNA sense strand
cguaauguggccuuugaga

SEQ ID NO: 2207349 - RNA, 19 nt, Homo sapiens
  misc_RNA (1)...(19): siRNA sense strand
gaacauauaccugaaacaa

SEQ ID NO: 2207350 - RNA, 19 nt, Homo sapiens
  misc_RNA (1)...(19): siRNA sense strand
acgagaaccuuaaaccuuu

SEQ ID NO: 2207351 - RNA, 19 nt, Homo sapiens
  misc_RNA (1)...(19): siRNA sense strand
cuacagcaaucaugaagga

SEQ ID NO: 2207352 - RNA, 19 nt, Homo sapiens
  misc_RNA (1)...(19): siRNA sense strand
cguuggcucugaacauaua

SEQ ID NO: 2207353 - RNA, 19 nt, Homo sapiens
  misc_RNA (1)...(19): siRNA sense strand
ugacugggcucagcacaug

SEQ ID NO: 2207354 - RNA, 19 nt, Homo sapiens
  misc_RNA (1)...(19): siRNA sense strand
cuuaaaccuuuccuucuuu

SEQ ID NO: 2207355 - RNA, 19 nt, Homo sapiens
  misc_RNA (1)...(19): siRNA sense strand
ggucaugugucaccuaacu

SEQ ID NO: 2207356 - RNA, 19 nt, Homo sapiens
  misc_RNA (1)...(19): siRNA sense strand
ccuuaaaccuuuccuucuu

SEQ ID NO: 2207357 - RNA, 19 nt, Homo sapiens
  misc_RNA (1)...(19): siRNA sense strand
cagcuuggcuacagcaauc

SEQ ID NO: 2207358 - RNA, 19 nt, Homo sapiens
  misc_RNA (1)...(19): siRNA sense strand
cacgagaaccuuaaaccuu

SEQ ID NO: 2207359 - RNA, 19 nt, Homo sapiens
  misc_RNA (1)...(19): siRNA sense strand
ugaaacaaccucccuacca

SEQ ID NO: 2207360 - RNA, 19 nt, Homo sapiens
  misc_RNA (1)...(19): siRNA sense strand
uaacauggccgagaaaucc

SEQ ID NO: 2207361 - RNA, 19 nt, Homo sapiens
  misc_RNA (1)...(19): siRNA sense strand
cgagaaccuuaaaccuuuc

SEQ ID NO: 2207362 - RNA, 19 nt, Homo sapiens
  misc_RNA (1)...(19): siRNA sense strand
uuaaaccuuuccuucuuuc

SEQ ID NO: 2207363 - RNA, 19 nt, Homo sapiens
  misc_RNA (1)...(19): siRNA sense strand
gaaccuuaaaccuuuccuu

SEQ ID NO: 2207364 - RNA, 19 nt, Homo sapiens
  misc_RNA (1)...(19): siRNA sense strand
guaacauggccgagaaauc

SEQ ID NO: 2207365 - RNA, 19 nt, Homo sapiens
  misc_RNA (1)...(19): siRNA sense strand
ucaugugucaccuaacuga

SEQ ID NO: 2207366 - RNA, 19 nt, Homo sapiens
  misc_RNA (1)...(19): siRNA sense strand
aucguuggcucugaacaua

SEQ ID NO: 2207367 - RNA, 19 nt, Homo sapiens
  misc_RNA (1)...(19): siRNA sense strand
ggagugaagagugcaugga

SEQ ID NO: 2207368 - RNA, 19 nt, Homo sapiens
  misc_RNA (1)...(19): siRNA sense strand
ccaggugggaugcguaaca

SEQ ID NO: 2207369 - RNA, 19 nt, Homo sapiens
  misc_RNA (1)...(19): siRNA sense strand
ugcguaacauggccgagaa

SEQ ID NO: 2207370 - RNA, 19 nt, Homo sapiens
  misc_RNA (1)...(19): siRNA sense strand
ggggucaugugucaccuaa

SEQ ID NO: 2207371 - RNA, 19 nt, Homo sapiens
  misc_RNA (1)...(19): siRNA sense strand
caaagaugcuggcagauuu

SEQ ID NO: 2207372 - RNA, 19 nt, Homo sapiens
  misc_RNA (1)...(19): siRNA sense strand
caaaguggcuucuguguuc

SEQ ID NO: 2207373 - RNA, 19 nt, Homo sapiens
  misc_RNA (1)...(19): siRNA sense strand
ccaccugcaucuauacuua

SEQ ID NO: 2207374 - RNA, 19 nt, Homo sapiens
  misc_RNA (1)...(19): siRNA sense strand
gaugcuggcagauuuauua

SEQ ID NO: 2207375 - RNA, 19 nt, Homo sapiens
  misc_RNA (1)...(19): siRNA sense strand
gcagauuuauuaucagaga

SEQ ID NO: 2207376 - RNA, 19 nt, Homo sapiens
  misc_RNA (1)...(19): siRNA sense strand
gcuggcagauuuauuauca

SEQ ID NO: 2207377 - RNA, 19 nt, Homo sapiens
  misc_RNA (1)...(19): siRNA sense strand
gaauguaauuagcaggaaa

SEQ ID NO: 2207378 - RNA, 19 nt, Homo sapiens
  misc_RNA (1)...(19): siRNA sense strand
ggaguaaggaaguaaagaa

SEQ ID NO: 2207379 - RNA, 19 nt, Homo sapiens
  misc_RNA (1)...(19): siRNA sense strand
gacacacacuugaaggaaa

SEQ ID NO: 2207380 - RNA, 19 nt, Homo sapiens
  misc_RNA (1)...(19): siRNA sense strand
gacacaauccugaaagaaa

SEQ ID NO: 2207381 - RNA, 19 nt, Homo sapiens
  misc_RNA (1)...(19): siRNA sense strand
gcuccaaugucauccauca

SEQ ID NO: 2207382 - RNA, 19 nt, Homo sapiens
  misc_RNA (1)...(19): siRNA sense strand
caucuauacuuaccugaga

SEQ ID NO: 2207383 - RNA, 19 nt, Homo sapiens
  misc_RNA (1)...(19): siRNA sense strand
uacguucucuucuccauuu

SEQ ID NO: 2207384 - RNA, 19 nt, Homo sapiens
  misc_RNA (1)...(19): siRNA sense strand
ugaaagaaagcauaaguuc

SEQ ID NO: 2207385 - RNA, 19 nt, Homo sapiens
  misc_RNA (1)...(19): siRNA sense strand
ggucaacacuagcuauguc

SEQ ID NO: 2207386 - RNA, 19 nt, Homo sapiens
  misc_RNA (1)...(19): siRNA sense strand
ccaaagaugcuggcagauu

SEQ ID NO: 2207387 - RNA, 19 nt, Homo sapiens
  misc_RNA (1)...(19): siRNA sense strand
acacaauccugaaagaaag

SEQ ID NO: 2207388 - RNA, 19 nt, Homo sapiens
  misc_RNA (1)...(19): siRNA sense strand
ccaggaccgucuaccuaaa

SEQ ID NO: 2207389 - RNA, 19 nt, Homo sapiens
  misc_RNA (1)...(19): siRNA sense strand
aaagaugcuggcagauuua

SEQ ID NO: 2207390 - RNA, 19 nt, Homo sapiens
  misc_RNA (1)...(19): siRNA sense strand
ugucauccaucacuucuuc

SEQ ID NO: 2207391 - RNA, 19 nt, Homo sapiens
  misc_RNA (1)...(19): siRNA sense strand
ugucauccaucacuucuuc

SEQ ID NO: 2207392 - RNA, 19 nt, Homo sapiens
  misc_RNA (1)...(19): siRNA sense strand
uggcagauuuauuaucaga

SEQ ID NO: 2207393 - RNA, 19 nt, Homo sapiens
  misc_RNA (1)...(19): siRNA sense strand
ccaaugucauccaucacuu

SEQ ID NO: 2207394 - RNA, 19 nt, Homo sapiens
  misc_RNA (1)...(19): siRNA sense strand
ccaaugucauccaucacuu

SEQ ID NO: 2207395 - RNA, 19 nt, Homo sapiens
  misc_RNA (1)...(19): siRNA sense strand
cagauguacuucuuuaucg

SEQ ID NO: 2207396 - RNA, 19 nt, Homo sapiens
  misc_RNA (1)...(19): siRNA sense strand
guaauuagcaggaaaagga

SEQ ID NO: 2207397 - RNA, 19 nt, Homo sapiens
  misc_RNA (1)...(19): siRNA sense strand
ccucaggaguaaggaagua

SEQ ID NO: 2207398 - RNA, 19 nt, Homo sapiens
  misc_RNA (1)...(19): siRNA sense strand
gucagcagcuugucauucu

SEQ ID NO: 2207399 - RNA, 19 nt, Homo sapiens
  misc_RNA (1)...(19): siRNA sense strand
gucagcagcuugucauucu

SEQ ID NO: 2207400 - RNA, 19 nt, Homo sapiens
  misc_RNA (1)...(19): siRNA sense strand
gcuggcugcuuccuacaga

SEQ ID NO: 2207401 - RNA, 19 nt, Homo sapiens
  misc_RNA (1)...(19): siRNA sense strand
gaacuucauggucaacaca

SEQ ID NO: 2207402 - RNA, 19 nt, Homo sapiens
  misc_RNA (1)...(19): siRNA sense strand
caucacuucuucugcaaca

SEQ ID NO: 2207403 - RNA, 19 nt, Homo sapiens
  misc_RNA (1)...(19): siRNA sense strand
ucaccugacagccauaauu

SEQ ID NO: 2207404 - RNA, 19 nt, Homo sapiens
  misc_RNA (1)...(19): siRNA sense strand
cgaauguaauuagcaggaa

SEQ ID NO: 2207405 - RNA, 19 nt, Homo sapiens
  misc_RNA (1)...(19): siRNA sense strand
ugaauccucugaucuacag

SEQ ID NO: 2207406 - RNA, 19 nt, Homo sapiens
  misc_RNA (1)...(19): siRNA sense strand
ggcuuuagcgaauguaauu

SEQ ID NO: 2207407 - RNA, 19 nt, Homo sapiens
  misc_RNA (1)...(19): siRNA sense strand
acacacacuugaaggaaag

SEQ ID NO: 2207408 - RNA, 19 nt, Homo sapiens
  misc_RNA (1)...(19): siRNA sense strand
cauguugaauccucugauc

SEQ ID NO: 2207409 - RNA, 19 nt, Homo sapiens
  misc_RNA (1)...(19): siRNA sense strand
ccgaaugcauccucuuugg

SEQ ID NO: 2207410 - RNA, 19 nt, Homo sapiens
  misc_RNA (1)...(19): siRNA sense strand
ugguuaaccuguccuuugu

SEQ ID NO: 2207411 - RNA, 19 nt, Homo sapiens
  misc_RNA (1)...(19): siRNA sense strand
cagccauaauucuguucua

SEQ ID NO: 2207412 - RNA, 19 nt, Homo sapiens
  misc_RNA (1)...(19): siRNA sense strand
ggacucugcuugucauccu

SEQ ID NO: 2207413 - RNA, 19 nt, Homo sapiens
  misc_RNA (1)...(19): siRNA sense strand
ccgaaugcauccucuuugg

SEQ ID NO: 2207414 - RNA, 19 nt, Homo sapiens
  misc_RNA (1)...(19): siRNA sense strand
acacuugaaggaaagcaua

SEQ ID NO: 2207415 - RNA, 19 nt, Homo sapiens
  misc_RNA (1)...(19): siRNA sense strand
ucuacagccucaggaguaa

SEQ ID NO: 2207416 - RNA, 19 nt, Homo sapiens
  misc_RNA (1)...(19): siRNA sense strand
ccaggacagucugccuaaa

SEQ ID NO: 2207417 - RNA, 19 nt, Homo sapiens
  misc_RNA (1)...(19): siRNA sense strand
cugcaggguugcugaacuu

SEQ ID NO: 2207418 - RNA, 19 nt, Homo sapiens
  misc_RNA (1)...(19): siRNA sense strand
gccuaugaccgguauguga

SEQ ID NO: 2207419 - RNA, 19 nt, Homo sapiens
  misc_RNA (1)...(19): siRNA sense strand
agaaggcuuuagcgaaugu

SEQ ID NO: 2207420 - RNA, 19 nt, Homo sapiens
  misc_RNA (1)...(19): siRNA sense strand
uggcuggugugaauauugu

SEQ ID NO: 2207421 - RNA, 19 nt, Homo sapiens
  misc_RNA (1)...(19): siRNA sense strand
gacaaaguggcuucugugu

SEQ ID NO: 2207422 - RNA, 19 nt, Homo sapiens
  misc_RNA (1)...(19): siRNA sense strand
gaccucuuccuuucuguga

SEQ ID NO: 2207423 - RNA, 19 nt, Homo sapiens
  misc_RNA (1)...(19): siRNA sense strand
gcccgcugcuuuacuccuu

SEQ ID NO: 2207424 - RNA, 19 nt, Homo sapiens
  misc_RNA (1)...(19): siRNA sense strand
gaguaaggaaguaaagaag

SEQ ID NO: 2207425 - RNA, 19 nt, Homo sapiens
  misc_RNA (1)...(19): siRNA sense strand
ugacacaauccugaaagaa

SEQ ID NO: 2207426 - RNA, 19 nt, Homo sapiens
  misc_RNA (1)...(19): siRNA sense strand
cugcuuuacuccuugauca

SEQ ID NO: 2207427 - RNA, 19 nt, Homo sapiens
  misc_RNA (1)...(19): siRNA sense strand
gcccgcugcuuuacuccuu

SEQ ID NO: 2207428 - RNA, 19 nt, Homo sapiens
  misc_RNA (1)...(19): siRNA sense strand
ugacacacacuugaaggaa

SEQ ID NO: 2207429 - RNA, 19 nt, Homo sapiens
  misc_RNA (1)...(19): siRNA sense strand
cugcuuuacuccuugauca

SEQ ID NO: 2207430 - RNA, 19 nt, Homo sapiens
  misc_RNA (1)...(19): siRNA sense strand
acuccaaugucauccauca

SEQ ID NO: 2207431 - RNA, 19 nt, Homo sapiens
  misc_RNA (1)...(19): siRNA sense strand
cugacacaauccugaaaga

SEQ ID NO: 2207432 - RNA, 19 nt, Homo sapiens
  misc_RNA (1)...(19): siRNA sense strand
caggguugcugaacuccau

SEQ ID NO: 2207433 - RNA, 19 nt, Homo sapiens
  misc_RNA (1)...(19): siRNA sense strand
cuugaaggaaagcauauuu

SEQ ID NO: 2207434 - RNA, 19 nt, Homo sapiens
  misc_RNA (1)...(19): siRNA sense strand
guucugacacacacuugaa

SEQ ID NO: 2207435 - RNA, 19 nt, Homo sapiens
  misc_RNA (1)...(19): siRNA sense strand
guggacauuuguuacucaa

SEQ ID NO: 2207436 - RNA, 19 nt, Homo sapiens
  misc_RNA (1)...(19): siRNA sense strand
caccugacagccauaauuc

SEQ ID NO: 2207437 - RNA, 19 nt, Homo sapiens
  misc_RNA (1)...(19): siRNA sense strand
acagauguacuucuuuauc

SEQ ID NO: 2207438 - RNA, 19 nt, Homo sapiens
  misc_RNA (1)...(19): siRNA sense strand
acaaaguggcuucuguguu

SEQ ID NO: 2207439 - RNA, 19 nt, Homo sapiens
  misc_RNA (1)...(19): siRNA sense strand
caguggugauucccauguu

SEQ ID NO: 2207440 - RNA, 19 nt, Homo sapiens
  misc_RNA (1)...(19): siRNA sense strand
uguugaauccucugaucua

SEQ ID NO: 2207441 - RNA, 19 nt, Homo sapiens
  misc_RNA (1)...(19): siRNA sense strand
gcucucuuguucugacaca

SEQ ID NO: 2207442 - RNA, 19 nt, Homo sapiens
  misc_RNA (1)...(19): siRNA sense strand
gucauucuguggcuccaau

SEQ ID NO: 2207443 - RNA, 19 nt, Homo sapiens
  misc_RNA (1)...(19): siRNA sense strand
cauccucuuuggguuaaug

SEQ ID NO: 2207444 - RNA, 19 nt, Homo sapiens
  misc_RNA (1)...(19): siRNA sense strand
gcuuuagcgaauguaauua

SEQ ID NO: 2207445 - RNA, 19 nt, Homo sapiens
  misc_RNA (1)...(19): siRNA sense strand
aggacaaaguggcuucugu

SEQ ID NO: 2207446 - RNA, 19 nt, Homo sapiens
  misc_RNA (1)...(19): siRNA sense strand
ccagcuacucccugaauca

SEQ ID NO: 2207447 - RNA, 19 nt, Homo sapiens
  misc_RNA (1)...(19): siRNA sense strand
agccauaauucuguucuau

SEQ ID NO: 2207448 - RNA, 19 nt, Homo sapiens
  misc_RNA (1)...(19): siRNA sense strand
cugaaagaaagcauaaguu

SEQ ID NO: 2207449 - RNA, 19 nt, Homo sapiens
  misc_RNA (1)...(19): siRNA sense strand
cauccucuuuggguuaaug

SEQ ID NO: 2207450 - RNA, 19 nt, Homo sapiens
  misc_RNA (1)...(19): siRNA sense strand
gugaauaagauguacuucu

SEQ ID NO: 2207451 - RNA, 19 nt, Homo sapiens
  misc_RNA (1)...(19): siRNA sense strand
uugcuggugugaauaagau

SEQ ID NO: 2207452 - RNA, 19 nt, Homo sapiens
  misc_RNA (1)...(19): siRNA sense strand
caaccaccaucaccccaaa

SEQ ID NO: 2207453 - RNA, 19 nt, Homo sapiens
  misc_RNA (1)...(19): siRNA sense strand
caaugucauccaucacuuc

SEQ ID NO: 2207454 - RNA, 19 nt, Homo sapiens
  misc_RNA (1)...(19): siRNA sense strand
aagaaggcuuuagcgaaug

SEQ ID NO: 2207455 - RNA, 19 nt, Homo sapiens
  misc_RNA (1)...(19): siRNA sense strand
cugguuaaccuguccuuug

SEQ ID NO: 2207456 - RNA, 19 nt, Homo sapiens
  misc_RNA (1)...(19): siRNA sense strand
ccugaaagaaagcauaagu

SEQ ID NO: 2207457 - RNA, 19 nt, Homo sapiens
  misc_RNA (1)...(19): siRNA sense strand
caaugucauccaucacuuc

SEQ ID NO: 2207458 - RNA, 19 nt, Homo sapiens
  misc_RNA (1)...(19): siRNA sense strand
aaccgaaugcauccucuuu

SEQ ID NO: 2207459 - RNA, 19 nt, Homo sapiens
  misc_RNA (1)...(19): siRNA sense strand
guugaauccucugaucuac

SEQ ID NO: 2207460 - RNA, 19 nt, Homo sapiens
  misc_RNA (1)...(19): siRNA sense strand
guucuacacaguggugauu

SEQ ID NO: 2207461 - RNA, 19 nt, Homo sapiens
  misc_RNA (1)...(19): siRNA sense strand
gacauuuguuacucaacca

SEQ ID NO: 2207462 - RNA, 19 nt, Homo sapiens
  misc_RNA (1)...(19): siRNA sense strand
aaccgaaugcauccucuuu

SEQ ID NO: 2207463 - RNA, 19 nt, Homo sapiens
  misc_RNA (1)...(19): siRNA sense strand
guucugacacaauccugaa

SEQ ID NO: 2207464 - RNA, 19 nt, Homo sapiens
  misc_RNA (1)...(19): siRNA sense strand
gcagcuugucauucuguga

SEQ ID NO: 2207465 - RNA, 19 nt, Homo sapiens
  misc_RNA (1)...(19): siRNA sense strand
uccaggaccgucuaccuaa

SEQ ID NO: 2207466 - RNA, 19 nt, Homo sapiens
  misc_RNA (1)...(19): siRNA sense strand
gaacaaggauggaaguuug

SEQ ID NO: 2207467 - RNA, 19 nt, Homo sapiens
  misc_RNA (1)...(19): siRNA sense strand
ggaaugagguccaccacaa

SEQ ID NO: 2207468 - RNA, 19 nt, Homo sapiens
  misc_RNA (1)...(19): siRNA sense strand
gaguuuggcucuaaucuca

SEQ ID NO: 2207469 - RNA, 19 nt, Homo sapiens
  misc_RNA (1)...(19): siRNA sense strand
gguaaaaccugaccuggua

SEQ ID NO: 2207470 - RNA, 19 nt, Homo sapiens
  misc_RNA (1)...(19): siRNA sense strand
cacauuugcucucuacgua

SEQ ID NO: 2207471 - RNA, 19 nt, Homo sapiens
  misc_RNA (1)...(19): siRNA sense strand
uagggaagcuguccagaug

SEQ ID NO: 2207472 - RNA, 19 nt, Homo sapiens
  misc_RNA (1)...(19): siRNA sense strand
ggacagcacaggcaccauu

SEQ ID NO: 2207473 - RNA, 19 nt, Homo sapiens
  misc_RNA (1)...(19): siRNA sense strand
ggaacaaggauggaaguuu

SEQ ID NO: 2207474 - RNA, 19 nt, Homo sapiens
  misc_RNA (1)...(19): siRNA sense strand
gaaauugcugcaucccuuu

SEQ ID NO: 2207475 - RNA, 19 nt, Homo sapiens
  misc_RNA (1)...(19): siRNA sense strand
ucacagggaccuugccuaa

SEQ ID NO: 2207476 - RNA, 19 nt, Homo sapiens
  misc_RNA (1)...(19): siRNA sense strand
ggccauggcuacccagaug

SEQ ID NO: 2207477 - RNA, 19 nt, Homo sapiens
  misc_RNA (1)...(19): siRNA sense strand
caaccugcaagaccauuua

SEQ ID NO: 2207478 - RNA, 19 nt, Homo sapiens
  misc_RNA (1)...(19): siRNA sense strand
gcucaguccuggccaguca

SEQ ID NO: 2207479 - RNA, 19 nt, Homo sapiens
  misc_RNA (1)...(19): siRNA sense strand
aaacaagccaagaaaggua

SEQ ID NO: 2207480 - RNA, 19 nt, Homo sapiens
  misc_RNA (1)...(19): siRNA sense strand
ggcuuuagcuacguaauug

SEQ ID NO: 2207481 - RNA, 19 nt, Homo sapiens
  misc_RNA (1)...(19): siRNA sense strand
guacaacaaugggaacaag

SEQ ID NO: 2207482 - RNA, 19 nt, Homo sapiens
  misc_RNA (1)...(19): siRNA sense strand
cagcaagagugaaauaaaa

SEQ ID NO: 2207483 - RNA, 19 nt, Homo sapiens
  misc_RNA (1)...(19): siRNA sense strand
gcacugcccaggagaagga

SEQ ID NO: 2207484 - RNA, 19 nt, Homo sapiens
  misc_RNA (1)...(19): siRNA sense strand
ggauggaaguuugcagugu

SEQ ID NO: 2207485 - RNA, 19 nt, Homo sapiens
  misc_RNA (1)...(19): siRNA sense strand
ccacaucuacugcuugguu

SEQ ID NO: 2207486 - RNA, 19 nt, Homo sapiens
  misc_RNA (1)...(19): siRNA sense strand
ggaucgaccucacuuccau

SEQ ID NO: 2207487 - RNA, 19 nt, Homo sapiens
  misc_RNA (1)...(19): siRNA sense strand
ggacugcaccaucuguaug

SEQ ID NO: 2207488 - RNA, 19 nt, Homo sapiens
  misc_RNA (1)...(19): siRNA sense strand
ggacugggucucauuagca

SEQ ID NO: 2207489 - RNA, 19 nt, Homo sapiens
  misc_RNA (1)...(19): siRNA sense strand
cagggaagauggaguacca

SEQ ID NO: 2207490 - RNA, 19 nt, Homo sapiens
  misc_RNA (1)...(19): siRNA sense strand
ccacagucccagugaagaa

SEQ ID NO: 2207491 - RNA, 19 nt, Homo sapiens
  misc_RNA (1)...(19): siRNA sense strand
gaugccaauuaccuggaua

SEQ ID NO: 2207492 - RNA, 19 nt, Homo sapiens
  misc_RNA (1)...(19): siRNA sense strand
ucagcaagagugaaauaaa

SEQ ID NO: 2207493 - RNA, 19 nt, Homo sapiens
  misc_RNA (1)...(19): siRNA sense strand
ucacugggauccucaugag

SEQ ID NO: 2207494 - RNA, 19 nt, Homo sapiens
  misc_RNA (1)...(19): siRNA sense strand
ccagugacccgcaagaaca

SEQ ID NO: 2207495 - RNA, 19 nt, Homo sapiens
  misc_RNA (1)...(19): siRNA sense strand
aaaccacauuugcucucua

SEQ ID NO: 2207496 - RNA, 19 nt, Homo sapiens
  misc_RNA (1)...(19): siRNA sense strand
gcuacccagaugccaauua

SEQ ID NO: 2207497 - RNA, 19 nt, Homo sapiens
  misc_RNA (1)...(19): siRNA sense strand
gcccgcagccuacgguaaa

SEQ ID NO: 2207498 - RNA, 19 nt, Homo sapiens
  misc_RNA (1)...(19): siRNA sense strand
cgucagcaagagugaaaua

SEQ ID NO: 2207499 - RNA, 19 nt, Homo sapiens
  misc_RNA (1)...(19): siRNA sense strand
ucacuuccauuggcuuuag

SEQ ID NO: 2207500 - RNA, 19 nt, Homo sapiens
  misc_RNA (1)...(19): siRNA sense strand
cagugugucuuggugauga

SEQ ID NO: 2207501 - RNA, 19 nt, Homo sapiens
  misc_RNA (1)...(19): siRNA sense strand
cuacccagaugccaauuac

SEQ ID NO: 2207502 - RNA, 19 nt, Homo sapiens
  misc_RNA (1)...(19): siRNA sense strand
gaggacugcaccaucugua

SEQ ID NO: 2207503 - RNA, 19 nt, Homo sapiens
  misc_RNA (1)...(19): siRNA sense strand
cgaauccugggaagaguuu

SEQ ID NO: 2207504 - RNA, 19 nt, Homo sapiens
  misc_RNA (1)...(19): siRNA sense strand
ccauccagcaugccuauga

SEQ ID NO: 2207505 - RNA, 19 nt, Homo sapiens
  misc_RNA (1)...(19): siRNA sense strand
guagggaagcuguccagau

SEQ ID NO: 2207506 - RNA, 19 nt, Homo sapiens
  misc_RNA (1)...(19): siRNA sense strand
ggccagaucaaccgucaga

SEQ ID NO: 2207507 - RNA, 19 nt, Homo sapiens
  misc_RNA (1)...(19): siRNA sense strand
gaaugagguccaccacaag

SEQ ID NO: 2207508 - RNA, 19 nt, Homo sapiens
  misc_RNA (1)...(19): siRNA sense strand
ccagugaagaaccuaaaug

SEQ ID NO: 2207509 - RNA, 19 nt, Homo sapiens
  misc_RNA (1)...(19): siRNA sense strand
uaaggcagccguggucaau

SEQ ID NO: 2207510 - RNA, 19 nt, Homo sapiens
  misc_RNA (1)...(19): siRNA sense strand
ggagugggagaacgacaau

SEQ ID NO: 2207511 - RNA, 19 nt, Homo sapiens
  misc_RNA (1)...(19): siRNA sense strand
cuggccaccuugaaucgua

SEQ ID NO: 2207512 - RNA, 19 nt, Homo sapiens
  misc_RNA (1)...(19): siRNA sense strand
ucucuacguagguaauaua

SEQ ID NO: 2207513 - RNA, 19 nt, Homo sapiens
  misc_RNA (1)...(19): siRNA sense strand
gccggcacacgacacuuua

SEQ ID NO: 2207514 - RNA, 19 nt, Homo sapiens
  misc_RNA (1)...(19): siRNA sense strand
gaagacaggcacccaaccu

SEQ ID NO: 2207515 - RNA, 19 nt, Homo sapiens
  misc_RNA (1)...(19): siRNA sense strand
gcucucuacguagguaaua

SEQ ID NO: 2207516 - RNA, 19 nt, Homo sapiens
  misc_RNA (1)...(19): siRNA sense strand
gcaccacaggcgagucaga

SEQ ID NO: 2207517 - RNA, 19 nt, Homo sapiens
  misc_RNA (1)...(19): siRNA sense strand
caacaaugggaacaaggau

SEQ ID NO: 2207518 - RNA, 19 nt, Homo sapiens
  misc_RNA (1)...(19): siRNA sense strand
caggugauccggagacaag

SEQ ID NO: 2207519 - RNA, 19 nt, Homo sapiens
  misc_RNA (1)...(19): siRNA sense strand
auaaugugcuggcugaacu

SEQ ID NO: 2207520 - RNA, 19 nt, Homo sapiens
  misc_RNA (1)...(19): siRNA sense strand
ggaaguuugcaguguccaa

SEQ ID NO: 2207521 - RNA, 19 nt, Homo sapiens
  misc_RNA (1)...(19): siRNA sense strand
ccacgucuaccacaucuac

SEQ ID NO: 2207522 - RNA, 19 nt, Homo sapiens
  misc_RNA (1)...(19): siRNA sense strand
ggccacgucuaccacaucu

SEQ ID NO: 2207523 - RNA, 19 nt, Homo sapiens
  misc_RNA (1)...(19): siRNA sense strand
gaucgaccucacuuccauu

SEQ ID NO: 2207524 - RNA, 19 nt, Homo sapiens
  misc_RNA (1)...(19): siRNA sense strand
gagaaagggagaaaaguuc

SEQ ID NO: 2207525 - RNA, 19 nt, Homo sapiens
  misc_RNA (1)...(19): siRNA sense strand
cauuggcuuuagcuacgua

SEQ ID NO: 2207526 - RNA, 19 nt, Homo sapiens
  misc_RNA (1)...(19): siRNA sense strand
ucaucgaccugcaguccau

SEQ ID NO: 2207527 - RNA, 19 nt, Homo sapiens
  misc_RNA (1)...(19): siRNA sense strand
ccaccacaagacagaguuu

SEQ ID NO: 2207528 - RNA, 19 nt, Homo sapiens
  misc_RNA (1)...(19): siRNA sense strand
uuagcuacguaauugacuu

SEQ ID NO: 2207529 - RNA, 19 nt, Homo sapiens
  misc_RNA (1)...(19): siRNA sense strand
gggagugggagaacgacaa

SEQ ID NO: 2207530 - RNA, 19 nt, Homo sapiens
  misc_RNA (1)...(19): siRNA sense strand
ugcaguccaugaaccaguu

SEQ ID NO: 2207531 - RNA, 19 nt, Homo sapiens
  misc_RNA (1)...(19): siRNA sense strand
aggcagccguggucaaugg

SEQ ID NO: 2207532 - RNA, 19 nt, Homo sapiens
  misc_RNA (1)...(19): siRNA sense strand
cggagguucucgcuacagu

SEQ ID NO: 2207533 - RNA, 19 nt, Homo sapiens
  misc_RNA (1)...(19): siRNA sense strand
gggcaucaccauccagcau

SEQ ID NO: 2207534 - RNA, 19 nt, Homo sapiens
  misc_RNA (1)...(19): siRNA sense strand
acaacaaugggaacaagga

SEQ ID NO: 2207535 - RNA, 19 nt, Homo sapiens
  misc_RNA (1)...(19): siRNA sense strand
gaaacuaccuguccuggaa

SEQ ID NO: 2207536 - RNA, 19 nt, Homo sapiens
  misc_RNA (1)...(19): siRNA sense strand
caaagucaauggcaaguuu

SEQ ID NO: 2207537 - RNA, 19 nt, Homo sapiens
  misc_RNA (1)...(19): siRNA sense strand
gaagaaaccauaagagaau

SEQ ID NO: 2207538 - RNA, 19 nt, Homo sapiens
  misc_RNA (1)...(19): siRNA sense strand
gaaagcauaucaggcaauu

SEQ ID NO: 2207539 - RNA, 19 nt, Homo sapiens
  misc_RNA (1)...(19): siRNA sense strand
ggacgaaguuggaguucaa

SEQ ID NO: 2207540 - RNA, 19 nt, Homo sapiens
  misc_RNA (1)...(19): siRNA sense strand
caacccaacuuuagagcua

SEQ ID NO: 2207541 - RNA, 19 nt, Homo sapiens
  misc_RNA (1)...(19): siRNA sense strand
ggaagaaaccauaagagaa

SEQ ID NO: 2207542 - RNA, 19 nt, Homo sapiens
  misc_RNA (1)...(19): siRNA sense strand
gaagcgcuauuauacauuc

SEQ ID NO: 2207543 - RNA, 19 nt, Homo sapiens
  misc_RNA (1)...(19): siRNA sense strand
ccacugagacucuuugaaa

SEQ ID NO: 2207544 - RNA, 19 nt, Homo sapiens
  misc_RNA (1)...(19): siRNA sense strand
uaucaugccucaaauggaa

SEQ ID NO: 2207545 - RNA, 19 nt, Homo sapiens
  misc_RNA (1)...(19): siRNA sense strand
ugacaucucugaccgucua

SEQ ID NO: 2207546 - RNA, 19 nt, Homo sapiens
  misc_RNA (1)...(19): siRNA sense strand
ggaaugcacucagcucuca

SEQ ID NO: 2207547 - RNA, 19 nt, Homo sapiens
  misc_RNA (1)...(19): siRNA sense strand
caacagaggauggacagua

SEQ ID NO: 2207548 - RNA, 19 nt, Homo sapiens
  misc_RNA (1)...(19): siRNA sense strand
caacuggagacaccacuua

SEQ ID NO: 2207549 - RNA, 19 nt, Homo sapiens
  misc_RNA (1)...(19): siRNA sense strand
cgacucugauuuccuguuu

SEQ ID NO: 2207550 - RNA, 19 nt, Homo sapiens
  misc_RNA (1)...(19): siRNA sense strand
ccugguagauccugcuaua

SEQ ID NO: 2207551 - RNA, 19 nt, Homo sapiens
  misc_RNA (1)...(19): siRNA sense strand
uaagaaaccucgucuacac

SEQ ID NO: 2207552 - RNA, 19 nt, Homo sapiens
  misc_RNA (1)...(19): siRNA sense strand
ggacaugggacgaguuaug

SEQ ID NO: 2207553 - RNA, 19 nt, Homo sapiens
  misc_RNA (1)...(19): siRNA sense strand
gaugccaaguguccuauug

SEQ ID NO: 2207554 - RNA, 19 nt, Homo sapiens
  misc_RNA (1)...(19): siRNA sense strand
gcugugaagcgcuauuaua

SEQ ID NO: 2207555 - RNA, 19 nt, Homo sapiens
  misc_RNA (1)...(19): siRNA sense strand
gcaagaccgugugugaaga

SEQ ID NO: 2207556 - RNA, 19 nt, Homo sapiens
  misc_RNA (1)...(19): siRNA sense strand
gugaagcgcuauuauacau

SEQ ID NO: 2207557 - RNA, 19 nt, Homo sapiens
  misc_RNA (1)...(19): siRNA sense strand
ggagaugaacucagaaauc

SEQ ID NO: 2207558 - RNA, 19 nt, Homo sapiens
  misc_RNA (1)...(19): siRNA sense strand
ugaagaaggugucaaagac

SEQ ID NO: 2207559 - RNA, 19 nt, Homo sapiens
  misc_RNA (1)...(19): siRNA sense strand
ugaagacccuccaagugaa

SEQ ID NO: 2207560 - RNA, 19 nt, Homo sapiens
  misc_RNA (1)...(19): siRNA sense strand
acacagaacucucucuuuu

SEQ ID NO: 2207561 - RNA, 19 nt, Homo sapiens
  misc_RNA (1)...(19): siRNA sense strand
gaacucagaaauccuggaa

SEQ ID NO: 2207562 - RNA, 19 nt, Homo sapiens
  misc_RNA (1)...(19): siRNA sense strand
ccacugaguuccagaggau

SEQ ID NO: 2207563 - RNA, 19 nt, Homo sapiens
  misc_RNA (1)...(19): siRNA sense strand
ggacuugccuuucaaaaca

SEQ ID NO: 2207564 - RNA, 19 nt, Homo sapiens
  misc_RNA (1)...(19): siRNA sense strand
gagaugaacucagaaaucc

SEQ ID NO: 2207565 - RNA, 19 nt, Homo sapiens
  misc_RNA (1)...(19): siRNA sense strand
gcagaagaauccacucacu

SEQ ID NO: 2207566 - RNA, 19 nt, Homo sapiens
  misc_RNA (1)...(19): siRNA sense strand
gggacaaucugcggaaugu

SEQ ID NO: 2207567 - RNA, 19 nt, Homo sapiens
  misc_RNA (1)...(19): siRNA sense strand
agacgaggauggccaccua

SEQ ID NO: 2207568 - RNA, 19 nt, Homo sapiens
  misc_RNA (1)...(19): siRNA sense strand
gaugaagacccuccaagug

SEQ ID NO: 2207569 - RNA, 19 nt, Homo sapiens
  misc_RNA (1)...(19): siRNA sense strand
gaggauggacaguauauca

SEQ ID NO: 2207570 - RNA, 19 nt, Homo sapiens
  misc_RNA (1)...(19): siRNA sense strand
ccaaguaccugaaaacuca

SEQ ID NO: 2207571 - RNA, 19 nt, Homo sapiens
  misc_RNA (1)...(19): siRNA sense strand
caaaaucaacccaacuuua

SEQ ID NO: 2207572 - RNA, 19 nt, Homo sapiens
  misc_RNA (1)...(19): siRNA sense strand
aagaaugccuugaaacuac

SEQ ID NO: 2207573 - RNA, 19 nt, Homo sapiens
  misc_RNA (1)...(19): siRNA sense strand
cagaauguccucaccaaga

SEQ ID NO: 2207574 - RNA, 19 nt, Homo sapiens
  misc_RNA (1)...(19): siRNA sense strand
aagcauaucaggcaauuga

SEQ ID NO: 2207575 - RNA, 19 nt, Homo sapiens
  misc_RNA (1)...(19): siRNA sense strand
acucagcucucagggaaua

SEQ ID NO: 2207576 - RNA, 19 nt, Homo sapiens
  misc_RNA (1)...(19): siRNA sense strand
agagcaaccuggagaugaa

SEQ ID NO: 2207577 - RNA, 19 nt, Homo sapiens
  misc_RNA (1)...(19): siRNA sense strand
caccaauacugucauagug

SEQ ID NO: 2207578 - RNA, 19 nt, Homo sapiens
  misc_RNA (1)...(19): siRNA sense strand
gcaaauuaccagaguagca

SEQ ID NO: 2207579 - RNA, 19 nt, Homo sapiens
  misc_RNA (1)...(19): siRNA sense strand
ucaagaagaaagcauauca

SEQ ID NO: 2207580 - RNA, 19 nt, Homo sapiens
  misc_RNA (1)...(19): siRNA sense strand
gugaagaaggugucaaaga

SEQ ID NO: 2207581 - RNA, 19 nt, Homo sapiens
  misc_RNA (1)...(19): siRNA sense strand
ggauggugguggucuguca

SEQ ID NO: 2207582 - RNA, 19 nt, Homo sapiens
  misc_RNA (1)...(19): siRNA sense strand
gcauaaaccccaugacaaa

SEQ ID NO: 2207583 - RNA, 19 nt, Homo sapiens
  misc_RNA (1)...(19): siRNA sense strand
gggacgaguuauggaauug

SEQ ID NO: 2207584 - RNA, 19 nt, Homo sapiens
  misc_RNA (1)...(19): siRNA sense strand
agacaccacuuaccaagag

SEQ ID NO: 2207585 - RNA, 19 nt, Homo sapiens
  misc_RNA (1)...(19): siRNA sense strand
ggaaaggcagaguuugguu

SEQ ID NO: 2207586 - RNA, 19 nt, Homo sapiens
  misc_RNA (1)...(19): siRNA sense strand
caacaugcuaccugacuug

SEQ ID NO: 2207587 - RNA, 19 nt, Homo sapiens
  misc_RNA (1)...(19): siRNA sense strand
ccaccuaccuggcagaacu

SEQ ID NO: 2207588 - RNA, 19 nt, Homo sapiens
  misc_RNA (1)...(19): siRNA sense strand
gguaagaaaccucgucuac

SEQ ID NO: 2207589 - RNA, 19 nt, Homo sapiens
  misc_RNA (1)...(19): siRNA sense strand
caacacagaacucucucuu

SEQ ID NO: 2207590 - RNA, 19 nt, Homo sapiens
  misc_RNA (1)...(19): siRNA sense strand
cgggagagauggacgaagu

SEQ ID NO: 2207591 - RNA, 19 nt, Homo sapiens
  misc_RNA (1)...(19): siRNA sense strand
gaccgugugugaagaugug

SEQ ID NO: 2207592 - RNA, 19 nt, Homo sapiens
  misc_RNA (1)...(19): siRNA sense strand
ucucaauucucccaacuuc

SEQ ID NO: 2207593 - RNA, 19 nt, Homo sapiens
  misc_RNA (1)...(19): siRNA sense strand
gugaaggaccaagcuauaa

SEQ ID NO: 2207594 - RNA, 19 nt, Homo sapiens
  misc_RNA (1)...(19): siRNA sense strand
ggaugaagacccuccaagu

SEQ ID NO: 2207595 - RNA, 19 nt, Homo sapiens
  misc_RNA (1)...(19): siRNA sense strand
gcacucuccucgucuucug

SEQ ID NO: 2207596 - RNA, 19 nt, Homo sapiens
  misc_RNA (1)...(19): siRNA sense strand
acaaccaccuggaguguca

SEQ ID NO: 2207597 - RNA, 19 nt, Homo sapiens
  misc_RNA (1)...(19): siRNA sense strand
gagcagaagaauccacuca

SEQ ID NO: 2207598 - RNA, 19 nt, Homo sapiens
  misc_RNA (1)...(19): siRNA sense strand
ucaauucucccaacuucaa

SEQ ID NO: 2207599 - RNA, 19 nt, Homo sapiens
  misc_RNA (1)...(19): siRNA sense strand
ggaacuccuugacaucucu

SEQ ID NO: 2207600 - RNA, 19 nt, Homo sapiens
  misc_RNA (1)...(19): siRNA sense strand
ugaauccuguggcuuggaa

SEQ ID NO: 2207601 - RNA, 19 nt, Homo sapiens
  misc_RNA (1)...(19): siRNA sense strand
gaauugacuuacuccaacu

SEQ ID NO: 2207602 - RNA, 19 nt, Homo sapiens
  misc_RNA (1)...(19): siRNA sense strand
ccugcuauauccagagauu

SEQ ID NO: 2207603 - RNA, 19 nt, Homo sapiens
  misc_RNA (1)...(19): siRNA sense strand
ucaaggaaaucaugcuacu

SEQ ID NO: 2207604 - RNA, 19 nt, Homo sapiens
  misc_RNA (1)...(19): siRNA sense strand
acucagaaauccuggaauc

SEQ ID NO: 2207605 - RNA, 19 nt, Homo sapiens
  misc_RNA (1)...(19): siRNA sense strand
aacagaggauggacaguau

SEQ ID NO: 2207606 - RNA, 19 nt, Homo sapiens
  misc_RNA (1)...(19): siRNA sense strand
gaggaaaggcagaguuugg

SEQ ID NO: 2207607 - RNA, 19 nt, Homo sapiens
  misc_RNA (1)...(19): siRNA sense strand
gaaaccucgucuacacagu

SEQ ID NO: 2207608 - RNA, 19 nt, Homo sapiens
  misc_RNA (1)...(19): siRNA sense strand
cccggaaguucaagaagaa

SEQ ID NO: 2207609 - RNA, 19 nt, Homo sapiens
  misc_RNA (1)...(19): siRNA sense strand
gagucaggcugccaccaau

SEQ ID NO: 2207610 - RNA, 19 nt, Homo sapiens
  misc_RNA (1)...(19): siRNA sense strand
ggcaaaagcugaauuuagg

SEQ ID NO: 2207611 - RNA, 19 nt, Homo sapiens
  misc_RNA (1)...(19): siRNA sense strand
ccaacaugcuaccugacuu

SEQ ID NO: 2207612 - RNA, 19 nt, Homo sapiens
  misc_RNA (1)...(19): siRNA sense strand
aacuauaccucgcagaaug

SEQ ID NO: 2207613 - RNA, 19 nt, Homo sapiens
  misc_RNA (1)...(19): siRNA sense strand
gaaaacuucuucucaucau

SEQ ID NO: 2207614 - RNA, 19 nt, Homo sapiens
  misc_RNA (1)...(19): siRNA sense strand
uggaagaaaccauaagaga

SEQ ID NO: 2207615 - RNA, 19 nt, Homo sapiens
  misc_RNA (1)...(19): siRNA sense strand
guggacaugggacgaguua

SEQ ID NO: 2207616 - RNA, 19 nt, Homo sapiens
  misc_RNA (1)...(19): siRNA sense strand
gcacccggaaguucaagaa

SEQ ID NO: 2207617 - RNA, 19 nt, Homo sapiens
  misc_RNA (1)...(19): siRNA sense strand
gaucucaauucucccaacu

SEQ ID NO: 2207618 - RNA, 19 nt, Homo sapiens
  misc_RNA (1)...(19): siRNA sense strand
gaccgccucugcuggacuu

SEQ ID NO: 2207619 - RNA, 19 nt, Homo sapiens
  misc_RNA (1)...(19): siRNA sense strand
guaagaaaccucgucuaca

SEQ ID NO: 2207620 - RNA, 19 nt, Homo sapiens
  misc_RNA (1)...(19): siRNA sense strand
uggaauccugggcaaauua

SEQ ID NO: 2207621 - RNA, 19 nt, Homo sapiens
  misc_RNA (1)...(19): siRNA sense strand
gaguuauggaauugacuua

SEQ ID NO: 2207622 - RNA, 19 nt, Homo sapiens
  misc_RNA (1)...(19): siRNA sense strand
cugccaggcucccaccuuu

SEQ ID NO: 2207623 - RNA, 19 nt, Homo sapiens
  misc_RNA (1)...(19): siRNA sense strand
ugcuauauccagagauuua

SEQ ID NO: 2207624 - RNA, 19 nt, Homo sapiens
  misc_RNA (1)...(19): siRNA sense strand
aacccuugcuccacuguuu

SEQ ID NO: 2207625 - RNA, 19 nt, Homo sapiens
  misc_RNA (1)...(19): siRNA sense strand
ggagagauggacgaaguug

SEQ ID NO: 2207626 - RNA, 19 nt, Homo sapiens
  misc_RNA (1)...(19): siRNA sense strand
gauggacgaaguuggaguu

SEQ ID NO: 2207627 - RNA, 19 nt, Homo sapiens
  misc_RNA (1)...(19): siRNA sense strand
caccuggagugucaucgaa

SEQ ID NO: 2207628 - RNA, 19 nt, Homo sapiens
  misc_RNA (1)...(19): siRNA sense strand
cugcacagaucucaauucu

SEQ ID NO: 2207629 - RNA, 19 nt, Homo sapiens
  misc_RNA (1)...(19): siRNA sense strand
cugcuggacuugccuuuca

SEQ ID NO: 2207630 - RNA, 19 nt, Homo sapiens
  misc_RNA (1)...(19): siRNA sense strand
gagacaccacuuaccaaga

SEQ ID NO: 2207631 - RNA, 19 nt, Homo sapiens
  misc_RNA (1)...(19): siRNA sense strand
cauucuggcuguuguuauc

SEQ ID NO: 2207632 - RNA, 19 nt, Homo sapiens
  misc_RNA (1)...(19): siRNA sense strand
gguagauccugcuauaucc

SEQ ID NO: 2207633 - RNA, 19 nt, Homo sapiens
  misc_RNA (1)...(19): siRNA sense strand
gauguccuccucugccaaa

SEQ ID NO: 2207634 - RNA, 19 nt, Homo sapiens
  misc_RNA (1)...(19): siRNA sense strand
gaaaaugaccaacuucucu

SEQ ID NO: 2207635 - RNA, 19 nt, Homo sapiens
  misc_RNA (1)...(19): siRNA sense strand
ggacaaaacuggacacuuc

SEQ ID NO: 2207636 - RNA, 19 nt, Homo sapiens
  misc_RNA (1)...(19): siRNA sense strand
gggaugugcugcucuuuga

SEQ ID NO: 2207637 - RNA, 19 nt, Homo sapiens
  misc_RNA (1)...(19): siRNA sense strand
ugaagucccugccaugcua

SEQ ID NO: 2207638 - RNA, 19 nt, Homo sapiens
  misc_RNA (1)...(19): siRNA sense strand
aaacuggacacuucccuaa

SEQ ID NO: 2207639 - RNA, 19 nt, Homo sapiens
  misc_RNA (1)...(19): siRNA sense strand
ggacacuucccuaacacaa

SEQ ID NO: 2207640 - RNA, 19 nt, Homo sapiens
  misc_RNA (1)...(19): siRNA sense strand
caaaggccgacgcuucuau

SEQ ID NO: 2207641 - RNA, 19 nt, Homo sapiens
  misc_RNA (1)...(19): siRNA sense strand
acgcuucuauuuccucuug

SEQ ID NO: 2207642 - RNA, 19 nt, Homo sapiens
  misc_RNA (1)...(19): siRNA sense strand
caucggagcccucguacuc

SEQ ID NO: 2207643 - RNA, 19 nt, Homo sapiens
  misc_RNA (1)...(19): siRNA sense strand
ugaagcagguaucuugcau

SEQ ID NO: 2207644 - RNA, 19 nt, Homo sapiens
  misc_RNA (1)...(19): siRNA sense strand
ucacaguuccuuugaagca

SEQ ID NO: 2207645 - RNA, 19 nt, Homo sapiens
  misc_RNA (1)...(19): siRNA sense strand
ggccgacgcuucuauuucc

SEQ ID NO: 2207646 - RNA, 19 nt, Homo sapiens
  misc_RNA (1)...(19): siRNA sense strand
gacacuucccuaacacaaa

SEQ ID NO: 2207647 - RNA, 19 nt, Homo sapiens
  misc_RNA (1)...(19): siRNA sense strand
ucuauuuccucuuggacaa

SEQ ID NO: 2207648 - RNA, 19 nt, Homo sapiens
  misc_RNA (1)...(19): siRNA sense strand
gugcuggucuucucuucuc

SEQ ID NO: 2207649 - RNA, 19 nt, Homo sapiens
  misc_RNA (1)...(19): siRNA sense strand
caugcuaccucugaaaguc

SEQ ID NO: 2207650 - RNA, 19 nt, Homo sapiens
  misc_RNA (1)...(19): siRNA sense strand
acacuucccuaacacaaaa

SEQ ID NO: 2207651 - RNA, 19 nt, Homo sapiens
  misc_RNA (1)...(19): siRNA sense strand
acuggacacuucccuaaca

SEQ ID NO: 2207652 - RNA, 19 nt, Homo sapiens
  misc_RNA (1)...(19): siRNA sense strand
ccauuucacaguuccuuug

SEQ ID NO: 2207653 - RNA, 19 nt, Homo sapiens
  misc_RNA (1)...(19): siRNA sense strand
gcuucuauuuccucuugga

SEQ ID NO: 2207654 - RNA, 19 nt, Homo sapiens
  misc_RNA (1)...(19): siRNA sense strand
aaaggccgacgcuucuauu

SEQ ID NO: 2207655 - RNA, 19 nt, Homo sapiens
  misc_RNA (1)...(19): siRNA sense strand
cuuugaagcagguaucuug

SEQ ID NO: 2207656 - RNA, 19 nt, Homo sapiens
  misc_RNA (1)...(19): siRNA sense strand
ccaaggaccuggaggaaga

SEQ ID NO: 2207657 - RNA, 19 nt, Homo sapiens
  misc_RNA (1)...(19): siRNA sense strand
ugacauuccuggaugacuu

SEQ ID NO: 2207658 - RNA, 19 nt, Homo sapiens
  misc_RNA (1)...(19): siRNA sense strand
gcaaugccaugcugcugau

SEQ ID NO: 2207659 - RNA, 19 nt, Homo sapiens
  misc_RNA (1)...(19): siRNA sense strand
gggcuuggacugucuacua

SEQ ID NO: 2207660 - RNA, 19 nt, Homo sapiens
  misc_RNA (1)...(19): siRNA sense strand
aagaggaaguggaggcuuu

SEQ ID NO: 2207661 - RNA, 19 nt, Homo sapiens
  misc_RNA (1)...(19): siRNA sense strand
aggagacgcuggugaaaga

SEQ ID NO: 2207662 - RNA, 19 nt, Homo sapiens
  misc_RNA (1)...(19): siRNA sense strand
cagcugcccugcucagaug

SEQ ID NO: 2207663 - RNA, 19 nt, Homo sapiens
  misc_RNA (1)...(19): siRNA sense strand
gcugcuggcugcuguuaug

SEQ ID NO: 2207664 - RNA, 19 nt, Homo sapiens
  misc_RNA (1)...(19): siRNA sense strand
ucacccagcugcaccuguu

SEQ ID NO: 2207665 - RNA, 19 nt, Homo sapiens
  misc_RNA (1)...(19): siRNA sense strand
cgggaaacaugcuccuuug

SEQ ID NO: 2207666 - RNA, 19 nt, Homo sapiens
  misc_RNA (1)...(19): siRNA sense strand
ccacuuugcaucccaguug

SEQ ID NO: 2207667 - RNA, 19 nt, Homo sapiens
  misc_RNA (1)...(19): siRNA sense strand
ggacugcuacgccucaauc

SEQ ID NO: 2207668 - RNA, 19 nt, Homo sapiens
  misc_RNA (1)...(19): siRNA sense strand
cuuccugucucacuucaaa

SEQ ID NO: 2207669 - RNA, 19 nt, Homo sapiens
  misc_RNA (1)...(19): siRNA sense strand
ggagcugaguggcaaagag

SEQ ID NO: 2207670 - RNA, 19 nt, Homo sapiens
  misc_RNA (1)...(19): siRNA sense strand
caagaacaaaggccuagug

SEQ ID NO: 2207671 - RNA, 19 nt, Homo sapiens
  misc_RNA (1)...(19): siRNA sense strand
gcuucuaccugcgugauug

SEQ ID NO: 2207672 - RNA, 19 nt, Homo sapiens
  misc_RNA (1)...(19): siRNA sense strand
ccgcauggguggcuucuac

SEQ ID NO: 2207673 - RNA, 19 nt, Homo sapiens
  misc_RNA (1)...(19): siRNA sense strand
gcaggaggcacagaugguu

SEQ ID NO: 2207674 - RNA, 19 nt, Homo sapiens
  misc_RNA (1)...(19): siRNA sense strand
ccuggugccuggcgaguau

SEQ ID NO: 2207675 - RNA, 19 nt, Homo sapiens
  misc_RNA (1)...(19): siRNA sense strand
cugcuuggcugaugaaggu

SEQ ID NO: 2207676 - RNA, 19 nt, Homo sapiens
  misc_RNA (1)...(19): siRNA sense strand
ccucccacacucacuaaua

SEQ ID NO: 2207677 - RNA, 19 nt, Homo sapiens
  misc_RNA (1)...(19): siRNA sense strand
cugccuggcuucacugaga

SEQ ID NO: 2207678 - RNA, 19 nt, Homo sapiens
  misc_RNA (1)...(19): siRNA sense strand
gagcacuuuucccggauua

SEQ ID NO: 2207679 - RNA, 19 nt, Homo sapiens
  misc_RNA (1)...(19): siRNA sense strand
cuuggacugucuacuacua

SEQ ID NO: 2207680 - RNA, 19 nt, Homo sapiens
  misc_RNA (1)...(19): siRNA sense strand
gacauuccuggaugacuuu

SEQ ID NO: 2207681 - RNA, 19 nt, Homo sapiens
  misc_RNA (1)...(19): siRNA sense strand
agaccuucauccacuuuga

SEQ ID NO: 2207682 - RNA, 19 nt, Homo sapiens
  misc_RNA (1)...(19): siRNA sense strand
gugcagugguggacacagu

SEQ ID NO: 2207683 - RNA, 19 nt, Homo sapiens
  misc_RNA (1)...(19): siRNA sense strand
gcacccaugguucuaguca

SEQ ID NO: 2207684 - RNA, 19 nt, Homo sapiens
  misc_RNA (1)...(19): siRNA sense strand
guugcucgauggagucuuc

SEQ ID NO: 2207685 - RNA, 19 nt, Homo sapiens
  misc_RNA (1)...(19): siRNA sense strand
cgacguggaccugguguug

SEQ ID NO: 2207686 - RNA, 19 nt, Homo sapiens
  misc_RNA (1)...(19): siRNA sense strand
ccgaggcccugggugauau

SEQ ID NO: 2207687 - RNA, 19 nt, Homo sapiens
  misc_RNA (1)...(19): siRNA sense strand
aaagggauccaggcaagaa

SEQ ID NO: 2207688 - RNA, 19 nt, Homo sapiens
  misc_RNA (1)...(19): siRNA sense strand
ggagagugaggcugaugug

SEQ ID NO: 2207689 - RNA, 19 nt, Homo sapiens
  misc_RNA (1)...(19): siRNA sense strand
cagcaacccuggcuuucac

SEQ ID NO: 2207690 - RNA, 19 nt, Homo sapiens
  misc_RNA (1)...(19): siRNA sense strand
ccgggaaacaugcuccuuu

SEQ ID NO: 2207691 - RNA, 19 nt, Homo sapiens
  misc_RNA (1)...(19): siRNA sense strand
guucuagucacaucuguca

SEQ ID NO: 2207692 - RNA, 19 nt, Homo sapiens
  misc_RNA (1)...(19): siRNA sense strand
ucuagucacaucugucaaa

SEQ ID NO: 2207693 - RNA, 19 nt, Homo sapiens
  misc_RNA (1)...(19): siRNA sense strand
gcgccgugccaccuacuuu

SEQ ID NO: 2207694 - RNA, 19 nt, Homo sapiens
  misc_RNA (1)...(19): siRNA sense strand
ggcgucaugugccuugugu

SEQ ID NO: 2207695 - RNA, 19 nt, Homo sapiens
  misc_RNA (1)...(19): siRNA sense strand
ggagcucuaugguguugac

SEQ ID NO: 2207696 - RNA, 19 nt, Homo sapiens
  misc_RNA (1)...(19): siRNA sense strand
gaggaccggcugcugacaa

SEQ ID NO: 2207697 - RNA, 19 nt, Homo sapiens
  misc_RNA (1)...(19): siRNA sense strand
cugcucagaugguccuuca

SEQ ID NO: 2207698 - RNA, 19 nt, Homo sapiens
  misc_RNA (1)...(19): siRNA sense strand
aaucugugcuguggugugu

SEQ ID NO: 2207699 - RNA, 19 nt, Homo sapiens
  misc_RNA (1)...(19): siRNA sense strand
acguggaccugguguuguu

SEQ ID NO: 2207700 - RNA, 19 nt, Homo sapiens
  misc_RNA (1)...(19): siRNA sense strand
caguggcccuggagcugaa

SEQ ID NO: 2207701 - RNA, 19 nt, Homo sapiens
  misc_RNA (1)...(19): siRNA sense strand
ggcuuggacugucuacuac

SEQ ID NO: 2207702 - RNA, 19 nt, Homo sapiens
  misc_RNA (1)...(19): siRNA sense strand
gauccaggcaagaacaaag

SEQ ID NO: 2207703 - RNA, 19 nt, Homo sapiens
  misc_RNA (1)...(19): siRNA sense strand
caacccuggcuuucaccua

SEQ ID NO: 2207704 - RNA, 19 nt, Homo sapiens
  misc_RNA (1)...(19): siRNA sense strand
cauccacuuugacaugaca

SEQ ID NO: 2207705 - RNA, 19 nt, Homo sapiens
  misc_RNA (1)...(19): siRNA sense strand
ccaugcgccuggcuaagca

SEQ ID NO: 2207706 - RNA, 19 nt, Homo sapiens
  misc_RNA (1)...(19): siRNA sense strand
gauggcugcuucuccuacu

SEQ ID NO: 2207707 - RNA, 19 nt, Homo sapiens
  misc_RNA (1)...(19): siRNA sense strand
gccugacauuccuggauga

SEQ ID NO: 2207708 - RNA, 19 nt, Homo sapiens
  misc_RNA (1)...(19): siRNA sense strand
gcaucgaugggcccagcua

SEQ ID NO: 2207709 - RNA, 19 nt, Homo sapiens
  misc_RNA (1)...(19): siRNA sense strand
cucccacacucacuaauag

SEQ ID NO: 2207710 - RNA, 19 nt, Homo sapiens
  misc_RNA (1)...(19): siRNA sense strand
gcgccuggcuaagcagaag

SEQ ID NO: 2207711 - RNA, 19 nt, Homo sapiens
  misc_RNA (1)...(19): siRNA sense strand
gcuacccuguugcccacuu

SEQ ID NO: 2207712 - RNA, 19 nt, Homo sapiens
  misc_RNA (1)...(19): siRNA sense strand
caaagggauccaggcaaga

SEQ ID NO: 2207713 - RNA, 19 nt, Homo sapiens
  misc_RNA (1)...(19): siRNA sense strand
ccaugguucuagucacauc

SEQ ID NO: 2207714 - RNA, 19 nt, Homo sapiens
  misc_RNA (1)...(19): siRNA sense strand
gaaggaagcuugugagaag

SEQ ID NO: 2207715 - RNA, 19 nt, Homo sapiens
  misc_RNA (1)...(19): siRNA sense strand
gaggagaggucacucaauu

SEQ ID NO: 2207716 - RNA, 19 nt, Homo sapiens
  misc_RNA (1)...(19): siRNA sense strand
ggugacagcugccaaauuc

SEQ ID NO: 2207717 - RNA, 19 nt, Homo sapiens
  misc_RNA (1)...(19): siRNA sense strand
gagcagcgauaccagauca

SEQ ID NO: 2207718 - RNA, 19 nt, Homo sapiens
  misc_RNA (1)...(19): siRNA sense strand
gaccauaucaucauuagug

SEQ ID NO: 2207719 - RNA, 19 nt, Homo sapiens
  misc_RNA (1)...(19): siRNA sense strand
ggucaaugcuguucguuuu

SEQ ID NO: 2207720 - RNA, 19 nt, Homo sapiens
  misc_RNA (1)...(19): siRNA sense strand
gaagaggagaggucacuca

SEQ ID NO: 2207721 - RNA, 19 nt, Homo sapiens
  misc_RNA (1)...(19): siRNA sense strand
ucaccaguguggacuuuga

SEQ ID NO: 2207722 - RNA, 19 nt, Homo sapiens
  misc_RNA (1)...(19): siRNA sense strand
gcugccaaauucaagcuaa

SEQ ID NO: 2207723 - RNA, 19 nt, Homo sapiens
  misc_RNA (1)...(19): siRNA sense strand
ccaucaauguccuuuccua

SEQ ID NO: 2207724 - RNA, 19 nt, Homo sapiens
  misc_RNA (1)...(19): siRNA sense strand
gaaacuggagagcagacua

SEQ ID NO: 2207725 - RNA, 19 nt, Homo sapiens
  misc_RNA (1)...(19): siRNA sense strand
ucaauguccuuuccuacug

SEQ ID NO: 2207726 - RNA, 19 nt, Homo sapiens
  misc_RNA (1)...(19): siRNA sense strand
gagaaggaagcuugugaga

SEQ ID NO: 2207727 - RNA, 19 nt, Homo sapiens
  misc_RNA (1)...(19): siRNA sense strand
caucaccaguguggacuuu

SEQ ID NO: 2207728 - RNA, 19 nt, Homo sapiens
  misc_RNA (1)...(19): siRNA sense strand
aggcugagcugcuggacaa

SEQ ID NO: 2207729 - RNA, 19 nt, Homo sapiens
  misc_RNA (1)...(19): siRNA sense strand
gggaccauaucaucauuag

SEQ ID NO: 2207730 - RNA, 19 nt, Homo sapiens
  misc_RNA (1)...(19): siRNA sense strand
ggagaggucacucaauugg

SEQ ID NO: 2207731 - RNA, 19 nt, Homo sapiens
  misc_RNA (1)...(19): siRNA sense strand
caucauuaguggccacaau

SEQ ID NO: 2207732 - RNA, 19 nt, Homo sapiens
  misc_RNA (1)...(19): siRNA sense strand
gcuggucuguggugagaug

SEQ ID NO: 2207733 - RNA, 19 nt, Homo sapiens
  misc_RNA (1)...(19): siRNA sense strand
ggccuauaaccaucucuua

SEQ ID NO: 2207734 - RNA, 19 nt, Homo sapiens
  misc_RNA (1)...(19): siRNA sense strand
cuggacaaguucucaaaga

SEQ ID NO: 2207735 - RNA, 19 nt, Homo sapiens
  misc_RNA (1)...(19): siRNA sense strand
caauguccuuuccuacugu

SEQ ID NO: 2207736 - RNA, 19 nt, Homo sapiens
  misc_RNA (1)...(19): siRNA sense strand
ccuauaaccaucucuuaga

SEQ ID NO: 2207737 - RNA, 19 nt, Homo sapiens
  misc_RNA (1)...(19): siRNA sense strand
ugacagcugccaaauucaa

SEQ ID NO: 2207738 - RNA, 19 nt, Homo sapiens
  misc_RNA (1)...(19): siRNA sense strand
uaaggugacagcugccaaa

SEQ ID NO: 2207739 - RNA, 19 nt, Homo sapiens
  misc_RNA (1)...(19): siRNA sense strand
gaccaucaauguccuuucc

SEQ ID NO: 2207740 - RNA, 19 nt, Homo sapiens
  misc_RNA (1)...(19): siRNA sense strand
gcuccaggaccaucaaugu

SEQ ID NO: 2207741 - RNA, 19 nt, Homo sapiens
  misc_RNA (1)...(19): siRNA sense strand
ccauugcgcugccgucaac

SEQ ID NO: 2207742 - RNA, 19 nt, Homo sapiens
  misc_RNA (1)...(19): siRNA sense strand
acacaaggauaaggugaca

SEQ ID NO: 2207743 - RNA, 19 nt, Homo sapiens
  misc_RNA (1)...(19): siRNA sense strand
guccuuuccuacuguaaug

SEQ ID NO: 2207744 - RNA, 19 nt, Homo sapiens
  misc_RNA (1)...(19): siRNA sense strand
gggaggagucagagcuuga

SEQ ID NO: 2207745 - RNA, 19 nt, Homo sapiens
  misc_RNA (1)...(19): siRNA sense strand
guguguggcugcccgacuu

SEQ ID NO: 2207746 - RNA, 19 nt, Homo sapiens
  misc_RNA (1)...(19): siRNA sense strand
ggauguggacaccgggaaa

SEQ ID NO: 2207747 - RNA, 19 nt, Homo sapiens
  misc_RNA (1)...(19): siRNA sense strand
cugagcugcuggacaaguu

SEQ ID NO: 2207748 - RNA, 19 nt, Homo sapiens
  misc_RNA (1)...(19): siRNA sense strand
gggaggcacaguccaagga

SEQ ID NO: 2207749 - RNA, 19 nt, Homo sapiens
  misc_RNA (1)...(19): siRNA sense strand
cggcuggucuguggugaga

SEQ ID NO: 2207750 - RNA, 19 nt, Homo sapiens
  misc_RNA (1)...(19): siRNA sense strand
uaccagaucaucccugugu

SEQ ID NO: 2207751 - RNA, 19 nt, Homo sapiens
  misc_RNA (1)...(19): siRNA sense strand
ggaccaaagcuguguucag

SEQ ID NO: 2207752 - RNA, 19 nt, Homo sapiens
  misc_RNA (1)...(19): siRNA sense strand
agaaggaagcuugugagaa

SEQ ID NO: 2207753 - RNA, 19 nt, Homo sapiens
  misc_RNA (1)...(19): siRNA sense strand
acaacacacucaaggucau

SEQ ID NO: 2207754 - RNA, 19 nt, Homo sapiens
  misc_RNA (1)...(19): siRNA sense strand
gguucugacuggaccaaag

SEQ ID NO: 2207755 - RNA, 19 nt, Homo sapiens
  misc_RNA (1)...(19): siRNA sense strand
ccagaucaucccugugugu

SEQ ID NO: 2207756 - RNA, 19 nt, Homo sapiens
  misc_RNA (1)...(19): siRNA sense strand
gagacaacacacucaaggu

SEQ ID NO: 2207757 - RNA, 19 nt, Homo sapiens
  misc_RNA (1)...(19): siRNA sense strand
ccacaaugaccagaagauc

SEQ ID NO: 2207758 - RNA, 19 nt, Homo sapiens
  misc_RNA (1)...(19): siRNA sense strand
aagcggaccgugagcauca

SEQ ID NO: 2207759 - RNA, 19 nt, Homo sapiens
  misc_RNA (1)...(19): siRNA sense strand
gcagcgauaccagaucauc

SEQ ID NO: 2207760 - RNA, 19 nt, Homo sapiens
  misc_RNA (1)...(19): siRNA sense strand
uggagaaggaagcuuguga

SEQ ID NO: 2207761 - RNA, 19 nt, Homo sapiens
  misc_RNA (1)...(19): siRNA sense strand
aaucagagcugcuuucuuu

SEQ ID NO: 2207762 - RNA, 19 nt, Homo sapiens
  misc_RNA (1)...(19): siRNA sense strand
caagucagcuccuuaauca

SEQ ID NO: 2207763 - RNA, 19 nt, Homo sapiens
  misc_RNA (1)...(19): siRNA sense strand
caaccucacuuuccaaauu

SEQ ID NO: 2207764 - RNA, 19 nt, Homo sapiens
  misc_RNA (1)...(19): siRNA sense strand
gcaaugcacuugagcuuga

SEQ ID NO: 2207765 - RNA, 19 nt, Homo sapiens
  misc_RNA (1)...(19): siRNA sense strand
ggaacccgcucuacaguuu

SEQ ID NO: 2207766 - RNA, 19 nt, Homo sapiens
  misc_RNA (1)...(19): siRNA sense strand
gaacuuaaccaagauauga

SEQ ID NO: 2207767 - RNA, 19 nt, Homo sapiens
  misc_RNA (1)...(19): siRNA sense strand
caacacaaccggucuuuaa

SEQ ID NO: 2207768 - RNA, 19 nt, Homo sapiens
  misc_RNA (1)...(19): siRNA sense strand
gagaacagccugaaagauu

SEQ ID NO: 2207769 - RNA, 19 nt, Homo sapiens
  misc_RNA (1)...(19): siRNA sense strand
caaaggagcuugauuucuc

SEQ ID NO: 2207770 - RNA, 19 nt, Homo sapiens
  misc_RNA (1)...(19): siRNA sense strand
ugaggaaacugcaaagaaa

SEQ ID NO: 2207771 - RNA, 19 nt, Homo sapiens
  misc_RNA (1)...(19): siRNA sense strand
ccauggagcuuauuacaga

SEQ ID NO: 2207772 - RNA, 19 nt, Homo sapiens
  misc_RNA (1)...(19): siRNA sense strand
ggagggcccugcugauuug

SEQ ID NO: 2207773 - RNA, 19 nt, Homo sapiens
  misc_RNA (1)...(19): siRNA sense strand
gcccaucacugcuuuggua

SEQ ID NO: 2207774 - RNA, 19 nt, Homo sapiens
  misc_RNA (1)...(19): siRNA sense strand
caacagcagucaaggcuau

SEQ ID NO: 2207775 - RNA, 19 nt, Homo sapiens
  misc_RNA (1)...(19): siRNA sense strand
ggaccugaguuccuugaaa

SEQ ID NO: 2207776 - RNA, 19 nt, Homo sapiens
  misc_RNA (1)...(19): siRNA sense strand
caaaagagcugcugaucaa

SEQ ID NO: 2207777 - RNA, 19 nt, Homo sapiens
  misc_RNA (1)...(19): siRNA sense strand
gaucccaucuuuaauagug

SEQ ID NO: 2207778 - RNA, 19 nt, Homo sapiens
  misc_RNA (1)...(19): siRNA sense strand
gcagaacauucgccgguuu

SEQ ID NO: 2207779 - RNA, 19 nt, Homo sapiens
  misc_RNA (1)...(19): siRNA sense strand
uaccagaacuuaaccaaga

SEQ ID NO: 2207780 - RNA, 19 nt, Homo sapiens
  misc_RNA (1)...(19): siRNA sense strand
caaguucuaugaucaugaa

SEQ ID NO: 2207781 - RNA, 19 nt, Homo sapiens
  misc_RNA (1)...(19): siRNA sense strand
uggaaaggcuuaagaacaa

SEQ ID NO: 2207782 - RNA, 19 nt, Homo sapiens
  misc_RNA (1)...(19): siRNA sense strand
ccacaaaacuuaaaccaaa

SEQ ID NO: 2207783 - RNA, 19 nt, Homo sapiens
  misc_RNA (1)...(19): siRNA sense strand
gauaugaccuguaccaaaa

SEQ ID NO: 2207784 - RNA, 19 nt, Homo sapiens
  misc_RNA (1)...(19): siRNA sense strand
gugcaaaggcuccuacuaa

SEQ ID NO: 2207785 - RNA, 19 nt, Homo sapiens
  misc_RNA (1)...(19): siRNA sense strand
ugagugagcuugaucagau

SEQ ID NO: 2207786 - RNA, 19 nt, Homo sapiens
  misc_RNA (1)...(19): siRNA sense strand
uaagaacaaugugauggua

SEQ ID NO: 2207787 - RNA, 19 nt, Homo sapiens
  misc_RNA (1)...(19): siRNA sense strand
agaacagccugaaagauuu

SEQ ID NO: 2207788 - RNA, 19 nt, Homo sapiens
  misc_RNA (1)...(19): siRNA sense strand
caaauaauggcacuacaaa

SEQ ID NO: 2207789 - RNA, 19 nt, Homo sapiens
  misc_RNA (1)...(19): siRNA sense strand
gaauacagaccuuuaaucu

SEQ ID NO: 2207790 - RNA, 19 nt, Homo sapiens
  misc_RNA (1)...(19): siRNA sense strand
gaccuuuaaucucccuuua

SEQ ID NO: 2207791 - RNA, 19 nt, Homo sapiens
  misc_RNA (1)...(19): siRNA sense strand
gcuuugagauccauauaga

SEQ ID NO: 2207792 - RNA, 19 nt, Homo sapiens
  misc_RNA (1)...(19): siRNA sense strand
gagaagugauaccacaaga

SEQ ID NO: 2207793 - RNA, 19 nt, Homo sapiens
  misc_RNA (1)...(19): siRNA sense strand
caagucagcaagugauaua

SEQ ID NO: 2207794 - RNA, 19 nt, Homo sapiens
  misc_RNA (1)...(19): siRNA sense strand
uagcagaguuguuggaguu

SEQ ID NO: 2207795 - RNA, 19 nt, Homo sapiens
  misc_RNA (1)...(19): siRNA sense strand
ggaauuccaaccucacuuu

SEQ ID NO: 2207796 - RNA, 19 nt, Homo sapiens
  misc_RNA (1)...(19): siRNA sense strand
gcacuacaaagauuaaaga

SEQ ID NO: 2207797 - RNA, 19 nt, Homo sapiens
  misc_RNA (1)...(19): siRNA sense strand
aaagaaaacuccacagaaa

SEQ ID NO: 2207798 - RNA, 19 nt, Homo sapiens
  misc_RNA (1)...(19): siRNA sense strand
ucccaaaccuccauucuga

SEQ ID NO: 2207799 - RNA, 19 nt, Homo sapiens
  misc_RNA (1)...(19): siRNA sense strand
gcuacaaguucuaugauca

SEQ ID NO: 2207800 - RNA, 19 nt, Homo sapiens
  misc_RNA (1)...(19): siRNA sense strand
gaaacaaucaccaugcaau

SEQ ID NO: 2207801 - RNA, 19 nt, Homo sapiens
  misc_RNA (1)...(19): siRNA sense strand
acaaagauuucacugguau

SEQ ID NO: 2207802 - RNA, 19 nt, Homo sapiens
  misc_RNA (1)...(19): siRNA sense strand
gagaaacaaucaccaugca

SEQ ID NO: 2207803 - RNA, 19 nt, Homo sapiens
  misc_RNA (1)...(19): siRNA sense strand
ucaaagaugcuaagauuuc

SEQ ID NO: 2207804 - RNA, 19 nt, Homo sapiens
  misc_RNA (1)...(19): siRNA sense strand
gcucaugccuccucaaagg

SEQ ID NO: 2207805 - RNA, 19 nt, Homo sapiens
  misc_RNA (1)...(19): siRNA sense strand
ucaagaagccuaaggaauc

SEQ ID NO: 2207806 - RNA, 19 nt, Homo sapiens
  misc_RNA (1)...(19): siRNA sense strand
guacaggcguaguccaaga

SEQ ID NO: 2207807 - RNA, 19 nt, Homo sapiens
  misc_RNA (1)...(19): siRNA sense strand
caaaggcuccuacuaagug

SEQ ID NO: 2207808 - RNA, 19 nt, Homo sapiens
  misc_RNA (1)...(19): siRNA sense strand
caaucaccaugcaauguuu

SEQ ID NO: 2207809 - RNA, 19 nt, Homo sapiens
  misc_RNA (1)...(19): siRNA sense strand
gaagugauaccacaagaag

SEQ ID NO: 2207810 - RNA, 19 nt, Homo sapiens
  misc_RNA (1)...(19): siRNA sense strand
gaaagagcaaugcacuuga

SEQ ID NO: 2207811 - RNA, 19 nt, Homo sapiens
  misc_RNA (1)...(19): siRNA sense strand
ggagcugccuugcgaguuc

SEQ ID NO: 2207812 - RNA, 19 nt, Homo sapiens
  misc_RNA (1)...(19): siRNA sense strand
gaaaauggaauuacucuga

SEQ ID NO: 2207813 - RNA, 19 nt, Homo sapiens
  misc_RNA (1)...(19): siRNA sense strand
uaauggcacuacaaagauu

SEQ ID NO: 2207814 - RNA, 19 nt, Homo sapiens
  misc_RNA (1)...(19): siRNA sense strand
gcuauggguucuucaaauc

SEQ ID NO: 2207815 - RNA, 19 nt, Homo sapiens
  misc_RNA (1)...(19): siRNA sense strand
gggagaagcagauuguuau

SEQ ID NO: 2207816 - RNA, 19 nt, Homo sapiens
  misc_RNA (1)...(19): siRNA sense strand
ggaguuugcagaaguuauu

SEQ ID NO: 2207817 - RNA, 19 nt, Homo sapiens
  misc_RNA (1)...(19): siRNA sense strand
ggaaagaauugaggaacca

SEQ ID NO: 2207818 - RNA, 19 nt, Homo sapiens
  misc_RNA (1)...(19): siRNA sense strand
gagcugucauucaaucaga

SEQ ID NO: 2207819 - RNA, 19 nt, Homo sapiens
  misc_RNA (1)...(19): siRNA sense strand
ugauuuggauggaacguuu

SEQ ID NO: 2207820 - RNA, 19 nt, Homo sapiens
  misc_RNA (1)...(19): siRNA sense strand
ucaaggaucugugcuaugg

SEQ ID NO: 2207821 - RNA, 19 nt, Homo sapiens
  misc_RNA (1)...(19): siRNA sense strand
gaagucaccagaucuguca

SEQ ID NO: 2207822 - RNA, 19 nt, Homo sapiens
  misc_RNA (1)...(19): siRNA sense strand
aaaccaaauucaugaggaa

SEQ ID NO: 2207823 - RNA, 19 nt, Homo sapiens
  misc_RNA (1)...(19): siRNA sense strand
auagagcacugguggaauu

SEQ ID NO: 2207824 - RNA, 19 nt, Homo sapiens
  misc_RNA (1)...(19): siRNA sense strand
caacaaacccuggucuuca

SEQ ID NO: 2207825 - RNA, 19 nt, Homo sapiens
  misc_RNA (1)...(19): siRNA sense strand
aaagaaagcacagaacuug

SEQ ID NO: 2207826 - RNA, 19 nt, Homo sapiens
  misc_RNA (1)...(19): siRNA sense strand
gcuccuacaaguccaaaua

SEQ ID NO: 2207827 - RNA, 19 nt, Homo sapiens
  misc_RNA (1)...(19): siRNA sense strand
gcaagucagcuccuuaauc

SEQ ID NO: 2207828 - RNA, 19 nt, Homo sapiens
  misc_RNA (1)...(19): siRNA sense strand
ugagucaucuccuguauac

SEQ ID NO: 2207829 - RNA, 19 nt, Homo sapiens
  misc_RNA (1)...(19): siRNA sense strand
caaagaaagcacagaacuu

SEQ ID NO: 2207830 - RNA, 19 nt, Homo sapiens
  misc_RNA (1)...(19): siRNA sense strand
ggccacaaccacauucaua

SEQ ID NO: 2207831 - RNA, 19 nt, Homo sapiens
  misc_RNA (1)...(19): siRNA sense strand
gccuggagcucaugcagaa

SEQ ID NO: 2207832 - RNA, 19 nt, Homo sapiens
  misc_RNA (1)...(19): siRNA sense strand
guacuacuuuccaguucaa

SEQ ID NO: 2207833 - RNA, 19 nt, Homo sapiens
  misc_RNA (1)...(19): siRNA sense strand
guaaccauggagcuuauua

SEQ ID NO: 2207834 - RNA, 19 nt, Homo sapiens
  misc_RNA (1)...(19): siRNA sense strand
gguacaacaucacagacuu

SEQ ID NO: 2207835 - RNA, 19 nt, Homo sapiens
  misc_RNA (1)...(19): siRNA sense strand
gcagucagcauccuaguag

SEQ ID NO: 2207836 - RNA, 19 nt, Homo sapiens
  misc_RNA (1)...(19): siRNA sense strand
acaaccacauucauaagaa

SEQ ID NO: 2207837 - RNA, 19 nt, Homo sapiens
  misc_RNA (1)...(19): siRNA sense strand
gcagaggaccgaggaaaug

SEQ ID NO: 2207838 - RNA, 19 nt, Homo sapiens
  misc_RNA (1)...(19): siRNA sense strand
aauaauggcacuacaaaga

SEQ ID NO: 2207839 - RNA, 19 nt, Homo sapiens
  misc_RNA (1)...(19): siRNA sense strand
uaaguggcaacacccauua

SEQ ID NO: 2207840 - RNA, 19 nt, Homo sapiens
  misc_RNA (1)...(19): siRNA sense strand
ucacugaucccaauauaca

SEQ ID NO: 2207841 - RNA, 19 nt, Homo sapiens
  misc_RNA (1)...(19): siRNA sense strand
caacaucacagacuucagu

SEQ ID NO: 2207842 - RNA, 19 nt, Homo sapiens
  misc_RNA (1)...(19): siRNA sense strand
gauacccaguuguugugua

SEQ ID NO: 2207843 - RNA, 19 nt, Homo sapiens
  misc_RNA (1)...(19): siRNA sense strand
gauggaacguuugcaguca

SEQ ID NO: 2207844 - RNA, 19 nt, Homo sapiens
  misc_RNA (1)...(19): siRNA sense strand
caagaagccuaaggaaucu

SEQ ID NO: 2207845 - RNA, 19 nt, Homo sapiens
  misc_RNA (1)...(19): siRNA sense strand
gaacccgcucuacaguuua

SEQ ID NO: 2207846 - RNA, 19 nt, Homo sapiens
  misc_RNA (1)...(19): siRNA sense strand
ggaauacagaccuuuaauc

SEQ ID NO: 2207847 - RNA, 19 nt, Homo sapiens
  misc_RNA (1)...(19): siRNA sense strand
ggaaaggcuuaagaacaau

SEQ ID NO: 2207848 - RNA, 19 nt, Homo sapiens
  misc_RNA (1)...(19): siRNA sense strand
gccagccucccauaauuua

SEQ ID NO: 2207849 - RNA, 19 nt, Homo sapiens
  misc_RNA (1)...(19): siRNA sense strand
agacaaaugggacaacaaa

SEQ ID NO: 2207850 - RNA, 19 nt, Homo sapiens
  misc_RNA (1)...(19): siRNA sense strand
ggucuggagcuuucgauuu

SEQ ID NO: 2207851 - RNA, 19 nt, Homo sapiens
  misc_RNA (1)...(19): siRNA sense strand
caaagaguaucugcuugga

SEQ ID NO: 2207852 - RNA, 19 nt, Homo sapiens
  misc_RNA (1)...(19): siRNA sense strand
aaggaucugugcuauggua

SEQ ID NO: 2207853 - RNA, 19 nt, Homo sapiens
  misc_RNA (1)...(19): siRNA sense strand
gcaaaggcuccuacuaagu

SEQ ID NO: 2207854 - RNA, 19 nt, Homo sapiens
  misc_RNA (1)...(19): siRNA sense strand
caaccggucuuuaacuuuu

SEQ ID NO: 2207855 - RNA, 19 nt, Homo sapiens
  misc_RNA (1)...(19): siRNA sense strand
gugcuuugcuguugcaugu

SEQ ID NO: 2207856 - RNA, 19 nt, Homo sapiens
  misc_RNA (1)...(19): siRNA sense strand
gcccugaguucucccauca

SEQ ID NO: 2207857 - RNA, 19 nt, Homo sapiens
  misc_RNA (1)...(19): siRNA sense strand
uugaucagauucagaggua

SEQ ID NO: 2207858 - RNA, 19 nt, Homo sapiens
  misc_RNA (1)...(19): siRNA sense strand
ugacagagcggaaaguauc

SEQ ID NO: 2207859 - RNA, 19 nt, Homo sapiens
  misc_RNA (1)...(19): siRNA sense strand
uuacagaggugaaguucca

SEQ ID NO: 2207860 - RNA, 19 nt, Homo sapiens
  misc_RNA (1)...(19): siRNA sense strand
gaugguauccuaucauuuu

SEQ ID NO: 2207861 - RNA, 19 nt, Homo sapiens
  misc_RNA (1)...(19): siRNA sense strand
gagagaagauaaauuggaa

SEQ ID NO: 2207862 - RNA, 19 nt, Homo sapiens
  misc_RNA (1)...(19): siRNA sense strand
gaaucaaacuuccugaauc

SEQ ID NO: 2207863 - RNA, 19 nt, Homo sapiens
  misc_RNA (1)...(19): siRNA sense strand
gaagaggagcuuaacauga

SEQ ID NO: 2207864 - RNA, 19 nt, Homo sapiens
  misc_RNA (1)...(19): siRNA sense strand
aagaggagcuuaacaugaa

SEQ ID NO: 2207865 - RNA, 19 nt, Homo sapiens
  misc_RNA (1)...(19): siRNA sense strand
acaaugagcugaccaccaa

SEQ ID NO: 2207866 - RNA, 19 nt, Homo sapiens
  misc_RNA (1)...(19): siRNA sense strand
gaaaagcugcuaugaauaa

SEQ ID NO: 2207867 - RNA, 19 nt, Homo sapiens
  misc_RNA (1)...(19): siRNA sense strand
gcagucacaucuucacaug

SEQ ID NO: 2207868 - RNA, 19 nt, Homo sapiens
  misc_RNA (1)...(19): siRNA sense strand
caacaaggcaccagggaaa

SEQ ID NO: 2207869 - RNA, 19 nt, Homo sapiens
  misc_RNA (1)...(19): siRNA sense strand
ccacaagguugcaguagug

SEQ ID NO: 2207870 - RNA, 19 nt, Homo sapiens
  misc_RNA (1)...(19): siRNA sense strand
ccaaaggaauuaugggaau

SEQ ID NO: 2207871 - RNA, 19 nt, Homo sapiens
  misc_RNA (1)...(19): siRNA sense strand
ggaauuaugggaauguuug

SEQ ID NO: 2207872 - RNA, 19 nt, Homo sapiens
  misc_RNA (1)...(19): siRNA sense strand
ggaauaugaugagcaacuu

SEQ ID NO: 2207873 - RNA, 19 nt, Homo sapiens
  misc_RNA (1)...(19): siRNA sense strand
aaaacaagaucgugacaua

SEQ ID NO: 2207874 - RNA, 19 nt, Homo sapiens
  misc_RNA (1)...(19): siRNA sense strand
aacagaggcuaaagaagua

SEQ ID NO: 2207875 - RNA, 19 nt, Homo sapiens
  misc_RNA (1)...(19): siRNA sense strand
gaaaggaaacgaaaagaaa

SEQ ID NO: 2207876 - RNA, 19 nt, Homo sapiens
  misc_RNA (1)...(19): siRNA sense strand
acaaauggcugagcuauac

SEQ ID NO: 2207877 - RNA, 19 nt, Homo sapiens
  misc_RNA (1)...(19): siRNA sense strand
agaaagccaugcuaaagga

SEQ ID NO: 2207878 - RNA, 19 nt, Homo sapiens
  misc_RNA (1)...(19): siRNA sense strand
aaacagaggcuaaagaagu

SEQ ID NO: 2207879 - RNA, 19 nt, Homo sapiens
  misc_RNA (1)...(19): siRNA sense strand
cuccaaagcugcugcuaaa

SEQ ID NO: 2207880 - RNA, 19 nt, Homo sapiens
  misc_RNA (1)...(19): siRNA sense strand
caagaaaccaacaaggaaa

SEQ ID NO: 2207881 - RNA, 19 nt, Homo sapiens
  misc_RNA (1)...(19): siRNA sense strand
cagaacugcagcaaauuua

SEQ ID NO: 2207882 - RNA, 19 nt, Homo sapiens
  misc_RNA (1)...(19): siRNA sense strand
gaacaagcagugaaagaag

SEQ ID NO: 2207883 - RNA, 19 nt, Homo sapiens
  misc_RNA (1)...(19): siRNA sense strand
ccaagaaaccaacaaggaa

SEQ ID NO: 2207884 - RNA, 19 nt, Homo sapiens
  misc_RNA (1)...(19): siRNA sense strand
cuaaagaaguaacaaaugc

SEQ ID NO: 2207885 - RNA, 19 nt, Homo sapiens
  misc_RNA (1)...(19): siRNA sense strand
gaaaacagaggcuaaagaa

SEQ ID NO: 2207886 - RNA, 19 nt, Homo sapiens
  misc_RNA (1)...(19): siRNA sense strand
gaugcuguaugauuauguu

SEQ ID NO: 2207887 - RNA, 19 nt, Homo sapiens
  misc_RNA (1)...(19): siRNA sense strand
cgaguagcauuaucugaug

SEQ ID NO: 2207888 - RNA, 19 nt, Homo sapiens
  misc_RNA (1)...(19): siRNA sense strand
gcuguaugauuauguugaa

SEQ ID NO: 2207889 - RNA, 19 nt, Homo sapiens
  misc_RNA (1)...(19): siRNA sense strand
agacacaagccaacaauga

SEQ ID NO: 2207890 - RNA, 19 nt, Homo sapiens
  misc_RNA (1)...(19): siRNA sense strand
gcuaaagaaguaacaaaug

SEQ ID NO: 2207891 - RNA, 19 nt, Homo sapiens
  misc_RNA (1)...(19): siRNA sense strand
uggcugagcuauacacuag

SEQ ID NO: 2207892 - RNA, 19 nt, Homo sapiens
  misc_RNA (1)...(19): siRNA sense strand
caaaggaauuaugggaaug

SEQ ID NO: 2207893 - RNA, 19 nt, Homo sapiens
  misc_RNA (1)...(19): siRNA sense strand
gaagacauccucaguacac

SEQ ID NO: 2207894 - RNA, 19 nt, Homo sapiens
  misc_RNA (1)...(19): siRNA sense strand
gaaccuccuucugucaaga

SEQ ID NO: 2207895 - RNA, 19 nt, Homo sapiens
  misc_RNA (1)...(19): siRNA sense strand
uuaaggugcugcagaagga

SEQ ID NO: 2207896 - RNA, 19 nt, Homo sapiens
  misc_RNA (1)...(19): siRNA sense strand
ggaaagggaauaugaugag

SEQ ID NO: 2207897 - RNA, 19 nt, Homo sapiens
  misc_RNA (1)...(19): siRNA sense strand
gaguagcauuaucugauga

SEQ ID NO: 2207898 - RNA, 19 nt, Homo sapiens
  misc_RNA (1)...(19): siRNA sense strand
ggagcccaacugcauguua

SEQ ID NO: 2207899 - RNA, 19 nt, Homo sapiens
  misc_RNA (1)...(19): siRNA sense strand
ggggaaggcugcauaguga

SEQ ID NO: 2207900 - RNA, 19 nt, Homo sapiens
  misc_RNA (1)...(19): siRNA sense strand
ugauagcagugaagaugaa

SEQ ID NO: 2207901 - RNA, 19 nt, Homo sapiens
  misc_RNA (1)...(19): siRNA sense strand
aaucaaacuuccugaaucu

SEQ ID NO: 2207902 - RNA, 19 nt, Homo sapiens
  misc_RNA (1)...(19): siRNA sense strand
gaauaugaugagcaacuuu

SEQ ID NO: 2207903 - RNA, 19 nt, Homo sapiens
  misc_RNA (1)...(19): siRNA sense strand
ccagggaaagggaauauga

SEQ ID NO: 2207904 - RNA, 19 nt, Homo sapiens
  misc_RNA (1)...(19): siRNA sense strand
gaacugcagcaaauuuagu

SEQ ID NO: 2207905 - RNA, 19 nt, Homo sapiens
  misc_RNA (1)...(19): siRNA sense strand
gaucgugacauacaaaugg

SEQ ID NO: 2207906 - RNA, 19 nt, Homo sapiens
  misc_RNA (1)...(19): siRNA sense strand
agugaauccugcacagaua

SEQ ID NO: 2207907 - RNA, 19 nt, Homo sapiens
  misc_RNA (1)...(19): siRNA sense strand
cagcagcccaaaggaauua

SEQ ID NO: 2207908 - RNA, 19 nt, Homo sapiens
  misc_RNA (1)...(19): siRNA sense strand
caugaagacauccucagua

SEQ ID NO: 2207909 - RNA, 19 nt, Homo sapiens
  misc_RNA (1)...(19): siRNA sense strand
gagcuuaacaugaagacau

SEQ ID NO: 2207910 - RNA, 19 nt, Homo sapiens
  misc_RNA (1)...(19): siRNA sense strand
aaaggaaacugaaaacaug

SEQ ID NO: 2207911 - RNA, 19 nt, Homo sapiens
  misc_RNA (1)...(19): siRNA sense strand
ggaagcgaguagcauuauc

SEQ ID NO: 2207912 - RNA, 19 nt, Homo sapiens
  misc_RNA (1)...(19): siRNA sense strand
gggaaagggaauaugauga

SEQ ID NO: 2207913 - RNA, 19 nt, Homo sapiens
  misc_RNA (1)...(19): siRNA sense strand
gagcccaacugcauguuac

SEQ ID NO: 2207914 - RNA, 19 nt, Homo sapiens
  misc_RNA (1)...(19): siRNA sense strand
gaaaacgcguacuaaaauc

SEQ ID NO: 2207915 - RNA, 19 nt, Homo sapiens
  misc_RNA (1)...(19): siRNA sense strand
caaacuuccugaaucugau

SEQ ID NO: 2207916 - RNA, 19 nt, Homo sapiens
  misc_RNA (1)...(19): siRNA sense strand
aagcagagccuguuaaggu

SEQ ID NO: 2207917 - RNA, 19 nt, Homo sapiens
  misc_RNA (1)...(19): siRNA sense strand
caauuuggacucagaacaa

SEQ ID NO: 2207918 - RNA, 19 nt, Homo sapiens
  misc_RNA (1)...(19): siRNA sense strand
gcaguagugagagaagaua

SEQ ID NO: 2207919 - RNA, 19 nt, Homo sapiens
  misc_RNA (1)...(19): siRNA sense strand
ucaaacuuccugaaucuga

SEQ ID NO: 2207920 - RNA, 19 nt, Homo sapiens
  misc_RNA (1)...(19): siRNA sense strand
gcgaguagcauuaucugau

SEQ ID NO: 2207921 - RNA, 19 nt, Homo sapiens
  misc_RNA (1)...(19): siRNA sense strand
uggaaaagcugcuaugaau

SEQ ID NO: 2207922 - RNA, 19 nt, Homo sapiens
  misc_RNA (1)...(19): siRNA sense strand
caagaucgugacauacaaa

SEQ ID NO: 2207923 - RNA, 19 nt, Homo sapiens
  misc_RNA (1)...(19): siRNA sense strand
gaugaugagacaaaggaaa

SEQ ID NO: 2207924 - RNA, 19 nt, Homo sapiens
  misc_RNA (1)...(19): siRNA sense strand
gaagcgaguagcauuaucu

SEQ ID NO: 2207925 - RNA, 19 nt, Homo sapiens
  misc_RNA (1)...(19): siRNA sense strand
gcaaauuuagugcuauaca

SEQ ID NO: 2207926 - RNA, 19 nt, Homo sapiens
  misc_RNA (1)...(19): siRNA sense strand
ccagaaagccaugcuaaag

SEQ ID NO: 2207927 - RNA, 19 nt, Homo sapiens
  misc_RNA (1)...(19): siRNA sense strand
guccauuacuggcuucuuc

SEQ ID NO: 2207928 - RNA, 19 nt, Homo sapiens
  misc_RNA (1)...(19): siRNA sense strand
gccaaagacugagccugaa

SEQ ID NO: 2207929 - RNA, 19 nt, Homo sapiens
  misc_RNA (1)...(19): siRNA sense strand
agugagagaagauaaauug

SEQ ID NO: 2207930 - RNA, 19 nt, Homo sapiens
  misc_RNA (1)...(19): siRNA sense strand
uaaccaggccaaacagaug

SEQ ID NO: 2207931 - RNA, 19 nt, Homo sapiens
  misc_RNA (1)...(19): siRNA sense strand
caagagcucaaguggagaa

SEQ ID NO: 2207932 - RNA, 19 nt, Homo sapiens
  misc_RNA (1)...(19): siRNA sense strand
gaggagaagaaucaaacuu

SEQ ID NO: 2207933 - RNA, 19 nt, Homo sapiens
  misc_RNA (1)...(19): siRNA sense strand
aacaagcagugaaagaaga

SEQ ID NO: 2207934 - RNA, 19 nt, Homo sapiens
  misc_RNA (1)...(19): siRNA sense strand
gcugaauccucuucgucuu

SEQ ID NO: 2207935 - RNA, 19 nt, Homo sapiens
  misc_RNA (1)...(19): siRNA sense strand
caagguugcaguagugaga

SEQ ID NO: 2207936 - RNA, 19 nt, Homo sapiens
  misc_RNA (1)...(19): siRNA sense strand
gagacaaaggaaacugaaa

SEQ ID NO: 2207937 - RNA, 19 nt, Homo sapiens
  misc_RNA (1)...(19): siRNA sense strand
uaucugaugaugagacaaa

SEQ ID NO: 2207938 - RNA, 19 nt, Homo sapiens
  misc_RNA (1)...(19): siRNA sense strand
acaagaucgugacauacaa

SEQ ID NO: 2207939 - RNA, 19 nt, Homo sapiens
  misc_RNA (1)...(19): siRNA sense strand
cccuagagcuccugcugaa

SEQ ID NO: 2207940 - RNA, 19 nt, Homo sapiens
  misc_RNA (1)...(19): siRNA sense strand
ggagcagccuacagugucu

SEQ ID NO: 2207941 - RNA, 19 nt, Homo sapiens
  misc_RNA (1)...(19): siRNA sense strand
ggaaaagcugcuaugaaua

SEQ ID NO: 2207942 - RNA, 19 nt, Homo sapiens
  misc_RNA (1)...(19): siRNA sense strand
ggucauggcccaccugcau

SEQ ID NO: 2207943 - RNA, 19 nt, Homo sapiens
  misc_RNA (1)...(19): siRNA sense strand
aagggaauaugaugagcaa

SEQ ID NO: 2207944 - RNA, 19 nt, Homo sapiens
  misc_RNA (1)...(19): siRNA sense strand
gagugaauccugcacagau

SEQ ID NO: 2207945 - RNA, 19 nt, Homo sapiens
  misc_RNA (1)...(19): siRNA sense strand
cgaaaacgcguacuaaaau

SEQ ID NO: 2207946 - RNA, 19 nt, Homo sapiens
  misc_RNA (1)...(19): siRNA sense strand
cagaacaagcagugaaaga

SEQ ID NO: 2207947 - RNA, 19 nt, Homo sapiens
  misc_RNA (1)...(19): siRNA sense strand
ugagagaagauaaauugga

SEQ ID NO: 2207948 - RNA, 19 nt, Homo sapiens
  misc_RNA (1)...(19): siRNA sense strand
ugaagaggagcuuaacaug

SEQ ID NO: 2207949 - RNA, 19 nt, Homo sapiens
  misc_RNA (1)...(19): siRNA sense strand
agaacaagcagugaaagaa

SEQ ID NO: 2207950 - RNA, 19 nt, Homo sapiens
  misc_RNA (1)...(19): siRNA sense strand
uaaauuggaagcagugaag

SEQ ID NO: 2207951 - RNA, 19 nt, Homo sapiens
  misc_RNA (1)...(19): siRNA sense strand
gggccucuguucaauacug

SEQ ID NO: 2207952 - RNA, 19 nt, Homo sapiens
  misc_RNA (1)...(19): siRNA sense strand
gugaagaggagcuuaacau

SEQ ID NO: 2207953 - RNA, 19 nt, Homo sapiens
  misc_RNA (1)...(19): siRNA sense strand
gccacaagguugcaguagu

SEQ ID NO: 2207954 - RNA, 19 nt, Homo sapiens
  misc_RNA (1)...(19): siRNA sense strand
gcaccagggaaagggaaua

SEQ ID NO: 2207955 - RNA, 19 nt, Homo sapiens
  misc_RNA (1)...(19): siRNA sense strand
caucuucacaugucaagug

SEQ ID NO: 2207956 - RNA, 19 nt, Homo sapiens
  misc_RNA (1)...(19): siRNA sense strand
ugacuaugacauccuuaaa

SEQ ID NO: 2207957 - RNA, 19 nt, Homo sapiens
  misc_RNA (1)...(19): siRNA sense strand
uacaaauggcugagcuaua

SEQ ID NO: 2207958 - RNA, 19 nt, Homo sapiens
  misc_RNA (1)...(19): siRNA sense strand
gauagugaagaggagcuua

SEQ ID NO: 2207959 - RNA, 19 nt, Homo sapiens
  misc_RNA (1)...(19): siRNA sense strand
aaacuuccugaaucugaua

SEQ ID NO: 2207960 - RNA, 19 nt, Homo sapiens
  misc_RNA (1)...(19): siRNA sense strand
gggaagcgaguagcauuau

SEQ ID NO: 2207961 - RNA, 19 nt, Homo sapiens
  misc_RNA (1)...(19): siRNA sense strand
gagagaagauaaauuggaa

SEQ ID NO: 2207962 - RNA, 19 nt, Homo sapiens
  misc_RNA (1)...(19): siRNA sense strand
gaaucaaacuuccugaauc

SEQ ID NO: 2207963 - RNA, 19 nt, Homo sapiens
  misc_RNA (1)...(19): siRNA sense strand
gaagaggagcuuaacauga

SEQ ID NO: 2207964 - RNA, 19 nt, Homo sapiens
  misc_RNA (1)...(19): siRNA sense strand
aagaggagcuuaacaugaa

SEQ ID NO: 2207965 - RNA, 19 nt, Homo sapiens
  misc_RNA (1)...(19): siRNA sense strand
acaaugagcugaccaccaa

SEQ ID NO: 2207966 - RNA, 19 nt, Homo sapiens
  misc_RNA (1)...(19): siRNA sense strand
gaaaagcugcuaugaauaa

SEQ ID NO: 2207967 - RNA, 19 nt, Homo sapiens
  misc_RNA (1)...(19): siRNA sense strand
gcagucacaucuucacaug

SEQ ID NO: 2207968 - RNA, 19 nt, Homo sapiens
  misc_RNA (1)...(19): siRNA sense strand
caacaaggcaccagggaaa

SEQ ID NO: 2207969 - RNA, 19 nt, Homo sapiens
  misc_RNA (1)...(19): siRNA sense strand
ccacaagguugcaguagug

SEQ ID NO: 2207970 - RNA, 19 nt, Homo sapiens
  misc_RNA (1)...(19): siRNA sense strand
ccaaaggaauuaugggaau

SEQ ID NO: 2207971 - RNA, 19 nt, Homo sapiens
  misc_RNA (1)...(19): siRNA sense strand
ggaauuaugggaauguuug

SEQ ID NO: 2207972 - RNA, 19 nt, Homo sapiens
  misc_RNA (1)...(19): siRNA sense strand
ggaauaugaugagcaacuu

SEQ ID NO: 2207973 - RNA, 19 nt, Homo sapiens
  misc_RNA (1)...(19): siRNA sense strand
aaaacaagaucgugacaua

SEQ ID NO: 2207974 - RNA, 19 nt, Homo sapiens
  misc_RNA (1)...(19): siRNA sense strand
aacagaggcuaaagaagua

SEQ ID NO: 2207975 - RNA, 19 nt, Homo sapiens
  misc_RNA (1)...(19): siRNA sense strand
gaaaggaaacgaaaagaaa

SEQ ID NO: 2207976 - RNA, 19 nt, Homo sapiens
  misc_RNA (1)...(19): siRNA sense strand
acaaauggcugagcuauac

SEQ ID NO: 2207977 - RNA, 19 nt, Homo sapiens
  misc_RNA (1)...(19): siRNA sense strand
agaaagccaugcuaaagga

SEQ ID NO: 2207978 - RNA, 19 nt, Homo sapiens
  misc_RNA (1)...(19): siRNA sense strand
aaacagaggcuaaagaagu

SEQ ID NO: 2207979 - RNA, 19 nt, Homo sapiens
  misc_RNA (1)...(19): siRNA sense strand
cuccaaagcugcugcuaaa

SEQ ID NO: 2207980 - RNA, 19 nt, Homo sapiens
  misc_RNA (1)...(19): siRNA sense strand
caagaaaccaacaaggaaa

SEQ ID NO: 2207981 - RNA, 19 nt, Homo sapiens
  misc_RNA (1)...(19): siRNA sense strand
cagaacugcagcaaauuua

SEQ ID NO: 2207982 - RNA, 19 nt, Homo sapiens
  misc_RNA (1)...(19): siRNA sense strand
gaacaagcagugaaagaag

SEQ ID NO: 2207983 - RNA, 19 nt, Homo sapiens
  misc_RNA (1)...(19): siRNA sense strand
ccaagaaaccaacaaggaa

SEQ ID NO: 2207984 - RNA, 19 nt, Homo sapiens
  misc_RNA (1)...(19): siRNA sense strand
cuaaagaaguaacaaaugc

SEQ ID NO: 2207985 - RNA, 19 nt, Homo sapiens
  misc_RNA (1)...(19): siRNA sense strand
gaaaacagaggcuaaagaa

SEQ ID NO: 2207986 - RNA, 19 nt, Homo sapiens
  misc_RNA (1)...(19): siRNA sense strand
gaugcuguaugauuauguu

SEQ ID NO: 2207987 - RNA, 19 nt, Homo sapiens
  misc_RNA (1)...(19): siRNA sense strand
cgaguagcauuaucugaug

SEQ ID NO: 2207988 - RNA, 19 nt, Homo sapiens
  misc_RNA (1)...(19): siRNA sense strand
gcuguaugauuauguugaa

SEQ ID NO: 2207989 - RNA, 19 nt, Homo sapiens
  misc_RNA (1)...(19): siRNA sense strand
agacacaagccaacaauga

SEQ ID NO: 2207990 - RNA, 19 nt, Homo sapiens
  misc_RNA (1)...(19): siRNA sense strand
gcuaaagaaguaacaaaug

SEQ ID NO: 2207991 - RNA, 19 nt, Homo sapiens
  misc_RNA (1)...(19): siRNA sense strand
uggcugagcuauacacuag

SEQ ID NO: 2207992 - RNA, 19 nt, Homo sapiens
  misc_RNA (1)...(19): siRNA sense strand
caaaggaauuaugggaaug

SEQ ID NO: 2207993 - RNA, 19 nt, Homo sapiens
  misc_RNA (1)...(19): siRNA sense strand
gaagacauccucaguacac

SEQ ID NO: 2207994 - RNA, 19 nt, Homo sapiens
  misc_RNA (1)...(19): siRNA sense strand
gaaccuccuucugucaaga

SEQ ID NO: 2207995 - RNA, 19 nt, Homo sapiens
  misc_RNA (1)...(19): siRNA sense strand
uuaaggugcugcagaagga

SEQ ID NO: 2207996 - RNA, 19 nt, Homo sapiens
  misc_RNA (1)...(19): siRNA sense strand
ggaaagggaauaugaugag

SEQ ID NO: 2207997 - RNA, 19 nt, Homo sapiens
  misc_RNA (1)...(19): siRNA sense strand
gaguagcauuaucugauga

SEQ ID NO: 2207998 - RNA, 19 nt, Homo sapiens
  misc_RNA (1)...(19): siRNA sense strand
ggagcccaacugcauguua

SEQ ID NO: 2207999 - RNA, 19 nt, Homo sapiens
  misc_RNA (1)...(19): siRNA sense strand
ggggaaggcugcauaguga

SEQ ID NO: 2208000 - RNA, 19 nt, Homo sapiens
  misc_RNA (1)...(19): siRNA sense strand
ugauagcagugaagaugaa

SEQ ID NO: 2208001 - RNA, 19 nt, Homo sapiens
  misc_RNA (1)...(19): siRNA sense strand
aaucaaacuuccugaaucu

SEQ ID NO: 2208002 - RNA, 19 nt, Homo sapiens
  misc_RNA (1)...(19): siRNA sense strand
gaauaugaugagcaacuuu

SEQ ID NO: 2208003 - RNA, 19 nt, Homo sapiens
  misc_RNA (1)...(19): siRNA sense strand
ccagggaaagggaauauga

SEQ ID NO: 2208004 - RNA, 19 nt, Homo sapiens
  misc_RNA (1)...(19): siRNA sense strand
gaacugcagcaaauuuagu

SEQ ID NO: 2208005 - RNA, 19 nt, Homo sapiens
  misc_RNA (1)...(19): siRNA sense strand
gaucgugacauacaaaugg

SEQ ID NO: 2208006 - RNA, 19 nt, Homo sapiens
  misc_RNA (1)...(19): siRNA sense strand
agugaauccugcacagaua

SEQ ID NO: 2208007 - RNA, 19 nt, Homo sapiens
  misc_RNA (1)...(19): siRNA sense strand
cagcagcccaaaggaauua

SEQ ID NO: 2208008 - RNA, 19 nt, Homo sapiens
  misc_RNA (1)...(19): siRNA sense strand
caugaagacauccucagua

SEQ ID NO: 2208009 - RNA, 19 nt, Homo sapiens
  misc_RNA (1)...(19): siRNA sense strand
gagcuuaacaugaagacau

SEQ ID NO: 2208010 - RNA, 19 nt, Homo sapiens
  misc_RNA (1)...(19): siRNA sense strand
gagcuguggcugugauuga

SEQ ID NO: 2208011 - RNA, 19 nt, Homo sapiens
  misc_RNA (1)...(19): siRNA sense strand
aaaggaaacugaaaacaug

SEQ ID NO: 2208012 - RNA, 19 nt, Homo sapiens
  misc_RNA (1)...(19): siRNA sense strand
ggaagcgaguagcauuauc

SEQ ID NO: 2208013 - RNA, 19 nt, Homo sapiens
  misc_RNA (1)...(19): siRNA sense strand
gggaaagggaauaugauga

SEQ ID NO: 2208014 - RNA, 19 nt, Homo sapiens
  misc_RNA (1)...(19): siRNA sense strand
gagcccaacugcauguuac

SEQ ID NO: 2208015 - RNA, 19 nt, Homo sapiens
  misc_RNA (1)...(19): siRNA sense strand
gaaaacgcguacuaaaauc

SEQ ID NO: 2208016 - RNA, 19 nt, Homo sapiens
  misc_RNA (1)...(19): siRNA sense strand
caaacuuccugaaucugau

SEQ ID NO: 2208017 - RNA, 19 nt, Homo sapiens
  misc_RNA (1)...(19): siRNA sense strand
aagcagagccuguuaaggu

SEQ ID NO: 2208018 - RNA, 19 nt, Homo sapiens
  misc_RNA (1)...(19): siRNA sense strand
caauuuggacucagaacaa

SEQ ID NO: 2208019 - RNA, 19 nt, Homo sapiens
  misc_RNA (1)...(19): siRNA sense strand
gcaguagugagagaagaua

SEQ ID NO: 2208020 - RNA, 19 nt, Homo sapiens
  misc_RNA (1)...(19): siRNA sense strand
ucaaacuuccugaaucuga

SEQ ID NO: 2208021 - RNA, 19 nt, Homo sapiens
  misc_RNA (1)...(19): siRNA sense strand
gcgaguagcauuaucugau

SEQ ID NO: 2208022 - RNA, 19 nt, Homo sapiens
  misc_RNA (1)...(19): siRNA sense strand
uggaaaagcugcuaugaau

SEQ ID NO: 2208023 - RNA, 19 nt, Homo sapiens
  misc_RNA (1)...(19): siRNA sense strand
gcaaauuuagugcuauaca

SEQ ID NO: 2208024 - RNA, 19 nt, Homo sapiens
  misc_RNA (1)...(19): siRNA sense strand
caagaucgugacauacaaa

SEQ ID NO: 2208025 - RNA, 19 nt, Homo sapiens
  misc_RNA (1)...(19): siRNA sense strand
gaugaugagacaaaggaaa

SEQ ID NO: 2208026 - RNA, 19 nt, Homo sapiens
  misc_RNA (1)...(19): siRNA sense strand
gaagcgaguagcauuaucu

SEQ ID NO: 2208027 - RNA, 19 nt, Homo sapiens
  misc_RNA (1)...(19): siRNA sense strand
ccagaaagccaugcuaaag

SEQ ID NO: 2208028 - RNA, 19 nt, Homo sapiens
  misc_RNA (1)...(19): siRNA sense strand
guccauuacuggcuucuuc

SEQ ID NO: 2208029 - RNA, 19 nt, Homo sapiens
  misc_RNA (1)...(19): siRNA sense strand
gccaaagacugagccugaa

SEQ ID NO: 2208030 - RNA, 19 nt, Homo sapiens
  misc_RNA (1)...(19): siRNA sense strand
agugagagaagauaaauug

SEQ ID NO: 2208031 - RNA, 19 nt, Homo sapiens
  misc_RNA (1)...(19): siRNA sense strand
caagagcucaaguggagaa

SEQ ID NO: 2208032 - RNA, 19 nt, Homo sapiens
  misc_RNA (1)...(19): siRNA sense strand
gaggagaagaaucaaacuu

SEQ ID NO: 2208033 - RNA, 19 nt, Homo sapiens
  misc_RNA (1)...(19): siRNA sense strand
uaaccaggccaaacagaug

SEQ ID NO: 2208034 - RNA, 19 nt, Homo sapiens
  misc_RNA (1)...(19): siRNA sense strand
aacaagcagugaaagaaga

SEQ ID NO: 2208035 - RNA, 19 nt, Homo sapiens
  misc_RNA (1)...(19): siRNA sense strand
gcugaauccucuucgucuu

SEQ ID NO: 2208036 - RNA, 19 nt, Homo sapiens
  misc_RNA (1)...(19): siRNA sense strand
caagguugcaguagugaga

SEQ ID NO: 2208037 - RNA, 19 nt, Homo sapiens
  misc_RNA (1)...(19): siRNA sense strand
acaagaucgugacauacaa

SEQ ID NO: 2208038 - RNA, 19 nt, Homo sapiens
  misc_RNA (1)...(19): siRNA sense strand
gagacaaaggaaacugaaa

SEQ ID NO: 2208039 - RNA, 19 nt, Homo sapiens
  misc_RNA (1)...(19): siRNA sense strand
uaucugaugaugagacaaa

SEQ ID NO: 2208040 - RNA, 19 nt, Homo sapiens
  misc_RNA (1)...(19): siRNA sense strand
cccuagagcuccugcugaa

SEQ ID NO: 2208041 - RNA, 19 nt, Homo sapiens
  misc_RNA (1)...(19): siRNA sense strand
ggagcagccuacagugucu

SEQ ID NO: 2208042 - RNA, 19 nt, Homo sapiens
  misc_RNA (1)...(19): siRNA sense strand
ggaaaagcugcuaugaaua

SEQ ID NO: 2208043 - RNA, 19 nt, Homo sapiens
  misc_RNA (1)...(19): siRNA sense strand
ggucauggcccaccugcau

SEQ ID NO: 2208044 - RNA, 19 nt, Homo sapiens
  misc_RNA (1)...(19): siRNA sense strand
aagggaauaugaugagcaa

SEQ ID NO: 2208045 - RNA, 19 nt, Homo sapiens
  misc_RNA (1)...(19): siRNA sense strand
gagugaauccugcacagau

SEQ ID NO: 2208046 - RNA, 19 nt, Homo sapiens
  misc_RNA (1)...(19): siRNA sense strand
cgaaaacgcguacuaaaau

SEQ ID NO: 2208047 - RNA, 19 nt, Homo sapiens
  misc_RNA (1)...(19): siRNA sense strand
cagaacaagcagugaaaga

SEQ ID NO: 2208048 - RNA, 19 nt, Homo sapiens
  misc_RNA (1)...(19): siRNA sense strand
ugagagaagauaaauugga

SEQ ID NO: 2208049 - RNA, 19 nt, Homo sapiens
  misc_RNA (1)...(19): siRNA sense strand
ugaagaggagcuuaacaug

SEQ ID NO: 2208050 - RNA, 19 nt, Homo sapiens
  misc_RNA (1)...(19): siRNA sense strand
agaacaagcagugaaagaa

SEQ ID NO: 2208051 - RNA, 19 nt, Homo sapiens
  misc_RNA (1)...(19): siRNA sense strand
uaaauuggaagcagugaag

SEQ ID NO: 2208052 - RNA, 19 nt, Homo sapiens
  misc_RNA (1)...(19): siRNA sense strand
gggccucuguucaauacug

SEQ ID NO: 2208053 - RNA, 19 nt, Homo sapiens
  misc_RNA (1)...(19): siRNA sense strand
gugaagaggagcuuaacau

SEQ ID NO: 2208054 - RNA, 19 nt, Homo sapiens
  misc_RNA (1)...(19): siRNA sense strand
gccacaagguugcaguagu

SEQ ID NO: 2208055 - RNA, 19 nt, Homo sapiens
  misc_RNA (1)...(19): siRNA sense strand
gcaccagggaaagggaaua

SEQ ID NO: 2208056 - RNA, 19 nt, Homo sapiens
  misc_RNA (1)...(19): siRNA sense strand
caucuucacaugucaagug

SEQ ID NO: 2208057 - RNA, 19 nt, Homo sapiens
  misc_RNA (1)...(19): siRNA sense strand
ugacuaugacauccuuaaa

SEQ ID NO: 2208058 - RNA, 19 nt, Homo sapiens
  misc_RNA (1)...(19): siRNA sense strand
aaacuuccugaaucugaua

SEQ ID NO: 2208059 - RNA, 19 nt, Homo sapiens
  misc_RNA (1)...(19): siRNA sense strand
gauagugaagaggagcuua

SEQ ID NO: 2208060 - RNA, 19 nt, Homo sapiens
  misc_RNA (1)...(19): siRNA sense strand
uacaaauggcugagcuaua

SEQ ID NO: 2208061 - RNA, 19 nt, Homo sapiens
  misc_RNA (1)...(19): siRNA sense strand
ggaagaauauugacaagug

SEQ ID NO: 2208062 - RNA, 19 nt, Homo sapiens
  misc_RNA (1)...(19): siRNA sense strand
gaacggagaaggaagaagu

SEQ ID NO: 2208063 - RNA, 19 nt, Homo sapiens
  misc_RNA (1)...(19): siRNA sense strand
agugguaccuguucaauga

SEQ ID NO: 2208064 - RNA, 19 nt, Homo sapiens
  misc_RNA (1)...(19): siRNA sense strand
guuaagaaguucagcaucu

SEQ ID NO: 2208065 - RNA, 19 nt, Homo sapiens
  misc_RNA (1)...(19): siRNA sense strand
agagcgagcuggcggguuu

SEQ ID NO: 2208066 - RNA, 19 nt, Homo sapiens
  misc_RNA (1)...(19): siRNA sense strand
caacgucaccuccuucuuc

SEQ ID NO: 2208067 - RNA, 19 nt, Homo sapiens
  misc_RNA (1)...(19): siRNA sense strand
aagagaagguggagaagga

SEQ ID NO: 2208068 - RNA, 19 nt, Homo sapiens
  misc_RNA (1)...(19): siRNA sense strand
gcucggaguaucugaagua

SEQ ID NO: 2208069 - RNA, 19 nt, Homo sapiens
  misc_RNA (1)...(19): siRNA sense strand
gcagagcagucaggaggaa

SEQ ID NO: 2208070 - RNA, 19 nt, Homo sapiens
  misc_RNA (1)...(19): siRNA sense strand
ggauagagagggaggaaga

SEQ ID NO: 2208071 - RNA, 19 nt, Homo sapiens
  misc_RNA (1)...(19): siRNA sense strand
ggaccugguuaacuacuuc

SEQ ID NO: 2208072 - RNA, 19 nt, Homo sapiens
  misc_RNA (1)...(19): siRNA sense strand
ggagagaacggagaaggaa

SEQ ID NO: 2208073 - RNA, 19 nt, Homo sapiens
  misc_RNA (1)...(19): siRNA sense strand
agacaaggaugaggaugaa

SEQ ID NO: 2208074 - RNA, 19 nt, Homo sapiens
  misc_RNA (1)...(19): siRNA sense strand
caacauccuuuaccuacag

SEQ ID NO: 2208075 - RNA, 19 nt, Homo sapiens
  misc_RNA (1)...(19): siRNA sense strand
ggaccuccauguucccaau

SEQ ID NO: 2208076 - RNA, 19 nt, Homo sapiens
  misc_RNA (1)...(19): siRNA sense strand
caagauuggucucaucaac

SEQ ID NO: 2208077 - RNA, 19 nt, Homo sapiens
  misc_RNA (1)...(19): siRNA sense strand
gaagccauuuccaaagaca

SEQ ID NO: 2208078 - RNA, 19 nt, Homo sapiens
  misc_RNA (1)...(19): siRNA sense strand
aaaggaggcugagcaggaa

SEQ ID NO: 2208079 - RNA, 19 nt, Homo sapiens
  misc_RNA (1)...(19): siRNA sense strand
caaaggaaacacugcauca

SEQ ID NO: 2208080 - RNA, 19 nt, Homo sapiens
  misc_RNA (1)...(19): siRNA sense strand
gugcuccgcuugacugaga

SEQ ID NO: 2208081 - RNA, 19 nt, Homo sapiens
  misc_RNA (1)...(19): siRNA sense strand
cagcauccuucaggccuua

SEQ ID NO: 2208082 - RNA, 19 nt, Homo sapiens
  misc_RNA (1)...(19): siRNA sense strand
gaaagaggaggagguggaa

SEQ ID NO: 2208083 - RNA, 19 nt, Homo sapiens
  misc_RNA (1)...(19): siRNA sense strand
ggaaacacugcaucacaga

SEQ ID NO: 2208084 - RNA, 19 nt, Homo sapiens
  misc_RNA (1)...(19): siRNA sense strand
guccuucucuuccuucgaa

SEQ ID NO: 2208085 - RNA, 19 nt, Homo sapiens
  misc_RNA (1)...(19): siRNA sense strand
caucaaggaccuccauguu

SEQ ID NO: 2208086 - RNA, 19 nt, Homo sapiens
  misc_RNA (1)...(19): siRNA sense strand
ggaaggagagagggagaaa

SEQ ID NO: 2208087 - RNA, 19 nt, Homo sapiens
  misc_RNA (1)...(19): siRNA sense strand
gggccuggcugcuguuaag

SEQ ID NO: 2208088 - RNA, 19 nt, Homo sapiens
  misc_RNA (1)...(19): siRNA sense strand
gggcaagauuggucucauc

SEQ ID NO: 2208089 - RNA, 19 nt, Homo sapiens
  misc_RNA (1)...(19): siRNA sense strand
ggaagaggaagaagagaag

SEQ ID NO: 2208090 - RNA, 19 nt, Homo sapiens
  misc_RNA (1)...(19): siRNA sense strand
uggcugcuguuaagaaguu

SEQ ID NO: 2208091 - RNA, 19 nt, Homo sapiens
  misc_RNA (1)...(19): siRNA sense strand
gggcuuugaugaagacaag

SEQ ID NO: 2208092 - RNA, 19 nt, Homo sapiens
  misc_RNA (1)...(19): siRNA sense strand
ccuaugaccucugcagugu

SEQ ID NO: 2208093 - RNA, 19 nt, Homo sapiens
  misc_RNA (1)...(19): siRNA sense strand
gcucuuuggcuuccuagaa

SEQ ID NO: 2208094 - RNA, 19 nt, Homo sapiens
  misc_RNA (1)...(19): siRNA sense strand
ucaccuccuucuucccuaa

SEQ ID NO: 2208095 - RNA, 19 nt, Homo sapiens
  misc_RNA (1)...(19): siRNA sense strand
gaaguucagcaucuugauc

SEQ ID NO: 2208096 - RNA, 19 nt, Homo sapiens
  misc_RNA (1)...(19): siRNA sense strand
ccaccagccuguacaucga

SEQ ID NO: 2208097 - RNA, 19 nt, Homo sapiens
  misc_RNA (1)...(19): siRNA sense strand
uggaucggcugcacgaaga

SEQ ID NO: 2208098 - RNA, 19 nt, Homo sapiens
  misc_RNA (1)...(19): siRNA sense strand
aagaagagaagguggagaa

SEQ ID NO: 2208099 - RNA, 19 nt, Homo sapiens
  misc_RNA (1)...(19): siRNA sense strand
gggcuucccggaucuguau

SEQ ID NO: 2208100 - RNA, 19 nt, Homo sapiens
  misc_RNA (1)...(19): siRNA sense strand
uccuggaccugguuaacua

SEQ ID NO: 2208101 - RNA, 19 nt, Homo sapiens
  misc_RNA (1)...(19): siRNA sense strand
ggagguggaagaggaagaa

SEQ ID NO: 2208102 - RNA, 19 nt, Homo sapiens
  misc_RNA (1)...(19): siRNA sense strand
gcaucuugaucgagguuuc

SEQ ID NO: 2208103 - RNA, 19 nt, Homo sapiens
  misc_RNA (1)...(19): siRNA sense strand
uggcaaugguggugacuuc

SEQ ID NO: 2208104 - RNA, 19 nt, Homo sapiens
  misc_RNA (1)...(19): siRNA sense strand
agacaacauccuuuaccua

SEQ ID NO: 2208105 - RNA, 19 nt, Homo sapiens
  misc_RNA (1)...(19): siRNA sense strand
ggucacuacuacugcuaug

SEQ ID NO: 2208106 - RNA, 19 nt, Homo sapiens
  misc_RNA (1)...(19): siRNA sense strand
cggaguaucugaaguaccu

SEQ ID NO: 2208107 - RNA, 19 nt, Homo sapiens
  misc_RNA (1)...(19): siRNA sense strand
aaggagagagggagaaaga

SEQ ID NO: 2208108 - RNA, 19 nt, Homo sapiens
  misc_RNA (1)...(19): siRNA sense strand
ugucugugcucaaguacau

SEQ ID NO: 2208109 - RNA, 19 nt, Homo sapiens
  misc_RNA (1)...(19): siRNA sense strand
ucagcaacgucaccuccuu

SEQ ID NO: 2208110 - RNA, 19 nt, Homo sapiens
  misc_RNA (1)...(19): siRNA sense strand
ggaggagguggaagaggaa

SEQ ID NO: 2208111 - RNA, 19 nt, Homo sapiens
  misc_RNA (1)...(19): siRNA sense strand
gcagucaggaggaaaggau

SEQ ID NO: 2208112 - RNA, 19 nt, Homo sapiens
  misc_RNA (1)...(19): siRNA sense strand
acucggaucugcugucucu

SEQ ID NO: 2208113 - RNA, 19 nt, Homo sapiens
  misc_RNA (1)...(19): siRNA sense strand
aagcugcaguggcucuuug

SEQ ID NO: 2208114 - RNA, 19 nt, Homo sapiens
  misc_RNA (1)...(19): siRNA sense strand
cuaaggacacagccuaugu

SEQ ID NO: 2208115 - RNA, 19 nt, Homo sapiens
  misc_RNA (1)...(19): siRNA sense strand
uacaggagcaggagaagga

SEQ ID NO: 2208116 - RNA, 19 nt, Homo sapiens
  misc_RNA (1)...(19): siRNA sense strand
cgagcuggcggguuucuau

SEQ ID NO: 2208117 - RNA, 19 nt, Homo sapiens
  misc_RNA (1)...(19): siRNA sense strand
gaagggaaggaggagagaa

SEQ ID NO: 2208118 - RNA, 19 nt, Homo sapiens
  misc_RNA (1)...(19): siRNA sense strand
gcaagauuggucucaucaa

SEQ ID NO: 2208119 - RNA, 19 nt, Homo sapiens
  misc_RNA (1)...(19): siRNA sense strand
uggccucucuggucaagga

SEQ ID NO: 2208120 - RNA, 19 nt, Homo sapiens
  misc_RNA (1)...(19): siRNA sense strand
auugacaaguggaucauug

SEQ ID NO: 2208121 - RNA, 19 nt, Homo sapiens
  misc_RNA (1)...(19): siRNA sense strand
gauagagagggaggaagaa

SEQ ID NO: 2208122 - RNA, 19 nt, Homo sapiens
  misc_RNA (1)...(19): siRNA sense strand
ucagacacgggcaagauug

SEQ ID NO: 2208123 - RNA, 19 nt, Homo sapiens
  misc_RNA (1)...(19): siRNA sense strand
agagaacggagaaggaaga

SEQ ID NO: 2208124 - RNA, 19 nt, Homo sapiens
  misc_RNA (1)...(19): siRNA sense strand
aagacaaggaugaggauga

SEQ ID NO: 2208125 - RNA, 19 nt, Homo sapiens
  misc_RNA (1)...(19): siRNA sense strand
gaucauugcacugcugaag

SEQ ID NO: 2208126 - RNA, 19 nt, Homo sapiens
  misc_RNA (1)...(19): siRNA sense strand
ugaguugggcucuucuaga

SEQ ID NO: 2208127 - RNA, 19 nt, Homo sapiens
  misc_RNA (1)...(19): siRNA sense strand
ggcaagauuggucucauca

SEQ ID NO: 2208128 - RNA, 19 nt, Homo sapiens
  misc_RNA (1)...(19): siRNA sense strand
uggaagaggaagaagagaa

SEQ ID NO: 2208129 - RNA, 19 nt, Homo sapiens
  misc_RNA (1)...(19): siRNA sense strand
gguggaagaggaagaagag

SEQ ID NO: 2208130 - RNA, 19 nt, Homo sapiens
  misc_RNA (1)...(19): siRNA sense strand
gagaacggagaaggaagaa

SEQ ID NO: 2208131 - RNA, 19 nt, Homo sapiens
  misc_RNA (1)...(19): siRNA sense strand
ccuuauucauggcgucuga

SEQ ID NO: 2208132 - RNA, 19 nt, Homo sapiens
  misc_RNA (1)...(19): siRNA sense strand
ccaaugaggaccgcaucaa

SEQ ID NO: 2208133 - RNA, 19 nt, Homo sapiens
  misc_RNA (1)...(19): siRNA sense strand
acaacauccuuuaccuaca

SEQ ID NO: 2208134 - RNA, 19 nt, Homo sapiens
  misc_RNA (1)...(19): siRNA sense strand
ucaaggaggacucgaacuc

SEQ ID NO: 2208135 - RNA, 19 nt, Homo sapiens
  misc_RNA (1)...(19): siRNA sense strand
caaugaggaccgcaucaag

SEQ ID NO: 2208136 - RNA, 19 nt, Homo sapiens
  misc_RNA (1)...(19): siRNA sense strand
aagaggaggagguggaaga

SEQ ID NO: 2208137 - RNA, 19 nt, Homo sapiens
  misc_RNA (1)...(19): siRNA sense strand
ggaggggcuuugaugaaga

SEQ ID NO: 2208138 - RNA, 19 nt, Homo sapiens
  misc_RNA (1)...(19): siRNA sense strand
ucucuuccuucgaaucugu

SEQ ID NO: 2208139 - RNA, 19 nt, Homo sapiens
  misc_RNA (1)...(19): siRNA sense strand
cugcugcgcuucucuuucg

SEQ ID NO: 2208140 - RNA, 19 nt, Homo sapiens
  misc_RNA (1)...(19): siRNA sense strand
guggagaaggagacagaaa

SEQ ID NO: 2208141 - RNA, 19 nt, Homo sapiens
  misc_RNA (1)...(19): siRNA sense strand
ggacugcucggaguaucug

SEQ ID NO: 2208142 - RNA, 19 nt, Homo sapiens
  misc_RNA (1)...(19): siRNA sense strand
ucugggaacugccgauagg

SEQ ID NO: 2208143 - RNA, 19 nt, Homo sapiens
  misc_RNA (1)...(19): siRNA sense strand
gagaaaacgggcacaagga

SEQ ID NO: 2208144 - RNA, 19 nt, Homo sapiens
  misc_RNA (1)...(19): siRNA sense strand
gcacagagaagaucuauga

SEQ ID NO: 2208145 - RNA, 19 nt, Homo sapiens
  misc_RNA (1)...(19): siRNA sense strand
ggaaauggccaauacauga

SEQ ID NO: 2208146 - RNA, 19 nt, Homo sapiens
  misc_RNA (1)...(19): siRNA sense strand
gaacaagccuuuccucaac

SEQ ID NO: 2208147 - RNA, 19 nt, Homo sapiens
  misc_RNA (1)...(19): siRNA sense strand
cagagaagaucuaugauga

SEQ ID NO: 2208148 - RNA, 19 nt, Homo sapiens
  misc_RNA (1)...(19): siRNA sense strand
gagcaguggugaugaguuu

SEQ ID NO: 2208149 - RNA, 19 nt, Homo sapiens
  misc_RNA (1)...(19): siRNA sense strand
ugaaagaccugaauguaga

SEQ ID NO: 2208150 - RNA, 19 nt, Homo sapiens
  misc_RNA (1)...(19): siRNA sense strand
ugaaggaagugcaguauga

SEQ ID NO: 2208151 - RNA, 19 nt, Homo sapiens
  misc_RNA (1)...(19): siRNA sense strand
gagacuaccuguacaacuu

SEQ ID NO: 2208152 - RNA, 19 nt, Homo sapiens
  misc_RNA (1)...(19): siRNA sense strand
cgacagaucuuccgcuuca

SEQ ID NO: 2208153 - RNA, 19 nt, Homo sapiens
  misc_RNA (1)...(19): siRNA sense strand
gaggacaguuucauagauu

SEQ ID NO: 2208154 - RNA, 19 nt, Homo sapiens
  misc_RNA (1)...(19): siRNA sense strand
caaccgacgucucccuaua

SEQ ID NO: 2208155 - RNA, 19 nt, Homo sapiens
  misc_RNA (1)...(19): siRNA sense strand
ccacagacaucaucagugu

SEQ ID NO: 2208156 - RNA, 19 nt, Homo sapiens
  misc_RNA (1)...(19): siRNA sense strand
caucaugucugaaagaaug

SEQ ID NO: 2208157 - RNA, 19 nt, Homo sapiens
  misc_RNA (1)...(19): siRNA sense strand
gcugugaccugagcaauuu

SEQ ID NO: 2208158 - RNA, 19 nt, Homo sapiens
  misc_RNA (1)...(19): siRNA sense strand
gcagggugauauacaagua

SEQ ID NO: 2208159 - RNA, 19 nt, Homo sapiens
  misc_RNA (1)...(19): siRNA sense strand
gcggugauaucuuugagua

SEQ ID NO: 2208160 - RNA, 19 nt, Homo sapiens
  misc_RNA (1)...(19): siRNA sense strand
gaaggaaagcccaguaguu

SEQ ID NO: 2208161 - RNA, 19 nt, Homo sapiens
  misc_RNA (1)...(19): siRNA sense strand
gaucucaaguguucauaga

SEQ ID NO: 2208162 - RNA, 19 nt, Homo sapiens
  misc_RNA (1)...(19): siRNA sense strand
gcagcaacgucaugccuuu

SEQ ID NO: 2208163 - RNA, 19 nt, Homo sapiens
  misc_RNA (1)...(19): siRNA sense strand
caaggaugaugucaccaua

SEQ ID NO: 2208164 - RNA, 19 nt, Homo sapiens
  misc_RNA (1)...(19): siRNA sense strand
gaucuaauccugugggaaa

SEQ ID NO: 2208165 - RNA, 19 nt, Homo sapiens
  misc_RNA (1)...(19): siRNA sense strand
gaaccuacacuccuucuau

SEQ ID NO: 2208166 - RNA, 19 nt, Homo sapiens
  misc_RNA (1)...(19): siRNA sense strand
ggacuuugaucgcguaaca

SEQ ID NO: 2208167 - RNA, 19 nt, Homo sapiens
  misc_RNA (1)...(19): siRNA sense strand
ggacacgacuguucuaucg

SEQ ID NO: 2208168 - RNA, 19 nt, Homo sapiens
  misc_RNA (1)...(19): siRNA sense strand
ugccaaggaugcaaaguua

SEQ ID NO: 2208169 - RNA, 19 nt, Homo sapiens
  misc_RNA (1)...(19): siRNA sense strand
gaagugguuuccuuucuca

SEQ ID NO: 2208170 - RNA, 19 nt, Homo sapiens
  misc_RNA (1)...(19): siRNA sense strand
ggaugaccguccaguauga

SEQ ID NO: 2208171 - RNA, 19 nt, Homo sapiens
  misc_RNA (1)...(19): siRNA sense strand
gaacauguaugagcugucu

SEQ ID NO: 2208172 - RNA, 19 nt, Homo sapiens
  misc_RNA (1)...(19): siRNA sense strand
gaaguuuggugucauuuac

SEQ ID NO: 2208173 - RNA, 19 nt, Homo sapiens
  misc_RNA (1)...(19): siRNA sense strand
gaacaucaguuuugucaau

SEQ ID NO: 2208174 - RNA, 19 nt, Homo sapiens
  misc_RNA (1)...(19): siRNA sense strand
gacaucaagugcuucauga

SEQ ID NO: 2208175 - RNA, 19 nt, Homo sapiens
  misc_RNA (1)...(19): siRNA sense strand
gcauuacaguggacaaguu

SEQ ID NO: 2208176 - RNA, 19 nt, Homo sapiens
  misc_RNA (1)...(19): siRNA sense strand
gccaugggaucgcuucuuu

SEQ ID NO: 2208177 - RNA, 19 nt, Homo sapiens
  misc_RNA (1)...(19): siRNA sense strand
caauaacccucucuuugga

SEQ ID NO: 2208178 - RNA, 19 nt, Homo sapiens
  misc_RNA (1)...(19): siRNA sense strand
caagaacucugaggugguu

SEQ ID NO: 2208179 - RNA, 19 nt, Homo sapiens
  misc_RNA (1)...(19): siRNA sense strand
ggaaguuuggugucauuua

SEQ ID NO: 2208180 - RNA, 19 nt, Homo sapiens
  misc_RNA (1)...(19): siRNA sense strand
caaccgaaaucuccuaucu

SEQ ID NO: 2208181 - RNA, 19 nt, Homo sapiens
  misc_RNA (1)...(19): siRNA sense strand
gaucugugcugccgacugu

SEQ ID NO: 2208182 - RNA, 19 nt, Homo sapiens
  misc_RNA (1)...(19): siRNA sense strand
ggacaacauuuuaugagua

SEQ ID NO: 2208183 - RNA, 19 nt, Homo sapiens
  misc_RNA (1)...(19): siRNA sense strand
caaagacaaugauggagau

SEQ ID NO: 2208184 - RNA, 19 nt, Homo sapiens
  misc_RNA (1)...(19): siRNA sense strand
ggacagcacgcacauaauc

SEQ ID NO: 2208185 - RNA, 19 nt, Homo sapiens
  misc_RNA (1)...(19): siRNA sense strand
gaaccaugcccacuaccua

SEQ ID NO: 2208186 - RNA, 19 nt, Homo sapiens
  misc_RNA (1)...(19): siRNA sense strand
ggcaguauaucuuugaguu

SEQ ID NO: 2208187 - RNA, 19 nt, Homo sapiens
  misc_RNA (1)...(19): siRNA sense strand
ccacgacacugcccagaga

SEQ ID NO: 2208188 - RNA, 19 nt, Homo sapiens
  misc_RNA (1)...(19): siRNA sense strand
guagaaaacccgaccauua

SEQ ID NO: 2208189 - RNA, 19 nt, Homo sapiens
  misc_RNA (1)...(19): siRNA sense strand
gaaauggccaauacaugaa

SEQ ID NO: 2208190 - RNA, 19 nt, Homo sapiens
  misc_RNA (1)...(19): siRNA sense strand
gaagaaggagcugaaggua

SEQ ID NO: 2208191 - RNA, 19 nt, Homo sapiens
  misc_RNA (1)...(19): siRNA sense strand
caaaggaaccacagaagga

SEQ ID NO: 2208192 - RNA, 19 nt, Homo sapiens
  misc_RNA (1)...(19): siRNA sense strand
caacauccacuucaugaga

SEQ ID NO: 2208193 - RNA, 19 nt, Homo sapiens
  misc_RNA (1)...(19): siRNA sense strand
ggacacgaguuggccauga

SEQ ID NO: 2208194 - RNA, 19 nt, Homo sapiens
  misc_RNA (1)...(19): siRNA sense strand
gaaccaaagggcccugaaa

SEQ ID NO: 2208195 - RNA, 19 nt, Homo sapiens
  misc_RNA (1)...(19): siRNA sense strand
gaucaacacaguacuuaau

SEQ ID NO: 2208196 - RNA, 19 nt, Homo sapiens
  misc_RNA (1)...(19): siRNA sense strand
ccaucaaccuacagaauga

SEQ ID NO: 2208197 - RNA, 19 nt, Homo sapiens
  misc_RNA (1)...(19): siRNA sense strand
gaacugaaagaccugaaug

SEQ ID NO: 2208198 - RNA, 19 nt, Homo sapiens
  misc_RNA (1)...(19): siRNA sense strand
gaagugauacagacaguuc

SEQ ID NO: 2208199 - RNA, 19 nt, Homo sapiens
  misc_RNA (1)...(19): siRNA sense strand
caacggcagauguaccuua

SEQ ID NO: 2208200 - RNA, 19 nt, Homo sapiens
  misc_RNA (1)...(19): siRNA sense strand
gaccgccucucuucuguga

SEQ ID NO: 2208201 - RNA, 19 nt, Homo sapiens
  misc_RNA (1)...(19): siRNA sense strand
caacaauggcaacauggua

SEQ ID NO: 2208202 - RNA, 19 nt, Homo sapiens
  misc_RNA (1)...(19): siRNA sense strand
agacaacaauggcaacaug

SEQ ID NO: 2208203 - RNA, 19 nt, Homo sapiens
  misc_RNA (1)...(19): siRNA sense strand
ccagaccuguccuauuauu

SEQ ID NO: 2208204 - RNA, 19 nt, Homo sapiens
  misc_RNA (1)...(19): siRNA sense strand
ccccagaccuguccuauua

SEQ ID NO: 2208205 - RNA, 19 nt, Homo sapiens
  misc_RNA (1)...(19): siRNA sense strand
agacaggcuucauccagua

SEQ ID NO: 2208206 - RNA, 19 nt, Homo sapiens
  misc_RNA (1)...(19): siRNA sense strand
gcaaggcuacgacggcuuu

SEQ ID NO: 2208207 - RNA, 19 nt, Homo sapiens
  misc_RNA (1)...(19): siRNA sense strand
ggacuagacgcuacacaga

SEQ ID NO: 2208208 - RNA, 19 nt, Homo sapiens
  misc_RNA (1)...(19): siRNA sense strand
agacauggagcuacacaua

SEQ ID NO: 2208209 - RNA, 19 nt, Homo sapiens
  misc_RNA (1)...(19): siRNA sense strand
gggaagacauggagcuaca

SEQ ID NO: 2208210 - RNA, 19 nt, Homo sapiens
  misc_RNA (1)...(19): siRNA sense strand
gagcugucuucaccaauug

SEQ ID NO: 2208211 - RNA, 19 nt, Homo sapiens
  misc_RNA (1)...(19): siRNA sense strand
gauggagccuagacaaaca

SEQ ID NO: 2208212 - RNA, 19 nt, Homo sapiens
  misc_RNA (1)...(19): siRNA sense strand
ggacaucaagugcuucaug

SEQ ID NO: 2208213 - RNA, 19 nt, Homo sapiens
  misc_RNA (1)...(19): siRNA sense strand
ucaccaagcuuguccacau

SEQ ID NO: 2208214 - RNA, 19 nt, Homo sapiens
  misc_RNA (1)...(19): siRNA sense strand
ucagugggcuacuacagaa

SEQ ID NO: 2208215 - RNA, 19 nt, Homo sapiens
  misc_RNA (1)...(19): siRNA sense strand
caggcaagauggcagcuuu

SEQ ID NO: 2208216 - RNA, 19 nt, Homo sapiens
  misc_RNA (1)...(19): siRNA sense strand
gaaaccaggaccuucagaa

SEQ ID NO: 2208217 - RNA, 19 nt, Homo sapiens
  misc_RNA (1)...(19): siRNA sense strand
ggugauaucuuugaguaca

SEQ ID NO: 2208218 - RNA, 19 nt, Homo sapiens
  misc_RNA (1)...(19): siRNA sense strand
ugagcugucuucaccaauu

SEQ ID NO: 2208219 - RNA, 19 nt, Homo sapiens
  misc_RNA (1)...(19): siRNA sense strand
caauggacaacucacuuua

SEQ ID NO: 2208220 - RNA, 19 nt, Homo sapiens
  misc_RNA (1)...(19): siRNA sense strand
gugauucugucauggauau

SEQ ID NO: 2208221 - RNA, 19 nt, Homo sapiens
  misc_RNA (1)...(19): siRNA sense strand
gaaucuggcacuuggcuuu

SEQ ID NO: 2208222 - RNA, 19 nt, Homo sapiens
  misc_RNA (1)...(19): siRNA sense strand
gaaccugcacuucaccauu

SEQ ID NO: 2208223 - RNA, 19 nt, Homo sapiens
  misc_RNA (1)...(19): siRNA sense strand
ugggaucgcuucuuuguca

SEQ ID NO: 2208224 - RNA, 19 nt, Homo sapiens
  misc_RNA (1)...(19): siRNA sense strand
ccaaggaugcaaaguuaaa

SEQ ID NO: 2208225 - RNA, 19 nt, Homo sapiens
  misc_RNA (1)...(19): siRNA sense strand
ggacuggacacgacuguuc

SEQ ID NO: 2208226 - RNA, 19 nt, Homo sapiens
  misc_RNA (1)...(19): siRNA sense strand
cuggagaucucaaguguuc

SEQ ID NO: 2208227 - RNA, 19 nt, Homo sapiens
  misc_RNA (1)...(19): siRNA sense strand
acaacgugaucccugguua

SEQ ID NO: 2208228 - RNA, 19 nt, Homo sapiens
  misc_RNA (1)...(19): siRNA sense strand
ucacaccacuacgguauga

SEQ ID NO: 2208229 - RNA, 19 nt, Homo sapiens
  misc_RNA (1)...(19): siRNA sense strand
gacauuaaccagaucauca

SEQ ID NO: 2208230 - RNA, 19 nt, Homo sapiens
  misc_RNA (1)...(19): siRNA sense strand
gaugaugugucaggcaaga

SEQ ID NO: 2208231 - RNA, 19 nt, Homo sapiens
  misc_RNA (1)...(19): siRNA sense strand
caaguucacccuucggauu

SEQ ID NO: 2208232 - RNA, 19 nt, Homo sapiens
  misc_RNA (1)...(19): siRNA sense strand
gaaaacggauggacaacau

SEQ ID NO: 2208233 - RNA, 19 nt, Homo sapiens
  misc_RNA (1)...(19): siRNA sense strand
ccacagacuuagccaucaa

SEQ ID NO: 2208234 - RNA, 19 nt, Homo sapiens
  misc_RNA (1)...(19): siRNA sense strand
ggagggcaugcuuguguua

SEQ ID NO: 2208235 - RNA, 19 nt, Homo sapiens
  misc_RNA (1)...(19): siRNA sense strand
caacugcuauggcaauggu

SEQ ID NO: 2208236 - RNA, 19 nt, Homo sapiens
  misc_RNA (1)...(19): siRNA sense strand
caacaacauccacuucaug

SEQ ID NO: 2208237 - RNA, 19 nt, Homo sapiens
  misc_RNA (1)...(19): siRNA sense strand
ggauacccauuacuuugug

SEQ ID NO: 2208238 - RNA, 19 nt, Homo sapiens
  misc_RNA (1)...(19): siRNA sense strand
caggagcucuaucuguuug

SEQ ID NO: 2208239 - RNA, 19 nt, Homo sapiens
  misc_RNA (1)...(19): siRNA sense strand
ggugauuucaacuacauua

SEQ ID NO: 2208240 - RNA, 19 nt, Homo sapiens
  misc_RNA (1)...(19): siRNA sense strand
cagaagguguuugggcuuu

SEQ ID NO: 2208241 - RNA, 19 nt, Homo sapiens
  misc_RNA (1)...(19): siRNA sense strand
aaggaaagcccaguaguuu

SEQ ID NO: 2208242 - RNA, 19 nt, Homo sapiens
  misc_RNA (1)...(19): siRNA sense strand
gggcagauguaugagauca

SEQ ID NO: 2208243 - RNA, 19 nt, Homo sapiens
  misc_RNA (1)...(19): siRNA sense strand
ggacaaguuugggcugauc

SEQ ID NO: 2208244 - RNA, 19 nt, Homo sapiens
  misc_RNA (1)...(19): siRNA sense strand
gaacaacuccuacuccuua

SEQ ID NO: 2208245 - RNA, 19 nt, Homo sapiens
  misc_RNA (1)...(19): siRNA sense strand
gaacaggacagugauaaua

SEQ ID NO: 2208246 - RNA, 19 nt, Homo sapiens
  misc_RNA (1)...(19): siRNA sense strand
gaaaauggaugaacagaaa

SEQ ID NO: 2208247 - RNA, 19 nt, Homo sapiens
  misc_RNA (1)...(19): siRNA sense strand
caaaauggcucccuuaaaa

SEQ ID NO: 2208248 - RNA, 19 nt, Homo sapiens
  misc_RNA (1)...(19): siRNA sense strand
ccgaagaacuaaaccauuu

SEQ ID NO: 2208249 - RNA, 19 nt, Homo sapiens
  misc_RNA (1)...(19): siRNA sense strand
ggaagaagaccgacaguug

SEQ ID NO: 2208250 - RNA, 19 nt, Homo sapiens
  misc_RNA (1)...(19): siRNA sense strand
ugagaaagcugagagaaga

SEQ ID NO: 2208251 - RNA, 19 nt, Homo sapiens
  misc_RNA (1)...(19): siRNA sense strand
gaaaggagucagagcugua

SEQ ID NO: 2208252 - RNA, 19 nt, Homo sapiens
  misc_RNA (1)...(19): siRNA sense strand
gaugaaccauuaguacuga

SEQ ID NO: 2208253 - RNA, 19 nt, Homo sapiens
  misc_RNA (1)...(19): siRNA sense strand
acacaucgcucggcauuug

SEQ ID NO: 2208254 - RNA, 19 nt, Homo sapiens
  misc_RNA (1)...(19): siRNA sense strand
caucauugguguccucuug

SEQ ID NO: 2208255 - RNA, 19 nt, Homo sapiens
  misc_RNA (1)...(19): siRNA sense strand
gaagguauccauucuagca

SEQ ID NO: 2208256 - RNA, 19 nt, Homo sapiens
  misc_RNA (1)...(19): siRNA sense strand
uuacuaggcucugaaggua

SEQ ID NO: 2208257 - RNA, 19 nt, Homo sapiens
  misc_RNA (1)...(19): siRNA sense strand
cagcaucuccgaagaacua

SEQ ID NO: 2208258 - RNA, 19 nt, Homo sapiens
  misc_RNA (1)...(19): siRNA sense strand
cagagcaccaaucaaauua

SEQ ID NO: 2208259 - RNA, 19 nt, Homo sapiens
  misc_RNA (1)...(19): siRNA sense strand
gagcaccaaucaaauuaag

SEQ ID NO: 2208260 - RNA, 19 nt, Homo sapiens
  misc_RNA (1)...(19): siRNA sense strand
gcuaaguccucucaucauc

SEQ ID NO: 2208261 - RNA, 19 nt, Homo sapiens
  misc_RNA (1)...(19): siRNA sense strand
cagggaagcuaaacuccaa

SEQ ID NO: 2208262 - RNA, 19 nt, Homo sapiens
  misc_RNA (1)...(19): siRNA sense strand
gaacaaaauggcucccuua

SEQ ID NO: 2208263 - RNA, 19 nt, Homo sapiens
  misc_RNA (1)...(19): siRNA sense strand
cuaaugguguucuaguuga

SEQ ID NO: 2208264 - RNA, 19 nt, Homo sapiens
  misc_RNA (1)...(19): siRNA sense strand
gaauaugaaagcuugagaa

SEQ ID NO: 2208265 - RNA, 19 nt, Homo sapiens
  misc_RNA (1)...(19): siRNA sense strand
gcagaacaggacagugaua

SEQ ID NO: 2208266 - RNA, 19 nt, Homo sapiens
  misc_RNA (1)...(19): siRNA sense strand
caacaaagccaaggucaca

SEQ ID NO: 2208267 - RNA, 19 nt, Homo sapiens
  misc_RNA (1)...(19): siRNA sense strand
acaggacagugauaauaaa

SEQ ID NO: 2208268 - RNA, 19 nt, Homo sapiens
  misc_RNA (1)...(19): siRNA sense strand
ucagagcaccaaucaaauu

SEQ ID NO: 2208269 - RNA, 19 nt, Homo sapiens
  misc_RNA (1)...(19): siRNA sense strand
ccacgcaaccuaaacagaa

SEQ ID NO: 2208270 - RNA, 19 nt, Homo sapiens
  misc_RNA (1)...(19): siRNA sense strand
uaaguccucucaucaucaa

SEQ ID NO: 2208271 - RNA, 19 nt, Homo sapiens
  misc_RNA (1)...(19): siRNA sense strand
ugacacagcccaggaaaga

SEQ ID NO: 2208272 - RNA, 19 nt, Homo sapiens
  misc_RNA (1)...(19): siRNA sense strand
gacaaaaccuguauaagca

SEQ ID NO: 2208273 - RNA, 19 nt, Homo sapiens
  misc_RNA (1)...(19): siRNA sense strand
gaagaacuaaaccauuuca

SEQ ID NO: 2208274 - RNA, 19 nt, Homo sapiens
  misc_RNA (1)...(19): siRNA sense strand
gccaaggucacaacuauga

SEQ ID NO: 2208275 - RNA, 19 nt, Homo sapiens
  misc_RNA (1)...(19): siRNA sense strand
aagccaaggucacaacuau

SEQ ID NO: 2208276 - RNA, 19 nt, Homo sapiens
  misc_RNA (1)...(19): siRNA sense strand
gagcagagucagagcaguu

SEQ ID NO: 2208277 - RNA, 19 nt, Homo sapiens
  misc_RNA (1)...(19): siRNA sense strand
aaggaaguguggaucagua

SEQ ID NO: 2208278 - RNA, 19 nt, Homo sapiens
  misc_RNA (1)...(19): siRNA sense strand
ggcagguccucucugagua

SEQ ID NO: 2208279 - RNA, 19 nt, Homo sapiens
  misc_RNA (1)...(19): siRNA sense strand
ggaacuucgugaggaauau

SEQ ID NO: 2208280 - RNA, 19 nt, Homo sapiens
  misc_RNA (1)...(19): siRNA sense strand
gaucauuuccccucuguua

SEQ ID NO: 2208281 - RNA, 19 nt, Homo sapiens
  misc_RNA (1)...(19): siRNA sense strand
agcagaagcuucagcaaga

SEQ ID NO: 2208282 - RNA, 19 nt, Homo sapiens
  misc_RNA (1)...(19): siRNA sense strand
acaguuggcucugcaguug

SEQ ID NO: 2208283 - RNA, 19 nt, Homo sapiens
  misc_RNA (1)...(19): siRNA sense strand
gcugagagaagaaaaguua

SEQ ID NO: 2208284 - RNA, 19 nt, Homo sapiens
  misc_RNA (1)...(19): siRNA sense strand
gcaacaauugaagacauua

SEQ ID NO: 2208285 - RNA, 19 nt, Homo sapiens
  misc_RNA (1)...(19): siRNA sense strand
gcagugggacuucuuugga

SEQ ID NO: 2208286 - RNA, 19 nt, Homo sapiens
  misc_RNA (1)...(19): siRNA sense strand
cggcauuuguuuccaagaa

SEQ ID NO: 2208287 - RNA, 19 nt, Homo sapiens
  misc_RNA (1)...(19): siRNA sense strand
ucaaauccacaagcuguua

SEQ ID NO: 2208288 - RNA, 19 nt, Homo sapiens
  misc_RNA (1)...(19): siRNA sense strand
acagaagccugcagaagca

SEQ ID NO: 2208289 - RNA, 19 nt, Homo sapiens
  misc_RNA (1)...(19): siRNA sense strand
gaccaagcacuuagaacaa

SEQ ID NO: 2208290 - RNA, 19 nt, Homo sapiens
  misc_RNA (1)...(19): siRNA sense strand
gcaagaccaagcacuuaga

SEQ ID NO: 2208291 - RNA, 19 nt, Homo sapiens
  misc_RNA (1)...(19): siRNA sense strand
guugagagccuaagugaag

SEQ ID NO: 2208292 - RNA, 19 nt, Homo sapiens
  misc_RNA (1)...(19): siRNA sense strand
gaaaaucaccacaguuaau

SEQ ID NO: 2208293 - RNA, 19 nt, Homo sapiens
  misc_RNA (1)...(19): siRNA sense strand
gcaccaaucaaauuaagca

SEQ ID NO: 2208294 - RNA, 19 nt, Homo sapiens
  misc_RNA (1)...(19): siRNA sense strand
aagcagaacaggacaguga

SEQ ID NO: 2208295 - RNA, 19 nt, Homo sapiens
  misc_RNA (1)...(19): siRNA sense strand
ggacccaccucugcugauc

SEQ ID NO: 2208296 - RNA, 19 nt, Homo sapiens
  misc_RNA (1)...(19): siRNA sense strand
gugggcagguccucucuga

SEQ ID NO: 2208297 - RNA, 19 nt, Homo sapiens
  misc_RNA (1)...(19): siRNA sense strand
gcacgucucucagauucag

SEQ ID NO: 2208298 - RNA, 19 nt, Homo sapiens
  misc_RNA (1)...(19): siRNA sense strand
ggacagugauaauaaaagu

SEQ ID NO: 2208299 - RNA, 19 nt, Homo sapiens
  misc_RNA (1)...(19): siRNA sense strand
gggaacuucgugaggaaua

SEQ ID NO: 2208300 - RNA, 19 nt, Homo sapiens
  misc_RNA (1)...(19): siRNA sense strand
gcucggcauuuguuuccaa

SEQ ID NO: 2208301 - RNA, 19 nt, Homo sapiens
  misc_RNA (1)...(19): siRNA sense strand
aaugagaggcggacuguga

SEQ ID NO: 2208302 - RNA, 19 nt, Homo sapiens
  misc_RNA (1)...(19): siRNA sense strand
ugcgagagauggagcagaa

SEQ ID NO: 2208303 - RNA, 19 nt, Homo sapiens
  misc_RNA (1)...(19): siRNA sense strand
cagaacaggacagugauaa

SEQ ID NO: 2208304 - RNA, 19 nt, Homo sapiens
  misc_RNA (1)...(19): siRNA sense strand
caacuccacgcaaccuaaa

SEQ ID NO: 2208305 - RNA, 19 nt, Homo sapiens
  misc_RNA (1)...(19): siRNA sense strand
caaaacaaagcaacaauug

SEQ ID NO: 2208306 - RNA, 19 nt, Homo sapiens
  misc_RNA (1)...(19): siRNA sense strand
gaaguguggaucaguaucu

SEQ ID NO: 2208307 - RNA, 19 nt, Homo sapiens
  misc_RNA (1)...(19): siRNA sense strand
ggaauaugaaagcuugaga

SEQ ID NO: 2208308 - RNA, 19 nt, Homo sapiens
  misc_RNA (1)...(19): siRNA sense strand
auucagagcaccaaucaaa

SEQ ID NO: 2208309 - RNA, 19 nt, Homo sapiens
  misc_RNA (1)...(19): siRNA sense strand
caagaccaagcacuuagaa

SEQ ID NO: 2208310 - RNA, 19 nt, Homo sapiens
  misc_RNA (1)...(19): siRNA sense strand
ggauacagaaacagggaaa

SEQ ID NO: 2208311 - RNA, 19 nt, Homo sapiens
  misc_RNA (1)...(19): siRNA sense strand
gcucugaagguauccauuc

SEQ ID NO: 2208312 - RNA, 19 nt, Homo sapiens
  misc_RNA (1)...(19): siRNA sense strand
ugacagcaucuccgaagaa

SEQ ID NO: 2208313 - RNA, 19 nt, Homo sapiens
  misc_RNA (1)...(19): siRNA sense strand
ggagucagagcuguaguga

SEQ ID NO: 2208314 - RNA, 19 nt, Homo sapiens
  misc_RNA (1)...(19): siRNA sense strand
ucagcucccuuucauccuu

SEQ ID NO: 2208315 - RNA, 19 nt, Homo sapiens
  misc_RNA (1)...(19): siRNA sense strand
gcagaagcuucagcaagag

SEQ ID NO: 2208316 - RNA, 19 nt, Homo sapiens
  misc_RNA (1)...(19): siRNA sense strand
ucaccacaguuaauucagu

SEQ ID NO: 2208317 - RNA, 19 nt, Homo sapiens
  misc_RNA (1)...(19): siRNA sense strand
aacaggacagugauaauaa

SEQ ID NO: 2208318 - RNA, 19 nt, Homo sapiens
  misc_RNA (1)...(19): siRNA sense strand
cagguccucucugaguaua

SEQ ID NO: 2208319 - RNA, 19 nt, Homo sapiens
  misc_RNA (1)...(19): siRNA sense strand
gcagguccucucugaguau

SEQ ID NO: 2208320 - RNA, 19 nt, Homo sapiens
  misc_RNA (1)...(19): siRNA sense strand
cugaagguauccauucuag

SEQ ID NO: 2208321 - RNA, 19 nt, Homo sapiens
  misc_RNA (1)...(19): siRNA sense strand
ggaaaaggaaaauggauga

SEQ ID NO: 2208322 - RNA, 19 nt, Homo sapiens
  misc_RNA (1)...(19): siRNA sense strand
cacaguuaauucagugcua

SEQ ID NO: 2208323 - RNA, 19 nt, Homo sapiens
  misc_RNA (1)...(19): siRNA sense strand
gggcagguccucucugagu

SEQ ID NO: 2208324 - RNA, 19 nt, Homo sapiens
  misc_RNA (1)...(19): siRNA sense strand
gagaugaaccauuaguacu

SEQ ID NO: 2208325 - RNA, 19 nt, Homo sapiens
  misc_RNA (1)...(19): siRNA sense strand
gagaaagcugagagaagaa

SEQ ID NO: 2208326 - RNA, 19 nt, Homo sapiens
  misc_RNA (1)...(19): siRNA sense strand
accaagcacuuagaacaaa

SEQ ID NO: 2208327 - RNA, 19 nt, Homo sapiens
  misc_RNA (1)...(19): siRNA sense strand
aagcaacaauugaagacau

SEQ ID NO: 2208328 - RNA, 19 nt, Homo sapiens
  misc_RNA (1)...(19): siRNA sense strand
cugcacgucucucagauuc

SEQ ID NO: 2208329 - RNA, 19 nt, Homo sapiens
  misc_RNA (1)...(19): siRNA sense strand
gaaaacaaaucuggaacgu

SEQ ID NO: 2208330 - RNA, 19 nt, Homo sapiens
  misc_RNA (1)...(19): siRNA sense strand
gaaaaggaaguguggauca

SEQ ID NO: 2208331 - RNA, 19 nt, Homo sapiens
  misc_RNA (1)...(19): siRNA sense strand
acaaagcaacaauugaaga

SEQ ID NO: 2208332 - RNA, 19 nt, Homo sapiens
  misc_RNA (1)...(19): siRNA sense strand
uauaagcagagccaugaaa

SEQ ID NO: 2208333 - RNA, 19 nt, Homo sapiens
  misc_RNA (1)...(19): siRNA sense strand
gugcuaaguccucucauca

SEQ ID NO: 2208334 - RNA, 19 nt, Homo sapiens
  misc_RNA (1)...(19): siRNA sense strand
agacacaucgcucggcauu

SEQ ID NO: 2208335 - RNA, 19 nt, Homo sapiens
  misc_RNA (1)...(19): siRNA sense strand
ucagagcuguagugacaca

SEQ ID NO: 2208336 - RNA, 19 nt, Homo sapiens
  misc_RNA (1)...(19): siRNA sense strand
gagaagaaaaguuacaaga

SEQ ID NO: 2208337 - RNA, 19 nt, Homo sapiens
  misc_RNA (1)...(19): siRNA sense strand
gaaaagcgucuacccuuca

SEQ ID NO: 2208338 - RNA, 19 nt, Homo sapiens
  misc_RNA (1)...(19): siRNA sense strand
gcaguugcagcgcauguuc

SEQ ID NO: 2208339 - RNA, 19 nt, Homo sapiens
  misc_RNA (1)...(19): siRNA sense strand
agaccaagcacuuagaaca

SEQ ID NO: 2208340 - RNA, 19 nt, Homo sapiens
  misc_RNA (1)...(19): siRNA sense strand
uguauaagcagagccauga

SEQ ID NO: 2208341 - RNA, 19 nt, Homo sapiens
  misc_RNA (1)...(19): siRNA sense strand
gaacuucgugaggaauaug

SEQ ID NO: 2208342 - RNA, 19 nt, Homo sapiens
  misc_RNA (1)...(19): siRNA sense strand
cccaagagacucccugaug

SEQ ID NO: 2208343 - RNA, 19 nt, Homo sapiens
  misc_RNA (1)...(19): siRNA sense strand
cagcgcauguucgacaaug

SEQ ID NO: 2208344 - RNA, 19 nt, Homo sapiens
  misc_RNA (1)...(19): siRNA sense strand
ggaaccaguuggacaaagc

SEQ ID NO: 2208345 - RNA, 19 nt, Homo sapiens
  misc_RNA (1)...(19): siRNA sense strand
gcgagacccaguaccagaa

SEQ ID NO: 2208346 - RNA, 19 nt, Homo sapiens
  misc_RNA (1)...(19): siRNA sense strand
gcucuaagcucuucuacug

SEQ ID NO: 2208347 - RNA, 19 nt, Homo sapiens
  misc_RNA (1)...(19): siRNA sense strand
gcaaaguguuccgcuauau

SEQ ID NO: 2208348 - RNA, 19 nt, Homo sapiens
  misc_RNA (1)...(19): siRNA sense strand
ggcaaaguguuccgcuaua

SEQ ID NO: 2208349 - RNA, 19 nt, Homo sapiens
  misc_RNA (1)...(19): siRNA sense strand
ggcaaucucuccuccauca

SEQ ID NO: 2208350 - RNA, 19 nt, Homo sapiens
  misc_RNA (1)...(19): siRNA sense strand
gcagggaggccgacuucua

SEQ ID NO: 2208351 - RNA, 19 nt, Homo sapiens
  misc_RNA (1)...(19): siRNA sense strand
cagggcaacugcuucauug

SEQ ID NO: 2208352 - RNA, 19 nt, Homo sapiens
  misc_RNA (1)...(19): siRNA sense strand
gcgggaagaugcccaccaa

SEQ ID NO: 2208353 - RNA, 19 nt, Homo sapiens
  misc_RNA (1)...(19): siRNA sense strand
gggaagaugcccaccaaga

SEQ ID NO: 2208354 - RNA, 19 nt, Homo sapiens
  misc_RNA (1)...(19): siRNA sense strand
ggaagaugcccaccaagag

SEQ ID NO: 2208355 - RNA, 19 nt, Homo sapiens
  misc_RNA (1)...(19): siRNA sense strand
cagagcaacucgcugcaau

SEQ ID NO: 2208356 - RNA, 19 nt, Homo sapiens
  misc_RNA (1)...(19): siRNA sense strand
gcgaggagcccagagagaa

SEQ ID NO: 2208357 - RNA, 19 nt, Homo sapiens
  misc_RNA (1)...(19): siRNA sense strand
gauuaauacgguacaggua

SEQ ID NO: 2208358 - RNA, 19 nt, Homo sapiens
  misc_RNA (1)...(19): siRNA sense strand
gggaagcucuauacaaccu

SEQ ID NO: 2208359 - RNA, 19 nt, Homo sapiens
  misc_RNA (1)...(19): siRNA sense strand
ggaggacuacuuccagcaa

SEQ ID NO: 2208360 - RNA, 19 nt, Homo sapiens
  misc_RNA (1)...(19): siRNA sense strand
agaaugccaugcucaacau

SEQ ID NO: 2208361 - RNA, 19 nt, Homo sapiens
  misc_RNA (1)...(19): siRNA sense strand
ccagggcaacugcuucauu

SEQ ID NO: 2208362 - RNA, 19 nt, Homo sapiens
  misc_RNA (1)...(19): siRNA sense strand
caaaguguuccgcuauauc

SEQ ID NO: 2208363 - RNA, 19 nt, Homo sapiens
  misc_RNA (1)...(19): siRNA sense strand
ccaacaagcagaucaacag

SEQ ID NO: 2208364 - RNA, 19 nt, Homo sapiens
  misc_RNA (1)...(19): siRNA sense strand
ugaccugccugaggacuuc

SEQ ID NO: 2208365 - RNA, 19 nt, Homo sapiens
  misc_RNA (1)...(19): siRNA sense strand
ucuacagccucuccucuuc

SEQ ID NO: 2208366 - RNA, 19 nt, Homo sapiens
  misc_RNA (1)...(19): siRNA sense strand
cguggaagagguacugaaa

SEQ ID NO: 2208367 - RNA, 19 nt, Homo sapiens
  misc_RNA (1)...(19): siRNA sense strand
ggacuggguggccaaugug

SEQ ID NO: 2208368 - RNA, 19 nt, Homo sapiens
  misc_RNA (1)...(19): siRNA sense strand
cagaggaggaguacaccaa

SEQ ID NO: 2208369 - RNA, 19 nt, Homo sapiens
  misc_RNA (1)...(19): siRNA sense strand
gaagaaugccaugcucaac

SEQ ID NO: 2208370 - RNA, 19 nt, Homo sapiens
  misc_RNA (1)...(19): siRNA sense strand
caacagcuuccaggucuuc

SEQ ID NO: 2208371 - RNA, 19 nt, Homo sapiens
  misc_RNA (1)...(19): siRNA sense strand
gagggcaggaggacuacuu

SEQ ID NO: 2208372 - RNA, 19 nt, Homo sapiens
  misc_RNA (1)...(19): siRNA sense strand
uggacuggguggccaaugu

SEQ ID NO: 2208373 - RNA, 19 nt, Homo sapiens
  misc_RNA (1)...(19): siRNA sense strand
cagcaccuccugccucuuc

SEQ ID NO: 2208374 - RNA, 19 nt, Homo sapiens
  misc_RNA (1)...(19): siRNA sense strand
uugaggcccugcaggagaa

SEQ ID NO: 2208375 - RNA, 19 nt, Homo sapiens
  misc_RNA (1)...(19): siRNA sense strand
ucacccacaugcucuggau

SEQ ID NO: 2208376 - RNA, 19 nt, Homo sapiens
  misc_RNA (1)...(19): siRNA sense strand
uggaagagguacugaaaau

SEQ ID NO: 2208377 - RNA, 19 nt, Homo sapiens
  misc_RNA (1)...(19): siRNA sense strand
cuucaacgccaacaucuuc

SEQ ID NO: 2208378 - RNA, 19 nt, Homo sapiens
  misc_RNA (1)...(19): siRNA sense strand
uggcgacccugaccagcuu

SEQ ID NO: 2208379 - RNA, 19 nt, Homo sapiens
  misc_RNA (1)...(19): siRNA sense strand
gcuucugcaucgauucuuc

SEQ ID NO: 2208380 - RNA, 19 nt, Homo sapiens
  misc_RNA (1)...(19): siRNA sense strand
cacaugcucuggauuuuau

SEQ ID NO: 2208381 - RNA, 19 nt, Homo sapiens
  misc_RNA (1)...(19): siRNA sense strand
agaagaaugccaugcucaa

SEQ ID NO: 2208382 - RNA, 19 nt, Homo sapiens
  misc_RNA (1)...(19): siRNA sense strand
ccaagcagaaccucaagag

SEQ ID NO: 2208383 - RNA, 19 nt, Homo sapiens
  misc_RNA (1)...(19): siRNA sense strand
gcucuucuacugcuccaau

SEQ ID NO: 2208384 - RNA, 19 nt, Homo sapiens
  misc_RNA (1)...(19): siRNA sense strand
ggucuucaacgccaacauc

SEQ ID NO: 2208385 - RNA, 19 nt, Homo sapiens
  misc_RNA (1)...(19): siRNA sense strand
gagcaacucgcugcaaugc

SEQ ID NO: 2208386 - RNA, 19 nt, Homo sapiens
  misc_RNA (1)...(19): siRNA sense strand
cggcaaaguguuccgcuau

SEQ ID NO: 2208387 - RNA, 19 nt, Homo sapiens
  misc_RNA (1)...(19): siRNA sense strand
gcuauauccucaacuuccu

SEQ ID NO: 2208388 - RNA, 19 nt, Homo sapiens
  misc_RNA (1)...(19): siRNA sense strand
auuaauacgguacagguaa

SEQ ID NO: 2208389 - RNA, 19 nt, Homo sapiens
  misc_RNA (1)...(19): siRNA sense strand
acaccaagcagaaccucaa

SEQ ID NO: 2208390 - RNA, 19 nt, Homo sapiens
  misc_RNA (1)...(19): siRNA sense strand
gaagagguacugaaaaucg

SEQ ID NO: 2208391 - RNA, 19 nt, Homo sapiens
  misc_RNA (1)...(19): siRNA sense strand
cagggaggccgacuucuac

SEQ ID NO: 2208392 - RNA, 19 nt, Homo sapiens
  misc_RNA (1)...(19): siRNA sense strand
ccuccugccucuuccucaa

SEQ ID NO: 2208393 - RNA, 19 nt, Homo sapiens
  misc_RNA (1)...(19): siRNA sense strand
agaaagggcuuccacauua

SEQ ID NO: 2208394 - RNA, 19 nt, Homo sapiens
  misc_RNA (1)...(19): siRNA sense strand
gaaagggcuuccacauuaa

SEQ ID NO: 2208395 - RNA, 19 nt, Homo sapiens
  misc_RNA (1)...(19): siRNA sense strand
gagaagauguggcauggaa

SEQ ID NO: 2208396 - RNA, 19 nt, Homo sapiens
  misc_RNA (1)...(19): siRNA sense strand
gagaaagggcuuccacauu

SEQ ID NO: 2208397 - RNA, 19 nt, Homo sapiens
  misc_RNA (1)...(19): siRNA sense strand
gaacuucguugucaugaac

SEQ ID NO: 2208398 - RNA, 19 nt, Homo sapiens
  misc_RNA (1)...(19): siRNA sense strand
gaaaucaggaacuacuuug

SEQ ID NO: 2208399 - RNA, 19 nt, Homo sapiens
  misc_RNA (1)...(19): siRNA sense strand
ucgaggaucugaugaagga

SEQ ID NO: 2208400 - RNA, 19 nt, Homo sapiens
  misc_RNA (1)...(19): siRNA sense strand
gcagccaguugaugaaauc

SEQ ID NO: 2208401 - RNA, 19 nt, Homo sapiens
  misc_RNA (1)...(19): siRNA sense strand
uggaggagcucaggagaaa

SEQ ID NO: 2208402 - RNA, 19 nt, Homo sapiens
  misc_RNA (1)...(19): siRNA sense strand
gagaucagcaccugugaga

SEQ ID NO: 2208403 - RNA, 19 nt, Homo sapiens
  misc_RNA (1)...(19): siRNA sense strand
gagggacgccugaagaaga

SEQ ID NO: 2208404 - RNA, 19 nt, Homo sapiens
  misc_RNA (1)...(19): siRNA sense strand
gggaaaagguggcccugua

SEQ ID NO: 2208405 - RNA, 19 nt, Homo sapiens
  misc_RNA (1)...(19): siRNA sense strand
caagcucacccaccucuuu

SEQ ID NO: 2208406 - RNA, 19 nt, Homo sapiens
  misc_RNA (1)...(19): siRNA sense strand
gauccgugcugacaacagu

SEQ ID NO: 2208407 - RNA, 19 nt, Homo sapiens
  misc_RNA (1)...(19): siRNA sense strand
gaaagaaggcaacucuacu

SEQ ID NO: 2208408 - RNA, 19 nt, Homo sapiens
  misc_RNA (1)...(19): siRNA sense strand
gggagcagccaguugauga

SEQ ID NO: 2208409 - RNA, 19 nt, Homo sapiens
  misc_RNA (1)...(19): siRNA sense strand
ucacccaccucuuugacaa

SEQ ID NO: 2208410 - RNA, 19 nt, Homo sapiens
  misc_RNA (1)...(19): siRNA sense strand
ggagaaagggcuuccacau

SEQ ID NO: 2208411 - RNA, 19 nt, Homo sapiens
  misc_RNA (1)...(19): siRNA sense strand
ugacgggccucuuagucuu

SEQ ID NO: 2208412 - RNA, 19 nt, Homo sapiens
  misc_RNA (1)...(19): siRNA sense strand
gaauccgaaucgugaacuu

SEQ ID NO: 2208413 - RNA, 19 nt, Homo sapiens
  misc_RNA (1)...(19): siRNA sense strand
ugaaaucaggaacuacuuu

SEQ ID NO: 2208414 - RNA, 19 nt, Homo sapiens
  misc_RNA (1)...(19): siRNA sense strand
ggccauaccagcacuccua

SEQ ID NO: 2208415 - RNA, 19 nt, Homo sapiens
  misc_RNA (1)...(19): siRNA sense strand
gcacuucagcucauuaacu

SEQ ID NO: 2208416 - RNA, 19 nt, Homo sapiens
  misc_RNA (1)...(19): siRNA sense strand
cggcgcaacuaccuucuga

SEQ ID NO: 2208417 - RNA, 19 nt, Homo sapiens
  misc_RNA (1)...(19): siRNA sense strand
acuacaagcuccggccaua

SEQ ID NO: 2208418 - RNA, 19 nt, Homo sapiens
  misc_RNA (1)...(19): siRNA sense strand
cccgaguggucuacaagua

SEQ ID NO: 2208419 - RNA, 19 nt, Homo sapiens
  misc_RNA (1)...(19): siRNA sense strand
ucagcaaccucguggagau

SEQ ID NO: 2208420 - RNA, 19 nt, Homo sapiens
  misc_RNA (1)...(19): siRNA sense strand
ggucauugccuucacaucu

SEQ ID NO: 2208421 - RNA, 19 nt, Homo sapiens
  misc_RNA (1)...(19): siRNA sense strand
gggcucuggugcacuaugu

SEQ ID NO: 2208422 - RNA, 19 nt, Homo sapiens
  misc_RNA (1)...(19): siRNA sense strand
gcguggcccugaagcuuug

SEQ ID NO: 2208423 - RNA, 19 nt, Homo sapiens
  misc_RNA (1)...(19): siRNA sense strand
guccugacccugcucauga

SEQ ID NO: 2208424 - RNA, 19 nt, Homo sapiens
  misc_RNA (1)...(19): siRNA sense strand
acaagguucuggaggugaa

SEQ ID NO: 2208425 - RNA, 19 nt, Homo sapiens
  misc_RNA (1)...(19): siRNA sense strand
gauggucauugccuucaca

SEQ ID NO: 2208426 - RNA, 19 nt, Homo sapiens
  misc_RNA (1)...(19): siRNA sense strand
gggagggacgccugaagaa

SEQ ID NO: 2208427 - RNA, 19 nt, Homo sapiens
  misc_RNA (1)...(19): siRNA sense strand
gagcagccaguugaugaaa

SEQ ID NO: 2208428 - RNA, 19 nt, Homo sapiens
  misc_RNA (1)...(19): siRNA sense strand
gaugaaaucaggaacuacu

SEQ ID NO: 2208429 - RNA, 19 nt, Homo sapiens
  misc_RNA (1)...(19): siRNA sense strand
ucucgucucucaucuacau

SEQ ID NO: 2208430 - RNA, 19 nt, Homo sapiens
  misc_RNA (1)...(19): siRNA sense strand
cugcaguucuucacccauu

SEQ ID NO: 2208431 - RNA, 19 nt, Homo sapiens
  misc_RNA (1)...(19): siRNA sense strand
cacuucagcucauuaacug

SEQ ID NO: 2208432 - RNA, 19 nt, Homo sapiens
  misc_RNA (1)...(19): siRNA sense strand
ugaacuucguugucaugaa

SEQ ID NO: 2208433 - RNA, 19 nt, Homo sapiens
  misc_RNA (1)...(19): siRNA sense strand
ugaaagaaggcaacucuac

SEQ ID NO: 2208434 - RNA, 19 nt, Homo sapiens
  misc_RNA (1)...(19): siRNA sense strand
ucauugccuucacaucuga

SEQ ID NO: 2208435 - RNA, 19 nt, Homo sapiens
  misc_RNA (1)...(19): siRNA sense strand
ggacgaggaacaggaggaa

SEQ ID NO: 2208436 - RNA, 19 nt, Homo sapiens
  misc_RNA (1)...(19): siRNA sense strand
gguguucgccaucuucaug

SEQ ID NO: 2208437 - RNA, 19 nt, Homo sapiens
  misc_RNA (1)...(19): siRNA sense strand
ggagcagccaguugaugaa

SEQ ID NO: 2208438 - RNA, 19 nt, Homo sapiens
  misc_RNA (1)...(19): siRNA sense strand
cacguggccuugugcauca

SEQ ID NO: 2208439 - RNA, 19 nt, Homo sapiens
  misc_RNA (1)...(19): siRNA sense strand
uaccagaggcugcgugaga

SEQ ID NO: 2208440 - RNA, 19 nt, Homo sapiens
  misc_RNA (1)...(19): siRNA sense strand
gaccuucgaggaucugaug

SEQ ID NO: 2208441 - RNA, 19 nt, Homo sapiens
  misc_RNA (1)...(19): siRNA sense strand
ugaagcagacgcucagcaa

SEQ ID NO: 2208442 - RNA, 19 nt, Homo sapiens
  misc_RNA (1)...(19): siRNA sense strand
ucagcaaggagaucuguga

SEQ ID NO: 2208443 - RNA, 19 nt, Homo sapiens
  misc_RNA (1)...(19): siRNA sense strand
ccaccucuuugacaaugau

SEQ ID NO: 2208444 - RNA, 19 nt, Homo sapiens
  misc_RNA (1)...(19): siRNA sense strand
aaagaaggcaacucuacug

SEQ ID NO: 2208445 - RNA, 19 nt, Homo sapiens
  misc_RNA (1)...(19): siRNA sense strand
gucauugccuucacaucug

SEQ ID NO: 2208446 - RNA, 19 nt, Homo sapiens
  misc_RNA (1)...(19): siRNA sense strand
gcaacugcgucgaguaccu

SEQ ID NO: 2208447 - RNA, 19 nt, Homo sapiens
  misc_RNA (1)...(19): siRNA sense strand
uaugugaccaucaucauca

SEQ ID NO: 2208448 - RNA, 19 nt, Homo sapiens
  misc_RNA (1)...(19): siRNA sense strand
gcucuggugcacuauguga

SEQ ID NO: 2208449 - RNA, 19 nt, Homo sapiens
  misc_RNA (1)...(19): siRNA sense strand
ggaacuacuuuggggaaaa

SEQ ID NO: 2208450 - RNA, 19 nt, Homo sapiens
  misc_RNA (1)...(19): siRNA sense strand
cuucacaucugaguucauc

SEQ ID NO: 2208451 - RNA, 19 nt, Homo sapiens
  misc_RNA (1)...(19): siRNA sense strand
ugaacccggucaacaccuu

SEQ ID NO: 2208452 - RNA, 19 nt, Homo sapiens
  misc_RNA (1)...(19): siRNA sense strand
gaggagcucaggagaaagg

SEQ ID NO: 2208453 - RNA, 19 nt, Homo sapiens
  misc_RNA (1)...(19): siRNA sense strand
guacgugugggacgaggaa

SEQ ID NO: 2208454 - RNA, 19 nt, Homo sapiens
  misc_RNA (1)...(19): siRNA sense strand
ccacgguguuccuggagau

SEQ ID NO: 2208455 - RNA, 19 nt, Homo sapiens
  misc_RNA (1)...(19): siRNA sense strand
ucggaaaccugcacuuuug

SEQ ID NO: 2208456 - RNA, 19 nt, Homo sapiens
  misc_RNA (1)...(19): siRNA sense strand
ccagccagaucagcaagga

SEQ ID NO: 2208457 - RNA, 19 nt, Homo sapiens
  misc_RNA (1)...(19): siRNA sense strand
aaagguggcccuguacuuc

SEQ ID NO: 2208458 - RNA, 19 nt, Homo sapiens
  misc_RNA (1)...(19): siRNA sense strand
ggugauccgggaccagaaa

SEQ ID NO: 2208459 - RNA, 19 nt, Homo sapiens
  misc_RNA (1)...(19): siRNA sense strand
aggaggaaauggcacuuca

SEQ ID NO: 2208460 - RNA, 19 nt, Homo sapiens
  misc_RNA (1)...(19): siRNA sense strand
cucagucggugaagaacaa

SEQ ID NO: 2208461 - RNA, 19 nt, Homo sapiens
  misc_RNA (1)...(19): siRNA sense strand
gacgggccucuuagucuuu

SEQ ID NO: 2208462 - RNA, 19 nt, Homo sapiens
  misc_RNA (1)...(19): siRNA sense strand
cuauagcccaugccugaaa

SEQ ID NO: 2208463 - RNA, 19 nt, Homo sapiens
  misc_RNA (1)...(19): siRNA sense strand
gucuacaaguaccgcuaua

SEQ ID NO: 2208464 - RNA, 19 nt, Homo sapiens
  misc_RNA (1)...(19): siRNA sense strand
caccacgagucucagaauc

SEQ ID NO: 2208465 - RNA, 19 nt, Homo sapiens
  misc_RNA (1)...(19): siRNA sense strand
ggccuucgucauccucuuu

SEQ ID NO: 2208466 - RNA, 19 nt, Homo sapiens
  misc_RNA (1)...(19): siRNA sense strand
gcaguucuucacccauuuc

SEQ ID NO: 2208467 - RNA, 19 nt, Homo sapiens
  misc_RNA (1)...(19): siRNA sense strand
aaauggcacuucagcucau

SEQ ID NO: 2208468 - RNA, 19 nt, Homo sapiens
  misc_RNA (1)...(19): siRNA sense strand
gaggcugcgugagaagaug

SEQ ID NO: 2208469 - RNA, 19 nt, Homo sapiens
  misc_RNA (1)...(19): siRNA sense strand
ggucuacaaguaccgcuau

SEQ ID NO: 2208470 - RNA, 19 nt, Homo sapiens
  misc_RNA (1)...(19): siRNA sense strand
uaccagcggcucucggaaa

SEQ ID NO: 2208471 - RNA, 19 nt, Homo sapiens
  misc_RNA (1)...(19): siRNA sense strand
gcgcaaggccaaggacauc

SEQ ID NO: 2208472 - RNA, 19 nt, Homo sapiens
  misc_RNA (1)...(19): siRNA sense strand
gcgcaacuaccuucugaac

SEQ ID NO: 2208473 - RNA, 19 nt, Homo sapiens
  misc_RNA (1)...(19): siRNA sense strand
ggagggacgccugaagaag

SEQ ID NO: 2208474 - RNA, 19 nt, Homo sapiens
  misc_RNA (1)...(19): siRNA sense strand
ucgacgaguucauggagau

SEQ ID NO: 2208475 - RNA, 19 nt, Homo sapiens
  misc_RNA (1)...(19): siRNA sense strand
acccauuucucgucucuca

SEQ ID NO: 2208476 - RNA, 19 nt, Homo sapiens
  misc_RNA (1)...(19): siRNA sense strand
ucucggaaaccugcacuuu

SEQ ID NO: 2208477 - RNA, 19 nt, Homo sapiens
  misc_RNA (1)...(19): siRNA sense strand
cgaggaacaggaggaaaug

SEQ ID NO: 2208478 - RNA, 19 nt, Homo sapiens
  misc_RNA (1)...(19): siRNA sense strand
caggagcacagacguguag

SEQ ID NO: 2208479 - RNA, 19 nt, Homo sapiens
  misc_RNA (1)...(19): siRNA sense strand
ucuccgagcaguucugguu

SEQ ID NO: 2208480 - RNA, 19 nt, Homo sapiens
  misc_RNA (1)...(19): siRNA sense strand
uacagggacuaccgcaauc

SEQ ID NO: 2208481 - RNA, 19 nt, Homo sapiens
  misc_RNA (1)...(19): siRNA sense strand
auacagggacuaccgcaau

SEQ ID NO: 2208482 - RNA, 19 nt, Homo sapiens
  misc_RNA (1)...(19): siRNA sense strand
ggucaccacgagucucaga

SEQ ID NO: 2208483 - RNA, 19 nt, Homo sapiens
  misc_RNA (1)...(19): siRNA sense strand
ugacccugcucaugaucug

SEQ ID NO: 2208484 - RNA, 19 nt, Homo sapiens
  misc_RNA (1)...(19): siRNA sense strand
ggaagaagguaaagaguga

SEQ ID NO: 2208485 - RNA, 19 nt, Homo sapiens
  misc_RNA (1)...(19): siRNA sense strand
gugaagagcuuucugcaaa

SEQ ID NO: 2208486 - RNA, 19 nt, Homo sapiens
  misc_RNA (1)...(19): siRNA sense strand
gcucggaacuugucaaaug

SEQ ID NO: 2208487 - RNA, 19 nt, Homo sapiens
  misc_RNA (1)...(19): siRNA sense strand
ggacacgucuuugaugauu

SEQ ID NO: 2208488 - RNA, 19 nt, Homo sapiens
  misc_RNA (1)...(19): siRNA sense strand
gagcgagacuucccacuga

SEQ ID NO: 2208489 - RNA, 19 nt, Homo sapiens
  misc_RNA (1)...(19): siRNA sense strand
gcaggugacuuugaagaaa

SEQ ID NO: 2208490 - RNA, 19 nt, Homo sapiens
  misc_RNA (1)...(19): siRNA sense strand
ggaagaaggccaagaggaa

SEQ ID NO: 2208491 - RNA, 19 nt, Homo sapiens
  misc_RNA (1)...(19): siRNA sense strand
gaacugugcccauuacuuc

SEQ ID NO: 2208492 - RNA, 19 nt, Homo sapiens
  misc_RNA (1)...(19): siRNA sense strand
gacaugagcucgccaccuu

SEQ ID NO: 2208493 - RNA, 19 nt, Homo sapiens
  misc_RNA (1)...(19): siRNA sense strand
ggucuucccugcuggauga

SEQ ID NO: 2208494 - RNA, 19 nt, Homo sapiens
  misc_RNA (1)...(19): siRNA sense strand
gaagagggaagaagguaaa

SEQ ID NO: 2208495 - RNA, 19 nt, Homo sapiens
  misc_RNA (1)...(19): siRNA sense strand
gcaaggccgugcagaagau

SEQ ID NO: 2208496 - RNA, 19 nt, Homo sapiens
  misc_RNA (1)...(19): siRNA sense strand
caacaucgagugaagaaga

SEQ ID NO: 2208497 - RNA, 19 nt, Homo sapiens
  misc_RNA (1)...(19): siRNA sense strand
ggagaacugugcccauuac

SEQ ID NO: 2208498 - RNA, 19 nt, Homo sapiens
  misc_RNA (1)...(19): siRNA sense strand
ccaaagaucaggagagaug

SEQ ID NO: 2208499 - RNA, 19 nt, Homo sapiens
  misc_RNA (1)...(19): siRNA sense strand
ggaagaaagccaaggacaa

SEQ ID NO: 2208500 - RNA, 19 nt, Homo sapiens
  misc_RNA (1)...(19): siRNA sense strand
gaagaaagccaaggacaag

SEQ ID NO: 2208501 - RNA, 19 nt, Homo sapiens
  misc_RNA (1)...(19): siRNA sense strand
guugaucgaacucuauuua

SEQ ID NO: 2208502 - RNA, 19 nt, Homo sapiens
  misc_RNA (1)...(19): siRNA sense strand
guggagagcaucuuuggua

SEQ ID NO: 2208503 - RNA, 19 nt, Homo sapiens
  misc_RNA (1)...(19): siRNA sense strand
gccaauuccuguccaguug

SEQ ID NO: 2208504 - RNA, 19 nt, Homo sapiens
  misc_RNA (1)...(19): siRNA sense strand
cgacagcagugaagagcuu

SEQ ID NO: 2208505 - RNA, 19 nt, Homo sapiens
  misc_RNA (1)...(19): siRNA sense strand
caaucugucucaacgcauu

SEQ ID NO: 2208506 - RNA, 19 nt, Homo sapiens
  misc_RNA (1)...(19): siRNA sense strand
gaaagugccgggaagaaag

SEQ ID NO: 2208507 - RNA, 19 nt, Homo sapiens
  misc_RNA (1)...(19): siRNA sense strand
gaaagaucccaguggagaa

SEQ ID NO: 2208508 - RNA, 19 nt, Homo sapiens
  misc_RNA (1)...(19): siRNA sense strand
gagcucaauuuggugguaa

SEQ ID NO: 2208509 - RNA, 19 nt, Homo sapiens
  misc_RNA (1)...(19): siRNA sense strand
aggcguacguggacaagua

SEQ ID NO: 2208510 - RNA, 19 nt, Homo sapiens
  misc_RNA (1)...(19): siRNA sense strand
agagggaggugaccaagga

SEQ ID NO: 2208511 - RNA, 19 nt, Homo sapiens
  misc_RNA (1)...(19): siRNA sense strand
gcacccaggagccacauuu

SEQ ID NO: 2208512 - RNA, 19 nt, Homo sapiens
  misc_RNA (1)...(19): siRNA sense strand
cgaaccaucuccaucaaca

SEQ ID NO: 2208513 - RNA, 19 nt, Homo sapiens
  misc_RNA (1)...(19): siRNA sense strand
uuugagagcuuccggauca

SEQ ID NO: 2208514 - RNA, 19 nt, Homo sapiens
  misc_RNA (1)...(19): siRNA sense strand
gagugugccuggcuucaga

SEQ ID NO: 2208515 - RNA, 19 nt, Homo sapiens
  misc_RNA (1)...(19): siRNA sense strand
gccgcuggcucuuucaauu

SEQ ID NO: 2208516 - RNA, 19 nt, Homo sapiens
  misc_RNA (1)...(19): siRNA sense strand
gagagcuuccggaucaaua

SEQ ID NO: 2208517 - RNA, 19 nt, Homo sapiens
  misc_RNA (1)...(19): siRNA sense strand
gagaagagggaagaaggua

SEQ ID NO: 2208518 - RNA, 19 nt, Homo sapiens
  misc_RNA (1)...(19): siRNA sense strand
gcgacaagaucuaagaaac

SEQ ID NO: 2208519 - RNA, 19 nt, Homo sapiens
  misc_RNA (1)...(19): siRNA sense strand
gaucgaacucuauuuaagu

SEQ ID NO: 2208520 - RNA, 19 nt, Homo sapiens
  misc_RNA (1)...(19): siRNA sense strand
caagaagacggaagaaagu

SEQ ID NO: 2208521 - RNA, 19 nt, Homo sapiens
  misc_RNA (1)...(19): siRNA sense strand
ggacccggcaggugacuuu

SEQ ID NO: 2208522 - RNA, 19 nt, Homo sapiens
  misc_RNA (1)...(19): siRNA sense strand
gugccuggcuucagacaga

SEQ ID NO: 2208523 - RNA, 19 nt, Homo sapiens
  misc_RNA (1)...(19): siRNA sense strand
gcugagagcggauauugga

SEQ ID NO: 2208524 - RNA, 19 nt, Homo sapiens
  misc_RNA (1)...(19): siRNA sense strand
ccugagcacugccguguau

SEQ ID NO: 2208525 - RNA, 19 nt, Homo sapiens
  misc_RNA (1)...(19): siRNA sense strand
aaaccaagaaggaggagua

SEQ ID NO: 2208526 - RNA, 19 nt, Homo sapiens
  misc_RNA (1)...(19): siRNA sense strand
gagaguaggaagaagaaga

SEQ ID NO: 2208527 - RNA, 19 nt, Homo sapiens
  misc_RNA (1)...(19): siRNA sense strand
uaccaaagaucaggagaga

SEQ ID NO: 2208528 - RNA, 19 nt, Homo sapiens
  misc_RNA (1)...(19): siRNA sense strand
gaagccagcgcccagaaga

SEQ ID NO: 2208529 - RNA, 19 nt, Homo sapiens
  misc_RNA (1)...(19): siRNA sense strand
gaagaaagugccgggaaga

SEQ ID NO: 2208530 - RNA, 19 nt, Homo sapiens
  misc_RNA (1)...(19): siRNA sense strand
gaagaggaagacaagaaga

SEQ ID NO: 2208531 - RNA, 19 nt, Homo sapiens
  misc_RNA (1)...(19): siRNA sense strand
caggcuagcugcggagaaa

SEQ ID NO: 2208532 - RNA, 19 nt, Homo sapiens
  misc_RNA (1)...(19): siRNA sense strand
ccaaggaggaguacaagga

SEQ ID NO: 2208533 - RNA, 19 nt, Homo sapiens
  misc_RNA (1)...(19): siRNA sense strand
cagcaagaguggagagauc

SEQ ID NO: 2208534 - RNA, 19 nt, Homo sapiens
  misc_RNA (1)...(19): siRNA sense strand
aguaagagcucagcgacaa

SEQ ID NO: 2208535 - RNA, 19 nt, Homo sapiens
  misc_RNA (1)...(19): siRNA sense strand
gaaggaggaguacaugaag

SEQ ID NO: 2208536 - RNA, 19 nt, Homo sapiens
  misc_RNA (1)...(19): siRNA sense strand
ugaagcgggucaccuggaa

SEQ ID NO: 2208537 - RNA, 19 nt, Homo sapiens
  misc_RNA (1)...(19): siRNA sense strand
agagggaggugucauugau

SEQ ID NO: 2208538 - RNA, 19 nt, Homo sapiens
  misc_RNA (1)...(19): siRNA sense strand
ccggacacgucuuugauga

SEQ ID NO: 2208539 - RNA, 19 nt, Homo sapiens
  misc_RNA (1)...(19): siRNA sense strand
ggagguggcagcugagugu

SEQ ID NO: 2208540 - RNA, 19 nt, Homo sapiens
  misc_RNA (1)...(19): siRNA sense strand
uaugagcacuaugagagua

SEQ ID NO: 2208541 - RNA, 19 nt, Homo sapiens
  misc_RNA (1)...(19): siRNA sense strand
ggaagaggaagacaagaag

SEQ ID NO: 2208542 - RNA, 19 nt, Homo sapiens
  misc_RNA (1)...(19): siRNA sense strand
gcucagcgacaagaucuaa

SEQ ID NO: 2208543 - RNA, 19 nt, Homo sapiens
  misc_RNA (1)...(19): siRNA sense strand
gagagcaucuuugguacag

SEQ ID NO: 2208544 - RNA, 19 nt, Homo sapiens
  misc_RNA (1)...(19): siRNA sense strand
ugaucgaacucuauuuaag

SEQ ID NO: 2208545 - RNA, 19 nt, Homo sapiens
  misc_RNA (1)...(19): siRNA sense strand
cgucuuugaugauuucuca

SEQ ID NO: 2208546 - RNA, 19 nt, Homo sapiens
  misc_RNA (1)...(19): siRNA sense strand
gaacucuauuuaagugcau

SEQ ID NO: 2208547 - RNA, 19 nt, Homo sapiens
  misc_RNA (1)...(19): siRNA sense strand
ccggagaacugugcccauu

SEQ ID NO: 2208548 - RNA, 19 nt, Homo sapiens
  misc_RNA (1)...(19): siRNA sense strand
acacgucuuugaugauuuc

SEQ ID NO: 2208549 - RNA, 19 nt, Homo sapiens
  misc_RNA (1)...(19): siRNA sense strand
gacacgucuuugaugauuu

SEQ ID NO: 2208550 - RNA, 19 nt, Homo sapiens
  misc_RNA (1)...(19): siRNA sense strand
gaggucagcgucaccauca

SEQ ID NO: 2208551 - RNA, 19 nt, Homo sapiens
  misc_RNA (1)...(19): siRNA sense strand
uaagaaacgccaacaucga

SEQ ID NO: 2208552 - RNA, 19 nt, Homo sapiens
  misc_RNA (1)...(19): siRNA sense strand
ggaggccggacacgucuuu

SEQ ID NO: 2208553 - RNA, 19 nt, Homo sapiens
  misc_RNA (1)...(19): siRNA sense strand
gcaggaagaaggccaagag

SEQ ID NO: 2208554 - RNA, 19 nt, Homo sapiens
  misc_RNA (1)...(19): siRNA sense strand
ucucugagcuacccaggau

SEQ ID NO: 2208555 - RNA, 19 nt, Homo sapiens
  misc_RNA (1)...(19): siRNA sense strand
cagaagaacagacaucucu

SEQ ID NO: 2208556 - RNA, 19 nt, Homo sapiens
  misc_RNA (1)...(19): siRNA sense strand
gacaagaagacggaagaaa

SEQ ID NO: 2208557 - RNA, 19 nt, Homo sapiens
  misc_RNA (1)...(19): siRNA sense strand
agaaggaggaguacaugaa

SEQ ID NO: 2208558 - RNA, 19 nt, Homo sapiens
  misc_RNA (1)...(19): siRNA sense strand
ccucagagccagccaguca

SEQ ID NO: 2208559 - RNA, 19 nt, Homo sapiens
  misc_RNA (1)...(19): siRNA sense strand
ccuggcagcucuuccuaug

SEQ ID NO: 2208560 - RNA, 19 nt, Homo sapiens
  misc_RNA (1)...(19): siRNA sense strand
cuggaaacauggcacauuc

SEQ ID NO: 2208561 - RNA, 19 nt, Homo sapiens
  misc_RNA (1)...(19): siRNA sense strand
gaagagaagagggaagaag

SEQ ID NO: 2208562 - RNA, 19 nt, Homo sapiens
  misc_RNA (1)...(19): siRNA sense strand
uaagugcauuuguauucga

SEQ ID NO: 2208563 - RNA, 19 nt, Homo sapiens
  misc_RNA (1)...(19): siRNA sense strand
ccaagaaggaggaguacau

SEQ ID NO: 2208564 - RNA, 19 nt, Homo sapiens
  misc_RNA (1)...(19): siRNA sense strand
gagcuaagaggaagaaagc

SEQ ID NO: 2208565 - RNA, 19 nt, Homo sapiens
  misc_RNA (1)...(19): siRNA sense strand
acaagaagacggaagaaag

SEQ ID NO: 2208566 - RNA, 19 nt, Homo sapiens
  misc_RNA (1)...(19): siRNA sense strand
gguaccacauggaaugcuu

SEQ ID NO: 2208567 - RNA, 19 nt, Homo sapiens
  misc_RNA (1)...(19): siRNA sense strand
cgagcucaauuugguggua

SEQ ID NO: 2208568 - RNA, 19 nt, Homo sapiens
  misc_RNA (1)...(19): siRNA sense strand
acacgaaccaucuccauca

SEQ ID NO: 2208569 - RNA, 19 nt, Homo sapiens
  misc_RNA (1)...(19): siRNA sense strand
gagcuacccaggauaccaa

SEQ ID NO: 2208570 - RNA, 19 nt, Homo sapiens
  misc_RNA (1)...(19): siRNA sense strand
cggaagaggaagacaagaa

SEQ ID NO: 2208571 - RNA, 19 nt, Homo sapiens
  misc_RNA (1)...(19): siRNA sense strand
agaaggagccugggacaug

SEQ ID NO: 2208572 - RNA, 19 nt, Homo sapiens
  misc_RNA (1)...(19): siRNA sense strand
ccacuucacaggccacaga

SEQ ID NO: 2208573 - RNA, 19 nt, Homo sapiens
  misc_RNA (1)...(19): siRNA sense strand
ggucgaccuuugagagcuu

SEQ ID NO: 2208574 - RNA, 19 nt, Homo sapiens
  misc_RNA (1)...(19): siRNA sense strand
gcagcugcaucccgucagu

SEQ ID NO: 2208575 - RNA, 19 nt, Homo sapiens
  misc_RNA (1)...(19): siRNA sense strand
gagggaagaagguaaagag

SEQ ID NO: 2208576 - RNA, 19 nt, Homo sapiens
  misc_RNA (1)...(19): siRNA sense strand
agaaagugccgggaagaaa

SEQ ID NO: 2208577 - RNA, 19 nt, Homo sapiens
  misc_RNA (1)...(19): siRNA sense strand
ggacaaguacaggcacaug

SEQ ID NO: 2208578 - RNA, 19 nt, Homo sapiens
  misc_RNA (1)...(19): siRNA sense strand
cggagaacugugcccauua

SEQ ID NO: 2208579 - RNA, 19 nt, Homo sapiens
  misc_RNA (1)...(19): siRNA sense strand
ggaagaccuggaagacaga

SEQ ID NO: 2208580 - RNA, 19 nt, Homo sapiens
  misc_RNA (1)...(19): siRNA sense strand
gcaccaacaagcacaccuu

SEQ ID NO: 2208581 - RNA, 19 nt, Homo sapiens
  misc_RNA (1)...(19): siRNA sense strand
ucaggaaacaggccacaga

SEQ ID NO: 2208582 - RNA, 19 nt, Homo sapiens
  misc_RNA (1)...(19): siRNA sense strand
caagaaggaggaguacaug

SEQ ID NO: 2208583 - RNA, 19 nt, Homo sapiens
  misc_RNA (1)...(19): siRNA sense strand
gagcuuccggaucaauauu

SEQ ID NO: 2208584 - RNA, 19 nt, Homo sapiens
  misc_RNA (1)...(19): siRNA sense strand
ugaaugaccucuccaauaa

SEQ ID NO: 2208585 - RNA, 19 nt, Homo sapiens
  misc_RNA (1)...(19): siRNA sense strand
caagaacgacuacugaaua

SEQ ID NO: 2208586 - RNA, 19 nt, Homo sapiens
  misc_RNA (1)...(19): siRNA sense strand
gaaggacucuccacagaca

SEQ ID NO: 2208587 - RNA, 19 nt, Homo sapiens
  misc_RNA (1)...(19): siRNA sense strand
gcccugagcucauuaaaca

SEQ ID NO: 2208588 - RNA, 19 nt, Homo sapiens
  misc_RNA (1)...(19): siRNA sense strand
ccacucacguuccaucuuu

SEQ ID NO: 2208589 - RNA, 19 nt, Homo sapiens
  misc_RNA (1)...(19): siRNA sense strand
ccucuacuguuucuucuua

SEQ ID NO: 2208590 - RNA, 19 nt, Homo sapiens
  misc_RNA (1)...(19): siRNA sense strand
gaaggugaccaacgaguuu

SEQ ID NO: 2208591 - RNA, 19 nt, Homo sapiens
  misc_RNA (1)...(19): siRNA sense strand
ccaacgaguuugucaguga

SEQ ID NO: 2208592 - RNA, 19 nt, Homo sapiens
  misc_RNA (1)...(19): siRNA sense strand
ggacacaacggaugacuuc

SEQ ID NO: 2208593 - RNA, 19 nt, Homo sapiens
  misc_RNA (1)...(19): siRNA sense strand
ccacucacguuccaccuuu

SEQ ID NO: 2208594 - RNA, 19 nt, Homo sapiens
  misc_RNA (1)...(19): siRNA sense strand
ccacucacguuccaccuuu

SEQ ID NO: 2208595 - RNA, 19 nt, Homo sapiens
  misc_RNA (1)...(19): siRNA sense strand
acaccuaccucgcuacauu

SEQ ID NO: 2208596 - RNA, 19 nt, Homo sapiens
  misc_RNA (1)...(19): siRNA sense strand
ccacucacguuccaccuuu

SEQ ID NO: 2208597 - RNA, 19 nt, Homo sapiens
  misc_RNA (1)...(19): siRNA sense strand
gcaccuaccugaaccaaaa

SEQ ID NO: 2208598 - RNA, 19 nt, Homo sapiens
  misc_RNA (1)...(19): siRNA sense strand
gagcgaagccaucaucuca

SEQ ID NO: 2208599 - RNA, 19 nt, Homo sapiens
  misc_RNA (1)...(19): siRNA sense strand
ggaaguacaugggucagau

SEQ ID NO: 2208600 - RNA, 19 nt, Homo sapiens
  misc_RNA (1)...(19): siRNA sense strand
acacacagauggccacuuc

SEQ ID NO: 2208601 - RNA, 19 nt, Homo sapiens
  misc_RNA (1)...(19): siRNA sense strand
acacacagauggccacuuc

SEQ ID NO: 2208602 - RNA, 19 nt, Homo sapiens
  misc_RNA (1)...(19): siRNA sense strand
gggagcaucucgcggauca

SEQ ID NO: 2208603 - RNA, 19 nt, Homo sapiens
  misc_RNA (1)...(19): siRNA sense strand
ccucagaacucuagcucaa

SEQ ID NO: 2208604 - RNA, 19 nt, Homo sapiens
  misc_RNA (1)...(19): siRNA sense strand
aaacaagaacgacuacuga

SEQ ID NO: 2208605 - RNA, 19 nt, Homo sapiens
  misc_RNA (1)...(19): siRNA sense strand
cgucuuggcugccucagaa

SEQ ID NO: 2208606 - RNA, 19 nt, Homo sapiens
  misc_RNA (1)...(19): siRNA sense strand
ucaagauccugacagagaa

SEQ ID NO: 2208607 - RNA, 19 nt, Homo sapiens
  misc_RNA (1)...(19): siRNA sense strand
gaagguacgguccugaaug

SEQ ID NO: 2208608 - RNA, 19 nt, Homo sapiens
  misc_RNA (1)...(19): siRNA sense strand
ccacacagcgccaacaaug

SEQ ID NO: 2208609 - RNA, 19 nt, Homo sapiens
  misc_RNA (1)...(19): siRNA sense strand
ucacccagcucuaaucaca

SEQ ID NO: 2208610 - RNA, 19 nt, Homo sapiens
  misc_RNA (1)...(19): siRNA sense strand
uauaccaccugcccuacua

SEQ ID NO: 2208611 - RNA, 19 nt, Homo sapiens
  misc_RNA (1)...(19): siRNA sense strand
cuacaucccuacauucaca

SEQ ID NO: 2208612 - RNA, 19 nt, Homo sapiens
  misc_RNA (1)...(19): siRNA sense strand
cuacaucccuacauucaca

SEQ ID NO: 2208613 - RNA, 19 nt, Homo sapiens
  misc_RNA (1)...(19): siRNA sense strand
gcgaagccaucaucucagu

SEQ ID NO: 2208614 - RNA, 19 nt, Homo sapiens
  misc_RNA (1)...(19): siRNA sense strand
gccaagcccugagcucauu

SEQ ID NO: 2208615 - RNA, 19 nt, Homo sapiens
  misc_RNA (1)...(19): siRNA sense strand
agagaccacucaaacaaga

SEQ ID NO: 2208616 - RNA, 19 nt, Homo sapiens
  misc_RNA (1)...(19): siRNA sense strand
ggacgucuguggugucaac

SEQ ID NO: 2208617 - RNA, 19 nt, Homo sapiens
  misc_RNA (1)...(19): siRNA sense strand
aagguacgguccugaauga

SEQ ID NO: 2208618 - RNA, 19 nt, Homo sapiens
  misc_RNA (1)...(19): siRNA sense strand
cugaaugaccucuccaaua

SEQ ID NO: 2208619 - RNA, 19 nt, Homo sapiens
  misc_RNA (1)...(19): siRNA sense strand
ggaccacucccaucucuuc

SEQ ID NO: 2208620 - RNA, 19 nt, Homo sapiens
  misc_RNA (1)...(19): siRNA sense strand
auacaagacucgcaacauc

SEQ ID NO: 2208621 - RNA, 19 nt, Homo sapiens
  misc_RNA (1)...(19): siRNA sense strand
ggaaggugaccaacgaguu

SEQ ID NO: 2208622 - RNA, 19 nt, Homo sapiens
  misc_RNA (1)...(19): siRNA sense strand
ccacacagccccaccaaua

SEQ ID NO: 2208623 - RNA, 19 nt, Homo sapiens
  misc_RNA (1)...(19): siRNA sense strand
acgcaagucuggcccauga

SEQ ID NO: 2208624 - RNA, 19 nt, Homo sapiens
  misc_RNA (1)...(19): siRNA sense strand
cgacaaguccggcgucuca

SEQ ID NO: 2208625 - RNA, 19 nt, Homo sapiens
  misc_RNA (1)...(19): siRNA sense strand
gugccacccugucggagua

SEQ ID NO: 2208626 - RNA, 19 nt, Homo sapiens
  misc_RNA (1)...(19): siRNA sense strand
caacacaccauccugaagu

SEQ ID NO: 2208627 - RNA, 19 nt, Homo sapiens
  misc_RNA (1)...(19): siRNA sense strand
cugaaggacucuccacaga

SEQ ID NO: 2208628 - RNA, 19 nt, Homo sapiens
  misc_RNA (1)...(19): siRNA sense strand
gcacagcuacagccucuuc

SEQ ID NO: 2208629 - RNA, 19 nt, Homo sapiens
  misc_RNA (1)...(19): siRNA sense strand
ccacagagaccacucaaac

SEQ ID NO: 2208630 - RNA, 19 nt, Homo sapiens
  misc_RNA (1)...(19): siRNA sense strand
ggagaaccaccuagaccaa

SEQ ID NO: 2208631 - RNA, 19 nt, Homo sapiens
  misc_RNA (1)...(19): siRNA sense strand
uggcacaucuuccucuuuc

SEQ ID NO: 2208632 - RNA, 19 nt, Homo sapiens
  misc_RNA (1)...(19): siRNA sense strand
ucccgaagcucauuuagca

SEQ ID NO: 2208633 - RNA, 19 nt, Homo sapiens
  misc_RNA (1)...(19): siRNA sense strand
gaagccaucaucucaguca

SEQ ID NO: 2208634 - RNA, 19 nt, Homo sapiens
  misc_RNA (1)...(19): siRNA sense strand
ccacaacacggaccacaau

SEQ ID NO: 2208635 - RNA, 19 nt, Homo sapiens
  misc_RNA (1)...(19): siRNA sense strand
caucaagucuggcuaacac

SEQ ID NO: 2208636 - RNA, 19 nt, Homo sapiens
  misc_RNA (1)...(19): siRNA sense strand
caaacaagaacgacuacug

SEQ ID NO: 2208637 - RNA, 19 nt, Homo sapiens
  misc_RNA (1)...(19): siRNA sense strand
gcuccuuuguuaccacauu

SEQ ID NO: 2208638 - RNA, 19 nt, Homo sapiens
  misc_RNA (1)...(19): siRNA sense strand
cacacuaucuccucuccuu

SEQ ID NO: 2208639 - RNA, 19 nt, Homo sapiens
  misc_RNA (1)...(19): siRNA sense strand
agaccacacuucccacuca

SEQ ID NO: 2208640 - RNA, 19 nt, Homo sapiens
  misc_RNA (1)...(19): siRNA sense strand
acaccacacuucccacuca

SEQ ID NO: 2208641 - RNA, 19 nt, Homo sapiens
  misc_RNA (1)...(19): siRNA sense strand
gucaucagccugcccuaua

SEQ ID NO: 2208642 - RNA, 19 nt, Homo sapiens
  misc_RNA (1)...(19): siRNA sense strand
agaccacacuucccacuca

SEQ ID NO: 2208643 - RNA, 19 nt, Homo sapiens
  misc_RNA (1)...(19): siRNA sense strand
agaccacacuucccacuca

SEQ ID NO: 2208644 - RNA, 19 nt, Homo sapiens
  misc_RNA (1)...(19): siRNA sense strand
ggagugcccaugugaguuc

SEQ ID NO: 2208645 - RNA, 19 nt, Homo sapiens
  misc_RNA (1)...(19): siRNA sense strand
acggaugacuucaccacua

SEQ ID NO: 2208646 - RNA, 19 nt, Homo sapiens
  misc_RNA (1)...(19): siRNA sense strand
caacuacgaggagaccuuu

SEQ ID NO: 2208647 - RNA, 19 nt, Homo sapiens
  misc_RNA (1)...(19): siRNA sense strand
ggagcagucccuucucuuc

SEQ ID NO: 2208648 - RNA, 19 nt, Homo sapiens
  misc_RNA (1)...(19): siRNA sense strand
cuacaucccuaccuuacca

SEQ ID NO: 2208649 - RNA, 19 nt, Homo sapiens
  misc_RNA (1)...(19): siRNA sense strand
ggagcagucccuucucuuc

SEQ ID NO: 2208650 - RNA, 19 nt, Homo sapiens
  misc_RNA (1)...(19): siRNA sense strand
gaacgacuacugaauacac

SEQ ID NO: 2208651 - RNA, 19 nt, Homo sapiens
  misc_RNA (1)...(19): siRNA sense strand
acagagaccacucaaacaa

SEQ ID NO: 2208652 - RNA, 19 nt, Homo sapiens
  misc_RNA (1)...(19): siRNA sense strand
ggacaggcacgguguucga

SEQ ID NO: 2208653 - RNA, 19 nt, Homo sapiens
  misc_RNA (1)...(19): siRNA sense strand
caacuucuacuaccacgau

SEQ ID NO: 2208654 - RNA, 19 nt, Homo sapiens
  misc_RNA (1)...(19): siRNA sense strand
ggacgugagcuucgugaca

SEQ ID NO: 2208655 - RNA, 19 nt, Homo sapiens
  misc_RNA (1)...(19): siRNA sense strand
ucacagcccaccuucaaga

SEQ ID NO: 2208656 - RNA, 19 nt, Homo sapiens
  misc_RNA (1)...(19): siRNA sense strand
gguacaaccugacgcucau

SEQ ID NO: 2208657 - RNA, 19 nt, Homo sapiens
  misc_RNA (1)...(19): siRNA sense strand
aggaggagaucacguucaa

SEQ ID NO: 2208658 - RNA, 19 nt, Homo sapiens
  misc_RNA (1)...(19): siRNA sense strand
caacuucuaccaccaacau

SEQ ID NO: 2208659 - RNA, 19 nt, Homo sapiens
  misc_RNA (1)...(19): siRNA sense strand
caacuucuaccaccaacau

SEQ ID NO: 2208660 - RNA, 19 nt, Homo sapiens
  misc_RNA (1)...(19): siRNA sense strand
cuaccucgcuacauucaca

SEQ ID NO: 2208661 - RNA, 19 nt, Homo sapiens
  misc_RNA (1)...(19): siRNA sense strand
ggaagguacgguccugaau

SEQ ID NO: 2208662 - RNA, 19 nt, Homo sapiens
  misc_RNA (1)...(19): siRNA sense strand
ucagcuguccuccucauuu

SEQ ID NO: 2208663 - RNA, 19 nt, Homo sapiens
  misc_RNA (1)...(19): siRNA sense strand
caucaccuaucaccacaca

SEQ ID NO: 2208664 - RNA, 19 nt, Homo sapiens
  misc_RNA (1)...(19): siRNA sense strand
ccaccgucaucaccuauca

SEQ ID NO: 2208665 - RNA, 19 nt, Homo sapiens
  misc_RNA (1)...(19): siRNA sense strand
gcucaaggccaccgucauc

SEQ ID NO: 2208666 - RNA, 19 nt, Homo sapiens
  misc_RNA (1)...(19): siRNA sense strand
ugagaucgacagccacaaa

SEQ ID NO: 2208667 - RNA, 19 nt, Homo sapiens
  misc_RNA (1)...(19): siRNA sense strand
cagcaucaagucuggcuaa

SEQ ID NO: 2208668 - RNA, 19 nt, Homo sapiens
  misc_RNA (1)...(19): siRNA sense strand
gaaguacaugggucagaug

SEQ ID NO: 2208669 - RNA, 19 nt, Homo sapiens
  misc_RNA (1)...(19): siRNA sense strand
ugacagccaccucaugguu

SEQ ID NO: 2208670 - RNA, 19 nt, Homo sapiens
  misc_RNA (1)...(19): siRNA sense strand
ggacgugcaacuacaucuu

SEQ ID NO: 2208671 - RNA, 19 nt, Homo sapiens
  misc_RNA (1)...(19): siRNA sense strand
guaacaccaccuucagcua

SEQ ID NO: 2208672 - RNA, 19 nt, Homo sapiens
  misc_RNA (1)...(19): siRNA sense strand
gagaagcaguguggacaac

SEQ ID NO: 2208673 - RNA, 19 nt, Homo sapiens
  misc_RNA (1)...(19): siRNA sense strand
ggagaagcaguguggacaa

SEQ ID NO: 2208674 - RNA, 19 nt, Homo sapiens
  misc_RNA (1)...(19): siRNA sense strand
guaccaggccugcaacuac

SEQ ID NO: 2208675 - RNA, 19 nt, Homo sapiens
  misc_RNA (1)...(19): siRNA sense strand
cgugcauacuggaggguua

SEQ ID NO: 2208676 - RNA, 19 nt, Homo sapiens
  misc_RNA (1)...(19): siRNA sense strand
uuaccacacuuccucaaca

SEQ ID NO: 2208677 - RNA, 19 nt, Homo sapiens
  misc_RNA (1)...(19): siRNA sense strand
ccacacaccauccugaagu

SEQ ID NO: 2208678 - RNA, 19 nt, Homo sapiens
  misc_RNA (1)...(19): siRNA sense strand
ucaagaccaccacuaccua

SEQ ID NO: 2208679 - RNA, 19 nt, Homo sapiens
  misc_RNA (1)...(19): siRNA sense strand
ccacacaccauccugaagu

SEQ ID NO: 2208680 - RNA, 19 nt, Homo sapiens
  misc_RNA (1)...(19): siRNA sense strand
aagaacgacuacugaauac

SEQ ID NO: 2208681 - RNA, 19 nt, Homo sapiens
  misc_RNA (1)...(19): siRNA sense strand
gcaagugcagcgucaucaa

SEQ ID NO: 2208682 - RNA, 19 nt, Homo sapiens
  misc_RNA (1)...(19): siRNA sense strand
gaggagugcccaugugagu

SEQ ID NO: 2208683 - RNA, 19 nt, Homo sapiens
  misc_RNA (1)...(19): siRNA sense strand
caaucccgaagcucauuua

SEQ ID NO: 2208684 - RNA, 19 nt, Homo sapiens
  misc_RNA (1)...(19): siRNA sense strand
gagagcagcugguggaaga

SEQ ID NO: 2208685 - RNA, 19 nt, Homo sapiens
  misc_RNA (1)...(19): siRNA sense strand
caaaauggcuggcuacaga

SEQ ID NO: 2208686 - RNA, 19 nt, Homo sapiens
  misc_RNA (1)...(19): siRNA sense strand
ugaaggaggccaucaagaa

SEQ ID NO: 2208687 - RNA, 19 nt, Homo sapiens
  misc_RNA (1)...(19): siRNA sense strand
cggauuccuucgacaaaua

SEQ ID NO: 2208688 - RNA, 19 nt, Homo sapiens
  misc_RNA (1)...(19): siRNA sense strand
ccacacacccacaccagua

SEQ ID NO: 2208689 - RNA, 19 nt, Homo sapiens
  misc_RNA (1)...(19): siRNA sense strand
cugaaggccugcuuucuga

SEQ ID NO: 2208690 - RNA, 19 nt, Homo sapiens
  misc_RNA (1)...(19): siRNA sense strand
gggaaggccugggacuuga

SEQ ID NO: 2208691 - RNA, 19 nt, Homo sapiens
  misc_RNA (1)...(19): siRNA sense strand
gaaggaggccaucaagaag

SEQ ID NO: 2208692 - RNA, 19 nt, Homo sapiens
  misc_RNA (1)...(19): siRNA sense strand
ugaggacgcuggagaugug

SEQ ID NO: 2208693 - RNA, 19 nt, Homo sapiens
  misc_RNA (1)...(19): siRNA sense strand
gcccucaaccgaacacgua

SEQ ID NO: 2208694 - RNA, 19 nt, Homo sapiens
  misc_RNA (1)...(19): siRNA sense strand
cagggcagcugaacucucu

SEQ ID NO: 2208695 - RNA, 19 nt, Homo sapiens
  misc_RNA (1)...(19): siRNA sense strand
gggcagaggugaggaagcu

SEQ ID NO: 2208696 - RNA, 19 nt, Homo sapiens
  misc_RNA (1)...(19): siRNA sense strand
caacacaggccaggagauc

SEQ ID NO: 2208697 - RNA, 19 nt, Homo sapiens
  misc_RNA (1)...(19): siRNA sense strand
ccacacacccacgccagua

SEQ ID NO: 2208698 - RNA, 19 nt, Homo sapiens
  misc_RNA (1)...(19): siRNA sense strand
ccacacacccacgccagua

SEQ ID NO: 2208699 - RNA, 19 nt, Homo sapiens
  misc_RNA (1)...(19): siRNA sense strand
ccacacacccacgccagua

SEQ ID NO: 2208700 - RNA, 19 nt, Homo sapiens
  misc_RNA (1)...(19): siRNA sense strand
ccacacacccacgccagua

SEQ ID NO: 2208701 - RNA, 19 nt, Homo sapiens
  misc_RNA (1)...(19): siRNA sense strand
ccacacacccacgccagua

SEQ ID NO: 2208702 - RNA, 19 nt, Homo sapiens
  misc_RNA (1)...(19): siRNA sense strand
ccacacacccacgccagua

SEQ ID NO: 2208703 - RNA, 19 nt, Homo sapiens
  misc_RNA (1)...(19): siRNA sense strand
ccacacacccacgccagua

SEQ ID NO: 2208704 - RNA, 19 nt, Homo sapiens
  misc_RNA (1)...(19): siRNA sense strand
ccacacacccacgccagua

SEQ ID NO: 2208705 - RNA, 19 nt, Homo sapiens
  misc_RNA (1)...(19): siRNA sense strand
ccacacacccacgccagua

SEQ ID NO: 2208706 - RNA, 19 nt, Homo sapiens
  misc_RNA (1)...(19): siRNA sense strand
gagcugucccugccugaga

SEQ ID NO: 2208707 - RNA, 19 nt, Homo sapiens
  misc_RNA (1)...(19): siRNA sense strand
gggauguccuggcccaaag

SEQ ID NO: 2208708 - RNA, 19 nt, Homo sapiens
  misc_RNA (1)...(19): siRNA sense strand
gagaccaucagguggagaa

SEQ ID NO: 2208709 - RNA, 19 nt, Homo sapiens
  misc_RNA (1)...(19): siRNA sense strand
gcagagggcaaugcacuca

SEQ ID NO: 2208710 - RNA, 19 nt, Homo sapiens
  misc_RNA (1)...(19): siRNA sense strand
caaccuggaccaacugaag

SEQ ID NO: 2208711 - RNA, 19 nt, Homo sapiens
  misc_RNA (1)...(19): siRNA sense strand
ccaaagccagcaccacaug

SEQ ID NO: 2208712 - RNA, 19 nt, Homo sapiens
  misc_RNA (1)...(19): siRNA sense strand
ggauuccuucgacaaauau

SEQ ID NO: 2208713 - RNA, 19 nt, Homo sapiens
  misc_RNA (1)...(19): siRNA sense strand
ccauggugcuggccaaguc

SEQ ID NO: 2208714 - RNA, 19 nt, Homo sapiens
  misc_RNA (1)...(19): siRNA sense strand
ggacuggcuugcggugaag

SEQ ID NO: 2208715 - RNA, 19 nt, Homo sapiens
  misc_RNA (1)...(19): siRNA sense strand
ugcagugccuguccugaga

SEQ ID NO: 2208716 - RNA, 19 nt, Homo sapiens
  misc_RNA (1)...(19): siRNA sense strand
caucacagaggaacaaagg

SEQ ID NO: 2208717 - RNA, 19 nt, Homo sapiens
  misc_RNA (1)...(19): siRNA sense strand
cacccaaggccacgagauu

SEQ ID NO: 2208718 - RNA, 19 nt, Homo sapiens
  misc_RNA (1)...(19): siRNA sense strand
uggaccaacugaagcugaa

SEQ ID NO: 2208719 - RNA, 19 nt, Homo sapiens
  misc_RNA (1)...(19): siRNA sense strand
ucacggauuccuucgacaa

SEQ ID NO: 2208720 - RNA, 19 nt, Homo sapiens
  misc_RNA (1)...(19): siRNA sense strand
ccucuuugccagcacuuaa

SEQ ID NO: 2208721 - RNA, 19 nt, Homo sapiens
  misc_RNA (1)...(19): siRNA sense strand
cagcaucacagaggaacaa

SEQ ID NO: 2208722 - RNA, 19 nt, Homo sapiens
  misc_RNA (1)...(19): siRNA sense strand
aggacuggcuugcggugaa

SEQ ID NO: 2208723 - RNA, 19 nt, Homo sapiens
  misc_RNA (1)...(19): siRNA sense strand
gaacucuacgccuccuaca

SEQ ID NO: 2208724 - RNA, 19 nt, Homo sapiens
  misc_RNA (1)...(19): siRNA sense strand
accaucagguggagaagga

SEQ ID NO: 2208725 - RNA, 19 nt, Homo sapiens
  misc_RNA (1)...(19): siRNA sense strand
ggacgcuggagaugugugu

SEQ ID NO: 2208726 - RNA, 19 nt, Homo sapiens
  misc_RNA (1)...(19): siRNA sense strand
gugaaggaggccaucaaga

SEQ ID NO: 2208727 - RNA, 19 nt, Homo sapiens
  misc_RNA (1)...(19): siRNA sense strand
ugccagcacuuaaggaacu

SEQ ID NO: 2208728 - RNA, 19 nt, Homo sapiens
  misc_RNA (1)...(19): siRNA sense strand
gaaggccugggacuugauc

SEQ ID NO: 2208729 - RNA, 19 nt, Homo sapiens
  misc_RNA (1)...(19): siRNA sense strand
ucagagggacagacuugga

SEQ ID NO: 2208730 - RNA, 19 nt, Homo sapiens
  misc_RNA (1)...(19): siRNA sense strand
caagugagcuaccauauua

SEQ ID NO: 2208731 - RNA, 19 nt, Homo sapiens
  misc_RNA (1)...(19): siRNA sense strand
gcagaaaucuccuacagua

SEQ ID NO: 2208732 - RNA, 19 nt, Homo sapiens
  misc_RNA (1)...(19): siRNA sense strand
gaacaaagguaauucaugu

SEQ ID NO: 2208733 - RNA, 19 nt, Homo sapiens
  misc_RNA (1)...(19): siRNA sense strand
gaagacaccuggagaauau

SEQ ID NO: 2208734 - RNA, 19 nt, Homo sapiens
  misc_RNA (1)...(19): siRNA sense strand
gcaaugggauuauaaugua

SEQ ID NO: 2208735 - RNA, 19 nt, Homo sapiens
  misc_RNA (1)...(19): siRNA sense strand
gcaaaucccugcauaauuc

SEQ ID NO: 2208736 - RNA, 19 nt, Homo sapiens
  misc_RNA (1)...(19): siRNA sense strand
gagcagagguccaucuaua

SEQ ID NO: 2208737 - RNA, 19 nt, Homo sapiens
  misc_RNA (1)...(19): siRNA sense strand
ucaaagugcuggauaauaa

SEQ ID NO: 2208738 - RNA, 19 nt, Homo sapiens
  misc_RNA (1)...(19): siRNA sense strand
gagaagaacaggacauuua

SEQ ID NO: 2208739 - RNA, 19 nt, Homo sapiens
  misc_RNA (1)...(19): siRNA sense strand
ugacagaugugaaugauaa

SEQ ID NO: 2208740 - RNA, 19 nt, Homo sapiens
  misc_RNA (1)...(19): siRNA sense strand
gaacugacauacagccuaa

SEQ ID NO: 2208741 - RNA, 19 nt, Homo sapiens
  misc_RNA (1)...(19): siRNA sense strand
guacaacacugcacuuuga

SEQ ID NO: 2208742 - RNA, 19 nt, Homo sapiens
  misc_RNA (1)...(19): siRNA sense strand
gcaaagauauuggcacaaa

SEQ ID NO: 2208743 - RNA, 19 nt, Homo sapiens
  misc_RNA (1)...(19): siRNA sense strand
ggaaaucgauccugacaau

SEQ ID NO: 2208744 - RNA, 19 nt, Homo sapiens
  misc_RNA (1)...(19): siRNA sense strand
gcaaagcaaugggauuaua

SEQ ID NO: 2208745 - RNA, 19 nt, Homo sapiens
  misc_RNA (1)...(19): siRNA sense strand
gcaaguauguccugaaugu

SEQ ID NO: 2208746 - RNA, 19 nt, Homo sapiens
  misc_RNA (1)...(19): siRNA sense strand
ggaaugcucugcuugugua

SEQ ID NO: 2208747 - RNA, 19 nt, Homo sapiens
  misc_RNA (1)...(19): siRNA sense strand
gaacaucagucauucuaau

SEQ ID NO: 2208748 - RNA, 19 nt, Homo sapiens
  misc_RNA (1)...(19): siRNA sense strand
gaacguggcugcaggaaca

SEQ ID NO: 2208749 - RNA, 19 nt, Homo sapiens
  misc_RNA (1)...(19): siRNA sense strand
ggagcaaauucaaggauua

SEQ ID NO: 2208750 - RNA, 19 nt, Homo sapiens
  misc_RNA (1)...(19): siRNA sense strand
gaagacauuccaucaaaua

SEQ ID NO: 2208751 - RNA, 19 nt, Homo sapiens
  misc_RNA (1)...(19): siRNA sense strand
ggagaggaguuaagaagaa

SEQ ID NO: 2208752 - RNA, 19 nt, Homo sapiens
  misc_RNA (1)...(19): siRNA sense strand
gauggaaaguucuacagua

SEQ ID NO: 2208753 - RNA, 19 nt, Homo sapiens
  misc_RNA (1)...(19): siRNA sense strand
ggucagagaucaggaguuu

SEQ ID NO: 2208754 - RNA, 19 nt, Homo sapiens
  misc_RNA (1)...(19): siRNA sense strand
ggauguagauaucaaggua

SEQ ID NO: 2208755 - RNA, 19 nt, Homo sapiens
  misc_RNA (1)...(19): siRNA sense strand
guaaagcacucccucauuc

SEQ ID NO: 2208756 - RNA, 19 nt, Homo sapiens
  misc_RNA (1)...(19): siRNA sense strand
cgagagauguucuauauuc

SEQ ID NO: 2208757 - RNA, 19 nt, Homo sapiens
  misc_RNA (1)...(19): siRNA sense strand
gacaaugccuccauaguga

SEQ ID NO: 2208758 - RNA, 19 nt, Homo sapiens
  misc_RNA (1)...(19): siRNA sense strand
gaaggaaggugcagaguac

SEQ ID NO: 2208759 - RNA, 19 nt, Homo sapiens
  misc_RNA (1)...(19): siRNA sense strand
gaaaucuccuacaguauug

SEQ ID NO: 2208760 - RNA, 19 nt, Homo sapiens
  misc_RNA (1)...(19): siRNA sense strand
caaaguagacauuguguuu

SEQ ID NO: 2208761 - RNA, 19 nt, Homo sapiens
  misc_RNA (1)...(19): siRNA sense strand
ggacaaauguugcuguuac

SEQ ID NO: 2208762 - RNA, 19 nt, Homo sapiens
  misc_RNA (1)...(19): siRNA sense strand
gcacacuucucucagcuuu

SEQ ID NO: 2208763 - RNA, 19 nt, Homo sapiens
  misc_RNA (1)...(19): siRNA sense strand
caacuauacugcugugauu

SEQ ID NO: 2208764 - RNA, 19 nt, Homo sapiens
  misc_RNA (1)...(19): siRNA sense strand
uaaaguagcagccacuaua

SEQ ID NO: 2208765 - RNA, 19 nt, Homo sapiens
  misc_RNA (1)...(19): siRNA sense strand
ugacaauucuccagucuuu

SEQ ID NO: 2208766 - RNA, 19 nt, Homo sapiens
  misc_RNA (1)...(19): siRNA sense strand
gagaacaacacuaacauaa

SEQ ID NO: 2208767 - RNA, 19 nt, Homo sapiens
  misc_RNA (1)...(19): siRNA sense strand
gaacucauauauaccauag

SEQ ID NO: 2208768 - RNA, 19 nt, Homo sapiens
  misc_RNA (1)...(19): siRNA sense strand
gaacaagggaaauuuaaga

SEQ ID NO: 2208769 - RNA, 19 nt, Homo sapiens
  misc_RNA (1)...(19): siRNA sense strand
ggaaacaguuacaucaaau

SEQ ID NO: 2208770 - RNA, 19 nt, Homo sapiens
  misc_RNA (1)...(19): siRNA sense strand
caagggaaauuuaagauca

SEQ ID NO: 2208771 - RNA, 19 nt, Homo sapiens
  misc_RNA (1)...(19): siRNA sense strand
ggacaaagacaaaggagaa

SEQ ID NO: 2208772 - RNA, 19 nt, Homo sapiens
  misc_RNA (1)...(19): siRNA sense strand
gaagaggauuucaaacuag

SEQ ID NO: 2208773 - RNA, 19 nt, Homo sapiens
  misc_RNA (1)...(19): siRNA sense strand
caaguugucucuauugaug

SEQ ID NO: 2208774 - RNA, 19 nt, Homo sapiens
  misc_RNA (1)...(19): siRNA sense strand
ggacagcggccuccacuuu

SEQ ID NO: 2208775 - RNA, 19 nt, Homo sapiens
  misc_RNA (1)...(19): siRNA sense strand
gaacgugaccgaaagaaga

SEQ ID NO: 2208776 - RNA, 19 nt, Homo sapiens
  misc_RNA (1)...(19): siRNA sense strand
caaagaagaggauuucaaa

SEQ ID NO: 2208777 - RNA, 19 nt, Homo sapiens
  misc_RNA (1)...(19): siRNA sense strand
gaacgaacaagggaaauuu

SEQ ID NO: 2208778 - RNA, 19 nt, Homo sapiens
  misc_RNA (1)...(19): siRNA sense strand
gaaagucagugcaaaggau

SEQ ID NO: 2208779 - RNA, 19 nt, Homo sapiens
  misc_RNA (1)...(19): siRNA sense strand
gcaccaaacucacacaagu

SEQ ID NO: 2208780 - RNA, 19 nt, Homo sapiens
  misc_RNA (1)...(19): siRNA sense strand
gcagugagguucucguuca

SEQ ID NO: 2208781 - RNA, 19 nt, Homo sapiens
  misc_RNA (1)...(19): siRNA sense strand
agaagaggauuucaaacua

SEQ ID NO: 2208782 - RNA, 19 nt, Homo sapiens
  misc_RNA (1)...(19): siRNA sense strand
gcucagggcuggacuguca

SEQ ID NO: 2208783 - RNA, 19 nt, Homo sapiens
  misc_RNA (1)...(19): siRNA sense strand
gaagugagcgucagugaug

SEQ ID NO: 2208784 - RNA, 19 nt, Homo sapiens
  misc_RNA (1)...(19): siRNA sense strand
caagugagagcuauugaua

SEQ ID NO: 2208785 - RNA, 19 nt, Homo sapiens
  misc_RNA (1)...(19): siRNA sense strand
ucacagauguuaaugacaa

SEQ ID NO: 2208786 - RNA, 19 nt, Homo sapiens
  misc_RNA (1)...(19): siRNA sense strand
ggagcaaccuggauaagau

SEQ ID NO: 2208787 - RNA, 19 nt, Homo sapiens
  misc_RNA (1)...(19): siRNA sense strand
gagaaggucuaccagauca

SEQ ID NO: 2208788 - RNA, 19 nt, Homo sapiens
  misc_RNA (1)...(19): siRNA sense strand
gaacaggacauuuacuuuc

SEQ ID NO: 2208789 - RNA, 19 nt, Homo sapiens
  misc_RNA (1)...(19): siRNA sense strand
ggaccuagaucacgagaca

SEQ ID NO: 2208790 - RNA, 19 nt, Homo sapiens
  misc_RNA (1)...(19): siRNA sense strand
uagagugacugaaauugua

SEQ ID NO: 2208791 - RNA, 19 nt, Homo sapiens
  misc_RNA (1)...(19): siRNA sense strand
gcagacggguuacuggaaa

SEQ ID NO: 2208792 - RNA, 19 nt, Homo sapiens
  misc_RNA (1)...(19): siRNA sense strand
ucagaagcaucucuuauug

SEQ ID NO: 2208793 - RNA, 19 nt, Homo sapiens
  misc_RNA (1)...(19): siRNA sense strand
gaacaacacuaacauaacc

SEQ ID NO: 2208794 - RNA, 19 nt, Homo sapiens
  misc_RNA (1)...(19): siRNA sense strand
gagacuaucuuacuucuac

SEQ ID NO: 2208795 - RNA, 19 nt, Homo sapiens
  misc_RNA (1)...(19): siRNA sense strand
gaaaggagaggaguuaaga

SEQ ID NO: 2208796 - RNA, 19 nt, Homo sapiens
  misc_RNA (1)...(19): siRNA sense strand
ugacagccauugacaaaga

SEQ ID NO: 2208797 - RNA, 19 nt, Homo sapiens
  misc_RNA (1)...(19): siRNA sense strand
ggaguuuccuuaucgaaga

SEQ ID NO: 2208798 - RNA, 19 nt, Homo sapiens
  misc_RNA (1)...(19): siRNA sense strand
guuaugacauugacaguga

SEQ ID NO: 2208799 - RNA, 19 nt, Homo sapiens
  misc_RNA (1)...(19): siRNA sense strand
caaaugcugagaucacuua

SEQ ID NO: 2208800 - RNA, 19 nt, Homo sapiens
  misc_RNA (1)...(19): siRNA sense strand
cagcccagcuuuccacuuu

SEQ ID NO: 2208801 - RNA, 19 nt, Homo sapiens
  misc_RNA (1)...(19): siRNA sense strand
gccaaggcaucauauauau

SEQ ID NO: 2208802 - RNA, 19 nt, Homo sapiens
  misc_RNA (1)...(19): siRNA sense strand
ggaugacuauggccacuuu

SEQ ID NO: 2208803 - RNA, 19 nt, Homo sapiens
  misc_RNA (1)...(19): siRNA sense strand
uauaugagcuggugguaga

SEQ ID NO: 2208804 - RNA, 19 nt, Homo sapiens
  misc_RNA (1)...(19): siRNA sense strand
gaaggcaguuuggaucauu

SEQ ID NO: 2208805 - RNA, 19 nt, Homo sapiens
  misc_RNA (1)...(19): siRNA sense strand
acacaaagcuucuauucca

SEQ ID NO: 2208806 - RNA, 19 nt, Homo sapiens
  misc_RNA (1)...(19): siRNA sense strand
gcauaauucugaagauugu

SEQ ID NO: 2208807 - RNA, 19 nt, Homo sapiens
  misc_RNA (1)...(19): siRNA sense strand
ucaaauaucggcuuucuga

SEQ ID NO: 2208808 - RNA, 19 nt, Homo sapiens
  misc_RNA (1)...(19): siRNA sense strand
gggaacgggugucuggaua

SEQ ID NO: 2208809 - RNA, 19 nt, Homo sapiens
  misc_RNA (1)...(19): siRNA sense strand
gacaaugaauuuacuguag

SEQ ID NO: 2208810 - RNA, 19 nt, Homo sapiens
  misc_RNA (1)...(19): siRNA sense strand
ugacaacccucccaaguuc

SEQ ID NO: 2208811 - RNA, 19 nt, Homo sapiens
  misc_RNA (1)...(19): siRNA sense strand
gggaucagcuguucugcaa

SEQ ID NO: 2208812 - RNA, 19 nt, Homo sapiens
  misc_RNA (1)...(19): siRNA sense strand
gaaaugaagaggaggaguu

SEQ ID NO: 2208813 - RNA, 19 nt, Homo sapiens
  misc_RNA (1)...(19): siRNA sense strand
gaacaacuuucugcacugu

SEQ ID NO: 2208814 - RNA, 19 nt, Homo sapiens
  misc_RNA (1)...(19): siRNA sense strand
gaaguuacaucugcuuaca

SEQ ID NO: 2208815 - RNA, 19 nt, Homo sapiens
  misc_RNA (1)...(19): siRNA sense strand
agucaaagauggagacauu

SEQ ID NO: 2208816 - RNA, 19 nt, Homo sapiens
  misc_RNA (1)...(19): siRNA sense strand
gaacauguuuaagaucgaa

SEQ ID NO: 2208817 - RNA, 19 nt, Homo sapiens
  misc_RNA (1)...(19): siRNA sense strand
ugacggcucuggacaaaga

SEQ ID NO: 2208818 - RNA, 19 nt, Homo sapiens
  misc_RNA (1)...(19): siRNA sense strand
gaauauagagccaguguca

SEQ ID NO: 2208819 - RNA, 19 nt, Homo sapiens
  misc_RNA (1)...(19): siRNA sense strand
ggacuucccagaccaauau

SEQ ID NO: 2208820 - RNA, 19 nt, Homo sapiens
  misc_RNA (1)...(19): siRNA sense strand
caacccagaugcuuucaug

SEQ ID NO: 2208821 - RNA, 19 nt, Homo sapiens
  misc_RNA (1)...(19): siRNA sense strand
uaaccaaaguugcuauugu

SEQ ID NO: 2208822 - RNA, 19 nt, Homo sapiens
  misc_RNA (1)...(19): siRNA sense strand
gaauggagaucgggacaau

SEQ ID NO: 2208823 - RNA, 19 nt, Homo sapiens
  misc_RNA (1)...(19): siRNA sense strand
caggaaacaggcacuauua

SEQ ID NO: 2208824 - RNA, 19 nt, Homo sapiens
  misc_RNA (1)...(19): siRNA sense strand
gaucagcuaugccaucauc

SEQ ID NO: 2208825 - RNA, 19 nt, Homo sapiens
  misc_RNA (1)...(19): siRNA sense strand
ucacauagauagcucaagu

SEQ ID NO: 2208826 - RNA, 19 nt, Homo sapiens
  misc_RNA (1)...(19): siRNA sense strand
ggccaaggcaucauauaua

SEQ ID NO: 2208827 - RNA, 19 nt, Homo sapiens
  misc_RNA (1)...(19): siRNA sense strand
uggaggaugugaaugauaa

SEQ ID NO: 2208828 - RNA, 19 nt, Homo sapiens
  misc_RNA (1)...(19): siRNA sense strand
ggcaaaggauucaggcaaa

SEQ ID NO: 2208829 - RNA, 19 nt, Homo sapiens
  misc_RNA (1)...(19): siRNA sense strand
ggacaaugaauuuacugua

SEQ ID NO: 2208830 - RNA, 19 nt, Homo sapiens
  misc_RNA (1)...(19): siRNA sense strand
gaggacagcuuuacccauu

SEQ ID NO: 2208831 - RNA, 19 nt, Homo sapiens
  misc_RNA (1)...(19): siRNA sense strand
gaagaacauugucuauuuc

SEQ ID NO: 2208832 - RNA, 19 nt, Homo sapiens
  misc_RNA (1)...(19): siRNA sense strand
gaacaacuguggugaaacu

SEQ ID NO: 2208833 - RNA, 19 nt, Homo sapiens
  misc_RNA (1)...(19): siRNA sense strand
gaauacagauuaccuugau

SEQ ID NO: 2208834 - RNA, 19 nt, Homo sapiens
  misc_RNA (1)...(19): siRNA sense strand
agaaacugcuuccauuuaa

SEQ ID NO: 2208835 - RNA, 19 nt, Homo sapiens
  misc_RNA (1)...(19): siRNA sense strand
cuacagaguuaaagacaaa

SEQ ID NO: 2208836 - RNA, 19 nt, Homo sapiens
  misc_RNA (1)...(19): siRNA sense strand
cauagaagaugugauggua

SEQ ID NO: 2208837 - RNA, 19 nt, Homo sapiens
  misc_RNA (1)...(19): siRNA sense strand
uagaagaugugaugguaaa

SEQ ID NO: 2208838 - RNA, 19 nt, Homo sapiens
  misc_RNA (1)...(19): siRNA sense strand
cggauuggcuacaagguua

SEQ ID NO: 2208839 - RNA, 19 nt, Homo sapiens
  misc_RNA (1)...(19): siRNA sense strand
gguaaaagaucuucagaaa

SEQ ID NO: 2208840 - RNA, 19 nt, Homo sapiens
  misc_RNA (1)...(19): siRNA sense strand
cagaaacugcuuccauuua

SEQ ID NO: 2208841 - RNA, 19 nt, Homo sapiens
  misc_RNA (1)...(19): siRNA sense strand
ccaagcaggugauuaaugg

SEQ ID NO: 2208842 - RNA, 19 nt, Homo sapiens
  misc_RNA (1)...(19): siRNA sense strand
cagaacaacuguggugaaa

SEQ ID NO: 2208843 - RNA, 19 nt, Homo sapiens
  misc_RNA (1)...(19): siRNA sense strand
caggaacggugguauguga

SEQ ID NO: 2208844 - RNA, 19 nt, Homo sapiens
  misc_RNA (1)...(19): siRNA sense strand
ggaugaagaacgaauggua

SEQ ID NO: 2208845 - RNA, 19 nt, Homo sapiens
  misc_RNA (1)...(19): siRNA sense strand
gcaggugauuaauggcaua

SEQ ID NO: 2208846 - RNA, 19 nt, Homo sapiens
  misc_RNA (1)...(19): siRNA sense strand
ggacagugacaucauagaa

SEQ ID NO: 2208847 - RNA, 19 nt, Homo sapiens
  misc_RNA (1)...(19): siRNA sense strand
gcucagccaccaucucaua

SEQ ID NO: 2208848 - RNA, 19 nt, Homo sapiens
  misc_RNA (1)...(19): siRNA sense strand
ggugauuaauggcauagaa

SEQ ID NO: 2208849 - RNA, 19 nt, Homo sapiens
  misc_RNA (1)...(19): siRNA sense strand
caugggcgcuauuccaauu

SEQ ID NO: 2208850 - RNA, 19 nt, Homo sapiens
  misc_RNA (1)...(19): siRNA sense strand
gcaagcggauuggcuacaa

SEQ ID NO: 2208851 - RNA, 19 nt, Homo sapiens
  misc_RNA (1)...(19): siRNA sense strand
acagugacaucauagaaga

SEQ ID NO: 2208852 - RNA, 19 nt, Homo sapiens
  misc_RNA (1)...(19): siRNA sense strand
ugagggaaguaguagcuuu

SEQ ID NO: 2208853 - RNA, 19 nt, Homo sapiens
  misc_RNA (1)...(19): siRNA sense strand
gggaagaguuggugagcau

SEQ ID NO: 2208854 - RNA, 19 nt, Homo sapiens
  misc_RNA (1)...(19): siRNA sense strand
uuaccaagcaggugauuaa

SEQ ID NO: 2208855 - RNA, 19 nt, Homo sapiens
  misc_RNA (1)...(19): siRNA sense strand
gaaggccauuugccgaguu

SEQ ID NO: 2208856 - RNA, 19 nt, Homo sapiens
  misc_RNA (1)...(19): siRNA sense strand
gaaacugcuuccauuuaac

SEQ ID NO: 2208857 - RNA, 19 nt, Homo sapiens
  misc_RNA (1)...(19): siRNA sense strand
gaagaacgaaugguacaau

SEQ ID NO: 2208858 - RNA, 19 nt, Homo sapiens
  misc_RNA (1)...(19): siRNA sense strand
ggacagcuuuacccauucu

SEQ ID NO: 2208859 - RNA, 19 nt, Homo sapiens
  misc_RNA (1)...(19): siRNA sense strand
aaacugagcaagacacaga

SEQ ID NO: 2208860 - RNA, 19 nt, Homo sapiens
  misc_RNA (1)...(19): siRNA sense strand
ccacauuuacucucacaaa

SEQ ID NO: 2208861 - RNA, 19 nt, Homo sapiens
  misc_RNA (1)...(19): siRNA sense strand
gaacggugguaugugaauc

SEQ ID NO: 2208862 - RNA, 19 nt, Homo sapiens
  misc_RNA (1)...(19): siRNA sense strand
gcuacaagguuacuuuuga

SEQ ID NO: 2208863 - RNA, 19 nt, Homo sapiens
  misc_RNA (1)...(19): siRNA sense strand
ccgggacagugacaucaua

SEQ ID NO: 2208864 - RNA, 19 nt, Homo sapiens
  misc_RNA (1)...(19): siRNA sense strand
uuaauggcauagaaaguug

SEQ ID NO: 2208865 - RNA, 19 nt, Homo sapiens
  misc_RNA (1)...(19): siRNA sense strand
gaacgaaugguacaaucuc

SEQ ID NO: 2208866 - RNA, 19 nt, Homo sapiens
  misc_RNA (1)...(19): siRNA sense strand
gggaagaccuauauauccu

SEQ ID NO: 2208867 - RNA, 19 nt, Homo sapiens
  misc_RNA (1)...(19): siRNA sense strand
ucagaaacugcuuccauuu

SEQ ID NO: 2208868 - RNA, 19 nt, Homo sapiens
  misc_RNA (1)...(19): siRNA sense strand
uggcgaaugugacaaguuc

SEQ ID NO: 2208869 - RNA, 19 nt, Homo sapiens
  misc_RNA (1)...(19): siRNA sense strand
uauuuccugugguguguua

SEQ ID NO: 2208870 - RNA, 19 nt, Homo sapiens
  misc_RNA (1)...(19): siRNA sense strand
uagcaauccugaagaacau

SEQ ID NO: 2208871 - RNA, 19 nt, Homo sapiens
  misc_RNA (1)...(19): siRNA sense strand
cucaugggcuucauugcua

SEQ ID NO: 2208872 - RNA, 19 nt, Homo sapiens
  misc_RNA (1)...(19): siRNA sense strand
gugaaucuccacagccuaa

SEQ ID NO: 2208873 - RNA, 19 nt, Homo sapiens
  misc_RNA (1)...(19): siRNA sense strand
gaagaguuggugagcauuc

SEQ ID NO: 2208874 - RNA, 19 nt, Homo sapiens
  misc_RNA (1)...(19): siRNA sense strand
cgaaugguacaaucucaaa

SEQ ID NO: 2208875 - RNA, 19 nt, Homo sapiens
  misc_RNA (1)...(19): siRNA sense strand
guagcaauccugaagaaca

SEQ ID NO: 2208876 - RNA, 19 nt, Homo sapiens
  misc_RNA (1)...(19): siRNA sense strand
ugacaauucuggggaguua

SEQ ID NO: 2208877 - RNA, 19 nt, Homo sapiens
  misc_RNA (1)...(19): siRNA sense strand
uucagaaacugcuuccauu

SEQ ID NO: 2208878 - RNA, 19 nt, Homo sapiens
  misc_RNA (1)...(19): siRNA sense strand
uugaggaggcgauuaauga

SEQ ID NO: 2208879 - RNA, 19 nt, Homo sapiens
  misc_RNA (1)...(19): siRNA sense strand
ggcagucccugaguuuguu

SEQ ID NO: 2208880 - RNA, 19 nt, Homo sapiens
  misc_RNA (1)...(19): siRNA sense strand
gcucuccuccggauccuuu

SEQ ID NO: 2208881 - RNA, 19 nt, Homo sapiens
  misc_RNA (1)...(19): siRNA sense strand
gccaccaucucauacuuca

SEQ ID NO: 2208882 - RNA, 19 nt, Homo sapiens
  misc_RNA (1)...(19): siRNA sense strand
acccucagcuguuucagaa

SEQ ID NO: 2208883 - RNA, 19 nt, Homo sapiens
  misc_RNA (1)...(19): siRNA sense strand
cagccaccaucucauacuu

SEQ ID NO: 2208884 - RNA, 19 nt, Homo sapiens
  misc_RNA (1)...(19): siRNA sense strand
ugauucugauuaccaaaga

SEQ ID NO: 2208885 - RNA, 19 nt, Homo sapiens
  misc_RNA (1)...(19): siRNA sense strand
aaacucaugggcuucauug

SEQ ID NO: 2208886 - RNA, 19 nt, Homo sapiens
  misc_RNA (1)...(19): siRNA sense strand
guccagguggccacauuua

SEQ ID NO: 2208887 - RNA, 19 nt, Homo sapiens
  misc_RNA (1)...(19): siRNA sense strand
ccuggaaggugcucaaggu

SEQ ID NO: 2208888 - RNA, 19 nt, Homo sapiens
  misc_RNA (1)...(19): siRNA sense strand
gcaucugagggaaguagua

SEQ ID NO: 2208889 - RNA, 19 nt, Homo sapiens
  misc_RNA (1)...(19): siRNA sense strand
gugauuaauggcauagaaa

SEQ ID NO: 2208890 - RNA, 19 nt, Homo sapiens
  misc_RNA (1)...(19): siRNA sense strand
ugaauacagauuaccuuga

SEQ ID NO: 2208891 - RNA, 19 nt, Homo sapiens
  misc_RNA (1)...(19): siRNA sense strand
ggucguggccaaagucauc

SEQ ID NO: 2208892 - RNA, 19 nt, Homo sapiens
  misc_RNA (1)...(19): siRNA sense strand
ugguagcaauccugaagaa

SEQ ID NO: 2208893 - RNA, 19 nt, Homo sapiens
  misc_RNA (1)...(19): siRNA sense strand
ugagcaagacacagagaaa

SEQ ID NO: 2208894 - RNA, 19 nt, Homo sapiens
  misc_RNA (1)...(19): siRNA sense strand
agaccuauauauccucaca

SEQ ID NO: 2208895 - RNA, 19 nt, Homo sapiens
  misc_RNA (1)...(19): siRNA sense strand
ggaacggugguaugugaau

SEQ ID NO: 2208896 - RNA, 19 nt, Homo sapiens
  misc_RNA (1)...(19): siRNA sense strand
caagguuacuuuugacaau

SEQ ID NO: 2208897 - RNA, 19 nt, Homo sapiens
  misc_RNA (1)...(19): siRNA sense strand
ucaaggucguggccaaagu

SEQ ID NO: 2208898 - RNA, 19 nt, Homo sapiens
  misc_RNA (1)...(19): siRNA sense strand
caccaucucauacuucaug

SEQ ID NO: 2208899 - RNA, 19 nt, Homo sapiens
  misc_RNA (1)...(19): siRNA sense strand
gguacaaucucaaaagagu

SEQ ID NO: 2208900 - RNA, 19 nt, Homo sapiens
  misc_RNA (1)...(19): siRNA sense strand
aagaacgaaugguacaauc

SEQ ID NO: 2208901 - RNA, 19 nt, Homo sapiens
  misc_RNA (1)...(19): siRNA sense strand
gcccucagacuacagaguu

SEQ ID NO: 2208902 - RNA, 19 nt, Homo sapiens
  misc_RNA (1)...(19): siRNA sense strand
cuuuacccauucucccuua

SEQ ID NO: 2208903 - RNA, 19 nt, Homo sapiens
  misc_RNA (1)...(19): siRNA sense strand
gcggauuggcuacaagguu

SEQ ID NO: 2208904 - RNA, 19 nt, Homo sapiens
  misc_RNA (1)...(19): siRNA sense strand
gcgaaugugacaaguucuu

SEQ ID NO: 2208905 - RNA, 19 nt, Homo sapiens
  misc_RNA (1)...(19): siRNA sense strand
gaaucuccacagccuaaug

SEQ ID NO: 2208906 - RNA, 19 nt, Homo sapiens
  misc_RNA (1)...(19): siRNA sense strand
cuaauggaccgggcuuuga

SEQ ID NO: 2208907 - RNA, 19 nt, Homo sapiens
  misc_RNA (1)...(19): siRNA sense strand
ugaacagccugggaagcaa

SEQ ID NO: 2208908 - RNA, 19 nt, Homo sapiens
  misc_RNA (1)...(19): siRNA sense strand
ucagaacaacuguggugaa

SEQ ID NO: 2208909 - RNA, 19 nt, Homo sapiens
  misc_RNA (1)...(19): siRNA sense strand
gacagugacaucauagaag

SEQ ID NO: 2208910 - RNA, 19 nt, Homo sapiens
  misc_RNA (1)...(19): siRNA sense strand
cauuuaacccucagcuguu

SEQ ID NO: 2208911 - RNA, 19 nt, Homo sapiens
  misc_RNA (1)...(19): siRNA sense strand
gcgcuauuccaauuguuug

SEQ ID NO: 2208912 - RNA, 19 nt, Homo sapiens
  misc_RNA (1)...(19): siRNA sense strand
guggugaaacugagcaaga

SEQ ID NO: 2208913 - RNA, 19 nt, Homo sapiens
  misc_RNA (1)...(19): siRNA sense strand
cccucagacuacagaguua

SEQ ID NO: 2208914 - RNA, 19 nt, Homo sapiens
  misc_RNA (1)...(19): siRNA sense strand
aagccuugaauacagauua

SEQ ID NO: 2208915 - RNA, 19 nt, Homo sapiens
  misc_RNA (1)...(19): siRNA sense strand
ggccaugggcuuugucaag

SEQ ID NO: 2208916 - RNA, 19 nt, Homo sapiens
  misc_RNA (1)...(19): siRNA sense strand
ggccacauuuacucucaca

SEQ ID NO: 2208917 - RNA, 19 nt, Homo sapiens
  misc_RNA (1)...(19): siRNA sense strand
caagcggauuggcuacaag

SEQ ID NO: 2208918 - RNA, 19 nt, Homo sapiens
  misc_RNA (1)...(19): siRNA sense strand
gauuaauggcauagaaagu

SEQ ID NO: 2208919 - RNA, 19 nt, Homo sapiens
  misc_RNA (1)...(19): siRNA sense strand
cauucucccuuagcaguga

SEQ ID NO: 2208920 - RNA, 19 nt, Homo sapiens
  misc_RNA (1)...(19): siRNA sense strand
ggcgcuauuccaauuguuu

SEQ ID NO: 2208921 - RNA, 19 nt, Homo sapiens
  misc_RNA (1)...(19): siRNA sense strand
gccauuugccgaguucuga

SEQ ID NO: 2208922 - RNA, 19 nt, Homo sapiens
  misc_RNA (1)...(19): siRNA sense strand
gugaacagccugggaagca

SEQ ID NO: 2208923 - RNA, 19 nt, Homo sapiens
  misc_RNA (1)...(19): siRNA sense strand
gcucaaggucguggccaaa

SEQ ID NO: 2208924 - RNA, 19 nt, Homo sapiens
  misc_RNA (1)...(19): siRNA sense strand
guggccacauuuacucuca

SEQ ID NO: 2208925 - RNA, 19 nt, Homo sapiens
  misc_RNA (1)...(19): siRNA sense strand
uuaccuugauucugauuac

SEQ ID NO: 2208926 - RNA, 19 nt, Homo sapiens
  misc_RNA (1)...(19): siRNA sense strand
cagacuacagaguuaaaga

SEQ ID NO: 2208927 - RNA, 19 nt, Homo sapiens
  misc_RNA (1)...(19): siRNA sense strand
auacagauuaccuugauuc

SEQ ID NO: 2208928 - RNA, 19 nt, Homo sapiens
  misc_RNA (1)...(19): siRNA sense strand
cugaagaacauugucuauu

SEQ ID NO: 2208929 - RNA, 19 nt, Homo sapiens
  misc_RNA (1)...(19): siRNA sense strand
gggcgcuauuccaauuguu

SEQ ID NO: 2208930 - RNA, 19 nt, Homo sapiens
  misc_RNA (1)...(19): siRNA sense strand
cagaagagauacacauuua

SEQ ID NO: 2208931 - RNA, 19 nt, Homo sapiens
  misc_RNA (1)...(19): siRNA sense strand
ggacuaaccuggagaaaca

SEQ ID NO: 2208932 - RNA, 19 nt, Homo sapiens
  misc_RNA (1)...(19): siRNA sense strand
caaaugauccuguaaacua

SEQ ID NO: 2208933 - RNA, 19 nt, Homo sapiens
  misc_RNA (1)...(19): siRNA sense strand
ggaaaugguuugucucuca

SEQ ID NO: 2208934 - RNA, 19 nt, Homo sapiens
  misc_RNA (1)...(19): siRNA sense strand
gggaggacaugaccuuuaa

SEQ ID NO: 2208935 - RNA, 19 nt, Homo sapiens
  misc_RNA (1)...(19): siRNA sense strand
ugacuuauguguguguuua

SEQ ID NO: 2208936 - RNA, 19 nt, Homo sapiens
  misc_RNA (1)...(19): siRNA sense strand
gcacagggcauucaagaga

SEQ ID NO: 2208937 - RNA, 19 nt, Homo sapiens
  misc_RNA (1)...(19): siRNA sense strand
gagagcaaaugauccugua

SEQ ID NO: 2208938 - RNA, 19 nt, Homo sapiens
  misc_RNA (1)...(19): siRNA sense strand
gaagugaaaucugccucua

SEQ ID NO: 2208939 - RNA, 19 nt, Homo sapiens
  misc_RNA (1)...(19): siRNA sense strand
ggaaugguaugaaacagau

SEQ ID NO: 2208940 - RNA, 19 nt, Homo sapiens
  misc_RNA (1)...(19): siRNA sense strand
gaugauuucuucacgaguu

SEQ ID NO: 2208941 - RNA, 19 nt, Homo sapiens
  misc_RNA (1)...(19): siRNA sense strand
gacaugaccuuuaaaauug

SEQ ID NO: 2208942 - RNA, 19 nt, Homo sapiens
  misc_RNA (1)...(19): siRNA sense strand
ccacaucaguagcuaaaga

SEQ ID NO: 2208943 - RNA, 19 nt, Homo sapiens
  misc_RNA (1)...(19): siRNA sense strand
ggacaugaccuuuaaaauu

SEQ ID NO: 2208944 - RNA, 19 nt, Homo sapiens
  misc_RNA (1)...(19): siRNA sense strand
gaagagauacacauuuaca

SEQ ID NO: 2208945 - RNA, 19 nt, Homo sapiens
  misc_RNA (1)...(19): siRNA sense strand
cgaagggacuugauaagca

SEQ ID NO: 2208946 - RNA, 19 nt, Homo sapiens
  misc_RNA (1)...(19): siRNA sense strand
gaagggacuugauaagcau

SEQ ID NO: 2208947 - RNA, 19 nt, Homo sapiens
  misc_RNA (1)...(19): siRNA sense strand
gagcaaaugauccuguaaa

SEQ ID NO: 2208948 - RNA, 19 nt, Homo sapiens
  misc_RNA (1)...(19): siRNA sense strand
gacaauagaagaagaagug

SEQ ID NO: 2208949 - RNA, 19 nt, Homo sapiens
  misc_RNA (1)...(19): siRNA sense strand
gguaugaaacagaugauuu

SEQ ID NO: 2208950 - RNA, 19 nt, Homo sapiens
  misc_RNA (1)...(19): siRNA sense strand
gugguuacaauccaaauua

SEQ ID NO: 2208951 - RNA, 19 nt, Homo sapiens
  misc_RNA (1)...(19): siRNA sense strand
uaagaacuaucgacaagca

SEQ ID NO: 2208952 - RNA, 19 nt, Homo sapiens
  misc_RNA (1)...(19): siRNA sense strand
ccuguaaacuaccuagaaa

SEQ ID NO: 2208953 - RNA, 19 nt, Homo sapiens
  misc_RNA (1)...(19): siRNA sense strand
gaaacacauucucuucucu

SEQ ID NO: 2208954 - RNA, 19 nt, Homo sapiens
  misc_RNA (1)...(19): siRNA sense strand
gaaggagaccauaguguuc

SEQ ID NO: 2208955 - RNA, 19 nt, Homo sapiens
  misc_RNA (1)...(19): siRNA sense strand
ccacgaagggacuugauaa

SEQ ID NO: 2208956 - RNA, 19 nt, Homo sapiens
  misc_RNA (1)...(19): siRNA sense strand
caaacacaauuccuacaca

SEQ ID NO: 2208957 - RNA, 19 nt, Homo sapiens
  misc_RNA (1)...(19): siRNA sense strand
ucaaagagcaagagagaau

SEQ ID NO: 2208958 - RNA, 19 nt, Homo sapiens
  misc_RNA (1)...(19): siRNA sense strand
guaaacuaccuagaaagua

SEQ ID NO: 2208959 - RNA, 19 nt, Homo sapiens
  misc_RNA (1)...(19): siRNA sense strand
ugacuacauuguuucaaga

SEQ ID NO: 2208960 - RNA, 19 nt, Homo sapiens
  misc_RNA (1)...(19): siRNA sense strand
ggaggaaugguaugaaaca

SEQ ID NO: 2208961 - RNA, 19 nt, Homo sapiens
  misc_RNA (1)...(19): siRNA sense strand
uaauaugacuacugacuac

SEQ ID NO: 2208962 - RNA, 19 nt, Homo sapiens
  misc_RNA (1)...(19): siRNA sense strand
cauuaacagucuuugagaa

SEQ ID NO: 2208963 - RNA, 19 nt, Homo sapiens
  misc_RNA (1)...(19): siRNA sense strand
gugguuggauuuauucugu

SEQ ID NO: 2208964 - RNA, 19 nt, Homo sapiens
  misc_RNA (1)...(19): siRNA sense strand
caucaguagcuaaagauaa

SEQ ID NO: 2208965 - RNA, 19 nt, Homo sapiens
  misc_RNA (1)...(19): siRNA sense strand
uuuaagaucuccugucaag

SEQ ID NO: 2208966 - RNA, 19 nt, Homo sapiens
  misc_RNA (1)...(19): siRNA sense strand
cuaguuugguugcaaguga

SEQ ID NO: 2208967 - RNA, 19 nt, Homo sapiens
  misc_RNA (1)...(19): siRNA sense strand
ugaaggagaccauaguguu

SEQ ID NO: 2208968 - RNA, 19 nt, Homo sapiens
  misc_RNA (1)...(19): siRNA sense strand
acacaauuccuacacauga

SEQ ID NO: 2208969 - RNA, 19 nt, Homo sapiens
  misc_RNA (1)...(19): siRNA sense strand
ccaugaauccacaucagua

SEQ ID NO: 2208970 - RNA, 19 nt, Homo sapiens
  misc_RNA (1)...(19): siRNA sense strand
gaauccacaucaguagcua

SEQ ID NO: 2208971 - RNA, 19 nt, Homo sapiens
  misc_RNA (1)...(19): siRNA sense strand
gaagaagaagugaaaucug

SEQ ID NO: 2208972 - RNA, 19 nt, Homo sapiens
  misc_RNA (1)...(19): siRNA sense strand
ucagaagagauacacauuu

SEQ ID NO: 2208973 - RNA, 19 nt, Homo sapiens
  misc_RNA (1)...(19): siRNA sense strand
uaugacuacugacuacauu

SEQ ID NO: 2208974 - RNA, 19 nt, Homo sapiens
  misc_RNA (1)...(19): siRNA sense strand
aaagagcaagagagaauuu

SEQ ID NO: 2208975 - RNA, 19 nt, Homo sapiens
  misc_RNA (1)...(19): siRNA sense strand
aaacacaauuccuacacau

SEQ ID NO: 2208976 - RNA, 19 nt, Homo sapiens
  misc_RNA (1)...(19): siRNA sense strand
gcccugcguucaauggaaa

SEQ ID NO: 2208977 - RNA, 19 nt, Homo sapiens
  misc_RNA (1)...(19): siRNA sense strand
gguuggauuuauucuguga

SEQ ID NO: 2208978 - RNA, 19 nt, Homo sapiens
  misc_RNA (1)...(19): siRNA sense strand
aagaugugcuugaagacuu

SEQ ID NO: 2208979 - RNA, 19 nt, Homo sapiens
  misc_RNA (1)...(19): siRNA sense strand
ugaaaucugccucuacuca

SEQ ID NO: 2208980 - RNA, 19 nt, Homo sapiens
  misc_RNA (1)...(19): siRNA sense strand
gggugcaacuugaucuuuc

SEQ ID NO: 2208981 - RNA, 19 nt, Homo sapiens
  misc_RNA (1)...(19): siRNA sense strand
guuugucucucacuucaga

SEQ ID NO: 2208982 - RNA, 19 nt, Homo sapiens
  misc_RNA (1)...(19): siRNA sense strand
ugcaagugauuguuuguug

SEQ ID NO: 2208983 - RNA, 19 nt, Homo sapiens
  misc_RNA (1)...(19): siRNA sense strand
gucauugauugcuguacua

SEQ ID NO: 2208984 - RNA, 19 nt, Homo sapiens
  misc_RNA (1)...(19): siRNA sense strand
cacaauuccuacacaugaa

SEQ ID NO: 2208985 - RNA, 19 nt, Homo sapiens
  misc_RNA (1)...(19): siRNA sense strand
acuacugacuacauuguuu

SEQ ID NO: 2208986 - RNA, 19 nt, Homo sapiens
  misc_RNA (1)...(19): siRNA sense strand
uuuaagaacuaucgacaag

SEQ ID NO: 2208987 - RNA, 19 nt, Homo sapiens
  misc_RNA (1)...(19): siRNA sense strand
gguugcaagugauuguuug

SEQ ID NO: 2208988 - RNA, 19 nt, Homo sapiens
  misc_RNA (1)...(19): siRNA sense strand
cugagugguuggauuuauu

SEQ ID NO: 2208989 - RNA, 19 nt, Homo sapiens
  misc_RNA (1)...(19): siRNA sense strand
ccugcagucuccacuacua

SEQ ID NO: 2208990 - RNA, 19 nt, Homo sapiens
  misc_RNA (1)...(19): siRNA sense strand
auugauugcuguacuaguu

SEQ ID NO: 2208991 - RNA, 19 nt, Homo sapiens
  misc_RNA (1)...(19): siRNA sense strand
caaccuccaucaaaacauu

SEQ ID NO: 2208992 - RNA, 19 nt, Homo sapiens
  misc_RNA (1)...(19): siRNA sense strand
gaauuucccauuuaagaac

SEQ ID NO: 2208993 - RNA, 19 nt, Homo sapiens
  misc_RNA (1)...(19): siRNA sense strand
gaagcaaugguuucuaaaa

SEQ ID NO: 2208994 - RNA, 19 nt, Homo sapiens
  misc_RNA (1)...(19): siRNA sense strand
guaagccuauagaagcaau

SEQ ID NO: 2208995 - RNA, 19 nt, Homo sapiens
  misc_RNA (1)...(19): siRNA sense strand
ucaaguaagccuauagaag

SEQ ID NO: 2208996 - RNA, 19 nt, Homo sapiens
  misc_RNA (1)...(19): siRNA sense strand
cuuuggaucucacaaugaa

SEQ ID NO: 2208997 - RNA, 19 nt, Homo sapiens
  misc_RNA (1)...(19): siRNA sense strand
gcauugaacaccaggagau

SEQ ID NO: 2208998 - RNA, 19 nt, Homo sapiens
  misc_RNA (1)...(19): siRNA sense strand
gcagucuccacuacuauau

SEQ ID NO: 2208999 - RNA, 19 nt, Homo sapiens
  misc_RNA (1)...(19): siRNA sense strand
caagagagaauuuuaagga

SEQ ID NO: 2209000 - RNA, 19 nt, Homo sapiens
  misc_RNA (1)...(19): siRNA sense strand
gagauucuaaagacaauag

SEQ ID NO: 2209001 - RNA, 19 nt, Homo sapiens
  misc_RNA (1)...(19): siRNA sense strand
auaccuccauccagcuaua

SEQ ID NO: 2209002 - RNA, 19 nt, Homo sapiens
  misc_RNA (1)...(19): siRNA sense strand
caaagagcaagagagaauu

SEQ ID NO: 2209003 - RNA, 19 nt, Homo sapiens
  misc_RNA (1)...(19): siRNA sense strand
gagcaagagagaauuuuaa

SEQ ID NO: 2209004 - RNA, 19 nt, Homo sapiens
  misc_RNA (1)...(19): siRNA sense strand
gacauuaacagucuuugag

SEQ ID NO: 2209005 - RNA, 19 nt, Homo sapiens
  misc_RNA (1)...(19): siRNA sense strand
aacuugaucuuuccacgaa

SEQ ID NO: 2209006 - RNA, 19 nt, Homo sapiens
  misc_RNA (1)...(19): siRNA sense strand
cuaccuagaaaguaagaaa

SEQ ID NO: 2209007 - RNA, 19 nt, Homo sapiens
  misc_RNA (1)...(19): siRNA sense strand
ucccagcuguggagcaauu

SEQ ID NO: 2209008 - RNA, 19 nt, Homo sapiens
  misc_RNA (1)...(19): siRNA sense strand
ugggaauaccuucauaauu

SEQ ID NO: 2209009 - RNA, 19 nt, Homo sapiens
  misc_RNA (1)...(19): siRNA sense strand
aaaugauccuguaaacuac

SEQ ID NO: 2209010 - RNA, 19 nt, Homo sapiens
  misc_RNA (1)...(19): siRNA sense strand
cagcuauacuggaaauggu

SEQ ID NO: 2209011 - RNA, 19 nt, Homo sapiens
  misc_RNA (1)...(19): siRNA sense strand
ugaaacagaugauuuuguc

SEQ ID NO: 2209012 - RNA, 19 nt, Homo sapiens
  misc_RNA (1)...(19): siRNA sense strand
uaaccuggagaaacacauu

SEQ ID NO: 2209013 - RNA, 19 nt, Homo sapiens
  misc_RNA (1)...(19): siRNA sense strand
ugggaggacaugaccuuua

SEQ ID NO: 2209014 - RNA, 19 nt, Homo sapiens
  misc_RNA (1)...(19): siRNA sense strand
caugagauucuaaagacaa

SEQ ID NO: 2209015 - RNA, 19 nt, Homo sapiens
  misc_RNA (1)...(19): siRNA sense strand
gcaaaugauccuguaaacu

SEQ ID NO: 2209016 - RNA, 19 nt, Homo sapiens
  misc_RNA (1)...(19): siRNA sense strand
ggggaggaaugguaugaaa

SEQ ID NO: 2209017 - RNA, 19 nt, Homo sapiens
  misc_RNA (1)...(19): siRNA sense strand
ggacuugauaagcauugaa

SEQ ID NO: 2209018 - RNA, 19 nt, Homo sapiens
  misc_RNA (1)...(19): siRNA sense strand
ccuagaaaguaagaaagau

SEQ ID NO: 2209019 - RNA, 19 nt, Homo sapiens
  misc_RNA (1)...(19): siRNA sense strand
gcuauacuggaaaugguuu

SEQ ID NO: 2209020 - RNA, 19 nt, Homo sapiens
  misc_RNA (1)...(19): siRNA sense strand
ugagggauggcaggaauuu

SEQ ID NO: 2209021 - RNA, 19 nt, Homo sapiens
  misc_RNA (1)...(19): siRNA sense strand
agugauuguuuguugguuu

SEQ ID NO: 2209022 - RNA, 19 nt, Homo sapiens
  misc_RNA (1)...(19): siRNA sense strand
caacagugugguuacaauc

SEQ ID NO: 2209023 - RNA, 19 nt, Homo sapiens
  misc_RNA (1)...(19): siRNA sense strand
caauagaagaagaagugaa

SEQ ID NO: 2209024 - RNA, 19 nt, Homo sapiens
  misc_RNA (1)...(19): siRNA sense strand
uccaugagauucuaaagac

SEQ ID NO: 2209025 - RNA, 19 nt, Homo sapiens
  misc_RNA (1)...(19): siRNA sense strand
gccuauagaagcaaugguu

SEQ ID NO: 2209026 - RNA, 19 nt, Homo sapiens
  misc_RNA (1)...(19): siRNA sense strand
ugauugcuguacuaguuug

SEQ ID NO: 2209027 - RNA, 19 nt, Homo sapiens
  misc_RNA (1)...(19): siRNA sense strand
uagaagaagaagugaaauc

SEQ ID NO: 2209028 - RNA, 19 nt, Homo sapiens
  misc_RNA (1)...(19): siRNA sense strand
uguacaaacacaauuccua

SEQ ID NO: 2209029 - RNA, 19 nt, Homo sapiens
  misc_RNA (1)...(19): siRNA sense strand
agaaaaugcucucugaaca

SEQ ID NO: 2209030 - RNA, 19 nt, Homo sapiens
  misc_RNA (1)...(19): siRNA sense strand
gaaguaaucaccacuguau

SEQ ID NO: 2209031 - RNA, 19 nt, Homo sapiens
  misc_RNA (1)...(19): siRNA sense strand
uaaauggucagaaacgaua

SEQ ID NO: 2209032 - RNA, 19 nt, Homo sapiens
  misc_RNA (1)...(19): siRNA sense strand
cacaguaaauggucagaaa

SEQ ID NO: 2209033 - RNA, 19 nt, Homo sapiens
  misc_RNA (1)...(19): siRNA sense strand
aacgauagcuguugguauu

SEQ ID NO: 2209034 - RNA, 19 nt, Homo sapiens
  misc_RNA (1)...(19): siRNA sense strand
gaaacgauagcuguuggua

SEQ ID NO: 2209035 - RNA, 19 nt, Homo sapiens
  misc_RNA (1)...(19): siRNA sense strand
cagaaguaaucaccacugu

SEQ ID NO: 2209036 - RNA, 19 nt, Homo sapiens
  misc_RNA (1)...(19): siRNA sense strand
guaaauggucagaaacgau

SEQ ID NO: 2209037 - RNA, 19 nt, Homo sapiens
  misc_RNA (1)...(19): siRNA sense strand
gcacaguaaauggucagaa

SEQ ID NO: 2209038 - RNA, 19 nt, Homo sapiens
  misc_RNA (1)...(19): siRNA sense strand
aaucaggacauccaccaaa

SEQ ID NO: 2209039 - RNA, 19 nt, Homo sapiens
  misc_RNA (1)...(19): siRNA sense strand
ucagaaacgauagcuguug

SEQ ID NO: 2209040 - RNA, 19 nt, Homo sapiens
  misc_RNA (1)...(19): siRNA sense strand
aguaaucaccacuguauca

SEQ ID NO: 2209041 - RNA, 19 nt, Homo sapiens
  misc_RNA (1)...(19): siRNA sense strand
agaaguaaucaccacugua

SEQ ID NO: 2209042 - RNA, 19 nt, Homo sapiens
  misc_RNA (1)...(19): siRNA sense strand
cgauagcuguugguauuac

SEQ ID NO: 2209043 - RNA, 19 nt, Homo sapiens
  misc_RNA (1)...(19): siRNA sense strand
aaacgauagcuguugguau

SEQ ID NO: 2209044 - RNA, 19 nt, Homo sapiens
  misc_RNA (1)...(19): siRNA sense strand
caacaaucucccagccaau

SEQ ID NO: 2209045 - RNA, 19 nt, Homo sapiens
  misc_RNA (1)...(19): siRNA sense strand
uaucaggaagcaacaaucu

SEQ ID NO: 2209046 - RNA, 19 nt, Homo sapiens
  misc_RNA (1)...(19): siRNA sense strand
ucaggacauccaccaaaga

SEQ ID NO: 2209047 - RNA, 19 nt, Homo sapiens
  misc_RNA (1)...(19): siRNA sense strand
gaggaugccugcaacaaua

SEQ ID NO: 2209048 - RNA, 19 nt, Homo sapiens
  misc_RNA (1)...(19): siRNA sense strand
gaagucaucuacaauaaga

SEQ ID NO: 2209049 - RNA, 19 nt, Homo sapiens
  misc_RNA (1)...(19): siRNA sense strand
gaaccaggcugacgacuuc

SEQ ID NO: 2209050 - RNA, 19 nt, Homo sapiens
  misc_RNA (1)...(19): siRNA sense strand
gcaacuacguguucucuga

SEQ ID NO: 2209051 - RNA, 19 nt, Homo sapiens
  misc_RNA (1)...(19): siRNA sense strand
gggaagucaucuacaauaa

SEQ ID NO: 2209052 - RNA, 19 nt, Homo sapiens
  misc_RNA (1)...(19): siRNA sense strand
ggacagagugguuugauga

SEQ ID NO: 2209053 - RNA, 19 nt, Homo sapiens
  misc_RNA (1)...(19): siRNA sense strand
ucacaaagcugaccacaac

SEQ ID NO: 2209054 - RNA, 19 nt, Homo sapiens
  misc_RNA (1)...(19): siRNA sense strand
ggacccacccuacaagaua

SEQ ID NO: 2209055 - RNA, 19 nt, Homo sapiens
  misc_RNA (1)...(19): siRNA sense strand
ucacagagcugaccacaac

SEQ ID NO: 2209056 - RNA, 19 nt, Homo sapiens
  misc_RNA (1)...(19): siRNA sense strand
ccacagugcugaccacgaa

SEQ ID NO: 2209057 - RNA, 19 nt, Homo sapiens
  misc_RNA (1)...(19): siRNA sense strand
ucacagagcugaccacaac

SEQ ID NO: 2209058 - RNA, 19 nt, Homo sapiens
  misc_RNA (1)...(19): siRNA sense strand
ucacagagcugaccacaac

SEQ ID NO: 2209059 - RNA, 19 nt, Homo sapiens
  misc_RNA (1)...(19): siRNA sense strand
gaccucagcuguguucgua

SEQ ID NO: 2209060 - RNA, 19 nt, Homo sapiens
  misc_RNA (1)...(19): siRNA sense strand
ggcagaaggugcacuguga

SEQ ID NO: 2209061 - RNA, 19 nt, Homo sapiens
  misc_RNA (1)...(19): siRNA sense strand
gaacagcucacacuaccaa

SEQ ID NO: 2209062 - RNA, 19 nt, Homo sapiens
  misc_RNA (1)...(19): siRNA sense strand
gaacagcucacacuaccaa

SEQ ID NO: 2209063 - RNA, 19 nt, Homo sapiens
  misc_RNA (1)...(19): siRNA sense strand
gaacagcucacacuaccaa

SEQ ID NO: 2209064 - RNA, 19 nt, Homo sapiens
  misc_RNA (1)...(19): siRNA sense strand
gaacagcucacacuaccaa

SEQ ID NO: 2209065 - RNA, 19 nt, Homo sapiens
  misc_RNA (1)...(19): siRNA sense strand
gaacagcucacacuaccaa

SEQ ID NO: 2209066 - RNA, 19 nt, Homo sapiens
  misc_RNA (1)...(19): siRNA sense strand
ggaggccacugcugucuga

SEQ ID NO: 2209067 - RNA, 19 nt, Homo sapiens
  misc_RNA (1)...(19): siRNA sense strand
ccaaguacaugcagaacug

SEQ ID NO: 2209068 - RNA, 19 nt, Homo sapiens
  misc_RNA (1)...(19): siRNA sense strand
ucacugagcugaccacaac

SEQ ID NO: 2209069 - RNA, 19 nt, Homo sapiens
  misc_RNA (1)...(19): siRNA sense strand
cgaccuggauccucacaaa

SEQ ID NO: 2209070 - RNA, 19 nt, Homo sapiens
  misc_RNA (1)...(19): siRNA sense strand
cgaccuggauccucacaaa

SEQ ID NO: 2209071 - RNA, 19 nt, Homo sapiens
  misc_RNA (1)...(19): siRNA sense strand
ggacagagacgacaaugag

SEQ ID NO: 2209072 - RNA, 19 nt, Homo sapiens
  misc_RNA (1)...(19): siRNA sense strand
gcaacacccuccucuagca

SEQ ID NO: 2209073 - RNA, 19 nt, Homo sapiens
  misc_RNA (1)...(19): siRNA sense strand
gcaaggacauggccaagac

SEQ ID NO: 2209074 - RNA, 19 nt, Homo sapiens
  misc_RNA (1)...(19): siRNA sense strand
gcaacacccuccucuagca

SEQ ID NO: 2209075 - RNA, 19 nt, Homo sapiens
  misc_RNA (1)...(19): siRNA sense strand
gcaacacccuccucuagca

SEQ ID NO: 2209076 - RNA, 19 nt, Homo sapiens
  misc_RNA (1)...(19): siRNA sense strand
caacagccacuacgacuga

SEQ ID NO: 2209077 - RNA, 19 nt, Homo sapiens
  misc_RNA (1)...(19): siRNA sense strand
gagccgagcugggagaaug

SEQ ID NO: 2209078 - RNA, 19 nt, Homo sapiens
  misc_RNA (1)...(19): siRNA sense strand
gcaacacccuccucuagca

SEQ ID NO: 2209079 - RNA, 19 nt, Homo sapiens
  misc_RNA (1)...(19): siRNA sense strand
gcaacacccuccucuagca

SEQ ID NO: 2209080 - RNA, 19 nt, Homo sapiens
  misc_RNA (1)...(19): siRNA sense strand
caacagccacuacgacuga

SEQ ID NO: 2209081 - RNA, 19 nt, Homo sapiens
  misc_RNA (1)...(19): siRNA sense strand
gggaggagcugccuuacag

SEQ ID NO: 2209082 - RNA, 19 nt, Homo sapiens
  misc_RNA (1)...(19): siRNA sense strand
gaaggcagcugcgaguaca

SEQ ID NO: 2209083 - RNA, 19 nt, Homo sapiens
  misc_RNA (1)...(19): siRNA sense strand
ggagcuggaucccaaauac

SEQ ID NO: 2209084 - RNA, 19 nt, Homo sapiens
  misc_RNA (1)...(19): siRNA sense strand
gacgucaccugcagcguuu

SEQ ID NO: 2209085 - RNA, 19 nt, Homo sapiens
  misc_RNA (1)...(19): siRNA sense strand
gcagcuacguucuguccaa

SEQ ID NO: 2209086 - RNA, 19 nt, Homo sapiens
  misc_RNA (1)...(19): siRNA sense strand
cgauggguuuccuaaauuu

SEQ ID NO: 2209087 - RNA, 19 nt, Homo sapiens
  misc_RNA (1)...(19): siRNA sense strand
ucacagagccgagcacuau

SEQ ID NO: 2209088 - RNA, 19 nt, Homo sapiens
  misc_RNA (1)...(19): siRNA sense strand
caagaugugcuucaacuau

SEQ ID NO: 2209089 - RNA, 19 nt, Homo sapiens
  misc_RNA (1)...(19): siRNA sense strand
caagaugugcuucaacuau

SEQ ID NO: 2209090 - RNA, 19 nt, Homo sapiens
  misc_RNA (1)...(19): siRNA sense strand
caagaugugcuucaacuau

SEQ ID NO: 2209091 - RNA, 19 nt, Homo sapiens
  misc_RNA (1)...(19): siRNA sense strand
caagaugugcuucaacuau

SEQ ID NO: 2209092 - RNA, 19 nt, Homo sapiens
  misc_RNA (1)...(19): siRNA sense strand
gacguugaguccuacgaua

SEQ ID NO: 2209093 - RNA, 19 nt, Homo sapiens
  misc_RNA (1)...(19): siRNA sense strand
ccgauggguuuccuaaauu

SEQ ID NO: 2209094 - RNA, 19 nt, Homo sapiens
  misc_RNA (1)...(19): siRNA sense strand
caacgagaacugccugaaa

SEQ ID NO: 2209095 - RNA, 19 nt, Homo sapiens
  misc_RNA (1)...(19): siRNA sense strand
cgacgacaaugccaucaau

SEQ ID NO: 2209096 - RNA, 19 nt, Homo sapiens
  misc_RNA (1)...(19): siRNA sense strand
gcggagacuuugagacguu

SEQ ID NO: 2209097 - RNA, 19 nt, Homo sapiens
  misc_RNA (1)...(19): siRNA sense strand
gcaccuauguccucaugag

SEQ ID NO: 2209098 - RNA, 19 nt, Homo sapiens
  misc_RNA (1)...(19): siRNA sense strand
gccagcagguggacuguga

SEQ ID NO: 2209099 - RNA, 19 nt, Homo sapiens
  misc_RNA (1)...(19): siRNA sense strand
cgaccuggauccucacaga

SEQ ID NO: 2209100 - RNA, 19 nt, Homo sapiens
  misc_RNA (1)...(19): siRNA sense strand
agagauccaugcacgcuuu

SEQ ID NO: 2209101 - RNA, 19 nt, Homo sapiens
  misc_RNA (1)...(19): siRNA sense strand
ccaccuggauccucacaga

SEQ ID NO: 2209102 - RNA, 19 nt, Homo sapiens
  misc_RNA (1)...(19): siRNA sense strand
ugacaagggccaccaauuc

SEQ ID NO: 2209103 - RNA, 19 nt, Homo sapiens
  misc_RNA (1)...(19): siRNA sense strand
ccaccuggauccucacaga

SEQ ID NO: 2209104 - RNA, 19 nt, Homo sapiens
  misc_RNA (1)...(19): siRNA sense strand
ccaccuggauccucacaga

SEQ ID NO: 2209105 - RNA, 19 nt, Homo sapiens
  misc_RNA (1)...(19): siRNA sense strand
cgaccuggauccucacaga

SEQ ID NO: 2209106 - RNA, 19 nt, Homo sapiens
  misc_RNA (1)...(19): siRNA sense strand
cgaccuggauccucacaga

SEQ ID NO: 2209107 - RNA, 19 nt, Homo sapiens
  misc_RNA (1)...(19): siRNA sense strand
ccaccuggauccucacaga

SEQ ID NO: 2209108 - RNA, 19 nt, Homo sapiens
  misc_RNA (1)...(19): siRNA sense strand
ccaccuggauccucacaga

SEQ ID NO: 2209109 - RNA, 19 nt, Homo sapiens
  misc_RNA (1)...(19): siRNA sense strand
cgaccuggauccucacaga

SEQ ID NO: 2209110 - RNA, 19 nt, Homo sapiens
  misc_RNA (1)...(19): siRNA sense strand
cgaccuggauccucacaga

SEQ ID NO: 2209111 - RNA, 19 nt, Homo sapiens
  misc_RNA (1)...(19): siRNA sense strand
ccaccuggauccucacaga

SEQ ID NO: 2209112 - RNA, 19 nt, Homo sapiens
  misc_RNA (1)...(19): siRNA sense strand
gcccacaucuccaccuaug

SEQ ID NO: 2209113 - RNA, 19 nt, Homo sapiens
  misc_RNA (1)...(19): siRNA sense strand
ggaagcaacggcaccauca

SEQ ID NO: 2209114 - RNA, 19 nt, Homo sapiens
  misc_RNA (1)...(19): siRNA sense strand
aaucagcacugugacauug

SEQ ID NO: 2209115 - RNA, 19 nt, Homo sapiens
  misc_RNA (1)...(19): siRNA sense strand
ggaaugcagccuggacuuu

SEQ ID NO: 2209116 - RNA, 19 nt, Homo sapiens
  misc_RNA (1)...(19): siRNA sense strand
ggaaugcagccuggacuuu

SEQ ID NO: 2209117 - RNA, 19 nt, Homo sapiens
  misc_RNA (1)...(19): siRNA sense strand
ggaaugcagccuggacuuu

SEQ ID NO: 2209118 - RNA, 19 nt, Homo sapiens
  misc_RNA (1)...(19): siRNA sense strand
ggaaugcagccuggacuuu

SEQ ID NO: 2209119 - RNA, 19 nt, Homo sapiens
  misc_RNA (1)...(19): siRNA sense strand
ucacaaagccgaccacaac

SEQ ID NO: 2209120 - RNA, 19 nt, Homo sapiens
  misc_RNA (1)...(19): siRNA sense strand
cagcaccgcuuccaaagag

SEQ ID NO: 2209121 - RNA, 19 nt, Homo sapiens
  misc_RNA (1)...(19): siRNA sense strand
gcgggcaccuuccucaaug

SEQ ID NO: 2209122 - RNA, 19 nt, Homo sapiens
  misc_RNA (1)...(19): siRNA sense strand
ggcgaucgcuacagcuuug

SEQ ID NO: 2209123 - RNA, 19 nt, Homo sapiens
  misc_RNA (1)...(19): siRNA sense strand
gcacuggaguuugggaaca

SEQ ID NO: 2209124 - RNA, 19 nt, Homo sapiens
  misc_RNA (1)...(19): siRNA sense strand
caacaugugcuucaacuac

SEQ ID NO: 2209125 - RNA, 19 nt, Homo sapiens
  misc_RNA (1)...(19): siRNA sense strand
ccacaacgccauucaccuu

SEQ ID NO: 2209126 - RNA, 19 nt, Homo sapiens
  misc_RNA (1)...(19): siRNA sense strand
ggaggaugccugcaacaau

SEQ ID NO: 2209127 - RNA, 19 nt, Homo sapiens
  misc_RNA (1)...(19): siRNA sense strand
ccugugacuuccacuauga

SEQ ID NO: 2209128 - RNA, 19 nt, Homo sapiens
  misc_RNA (1)...(19): siRNA sense strand
cgacaagggccaccaguuc

SEQ ID NO: 2209129 - RNA, 19 nt, Homo sapiens
  misc_RNA (1)...(19): siRNA sense strand
gaaugcagccuggacuuug

SEQ ID NO: 2209130 - RNA, 19 nt, Homo sapiens
  misc_RNA (1)...(19): siRNA sense strand
gaaugcagccuggacuuug

SEQ ID NO: 2209131 - RNA, 19 nt, Homo sapiens
  misc_RNA (1)...(19): siRNA sense strand
cgacaagggccaccaguuc

SEQ ID NO: 2209132 - RNA, 19 nt, Homo sapiens
  misc_RNA (1)...(19): siRNA sense strand
gaaugcagccuggacuuug

SEQ ID NO: 2209133 - RNA, 19 nt, Homo sapiens
  misc_RNA (1)...(19): siRNA sense strand
gaaugcagccuggacuuug

SEQ ID NO: 2209134 - RNA, 19 nt, Homo sapiens
  misc_RNA (1)...(19): siRNA sense strand
gcaccaaguacaugcagaa

SEQ ID NO: 2209135 - RNA, 19 nt, Homo sapiens
  misc_RNA (1)...(19): siRNA sense strand
acaagcaccugcccaucaa

SEQ ID NO: 2209136 - RNA, 19 nt, Homo sapiens
  misc_RNA (1)...(19): siRNA sense strand
cgacccggauccucacuga

SEQ ID NO: 2209137 - RNA, 19 nt, Homo sapiens
  misc_RNA (1)...(19): siRNA sense strand
gaaggcugcuacccgaagu

SEQ ID NO: 2209138 - RNA, 19 nt, Homo sapiens
  misc_RNA (1)...(19): siRNA sense strand
cagaguggcuggacuacag

SEQ ID NO: 2209139 - RNA, 19 nt, Homo sapiens
  misc_RNA (1)...(19): siRNA sense strand
cagaguggcuggacuacag

SEQ ID NO: 2209140 - RNA, 19 nt, Homo sapiens
  misc_RNA (1)...(19): siRNA sense strand
cagaguggcuggacuacag

SEQ ID NO: 2209141 - RNA, 19 nt, Homo sapiens
  misc_RNA (1)...(19): siRNA sense strand
cagaguggcuggacuacag

SEQ ID NO: 2209142 - RNA, 19 nt, Homo sapiens
  misc_RNA (1)...(19): siRNA sense strand
gcacugugacguccacuuc

SEQ ID NO: 2209143 - RNA, 19 nt, Homo sapiens
  misc_RNA (1)...(19): siRNA sense strand
caggaaggcuguggcaugu

SEQ ID NO: 2209144 - RNA, 19 nt, Homo sapiens
  misc_RNA (1)...(19): siRNA sense strand
ucaaugaggaccagaugaa

SEQ ID NO: 2209145 - RNA, 19 nt, Homo sapiens
  misc_RNA (1)...(19): siRNA sense strand
gauaucguccucacuguca

SEQ ID NO: 2209146 - RNA, 19 nt, Homo sapiens
  misc_RNA (1)...(19): siRNA sense strand
gcccuucccugccacaugu

SEQ ID NO: 2209147 - RNA, 19 nt, Homo sapiens
  misc_RNA (1)...(19): siRNA sense strand
gcaagaagcgggucuguuu

SEQ ID NO: 2209148 - RNA, 19 nt, Homo sapiens
  misc_RNA (1)...(19): siRNA sense strand
aagcgggucuguuucuuua

SEQ ID NO: 2209149 - RNA, 19 nt, Homo sapiens
  misc_RNA (1)...(19): siRNA sense strand
gaagcgggucuguuucuuu

SEQ ID NO: 2209150 - RNA, 19 nt, Homo sapiens
  misc_RNA (1)...(19): siRNA sense strand
ugaauaugcugcacuuuac

SEQ ID NO: 2209151 - RNA, 19 nt, Homo sapiens
  misc_RNA (1)...(19): siRNA sense strand
gaacccacaacaugaaaga

SEQ ID NO: 2209152 - RNA, 19 nt, Homo sapiens
  misc_RNA (1)...(19): siRNA sense strand
ggaaucggcucuggaaggu

SEQ ID NO: 2209153 - RNA, 19 nt, Homo sapiens
  misc_RNA (1)...(19): siRNA sense strand
gcucaagccugggccuuug

SEQ ID NO: 2209154 - RNA, 19 nt, Homo sapiens
  misc_RNA (1)...(19): siRNA sense strand
aaaugaauaugcugcacuu

SEQ ID NO: 2209155 - RNA, 19 nt, Homo sapiens
  misc_RNA (1)...(19): siRNA sense strand
ccacggagucggcacacua

SEQ ID NO: 2209156 - RNA, 19 nt, Homo sapiens
  misc_RNA (1)...(19): siRNA sense strand
ccagaacccacaacaugaa

SEQ ID NO: 2209157 - RNA, 19 nt, Homo sapiens
  misc_RNA (1)...(19): siRNA sense strand
augaauaugcugcacuuua

SEQ ID NO: 2209158 - RNA, 19 nt, Homo sapiens
  misc_RNA (1)...(19): siRNA sense strand
ucaggaaucggcucuggaa

SEQ ID NO: 2209159 - RNA, 19 nt, Homo sapiens
  misc_RNA (1)...(19): siRNA sense strand
ccucuagcuuggaaaugaa

SEQ ID NO: 2209160 - RNA, 19 nt, Homo sapiens
  misc_RNA (1)...(19): siRNA sense strand
cccacaacaugaaagaaau

SEQ ID NO: 2209161 - RNA, 19 nt, Homo sapiens
  misc_RNA (1)...(19): siRNA sense strand
gaauaugcugcacuuuaca

SEQ ID NO: 2209162 - RNA, 19 nt, Homo sapiens
  misc_RNA (1)...(19): siRNA sense strand
cccucuagcuuggaaauga

SEQ ID NO: 2209163 - RNA, 19 nt, Homo sapiens
  misc_RNA (1)...(19): siRNA sense strand
ccacaacaugaaagaaaug

SEQ ID NO: 2209164 - RNA, 19 nt, Homo sapiens
  misc_RNA (1)...(19): siRNA sense strand
ucccagaacccacaacaug

SEQ ID NO: 2209165 - RNA, 19 nt, Homo sapiens
  misc_RNA (1)...(19): siRNA sense strand
caagaagcgggucuguuuc

SEQ ID NO: 2209166 - RNA, 19 nt, Homo sapiens
  misc_RNA (1)...(19): siRNA sense strand
gcgggucuguuucuuuacu

SEQ ID NO: 2209167 - RNA, 19 nt, Homo sapiens
  misc_RNA (1)...(19): siRNA sense strand
gcuuggaaaugaauaugcu

SEQ ID NO: 2209168 - RNA, 19 nt, Homo sapiens
  misc_RNA (1)...(19): siRNA sense strand
cagaacccacaacaugaaa

SEQ ID NO: 2209169 - RNA, 19 nt, Homo sapiens
  misc_RNA (1)...(19): siRNA sense strand
cccagaacccacaacauga

SEQ ID NO: 2209170 - RNA, 19 nt, Homo sapiens
  misc_RNA (1)...(19): siRNA sense strand
caugaaagaaauggugcua

SEQ ID NO: 2209171 - RNA, 19 nt, Homo sapiens
  misc_RNA (1)...(19): siRNA sense strand
ugacaagcaggacaugaca

SEQ ID NO: 2209172 - RNA, 19 nt, Homo sapiens
  misc_RNA (1)...(19): siRNA sense strand
cguccggccuuccugaaca

SEQ ID NO: 2209173 - RNA, 19 nt, Homo sapiens
  misc_RNA (1)...(19): siRNA sense strand
gaacagcugccuauacuuu

SEQ ID NO: 2209174 - RNA, 19 nt, Homo sapiens
  misc_RNA (1)...(19): siRNA sense strand
ggaccuggcuucccugaug

SEQ ID NO: 2209175 - RNA, 19 nt, Homo sapiens
  misc_RNA (1)...(19): siRNA sense strand
gaagaugaccaacgaggua

SEQ ID NO: 2209176 - RNA, 19 nt, Homo sapiens
  misc_RNA (1)...(19): siRNA sense strand
gaauauguaugccgcaaag

SEQ ID NO: 2209177 - RNA, 19 nt, Homo sapiens
  misc_RNA (1)...(19): siRNA sense strand
caacgagguagccaucuua

SEQ ID NO: 2209178 - RNA, 19 nt, Homo sapiens
  misc_RNA (1)...(19): siRNA sense strand
ccgcacagcuuacccaaau

SEQ ID NO: 2209179 - RNA, 19 nt, Homo sapiens
  misc_RNA (1)...(19): siRNA sense strand
gauaguacuucaggccuaa

SEQ ID NO: 2209180 - RNA, 19 nt, Homo sapiens
  misc_RNA (1)...(19): siRNA sense strand
acaagaagaugaccaacga

SEQ ID NO: 2209181 - RNA, 19 nt, Homo sapiens
  misc_RNA (1)...(19): siRNA sense strand
gccaguaccucuauagcuu

SEQ ID NO: 2209182 - RNA, 19 nt, Homo sapiens
  misc_RNA (1)...(19): siRNA sense strand
gugcagaucuuucagaacu

SEQ ID NO: 2209183 - RNA, 19 nt, Homo sapiens
  misc_RNA (1)...(19): siRNA sense strand
gugcagggcucuacuuugg

SEQ ID NO: 2209184 - RNA, 19 nt, Homo sapiens
  misc_RNA (1)...(19): siRNA sense strand
gaaggacuccggcguguca

SEQ ID NO: 2209185 - RNA, 19 nt, Homo sapiens
  misc_RNA (1)...(19): siRNA sense strand
acaauggucuucccaguca

SEQ ID NO: 2209186 - RNA, 19 nt, Homo sapiens
  misc_RNA (1)...(19): siRNA sense strand
uggaggagcuggugcugaa

SEQ ID NO: 2209187 - RNA, 19 nt, Homo sapiens
  misc_RNA (1)...(19): siRNA sense strand
gaucucgagucgcuacguu

SEQ ID NO: 2209188 - RNA, 19 nt, Homo sapiens
  misc_RNA (1)...(19): siRNA sense strand
gagaucagcaucaucaaca

SEQ ID NO: 2209189 - RNA, 19 nt, Homo sapiens
  misc_RNA (1)...(19): siRNA sense strand
gcagaucuuucagaacugu

SEQ ID NO: 2209190 - RNA, 19 nt, Homo sapiens
  misc_RNA (1)...(19): siRNA sense strand
ccacacaggauucuuggaa

SEQ ID NO: 2209191 - RNA, 19 nt, Homo sapiens
  misc_RNA (1)...(19): siRNA sense strand
gggugcagaucuuucagaa

SEQ ID NO: 2209192 - RNA, 19 nt, Homo sapiens
  misc_RNA (1)...(19): siRNA sense strand
cuacacgagugaccugcua

SEQ ID NO: 2209193 - RNA, 19 nt, Homo sapiens
  misc_RNA (1)...(19): siRNA sense strand
caacaucaaagguggguau

SEQ ID NO: 2209194 - RNA, 19 nt, Homo sapiens
  misc_RNA (1)...(19): siRNA sense strand
ccaacgagguagccaucuu

SEQ ID NO: 2209195 - RNA, 19 nt, Homo sapiens
  misc_RNA (1)...(19): siRNA sense strand
caccuggaguuucuucuug

SEQ ID NO: 2209196 - RNA, 19 nt, Homo sapiens
  misc_RNA (1)...(19): siRNA sense strand
cagagacccgcacagcuua

SEQ ID NO: 2209197 - RNA, 19 nt, Homo sapiens
  misc_RNA (1)...(19): siRNA sense strand
gaugguaucacacaguaug

SEQ ID NO: 2209198 - RNA, 19 nt, Homo sapiens
  misc_RNA (1)...(19): siRNA sense strand
gugcaccuguccacucuga

SEQ ID NO: 2209199 - RNA, 19 nt, Homo sapiens
  misc_RNA (1)...(19): siRNA sense strand
ggcgaguuauugacuggua

SEQ ID NO: 2209200 - RNA, 19 nt, Homo sapiens
  misc_RNA (1)...(19): siRNA sense strand
cgagugaccugcuauaccu

SEQ ID NO: 2209201 - RNA, 19 nt, Homo sapiens
  misc_RNA (1)...(19): siRNA sense strand
ggucuucccagucauguau

SEQ ID NO: 2209202 - RNA, 19 nt, Homo sapiens
  misc_RNA (1)...(19): siRNA sense strand
uggaacagcugccuauacu

SEQ ID NO: 2209203 - RNA, 19 nt, Homo sapiens
  misc_RNA (1)...(19): siRNA sense strand
gaccugcuauaccuacuag

SEQ ID NO: 2209204 - RNA, 19 nt, Homo sapiens
  misc_RNA (1)...(19): siRNA sense strand
gcagaaggcgggaccuaag

SEQ ID NO: 2209205 - RNA, 19 nt, Homo sapiens
  misc_RNA (1)...(19): siRNA sense strand
uaucagcaccugcagauca

SEQ ID NO: 2209206 - RNA, 19 nt, Homo sapiens
  misc_RNA (1)...(19): siRNA sense strand
acacaggauucuuggaaca

SEQ ID NO: 2209207 - RNA, 19 nt, Homo sapiens
  misc_RNA (1)...(19): siRNA sense strand
gguggcagaugaugguauc

SEQ ID NO: 2209208 - RNA, 19 nt, Homo sapiens
  misc_RNA (1)...(19): siRNA sense strand
gaucaugcacuggugaaga

SEQ ID NO: 2209209 - RNA, 19 nt, Homo sapiens
  misc_RNA (1)...(19): siRNA sense strand
gagcaccgccucuccucuu

SEQ ID NO: 2209210 - RNA, 19 nt, Homo sapiens
  misc_RNA (1)...(19): siRNA sense strand
guucgcaccuggaguuucu

SEQ ID NO: 2209211 - RNA, 19 nt, Homo sapiens
  misc_RNA (1)...(19): siRNA sense strand
caacaugaacacugcagau

SEQ ID NO: 2209212 - RNA, 19 nt, Homo sapiens
  misc_RNA (1)...(19): siRNA sense strand
gcaccuggaguuucuucuu

SEQ ID NO: 2209213 - RNA, 19 nt, Homo sapiens
  misc_RNA (1)...(19): siRNA sense strand
guacuucaggccuaaacuu

SEQ ID NO: 2209214 - RNA, 19 nt, Homo sapiens
  misc_RNA (1)...(19): siRNA sense strand
ugagcucugucaucuacaa

SEQ ID NO: 2209215 - RNA, 19 nt, Homo sapiens
  misc_RNA (1)...(19): siRNA sense strand
gggaccagauaguacuuca

SEQ ID NO: 2209216 - RNA, 19 nt, Homo sapiens
  misc_RNA (1)...(19): siRNA sense strand
acugguggcugaacacaau

SEQ ID NO: 2209217 - RNA, 19 nt, Homo sapiens
  misc_RNA (1)...(19): siRNA sense strand
ggagacauuggccaagaga

SEQ ID NO: 2209218 - RNA, 19 nt, Homo sapiens
  misc_RNA (1)...(19): siRNA sense strand
cagaucaacaagaagauga

SEQ ID NO: 2209219 - RNA, 19 nt, Homo sapiens
  misc_RNA (1)...(19): siRNA sense strand
gcucugucaucuacaacau

SEQ ID NO: 2209220 - RNA, 19 nt, Homo sapiens
  misc_RNA (1)...(19): siRNA sense strand
acagagacccgcacagcuu

SEQ ID NO: 2209221 - RNA, 19 nt, Homo sapiens
  misc_RNA (1)...(19): siRNA sense strand
gguaucagcaccugcagau

SEQ ID NO: 2209222 - RNA, 19 nt, Homo sapiens
  misc_RNA (1)...(19): siRNA sense strand
gcgaguuauugacugguau

SEQ ID NO: 2209223 - RNA, 19 nt, Homo sapiens
  misc_RNA (1)...(19): siRNA sense strand
aagcuggagcggcgaguua

SEQ ID NO: 2209224 - RNA, 19 nt, Homo sapiens
  misc_RNA (1)...(19): siRNA sense strand
gcagaucaacaagaagaug

SEQ ID NO: 2209225 - RNA, 19 nt, Homo sapiens
  misc_RNA (1)...(19): siRNA sense strand
ccaguaccucuauagcuuu

SEQ ID NO: 2209226 - RNA, 19 nt, Homo sapiens
  misc_RNA (1)...(19): siRNA sense strand
aaggagacauuggccaaga

SEQ ID NO: 2209227 - RNA, 19 nt, Homo sapiens
  misc_RNA (1)...(19): siRNA sense strand
ucaacaagaagaugaccaa

SEQ ID NO: 2209228 - RNA, 19 nt, Homo sapiens
  misc_RNA (1)...(19): siRNA sense strand
gcacagcuuacccaaaugc

SEQ ID NO: 2209229 - RNA, 19 nt, Homo sapiens
  misc_RNA (1)...(19): siRNA sense strand
cagcaucaucaacaucaaa

SEQ ID NO: 2209230 - RNA, 19 nt, Homo sapiens
  misc_RNA (1)...(19): siRNA sense strand
agacauuggccaagagaug

SEQ ID NO: 2209231 - RNA, 19 nt, Homo sapiens
  misc_RNA (1)...(19): siRNA sense strand
cgagguagccaucuuacag

SEQ ID NO: 2209232 - RNA, 19 nt, Homo sapiens
  misc_RNA (1)...(19): siRNA sense strand
augcacuggugaagaagua

SEQ ID NO: 2209233 - RNA, 19 nt, Homo sapiens
  misc_RNA (1)...(19): siRNA sense strand
ggcagaaggcgggaccuaa

SEQ ID NO: 2209234 - RNA, 19 nt, Homo sapiens
  misc_RNA (1)...(19): siRNA sense strand
ggguaucccaguauuuguu

SEQ ID NO: 2209235 - RNA, 19 nt, Homo sapiens
  misc_RNA (1)...(19): siRNA sense strand
gaucagcaucaucaacauc

SEQ ID NO: 2209236 - RNA, 19 nt, Homo sapiens
  misc_RNA (1)...(19): siRNA sense strand
guuaucugguggccugguu

SEQ ID NO: 2209237 - RNA, 19 nt, Homo sapiens
  misc_RNA (1)...(19): siRNA sense strand
cugcagaugcggcuuucua

SEQ ID NO: 2209238 - RNA, 19 nt, Homo sapiens
  misc_RNA (1)...(19): siRNA sense strand
uuacuucuccacgcugaua

SEQ ID NO: 2209239 - RNA, 19 nt, Homo sapiens
  misc_RNA (1)...(19): siRNA sense strand
ccugguuggugcuggacua

SEQ ID NO: 2209240 - RNA, 19 nt, Homo sapiens
  misc_RNA (1)...(19): siRNA sense strand
uguauaaccucaucauccu

SEQ ID NO: 2209241 - RNA, 19 nt, Homo sapiens
  misc_RNA (1)...(19): siRNA sense strand
ggagaucagcaucaucaac

SEQ ID NO: 2209242 - RNA, 19 nt, Homo sapiens
  misc_RNA (1)...(19): siRNA sense strand
ggacuccggcgugucauag

SEQ ID NO: 2209243 - RNA, 19 nt, Homo sapiens
  misc_RNA (1)...(19): siRNA sense strand
aucaugcacuggugaagaa

SEQ ID NO: 2209244 - RNA, 19 nt, Homo sapiens
  misc_RNA (1)...(19): siRNA sense strand
gaccuaaggagaggcgauu

SEQ ID NO: 2209245 - RNA, 19 nt, Homo sapiens
  misc_RNA (1)...(19): siRNA sense strand
acacgagugaccugcuaua

SEQ ID NO: 2209246 - RNA, 19 nt, Homo sapiens
  misc_RNA (1)...(19): siRNA sense strand
ggaacagcugccuauacuu

SEQ ID NO: 2209247 - RNA, 19 nt, Homo sapiens
  misc_RNA (1)...(19): siRNA sense strand
ugacuacagugggcgauac

SEQ ID NO: 2209248 - RNA, 19 nt, Homo sapiens
  misc_RNA (1)...(19): siRNA sense strand
cuucaggccuaaacuucug

SEQ ID NO: 2209249 - RNA, 19 nt, Homo sapiens
  misc_RNA (1)...(19): siRNA sense strand
ggaaggaaagguggaacca

SEQ ID NO: 2209250 - RNA, 19 nt, Homo sapiens
  misc_RNA (1)...(19): siRNA sense strand
cgacuugcagcacgguuau

SEQ ID NO: 2209251 - RNA, 19 nt, Homo sapiens
  misc_RNA (1)...(19): siRNA sense strand
cugcagaucaacaagaaga

SEQ ID NO: 2209252 - RNA, 19 nt, Homo sapiens
  misc_RNA (1)...(19): siRNA sense strand
agucauguauaaccucauc

SEQ ID NO: 2209253 - RNA, 19 nt, Homo sapiens
  misc_RNA (1)...(19): siRNA sense strand
gguagcaugagcucuguca

SEQ ID NO: 2209254 - RNA, 19 nt, Homo sapiens
  misc_RNA (1)...(19): siRNA sense strand
caucaucaacaucaaaggu

SEQ ID NO: 2209255 - RNA, 19 nt, Homo sapiens
  misc_RNA (1)...(19): siRNA sense strand
gagcggcgaguuauugacu

SEQ ID NO: 2209256 - RNA, 19 nt, Homo sapiens
  misc_RNA (1)...(19): siRNA sense strand
gccuauacuuugcccuauc

SEQ ID NO: 2209257 - RNA, 19 nt, Homo sapiens
  misc_RNA (1)...(19): siRNA sense strand
uugguuccgucccuucgua

SEQ ID NO: 2209258 - RNA, 19 nt, Homo sapiens
  misc_RNA (1)...(19): siRNA sense strand
ccgacuugcagcacgguua

SEQ ID NO: 2209259 - RNA, 19 nt, Homo sapiens
  misc_RNA (1)...(19): siRNA sense strand
ggguuucgccaccaucaug

SEQ ID NO: 2209260 - RNA, 19 nt, Homo sapiens
  misc_RNA (1)...(19): siRNA sense strand
ccacgcugauacugacuac

SEQ ID NO: 2209261 - RNA, 19 nt, Homo sapiens
  misc_RNA (1)...(19): siRNA sense strand
ugacagagcucacagauuu

SEQ ID NO: 2209262 - RNA, 19 nt, Homo sapiens
  misc_RNA (1)...(19): siRNA sense strand
ggcaguagcuucuuugaaa

SEQ ID NO: 2209263 - RNA, 19 nt, Homo sapiens
  misc_RNA (1)...(19): siRNA sense strand
ugaauaaaguucugcauga

SEQ ID NO: 2209264 - RNA, 19 nt, Homo sapiens
  misc_RNA (1)...(19): siRNA sense strand
cuacuuagcugccaugaug

SEQ ID NO: 2209265 - RNA, 19 nt, Homo sapiens
  misc_RNA (1)...(19): siRNA sense strand
gguccuuccuguacaauua

SEQ ID NO: 2209266 - RNA, 19 nt, Homo sapiens
  misc_RNA (1)...(19): siRNA sense strand
gcacgcaucuugcauaguc

SEQ ID NO: 2209267 - RNA, 19 nt, Homo sapiens
  misc_RNA (1)...(19): siRNA sense strand
gagcagacuuggcagugua

SEQ ID NO: 2209268 - RNA, 19 nt, Homo sapiens
  misc_RNA (1)...(19): siRNA sense strand
ucacagauuucaugcauau

SEQ ID NO: 2209269 - RNA, 19 nt, Homo sapiens
  misc_RNA (1)...(19): siRNA sense strand
caagagagcuauagugaac

SEQ ID NO: 2209270 - RNA, 19 nt, Homo sapiens
  misc_RNA (1)...(19): siRNA sense strand
ggagguggcugacacaaca

SEQ ID NO: 2209271 - RNA, 19 nt, Homo sapiens
  misc_RNA (1)...(19): siRNA sense strand
uggcagaaccuaugacuua

SEQ ID NO: 2209272 - RNA, 19 nt, Homo sapiens
  misc_RNA (1)...(19): siRNA sense strand
gaacaucauuggauaacag

SEQ ID NO: 2209273 - RNA, 19 nt, Homo sapiens
  misc_RNA (1)...(19): siRNA sense strand
gucaggagauuuaaacaaa

SEQ ID NO: 2209274 - RNA, 19 nt, Homo sapiens
  misc_RNA (1)...(19): siRNA sense strand
gaaguugaaugaagccaau

SEQ ID NO: 2209275 - RNA, 19 nt, Homo sapiens
  misc_RNA (1)...(19): siRNA sense strand
uggcaucccuuccuuauga

SEQ ID NO: 2209276 - RNA, 19 nt, Homo sapiens
  misc_RNA (1)...(19): siRNA sense strand
gaggagcccuuacuuccaa

SEQ ID NO: 2209277 - RNA, 19 nt, Homo sapiens
  misc_RNA (1)...(19): siRNA sense strand
cagggaacaucauuggaua

SEQ ID NO: 2209278 - RNA, 19 nt, Homo sapiens
  misc_RNA (1)...(19): siRNA sense strand
gcugugagcuucaggucuu

SEQ ID NO: 2209279 - RNA, 19 nt, Homo sapiens
  misc_RNA (1)...(19): siRNA sense strand
ccagagggcuucccaaggu

SEQ ID NO: 2209280 - RNA, 19 nt, Homo sapiens
  misc_RNA (1)...(19): siRNA sense strand
ccaggcaccuuucucuuga

SEQ ID NO: 2209281 - RNA, 19 nt, Homo sapiens
  misc_RNA (1)...(19): siRNA sense strand
gcucacagauuucaugcau

SEQ ID NO: 2209282 - RNA, 19 nt, Homo sapiens
  misc_RNA (1)...(19): siRNA sense strand
cuacugcgcucaccacugu

SEQ ID NO: 2209283 - RNA, 19 nt, Homo sapiens
  misc_RNA (1)...(19): siRNA sense strand
gcacccagaaguugaauga

SEQ ID NO: 2209284 - RNA, 19 nt, Homo sapiens
  misc_RNA (1)...(19): siRNA sense strand
gaaccucagucaacaacuc

SEQ ID NO: 2209285 - RNA, 19 nt, Homo sapiens
  misc_RNA (1)...(19): siRNA sense strand
gauacuggaagacacaaua

SEQ ID NO: 2209286 - RNA, 19 nt, Homo sapiens
  misc_RNA (1)...(19): siRNA sense strand
caagcgacaugccauuaug

SEQ ID NO: 2209287 - RNA, 19 nt, Homo sapiens
  misc_RNA (1)...(19): siRNA sense strand
aggaagaccuggacaacaa

SEQ ID NO: 2209288 - RNA, 19 nt, Homo sapiens
  misc_RNA (1)...(19): siRNA sense strand
gcaccuuucucuugaugga

SEQ ID NO: 2209289 - RNA, 19 nt, Homo sapiens
  misc_RNA (1)...(19): siRNA sense strand
gaacugcaccacuuguaug

SEQ ID NO: 2209290 - RNA, 19 nt, Homo sapiens
  misc_RNA (1)...(19): siRNA sense strand
gaauaaaguucugcaugag

SEQ ID NO: 2209291 - RNA, 19 nt, Homo sapiens
  misc_RNA (1)...(19): siRNA sense strand
auaagcagcuggaggaaga

SEQ ID NO: 2209292 - RNA, 19 nt, Homo sapiens
  misc_RNA (1)...(19): siRNA sense strand
ggacaacaacccuaagauc

SEQ ID NO: 2209293 - RNA, 19 nt, Homo sapiens
  misc_RNA (1)...(19): siRNA sense strand
ggccugugcuccacuagaa

SEQ ID NO: 2209294 - RNA, 19 nt, Homo sapiens
  misc_RNA (1)...(19): siRNA sense strand
ucaagcagauacuggaaga

SEQ ID NO: 2209295 - RNA, 19 nt, Homo sapiens
  misc_RNA (1)...(19): siRNA sense strand
cccaauugcugguaucuug

SEQ ID NO: 2209296 - RNA, 19 nt, Homo sapiens
  misc_RNA (1)...(19): siRNA sense strand
ggcaagagagcuauaguga

SEQ ID NO: 2209297 - RNA, 19 nt, Homo sapiens
  misc_RNA (1)...(19): siRNA sense strand
ggaaagucuucagguguug

SEQ ID NO: 2209298 - RNA, 19 nt, Homo sapiens
  misc_RNA (1)...(19): siRNA sense strand
gggaggcauuucaguuuga

SEQ ID NO: 2209299 - RNA, 19 nt, Homo sapiens
  misc_RNA (1)...(19): siRNA sense strand
caaccacuuuagccucuuu

SEQ ID NO: 2209300 - RNA, 19 nt, Homo sapiens
  misc_RNA (1)...(19): siRNA sense strand
cagaaccuaugacuuacaa

SEQ ID NO: 2209301 - RNA, 19 nt, Homo sapiens
  misc_RNA (1)...(19): siRNA sense strand
ccacauggcugagguucug

SEQ ID NO: 2209302 - RNA, 19 nt, Homo sapiens
  misc_RNA (1)...(19): siRNA sense strand
gagguggucccaucaagaa

SEQ ID NO: 2209303 - RNA, 19 nt, Homo sapiens
  misc_RNA (1)...(19): siRNA sense strand
gaagauggacgggcugguu

SEQ ID NO: 2209304 - RNA, 19 nt, Homo sapiens
  misc_RNA (1)...(19): siRNA sense strand
ggaaauuacccaccuguac

SEQ ID NO: 2209305 - RNA, 19 nt, Homo sapiens
  misc_RNA (1)...(19): siRNA sense strand
gacacaauacggacacuaa

SEQ ID NO: 2209306 - RNA, 19 nt, Homo sapiens
  misc_RNA (1)...(19): siRNA sense strand
gcaagagagcuauagugaa

SEQ ID NO: 2209307 - RNA, 19 nt, Homo sapiens
  misc_RNA (1)...(19): siRNA sense strand
ucaagcaacugcccaagca

SEQ ID NO: 2209308 - RNA, 19 nt, Homo sapiens
  misc_RNA (1)...(19): siRNA sense strand
gaaugaagccaaugaacag

SEQ ID NO: 2209309 - RNA, 19 nt, Homo sapiens
  misc_RNA (1)...(19): siRNA sense strand
gaucccagcccugacauuu

SEQ ID NO: 2209310 - RNA, 19 nt, Homo sapiens
  misc_RNA (1)...(19): siRNA sense strand
cgacgcugcuuuccucaug

SEQ ID NO: 2209311 - RNA, 19 nt, Homo sapiens
  misc_RNA (1)...(19): siRNA sense strand
gcaccuucauccucucaga

SEQ ID NO: 2209312 - RNA, 19 nt, Homo sapiens
  misc_RNA (1)...(19): siRNA sense strand
cagcauggcacgcaucuug

SEQ ID NO: 2209313 - RNA, 19 nt, Homo sapiens
  misc_RNA (1)...(19): siRNA sense strand
cuaaguggcuggccucucu

SEQ ID NO: 2209314 - RNA, 19 nt, Homo sapiens
  misc_RNA (1)...(19): siRNA sense strand
gaagauccaguuuccuaau

SEQ ID NO: 2209315 - RNA, 19 nt, Homo sapiens
  misc_RNA (1)...(19): siRNA sense strand
gcagggaacaucauuggau

SEQ ID NO: 2209316 - RNA, 19 nt, Homo sapiens
  misc_RNA (1)...(19): siRNA sense strand
gcagacagaggaaucaauc

SEQ ID NO: 2209317 - RNA, 19 nt, Homo sapiens
  misc_RNA (1)...(19): siRNA sense strand
cgaaaagucaggagauuua

SEQ ID NO: 2209318 - RNA, 19 nt, Homo sapiens
  misc_RNA (1)...(19): siRNA sense strand
ccuaugccaucuucacuga

SEQ ID NO: 2209319 - RNA, 19 nt, Homo sapiens
  misc_RNA (1)...(19): siRNA sense strand
gcaagcgacaugccauuau

SEQ ID NO: 2209320 - RNA, 19 nt, Homo sapiens
  misc_RNA (1)...(19): siRNA sense strand
gggagguaguggacaaaga

SEQ ID NO: 2209321 - RNA, 19 nt, Homo sapiens
  misc_RNA (1)...(19): siRNA sense strand
ggaggaacugcaacaggua

SEQ ID NO: 2209322 - RNA, 19 nt, Homo sapiens
  misc_RNA (1)...(19): siRNA sense strand
gcucaccacuguuuagcau

SEQ ID NO: 2209323 - RNA, 19 nt, Homo sapiens
  misc_RNA (1)...(19): siRNA sense strand
ugaggaggcugcccuacug

SEQ ID NO: 2209324 - RNA, 19 nt, Homo sapiens
  misc_RNA (1)...(19): siRNA sense strand
gaaacacaagcaccauaga

SEQ ID NO: 2209325 - RNA, 19 nt, Homo sapiens
  misc_RNA (1)...(19): siRNA sense strand
ggguucaccucacauaauc

SEQ ID NO: 2209326 - RNA, 19 nt, Homo sapiens
  misc_RNA (1)...(19): siRNA sense strand
caguaugccuaucgaguug

SEQ ID NO: 2209327 - RNA, 19 nt, Homo sapiens
  misc_RNA (1)...(19): siRNA sense strand
uugagguacuggugaauuu

SEQ ID NO: 2209328 - RNA, 19 nt, Homo sapiens
  misc_RNA (1)...(19): siRNA sense strand
cuggaagucucacccaauu

SEQ ID NO: 2209329 - RNA, 19 nt, Homo sapiens
  misc_RNA (1)...(19): siRNA sense strand
gaagcuggaagacaugaga

SEQ ID NO: 2209330 - RNA, 19 nt, Homo sapiens
  misc_RNA (1)...(19): siRNA sense strand
gcagguguggcagaaguua

SEQ ID NO: 2209331 - RNA, 19 nt, Homo sapiens
  misc_RNA (1)...(19): siRNA sense strand
ccaaauucuucucucuaga

SEQ ID NO: 2209332 - RNA, 19 nt, Homo sapiens
  misc_RNA (1)...(19): siRNA sense strand
ggaggaggcucugcuugag

SEQ ID NO: 2209333 - RNA, 19 nt, Homo sapiens
  misc_RNA (1)...(19): siRNA sense strand
acagcaaccugcaggauuc

SEQ ID NO: 2209334 - RNA, 19 nt, Homo sapiens
  misc_RNA (1)...(19): siRNA sense strand
gugagccgccugaauguuu

SEQ ID NO: 2209335 - RNA, 19 nt, Homo sapiens
  misc_RNA (1)...(19): siRNA sense strand
gagagguggucccaucaag

SEQ ID NO: 2209336 - RNA, 19 nt, Homo sapiens
  misc_RNA (1)...(19): siRNA sense strand
ucaccacuguuuagcauuc

SEQ ID NO: 2209337 - RNA, 19 nt, Homo sapiens
  misc_RNA (1)...(19): siRNA sense strand
ccaggaggcuucccgaaac

SEQ ID NO: 2209338 - RNA, 19 nt, Homo sapiens
  misc_RNA (1)...(19): siRNA sense strand
gcucgaggcccaucucuag

SEQ ID NO: 2209339 - RNA, 19 nt, Homo sapiens
  misc_RNA (1)...(19): siRNA sense strand
ggagguaguggacaaagau

SEQ ID NO: 2209340 - RNA, 19 nt, Homo sapiens
  misc_RNA (1)...(19): siRNA sense strand
gaaugaagcacuggacauc

SEQ ID NO: 2209341 - RNA, 19 nt, Homo sapiens
  misc_RNA (1)...(19): siRNA sense strand
gcuggaaccucagucaaca

SEQ ID NO: 2209342 - RNA, 19 nt, Homo sapiens
  misc_RNA (1)...(19): siRNA sense strand
ucgcugagcucaaccacau

SEQ ID NO: 2209343 - RNA, 19 nt, Homo sapiens
  misc_RNA (1)...(19): siRNA sense strand
uggcaucuuucccaaggua

SEQ ID NO: 2209344 - RNA, 19 nt, Homo sapiens
  misc_RNA (1)...(19): siRNA sense strand
gagcaacuaucugaauggu

SEQ ID NO: 2209345 - RNA, 19 nt, Homo sapiens
  misc_RNA (1)...(19): siRNA sense strand
uggaggagcgaauggaaua

SEQ ID NO: 2209346 - RNA, 19 nt, Homo sapiens
  misc_RNA (1)...(19): siRNA sense strand
ccacgccuaugccaucuuc

SEQ ID NO: 2209347 - RNA, 19 nt, Homo sapiens
  misc_RNA (1)...(19): siRNA sense strand
cacuaaaugugaccaagga

SEQ ID NO: 2209348 - RNA, 19 nt, Homo sapiens
  misc_RNA (1)...(19): siRNA sense strand
aggaaagucuucagguguu

SEQ ID NO: 2209349 - RNA, 19 nt, Homo sapiens
  misc_RNA (1)...(19): siRNA sense strand
ggaacaucauuggauaaca

SEQ ID NO: 2209350 - RNA, 19 nt, Homo sapiens
  misc_RNA (1)...(19): siRNA sense strand
ccuguacaauuacgaguau

SEQ ID NO: 2209351 - RNA, 19 nt, Homo sapiens
  misc_RNA (1)...(19): siRNA sense strand
gagaugaagauccaguuuc

SEQ ID NO: 2209352 - RNA, 19 nt, Homo sapiens
  misc_RNA (1)...(19): siRNA sense strand
gugggaggcauuucaguuu

SEQ ID NO: 2209353 - RNA, 19 nt, Homo sapiens
  misc_RNA (1)...(19): siRNA sense strand
cgaaccaucaacucagaua

SEQ ID NO: 2209354 - RNA, 19 nt, Homo sapiens
  misc_RNA (1)...(19): siRNA sense strand
gaaccaucaacucagauau

SEQ ID NO: 2209355 - RNA, 19 nt, Homo sapiens
  misc_RNA (1)...(19): siRNA sense strand
ucuggugccugcaacauug

SEQ ID NO: 2209356 - RNA, 19 nt, Homo sapiens
  misc_RNA (1)...(19): siRNA sense strand
ggacucaaaagacgaauuu

SEQ ID NO: 2209357 - RNA, 19 nt, Homo sapiens
  misc_RNA (1)...(19): siRNA sense strand
cuacccgccuauccaaauu

SEQ ID NO: 2209358 - RNA, 19 nt, Homo sapiens
  misc_RNA (1)...(19): siRNA sense strand
auaaaguucugcaugagau

SEQ ID NO: 2209359 - RNA, 19 nt, Homo sapiens
  misc_RNA (1)...(19): siRNA sense strand
ggagcgaauggaauacgua

SEQ ID NO: 2209360 - RNA, 19 nt, Homo sapiens
  misc_RNA (1)...(19): siRNA sense strand
ugaaugaagccaaugaaca

SEQ ID NO: 2209361 - RNA, 19 nt, Homo sapiens
  misc_RNA (1)...(19): siRNA sense strand
gcacaaauaucccacuuua

SEQ ID NO: 2209362 - RNA, 19 nt, Homo sapiens
  misc_RNA (1)...(19): siRNA sense strand
uaaggacccugaagaauua

SEQ ID NO: 2209363 - RNA, 19 nt, Homo sapiens
  misc_RNA (1)...(19): siRNA sense strand
ggagaagucugcacugcua

SEQ ID NO: 2209364 - RNA, 19 nt, Homo sapiens
  misc_RNA (1)...(19): siRNA sense strand
ccacagaaaucacuggaaa

SEQ ID NO: 2209365 - RNA, 19 nt, Homo sapiens
  misc_RNA (1)...(19): siRNA sense strand
ccaaaggcauuaagaaguu

SEQ ID NO: 2209366 - RNA, 19 nt, Homo sapiens
  misc_RNA (1)...(19): siRNA sense strand
gauaaggagucccucauau

SEQ ID NO: 2209367 - RNA, 19 nt, Homo sapiens
  misc_RNA (1)...(19): siRNA sense strand
ccugaaagaugcagaaauu

SEQ ID NO: 2209368 - RNA, 19 nt, Homo sapiens
  misc_RNA (1)...(19): siRNA sense strand
gaagugaaucuguggauaa

SEQ ID NO: 2209369 - RNA, 19 nt, Homo sapiens
  misc_RNA (1)...(19): siRNA sense strand
cccaacagcugccuacaua

SEQ ID NO: 2209370 - RNA, 19 nt, Homo sapiens
  misc_RNA (1)...(19): siRNA sense strand
cagcagcucuccacaguga

SEQ ID NO: 2209371 - RNA, 19 nt, Homo sapiens
  misc_RNA (1)...(19): siRNA sense strand
gaaacucaaugcugcugaa

SEQ ID NO: 2209372 - RNA, 19 nt, Homo sapiens
  misc_RNA (1)...(19): siRNA sense strand
ggaaauuucuacacugaca

SEQ ID NO: 2209373 - RNA, 19 nt, Homo sapiens
  misc_RNA (1)...(19): siRNA sense strand
gaagaacucagucaggaaa

SEQ ID NO: 2209374 - RNA, 19 nt, Homo sapiens
  misc_RNA (1)...(19): siRNA sense strand
uaaaggagauugugauggu

SEQ ID NO: 2209375 - RNA, 19 nt, Homo sapiens
  misc_RNA (1)...(19): siRNA sense strand
gaacgauuuacucuucuua

SEQ ID NO: 2209376 - RNA, 19 nt, Homo sapiens
  misc_RNA (1)...(19): siRNA sense strand
caacagcugccuacauaaa

SEQ ID NO: 2209377 - RNA, 19 nt, Homo sapiens
  misc_RNA (1)...(19): siRNA sense strand
ccacagugcugcuaguaau

SEQ ID NO: 2209378 - RNA, 19 nt, Homo sapiens
  misc_RNA (1)...(19): siRNA sense strand
caggaaauuucuacacuga

SEQ ID NO: 2209379 - RNA, 19 nt, Homo sapiens
  misc_RNA (1)...(19): siRNA sense strand
gaacucagucaggaaauuu

SEQ ID NO: 2209380 - RNA, 19 nt, Homo sapiens
  misc_RNA (1)...(19): siRNA sense strand
agagagagaccaagaaauu

SEQ ID NO: 2209381 - RNA, 19 nt, Homo sapiens
  misc_RNA (1)...(19): siRNA sense strand
ggauaaggagucccucaua

SEQ ID NO: 2209382 - RNA, 19 nt, Homo sapiens
  misc_RNA (1)...(19): siRNA sense strand
gaaaaggagcuaggaauua

SEQ ID NO: 2209383 - RNA, 19 nt, Homo sapiens
  misc_RNA (1)...(19): siRNA sense strand
gcaaguggaacgcuacaaa

SEQ ID NO: 2209384 - RNA, 19 nt, Homo sapiens
  misc_RNA (1)...(19): siRNA sense strand
caaauaaggacccugaaga

SEQ ID NO: 2209385 - RNA, 19 nt, Homo sapiens
  misc_RNA (1)...(19): siRNA sense strand
acaaagaccaguuucauga

SEQ ID NO: 2209386 - RNA, 19 nt, Homo sapiens
  misc_RNA (1)...(19): siRNA sense strand
uaaggagucccucauauug

SEQ ID NO: 2209387 - RNA, 19 nt, Homo sapiens
  misc_RNA (1)...(19): siRNA sense strand
gugcauggcuggaggacuu

SEQ ID NO: 2209388 - RNA, 19 nt, Homo sapiens
  misc_RNA (1)...(19): siRNA sense strand
acacugcuguggucaauga

SEQ ID NO: 2209389 - RNA, 19 nt, Homo sapiens
  misc_RNA (1)...(19): siRNA sense strand
gaaaggaaucaguaugaau

SEQ ID NO: 2209390 - RNA, 19 nt, Homo sapiens
  misc_RNA (1)...(19): siRNA sense strand
gauggaaacuuugcugcuu

SEQ ID NO: 2209391 - RNA, 19 nt, Homo sapiens
  misc_RNA (1)...(19): siRNA sense strand
ggaagugugucuggaagga

SEQ ID NO: 2209392 - RNA, 19 nt, Homo sapiens
  misc_RNA (1)...(19): siRNA sense strand
gagcacaaauaucccacuu

SEQ ID NO: 2209393 - RNA, 19 nt, Homo sapiens
  misc_RNA (1)...(19): siRNA sense strand
gauaaggaccgucggauag

SEQ ID NO: 2209394 - RNA, 19 nt, Homo sapiens
  misc_RNA (1)...(19): siRNA sense strand
gacagcagcucuccacagu

SEQ ID NO: 2209395 - RNA, 19 nt, Homo sapiens
  misc_RNA (1)...(19): siRNA sense strand
gagaaaagcagaggaguua

SEQ ID NO: 2209396 - RNA, 19 nt, Homo sapiens
  misc_RNA (1)...(19): siRNA sense strand
ugaaagccaucaacaccaa

SEQ ID NO: 2209397 - RNA, 19 nt, Homo sapiens
  misc_RNA (1)...(19): siRNA sense strand
ugaaagaugcagaaauuga

SEQ ID NO: 2209398 - RNA, 19 nt, Homo sapiens
  misc_RNA (1)...(19): siRNA sense strand
gugaaucuguggauaagug

SEQ ID NO: 2209399 - RNA, 19 nt, Homo sapiens
  misc_RNA (1)...(19): siRNA sense strand
gaccaggugggacagauua

SEQ ID NO: 2209400 - RNA, 19 nt, Homo sapiens
  misc_RNA (1)...(19): siRNA sense strand
acagacgaaugcugcaaua

SEQ ID NO: 2209401 - RNA, 19 nt, Homo sapiens
  misc_RNA (1)...(19): siRNA sense strand
cuacauaaaggaaugguuu

SEQ ID NO: 2209402 - RNA, 19 nt, Homo sapiens
  misc_RNA (1)...(19): siRNA sense strand
gaucauugcaggcacuaaa

SEQ ID NO: 2209403 - RNA, 19 nt, Homo sapiens
  misc_RNA (1)...(19): siRNA sense strand
ugaaaggaaucaguaugaa

SEQ ID NO: 2209404 - RNA, 19 nt, Homo sapiens
  misc_RNA (1)...(19): siRNA sense strand
caagagaugccuccaagau

SEQ ID NO: 2209405 - RNA, 19 nt, Homo sapiens
  misc_RNA (1)...(19): siRNA sense strand
agagaugccuccaagaugu

SEQ ID NO: 2209406 - RNA, 19 nt, Homo sapiens
  misc_RNA (1)...(19): siRNA sense strand
ggaaucaguaugaauggaa

SEQ ID NO: 2209407 - RNA, 19 nt, Homo sapiens
  misc_RNA (1)...(19): siRNA sense strand
ggaagaagcuuguuuuagc

SEQ ID NO: 2209408 - RNA, 19 nt, Homo sapiens
  misc_RNA (1)...(19): siRNA sense strand
agaacucucucaaucaaug

SEQ ID NO: 2209409 - RNA, 19 nt, Homo sapiens
  misc_RNA (1)...(19): siRNA sense strand
caagaaauucaacgucuga

SEQ ID NO: 2209410 - RNA, 19 nt, Homo sapiens
  misc_RNA (1)...(19): siRNA sense strand
caguaugaauggaagcuaa

SEQ ID NO: 2209411 - RNA, 19 nt, Homo sapiens
  misc_RNA (1)...(19): siRNA sense strand
aaaaggagcuaggaauuaa

SEQ ID NO: 2209412 - RNA, 19 nt, Homo sapiens
  misc_RNA (1)...(19): siRNA sense strand
uaaugaaaccuaccaggaa

SEQ ID NO: 2209413 - RNA, 19 nt, Homo sapiens
  misc_RNA (1)...(19): siRNA sense strand
gaaagaugcagaaauugag

SEQ ID NO: 2209414 - RNA, 19 nt, Homo sapiens
  misc_RNA (1)...(19): siRNA sense strand
cagaggaguuacugcaaga

SEQ ID NO: 2209415 - RNA, 19 nt, Homo sapiens
  misc_RNA (1)...(19): siRNA sense strand
gcacugcuagaccacauuu

SEQ ID NO: 2209416 - RNA, 19 nt, Homo sapiens
  misc_RNA (1)...(19): siRNA sense strand
aaagcucucuuguagucua

SEQ ID NO: 2209417 - RNA, 19 nt, Homo sapiens
  misc_RNA (1)...(19): siRNA sense strand
auaaggacccugaagaauu

SEQ ID NO: 2209418 - RNA, 19 nt, Homo sapiens
  misc_RNA (1)...(19): siRNA sense strand
ugugaacgauuuacucuuc

SEQ ID NO: 2209419 - RNA, 19 nt, Homo sapiens
  misc_RNA (1)...(19): siRNA sense strand
aaagaccaguuucaugaau

SEQ ID NO: 2209420 - RNA, 19 nt, Homo sapiens
  misc_RNA (1)...(19): siRNA sense strand
gcuugaugauauuggcuua

SEQ ID NO: 2209421 - RNA, 19 nt, Homo sapiens
  misc_RNA (1)...(19): siRNA sense strand
ugaaucagguccucagucu

SEQ ID NO: 2209422 - RNA, 19 nt, Homo sapiens
  misc_RNA (1)...(19): siRNA sense strand
agaagugaaucuguggaua

SEQ ID NO: 2209423 - RNA, 19 nt, Homo sapiens
  misc_RNA (1)...(19): siRNA sense strand
ggaaaccagggcucagaaa

SEQ ID NO: 2209424 - RNA, 19 nt, Homo sapiens
  misc_RNA (1)...(19): siRNA sense strand
aaaggaaucaguaugaaug

SEQ ID NO: 2209425 - RNA, 19 nt, Homo sapiens
  misc_RNA (1)...(19): siRNA sense strand
ggacccugaagaauuauuu

SEQ ID NO: 2209426 - RNA, 19 nt, Homo sapiens
  misc_RNA (1)...(19): siRNA sense strand
gagagcuugucccagguaa

SEQ ID NO: 2209427 - RNA, 19 nt, Homo sapiens
  misc_RNA (1)...(19): siRNA sense strand
uuucaugaaucuagaguug

SEQ ID NO: 2209428 - RNA, 19 nt, Homo sapiens
  misc_RNA (1)...(19): siRNA sense strand
aaauaaggacccugaagaa

SEQ ID NO: 2209429 - RNA, 19 nt, Homo sapiens
  misc_RNA (1)...(19): siRNA sense strand
guggaacgcuacaaauaag

SEQ ID NO: 2209430 - RNA, 19 nt, Homo sapiens
  misc_RNA (1)...(19): siRNA sense strand
caaugcugcugaagagaug

SEQ ID NO: 2209431 - RNA, 19 nt, Homo sapiens
  misc_RNA (1)...(19): siRNA sense strand
ccucacagaccaaguagaa

SEQ ID NO: 2209432 - RNA, 19 nt, Homo sapiens
  misc_RNA (1)...(19): siRNA sense strand
guccauggaggccucauua

SEQ ID NO: 2209433 - RNA, 19 nt, Homo sapiens
  misc_RNA (1)...(19): siRNA sense strand
caaagaccaguuucaugaa

SEQ ID NO: 2209434 - RNA, 19 nt, Homo sapiens
  misc_RNA (1)...(19): siRNA sense strand
gagaugccuccaagaugua

SEQ ID NO: 2209435 - RNA, 19 nt, Homo sapiens
  misc_RNA (1)...(19): siRNA sense strand
agagagagcaggaggagaa

SEQ ID NO: 2209436 - RNA, 19 nt, Homo sapiens
  misc_RNA (1)...(19): siRNA sense strand
aaaucaaaguggaagaguu

SEQ ID NO: 2209437 - RNA, 19 nt, Homo sapiens
  misc_RNA (1)...(19): siRNA sense strand
guacaaagaccaguuucau

SEQ ID NO: 2209438 - RNA, 19 nt, Homo sapiens
  misc_RNA (1)...(19): siRNA sense strand
uggagaggcugccaaaucu

SEQ ID NO: 2209439 - RNA, 19 nt, Homo sapiens
  misc_RNA (1)...(19): siRNA sense strand
uaaaacaggugcagaucuu

SEQ ID NO: 2209440 - RNA, 19 nt, Homo sapiens
  misc_RNA (1)...(19): siRNA sense strand
cucaaucaaugaagaagaa

SEQ ID NO: 2209441 - RNA, 19 nt, Homo sapiens
  misc_RNA (1)...(19): siRNA sense strand
cgacacugcuguggucaau

SEQ ID NO: 2209442 - RNA, 19 nt, Homo sapiens
  misc_RNA (1)...(19): siRNA sense strand
ccaccuccauugccacaga

SEQ ID NO: 2209443 - RNA, 19 nt, Homo sapiens
  misc_RNA (1)...(19): siRNA sense strand
uaaaggaaugguuugaaga

SEQ ID NO: 2209444 - RNA, 19 nt, Homo sapiens
  misc_RNA (1)...(19): siRNA sense strand
gagggagguuucagcaagu

SEQ ID NO: 2209445 - RNA, 19 nt, Homo sapiens
  misc_RNA (1)...(19): siRNA sense strand
gaaucgacggacuacauuu

SEQ ID NO: 2209446 - RNA, 19 nt, Homo sapiens
  misc_RNA (1)...(19): siRNA sense strand
ugcaauaccuaacugugaa

SEQ ID NO: 2209447 - RNA, 19 nt, Homo sapiens
  misc_RNA (1)...(19): siRNA sense strand
ggaaaaggagcuaggaauu

SEQ ID NO: 2209448 - RNA, 19 nt, Homo sapiens
  misc_RNA (1)...(19): siRNA sense strand
uggaagaguuggaaaauga

SEQ ID NO: 2209449 - RNA, 19 nt, Homo sapiens
  misc_RNA (1)...(19): siRNA sense strand
ucacacuucggaaacauaa

SEQ ID NO: 2209450 - RNA, 19 nt, Homo sapiens
  misc_RNA (1)...(19): siRNA sense strand
gccaaggaaacuaggauuu

SEQ ID NO: 2209451 - RNA, 19 nt, Homo sapiens
  misc_RNA (1)...(19): siRNA sense strand
caucaucucagcaucaaau

SEQ ID NO: 2209452 - RNA, 19 nt, Homo sapiens
  misc_RNA (1)...(19): siRNA sense strand
auaaaggaaugguuugaag

SEQ ID NO: 2209453 - RNA, 19 nt, Homo sapiens
  misc_RNA (1)...(19): siRNA sense strand
gcugagagacacagaaagu

SEQ ID NO: 2209454 - RNA, 19 nt, Homo sapiens
  misc_RNA (1)...(19): siRNA sense strand
gaacucucucaaucaauga

SEQ ID NO: 2209455 - RNA, 19 nt, Homo sapiens
  misc_RNA (1)...(19): siRNA sense strand
aaguggaacgcuacaaaua

SEQ ID NO: 2209456 - RNA, 19 nt, Homo sapiens
  misc_RNA (1)...(19): siRNA sense strand
cgaaugcugcaauaccuaa

SEQ ID NO: 2209457 - RNA, 19 nt, Homo sapiens
  misc_RNA (1)...(19): siRNA sense strand
gcagugaaagccaucaaca

SEQ ID NO: 2209458 - RNA, 19 nt, Homo sapiens
  misc_RNA (1)...(19): siRNA sense strand
gaagaagcuuguuuuagca

SEQ ID NO: 2209459 - RNA, 19 nt, Homo sapiens
  misc_RNA (1)...(19): siRNA sense strand
ggacuccaagggacagaaa

SEQ ID NO: 2209460 - RNA, 19 nt, Homo sapiens
  misc_RNA (1)...(19): siRNA sense strand
gggccaagacucucuagga

SEQ ID NO: 2209461 - RNA, 19 nt, Homo sapiens
  misc_RNA (1)...(19): siRNA sense strand
gcaaagagcugauuguguu

SEQ ID NO: 2209462 - RNA, 19 nt, Homo sapiens
  misc_RNA (1)...(19): siRNA sense strand
gaacacaggugcagacaug

SEQ ID NO: 2209463 - RNA, 19 nt, Homo sapiens
  misc_RNA (1)...(19): siRNA sense strand
gaaaugcuauccaaacuuc

SEQ ID NO: 2209464 - RNA, 19 nt, Homo sapiens
  misc_RNA (1)...(19): siRNA sense strand
gaccuuagcuuaacaguuc

SEQ ID NO: 2209465 - RNA, 19 nt, Homo sapiens
  misc_RNA (1)...(19): siRNA sense strand
ugaaugagcugaacaaaca

SEQ ID NO: 2209466 - RNA, 19 nt, Homo sapiens
  misc_RNA (1)...(19): siRNA sense strand
cuacacagguggcacauaa

SEQ ID NO: 2209467 - RNA, 19 nt, Homo sapiens
  misc_RNA (1)...(19): siRNA sense strand
cauaaugcaucacaaguuu

SEQ ID NO: 2209468 - RNA, 19 nt, Homo sapiens
  misc_RNA (1)...(19): siRNA sense strand
gugcagacauguugaagaa

SEQ ID NO: 2209469 - RNA, 19 nt, Homo sapiens
  misc_RNA (1)...(19): siRNA sense strand
gaagugaagcaucagcaua

SEQ ID NO: 2209470 - RNA, 19 nt, Homo sapiens
  misc_RNA (1)...(19): siRNA sense strand
gcagacauguugaagaagu

SEQ ID NO: 2209471 - RNA, 19 nt, Homo sapiens
  misc_RNA (1)...(19): siRNA sense strand
gagcaucccuccaguuucu

SEQ ID NO: 2209472 - RNA, 19 nt, Homo sapiens
  misc_RNA (1)...(19): siRNA sense strand
ucucuuggcugcauaacua

SEQ ID NO: 2209473 - RNA, 19 nt, Homo sapiens
  misc_RNA (1)...(19): siRNA sense strand
gaccaaaucuccucagcau

SEQ ID NO: 2209474 - RNA, 19 nt, Homo sapiens
  misc_RNA (1)...(19): siRNA sense strand
gcacuccucuccaaaugug

SEQ ID NO: 2209475 - RNA, 19 nt, Homo sapiens
  misc_RNA (1)...(19): siRNA sense strand
gagaagagggcagcacaua

SEQ ID NO: 2209476 - RNA, 19 nt, Homo sapiens
  misc_RNA (1)...(19): siRNA sense strand
cauaagaaauccagucuac

SEQ ID NO: 2209477 - RNA, 19 nt, Homo sapiens
  misc_RNA (1)...(19): siRNA sense strand
gaagagggcagcacauauc

SEQ ID NO: 2209478 - RNA, 19 nt, Homo sapiens
  misc_RNA (1)...(19): siRNA sense strand
guucugagaccacuaauga

SEQ ID NO: 2209479 - RNA, 19 nt, Homo sapiens
  misc_RNA (1)...(19): siRNA sense strand
ccaagaugguucugaugaa

SEQ ID NO: 2209480 - RNA, 19 nt, Homo sapiens
  misc_RNA (1)...(19): siRNA sense strand
uuugaaagauggaaaguga

SEQ ID NO: 2209481 - RNA, 19 nt, Homo sapiens
  misc_RNA (1)...(19): siRNA sense strand
gaacauggacauaaugcau

SEQ ID NO: 2209482 - RNA, 19 nt, Homo sapiens
  misc_RNA (1)...(19): siRNA sense strand
gcaaauugaggacaggauu

SEQ ID NO: 2209483 - RNA, 19 nt, Homo sapiens
  misc_RNA (1)...(19): siRNA sense strand
uggcaagccuggcaaguga

SEQ ID NO: 2209484 - RNA, 19 nt, Homo sapiens
  misc_RNA (1)...(19): siRNA sense strand
caagaugguucugaugaau

SEQ ID NO: 2209485 - RNA, 19 nt, Homo sapiens
  misc_RNA (1)...(19): siRNA sense strand
gcagugugcuccucaucug

SEQ ID NO: 2209486 - RNA, 19 nt, Homo sapiens
  misc_RNA (1)...(19): siRNA sense strand
aaacuuccuuuguucauca

SEQ ID NO: 2209487 - RNA, 19 nt, Homo sapiens
  misc_RNA (1)...(19): siRNA sense strand
gggaaaugcuauccaaacu

SEQ ID NO: 2209488 - RNA, 19 nt, Homo sapiens
  misc_RNA (1)...(19): siRNA sense strand
gccaggaacugcucugagu

SEQ ID NO: 2209489 - RNA, 19 nt, Homo sapiens
  misc_RNA (1)...(19): siRNA sense strand
ggagaaugcucuguguaag

SEQ ID NO: 2209490 - RNA, 19 nt, Homo sapiens
  misc_RNA (1)...(19): siRNA sense strand
cagagcaucccuccaguuu

SEQ ID NO: 2209491 - RNA, 19 nt, Homo sapiens
  misc_RNA (1)...(19): siRNA sense strand
ccaacacucuggagaugga

SEQ ID NO: 2209492 - RNA, 19 nt, Homo sapiens
  misc_RNA (1)...(19): siRNA sense strand
ggaaaugcuauccaaacuu

SEQ ID NO: 2209493 - RNA, 19 nt, Homo sapiens
  misc_RNA (1)...(19): siRNA sense strand
ugucugaguucuuugauuc

SEQ ID NO: 2209494 - RNA, 19 nt, Homo sapiens
  misc_RNA (1)...(19): siRNA sense strand
aaccaugucugaguucuuu

SEQ ID NO: 2209495 - RNA, 19 nt, Homo sapiens
  misc_RNA (1)...(19): siRNA sense strand
ccggagacuucaccuugua

SEQ ID NO: 2209496 - RNA, 19 nt, Homo sapiens
  misc_RNA (1)...(19): siRNA sense strand
cagcacuccucuccaaaug

SEQ ID NO: 2209497 - RNA, 19 nt, Homo sapiens
  misc_RNA (1)...(19): siRNA sense strand
ggacauaaugcaucacaag

SEQ ID NO: 2209498 - RNA, 19 nt, Homo sapiens
  misc_RNA (1)...(19): siRNA sense strand
uugagcaugugcagaauuu

SEQ ID NO: 2209499 - RNA, 19 nt, Homo sapiens
  misc_RNA (1)...(19): siRNA sense strand
cuccaaauguggugagaaa

SEQ ID NO: 2209500 - RNA, 19 nt, Homo sapiens
  misc_RNA (1)...(19): siRNA sense strand
agaugguucugaugaauga

SEQ ID NO: 2209501 - RNA, 19 nt, Homo sapiens
  misc_RNA (1)...(19): siRNA sense strand
ccaaaucuccucagcaucu

SEQ ID NO: 2209502 - RNA, 19 nt, Homo sapiens
  misc_RNA (1)...(19): siRNA sense strand
gccaagaugguucugauga

SEQ ID NO: 2209503 - RNA, 19 nt, Homo sapiens
  misc_RNA (1)...(19): siRNA sense strand
caaauguggugagaaagca

SEQ ID NO: 2209504 - RNA, 19 nt, Homo sapiens
  misc_RNA (1)...(19): siRNA sense strand
uggaggaaaugcagaagga

SEQ ID NO: 2209505 - RNA, 19 nt, Homo sapiens
  misc_RNA (1)...(19): siRNA sense strand
gagcaugugcagaauuuca

SEQ ID NO: 2209506 - RNA, 19 nt, Homo sapiens
  misc_RNA (1)...(19): siRNA sense strand
ugcccaaccugauaaguga

SEQ ID NO: 2209507 - RNA, 19 nt, Homo sapiens
  misc_RNA (1)...(19): siRNA sense strand
gcuauucugugagacaugu

SEQ ID NO: 2209508 - RNA, 19 nt, Homo sapiens
  misc_RNA (1)...(19): siRNA sense strand
uagcuuaacaguucugaga

SEQ ID NO: 2209509 - RNA, 19 nt, Homo sapiens
  misc_RNA (1)...(19): siRNA sense strand
uggagaaugcucuguguaa

SEQ ID NO: 2209510 - RNA, 19 nt, Homo sapiens
  misc_RNA (1)...(19): siRNA sense strand
uacugaagguggacaaaug

SEQ ID NO: 2209511 - RNA, 19 nt, Homo sapiens
  misc_RNA (1)...(19): siRNA sense strand
cugcauaacuacugaaggu

SEQ ID NO: 2209512 - RNA, 19 nt, Homo sapiens
  misc_RNA (1)...(19): siRNA sense strand
gaaagcggaagcuggaaca

SEQ ID NO: 2209513 - RNA, 19 nt, Homo sapiens
  misc_RNA (1)...(19): siRNA sense strand
uaagaaauccagucuacag

SEQ ID NO: 2209514 - RNA, 19 nt, Homo sapiens
  misc_RNA (1)...(19): siRNA sense strand
ccacuaaugacaaccaugu

SEQ ID NO: 2209515 - RNA, 19 nt, Homo sapiens
  misc_RNA (1)...(19): siRNA sense strand
ggaaguacucaagcuauuc

SEQ ID NO: 2209516 - RNA, 19 nt, Homo sapiens
  misc_RNA (1)...(19): siRNA sense strand
uaaugcaucacaaguuuga

SEQ ID NO: 2209517 - RNA, 19 nt, Homo sapiens
  misc_RNA (1)...(19): siRNA sense strand
ucucagaacauggacauaa

SEQ ID NO: 2209518 - RNA, 19 nt, Homo sapiens
  misc_RNA (1)...(19): siRNA sense strand
gugcagaauuucaucaacu

SEQ ID NO: 2209519 - RNA, 19 nt, Homo sapiens
  misc_RNA (1)...(19): siRNA sense strand
acagguggcacauaagaaa

SEQ ID NO: 2209520 - RNA, 19 nt, Homo sapiens
  misc_RNA (1)...(19): siRNA sense strand
gaaguacucaagcuauucu

SEQ ID NO: 2209521 - RNA, 19 nt, Homo sapiens
  misc_RNA (1)...(19): siRNA sense strand
gcagagcaucccuccaguu

SEQ ID NO: 2209522 - RNA, 19 nt, Homo sapiens
  misc_RNA (1)...(19): siRNA sense strand
aggaaguacucaagcuauu

SEQ ID NO: 2209523 - RNA, 19 nt, Homo sapiens
  misc_RNA (1)...(19): siRNA sense strand
gcagaaggacuuggagcuu

SEQ ID NO: 2209524 - RNA, 19 nt, Homo sapiens
  misc_RNA (1)...(19): siRNA sense strand
gaagcucagucacuuucag

SEQ ID NO: 2209525 - RNA, 19 nt, Homo sapiens
  misc_RNA (1)...(19): siRNA sense strand
caaagagcugauuguguuu

SEQ ID NO: 2209526 - RNA, 19 nt, Homo sapiens
  misc_RNA (1)...(19): siRNA sense strand
cagacauguugaagaaguu

SEQ ID NO: 2209527 - RNA, 19 nt, Homo sapiens
  misc_RNA (1)...(19): siRNA sense strand
guauuguccucuacacaca

SEQ ID NO: 2209528 - RNA, 19 nt, Homo sapiens
  misc_RNA (1)...(19): siRNA sense strand
gagacuucaccuuguauug

SEQ ID NO: 2209529 - RNA, 19 nt, Homo sapiens
  misc_RNA (1)...(19): siRNA sense strand
guccaugcccaaccugaua

SEQ ID NO: 2209530 - RNA, 19 nt, Homo sapiens
  misc_RNA (1)...(19): siRNA sense strand
cagcccagccugcaacuga

SEQ ID NO: 2209531 - RNA, 19 nt, Homo sapiens
  misc_RNA (1)...(19): siRNA sense strand
aguuugagcuggaggaaau

SEQ ID NO: 2209532 - RNA, 19 nt, Homo sapiens
  misc_RNA (1)...(19): siRNA sense strand
ggcccugccuguucucaga

SEQ ID NO: 2209533 - RNA, 19 nt, Homo sapiens
  misc_RNA (1)...(19): siRNA sense strand
caccuuguauuguccucua

SEQ ID NO: 2209534 - RNA, 19 nt, Homo sapiens
  misc_RNA (1)...(19): siRNA sense strand
gcaguuacagagcaucaug

SEQ ID NO: 2209535 - RNA, 19 nt, Homo sapiens
  misc_RNA (1)...(19): siRNA sense strand
ugaagcaucagcauaggaa

SEQ ID NO: 2209536 - RNA, 19 nt, Homo sapiens
  misc_RNA (1)...(19): siRNA sense strand
uacucaagcuauucuguga

SEQ ID NO: 2209537 - RNA, 19 nt, Homo sapiens
  misc_RNA (1)...(19): siRNA sense strand
ucgcuucacugacuuacug

SEQ ID NO: 2209538 - RNA, 19 nt, Homo sapiens
  misc_RNA (1)...(19): siRNA sense strand
gagccugugucccagagau

SEQ ID NO: 2209539 - RNA, 19 nt, Homo sapiens
  misc_RNA (1)...(19): siRNA sense strand
ggaaaugcagaaggacuug

SEQ ID NO: 2209540 - RNA, 19 nt, Homo sapiens
  misc_RNA (1)...(19): siRNA sense strand
acaggccaaugggcuaaua

SEQ ID NO: 2209541 - RNA, 19 nt, Homo sapiens
  misc_RNA (1)...(19): siRNA sense strand
gcucugagugcaaggagaa

SEQ ID NO: 2209542 - RNA, 19 nt, Homo sapiens
  misc_RNA (1)...(19): siRNA sense strand
ggagacuucaccuuguauu

SEQ ID NO: 2209543 - RNA, 19 nt, Homo sapiens
  misc_RNA (1)...(19): siRNA sense strand
caaaucuccucagcaucuu

SEQ ID NO: 2209544 - RNA, 19 nt, Homo sapiens
  misc_RNA (1)...(19): siRNA sense strand
guucucaaccgucaguuug

SEQ ID NO: 2209545 - RNA, 19 nt, Homo sapiens
  misc_RNA (1)...(19): siRNA sense strand
gacuucaccuuguauuguc

SEQ ID NO: 2209546 - RNA, 19 nt, Homo sapiens
  misc_RNA (1)...(19): siRNA sense strand
agaaugcucuguguaaggu

SEQ ID NO: 2209547 - RNA, 19 nt, Homo sapiens
  misc_RNA (1)...(19): siRNA sense strand
cagaugcuccugcuuaugg

SEQ ID NO: 2209548 - RNA, 19 nt, Homo sapiens
  misc_RNA (1)...(19): siRNA sense strand
ggauuccacucgcuucacu

SEQ ID NO: 2209549 - RNA, 19 nt, Homo sapiens
  misc_RNA (1)...(19): siRNA sense strand
ggacccuuauucugaccuu

SEQ ID NO: 2209550 - RNA, 19 nt, Homo sapiens
  misc_RNA (1)...(19): siRNA sense strand
acacagguggcacauaaga

SEQ ID NO: 2209551 - RNA, 19 nt, Homo sapiens
  misc_RNA (1)...(19): siRNA sense strand
ugaguucuuugauucuugu

SEQ ID NO: 2209552 - RNA, 19 nt, Homo sapiens
  misc_RNA (1)...(19): siRNA sense strand
gagaaugcucuguguaagg

SEQ ID NO: 2209553 - RNA, 19 nt, Homo sapiens
  misc_RNA (1)...(19): siRNA sense strand
ggucaucacccuuuuauca

SEQ ID NO: 2209554 - RNA, 19 nt, Homo sapiens
  misc_RNA (1)...(19): siRNA sense strand
caucugcaaagcaaauuga

SEQ ID NO: 2209555 - RNA, 19 nt, Homo sapiens
  misc_RNA (1)...(19): siRNA sense strand
gaugaaugagcugaacaaa

SEQ ID NO: 2209556 - RNA, 19 nt, Homo sapiens
  misc_RNA (1)...(19): siRNA sense strand
ccacugggacccuuauucu

SEQ ID NO: 2209557 - RNA, 19 nt, Homo sapiens
  misc_RNA (1)...(19): siRNA sense strand
ggaagaaaccccucucagu

SEQ ID NO: 2209558 - RNA, 19 nt, Homo sapiens
  misc_RNA (1)...(19): siRNA sense strand
acauggacauaaugcauca

SEQ ID NO: 2209559 - RNA, 19 nt, Homo sapiens
  misc_RNA (1)...(19): siRNA sense strand
agucucgccuucccucaaa

SEQ ID NO: 2209560 - RNA, 19 nt, Homo sapiens
  misc_RNA (1)...(19): siRNA sense strand
aaugcucuguguaagguaa

SEQ ID NO: 2209561 - RNA, 19 nt, Homo sapiens
  misc_RNA (1)...(19): siRNA sense strand
gaaaggaucuggagucaug

SEQ ID NO: 2209562 - RNA, 19 nt, Homo sapiens
  misc_RNA (1)...(19): siRNA sense strand
gcacaaaccuauuaugaga

SEQ ID NO: 2209563 - RNA, 19 nt, Homo sapiens
  misc_RNA (1)...(19): siRNA sense strand
ccaaauggcugguggagua

SEQ ID NO: 2209564 - RNA, 19 nt, Homo sapiens
  misc_RNA (1)...(19): siRNA sense strand
gauuacagcucucauguuu

SEQ ID NO: 2209565 - RNA, 19 nt, Homo sapiens
  misc_RNA (1)...(19): siRNA sense strand
gcaaaucguuucacucaga

SEQ ID NO: 2209566 - RNA, 19 nt, Homo sapiens
  misc_RNA (1)...(19): siRNA sense strand
gagaauguguuucagcuuu

SEQ ID NO: 2209567 - RNA, 19 nt, Homo sapiens
  misc_RNA (1)...(19): siRNA sense strand
aagaagaacucaggauuua

SEQ ID NO: 2209568 - RNA, 19 nt, Homo sapiens
  misc_RNA (1)...(19): siRNA sense strand
gaagaagaacucaggauuu

SEQ ID NO: 2209569 - RNA, 19 nt, Homo sapiens
  misc_RNA (1)...(19): siRNA sense strand
gaagagaacacccugauug

SEQ ID NO: 2209570 - RNA, 19 nt, Homo sapiens
  misc_RNA (1)...(19): siRNA sense strand
caauaaggaucucaaaguu

SEQ ID NO: 2209571 - RNA, 19 nt, Homo sapiens
  misc_RNA (1)...(19): siRNA sense strand
ggucccaccuguuacauua

SEQ ID NO: 2209572 - RNA, 19 nt, Homo sapiens
  misc_RNA (1)...(19): siRNA sense strand
gaacaccugcguuuagaua

SEQ ID NO: 2209573 - RNA, 19 nt, Homo sapiens
  misc_RNA (1)...(19): siRNA sense strand
cgaaagggcuggcauucaa

SEQ ID NO: 2209574 - RNA, 19 nt, Homo sapiens
  misc_RNA (1)...(19): siRNA sense strand
cagcuucucuccugcauuu

SEQ ID NO: 2209575 - RNA, 19 nt, Homo sapiens
  misc_RNA (1)...(19): siRNA sense strand
gaucaaagaccauacacuu

SEQ ID NO: 2209576 - RNA, 19 nt, Homo sapiens
  misc_RNA (1)...(19): siRNA sense strand
ccaauuccaugccuuuauu

SEQ ID NO: 2209577 - RNA, 19 nt, Homo sapiens
  misc_RNA (1)...(19): siRNA sense strand
ugaagcagcuccucucaga

SEQ ID NO: 2209578 - RNA, 19 nt, Homo sapiens
  misc_RNA (1)...(19): siRNA sense strand
gagaagaacauucaaaucu

SEQ ID NO: 2209579 - RNA, 19 nt, Homo sapiens
  misc_RNA (1)...(19): siRNA sense strand
cggcaaggauggcaaguuu

SEQ ID NO: 2209580 - RNA, 19 nt, Homo sapiens
  misc_RNA (1)...(19): siRNA sense strand
gcacaaugcugaguaugau

SEQ ID NO: 2209581 - RNA, 19 nt, Homo sapiens
  misc_RNA (1)...(19): siRNA sense strand
gcaauaaggaucucaaagu

SEQ ID NO: 2209582 - RNA, 19 nt, Homo sapiens
  misc_RNA (1)...(19): siRNA sense strand
gcaauaagaccaagaggau

SEQ ID NO: 2209583 - RNA, 19 nt, Homo sapiens
  misc_RNA (1)...(19): siRNA sense strand
ggaaagaucggcagaagca

SEQ ID NO: 2209584 - RNA, 19 nt, Homo sapiens
  misc_RNA (1)...(19): siRNA sense strand
gagcagacaccauugagaa

SEQ ID NO: 2209585 - RNA, 19 nt, Homo sapiens
  misc_RNA (1)...(19): siRNA sense strand
ggauggcucucggacauuu

SEQ ID NO: 2209586 - RNA, 19 nt, Homo sapiens
  misc_RNA (1)...(19): siRNA sense strand
gaacguaggaagucugaug

SEQ ID NO: 2209587 - RNA, 19 nt, Homo sapiens
  misc_RNA (1)...(19): siRNA sense strand
ugaccaagaugcaguagga

SEQ ID NO: 2209588 - RNA, 19 nt, Homo sapiens
  misc_RNA (1)...(19): siRNA sense strand
ccuacgagcuucuuaagga

SEQ ID NO: 2209589 - RNA, 19 nt, Homo sapiens
  misc_RNA (1)...(19): siRNA sense strand
gaggauggcucucggacau

SEQ ID NO: 2209590 - RNA, 19 nt, Homo sapiens
  misc_RNA (1)...(19): siRNA sense strand
ucuaucaccuccugucuuu

SEQ ID NO: 2209591 - RNA, 19 nt, Homo sapiens
  misc_RNA (1)...(19): siRNA sense strand
gcaguaggaaugcuaugua

SEQ ID NO: 2209592 - RNA, 19 nt, Homo sapiens
  misc_RNA (1)...(19): siRNA sense strand
guacauacaggcuucuaaa

SEQ ID NO: 2209593 - RNA, 19 nt, Homo sapiens
  misc_RNA (1)...(19): siRNA sense strand
ucccuaagcugcagucuga

SEQ ID NO: 2209594 - RNA, 19 nt, Homo sapiens
  misc_RNA (1)...(19): siRNA sense strand
ccaaugagcuuccccuauu

SEQ ID NO: 2209595 - RNA, 19 nt, Homo sapiens
  misc_RNA (1)...(19): siRNA sense strand
gaggaaaacuggcauacaa

SEQ ID NO: 2209596 - RNA, 19 nt, Homo sapiens
  misc_RNA (1)...(19): siRNA sense strand
gcaauucacccacauuuac

SEQ ID NO: 2209597 - RNA, 19 nt, Homo sapiens
  misc_RNA (1)...(19): siRNA sense strand
gcaugucuaugucccuauu

SEQ ID NO: 2209598 - RNA, 19 nt, Homo sapiens
  misc_RNA (1)...(19): siRNA sense strand
auaaggaucucaaaguuca

SEQ ID NO: 2209599 - RNA, 19 nt, Homo sapiens
  misc_RNA (1)...(19): siRNA sense strand
gcacugaucaaagaccaua

SEQ ID NO: 2209600 - RNA, 19 nt, Homo sapiens
  misc_RNA (1)...(19): siRNA sense strand
ggaaucccuuugaccaaga

SEQ ID NO: 2209601 - RNA, 19 nt, Homo sapiens
  misc_RNA (1)...(19): siRNA sense strand
agacacagaucaugcagau

SEQ ID NO: 2209602 - RNA, 19 nt, Homo sapiens
  misc_RNA (1)...(19): siRNA sense strand
gacaagaucaggcuguuga

SEQ ID NO: 2209603 - RNA, 19 nt, Homo sapiens
  misc_RNA (1)...(19): siRNA sense strand
gguauuugauucccgaguu

SEQ ID NO: 2209604 - RNA, 19 nt, Homo sapiens
  misc_RNA (1)...(19): siRNA sense strand
gacaaccacuucauugagu

SEQ ID NO: 2209605 - RNA, 19 nt, Homo sapiens
  misc_RNA (1)...(19): siRNA sense strand
gaagauuggacaagggaaa

SEQ ID NO: 2209606 - RNA, 19 nt, Homo sapiens
  misc_RNA (1)...(19): siRNA sense strand
gcaaggauggcaaguuuca

SEQ ID NO: 2209607 - RNA, 19 nt, Homo sapiens
  misc_RNA (1)...(19): siRNA sense strand
cugaaggaaugccgcaaua

SEQ ID NO: 2209608 - RNA, 19 nt, Homo sapiens
  misc_RNA (1)...(19): siRNA sense strand
ccagaggacuugccacagu

SEQ ID NO: 2209609 - RNA, 19 nt, Homo sapiens
  misc_RNA (1)...(19): siRNA sense strand
ucacugcaaucaacaauac

SEQ ID NO: 2209610 - RNA, 19 nt, Homo sapiens
  misc_RNA (1)...(19): siRNA sense strand
ucaaugccgucgauuacuu

SEQ ID NO: 2209611 - RNA, 19 nt, Homo sapiens
  misc_RNA (1)...(19): siRNA sense strand
gaaggaaugccgcaauaag

SEQ ID NO: 2209612 - RNA, 19 nt, Homo sapiens
  misc_RNA (1)...(19): siRNA sense strand
cagaacaccugcguuuaga

SEQ ID NO: 2209613 - RNA, 19 nt, Homo sapiens
  misc_RNA (1)...(19): siRNA sense strand
acacagaacaccugcguuu

SEQ ID NO: 2209614 - RNA, 19 nt, Homo sapiens
  misc_RNA (1)...(19): siRNA sense strand
ucagauguuugcagauuau

SEQ ID NO: 2209615 - RNA, 19 nt, Homo sapiens
  misc_RNA (1)...(19): siRNA sense strand
ucagugugaugaagaagaa

SEQ ID NO: 2209616 - RNA, 19 nt, Homo sapiens
  misc_RNA (1)...(19): siRNA sense strand
accaaugucuucacaacua

SEQ ID NO: 2209617 - RNA, 19 nt, Homo sapiens
  misc_RNA (1)...(19): siRNA sense strand
gaaguagucccugaggaaa

SEQ ID NO: 2209618 - RNA, 19 nt, Homo sapiens
  misc_RNA (1)...(19): siRNA sense strand
cggacgagcugucggcauu

SEQ ID NO: 2209619 - RNA, 19 nt, Homo sapiens
  misc_RNA (1)...(19): siRNA sense strand
ucacugcacacauguauga

SEQ ID NO: 2209620 - RNA, 19 nt, Homo sapiens
  misc_RNA (1)...(19): siRNA sense strand
caacagggagcaaaugcaa

SEQ ID NO: 2209621 - RNA, 19 nt, Homo sapiens
  misc_RNA (1)...(19): siRNA sense strand
gaccauacacuugucaauu

SEQ ID NO: 2209622 - RNA, 19 nt, Homo sapiens
  misc_RNA (1)...(19): siRNA sense strand
ccaggaaugugcuagagau

SEQ ID NO: 2209623 - RNA, 19 nt, Homo sapiens
  misc_RNA (1)...(19): siRNA sense strand
ggaagagaacacccugauu

SEQ ID NO: 2209624 - RNA, 19 nt, Homo sapiens
  misc_RNA (1)...(19): siRNA sense strand
ccagaccaauuggaaguuu

SEQ ID NO: 2209625 - RNA, 19 nt, Homo sapiens
  misc_RNA (1)...(19): siRNA sense strand
ggacauugacaaccacuuc

SEQ ID NO: 2209626 - RNA, 19 nt, Homo sapiens
  misc_RNA (1)...(19): siRNA sense strand
acacagaucaugcagauuc

SEQ ID NO: 2209627 - RNA, 19 nt, Homo sapiens
  misc_RNA (1)...(19): siRNA sense strand
ucaggaauacuucuugauu

SEQ ID NO: 2209628 - RNA, 19 nt, Homo sapiens
  misc_RNA (1)...(19): siRNA sense strand
ugaagaagaacucaggauu

SEQ ID NO: 2209629 - RNA, 19 nt, Homo sapiens
  misc_RNA (1)...(19): siRNA sense strand
ucaaagaccauacacuugu

SEQ ID NO: 2209630 - RNA, 19 nt, Homo sapiens
  misc_RNA (1)...(19): siRNA sense strand
gaacuucugccgauuuguc

SEQ ID NO: 2209631 - RNA, 19 nt, Homo sapiens
  misc_RNA (1)...(19): siRNA sense strand
cagacaccauugagaagaa

SEQ ID NO: 2209632 - RNA, 19 nt, Homo sapiens
  misc_RNA (1)...(19): siRNA sense strand
ggugccagcccuuucauuu

SEQ ID NO: 2209633 - RNA, 19 nt, Homo sapiens
  misc_RNA (1)...(19): siRNA sense strand
caguaggaaugcuauguau

SEQ ID NO: 2209634 - RNA, 19 nt, Homo sapiens
  misc_RNA (1)...(19): siRNA sense strand
uaugagacauuagagaaga

SEQ ID NO: 2209635 - RNA, 19 nt, Homo sapiens
  misc_RNA (1)...(19): siRNA sense strand
aagcacaaaccuauuauga

SEQ ID NO: 2209636 - RNA, 19 nt, Homo sapiens
  misc_RNA (1)...(19): siRNA sense strand
ggaaugugcuagagaugac

SEQ ID NO: 2209637 - RNA, 19 nt, Homo sapiens
  misc_RNA (1)...(19): siRNA sense strand
cugaggaucucccugauuc

SEQ ID NO: 2209638 - RNA, 19 nt, Homo sapiens
  misc_RNA (1)...(19): siRNA sense strand
uagagggccugcugaagga

SEQ ID NO: 2209639 - RNA, 19 nt, Homo sapiens
  misc_RNA (1)...(19): siRNA sense strand
gcugcagucugauguacuu

SEQ ID NO: 2209640 - RNA, 19 nt, Homo sapiens
  misc_RNA (1)...(19): siRNA sense strand
uagaugcuccuguuccaua

SEQ ID NO: 2209641 - RNA, 19 nt, Homo sapiens
  misc_RNA (1)...(19): siRNA sense strand
cuugagagcuacauauaca

SEQ ID NO: 2209642 - RNA, 19 nt, Homo sapiens
  misc_RNA (1)...(19): siRNA sense strand
ccaaugucuucacaacuau

SEQ ID NO: 2209643 - RNA, 19 nt, Homo sapiens
  misc_RNA (1)...(19): siRNA sense strand
cacauuuacuugacaugaa

SEQ ID NO: 2209644 - RNA, 19 nt, Homo sapiens
  misc_RNA (1)...(19): siRNA sense strand
cagaggacuugccacaguu

SEQ ID NO: 2209645 - RNA, 19 nt, Homo sapiens
  misc_RNA (1)...(19): siRNA sense strand
uuccaugccuuuauuauca

SEQ ID NO: 2209646 - RNA, 19 nt, Homo sapiens
  misc_RNA (1)...(19): siRNA sense strand
caaagaccauacacuuguc

SEQ ID NO: 2209647 - RNA, 19 nt, Homo sapiens
  misc_RNA (1)...(19): siRNA sense strand
agccagagaucaccuccua

SEQ ID NO: 2209648 - RNA, 19 nt, Homo sapiens
  misc_RNA (1)...(19): siRNA sense strand
ucacaggacauaccuacaa

SEQ ID NO: 2209649 - RNA, 19 nt, Homo sapiens
  misc_RNA (1)...(19): siRNA sense strand
ccucaguaccucaggaaua

SEQ ID NO: 2209650 - RNA, 19 nt, Homo sapiens
  misc_RNA (1)...(19): siRNA sense strand
cuuauggucccaccuguua

SEQ ID NO: 2209651 - RNA, 19 nt, Homo sapiens
  misc_RNA (1)...(19): siRNA sense strand
ggagaaguacauccaggaa

SEQ ID NO: 2209652 - RNA, 19 nt, Homo sapiens
  misc_RNA (1)...(19): siRNA sense strand
guauuugauucccgaguug

SEQ ID NO: 2209653 - RNA, 19 nt, Homo sapiens
  misc_RNA (1)...(19): siRNA sense strand
caucuuucauugacaacaa

SEQ ID NO: 2209654 - RNA, 19 nt, Homo sapiens
  misc_RNA (1)...(19): siRNA sense strand
gcagugagagugccuccaa

SEQ ID NO: 2209655 - RNA, 19 nt, Homo sapiens
  misc_RNA (1)...(19): siRNA sense strand
ucucauggcauuuggaauu

SEQ ID NO: 2209656 - RNA, 19 nt, Homo sapiens
  misc_RNA (1)...(19): siRNA sense strand
gccaacccauggaucugua

SEQ ID NO: 2209657 - RNA, 19 nt, Homo sapiens
  misc_RNA (1)...(19): siRNA sense strand
agagaagaaugaaguaguc

SEQ ID NO: 2209658 - RNA, 19 nt, Homo sapiens
  misc_RNA (1)...(19): siRNA sense strand
acaaaccuauuaugagaca

SEQ ID NO: 2209659 - RNA, 19 nt, Homo sapiens
  misc_RNA (1)...(19): siRNA sense strand
uccauaagccugagaaaga

SEQ ID NO: 2209660 - RNA, 19 nt, Homo sapiens
  misc_RNA (1)...(19): siRNA sense strand
ugauaacucugggcuguau

SEQ ID NO: 2209661 - RNA, 19 nt, Homo sapiens
  misc_RNA (1)...(19): siRNA sense strand
gcaagaaugucacuccuua

SEQ ID NO: 2209662 - RNA, 19 nt, Homo sapiens
  misc_RNA (1)...(19): siRNA sense strand
gaagaaagagugaauauga

SEQ ID NO: 2209663 - RNA, 19 nt, Homo sapiens
  misc_RNA (1)...(19): siRNA sense strand
gaaugucacuccuuauauu

SEQ ID NO: 2209664 - RNA, 19 nt, Homo sapiens
  misc_RNA (1)...(19): siRNA sense strand
gaacaacacuguaucaacu

SEQ ID NO: 2209665 - RNA, 19 nt, Homo sapiens
  misc_RNA (1)...(19): siRNA sense strand
ccacuagccuuauuucuug

SEQ ID NO: 2209666 - RNA, 19 nt, Homo sapiens
  misc_RNA (1)...(19): siRNA sense strand
acaaauaccuaacagagaa

SEQ ID NO: 2209667 - RNA, 19 nt, Homo sapiens
  misc_RNA (1)...(19): siRNA sense strand
gaucuuggcuguucuuucu

SEQ ID NO: 2209668 - RNA, 19 nt, Homo sapiens
  misc_RNA (1)...(19): siRNA sense strand
gaacaucucauuaacuaca

SEQ ID NO: 2209669 - RNA, 19 nt, Homo sapiens
  misc_RNA (1)...(19): siRNA sense strand
gaagaagaaagagugaaua

SEQ ID NO: 2209670 - RNA, 19 nt, Homo sapiens
  misc_RNA (1)...(19): siRNA sense strand
uaacaccauuucugccuaa

SEQ ID NO: 2209671 - RNA, 19 nt, Homo sapiens
  misc_RNA (1)...(19): siRNA sense strand
caccauuucugccuaauug

SEQ ID NO: 2209672 - RNA, 19 nt, Homo sapiens
  misc_RNA (1)...(19): siRNA sense strand
gcagagaccaccagaagga

SEQ ID NO: 2209673 - RNA, 19 nt, Homo sapiens
  misc_RNA (1)...(19): siRNA sense strand
acaacacuguaucaacuua

SEQ ID NO: 2209674 - RNA, 19 nt, Homo sapiens
  misc_RNA (1)...(19): siRNA sense strand
uccuggaacucaauauuua

SEQ ID NO: 2209675 - RNA, 19 nt, Homo sapiens
  misc_RNA (1)...(19): siRNA sense strand
uaacagagaaagcaguaaa

SEQ ID NO: 2209676 - RNA, 19 nt, Homo sapiens
  misc_RNA (1)...(19): siRNA sense strand
gauaaacgugccauugaaa

SEQ ID NO: 2209677 - RNA, 19 nt, Homo sapiens
  misc_RNA (1)...(19): siRNA sense strand
ugauaaacgugccauugaa

SEQ ID NO: 2209678 - RNA, 19 nt, Homo sapiens
  misc_RNA (1)...(19): siRNA sense strand
aagaaugucacuccuuaua

SEQ ID NO: 2209679 - RNA, 19 nt, Homo sapiens
  misc_RNA (1)...(19): siRNA sense strand
gguugaacgucauagagaa

SEQ ID NO: 2209680 - RNA, 19 nt, Homo sapiens
  misc_RNA (1)...(19): siRNA sense strand
ucuguuauaugcuuuccua

SEQ ID NO: 2209681 - RNA, 19 nt, Homo sapiens
  misc_RNA (1)...(19): siRNA sense strand
gugauaaacgugccauuga

SEQ ID NO: 2209682 - RNA, 19 nt, Homo sapiens
  misc_RNA (1)...(19): siRNA sense strand
gcucuauauuucucaguau

SEQ ID NO: 2209683 - RNA, 19 nt, Homo sapiens
  misc_RNA (1)...(19): siRNA sense strand
ggcucuauauuucucagua

SEQ ID NO: 2209684 - RNA, 19 nt, Homo sapiens
  misc_RNA (1)...(19): siRNA sense strand
gaagguucccagagauaug

SEQ ID NO: 2209685 - RNA, 19 nt, Homo sapiens
  misc_RNA (1)...(19): siRNA sense strand
gcuauuccaggcucuauau

SEQ ID NO: 2209686 - RNA, 19 nt, Homo sapiens
  misc_RNA (1)...(19): siRNA sense strand
ggaacaacacuguaucaac

SEQ ID NO: 2209687 - RNA, 19 nt, Homo sapiens
  misc_RNA (1)...(19): siRNA sense strand
cagcagagaccaccagaag

SEQ ID NO: 2209688 - RNA, 19 nt, Homo sapiens
  misc_RNA (1)...(19): siRNA sense strand
auaugaagguucccagaga

SEQ ID NO: 2209689 - RNA, 19 nt, Homo sapiens
  misc_RNA (1)...(19): siRNA sense strand
ugaagaagaaagagugaau

SEQ ID NO: 2209690 - RNA, 19 nt, Homo sapiens
  misc_RNA (1)...(19): siRNA sense strand
aacgugccauugaaaguuu

SEQ ID NO: 2209691 - RNA, 19 nt, Homo sapiens
  misc_RNA (1)...(19): siRNA sense strand
cugaugaucuuggcuguuc

SEQ ID NO: 2209692 - RNA, 19 nt, Homo sapiens
  misc_RNA (1)...(19): siRNA sense strand
caaauaccuaacagagaaa

SEQ ID NO: 2209693 - RNA, 19 nt, Homo sapiens
  misc_RNA (1)...(19): siRNA sense strand
ucagcuuagugaagaagaa

SEQ ID NO: 2209694 - RNA, 19 nt, Homo sapiens
  misc_RNA (1)...(19): siRNA sense strand
aaacgugccauugaaaguu

SEQ ID NO: 2209695 - RNA, 19 nt, Homo sapiens
  misc_RNA (1)...(19): siRNA sense strand
gcagguugaacgucauaga

SEQ ID NO: 2209696 - RNA, 19 nt, Homo sapiens
  misc_RNA (1)...(19): siRNA sense strand
ccuaacagagaaagcagua

SEQ ID NO: 2209697 - RNA, 19 nt, Homo sapiens
  misc_RNA (1)...(19): siRNA sense strand
uaugaagguucccagagau

SEQ ID NO: 2209698 - RNA, 19 nt, Homo sapiens
  misc_RNA (1)...(19): siRNA sense strand
gcaggaacaacacuguauc

SEQ ID NO: 2209699 - RNA, 19 nt, Homo sapiens
  misc_RNA (1)...(19): siRNA sense strand
agaaugucacuccuuauau

SEQ ID NO: 2209700 - RNA, 19 nt, Homo sapiens
  misc_RNA (1)...(19): siRNA sense strand
ggacaccuuuuauguucaa

SEQ ID NO: 2209701 - RNA, 19 nt, Homo sapiens
  misc_RNA (1)...(19): siRNA sense strand
ggcaggaacaacacuguau

SEQ ID NO: 2209702 - RNA, 19 nt, Homo sapiens
  misc_RNA (1)...(19): siRNA sense strand
auuccaggcucuauauuuc

SEQ ID NO: 2209703 - RNA, 19 nt, Homo sapiens
  misc_RNA (1)...(19): siRNA sense strand
uauuccaggcucuauauuu

SEQ ID NO: 2209704 - RNA, 19 nt, Homo sapiens
  misc_RNA (1)...(19): siRNA sense strand
caguauacucucaggguuu

SEQ ID NO: 2209705 - RNA, 19 nt, Homo sapiens
  misc_RNA (1)...(19): siRNA sense strand
uaaacgugccauugaaagu

SEQ ID NO: 2209706 - RNA, 19 nt, Homo sapiens
  misc_RNA (1)...(19): siRNA sense strand
ggacuuggugccucuuucu

SEQ ID NO: 2209707 - RNA, 19 nt, Homo sapiens
  misc_RNA (1)...(19): siRNA sense strand
cuuuaucccuuuccacuag

SEQ ID NO: 2209708 - RNA, 19 nt, Homo sapiens
  misc_RNA (1)...(19): siRNA sense strand
cuagccuuauuucuuguuu

SEQ ID NO: 2209709 - RNA, 19 nt, Homo sapiens
  misc_RNA (1)...(19): siRNA sense strand
uacaaauaccuaacagaga

SEQ ID NO: 2209710 - RNA, 19 nt, Homo sapiens
  misc_RNA (1)...(19): siRNA sense strand
ugccaaggcucuaggaaaa

SEQ ID NO: 2209711 - RNA, 19 nt, Homo sapiens
  misc_RNA (1)...(19): siRNA sense strand
uuucuuaucugcagcuuuu

SEQ ID NO: 2209712 - RNA, 19 nt, Homo sapiens
  misc_RNA (1)...(19): siRNA sense strand
gcuuagugaagaagaaaga

SEQ ID NO: 2209713 - RNA, 19 nt, Homo sapiens
  misc_RNA (1)...(19): siRNA sense strand
caggaacaacacuguauca

SEQ ID NO: 2209714 - RNA, 19 nt, Homo sapiens
  misc_RNA (1)...(19): siRNA sense strand
caagaaugucacuccuuau

SEQ ID NO: 2209715 - RNA, 19 nt, Homo sapiens
  misc_RNA (1)...(19): siRNA sense strand
cagcagguugaacgucaua

SEQ ID NO: 2209716 - RNA, 19 nt, Homo sapiens
  misc_RNA (1)...(19): siRNA sense strand
gugccucuuucuguuauau

SEQ ID NO: 2209717 - RNA, 19 nt, Homo sapiens
  misc_RNA (1)...(19): siRNA sense strand
gaacgucauagagaacauc

SEQ ID NO: 2209718 - RNA, 19 nt, Homo sapiens
  misc_RNA (1)...(19): siRNA sense strand
agaaagagugaauaugaag

SEQ ID NO: 2209719 - RNA, 19 nt, Homo sapiens
  misc_RNA (1)...(19): siRNA sense strand
uggcuguucuuucuauucu

SEQ ID NO: 2209720 - RNA, 19 nt, Homo sapiens
  misc_RNA (1)...(19): siRNA sense strand
cauuaaggcaggaacaaca

SEQ ID NO: 2209721 - RNA, 19 nt, Homo sapiens
  misc_RNA (1)...(19): siRNA sense strand
guugggagaccaguuguau

SEQ ID NO: 2209722 - RNA, 19 nt, Homo sapiens
  misc_RNA (1)...(19): siRNA sense strand
ggugccucuuucuguuaua

SEQ ID NO: 2209723 - RNA, 19 nt, Homo sapiens
  misc_RNA (1)...(19): siRNA sense strand
cuuggugccucuuucuguu

SEQ ID NO: 2209724 - RNA, 19 nt, Homo sapiens
  misc_RNA (1)...(19): siRNA sense strand
ucucaggguuucuuuaucc

SEQ ID NO: 2209725 - RNA, 19 nt, Homo sapiens
  misc_RNA (1)...(19): siRNA sense strand
caucuccugugauaaacgu

SEQ ID NO: 2209726 - RNA, 19 nt, Homo sapiens
  misc_RNA (1)...(19): siRNA sense strand
ucuuggcuguucuuucuau

SEQ ID NO: 2209727 - RNA, 19 nt, Homo sapiens
  misc_RNA (1)...(19): siRNA sense strand
ugaagguucccagagauau

SEQ ID NO: 2209728 - RNA, 19 nt, Homo sapiens
  misc_RNA (1)...(19): siRNA sense strand
agccuuauuucuuguuugu

SEQ ID NO: 2209729 - RNA, 19 nt, Homo sapiens
  misc_RNA (1)...(19): siRNA sense strand
caccuuuuauguucaagua

SEQ ID NO: 2209730 - RNA, 19 nt, Homo sapiens
  misc_RNA (1)...(19): siRNA sense strand
gaugaucuuggcuguucuu

SEQ ID NO: 2209731 - RNA, 19 nt, Homo sapiens
  misc_RNA (1)...(19): siRNA sense strand
ugggagaccaguuguauac

SEQ ID NO: 2209732 - RNA, 19 nt, Homo sapiens
  misc_RNA (1)...(19): siRNA sense strand
uuccucagcuuagugaaga

SEQ ID NO: 2209733 - RNA, 19 nt, Homo sapiens
  misc_RNA (1)...(19): siRNA sense strand
gcagcagagaccaccagaa

SEQ ID NO: 2209734 - RNA, 19 nt, Homo sapiens
  misc_RNA (1)...(19): siRNA sense strand
uccacuagccuuauuucuu

SEQ ID NO: 2209735 - RNA, 19 nt, Homo sapiens
  misc_RNA (1)...(19): siRNA sense strand
gaagagagccugcaacacu

SEQ ID NO: 2209736 - RNA, 19 nt, Homo sapiens
  misc_RNA (1)...(19): siRNA sense strand
gcaggacuaugugcagaug

SEQ ID NO: 2209737 - RNA, 19 nt, Homo sapiens
  misc_RNA (1)...(19): siRNA sense strand
gcaacuucgugcccaccaa

SEQ ID NO: 2209738 - RNA, 19 nt, Homo sapiens
  misc_RNA (1)...(19): siRNA sense strand
cagaagagagccugcaaca

SEQ ID NO: 2209739 - RNA, 19 nt, Homo sapiens
  misc_RNA (1)...(19): siRNA sense strand
gaaggccagugagcugaag

SEQ ID NO: 2209740 - RNA, 19 nt, Homo sapiens
  misc_RNA (1)...(19): siRNA sense strand
cggccacacucaguaaaga

SEQ ID NO: 2209741 - RNA, 19 nt, Homo sapiens
  misc_RNA (1)...(19): siRNA sense strand
aggacuaugugcagaugaa

SEQ ID NO: 2209742 - RNA, 19 nt, Homo sapiens
  misc_RNA (1)...(19): siRNA sense strand
ucaguaucuugguccugua

SEQ ID NO: 2209743 - RNA, 19 nt, Homo sapiens
  misc_RNA (1)...(19): siRNA sense strand
caacuucgugcccaccaau

SEQ ID NO: 2209744 - RNA, 19 nt, Homo sapiens
  misc_RNA (1)...(19): siRNA sense strand
cuuccuggcucucaguauc

SEQ ID NO: 2209745 - RNA, 19 nt, Homo sapiens
  misc_RNA (1)...(19): siRNA sense strand
gaagagagccugcaacacu

SEQ ID NO: 2209746 - RNA, 19 nt, Homo sapiens
  misc_RNA (1)...(19): siRNA sense strand
gcaggacuaugugcagaug

SEQ ID NO: 2209747 - RNA, 19 nt, Homo sapiens
  misc_RNA (1)...(19): siRNA sense strand
gcaacuucgugcccaccaa

SEQ ID NO: 2209748 - RNA, 19 nt, Homo sapiens
  misc_RNA (1)...(19): siRNA sense strand
cagaagagagccugcaaca

SEQ ID NO: 2209749 - RNA, 19 nt, Homo sapiens
  misc_RNA (1)...(19): siRNA sense strand
gaaggccagugagcugaag

SEQ ID NO: 2209750 - RNA, 19 nt, Homo sapiens
  misc_RNA (1)...(19): siRNA sense strand
cggccacacucaguaaaga

SEQ ID NO: 2209751 - RNA, 19 nt, Homo sapiens
  misc_RNA (1)...(19): siRNA sense strand
aggacuaugugcagaugaa

SEQ ID NO: 2209752 - RNA, 19 nt, Homo sapiens
  misc_RNA (1)...(19): siRNA sense strand
ucaguaucuugguccugua

SEQ ID NO: 2209753 - RNA, 19 nt, Homo sapiens
  misc_RNA (1)...(19): siRNA sense strand
caacuucgugcccaccaau

SEQ ID NO: 2209754 - RNA, 19 nt, Homo sapiens
  misc_RNA (1)...(19): siRNA sense strand
cuuccuggcucucaguauc

SEQ ID NO: 2209755 - RNA, 19 nt, Homo sapiens
  misc_RNA (1)...(19): siRNA sense strand
gcaagaaccucccaaaguu

SEQ ID NO: 2209756 - RNA, 19 nt, Homo sapiens
  misc_RNA (1)...(19): siRNA sense strand
gcucaaacaugacaagaaa

SEQ ID NO: 2209757 - RNA, 19 nt, Homo sapiens
  misc_RNA (1)...(19): siRNA sense strand
gaacuucacugauuuacuc

SEQ ID NO: 2209758 - RNA, 19 nt, Homo sapiens
  misc_RNA (1)...(19): siRNA sense strand
ugaaagugauuaugccuua

SEQ ID NO: 2209759 - RNA, 19 nt, Homo sapiens
  misc_RNA (1)...(19): siRNA sense strand
ggaaagagcagcagaagga

SEQ ID NO: 2209760 - RNA, 19 nt, Homo sapiens
  misc_RNA (1)...(19): siRNA sense strand
gagaauuccuugaacgaaa

SEQ ID NO: 2209761 - RNA, 19 nt, Homo sapiens
  misc_RNA (1)...(19): siRNA sense strand
gaacuucgacgaccaguga

SEQ ID NO: 2209762 - RNA, 19 nt, Homo sapiens
  misc_RNA (1)...(19): siRNA sense strand
gaaauauccaagcacauua

SEQ ID NO: 2209763 - RNA, 19 nt, Homo sapiens
  misc_RNA (1)...(19): siRNA sense strand
ccaagaagccaaccaauga

SEQ ID NO: 2209764 - RNA, 19 nt, Homo sapiens
  misc_RNA (1)...(19): siRNA sense strand
cuacagagcugcccaaggu

SEQ ID NO: 2209765 - RNA, 19 nt, Homo sapiens
  misc_RNA (1)...(19): siRNA sense strand
ggacuuagaggaaaugaga

SEQ ID NO: 2209766 - RNA, 19 nt, Homo sapiens
  misc_RNA (1)...(19): siRNA sense strand
gcgagaauaugaagaggaa

SEQ ID NO: 2209767 - RNA, 19 nt, Homo sapiens
  misc_RNA (1)...(19): siRNA sense strand
caagaggacuuagaggaaa

SEQ ID NO: 2209768 - RNA, 19 nt, Homo sapiens
  misc_RNA (1)...(19): siRNA sense strand
gaaccgaccgagaguauga

SEQ ID NO: 2209769 - RNA, 19 nt, Homo sapiens
  misc_RNA (1)...(19): siRNA sense strand
gaagaaaugcaacgucgaa

SEQ ID NO: 2209770 - RNA, 19 nt, Homo sapiens
  misc_RNA (1)...(19): siRNA sense strand
gaacgaaagcauaggagaa

SEQ ID NO: 2209771 - RNA, 19 nt, Homo sapiens
  misc_RNA (1)...(19): siRNA sense strand
gaaauucucaugauagcuu

SEQ ID NO: 2209772 - RNA, 19 nt, Homo sapiens
  misc_RNA (1)...(19): siRNA sense strand
ggaccugggcaaacaguua

SEQ ID NO: 2209773 - RNA, 19 nt, Homo sapiens
  misc_RNA (1)...(19): siRNA sense strand
gcaagaggacuuagaggaa

SEQ ID NO: 2209774 - RNA, 19 nt, Homo sapiens
  misc_RNA (1)...(19): siRNA sense strand
gcacauuagagaaaucuuu

SEQ ID NO: 2209775 - RNA, 19 nt, Homo sapiens
  misc_RNA (1)...(19): siRNA sense strand
ggaaaugagacgugaagaa

SEQ ID NO: 2209776 - RNA, 19 nt, Homo sapiens
  misc_RNA (1)...(19): siRNA sense strand
gcucaggucccacuauaaa

SEQ ID NO: 2209777 - RNA, 19 nt, Homo sapiens
  misc_RNA (1)...(19): siRNA sense strand
gauuaugccuuacguuaca

SEQ ID NO: 2209778 - RNA, 19 nt, Homo sapiens
  misc_RNA (1)...(19): siRNA sense strand
gaaagaagaggagcugaga

SEQ ID NO: 2209779 - RNA, 19 nt, Homo sapiens
  misc_RNA (1)...(19): siRNA sense strand
gaaaugagacgugaagaag

SEQ ID NO: 2209780 - RNA, 19 nt, Homo sapiens
  misc_RNA (1)...(19): siRNA sense strand
agagaaaucuuugguuaug

SEQ ID NO: 2209781 - RNA, 19 nt, Homo sapiens
  misc_RNA (1)...(19): siRNA sense strand
uagcucaggucccacuaua

SEQ ID NO: 2209782 - RNA, 19 nt, Homo sapiens
  misc_RNA (1)...(19): siRNA sense strand
gaagaggagcugagacgaa

SEQ ID NO: 2209783 - RNA, 19 nt, Homo sapiens
  misc_RNA (1)...(19): siRNA sense strand
gaacuuagggagcgagaau

SEQ ID NO: 2209784 - RNA, 19 nt, Homo sapiens
  misc_RNA (1)...(19): siRNA sense strand
gugauuaugccuuacguua

SEQ ID NO: 2209785 - RNA, 19 nt, Homo sapiens
  misc_RNA (1)...(19): siRNA sense strand
gagaaaucuuugguuauga

SEQ ID NO: 2209786 - RNA, 19 nt, Homo sapiens
  misc_RNA (1)...(19): siRNA sense strand
gaauacgacucugaaaugg

SEQ ID NO: 2209787 - RNA, 19 nt, Homo sapiens
  misc_RNA (1)...(19): siRNA sense strand
aaugagacgugaagaagaa

SEQ ID NO: 2209788 - RNA, 19 nt, Homo sapiens
  misc_RNA (1)...(19): siRNA sense strand
ggacaaaggauaauuucca

SEQ ID NO: 2209789 - RNA, 19 nt, Homo sapiens
  misc_RNA (1)...(19): siRNA sense strand
ggacagaugaauggaauga

SEQ ID NO: 2209790 - RNA, 19 nt, Homo sapiens
  misc_RNA (1)...(19): siRNA sense strand
gccaagaggacaaaggaua

SEQ ID NO: 2209791 - RNA, 19 nt, Homo sapiens
  misc_RNA (1)...(19): siRNA sense strand
aggauaauuuccaugguua

SEQ ID NO: 2209792 - RNA, 19 nt, Homo sapiens
  misc_RNA (1)...(19): siRNA sense strand
ccaagaggacaaaggauaa

SEQ ID NO: 2209793 - RNA, 19 nt, Homo sapiens
  misc_RNA (1)...(19): siRNA sense strand
caagaaagcaagagcuaug

SEQ ID NO: 2209794 - RNA, 19 nt, Homo sapiens
  misc_RNA (1)...(19): siRNA sense strand
cagcauggccaaugagaaa

SEQ ID NO: 2209795 - RNA, 19 nt, Homo sapiens
  misc_RNA (1)...(19): siRNA sense strand
caagagcuauggccaagag

SEQ ID NO: 2209796 - RNA, 19 nt, Homo sapiens
  misc_RNA (1)...(19): siRNA sense strand
ugaauacgacucugaaaug

SEQ ID NO: 2209797 - RNA, 19 nt, Homo sapiens
  misc_RNA (1)...(19): siRNA sense strand
gcaauggacagaugaaugg

SEQ ID NO: 2209798 - RNA, 19 nt, Homo sapiens
  misc_RNA (1)...(19): siRNA sense strand
gacaaaggauaauuuccau

SEQ ID NO: 2209799 - RNA, 19 nt, Homo sapiens
  misc_RNA (1)...(19): siRNA sense strand
auacgacucugaaauggaa

SEQ ID NO: 2209800 - RNA, 19 nt, Homo sapiens
  misc_RNA (1)...(19): siRNA sense strand
gaagaggcaggcaacagaa

SEQ ID NO: 2209801 - RNA, 19 nt, Homo sapiens
  misc_RNA (1)...(19): siRNA sense strand
aagaggagcugagacgaaa

SEQ ID NO: 2209802 - RNA, 19 nt, Homo sapiens
  misc_RNA (1)...(19): siRNA sense strand
gacaagaaagcaagagcua

SEQ ID NO: 2209803 - RNA, 19 nt, Homo sapiens
  misc_RNA (1)...(19): siRNA sense strand
gacccagcauggccaauga

SEQ ID NO: 2209804 - RNA, 19 nt, Homo sapiens
  misc_RNA (1)...(19): siRNA sense strand
gcacaaaacuuagcaaagg

SEQ ID NO: 2209805 - RNA, 19 nt, Homo sapiens
  misc_RNA (1)...(19): siRNA sense strand
agucagagcaggaguauga

SEQ ID NO: 2209806 - RNA, 19 nt, Homo sapiens
  misc_RNA (1)...(19): siRNA sense strand
gaggaaaagucaaagaaga

SEQ ID NO: 2209807 - RNA, 19 nt, Homo sapiens
  misc_RNA (1)...(19): siRNA sense strand
ugacgaugaugaugaauac

SEQ ID NO: 2209808 - RNA, 19 nt, Homo sapiens
  misc_RNA (1)...(19): siRNA sense strand
gagaauaugaagaggaaga

SEQ ID NO: 2209809 - RNA, 19 nt, Homo sapiens
  misc_RNA (1)...(19): siRNA sense strand
gacagucagugguacaugu

SEQ ID NO: 2209810 - RNA, 19 nt, Homo sapiens
  misc_RNA (1)...(19): siRNA sense strand
agaaacaccucgcuuuguc

SEQ ID NO: 2209811 - RNA, 19 nt, Homo sapiens
  misc_RNA (1)...(19): siRNA sense strand
aaaucaagguagugaagaa

SEQ ID NO: 2209812 - RNA, 19 nt, Homo sapiens
  misc_RNA (1)...(19): siRNA sense strand
ucccaaaguugaaagcaaa

SEQ ID NO: 2209813 - RNA, 19 nt, Homo sapiens
  misc_RNA (1)...(19): siRNA sense strand
ggaaaguaguuggaaagag

SEQ ID NO: 2209814 - RNA, 19 nt, Homo sapiens
  misc_RNA (1)...(19): siRNA sense strand
agaggaagaugacgaugau

SEQ ID NO: 2209815 - RNA, 19 nt, Homo sapiens
  misc_RNA (1)...(19): siRNA sense strand
ccugggagauccauaagug

SEQ ID NO: 2209816 - RNA, 19 nt, Homo sapiens
  misc_RNA (1)...(19): siRNA sense strand
aguaugaaauggaagaaga

SEQ ID NO: 2209817 - RNA, 19 nt, Homo sapiens
  misc_RNA (1)...(19): siRNA sense strand
cauggaaaguaguuggaaa

SEQ ID NO: 2209818 - RNA, 19 nt, Homo sapiens
  misc_RNA (1)...(19): siRNA sense strand
aguuaaagguguccaauca

SEQ ID NO: 2209819 - RNA, 19 nt, Homo sapiens
  misc_RNA (1)...(19): siRNA sense strand
gaagaccagugagcagcuu

SEQ ID NO: 2209820 - RNA, 19 nt, Homo sapiens
  misc_RNA (1)...(19): siRNA sense strand
gaaaucaagguagugaaga

SEQ ID NO: 2209821 - RNA, 19 nt, Homo sapiens
  misc_RNA (1)...(19): siRNA sense strand
ggaaaucaagguagugaag

SEQ ID NO: 2209822 - RNA, 19 nt, Homo sapiens
  misc_RNA (1)...(19): siRNA sense strand
cgaccgagaguaugaaaug

SEQ ID NO: 2209823 - RNA, 19 nt, Homo sapiens
  misc_RNA (1)...(19): siRNA sense strand
ccaagcacauuagagaaau

SEQ ID NO: 2209824 - RNA, 19 nt, Homo sapiens
  misc_RNA (1)...(19): siRNA sense strand
agaaauauccaagcacauu

SEQ ID NO: 2209825 - RNA, 19 nt, Homo sapiens
  misc_RNA (1)...(19): siRNA sense strand
ggaccugagcgaucaauca

SEQ ID NO: 2209826 - RNA, 19 nt, Homo sapiens
  misc_RNA (1)...(19): siRNA sense strand
ugagacagauggaaaacua

SEQ ID NO: 2209827 - RNA, 19 nt, Homo sapiens
  misc_RNA (1)...(19): siRNA sense strand
gagcgagaauuccuugaac

SEQ ID NO: 2209828 - RNA, 19 nt, Homo sapiens
  misc_RNA (1)...(19): siRNA sense strand
ggagcgagaauuccuugaa

SEQ ID NO: 2209829 - RNA, 19 nt, Homo sapiens
  misc_RNA (1)...(19): siRNA sense strand
ucagaagagcgaccuauga

SEQ ID NO: 2209830 - RNA, 19 nt, Homo sapiens
  misc_RNA (1)...(19): siRNA sense strand
aaggauaauuuccaugguu

SEQ ID NO: 2209831 - RNA, 19 nt, Homo sapiens
  misc_RNA (1)...(19): siRNA sense strand
ugaagaagaagaaaugcaa

SEQ ID NO: 2209832 - RNA, 19 nt, Homo sapiens
  misc_RNA (1)...(19): siRNA sense strand
aaaggcagcgagaauauga

SEQ ID NO: 2209833 - RNA, 19 nt, Homo sapiens
  misc_RNA (1)...(19): siRNA sense strand
caucagugguucaguuagu

SEQ ID NO: 2209834 - RNA, 19 nt, Homo sapiens
  misc_RNA (1)...(19): siRNA sense strand
ccaaagacuucugcuagca

SEQ ID NO: 2209835 - RNA, 19 nt, Homo sapiens
  misc_RNA (1)...(19): siRNA sense strand
gagaaacaccucgcuuugu

SEQ ID NO: 2209836 - RNA, 19 nt, Homo sapiens
  misc_RNA (1)...(19): siRNA sense strand
caagaaccucccaaaguug

SEQ ID NO: 2209837 - RNA, 19 nt, Homo sapiens
  misc_RNA (1)...(19): siRNA sense strand
ugaaauggaagaagagaau

SEQ ID NO: 2209838 - RNA, 19 nt, Homo sapiens
  misc_RNA (1)...(19): siRNA sense strand
ccgagaguaugaaauggaa

SEQ ID NO: 2209839 - RNA, 19 nt, Homo sapiens
  misc_RNA (1)...(19): siRNA sense strand
gcagaaggaagaagcaaag

SEQ ID NO: 2209840 - RNA, 19 nt, Homo sapiens
  misc_RNA (1)...(19): siRNA sense strand
aaggagagccucaggaaga

SEQ ID NO: 2209841 - RNA, 19 nt, Homo sapiens
  misc_RNA (1)...(19): siRNA sense strand
gaaaagccuuagaggagaa

SEQ ID NO: 2209842 - RNA, 19 nt, Homo sapiens
  misc_RNA (1)...(19): siRNA sense strand
gaagaugacgaugaugaug

SEQ ID NO: 2209843 - RNA, 19 nt, Homo sapiens
  misc_RNA (1)...(19): siRNA sense strand
gaagccaaccaaugacuca

SEQ ID NO: 2209844 - RNA, 19 nt, Homo sapiens
  misc_RNA (1)...(19): siRNA sense strand
cagcaccucuucaccaagu

SEQ ID NO: 2209845 - RNA, 19 nt, Homo sapiens
  misc_RNA (1)...(19): siRNA sense strand
aaaggcacccucucagaaa

SEQ ID NO: 2209846 - RNA, 19 nt, Homo sapiens
  misc_RNA (1)...(19): siRNA sense strand
ucaagguagugaagaaauc

SEQ ID NO: 2209847 - RNA, 19 nt, Homo sapiens
  misc_RNA (1)...(19): siRNA sense strand
uagcaggacucagaaaucu

SEQ ID NO: 2209848 - RNA, 19 nt, Homo sapiens
  misc_RNA (1)...(19): siRNA sense strand
ggaagaugacgaugaugau

SEQ ID NO: 2209849 - RNA, 19 nt, Homo sapiens
  misc_RNA (1)...(19): siRNA sense strand
ggagacaggcauccuucuu

SEQ ID NO: 2209850 - RNA, 19 nt, Homo sapiens
  misc_RNA (1)...(19): siRNA sense strand
agaugacgaugaugaugaa

SEQ ID NO: 2209851 - RNA, 19 nt, Homo sapiens
  misc_RNA (1)...(19): siRNA sense strand
aagccuaagugcacuguug

SEQ ID NO: 2209852 - RNA, 19 nt, Homo sapiens
  misc_RNA (1)...(19): siRNA sense strand
gccaaccaaugacucaaau

SEQ ID NO: 2209853 - RNA, 19 nt, Homo sapiens
  misc_RNA (1)...(19): siRNA sense strand
ugagaaacaccucgcuuug

SEQ ID NO: 2209854 - RNA, 19 nt, Homo sapiens
  misc_RNA (1)...(19): siRNA sense strand
gagacaggcauccuucuuc

SEQ ID NO: 2209855 - RNA, 19 nt, Homo sapiens
  misc_RNA (1)...(19): siRNA sense strand
gagcaucaguuuaauauug

SEQ ID NO: 2209856 - RNA, 19 nt, Homo sapiens
  misc_RNA (1)...(19): siRNA sense strand
gaacuggaauucucucuau

SEQ ID NO: 2209857 - RNA, 19 nt, Homo sapiens
  misc_RNA (1)...(19): siRNA sense strand
gaauaaacaugcugauaga

SEQ ID NO: 2209858 - RNA, 19 nt, Homo sapiens
  misc_RNA (1)...(19): siRNA sense strand
ggaauucucucuauguuug

SEQ ID NO: 2209859 - RNA, 19 nt, Homo sapiens
  misc_RNA (1)...(19): siRNA sense strand
gaaagcaguuauuccagaa

SEQ ID NO: 2209860 - RNA, 19 nt, Homo sapiens
  misc_RNA (1)...(19): siRNA sense strand
guacaugaauuccauauac

SEQ ID NO: 2209861 - RNA, 19 nt, Homo sapiens
  misc_RNA (1)...(19): siRNA sense strand
acagaaagcuaccgagauu

SEQ ID NO: 2209862 - RNA, 19 nt, Homo sapiens
  misc_RNA (1)...(19): siRNA sense strand
ggcaauugcuggcuacuuu

SEQ ID NO: 2209863 - RNA, 19 nt, Homo sapiens
  misc_RNA (1)...(19): siRNA sense strand
gaaagaagaguauuugaag

SEQ ID NO: 2209864 - RNA, 19 nt, Homo sapiens
  misc_RNA (1)...(19): siRNA sense strand
gaaaauacaucuguuguug

SEQ ID NO: 2209865 - RNA, 19 nt, Homo sapiens
  misc_RNA (1)...(19): siRNA sense strand
ggaugaggaugguguuuau

SEQ ID NO: 2209866 - RNA, 19 nt, Homo sapiens
  misc_RNA (1)...(19): siRNA sense strand
gaaacaauuugcucaggau

SEQ ID NO: 2209867 - RNA, 19 nt, Homo sapiens
  misc_RNA (1)...(19): siRNA sense strand
ggcaauggauauuauaaga

SEQ ID NO: 2209868 - RNA, 19 nt, Homo sapiens
  misc_RNA (1)...(19): siRNA sense strand
gaagaaagcaguuauucca

SEQ ID NO: 2209869 - RNA, 19 nt, Homo sapiens
  misc_RNA (1)...(19): siRNA sense strand
gaaaggaaaggucacaguu

SEQ ID NO: 2209870 - RNA, 19 nt, Homo sapiens
  misc_RNA (1)...(19): siRNA sense strand
gagaagaauugccacaaca

SEQ ID NO: 2209871 - RNA, 19 nt, Homo sapiens
  misc_RNA (1)...(19): siRNA sense strand
ucagaaccuugugguauua

SEQ ID NO: 2209872 - RNA, 19 nt, Homo sapiens
  misc_RNA (1)...(19): siRNA sense strand
ggagaaagaagaguauuug

SEQ ID NO: 2209873 - RNA, 19 nt, Homo sapiens
  misc_RNA (1)...(19): siRNA sense strand
ucauaaacauggacuugaa

SEQ ID NO: 2209874 - RNA, 19 nt, Homo sapiens
  misc_RNA (1)...(19): siRNA sense strand
ugagugaugugaauaaaca

SEQ ID NO: 2209875 - RNA, 19 nt, Homo sapiens
  misc_RNA (1)...(19): siRNA sense strand
gcauauagauugccauacg

SEQ ID NO: 2209876 - RNA, 19 nt, Homo sapiens
  misc_RNA (1)...(19): siRNA sense strand
cuaccgagauuucauauac

SEQ ID NO: 2209877 - RNA, 19 nt, Homo sapiens
  misc_RNA (1)...(19): siRNA sense strand
guauuugaagccaguauua

SEQ ID NO: 2209878 - RNA, 19 nt, Homo sapiens
  misc_RNA (1)...(19): siRNA sense strand
ugggauacaugaagaaaug

SEQ ID NO: 2209879 - RNA, 19 nt, Homo sapiens
  misc_RNA (1)...(19): siRNA sense strand
uauguuagauucuguccuu

SEQ ID NO: 2209880 - RNA, 19 nt, Homo sapiens
  misc_RNA (1)...(19): siRNA sense strand
guuagauucuguccuuuau

SEQ ID NO: 2209881 - RNA, 19 nt, Homo sapiens
  misc_RNA (1)...(19): siRNA sense strand
aaggaaagauugaagaagu

SEQ ID NO: 2209882 - RNA, 19 nt, Homo sapiens
  misc_RNA (1)...(19): siRNA sense strand
ggucacaguucacaagagu

SEQ ID NO: 2209883 - RNA, 19 nt, Homo sapiens
  misc_RNA (1)...(19): siRNA sense strand
uuaagaauccuacaguuga

SEQ ID NO: 2209884 - RNA, 19 nt, Homo sapiens
  misc_RNA (1)...(19): siRNA sense strand
gaacaaauacuuggcaaaa

SEQ ID NO: 2209885 - RNA, 19 nt, Homo sapiens
  misc_RNA (1)...(19): siRNA sense strand
gggagaaagaagaguauuu

SEQ ID NO: 2209886 - RNA, 19 nt, Homo sapiens
  misc_RNA (1)...(19): siRNA sense strand
cagcaugguucauaaacau

SEQ ID NO: 2209887 - RNA, 19 nt, Homo sapiens
  misc_RNA (1)...(19): siRNA sense strand
gagaaagaagaguauuuga

SEQ ID NO: 2209888 - RNA, 19 nt, Homo sapiens
  misc_RNA (1)...(19): siRNA sense strand
ucacaguucacaagaguaa

SEQ ID NO: 2209889 - RNA, 19 nt, Homo sapiens
  misc_RNA (1)...(19): siRNA sense strand
ugaauaaacaugcugauag

SEQ ID NO: 2209890 - RNA, 19 nt, Homo sapiens
  misc_RNA (1)...(19): siRNA sense strand
aaggaaaggucacaguuca

SEQ ID NO: 2209891 - RNA, 19 nt, Homo sapiens
  misc_RNA (1)...(19): siRNA sense strand
auacgggcauuaugggaua

SEQ ID NO: 2209892 - RNA, 19 nt, Homo sapiens
  misc_RNA (1)...(19): siRNA sense strand
caagauguccugcaugaag

SEQ ID NO: 2209893 - RNA, 19 nt, Homo sapiens
  misc_RNA (1)...(19): siRNA sense strand
gauguuaucauaucugagu

SEQ ID NO: 2209894 - RNA, 19 nt, Homo sapiens
  misc_RNA (1)...(19): siRNA sense strand
ggucuacccugacauuugc

SEQ ID NO: 2209895 - RNA, 19 nt, Homo sapiens
  misc_RNA (1)...(19): siRNA sense strand
cagaagcuguuguggaagu

SEQ ID NO: 2209896 - RNA, 19 nt, Homo sapiens
  misc_RNA (1)...(19): siRNA sense strand
ugaggaugguguuuauuuc

SEQ ID NO: 2209897 - RNA, 19 nt, Homo sapiens
  misc_RNA (1)...(19): siRNA sense strand
gaugaugucuauggcuuca

SEQ ID NO: 2209898 - RNA, 19 nt, Homo sapiens
  misc_RNA (1)...(19): siRNA sense strand
gugaauaaacaugcugaua

SEQ ID NO: 2209899 - RNA, 19 nt, Homo sapiens
  misc_RNA (1)...(19): siRNA sense strand
augaagaaaugcuaaagga

SEQ ID NO: 2209900 - RNA, 19 nt, Homo sapiens
  misc_RNA (1)...(19): siRNA sense strand
gucuauggcuucaagaugu

SEQ ID NO: 2209901 - RNA, 19 nt, Homo sapiens
  misc_RNA (1)...(19): siRNA sense strand
gcagugagugaugugaaua

SEQ ID NO: 2209902 - RNA, 19 nt, Homo sapiens
  misc_RNA (1)...(19): siRNA sense strand
gaagguucuuggaguugau

SEQ ID NO: 2209903 - RNA, 19 nt, Homo sapiens
  misc_RNA (1)...(19): siRNA sense strand
ggaacuggaauucucucua

SEQ ID NO: 2209904 - RNA, 19 nt, Homo sapiens
  misc_RNA (1)...(19): siRNA sense strand
aagaaaugcuaaaggacaa

SEQ ID NO: 2209905 - RNA, 19 nt, Homo sapiens
  misc_RNA (1)...(19): siRNA sense strand
cugaguggaugggcuauuu

SEQ ID NO: 2209906 - RNA, 19 nt, Homo sapiens
  misc_RNA (1)...(19): siRNA sense strand
acaguugaguacaugaauu

SEQ ID NO: 2209907 - RNA, 19 nt, Homo sapiens
  misc_RNA (1)...(19): siRNA sense strand
ggaaaggucacaguucaca

SEQ ID NO: 2209908 - RNA, 19 nt, Homo sapiens
  misc_RNA (1)...(19): siRNA sense strand
ggacuugaauuuuauggau

SEQ ID NO: 2209909 - RNA, 19 nt, Homo sapiens
  misc_RNA (1)...(19): siRNA sense strand
ugucaguacccuucucaua

SEQ ID NO: 2209910 - RNA, 19 nt, Homo sapiens
  misc_RNA (1)...(19): siRNA sense strand
uucaagauguccugcauga

SEQ ID NO: 2209911 - RNA, 19 nt, Homo sapiens
  misc_RNA (1)...(19): siRNA sense strand
aggaaagauugaagaaguu

SEQ ID NO: 2209912 - RNA, 19 nt, Homo sapiens
  misc_RNA (1)...(19): siRNA sense strand
gaggaugguguuuauuuca

SEQ ID NO: 2209913 - RNA, 19 nt, Homo sapiens
  misc_RNA (1)...(19): siRNA sense strand
ucacaagaguaagaaagau

SEQ ID NO: 2209914 - RNA, 19 nt, Homo sapiens
  misc_RNA (1)...(19): siRNA sense strand
aaaacacacuggaaacaaa

SEQ ID NO: 2209915 - RNA, 19 nt, Homo sapiens
  misc_RNA (1)...(19): siRNA sense strand
gcuauuuucuucuguuuga

SEQ ID NO: 2209916 - RNA, 19 nt, Homo sapiens
  misc_RNA (1)...(19): siRNA sense strand
ggaguugaucaaucugaaa

SEQ ID NO: 2209917 - RNA, 19 nt, Homo sapiens
  misc_RNA (1)...(19): siRNA sense strand
gauguuggguguggaacug

SEQ ID NO: 2209918 - RNA, 19 nt, Homo sapiens
  misc_RNA (1)...(19): siRNA sense strand
guguuuauuucagcucaua

SEQ ID NO: 2209919 - RNA, 19 nt, Homo sapiens
  misc_RNA (1)...(19): siRNA sense strand
cauauagauugccauacga

SEQ ID NO: 2209920 - RNA, 19 nt, Homo sapiens
  misc_RNA (1)...(19): siRNA sense strand
ccugacauuugcacuauca

SEQ ID NO: 2209921 - RNA, 19 nt, Homo sapiens
  misc_RNA (1)...(19): siRNA sense strand
cgagauuucauauaccaaa

SEQ ID NO: 2209922 - RNA, 19 nt, Homo sapiens
  misc_RNA (1)...(19): siRNA sense strand
ggcauuaugggauacauga

SEQ ID NO: 2209923 - RNA, 19 nt, Homo sapiens
  misc_RNA (1)...(19): siRNA sense strand
ugaagccaguauuagaaga

SEQ ID NO: 2209924 - RNA, 19 nt, Homo sapiens
  misc_RNA (1)...(19): siRNA sense strand
uucagaaccuugugguauu

SEQ ID NO: 2209925 - RNA, 19 nt, Homo sapiens
  misc_RNA (1)...(19): siRNA sense strand
gcaugaagaaagcaguuau

SEQ ID NO: 2209926 - RNA, 19 nt, Homo sapiens
  misc_RNA (1)...(19): siRNA sense strand
aagauguccugcaugaaga

SEQ ID NO: 2209927 - RNA, 19 nt, Homo sapiens
  misc_RNA (1)...(19): siRNA sense strand
gacaaaauacgaacagaaa

SEQ ID NO: 2209928 - RNA, 19 nt, Homo sapiens
  misc_RNA (1)...(19): siRNA sense strand
gaagccaguauuagaagau

SEQ ID NO: 2209929 - RNA, 19 nt, Homo sapiens
  misc_RNA (1)...(19): siRNA sense strand
gaaaggucacaguucacaa

SEQ ID NO: 2209930 - RNA, 19 nt, Homo sapiens
  misc_RNA (1)...(19): siRNA sense strand
ugagaagaauugccacaac

SEQ ID NO: 2209931 - RNA, 19 nt, Homo sapiens
  misc_RNA (1)...(19): siRNA sense strand
cuggcuacuuugauauaua

SEQ ID NO: 2209932 - RNA, 19 nt, Homo sapiens
  misc_RNA (1)...(19): siRNA sense strand
gcuggcuacuuugauauau

SEQ ID NO: 2209933 - RNA, 19 nt, Homo sapiens
  misc_RNA (1)...(19): siRNA sense strand
gcaauugcuggcuacuuug

SEQ ID NO: 2209934 - RNA, 19 nt, Homo sapiens
  misc_RNA (1)...(19): siRNA sense strand
cacaucugcugaagaaaca

SEQ ID NO: 2209935 - RNA, 19 nt, Homo sapiens
  misc_RNA (1)...(19): siRNA sense strand
uaagaauccuacaguugag

SEQ ID NO: 2209936 - RNA, 19 nt, Homo sapiens
  misc_RNA (1)...(19): siRNA sense strand
aaacaugcugauagaauug

SEQ ID NO: 2209937 - RNA, 19 nt, Homo sapiens
  misc_RNA (1)...(19): siRNA sense strand
uagauucuguccuuuaugc

SEQ ID NO: 2209938 - RNA, 19 nt, Homo sapiens
  misc_RNA (1)...(19): siRNA sense strand
ggaaagauugaagaaguuc

SEQ ID NO: 2209939 - RNA, 19 nt, Homo sapiens
  misc_RNA (1)...(19): siRNA sense strand
ggccagagcacgugaggau

SEQ ID NO: 2209940 - RNA, 19 nt, Homo sapiens
  misc_RNA (1)...(19): siRNA sense strand
aaagauccacguucucuca

SEQ ID NO: 2209941 - RNA, 19 nt, Homo sapiens
  misc_RNA (1)...(19): siRNA sense strand
aagcauauagauugccaua

SEQ ID NO: 2209942 - RNA, 19 nt, Homo sapiens
  misc_RNA (1)...(19): siRNA sense strand
ccaggcaauggauauuaua

SEQ ID NO: 2209943 - RNA, 19 nt, Homo sapiens
  misc_RNA (1)...(19): siRNA sense strand
agaaccugcucgucaucua

SEQ ID NO: 2209944 - RNA, 19 nt, Homo sapiens
  misc_RNA (1)...(19): siRNA sense strand
cccaauggacucagugaaa

SEQ ID NO: 2209945 - RNA, 19 nt, Homo sapiens
  misc_RNA (1)...(19): siRNA sense strand
acccucacguugaauaauu

SEQ ID NO: 2209946 - RNA, 19 nt, Homo sapiens
  misc_RNA (1)...(19): siRNA sense strand
ugacagcaugguucauaaa

SEQ ID NO: 2209947 - RNA, 19 nt, Homo sapiens
  misc_RNA (1)...(19): siRNA sense strand
guugaucaaucugaaauac

SEQ ID NO: 2209948 - RNA, 19 nt, Homo sapiens
  misc_RNA (1)...(19): siRNA sense strand
ucucuauguuugcugcuaa

SEQ ID NO: 2209949 - RNA, 19 nt, Homo sapiens
  misc_RNA (1)...(19): siRNA sense strand
gauacaugaagaaaugcua

SEQ ID NO: 2209950 - RNA, 19 nt, Homo sapiens
  misc_RNA (1)...(19): siRNA sense strand
ccaauggacucagugaaaa

SEQ ID NO: 2209951 - RNA, 19 nt, Homo sapiens
  misc_RNA (1)...(19): siRNA sense strand
gcacgugaggaucugcaaa

SEQ ID NO: 2209952 - RNA, 19 nt, Homo sapiens
  misc_RNA (1)...(19): siRNA sense strand
caugaagaaagcaguuauu

SEQ ID NO: 2209953 - RNA, 19 nt, Homo sapiens
  misc_RNA (1)...(19): siRNA sense strand
uaccaggcaauggauauua

SEQ ID NO: 2209954 - RNA, 19 nt, Homo sapiens
  misc_RNA (1)...(19): siRNA sense strand
cuugugguauuaagcauau

SEQ ID NO: 2209955 - RNA, 19 nt, Homo sapiens
  misc_RNA (1)...(19): siRNA sense strand
guacagagauuacagauau

SEQ ID NO: 2209956 - RNA, 19 nt, Homo sapiens
  misc_RNA (1)...(19): siRNA sense strand
ggaaagugaugcauccuua

SEQ ID NO: 2209957 - RNA, 19 nt, Homo sapiens
  misc_RNA (1)...(19): siRNA sense strand
aaagagaacuugggaauua

SEQ ID NO: 2209958 - RNA, 19 nt, Homo sapiens
  misc_RNA (1)...(19): siRNA sense strand
cuacguagcuuucuuuaaa

SEQ ID NO: 2209959 - RNA, 19 nt, Homo sapiens
  misc_RNA (1)...(19): siRNA sense strand
gaaacagaauuguguacua

SEQ ID NO: 2209960 - RNA, 19 nt, Homo sapiens
  misc_RNA (1)...(19): siRNA sense strand
aaagaaagacgcagaguua

SEQ ID NO: 2209961 - RNA, 19 nt, Homo sapiens
  misc_RNA (1)...(19): siRNA sense strand
gaauuugggucaccuuauu

SEQ ID NO: 2209962 - RNA, 19 nt, Homo sapiens
  misc_RNA (1)...(19): siRNA sense strand
gcacuuaggaugagaauug

SEQ ID NO: 2209963 - RNA, 19 nt, Homo sapiens
  misc_RNA (1)...(19): siRNA sense strand
guggaugccuggaaacuua

SEQ ID NO: 2209964 - RNA, 19 nt, Homo sapiens
  misc_RNA (1)...(19): siRNA sense strand
gaagauggaagaacuuauu

SEQ ID NO: 2209965 - RNA, 19 nt, Homo sapiens
  misc_RNA (1)...(19): siRNA sense strand
gaacuuuauugucaucuug

SEQ ID NO: 2209966 - RNA, 19 nt, Homo sapiens
  misc_RNA (1)...(19): siRNA sense strand
ggaucaugcuugaacuuua

SEQ ID NO: 2209967 - RNA, 19 nt, Homo sapiens
  misc_RNA (1)...(19): siRNA sense strand
gauaaugagucaacagugu

SEQ ID NO: 2209968 - RNA, 19 nt, Homo sapiens
  misc_RNA (1)...(19): siRNA sense strand
gaucaugcuugaacuuuau

SEQ ID NO: 2209969 - RNA, 19 nt, Homo sapiens
  misc_RNA (1)...(19): siRNA sense strand
ucaagauucuccaugauuu

SEQ ID NO: 2209970 - RNA, 19 nt, Homo sapiens
  misc_RNA (1)...(19): siRNA sense strand
ggagcagccuuuagacuug

SEQ ID NO: 2209971 - RNA, 19 nt, Homo sapiens
  misc_RNA (1)...(19): siRNA sense strand
caggauaugugaauaauag

SEQ ID NO: 2209972 - RNA, 19 nt, Homo sapiens
  misc_RNA (1)...(19): siRNA sense strand
ggaaugaaagcugcacuua

SEQ ID NO: 2209973 - RNA, 19 nt, Homo sapiens
  misc_RNA (1)...(19): siRNA sense strand
aaacaggucuugaguugga

SEQ ID NO: 2209974 - RNA, 19 nt, Homo sapiens
  misc_RNA (1)...(19): siRNA sense strand
agacuacucuuuccaaaug

SEQ ID NO: 2209975 - RNA, 19 nt, Homo sapiens
  misc_RNA (1)...(19): siRNA sense strand
gaggcugucuuauagaauu

SEQ ID NO: 2209976 - RNA, 19 nt, Homo sapiens
  misc_RNA (1)...(19): siRNA sense strand
gaaauugaaugcagugacu

SEQ ID NO: 2209977 - RNA, 19 nt, Homo sapiens
  misc_RNA (1)...(19): siRNA sense strand
gauacacacuucaccagaa

SEQ ID NO: 2209978 - RNA, 19 nt, Homo sapiens
  misc_RNA (1)...(19): siRNA sense strand
gcucauagcauagguguuu

SEQ ID NO: 2209979 - RNA, 19 nt, Homo sapiens
  misc_RNA (1)...(19): siRNA sense strand
cauagaagaugggaagaaa

SEQ ID NO: 2209980 - RNA, 19 nt, Homo sapiens
  misc_RNA (1)...(19): siRNA sense strand
aauaauagccugucaguau

SEQ ID NO: 2209981 - RNA, 19 nt, Homo sapiens
  misc_RNA (1)...(19): siRNA sense strand
cuucaaaguucucccauuu

SEQ ID NO: 2209982 - RNA, 19 nt, Homo sapiens
  misc_RNA (1)...(19): siRNA sense strand
gaaagacugcuaaacucua

SEQ ID NO: 2209983 - RNA, 19 nt, Homo sapiens
  misc_RNA (1)...(19): siRNA sense strand
gaugauaccugauguucca

SEQ ID NO: 2209984 - RNA, 19 nt, Homo sapiens
  misc_RNA (1)...(19): siRNA sense strand
gaccagaauuugaagcuau

SEQ ID NO: 2209985 - RNA, 19 nt, Homo sapiens
  misc_RNA (1)...(19): siRNA sense strand
aaagacugcuaaacucuaa

SEQ ID NO: 2209986 - RNA, 19 nt, Homo sapiens
  misc_RNA (1)...(19): siRNA sense strand
ggaaacuuaccacucaaua

SEQ ID NO: 2209987 - RNA, 19 nt, Homo sapiens
  misc_RNA (1)...(19): siRNA sense strand
aaacgagacuucaucacuu

SEQ ID NO: 2209988 - RNA, 19 nt, Homo sapiens
  misc_RNA (1)...(19): siRNA sense strand
ggaaagaggcguggaaaca

SEQ ID NO: 2209989 - RNA, 19 nt, Homo sapiens
  misc_RNA (1)...(19): siRNA sense strand
aagcacagcuggcuaaauc

SEQ ID NO: 2209990 - RNA, 19 nt, Homo sapiens
  misc_RNA (1)...(19): siRNA sense strand
acuaaugccuuuauuguug

SEQ ID NO: 2209991 - RNA, 19 nt, Homo sapiens
  misc_RNA (1)...(19): siRNA sense strand
caacuaaugccuuuauugu

SEQ ID NO: 2209992 - RNA, 19 nt, Homo sapiens
  misc_RNA (1)...(19): siRNA sense strand
gaugggagcaggaucauga

SEQ ID NO: 2209993 - RNA, 19 nt, Homo sapiens
  misc_RNA (1)...(19): siRNA sense strand
uaugguagcuguaauugug

SEQ ID NO: 2209994 - RNA, 19 nt, Homo sapiens
  misc_RNA (1)...(19): siRNA sense strand
guaguuggcuuagcuuguu

SEQ ID NO: 2209995 - RNA, 19 nt, Homo sapiens
  misc_RNA (1)...(19): siRNA sense strand
gcauauagacuacucuuuc

SEQ ID NO: 2209996 - RNA, 19 nt, Homo sapiens
  misc_RNA (1)...(19): siRNA sense strand
gaucaugaccuugaaaguu

SEQ ID NO: 2209997 - RNA, 19 nt, Homo sapiens
  misc_RNA (1)...(19): siRNA sense strand
gaagaaacaaugccugcaa

SEQ ID NO: 2209998 - RNA, 19 nt, Homo sapiens
  misc_RNA (1)...(19): siRNA sense strand
gaauggcuguccuuucugu

SEQ ID NO: 2209999 - RNA, 19 nt, Homo sapiens
  misc_RNA (1)...(19): siRNA sense strand
gcacacuccuauaagcuau

SEQ ID NO: 2210000 - RNA, 19 nt, Homo sapiens
  misc_RNA (1)...(19): siRNA sense strand
aaaguucucccauuuguuu

SEQ ID NO: 2210001 - RNA, 19 nt, Homo sapiens
  misc_RNA (1)...(19): siRNA sense strand
gagagaaucaagagagaaa

SEQ ID NO: 2210002 - RNA, 19 nt, Homo sapiens
  misc_RNA (1)...(19): siRNA sense strand
gaagagcaggcccuuagaa

SEQ ID NO: 2210003 - RNA, 19 nt, Homo sapiens
  misc_RNA (1)...(19): siRNA sense strand
acagauauccuccugauga

SEQ ID NO: 2210004 - RNA, 19 nt, Homo sapiens
  misc_RNA (1)...(19): siRNA sense strand
gaaagugaugcauccuuaa

SEQ ID NO: 2210005 - RNA, 19 nt, Homo sapiens
  misc_RNA (1)...(19): siRNA sense strand
gaaagacgcagaguuaaag

SEQ ID NO: 2210006 - RNA, 19 nt, Homo sapiens
  misc_RNA (1)...(19): siRNA sense strand
gagaugggauuaggcaaau

SEQ ID NO: 2210007 - RNA, 19 nt, Homo sapiens
  misc_RNA (1)...(19): siRNA sense strand
gcugaagucuugggaauca

SEQ ID NO: 2210008 - RNA, 19 nt, Homo sapiens
  misc_RNA (1)...(19): siRNA sense strand
gggauuaggcaaauugauu

SEQ ID NO: 2210009 - RNA, 19 nt, Homo sapiens
  misc_RNA (1)...(19): siRNA sense strand
uuaacgagcuggcgaagau

SEQ ID NO: 2210010 - RNA, 19 nt, Homo sapiens
  misc_RNA (1)...(19): siRNA sense strand
gcaacuaaugccuuuauug

SEQ ID NO: 2210011 - RNA, 19 nt, Homo sapiens
  misc_RNA (1)...(19): siRNA sense strand
gauccuggaggcugucuua

SEQ ID NO: 2210012 - RNA, 19 nt, Homo sapiens
  misc_RNA (1)...(19): siRNA sense strand
cugcaaagcgauucaauuu

SEQ ID NO: 2210013 - RNA, 19 nt, Homo sapiens
  misc_RNA (1)...(19): siRNA sense strand
caacccaauugaccauuau

SEQ ID NO: 2210014 - RNA, 19 nt, Homo sapiens
  misc_RNA (1)...(19): siRNA sense strand
acaacccaauugaccauua

SEQ ID NO: 2210015 - RNA, 19 nt, Homo sapiens
  misc_RNA (1)...(19): siRNA sense strand
ugaaugcagugacuaagga

SEQ ID NO: 2210016 - RNA, 19 nt, Homo sapiens
  misc_RNA (1)...(19): siRNA sense strand
ggaaucaaaaugccuauua

SEQ ID NO: 2210017 - RNA, 19 nt, Homo sapiens
  misc_RNA (1)...(19): siRNA sense strand
ggagcaggaucaugaccuu

SEQ ID NO: 2210018 - RNA, 19 nt, Homo sapiens
  misc_RNA (1)...(19): siRNA sense strand
gagaagcuguauagucgau

SEQ ID NO: 2210019 - RNA, 19 nt, Homo sapiens
  misc_RNA (1)...(19): siRNA sense strand
ggagauggaaccuuacaug

SEQ ID NO: 2210020 - RNA, 19 nt, Homo sapiens
  misc_RNA (1)...(19): siRNA sense strand
aagcagcacugaaaucugu

SEQ ID NO: 2210021 - RNA, 19 nt, Homo sapiens
  misc_RNA (1)...(19): siRNA sense strand
ccuaagcacacuccuauaa

SEQ ID NO: 2210022 - RNA, 19 nt, Homo sapiens
  misc_RNA (1)...(19): siRNA sense strand
gugcgaagccuguacagaa

SEQ ID NO: 2210023 - RNA, 19 nt, Homo sapiens
  misc_RNA (1)...(19): siRNA sense strand
gacaggauaugugaauaau

SEQ ID NO: 2210024 - RNA, 19 nt, Homo sapiens
  misc_RNA (1)...(19): siRNA sense strand
cuacuaugcuuacucaaca

SEQ ID NO: 2210025 - RNA, 19 nt, Homo sapiens
  misc_RNA (1)...(19): siRNA sense strand
gcauuuacgucagacauca

SEQ ID NO: 2210026 - RNA, 19 nt, Homo sapiens
  misc_RNA (1)...(19): siRNA sense strand
gcaggaucaugaccuugaa

SEQ ID NO: 2210027 - RNA, 19 nt, Homo sapiens
  misc_RNA (1)...(19): siRNA sense strand
gcuauucuuugcagcugua

SEQ ID NO: 2210028 - RNA, 19 nt, Homo sapiens
  misc_RNA (1)...(19): siRNA sense strand
aaugaaagauacacacuuc

SEQ ID NO: 2210029 - RNA, 19 nt, Homo sapiens
  misc_RNA (1)...(19): siRNA sense strand
gcuaaacucuaacacuuac

SEQ ID NO: 2210030 - RNA, 19 nt, Homo sapiens
  misc_RNA (1)...(19): siRNA sense strand
caagaaacagaauugugua

SEQ ID NO: 2210031 - RNA, 19 nt, Homo sapiens
  misc_RNA (1)...(19): siRNA sense strand
cuaucaagauucuccauga

SEQ ID NO: 2210032 - RNA, 19 nt, Homo sapiens
  misc_RNA (1)...(19): siRNA sense strand
uucuaaagcucauagcaua

SEQ ID NO: 2210033 - RNA, 19 nt, Homo sapiens
  misc_RNA (1)...(19): siRNA sense strand
ccuggaaacuuaccacuca

SEQ ID NO: 2210034 - RNA, 19 nt, Homo sapiens
  misc_RNA (1)...(19): siRNA sense strand
ccauuuaucccuuggcuuu

SEQ ID NO: 2210035 - RNA, 19 nt, Homo sapiens
  misc_RNA (1)...(19): siRNA sense strand
ccuggaggcugucuuauag

SEQ ID NO: 2210036 - RNA, 19 nt, Homo sapiens
  misc_RNA (1)...(19): siRNA sense strand
gaguaugagagcagucuua

SEQ ID NO: 2210037 - RNA, 19 nt, Homo sapiens
  misc_RNA (1)...(19): siRNA sense strand
gagccacagugacauuaug

SEQ ID NO: 2210038 - RNA, 19 nt, Homo sapiens
  misc_RNA (1)...(19): siRNA sense strand
guaaacacaggaaauugaa

SEQ ID NO: 2210039 - RNA, 19 nt, Homo sapiens
  misc_RNA (1)...(19): siRNA sense strand
aaugaaagcugcacuuagg

SEQ ID NO: 2210040 - RNA, 19 nt, Homo sapiens
  misc_RNA (1)...(19): siRNA sense strand
ugacaggauaugugaauaa

SEQ ID NO: 2210041 - RNA, 19 nt, Homo sapiens
  misc_RNA (1)...(19): siRNA sense strand
guggagaagugaagagugu

SEQ ID NO: 2210042 - RNA, 19 nt, Homo sapiens
  misc_RNA (1)...(19): siRNA sense strand
aaccuuacaugccucuaua

SEQ ID NO: 2210043 - RNA, 19 nt, Homo sapiens
  misc_RNA (1)...(19): siRNA sense strand
gcugagaccagaauuugaa

SEQ ID NO: 2210044 - RNA, 19 nt, Homo sapiens
  misc_RNA (1)...(19): siRNA sense strand
guacuauauucucucaaga

SEQ ID NO: 2210045 - RNA, 19 nt, Homo sapiens
  misc_RNA (1)...(19): siRNA sense strand
gaccagcuuucucaucaau

SEQ ID NO: 2210046 - RNA, 19 nt, Homo sapiens
  misc_RNA (1)...(19): siRNA sense strand
gagcaggcccuuagaaguc

SEQ ID NO: 2210047 - RNA, 19 nt, Homo sapiens
  misc_RNA (1)...(19): siRNA sense strand
gcauagguguuuggcaaga

SEQ ID NO: 2210048 - RNA, 19 nt, Homo sapiens
  misc_RNA (1)...(19): siRNA sense strand
gagcagucuuaccuugaaa

SEQ ID NO: 2210049 - RNA, 19 nt, Homo sapiens
  misc_RNA (1)...(19): siRNA sense strand
ucaagaaacagaauugugu

SEQ ID NO: 2210050 - RNA, 19 nt, Homo sapiens
  misc_RNA (1)...(19): siRNA sense strand
aagaaacaaugccugcaaa

SEQ ID NO: 2210051 - RNA, 19 nt, Homo sapiens
  misc_RNA (1)...(19): siRNA sense strand
ccuuuagacuugauuaaga

SEQ ID NO: 2210052 - RNA, 19 nt, Homo sapiens
  misc_RNA (1)...(19): siRNA sense strand
gaaacaguuacucaauuug

SEQ ID NO: 2210053 - RNA, 19 nt, Homo sapiens
  misc_RNA (1)...(19): siRNA sense strand
aucaugaccuugaaaguuu

SEQ ID NO: 2210054 - RNA, 19 nt, Homo sapiens
  misc_RNA (1)...(19): siRNA sense strand
gaauuugaagcuaugugua

SEQ ID NO: 2210055 - RNA, 19 nt, Homo sapiens
  misc_RNA (1)...(19): siRNA sense strand
gaacaaagguuauccuaca

SEQ ID NO: 2210056 - RNA, 19 nt, Homo sapiens
  misc_RNA (1)...(19): siRNA sense strand
gaaggaaugugauaaagaa

SEQ ID NO: 2210057 - RNA, 19 nt, Homo sapiens
  misc_RNA (1)...(19): siRNA sense strand
uaaaggagauugugaagaa

SEQ ID NO: 2210058 - RNA, 19 nt, Homo sapiens
  misc_RNA (1)...(19): siRNA sense strand
agacaaaccugaaauugaa

SEQ ID NO: 2210059 - RNA, 19 nt, Homo sapiens
  misc_RNA (1)...(19): siRNA sense strand
gaaagaguccaaagacaaa

SEQ ID NO: 2210060 - RNA, 19 nt, Homo sapiens
  misc_RNA (1)...(19): siRNA sense strand
gaaacauucucagcuuauu

SEQ ID NO: 2210061 - RNA, 19 nt, Homo sapiens
  misc_RNA (1)...(19): siRNA sense strand
guacaucgaccaagaagaa

SEQ ID NO: 2210062 - RNA, 19 nt, Homo sapiens
  misc_RNA (1)...(19): siRNA sense strand
ggagaaggaaugugauaaa

SEQ ID NO: 2210063 - RNA, 19 nt, Homo sapiens
  misc_RNA (1)...(19): siRNA sense strand
gagaaagaguccaaagaca

SEQ ID NO: 2210064 - RNA, 19 nt, Homo sapiens
  misc_RNA (1)...(19): siRNA sense strand
gaauaaaggagauugugaa

SEQ ID NO: 2210065 - RNA, 19 nt, Homo sapiens
  misc_RNA (1)...(19): siRNA sense strand
ggauaucccauuacucuuu

SEQ ID NO: 2210066 - RNA, 19 nt, Homo sapiens
  misc_RNA (1)...(19): siRNA sense strand
ccagaaaucccgacgauau

SEQ ID NO: 2210067 - RNA, 19 nt, Homo sapiens
  misc_RNA (1)...(19): siRNA sense strand
ccaagaagaacucaacaaa

SEQ ID NO: 2210068 - RNA, 19 nt, Homo sapiens
  misc_RNA (1)...(19): siRNA sense strand
cuuauuggauaucccauua

SEQ ID NO: 2210069 - RNA, 19 nt, Homo sapiens
  misc_RNA (1)...(19): siRNA sense strand
ucagagcccuucuauuugu

SEQ ID NO: 2210070 - RNA, 19 nt, Homo sapiens
  misc_RNA (1)...(19): siRNA sense strand
gaaggauggugacaagaag

SEQ ID NO: 2210071 - RNA, 19 nt, Homo sapiens
  misc_RNA (1)...(19): siRNA sense strand
auucagagcccuucuauuu

SEQ ID NO: 2210072 - RNA, 19 nt, Homo sapiens
  misc_RNA (1)...(19): siRNA sense strand
gaaggacaguuggaauuca

SEQ ID NO: 2210073 - RNA, 19 nt, Homo sapiens
  misc_RNA (1)...(19): siRNA sense strand
gagaaggaaugugauaaag

SEQ ID NO: 2210074 - RNA, 19 nt, Homo sapiens
  misc_RNA (1)...(19): siRNA sense strand
agaagaagaagaagacuaa

SEQ ID NO: 2210075 - RNA, 19 nt, Homo sapiens
  misc_RNA (1)...(19): siRNA sense strand
caaagacaaaccugaaauu

SEQ ID NO: 2210076 - RNA, 19 nt, Homo sapiens
  misc_RNA (1)...(19): siRNA sense strand
ggaaugugauaaagaaguc

SEQ ID NO: 2210077 - RNA, 19 nt, Homo sapiens
  misc_RNA (1)...(19): siRNA sense strand
ggaagacaaagaagaagaa

SEQ ID NO: 2210078 - RNA, 19 nt, Homo sapiens
  misc_RNA (1)...(19): siRNA sense strand
gaccagaaaucccgacgau

SEQ ID NO: 2210079 - RNA, 19 nt, Homo sapiens
  misc_RNA (1)...(19): siRNA sense strand
auucucagcuuauuggaua

SEQ ID NO: 2210080 - RNA, 19 nt, Homo sapiens
  misc_RNA (1)...(19): siRNA sense strand
aaagaaggauggugacaag

SEQ ID NO: 2210081 - RNA, 19 nt, Homo sapiens
  misc_RNA (1)...(19): siRNA sense strand
ggucguggaacaaagguua

SEQ ID NO: 2210082 - RNA, 19 nt, Homo sapiens
  misc_RNA (1)...(19): siRNA sense strand
guacuuggaggaacaaaga

SEQ ID NO: 2210083 - RNA, 19 nt, Homo sapiens
  misc_RNA (1)...(19): siRNA sense strand
aaaggaagacaaagaagaa

SEQ ID NO: 2210084 - RNA, 19 nt, Homo sapiens
  misc_RNA (1)...(19): siRNA sense strand
gaauucagagcccuucuau

SEQ ID NO: 2210085 - RNA, 19 nt, Homo sapiens
  misc_RNA (1)...(19): siRNA sense strand
gaagaagaagacuaaggaa

SEQ ID NO: 2210086 - RNA, 19 nt, Homo sapiens
  misc_RNA (1)...(19): siRNA sense strand
agaaaucccgacgauauua

SEQ ID NO: 2210087 - RNA, 19 nt, Homo sapiens
  misc_RNA (1)...(19): siRNA sense strand
gaagauguugguucugaug

SEQ ID NO: 2210088 - RNA, 19 nt, Homo sapiens
  misc_RNA (1)...(19): siRNA sense strand
ggaauucagagcccuucua

SEQ ID NO: 2210089 - RNA, 19 nt, Homo sapiens
  misc_RNA (1)...(19): siRNA sense strand
gaagagaaagaguccaaag

SEQ ID NO: 2210090 - RNA, 19 nt, Homo sapiens
  misc_RNA (1)...(19): siRNA sense strand
gaagacaaagaagaagaaa

SEQ ID NO: 2210091 - RNA, 19 nt, Homo sapiens
  misc_RNA (1)...(19): siRNA sense strand
agaaagaguccaaagacaa

SEQ ID NO: 2210092 - RNA, 19 nt, Homo sapiens
  misc_RNA (1)...(19): siRNA sense strand
cagaaaucccgacgauauu

SEQ ID NO: 2210093 - RNA, 19 nt, Homo sapiens
  misc_RNA (1)...(19): siRNA sense strand
aagacaaaccugaaauuga

SEQ ID NO: 2210094 - RNA, 19 nt, Homo sapiens
  misc_RNA (1)...(19): siRNA sense strand
agaagaagaagacuaagga

SEQ ID NO: 2210095 - RNA, 19 nt, Homo sapiens
  misc_RNA (1)...(19): siRNA sense strand
aaagacaaaccugaaauug

SEQ ID NO: 2210096 - RNA, 19 nt, Homo sapiens
  misc_RNA (1)...(19): siRNA sense strand
aaccugaaauugaagaugu

SEQ ID NO: 2210097 - RNA, 19 nt, Homo sapiens
  misc_RNA (1)...(19): siRNA sense strand
gaagucagcgacgaugaga

SEQ ID NO: 2210098 - RNA, 19 nt, Homo sapiens
  misc_RNA (1)...(19): siRNA sense strand
caaagaauaaaggagauug

SEQ ID NO: 2210099 - RNA, 19 nt, Homo sapiens
  misc_RNA (1)...(19): siRNA sense strand
aaaaguacaucgaccaaga

SEQ ID NO: 2210100 - RNA, 19 nt, Homo sapiens
  misc_RNA (1)...(19): siRNA sense strand
gaagaagacuaaggaaaag

SEQ ID NO: 2210101 - RNA, 19 nt, Homo sapiens
  misc_RNA (1)...(19): siRNA sense strand
gacaagaagaagaagaaga

SEQ ID NO: 2210102 - RNA, 19 nt, Homo sapiens
  misc_RNA (1)...(19): siRNA sense strand
uugaagauguugguucuga

SEQ ID NO: 2210103 - RNA, 19 nt, Homo sapiens
  misc_RNA (1)...(19): siRNA sense strand
gagauugugaagaaacauu

SEQ ID NO: 2210104 - RNA, 19 nt, Homo sapiens
  misc_RNA (1)...(19): siRNA sense strand
ccaaagacaaaccugaaau

SEQ ID NO: 2210105 - RNA, 19 nt, Homo sapiens
  misc_RNA (1)...(19): siRNA sense strand
gaaauugaagauguugguu

SEQ ID NO: 2210106 - RNA, 19 nt, Homo sapiens
  misc_RNA (1)...(19): siRNA sense strand
ugacugggaagaucacuug

SEQ ID NO: 2210107 - RNA, 19 nt, Homo sapiens
  misc_RNA (1)...(19): siRNA sense strand
ggaggaacaaagaauaaag

SEQ ID NO: 2210108 - RNA, 19 nt, Homo sapiens
  misc_RNA (1)...(19): siRNA sense strand
gauaucccauuacucuuuu

SEQ ID NO: 2210109 - RNA, 19 nt, Homo sapiens
  misc_RNA (1)...(19): siRNA sense strand
gugacaagaagaagaagaa

SEQ ID NO: 2210110 - RNA, 19 nt, Homo sapiens
  misc_RNA (1)...(19): siRNA sense strand
agaaggauggugacaagaa

SEQ ID NO: 2210111 - RNA, 19 nt, Homo sapiens
  misc_RNA (1)...(19): siRNA sense strand
aaaggagauugugaagaaa

SEQ ID NO: 2210112 - RNA, 19 nt, Homo sapiens
  misc_RNA (1)...(19): siRNA sense strand
guggagaaggaaugugaua

SEQ ID NO: 2210113 - RNA, 19 nt, Homo sapiens
  misc_RNA (1)...(19): siRNA sense strand
agaaggaaugugauaaaga

SEQ ID NO: 2210114 - RNA, 19 nt, Homo sapiens
  misc_RNA (1)...(19): siRNA sense strand
gaaaucccgacgauauuac

SEQ ID NO: 2210115 - RNA, 19 nt, Homo sapiens
  misc_RNA (1)...(19): siRNA sense strand
aagaagaagacuaaggaaa

SEQ ID NO: 2210116 - RNA, 19 nt, Homo sapiens
  misc_RNA (1)...(19): siRNA sense strand
agaauaaaggagauuguga

SEQ ID NO: 2210117 - RNA, 19 nt, Homo sapiens
  misc_RNA (1)...(19): siRNA sense strand
cagcgacgaugagacugaa

SEQ ID NO: 2210118 - RNA, 19 nt, Homo sapiens
  misc_RNA (1)...(19): siRNA sense strand
uaaagaagucagcgacgau

SEQ ID NO: 2210119 - RNA, 19 nt, Homo sapiens
  misc_RNA (1)...(19): siRNA sense strand
aaacauucucagcuuauug

SEQ ID NO: 2210120 - RNA, 19 nt, Homo sapiens
  misc_RNA (1)...(19): siRNA sense strand
gaagaacucaacaaaacaa

SEQ ID NO: 2210121 - RNA, 19 nt, Homo sapiens
  misc_RNA (1)...(19): siRNA sense strand
caagaagaacucaacaaaa

SEQ ID NO: 2210122 - RNA, 19 nt, Homo sapiens
  misc_RNA (1)...(19): siRNA sense strand
gauggugacaagaagaaga

SEQ ID NO: 2210123 - RNA, 19 nt, Homo sapiens
  misc_RNA (1)...(19): siRNA sense strand
aagaagaacucaacaaaac

SEQ ID NO: 2210124 - RNA, 19 nt, Homo sapiens
  misc_RNA (1)...(19): siRNA sense strand
gaggaacaaagaauaaagg

SEQ ID NO: 2210125 - RNA, 19 nt, Homo sapiens
  misc_RNA (1)...(19): siRNA sense strand
ccaaugacugggaagauca

SEQ ID NO: 2210126 - RNA, 19 nt, Homo sapiens
  misc_RNA (1)...(19): siRNA sense strand
agaagaagacuaaggaaaa

SEQ ID NO: 2210127 - RNA, 19 nt, Homo sapiens
  misc_RNA (1)...(19): siRNA sense strand
aagagaaagaguccaaaga

SEQ ID NO: 2210128 - RNA, 19 nt, Homo sapiens
  misc_RNA (1)...(19): siRNA sense strand
ugaggaguacggagaauuc

SEQ ID NO: 2210129 - RNA, 19 nt, Homo sapiens
  misc_RNA (1)...(19): siRNA sense strand
aaaguacaucgaccaagaa

SEQ ID NO: 2210130 - RNA, 19 nt, Homo sapiens
  misc_RNA (1)...(19): siRNA sense strand
guccaaagacaaaccugaa

SEQ ID NO: 2210131 - RNA, 19 nt, Homo sapiens
  misc_RNA (1)...(19): siRNA sense strand
ugaaggacaguuggaauuc

SEQ ID NO: 2210132 - RNA, 19 nt, Homo sapiens
  misc_RNA (1)...(19): siRNA sense strand
ugaagauguugguucugau

SEQ ID NO: 2210133 - RNA, 19 nt, Homo sapiens
  misc_RNA (1)...(19): siRNA sense strand
aagaagaagaagaagacua

SEQ ID NO: 2210134 - RNA, 19 nt, Homo sapiens
  misc_RNA (1)...(19): siRNA sense strand
uaaugaggaguacggagaa

SEQ ID NO: 2210135 - RNA, 19 nt, Homo sapiens
  misc_RNA (1)...(19): siRNA sense strand
aauugaagauguugguucu

SEQ ID NO: 2210136 - RNA, 19 nt, Homo sapiens
  misc_RNA (1)...(19): siRNA sense strand
cgacgaugagacugaagaa

SEQ ID NO: 2210137 - RNA, 19 nt, Homo sapiens
  misc_RNA (1)...(19): siRNA sense strand
uugaaggacaguuggaauu

SEQ ID NO: 2210138 - RNA, 19 nt, Homo sapiens
  misc_RNA (1)...(19): siRNA sense strand
acuuggcagugaagcauuu

SEQ ID NO: 2210139 - RNA, 19 nt, Homo sapiens
  misc_RNA (1)...(19): siRNA sense strand
gcgacgaugagacugaaga

SEQ ID NO: 2210140 - RNA, 19 nt, Homo sapiens
  misc_RNA (1)...(19): siRNA sense strand
cuuggaggaacaaagaaua

SEQ ID NO: 2210141 - RNA, 19 nt, Homo sapiens
  misc_RNA (1)...(19): siRNA sense strand
acaagaagaagaagaagac

SEQ ID NO: 2210142 - RNA, 19 nt, Homo sapiens
  misc_RNA (1)...(19): siRNA sense strand
aagaagagaaagaguccaa

SEQ ID NO: 2210143 - RNA, 19 nt, Homo sapiens
  misc_RNA (1)...(19): siRNA sense strand
ccuucuauuugucccauga

SEQ ID NO: 2210144 - RNA, 19 nt, Homo sapiens
  misc_RNA (1)...(19): siRNA sense strand
uggaacaaagguuauccua

SEQ ID NO: 2210145 - RNA, 19 nt, Homo sapiens
  misc_RNA (1)...(19): siRNA sense strand
agagaaagaguccaaagac

SEQ ID NO: 2210146 - RNA, 19 nt, Homo sapiens
  misc_RNA (1)...(19): siRNA sense strand
uuggaggaacaaagaauaa

SEQ ID NO: 2210147 - RNA, 19 nt, Homo sapiens
  misc_RNA (1)...(19): siRNA sense strand
cugaguacuuggaggaaca

SEQ ID NO: 2210148 - RNA, 19 nt, Homo sapiens
  misc_RNA (1)...(19): siRNA sense strand
cgaccaagaagaacucaac

SEQ ID NO: 2210149 - RNA, 19 nt, Homo sapiens
  misc_RNA (1)...(19): siRNA sense strand
uauuggauaucccauuacu

SEQ ID NO: 2210150 - RNA, 19 nt, Homo sapiens
  misc_RNA (1)...(19): siRNA sense strand
gaacauagcuaaucccuua

SEQ ID NO: 2210151 - RNA, 19 nt, Homo sapiens
  misc_RNA (1)...(19): siRNA sense strand
cagcugaaguugcauauua

SEQ ID NO: 2210152 - RNA, 19 nt, Homo sapiens
  misc_RNA (1)...(19): siRNA sense strand
ggauguauaugauuccuua

SEQ ID NO: 2210153 - RNA, 19 nt, Homo sapiens
  misc_RNA (1)...(19): siRNA sense strand
gcagaaggguuuaguauuc

SEQ ID NO: 2210154 - RNA, 19 nt, Homo sapiens
  misc_RNA (1)...(19): siRNA sense strand
gaacacaccucuucuuugg

SEQ ID NO: 2210155 - RNA, 19 nt, Homo sapiens
  misc_RNA (1)...(19): siRNA sense strand
caacuuaccucccaggaaa

SEQ ID NO: 2210156 - RNA, 19 nt, Homo sapiens
  misc_RNA (1)...(19): siRNA sense strand
ggagggagcgguucuauuu

SEQ ID NO: 2210157 - RNA, 19 nt, Homo sapiens
  misc_RNA (1)...(19): siRNA sense strand
ggaaaguccugaauaccaa

SEQ ID NO: 2210158 - RNA, 19 nt, Homo sapiens
  misc_RNA (1)...(19): siRNA sense strand
gcccagaaauguaucagua

SEQ ID NO: 2210159 - RNA, 19 nt, Homo sapiens
  misc_RNA (1)...(19): siRNA sense strand
caacauggccuuucacaga

SEQ ID NO: 2210160 - RNA, 19 nt, Homo sapiens
  misc_RNA (1)...(19): siRNA sense strand
gagaauggcucugucauca

SEQ ID NO: 2210161 - RNA, 19 nt, Homo sapiens
  misc_RNA (1)...(19): siRNA sense strand
gcagggacuuccuccauuu

SEQ ID NO: 2210162 - RNA, 19 nt, Homo sapiens
  misc_RNA (1)...(19): siRNA sense strand
ggaccaacuucuacaggua

SEQ ID NO: 2210163 - RNA, 19 nt, Homo sapiens
  misc_RNA (1)...(19): siRNA sense strand
gagcuaccauguauaaaug

SEQ ID NO: 2210164 - RNA, 19 nt, Homo sapiens
  misc_RNA (1)...(19): siRNA sense strand
gacuuucccuccauacuua

SEQ ID NO: 2210165 - RNA, 19 nt, Homo sapiens
  misc_RNA (1)...(19): siRNA sense strand
gcuaagagcaguucgauga

SEQ ID NO: 2210166 - RNA, 19 nt, Homo sapiens
  misc_RNA (1)...(19): siRNA sense strand
ccaaacagcugaaguugca

SEQ ID NO: 2210167 - RNA, 19 nt, Homo sapiens
  misc_RNA (1)...(19): siRNA sense strand
gagccaagcggacaacaua

SEQ ID NO: 2210168 - RNA, 19 nt, Homo sapiens
  misc_RNA (1)...(19): siRNA sense strand
agacagacauguuugaguu

SEQ ID NO: 2210169 - RNA, 19 nt, Homo sapiens
  misc_RNA (1)...(19): siRNA sense strand
acagguagcuugcaggaaa

SEQ ID NO: 2210170 - RNA, 19 nt, Homo sapiens
  misc_RNA (1)...(19): siRNA sense strand
guucugaaauuuccaguga

SEQ ID NO: 2210171 - RNA, 19 nt, Homo sapiens
  misc_RNA (1)...(19): siRNA sense strand
gauacagguucugaaauuu

SEQ ID NO: 2210172 - RNA, 19 nt, Homo sapiens
  misc_RNA (1)...(19): siRNA sense strand
ugacuugggucuucccuuu

SEQ ID NO: 2210173 - RNA, 19 nt, Homo sapiens
  misc_RNA (1)...(19): siRNA sense strand
ggaauauucucauaauguc

SEQ ID NO: 2210174 - RNA, 19 nt, Homo sapiens
  misc_RNA (1)...(19): siRNA sense strand
gaaguucaguaucgccaaa

SEQ ID NO: 2210175 - RNA, 19 nt, Homo sapiens
  misc_RNA (1)...(19): siRNA sense strand
agauacagguucugaaauu

SEQ ID NO: 2210176 - RNA, 19 nt, Homo sapiens
  misc_RNA (1)...(19): siRNA sense strand
cgaaggaaauggagcaugu

SEQ ID NO: 2210177 - RNA, 19 nt, Homo sapiens
  misc_RNA (1)...(19): siRNA sense strand
acaaagcccugaagcagaa

SEQ ID NO: 2210178 - RNA, 19 nt, Homo sapiens
  misc_RNA (1)...(19): siRNA sense strand
gaaaugugccagcgaguga

SEQ ID NO: 2210179 - RNA, 19 nt, Homo sapiens
  misc_RNA (1)...(19): siRNA sense strand
gcagaaacuggaucucuuu

SEQ ID NO: 2210180 - RNA, 19 nt, Homo sapiens
  misc_RNA (1)...(19): siRNA sense strand
gaacaagaacgacuucaag

SEQ ID NO: 2210181 - RNA, 19 nt, Homo sapiens
  misc_RNA (1)...(19): siRNA sense strand
gcaguucgaugacuacucu

SEQ ID NO: 2210182 - RNA, 19 nt, Homo sapiens
  misc_RNA (1)...(19): siRNA sense strand
aagggaaguugguguauuu

SEQ ID NO: 2210183 - RNA, 19 nt, Homo sapiens
  misc_RNA (1)...(19): siRNA sense strand
ggaaagagguuuugagucu

SEQ ID NO: 2210184 - RNA, 19 nt, Homo sapiens
  misc_RNA (1)...(19): siRNA sense strand
cggcugagcuggugggauu

SEQ ID NO: 2210185 - RNA, 19 nt, Homo sapiens
  misc_RNA (1)...(19): siRNA sense strand
cuucagacauugauuguga

SEQ ID NO: 2210186 - RNA, 19 nt, Homo sapiens
  misc_RNA (1)...(19): siRNA sense strand
gagcacacauacagccauu

SEQ ID NO: 2210187 - RNA, 19 nt, Homo sapiens
  misc_RNA (1)...(19): siRNA sense strand
ggacaggugcagccacuaa

SEQ ID NO: 2210188 - RNA, 19 nt, Homo sapiens
  misc_RNA (1)...(19): siRNA sense strand
ggaacaagcugcgccucaa

SEQ ID NO: 2210189 - RNA, 19 nt, Homo sapiens
  misc_RNA (1)...(19): siRNA sense strand
gugcaaggcuuugauuaug

SEQ ID NO: 2210190 - RNA, 19 nt, Homo sapiens
  misc_RNA (1)...(19): siRNA sense strand
gcuccugacucaccucauu

SEQ ID NO: 2210191 - RNA, 19 nt, Homo sapiens
  misc_RNA (1)...(19): siRNA sense strand
uuucagagcuaccauguau

SEQ ID NO: 2210192 - RNA, 19 nt, Homo sapiens
  misc_RNA (1)...(19): siRNA sense strand
gcaggcuacuuccagcuaa

SEQ ID NO: 2210193 - RNA, 19 nt, Homo sapiens
  misc_RNA (1)...(19): siRNA sense strand
gcauauuacucacccacaa

SEQ ID NO: 2210194 - RNA, 19 nt, Homo sapiens
  misc_RNA (1)...(19): siRNA sense strand
acaauuagcaccacaaguu

SEQ ID NO: 2210195 - RNA, 19 nt, Homo sapiens
  misc_RNA (1)...(19): siRNA sense strand
caagcaaaguuccuaaucu

SEQ ID NO: 2210196 - RNA, 19 nt, Homo sapiens
  misc_RNA (1)...(19): siRNA sense strand
ccaagaggaagggauauua

SEQ ID NO: 2210197 - RNA, 19 nt, Homo sapiens
  misc_RNA (1)...(19): siRNA sense strand
ucagagcuaccauguauaa

SEQ ID NO: 2210198 - RNA, 19 nt, Homo sapiens
  misc_RNA (1)...(19): siRNA sense strand
ggagagugcagaucaguga

SEQ ID NO: 2210199 - RNA, 19 nt, Homo sapiens
  misc_RNA (1)...(19): siRNA sense strand
gaugacuacucuugcuaaa

SEQ ID NO: 2210200 - RNA, 19 nt, Homo sapiens
  misc_RNA (1)...(19): siRNA sense strand
ucucaggauuucaaagaua

SEQ ID NO: 2210201 - RNA, 19 nt, Homo sapiens
  misc_RNA (1)...(19): siRNA sense strand
gaaaugaccagcagaaagc

SEQ ID NO: 2210202 - RNA, 19 nt, Homo sapiens
  misc_RNA (1)...(19): siRNA sense strand
gaacaagcugcgccucaaa

SEQ ID NO: 2210203 - RNA, 19 nt, Homo sapiens
  misc_RNA (1)...(19): siRNA sense strand
gaccgcagcugccaagauc

SEQ ID NO: 2210204 - RNA, 19 nt, Homo sapiens
  misc_RNA (1)...(19): siRNA sense strand
caaaggagagugcagauca

SEQ ID NO: 2210205 - RNA, 19 nt, Homo sapiens
  misc_RNA (1)...(19): siRNA sense strand
caacagcuccucccaaugg

SEQ ID NO: 2210206 - RNA, 19 nt, Homo sapiens
  misc_RNA (1)...(19): siRNA sense strand
caaaguuccuaaucuucuu

SEQ ID NO: 2210207 - RNA, 19 nt, Homo sapiens
  misc_RNA (1)...(19): siRNA sense strand
caacuugacaauucaggua

SEQ ID NO: 2210208 - RNA, 19 nt, Homo sapiens
  misc_RNA (1)...(19): siRNA sense strand
ccagugacaucaauucauc

SEQ ID NO: 2210209 - RNA, 19 nt, Homo sapiens
  misc_RNA (1)...(19): siRNA sense strand
ggauuugucucugauuuca

SEQ ID NO: 2210210 - RNA, 19 nt, Homo sapiens
  misc_RNA (1)...(19): siRNA sense strand
ggacuuccuccauuucaaa

SEQ ID NO: 2210211 - RNA, 19 nt, Homo sapiens
  misc_RNA (1)...(19): siRNA sense strand
gaaagaaagaagauguaug

SEQ ID NO: 2210212 - RNA, 19 nt, Homo sapiens
  misc_RNA (1)...(19): siRNA sense strand
gguggccgcugaacccuuu

SEQ ID NO: 2210213 - RNA, 19 nt, Homo sapiens
  misc_RNA (1)...(19): siRNA sense strand
caaaggaggaggcaaggaa

SEQ ID NO: 2210214 - RNA, 19 nt, Homo sapiens
  misc_RNA (1)...(19): siRNA sense strand
caaguuugcucagacaaug

SEQ ID NO: 2210215 - RNA, 19 nt, Homo sapiens
  misc_RNA (1)...(19): siRNA sense strand
aagcaaaguuccuaaucuu

SEQ ID NO: 2210216 - RNA, 19 nt, Homo sapiens
  misc_RNA (1)...(19): siRNA sense strand
cagcagagccuggcagaaa

SEQ ID NO: 2210217 - RNA, 19 nt, Homo sapiens
  misc_RNA (1)...(19): siRNA sense strand
gcuaccauguauaaaugua

SEQ ID NO: 2210218 - RNA, 19 nt, Homo sapiens
  misc_RNA (1)...(19): siRNA sense strand
ucacauuguuucugaggaa

SEQ ID NO: 2210219 - RNA, 19 nt, Homo sapiens
  misc_RNA (1)...(19): siRNA sense strand
ugucucaucucccaucauu

SEQ ID NO: 2210220 - RNA, 19 nt, Homo sapiens
  misc_RNA (1)...(19): siRNA sense strand
caucccagcugccaacaga

SEQ ID NO: 2210221 - RNA, 19 nt, Homo sapiens
  misc_RNA (1)...(19): siRNA sense strand
agaaaugacuugggucuuc

SEQ ID NO: 2210222 - RNA, 19 nt, Homo sapiens
  misc_RNA (1)...(19): siRNA sense strand
cuacauguaugcaagaaca

SEQ ID NO: 2210223 - RNA, 19 nt, Homo sapiens
  misc_RNA (1)...(19): siRNA sense strand
cagccgaugugucagguuu

SEQ ID NO: 2210224 - RNA, 19 nt, Homo sapiens
  misc_RNA (1)...(19): siRNA sense strand
gcagaaggcauuccaggau

SEQ ID NO: 2210225 - RNA, 19 nt, Homo sapiens
  misc_RNA (1)...(19): siRNA sense strand
gcaaugcugcaguuuguga

SEQ ID NO: 2210226 - RNA, 19 nt, Homo sapiens
  misc_RNA (1)...(19): siRNA sense strand
ugucacaguugguuauuau

SEQ ID NO: 2210227 - RNA, 19 nt, Homo sapiens
  misc_RNA (1)...(19): siRNA sense strand
gcugcugaaucuucuauau

SEQ ID NO: 2210228 - RNA, 19 nt, Homo sapiens
  misc_RNA (1)...(19): siRNA sense strand
gcaaaugacucugcuaacc

SEQ ID NO: 2210229 - RNA, 19 nt, Homo sapiens
  misc_RNA (1)...(19): siRNA sense strand
gaaugaagaggcaaaugug

SEQ ID NO: 2210230 - RNA, 19 nt, Homo sapiens
  misc_RNA (1)...(19): siRNA sense strand
ggaagaacaagaacgacuu

SEQ ID NO: 2210231 - RNA, 19 nt, Homo sapiens
  misc_RNA (1)...(19): siRNA sense strand
ggcagggacuuccuccauu

SEQ ID NO: 2210232 - RNA, 19 nt, Homo sapiens
  misc_RNA (1)...(19): siRNA sense strand
gaucagucggcuuuaaauu

SEQ ID NO: 2210233 - RNA, 19 nt, Homo sapiens
  misc_RNA (1)...(19): siRNA sense strand
gcaggaagaacaagaacga

SEQ ID NO: 2210234 - RNA, 19 nt, Homo sapiens
  misc_RNA (1)...(19): siRNA sense strand
ccaauaaccuguggaucau

SEQ ID NO: 2210235 - RNA, 19 nt, Homo sapiens
  misc_RNA (1)...(19): siRNA sense strand
gcccagcuauucaugaugu

SEQ ID NO: 2210236 - RNA, 19 nt, Homo sapiens
  misc_RNA (1)...(19): siRNA sense strand
cugcagcccugguugcuaa

SEQ ID NO: 2210237 - RNA, 19 nt, Homo sapiens
  misc_RNA (1)...(19): siRNA sense strand
ggaagaaugaagaggcaaa

SEQ ID NO: 2210238 - RNA, 19 nt, Homo sapiens
  misc_RNA (1)...(19): siRNA sense strand
aaaccaacauugacagagu

SEQ ID NO: 2210239 - RNA, 19 nt, Homo sapiens
  misc_RNA (1)...(19): siRNA sense strand
agucagacaucgagcacua

SEQ ID NO: 2210240 - RNA, 19 nt, Homo sapiens
  misc_RNA (1)...(19): siRNA sense strand
gagcgguucuauuugacaa

SEQ ID NO: 2210241 - RNA, 19 nt, Homo sapiens
  misc_RNA (1)...(19): siRNA sense strand
aaaagcaacuugacaauuc

SEQ ID NO: 2210242 - RNA, 19 nt, Homo sapiens
  misc_RNA (1)...(19): siRNA sense strand
ucaccaacauggccuuuca

SEQ ID NO: 2210243 - RNA, 19 nt, Homo sapiens
  misc_RNA (1)...(19): siRNA sense strand
gaaacucauuuagcuccaa

SEQ ID NO: 2210244 - RNA, 19 nt, Homo sapiens
  misc_RNA (1)...(19): siRNA sense strand
gcuuuaaauuacucaggua

SEQ ID NO: 2210245 - RNA, 19 nt, Homo sapiens
  misc_RNA (1)...(19): siRNA sense strand
ucagucggcuuuaaauuac

SEQ ID NO: 2210246 - RNA, 19 nt, Homo sapiens
  misc_RNA (1)...(19): siRNA sense strand
ggcaacagaugaagaacuc

SEQ ID NO: 2210247 - RNA, 19 nt, Homo sapiens
  misc_RNA (1)...(19): siRNA sense strand
gaggaggucaucccuguga

SEQ ID NO: 2210248 - RNA, 19 nt, Homo sapiens
  misc_RNA (1)...(19): siRNA sense strand
cacaguaucaucuaaggua

SEQ ID NO: 2210249 - RNA, 19 nt, Homo sapiens
  misc_RNA (1)...(19): siRNA sense strand
cagaacaucuugggauauc

SEQ ID NO: 2210250 - RNA, 19 nt, Homo sapiens
  misc_RNA (1)...(19): siRNA sense strand
uaacauuacugccucauga

SEQ ID NO: 2210251 - RNA, 19 nt, Homo sapiens
  misc_RNA (1)...(19): siRNA sense strand
caacaacaguuaacacaau

SEQ ID NO: 2210252 - RNA, 19 nt, Homo sapiens
  misc_RNA (1)...(19): siRNA sense strand
acaagagacucaaaucuaa

SEQ ID NO: 2210253 - RNA, 19 nt, Homo sapiens
  misc_RNA (1)...(19): siRNA sense strand
gcucagugaugguacguua

SEQ ID NO: 2210254 - RNA, 19 nt, Homo sapiens
  misc_RNA (1)...(19): siRNA sense strand
ccacuacuccuuucucuua

SEQ ID NO: 2210255 - RNA, 19 nt, Homo sapiens
  misc_RNA (1)...(19): siRNA sense strand
cgaaugaacucuaaagaca

SEQ ID NO: 2210256 - RNA, 19 nt, Homo sapiens
  misc_RNA (1)...(19): siRNA sense strand
gaaagcaucccuucuuaug

SEQ ID NO: 2210257 - RNA, 19 nt, Homo sapiens
  misc_RNA (1)...(19): siRNA sense strand
gaaggucuguccaacuuga

SEQ ID NO: 2210258 - RNA, 19 nt, Homo sapiens
  misc_RNA (1)...(19): siRNA sense strand
ggaaaucccuaaccucaca

SEQ ID NO: 2210259 - RNA, 19 nt, Homo sapiens
  misc_RNA (1)...(19): siRNA sense strand
gaacuguaacugugacaua

SEQ ID NO: 2210260 - RNA, 19 nt, Homo sapiens
  misc_RNA (1)...(19): siRNA sense strand
acacauguauggugaguaa

SEQ ID NO: 2210261 - RNA, 19 nt, Homo sapiens
  misc_RNA (1)...(19): siRNA sense strand
gaugguacguuaaauuuca

SEQ ID NO: 2210262 - RNA, 19 nt, Homo sapiens
  misc_RNA (1)...(19): siRNA sense strand
ccacaucccugacaucugu

SEQ ID NO: 2210263 - RNA, 19 nt, Homo sapiens
  misc_RNA (1)...(19): siRNA sense strand
caaggacuguugaaauuau

SEQ ID NO: 2210264 - RNA, 19 nt, Homo sapiens
  misc_RNA (1)...(19): siRNA sense strand
ggauagcugugcucaguga

SEQ ID NO: 2210265 - RNA, 19 nt, Homo sapiens
  misc_RNA (1)...(19): siRNA sense strand
gaauggagcuuuuguauac

SEQ ID NO: 2210266 - RNA, 19 nt, Homo sapiens
  misc_RNA (1)...(19): siRNA sense strand
uaauguggaugaugagauu

SEQ ID NO: 2210267 - RNA, 19 nt, Homo sapiens
  misc_RNA (1)...(19): siRNA sense strand
uggcucagcugguggauaa

SEQ ID NO: 2210268 - RNA, 19 nt, Homo sapiens
  misc_RNA (1)...(19): siRNA sense strand
uaacacuccucccaaucua

SEQ ID NO: 2210269 - RNA, 19 nt, Homo sapiens
  misc_RNA (1)...(19): siRNA sense strand
gcaccuaaaucacuauaac

SEQ ID NO: 2210270 - RNA, 19 nt, Homo sapiens
  misc_RNA (1)...(19): siRNA sense strand
uugaaagcaucccuucuua

SEQ ID NO: 2210271 - RNA, 19 nt, Homo sapiens
  misc_RNA (1)...(19): siRNA sense strand
gcacaaggucgacagagaa

SEQ ID NO: 2210272 - RNA, 19 nt, Homo sapiens
  misc_RNA (1)...(19): siRNA sense strand
gaaauccuacaguugagua

SEQ ID NO: 2210273 - RNA, 19 nt, Homo sapiens
  misc_RNA (1)...(19): siRNA sense strand
agaauuacuucacaugcua

SEQ ID NO: 2210274 - RNA, 19 nt, Homo sapiens
  misc_RNA (1)...(19): siRNA sense strand
uaaagacaauguacaagag

SEQ ID NO: 2210275 - RNA, 19 nt, Homo sapiens
  misc_RNA (1)...(19): siRNA sense strand
ugaacaagaugaccuuaca

SEQ ID NO: 2210276 - RNA, 19 nt, Homo sapiens
  misc_RNA (1)...(19): siRNA sense strand
gaugauacagucccagauu

SEQ ID NO: 2210277 - RNA, 19 nt, Homo sapiens
  misc_RNA (1)...(19): siRNA sense strand
gcagugaugcuggucauuu

SEQ ID NO: 2210278 - RNA, 19 nt, Homo sapiens
  misc_RNA (1)...(19): siRNA sense strand
gcggauagcugugcucagu

SEQ ID NO: 2210279 - RNA, 19 nt, Homo sapiens
  misc_RNA (1)...(19): siRNA sense strand
caucaggccuggcucuuuc

SEQ ID NO: 2210280 - RNA, 19 nt, Homo sapiens
  misc_RNA (1)...(19): siRNA sense strand
ucacaacccuuggaacugu

SEQ ID NO: 2210281 - RNA, 19 nt, Homo sapiens
  misc_RNA (1)...(19): siRNA sense strand
gugaugguacguuaaauuu

SEQ ID NO: 2210282 - RNA, 19 nt, Homo sapiens
  misc_RNA (1)...(19): siRNA sense strand
gcugcuggcucuucaacuu

SEQ ID NO: 2210283 - RNA, 19 nt, Homo sapiens
  misc_RNA (1)...(19): siRNA sense strand
ucagcaaggugauuugugu

SEQ ID NO: 2210284 - RNA, 19 nt, Homo sapiens
  misc_RNA (1)...(19): siRNA sense strand
auacaaaucucccuucaac

SEQ ID NO: 2210285 - RNA, 19 nt, Homo sapiens
  misc_RNA (1)...(19): siRNA sense strand
ggagacacacccauggaaa

SEQ ID NO: 2210286 - RNA, 19 nt, Homo sapiens
  misc_RNA (1)...(19): siRNA sense strand
acucauggcugcagugaug

SEQ ID NO: 2210287 - RNA, 19 nt, Homo sapiens
  misc_RNA (1)...(19): siRNA sense strand
gaaccuccaugagaaccaa

SEQ ID NO: 2210288 - RNA, 19 nt, Homo sapiens
  misc_RNA (1)...(19): siRNA sense strand
uacaagagacucaaaucua

SEQ ID NO: 2210289 - RNA, 19 nt, Homo sapiens
  misc_RNA (1)...(19): siRNA sense strand
uuggagagcucgaccagaa

SEQ ID NO: 2210290 - RNA, 19 nt, Homo sapiens
  misc_RNA (1)...(19): siRNA sense strand
gaacucuaaagacaaugua

SEQ ID NO: 2210291 - RNA, 19 nt, Homo sapiens
  misc_RNA (1)...(19): siRNA sense strand
acaucuguaucuuggauua

SEQ ID NO: 2210292 - RNA, 19 nt, Homo sapiens
  misc_RNA (1)...(19): siRNA sense strand
ggagagcucgaccagaauu

SEQ ID NO: 2210293 - RNA, 19 nt, Homo sapiens
  misc_RNA (1)...(19): siRNA sense strand
gaaugaacucuaaagacaa

SEQ ID NO: 2210294 - RNA, 19 nt, Homo sapiens
  misc_RNA (1)...(19): siRNA sense strand
ggugauuuguguucggaaa

SEQ ID NO: 2210295 - RNA, 19 nt, Homo sapiens
  misc_RNA (1)...(19): siRNA sense strand
cuaaagacaauguacaaga

SEQ ID NO: 2210296 - RNA, 19 nt, Homo sapiens
  misc_RNA (1)...(19): siRNA sense strand
gcacggaccacagauaaca

SEQ ID NO: 2210297 - RNA, 19 nt, Homo sapiens
  misc_RNA (1)...(19): siRNA sense strand
aaauguaacugugcaagau

SEQ ID NO: 2210298 - RNA, 19 nt, Homo sapiens
  misc_RNA (1)...(19): siRNA sense strand
ggauacauuuacaucacaa

SEQ ID NO: 2210299 - RNA, 19 nt, Homo sapiens
  misc_RNA (1)...(19): siRNA sense strand
gaacggaaugccuuugaca

SEQ ID NO: 2210300 - RNA, 19 nt, Homo sapiens
  misc_RNA (1)...(19): siRNA sense strand
guauacuugucuaaacuga

SEQ ID NO: 2210301 - RNA, 19 nt, Homo sapiens
  misc_RNA (1)...(19): siRNA sense strand
ucagaaccauugaaauugg

SEQ ID NO: 2210302 - RNA, 19 nt, Homo sapiens
  misc_RNA (1)...(19): siRNA sense strand
gcacuugagacacuuggaa

SEQ ID NO: 2210303 - RNA, 19 nt, Homo sapiens
  misc_RNA (1)...(19): siRNA sense strand
caaccuggcacacaauaau

SEQ ID NO: 2210304 - RNA, 19 nt, Homo sapiens
  misc_RNA (1)...(19): siRNA sense strand
cauaucagaaccauugaaa

SEQ ID NO: 2210305 - RNA, 19 nt, Homo sapiens
  misc_RNA (1)...(19): siRNA sense strand
gcaugaaccguuauugauc

SEQ ID NO: 2210306 - RNA, 19 nt, Homo sapiens
  misc_RNA (1)...(19): siRNA sense strand
ugacaucuguaucuuggau

SEQ ID NO: 2210307 - RNA, 19 nt, Homo sapiens
  misc_RNA (1)...(19): siRNA sense strand
gagcucugguugcgaaaca

SEQ ID NO: 2210308 - RNA, 19 nt, Homo sapiens
  misc_RNA (1)...(19): siRNA sense strand
ccaaauggaacagucauga

SEQ ID NO: 2210309 - RNA, 19 nt, Homo sapiens
  misc_RNA (1)...(19): siRNA sense strand
acaaggacuguugaaauua

SEQ ID NO: 2210310 - RNA, 19 nt, Homo sapiens
  misc_RNA (1)...(19): siRNA sense strand
uaacagggcccuauuugac

SEQ ID NO: 2210311 - RNA, 19 nt, Homo sapiens
  misc_RNA (1)...(19): siRNA sense strand
cagcaaccacuacuccuuu

SEQ ID NO: 2210312 - RNA, 19 nt, Homo sapiens
  misc_RNA (1)...(19): siRNA sense strand
gaaccucaacacucuggaa

SEQ ID NO: 2210313 - RNA, 19 nt, Homo sapiens
  misc_RNA (1)...(19): siRNA sense strand
gugcaugaaccguuauuga

SEQ ID NO: 2210314 - RNA, 19 nt, Homo sapiens
  misc_RNA (1)...(19): siRNA sense strand
cgaccagaauuacuucaca

SEQ ID NO: 2210315 - RNA, 19 nt, Homo sapiens
  misc_RNA (1)...(19): siRNA sense strand
gagagcucgaccagaauua

SEQ ID NO: 2210316 - RNA, 19 nt, Homo sapiens
  misc_RNA (1)...(19): siRNA sense strand
uugaaggucuguccaacuu

SEQ ID NO: 2210317 - RNA, 19 nt, Homo sapiens
  misc_RNA (1)...(19): siRNA sense strand
ccaaauccagaucaucaaa

SEQ ID NO: 2210318 - RNA, 19 nt, Homo sapiens
  misc_RNA (1)...(19): siRNA sense strand
guacaagagacucaaaucu

SEQ ID NO: 2210319 - RNA, 19 nt, Homo sapiens
  misc_RNA (1)...(19): siRNA sense strand
caaauguaacugugcaaga

SEQ ID NO: 2210320 - RNA, 19 nt, Homo sapiens
  misc_RNA (1)...(19): siRNA sense strand
ucaacacucuggaacucuu

SEQ ID NO: 2210321 - RNA, 19 nt, Homo sapiens
  misc_RNA (1)...(19): siRNA sense strand
gagcaugagcaccuaaauc

SEQ ID NO: 2210322 - RNA, 19 nt, Homo sapiens
  misc_RNA (1)...(19): siRNA sense strand
ggaccacagauaacaaugu

SEQ ID NO: 2210323 - RNA, 19 nt, Homo sapiens
  misc_RNA (1)...(19): siRNA sense strand
gaccagaauuacuucacau

SEQ ID NO: 2210324 - RNA, 19 nt, Homo sapiens
  misc_RNA (1)...(19): siRNA sense strand
gaaugccuuugacaaccuu

SEQ ID NO: 2210325 - RNA, 19 nt, Homo sapiens
  misc_RNA (1)...(19): siRNA sense strand
gcuaugcuccggugauugu

SEQ ID NO: 2210326 - RNA, 19 nt, Homo sapiens
  misc_RNA (1)...(19): siRNA sense strand
gagcggauacauuuacauc

SEQ ID NO: 2210327 - RNA, 19 nt, Homo sapiens
  misc_RNA (1)...(19): siRNA sense strand
aaccauaucagaaccauug

SEQ ID NO: 2210328 - RNA, 19 nt, Homo sapiens
  misc_RNA (1)...(19): siRNA sense strand
gcagcaaccaguucagcaa

SEQ ID NO: 2210329 - RNA, 19 nt, Homo sapiens
  misc_RNA (1)...(19): siRNA sense strand
ucauacaaaucucccuuca

SEQ ID NO: 2210330 - RNA, 19 nt, Homo sapiens
  misc_RNA (1)...(19): siRNA sense strand
gagcaccuaaaucacuaua

SEQ ID NO: 2210331 - RNA, 19 nt, Homo sapiens
  misc_RNA (1)...(19): siRNA sense strand
aaauccagaucaucaaagu

SEQ ID NO: 2210332 - RNA, 19 nt, Homo sapiens
  misc_RNA (1)...(19): siRNA sense strand
uuacauccacagcagauaa

SEQ ID NO: 2210333 - RNA, 19 nt, Homo sapiens
  misc_RNA (1)...(19): siRNA sense strand
uggcgaaccucaacacucu

SEQ ID NO: 2210334 - RNA, 19 nt, Homo sapiens
  misc_RNA (1)...(19): siRNA sense strand
gaguaggaaccauaucaga

SEQ ID NO: 2210335 - RNA, 19 nt, Homo sapiens
  misc_RNA (1)...(19): siRNA sense strand
gcagcaaccacuacuccuu

SEQ ID NO: 2210336 - RNA, 19 nt, Homo sapiens
  misc_RNA (1)...(19): siRNA sense strand
ucagugaugguacguuaaa

SEQ ID NO: 2210337 - RNA, 19 nt, Homo sapiens
  misc_RNA (1)...(19): siRNA sense strand
gaacaagaugaccuuacau

SEQ ID NO: 2210338 - RNA, 19 nt, Homo sapiens
  misc_RNA (1)...(19): siRNA sense strand
ccacagcagauaaugauag

SEQ ID NO: 2210339 - RNA, 19 nt, Homo sapiens
  misc_RNA (1)...(19): siRNA sense strand
guaacacuccucccaaucu

SEQ ID NO: 2210340 - RNA, 19 nt, Homo sapiens
  misc_RNA (1)...(19): siRNA sense strand
caucuagagcggauacauu

SEQ ID NO: 2210341 - RNA, 19 nt, Homo sapiens
  misc_RNA (1)...(19): siRNA sense strand
ggaaugccuuugacaaccu

SEQ ID NO: 2210342 - RNA, 19 nt, Homo sapiens
  misc_RNA (1)...(19): siRNA sense strand
cgaaacaaccccauugaaa

SEQ ID NO: 2210343 - RNA, 19 nt, Homo sapiens
  misc_RNA (1)...(19): siRNA sense strand
gcggauacauuuacaucac

SEQ ID NO: 2210344 - RNA, 19 nt, Homo sapiens
  misc_RNA (1)...(19): siRNA sense strand
gaggcacggaccacagaua

SEQ ID NO: 2210345 - RNA, 19 nt, Homo sapiens
  misc_RNA (1)...(19): siRNA sense strand
gaaacaaccccauugaaag

SEQ ID NO: 2210346 - RNA, 19 nt, Homo sapiens
  misc_RNA (1)...(19): siRNA sense strand
gcaaccaguucagcaaggu

SEQ ID NO: 2210347 - RNA, 19 nt, Homo sapiens
  misc_RNA (1)...(19): siRNA sense strand
gaaccaaauccagaucauc

SEQ ID NO: 2210348 - RNA, 19 nt, Homo sapiens
  misc_RNA (1)...(19): siRNA sense strand
aaccacacaacaacaguua

SEQ ID NO: 2210349 - RNA, 19 nt, Homo sapiens
  misc_RNA (1)...(19): siRNA sense strand
cauguauggugaguaauuc

SEQ ID NO: 2210350 - RNA, 19 nt, Homo sapiens
  misc_RNA (1)...(19): siRNA sense strand
gcuccaaugucuacagaaa

SEQ ID NO: 2210351 - RNA, 19 nt, Homo sapiens
  misc_RNA (1)...(19): siRNA sense strand
cccggaaccugcucuggua

SEQ ID NO: 2210352 - RNA, 19 nt, Homo sapiens
  misc_RNA (1)...(19): siRNA sense strand
ccaagcccgucgucuacuu

SEQ ID NO: 2210353 - RNA, 19 nt, Homo sapiens
  misc_RNA (1)...(19): siRNA sense strand
cagcuccaaugucuacaga

SEQ ID NO: 2210354 - RNA, 19 nt, Homo sapiens
  misc_RNA (1)...(19): siRNA sense strand
gcgcggaucucaucuuccu

SEQ ID NO: 2210355 - RNA, 19 nt, Homo sapiens
  misc_RNA (1)...(19): siRNA sense strand
ccacuucagcuuccucaug

SEQ ID NO: 2210356 - RNA, 19 nt, Homo sapiens
  misc_RNA (1)...(19): siRNA sense strand
cugcucagcuccaaugucu

SEQ ID NO: 2210357 - RNA, 19 nt, Homo sapiens
  misc_RNA (1)...(19): siRNA sense strand
uggcaacgcugcgcuucuu

SEQ ID NO: 2210358 - RNA, 19 nt, Homo sapiens
  misc_RNA (1)...(19): siRNA sense strand
ggaaccugcucugguacau

SEQ ID NO: 2210359 - RNA, 19 nt, Homo sapiens
  misc_RNA (1)...(19): siRNA sense strand
gcucagcuccaaugucuac

SEQ ID NO: 2210360 - RNA, 19 nt, Homo sapiens
  misc_RNA (1)...(19): siRNA sense strand
gcugcuggcucugcugugu

SEQ ID NO: 2210361 - RNA, 19 nt, Homo sapiens
  misc_RNA (1)...(19): siRNA sense strand
ccacuacuucuaccacuuc

SEQ ID NO: 2210362 - RNA, 19 nt, Homo sapiens
  misc_RNA (1)...(19): siRNA sense strand
aggaggauguggccuucaa

SEQ ID NO: 2210363 - RNA, 19 nt, Homo sapiens
  misc_RNA (1)...(19): siRNA sense strand
gaaaccccuucgccaucua

SEQ ID NO: 2210364 - RNA, 19 nt, Homo sapiens
  misc_RNA (1)...(19): siRNA sense strand
caccugaccaccugugugu

SEQ ID NO: 2210365 - RNA, 19 nt, Homo sapiens
  misc_RNA (1)...(19): siRNA sense strand
cugcgcggaucucaucuuc

SEQ ID NO: 2210366 - RNA, 19 nt, Homo sapiens
  misc_RNA (1)...(19): siRNA sense strand
ugaagaaucucauagaaga

SEQ ID NO: 2210367 - RNA, 19 nt, Homo sapiens
  misc_RNA (1)...(19): siRNA sense strand
gaugcaaccucgaauguuu

SEQ ID NO: 2210368 - RNA, 19 nt, Homo sapiens
  misc_RNA (1)...(19): siRNA sense strand
ucacaaaucuccuucaagu

SEQ ID NO: 2210369 - RNA, 19 nt, Homo sapiens
  misc_RNA (1)...(19): siRNA sense strand
caaauucaguacagcuuaa

SEQ ID NO: 2210370 - RNA, 19 nt, Homo sapiens
  misc_RNA (1)...(19): siRNA sense strand
gauagaagcauuucaggaa

SEQ ID NO: 2210371 - RNA, 19 nt, Homo sapiens
  misc_RNA (1)...(19): siRNA sense strand
gaacguuccuucauucucu

SEQ ID NO: 2210372 - RNA, 19 nt, Homo sapiens
  misc_RNA (1)...(19): siRNA sense strand
gaagcaaggagacaacuuu

SEQ ID NO: 2210373 - RNA, 19 nt, Homo sapiens
  misc_RNA (1)...(19): siRNA sense strand
uccaagaacugcagaaauu

SEQ ID NO: 2210374 - RNA, 19 nt, Homo sapiens
  misc_RNA (1)...(19): siRNA sense strand
caagaagccuaucagaaug

SEQ ID NO: 2210375 - RNA, 19 nt, Homo sapiens
  misc_RNA (1)...(19): siRNA sense strand
ucaaagaaguaucagcaaa

SEQ ID NO: 2210376 - RNA, 19 nt, Homo sapiens
  misc_RNA (1)...(19): siRNA sense strand
ccaagaagccuaucagaau

SEQ ID NO: 2210377 - RNA, 19 nt, Homo sapiens
  misc_RNA (1)...(19): siRNA sense strand
ggagagucagccuuuauua

SEQ ID NO: 2210378 - RNA, 19 nt, Homo sapiens
  misc_RNA (1)...(19): siRNA sense strand
gcaaauucaguacagcuua

SEQ ID NO: 2210379 - RNA, 19 nt, Homo sapiens
  misc_RNA (1)...(19): siRNA sense strand
guagaacguuccuucauuc

SEQ ID NO: 2210380 - RNA, 19 nt, Homo sapiens
  misc_RNA (1)...(19): siRNA sense strand
gauuggaucuccuggaaau

SEQ ID NO: 2210381 - RNA, 19 nt, Homo sapiens
  misc_RNA (1)...(19): siRNA sense strand
uggcuuagauuaccugaaa

SEQ ID NO: 2210382 - RNA, 19 nt, Homo sapiens
  misc_RNA (1)...(19): siRNA sense strand
caagcuuguucgucuaaua

SEQ ID NO: 2210383 - RNA, 19 nt, Homo sapiens
  misc_RNA (1)...(19): siRNA sense strand
gcucagaaguggauagaag

SEQ ID NO: 2210384 - RNA, 19 nt, Homo sapiens
  misc_RNA (1)...(19): siRNA sense strand
gcugacagauuauuugaag

SEQ ID NO: 2210385 - RNA, 19 nt, Homo sapiens
  misc_RNA (1)...(19): siRNA sense strand
cauagaagaugcuggagau

SEQ ID NO: 2210386 - RNA, 19 nt, Homo sapiens
  misc_RNA (1)...(19): siRNA sense strand
agaagaguaugccaagaaa

SEQ ID NO: 2210387 - RNA, 19 nt, Homo sapiens
  misc_RNA (1)...(19): siRNA sense strand
gaauuccgagucuaaagua

SEQ ID NO: 2210388 - RNA, 19 nt, Homo sapiens
  misc_RNA (1)...(19): siRNA sense strand
gaagcugucucggaaagug

SEQ ID NO: 2210389 - RNA, 19 nt, Homo sapiens
  misc_RNA (1)...(19): siRNA sense strand
gaaguuaguccucuuggau

SEQ ID NO: 2210390 - RNA, 19 nt, Homo sapiens
  misc_RNA (1)...(19): siRNA sense strand
uagaagaugcuggagauua

SEQ ID NO: 2210391 - RNA, 19 nt, Homo sapiens
  misc_RNA (1)...(19): siRNA sense strand
acagaggauucuucuauga

SEQ ID NO: 2210392 - RNA, 19 nt, Homo sapiens
  misc_RNA (1)...(19): siRNA sense strand
uguagaacguuccuucauu

SEQ ID NO: 2210393 - RNA, 19 nt, Homo sapiens
  misc_RNA (1)...(19): siRNA sense strand
gaaguggauagaagcauuu

SEQ ID NO: 2210394 - RNA, 19 nt, Homo sapiens
  misc_RNA (1)...(19): siRNA sense strand
uaucaucagucuuacauag

SEQ ID NO: 2210395 - RNA, 19 nt, Homo sapiens
  misc_RNA (1)...(19): siRNA sense strand
ccaagaacugcagaaauua

SEQ ID NO: 2210396 - RNA, 19 nt, Homo sapiens
  misc_RNA (1)...(19): siRNA sense strand
ggaaaucacaaaucuccuu

SEQ ID NO: 2210397 - RNA, 19 nt, Homo sapiens
  misc_RNA (1)...(19): siRNA sense strand
acacagaggauucuucuau

SEQ ID NO: 2210398 - RNA, 19 nt, Homo sapiens
  misc_RNA (1)...(19): siRNA sense strand
aaucccagcugcucucaaa

SEQ ID NO: 2210399 - RNA, 19 nt, Homo sapiens
  misc_RNA (1)...(19): siRNA sense strand
gugaggacguggccgcuuu

SEQ ID NO: 2210400 - RNA, 19 nt, Homo sapiens
  misc_RNA (1)...(19): siRNA sense strand
ccagggcaauagaagagua

SEQ ID NO: 2210401 - RNA, 19 nt, Homo sapiens
  misc_RNA (1)...(19): siRNA sense strand
gagucagccuuuauuagga

SEQ ID NO: 2210402 - RNA, 19 nt, Homo sapiens
  misc_RNA (1)...(19): siRNA sense strand
agaaguggauagaagcauu

SEQ ID NO: 2210403 - RNA, 19 nt, Homo sapiens
  misc_RNA (1)...(19): siRNA sense strand
gaugagaauuccgagucua

SEQ ID NO: 2210404 - RNA, 19 nt, Homo sapiens
  misc_RNA (1)...(19): siRNA sense strand
gugcuaaucuggcccucaa

SEQ ID NO: 2210405 - RNA, 19 nt, Homo sapiens
  misc_RNA (1)...(19): siRNA sense strand
ucaggaaggcacaauauug

SEQ ID NO: 2210406 - RNA, 19 nt, Homo sapiens
  misc_RNA (1)...(19): siRNA sense strand
cagcugcucucaaagaagu

SEQ ID NO: 2210407 - RNA, 19 nt, Homo sapiens
  misc_RNA (1)...(19): siRNA sense strand
ccacagaaagggaugaaug

SEQ ID NO: 2210408 - RNA, 19 nt, Homo sapiens
  misc_RNA (1)...(19): siRNA sense strand
cagaaaaccuacccaagaa

SEQ ID NO: 2210409 - RNA, 19 nt, Homo sapiens
  misc_RNA (1)...(19): siRNA sense strand
auacauaugcugcaaguga

SEQ ID NO: 2210410 - RNA, 19 nt, Homo sapiens
  misc_RNA (1)...(19): siRNA sense strand
ugccuuaucaucagucuua

SEQ ID NO: 2210411 - RNA, 19 nt, Homo sapiens
  misc_RNA (1)...(19): siRNA sense strand
aaagaaguaucagcaaaca

SEQ ID NO: 2210412 - RNA, 19 nt, Homo sapiens
  misc_RNA (1)...(19): siRNA sense strand
aaucacaaaucuccuucaa

SEQ ID NO: 2210413 - RNA, 19 nt, Homo sapiens
  misc_RNA (1)...(19): siRNA sense strand
agaagaugcuggagauuac

SEQ ID NO: 2210414 - RNA, 19 nt, Homo sapiens
  misc_RNA (1)...(19): siRNA sense strand
gauugaaaguguagaacgu

SEQ ID NO: 2210415 - RNA, 19 nt, Homo sapiens
  misc_RNA (1)...(19): siRNA sense strand
uagaagaguaugccaagaa

SEQ ID NO: 2210416 - RNA, 19 nt, Homo sapiens
  misc_RNA (1)...(19): siRNA sense strand
gaucgaaggcucccaucug

SEQ ID NO: 2210417 - RNA, 19 nt, Homo sapiens
  misc_RNA (1)...(19): siRNA sense strand
gagagucagccuuuauuag

SEQ ID NO: 2210418 - RNA, 19 nt, Homo sapiens
  misc_RNA (1)...(19): siRNA sense strand
cacagaggauucuucuaug

SEQ ID NO: 2210419 - RNA, 19 nt, Homo sapiens
  misc_RNA (1)...(19): siRNA sense strand
gaucugcacaagcgaauuc

SEQ ID NO: 2210420 - RNA, 19 nt, Homo sapiens
  misc_RNA (1)...(19): siRNA sense strand
gaacugcagaaauuagauc

SEQ ID NO: 2210421 - RNA, 19 nt, Homo sapiens
  misc_RNA (1)...(19): siRNA sense strand
ccaaugacaccaugaagca

SEQ ID NO: 2210422 - RNA, 19 nt, Homo sapiens
  misc_RNA (1)...(19): siRNA sense strand
uuccgagucuaaaguauuu

SEQ ID NO: 2210423 - RNA, 19 nt, Homo sapiens
  misc_RNA (1)...(19): siRNA sense strand
ucaagugccuuaucaucag

SEQ ID NO: 2210424 - RNA, 19 nt, Homo sapiens
  misc_RNA (1)...(19): siRNA sense strand
aaugaugcccugcuguaua

SEQ ID NO: 2210425 - RNA, 19 nt, Homo sapiens
  misc_RNA (1)...(19): siRNA sense strand
uuacagagacacucaagau

SEQ ID NO: 2210426 - RNA, 19 nt, Homo sapiens
  misc_RNA (1)...(19): siRNA sense strand
aggauucacuguuauucaa

SEQ ID NO: 2210427 - RNA, 19 nt, Homo sapiens
  misc_RNA (1)...(19): siRNA sense strand
ugcccuugcuguuguuaua

SEQ ID NO: 2210428 - RNA, 19 nt, Homo sapiens
  misc_RNA (1)...(19): siRNA sense strand
gcaaggagacaacuuucag

SEQ ID NO: 2210429 - RNA, 19 nt, Homo sapiens
  misc_RNA (1)...(19): siRNA sense strand
caucagggaggaaacagaa

SEQ ID NO: 2210430 - RNA, 19 nt, Homo sapiens
  misc_RNA (1)...(19): siRNA sense strand
caagaacugcagaaauuag

SEQ ID NO: 2210431 - RNA, 19 nt, Homo sapiens
  misc_RNA (1)...(19): siRNA sense strand
ucugggauguauaaacuga

SEQ ID NO: 2210432 - RNA, 19 nt, Homo sapiens
  misc_RNA (1)...(19): siRNA sense strand
uuaaugaugcccugcugua

SEQ ID NO: 2210433 - RNA, 19 nt, Homo sapiens
  misc_RNA (1)...(19): siRNA sense strand
gagauuacagagacacuca

SEQ ID NO: 2210434 - RNA, 19 nt, Homo sapiens
  misc_RNA (1)...(19): siRNA sense strand
gauaccagagccacaaugu

SEQ ID NO: 2210435 - RNA, 19 nt, Homo sapiens
  misc_RNA (1)...(19): siRNA sense strand
gaggcagacucagaaaaua

SEQ ID NO: 2210436 - RNA, 19 nt, Homo sapiens
  misc_RNA (1)...(19): siRNA sense strand
acaagcgaauucacucuca

SEQ ID NO: 2210437 - RNA, 19 nt, Homo sapiens
  misc_RNA (1)...(19): siRNA sense strand
cagcaaacacagaggauuc

SEQ ID NO: 2210438 - RNA, 19 nt, Homo sapiens
  misc_RNA (1)...(19): siRNA sense strand
caaagaaguaucagcaaac

SEQ ID NO: 2210439 - RNA, 19 nt, Homo sapiens
  misc_RNA (1)...(19): siRNA sense strand
ucaagccgguucagaggau

SEQ ID NO: 2210440 - RNA, 19 nt, Homo sapiens
  misc_RNA (1)...(19): siRNA sense strand
ggauguauaaacugaacaa

SEQ ID NO: 2210441 - RNA, 19 nt, Homo sapiens
  misc_RNA (1)...(19): siRNA sense strand
aagaugcccuugcuguugu

SEQ ID NO: 2210442 - RNA, 19 nt, Homo sapiens
  misc_RNA (1)...(19): siRNA sense strand
agaaguaucagcaaacaca

SEQ ID NO: 2210443 - RNA, 19 nt, Homo sapiens
  misc_RNA (1)...(19): siRNA sense strand
aagcuuguucgucuaauaa

SEQ ID NO: 2210444 - RNA, 19 nt, Homo sapiens
  misc_RNA (1)...(19): siRNA sense strand
caaggagacaacuuucaga

SEQ ID NO: 2210445 - RNA, 19 nt, Homo sapiens
  misc_RNA (1)...(19): siRNA sense strand
uagccaaccacgccaauga

SEQ ID NO: 2210446 - RNA, 19 nt, Homo sapiens
  misc_RNA (1)...(19): siRNA sense strand
aaaucaaccagcaagagua

SEQ ID NO: 2210447 - RNA, 19 nt, Homo sapiens
  misc_RNA (1)...(19): siRNA sense strand
ugaacaacaugcucucacu

SEQ ID NO: 2210448 - RNA, 19 nt, Homo sapiens
  misc_RNA (1)...(19): siRNA sense strand
cgaaggcucccaucuggau

SEQ ID NO: 2210449 - RNA, 19 nt, Homo sapiens
  misc_RNA (1)...(19): siRNA sense strand
gauucacuguuauucaagu

SEQ ID NO: 2210450 - RNA, 19 nt, Homo sapiens
  misc_RNA (1)...(19): siRNA sense strand
cagaaacuuaugcaaauuc

SEQ ID NO: 2210451 - RNA, 19 nt, Homo sapiens
  misc_RNA (1)...(19): siRNA sense strand
aagauuguaugccaagcuu

SEQ ID NO: 2210452 - RNA, 19 nt, Homo sapiens
  misc_RNA (1)...(19): siRNA sense strand
aagccuaucagaaugaauu

SEQ ID NO: 2210453 - RNA, 19 nt, Homo sapiens
  misc_RNA (1)...(19): siRNA sense strand
cagaucaaagggcaauaaa

SEQ ID NO: 2210454 - RNA, 19 nt, Homo sapiens
  misc_RNA (1)...(19): siRNA sense strand
cuaguaggagucuugauga

SEQ ID NO: 2210455 - RNA, 19 nt, Homo sapiens
  misc_RNA (1)...(19): siRNA sense strand
gagaauuccgagucuaaag

SEQ ID NO: 2210456 - RNA, 19 nt, Homo sapiens
  misc_RNA (1)...(19): siRNA sense strand
guacagaucaaagggcaau

SEQ ID NO: 2210457 - RNA, 19 nt, Homo sapiens
  misc_RNA (1)...(19): siRNA sense strand
agaggauucuucuaugagu

SEQ ID NO: 2210458 - RNA, 19 nt, Homo sapiens
  misc_RNA (1)...(19): siRNA sense strand
cccagcugcucucaaagaa

SEQ ID NO: 2210459 - RNA, 19 nt, Homo sapiens
  misc_RNA (1)...(19): siRNA sense strand
uuacauagcauuccaucag

SEQ ID NO: 2210460 - RNA, 19 nt, Homo sapiens
  misc_RNA (1)...(19): siRNA sense strand
ucaucagucuuacauagca

SEQ ID NO: 2210461 - RNA, 19 nt, Homo sapiens
  misc_RNA (1)...(19): siRNA sense strand
caagugccuuaucaucagu

SEQ ID NO: 2210462 - RNA, 19 nt, Homo sapiens
  misc_RNA (1)...(19): siRNA sense strand
gcacaagcgaauucacucu

SEQ ID NO: 2210463 - RNA, 19 nt, Homo sapiens
  misc_RNA (1)...(19): siRNA sense strand
caaacacagaggauucuuc

SEQ ID NO: 2210464 - RNA, 19 nt, Homo sapiens
  misc_RNA (1)...(19): siRNA sense strand
gccaagcuuguucgucuaa

SEQ ID NO: 2210465 - RNA, 19 nt, Homo sapiens
  misc_RNA (1)...(19): siRNA sense strand
aaacacagaggauucuucu

SEQ ID NO: 2210466 - RNA, 19 nt, Homo sapiens
  misc_RNA (1)...(19): siRNA sense strand
ggaaauccuucaagaaaua

SEQ ID NO: 2210467 - RNA, 19 nt, Homo sapiens
  misc_RNA (1)...(19): siRNA sense strand
gaaagugcauguaacagaa

SEQ ID NO: 2210468 - RNA, 19 nt, Homo sapiens
  misc_RNA (1)...(19): siRNA sense strand
gcagaaauaugaagagcaa

SEQ ID NO: 2210469 - RNA, 19 nt, Homo sapiens
  misc_RNA (1)...(19): siRNA sense strand
gagaggagcagaaauauga

SEQ ID NO: 2210470 - RNA, 19 nt, Homo sapiens
  misc_RNA (1)...(19): siRNA sense strand
gaaaggagacgcaucuaug

SEQ ID NO: 2210471 - RNA, 19 nt, Homo sapiens
  misc_RNA (1)...(19): siRNA sense strand
gaaaggaaccagucacgaa

SEQ ID NO: 2210472 - RNA, 19 nt, Homo sapiens
  misc_RNA (1)...(19): siRNA sense strand
gcaaauggccuaccuccaa

SEQ ID NO: 2210473 - RNA, 19 nt, Homo sapiens
  misc_RNA (1)...(19): siRNA sense strand
aaacaaggacgaugcauuu

SEQ ID NO: 2210474 - RNA, 19 nt, Homo sapiens
  misc_RNA (1)...(19): siRNA sense strand
ccagaaagaaaucccauua

SEQ ID NO: 2210475 - RNA, 19 nt, Homo sapiens
  misc_RNA (1)...(19): siRNA sense strand
caggucagcugccgucuuu

SEQ ID NO: 2210476 - RNA, 19 nt, Homo sapiens
  misc_RNA (1)...(19): siRNA sense strand
agaaagagcuggaccugau

SEQ ID NO: 2210477 - RNA, 19 nt, Homo sapiens
  misc_RNA (1)...(19): siRNA sense strand
gaaaagccuucaaaagaaa

SEQ ID NO: 2210478 - RNA, 19 nt, Homo sapiens
  misc_RNA (1)...(19): siRNA sense strand
gacgaugcauuuacagauu

SEQ ID NO: 2210479 - RNA, 19 nt, Homo sapiens
  misc_RNA (1)...(19): siRNA sense strand
uggcuacucuuuagaaauu

SEQ ID NO: 2210480 - RNA, 19 nt, Homo sapiens
  misc_RNA (1)...(19): siRNA sense strand
guacagagaagaacaagga

SEQ ID NO: 2210481 - RNA, 19 nt, Homo sapiens
  misc_RNA (1)...(19): siRNA sense strand
agaaacauauggccagauu

SEQ ID NO: 2210482 - RNA, 19 nt, Homo sapiens
  misc_RNA (1)...(19): siRNA sense strand
gggaaauccuucaagaaau

SEQ ID NO: 2210483 - RNA, 19 nt, Homo sapiens
  misc_RNA (1)...(19): siRNA sense strand
gacccagaauauuguguua

SEQ ID NO: 2210484 - RNA, 19 nt, Homo sapiens
  misc_RNA (1)...(19): siRNA sense strand
gaaagagcuggaccugaua

SEQ ID NO: 2210485 - RNA, 19 nt, Homo sapiens
  misc_RNA (1)...(19): siRNA sense strand
gcacacaucgugagacguu

SEQ ID NO: 2210486 - RNA, 19 nt, Homo sapiens
  misc_RNA (1)...(19): siRNA sense strand
caaggacgaugcauuuaca

SEQ ID NO: 2210487 - RNA, 19 nt, Homo sapiens
  misc_RNA (1)...(19): siRNA sense strand
gagcuggaccugauagauu

SEQ ID NO: 2210488 - RNA, 19 nt, Homo sapiens
  misc_RNA (1)...(19): siRNA sense strand
agacggaccugcaggcauu

SEQ ID NO: 2210489 - RNA, 19 nt, Homo sapiens
  misc_RNA (1)...(19): siRNA sense strand
ccaagaaacccucagauuc

SEQ ID NO: 2210490 - RNA, 19 nt, Homo sapiens
  misc_RNA (1)...(19): siRNA sense strand
uaggagaggagcagaaaua

SEQ ID NO: 2210491 - RNA, 19 nt, Homo sapiens
  misc_RNA (1)...(19): siRNA sense strand
cagcucaagugaugaagaa

SEQ ID NO: 2210492 - RNA, 19 nt, Homo sapiens
  misc_RNA (1)...(19): siRNA sense strand
gcuuggcucugauaaagaa

SEQ ID NO: 2210493 - RNA, 19 nt, Homo sapiens
  misc_RNA (1)...(19): siRNA sense strand
ggacuauuccgacccauug

SEQ ID NO: 2210494 - RNA, 19 nt, Homo sapiens
  misc_RNA (1)...(19): siRNA sense strand
caagaaauacagauguuga

SEQ ID NO: 2210495 - RNA, 19 nt, Homo sapiens
  misc_RNA (1)...(19): siRNA sense strand
gaucagguggcuacucuuu

SEQ ID NO: 2210496 - RNA, 19 nt, Homo sapiens
  misc_RNA (1)...(19): siRNA sense strand
ggaaaggagacgcaucuau

SEQ ID NO: 2210497 - RNA, 19 nt, Homo sapiens
  misc_RNA (1)...(19): siRNA sense strand
aaaccuaaguccagugaug

SEQ ID NO: 2210498 - RNA, 19 nt, Homo sapiens
  misc_RNA (1)...(19): siRNA sense strand
gaagaacugguggauguuu

SEQ ID NO: 2210499 - RNA, 19 nt, Homo sapiens
  misc_RNA (1)...(19): siRNA sense strand
aaaccaagauugucacucu

SEQ ID NO: 2210500 - RNA, 19 nt, Homo sapiens
  misc_RNA (1)...(19): siRNA sense strand
gaaagaaaucccauuacuc

SEQ ID NO: 2210501 - RNA, 19 nt, Homo sapiens
  misc_RNA (1)...(19): siRNA sense strand
uaaagaaagugcauguaac

SEQ ID NO: 2210502 - RNA, 19 nt, Homo sapiens
  misc_RNA (1)...(19): siRNA sense strand
cagauucucuacagcuuga

SEQ ID NO: 2210503 - RNA, 19 nt, Homo sapiens
  misc_RNA (1)...(19): siRNA sense strand
agaaagaaaucccauuacu

SEQ ID NO: 2210504 - RNA, 19 nt, Homo sapiens
  misc_RNA (1)...(19): siRNA sense strand
cauccagucucaguaguaa

SEQ ID NO: 2210505 - RNA, 19 nt, Homo sapiens
  misc_RNA (1)...(19): siRNA sense strand
guacgacgccucuaugaca

SEQ ID NO: 2210506 - RNA, 19 nt, Homo sapiens
  misc_RNA (1)...(19): siRNA sense strand
gaacccgacugucccucuu

SEQ ID NO: 2210507 - RNA, 19 nt, Homo sapiens
  misc_RNA (1)...(19): siRNA sense strand
acgcaucuaugacauugua

SEQ ID NO: 2210508 - RNA, 19 nt, Homo sapiens
  misc_RNA (1)...(19): siRNA sense strand
uuacaucagucaccaguuc

SEQ ID NO: 2210509 - RNA, 19 nt, Homo sapiens
  misc_RNA (1)...(19): siRNA sense strand
agaggaaagugaacucaga

SEQ ID NO: 2210510 - RNA, 19 nt, Homo sapiens
  misc_RNA (1)...(19): siRNA sense strand
gaucgggccuguggacuuc

SEQ ID NO: 2210511 - RNA, 19 nt, Homo sapiens
  misc_RNA (1)...(19): siRNA sense strand
gaaauaugaagagcaaaug

SEQ ID NO: 2210512 - RNA, 19 nt, Homo sapiens
  misc_RNA (1)...(19): siRNA sense strand
aaacuaccaucucccuaga

SEQ ID NO: 2210513 - RNA, 19 nt, Homo sapiens
  misc_RNA (1)...(19): siRNA sense strand
gagcagcccguacagagaa

SEQ ID NO: 2210514 - RNA, 19 nt, Homo sapiens
  misc_RNA (1)...(19): siRNA sense strand
cagcuuggcucugauaaag

SEQ ID NO: 2210515 - RNA, 19 nt, Homo sapiens
  misc_RNA (1)...(19): siRNA sense strand
ccaauguucugaccagcuu

SEQ ID NO: 2210516 - RNA, 19 nt, Homo sapiens
  misc_RNA (1)...(19): siRNA sense strand
uaagggaccgggagaagaa

SEQ ID NO: 2210517 - RNA, 19 nt, Homo sapiens
  misc_RNA (1)...(19): siRNA sense strand
cagcugugguuaauccaaa

SEQ ID NO: 2210518 - RNA, 19 nt, Homo sapiens
  misc_RNA (1)...(19): siRNA sense strand
gcagaagagauuucaggaa

SEQ ID NO: 2210519 - RNA, 19 nt, Homo sapiens
  misc_RNA (1)...(19): siRNA sense strand
ccuggcagcugucuauaga

SEQ ID NO: 2210520 - RNA, 19 nt, Homo sapiens
  misc_RNA (1)...(19): siRNA sense strand
ucagguggcuacucuuuag

SEQ ID NO: 2210521 - RNA, 19 nt, Homo sapiens
  misc_RNA (1)...(19): siRNA sense strand
gaaccgagcagcccguaca

SEQ ID NO: 2210522 - RNA, 19 nt, Homo sapiens
  misc_RNA (1)...(19): siRNA sense strand
gaagagcgaggucguaaac

SEQ ID NO: 2210523 - RNA, 19 nt, Homo sapiens
  misc_RNA (1)...(19): siRNA sense strand
ugaaguugcugucagucuu

SEQ ID NO: 2210524 - RNA, 19 nt, Homo sapiens
  misc_RNA (1)...(19): siRNA sense strand
gcccagaggagacuagaaa

SEQ ID NO: 2210525 - RNA, 19 nt, Homo sapiens
  misc_RNA (1)...(19): siRNA sense strand
ggacauccagucucaguag

SEQ ID NO: 2210526 - RNA, 19 nt, Homo sapiens
  misc_RNA (1)...(19): siRNA sense strand
gcaaaguagggaauaugaa

SEQ ID NO: 2210527 - RNA, 19 nt, Homo sapiens
  misc_RNA (1)...(19): siRNA sense strand
guggaugucucacuugcuu

SEQ ID NO: 2210528 - RNA, 19 nt, Homo sapiens
  misc_RNA (1)...(19): siRNA sense strand
aaacauauggccagauuca

SEQ ID NO: 2210529 - RNA, 19 nt, Homo sapiens
  misc_RNA (1)...(19): siRNA sense strand
gauaaagaaagugcaugua

SEQ ID NO: 2210530 - RNA, 19 nt, Homo sapiens
  misc_RNA (1)...(19): siRNA sense strand
ggacuccugugccagaagu

SEQ ID NO: 2210531 - RNA, 19 nt, Homo sapiens
  misc_RNA (1)...(19): siRNA sense strand
agcuggaccugauagauua

SEQ ID NO: 2210532 - RNA, 19 nt, Homo sapiens
  misc_RNA (1)...(19): siRNA sense strand
ggacgaugcauuuacagau

SEQ ID NO: 2210533 - RNA, 19 nt, Homo sapiens
  misc_RNA (1)...(19): siRNA sense strand
gguggcuacucuuuagaaa

SEQ ID NO: 2210534 - RNA, 19 nt, Homo sapiens
  misc_RNA (1)...(19): siRNA sense strand
gauagaagaaagccaagau

SEQ ID NO: 2210535 - RNA, 19 nt, Homo sapiens
  misc_RNA (1)...(19): siRNA sense strand
ggagacgcaucuaugacau

SEQ ID NO: 2210536 - RNA, 19 nt, Homo sapiens
  misc_RNA (1)...(19): siRNA sense strand
aaaggagacgcaucuauga

SEQ ID NO: 2210537 - RNA, 19 nt, Homo sapiens
  misc_RNA (1)...(19): siRNA sense strand
gaauuaugagccagaaguu

SEQ ID NO: 2210538 - RNA, 19 nt, Homo sapiens
  misc_RNA (1)...(19): siRNA sense strand
augaagaacugguggaugu

SEQ ID NO: 2210539 - RNA, 19 nt, Homo sapiens
  misc_RNA (1)...(19): siRNA sense strand
cccagaccauaguaaauuu

SEQ ID NO: 2210540 - RNA, 19 nt, Homo sapiens
  misc_RNA (1)...(19): siRNA sense strand
ccaaaauacugauagaaga

SEQ ID NO: 2210541 - RNA, 19 nt, Homo sapiens
  misc_RNA (1)...(19): siRNA sense strand
ggacgaauuugaaaagcaa

SEQ ID NO: 2210542 - RNA, 19 nt, Homo sapiens
  misc_RNA (1)...(19): siRNA sense strand
cagcuugccuggccuugga

SEQ ID NO: 2210543 - RNA, 19 nt, Homo sapiens
  misc_RNA (1)...(19): siRNA sense strand
caaaguagggaauaugaag

SEQ ID NO: 2210544 - RNA, 19 nt, Homo sapiens
  misc_RNA (1)...(19): siRNA sense strand
ccaguuaaguuuguugaca

SEQ ID NO: 2210545 - RNA, 19 nt, Homo sapiens
  misc_RNA (1)...(19): siRNA sense strand
cccagaauauuguguuaau

SEQ ID NO: 2210546 - RNA, 19 nt, Homo sapiens
  misc_RNA (1)...(19): siRNA sense strand
gaaguugcugucagucuug

SEQ ID NO: 2210547 - RNA, 19 nt, Homo sapiens
  misc_RNA (1)...(19): siRNA sense strand
aagcaaaggccaagcagaa

SEQ ID NO: 2210548 - RNA, 19 nt, Homo sapiens
  misc_RNA (1)...(19): siRNA sense strand
ggagaggagcagaaauaug

SEQ ID NO: 2210549 - RNA, 19 nt, Homo sapiens
  misc_RNA (1)...(19): siRNA sense strand
ggcaaaguagggaauauga

SEQ ID NO: 2210550 - RNA, 19 nt, Homo sapiens
  misc_RNA (1)...(19): siRNA sense strand
cagcuaaccugaagaugcu

SEQ ID NO: 2210551 - RNA, 19 nt, Homo sapiens
  misc_RNA (1)...(19): siRNA sense strand
aaagaaagugcauguaaca

SEQ ID NO: 2210552 - RNA, 19 nt, Homo sapiens
  misc_RNA (1)...(19): siRNA sense strand
ccagaccauaguaaauuua

SEQ ID NO: 2210553 - RNA, 19 nt, Homo sapiens
  misc_RNA (1)...(19): siRNA sense strand
guuacuggauuucucugaa

SEQ ID NO: 2210554 - RNA, 19 nt, Homo sapiens
  misc_RNA (1)...(19): siRNA sense strand
agacgcaucuaugacauug

SEQ ID NO: 2210555 - RNA, 19 nt, Homo sapiens
  misc_RNA (1)...(19): siRNA sense strand
aaaggaaccagucacgaaa

SEQ ID NO: 2210556 - RNA, 19 nt, Homo sapiens
  misc_RNA (1)...(19): siRNA sense strand
caagaaacccucagauucc

SEQ ID NO: 2210557 - RNA, 19 nt, Homo sapiens
  misc_RNA (1)...(19): siRNA sense strand
gagaggauccagaggaaag

SEQ ID NO: 2210558 - RNA, 19 nt, Homo sapiens
  misc_RNA (1)...(19): siRNA sense strand
ugucuuaccagaauugaaa

SEQ ID NO: 2210559 - RNA, 19 nt, Homo sapiens
  misc_RNA (1)...(19): siRNA sense strand
uggccuaccuccaacagaa

SEQ ID NO: 2210560 - RNA, 19 nt, Homo sapiens
  misc_RNA (1)...(19): siRNA sense strand
ggaccugauagauuauaaa

SEQ ID NO: 2210561 - RNA, 19 nt, Homo sapiens
  misc_RNA (1)...(19): siRNA sense strand
gguaacagggcaucuauac

SEQ ID NO: 2210562 - RNA, 19 nt, Homo sapiens
  misc_RNA (1)...(19): siRNA sense strand
cagagaagaacaaggauca

SEQ ID NO: 2210563 - RNA, 19 nt, Homo sapiens
  misc_RNA (1)...(19): siRNA sense strand
guaaaccagccuucaagug

SEQ ID NO: 2210564 - RNA, 19 nt, Homo sapiens
  misc_RNA (1)...(19): siRNA sense strand
gaggaaagugaacucagaa

SEQ ID NO: 2210565 - RNA, 19 nt, Homo sapiens
  misc_RNA (1)...(19): siRNA sense strand
cagagucagcccucacuaa

SEQ ID NO: 2210566 - RNA, 19 nt, Homo sapiens
  misc_RNA (1)...(19): siRNA sense strand
gaagaaaucucaugaaguu

SEQ ID NO: 2210567 - RNA, 19 nt, Homo sapiens
  misc_RNA (1)...(19): siRNA sense strand
gcaguugaguuuaugaaua

SEQ ID NO: 2210568 - RNA, 19 nt, Homo sapiens
  misc_RNA (1)...(19): siRNA sense strand
gaauaaagcaggugauuga

SEQ ID NO: 2210569 - RNA, 19 nt, Homo sapiens
  misc_RNA (1)...(19): siRNA sense strand
uaaagaagcuuggauuaga

SEQ ID NO: 2210570 - RNA, 19 nt, Homo sapiens
  misc_RNA (1)...(19): siRNA sense strand
gcaaauacccaacagagaa

SEQ ID NO: 2210571 - RNA, 19 nt, Homo sapiens
  misc_RNA (1)...(19): siRNA sense strand
uaacaacaguccuacaaau

SEQ ID NO: 2210572 - RNA, 19 nt, Homo sapiens
  misc_RNA (1)...(19): siRNA sense strand
ggucugcucuugugaaguu

SEQ ID NO: 2210573 - RNA, 19 nt, Homo sapiens
  misc_RNA (1)...(19): siRNA sense strand
gccaagggcugccuacuga

SEQ ID NO: 2210574 - RNA, 19 nt, Homo sapiens
  misc_RNA (1)...(19): siRNA sense strand
ugaaagagcaggaagauau

SEQ ID NO: 2210575 - RNA, 19 nt, Homo sapiens
  misc_RNA (1)...(19): siRNA sense strand
gggaggagcuggucgacuu

SEQ ID NO: 2210576 - RNA, 19 nt, Homo sapiens
  misc_RNA (1)...(19): siRNA sense strand
gaagaaacauuggaaacuc

SEQ ID NO: 2210577 - RNA, 19 nt, Homo sapiens
  misc_RNA (1)...(19): siRNA sense strand
uaaagcaggugauugacuu

SEQ ID NO: 2210578 - RNA, 19 nt, Homo sapiens
  misc_RNA (1)...(19): siRNA sense strand
uaaagaacguacucaggaa

SEQ ID NO: 2210579 - RNA, 19 nt, Homo sapiens
  misc_RNA (1)...(19): siRNA sense strand
guacaaaacuugggaauau

SEQ ID NO: 2210580 - RNA, 19 nt, Homo sapiens
  misc_RNA (1)...(19): siRNA sense strand
gaaagagcaggaagauauu

SEQ ID NO: 2210581 - RNA, 19 nt, Homo sapiens
  misc_RNA (1)...(19): siRNA sense strand
guauaagccucgaaugaau

SEQ ID NO: 2210582 - RNA, 19 nt, Homo sapiens
  misc_RNA (1)...(19): siRNA sense strand
uuaaagauuuggaggauug

SEQ ID NO: 2210583 - RNA, 19 nt, Homo sapiens
  misc_RNA (1)...(19): siRNA sense strand
gaacuccaugacauuauua

SEQ ID NO: 2210584 - RNA, 19 nt, Homo sapiens
  misc_RNA (1)...(19): siRNA sense strand
gcuaccaccucuuaucuga

SEQ ID NO: 2210585 - RNA, 19 nt, Homo sapiens
  misc_RNA (1)...(19): siRNA sense strand
aagcagguaugacugauuu

SEQ ID NO: 2210586 - RNA, 19 nt, Homo sapiens
  misc_RNA (1)...(19): siRNA sense strand
caacaguccuacaaaucaa

SEQ ID NO: 2210587 - RNA, 19 nt, Homo sapiens
  misc_RNA (1)...(19): siRNA sense strand
gaaggcaguugaguuuaug

SEQ ID NO: 2210588 - RNA, 19 nt, Homo sapiens
  misc_RNA (1)...(19): siRNA sense strand
ugacuuggguuccgguaaa

SEQ ID NO: 2210589 - RNA, 19 nt, Homo sapiens
  misc_RNA (1)...(19): siRNA sense strand
agaaacaucugaagccaau

SEQ ID NO: 2210590 - RNA, 19 nt, Homo sapiens
  misc_RNA (1)...(19): siRNA sense strand
ucagaaggcaguugaguuu

SEQ ID NO: 2210591 - RNA, 19 nt, Homo sapiens
  misc_RNA (1)...(19): siRNA sense strand
gggaugcccuguccauuuc

SEQ ID NO: 2210592 - RNA, 19 nt, Homo sapiens
  misc_RNA (1)...(19): siRNA sense strand
aagauuagaugucaaugga

SEQ ID NO: 2210593 - RNA, 19 nt, Homo sapiens
  misc_RNA (1)...(19): siRNA sense strand
ugacuacuauggaauaaag

SEQ ID NO: 2210594 - RNA, 19 nt, Homo sapiens
  misc_RNA (1)...(19): siRNA sense strand
ccaaugugccacuauuuaa

SEQ ID NO: 2210595 - RNA, 19 nt, Homo sapiens
  misc_RNA (1)...(19): siRNA sense strand
caaagucaagugaaucaaa

SEQ ID NO: 2210596 - RNA, 19 nt, Homo sapiens
  misc_RNA (1)...(19): siRNA sense strand
guggugaucuggcuccaaa

SEQ ID NO: 2210597 - RNA, 19 nt, Homo sapiens
  misc_RNA (1)...(19): siRNA sense strand
uggaaacccuucauucuca

SEQ ID NO: 2210598 - RNA, 19 nt, Homo sapiens
  misc_RNA (1)...(19): siRNA sense strand
agaaggcaguugaguuuau

SEQ ID NO: 2210599 - RNA, 19 nt, Homo sapiens
  misc_RNA (1)...(19): siRNA sense strand
uguacuggcucccuguaua

SEQ ID NO: 2210600 - RNA, 19 nt, Homo sapiens
  misc_RNA (1)...(19): siRNA sense strand
guuauggcaucaccaaaug

SEQ ID NO: 2210601 - RNA, 19 nt, Homo sapiens
  misc_RNA (1)...(19): siRNA sense strand
caaauacccaacagagaaa

SEQ ID NO: 2210602 - RNA, 19 nt, Homo sapiens
  misc_RNA (1)...(19): siRNA sense strand
gcuggaagcuuuuaauaug

SEQ ID NO: 2210603 - RNA, 19 nt, Homo sapiens
  misc_RNA (1)...(19): siRNA sense strand
caucugaagccaauaaaga

SEQ ID NO: 2210604 - RNA, 19 nt, Homo sapiens
  misc_RNA (1)...(19): siRNA sense strand
aaacaucugaagccaauaa

SEQ ID NO: 2210605 - RNA, 19 nt, Homo sapiens
  misc_RNA (1)...(19): siRNA sense strand
ucaaauaccaauacucaug

SEQ ID NO: 2210606 - RNA, 19 nt, Homo sapiens
  misc_RNA (1)...(19): siRNA sense strand
caaaugugaucggcauguu

SEQ ID NO: 2210607 - RNA, 19 nt, Homo sapiens
  misc_RNA (1)...(19): siRNA sense strand
ggugaucuggcuccaaaua

SEQ ID NO: 2210608 - RNA, 19 nt, Homo sapiens
  misc_RNA (1)...(19): siRNA sense strand
ggaauaaagcaggugauug

SEQ ID NO: 2210609 - RNA, 19 nt, Homo sapiens
  misc_RNA (1)...(19): siRNA sense strand
cagauguuaugcuguuauu

SEQ ID NO: 2210610 - RNA, 19 nt, Homo sapiens
  misc_RNA (1)...(19): siRNA sense strand
uaucagaaaccaaauggaa

SEQ ID NO: 2210611 - RNA, 19 nt, Homo sapiens
  misc_RNA (1)...(19): siRNA sense strand
ucagaacuccaugacauua

SEQ ID NO: 2210612 - RNA, 19 nt, Homo sapiens
  misc_RNA (1)...(19): siRNA sense strand
aaagaagcuuggauuagau

SEQ ID NO: 2210613 - RNA, 19 nt, Homo sapiens
  misc_RNA (1)...(19): siRNA sense strand
gugcuguucuucaggauau

SEQ ID NO: 2210614 - RNA, 19 nt, Homo sapiens
  misc_RNA (1)...(19): siRNA sense strand
agaacuccaugacauuauu

SEQ ID NO: 2210615 - RNA, 19 nt, Homo sapiens
  misc_RNA (1)...(19): siRNA sense strand
gcacauaccguggauuucu

SEQ ID NO: 2210616 - RNA, 19 nt, Homo sapiens
  misc_RNA (1)...(19): siRNA sense strand
guauagagacuuugauucu

SEQ ID NO: 2210617 - RNA, 19 nt, Homo sapiens
  misc_RNA (1)...(19): siRNA sense strand
ucauggagcugaggagaga

SEQ ID NO: 2210618 - RNA, 19 nt, Homo sapiens
  misc_RNA (1)...(19): siRNA sense strand
ucuaaagaagcuuggauua

SEQ ID NO: 2210619 - RNA, 19 nt, Homo sapiens
  misc_RNA (1)...(19): siRNA sense strand
gcugacuacuauggaauaa

SEQ ID NO: 2210620 - RNA, 19 nt, Homo sapiens
  misc_RNA (1)...(19): siRNA sense strand
caaugugccacuauuuaaa

SEQ ID NO: 2210621 - RNA, 19 nt, Homo sapiens
  misc_RNA (1)...(19): siRNA sense strand
gggaauauguacuccuuuu

SEQ ID NO: 2210622 - RNA, 19 nt, Homo sapiens
  misc_RNA (1)...(19): siRNA sense strand
cacauaccguggauuucua

SEQ ID NO: 2210623 - RNA, 19 nt, Homo sapiens
  misc_RNA (1)...(19): siRNA sense strand
auagagacuuugauucuuc

SEQ ID NO: 2210624 - RNA, 19 nt, Homo sapiens
  misc_RNA (1)...(19): siRNA sense strand
gaagcagguaugacugauu

SEQ ID NO: 2210625 - RNA, 19 nt, Homo sapiens
  misc_RNA (1)...(19): siRNA sense strand
ggagagaaacagaaaauug

SEQ ID NO: 2210626 - RNA, 19 nt, Homo sapiens
  misc_RNA (1)...(19): siRNA sense strand
guuguuugaucccgugaaa

SEQ ID NO: 2210627 - RNA, 19 nt, Homo sapiens
  misc_RNA (1)...(19): siRNA sense strand
ucagccacaucaagaagaa

SEQ ID NO: 2210628 - RNA, 19 nt, Homo sapiens
  misc_RNA (1)...(19): siRNA sense strand
uaaagcugauacugaggaa

SEQ ID NO: 2210629 - RNA, 19 nt, Homo sapiens
  misc_RNA (1)...(19): siRNA sense strand
gagagaaacagaaaauuga

SEQ ID NO: 2210630 - RNA, 19 nt, Homo sapiens
  misc_RNA (1)...(19): siRNA sense strand
cagaaugucagcauguuug

SEQ ID NO: 2210631 - RNA, 19 nt, Homo sapiens
  misc_RNA (1)...(19): siRNA sense strand
ccaauaaagagagaagaaa

SEQ ID NO: 2210632 - RNA, 19 nt, Homo sapiens
  misc_RNA (1)...(19): siRNA sense strand
ggaagcagguaugacugau

SEQ ID NO: 2210633 - RNA, 19 nt, Homo sapiens
  misc_RNA (1)...(19): siRNA sense strand
gggaagcagguaugacuga

SEQ ID NO: 2210634 - RNA, 19 nt, Homo sapiens
  misc_RNA (1)...(19): siRNA sense strand
cagcauguuuggcauugga

SEQ ID NO: 2210635 - RNA, 19 nt, Homo sapiens
  misc_RNA (1)...(19): siRNA sense strand
gugccacuauuuaaaggaa

SEQ ID NO: 2210636 - RNA, 19 nt, Homo sapiens
  misc_RNA (1)...(19): siRNA sense strand
uccaaugugccacuauuua

SEQ ID NO: 2210637 - RNA, 19 nt, Homo sapiens
  misc_RNA (1)...(19): siRNA sense strand
gccagaaugucagcauguu

SEQ ID NO: 2210638 - RNA, 19 nt, Homo sapiens
  misc_RNA (1)...(19): siRNA sense strand
gccaauaaagagagaagaa

SEQ ID NO: 2210639 - RNA, 19 nt, Homo sapiens
  misc_RNA (1)...(19): siRNA sense strand
cugaaucacucuucuaucg

SEQ ID NO: 2210640 - RNA, 19 nt, Homo sapiens
  misc_RNA (1)...(19): siRNA sense strand
acaacaguccuacaaauca

SEQ ID NO: 2210641 - RNA, 19 nt, Homo sapiens
  misc_RNA (1)...(19): siRNA sense strand
guucuucuuuucuggauua

SEQ ID NO: 2210642 - RNA, 19 nt, Homo sapiens
  misc_RNA (1)...(19): siRNA sense strand
gaauauguacuccuuuuga

SEQ ID NO: 2210643 - RNA, 19 nt, Homo sapiens
  misc_RNA (1)...(19): siRNA sense strand
ugaagccaauaaagagaga

SEQ ID NO: 2210644 - RNA, 19 nt, Homo sapiens
  misc_RNA (1)...(19): siRNA sense strand
ccagagaauuggugaaaau

SEQ ID NO: 2210645 - RNA, 19 nt, Homo sapiens
  misc_RNA (1)...(19): siRNA sense strand
gaaguuggugaguguggaa

SEQ ID NO: 2210646 - RNA, 19 nt, Homo sapiens
  misc_RNA (1)...(19): siRNA sense strand
ucccagauguuaugcuguu

SEQ ID NO: 2210647 - RNA, 19 nt, Homo sapiens
  misc_RNA (1)...(19): siRNA sense strand
gaaguauaagccucgaaug

SEQ ID NO: 2210648 - RNA, 19 nt, Homo sapiens
  misc_RNA (1)...(19): siRNA sense strand
gaucuggcuccaaauacuu

SEQ ID NO: 2210649 - RNA, 19 nt, Homo sapiens
  misc_RNA (1)...(19): siRNA sense strand
auacugaggaaguguuuaa

SEQ ID NO: 2210650 - RNA, 19 nt, Homo sapiens
  misc_RNA (1)...(19): siRNA sense strand
gaaguauggcuuaaaaguu

SEQ ID NO: 2210651 - RNA, 19 nt, Homo sapiens
  misc_RNA (1)...(19): siRNA sense strand
aaguauaagccucgaauga

SEQ ID NO: 2210652 - RNA, 19 nt, Homo sapiens
  misc_RNA (1)...(19): siRNA sense strand
cuucaaauaccaauacuca

SEQ ID NO: 2210653 - RNA, 19 nt, Homo sapiens
  misc_RNA (1)...(19): siRNA sense strand
cagaaggcaguugaguuua

SEQ ID NO: 2210654 - RNA, 19 nt, Homo sapiens
  misc_RNA (1)...(19): siRNA sense strand
gauguuaugcuguuauugc

SEQ ID NO: 2210655 - RNA, 19 nt, Homo sapiens
  misc_RNA (1)...(19): siRNA sense strand
uaccguggauuucuacaca

SEQ ID NO: 2210656 - RNA, 19 nt, Homo sapiens
  misc_RNA (1)...(19): siRNA sense strand
augccuaccucagcuauuu

SEQ ID NO: 2210657 - RNA, 19 nt, Homo sapiens
  misc_RNA (1)...(19): siRNA sense strand
auucagaacuccaugacau

SEQ ID NO: 2210658 - RNA, 19 nt, Homo sapiens
  misc_RNA (1)...(19): siRNA sense strand
gcccuucgaggaaaucaaa

SEQ ID NO: 2210659 - RNA, 19 nt, Homo sapiens
  misc_RNA (1)...(19): siRNA sense strand
guacuggcucccuguauag

SEQ ID NO: 2210660 - RNA, 19 nt, Homo sapiens
  misc_RNA (1)...(19): siRNA sense strand
gugaucggcauguugguaa

SEQ ID NO: 2210661 - RNA, 19 nt, Homo sapiens
  misc_RNA (1)...(19): siRNA sense strand
ucaagggaguuugcagugu

SEQ ID NO: 2210662 - RNA, 19 nt, Homo sapiens
  misc_RNA (1)...(19): siRNA sense strand
uaccaccucuuaucugaag

SEQ ID NO: 2210663 - RNA, 19 nt, Homo sapiens
  misc_RNA (1)...(19): siRNA sense strand
ccagaaugucagcauguuu

SEQ ID NO: 2210664 - RNA, 19 nt, Homo sapiens
  misc_RNA (1)...(19): siRNA sense strand
gccacuauuuaaaggaaga

SEQ ID NO: 2210665 - RNA, 19 nt, Homo sapiens
  misc_RNA (1)...(19): siRNA sense strand
caagggcugccuacugaau

SEQ ID NO: 2210666 - RNA, 19 nt, Homo sapiens
  misc_RNA (1)...(19): siRNA sense strand
ggauguaacucaauucaaa

SEQ ID NO: 2210667 - RNA, 19 nt, Homo sapiens
  misc_RNA (1)...(19): siRNA sense strand
ggacuuacauuucaugcuu

SEQ ID NO: 2210668 - RNA, 19 nt, Homo sapiens
  misc_RNA (1)...(19): siRNA sense strand
uggauuaucuucaauggua

SEQ ID NO: 2210669 - RNA, 19 nt, Homo sapiens
  misc_RNA (1)...(19): siRNA sense strand
ggaagaaucgcgaagauau

SEQ ID NO: 2210670 - RNA, 19 nt, Homo sapiens
  misc_RNA (1)...(19): siRNA sense strand
caaacuggacccauuguua

SEQ ID NO: 2210671 - RNA, 19 nt, Homo sapiens
  misc_RNA (1)...(19): siRNA sense strand
uaaggcaacuggaauuaau

SEQ ID NO: 2210672 - RNA, 19 nt, Homo sapiens
  misc_RNA (1)...(19): siRNA sense strand
guaacucaauucaaagcua

SEQ ID NO: 2210673 - RNA, 19 nt, Homo sapiens
  misc_RNA (1)...(19): siRNA sense strand
agaaggagauccaggaguu

SEQ ID NO: 2210674 - RNA, 19 nt, Homo sapiens
  misc_RNA (1)...(19): siRNA sense strand
uaaaguggauguaacucaa

SEQ ID NO: 2210675 - RNA, 19 nt, Homo sapiens
  misc_RNA (1)...(19): siRNA sense strand
gagaauaaaguggauguaa

SEQ ID NO: 2210676 - RNA, 19 nt, Homo sapiens
  misc_RNA (1)...(19): siRNA sense strand
gaugaaaaccugaagaaua

SEQ ID NO: 2210677 - RNA, 19 nt, Homo sapiens
  misc_RNA (1)...(19): siRNA sense strand
gauaagaauuaaccuaagg

SEQ ID NO: 2210678 - RNA, 19 nt, Homo sapiens
  misc_RNA (1)...(19): siRNA sense strand
gaagaaucgcgaagauauu

SEQ ID NO: 2210679 - RNA, 19 nt, Homo sapiens
  misc_RNA (1)...(19): siRNA sense strand
acaaugcuauggaagauau

SEQ ID NO: 2210680 - RNA, 19 nt, Homo sapiens
  misc_RNA (1)...(19): siRNA sense strand
gaugagauguuugauagca

SEQ ID NO: 2210681 - RNA, 19 nt, Homo sapiens
  misc_RNA (1)...(19): siRNA sense strand
ggagauccaggaguuguua

SEQ ID NO: 2210682 - RNA, 19 nt, Homo sapiens
  misc_RNA (1)...(19): siRNA sense strand
gcuacuggaugagauguuu

SEQ ID NO: 2210683 - RNA, 19 nt, Homo sapiens
  misc_RNA (1)...(19): siRNA sense strand
gaauuaaccuaagggaagu

SEQ ID NO: 2210684 - RNA, 19 nt, Homo sapiens
  misc_RNA (1)...(19): siRNA sense strand
caucuuugcuggauuaucu

SEQ ID NO: 2210685 - RNA, 19 nt, Homo sapiens
  misc_RNA (1)...(19): siRNA sense strand
uggaugagauguuugauag

SEQ ID NO: 2210686 - RNA, 19 nt, Homo sapiens
  misc_RNA (1)...(19): siRNA sense strand
uggaagcucuuucugauuc

SEQ ID NO: 2210687 - RNA, 19 nt, Homo sapiens
  misc_RNA (1)...(19): siRNA sense strand
gauguugucucagaauugu

SEQ ID NO: 2210688 - RNA, 19 nt, Homo sapiens
  misc_RNA (1)...(19): siRNA sense strand
caaugaagauggcagugau

SEQ ID NO: 2210689 - RNA, 19 nt, Homo sapiens
  misc_RNA (1)...(19): siRNA sense strand
ggaagagaagcacgaauuc

SEQ ID NO: 2210690 - RNA, 19 nt, Homo sapiens
  misc_RNA (1)...(19): siRNA sense strand
gaagauggcagugaugauc

SEQ ID NO: 2210691 - RNA, 19 nt, Homo sapiens
  misc_RNA (1)...(19): siRNA sense strand
gaauaaaguggauguaacu

SEQ ID NO: 2210692 - RNA, 19 nt, Homo sapiens
  misc_RNA (1)...(19): siRNA sense strand
ggagauucaugauguuguc

SEQ ID NO: 2210693 - RNA, 19 nt, Homo sapiens
  misc_RNA (1)...(19): siRNA sense strand
cagagcggcuacuggauga

SEQ ID NO: 2210694 - RNA, 19 nt, Homo sapiens
  misc_RNA (1)...(19): siRNA sense strand
gaauacaaacuggcccuuu

SEQ ID NO: 2210695 - RNA, 19 nt, Homo sapiens
  misc_RNA (1)...(19): siRNA sense strand
gaaguggagauucaugaug

SEQ ID NO: 2210696 - RNA, 19 nt, Homo sapiens
  misc_RNA (1)...(19): siRNA sense strand
gcauguguauggaguccuu

SEQ ID NO: 2210697 - RNA, 19 nt, Homo sapiens
  misc_RNA (1)...(19): siRNA sense strand
gcauaucuuguccuccuua

SEQ ID NO: 2210698 - RNA, 19 nt, Homo sapiens
  misc_RNA (1)...(19): siRNA sense strand
gccacuucuuuguuuaaua

SEQ ID NO: 2210699 - RNA, 19 nt, Homo sapiens
  misc_RNA (1)...(19): siRNA sense strand
guuaaggcaacuggaauua

SEQ ID NO: 2210700 - RNA, 19 nt, Homo sapiens
  misc_RNA (1)...(19): siRNA sense strand
gcaguucaauaccaauuuu

SEQ ID NO: 2210701 - RNA, 19 nt, Homo sapiens
  misc_RNA (1)...(19): siRNA sense strand
ugacugccaugccgggauu

SEQ ID NO: 2210702 - RNA, 19 nt, Homo sapiens
  misc_RNA (1)...(19): siRNA sense strand
caggaagaaucgcgaagau

SEQ ID NO: 2210703 - RNA, 19 nt, Homo sapiens
  misc_RNA (1)...(19): siRNA sense strand
gcagaaaacugauggucau

SEQ ID NO: 2210704 - RNA, 19 nt, Homo sapiens
  misc_RNA (1)...(19): siRNA sense strand
ggaagcucuuucugauuca

SEQ ID NO: 2210705 - RNA, 19 nt, Homo sapiens
  misc_RNA (1)...(19): siRNA sense strand
agaggagucuuugaaucua

SEQ ID NO: 2210706 - RNA, 19 nt, Homo sapiens
  misc_RNA (1)...(19): siRNA sense strand
gguuggagauagccuuugu

SEQ ID NO: 2210707 - RNA, 19 nt, Homo sapiens
  misc_RNA (1)...(19): siRNA sense strand
gacccauuguuacagauga

SEQ ID NO: 2210708 - RNA, 19 nt, Homo sapiens
  misc_RNA (1)...(19): siRNA sense strand
gaggagucuuugaaucuag

SEQ ID NO: 2210709 - RNA, 19 nt, Homo sapiens
  misc_RNA (1)...(19): siRNA sense strand
caggaguuguuaggcuuua

SEQ ID NO: 2210710 - RNA, 19 nt, Homo sapiens
  misc_RNA (1)...(19): siRNA sense strand
gacuuacauuucaugcuuu

SEQ ID NO: 2210711 - RNA, 19 nt, Homo sapiens
  misc_RNA (1)...(19): siRNA sense strand
cugcuggacuuacauuuca

SEQ ID NO: 2210712 - RNA, 19 nt, Homo sapiens
  misc_RNA (1)...(19): siRNA sense strand
agaauaaaguggauguaac

SEQ ID NO: 2210713 - RNA, 19 nt, Homo sapiens
  misc_RNA (1)...(19): siRNA sense strand
aaauauuggugcagaugga

SEQ ID NO: 2210714 - RNA, 19 nt, Homo sapiens
  misc_RNA (1)...(19): siRNA sense strand
aagaaucgcgaagauauuu

SEQ ID NO: 2210715 - RNA, 19 nt, Homo sapiens
  misc_RNA (1)...(19): siRNA sense strand
gcaacuggaauuaaugagu

SEQ ID NO: 2210716 - RNA, 19 nt, Homo sapiens
  misc_RNA (1)...(19): siRNA sense strand
gcagacuauuacaacgaaa

SEQ ID NO: 2210717 - RNA, 19 nt, Homo sapiens
  misc_RNA (1)...(19): siRNA sense strand
aaguggagauucaugaugu

SEQ ID NO: 2210718 - RNA, 19 nt, Homo sapiens
  misc_RNA (1)...(19): siRNA sense strand
gcaaacuggacccauuguu

SEQ ID NO: 2210719 - RNA, 19 nt, Homo sapiens
  misc_RNA (1)...(19): siRNA sense strand
gaagcucuuucugauucaa

SEQ ID NO: 2210720 - RNA, 19 nt, Homo sapiens
  misc_RNA (1)...(19): siRNA sense strand
cgagaggccacaaugaaga

SEQ ID NO: 2210721 - RNA, 19 nt, Homo sapiens
  misc_RNA (1)...(19): siRNA sense strand
ggcuaaaauugaugaguua

SEQ ID NO: 2210722 - RNA, 19 nt, Homo sapiens
  misc_RNA (1)...(19): siRNA sense strand
cauaucuuguccuccuuaa

SEQ ID NO: 2210723 - RNA, 19 nt, Homo sapiens
  misc_RNA (1)...(19): siRNA sense strand
uaucuucagcaguucaaua

SEQ ID NO: 2210724 - RNA, 19 nt, Homo sapiens
  misc_RNA (1)...(19): siRNA sense strand
uaaccuaagggaaguacaa

SEQ ID NO: 2210725 - RNA, 19 nt, Homo sapiens
  misc_RNA (1)...(19): siRNA sense strand
uuacaaugcuauggaagau

SEQ ID NO: 2210726 - RNA, 19 nt, Homo sapiens
  misc_RNA (1)...(19): siRNA sense strand
gauucaugauguugucuca

SEQ ID NO: 2210727 - RNA, 19 nt, Homo sapiens
  misc_RNA (1)...(19): siRNA sense strand
cuuggaagcucuuucugau

SEQ ID NO: 2210728 - RNA, 19 nt, Homo sapiens
  misc_RNA (1)...(19): siRNA sense strand
guuucuggcugucuuggaa

SEQ ID NO: 2210729 - RNA, 19 nt, Homo sapiens
  misc_RNA (1)...(19): siRNA sense strand
ucacucagguacuugacau

SEQ ID NO: 2210730 - RNA, 19 nt, Homo sapiens
  misc_RNA (1)...(19): siRNA sense strand
aggaagagaagcacgaauu

SEQ ID NO: 2210731 - RNA, 19 nt, Homo sapiens
  misc_RNA (1)...(19): siRNA sense strand
gaaggagauccaggaguug

SEQ ID NO: 2210732 - RNA, 19 nt, Homo sapiens
  misc_RNA (1)...(19): siRNA sense strand
gcuggauuaucuucaaugg

SEQ ID NO: 2210733 - RNA, 19 nt, Homo sapiens
  misc_RNA (1)...(19): siRNA sense strand
ccuuaaggcucaucaugca

SEQ ID NO: 2210734 - RNA, 19 nt, Homo sapiens
  misc_RNA (1)...(19): siRNA sense strand
gugguccagugucugcaua

SEQ ID NO: 2210735 - RNA, 19 nt, Homo sapiens
  misc_RNA (1)...(19): siRNA sense strand
uggcagugaugaucuucaa

SEQ ID NO: 2210736 - RNA, 19 nt, Homo sapiens
  misc_RNA (1)...(19): siRNA sense strand
ccugaagaauaaagaaucu

SEQ ID NO: 2210737 - RNA, 19 nt, Homo sapiens
  misc_RNA (1)...(19): siRNA sense strand
ccaaggccuuagaguaucu

SEQ ID NO: 2210738 - RNA, 19 nt, Homo sapiens
  misc_RNA (1)...(19): siRNA sense strand
aaguggauguaacucaauu

SEQ ID NO: 2210739 - RNA, 19 nt, Homo sapiens
  misc_RNA (1)...(19): siRNA sense strand
gaaaacugauggucauagg

SEQ ID NO: 2210740 - RNA, 19 nt, Homo sapiens
  misc_RNA (1)...(19): siRNA sense strand
ggucugcgacagugaugaa

SEQ ID NO: 2210741 - RNA, 19 nt, Homo sapiens
  misc_RNA (1)...(19): siRNA sense strand
uaaaacugcuggacuuaca

SEQ ID NO: 2210742 - RNA, 19 nt, Homo sapiens
  misc_RNA (1)...(19): siRNA sense strand
gauaaaacugcuggacuua

SEQ ID NO: 2210743 - RNA, 19 nt, Homo sapiens
  misc_RNA (1)...(19): siRNA sense strand
aaacuggacccauuguuac

SEQ ID NO: 2210744 - RNA, 19 nt, Homo sapiens
  misc_RNA (1)...(19): siRNA sense strand
ggaggaagagaagcacgaa

SEQ ID NO: 2210745 - RNA, 19 nt, Homo sapiens
  misc_RNA (1)...(19): siRNA sense strand
caaacuggcccuuuuacaa

SEQ ID NO: 2210746 - RNA, 19 nt, Homo sapiens
  misc_RNA (1)...(19): siRNA sense strand
acugcaaacuggacccauu

SEQ ID NO: 2210747 - RNA, 19 nt, Homo sapiens
  misc_RNA (1)...(19): siRNA sense strand
gcagugaugaucuucaaaa

SEQ ID NO: 2210748 - RNA, 19 nt, Homo sapiens
  misc_RNA (1)...(19): siRNA sense strand
gagaggccacaaugaagau

SEQ ID NO: 2210749 - RNA, 19 nt, Homo sapiens
  misc_RNA (1)...(19): siRNA sense strand
gcgcgcuacucucuacaca

SEQ ID NO: 2210750 - RNA, 19 nt, Homo sapiens
  misc_RNA (1)...(19): siRNA sense strand
cuuccaaggccuuagagua

SEQ ID NO: 2210751 - RNA, 19 nt, Homo sapiens
  misc_RNA (1)...(19): siRNA sense strand
ggaguuguuaggcuuuaug

SEQ ID NO: 2210752 - RNA, 19 nt, Homo sapiens
  misc_RNA (1)...(19): siRNA sense strand
cagcaguucaauaccaauu

SEQ ID NO: 2210753 - RNA, 19 nt, Homo sapiens
  misc_RNA (1)...(19): siRNA sense strand
uucaugauguugucucaga

SEQ ID NO: 2210754 - RNA, 19 nt, Homo sapiens
  misc_RNA (1)...(19): siRNA sense strand
ugugccacuucuuuguuua

SEQ ID NO: 2210755 - RNA, 19 nt, Homo sapiens
  misc_RNA (1)...(19): siRNA sense strand
gcucuuucugauucaaaua

SEQ ID NO: 2210756 - RNA, 19 nt, Homo sapiens
  misc_RNA (1)...(19): siRNA sense strand
uccagugucugcauaucuu

SEQ ID NO: 2210757 - RNA, 19 nt, Homo sapiens
  misc_RNA (1)...(19): siRNA sense strand
aaacugcuggacuuacauu

SEQ ID NO: 2210758 - RNA, 19 nt, Homo sapiens
  misc_RNA (1)...(19): siRNA sense strand
ucaugauguugucucagaa

SEQ ID NO: 2210759 - RNA, 19 nt, Homo sapiens
  misc_RNA (1)...(19): siRNA sense strand
aauacaaacuggcccuuuu

SEQ ID NO: 2210760 - RNA, 19 nt, Homo sapiens
  misc_RNA (1)...(19): siRNA sense strand
ggcguugugccacuucuuu

SEQ ID NO: 2210761 - RNA, 19 nt, Homo sapiens
  misc_RNA (1)...(19): siRNA sense strand
uuccaaggccuuagaguau

SEQ ID NO: 2210762 - RNA, 19 nt, Homo sapiens
  misc_RNA (1)...(19): siRNA sense strand
ggacccauuguuacagaug

SEQ ID NO: 2210763 - RNA, 19 nt, Homo sapiens
  misc_RNA (1)...(19): siRNA sense strand
cagcagacuauuacaacga

SEQ ID NO: 2210764 - RNA, 19 nt, Homo sapiens
  misc_RNA (1)...(19): siRNA sense strand
gugcagauggaaugcuuga

SEQ ID NO: 2210765 - RNA, 19 nt, Homo sapiens
  misc_RNA (1)...(19): siRNA sense strand
gaguuguuaggcuuuauga

SEQ ID NO: 2210766 - RNA, 19 nt, Homo sapiens
  misc_RNA (1)...(19): siRNA sense strand
cagaacaccuucaguauua

SEQ ID NO: 2210767 - RNA, 19 nt, Homo sapiens
  misc_RNA (1)...(19): siRNA sense strand
gaaauaaauuggcagauga

SEQ ID NO: 2210768 - RNA, 19 nt, Homo sapiens
  misc_RNA (1)...(19): siRNA sense strand
gugcaaaccuacagaauua

SEQ ID NO: 2210769 - RNA, 19 nt, Homo sapiens
  misc_RNA (1)...(19): siRNA sense strand
ggagauaguuguaaucauu

SEQ ID NO: 2210770 - RNA, 19 nt, Homo sapiens
  misc_RNA (1)...(19): siRNA sense strand
ggaguuggaugaagaagua

SEQ ID NO: 2210771 - RNA, 19 nt, Homo sapiens
  misc_RNA (1)...(19): siRNA sense strand
caacauggcuugcuaucaa

SEQ ID NO: 2210772 - RNA, 19 nt, Homo sapiens
  misc_RNA (1)...(19): siRNA sense strand
ggaaaccucccaucauuua

SEQ ID NO: 2210773 - RNA, 19 nt, Homo sapiens
  misc_RNA (1)...(19): siRNA sense strand
uaaagaagaugacaguuga

SEQ ID NO: 2210774 - RNA, 19 nt, Homo sapiens
  misc_RNA (1)...(19): siRNA sense strand
gaaaugauugccacaaaua

SEQ ID NO: 2210775 - RNA, 19 nt, Homo sapiens
  misc_RNA (1)...(19): siRNA sense strand
gaagaaguacuccagaaua

SEQ ID NO: 2210776 - RNA, 19 nt, Homo sapiens
  misc_RNA (1)...(19): siRNA sense strand
gaaauuggaucagaaacaa

SEQ ID NO: 2210777 - RNA, 19 nt, Homo sapiens
  misc_RNA (1)...(19): siRNA sense strand
ugaaagcuaugguacaaua

SEQ ID NO: 2210778 - RNA, 19 nt, Homo sapiens
  misc_RNA (1)...(19): siRNA sense strand
gauuugagauuuacucgua

SEQ ID NO: 2210779 - RNA, 19 nt, Homo sapiens
  misc_RNA (1)...(19): siRNA sense strand
gggaacagcucauggaaga

SEQ ID NO: 2210780 - RNA, 19 nt, Homo sapiens
  misc_RNA (1)...(19): siRNA sense strand
gaacucaacuacaaauuac

SEQ ID NO: 2210781 - RNA, 19 nt, Homo sapiens
  misc_RNA (1)...(19): siRNA sense strand
gcacugaguuucuuacauc

SEQ ID NO: 2210782 - RNA, 19 nt, Homo sapiens
  misc_RNA (1)...(19): siRNA sense strand
gaaaguaugaucugaagaa

SEQ ID NO: 2210783 - RNA, 19 nt, Homo sapiens
  misc_RNA (1)...(19): siRNA sense strand
guugauggcuuaaugcuaa

SEQ ID NO: 2210784 - RNA, 19 nt, Homo sapiens
  misc_RNA (1)...(19): siRNA sense strand
cagagaagauucgaauaua

SEQ ID NO: 2210785 - RNA, 19 nt, Homo sapiens
  misc_RNA (1)...(19): siRNA sense strand
gaauacggcuuugcugaaa

SEQ ID NO: 2210786 - RNA, 19 nt, Homo sapiens
  misc_RNA (1)...(19): siRNA sense strand
gauauuggaagaacaguua

SEQ ID NO: 2210787 - RNA, 19 nt, Homo sapiens
  misc_RNA (1)...(19): siRNA sense strand
gagaaggacuacccucuga

SEQ ID NO: 2210788 - RNA, 19 nt, Homo sapiens
  misc_RNA (1)...(19): siRNA sense strand
aaggugaacugaagaauuu

SEQ ID NO: 2210789 - RNA, 19 nt, Homo sapiens
  misc_RNA (1)...(19): siRNA sense strand
ggaacuggcuaaagcuaaa

SEQ ID NO: 2210790 - RNA, 19 nt, Homo sapiens
  misc_RNA (1)...(19): siRNA sense strand
gaaugaaucucuuaaacag

SEQ ID NO: 2210791 - RNA, 19 nt, Homo sapiens
  misc_RNA (1)...(19): siRNA sense strand
cuaaauacaucacaaagug

SEQ ID NO: 2210792 - RNA, 19 nt, Homo sapiens
  misc_RNA (1)...(19): siRNA sense strand
gaacuuaaggaaagaugua

SEQ ID NO: 2210793 - RNA, 19 nt, Homo sapiens
  misc_RNA (1)...(19): siRNA sense strand
gaagaugacaguugaauag

SEQ ID NO: 2210794 - RNA, 19 nt, Homo sapiens
  misc_RNA (1)...(19): siRNA sense strand
gggaauuucuguuucugua

SEQ ID NO: 2210795 - RNA, 19 nt, Homo sapiens
  misc_RNA (1)...(19): siRNA sense strand
ucagaaagcuguaauucau

SEQ ID NO: 2210796 - RNA, 19 nt, Homo sapiens
  misc_RNA (1)...(19): siRNA sense strand
gaacaguuauuagaaagug

SEQ ID NO: 2210797 - RNA, 19 nt, Homo sapiens
  misc_RNA (1)...(19): siRNA sense strand
ggaagaacaguuauuagaa

SEQ ID NO: 2210798 - RNA, 19 nt, Homo sapiens
  misc_RNA (1)...(19): siRNA sense strand
aaugucagcugucuauaua

SEQ ID NO: 2210799 - RNA, 19 nt, Homo sapiens
  misc_RNA (1)...(19): siRNA sense strand
ggaaaugaguacaugugaa

SEQ ID NO: 2210800 - RNA, 19 nt, Homo sapiens
  misc_RNA (1)...(19): siRNA sense strand
ggacaaaacugaaaacaca

SEQ ID NO: 2210801 - RNA, 19 nt, Homo sapiens
  misc_RNA (1)...(19): siRNA sense strand
guaaucagguaucucuaaa

SEQ ID NO: 2210802 - RNA, 19 nt, Homo sapiens
  misc_RNA (1)...(19): siRNA sense strand
gaacaaaggaagaguaugg

SEQ ID NO: 2210803 - RNA, 19 nt, Homo sapiens
  misc_RNA (1)...(19): siRNA sense strand
aagcaccucuccagauuua

SEQ ID NO: 2210804 - RNA, 19 nt, Homo sapiens
  misc_RNA (1)...(19): siRNA sense strand
gaauauuacuauccagaug

SEQ ID NO: 2210805 - RNA, 19 nt, Homo sapiens
  misc_RNA (1)...(19): siRNA sense strand
gaaccaagaagcccuaaug

SEQ ID NO: 2210806 - RNA, 19 nt, Homo sapiens
  misc_RNA (1)...(19): siRNA sense strand
caacaguaaugccaaugaa

SEQ ID NO: 2210807 - RNA, 19 nt, Homo sapiens
  misc_RNA (1)...(19): siRNA sense strand
gaaagugauggaagugaua

SEQ ID NO: 2210808 - RNA, 19 nt, Homo sapiens
  misc_RNA (1)...(19): siRNA sense strand
ucagagaacuuaaggaaag

SEQ ID NO: 2210809 - RNA, 19 nt, Homo sapiens
  misc_RNA (1)...(19): siRNA sense strand
ugaagcaccucuccagauu

SEQ ID NO: 2210810 - RNA, 19 nt, Homo sapiens
  misc_RNA (1)...(19): siRNA sense strand
ucaucuagaucuacacaua

SEQ ID NO: 2210811 - RNA, 19 nt, Homo sapiens
  misc_RNA (1)...(19): siRNA sense strand
gaggagagguuuugacuuu

SEQ ID NO: 2210812 - RNA, 19 nt, Homo sapiens
  misc_RNA (1)...(19): siRNA sense strand
uuacacagcuaacuauaga

SEQ ID NO: 2210813 - RNA, 19 nt, Homo sapiens
  misc_RNA (1)...(19): siRNA sense strand
caaccuggcuccucucugu

SEQ ID NO: 2210814 - RNA, 19 nt, Homo sapiens
  misc_RNA (1)...(19): siRNA sense strand
gaaggaguauuauaguaca

SEQ ID NO: 2210815 - RNA, 19 nt, Homo sapiens
  misc_RNA (1)...(19): siRNA sense strand
gcagaacaccuucaguauu

SEQ ID NO: 2210816 - RNA, 19 nt, Homo sapiens
  misc_RNA (1)...(19): siRNA sense strand
ugucauagcaacaaaguua

SEQ ID NO: 2210817 - RNA, 19 nt, Homo sapiens
  misc_RNA (1)...(19): siRNA sense strand
gaaggugaacugaagaauu

SEQ ID NO: 2210818 - RNA, 19 nt, Homo sapiens
  misc_RNA (1)...(19): siRNA sense strand
gaucaagcaaauacucuua

SEQ ID NO: 2210819 - RNA, 19 nt, Homo sapiens
  misc_RNA (1)...(19): siRNA sense strand
guaugcagauuaaucacua

SEQ ID NO: 2210820 - RNA, 19 nt, Homo sapiens
  misc_RNA (1)...(19): siRNA sense strand
ggacugcaaugucauagca

SEQ ID NO: 2210821 - RNA, 19 nt, Homo sapiens
  misc_RNA (1)...(19): siRNA sense strand
caaagugaaucuagugauc

SEQ ID NO: 2210822 - RNA, 19 nt, Homo sapiens
  misc_RNA (1)...(19): siRNA sense strand
aaggaaaccucccaucauu

SEQ ID NO: 2210823 - RNA, 19 nt, Homo sapiens
  misc_RNA (1)...(19): siRNA sense strand
uuaaaggacugcaauguca

SEQ ID NO: 2210824 - RNA, 19 nt, Homo sapiens
  misc_RNA (1)...(19): siRNA sense strand
cuuuaaagcugaagauuug

SEQ ID NO: 2210825 - RNA, 19 nt, Homo sapiens
  misc_RNA (1)...(19): siRNA sense strand
gagucaaacagacguauua

SEQ ID NO: 2210826 - RNA, 19 nt, Homo sapiens
  misc_RNA (1)...(19): siRNA sense strand
caaaugcuccugauguaaa

SEQ ID NO: 2210827 - RNA, 19 nt, Homo sapiens
  misc_RNA (1)...(19): siRNA sense strand
gaaguacuccagaauaugu

SEQ ID NO: 2210828 - RNA, 19 nt, Homo sapiens
  misc_RNA (1)...(19): siRNA sense strand
gcaaugucauagcaacaaa

SEQ ID NO: 2210829 - RNA, 19 nt, Homo sapiens
  misc_RNA (1)...(19): siRNA sense strand
cauggagauuugagauuua

SEQ ID NO: 2210830 - RNA, 19 nt, Homo sapiens
  misc_RNA (1)...(19): siRNA sense strand
gacgauggcucuuuucaua

SEQ ID NO: 2210831 - RNA, 19 nt, Homo sapiens
  misc_RNA (1)...(19): siRNA sense strand
gcuaaugucuaguucuguu

SEQ ID NO: 2210832 - RNA, 19 nt, Homo sapiens
  misc_RNA (1)...(19): siRNA sense strand
ugacauucaugcuaaagaa

SEQ ID NO: 2210833 - RNA, 19 nt, Homo sapiens
  misc_RNA (1)...(19): siRNA sense strand
ggagagguuuugacuuuua

SEQ ID NO: 2210834 - RNA, 19 nt, Homo sapiens
  misc_RNA (1)...(19): siRNA sense strand
ccaaugaagauacaaguuu

SEQ ID NO: 2210835 - RNA, 19 nt, Homo sapiens
  misc_RNA (1)...(19): siRNA sense strand
ugugaaggaucauaaugua

SEQ ID NO: 2210836 - RNA, 19 nt, Homo sapiens
  misc_RNA (1)...(19): siRNA sense strand
gaagugauagccauauguu

SEQ ID NO: 2210837 - RNA, 19 nt, Homo sapiens
  misc_RNA (1)...(19): siRNA sense strand
gcccagugguaccugauua

SEQ ID NO: 2210838 - RNA, 19 nt, Homo sapiens
  misc_RNA (1)...(19): siRNA sense strand
agucagacauccauuugua

SEQ ID NO: 2210839 - RNA, 19 nt, Homo sapiens
  misc_RNA (1)...(19): siRNA sense strand
ggaaaaggacggccaauaa

SEQ ID NO: 2210840 - RNA, 19 nt, Homo sapiens
  misc_RNA (1)...(19): siRNA sense strand
gaagugaaaucugaauguc

SEQ ID NO: 2210841 - RNA, 19 nt, Homo sapiens
  misc_RNA (1)...(19): siRNA sense strand
gaaggacuacccucugaaa

SEQ ID NO: 2210842 - RNA, 19 nt, Homo sapiens
  misc_RNA (1)...(19): siRNA sense strand
cuucggaucuauaguguaa

SEQ ID NO: 2210843 - RNA, 19 nt, Homo sapiens
  misc_RNA (1)...(19): siRNA sense strand
ggagaaauuggaucagaaa

SEQ ID NO: 2210844 - RNA, 19 nt, Homo sapiens
  misc_RNA (1)...(19): siRNA sense strand
aagaaguacuccagaauau

SEQ ID NO: 2210845 - RNA, 19 nt, Homo sapiens
  misc_RNA (1)...(19): siRNA sense strand
gaaaacacaucccaucugu

SEQ ID NO: 2210846 - RNA, 19 nt, Homo sapiens
  misc_RNA (1)...(19): siRNA sense strand
gaacagcucauggaagaga

SEQ ID NO: 2210847 - RNA, 19 nt, Homo sapiens
  misc_RNA (1)...(19): siRNA sense strand
caaugaagauacaaguuuc

SEQ ID NO: 2210848 - RNA, 19 nt, Homo sapiens
  misc_RNA (1)...(19): siRNA sense strand
agaaaucugucuucaagug

SEQ ID NO: 2210849 - RNA, 19 nt, Homo sapiens
  misc_RNA (1)...(19): siRNA sense strand
gcagaugccacccaaaguu

SEQ ID NO: 2210850 - RNA, 19 nt, Homo sapiens
  misc_RNA (1)...(19): siRNA sense strand
gaaaugaguacaugugaag

SEQ ID NO: 2210851 - RNA, 19 nt, Homo sapiens
  misc_RNA (1)...(19): siRNA sense strand
agaaauaaauuggcagaug

SEQ ID NO: 2210852 - RNA, 19 nt, Homo sapiens
  misc_RNA (1)...(19): siRNA sense strand
ccauagaguccaucuuuaa

SEQ ID NO: 2210853 - RNA, 19 nt, Homo sapiens
  misc_RNA (1)...(19): siRNA sense strand
gaacauggagauuugagau

SEQ ID NO: 2210854 - RNA, 19 nt, Homo sapiens
  misc_RNA (1)...(19): siRNA sense strand
caauuucuauucagaguuc

SEQ ID NO: 2210855 - RNA, 19 nt, Homo sapiens
  misc_RNA (1)...(19): siRNA sense strand
gaucagccacgugcaauuu

SEQ ID NO: 2210856 - RNA, 19 nt, Homo sapiens
  misc_RNA (1)...(19): siRNA sense strand
gaugacuuauuauggguuu

SEQ ID NO: 2210857 - RNA, 19 nt, Homo sapiens
  misc_RNA (1)...(19): siRNA sense strand
guugaaagcuaugguacaa

SEQ ID NO: 2210858 - RNA, 19 nt, Homo sapiens
  misc_RNA (1)...(19): siRNA sense strand
ggugaaacuucuccagaug

SEQ ID NO: 2210859 - RNA, 19 nt, Homo sapiens
  misc_RNA (1)...(19): siRNA sense strand
acucuuaagucuccuguuu

SEQ ID NO: 2210860 - RNA, 19 nt, Homo sapiens
  misc_RNA (1)...(19): siRNA sense strand
guagacucauucccucuuu

SEQ ID NO: 2210861 - RNA, 19 nt, Homo sapiens
  misc_RNA (1)...(19): siRNA sense strand
gaaagggacaugcagaaca

SEQ ID NO: 2210862 - RNA, 19 nt, Homo sapiens
  misc_RNA (1)...(19): siRNA sense strand
ccuagaagcuuuguuucaa

SEQ ID NO: 2210863 - RNA, 19 nt, Homo sapiens
  misc_RNA (1)...(19): siRNA sense strand
aguaugaucugaagaaaca

SEQ ID NO: 2210864 - RNA, 19 nt, Homo sapiens
  misc_RNA (1)...(19): siRNA sense strand
aaauuuaucuccugacaag

SEQ ID NO: 2210865 - RNA, 19 nt, Homo sapiens
  misc_RNA (1)...(19): siRNA sense strand
gcagacuuguaaucaggua

SEQ ID NO: 2210866 - RNA, 19 nt, Homo sapiens
  misc_RNA (1)...(19): siRNA sense strand
ggacaucgauggaguguug

SEQ ID NO: 2210867 - RNA, 19 nt, Homo sapiens
  misc_RNA (1)...(19): siRNA sense strand
gagaaccacuggaaauuaa

SEQ ID NO: 2210868 - RNA, 19 nt, Homo sapiens
  misc_RNA (1)...(19): siRNA sense strand
gaaugaagaugucuauaug

SEQ ID NO: 2210869 - RNA, 19 nt, Homo sapiens
  misc_RNA (1)...(19): siRNA sense strand
caaaggaggucaaugaaau

SEQ ID NO: 2210870 - RNA, 19 nt, Homo sapiens
  misc_RNA (1)...(19): siRNA sense strand
ugagaaaucugcaguuuga

SEQ ID NO: 2210871 - RNA, 19 nt, Homo sapiens
  misc_RNA (1)...(19): siRNA sense strand
caacagacuucuuuaaauc

SEQ ID NO: 2210872 - RNA, 19 nt, Homo sapiens
  misc_RNA (1)...(19): siRNA sense strand
gcaaacagaucaugaagag

SEQ ID NO: 2210873 - RNA, 19 nt, Homo sapiens
  misc_RNA (1)...(19): siRNA sense strand
gcacggcucuaucauuuau

SEQ ID NO: 2210874 - RNA, 19 nt, Homo sapiens
  misc_RNA (1)...(19): siRNA sense strand
ugaggaagcucuaaaugaa

SEQ ID NO: 2210875 - RNA, 19 nt, Homo sapiens
  misc_RNA (1)...(19): siRNA sense strand
aagaagagcuggcaacuau

SEQ ID NO: 2210876 - RNA, 19 nt, Homo sapiens
  misc_RNA (1)...(19): siRNA sense strand
gaagagaucagacagaaau

SEQ ID NO: 2210877 - RNA, 19 nt, Homo sapiens
  misc_RNA (1)...(19): siRNA sense strand
gugcaaacauucagauauu

SEQ ID NO: 2210878 - RNA, 19 nt, Homo sapiens
  misc_RNA (1)...(19): siRNA sense strand
agaggaagauugauguaua

SEQ ID NO: 2210879 - RNA, 19 nt, Homo sapiens
  misc_RNA (1)...(19): siRNA sense strand
ggaccagucugccgaaguu

SEQ ID NO: 2210880 - RNA, 19 nt, Homo sapiens
  misc_RNA (1)...(19): siRNA sense strand
caagaagccuggucucguu

SEQ ID NO: 2210881 - RNA, 19 nt, Homo sapiens
  misc_RNA (1)...(19): siRNA sense strand
ggagaaccacuggaaauua

SEQ ID NO: 2210882 - RNA, 19 nt, Homo sapiens
  misc_RNA (1)...(19): siRNA sense strand
gaagagugcugcguguuug

SEQ ID NO: 2210883 - RNA, 19 nt, Homo sapiens
  misc_RNA (1)...(19): siRNA sense strand
gagcaaauaguacagagua

SEQ ID NO: 2210884 - RNA, 19 nt, Homo sapiens
  misc_RNA (1)...(19): siRNA sense strand
uaaacaaucuggcuuugga

SEQ ID NO: 2210885 - RNA, 19 nt, Homo sapiens
  misc_RNA (1)...(19): siRNA sense strand
aagcacggcucuaucauuu

SEQ ID NO: 2210886 - RNA, 19 nt, Homo sapiens
  misc_RNA (1)...(19): siRNA sense strand
aaacaaagcuauguaugug

SEQ ID NO: 2210887 - RNA, 19 nt, Homo sapiens
  misc_RNA (1)...(19): siRNA sense strand
gguagaagcuguccaacuc

SEQ ID NO: 2210888 - RNA, 19 nt, Homo sapiens
  misc_RNA (1)...(19): siRNA sense strand
gaagauugauguauagacu

SEQ ID NO: 2210889 - RNA, 19 nt, Homo sapiens
  misc_RNA (1)...(19): siRNA sense strand
ggugagaaaucugcaguuu

SEQ ID NO: 2210890 - RNA, 19 nt, Homo sapiens
  misc_RNA (1)...(19): siRNA sense strand
augaagagcugugcuguua

SEQ ID NO: 2210891 - RNA, 19 nt, Homo sapiens
  misc_RNA (1)...(19): siRNA sense strand
gaagagcuggcaacuauug

SEQ ID NO: 2210892 - RNA, 19 nt, Homo sapiens
  misc_RNA (1)...(19): siRNA sense strand
gcaagaccaucaaagaagu

SEQ ID NO: 2210893 - RNA, 19 nt, Homo sapiens
  misc_RNA (1)...(19): siRNA sense strand
cggugacacuggaauauua

SEQ ID NO: 2210894 - RNA, 19 nt, Homo sapiens
  misc_RNA (1)...(19): siRNA sense strand
gauucgaggucaugauaaa

SEQ ID NO: 2210895 - RNA, 19 nt, Homo sapiens
  misc_RNA (1)...(19): siRNA sense strand
gcuaucaauuggacucuaa

SEQ ID NO: 2210896 - RNA, 19 nt, Homo sapiens
  misc_RNA (1)...(19): siRNA sense strand
ggaaagacuuacgacacua

SEQ ID NO: 2210897 - RNA, 19 nt, Homo sapiens
  misc_RNA (1)...(19): siRNA sense strand
ucauaaggcucaucuggaa

SEQ ID NO: 2210898 - RNA, 19 nt, Homo sapiens
  misc_RNA (1)...(19): siRNA sense strand
gaaagaggaagauugaugu

SEQ ID NO: 2210899 - RNA, 19 nt, Homo sapiens
  misc_RNA (1)...(19): siRNA sense strand
caucugggcuggaauuuua

SEQ ID NO: 2210900 - RNA, 19 nt, Homo sapiens
  misc_RNA (1)...(19): siRNA sense strand
ggaagagugcugcguguuu

SEQ ID NO: 2210901 - RNA, 19 nt, Homo sapiens
  misc_RNA (1)...(19): siRNA sense strand
gaggaagauugauguauag

SEQ ID NO: 2210902 - RNA, 19 nt, Homo sapiens
  misc_RNA (1)...(19): siRNA sense strand
ugacaagagugguagaaga

SEQ ID NO: 2210903 - RNA, 19 nt, Homo sapiens
  misc_RNA (1)...(19): siRNA sense strand
ugacaaggcugugcgaaug

SEQ ID NO: 2210904 - RNA, 19 nt, Homo sapiens
  misc_RNA (1)...(19): siRNA sense strand
aggaagcucuaaaugaaua

SEQ ID NO: 2210905 - RNA, 19 nt, Homo sapiens
  misc_RNA (1)...(19): siRNA sense strand
caaagagggccaccgagua

SEQ ID NO: 2210906 - RNA, 19 nt, Homo sapiens
  misc_RNA (1)...(19): siRNA sense strand
uggaaaagcugcugcaaua

SEQ ID NO: 2210907 - RNA, 19 nt, Homo sapiens
  misc_RNA (1)...(19): siRNA sense strand
agagauaaauggacagaug

SEQ ID NO: 2210908 - RNA, 19 nt, Homo sapiens
  misc_RNA (1)...(19): siRNA sense strand
ggagcugguuguagauuau

SEQ ID NO: 2210909 - RNA, 19 nt, Homo sapiens
  misc_RNA (1)...(19): siRNA sense strand
gggcaugggagcaguauuu

SEQ ID NO: 2210910 - RNA, 19 nt, Homo sapiens
  misc_RNA (1)...(19): siRNA sense strand
aaucugaccuucaccaaga

SEQ ID NO: 2210911 - RNA, 19 nt, Homo sapiens
  misc_RNA (1)...(19): siRNA sense strand
guauagacuugcagaccua

SEQ ID NO: 2210912 - RNA, 19 nt, Homo sapiens
  misc_RNA (1)...(19): siRNA sense strand
gauguugaacccaaugaua

SEQ ID NO: 2210913 - RNA, 19 nt, Homo sapiens
  misc_RNA (1)...(19): siRNA sense strand
ggauguugauaaagcagua

SEQ ID NO: 2210914 - RNA, 19 nt, Homo sapiens
  misc_RNA (1)...(19): siRNA sense strand
gaaaucugcaguuugaaga

SEQ ID NO: 2210915 - RNA, 19 nt, Homo sapiens
  misc_RNA (1)...(19): siRNA sense strand
ccauaccaguguuucauaa

SEQ ID NO: 2210916 - RNA, 19 nt, Homo sapiens
  misc_RNA (1)...(19): siRNA sense strand
gaaauuaaaggugccaaga

SEQ ID NO: 2210917 - RNA, 19 nt, Homo sapiens
  misc_RNA (1)...(19): siRNA sense strand
gaagaaugaaugcaagaga

SEQ ID NO: 2210918 - RNA, 19 nt, Homo sapiens
  misc_RNA (1)...(19): siRNA sense strand
uaaaugugcucccuuucug

SEQ ID NO: 2210919 - RNA, 19 nt, Homo sapiens
  misc_RNA (1)...(19): siRNA sense strand
gcacaggucacgcccuuga

SEQ ID NO: 2210920 - RNA, 19 nt, Homo sapiens
  misc_RNA (1)...(19): siRNA sense strand
gacagauggucacuuucua

SEQ ID NO: 2210921 - RNA, 19 nt, Homo sapiens
  misc_RNA (1)...(19): siRNA sense strand
caagagugguagaagaaau

SEQ ID NO: 2210922 - RNA, 19 nt, Homo sapiens
  misc_RNA (1)...(19): siRNA sense strand
caagagacauaaacaaagc

SEQ ID NO: 2210923 - RNA, 19 nt, Homo sapiens
  misc_RNA (1)...(19): siRNA sense strand
acauguaccucgccaaaga

SEQ ID NO: 2210924 - RNA, 19 nt, Homo sapiens
  misc_RNA (1)...(19): siRNA sense strand
gaaaauuggugauccacuu

SEQ ID NO: 2210925 - RNA, 19 nt, Homo sapiens
  misc_RNA (1)...(19): siRNA sense strand
uggaaaagcuccucguaua

SEQ ID NO: 2210926 - RNA, 19 nt, Homo sapiens
  misc_RNA (1)...(19): siRNA sense strand
gacaagagugguagaagaa

SEQ ID NO: 2210927 - RNA, 19 nt, Homo sapiens
  misc_RNA (1)...(19): siRNA sense strand
gaagagcugugcuguuagc

SEQ ID NO: 2210928 - RNA, 19 nt, Homo sapiens
  misc_RNA (1)...(19): siRNA sense strand
ggacccauccuucuucaga

SEQ ID NO: 2210929 - RNA, 19 nt, Homo sapiens
  misc_RNA (1)...(19): siRNA sense strand
caaaggagagaacuguauu

SEQ ID NO: 2210930 - RNA, 19 nt, Homo sapiens
  misc_RNA (1)...(19): siRNA sense strand
aagaaugaaugcaagagaa

SEQ ID NO: 2210931 - RNA, 19 nt, Homo sapiens
  misc_RNA (1)...(19): siRNA sense strand
gaaagacuuacgacacuau

SEQ ID NO: 2210932 - RNA, 19 nt, Homo sapiens
  misc_RNA (1)...(19): siRNA sense strand
ccaaagcacggcucuauca

SEQ ID NO: 2210933 - RNA, 19 nt, Homo sapiens
  misc_RNA (1)...(19): siRNA sense strand
gugaggaagcucuaaauga

SEQ ID NO: 2210934 - RNA, 19 nt, Homo sapiens
  misc_RNA (1)...(19): siRNA sense strand
caaaguauccuacgcuucu

SEQ ID NO: 2210935 - RNA, 19 nt, Homo sapiens
  misc_RNA (1)...(19): siRNA sense strand
gggcuucaguugcagaaug

SEQ ID NO: 2210936 - RNA, 19 nt, Homo sapiens
  misc_RNA (1)...(19): siRNA sense strand
gggcaagaccaucaaagaa

SEQ ID NO: 2210937 - RNA, 19 nt, Homo sapiens
  misc_RNA (1)...(19): siRNA sense strand
gcacugacggugagaaauc

SEQ ID NO: 2210938 - RNA, 19 nt, Homo sapiens
  misc_RNA (1)...(19): siRNA sense strand
gagcuuggacagagauaaa

SEQ ID NO: 2210939 - RNA, 19 nt, Homo sapiens
  misc_RNA (1)...(19): siRNA sense strand
gaugauggcuuggauacag

SEQ ID NO: 2210940 - RNA, 19 nt, Homo sapiens
  misc_RNA (1)...(19): siRNA sense strand
ggcuuuggcugcagagaaa

SEQ ID NO: 2210941 - RNA, 19 nt, Homo sapiens
  misc_RNA (1)...(19): siRNA sense strand
caacaaaggagagaacugu

SEQ ID NO: 2210942 - RNA, 19 nt, Homo sapiens
  misc_RNA (1)...(19): siRNA sense strand
guuagcaacuugaagaaag

SEQ ID NO: 2210943 - RNA, 19 nt, Homo sapiens
  misc_RNA (1)...(19): siRNA sense strand
ggaacuacccgcugaugau

SEQ ID NO: 2210944 - RNA, 19 nt, Homo sapiens
  misc_RNA (1)...(19): siRNA sense strand
guucacagaugcagacgau

SEQ ID NO: 2210945 - RNA, 19 nt, Homo sapiens
  misc_RNA (1)...(19): siRNA sense strand
gcagaaugaagaugucuau

SEQ ID NO: 2210946 - RNA, 19 nt, Homo sapiens
  misc_RNA (1)...(19): siRNA sense strand
ggacagauggucacuuucu

SEQ ID NO: 2210947 - RNA, 19 nt, Homo sapiens
  misc_RNA (1)...(19): siRNA sense strand
agagaaagaggaagauuga

SEQ ID NO: 2210948 - RNA, 19 nt, Homo sapiens
  misc_RNA (1)...(19): siRNA sense strand
uuucauaaauggacaguuc

SEQ ID NO: 2210949 - RNA, 19 nt, Homo sapiens
  misc_RNA (1)...(19): siRNA sense strand
uaaauggacaguucacaga

SEQ ID NO: 2210950 - RNA, 19 nt, Homo sapiens
  misc_RNA (1)...(19): siRNA sense strand
acucauagcugauggaaaa

SEQ ID NO: 2210951 - RNA, 19 nt, Homo sapiens
  misc_RNA (1)...(19): siRNA sense strand
gcaaauaguacagaguaug

SEQ ID NO: 2210952 - RNA, 19 nt, Homo sapiens
  misc_RNA (1)...(19): siRNA sense strand
gaacuacccgcugaugaug

SEQ ID NO: 2210953 - RNA, 19 nt, Homo sapiens
  misc_RNA (1)...(19): siRNA sense strand
aagcugaaguuggcacuaa

SEQ ID NO: 2210954 - RNA, 19 nt, Homo sapiens
  misc_RNA (1)...(19): siRNA sense strand
gagccucugcuaucaauug

SEQ ID NO: 2210955 - RNA, 19 nt, Homo sapiens
  misc_RNA (1)...(19): siRNA sense strand
uguucaagcuuccuaaaug

SEQ ID NO: 2210956 - RNA, 19 nt, Homo sapiens
  misc_RNA (1)...(19): siRNA sense strand
caaccaggcccguccaaau

SEQ ID NO: 2210957 - RNA, 19 nt, Homo sapiens
  misc_RNA (1)...(19): siRNA sense strand
uggagcugguuguagauua

SEQ ID NO: 2210958 - RNA, 19 nt, Homo sapiens
  misc_RNA (1)...(19): siRNA sense strand
caccaaguuugaaggcuuu

SEQ ID NO: 2210959 - RNA, 19 nt, Homo sapiens
  misc_RNA (1)...(19): siRNA sense strand
agacucaacagacuucuuu

SEQ ID NO: 2210960 - RNA, 19 nt, Homo sapiens
  misc_RNA (1)...(19): siRNA sense strand
ggcucgacauuacugaaua

SEQ ID NO: 2210961 - RNA, 19 nt, Homo sapiens
  misc_RNA (1)...(19): siRNA sense strand
gaaucaaggccaugguaga

SEQ ID NO: 2210962 - RNA, 19 nt, Homo sapiens
  misc_RNA (1)...(19): siRNA sense strand
ccauggauauaauugauag

SEQ ID NO: 2210963 - RNA, 19 nt, Homo sapiens
  misc_RNA (1)...(19): siRNA sense strand
gaaacuggagugaaagaag

SEQ ID NO: 2210964 - RNA, 19 nt, Homo sapiens
  misc_RNA (1)...(19): siRNA sense strand
guucuacuauuccaaucaa

SEQ ID NO: 2210965 - RNA, 19 nt, Homo sapiens
  misc_RNA (1)...(19): siRNA sense strand
caacgucugucugaacauc

SEQ ID NO: 2210966 - RNA, 19 nt, Homo sapiens
  misc_RNA (1)...(19): siRNA sense strand
ggaaauuucuugaggagua

SEQ ID NO: 2210967 - RNA, 19 nt, Homo sapiens
  misc_RNA (1)...(19): siRNA sense strand
gcaaagaaauagagaaaga

SEQ ID NO: 2210968 - RNA, 19 nt, Homo sapiens
  misc_RNA (1)...(19): siRNA sense strand
ggacagagcuaccuugauc

SEQ ID NO: 2210969 - RNA, 19 nt, Homo sapiens
  misc_RNA (1)...(19): siRNA sense strand
gaacugucuugcuuuguua

SEQ ID NO: 2210970 - RNA, 19 nt, Homo sapiens
  misc_RNA (1)...(19): siRNA sense strand
gaauauacaucuccgaaau

SEQ ID NO: 2210971 - RNA, 19 nt, Homo sapiens
  misc_RNA (1)...(19): siRNA sense strand
gaguauaccucucaacuga

SEQ ID NO: 2210972 - RNA, 19 nt, Homo sapiens
  misc_RNA (1)...(19): siRNA sense strand
ggaaggugauugccaaauu

SEQ ID NO: 2210973 - RNA, 19 nt, Homo sapiens
  misc_RNA (1)...(19): siRNA sense strand
guauugcacuuucagauuu

SEQ ID NO: 2210974 - RNA, 19 nt, Homo sapiens
  misc_RNA (1)...(19): siRNA sense strand
ggaacugucuugcuuuguu

SEQ ID NO: 2210975 - RNA, 19 nt, Homo sapiens
  misc_RNA (1)...(19): siRNA sense strand
gaacguaguccaccaguug

SEQ ID NO: 2210976 - RNA, 19 nt, Homo sapiens
  misc_RNA (1)...(19): siRNA sense strand
gcagagaauggauaaauuu

SEQ ID NO: 2210977 - RNA, 19 nt, Homo sapiens
  misc_RNA (1)...(19): siRNA sense strand
acagaaagcucaaucacuu

SEQ ID NO: 2210978 - RNA, 19 nt, Homo sapiens
  misc_RNA (1)...(19): siRNA sense strand
gaaggugauugccaaauuc

SEQ ID NO: 2210979 - RNA, 19 nt, Homo sapiens
  misc_RNA (1)...(19): siRNA sense strand
gaaggaagaagaaacuaaa

SEQ ID NO: 2210980 - RNA, 19 nt, Homo sapiens
  misc_RNA (1)...(19): siRNA sense strand
gaagcuagaagggcaauua

SEQ ID NO: 2210981 - RNA, 19 nt, Homo sapiens
  misc_RNA (1)...(19): siRNA sense strand
caacggcgacuuauuguuu

SEQ ID NO: 2210982 - RNA, 19 nt, Homo sapiens
  misc_RNA (1)...(19): siRNA sense strand
gcacgggaauuaugaauac

SEQ ID NO: 2210983 - RNA, 19 nt, Homo sapiens
  misc_RNA (1)...(19): siRNA sense strand
uuacguaacucacuaccua

SEQ ID NO: 2210984 - RNA, 19 nt, Homo sapiens
  misc_RNA (1)...(19): siRNA sense strand
cgagcugucuucccaauuu

SEQ ID NO: 2210985 - RNA, 19 nt, Homo sapiens
  misc_RNA (1)...(19): siRNA sense strand
agaaauaccugaaggagau

SEQ ID NO: 2210986 - RNA, 19 nt, Homo sapiens
  misc_RNA (1)...(19): siRNA sense strand
ggacaaauuaugcaaagaa

SEQ ID NO: 2210987 - RNA, 19 nt, Homo sapiens
  misc_RNA (1)...(19): siRNA sense strand
ggauaaauuugcugaagau

SEQ ID NO: 2210988 - RNA, 19 nt, Homo sapiens
  misc_RNA (1)...(19): siRNA sense strand
agacaagacuuucuacaau

SEQ ID NO: 2210989 - RNA, 19 nt, Homo sapiens
  misc_RNA (1)...(19): siRNA sense strand
gcuaugaaguggugaugaa

SEQ ID NO: 2210990 - RNA, 19 nt, Homo sapiens
  misc_RNA (1)...(19): siRNA sense strand
gagcugucuucccaauuua

SEQ ID NO: 2210991 - RNA, 19 nt, Homo sapiens
  misc_RNA (1)...(19): siRNA sense strand
agacaaguauguuggaauu

SEQ ID NO: 2210992 - RNA, 19 nt, Homo sapiens
  misc_RNA (1)...(19): siRNA sense strand
acaaagucaucacuguuua

SEQ ID NO: 2210993 - RNA, 19 nt, Homo sapiens
  misc_RNA (1)...(19): siRNA sense strand
gaaagagaaggaagaagaa

SEQ ID NO: 2210994 - RNA, 19 nt, Homo sapiens
  misc_RNA (1)...(19): siRNA sense strand
gaacgaacaagcaauaaca

SEQ ID NO: 2210995 - RNA, 19 nt, Homo sapiens
  misc_RNA (1)...(19): siRNA sense strand
ccaguuggcugcccucuau

SEQ ID NO: 2210996 - RNA, 19 nt, Homo sapiens
  misc_RNA (1)...(19): siRNA sense strand
cauuaaagcuuuugccuua

SEQ ID NO: 2210997 - RNA, 19 nt, Homo sapiens
  misc_RNA (1)...(19): siRNA sense strand
ccaugaaucucacucagaa

SEQ ID NO: 2210998 - RNA, 19 nt, Homo sapiens
  misc_RNA (1)...(19): siRNA sense strand
gcaacagaauguacaguca

SEQ ID NO: 2210999 - RNA, 19 nt, Homo sapiens
  misc_RNA (1)...(19): siRNA sense strand
guagagcauuccauuaguu

SEQ ID NO: 2211000 - RNA, 19 nt, Homo sapiens
  misc_RNA (1)...(19): siRNA sense strand
uaacaagauugcacccaaa

SEQ ID NO: 2211001 - RNA, 19 nt, Homo sapiens
  misc_RNA (1)...(19): siRNA sense strand
uaaacaaagucaucacugu

SEQ ID NO: 2211002 - RNA, 19 nt, Homo sapiens
  misc_RNA (1)...(19): siRNA sense strand
ccaaacugcuagacagaaa

SEQ ID NO: 2211003 - RNA, 19 nt, Homo sapiens
  misc_RNA (1)...(19): siRNA sense strand
gcaauaacaagcauuugaa

SEQ ID NO: 2211004 - RNA, 19 nt, Homo sapiens
  misc_RNA (1)...(19): siRNA sense strand
cugaagaucucaccaauag

SEQ ID NO: 2211005 - RNA, 19 nt, Homo sapiens
  misc_RNA (1)...(19): siRNA sense strand
gaacaacaauuugauucuc

SEQ ID NO: 2211006 - RNA, 19 nt, Homo sapiens
  misc_RNA (1)...(19): siRNA sense strand
ggagcugccuuuacugaug

SEQ ID NO: 2211007 - RNA, 19 nt, Homo sapiens
  misc_RNA (1)...(19): siRNA sense strand
gagcuaccuugaucaauuc

SEQ ID NO: 2211008 - RNA, 19 nt, Homo sapiens
  misc_RNA (1)...(19): siRNA sense strand
ggacauuuguaagaaggua

SEQ ID NO: 2211009 - RNA, 19 nt, Homo sapiens
  misc_RNA (1)...(19): siRNA sense strand
gagcugccuuuacugauga

SEQ ID NO: 2211010 - RNA, 19 nt, Homo sapiens
  misc_RNA (1)...(19): siRNA sense strand
gaacgaguccaaacacaau

SEQ ID NO: 2211011 - RNA, 19 nt, Homo sapiens
  misc_RNA (1)...(19): siRNA sense strand
gcugaggaauuugcacaua

SEQ ID NO: 2211012 - RNA, 19 nt, Homo sapiens
  misc_RNA (1)...(19): siRNA sense strand
acacauggcacgggaauua

SEQ ID NO: 2211013 - RNA, 19 nt, Homo sapiens
  misc_RNA (1)...(19): siRNA sense strand
gacaagacuuucuacaauc

SEQ ID NO: 2211014 - RNA, 19 nt, Homo sapiens
  misc_RNA (1)...(19): siRNA sense strand
caaugaaucucuacauguc

SEQ ID NO: 2211015 - RNA, 19 nt, Homo sapiens
  misc_RNA (1)...(19): siRNA sense strand
ggaauuugcacauaguauu

SEQ ID NO: 2211016 - RNA, 19 nt, Homo sapiens
  misc_RNA (1)...(19): siRNA sense strand
uaugaacaguccucucuuu

SEQ ID NO: 2211017 - RNA, 19 nt, Homo sapiens
  misc_RNA (1)...(19): siRNA sense strand
ggguguggcuuacauucua

SEQ ID NO: 2211018 - RNA, 19 nt, Homo sapiens
  misc_RNA (1)...(19): siRNA sense strand
agagcuaccuugaucaauu

SEQ ID NO: 2211019 - RNA, 19 nt, Homo sapiens
  misc_RNA (1)...(19): siRNA sense strand
aaagaccacuggacuaugu

SEQ ID NO: 2211020 - RNA, 19 nt, Homo sapiens
  misc_RNA (1)...(19): siRNA sense strand
gaacucauaaagacugaaa

SEQ ID NO: 2211021 - RNA, 19 nt, Homo sapiens
  misc_RNA (1)...(19): siRNA sense strand
ggaugucuaucuacaggaa

SEQ ID NO: 2211022 - RNA, 19 nt, Homo sapiens
  misc_RNA (1)...(19): siRNA sense strand
gaacaagcaauaacaagca

SEQ ID NO: 2211023 - RNA, 19 nt, Homo sapiens
  misc_RNA (1)...(19): siRNA sense strand
gggcuuacguaacucacua

SEQ ID NO: 2211024 - RNA, 19 nt, Homo sapiens
  misc_RNA (1)...(19): siRNA sense strand
ggauugcuaugacaaggaa

SEQ ID NO: 2211025 - RNA, 19 nt, Homo sapiens
  misc_RNA (1)...(19): siRNA sense strand
ugaaaucuguccaucacaa

SEQ ID NO: 2211026 - RNA, 19 nt, Homo sapiens
  misc_RNA (1)...(19): siRNA sense strand
gcacuuuguugugaaauca

SEQ ID NO: 2211027 - RNA, 19 nt, Homo sapiens
  misc_RNA (1)...(19): siRNA sense strand
gaacacaucaaauccagau

SEQ ID NO: 2211028 - RNA, 19 nt, Homo sapiens
  misc_RNA (1)...(19): siRNA sense strand
gccaauuuauguaugauga

SEQ ID NO: 2211029 - RNA, 19 nt, Homo sapiens
  misc_RNA (1)...(19): siRNA sense strand
gaaauuucuugaggaguau

SEQ ID NO: 2211030 - RNA, 19 nt, Homo sapiens
  misc_RNA (1)...(19): siRNA sense strand
gcagccagauuacauuaca

SEQ ID NO: 2211031 - RNA, 19 nt, Homo sapiens
  misc_RNA (1)...(19): siRNA sense strand
acaaagcaacggcgacuua

SEQ ID NO: 2211032 - RNA, 19 nt, Homo sapiens
  misc_RNA (1)...(19): siRNA sense strand
gaaauugaccagagagaca

SEQ ID NO: 2211033 - RNA, 19 nt, Homo sapiens
  misc_RNA (1)...(19): siRNA sense strand
cauaguauucggucaauuu

SEQ ID NO: 2211034 - RNA, 19 nt, Homo sapiens
  misc_RNA (1)...(19): siRNA sense strand
aauaugaggcugaaacuaa

SEQ ID NO: 2211035 - RNA, 19 nt, Homo sapiens
  misc_RNA (1)...(19): siRNA sense strand
gcgacuggaugucuaucua

SEQ ID NO: 2211036 - RNA, 19 nt, Homo sapiens
  misc_RNA (1)...(19): siRNA sense strand
ccuauagcauuaaagcuuu

SEQ ID NO: 2211037 - RNA, 19 nt, Homo sapiens
  misc_RNA (1)...(19): siRNA sense strand
caacucaucagccagauug

SEQ ID NO: 2211038 - RNA, 19 nt, Homo sapiens
  misc_RNA (1)...(19): siRNA sense strand
gaucauaaguauccuuuug

SEQ ID NO: 2211039 - RNA, 19 nt, Homo sapiens
  misc_RNA (1)...(19): siRNA sense strand
caacaucaggcucuucauu

SEQ ID NO: 2211040 - RNA, 19 nt, Homo sapiens
  misc_RNA (1)...(19): siRNA sense strand
gagcagagaauggauaaau

SEQ ID NO: 2211041 - RNA, 19 nt, Homo sapiens
  misc_RNA (1)...(19): siRNA sense strand
acaaguauguuggaauuug

SEQ ID NO: 2211042 - RNA, 19 nt, Homo sapiens
  misc_RNA (1)...(19): siRNA sense strand
gcacuugggagaacugcua

SEQ ID NO: 2211043 - RNA, 19 nt, Homo sapiens
  misc_RNA (1)...(19): siRNA sense strand
uaauuucaccuaccaguuu

SEQ ID NO: 2211044 - RNA, 19 nt, Homo sapiens
  misc_RNA (1)...(19): siRNA sense strand
uaaauuugcugaagaucuc

SEQ ID NO: 2211045 - RNA, 19 nt, Homo sapiens
  misc_RNA (1)...(19): siRNA sense strand
ccacuggacuauguacaaa

SEQ ID NO: 2211046 - RNA, 19 nt, Homo sapiens
  misc_RNA (1)...(19): siRNA sense strand
uaacacagcaccuucaaca

SEQ ID NO: 2211047 - RNA, 19 nt, Homo sapiens
  misc_RNA (1)...(19): siRNA sense strand
gaauuucgaaggccaaaga

SEQ ID NO: 2211048 - RNA, 19 nt, Homo sapiens
  misc_RNA (1)...(19): siRNA sense strand
guaaugcuaugggcuaugu

SEQ ID NO: 2211049 - RNA, 19 nt, Homo sapiens
  misc_RNA (1)...(19): siRNA sense strand
gagaugagaaacuuagcua

SEQ ID NO: 2211050 - RNA, 19 nt, Homo sapiens
  misc_RNA (1)...(19): siRNA sense strand
gcacauaguauucggucaa

SEQ ID NO: 2211051 - RNA, 19 nt, Homo sapiens
  misc_RNA (1)...(19): siRNA sense strand
gagaacgaguccaaacaca

SEQ ID NO: 2211052 - RNA, 19 nt, Homo sapiens
  misc_RNA (1)...(19): siRNA sense strand
aaagagugauuucugacaa

SEQ ID NO: 2211053 - RNA, 19 nt, Homo sapiens
  misc_RNA (1)...(19): siRNA sense strand
gagaauggauaaauuugcu

SEQ ID NO: 2211054 - RNA, 19 nt, Homo sapiens
  misc_RNA (1)...(19): siRNA sense strand
ggagaaggagcuacagaug

SEQ ID NO: 2211055 - RNA, 19 nt, Homo sapiens
  misc_RNA (1)...(19): siRNA sense strand
gcuaugggcuauguacgaa

SEQ ID NO: 2211056 - RNA, 19 nt, Homo sapiens
  misc_RNA (1)...(19): siRNA sense strand
caagcaauaacaagcauuu

SEQ ID NO: 2211057 - RNA, 19 nt, Homo sapiens
  misc_RNA (1)...(19): siRNA sense strand
uaacaacuguagcccuuca

SEQ ID NO: 2211058 - RNA, 19 nt, Homo sapiens
  misc_RNA (1)...(19): siRNA sense strand
cacaaugaaucucuacaug

SEQ ID NO: 2211059 - RNA, 19 nt, Homo sapiens
  misc_RNA (1)...(19): siRNA sense strand
uaccaaagauguacagucu

SEQ ID NO: 2211060 - RNA, 19 nt, Homo sapiens
  misc_RNA (1)...(19): siRNA sense strand
caaguauguuggaauuugu

SEQ ID NO: 2211061 - RNA, 19 nt, Homo sapiens
  misc_RNA (1)...(19): siRNA sense strand
agaaagagaaggaagaaga

SEQ ID NO: 2211062 - RNA, 19 nt, Homo sapiens
  misc_RNA (1)...(19): siRNA sense strand
ggagauguuugggauuuca

SEQ ID NO: 2211063 - RNA, 19 nt, Homo sapiens
  misc_RNA (1)...(19): siRNA sense strand
gcacaucuucccagucaga

SEQ ID NO: 2211064 - RNA, 19 nt, Homo sapiens
  misc_RNA (1)...(19): siRNA sense strand
cucaaucacuuaccaaaga

SEQ ID NO: 2211065 - RNA, 19 nt, Homo sapiens
  misc_RNA (1)...(19): siRNA sense strand
ucauugacauucgggcuua

SEQ ID NO: 2211066 - RNA, 19 nt, Homo sapiens
  misc_RNA (1)...(19): siRNA sense strand
ggugaagccucaagcauug

SEQ ID NO: 2211067 - RNA, 19 nt, Homo sapiens
  misc_RNA (1)...(19): siRNA sense strand
gcacgaaagcggccagaaa

SEQ ID NO: 2211068 - RNA, 19 nt, Homo sapiens
  misc_RNA (1)...(19): siRNA sense strand
guaccaggaucuuugcaaa

SEQ ID NO: 2211069 - RNA, 19 nt, Homo sapiens
  misc_RNA (1)...(19): siRNA sense strand
gugcugagcuguccuucuu

SEQ ID NO: 2211070 - RNA, 19 nt, Homo sapiens
  misc_RNA (1)...(19): siRNA sense strand
caacaaaggguuuaaaggu

SEQ ID NO: 2211071 - RNA, 19 nt, Homo sapiens
  misc_RNA (1)...(19): siRNA sense strand
gaccaucucugccuacauc

SEQ ID NO: 2211072 - RNA, 19 nt, Homo sapiens
  misc_RNA (1)...(19): siRNA sense strand
gaaagcggccagaaagaga

SEQ ID NO: 2211073 - RNA, 19 nt, Homo sapiens
  misc_RNA (1)...(19): siRNA sense strand
gccaagcucugguucaaau

SEQ ID NO: 2211074 - RNA, 19 nt, Homo sapiens
  misc_RNA (1)...(19): siRNA sense strand
ggacggaccaucugcauca

SEQ ID NO: 2211075 - RNA, 19 nt, Homo sapiens
  misc_RNA (1)...(19): siRNA sense strand
ggccagaguucgugaggaa

SEQ ID NO: 2211076 - RNA, 19 nt, Homo sapiens
  misc_RNA (1)...(19): siRNA sense strand
uccggaagcucgaguauga

SEQ ID NO: 2211077 - RNA, 19 nt, Homo sapiens
  misc_RNA (1)...(19): siRNA sense strand
ccaaguacaucggcugcua

SEQ ID NO: 2211078 - RNA, 19 nt, Homo sapiens
  misc_RNA (1)...(19): siRNA sense strand
ggacaaaugcguggacuuc

SEQ ID NO: 2211079 - RNA, 19 nt, Homo sapiens
  misc_RNA (1)...(19): siRNA sense strand
guauggaagugcaguguuc

SEQ ID NO: 2211080 - RNA, 19 nt, Homo sapiens
  misc_RNA (1)...(19): siRNA sense strand
cuaguuacuucauugugua

SEQ ID NO: 2211081 - RNA, 19 nt, Homo sapiens
  misc_RNA (1)...(19): siRNA sense strand
agacacaaguccaagacaa

SEQ ID NO: 2211082 - RNA, 19 nt, Homo sapiens
  misc_RNA (1)...(19): siRNA sense strand
ggaaaccugugcgcuucuu

SEQ ID NO: 2211083 - RNA, 19 nt, Homo sapiens
  misc_RNA (1)...(19): siRNA sense strand
gaagagcgagccaaguaca

SEQ ID NO: 2211084 - RNA, 19 nt, Homo sapiens
  misc_RNA (1)...(19): siRNA sense strand
gcugcgggacuccuaguua

SEQ ID NO: 2211085 - RNA, 19 nt, Homo sapiens
  misc_RNA (1)...(19): siRNA sense strand
aaaccugugcgcuucuuua

SEQ ID NO: 2211086 - RNA, 19 nt, Homo sapiens
  misc_RNA (1)...(19): siRNA sense strand
gcucaaguuuggcaagaag

SEQ ID NO: 2211087 - RNA, 19 nt, Homo sapiens
  misc_RNA (1)...(19): siRNA sense strand
acacuggacuggcucaagu

SEQ ID NO: 2211088 - RNA, 19 nt, Homo sapiens
  misc_RNA (1)...(19): siRNA sense strand
ugacuacuacccaagauga

SEQ ID NO: 2211089 - RNA, 19 nt, Homo sapiens
  misc_RNA (1)...(19): siRNA sense strand
aggaagagcgagccaagua

SEQ ID NO: 2211090 - RNA, 19 nt, Homo sapiens
  misc_RNA (1)...(19): siRNA sense strand
ccuaguuacuucauugugu

SEQ ID NO: 2211091 - RNA, 19 nt, Homo sapiens
  misc_RNA (1)...(19): siRNA sense strand
gaugacuacuacccaagau

SEQ ID NO: 2211092 - RNA, 19 nt, Homo sapiens
  misc_RNA (1)...(19): siRNA sense strand
ccaaccgccucucugucua

SEQ ID NO: 2211093 - RNA, 19 nt, Homo sapiens
  misc_RNA (1)...(19): siRNA sense strand
acaaaugcguggacuucug

SEQ ID NO: 2211094 - RNA, 19 nt, Homo sapiens
  misc_RNA (1)...(19): siRNA sense strand
cggaccaucugcaucaaga

SEQ ID NO: 2211095 - RNA, 19 nt, Homo sapiens
  misc_RNA (1)...(19): siRNA sense strand
guaggagaguggccagagu

SEQ ID NO: 2211096 - RNA, 19 nt, Homo sapiens
  misc_RNA (1)...(19): siRNA sense strand
caaccuuucccuggccuua

SEQ ID NO: 2211097 - RNA, 19 nt, Homo sapiens
  misc_RNA (1)...(19): siRNA sense strand
caggaucuuugcaaaucuu

SEQ ID NO: 2211098 - RNA, 19 nt, Homo sapiens
  misc_RNA (1)...(19): siRNA sense strand
gaagcaggaccucuuuguc

SEQ ID NO: 2211099 - RNA, 19 nt, Homo sapiens
  misc_RNA (1)...(19): siRNA sense strand
gggcaaggaugggaaugag

SEQ ID NO: 2211100 - RNA, 19 nt, Homo sapiens
  misc_RNA (1)...(19): siRNA sense strand
gugcagcgcggaggaguuu

SEQ ID NO: 2211101 - RNA, 19 nt, Homo sapiens
  misc_RNA (1)...(19): siRNA sense strand
gaaaccugugcgcuucuuu

SEQ ID NO: 2211102 - RNA, 19 nt, Homo sapiens
  misc_RNA (1)...(19): siRNA sense strand
guacggacccugguucaag

SEQ ID NO: 2211103 - RNA, 19 nt, Homo sapiens
  misc_RNA (1)...(19): siRNA sense strand
gcagcgcggaggaguuuga

SEQ ID NO: 2211104 - RNA, 19 nt, Homo sapiens
  misc_RNA (1)...(19): siRNA sense strand
ggaaugagagagccaagcu

SEQ ID NO: 2211105 - RNA, 19 nt, Homo sapiens
  misc_RNA (1)...(19): siRNA sense strand
uuauuucgcucgauuugca

SEQ ID NO: 2211106 - RNA, 19 nt, Homo sapiens
  misc_RNA (1)...(19): siRNA sense strand
gcaucaagacgcacgaaag

SEQ ID NO: 2211107 - RNA, 19 nt, Homo sapiens
  misc_RNA (1)...(19): siRNA sense strand
ggaggguuguccgggagaa

SEQ ID NO: 2211108 - RNA, 19 nt, Homo sapiens
  misc_RNA (1)...(19): siRNA sense strand
guggacuucugcacugaga

SEQ ID NO: 2211109 - RNA, 19 nt, Homo sapiens
  misc_RNA (1)...(19): siRNA sense strand
gaacgggguuaccuguaug

SEQ ID NO: 2211110 - RNA, 19 nt, Homo sapiens
  misc_RNA (1)...(19): siRNA sense strand
acuccuaguuacuucauug

SEQ ID NO: 2211111 - RNA, 19 nt, Homo sapiens
  misc_RNA (1)...(19): siRNA sense strand
gcacuuugaggaccugaag

SEQ ID NO: 2211112 - RNA, 19 nt, Homo sapiens
  misc_RNA (1)...(19): siRNA sense strand
uggacuggcucaaguuugg

SEQ ID NO: 2211113 - RNA, 19 nt, Homo sapiens
  misc_RNA (1)...(19): siRNA sense strand
gggcaaaggagccguacca

SEQ ID NO: 2211114 - RNA, 19 nt, Homo sapiens
  misc_RNA (1)...(19): siRNA sense strand
caagcucugguucaaauuc

SEQ ID NO: 2211115 - RNA, 19 nt, Homo sapiens
  misc_RNA (1)...(19): siRNA sense strand
gcucgccaccucauugaau

SEQ ID NO: 2211116 - RNA, 19 nt, Homo sapiens
  misc_RNA (1)...(19): siRNA sense strand
ggaagagcgagccaaguac

SEQ ID NO: 2211117 - RNA, 19 nt, Homo sapiens
  misc_RNA (1)...(19): siRNA sense strand
guaccagacacaaguccaa

SEQ ID NO: 2211118 - RNA, 19 nt, Homo sapiens
  misc_RNA (1)...(19): siRNA sense strand
gagagcugcgggacuccua

SEQ ID NO: 2211119 - RNA, 19 nt, Homo sapiens
  misc_RNA (1)...(19): siRNA sense strand
gaaugagagagccaagcuu

SEQ ID NO: 2211120 - RNA, 19 nt, Homo sapiens
  misc_RNA (1)...(19): siRNA sense strand
gguggaugcagcccucaaa

SEQ ID NO: 2211121 - RNA, 19 nt, Homo sapiens
  misc_RNA (1)...(19): siRNA sense strand
ugaagcaggaccucuuugu

SEQ ID NO: 2211122 - RNA, 19 nt, Homo sapiens
  misc_RNA (1)...(19): siRNA sense strand
cuacaacaaaggguuuaaa

SEQ ID NO: 2211123 - RNA, 19 nt, Homo sapiens
  misc_RNA (1)...(19): siRNA sense strand
gcguggacuucugcacuga

SEQ ID NO: 2211124 - RNA, 19 nt, Homo sapiens
  misc_RNA (1)...(19): siRNA sense strand
uuaccuuccuggcacucua

SEQ ID NO: 2211125 - RNA, 19 nt, Homo sapiens
  misc_RNA (1)...(19): siRNA sense strand
ccaggaucuuugcaaaucu

SEQ ID NO: 2211126 - RNA, 19 nt, Homo sapiens
  misc_RNA (1)...(19): siRNA sense strand
accaggaucuuugcaaauc

SEQ ID NO: 2211127 - RNA, 19 nt, Homo sapiens
  misc_RNA (1)...(19): siRNA sense strand
ccacuggaagggcaaagga

SEQ ID NO: 2211128 - RNA, 19 nt, Homo sapiens
  misc_RNA (1)...(19): siRNA sense strand
cgaaagcggccagaaagag

SEQ ID NO: 2211129 - RNA, 19 nt, Homo sapiens
  misc_RNA (1)...(19): siRNA sense strand
gggcucgccaccucauuga

SEQ ID NO: 2211130 - RNA, 19 nt, Homo sapiens
  misc_RNA (1)...(19): siRNA sense strand
caggacaacugugcugaac

SEQ ID NO: 2211131 - RNA, 19 nt, Homo sapiens
  misc_RNA (1)...(19): siRNA sense strand
ucaaagggcggaaccuaac

SEQ ID NO: 2211132 - RNA, 19 nt, Homo sapiens
  misc_RNA (1)...(19): siRNA sense strand
cacgaaagcggccagaaag

SEQ ID NO: 2211133 - RNA, 19 nt, Homo sapiens
  misc_RNA (1)...(19): siRNA sense strand
caaauuccagcgguacuuc

SEQ ID NO: 2211134 - RNA, 19 nt, Homo sapiens
  misc_RNA (1)...(19): siRNA sense strand
cuacugcggccacaagauc

SEQ ID NO: 2211135 - RNA, 19 nt, Homo sapiens
  misc_RNA (1)...(19): siRNA sense strand
ccucaaagggcggaaccua

SEQ ID NO: 2211136 - RNA, 19 nt, Homo sapiens
  misc_RNA (1)...(19): siRNA sense strand
gagaguggccagaguucgu

SEQ ID NO: 2211137 - RNA, 19 nt, Homo sapiens
  misc_RNA (1)...(19): siRNA sense strand
ugaacgggguuaccuguau

SEQ ID NO: 2211138 - RNA, 19 nt, Homo sapiens
  misc_RNA (1)...(19): siRNA sense strand
ccugugcgcuucuuuaccu

SEQ ID NO: 2211139 - RNA, 19 nt, Homo sapiens
  misc_RNA (1)...(19): siRNA sense strand
gccaaccgccucucugucu

SEQ ID NO: 2211140 - RNA, 19 nt, Homo sapiens
  misc_RNA (1)...(19): siRNA sense strand
cgaggcagagugcgacaug

SEQ ID NO: 2211141 - RNA, 19 nt, Homo sapiens
  misc_RNA (1)...(19): siRNA sense strand
ccaggacaacugugcugaa

SEQ ID NO: 2211142 - RNA, 19 nt, Homo sapiens
  misc_RNA (1)...(19): siRNA sense strand
cgaugacuacuacccaaga

SEQ ID NO: 2211143 - RNA, 19 nt, Homo sapiens
  misc_RNA (1)...(19): siRNA sense strand
cucaaagggcggaaccuaa

SEQ ID NO: 2211144 - RNA, 19 nt, Homo sapiens
  misc_RNA (1)...(19): siRNA sense strand
ggagccuugucuuccuuca

SEQ ID NO: 2211145 - RNA, 19 nt, Homo sapiens
  misc_RNA (1)...(19): siRNA sense strand
gaaagaugauguccuuaua

SEQ ID NO: 2211146 - RNA, 19 nt, Homo sapiens
  misc_RNA (1)...(19): siRNA sense strand
ggauugaccucuugaguga

SEQ ID NO: 2211147 - RNA, 19 nt, Homo sapiens
  misc_RNA (1)...(19): siRNA sense strand
ggaaagaugauguccuuau

SEQ ID NO: 2211148 - RNA, 19 nt, Homo sapiens
  misc_RNA (1)...(19): siRNA sense strand
aagaugauguccuuauauc

SEQ ID NO: 2211149 - RNA, 19 nt, Homo sapiens
  misc_RNA (1)...(19): siRNA sense strand
gacaagcgccucagcaaag

SEQ ID NO: 2211150 - RNA, 19 nt, Homo sapiens
  misc_RNA (1)...(19): siRNA sense strand
ugagugauuugugugcuuu

SEQ ID NO: 2211151 - RNA, 19 nt, Homo sapiens
  misc_RNA (1)...(19): siRNA sense strand
ccucuugagugauuugugu

SEQ ID NO: 2211152 - RNA, 19 nt, Homo sapiens
  misc_RNA (1)...(19): siRNA sense strand
gcgcugccaucgacuacau

SEQ ID NO: 2211153 - RNA, 19 nt, Homo sapiens
  misc_RNA (1)...(19): siRNA sense strand
auggaaagaugauguccuu

SEQ ID NO: 2211154 - RNA, 19 nt, Homo sapiens
  misc_RNA (1)...(19): siRNA sense strand
agacaagcgccucagcaaa

SEQ ID NO: 2211155 - RNA, 19 nt, Homo sapiens
  misc_RNA (1)...(19): siRNA sense strand
auugaccucuugagugauu

SEQ ID NO: 2211156 - RNA, 19 nt, Homo sapiens
  misc_RNA (1)...(19): siRNA sense strand
cagacaagcgccucagcaa

SEQ ID NO: 2211157 - RNA, 19 nt, Homo sapiens
  misc_RNA (1)...(19): siRNA sense strand
gaugauguccuuauauccu

SEQ ID NO: 2211158 - RNA, 19 nt, Homo sapiens
  misc_RNA (1)...(19): siRNA sense strand
aaacacucuuugcgcuaug

SEQ ID NO: 2211159 - RNA, 19 nt, Homo sapiens
  misc_RNA (1)...(19): siRNA sense strand
aaagaagaagaauccaaug

SEQ ID NO: 2211160 - RNA, 19 nt, Homo sapiens
  misc_RNA (1)...(19): siRNA sense strand
acaagcgccucagcaaagu

SEQ ID NO: 2211161 - RNA, 19 nt, Homo sapiens
  misc_RNA (1)...(19): siRNA sense strand
gcaccuggaaguucuguua

SEQ ID NO: 2211162 - RNA, 19 nt, Homo sapiens
  misc_RNA (1)...(19): siRNA sense strand
ucaagucacuggaaguaaa

SEQ ID NO: 2211163 - RNA, 19 nt, Homo sapiens
  misc_RNA (1)...(19): siRNA sense strand
gacaggagcuaccacuaga

SEQ ID NO: 2211164 - RNA, 19 nt, Homo sapiens
  misc_RNA (1)...(19): siRNA sense strand
uuacagaggccacaacuuu

SEQ ID NO: 2211165 - RNA, 19 nt, Homo sapiens
  misc_RNA (1)...(19): siRNA sense strand
caacugggaucaccaacau

SEQ ID NO: 2211166 - RNA, 19 nt, Homo sapiens
  misc_RNA (1)...(19): siRNA sense strand
gcaaagcaaggaacuagaa

SEQ ID NO: 2211167 - RNA, 19 nt, Homo sapiens
  misc_RNA (1)...(19): siRNA sense strand
gaagcuacgacguccuuua

SEQ ID NO: 2211168 - RNA, 19 nt, Homo sapiens
  misc_RNA (1)...(19): siRNA sense strand
gaucaagucacuggaagua

SEQ ID NO: 2211169 - RNA, 19 nt, Homo sapiens
  misc_RNA (1)...(19): siRNA sense strand
gaacuagaagcacaauaga

SEQ ID NO: 2211170 - RNA, 19 nt, Homo sapiens
  misc_RNA (1)...(19): siRNA sense strand
ggaacuagaagcacaauag

SEQ ID NO: 2211171 - RNA, 19 nt, Homo sapiens
  misc_RNA (1)...(19): siRNA sense strand
guaacaggcucuggaacaa

SEQ ID NO: 2211172 - RNA, 19 nt, Homo sapiens
  misc_RNA (1)...(19): siRNA sense strand
gccaaacccuggaagugaa

SEQ ID NO: 2211173 - RNA, 19 nt, Homo sapiens
  misc_RNA (1)...(19): siRNA sense strand
ccacugaggcuggaaguaa

SEQ ID NO: 2211174 - RNA, 19 nt, Homo sapiens
  misc_RNA (1)...(19): siRNA sense strand
acacaaaggcuaccacuuc

SEQ ID NO: 2211175 - RNA, 19 nt, Homo sapiens
  misc_RNA (1)...(19): siRNA sense strand
gggaucaccaacauaauuu

SEQ ID NO: 2211176 - RNA, 19 nt, Homo sapiens
  misc_RNA (1)...(19): siRNA sense strand
cauagucucuggcacaaca

SEQ ID NO: 2211177 - RNA, 19 nt, Homo sapiens
  misc_RNA (1)...(19): siRNA sense strand
ggacagaagacaggagcua

SEQ ID NO: 2211178 - RNA, 19 nt, Homo sapiens
  misc_RNA (1)...(19): siRNA sense strand
ggaaugaauacagguacua

SEQ ID NO: 2211179 - RNA, 19 nt, Homo sapiens
  misc_RNA (1)...(19): siRNA sense strand
ggaguggucucuggcaaca

SEQ ID NO: 2211180 - RNA, 19 nt, Homo sapiens
  misc_RNA (1)...(19): siRNA sense strand
cacaggaaguggaaugaau

SEQ ID NO: 2211181 - RNA, 19 nt, Homo sapiens
  misc_RNA (1)...(19): siRNA sense strand
ccacaggaguccauagaac

SEQ ID NO: 2211182 - RNA, 19 nt, Homo sapiens
  misc_RNA (1)...(19): siRNA sense strand
ggagguuucagaacagauu

SEQ ID NO: 2211183 - RNA, 19 nt, Homo sapiens
  misc_RNA (1)...(19): siRNA sense strand
acaggaaguggaaugaaua

SEQ ID NO: 2211184 - RNA, 19 nt, Homo sapiens
  misc_RNA (1)...(19): siRNA sense strand
gggagaagccaaccuacug

SEQ ID NO: 2211185 - RNA, 19 nt, Homo sapiens
  misc_RNA (1)...(19): siRNA sense strand
ggccaaacccuggaaguga

SEQ ID NO: 2211186 - RNA, 19 nt, Homo sapiens
  misc_RNA (1)...(19): siRNA sense strand
gcuacgacguccuuuagag

SEQ ID NO: 2211187 - RNA, 19 nt, Homo sapiens
  misc_RNA (1)...(19): siRNA sense strand
caucucaccuagcaguuuc

SEQ ID NO: 2211188 - RNA, 19 nt, Homo sapiens
  misc_RNA (1)...(19): siRNA sense strand
gaugaucaagucacuggaa

SEQ ID NO: 2211189 - RNA, 19 nt, Homo sapiens
  misc_RNA (1)...(19): siRNA sense strand
cacugaggcuggaaguaaa

SEQ ID NO: 2211190 - RNA, 19 nt, Homo sapiens
  misc_RNA (1)...(19): siRNA sense strand
caacuucuuugggcaaugg

SEQ ID NO: 2211191 - RNA, 19 nt, Homo sapiens
  misc_RNA (1)...(19): siRNA sense strand
ggaaguggaaugaauacag

SEQ ID NO: 2211192 - RNA, 19 nt, Homo sapiens
  misc_RNA (1)...(19): siRNA sense strand
gaucaccaacauaauuuca

SEQ ID NO: 2211193 - RNA, 19 nt, Homo sapiens
  misc_RNA (1)...(19): siRNA sense strand
ucaccuagcaguuucaaca

SEQ ID NO: 2211194 - RNA, 19 nt, Homo sapiens
  misc_RNA (1)...(19): siRNA sense strand
caccaucucucacacaacu

SEQ ID NO: 2211195 - RNA, 19 nt, Homo sapiens
  misc_RNA (1)...(19): siRNA sense strand
ggcaacaccaucucaccua

SEQ ID NO: 2211196 - RNA, 19 nt, Homo sapiens
  misc_RNA (1)...(19): siRNA sense strand
caaaggcuaccacuucuac

SEQ ID NO: 2211197 - RNA, 19 nt, Homo sapiens
  misc_RNA (1)...(19): siRNA sense strand
cacaaaggcuaccacuucu

SEQ ID NO: 2211198 - RNA, 19 nt, Homo sapiens
  misc_RNA (1)...(19): siRNA sense strand
gcacaucugagaggccaaa

SEQ ID NO: 2211199 - RNA, 19 nt, Homo sapiens
  misc_RNA (1)...(19): siRNA sense strand
ggcaccaucucucacacaa

SEQ ID NO: 2211200 - RNA, 19 nt, Homo sapiens
  misc_RNA (1)...(19): siRNA sense strand
caacacagaagccacaacu

SEQ ID NO: 2211201 - RNA, 19 nt, Homo sapiens
  misc_RNA (1)...(19): siRNA sense strand
ccugggaguuucaacacaa

SEQ ID NO: 2211202 - RNA, 19 nt, Homo sapiens
  misc_RNA (1)...(19): siRNA sense strand
ggaguugccacuggaguug

SEQ ID NO: 2211203 - RNA, 19 nt, Homo sapiens
  misc_RNA (1)...(19): siRNA sense strand
ucagggagaagccaaccua

SEQ ID NO: 2211204 - RNA, 19 nt, Homo sapiens
  misc_RNA (1)...(19): siRNA sense strand
caacucuccagcagucaaa

SEQ ID NO: 2211205 - RNA, 19 nt, Homo sapiens
  misc_RNA (1)...(19): siRNA sense strand
ggcauagucucuggcacaa

SEQ ID NO: 2211206 - RNA, 19 nt, Homo sapiens
  misc_RNA (1)...(19): siRNA sense strand
ugggaucaccaacauaauu

SEQ ID NO: 2211207 - RNA, 19 nt, Homo sapiens
  misc_RNA (1)...(19): siRNA sense strand
gcaacugggaucaccaaca

SEQ ID NO: 2211208 - RNA, 19 nt, Homo sapiens
  misc_RNA (1)...(19): siRNA sense strand
caaacagugauuccagguu

SEQ ID NO: 2211209 - RNA, 19 nt, Homo sapiens
  misc_RNA (1)...(19): siRNA sense strand
cagcaaagcaaggaacuag

SEQ ID NO: 2211210 - RNA, 19 nt, Homo sapiens
  misc_RNA (1)...(19): siRNA sense strand
guccauagaaccacuguag

SEQ ID NO: 2211211 - RNA, 19 nt, Homo sapiens
  misc_RNA (1)...(19): siRNA sense strand
cauuguaccugggaguuuc

SEQ ID NO: 2211212 - RNA, 19 nt, Homo sapiens
  misc_RNA (1)...(19): siRNA sense strand
ccacuagagggucagcaaa

SEQ ID NO: 2211213 - RNA, 19 nt, Homo sapiens
  misc_RNA (1)...(19): siRNA sense strand
acugggaucaccaacauaa

SEQ ID NO: 2211214 - RNA, 19 nt, Homo sapiens
  misc_RNA (1)...(19): siRNA sense strand
agacaggagcuaccacuag

SEQ ID NO: 2211215 - RNA, 19 nt, Homo sapiens
  misc_RNA (1)...(19): siRNA sense strand
aacaggcucuggaacaaca

SEQ ID NO: 2211216 - RNA, 19 nt, Homo sapiens
  misc_RNA (1)...(19): siRNA sense strand
aauaggcaccacuggcaua

SEQ ID NO: 2211217 - RNA, 19 nt, Homo sapiens
  misc_RNA (1)...(19): siRNA sense strand
caaggaacuagaagcacaa

SEQ ID NO: 2211218 - RNA, 19 nt, Homo sapiens
  misc_RNA (1)...(19): siRNA sense strand
ccaaacccuggaagugaaa

SEQ ID NO: 2211219 - RNA, 19 nt, Homo sapiens
  misc_RNA (1)...(19): siRNA sense strand
ggaauggcaacugggauca

SEQ ID NO: 2211220 - RNA, 19 nt, Homo sapiens
  misc_RNA (1)...(19): siRNA sense strand
gaaugaauacagguacuac

SEQ ID NO: 2211221 - RNA, 19 nt, Homo sapiens
  misc_RNA (1)...(19): siRNA sense strand
aagccaaccuacuggaagu

SEQ ID NO: 2211222 - RNA, 19 nt, Homo sapiens
  misc_RNA (1)...(19): siRNA sense strand
acuagaagcacaauagaag

SEQ ID NO: 2211223 - RNA, 19 nt, Homo sapiens
  misc_RNA (1)...(19): siRNA sense strand
guaccugggaguuucaaca

SEQ ID NO: 2211224 - RNA, 19 nt, Homo sapiens
  misc_RNA (1)...(19): siRNA sense strand
auaguuaccacugggauaa

SEQ ID NO: 2211225 - RNA, 19 nt, Homo sapiens
  misc_RNA (1)...(19): siRNA sense strand
cuagcaguuucaacacaga

SEQ ID NO: 2211226 - RNA, 19 nt, Homo sapiens
  misc_RNA (1)...(19): siRNA sense strand
acagaggccacaacuuuua

SEQ ID NO: 2211227 - RNA, 19 nt, Homo sapiens
  misc_RNA (1)...(19): siRNA sense strand
cuacugguguggccuugag

SEQ ID NO: 2211228 - RNA, 19 nt, Homo sapiens
  misc_RNA (1)...(19): siRNA sense strand
ccaguggcaccaucucuca

SEQ ID NO: 2211229 - RNA, 19 nt, Homo sapiens
  misc_RNA (1)...(19): siRNA sense strand
uagaagcuacgacguccuu

SEQ ID NO: 2211230 - RNA, 19 nt, Homo sapiens
  misc_RNA (1)...(19): siRNA sense strand
uguaacaggcucuggaaca

SEQ ID NO: 2211231 - RNA, 19 nt, Homo sapiens
  misc_RNA (1)...(19): siRNA sense strand
aggcaccacuggcauaguc

SEQ ID NO: 2211232 - RNA, 19 nt, Homo sapiens
  misc_RNA (1)...(19): siRNA sense strand
caaagcaaggaacuagaag

SEQ ID NO: 2211233 - RNA, 19 nt, Homo sapiens
  misc_RNA (1)...(19): siRNA sense strand
aacauaauuucagggagaa

SEQ ID NO: 2211234 - RNA, 19 nt, Homo sapiens
  misc_RNA (1)...(19): siRNA sense strand
ggaucaccaacauaauuuc

SEQ ID NO: 2211235 - RNA, 19 nt, Homo sapiens
  misc_RNA (1)...(19): siRNA sense strand
acaaaggcuaccacuucua

SEQ ID NO: 2211236 - RNA, 19 nt, Homo sapiens
  misc_RNA (1)...(19): siRNA sense strand
cugggaguuucaacacaaa

SEQ ID NO: 2211237 - RNA, 19 nt, Homo sapiens
  misc_RNA (1)...(19): siRNA sense strand
aauaguuaccacugggaua

SEQ ID NO: 2211238 - RNA, 19 nt, Homo sapiens
  misc_RNA (1)...(19): siRNA sense strand
gcuggaaguaaaauaguua

SEQ ID NO: 2211239 - RNA, 19 nt, Homo sapiens
  misc_RNA (1)...(19): siRNA sense strand
gaagcuaccaguggcacau

SEQ ID NO: 2211240 - RNA, 19 nt, Homo sapiens
  misc_RNA (1)...(19): siRNA sense strand
ccaauuaccugcucagaga

SEQ ID NO: 2211241 - RNA, 19 nt, Homo sapiens
  misc_RNA (1)...(19): siRNA sense strand
cuaaggagcucaacuacga

SEQ ID NO: 2211242 - RNA, 19 nt, Homo sapiens
  misc_RNA (1)...(19): siRNA sense strand
ucacugaaauugcuaagga

SEQ ID NO: 2211243 - RNA, 19 nt, Homo sapiens
  misc_RNA (1)...(19): siRNA sense strand
gaagagauccgggaguuug

SEQ ID NO: 2211244 - RNA, 19 nt, Homo sapiens
  misc_RNA (1)...(19): siRNA sense strand
gcagucagauccucaccaa

SEQ ID NO: 2211245 - RNA, 19 nt, Homo sapiens
  misc_RNA (1)...(19): siRNA sense strand
caacuacgaccgugaggua

SEQ ID NO: 2211246 - RNA, 19 nt, Homo sapiens
  misc_RNA (1)...(19): siRNA sense strand
guagugaacucagcuagug

SEQ ID NO: 2211247 - RNA, 19 nt, Homo sapiens
  misc_RNA (1)...(19): siRNA sense strand
gggaucaacuuagaagaga

SEQ ID NO: 2211248 - RNA, 19 nt, Homo sapiens
  misc_RNA (1)...(19): siRNA sense strand
uagaagagauccgggaguu

SEQ ID NO: 2211249 - RNA, 19 nt, Homo sapiens
  misc_RNA (1)...(19): siRNA sense strand
caagagugcccagaagcua

SEQ ID NO: 2211250 - RNA, 19 nt, Homo sapiens
  misc_RNA (1)...(19): siRNA sense strand
gcucagggacagguuauug

SEQ ID NO: 2211251 - RNA, 19 nt, Homo sapiens
  misc_RNA (1)...(19): siRNA sense strand
gcaaacgccgcaccuccuu

SEQ ID NO: 2211252 - RNA, 19 nt, Homo sapiens
  misc_RNA (1)...(19): siRNA sense strand
aggaugggaucaacuuaga

SEQ ID NO: 2211253 - RNA, 19 nt, Homo sapiens
  misc_RNA (1)...(19): siRNA sense strand
ccagggaucagcagucaga

SEQ ID NO: 2211254 - RNA, 19 nt, Homo sapiens
  misc_RNA (1)...(19): siRNA sense strand
agcagaaccugauggaguu

SEQ ID NO: 2211255 - RNA, 19 nt, Homo sapiens
  misc_RNA (1)...(19): siRNA sense strand
gcuaaacgaagcugaacug

SEQ ID NO: 2211256 - RNA, 19 nt, Homo sapiens
  misc_RNA (1)...(19): siRNA sense strand
agucagauccucaccaaug

SEQ ID NO: 2211257 - RNA, 19 nt, Homo sapiens
  misc_RNA (1)...(19): siRNA sense strand
uaaagccggugcuggaaaa

SEQ ID NO: 2211258 - RNA, 19 nt, Homo sapiens
  misc_RNA (1)...(19): siRNA sense strand
gccagacgcucaagaacac

SEQ ID NO: 2211259 - RNA, 19 nt, Homo sapiens
  misc_RNA (1)...(19): siRNA sense strand
gaggaugggaucaacuuag

SEQ ID NO: 2211260 - RNA, 19 nt, Homo sapiens
  misc_RNA (1)...(19): siRNA sense strand
ggaucaacuuagaagagau

SEQ ID NO: 2211261 - RNA, 19 nt, Homo sapiens
  misc_RNA (1)...(19): siRNA sense strand
gaugggaucaacuuagaag

SEQ ID NO: 2211262 - RNA, 19 nt, Homo sapiens
  misc_RNA (1)...(19): siRNA sense strand
cuagacaucacacccaaga

SEQ ID NO: 2211263 - RNA, 19 nt, Homo sapiens
  misc_RNA (1)...(19): siRNA sense strand
ggaugaggaugggaucaac

SEQ ID NO: 2211264 - RNA, 19 nt, Homo sapiens
  misc_RNA (1)...(19): siRNA sense strand
ggcgagcccuccaagaaac

SEQ ID NO: 2211265 - RNA, 19 nt, Homo sapiens
  misc_RNA (1)...(19): siRNA sense strand
ugaggaugggaucaacuua

SEQ ID NO: 2211266 - RNA, 19 nt, Homo sapiens
  misc_RNA (1)...(19): siRNA sense strand
uccgggaguuugccaagaa

SEQ ID NO: 2211267 - RNA, 19 nt, Homo sapiens
  misc_RNA (1)...(19): siRNA sense strand
ucgcugggccuuacacaga

SEQ ID NO: 2211268 - RNA, 19 nt, Homo sapiens
  misc_RNA (1)...(19): siRNA sense strand
caagccacauacuccaagu

SEQ ID NO: 2211269 - RNA, 19 nt, Homo sapiens
  misc_RNA (1)...(19): siRNA sense strand
ggaaaaguggcuaaacgaa

SEQ ID NO: 2211270 - RNA, 19 nt, Homo sapiens
  misc_RNA (1)...(19): siRNA sense strand
gcuaaagccggugcuggaa

SEQ ID NO: 2211271 - RNA, 19 nt, Homo sapiens
  misc_RNA (1)...(19): siRNA sense strand
ggaugggaucaacuuagaa

SEQ ID NO: 2211272 - RNA, 19 nt, Homo sapiens
  misc_RNA (1)...(19): siRNA sense strand
agacaucacacccaagagu

SEQ ID NO: 2211273 - RNA, 19 nt, Homo sapiens
  misc_RNA (1)...(19): siRNA sense strand
uugcuaaggagcucaacua

SEQ ID NO: 2211274 - RNA, 19 nt, Homo sapiens
  misc_RNA (1)...(19): siRNA sense strand
gcagaaccugauggaguuu

SEQ ID NO: 2211275 - RNA, 19 nt, Homo sapiens
  misc_RNA (1)...(19): siRNA sense strand
cuaaagccggugcuggaaa

SEQ ID NO: 2211276 - RNA, 19 nt, Homo sapiens
  misc_RNA (1)...(19): siRNA sense strand
ccaucugccucugcuccua

SEQ ID NO: 2211277 - RNA, 19 nt, Homo sapiens
  misc_RNA (1)...(19): siRNA sense strand
aagagugcccagaagcuaa

SEQ ID NO: 2211278 - RNA, 19 nt, Homo sapiens
  misc_RNA (1)...(19): siRNA sense strand
aagcugaacugcggaacca

SEQ ID NO: 2211279 - RNA, 19 nt, Homo sapiens
  misc_RNA (1)...(19): siRNA sense strand
ucgagaagcuagacaucac

SEQ ID NO: 2211280 - RNA, 19 nt, Homo sapiens
  misc_RNA (1)...(19): siRNA sense strand
ggagaacccugaaauguuu

SEQ ID NO: 2211281 - RNA, 19 nt, Homo sapiens
  misc_RNA (1)...(19): siRNA sense strand
gaaaugaccggaacaagaa

SEQ ID NO: 2211282 - RNA, 19 nt, Homo sapiens
  misc_RNA (1)...(19): siRNA sense strand
agaaagaggugaaggaaga

SEQ ID NO: 2211283 - RNA, 19 nt, Homo sapiens
  misc_RNA (1)...(19): siRNA sense strand
uagaagagcucaucaccaa

SEQ ID NO: 2211284 - RNA, 19 nt, Homo sapiens
  misc_RNA (1)...(19): siRNA sense strand
gaaagggccauuacucuga

SEQ ID NO: 2211285 - RNA, 19 nt, Homo sapiens
  misc_RNA (1)...(19): siRNA sense strand
caaggaagcugugcgaaau

SEQ ID NO: 2211286 - RNA, 19 nt, Homo sapiens
  misc_RNA (1)...(19): siRNA sense strand
ggaacaagaagaagaaaga

SEQ ID NO: 2211287 - RNA, 19 nt, Homo sapiens
  misc_RNA (1)...(19): siRNA sense strand
ucagugagcuggcuaccaa

SEQ ID NO: 2211288 - RNA, 19 nt, Homo sapiens
  misc_RNA (1)...(19): siRNA sense strand
gaagaaagaggugaaggaa

SEQ ID NO: 2211289 - RNA, 19 nt, Homo sapiens
  misc_RNA (1)...(19): siRNA sense strand
aaagcugccugccuagaua

SEQ ID NO: 2211290 - RNA, 19 nt, Homo sapiens
  misc_RNA (1)...(19): siRNA sense strand
ucaacaaggugaccaggaa

SEQ ID NO: 2211291 - RNA, 19 nt, Homo sapiens
  misc_RNA (1)...(19): siRNA sense strand
cgaaaugaccggaacaaga

SEQ ID NO: 2211292 - RNA, 19 nt, Homo sapiens
  misc_RNA (1)...(19): siRNA sense strand
ccaagugcaucaucaagau

SEQ ID NO: 2211293 - RNA, 19 nt, Homo sapiens
  misc_RNA (1)...(19): siRNA sense strand
ggacccagaugcacaaugc

SEQ ID NO: 2211294 - RNA, 19 nt, Homo sapiens
  misc_RNA (1)...(19): siRNA sense strand
caauaaggagcgacucuuu

SEQ ID NO: 2211295 - RNA, 19 nt, Homo sapiens
  misc_RNA (1)...(19): siRNA sense strand
gcaaguauaccacgaacuc

SEQ ID NO: 2211296 - RNA, 19 nt, Homo sapiens
  misc_RNA (1)...(19): siRNA sense strand
gaccuugucuuugccuuug

SEQ ID NO: 2211297 - RNA, 19 nt, Homo sapiens
  misc_RNA (1)...(19): siRNA sense strand
gccgaagcauccagaagaa

SEQ ID NO: 2211298 - RNA, 19 nt, Homo sapiens
  misc_RNA (1)...(19): siRNA sense strand
ccaaggaagcugugcgaaa

SEQ ID NO: 2211299 - RNA, 19 nt, Homo sapiens
  misc_RNA (1)...(19): siRNA sense strand
ucaucaagaucguggaguu

SEQ ID NO: 2211300 - RNA, 19 nt, Homo sapiens
  misc_RNA (1)...(19): siRNA sense strand
gcuaccaagugcaucauca

SEQ ID NO: 2211301 - RNA, 19 nt, Homo sapiens
  misc_RNA (1)...(19): siRNA sense strand
gcgguugccuggcuuuaca

SEQ ID NO: 2211302 - RNA, 19 nt, Homo sapiens
  misc_RNA (1)...(19): siRNA sense strand
ucccaaggaugcuaaugaa

SEQ ID NO: 2211303 - RNA, 19 nt, Homo sapiens
  misc_RNA (1)...(19): siRNA sense strand
gcacuaagggagcugaaag

SEQ ID NO: 2211304 - RNA, 19 nt, Homo sapiens
  misc_RNA (1)...(19): siRNA sense strand
aaagggccauuacucugaa

SEQ ID NO: 2211305 - RNA, 19 nt, Homo sapiens
  misc_RNA (1)...(19): siRNA sense strand
gaaagaggugaaggaagaa

SEQ ID NO: 2211306 - RNA, 19 nt, Homo sapiens
  misc_RNA (1)...(19): siRNA sense strand
uccgagagaugcuggagaa

SEQ ID NO: 2211307 - RNA, 19 nt, Homo sapiens
  misc_RNA (1)...(19): siRNA sense strand
cugaaauguuugaggauga

SEQ ID NO: 2211308 - RNA, 19 nt, Homo sapiens
  misc_RNA (1)...(19): siRNA sense strand
caaagcugccugccuagau

SEQ ID NO: 2211309 - RNA, 19 nt, Homo sapiens
  misc_RNA (1)...(19): siRNA sense strand
ggccauuacucugaagaug

SEQ ID NO: 2211310 - RNA, 19 nt, Homo sapiens
  misc_RNA (1)...(19): siRNA sense strand
gaccggaacaagaagaaga

SEQ ID NO: 2211311 - RNA, 19 nt, Homo sapiens
  misc_RNA (1)...(19): siRNA sense strand
uggagaacccugaaauguu

SEQ ID NO: 2211312 - RNA, 19 nt, Homo sapiens
  misc_RNA (1)...(19): siRNA sense strand
caaggaugcuaaugaaaau

SEQ ID NO: 2211313 - RNA, 19 nt, Homo sapiens
  misc_RNA (1)...(19): siRNA sense strand
cugcguaucugcacaaggu

SEQ ID NO: 2211314 - RNA, 19 nt, Homo sapiens
  misc_RNA (1)...(19): siRNA sense strand
ccaggaaucgcugccagua

SEQ ID NO: 2211315 - RNA, 19 nt, Homo sapiens
  misc_RNA (1)...(19): siRNA sense strand
aggaagcugugcgaaauga

SEQ ID NO: 2211316 - RNA, 19 nt, Homo sapiens
  misc_RNA (1)...(19): siRNA sense strand
agaagaacaugguguacac

SEQ ID NO: 2211317 - RNA, 19 nt, Homo sapiens
  misc_RNA (1)...(19): siRNA sense strand
cccgaugccucccuuaauc

SEQ ID NO: 2211318 - RNA, 19 nt, Homo sapiens
  misc_RNA (1)...(19): siRNA sense strand
ggagcugaaagggccauua

SEQ ID NO: 2211319 - RNA, 19 nt, Homo sapiens
  misc_RNA (1)...(19): siRNA sense strand
ccagccagcccuacauguu

SEQ ID NO: 2211320 - RNA, 19 nt, Homo sapiens
  misc_RNA (1)...(19): siRNA sense strand
uuacagggcucagcauugc

SEQ ID NO: 2211321 - RNA, 19 nt, Homo sapiens
  misc_RNA (1)...(19): siRNA sense strand
gaacaagaagaagaaagag

SEQ ID NO: 2211322 - RNA, 19 nt, Homo sapiens
  misc_RNA (1)...(19): siRNA sense strand
cgaagcauccagaagaaca

SEQ ID NO: 2211323 - RNA, 19 nt, Homo sapiens
  misc_RNA (1)...(19): siRNA sense strand
gagcugaaagggccauuac

SEQ ID NO: 2211324 - RNA, 19 nt, Homo sapiens
  misc_RNA (1)...(19): siRNA sense strand
ccaaggaugcuaaugaaaa

SEQ ID NO: 2211325 - RNA, 19 nt, Homo sapiens
  misc_RNA (1)...(19): siRNA sense strand
gaagaagaaagaggugaag

SEQ ID NO: 2211326 - RNA, 19 nt, Homo sapiens
  misc_RNA (1)...(19): siRNA sense strand
agaagaaagaggugaagga

SEQ ID NO: 2211327 - RNA, 19 nt, Homo sapiens
  misc_RNA (1)...(19): siRNA sense strand
gcuggagaacccugaaaug

SEQ ID NO: 2211328 - RNA, 19 nt, Homo sapiens
  misc_RNA (1)...(19): siRNA sense strand
caucaagaucguggaguuu

SEQ ID NO: 2211329 - RNA, 19 nt, Homo sapiens
  misc_RNA (1)...(19): siRNA sense strand
gcugaaagggccauuacuc

SEQ ID NO: 2211330 - RNA, 19 nt, Homo sapiens
  misc_RNA (1)...(19): siRNA sense strand
cugccuagauauccugaug

SEQ ID NO: 2211331 - RNA, 19 nt, Homo sapiens
  misc_RNA (1)...(19): siRNA sense strand
caacaaggugaccaggaau

SEQ ID NO: 2211332 - RNA, 19 nt, Homo sapiens
  misc_RNA (1)...(19): siRNA sense strand
cgccgaagcauccagaaga

SEQ ID NO: 2211333 - RNA, 19 nt, Homo sapiens
  misc_RNA (1)...(19): siRNA sense strand
aauaaggagcgacucuuug

SEQ ID NO: 2211334 - RNA, 19 nt, Homo sapiens
  misc_RNA (1)...(19): siRNA sense strand
aggaaucgcugccaguacu

SEQ ID NO: 2211335 - RNA, 19 nt, Homo sapiens
  misc_RNA (1)...(19): siRNA sense strand
gaagcauccagaagaacau

SEQ ID NO: 2211336 - RNA, 19 nt, Homo sapiens
  misc_RNA (1)...(19): siRNA sense strand
ucaccaaggucagcaaagc

SEQ ID NO: 2211337 - RNA, 19 nt, Homo sapiens
  misc_RNA (1)...(19): siRNA sense strand
agaagaagaaagaggugaa

SEQ ID NO: 2211338 - RNA, 19 nt, Homo sapiens
  misc_RNA (1)...(19): siRNA sense strand
cagccagcccuacauguuc

SEQ ID NO: 2211339 - RNA, 19 nt, Homo sapiens
  misc_RNA (1)...(19): siRNA sense strand
ggcccgaugccucccuuaa

SEQ ID NO: 2211340 - RNA, 19 nt, Homo sapiens
  misc_RNA (1)...(19): siRNA sense strand
cagaagaacaugguguaca

SEQ ID NO: 2211341 - RNA, 19 nt, Homo sapiens
  misc_RNA (1)...(19): siRNA sense strand
gcccgaugccucccuuaau

SEQ ID NO: 2211342 - RNA, 19 nt, Homo sapiens
  misc_RNA (1)...(19): siRNA sense strand
ccagagcaggacaccauga

SEQ ID NO: 2211343 - RNA, 19 nt, Homo sapiens
  misc_RNA (1)...(19): siRNA sense strand
ucaagaucguggaguuugc

SEQ ID NO: 2211344 - RNA, 19 nt, Homo sapiens
  misc_RNA (1)...(19): siRNA sense strand
ggagaacccugaaauguuu

SEQ ID NO: 2211345 - RNA, 19 nt, Homo sapiens
  misc_RNA (1)...(19): siRNA sense strand
gaaaugaccggaacaagaa

SEQ ID NO: 2211346 - RNA, 19 nt, Homo sapiens
  misc_RNA (1)...(19): siRNA sense strand
agaaagaggugaaggaaga

SEQ ID NO: 2211347 - RNA, 19 nt, Homo sapiens
  misc_RNA (1)...(19): siRNA sense strand
uagaagagcucaucaccaa

SEQ ID NO: 2211348 - RNA, 19 nt, Homo sapiens
  misc_RNA (1)...(19): siRNA sense strand
gaaagggccauuacucuga

SEQ ID NO: 2211349 - RNA, 19 nt, Homo sapiens
  misc_RNA (1)...(19): siRNA sense strand
caaggaagcugugcgaaau

SEQ ID NO: 2211350 - RNA, 19 nt, Homo sapiens
  misc_RNA (1)...(19): siRNA sense strand
ggaacaagaagaagaaaga

SEQ ID NO: 2211351 - RNA, 19 nt, Homo sapiens
  misc_RNA (1)...(19): siRNA sense strand
ucagugagcuggcuaccaa

SEQ ID NO: 2211352 - RNA, 19 nt, Homo sapiens
  misc_RNA (1)...(19): siRNA sense strand
gaagaaagaggugaaggaa

SEQ ID NO: 2211353 - RNA, 19 nt, Homo sapiens
  misc_RNA (1)...(19): siRNA sense strand
aaagcugccugccuagaua

SEQ ID NO: 2211354 - RNA, 19 nt, Homo sapiens
  misc_RNA (1)...(19): siRNA sense strand
ucaacaaggugaccaggaa

SEQ ID NO: 2211355 - RNA, 19 nt, Homo sapiens
  misc_RNA (1)...(19): siRNA sense strand
cgaaaugaccggaacaaga

SEQ ID NO: 2211356 - RNA, 19 nt, Homo sapiens
  misc_RNA (1)...(19): siRNA sense strand
ccaagugcaucaucaagau

SEQ ID NO: 2211357 - RNA, 19 nt, Homo sapiens
  misc_RNA (1)...(19): siRNA sense strand
ggacccagaugcacaaugc

SEQ ID NO: 2211358 - RNA, 19 nt, Homo sapiens
  misc_RNA (1)...(19): siRNA sense strand
caauaaggagcgacucuuu

SEQ ID NO: 2211359 - RNA, 19 nt, Homo sapiens
  misc_RNA (1)...(19): siRNA sense strand
gcaaguauaccacgaacuc

SEQ ID NO: 2211360 - RNA, 19 nt, Homo sapiens
  misc_RNA (1)...(19): siRNA sense strand
gaccuugucuuugccuuug

SEQ ID NO: 2211361 - RNA, 19 nt, Homo sapiens
  misc_RNA (1)...(19): siRNA sense strand
gccgaagcauccagaagaa

SEQ ID NO: 2211362 - RNA, 19 nt, Homo sapiens
  misc_RNA (1)...(19): siRNA sense strand
ccaaggaagcugugcgaaa

SEQ ID NO: 2211363 - RNA, 19 nt, Homo sapiens
  misc_RNA (1)...(19): siRNA sense strand
ucaucaagaucguggaguu

SEQ ID NO: 2211364 - RNA, 19 nt, Homo sapiens
  misc_RNA (1)...(19): siRNA sense strand
gcuaccaagugcaucauca

SEQ ID NO: 2211365 - RNA, 19 nt, Homo sapiens
  misc_RNA (1)...(19): siRNA sense strand
gcgguugccuggcuuuaca

SEQ ID NO: 2211366 - RNA, 19 nt, Homo sapiens
  misc_RNA (1)...(19): siRNA sense strand
ucccaaggaugcuaaugaa

SEQ ID NO: 2211367 - RNA, 19 nt, Homo sapiens
  misc_RNA (1)...(19): siRNA sense strand
gcacuaagggagcugaaag

SEQ ID NO: 2211368 - RNA, 19 nt, Homo sapiens
  misc_RNA (1)...(19): siRNA sense strand
aaagggccauuacucugaa

SEQ ID NO: 2211369 - RNA, 19 nt, Homo sapiens
  misc_RNA (1)...(19): siRNA sense strand
gaaagaggugaaggaagaa

SEQ ID NO: 2211370 - RNA, 19 nt, Homo sapiens
  misc_RNA (1)...(19): siRNA sense strand
uccgagagaugcuggagaa

SEQ ID NO: 2211371 - RNA, 19 nt, Homo sapiens
  misc_RNA (1)...(19): siRNA sense strand
cugaaauguuugaggauga

SEQ ID NO: 2211372 - RNA, 19 nt, Homo sapiens
  misc_RNA (1)...(19): siRNA sense strand
caaagcugccugccuagau

SEQ ID NO: 2211373 - RNA, 19 nt, Homo sapiens
  misc_RNA (1)...(19): siRNA sense strand
ggccauuacucugaagaug

SEQ ID NO: 2211374 - RNA, 19 nt, Homo sapiens
  misc_RNA (1)...(19): siRNA sense strand
gaccggaacaagaagaaga

SEQ ID NO: 2211375 - RNA, 19 nt, Homo sapiens
  misc_RNA (1)...(19): siRNA sense strand
uggagaacccugaaauguu

SEQ ID NO: 2211376 - RNA, 19 nt, Homo sapiens
  misc_RNA (1)...(19): siRNA sense strand
caaggaugcuaaugaaaau

SEQ ID NO: 2211377 - RNA, 19 nt, Homo sapiens
  misc_RNA (1)...(19): siRNA sense strand
cugcguaucugcacaaggu

SEQ ID NO: 2211378 - RNA, 19 nt, Homo sapiens
  misc_RNA (1)...(19): siRNA sense strand
ccaggaaucgcugccagua

SEQ ID NO: 2211379 - RNA, 19 nt, Homo sapiens
  misc_RNA (1)...(19): siRNA sense strand
aggaagcugugcgaaauga

SEQ ID NO: 2211380 - RNA, 19 nt, Homo sapiens
  misc_RNA (1)...(19): siRNA sense strand
agaagaacaugguguacac

SEQ ID NO: 2211381 - RNA, 19 nt, Homo sapiens
  misc_RNA (1)...(19): siRNA sense strand
cccgaugccucccuuaauc

SEQ ID NO: 2211382 - RNA, 19 nt, Homo sapiens
  misc_RNA (1)...(19): siRNA sense strand
ggagcugaaagggccauua

SEQ ID NO: 2211383 - RNA, 19 nt, Homo sapiens
  misc_RNA (1)...(19): siRNA sense strand
ccagccagcccuacauguu

SEQ ID NO: 2211384 - RNA, 19 nt, Homo sapiens
  misc_RNA (1)...(19): siRNA sense strand
uuacagggcucagcauugc

SEQ ID NO: 2211385 - RNA, 19 nt, Homo sapiens
  misc_RNA (1)...(19): siRNA sense strand
gaacaagaagaagaaagag

SEQ ID NO: 2211386 - RNA, 19 nt, Homo sapiens
  misc_RNA (1)...(19): siRNA sense strand
cgaagcauccagaagaaca

SEQ ID NO: 2211387 - RNA, 19 nt, Homo sapiens
  misc_RNA (1)...(19): siRNA sense strand
gagcugaaagggccauuac

SEQ ID NO: 2211388 - RNA, 19 nt, Homo sapiens
  misc_RNA (1)...(19): siRNA sense strand
ccaaggaugcuaaugaaaa

SEQ ID NO: 2211389 - RNA, 19 nt, Homo sapiens
  misc_RNA (1)...(19): siRNA sense strand
gaagaagaaagaggugaag

SEQ ID NO: 2211390 - RNA, 19 nt, Homo sapiens
  misc_RNA (1)...(19): siRNA sense strand
agaagaaagaggugaagga

SEQ ID NO: 2211391 - RNA, 19 nt, Homo sapiens
  misc_RNA (1)...(19): siRNA sense strand
gcuggagaacccugaaaug

SEQ ID NO: 2211392 - RNA, 19 nt, Homo sapiens
  misc_RNA (1)...(19): siRNA sense strand
caucaagaucguggaguuu

SEQ ID NO: 2211393 - RNA, 19 nt, Homo sapiens
  misc_RNA (1)...(19): siRNA sense strand
gcugaaagggccauuacuc

SEQ ID NO: 2211394 - RNA, 19 nt, Homo sapiens
  misc_RNA (1)...(19): siRNA sense strand
cugccuagauauccugaug

SEQ ID NO: 2211395 - RNA, 19 nt, Homo sapiens
  misc_RNA (1)...(19): siRNA sense strand
caacaaggugaccaggaau

SEQ ID NO: 2211396 - RNA, 19 nt, Homo sapiens
  misc_RNA (1)...(19): siRNA sense strand
cgccgaagcauccagaaga

SEQ ID NO: 2211397 - RNA, 19 nt, Homo sapiens
  misc_RNA (1)...(19): siRNA sense strand
aauaaggagcgacucuuug

SEQ ID NO: 2211398 - RNA, 19 nt, Homo sapiens
  misc_RNA (1)...(19): siRNA sense strand
aggaaucgcugccaguacu

SEQ ID NO: 2211399 - RNA, 19 nt, Homo sapiens
  misc_RNA (1)...(19): siRNA sense strand
gaagcauccagaagaacau

SEQ ID NO: 2211400 - RNA, 19 nt, Homo sapiens
  misc_RNA (1)...(19): siRNA sense strand
ucaccaaggucagcaaagc

SEQ ID NO: 2211401 - RNA, 19 nt, Homo sapiens
  misc_RNA (1)...(19): siRNA sense strand
agaagaagaaagaggugaa

SEQ ID NO: 2211402 - RNA, 19 nt, Homo sapiens
  misc_RNA (1)...(19): siRNA sense strand
cagccagcccuacauguuc

SEQ ID NO: 2211403 - RNA, 19 nt, Homo sapiens
  misc_RNA (1)...(19): siRNA sense strand
ggcccgaugccucccuuaa

SEQ ID NO: 2211404 - RNA, 19 nt, Homo sapiens
  misc_RNA (1)...(19): siRNA sense strand
cagaagaacaugguguaca

SEQ ID NO: 2211405 - RNA, 19 nt, Homo sapiens
  misc_RNA (1)...(19): siRNA sense strand
gcccgaugccucccuuaau

SEQ ID NO: 2211406 - RNA, 19 nt, Homo sapiens
  misc_RNA (1)...(19): siRNA sense strand
ccagagcaggacaccauga

SEQ ID NO: 2211407 - RNA, 19 nt, Homo sapiens
  misc_RNA (1)...(19): siRNA sense strand
ucaagaucguggaguuugc

SEQ ID NO: 2211408 - RNA, 19 nt, Homo sapiens
  misc_RNA (1)...(19): siRNA sense strand
gaacuagaaugcaucaaua

SEQ ID NO: 2211409 - RNA, 19 nt, Homo sapiens
  misc_RNA (1)...(19): siRNA sense strand
ggaaaucagugacgacgau

SEQ ID NO: 2211410 - RNA, 19 nt, Homo sapiens
  misc_RNA (1)...(19): siRNA sense strand
ggauucaaguaaagaagua

SEQ ID NO: 2211411 - RNA, 19 nt, Homo sapiens
  misc_RNA (1)...(19): siRNA sense strand
ggaagaaacuuuugaagau

SEQ ID NO: 2211412 - RNA, 19 nt, Homo sapiens
  misc_RNA (1)...(19): siRNA sense strand
gaaggucuccaucaagaaa

SEQ ID NO: 2211413 - RNA, 19 nt, Homo sapiens
  misc_RNA (1)...(19): siRNA sense strand
gauaauaacagccagauac

SEQ ID NO: 2211414 - RNA, 19 nt, Homo sapiens
  misc_RNA (1)...(19): siRNA sense strand
uagaaugcaucaauaagga

SEQ ID NO: 2211415 - RNA, 19 nt, Homo sapiens
  misc_RNA (1)...(19): siRNA sense strand
gauaagaaccguuugaaaa

SEQ ID NO: 2211416 - RNA, 19 nt, Homo sapiens
  misc_RNA (1)...(19): siRNA sense strand
ggaccaaacuagcacugau

SEQ ID NO: 2211417 - RNA, 19 nt, Homo sapiens
  misc_RNA (1)...(19): siRNA sense strand
ggaacuagaaugcaucaau

SEQ ID NO: 2211418 - RNA, 19 nt, Homo sapiens
  misc_RNA (1)...(19): siRNA sense strand
caaacuagcacugauaaug

SEQ ID NO: 2211419 - RNA, 19 nt, Homo sapiens
  misc_RNA (1)...(19): siRNA sense strand
ggagauaagaaccguuuga

SEQ ID NO: 2211420 - RNA, 19 nt, Homo sapiens
  misc_RNA (1)...(19): siRNA sense strand
cggaagagcuccaaaaguu

SEQ ID NO: 2211421 - RNA, 19 nt, Homo sapiens
  misc_RNA (1)...(19): siRNA sense strand
gaccaaacuagcacugaua

SEQ ID NO: 2211422 - RNA, 19 nt, Homo sapiens
  misc_RNA (1)...(19): siRNA sense strand
ucagugacgacgauaauaa

SEQ ID NO: 2211423 - RNA, 19 nt, Homo sapiens
  misc_RNA (1)...(19): siRNA sense strand
aaacuagcauugaguagca

SEQ ID NO: 2211424 - RNA, 19 nt, Homo sapiens
  misc_RNA (1)...(19): siRNA sense strand
gaacuucgaggaccaaacu

SEQ ID NO: 2211425 - RNA, 19 nt, Homo sapiens
  misc_RNA (1)...(19): siRNA sense strand
aagagaaugugcaggaaga

SEQ ID NO: 2211426 - RNA, 19 nt, Homo sapiens
  misc_RNA (1)...(19): siRNA sense strand
ggagaaaacacaagucaaa

SEQ ID NO: 2211427 - RNA, 19 nt, Homo sapiens
  misc_RNA (1)...(19): siRNA sense strand
acaaaggauucaaguaaag

SEQ ID NO: 2211428 - RNA, 19 nt, Homo sapiens
  misc_RNA (1)...(19): siRNA sense strand
aaacuagcacugauaaugu

SEQ ID NO: 2211429 - RNA, 19 nt, Homo sapiens
  misc_RNA (1)...(19): siRNA sense strand
gagauaagaaccguuugaa

SEQ ID NO: 2211430 - RNA, 19 nt, Homo sapiens
  misc_RNA (1)...(19): siRNA sense strand
ggaagauccuaaaacauug

SEQ ID NO: 2211431 - RNA, 19 nt, Homo sapiens
  misc_RNA (1)...(19): siRNA sense strand
gaaaucagugacgacgaua

SEQ ID NO: 2211432 - RNA, 19 nt, Homo sapiens
  misc_RNA (1)...(19): siRNA sense strand
caaaaccacuuucccugaa

SEQ ID NO: 2211433 - RNA, 19 nt, Homo sapiens
  misc_RNA (1)...(19): siRNA sense strand
ugaaauccgacacuacuga

SEQ ID NO: 2211434 - RNA, 19 nt, Homo sapiens
  misc_RNA (1)...(19): siRNA sense strand
gcagcuaccgacccaaaga

SEQ ID NO: 2211435 - RNA, 19 nt, Homo sapiens
  misc_RNA (1)...(19): siRNA sense strand
caggagauaagaaccguuu

SEQ ID NO: 2211436 - RNA, 19 nt, Homo sapiens
  misc_RNA (1)...(19): siRNA sense strand
caaaggauucaaguaaaga

SEQ ID NO: 2211437 - RNA, 19 nt, Homo sapiens
  misc_RNA (1)...(19): siRNA sense strand
ggaaggucuccaucaagaa

SEQ ID NO: 2211438 - RNA, 19 nt, Homo sapiens
  misc_RNA (1)...(19): siRNA sense strand
ggucucauccgccuucugu

SEQ ID NO: 2211439 - RNA, 19 nt, Homo sapiens
  misc_RNA (1)...(19): siRNA sense strand
uaaaaccacucaggcaaaa

SEQ ID NO: 2211440 - RNA, 19 nt, Homo sapiens
  misc_RNA (1)...(19): siRNA sense strand
gaaauccgacacuacugau

SEQ ID NO: 2211441 - RNA, 19 nt, Homo sapiens
  misc_RNA (1)...(19): siRNA sense strand
cgagcucacuguccgaaag

SEQ ID NO: 2211442 - RNA, 19 nt, Homo sapiens
  misc_RNA (1)...(19): siRNA sense strand
agaagagaaugugcaggaa

SEQ ID NO: 2211443 - RNA, 19 nt, Homo sapiens
  misc_RNA (1)...(19): siRNA sense strand
ggagcaggauccggguuca

SEQ ID NO: 2211444 - RNA, 19 nt, Homo sapiens
  misc_RNA (1)...(19): siRNA sense strand
cagcagcuaccgacccaaa

SEQ ID NO: 2211445 - RNA, 19 nt, Homo sapiens
  misc_RNA (1)...(19): siRNA sense strand
agauaagaaccguuugaaa

SEQ ID NO: 2211446 - RNA, 19 nt, Homo sapiens
  misc_RNA (1)...(19): siRNA sense strand
ggaagagcuccaaaaguuu

SEQ ID NO: 2211447 - RNA, 19 nt, Homo sapiens
  misc_RNA (1)...(19): siRNA sense strand
cgauaauaacagccagaua

SEQ ID NO: 2211448 - RNA, 19 nt, Homo sapiens
  misc_RNA (1)...(19): siRNA sense strand
gcauugaguagcaaagaag

SEQ ID NO: 2211449 - RNA, 19 nt, Homo sapiens
  misc_RNA (1)...(19): siRNA sense strand
ugaaaacuguguggaagaa

SEQ ID NO: 2211450 - RNA, 19 nt, Homo sapiens
  misc_RNA (1)...(19): siRNA sense strand
gaguagcaaagaagagaau

SEQ ID NO: 2211451 - RNA, 19 nt, Homo sapiens
  misc_RNA (1)...(19): siRNA sense strand
ugacuuuaccaggagauaa

SEQ ID NO: 2211452 - RNA, 19 nt, Homo sapiens
  misc_RNA (1)...(19): siRNA sense strand
gaaaacacaagucaaaacu

SEQ ID NO: 2211453 - RNA, 19 nt, Homo sapiens
  misc_RNA (1)...(19): siRNA sense strand
cuuggaccguuuccgcuuu

SEQ ID NO: 2211454 - RNA, 19 nt, Homo sapiens
  misc_RNA (1)...(19): siRNA sense strand
uagcaaagaagagaaugug

SEQ ID NO: 2211455 - RNA, 19 nt, Homo sapiens
  misc_RNA (1)...(19): siRNA sense strand
guagcaaagaagagaaugu

SEQ ID NO: 2211456 - RNA, 19 nt, Homo sapiens
  misc_RNA (1)...(19): siRNA sense strand
cgucaucguccucuucuca

SEQ ID NO: 2211457 - RNA, 19 nt, Homo sapiens
  misc_RNA (1)...(19): siRNA sense strand
ggguucagcagcagucaga

SEQ ID NO: 2211458 - RNA, 19 nt, Homo sapiens
  misc_RNA (1)...(19): siRNA sense strand
gagaaaacacaagucaaaa

SEQ ID NO: 2211459 - RNA, 19 nt, Homo sapiens
  misc_RNA (1)...(19): siRNA sense strand
cagcuaccgacccaaagaa

SEQ ID NO: 2211460 - RNA, 19 nt, Homo sapiens
  misc_RNA (1)...(19): siRNA sense strand
cuagaaugcaucaauaagg

SEQ ID NO: 2211461 - RNA, 19 nt, Homo sapiens
  misc_RNA (1)...(19): siRNA sense strand
ucccugaaauccgacacua

SEQ ID NO: 2211462 - RNA, 19 nt, Homo sapiens
  misc_RNA (1)...(19): siRNA sense strand
aaucagugacgacgauaau

SEQ ID NO: 2211463 - RNA, 19 nt, Homo sapiens
  misc_RNA (1)...(19): siRNA sense strand
aguuaaagauggagcaaaa

SEQ ID NO: 2211464 - RNA, 19 nt, Homo sapiens
  misc_RNA (1)...(19): siRNA sense strand
gaacuagaaugcaucaaua

SEQ ID NO: 2211465 - RNA, 19 nt, Homo sapiens
  misc_RNA (1)...(19): siRNA sense strand
ggaaaucagugacgacgau

SEQ ID NO: 2211466 - RNA, 19 nt, Homo sapiens
  misc_RNA (1)...(19): siRNA sense strand
ggauucaaguaaagaagua

SEQ ID NO: 2211467 - RNA, 19 nt, Homo sapiens
  misc_RNA (1)...(19): siRNA sense strand
ggaagaaacuuuugaagau

SEQ ID NO: 2211468 - RNA, 19 nt, Homo sapiens
  misc_RNA (1)...(19): siRNA sense strand
gaaggucuccaucaagaaa

SEQ ID NO: 2211469 - RNA, 19 nt, Homo sapiens
  misc_RNA (1)...(19): siRNA sense strand
gauaauaacagccagauac

SEQ ID NO: 2211470 - RNA, 19 nt, Homo sapiens
  misc_RNA (1)...(19): siRNA sense strand
uagaaugcaucaauaagga

SEQ ID NO: 2211471 - RNA, 19 nt, Homo sapiens
  misc_RNA (1)...(19): siRNA sense strand
gauaagaaccguuugaaaa

SEQ ID NO: 2211472 - RNA, 19 nt, Homo sapiens
  misc_RNA (1)...(19): siRNA sense strand
ggaccaaacuagcacugau

SEQ ID NO: 2211473 - RNA, 19 nt, Homo sapiens
  misc_RNA (1)...(19): siRNA sense strand
ggaacuagaaugcaucaau

SEQ ID NO: 2211474 - RNA, 19 nt, Homo sapiens
  misc_RNA (1)...(19): siRNA sense strand
caaacuagcacugauaaug

SEQ ID NO: 2211475 - RNA, 19 nt, Homo sapiens
  misc_RNA (1)...(19): siRNA sense strand
ggagauaagaaccguuuga

SEQ ID NO: 2211476 - RNA, 19 nt, Homo sapiens
  misc_RNA (1)...(19): siRNA sense strand
cggaagagcuccaaaaguu

SEQ ID NO: 2211477 - RNA, 19 nt, Homo sapiens
  misc_RNA (1)...(19): siRNA sense strand
gaccaaacuagcacugaua

SEQ ID NO: 2211478 - RNA, 19 nt, Homo sapiens
  misc_RNA (1)...(19): siRNA sense strand
ucagugacgacgauaauaa

SEQ ID NO: 2211479 - RNA, 19 nt, Homo sapiens
  misc_RNA (1)...(19): siRNA sense strand
aaacuagcauugaguagca

SEQ ID NO: 2211480 - RNA, 19 nt, Homo sapiens
  misc_RNA (1)...(19): siRNA sense strand
gaacuucgaggaccaaacu

SEQ ID NO: 2211481 - RNA, 19 nt, Homo sapiens
  misc_RNA (1)...(19): siRNA sense strand
aagagaaugugcaggaaga

SEQ ID NO: 2211482 - RNA, 19 nt, Homo sapiens
  misc_RNA (1)...(19): siRNA sense strand
ggagaaaacacaagucaaa

SEQ ID NO: 2211483 - RNA, 19 nt, Homo sapiens
  misc_RNA (1)...(19): siRNA sense strand
acaaaggauucaaguaaag

SEQ ID NO: 2211484 - RNA, 19 nt, Homo sapiens
  misc_RNA (1)...(19): siRNA sense strand
aaacuagcacugauaaugu

SEQ ID NO: 2211485 - RNA, 19 nt, Homo sapiens
  misc_RNA (1)...(19): siRNA sense strand
gagauaagaaccguuugaa

SEQ ID NO: 2211486 - RNA, 19 nt, Homo sapiens
  misc_RNA (1)...(19): siRNA sense strand
ggaagauccuaaaacauug

SEQ ID NO: 2211487 - RNA, 19 nt, Homo sapiens
  misc_RNA (1)...(19): siRNA sense strand
gaaaucagugacgacgaua

SEQ ID NO: 2211488 - RNA, 19 nt, Homo sapiens
  misc_RNA (1)...(19): siRNA sense strand
caaaaccacuuucccugaa

SEQ ID NO: 2211489 - RNA, 19 nt, Homo sapiens
  misc_RNA (1)...(19): siRNA sense strand
ugaaauccgacacuacuga

SEQ ID NO: 2211490 - RNA, 19 nt, Homo sapiens
  misc_RNA (1)...(19): siRNA sense strand
gcagcuaccgacccaaaga

SEQ ID NO: 2211491 - RNA, 19 nt, Homo sapiens
  misc_RNA (1)...(19): siRNA sense strand
caggagauaagaaccguuu

SEQ ID NO: 2211492 - RNA, 19 nt, Homo sapiens
  misc_RNA (1)...(19): siRNA sense strand
caaaggauucaaguaaaga

SEQ ID NO: 2211493 - RNA, 19 nt, Homo sapiens
  misc_RNA (1)...(19): siRNA sense strand
ggaaggucuccaucaagaa

SEQ ID NO: 2211494 - RNA, 19 nt, Homo sapiens
  misc_RNA (1)...(19): siRNA sense strand
ggucucauccgccuucugu

SEQ ID NO: 2211495 - RNA, 19 nt, Homo sapiens
  misc_RNA (1)...(19): siRNA sense strand
uaaaaccacucaggcaaaa

SEQ ID NO: 2211496 - RNA, 19 nt, Homo sapiens
  misc_RNA (1)...(19): siRNA sense strand
gaaauccgacacuacugau

SEQ ID NO: 2211497 - RNA, 19 nt, Homo sapiens
  misc_RNA (1)...(19): siRNA sense strand
cgagcucacuguccgaaag

SEQ ID NO: 2211498 - RNA, 19 nt, Homo sapiens
  misc_RNA (1)...(19): siRNA sense strand
agaagagaaugugcaggaa

SEQ ID NO: 2211499 - RNA, 19 nt, Homo sapiens
  misc_RNA (1)...(19): siRNA sense strand
ggagcaggauccggguuca

SEQ ID NO: 2211500 - RNA, 19 nt, Homo sapiens
  misc_RNA (1)...(19): siRNA sense strand
cagcagcuaccgacccaaa

SEQ ID NO: 2211501 - RNA, 19 nt, Homo sapiens
  misc_RNA (1)...(19): siRNA sense strand
agauaagaaccguuugaaa

SEQ ID NO: 2211502 - RNA, 19 nt, Homo sapiens
  misc_RNA (1)...(19): siRNA sense strand
ggaagagcuccaaaaguuu

SEQ ID NO: 2211503 - RNA, 19 nt, Homo sapiens
  misc_RNA (1)...(19): siRNA sense strand
cgauaauaacagccagaua

SEQ ID NO: 2211504 - RNA, 19 nt, Homo sapiens
  misc_RNA (1)...(19): siRNA sense strand
gcauugaguagcaaagaag

SEQ ID NO: 2211505 - RNA, 19 nt, Homo sapiens
  misc_RNA (1)...(19): siRNA sense strand
ugaaaacuguguggaagaa

SEQ ID NO: 2211506 - RNA, 19 nt, Homo sapiens
  misc_RNA (1)...(19): siRNA sense strand
gaguagcaaagaagagaau

SEQ ID NO: 2211507 - RNA, 19 nt, Homo sapiens
  misc_RNA (1)...(19): siRNA sense strand
ugacuuuaccaggagauaa

SEQ ID NO: 2211508 - RNA, 19 nt, Homo sapiens
  misc_RNA (1)...(19): siRNA sense strand
gaaaacacaagucaaaacu

SEQ ID NO: 2211509 - RNA, 19 nt, Homo sapiens
  misc_RNA (1)...(19): siRNA sense strand
cuuggaccguuuccgcuuu

SEQ ID NO: 2211510 - RNA, 19 nt, Homo sapiens
  misc_RNA (1)...(19): siRNA sense strand
uagcaaagaagagaaugug

SEQ ID NO: 2211511 - RNA, 19 nt, Homo sapiens
  misc_RNA (1)...(19): siRNA sense strand
guagcaaagaagagaaugu

SEQ ID NO: 2211512 - RNA, 19 nt, Homo sapiens
  misc_RNA (1)...(19): siRNA sense strand
cgucaucguccucuucuca

SEQ ID NO: 2211513 - RNA, 19 nt, Homo sapiens
  misc_RNA (1)...(19): siRNA sense strand
ggguucagcagcagucaga

SEQ ID NO: 2211514 - RNA, 19 nt, Homo sapiens
  misc_RNA (1)...(19): siRNA sense strand
gagaaaacacaagucaaaa

SEQ ID NO: 2211515 - RNA, 19 nt, Homo sapiens
  misc_RNA (1)...(19): siRNA sense strand
cagcuaccgacccaaagaa

SEQ ID NO: 2211516 - RNA, 19 nt, Homo sapiens
  misc_RNA (1)...(19): siRNA sense strand
cuagaaugcaucaauaagg

SEQ ID NO: 2211517 - RNA, 19 nt, Homo sapiens
  misc_RNA (1)...(19): siRNA sense strand
ucccugaaauccgacacua

SEQ ID NO: 2211518 - RNA, 19 nt, Homo sapiens
  misc_RNA (1)...(19): siRNA sense strand
aaucagugacgacgauaau

SEQ ID NO: 2211519 - RNA, 19 nt, Homo sapiens
  misc_RNA (1)...(19): siRNA sense strand
aguuaaagauggagcaaaa

SEQ ID NO: 2211520 - RNA, 19 nt, Homo sapiens
  misc_RNA (1)...(19): siRNA sense strand
ggaaggagaucucuuagua

SEQ ID NO: 2211521 - RNA, 19 nt, Homo sapiens
  misc_RNA (1)...(19): siRNA sense strand
gguaggaucugaagucuua

SEQ ID NO: 2211522 - RNA, 19 nt, Homo sapiens
  misc_RNA (1)...(19): siRNA sense strand
gaacacugcucuuuggaua

SEQ ID NO: 2211523 - RNA, 19 nt, Homo sapiens
  misc_RNA (1)...(19): siRNA sense strand
ggacagcucucauuucuug

SEQ ID NO: 2211524 - RNA, 19 nt, Homo sapiens
  misc_RNA (1)...(19): siRNA sense strand
gaaaucagaucuuggaaug

SEQ ID NO: 2211525 - RNA, 19 nt, Homo sapiens
  misc_RNA (1)...(19): siRNA sense strand
gagaaacucuguugaagaa

SEQ ID NO: 2211526 - RNA, 19 nt, Homo sapiens
  misc_RNA (1)...(19): siRNA sense strand
gagauuggcugucuugaaa

SEQ ID NO: 2211527 - RNA, 19 nt, Homo sapiens
  misc_RNA (1)...(19): siRNA sense strand
gauaugagcagcaaugaua

SEQ ID NO: 2211528 - RNA, 19 nt, Homo sapiens
  misc_RNA (1)...(19): siRNA sense strand
gcaguucacuuucuaaaug

SEQ ID NO: 2211529 - RNA, 19 nt, Homo sapiens
  misc_RNA (1)...(19): siRNA sense strand
ugaacaagcuccagaguuu

SEQ ID NO: 2211530 - RNA, 19 nt, Homo sapiens
  misc_RNA (1)...(19): siRNA sense strand
gaaauuaucauccgacuau

SEQ ID NO: 2211531 - RNA, 19 nt, Homo sapiens
  misc_RNA (1)...(19): siRNA sense strand
ccacguagcugaugguuug

SEQ ID NO: 2211532 - RNA, 19 nt, Homo sapiens
  misc_RNA (1)...(19): siRNA sense strand
ccaaagacaucauaagguu

SEQ ID NO: 2211533 - RNA, 19 nt, Homo sapiens
  misc_RNA (1)...(19): siRNA sense strand
gaacccaaguggcuuugua

SEQ ID NO: 2211534 - RNA, 19 nt, Homo sapiens
  misc_RNA (1)...(19): siRNA sense strand
gaacucuuauuuagccaua

SEQ ID NO: 2211535 - RNA, 19 nt, Homo sapiens
  misc_RNA (1)...(19): siRNA sense strand
ugugagaacucugaaauua

SEQ ID NO: 2211536 - RNA, 19 nt, Homo sapiens
  misc_RNA (1)...(19): siRNA sense strand
ggaaguugcugauaguaga

SEQ ID NO: 2211537 - RNA, 19 nt, Homo sapiens
  misc_RNA (1)...(19): siRNA sense strand
gaaagaaaauccucaagaa

SEQ ID NO: 2211538 - RNA, 19 nt, Homo sapiens
  misc_RNA (1)...(19): siRNA sense strand
cauacgagauuaccacuuu

SEQ ID NO: 2211539 - RNA, 19 nt, Homo sapiens
  misc_RNA (1)...(19): siRNA sense strand
gcucucauuucuugacuua

SEQ ID NO: 2211540 - RNA, 19 nt, Homo sapiens
  misc_RNA (1)...(19): siRNA sense strand
gaaacucuguugaagaaau

SEQ ID NO: 2211541 - RNA, 19 nt, Homo sapiens
  misc_RNA (1)...(19): siRNA sense strand
ggagaucucuuaguaaauc

SEQ ID NO: 2211542 - RNA, 19 nt, Homo sapiens
  misc_RNA (1)...(19): siRNA sense strand
gagaagaaguggcugugaa

SEQ ID NO: 2211543 - RNA, 19 nt, Homo sapiens
  misc_RNA (1)...(19): siRNA sense strand
guagagaaacugcaucuuu

SEQ ID NO: 2211544 - RNA, 19 nt, Homo sapiens
  misc_RNA (1)...(19): siRNA sense strand
gcacuucgcccaaacagaa

SEQ ID NO: 2211545 - RNA, 19 nt, Homo sapiens
  misc_RNA (1)...(19): siRNA sense strand
agacuggccuauccaaaua

SEQ ID NO: 2211546 - RNA, 19 nt, Homo sapiens
  misc_RNA (1)...(19): siRNA sense strand
cgaggaaucugaugcuuug

SEQ ID NO: 2211547 - RNA, 19 nt, Homo sapiens
  misc_RNA (1)...(19): siRNA sense strand
cgacaaggcauuuacuuaa

SEQ ID NO: 2211548 - RNA, 19 nt, Homo sapiens
  misc_RNA (1)...(19): siRNA sense strand
ggaaaucuuugaacuuaag

SEQ ID NO: 2211549 - RNA, 19 nt, Homo sapiens
  misc_RNA (1)...(19): siRNA sense strand
gaggacagcucucauuucu

SEQ ID NO: 2211550 - RNA, 19 nt, Homo sapiens
  misc_RNA (1)...(19): siRNA sense strand
gaagaaagcagaggaagga

SEQ ID NO: 2211551 - RNA, 19 nt, Homo sapiens
  misc_RNA (1)...(19): siRNA sense strand
uaagauccuuucccaauga

SEQ ID NO: 2211552 - RNA, 19 nt, Homo sapiens
  misc_RNA (1)...(19): siRNA sense strand
cuggaaaucuuugaacuua

SEQ ID NO: 2211553 - RNA, 19 nt, Homo sapiens
  misc_RNA (1)...(19): siRNA sense strand
gcacagcuaggaagccuua

SEQ ID NO: 2211554 - RNA, 19 nt, Homo sapiens
  misc_RNA (1)...(19): siRNA sense strand
gcacaaagauuuucuccuu

SEQ ID NO: 2211555 - RNA, 19 nt, Homo sapiens
  misc_RNA (1)...(19): siRNA sense strand
gcucaguacugcuguagaa

SEQ ID NO: 2211556 - RNA, 19 nt, Homo sapiens
  misc_RNA (1)...(19): siRNA sense strand
uaaacgagagccuuaauuu

SEQ ID NO: 2211557 - RNA, 19 nt, Homo sapiens
  misc_RNA (1)...(19): siRNA sense strand
ggacaucaaucuuccacau

SEQ ID NO: 2211558 - RNA, 19 nt, Homo sapiens
  misc_RNA (1)...(19): siRNA sense strand
ggaaauacugggaguggua

SEQ ID NO: 2211559 - RNA, 19 nt, Homo sapiens
  misc_RNA (1)...(19): siRNA sense strand
uaagggagguaaugguaaa

SEQ ID NO: 2211560 - RNA, 19 nt, Homo sapiens
  misc_RNA (1)...(19): siRNA sense strand
gauggcaaguuagcaauuu

SEQ ID NO: 2211561 - RNA, 19 nt, Homo sapiens
  misc_RNA (1)...(19): siRNA sense strand
aaagagacauacccuagaa

SEQ ID NO: 2211562 - RNA, 19 nt, Homo sapiens
  misc_RNA (1)...(19): siRNA sense strand
ccacauugauucucucaug

SEQ ID NO: 2211563 - RNA, 19 nt, Homo sapiens
  misc_RNA (1)...(19): siRNA sense strand
cgaaugaaacuuaugauug

SEQ ID NO: 2211564 - RNA, 19 nt, Homo sapiens
  misc_RNA (1)...(19): siRNA sense strand
aaggaaagcuggauugugu

SEQ ID NO: 2211565 - RNA, 19 nt, Homo sapiens
  misc_RNA (1)...(19): siRNA sense strand
aaggagaucucuuaguaaa

SEQ ID NO: 2211566 - RNA, 19 nt, Homo sapiens
  misc_RNA (1)...(19): siRNA sense strand
gaaggagaucucuuaguaa

SEQ ID NO: 2211567 - RNA, 19 nt, Homo sapiens
  misc_RNA (1)...(19): siRNA sense strand
gaauaaugaugaguuggaa

SEQ ID NO: 2211568 - RNA, 19 nt, Homo sapiens
  misc_RNA (1)...(19): siRNA sense strand
gcaaugauauucaguaccu

SEQ ID NO: 2211569 - RNA, 19 nt, Homo sapiens
  misc_RNA (1)...(19): siRNA sense strand
cgacuuauacguguaauuu

SEQ ID NO: 2211570 - RNA, 19 nt, Homo sapiens
  misc_RNA (1)...(19): siRNA sense strand
caaauucaacggaaagaaa

SEQ ID NO: 2211571 - RNA, 19 nt, Homo sapiens
  misc_RNA (1)...(19): siRNA sense strand
gcccaggucuuugacauuu

SEQ ID NO: 2211572 - RNA, 19 nt, Homo sapiens
  misc_RNA (1)...(19): siRNA sense strand
ugagaacucugaaauuauc

SEQ ID NO: 2211573 - RNA, 19 nt, Homo sapiens
  misc_RNA (1)...(19): siRNA sense strand
gcacagauuuugacaguga

SEQ ID NO: 2211574 - RNA, 19 nt, Homo sapiens
  misc_RNA (1)...(19): siRNA sense strand
cgugaggaauucuauagua

SEQ ID NO: 2211575 - RNA, 19 nt, Homo sapiens
  misc_RNA (1)...(19): siRNA sense strand
ugaacugcaucuuaacuuu

SEQ ID NO: 2211576 - RNA, 19 nt, Homo sapiens
  misc_RNA (1)...(19): siRNA sense strand
agaacuacaugucacagua

SEQ ID NO: 2211577 - RNA, 19 nt, Homo sapiens
  misc_RNA (1)...(19): siRNA sense strand
agacacugcucucuauauu

SEQ ID NO: 2211578 - RNA, 19 nt, Homo sapiens
  misc_RNA (1)...(19): siRNA sense strand
guacuccauugauguguuu

SEQ ID NO: 2211579 - RNA, 19 nt, Homo sapiens
  misc_RNA (1)...(19): siRNA sense strand
gcgacaaggcauuuacuua

SEQ ID NO: 2211580 - RNA, 19 nt, Homo sapiens
  misc_RNA (1)...(19): siRNA sense strand
ugacuuaaauacugaagga

SEQ ID NO: 2211581 - RNA, 19 nt, Homo sapiens
  misc_RNA (1)...(19): siRNA sense strand
agaaguggcugugaagauu

SEQ ID NO: 2211582 - RNA, 19 nt, Homo sapiens
  misc_RNA (1)...(19): siRNA sense strand
acucagccaugauuauaua

SEQ ID NO: 2211583 - RNA, 19 nt, Homo sapiens
  misc_RNA (1)...(19): siRNA sense strand
gcaucuuucucacaauaaa

SEQ ID NO: 2211584 - RNA, 19 nt, Homo sapiens
  misc_RNA (1)...(19): siRNA sense strand
caagccaacuguuuucuua

SEQ ID NO: 2211585 - RNA, 19 nt, Homo sapiens
  misc_RNA (1)...(19): siRNA sense strand
ggagaaacucuguugaaga

SEQ ID NO: 2211586 - RNA, 19 nt, Homo sapiens
  misc_RNA (1)...(19): siRNA sense strand
uacuugagauuucaccuua

SEQ ID NO: 2211587 - RNA, 19 nt, Homo sapiens
  misc_RNA (1)...(19): siRNA sense strand
gccaauaggagaagaauau

SEQ ID NO: 2211588 - RNA, 19 nt, Homo sapiens
  misc_RNA (1)...(19): siRNA sense strand
gcaaagccugcaugaguaa

SEQ ID NO: 2211589 - RNA, 19 nt, Homo sapiens
  misc_RNA (1)...(19): siRNA sense strand
ccuuggcucuucaauauaa

SEQ ID NO: 2211590 - RNA, 19 nt, Homo sapiens
  misc_RNA (1)...(19): siRNA sense strand
gaacugcaucuuaacuuug

SEQ ID NO: 2211591 - RNA, 19 nt, Homo sapiens
  misc_RNA (1)...(19): siRNA sense strand
uggcugaccugccuagaaa

SEQ ID NO: 2211592 - RNA, 19 nt, Homo sapiens
  misc_RNA (1)...(19): siRNA sense strand
aaauagcccuguuguggaa

SEQ ID NO: 2211593 - RNA, 19 nt, Homo sapiens
  misc_RNA (1)...(19): siRNA sense strand
guagaggguuugaaguuuc

SEQ ID NO: 2211594 - RNA, 19 nt, Homo sapiens
  misc_RNA (1)...(19): siRNA sense strand
cgcaaagccugcaugagua

SEQ ID NO: 2211595 - RNA, 19 nt, Homo sapiens
  misc_RNA (1)...(19): siRNA sense strand
gccuaugguugagaaauua

SEQ ID NO: 2211596 - RNA, 19 nt, Homo sapiens
  misc_RNA (1)...(19): siRNA sense strand
ggccuaugguugagaaauu

SEQ ID NO: 2211597 - RNA, 19 nt, Homo sapiens
  misc_RNA (1)...(19): siRNA sense strand
ggacaaagccagccucacu

SEQ ID NO: 2211598 - RNA, 19 nt, Homo sapiens
  misc_RNA (1)...(19): siRNA sense strand
ucacgcaguucacuuucua

SEQ ID NO: 2211599 - RNA, 19 nt, Homo sapiens
  misc_RNA (1)...(19): siRNA sense strand
gagauuaccacuuugugaa

SEQ ID NO: 2211600 - RNA, 19 nt, Homo sapiens
  misc_RNA (1)...(19): siRNA sense strand
caaucuugcuugaccguuu

SEQ ID NO: 2211601 - RNA, 19 nt, Homo sapiens
  misc_RNA (1)...(19): siRNA sense strand
ggaagugugggauaagaaa

SEQ ID NO: 2211602 - RNA, 19 nt, Homo sapiens
  misc_RNA (1)...(19): siRNA sense strand
gaaguuuccaaaugaguuu

SEQ ID NO: 2211603 - RNA, 19 nt, Homo sapiens
  misc_RNA (1)...(19): siRNA sense strand
gauuucaccuuacaugcuu

SEQ ID NO: 2211604 - RNA, 19 nt, Homo sapiens
  misc_RNA (1)...(19): siRNA sense strand
gaacuacaugucacaguau

SEQ ID NO: 2211605 - RNA, 19 nt, Homo sapiens
  misc_RNA (1)...(19): siRNA sense strand
ccacucagccaugauuaua

SEQ ID NO: 2211606 - RNA, 19 nt, Homo sapiens
  misc_RNA (1)...(19): siRNA sense strand
gcagcaaugauauucagua

SEQ ID NO: 2211607 - RNA, 19 nt, Homo sapiens
  misc_RNA (1)...(19): siRNA sense strand
agagauuccuccugagauu

SEQ ID NO: 2211608 - RNA, 19 nt, Homo sapiens
  misc_RNA (1)...(19): siRNA sense strand
aaacguaauuguugaaugc

SEQ ID NO: 2211609 - RNA, 19 nt, Homo sapiens
  misc_RNA (1)...(19): siRNA sense strand
aaaauuaccugauccaguu

SEQ ID NO: 2211610 - RNA, 19 nt, Homo sapiens
  misc_RNA (1)...(19): siRNA sense strand
guagaauaguagaggguuu

SEQ ID NO: 2211611 - RNA, 19 nt, Homo sapiens
  misc_RNA (1)...(19): siRNA sense strand
gaaguggcugugaagauuu

SEQ ID NO: 2211612 - RNA, 19 nt, Homo sapiens
  misc_RNA (1)...(19): siRNA sense strand
ugaccugccuagaaauauu

SEQ ID NO: 2211613 - RNA, 19 nt, Homo sapiens
  misc_RNA (1)...(19): siRNA sense strand
caaccaaggcucaccauuc

SEQ ID NO: 2211614 - RNA, 19 nt, Homo sapiens
  misc_RNA (1)...(19): siRNA sense strand
gaaagcagaggaaggagau

SEQ ID NO: 2211615 - RNA, 19 nt, Homo sapiens
  misc_RNA (1)...(19): siRNA sense strand
gaccugccuagaaauauua

SEQ ID NO: 2211616 - RNA, 19 nt, Homo sapiens
  misc_RNA (1)...(19): siRNA sense strand
acaucaaucuuccacauga

SEQ ID NO: 2211617 - RNA, 19 nt, Homo sapiens
  misc_RNA (1)...(19): siRNA sense strand
ggucaucaauaccgaagau

SEQ ID NO: 2211618 - RNA, 19 nt, Homo sapiens
  misc_RNA (1)...(19): siRNA sense strand
aggcugauguuuauucauu

SEQ ID NO: 2211619 - RNA, 19 nt, Homo sapiens
  misc_RNA (1)...(19): siRNA sense strand
ggauguuggugauggaguu

SEQ ID NO: 2211620 - RNA, 19 nt, Homo sapiens
  misc_RNA (1)...(19): siRNA sense strand
gaucaucgcuucaguuauu

SEQ ID NO: 2211621 - RNA, 19 nt, Homo sapiens
  misc_RNA (1)...(19): siRNA sense strand
gaagaacgcauucccuuua

SEQ ID NO: 2211622 - RNA, 19 nt, Homo sapiens
  misc_RNA (1)...(19): siRNA sense strand
caagauaacuguacaugga

SEQ ID NO: 2211623 - RNA, 19 nt, Homo sapiens
  misc_RNA (1)...(19): siRNA sense strand
caacucagcugacaauaau

SEQ ID NO: 2211624 - RNA, 19 nt, Homo sapiens
  misc_RNA (1)...(19): siRNA sense strand
gagaaucaccucaaagaua

SEQ ID NO: 2211625 - RNA, 19 nt, Homo sapiens
  misc_RNA (1)...(19): siRNA sense strand
gaacagacccaauccagaa

SEQ ID NO: 2211626 - RNA, 19 nt, Homo sapiens
  misc_RNA (1)...(19): siRNA sense strand
gcauacgaaucuaaccuua

SEQ ID NO: 2211627 - RNA, 19 nt, Homo sapiens
  misc_RNA (1)...(19): siRNA sense strand
gagaacagccucaccauga

SEQ ID NO: 2211628 - RNA, 19 nt, Homo sapiens
  misc_RNA (1)...(19): siRNA sense strand
gaaauacuauggagagaag

SEQ ID NO: 2211629 - RNA, 19 nt, Homo sapiens
  misc_RNA (1)...(19): siRNA sense strand
gaaacccaaugaucugaaa

SEQ ID NO: 2211630 - RNA, 19 nt, Homo sapiens
  misc_RNA (1)...(19): siRNA sense strand
gaaaagcaaucuggaauaa

SEQ ID NO: 2211631 - RNA, 19 nt, Homo sapiens
  misc_RNA (1)...(19): siRNA sense strand
gaacaagcccgaccagaau

SEQ ID NO: 2211632 - RNA, 19 nt, Homo sapiens
  misc_RNA (1)...(19): siRNA sense strand
gagaagaaccggaugaaug

SEQ ID NO: 2211633 - RNA, 19 nt, Homo sapiens
  misc_RNA (1)...(19): siRNA sense strand
caucuacucugugaaauuu

SEQ ID NO: 2211634 - RNA, 19 nt, Homo sapiens
  misc_RNA (1)...(19): siRNA sense strand
aggcagaacuugaguauga

SEQ ID NO: 2211635 - RNA, 19 nt, Homo sapiens
  misc_RNA (1)...(19): siRNA sense strand
gaucccagcugcccuaaug

SEQ ID NO: 2211636 - RNA, 19 nt, Homo sapiens
  misc_RNA (1)...(19): siRNA sense strand
ggaauaacauacaagaagu

SEQ ID NO: 2211637 - RNA, 19 nt, Homo sapiens
  misc_RNA (1)...(19): siRNA sense strand
ccagguggcugucuucuug

SEQ ID NO: 2211638 - RNA, 19 nt, Homo sapiens
  misc_RNA (1)...(19): siRNA sense strand
caagaucaguauuggauga

SEQ ID NO: 2211639 - RNA, 19 nt, Homo sapiens
  misc_RNA (1)...(19): siRNA sense strand
gcgaagaauugacuuuguu

SEQ ID NO: 2211640 - RNA, 19 nt, Homo sapiens
  misc_RNA (1)...(19): siRNA sense strand
caacagacuuguaaacucu

SEQ ID NO: 2211641 - RNA, 19 nt, Homo sapiens
  misc_RNA (1)...(19): siRNA sense strand
agaaucaccucaaagauau

SEQ ID NO: 2211642 - RNA, 19 nt, Homo sapiens
  misc_RNA (1)...(19): siRNA sense strand
ggacccagacugauuauga

SEQ ID NO: 2211643 - RNA, 19 nt, Homo sapiens
  misc_RNA (1)...(19): siRNA sense strand
ugauagagaugcuuucuuc

SEQ ID NO: 2211644 - RNA, 19 nt, Homo sapiens
  misc_RNA (1)...(19): siRNA sense strand
ucaaagaaauugugcaucu

SEQ ID NO: 2211645 - RNA, 19 nt, Homo sapiens
  misc_RNA (1)...(19): siRNA sense strand
caaggacccagacugauua

SEQ ID NO: 2211646 - RNA, 19 nt, Homo sapiens
  misc_RNA (1)...(19): siRNA sense strand
agagaaagcccaagacauu

SEQ ID NO: 2211647 - RNA, 19 nt, Homo sapiens
  misc_RNA (1)...(19): siRNA sense strand
aaucuaaccuuaucuguca

SEQ ID NO: 2211648 - RNA, 19 nt, Homo sapiens
  misc_RNA (1)...(19): siRNA sense strand
gggcaaauuuguaggcuau

SEQ ID NO: 2211649 - RNA, 19 nt, Homo sapiens
  misc_RNA (1)...(19): siRNA sense strand
gaguauggguuaccuuguu

SEQ ID NO: 2211650 - RNA, 19 nt, Homo sapiens
  misc_RNA (1)...(19): siRNA sense strand
aagcagcccuuggaucuua

SEQ ID NO: 2211651 - RNA, 19 nt, Homo sapiens
  misc_RNA (1)...(19): siRNA sense strand
gauaaugcacaucaaauug

SEQ ID NO: 2211652 - RNA, 19 nt, Homo sapiens
  misc_RNA (1)...(19): siRNA sense strand
aaagcaaucuggaauaaca

SEQ ID NO: 2211653 - RNA, 19 nt, Homo sapiens
  misc_RNA (1)...(19): siRNA sense strand
gcaacaagaucaguauugg

SEQ ID NO: 2211654 - RNA, 19 nt, Homo sapiens
  misc_RNA (1)...(19): siRNA sense strand
gcaguuagaagcaacaaga

SEQ ID NO: 2211655 - RNA, 19 nt, Homo sapiens
  misc_RNA (1)...(19): siRNA sense strand
ccagaagccgcauuguuua

SEQ ID NO: 2211656 - RNA, 19 nt, Homo sapiens
  misc_RNA (1)...(19): siRNA sense strand
gggcaaacugggauuauuu

SEQ ID NO: 2211657 - RNA, 19 nt, Homo sapiens
  misc_RNA (1)...(19): siRNA sense strand
aaacuucccaagaacauua

SEQ ID NO: 2211658 - RNA, 19 nt, Homo sapiens
  misc_RNA (1)...(19): siRNA sense strand
gauuugggaucacuggaaa

SEQ ID NO: 2211659 - RNA, 19 nt, Homo sapiens
  misc_RNA (1)...(19): siRNA sense strand
auacagaaaugaagagugu

SEQ ID NO: 2211660 - RNA, 19 nt, Homo sapiens
  misc_RNA (1)...(19): siRNA sense strand
uugcuuggcugggcuauua

SEQ ID NO: 2211661 - RNA, 19 nt, Homo sapiens
  misc_RNA (1)...(19): siRNA sense strand
gaauugacuuuguucuagu

SEQ ID NO: 2211662 - RNA, 19 nt, Homo sapiens
  misc_RNA (1)...(19): siRNA sense strand
gaugauagaagcaguagau

SEQ ID NO: 2211663 - RNA, 19 nt, Homo sapiens
  misc_RNA (1)...(19): siRNA sense strand
cauaauguguccucagugu

SEQ ID NO: 2211664 - RNA, 19 nt, Homo sapiens
  misc_RNA (1)...(19): siRNA sense strand
agaagaaccggaugaauga

SEQ ID NO: 2211665 - RNA, 19 nt, Homo sapiens
  misc_RNA (1)...(19): siRNA sense strand
gaagccgcauuguuuacuu

SEQ ID NO: 2211666 - RNA, 19 nt, Homo sapiens
  misc_RNA (1)...(19): siRNA sense strand
cuacauagcauucuuuaag

SEQ ID NO: 2211667 - RNA, 19 nt, Homo sapiens
  misc_RNA (1)...(19): siRNA sense strand
gaaguuugucauccugaua

SEQ ID NO: 2211668 - RNA, 19 nt, Homo sapiens
  misc_RNA (1)...(19): siRNA sense strand
gggaucaacagacuuguaa

SEQ ID NO: 2211669 - RNA, 19 nt, Homo sapiens
  misc_RNA (1)...(19): siRNA sense strand
gaagcaacaagaucaguau

SEQ ID NO: 2211670 - RNA, 19 nt, Homo sapiens
  misc_RNA (1)...(19): siRNA sense strand
cagacccaauccagaaaua

SEQ ID NO: 2211671 - RNA, 19 nt, Homo sapiens
  misc_RNA (1)...(19): siRNA sense strand
uagagaugcuuucuucaau

SEQ ID NO: 2211672 - RNA, 19 nt, Homo sapiens
  misc_RNA (1)...(19): siRNA sense strand
guacguaugcugagauaau

SEQ ID NO: 2211673 - RNA, 19 nt, Homo sapiens
  misc_RNA (1)...(19): siRNA sense strand
agaaccggaugaaugauuu

SEQ ID NO: 2211674 - RNA, 19 nt, Homo sapiens
  misc_RNA (1)...(19): siRNA sense strand
gauagaagcaguagauaac

SEQ ID NO: 2211675 - RNA, 19 nt, Homo sapiens
  misc_RNA (1)...(19): siRNA sense strand
caggagacccaguuuauug

SEQ ID NO: 2211676 - RNA, 19 nt, Homo sapiens
  misc_RNA (1)...(19): siRNA sense strand
ccaaggacccagacugauu

SEQ ID NO: 2211677 - RNA, 19 nt, Homo sapiens
  misc_RNA (1)...(19): siRNA sense strand
gugauaggcuuuguccauu

SEQ ID NO: 2211678 - RNA, 19 nt, Homo sapiens
  misc_RNA (1)...(19): siRNA sense strand
gcagaaaagagaccaauaa

SEQ ID NO: 2211679 - RNA, 19 nt, Homo sapiens
  misc_RNA (1)...(19): siRNA sense strand
gcacaaagagcaagaucca

SEQ ID NO: 2211680 - RNA, 19 nt, Homo sapiens
  misc_RNA (1)...(19): siRNA sense strand
gaucaguauuggaugacaa

SEQ ID NO: 2211681 - RNA, 19 nt, Homo sapiens
  misc_RNA (1)...(19): siRNA sense strand
ccucaaagauaugacgaaa

SEQ ID NO: 2211682 - RNA, 19 nt, Homo sapiens
  misc_RNA (1)...(19): siRNA sense strand
gggaaaauguauacggaua

SEQ ID NO: 2211683 - RNA, 19 nt, Homo sapiens
  misc_RNA (1)...(19): siRNA sense strand
caugggagguguuauguac

SEQ ID NO: 2211684 - RNA, 19 nt, Homo sapiens
  misc_RNA (1)...(19): siRNA sense strand
cccaaaagcuucuucauga

SEQ ID NO: 2211685 - RNA, 19 nt, Homo sapiens
  misc_RNA (1)...(19): siRNA sense strand
gggauacuguugaguuaca

SEQ ID NO: 2211686 - RNA, 19 nt, Homo sapiens
  misc_RNA (1)...(19): siRNA sense strand
cacaucaaauugccucuga

SEQ ID NO: 2211687 - RNA, 19 nt, Homo sapiens
  misc_RNA (1)...(19): siRNA sense strand
gagauaaugcacaucaaau

SEQ ID NO: 2211688 - RNA, 19 nt, Homo sapiens
  misc_RNA (1)...(19): siRNA sense strand
gaaaagacaagcauacgaa

SEQ ID NO: 2211689 - RNA, 19 nt, Homo sapiens
  misc_RNA (1)...(19): siRNA sense strand
uagaagcaguagauaacaa

SEQ ID NO: 2211690 - RNA, 19 nt, Homo sapiens
  misc_RNA (1)...(19): siRNA sense strand
cauaugcaauucccgaugu

SEQ ID NO: 2211691 - RNA, 19 nt, Homo sapiens
  misc_RNA (1)...(19): siRNA sense strand
caagaacauuaauggaaca

SEQ ID NO: 2211692 - RNA, 19 nt, Homo sapiens
  misc_RNA (1)...(19): siRNA sense strand
ccuuggaucuuaucaggaa

SEQ ID NO: 2211693 - RNA, 19 nt, Homo sapiens
  misc_RNA (1)...(19): siRNA sense strand
agagcaagauccagagaga

SEQ ID NO: 2211694 - RNA, 19 nt, Homo sapiens
  misc_RNA (1)...(19): siRNA sense strand
aacacaacaucuacuauug

SEQ ID NO: 2211695 - RNA, 19 nt, Homo sapiens
  misc_RNA (1)...(19): siRNA sense strand
gaauacgaagcacgaugua

SEQ ID NO: 2211696 - RNA, 19 nt, Homo sapiens
  misc_RNA (1)...(19): siRNA sense strand
ggaaacucaauauuacuug

SEQ ID NO: 2211697 - RNA, 19 nt, Homo sapiens
  misc_RNA (1)...(19): siRNA sense strand
ggaaauacuauggagagaa

SEQ ID NO: 2211698 - RNA, 19 nt, Homo sapiens
  misc_RNA (1)...(19): siRNA sense strand
auacgaaucuaaccuuauc

SEQ ID NO: 2211699 - RNA, 19 nt, Homo sapiens
  misc_RNA (1)...(19): siRNA sense strand
gaccaaugccaugaucaua

SEQ ID NO: 2211700 - RNA, 19 nt, Homo sapiens
  misc_RNA (1)...(19): siRNA sense strand
gagaaagcccaagacauug

SEQ ID NO: 2211701 - RNA, 19 nt, Homo sapiens
  misc_RNA (1)...(19): siRNA sense strand
ggaaaagcaaucuggaaua

SEQ ID NO: 2211702 - RNA, 19 nt, Homo sapiens
  misc_RNA (1)...(19): siRNA sense strand
gagacccaguuuauugguu

SEQ ID NO: 2211703 - RNA, 19 nt, Homo sapiens
  misc_RNA (1)...(19): siRNA sense strand
agaacagccucaccaugaa

SEQ ID NO: 2211704 - RNA, 19 nt, Homo sapiens
  misc_RNA (1)...(19): siRNA sense strand
ucuauaggcucucgguguu

SEQ ID NO: 2211705 - RNA, 19 nt, Homo sapiens
  misc_RNA (1)...(19): siRNA sense strand
gaacgcauucccuuuacug

SEQ ID NO: 2211706 - RNA, 19 nt, Homo sapiens
  misc_RNA (1)...(19): siRNA sense strand
ccaaaguccucaguguaga

SEQ ID NO: 2211707 - RNA, 19 nt, Homo sapiens
  misc_RNA (1)...(19): siRNA sense strand
ugauagaagcaguagauaa

SEQ ID NO: 2211708 - RNA, 19 nt, Homo sapiens
  misc_RNA (1)...(19): siRNA sense strand
ccuggucuuugcaguauuu

SEQ ID NO: 2211709 - RNA, 19 nt, Homo sapiens
  misc_RNA (1)...(19): siRNA sense strand
guacauggagcaaagaagu

SEQ ID NO: 2211710 - RNA, 19 nt, Homo sapiens
  misc_RNA (1)...(19): siRNA sense strand
gaucuuaucaggaaauacu

SEQ ID NO: 2211711 - RNA, 19 nt, Homo sapiens
  misc_RNA (1)...(19): siRNA sense strand
gacaagcauacgaaucuaa

SEQ ID NO: 2211712 - RNA, 19 nt, Homo sapiens
  misc_RNA (1)...(19): siRNA sense strand
uagcugagcggaugauaga

SEQ ID NO: 2211713 - RNA, 19 nt, Homo sapiens
  misc_RNA (1)...(19): siRNA sense strand
uuauugcccuggaucauga

SEQ ID NO: 2211714 - RNA, 19 nt, Homo sapiens
  misc_RNA (1)...(19): siRNA sense strand
agaacaagcccgaccagaa

SEQ ID NO: 2211715 - RNA, 19 nt, Homo sapiens
  misc_RNA (1)...(19): siRNA sense strand
ucuggaaacucaauauuac

SEQ ID NO: 2211716 - RNA, 19 nt, Homo sapiens
  misc_RNA (1)...(19): siRNA sense strand
gauaggcuuuguccauucu

SEQ ID NO: 2211717 - RNA, 19 nt, Homo sapiens
  misc_RNA (1)...(19): siRNA sense strand
uaauguguccucaguguga

SEQ ID NO: 2211718 - RNA, 19 nt, Homo sapiens
  misc_RNA (1)...(19): siRNA sense strand
ucaacagacuuguaaacuc

SEQ ID NO: 2211719 - RNA, 19 nt, Homo sapiens
  misc_RNA (1)...(19): siRNA sense strand
uggaaagucagcaugauuu

SEQ ID NO: 2211720 - RNA, 19 nt, Homo sapiens
  misc_RNA (1)...(19): siRNA sense strand
ggacuuugcuauuaacgua

SEQ ID NO: 2211721 - RNA, 19 nt, Homo sapiens
  misc_RNA (1)...(19): siRNA sense strand
gaaauuaggccacaagcua

SEQ ID NO: 2211722 - RNA, 19 nt, Homo sapiens
  misc_RNA (1)...(19): siRNA sense strand
ggaaauagauagugagaag

SEQ ID NO: 2211723 - RNA, 19 nt, Homo sapiens
  misc_RNA (1)...(19): siRNA sense strand
ggacaaucaucauguacua

SEQ ID NO: 2211724 - RNA, 19 nt, Homo sapiens
  misc_RNA (1)...(19): siRNA sense strand
caacuucaguacagaauuu

SEQ ID NO: 2211725 - RNA, 19 nt, Homo sapiens
  misc_RNA (1)...(19): siRNA sense strand
acuaacagcugccuuaaua

SEQ ID NO: 2211726 - RNA, 19 nt, Homo sapiens
  misc_RNA (1)...(19): siRNA sense strand
aaacagaacucagaacaaa

SEQ ID NO: 2211727 - RNA, 19 nt, Homo sapiens
  misc_RNA (1)...(19): siRNA sense strand
ggacaaaugguuacuauug

SEQ ID NO: 2211728 - RNA, 19 nt, Homo sapiens
  misc_RNA (1)...(19): siRNA sense strand
caacagacaucagcuggua

SEQ ID NO: 2211729 - RNA, 19 nt, Homo sapiens
  misc_RNA (1)...(19): siRNA sense strand
uaacauaacuccaucuucu

SEQ ID NO: 2211730 - RNA, 19 nt, Homo sapiens
  misc_RNA (1)...(19): siRNA sense strand
ggagaagaauggaaagaga

SEQ ID NO: 2211731 - RNA, 19 nt, Homo sapiens
  misc_RNA (1)...(19): siRNA sense strand
caaaggugaucaacuagaa

SEQ ID NO: 2211732 - RNA, 19 nt, Homo sapiens
  misc_RNA (1)...(19): siRNA sense strand
ggaauuaggugagaaugga

SEQ ID NO: 2211733 - RNA, 19 nt, Homo sapiens
  misc_RNA (1)...(19): siRNA sense strand
gauaagcacuguucaaagg

SEQ ID NO: 2211734 - RNA, 19 nt, Homo sapiens
  misc_RNA (1)...(19): siRNA sense strand
caaauagacaugcaagaua

SEQ ID NO: 2211735 - RNA, 19 nt, Homo sapiens
  misc_RNA (1)...(19): siRNA sense strand
guaguugucucaccacauu

SEQ ID NO: 2211736 - RNA, 19 nt, Homo sapiens
  misc_RNA (1)...(19): siRNA sense strand
ggucgcagauuguuaaaga

SEQ ID NO: 2211737 - RNA, 19 nt, Homo sapiens
  misc_RNA (1)...(19): siRNA sense strand
ggaggaugaugaugaggua

SEQ ID NO: 2211738 - RNA, 19 nt, Homo sapiens
  misc_RNA (1)...(19): siRNA sense strand
caacaaagcguagugauug

SEQ ID NO: 2211739 - RNA, 19 nt, Homo sapiens
  misc_RNA (1)...(19): siRNA sense strand
ggaaagagaagacugauag

SEQ ID NO: 2211740 - RNA, 19 nt, Homo sapiens
  misc_RNA (1)...(19): siRNA sense strand
cgacagcgguuuucuuuua

SEQ ID NO: 2211741 - RNA, 19 nt, Homo sapiens
  misc_RNA (1)...(19): siRNA sense strand
acacagcaauuuaguggua

SEQ ID NO: 2211742 - RNA, 19 nt, Homo sapiens
  misc_RNA (1)...(19): siRNA sense strand
acagggacaucaaaucaua

SEQ ID NO: 2211743 - RNA, 19 nt, Homo sapiens
  misc_RNA (1)...(19): siRNA sense strand
uaucuggacucccaaauga

SEQ ID NO: 2211744 - RNA, 19 nt, Homo sapiens
  misc_RNA (1)...(19): siRNA sense strand
caaccaaucuucaaaucug

SEQ ID NO: 2211745 - RNA, 19 nt, Homo sapiens
  misc_RNA (1)...(19): siRNA sense strand
acagagagaucauuuguca

SEQ ID NO: 2211746 - RNA, 19 nt, Homo sapiens
  misc_RNA (1)...(19): siRNA sense strand
gcacucuccuaucaaauga

SEQ ID NO: 2211747 - RNA, 19 nt, Homo sapiens
  misc_RNA (1)...(19): siRNA sense strand
gagaaauuguugaagaguu

SEQ ID NO: 2211748 - RNA, 19 nt, Homo sapiens
  misc_RNA (1)...(19): siRNA sense strand
ccaaauaaaguaggaguua

SEQ ID NO: 2211749 - RNA, 19 nt, Homo sapiens
  misc_RNA (1)...(19): siRNA sense strand
ggaaacagucgcaggaauu

SEQ ID NO: 2211750 - RNA, 19 nt, Homo sapiens
  misc_RNA (1)...(19): siRNA sense strand
gaacggucuuuccaaauca

SEQ ID NO: 2211751 - RNA, 19 nt, Homo sapiens
  misc_RNA (1)...(19): siRNA sense strand
gaagguacaucaggagaau

SEQ ID NO: 2211752 - RNA, 19 nt, Homo sapiens
  misc_RNA (1)...(19): siRNA sense strand
aaacaagucucaugaaggu

SEQ ID NO: 2211753 - RNA, 19 nt, Homo sapiens
  misc_RNA (1)...(19): siRNA sense strand
ccacaagggacuuuagaua

SEQ ID NO: 2211754 - RNA, 19 nt, Homo sapiens
  misc_RNA (1)...(19): siRNA sense strand
ucgcaggaauuccaaauaa

SEQ ID NO: 2211755 - RNA, 19 nt, Homo sapiens
  misc_RNA (1)...(19): siRNA sense strand
gaauggagcaucugggaaa

SEQ ID NO: 2211756 - RNA, 19 nt, Homo sapiens
  misc_RNA (1)...(19): siRNA sense strand
ggcacaagcucaacuccua

SEQ ID NO: 2211757 - RNA, 19 nt, Homo sapiens
  misc_RNA (1)...(19): siRNA sense strand
guacugauuugcuuaaugg

SEQ ID NO: 2211758 - RNA, 19 nt, Homo sapiens
  misc_RNA (1)...(19): siRNA sense strand
uguaggaaauggugagaua

SEQ ID NO: 2211759 - RNA, 19 nt, Homo sapiens
  misc_RNA (1)...(19): siRNA sense strand
gcaauuaggccuugacaca

SEQ ID NO: 2211760 - RNA, 19 nt, Homo sapiens
  misc_RNA (1)...(19): siRNA sense strand
caaaugccuuuaugaacuu

SEQ ID NO: 2211761 - RNA, 19 nt, Homo sapiens
  misc_RNA (1)...(19): siRNA sense strand
ucaacaaggucaaacuuau

SEQ ID NO: 2211762 - RNA, 19 nt, Homo sapiens
  misc_RNA (1)...(19): siRNA sense strand
gcaaugggcaggcacauau

SEQ ID NO: 2211763 - RNA, 19 nt, Homo sapiens
  misc_RNA (1)...(19): siRNA sense strand
cugaauaccucucgacuug

SEQ ID NO: 2211764 - RNA, 19 nt, Homo sapiens
  misc_RNA (1)...(19): siRNA sense strand
ccaaaugccuuuaugaacu

SEQ ID NO: 2211765 - RNA, 19 nt, Homo sapiens
  misc_RNA (1)...(19): siRNA sense strand
ugccaaaggugaucaacua

SEQ ID NO: 2211766 - RNA, 19 nt, Homo sapiens
  misc_RNA (1)...(19): siRNA sense strand
ggaauaguggaaauagaua

SEQ ID NO: 2211767 - RNA, 19 nt, Homo sapiens
  misc_RNA (1)...(19): siRNA sense strand
uaacagcugccuuaauauu

SEQ ID NO: 2211768 - RNA, 19 nt, Homo sapiens
  misc_RNA (1)...(19): siRNA sense strand
gcaagauacugccaaaggu

SEQ ID NO: 2211769 - RNA, 19 nt, Homo sapiens
  misc_RNA (1)...(19): siRNA sense strand
agucaaauguuaucuguga

SEQ ID NO: 2211770 - RNA, 19 nt, Homo sapiens
  misc_RNA (1)...(19): siRNA sense strand
gguagccagucacaagaua

SEQ ID NO: 2211771 - RNA, 19 nt, Homo sapiens
  misc_RNA (1)...(19): siRNA sense strand
gcaauuccaucuuccuaca

SEQ ID NO: 2211772 - RNA, 19 nt, Homo sapiens
  misc_RNA (1)...(19): siRNA sense strand
caaaguaaagcuccaauuc

SEQ ID NO: 2211773 - RNA, 19 nt, Homo sapiens
  misc_RNA (1)...(19): siRNA sense strand
ugucuaaugucaagggaua

SEQ ID NO: 2211774 - RNA, 19 nt, Homo sapiens
  misc_RNA (1)...(19): siRNA sense strand
gacguucggucuacaaaug

SEQ ID NO: 2211775 - RNA, 19 nt, Homo sapiens
  misc_RNA (1)...(19): siRNA sense strand
acagaacucagaacaaaua

SEQ ID NO: 2211776 - RNA, 19 nt, Homo sapiens
  misc_RNA (1)...(19): siRNA sense strand
aaaggaagcaacagguuua

SEQ ID NO: 2211777 - RNA, 19 nt, Homo sapiens
  misc_RNA (1)...(19): siRNA sense strand
gcuggacaaucaucaugua

SEQ ID NO: 2211778 - RNA, 19 nt, Homo sapiens
  misc_RNA (1)...(19): siRNA sense strand
guacaaacugugcccauuu

SEQ ID NO: 2211779 - RNA, 19 nt, Homo sapiens
  misc_RNA (1)...(19): siRNA sense strand
gaaacgugguccuucaaca

SEQ ID NO: 2211780 - RNA, 19 nt, Homo sapiens
  misc_RNA (1)...(19): siRNA sense strand
ccauucagauguacuauca

SEQ ID NO: 2211781 - RNA, 19 nt, Homo sapiens
  misc_RNA (1)...(19): siRNA sense strand
acgagaaaguucaucauuu

SEQ ID NO: 2211782 - RNA, 19 nt, Homo sapiens
  misc_RNA (1)...(19): siRNA sense strand
aaagagggaccaauaacua

SEQ ID NO: 2211783 - RNA, 19 nt, Homo sapiens
  misc_RNA (1)...(19): siRNA sense strand
gaaaaccgcuaguuaaugg

SEQ ID NO: 2211784 - RNA, 19 nt, Homo sapiens
  misc_RNA (1)...(19): siRNA sense strand
gaucacaaaccauaggaaa

SEQ ID NO: 2211785 - RNA, 19 nt, Homo sapiens
  misc_RNA (1)...(19): siRNA sense strand
aaucguaccugucuucguu

SEQ ID NO: 2211786 - RNA, 19 nt, Homo sapiens
  misc_RNA (1)...(19): siRNA sense strand
cgagaaaguucaucauuuu

SEQ ID NO: 2211787 - RNA, 19 nt, Homo sapiens
  misc_RNA (1)...(19): siRNA sense strand
ggacagcggguacuucaga

SEQ ID NO: 2211788 - RNA, 19 nt, Homo sapiens
  misc_RNA (1)...(19): siRNA sense strand
uaacgcugccuuugcuuua

SEQ ID NO: 2211789 - RNA, 19 nt, Homo sapiens
  misc_RNA (1)...(19): siRNA sense strand
gaaacagaacucagaacaa

SEQ ID NO: 2211790 - RNA, 19 nt, Homo sapiens
  misc_RNA (1)...(19): siRNA sense strand
caaaauccuucaccucaua

SEQ ID NO: 2211791 - RNA, 19 nt, Homo sapiens
  misc_RNA (1)...(19): siRNA sense strand
ucacuuuacuacuugcuaa

SEQ ID NO: 2211792 - RNA, 19 nt, Homo sapiens
  misc_RNA (1)...(19): siRNA sense strand
uaauggaccucuagcuuca

SEQ ID NO: 2211793 - RNA, 19 nt, Homo sapiens
  misc_RNA (1)...(19): siRNA sense strand
ggaaacagaacucagaaca

SEQ ID NO: 2211794 - RNA, 19 nt, Homo sapiens
  misc_RNA (1)...(19): siRNA sense strand
gaaaguacagugacucaag

SEQ ID NO: 2211795 - RNA, 19 nt, Homo sapiens
  misc_RNA (1)...(19): siRNA sense strand
caaaggaagcaacagguuu

SEQ ID NO: 2211796 - RNA, 19 nt, Homo sapiens
  misc_RNA (1)...(19): siRNA sense strand
uaacaguugugccaaauac

SEQ ID NO: 2211797 - RNA, 19 nt, Homo sapiens
  misc_RNA (1)...(19): siRNA sense strand
caggacaaaugguuacuau

SEQ ID NO: 2211798 - RNA, 19 nt, Homo sapiens
  misc_RNA (1)...(19): siRNA sense strand
ucagguagcuacaggacaa

SEQ ID NO: 2211799 - RNA, 19 nt, Homo sapiens
  misc_RNA (1)...(19): siRNA sense strand
gaauaccucucgacuugca

SEQ ID NO: 2211800 - RNA, 19 nt, Homo sapiens
  misc_RNA (1)...(19): siRNA sense strand
cguaugcacucuccuauca

SEQ ID NO: 2211801 - RNA, 19 nt, Homo sapiens
  misc_RNA (1)...(19): siRNA sense strand
ggaccuguauuaacuuugg

SEQ ID NO: 2211802 - RNA, 19 nt, Homo sapiens
  misc_RNA (1)...(19): siRNA sense strand
caagggacuuuagauauca

SEQ ID NO: 2211803 - RNA, 19 nt, Homo sapiens
  misc_RNA (1)...(19): siRNA sense strand
ucuaucagguggccaguaa

SEQ ID NO: 2211804 - RNA, 19 nt, Homo sapiens
  misc_RNA (1)...(19): siRNA sense strand
uuagaacggucuuuccaaa

SEQ ID NO: 2211805 - RNA, 19 nt, Homo sapiens
  misc_RNA (1)...(19): siRNA sense strand
gugagaaguuugcuuguca

SEQ ID NO: 2211806 - RNA, 19 nt, Homo sapiens
  misc_RNA (1)...(19): siRNA sense strand
gauuugggagucuuuauuu

SEQ ID NO: 2211807 - RNA, 19 nt, Homo sapiens
  misc_RNA (1)...(19): siRNA sense strand
aaauugaagucauggagaa

SEQ ID NO: 2211808 - RNA, 19 nt, Homo sapiens
  misc_RNA (1)...(19): siRNA sense strand
cuacaguuauccagaauuc

SEQ ID NO: 2211809 - RNA, 19 nt, Homo sapiens
  misc_RNA (1)...(19): siRNA sense strand
gaugagaggcauggaaauu

SEQ ID NO: 2211810 - RNA, 19 nt, Homo sapiens
  misc_RNA (1)...(19): siRNA sense strand
acaagggacuuuagauauc

SEQ ID NO: 2211811 - RNA, 19 nt, Homo sapiens
  misc_RNA (1)...(19): siRNA sense strand
gcaaaggaagcaacagguu

SEQ ID NO: 2211812 - RNA, 19 nt, Homo sapiens
  misc_RNA (1)...(19): siRNA sense strand
ggucagacaguucagcuaa

SEQ ID NO: 2211813 - RNA, 19 nt, Homo sapiens
  misc_RNA (1)...(19): siRNA sense strand
gcccucagguggucuauca

SEQ ID NO: 2211814 - RNA, 19 nt, Homo sapiens
  misc_RNA (1)...(19): siRNA sense strand
cagacacccucacagguuu

SEQ ID NO: 2211815 - RNA, 19 nt, Homo sapiens
  misc_RNA (1)...(19): siRNA sense strand
uuacuugcguuaccuagaa

SEQ ID NO: 2211816 - RNA, 19 nt, Homo sapiens
  misc_RNA (1)...(19): siRNA sense strand
ccaaauuguucuugcuaau

SEQ ID NO: 2211817 - RNA, 19 nt, Homo sapiens
  misc_RNA (1)...(19): siRNA sense strand
ggacaagcaggaagucaga

SEQ ID NO: 2211818 - RNA, 19 nt, Homo sapiens
  misc_RNA (1)...(19): siRNA sense strand
gcaacagcauccaccaaca

SEQ ID NO: 2211819 - RNA, 19 nt, Homo sapiens
  misc_RNA (1)...(19): siRNA sense strand
ccauaacaguugugccaaa

SEQ ID NO: 2211820 - RNA, 19 nt, Homo sapiens
  misc_RNA (1)...(19): siRNA sense strand
gaaagaaggagaacagauc

SEQ ID NO: 2211821 - RNA, 19 nt, Homo sapiens
  misc_RNA (1)...(19): siRNA sense strand
gaaggcgucuuugucauug

SEQ ID NO: 2211822 - RNA, 19 nt, Homo sapiens
  misc_RNA (1)...(19): siRNA sense strand
gagaagccgugucccguau

SEQ ID NO: 2211823 - RNA, 19 nt, Homo sapiens
  misc_RNA (1)...(19): siRNA sense strand
ggaaggcgucuuugucauu

SEQ ID NO: 2211824 - RNA, 19 nt, Homo sapiens
  misc_RNA (1)...(19): siRNA sense strand
gauacgaucccaauauguu

SEQ ID NO: 2211825 - RNA, 19 nt, Homo sapiens
  misc_RNA (1)...(19): siRNA sense strand
gugcagaaguccaagcuau

SEQ ID NO: 2211826 - RNA, 19 nt, Homo sapiens
  misc_RNA (1)...(19): siRNA sense strand
gauccuagaugucauaagc

SEQ ID NO: 2211827 - RNA, 19 nt, Homo sapiens
  misc_RNA (1)...(19): siRNA sense strand
ugaagacuauuuccuguca

SEQ ID NO: 2211828 - RNA, 19 nt, Homo sapiens
  misc_RNA (1)...(19): siRNA sense strand
ggagauccuagaugucaua

SEQ ID NO: 2211829 - RNA, 19 nt, Homo sapiens
  misc_RNA (1)...(19): siRNA sense strand
gugauacgaucccaauaug

SEQ ID NO: 2211830 - RNA, 19 nt, Homo sapiens
  misc_RNA (1)...(19): siRNA sense strand
gcagaaguccaagcuauug

SEQ ID NO: 2211831 - RNA, 19 nt, Homo sapiens
  misc_RNA (1)...(19): siRNA sense strand
ccaaggagaccgagcgaaa

SEQ ID NO: 2211832 - RNA, 19 nt, Homo sapiens
  misc_RNA (1)...(19): siRNA sense strand
ggagggcgcacaaagaaga

SEQ ID NO: 2211833 - RNA, 19 nt, Homo sapiens
  misc_RNA (1)...(19): siRNA sense strand
cauagcggcuccucugaug

SEQ ID NO: 2211834 - RNA, 19 nt, Homo sapiens
  misc_RNA (1)...(19): siRNA sense strand
gagcgcaggcaccgagaua

SEQ ID NO: 2211835 - RNA, 19 nt, Homo sapiens
  misc_RNA (1)...(19): siRNA sense strand
caacagggaaauaggaaga

SEQ ID NO: 2211836 - RNA, 19 nt, Homo sapiens
  misc_RNA (1)...(19): siRNA sense strand
ggaaagaaggagaacagau

SEQ ID NO: 2211837 - RNA, 19 nt, Homo sapiens
  misc_RNA (1)...(19): siRNA sense strand
ggaagggaaagaaggagaa

SEQ ID NO: 2211838 - RNA, 19 nt, Homo sapiens
  misc_RNA (1)...(19): siRNA sense strand
gaucugguuucccaaaugc

SEQ ID NO: 2211839 - RNA, 19 nt, Homo sapiens
  misc_RNA (1)...(19): siRNA sense strand
aagacuauuuccugucauu

SEQ ID NO: 2211840 - RNA, 19 nt, Homo sapiens
  misc_RNA (1)...(19): siRNA sense strand
gagaacagaucugguuucc

SEQ ID NO: 2211841 - RNA, 19 nt, Homo sapiens
  misc_RNA (1)...(19): siRNA sense strand
ggagaacagaucugguuuc

SEQ ID NO: 2211842 - RNA, 19 nt, Homo sapiens
  misc_RNA (1)...(19): siRNA sense strand
guagugauacgaucccaau

SEQ ID NO: 2211843 - RNA, 19 nt, Homo sapiens
  misc_RNA (1)...(19): siRNA sense strand
gaggagcucagcguccaua

SEQ ID NO: 2211844 - RNA, 19 nt, Homo sapiens
  misc_RNA (1)...(19): siRNA sense strand
cuagaugucauaagccaaa

SEQ ID NO: 2211845 - RNA, 19 nt, Homo sapiens
  misc_RNA (1)...(19): siRNA sense strand
gggaaggcgucuuugucau

SEQ ID NO: 2211846 - RNA, 19 nt, Homo sapiens
  misc_RNA (1)...(19): siRNA sense strand
gagcgcacuuuccgcaucu

SEQ ID NO: 2211847 - RNA, 19 nt, Homo sapiens
  misc_RNA (1)...(19): siRNA sense strand
gagggaagggaaagaagga

SEQ ID NO: 2211848 - RNA, 19 nt, Homo sapiens
  misc_RNA (1)...(19): siRNA sense strand
gauggaagcgacacagaag

SEQ ID NO: 2211849 - RNA, 19 nt, Homo sapiens
  misc_RNA (1)...(19): siRNA sense strand
gacuauuuccugucauuau

SEQ ID NO: 2211850 - RNA, 19 nt, Homo sapiens
  misc_RNA (1)...(19): siRNA sense strand
gggaagacagcggaacuga

SEQ ID NO: 2211851 - RNA, 19 nt, Homo sapiens
  misc_RNA (1)...(19): siRNA sense strand
agaggaagaugggaagaca

SEQ ID NO: 2211852 - RNA, 19 nt, Homo sapiens
  misc_RNA (1)...(19): siRNA sense strand
aaacaguucgccagaggaa

SEQ ID NO: 2211853 - RNA, 19 nt, Homo sapiens
  misc_RNA (1)...(19): siRNA sense strand
cagaucugguuucccaaau

SEQ ID NO: 2211854 - RNA, 19 nt, Homo sapiens
  misc_RNA (1)...(19): siRNA sense strand
gacggagggcgcacaaaga

SEQ ID NO: 2211855 - RNA, 19 nt, Homo sapiens
  misc_RNA (1)...(19): siRNA sense strand
gaagacuauuuccugucau

SEQ ID NO: 2211856 - RNA, 19 nt, Homo sapiens
  misc_RNA (1)...(19): siRNA sense strand
ggacccaacagggaaauag

SEQ ID NO: 2211857 - RNA, 19 nt, Homo sapiens
  misc_RNA (1)...(19): siRNA sense strand
aaggagaacagaucugguu

SEQ ID NO: 2211858 - RNA, 19 nt, Homo sapiens
  misc_RNA (1)...(19): siRNA sense strand
acucucaggugcccacuuc

SEQ ID NO: 2211859 - RNA, 19 nt, Homo sapiens
  misc_RNA (1)...(19): siRNA sense strand
gcccgagguuggaaacagu

SEQ ID NO: 2211860 - RNA, 19 nt, Homo sapiens
  misc_RNA (1)...(19): siRNA sense strand
gaagugaagacuauuuccu

SEQ ID NO: 2211861 - RNA, 19 nt, Homo sapiens
  misc_RNA (1)...(19): siRNA sense strand
gugauagaagugaagacua

SEQ ID NO: 2211862 - RNA, 19 nt, Homo sapiens
  misc_RNA (1)...(19): siRNA sense strand
uggauucccuccccuaaaa

SEQ ID NO: 2211863 - RNA, 19 nt, Homo sapiens
  misc_RNA (1)...(19): siRNA sense strand
ggcuccaccuucuuacgaa

SEQ ID NO: 2211864 - RNA, 19 nt, Homo sapiens
  misc_RNA (1)...(19): siRNA sense strand
uagaagugaagacuauuuc

SEQ ID NO: 2211865 - RNA, 19 nt, Homo sapiens
  misc_RNA (1)...(19): siRNA sense strand
cauaggaccuuggggacua

SEQ ID NO: 2211866 - RNA, 19 nt, Homo sapiens
  misc_RNA (1)...(19): siRNA sense strand
acaguucgccagaggaaga

SEQ ID NO: 2211867 - RNA, 19 nt, Homo sapiens
  misc_RNA (1)...(19): siRNA sense strand
agaucugguuucccaaaug

SEQ ID NO: 2211868 - RNA, 19 nt, Homo sapiens
  misc_RNA (1)...(19): siRNA sense strand
gauccaggcaccaccucaa

SEQ ID NO: 2211869 - RNA, 19 nt, Homo sapiens
  misc_RNA (1)...(19): siRNA sense strand
gaagccgugucccguaucc

SEQ ID NO: 2211870 - RNA, 19 nt, Homo sapiens
  misc_RNA (1)...(19): siRNA sense strand
ugauggaagcgacacagaa

SEQ ID NO: 2211871 - RNA, 19 nt, Homo sapiens
  misc_RNA (1)...(19): siRNA sense strand
ggcaccggauggagagaau

SEQ ID NO: 2211872 - RNA, 19 nt, Homo sapiens
  misc_RNA (1)...(19): siRNA sense strand
gucgagcagucgccuuuua

SEQ ID NO: 2211873 - RNA, 19 nt, Homo sapiens
  misc_RNA (1)...(19): siRNA sense strand
agugauacgaucccaauau

SEQ ID NO: 2211874 - RNA, 19 nt, Homo sapiens
  misc_RNA (1)...(19): siRNA sense strand
agacuauuuccugucauua

SEQ ID NO: 2211875 - RNA, 19 nt, Homo sapiens
  misc_RNA (1)...(19): siRNA sense strand
gggaaagaaggagaacaga

SEQ ID NO: 2211876 - RNA, 19 nt, Homo sapiens
  misc_RNA (1)...(19): siRNA sense strand
gagggacccaacagggaaa

SEQ ID NO: 2211877 - RNA, 19 nt, Homo sapiens
  misc_RNA (1)...(19): siRNA sense strand
cccagagcaccaagccuua

SEQ ID NO: 2211878 - RNA, 19 nt, Homo sapiens
  misc_RNA (1)...(19): siRNA sense strand
acagaucugguuucccaaa

SEQ ID NO: 2211879 - RNA, 19 nt, Homo sapiens
  misc_RNA (1)...(19): siRNA sense strand
gagauccuagaugucauaa

SEQ ID NO: 2211880 - RNA, 19 nt, Homo sapiens
  misc_RNA (1)...(19): siRNA sense strand
ggagguggcucucuuccua

SEQ ID NO: 2211881 - RNA, 19 nt, Homo sapiens
  misc_RNA (1)...(19): siRNA sense strand
gguaguagauggcauugaa

SEQ ID NO: 2211882 - RNA, 19 nt, Homo sapiens
  misc_RNA (1)...(19): siRNA sense strand
gcaagcacaagcucaauaa

SEQ ID NO: 2211883 - RNA, 19 nt, Homo sapiens
  misc_RNA (1)...(19): siRNA sense strand
aaacuugccugaguacaaa

SEQ ID NO: 2211884 - RNA, 19 nt, Homo sapiens
  misc_RNA (1)...(19): siRNA sense strand
gaacagcuccggccagagu

SEQ ID NO: 2211885 - RNA, 19 nt, Homo sapiens
  misc_RNA (1)...(19): siRNA sense strand
gaugugauacccauaaaga

SEQ ID NO: 2211886 - RNA, 19 nt, Homo sapiens
  misc_RNA (1)...(19): siRNA sense strand
aggcugagcugauccugua

SEQ ID NO: 2211887 - RNA, 19 nt, Homo sapiens
  misc_RNA (1)...(19): siRNA sense strand
aaaccaaacuugccugagu

SEQ ID NO: 2211888 - RNA, 19 nt, Homo sapiens
  misc_RNA (1)...(19): siRNA sense strand
caggagaccucugcucuga

SEQ ID NO: 2211889 - RNA, 19 nt, Homo sapiens
  misc_RNA (1)...(19): siRNA sense strand
gaacgugacggccaucauc

SEQ ID NO: 2211890 - RNA, 19 nt, Homo sapiens
  misc_RNA (1)...(19): siRNA sense strand
gcgcagacaucgccaugca

SEQ ID NO: 2211891 - RNA, 19 nt, Homo sapiens
  misc_RNA (1)...(19): siRNA sense strand
guucaaggcugagcugauc

SEQ ID NO: 2211892 - RNA, 19 nt, Homo sapiens
  misc_RNA (1)...(19): siRNA sense strand
caaacuugccugaguacaa

SEQ ID NO: 2211893 - RNA, 19 nt, Homo sapiens
  misc_RNA (1)...(19): siRNA sense strand
aaccaaacuugccugagua

SEQ ID NO: 2211894 - RNA, 19 nt, Homo sapiens
  misc_RNA (1)...(19): siRNA sense strand
gcucggaccagcccaaguu

SEQ ID NO: 2211895 - RNA, 19 nt, Homo sapiens
  misc_RNA (1)...(19): siRNA sense strand
ugauacccauaaagaauga

SEQ ID NO: 2211896 - RNA, 19 nt, Homo sapiens
  misc_RNA (1)...(19): siRNA sense strand
ccacauucguguccaaguc

SEQ ID NO: 2211897 - RNA, 19 nt, Homo sapiens
  misc_RNA (1)...(19): siRNA sense strand
gcucugauggcuucuguga

SEQ ID NO: 2211898 - RNA, 19 nt, Homo sapiens
  misc_RNA (1)...(19): siRNA sense strand
ggcaagcacaagcucaaua

SEQ ID NO: 2211899 - RNA, 19 nt, Homo sapiens
  misc_RNA (1)...(19): siRNA sense strand
aauccgagcugccugagau

SEQ ID NO: 2211900 - RNA, 19 nt, Homo sapiens
  misc_RNA (1)...(19): siRNA sense strand
ccagcuggcucugucuuga

SEQ ID NO: 2211901 - RNA, 19 nt, Homo sapiens
  misc_RNA (1)...(19): siRNA sense strand
gccuggagauggugcuuau

SEQ ID NO: 2211902 - RNA, 19 nt, Homo sapiens
  misc_RNA (1)...(19): siRNA sense strand
gagcucguccgccaacaga

SEQ ID NO: 2211903 - RNA, 19 nt, Homo sapiens
  misc_RNA (1)...(19): siRNA sense strand
guaccacauucguguccaa

SEQ ID NO: 2211904 - RNA, 19 nt, Homo sapiens
  misc_RNA (1)...(19): siRNA sense strand
gacaucagcgaaaccaaga

SEQ ID NO: 2211905 - RNA, 19 nt, Homo sapiens
  misc_RNA (1)...(19): siRNA sense strand
ccauaaagaaugagaaagg

SEQ ID NO: 2211906 - RNA, 19 nt, Homo sapiens
  misc_RNA (1)...(19): siRNA sense strand
caucaccucccucuacuuc

SEQ ID NO: 2211907 - RNA, 19 nt, Homo sapiens
  misc_RNA (1)...(19): siRNA sense strand
ugaauuuccguaccacauu

SEQ ID NO: 2211908 - RNA, 19 nt, Homo sapiens
  misc_RNA (1)...(19): siRNA sense strand
cuacaucaccucccucuac

SEQ ID NO: 2211909 - RNA, 19 nt, Homo sapiens
  misc_RNA (1)...(19): siRNA sense strand
gugauacccauaaagaaug

SEQ ID NO: 2211910 - RNA, 19 nt, Homo sapiens
  misc_RNA (1)...(19): siRNA sense strand
gaggagaaggagacagaug

SEQ ID NO: 2211911 - RNA, 19 nt, Homo sapiens
  misc_RNA (1)...(19): siRNA sense strand
uggaugugauacccauaaa

SEQ ID NO: 2211912 - RNA, 19 nt, Homo sapiens
  misc_RNA (1)...(19): siRNA sense strand
guucuggugucuccuggau

SEQ ID NO: 2211913 - RNA, 19 nt, Homo sapiens
  misc_RNA (1)...(19): siRNA sense strand
gaugcacgcggugguguuu

SEQ ID NO: 2211914 - RNA, 19 nt, Homo sapiens
  misc_RNA (1)...(19): siRNA sense strand
ccauuugccuccacuacgu

SEQ ID NO: 2211915 - RNA, 19 nt, Homo sapiens
  misc_RNA (1)...(19): siRNA sense strand
ucuggugucuccuggaugu

SEQ ID NO: 2211916 - RNA, 19 nt, Homo sapiens
  misc_RNA (1)...(19): siRNA sense strand
ggcgggagcaggugguaaa

SEQ ID NO: 2211917 - RNA, 19 nt, Homo sapiens
  misc_RNA (1)...(19): siRNA sense strand
ccugcaggcccucuacuuu

SEQ ID NO: 2211918 - RNA, 19 nt, Homo sapiens
  misc_RNA (1)...(19): siRNA sense strand
gggcccaucugcugaagac

SEQ ID NO: 2211919 - RNA, 19 nt, Homo sapiens
  misc_RNA (1)...(19): siRNA sense strand
gugcugaauuuccguacca

SEQ ID NO: 2211920 - RNA, 19 nt, Homo sapiens
  misc_RNA (1)...(19): siRNA sense strand
cacaaggacaucagcgaaa

SEQ ID NO: 2211921 - RNA, 19 nt, Homo sapiens
  misc_RNA (1)...(19): siRNA sense strand
ugugauacccauaaagaau

SEQ ID NO: 2211922 - RNA, 19 nt, Homo sapiens
  misc_RNA (1)...(19): siRNA sense strand
acacggacaccgagaagau

SEQ ID NO: 2211923 - RNA, 19 nt, Homo sapiens
  misc_RNA (1)...(19): siRNA sense strand
ccaguggacccaggaagaa

SEQ ID NO: 2211924 - RNA, 19 nt, Homo sapiens
  misc_RNA (1)...(19): siRNA sense strand
ccugggcggugaacaaugg

SEQ ID NO: 2211925 - RNA, 19 nt, Homo sapiens
  misc_RNA (1)...(19): siRNA sense strand
uugacauugugcugaauuu

SEQ ID NO: 2211926 - RNA, 19 nt, Homo sapiens
  misc_RNA (1)...(19): siRNA sense strand
gaccuccaccucagacuca

SEQ ID NO: 2211927 - RNA, 19 nt, Homo sapiens
  misc_RNA (1)...(19): siRNA sense strand
acacagacacacuggacaa

SEQ ID NO: 2211928 - RNA, 19 nt, Homo sapiens
  misc_RNA (1)...(19): siRNA sense strand
ugaaggggcugacguacug

SEQ ID NO: 2211929 - RNA, 19 nt, Homo sapiens
  misc_RNA (1)...(19): siRNA sense strand
caacacggacaccgagaag

SEQ ID NO: 2211930 - RNA, 19 nt, Homo sapiens
  misc_RNA (1)...(19): siRNA sense strand
ugcaggcccucuacuuugu

SEQ ID NO: 2211931 - RNA, 19 nt, Homo sapiens
  misc_RNA (1)...(19): siRNA sense strand
cagacacacuggacaagcu

SEQ ID NO: 2211932 - RNA, 19 nt, Homo sapiens
  misc_RNA (1)...(19): siRNA sense strand
gauccaaaggcuucaaugc

SEQ ID NO: 2211933 - RNA, 19 nt, Homo sapiens
  misc_RNA (1)...(19): siRNA sense strand
cggcgacaauacccuuaug

SEQ ID NO: 2211934 - RNA, 19 nt, Homo sapiens
  misc_RNA (1)...(19): siRNA sense strand
caaggucaacguguacuuc

SEQ ID NO: 2211935 - RNA, 19 nt, Homo sapiens
  misc_RNA (1)...(19): siRNA sense strand
cuggagauggugcuuauug

SEQ ID NO: 2211936 - RNA, 19 nt, Homo sapiens
  misc_RNA (1)...(19): siRNA sense strand
ggacgagcacaaggaguuc

SEQ ID NO: 2211937 - RNA, 19 nt, Homo sapiens
  misc_RNA (1)...(19): siRNA sense strand
ccaacacggacaccgagaa

SEQ ID NO: 2211938 - RNA, 19 nt, Homo sapiens
  misc_RNA (1)...(19): siRNA sense strand
ggucgccugcgucugguuu

SEQ ID NO: 2211939 - RNA, 19 nt, Homo sapiens
  misc_RNA (1)...(19): siRNA sense strand
cuucauccuugacauugug

SEQ ID NO: 2211940 - RNA, 19 nt, Homo sapiens
  misc_RNA (1)...(19): siRNA sense strand
acaaggacaucagcgaaac

SEQ ID NO: 2211941 - RNA, 19 nt, Homo sapiens
  misc_RNA (1)...(19): siRNA sense strand
cugcaggcccucuacuuug

SEQ ID NO: 2211942 - RNA, 19 nt, Homo sapiens
  misc_RNA (1)...(19): siRNA sense strand
gcgaggcaaggaacacaga

SEQ ID NO: 2211943 - RNA, 19 nt, Homo sapiens
  misc_RNA (1)...(19): siRNA sense strand
ucccugagcggcgacaaua

SEQ ID NO: 2211944 - RNA, 19 nt, Homo sapiens
  misc_RNA (1)...(19): siRNA sense strand
ggccaaugccgacgugaag

SEQ ID NO: 2211945 - RNA, 19 nt, Homo sapiens
  misc_RNA (1)...(19): siRNA sense strand
guggcucucuuccuagucu

SEQ ID NO: 2211946 - RNA, 19 nt, Homo sapiens
  misc_RNA (1)...(19): siRNA sense strand
caggguaguagauggcauu

SEQ ID NO: 2211947 - RNA, 19 nt, Homo sapiens
  misc_RNA (1)...(19): siRNA sense strand
uggaggagaaggagacaga

SEQ ID NO: 2211948 - RNA, 19 nt, Homo sapiens
  misc_RNA (1)...(19): siRNA sense strand
ccugguuccugcuggaugu

SEQ ID NO: 2211949 - RNA, 19 nt, Homo sapiens
  misc_RNA (1)...(19): siRNA sense strand
uggacgagcacaaggaguu

SEQ ID NO: 2211950 - RNA, 19 nt, Homo sapiens
  misc_RNA (1)...(19): siRNA sense strand
guggucuacugcucugaug

SEQ ID NO: 2211951 - RNA, 19 nt, Homo sapiens
  misc_RNA (1)...(19): siRNA sense strand
ggagguggcucucuuccua

SEQ ID NO: 2211952 - RNA, 19 nt, Homo sapiens
  misc_RNA (1)...(19): siRNA sense strand
gguaguagauggcauugaa

SEQ ID NO: 2211953 - RNA, 19 nt, Homo sapiens
  misc_RNA (1)...(19): siRNA sense strand
gcaagcacaagcucaauaa

SEQ ID NO: 2211954 - RNA, 19 nt, Homo sapiens
  misc_RNA (1)...(19): siRNA sense strand
aaacuugccugaguacaaa

SEQ ID NO: 2211955 - RNA, 19 nt, Homo sapiens
  misc_RNA (1)...(19): siRNA sense strand
gaacagcuccggccagagu

SEQ ID NO: 2211956 - RNA, 19 nt, Homo sapiens
  misc_RNA (1)...(19): siRNA sense strand
gaugugauacccauaaaga

SEQ ID NO: 2211957 - RNA, 19 nt, Homo sapiens
  misc_RNA (1)...(19): siRNA sense strand
aggcugagcugauccugua

SEQ ID NO: 2211958 - RNA, 19 nt, Homo sapiens
  misc_RNA (1)...(19): siRNA sense strand
aaaccaaacuugccugagu

SEQ ID NO: 2211959 - RNA, 19 nt, Homo sapiens
  misc_RNA (1)...(19): siRNA sense strand
caggagaccucugcucuga

SEQ ID NO: 2211960 - RNA, 19 nt, Homo sapiens
  misc_RNA (1)...(19): siRNA sense strand
gaacgugacggccaucauc

SEQ ID NO: 2211961 - RNA, 19 nt, Homo sapiens
  misc_RNA (1)...(19): siRNA sense strand
gcgcagacaucgccaugca

SEQ ID NO: 2211962 - RNA, 19 nt, Homo sapiens
  misc_RNA (1)...(19): siRNA sense strand
guucaaggcugagcugauc

SEQ ID NO: 2211963 - RNA, 19 nt, Homo sapiens
  misc_RNA (1)...(19): siRNA sense strand
caaacuugccugaguacaa

SEQ ID NO: 2211964 - RNA, 19 nt, Homo sapiens
  misc_RNA (1)...(19): siRNA sense strand
aaccaaacuugccugagua

SEQ ID NO: 2211965 - RNA, 19 nt, Homo sapiens
  misc_RNA (1)...(19): siRNA sense strand
gcucggaccagcccaaguu

SEQ ID NO: 2211966 - RNA, 19 nt, Homo sapiens
  misc_RNA (1)...(19): siRNA sense strand
ugauacccauaaagaauga

SEQ ID NO: 2211967 - RNA, 19 nt, Homo sapiens
  misc_RNA (1)...(19): siRNA sense strand
ccacauucguguccaaguc

SEQ ID NO: 2211968 - RNA, 19 nt, Homo sapiens
  misc_RNA (1)...(19): siRNA sense strand
gcucugauggcuucuguga

SEQ ID NO: 2211969 - RNA, 19 nt, Homo sapiens
  misc_RNA (1)...(19): siRNA sense strand
ggcaagcacaagcucaaua

SEQ ID NO: 2211970 - RNA, 19 nt, Homo sapiens
  misc_RNA (1)...(19): siRNA sense strand
aauccgagcugccugagau

SEQ ID NO: 2211971 - RNA, 19 nt, Homo sapiens
  misc_RNA (1)...(19): siRNA sense strand
ccagcuggcucugucuuga

SEQ ID NO: 2211972 - RNA, 19 nt, Homo sapiens
  misc_RNA (1)...(19): siRNA sense strand
gccuggagauggugcuuau

SEQ ID NO: 2211973 - RNA, 19 nt, Homo sapiens
  misc_RNA (1)...(19): siRNA sense strand
gagcucguccgccaacaga

SEQ ID NO: 2211974 - RNA, 19 nt, Homo sapiens
  misc_RNA (1)...(19): siRNA sense strand
guaccacauucguguccaa

SEQ ID NO: 2211975 - RNA, 19 nt, Homo sapiens
  misc_RNA (1)...(19): siRNA sense strand
gacaucagcgaaaccaaga

SEQ ID NO: 2211976 - RNA, 19 nt, Homo sapiens
  misc_RNA (1)...(19): siRNA sense strand
ccauaaagaaugagaaagg

SEQ ID NO: 2211977 - RNA, 19 nt, Homo sapiens
  misc_RNA (1)...(19): siRNA sense strand
caucaccucccucuacuuc

SEQ ID NO: 2211978 - RNA, 19 nt, Homo sapiens
  misc_RNA (1)...(19): siRNA sense strand
ugaauuuccguaccacauu

SEQ ID NO: 2211979 - RNA, 19 nt, Homo sapiens
  misc_RNA (1)...(19): siRNA sense strand
cuacaucaccucccucuac

SEQ ID NO: 2211980 - RNA, 19 nt, Homo sapiens
  misc_RNA (1)...(19): siRNA sense strand
gugauacccauaaagaaug

SEQ ID NO: 2211981 - RNA, 19 nt, Homo sapiens
  misc_RNA (1)...(19): siRNA sense strand
gaggagaaggagacagaug

SEQ ID NO: 2211982 - RNA, 19 nt, Homo sapiens
  misc_RNA (1)...(19): siRNA sense strand
uggaugugauacccauaaa

SEQ ID NO: 2211983 - RNA, 19 nt, Homo sapiens
  misc_RNA (1)...(19): siRNA sense strand
guucuggugucuccuggau

SEQ ID NO: 2211984 - RNA, 19 nt, Homo sapiens
  misc_RNA (1)...(19): siRNA sense strand
gaugcacgcggugguguuu

SEQ ID NO: 2211985 - RNA, 19 nt, Homo sapiens
  misc_RNA (1)...(19): siRNA sense strand
ccauuugccuccacuacgu

SEQ ID NO: 2211986 - RNA, 19 nt, Homo sapiens
  misc_RNA (1)...(19): siRNA sense strand
ucuggugucuccuggaugu

SEQ ID NO: 2211987 - RNA, 19 nt, Homo sapiens
  misc_RNA (1)...(19): siRNA sense strand
ggcgggagcaggugguaaa

SEQ ID NO: 2211988 - RNA, 19 nt, Homo sapiens
  misc_RNA (1)...(19): siRNA sense strand
ccugcaggcccucuacuuu

SEQ ID NO: 2211989 - RNA, 19 nt, Homo sapiens
  misc_RNA (1)...(19): siRNA sense strand
gggcccaucugcugaagac

SEQ ID NO: 2211990 - RNA, 19 nt, Homo sapiens
  misc_RNA (1)...(19): siRNA sense strand
gugcugaauuuccguacca

SEQ ID NO: 2211991 - RNA, 19 nt, Homo sapiens
  misc_RNA (1)...(19): siRNA sense strand
cacaaggacaucagcgaaa

SEQ ID NO: 2211992 - RNA, 19 nt, Homo sapiens
  misc_RNA (1)...(19): siRNA sense strand
ugugauacccauaaagaau

SEQ ID NO: 2211993 - RNA, 19 nt, Homo sapiens
  misc_RNA (1)...(19): siRNA sense strand
acacggacaccgagaagau

SEQ ID NO: 2211994 - RNA, 19 nt, Homo sapiens
  misc_RNA (1)...(19): siRNA sense strand
ccaguggacccaggaagaa

SEQ ID NO: 2211995 - RNA, 19 nt, Homo sapiens
  misc_RNA (1)...(19): siRNA sense strand
ccugggcggugaacaaugg

SEQ ID NO: 2211996 - RNA, 19 nt, Homo sapiens
  misc_RNA (1)...(19): siRNA sense strand
uugacauugugcugaauuu

SEQ ID NO: 2211997 - RNA, 19 nt, Homo sapiens
  misc_RNA (1)...(19): siRNA sense strand
gaccuccaccucagacuca

SEQ ID NO: 2211998 - RNA, 19 nt, Homo sapiens
  misc_RNA (1)...(19): siRNA sense strand
acacagacacacuggacaa

SEQ ID NO: 2211999 - RNA, 19 nt, Homo sapiens
  misc_RNA (1)...(19): siRNA sense strand
ugaaggggcugacguacug

SEQ ID NO: 2212000 - RNA, 19 nt, Homo sapiens
  misc_RNA (1)...(19): siRNA sense strand
caacacggacaccgagaag

SEQ ID NO: 2212001 - RNA, 19 nt, Homo sapiens
  misc_RNA (1)...(19): siRNA sense strand
ugcaggcccucuacuuugu

SEQ ID NO: 2212002 - RNA, 19 nt, Homo sapiens
  misc_RNA (1)...(19): siRNA sense strand
cagacacacuggacaagcu

SEQ ID NO: 2212003 - RNA, 19 nt, Homo sapiens
  misc_RNA (1)...(19): siRNA sense strand
gauccaaaggcuucaaugc

SEQ ID NO: 2212004 - RNA, 19 nt, Homo sapiens
  misc_RNA (1)...(19): siRNA sense strand
cggcgacaauacccuuaug

SEQ ID NO: 2212005 - RNA, 19 nt, Homo sapiens
  misc_RNA (1)...(19): siRNA sense strand
caaggucaacguguacuuc

SEQ ID NO: 2212006 - RNA, 19 nt, Homo sapiens
  misc_RNA (1)...(19): siRNA sense strand
cuggagauggugcuuauug

SEQ ID NO: 2212007 - RNA, 19 nt, Homo sapiens
  misc_RNA (1)...(19): siRNA sense strand
ggacgagcacaaggaguuc

SEQ ID NO: 2212008 - RNA, 19 nt, Homo sapiens
  misc_RNA (1)...(19): siRNA sense strand
ccaacacggacaccgagaa

SEQ ID NO: 2212009 - RNA, 19 nt, Homo sapiens
  misc_RNA (1)...(19): siRNA sense strand
ggucgccugcgucugguuu

SEQ ID NO: 2212010 - RNA, 19 nt, Homo sapiens
  misc_RNA (1)...(19): siRNA sense strand
cuucauccuugacauugug

SEQ ID NO: 2212011 - RNA, 19 nt, Homo sapiens
  misc_RNA (1)...(19): siRNA sense strand
acaaggacaucagcgaaac

SEQ ID NO: 2212012 - RNA, 19 nt, Homo sapiens
  misc_RNA (1)...(19): siRNA sense strand
cugcaggcccucuacuuug

SEQ ID NO: 2212013 - RNA, 19 nt, Homo sapiens
  misc_RNA (1)...(19): siRNA sense strand
gcgaggcaaggaacacaga

SEQ ID NO: 2212014 - RNA, 19 nt, Homo sapiens
  misc_RNA (1)...(19): siRNA sense strand
ucccugagcggcgacaaua

SEQ ID NO: 2212015 - RNA, 19 nt, Homo sapiens
  misc_RNA (1)...(19): siRNA sense strand
ggccaaugccgacgugaag

SEQ ID NO: 2212016 - RNA, 19 nt, Homo sapiens
  misc_RNA (1)...(19): siRNA sense strand
guggcucucuuccuagucu

SEQ ID NO: 2212017 - RNA, 19 nt, Homo sapiens
  misc_RNA (1)...(19): siRNA sense strand
caggguaguagauggcauu

SEQ ID NO: 2212018 - RNA, 19 nt, Homo sapiens
  misc_RNA (1)...(19): siRNA sense strand
uggaggagaaggagacaga

SEQ ID NO: 2212019 - RNA, 19 nt, Homo sapiens
  misc_RNA (1)...(19): siRNA sense strand
ccugguuccugcuggaugu

SEQ ID NO: 2212020 - RNA, 19 nt, Homo sapiens
  misc_RNA (1)...(19): siRNA sense strand
uggacgagcacaaggaguu

SEQ ID NO: 2212021 - RNA, 19 nt, Homo sapiens
  misc_RNA (1)...(19): siRNA sense strand
guggucuacugcucugaug

SEQ ID NO: 2212022 - RNA, 19 nt, Homo sapiens
  misc_RNA (1)...(19): siRNA sense strand
gcaaggagcugccauccaa

SEQ ID NO: 2212023 - RNA, 19 nt, Homo sapiens
  misc_RNA (1)...(19): siRNA sense strand
gcacagaggccaccaagaa

SEQ ID NO: 2212024 - RNA, 19 nt, Homo sapiens
  misc_RNA (1)...(19): siRNA sense strand
gcagagaacucggcacuug

SEQ ID NO: 2212025 - RNA, 19 nt, Homo sapiens
  misc_RNA (1)...(19): siRNA sense strand
ggagagugcuggagacaug

SEQ ID NO: 2212026 - RNA, 19 nt, Homo sapiens
  misc_RNA (1)...(19): siRNA sense strand
ggacacagagucuuaccua

SEQ ID NO: 2212027 - RNA, 19 nt, Homo sapiens
  misc_RNA (1)...(19): siRNA sense strand
ccaccaagcucccuuccaa

SEQ ID NO: 2212028 - RNA, 19 nt, Homo sapiens
  misc_RNA (1)...(19): siRNA sense strand
caugagaccuguccugaug

SEQ ID NO: 2212029 - RNA, 19 nt, Homo sapiens
  misc_RNA (1)...(19): siRNA sense strand
ggagggaagucaagaugga

SEQ ID NO: 2212030 - RNA, 19 nt, Homo sapiens
  misc_RNA (1)...(19): siRNA sense strand
gcaucaagcugaagaagag

SEQ ID NO: 2212031 - RNA, 19 nt, Homo sapiens
  misc_RNA (1)...(19): siRNA sense strand
gagaaggccuaccuaagca

SEQ ID NO: 2212032 - RNA, 19 nt, Homo sapiens
  misc_RNA (1)...(19): siRNA sense strand
ccaggcaacucauccaaga

SEQ ID NO: 2212033 - RNA, 19 nt, Homo sapiens
  misc_RNA (1)...(19): siRNA sense strand
gagccugucucaccaagga

SEQ ID NO: 2212034 - RNA, 19 nt, Homo sapiens
  misc_RNA (1)...(19): siRNA sense strand
ggagcugccucaccaaagu

SEQ ID NO: 2212035 - RNA, 19 nt, Homo sapiens
  misc_RNA (1)...(19): siRNA sense strand
gagaguguuugaccuggaa

SEQ ID NO: 2212036 - RNA, 19 nt, Homo sapiens
  misc_RNA (1)...(19): siRNA sense strand
caagcucccuuccaaguca

SEQ ID NO: 2212037 - RNA, 19 nt, Homo sapiens
  misc_RNA (1)...(19): siRNA sense strand
gaugcugagugcccuguuu

SEQ ID NO: 2212038 - RNA, 19 nt, Homo sapiens
  misc_RNA (1)...(19): siRNA sense strand
gcacaaacagccugaagca

SEQ ID NO: 2212039 - RNA, 19 nt, Homo sapiens
  misc_RNA (1)...(19): siRNA sense strand
ugaagggcauugaggagaa

SEQ ID NO: 2212040 - RNA, 19 nt, Homo sapiens
  misc_RNA (1)...(19): siRNA sense strand
gaggagaaggccuaccuaa

SEQ ID NO: 2212041 - RNA, 19 nt, Homo sapiens
  misc_RNA (1)...(19): siRNA sense strand
ggagaaggccuaccuaagc

SEQ ID NO: 2212042 - RNA, 19 nt, Homo sapiens
  misc_RNA (1)...(19): siRNA sense strand
gaaaagcaagcuccaaauu

SEQ ID NO: 2212043 - RNA, 19 nt, Homo sapiens
  misc_RNA (1)...(19): siRNA sense strand
gcaguggccuugggcacaa

SEQ ID NO: 2212044 - RNA, 19 nt, Homo sapiens
  misc_RNA (1)...(19): siRNA sense strand
gcagagacagggccagaug

SEQ ID NO: 2212045 - RNA, 19 nt, Homo sapiens
  misc_RNA (1)...(19): siRNA sense strand
ugaagaagagaguguuuga

SEQ ID NO: 2212046 - RNA, 19 nt, Homo sapiens
  misc_RNA (1)...(19): siRNA sense strand
acagcuaacucuggaggua

SEQ ID NO: 2212047 - RNA, 19 nt, Homo sapiens
  misc_RNA (1)...(19): siRNA sense strand
ggucucaaguuucuaaagc

SEQ ID NO: 2212048 - RNA, 19 nt, Homo sapiens
  misc_RNA (1)...(19): siRNA sense strand
gggcuccgcuagucaccaa

SEQ ID NO: 2212049 - RNA, 19 nt, Homo sapiens
  misc_RNA (1)...(19): siRNA sense strand
cuucugcccucuccagcua

SEQ ID NO: 2212050 - RNA, 19 nt, Homo sapiens
  misc_RNA (1)...(19): siRNA sense strand
acgacucgcuguccucuug

SEQ ID NO: 2212051 - RNA, 19 nt, Homo sapiens
  misc_RNA (1)...(19): siRNA sense strand
gccgagagccucaacaucu

SEQ ID NO: 2212052 - RNA, 19 nt, Homo sapiens
  misc_RNA (1)...(19): siRNA sense strand
caaggugaccguucuggau

SEQ ID NO: 2212053 - RNA, 19 nt, Homo sapiens
  misc_RNA (1)...(19): siRNA sense strand
ggaccuggagccugucuca

SEQ ID NO: 2212054 - RNA, 19 nt, Homo sapiens
  misc_RNA (1)...(19): siRNA sense strand
gcugaagaagagaguguuu

SEQ ID NO: 2212055 - RNA, 19 nt, Homo sapiens
  misc_RNA (1)...(19): siRNA sense strand
aggcguugcugaaccagaa

SEQ ID NO: 2212056 - RNA, 19 nt, Homo sapiens
  misc_RNA (1)...(19): siRNA sense strand
ccucggagucucucaguga

SEQ ID NO: 2212057 - RNA, 19 nt, Homo sapiens
  misc_RNA (1)...(19): siRNA sense strand
acucagccaucgaggagaa

SEQ ID NO: 2212058 - RNA, 19 nt, Homo sapiens
  misc_RNA (1)...(19): siRNA sense strand
gcugagagcccuggaagag

SEQ ID NO: 2212059 - RNA, 19 nt, Homo sapiens
  misc_RNA (1)...(19): siRNA sense strand
acacagagucuuaccuaca

SEQ ID NO: 2212060 - RNA, 19 nt, Homo sapiens
  misc_RNA (1)...(19): siRNA sense strand
guccuugccucccagaauc

SEQ ID NO: 2212061 - RNA, 19 nt, Homo sapiens
  misc_RNA (1)...(19): siRNA sense strand
cacagagucuuaccuacag

SEQ ID NO: 2212062 - RNA, 19 nt, Homo sapiens
  misc_RNA (1)...(19): siRNA sense strand
ccaaaggccuccccaaguc

SEQ ID NO: 2212063 - RNA, 19 nt, Homo sapiens
  misc_RNA (1)...(19): siRNA sense strand
gugcccaccucacacuuca

SEQ ID NO: 2212064 - RNA, 19 nt, Homo sapiens
  misc_RNA (1)...(19): siRNA sense strand
aaguggagcuggccaagag

SEQ ID NO: 2212065 - RNA, 19 nt, Homo sapiens
  misc_RNA (1)...(19): siRNA sense strand
gaacauucuggaccuuucu

SEQ ID NO: 2212066 - RNA, 19 nt, Homo sapiens
  misc_RNA (1)...(19): siRNA sense strand
uugaggacacagagucuua

SEQ ID NO: 2212067 - RNA, 19 nt, Homo sapiens
  misc_RNA (1)...(19): siRNA sense strand
gaacuggaccuuccccaau

SEQ ID NO: 2212068 - RNA, 19 nt, Homo sapiens
  misc_RNA (1)...(19): siRNA sense strand
ugagaccuguccugaugau

SEQ ID NO: 2212069 - RNA, 19 nt, Homo sapiens
  misc_RNA (1)...(19): siRNA sense strand
gaagggcauugaggagaac

SEQ ID NO: 2212070 - RNA, 19 nt, Homo sapiens
  misc_RNA (1)...(19): siRNA sense strand
aaaaccagcgggagacuua

SEQ ID NO: 2212071 - RNA, 19 nt, Homo sapiens
  misc_RNA (1)...(19): siRNA sense strand
gcugcaggcccacucaaug

SEQ ID NO: 2212072 - RNA, 19 nt, Homo sapiens
  misc_RNA (1)...(19): siRNA sense strand
aagagaagaguuuggacaa

SEQ ID NO: 2212073 - RNA, 19 nt, Homo sapiens
  misc_RNA (1)...(19): siRNA sense strand
ccagcugguucggccuuaa

SEQ ID NO: 2212074 - RNA, 19 nt, Homo sapiens
  misc_RNA (1)...(19): siRNA sense strand
gccagcugguucggccuua

SEQ ID NO: 2212075 - RNA, 19 nt, Homo sapiens
  misc_RNA (1)...(19): siRNA sense strand
ccaagucaccaaccaaggu

SEQ ID NO: 2212076 - RNA, 19 nt, Homo sapiens
  misc_RNA (1)...(19): siRNA sense strand
ugggcagacugugguagua

SEQ ID NO: 2212077 - RNA, 19 nt, Homo sapiens
  misc_RNA (1)...(19): siRNA sense strand
ccucggacccucucaugug

SEQ ID NO: 2212078 - RNA, 19 nt, Homo sapiens
  misc_RNA (1)...(19): siRNA sense strand
agccuucccugcacugcua

SEQ ID NO: 2212079 - RNA, 19 nt, Homo sapiens
  misc_RNA (1)...(19): siRNA sense strand
cggaaaaccuccuggaaag

SEQ ID NO: 2212080 - RNA, 19 nt, Homo sapiens
  misc_RNA (1)...(19): siRNA sense strand
cagaggccaccaagaacaa

SEQ ID NO: 2212081 - RNA, 19 nt, Homo sapiens
  misc_RNA (1)...(19): siRNA sense strand
cggaagaaggcccagauuc

SEQ ID NO: 2212082 - RNA, 19 nt, Homo sapiens
  misc_RNA (1)...(19): siRNA sense strand
gcggaaaaccuccuggaaa

SEQ ID NO: 2212083 - RNA, 19 nt, Homo sapiens
  misc_RNA (1)...(19): siRNA sense strand
gguucggccuuaagaagag

SEQ ID NO: 2212084 - RNA, 19 nt, Homo sapiens
  misc_RNA (1)...(19): siRNA sense strand
caggcaaggugaccguucu

SEQ ID NO: 2212085 - RNA, 19 nt, Homo sapiens
  misc_RNA (1)...(19): siRNA sense strand
gagaggagugcaucaagcu

SEQ ID NO: 2212086 - RNA, 19 nt, Homo sapiens
  misc_RNA (1)...(19): siRNA sense strand
uccagccggugucuucuga

SEQ ID NO: 2212087 - RNA, 19 nt, Homo sapiens
  misc_RNA (1)...(19): siRNA sense strand
ucgaggagaaggugaugaa

SEQ ID NO: 2212088 - RNA, 19 nt, Homo sapiens
  misc_RNA (1)...(19): siRNA sense strand
agagaagaguuuggacaag

SEQ ID NO: 2212089 - RNA, 19 nt, Homo sapiens
  misc_RNA (1)...(19): siRNA sense strand
aguggugucucccugcuau

SEQ ID NO: 2212090 - RNA, 19 nt, Homo sapiens
  misc_RNA (1)...(19): siRNA sense strand
caucucaggugaaaagcaa

SEQ ID NO: 2212091 - RNA, 19 nt, Homo sapiens
  misc_RNA (1)...(19): siRNA sense strand
caucaacggcgagcugugu

SEQ ID NO: 2212092 - RNA, 19 nt, Homo sapiens
  misc_RNA (1)...(19): siRNA sense strand
gagggaagucaagauggaa

SEQ ID NO: 2212093 - RNA, 19 nt, Homo sapiens
  misc_RNA (1)...(19): siRNA sense strand
aaaagcaagcuccaaauug

SEQ ID NO: 2212094 - RNA, 19 nt, Homo sapiens
  misc_RNA (1)...(19): siRNA sense strand
cuguccagcuggccaagaa

SEQ ID NO: 2212095 - RNA, 19 nt, Homo sapiens
  misc_RNA (1)...(19): siRNA sense strand
ugaaagaacuccagauuua

SEQ ID NO: 2212096 - RNA, 19 nt, Homo sapiens
  misc_RNA (1)...(19): siRNA sense strand
gaagacagcacuaaagaua

SEQ ID NO: 2212097 - RNA, 19 nt, Homo sapiens
  misc_RNA (1)...(19): siRNA sense strand
gaacaaaugucuggcauga

SEQ ID NO: 2212098 - RNA, 19 nt, Homo sapiens
  misc_RNA (1)...(19): siRNA sense strand
gaucuuggcugaaauagaa

SEQ ID NO: 2212099 - RNA, 19 nt, Homo sapiens
  misc_RNA (1)...(19): siRNA sense strand
gagcacagauccaguaauu

SEQ ID NO: 2212100 - RNA, 19 nt, Homo sapiens
  misc_RNA (1)...(19): siRNA sense strand
gcacagauccaguaauuaa

SEQ ID NO: 2212101 - RNA, 19 nt, Homo sapiens
  misc_RNA (1)...(19): siRNA sense strand
gcaauuauuucuucucuga

SEQ ID NO: 2212102 - RNA, 19 nt, Homo sapiens
  misc_RNA (1)...(19): siRNA sense strand
gcaguacccuccucucaua

SEQ ID NO: 2212103 - RNA, 19 nt, Homo sapiens
  misc_RNA (1)...(19): siRNA sense strand
gaccaaaucugagugauaa

SEQ ID NO: 2212104 - RNA, 19 nt, Homo sapiens
  misc_RNA (1)...(19): siRNA sense strand
gauaucaucucuaggauug

SEQ ID NO: 2212105 - RNA, 19 nt, Homo sapiens
  misc_RNA (1)...(19): siRNA sense strand
gagaagacaucuaugcauu

SEQ ID NO: 2212106 - RNA, 19 nt, Homo sapiens
  misc_RNA (1)...(19): siRNA sense strand
gaaggaagaggaguuauua

SEQ ID NO: 2212107 - RNA, 19 nt, Homo sapiens
  misc_RNA (1)...(19): siRNA sense strand
caaaugaucuuggcugaaa

SEQ ID NO: 2212108 - RNA, 19 nt, Homo sapiens
  misc_RNA (1)...(19): siRNA sense strand
gggcaaaggugaaauuaga

SEQ ID NO: 2212109 - RNA, 19 nt, Homo sapiens
  misc_RNA (1)...(19): siRNA sense strand
gcaagagggucaagaacaa

SEQ ID NO: 2212110 - RNA, 19 nt, Homo sapiens
  misc_RNA (1)...(19): siRNA sense strand
uuucagaagucaccaauua

SEQ ID NO: 2212111 - RNA, 19 nt, Homo sapiens
  misc_RNA (1)...(19): siRNA sense strand
gaacauuucagucccauuu

SEQ ID NO: 2212112 - RNA, 19 nt, Homo sapiens
  misc_RNA (1)...(19): siRNA sense strand
caucacagauuucaccuuu

SEQ ID NO: 2212113 - RNA, 19 nt, Homo sapiens
  misc_RNA (1)...(19): siRNA sense strand
ugagaacaaugucaagaua

SEQ ID NO: 2212114 - RNA, 19 nt, Homo sapiens
  misc_RNA (1)...(19): siRNA sense strand
gacaagcccuggauacuga

SEQ ID NO: 2212115 - RNA, 19 nt, Homo sapiens
  misc_RNA (1)...(19): siRNA sense strand
gcugagaaguccucuauau

SEQ ID NO: 2212116 - RNA, 19 nt, Homo sapiens
  misc_RNA (1)...(19): siRNA sense strand
ggaagaguguauugaaaga

SEQ ID NO: 2212117 - RNA, 19 nt, Homo sapiens
  misc_RNA (1)...(19): siRNA sense strand
gaacaguuauugaaguuag

SEQ ID NO: 2212118 - RNA, 19 nt, Homo sapiens
  misc_RNA (1)...(19): siRNA sense strand
uaaaggauaucaucucuag

SEQ ID NO: 2212119 - RNA, 19 nt, Homo sapiens
  misc_RNA (1)...(19): siRNA sense strand
gaaggaagcgaaacauuug

SEQ ID NO: 2212120 - RNA, 19 nt, Homo sapiens
  misc_RNA (1)...(19): siRNA sense strand
aaacaucucucuuuaacug

SEQ ID NO: 2212121 - RNA, 19 nt, Homo sapiens
  misc_RNA (1)...(19): siRNA sense strand
uuaagaagauucccaaaug

SEQ ID NO: 2212122 - RNA, 19 nt, Homo sapiens
  misc_RNA (1)...(19): siRNA sense strand
gaagaaccugauacuauua

SEQ ID NO: 2212123 - RNA, 19 nt, Homo sapiens
  misc_RNA (1)...(19): siRNA sense strand
agaagaaccugauacuauu

SEQ ID NO: 2212124 - RNA, 19 nt, Homo sapiens
  misc_RNA (1)...(19): siRNA sense strand
gaagagagccccaaaauau

SEQ ID NO: 2212125 - RNA, 19 nt, Homo sapiens
  misc_RNA (1)...(19): siRNA sense strand
ggacuccacuauuucauau

SEQ ID NO: 2212126 - RNA, 19 nt, Homo sapiens
  misc_RNA (1)...(19): siRNA sense strand
uaagaagauucccaaauga

SEQ ID NO: 2212127 - RNA, 19 nt, Homo sapiens
  misc_RNA (1)...(19): siRNA sense strand
uagagaaccuuccugauga

SEQ ID NO: 2212128 - RNA, 19 nt, Homo sapiens
  misc_RNA (1)...(19): siRNA sense strand
gaagauaagugagaauugg

SEQ ID NO: 2212129 - RNA, 19 nt, Homo sapiens
  misc_RNA (1)...(19): siRNA sense strand
uaaagagacuucagaaucu

SEQ ID NO: 2212130 - RNA, 19 nt, Homo sapiens
  misc_RNA (1)...(19): siRNA sense strand
gaaggaaacacaaccuaaa

SEQ ID NO: 2212131 - RNA, 19 nt, Homo sapiens
  misc_RNA (1)...(19): siRNA sense strand
gaagacaucuaugcauuca

SEQ ID NO: 2212132 - RNA, 19 nt, Homo sapiens
  misc_RNA (1)...(19): siRNA sense strand
gaaagaacuccagauuuaa

SEQ ID NO: 2212133 - RNA, 19 nt, Homo sapiens
  misc_RNA (1)...(19): siRNA sense strand
caccauaucucuucaggaa

SEQ ID NO: 2212134 - RNA, 19 nt, Homo sapiens
  misc_RNA (1)...(19): siRNA sense strand
agaguaaccucgaagaauu

SEQ ID NO: 2212135 - RNA, 19 nt, Homo sapiens
  misc_RNA (1)...(19): siRNA sense strand
caagaaacccaaaguaaug

SEQ ID NO: 2212136 - RNA, 19 nt, Homo sapiens
  misc_RNA (1)...(19): siRNA sense strand
agaggaaucugaagacauu

SEQ ID NO: 2212137 - RNA, 19 nt, Homo sapiens
  misc_RNA (1)...(19): siRNA sense strand
ggagcucucucugaagaua

SEQ ID NO: 2212138 - RNA, 19 nt, Homo sapiens
  misc_RNA (1)...(19): siRNA sense strand
ugggcgagcuucuucauua

SEQ ID NO: 2212139 - RNA, 19 nt, Homo sapiens
  misc_RNA (1)...(19): siRNA sense strand
guacagcggucauaugaag

SEQ ID NO: 2212140 - RNA, 19 nt, Homo sapiens
  misc_RNA (1)...(19): siRNA sense strand
ugaaagagauauuccaaca

SEQ ID NO: 2212141 - RNA, 19 nt, Homo sapiens
  misc_RNA (1)...(19): siRNA sense strand
gauaaugacucgcuauacu

SEQ ID NO: 2212142 - RNA, 19 nt, Homo sapiens
  misc_RNA (1)...(19): siRNA sense strand
ccuggaaucuggacccuua

SEQ ID NO: 2212143 - RNA, 19 nt, Homo sapiens
  misc_RNA (1)...(19): siRNA sense strand
cauaauggcuuuccuaaaa

SEQ ID NO: 2212144 - RNA, 19 nt, Homo sapiens
  misc_RNA (1)...(19): siRNA sense strand
ccaaacaagucaagucuca

SEQ ID NO: 2212145 - RNA, 19 nt, Homo sapiens
  misc_RNA (1)...(19): siRNA sense strand
gugaucaacuugcaacaaa

SEQ ID NO: 2212146 - RNA, 19 nt, Homo sapiens
  misc_RNA (1)...(19): siRNA sense strand
ggaaugauguuuugucuga

SEQ ID NO: 2212147 - RNA, 19 nt, Homo sapiens
  misc_RNA (1)...(19): siRNA sense strand
uagaugaaguccaaagaaa

SEQ ID NO: 2212148 - RNA, 19 nt, Homo sapiens
  misc_RNA (1)...(19): siRNA sense strand
gaucaacuugcaacaaaua

SEQ ID NO: 2212149 - RNA, 19 nt, Homo sapiens
  misc_RNA (1)...(19): siRNA sense strand
gaagauauuuccgaagaca

SEQ ID NO: 2212150 - RNA, 19 nt, Homo sapiens
  misc_RNA (1)...(19): siRNA sense strand
ggaccaaaucugagugaua

SEQ ID NO: 2212151 - RNA, 19 nt, Homo sapiens
  misc_RNA (1)...(19): siRNA sense strand
caagaacaguuauugaagu

SEQ ID NO: 2212152 - RNA, 19 nt, Homo sapiens
  misc_RNA (1)...(19): siRNA sense strand
caacagagccagaaacagu

SEQ ID NO: 2212153 - RNA, 19 nt, Homo sapiens
  misc_RNA (1)...(19): siRNA sense strand
aaacgugaaucuccauuug

SEQ ID NO: 2212154 - RNA, 19 nt, Homo sapiens
  misc_RNA (1)...(19): siRNA sense strand
gcagcugagugaaauaaug

SEQ ID NO: 2212155 - RNA, 19 nt, Homo sapiens
  misc_RNA (1)...(19): siRNA sense strand
gaagaagaaccugauacua

SEQ ID NO: 2212156 - RNA, 19 nt, Homo sapiens
  misc_RNA (1)...(19): siRNA sense strand
gaacaaugugcaucggaua

SEQ ID NO: 2212157 - RNA, 19 nt, Homo sapiens
  misc_RNA (1)...(19): siRNA sense strand
cuaggacucucauaauuga

SEQ ID NO: 2212158 - RNA, 19 nt, Homo sapiens
  misc_RNA (1)...(19): siRNA sense strand
gcagaaacuucaagaugca

SEQ ID NO: 2212159 - RNA, 19 nt, Homo sapiens
  misc_RNA (1)...(19): siRNA sense strand
gagcagacuugaugacuac

SEQ ID NO: 2212160 - RNA, 19 nt, Homo sapiens
  misc_RNA (1)...(19): siRNA sense strand
aaagagauauuccaacagu

SEQ ID NO: 2212161 - RNA, 19 nt, Homo sapiens
  misc_RNA (1)...(19): siRNA sense strand
ggaaagaaacaccauaucu

SEQ ID NO: 2212162 - RNA, 19 nt, Homo sapiens
  misc_RNA (1)...(19): siRNA sense strand
gagaggacauugauaugca

SEQ ID NO: 2212163 - RNA, 19 nt, Homo sapiens
  misc_RNA (1)...(19): siRNA sense strand
ggcuaggacucucauaauu

SEQ ID NO: 2212164 - RNA, 19 nt, Homo sapiens
  misc_RNA (1)...(19): siRNA sense strand
ggagcacuaugagaagaua

SEQ ID NO: 2212165 - RNA, 19 nt, Homo sapiens
  misc_RNA (1)...(19): siRNA sense strand
gaaaacaucucucuuuaac

SEQ ID NO: 2212166 - RNA, 19 nt, Homo sapiens
  misc_RNA (1)...(19): siRNA sense strand
ggccaaaccuagucaauac

SEQ ID NO: 2212167 - RNA, 19 nt, Homo sapiens
  misc_RNA (1)...(19): siRNA sense strand
gaggccaucuggaauguug

SEQ ID NO: 2212168 - RNA, 19 nt, Homo sapiens
  misc_RNA (1)...(19): siRNA sense strand
uaagcaggcucaggaauug

SEQ ID NO: 2212169 - RNA, 19 nt, Homo sapiens
  misc_RNA (1)...(19): siRNA sense strand
ggacagaugaggcagauuc

SEQ ID NO: 2212170 - RNA, 19 nt, Homo sapiens
  misc_RNA (1)...(19): siRNA sense strand
gauagacaaugacccugaa

SEQ ID NO: 2212171 - RNA, 19 nt, Homo sapiens
  misc_RNA (1)...(19): siRNA sense strand
ggacaaagagggcaaaggu

SEQ ID NO: 2212172 - RNA, 19 nt, Homo sapiens
  misc_RNA (1)...(19): siRNA sense strand
gaaugucucccuuacagaa

SEQ ID NO: 2212173 - RNA, 19 nt, Homo sapiens
  misc_RNA (1)...(19): siRNA sense strand
gaaacaccauaucucuuca

SEQ ID NO: 2212174 - RNA, 19 nt, Homo sapiens
  misc_RNA (1)...(19): siRNA sense strand
gaaagaaacaccauaucuc

SEQ ID NO: 2212175 - RNA, 19 nt, Homo sapiens
  misc_RNA (1)...(19): siRNA sense strand
gaccaaggacucugggaua

SEQ ID NO: 2212176 - RNA, 19 nt, Homo sapiens
  misc_RNA (1)...(19): siRNA sense strand
ucuaauggauguugaugaa

SEQ ID NO: 2212177 - RNA, 19 nt, Homo sapiens
  misc_RNA (1)...(19): siRNA sense strand
ugagaugacucuaauggau

SEQ ID NO: 2212178 - RNA, 19 nt, Homo sapiens
  misc_RNA (1)...(19): siRNA sense strand
gcaagaaauuuaggcaaca

SEQ ID NO: 2212179 - RNA, 19 nt, Homo sapiens
  misc_RNA (1)...(19): siRNA sense strand
agaacaaguuggagagaaa

SEQ ID NO: 2212180 - RNA, 19 nt, Homo sapiens
  misc_RNA (1)...(19): siRNA sense strand
ugaguaugcuaaaugauga

SEQ ID NO: 2212181 - RNA, 19 nt, Homo sapiens
  misc_RNA (1)...(19): siRNA sense strand
caacaaauacaaagguuuc

SEQ ID NO: 2212182 - RNA, 19 nt, Homo sapiens
  misc_RNA (1)...(19): siRNA sense strand
ccaggaaccuccacaugau

SEQ ID NO: 2212183 - RNA, 19 nt, Homo sapiens
  misc_RNA (1)...(19): siRNA sense strand
aagaagaaccugauacuau

SEQ ID NO: 2212184 - RNA, 19 nt, Homo sapiens
  misc_RNA (1)...(19): siRNA sense strand
acuaagaaguuccaaaugu

SEQ ID NO: 2212185 - RNA, 19 nt, Homo sapiens
  misc_RNA (1)...(19): siRNA sense strand
guggaagaguguauugaaa

SEQ ID NO: 2212186 - RNA, 19 nt, Homo sapiens
  misc_RNA (1)...(19): siRNA sense strand
ugaaggagcacuaugagaa

SEQ ID NO: 2212187 - RNA, 19 nt, Homo sapiens
  misc_RNA (1)...(19): siRNA sense strand
acaaaugucuggcaugagu

SEQ ID NO: 2212188 - RNA, 19 nt, Homo sapiens
  misc_RNA (1)...(19): siRNA sense strand
gaacuccagauuuaacuga

SEQ ID NO: 2212189 - RNA, 19 nt, Homo sapiens
  misc_RNA (1)...(19): siRNA sense strand
ccaaaucugagugauaaua

SEQ ID NO: 2212190 - RNA, 19 nt, Homo sapiens
  misc_RNA (1)...(19): siRNA sense strand
caaguuccuuucaccacua

SEQ ID NO: 2212191 - RNA, 19 nt, Homo sapiens
  misc_RNA (1)...(19): siRNA sense strand
caaguccaguggucccaua

SEQ ID NO: 2212192 - RNA, 19 nt, Homo sapiens
  misc_RNA (1)...(19): siRNA sense strand
gcaaagaggacaggaggaa

SEQ ID NO: 2212193 - RNA, 19 nt, Homo sapiens
  misc_RNA (1)...(19): siRNA sense strand
ucaguaugauccaauuuga

SEQ ID NO: 2212194 - RNA, 19 nt, Homo sapiens
  misc_RNA (1)...(19): siRNA sense strand
ccaagaaacccaaaguaau

SEQ ID NO: 2212195 - RNA, 19 nt, Homo sapiens
  misc_RNA (1)...(19): siRNA sense strand
caacugagcuggacagaug

SEQ ID NO: 2212196 - RNA, 19 nt, Homo sapiens
  misc_RNA (1)...(19): siRNA sense strand
ggacagauguucucacaga

SEQ ID NO: 2212197 - RNA, 19 nt, Homo sapiens
  misc_RNA (1)...(19): siRNA sense strand
ccacagucaucacuaguug

SEQ ID NO: 2212198 - RNA, 19 nt, Homo sapiens
  misc_RNA (1)...(19): siRNA sense strand
gggccaauguuccaccuuu

SEQ ID NO: 2212199 - RNA, 19 nt, Homo sapiens
  misc_RNA (1)...(19): siRNA sense strand
ggccaauguuccaccuuua

SEQ ID NO: 2212200 - RNA, 19 nt, Homo sapiens
  misc_RNA (1)...(19): siRNA sense strand
gggagcagcaucucacaga

SEQ ID NO: 2212201 - RNA, 19 nt, Homo sapiens
  misc_RNA (1)...(19): siRNA sense strand
ccaauguuccaccuuuauu

SEQ ID NO: 2212202 - RNA, 19 nt, Homo sapiens
  misc_RNA (1)...(19): siRNA sense strand
ucaaggccacaccacauuu

SEQ ID NO: 2212203 - RNA, 19 nt, Homo sapiens
  misc_RNA (1)...(19): siRNA sense strand
gagcuacacaugccacagu

SEQ ID NO: 2212204 - RNA, 19 nt, Homo sapiens
  misc_RNA (1)...(19): siRNA sense strand
gcucaaggccacaccacau

SEQ ID NO: 2212205 - RNA, 19 nt, Homo sapiens
  misc_RNA (1)...(19): siRNA sense strand
cuggacagauguucucaca

SEQ ID NO: 2212206 - RNA, 19 nt, Homo sapiens
  misc_RNA (1)...(19): siRNA sense strand
gccaauguuccaccuuuau

SEQ ID NO: 2212207 - RNA, 19 nt, Homo sapiens
  misc_RNA (1)...(19): siRNA sense strand
caaggccacaccacauuuc

SEQ ID NO: 2212208 - RNA, 19 nt, Homo sapiens
  misc_RNA (1)...(19): siRNA sense strand
gccacagucaucacuaguu

SEQ ID NO: 2212209 - RNA, 19 nt, Homo sapiens
  misc_RNA (1)...(19): siRNA sense strand
caucacuaguugcgagagu

SEQ ID NO: 2212210 - RNA, 19 nt, Homo sapiens
  misc_RNA (1)...(19): siRNA sense strand
acagagaagauacuuggau

SEQ ID NO: 2212211 - RNA, 19 nt, Homo sapiens
  misc_RNA (1)...(19): siRNA sense strand
ucucacagagcuacacaug

SEQ ID NO: 2212212 - RNA, 19 nt, Homo sapiens
  misc_RNA (1)...(19): siRNA sense strand
gagcuggacagauguucuc

SEQ ID NO: 2212213 - RNA, 19 nt, Homo sapiens
  misc_RNA (1)...(19): siRNA sense strand
gaucugcaguccauuaaua

SEQ ID NO: 2212214 - RNA, 19 nt, Homo sapiens
  misc_RNA (1)...(19): siRNA sense strand
gccaauagcuacucaacua

SEQ ID NO: 2212215 - RNA, 19 nt, Homo sapiens
  misc_RNA (1)...(19): siRNA sense strand
gaacagaguggcagcagua

SEQ ID NO: 2212216 - RNA, 19 nt, Homo sapiens
  misc_RNA (1)...(19): siRNA sense strand
ggaugguucuggucaaaua

SEQ ID NO: 2212217 - RNA, 19 nt, Homo sapiens
  misc_RNA (1)...(19): siRNA sense strand
gcacaaacguacacacaca

SEQ ID NO: 2212218 - RNA, 19 nt, Homo sapiens
  misc_RNA (1)...(19): siRNA sense strand
gagaggccauuuaugugua

SEQ ID NO: 2212219 - RNA, 19 nt, Homo sapiens
  misc_RNA (1)...(19): siRNA sense strand
gaagggaggcccaggugua

SEQ ID NO: 2212220 - RNA, 19 nt, Homo sapiens
  misc_RNA (1)...(19): siRNA sense strand
gggcagaccuuuacaacuc

SEQ ID NO: 2212221 - RNA, 19 nt, Homo sapiens
  misc_RNA (1)...(19): siRNA sense strand
ggagugaugccuaauauuc

SEQ ID NO: 2212222 - RNA, 19 nt, Homo sapiens
  misc_RNA (1)...(19): siRNA sense strand
uccaaggccuggcuaauaa

SEQ ID NO: 2212223 - RNA, 19 nt, Homo sapiens
  misc_RNA (1)...(19): siRNA sense strand
caacaucauugcugcuaug

SEQ ID NO: 2212224 - RNA, 19 nt, Homo sapiens
  misc_RNA (1)...(19): siRNA sense strand
ggacagacucaguauguga

SEQ ID NO: 2212225 - RNA, 19 nt, Homo sapiens
  misc_RNA (1)...(19): siRNA sense strand
acacacaggugagaagaaa

SEQ ID NO: 2212226 - RNA, 19 nt, Homo sapiens
  misc_RNA (1)...(19): siRNA sense strand
cagcagcaacaaauucuua

SEQ ID NO: 2212227 - RNA, 19 nt, Homo sapiens
  misc_RNA (1)...(19): siRNA sense strand
ucaagacccaccagaauaa

SEQ ID NO: 2212228 - RNA, 19 nt, Homo sapiens
  misc_RNA (1)...(19): siRNA sense strand
caagccaucucccaggaaa

SEQ ID NO: 2212229 - RNA, 19 nt, Homo sapiens
  misc_RNA (1)...(19): siRNA sense strand
ggugcaaaccaacagauua

SEQ ID NO: 2212230 - RNA, 19 nt, Homo sapiens
  misc_RNA (1)...(19): siRNA sense strand
cuacagaggcacaaacgua

SEQ ID NO: 2212231 - RNA, 19 nt, Homo sapiens
  misc_RNA (1)...(19): siRNA sense strand
gcaaaccaacagauuauca

SEQ ID NO: 2212232 - RNA, 19 nt, Homo sapiens
  misc_RNA (1)...(19): siRNA sense strand
ccacaagcccaaacaauca

SEQ ID NO: 2212233 - RNA, 19 nt, Homo sapiens
  misc_RNA (1)...(19): siRNA sense strand
ggcugccgcucccaacuua

SEQ ID NO: 2212234 - RNA, 19 nt, Homo sapiens
  misc_RNA (1)...(19): siRNA sense strand
ggaaguggaggcaacauca

SEQ ID NO: 2212235 - RNA, 19 nt, Homo sapiens
  misc_RNA (1)...(19): siRNA sense strand
aaugacagcuguggugaaa

SEQ ID NO: 2212236 - RNA, 19 nt, Homo sapiens
  misc_RNA (1)...(19): siRNA sense strand
accaacagauuaucacaaa

SEQ ID NO: 2212237 - RNA, 19 nt, Homo sapiens
  misc_RNA (1)...(19): siRNA sense strand
ccauuaaccucagugcauu

SEQ ID NO: 2212238 - RNA, 19 nt, Homo sapiens
  misc_RNA (1)...(19): siRNA sense strand
gcucugaacauccagcaaa

SEQ ID NO: 2212239 - RNA, 19 nt, Homo sapiens
  misc_RNA (1)...(19): siRNA sense strand
uggaauacaugaugacaca

SEQ ID NO: 2212240 - RNA, 19 nt, Homo sapiens
  misc_RNA (1)...(19): siRNA sense strand
gaauccaggugcacccaau

SEQ ID NO: 2212241 - RNA, 19 nt, Homo sapiens
  misc_RNA (1)...(19): siRNA sense strand
gugauggaauacaugauga

SEQ ID NO: 2212242 - RNA, 19 nt, Homo sapiens
  misc_RNA (1)...(19): siRNA sense strand
ugccuaauauucaguauca

SEQ ID NO: 2212243 - RNA, 19 nt, Homo sapiens
  misc_RNA (1)...(19): siRNA sense strand
gaucauaccaggugcaaac

SEQ ID NO: 2212244 - RNA, 19 nt, Homo sapiens
  misc_RNA (1)...(19): siRNA sense strand
gcaggaugguucuggucaa

SEQ ID NO: 2212245 - RNA, 19 nt, Homo sapiens
  misc_RNA (1)...(19): siRNA sense strand
ccaagcagcaccauuguca

SEQ ID NO: 2212246 - RNA, 19 nt, Homo sapiens
  misc_RNA (1)...(19): siRNA sense strand
uaucacaaaucgaggaagu

SEQ ID NO: 2212247 - RNA, 19 nt, Homo sapiens
  misc_RNA (1)...(19): siRNA sense strand
ggcgagaggccauuuaugu

SEQ ID NO: 2212248 - RNA, 19 nt, Homo sapiens
  misc_RNA (1)...(19): siRNA sense strand
gcacacuugcgcuggcaua

SEQ ID NO: 2212249 - RNA, 19 nt, Homo sapiens
  misc_RNA (1)...(19): siRNA sense strand
ccaauggacaggucaguug

SEQ ID NO: 2212250 - RNA, 19 nt, Homo sapiens
  misc_RNA (1)...(19): siRNA sense strand
uaauggugguggugccuuu

SEQ ID NO: 2212251 - RNA, 19 nt, Homo sapiens
  misc_RNA (1)...(19): siRNA sense strand
agacacagcagcaacaaau

SEQ ID NO: 2212252 - RNA, 19 nt, Homo sapiens
  misc_RNA (1)...(19): siRNA sense strand
ggaguugguggcaauaaug

SEQ ID NO: 2212253 - RNA, 19 nt, Homo sapiens
  misc_RNA (1)...(19): siRNA sense strand
gcaauggcagugagucuuc

SEQ ID NO: 2212254 - RNA, 19 nt, Homo sapiens
  misc_RNA (1)...(19): siRNA sense strand
acacaggugagaagaaauu

SEQ ID NO: 2212255 - RNA, 19 nt, Homo sapiens
  misc_RNA (1)...(19): siRNA sense strand
gccguuggcuauagcaaau

SEQ ID NO: 2212256 - RNA, 19 nt, Homo sapiens
  misc_RNA (1)...(19): siRNA sense strand
aauagcuacucaacuacua

SEQ ID NO: 2212257 - RNA, 19 nt, Homo sapiens
  misc_RNA (1)...(19): siRNA sense strand
gugcaaaccaacagauuau

SEQ ID NO: 2212258 - RNA, 19 nt, Homo sapiens
  misc_RNA (1)...(19): siRNA sense strand
caucagggaccaacucuca

SEQ ID NO: 2212259 - RNA, 19 nt, Homo sapiens
  misc_RNA (1)...(19): siRNA sense strand
cacagcagguggagaggaa

SEQ ID NO: 2212260 - RNA, 19 nt, Homo sapiens
  misc_RNA (1)...(19): siRNA sense strand
caggaugguucuggucaaa

SEQ ID NO: 2212261 - RNA, 19 nt, Homo sapiens
  misc_RNA (1)...(19): siRNA sense strand
gaccaccugucaaaacaua

SEQ ID NO: 2212262 - RNA, 19 nt, Homo sapiens
  misc_RNA (1)...(19): siRNA sense strand
ccagcaacaugggaauuau

SEQ ID NO: 2212263 - RNA, 19 nt, Homo sapiens
  misc_RNA (1)...(19): siRNA sense strand
gaacaucaccuugcuaccu

SEQ ID NO: 2212264 - RNA, 19 nt, Homo sapiens
  misc_RNA (1)...(19): siRNA sense strand
caggacagacucaguaugu

SEQ ID NO: 2212265 - RNA, 19 nt, Homo sapiens
  misc_RNA (1)...(19): siRNA sense strand
cauaccaggugcaaaccaa

SEQ ID NO: 2212266 - RNA, 19 nt, Homo sapiens
  misc_RNA (1)...(19): siRNA sense strand
ggucaaauacagaucauac

SEQ ID NO: 2212267 - RNA, 19 nt, Homo sapiens
  misc_RNA (1)...(19): siRNA sense strand
uaucaagacccaccagaau

SEQ ID NO: 2212268 - RNA, 19 nt, Homo sapiens
  misc_RNA (1)...(19): siRNA sense strand
gggaaaguguauggcaaga

SEQ ID NO: 2212269 - RNA, 19 nt, Homo sapiens
  misc_RNA (1)...(19): siRNA sense strand
ccaggccuccagaccauua

SEQ ID NO: 2212270 - RNA, 19 nt, Homo sapiens
  misc_RNA (1)...(19): siRNA sense strand
ugccucagcugcuuccauu

SEQ ID NO: 2212271 - RNA, 19 nt, Homo sapiens
  misc_RNA (1)...(19): siRNA sense strand
aggccuggcuaauaaugua

SEQ ID NO: 2212272 - RNA, 19 nt, Homo sapiens
  misc_RNA (1)...(19): siRNA sense strand
uaccuggagugaugccuaa

SEQ ID NO: 2212273 - RNA, 19 nt, Homo sapiens
  misc_RNA (1)...(19): siRNA sense strand
ggugauggaauacaugaug

SEQ ID NO: 2212274 - RNA, 19 nt, Homo sapiens
  misc_RNA (1)...(19): siRNA sense strand
caugggaauuaugaacuuu

SEQ ID NO: 2212275 - RNA, 19 nt, Homo sapiens
  misc_RNA (1)...(19): siRNA sense strand
ucaccaaugccaauagcua

SEQ ID NO: 2212276 - RNA, 19 nt, Homo sapiens
  misc_RNA (1)...(19): siRNA sense strand
cuggagugaugccuaauau

SEQ ID NO: 2212277 - RNA, 19 nt, Homo sapiens
  misc_RNA (1)...(19): siRNA sense strand
ccaaugagaacagcaacaa

SEQ ID NO: 2212278 - RNA, 19 nt, Homo sapiens
  misc_RNA (1)...(19): siRNA sense strand
cgagaggccauuuaugugu

SEQ ID NO: 2212279 - RNA, 19 nt, Homo sapiens
  misc_RNA (1)...(19): siRNA sense strand
ccaaggcugugggaaagug

SEQ ID NO: 2212280 - RNA, 19 nt, Homo sapiens
  misc_RNA (1)...(19): siRNA sense strand
ggcugguggugauggaaua

SEQ ID NO: 2212281 - RNA, 19 nt, Homo sapiens
  misc_RNA (1)...(19): siRNA sense strand
gaacccacaagcccaaaca

SEQ ID NO: 2212282 - RNA, 19 nt, Homo sapiens
  misc_RNA (1)...(19): siRNA sense strand
gggcaacagcugcaguuug

SEQ ID NO: 2212283 - RNA, 19 nt, Homo sapiens
  misc_RNA (1)...(19): siRNA sense strand
gagugaugccuaauauuca

SEQ ID NO: 2212284 - RNA, 19 nt, Homo sapiens
  misc_RNA (1)...(19): siRNA sense strand
caacuuacagaaccagcaa

SEQ ID NO: 2212285 - RNA, 19 nt, Homo sapiens
  misc_RNA (1)...(19): siRNA sense strand
aaauuugccugcccugagu

SEQ ID NO: 2212286 - RNA, 19 nt, Homo sapiens
  misc_RNA (1)...(19): siRNA sense strand
gcgagaggccauuuaugug

SEQ ID NO: 2212287 - RNA, 19 nt, Homo sapiens
  misc_RNA (1)...(19): siRNA sense strand
cauccaaggcugugggaaa

SEQ ID NO: 2212288 - RNA, 19 nt, Homo sapiens
  misc_RNA (1)...(19): siRNA sense strand
ucaaguaaucccacaguuc

SEQ ID NO: 2212289 - RNA, 19 nt, Homo sapiens
  misc_RNA (1)...(19): siRNA sense strand
aggacuaccuggagugaug

SEQ ID NO: 2212290 - RNA, 19 nt, Homo sapiens
  misc_RNA (1)...(19): siRNA sense strand
caguggcaauggcuucuga

SEQ ID NO: 2212291 - RNA, 19 nt, Homo sapiens
  misc_RNA (1)...(19): siRNA sense strand
ccucacagccacacaacuu

SEQ ID NO: 2212292 - RNA, 19 nt, Homo sapiens
  misc_RNA (1)...(19): siRNA sense strand
ggcagaccuuuacaacuca

SEQ ID NO: 2212293 - RNA, 19 nt, Homo sapiens
  misc_RNA (1)...(19): siRNA sense strand
ggucugaugcucugaacau

SEQ ID NO: 2212294 - RNA, 19 nt, Homo sapiens
  misc_RNA (1)...(19): siRNA sense strand
acaugggaauuaugaacuu

SEQ ID NO: 2212295 - RNA, 19 nt, Homo sapiens
  misc_RNA (1)...(19): siRNA sense strand
cucaguaugugaccaaugu

SEQ ID NO: 2212296 - RNA, 19 nt, Homo sapiens
  misc_RNA (1)...(19): siRNA sense strand
ucucaggacagacucagua

SEQ ID NO: 2212297 - RNA, 19 nt, Homo sapiens
  misc_RNA (1)...(19): siRNA sense strand
caacuugcagcagaauuga

SEQ ID NO: 2212298 - RNA, 19 nt, Homo sapiens
  misc_RNA (1)...(19): siRNA sense strand
ccaacagauuaucacaaau

SEQ ID NO: 2212299 - RNA, 19 nt, Homo sapiens
  misc_RNA (1)...(19): siRNA sense strand
cagaucugcaguccauuaa

SEQ ID NO: 2212300 - RNA, 19 nt, Homo sapiens
  misc_RNA (1)...(19): siRNA sense strand
ugacagcuguggugaaaau

SEQ ID NO: 2212301 - RNA, 19 nt, Homo sapiens
  misc_RNA (1)...(19): siRNA sense strand
gcagaccuuuacaacucaa

SEQ ID NO: 2212302 - RNA, 19 nt, Homo sapiens
  misc_RNA (1)...(19): siRNA sense strand
uauccagccucagcuaguu

SEQ ID NO: 2212303 - RNA, 19 nt, Homo sapiens
  misc_RNA (1)...(19): siRNA sense strand
caacaugggaauuaugaac

SEQ ID NO: 2212304 - RNA, 19 nt, Homo sapiens
  misc_RNA (1)...(19): siRNA sense strand
cuccaaggccuggcuaaua

SEQ ID NO: 2212305 - RNA, 19 nt, Homo sapiens
  misc_RNA (1)...(19): siRNA sense strand
acacagcagcaacaaauuc

SEQ ID NO: 2212306 - RNA, 19 nt, Homo sapiens
  misc_RNA (1)...(19): siRNA sense strand
gcaccugccccuacuguaa

SEQ ID NO: 2212307 - RNA, 19 nt, Homo sapiens
  misc_RNA (1)...(19): siRNA sense strand
ggagaaaacagcccagaug

SEQ ID NO: 2212308 - RNA, 19 nt, Homo sapiens
  misc_RNA (1)...(19): siRNA sense strand
aaacucuggucccaucauc

SEQ ID NO: 2212309 - RNA, 19 nt, Homo sapiens
  misc_RNA (1)...(19): siRNA sense strand
uccagaaccuccagcuuca

SEQ ID NO: 2212310 - RNA, 19 nt, Homo sapiens
  misc_RNA (1)...(19): siRNA sense strand
ccuccaagcagcaccauug

SEQ ID NO: 2212311 - RNA, 19 nt, Homo sapiens
  misc_RNA (1)...(19): siRNA sense strand
gcaguccauuaauaucagu

SEQ ID NO: 2212312 - RNA, 19 nt, Homo sapiens
  misc_RNA (1)...(19): siRNA sense strand
gacacagcagcaacaaauu

SEQ ID NO: 2212313 - RNA, 19 nt, Homo sapiens
  misc_RNA (1)...(19): siRNA sense strand
gaucugcaguccauuaaua

SEQ ID NO: 2212314 - RNA, 19 nt, Homo sapiens
  misc_RNA (1)...(19): siRNA sense strand
gccaauagcuacucaacua

SEQ ID NO: 2212315 - RNA, 19 nt, Homo sapiens
  misc_RNA (1)...(19): siRNA sense strand
gaacagaguggcagcagua

SEQ ID NO: 2212316 - RNA, 19 nt, Homo sapiens
  misc_RNA (1)...(19): siRNA sense strand
ggaugguucuggucaaaua

SEQ ID NO: 2212317 - RNA, 19 nt, Homo sapiens
  misc_RNA (1)...(19): siRNA sense strand
gcacaaacguacacacaca

SEQ ID NO: 2212318 - RNA, 19 nt, Homo sapiens
  misc_RNA (1)...(19): siRNA sense strand
gagaggccauuuaugugua

SEQ ID NO: 2212319 - RNA, 19 nt, Homo sapiens
  misc_RNA (1)...(19): siRNA sense strand
gaagggaggcccaggugua

SEQ ID NO: 2212320 - RNA, 19 nt, Homo sapiens
  misc_RNA (1)...(19): siRNA sense strand
gggcagaccuuuacaacuc

SEQ ID NO: 2212321 - RNA, 19 nt, Homo sapiens
  misc_RNA (1)...(19): siRNA sense strand
ggagugaugccuaauauuc

SEQ ID NO: 2212322 - RNA, 19 nt, Homo sapiens
  misc_RNA (1)...(19): siRNA sense strand
uccaaggccuggcuaauaa

SEQ ID NO: 2212323 - RNA, 19 nt, Homo sapiens
  misc_RNA (1)...(19): siRNA sense strand
caacaucauugcugcuaug

SEQ ID NO: 2212324 - RNA, 19 nt, Homo sapiens
  misc_RNA (1)...(19): siRNA sense strand
ggacagacucaguauguga

SEQ ID NO: 2212325 - RNA, 19 nt, Homo sapiens
  misc_RNA (1)...(19): siRNA sense strand
acacacaggugagaagaaa

SEQ ID NO: 2212326 - RNA, 19 nt, Homo sapiens
  misc_RNA (1)...(19): siRNA sense strand
cagcagcaacaaauucuua

SEQ ID NO: 2212327 - RNA, 19 nt, Homo sapiens
  misc_RNA (1)...(19): siRNA sense strand
ucaagacccaccagaauaa

SEQ ID NO: 2212328 - RNA, 19 nt, Homo sapiens
  misc_RNA (1)...(19): siRNA sense strand
caagccaucucccaggaaa

SEQ ID NO: 2212329 - RNA, 19 nt, Homo sapiens
  misc_RNA (1)...(19): siRNA sense strand
ggugcaaaccaacagauua

SEQ ID NO: 2212330 - RNA, 19 nt, Homo sapiens
  misc_RNA (1)...(19): siRNA sense strand
cuacagaggcacaaacgua

SEQ ID NO: 2212331 - RNA, 19 nt, Homo sapiens
  misc_RNA (1)...(19): siRNA sense strand
gcaaaccaacagauuauca

SEQ ID NO: 2212332 - RNA, 19 nt, Homo sapiens
  misc_RNA (1)...(19): siRNA sense strand
ggcugccgcucccaacuua

SEQ ID NO: 2212333 - RNA, 19 nt, Homo sapiens
  misc_RNA (1)...(19): siRNA sense strand
ggaaguggaggcaacauca

SEQ ID NO: 2212334 - RNA, 19 nt, Homo sapiens
  misc_RNA (1)...(19): siRNA sense strand
aaugacagcuguggugaaa

SEQ ID NO: 2212335 - RNA, 19 nt, Homo sapiens
  misc_RNA (1)...(19): siRNA sense strand
accaacagauuaucacaaa

SEQ ID NO: 2212336 - RNA, 19 nt, Homo sapiens
  misc_RNA (1)...(19): siRNA sense strand
ccauuaaccucagugcauu

SEQ ID NO: 2212337 - RNA, 19 nt, Homo sapiens
  misc_RNA (1)...(19): siRNA sense strand
gcucugaacauccagcaaa

SEQ ID NO: 2212338 - RNA, 19 nt, Homo sapiens
  misc_RNA (1)...(19): siRNA sense strand
uggaauacaugaugacaca

SEQ ID NO: 2212339 - RNA, 19 nt, Homo sapiens
  misc_RNA (1)...(19): siRNA sense strand
gaauccaggugcacccaau

SEQ ID NO: 2212340 - RNA, 19 nt, Homo sapiens
  misc_RNA (1)...(19): siRNA sense strand
gugauggaauacaugauga

SEQ ID NO: 2212341 - RNA, 19 nt, Homo sapiens
  misc_RNA (1)...(19): siRNA sense strand
ugccuaauauucaguauca

SEQ ID NO: 2212342 - RNA, 19 nt, Homo sapiens
  misc_RNA (1)...(19): siRNA sense strand
gaucauaccaggugcaaac

SEQ ID NO: 2212343 - RNA, 19 nt, Homo sapiens
  misc_RNA (1)...(19): siRNA sense strand
gcaggaugguucuggucaa

SEQ ID NO: 2212344 - RNA, 19 nt, Homo sapiens
  misc_RNA (1)...(19): siRNA sense strand
ccaagcagcaccauuguca

SEQ ID NO: 2212345 - RNA, 19 nt, Homo sapiens
  misc_RNA (1)...(19): siRNA sense strand
uaucacaaaucgaggaagu

SEQ ID NO: 2212346 - RNA, 19 nt, Homo sapiens
  misc_RNA (1)...(19): siRNA sense strand
ggcgagaggccauuuaugu

SEQ ID NO: 2212347 - RNA, 19 nt, Homo sapiens
  misc_RNA (1)...(19): siRNA sense strand
gcacacuugcgcuggcaua

SEQ ID NO: 2212348 - RNA, 19 nt, Homo sapiens
  misc_RNA (1)...(19): siRNA sense strand
uaauggugguggugccuuu

SEQ ID NO: 2212349 - RNA, 19 nt, Homo sapiens
  misc_RNA (1)...(19): siRNA sense strand
ccaauggacaggucaguug

SEQ ID NO: 2212350 - RNA, 19 nt, Homo sapiens
  misc_RNA (1)...(19): siRNA sense strand
agacacagcagcaacaaau

SEQ ID NO: 2212351 - RNA, 19 nt, Homo sapiens
  misc_RNA (1)...(19): siRNA sense strand
ggaguugguggcaauaaug

SEQ ID NO: 2212352 - RNA, 19 nt, Homo sapiens
  misc_RNA (1)...(19): siRNA sense strand
gcaauggcagugagucuuc

SEQ ID NO: 2212353 - RNA, 19 nt, Homo sapiens
  misc_RNA (1)...(19): siRNA sense strand
acacaggugagaagaaauu

SEQ ID NO: 2212354 - RNA, 19 nt, Homo sapiens
  misc_RNA (1)...(19): siRNA sense strand
gccguuggcuauagcaaau

SEQ ID NO: 2212355 - RNA, 19 nt, Homo sapiens
  misc_RNA (1)...(19): siRNA sense strand
aauagcuacucaacuacua

SEQ ID NO: 2212356 - RNA, 19 nt, Homo sapiens
  misc_RNA (1)...(19): siRNA sense strand
gugcaaaccaacagauuau

SEQ ID NO: 2212357 - RNA, 19 nt, Homo sapiens
  misc_RNA (1)...(19): siRNA sense strand
caucagggaccaacucuca

SEQ ID NO: 2212358 - RNA, 19 nt, Homo sapiens
  misc_RNA (1)...(19): siRNA sense strand
cacagcagguggagaggaa

SEQ ID NO: 2212359 - RNA, 19 nt, Homo sapiens
  misc_RNA (1)...(19): siRNA sense strand
caggaugguucuggucaaa

SEQ ID NO: 2212360 - RNA, 19 nt, Homo sapiens
  misc_RNA (1)...(19): siRNA sense strand
gaccaccugucaaaacaua

SEQ ID NO: 2212361 - RNA, 19 nt, Homo sapiens
  misc_RNA (1)...(19): siRNA sense strand
ccagcaacaugggaauuau

SEQ ID NO: 2212362 - RNA, 19 nt, Homo sapiens
  misc_RNA (1)...(19): siRNA sense strand
gaacaucaccuugcuaccu

SEQ ID NO: 2212363 - RNA, 19 nt, Homo sapiens
  misc_RNA (1)...(19): siRNA sense strand
caggacagacucaguaugu

SEQ ID NO: 2212364 - RNA, 19 nt, Homo sapiens
  misc_RNA (1)...(19): siRNA sense strand
cauaccaggugcaaaccaa

SEQ ID NO: 2212365 - RNA, 19 nt, Homo sapiens
  misc_RNA (1)...(19): siRNA sense strand
ggucaaauacagaucauac

SEQ ID NO: 2212366 - RNA, 19 nt, Homo sapiens
  misc_RNA (1)...(19): siRNA sense strand
uaucaagacccaccagaau

SEQ ID NO: 2212367 - RNA, 19 nt, Homo sapiens
  misc_RNA (1)...(19): siRNA sense strand
gggaaaguguauggcaaga

SEQ ID NO: 2212368 - RNA, 19 nt, Homo sapiens
  misc_RNA (1)...(19): siRNA sense strand
ccaggccuccagaccauua

SEQ ID NO: 2212369 - RNA, 19 nt, Homo sapiens
  misc_RNA (1)...(19): siRNA sense strand
ugccucagcugcuuccauu

SEQ ID NO: 2212370 - RNA, 19 nt, Homo sapiens
  misc_RNA (1)...(19): siRNA sense strand
aggccuggcuaauaaugua

SEQ ID NO: 2212371 - RNA, 19 nt, Homo sapiens
  misc_RNA (1)...(19): siRNA sense strand
uaccuggagugaugccuaa

SEQ ID NO: 2212372 - RNA, 19 nt, Homo sapiens
  misc_RNA (1)...(19): siRNA sense strand
ggugauggaauacaugaug

SEQ ID NO: 2212373 - RNA, 19 nt, Homo sapiens
  misc_RNA (1)...(19): siRNA sense strand
caugggaauuaugaacuuu

SEQ ID NO: 2212374 - RNA, 19 nt, Homo sapiens
  misc_RNA (1)...(19): siRNA sense strand
ucaccaaugccaauagcua

SEQ ID NO: 2212375 - RNA, 19 nt, Homo sapiens
  misc_RNA (1)...(19): siRNA sense strand
cuggagugaugccuaauau

SEQ ID NO: 2212376 - RNA, 19 nt, Homo sapiens
  misc_RNA (1)...(19): siRNA sense strand
cgagaggccauuuaugugu

SEQ ID NO: 2212377 - RNA, 19 nt, Homo sapiens
  misc_RNA (1)...(19): siRNA sense strand
ccaaugagaacagcaacaa

SEQ ID NO: 2212378 - RNA, 19 nt, Homo sapiens
  misc_RNA (1)...(19): siRNA sense strand
ccaaggcugugggaaagug

SEQ ID NO: 2212379 - RNA, 19 nt, Homo sapiens
  misc_RNA (1)...(19): siRNA sense strand
ggcugguggugauggaaua

SEQ ID NO: 2212380 - RNA, 19 nt, Homo sapiens
  misc_RNA (1)...(19): siRNA sense strand
gggcaacagcugcaguuug

SEQ ID NO: 2212381 - RNA, 19 nt, Homo sapiens
  misc_RNA (1)...(19): siRNA sense strand
gagugaugccuaauauuca

SEQ ID NO: 2212382 - RNA, 19 nt, Homo sapiens
  misc_RNA (1)...(19): siRNA sense strand
caacuuacagaaccagcaa

SEQ ID NO: 2212383 - RNA, 19 nt, Homo sapiens
  misc_RNA (1)...(19): siRNA sense strand
aaauuugccugcccugagu

SEQ ID NO: 2212384 - RNA, 19 nt, Homo sapiens
  misc_RNA (1)...(19): siRNA sense strand
gcgagaggccauuuaugug

SEQ ID NO: 2212385 - RNA, 19 nt, Homo sapiens
  misc_RNA (1)...(19): siRNA sense strand
cauccaaggcugugggaaa

SEQ ID NO: 2212386 - RNA, 19 nt, Homo sapiens
  misc_RNA (1)...(19): siRNA sense strand
ucaaguaaucccacaguuc

SEQ ID NO: 2212387 - RNA, 19 nt, Homo sapiens
  misc_RNA (1)...(19): siRNA sense strand
caacuugcagcagaauuga

SEQ ID NO: 2212388 - RNA, 19 nt, Homo sapiens
  misc_RNA (1)...(19): siRNA sense strand
caguggcaauggcuucuga

SEQ ID NO: 2212389 - RNA, 19 nt, Homo sapiens
  misc_RNA (1)...(19): siRNA sense strand
ccucacagccacacaacuu

SEQ ID NO: 2212390 - RNA, 19 nt, Homo sapiens
  misc_RNA (1)...(19): siRNA sense strand
ggcagaccuuuacaacuca

SEQ ID NO: 2212391 - RNA, 19 nt, Homo sapiens
  misc_RNA (1)...(19): siRNA sense strand
ggucugaugcucugaacau

SEQ ID NO: 2212392 - RNA, 19 nt, Homo sapiens
  misc_RNA (1)...(19): siRNA sense strand
acaugggaauuaugaacuu

SEQ ID NO: 2212393 - RNA, 19 nt, Homo sapiens
  misc_RNA (1)...(19): siRNA sense strand
cucaguaugugaccaaugu

SEQ ID NO: 2212394 - RNA, 19 nt, Homo sapiens
  misc_RNA (1)...(19): siRNA sense strand
ucucaggacagacucagua

SEQ ID NO: 2212395 - RNA, 19 nt, Homo sapiens
  misc_RNA (1)...(19): siRNA sense strand
aggacuaccuggagugaug

SEQ ID NO: 2212396 - RNA, 19 nt, Homo sapiens
  misc_RNA (1)...(19): siRNA sense strand
ccaacagauuaucacaaau

SEQ ID NO: 2212397 - RNA, 19 nt, Homo sapiens
  misc_RNA (1)...(19): siRNA sense strand
cagaucugcaguccauuaa

SEQ ID NO: 2212398 - RNA, 19 nt, Homo sapiens
  misc_RNA (1)...(19): siRNA sense strand
ugacagcuguggugaaaau

SEQ ID NO: 2212399 - RNA, 19 nt, Homo sapiens
  misc_RNA (1)...(19): siRNA sense strand
gcagaccuuuacaacucaa

SEQ ID NO: 2212400 - RNA, 19 nt, Homo sapiens
  misc_RNA (1)...(19): siRNA sense strand
uauccagccucagcuaguu

SEQ ID NO: 2212401 - RNA, 19 nt, Homo sapiens
  misc_RNA (1)...(19): siRNA sense strand
caacaugggaauuaugaac

SEQ ID NO: 2212402 - RNA, 19 nt, Homo sapiens
  misc_RNA (1)...(19): siRNA sense strand
cuccaaggccuggcuaaua

SEQ ID NO: 2212403 - RNA, 19 nt, Homo sapiens
  misc_RNA (1)...(19): siRNA sense strand
acacagcagcaacaaauuc

SEQ ID NO: 2212404 - RNA, 19 nt, Homo sapiens
  misc_RNA (1)...(19): siRNA sense strand
gcaccugccccuacuguaa

SEQ ID NO: 2212405 - RNA, 19 nt, Homo sapiens
  misc_RNA (1)...(19): siRNA sense strand
ggagaaaacagcccagaug

SEQ ID NO: 2212406 - RNA, 19 nt, Homo sapiens
  misc_RNA (1)...(19): siRNA sense strand
aaacucuggucccaucauc

SEQ ID NO: 2212407 - RNA, 19 nt, Homo sapiens
  misc_RNA (1)...(19): siRNA sense strand
uccagaaccuccagcuuca

SEQ ID NO: 2212408 - RNA, 19 nt, Homo sapiens
  misc_RNA (1)...(19): siRNA sense strand
ccuccaagcagcaccauug

SEQ ID NO: 2212409 - RNA, 19 nt, Homo sapiens
  misc_RNA (1)...(19): siRNA sense strand
gcaguccauuaauaucagu

SEQ ID NO: 2212410 - RNA, 19 nt, Homo sapiens
  misc_RNA (1)...(19): siRNA sense strand
cuccauggaugaaaugaca

SEQ ID NO: 2212411 - RNA, 19 nt, Homo sapiens
  misc_RNA (1)...(19): siRNA sense strand
gacacagcagcaacaaauu

SEQ ID NO: 2212412 - RNA, 19 nt, Homo sapiens
  misc_RNA (1)...(19): siRNA sense strand
caaugccaauagcuacuca

SEQ ID NO: 2212413 - RNA, 19 nt, Homo sapiens
  misc_RNA (1)...(19): siRNA sense strand
gaaauugaaugacaccuau

SEQ ID NO: 2212414 - RNA, 19 nt, Homo sapiens
  misc_RNA (1)...(19): siRNA sense strand
caaaugugcuuaucccaaa

SEQ ID NO: 2212415 - RNA, 19 nt, Homo sapiens
  misc_RNA (1)...(19): siRNA sense strand
caagagaucuggagguguu

SEQ ID NO: 2212416 - RNA, 19 nt, Homo sapiens
  misc_RNA (1)...(19): siRNA sense strand
guaaauaguuccagauugg

SEQ ID NO: 2212417 - RNA, 19 nt, Homo sapiens
  misc_RNA (1)...(19): siRNA sense strand
ugaaggagcuagagcaguu

SEQ ID NO: 2212418 - RNA, 19 nt, Homo sapiens
  misc_RNA (1)...(19): siRNA sense strand
ggcaguaucuuuuaaguua

SEQ ID NO: 2212419 - RNA, 19 nt, Homo sapiens
  misc_RNA (1)...(19): siRNA sense strand
ggaagacuguuucucgaau

SEQ ID NO: 2212420 - RNA, 19 nt, Homo sapiens
  misc_RNA (1)...(19): siRNA sense strand
gagaaugaacgaaguauca

SEQ ID NO: 2212421 - RNA, 19 nt, Homo sapiens
  misc_RNA (1)...(19): siRNA sense strand
uagaggagcuccgagaauu

SEQ ID NO: 2212422 - RNA, 19 nt, Homo sapiens
  misc_RNA (1)...(19): siRNA sense strand
auacagauccgaguaaaua

SEQ ID NO: 2212423 - RNA, 19 nt, Homo sapiens
  misc_RNA (1)...(19): siRNA sense strand
ugaaugacaccuauguuaa

SEQ ID NO: 2212424 - RNA, 19 nt, Homo sapiens
  misc_RNA (1)...(19): siRNA sense strand
uaaguuauguccucacagu

SEQ ID NO: 2212425 - RNA, 19 nt, Homo sapiens
  misc_RNA (1)...(19): siRNA sense strand
gagcagaagucaaauuuuc

SEQ ID NO: 2212426 - RNA, 19 nt, Homo sapiens
  misc_RNA (1)...(19): siRNA sense strand
guaccucauucaacuaguu

SEQ ID NO: 2212427 - RNA, 19 nt, Homo sapiens
  misc_RNA (1)...(19): siRNA sense strand
gaagacuguuucucgaauc

SEQ ID NO: 2212428 - RNA, 19 nt, Homo sapiens
  misc_RNA (1)...(19): siRNA sense strand
uaaauguggucaugcuuca

SEQ ID NO: 2212429 - RNA, 19 nt, Homo sapiens
  misc_RNA (1)...(19): siRNA sense strand
caaguacagugucauugug

SEQ ID NO: 2212430 - RNA, 19 nt, Homo sapiens
  misc_RNA (1)...(19): siRNA sense strand
gagcuagagcaguuuagua

SEQ ID NO: 2212431 - RNA, 19 nt, Homo sapiens
  misc_RNA (1)...(19): siRNA sense strand
cuucaggaaucccaaguuu

SEQ ID NO: 2212432 - RNA, 19 nt, Homo sapiens
  misc_RNA (1)...(19): siRNA sense strand
gaggaggacucauauucuc

SEQ ID NO: 2212433 - RNA, 19 nt, Homo sapiens
  misc_RNA (1)...(19): siRNA sense strand
ucauugcucuuuguacuaa

SEQ ID NO: 2212434 - RNA, 19 nt, Homo sapiens
  misc_RNA (1)...(19): siRNA sense strand
cauauugcccuugccauua

SEQ ID NO: 2212435 - RNA, 19 nt, Homo sapiens
  misc_RNA (1)...(19): siRNA sense strand
uagagaaggacaccaagua

SEQ ID NO: 2212436 - RNA, 19 nt, Homo sapiens
  misc_RNA (1)...(19): siRNA sense strand
ggauuagggagcauuauug

SEQ ID NO: 2212437 - RNA, 19 nt, Homo sapiens
  misc_RNA (1)...(19): siRNA sense strand
guacaucaccugcagaaag

SEQ ID NO: 2212438 - RNA, 19 nt, Homo sapiens
  misc_RNA (1)...(19): siRNA sense strand
acaguuggauucaugaguu

SEQ ID NO: 2212439 - RNA, 19 nt, Homo sapiens
  misc_RNA (1)...(19): siRNA sense strand
gaguaaauaguuccagauu

SEQ ID NO: 2212440 - RNA, 19 nt, Homo sapiens
  misc_RNA (1)...(19): siRNA sense strand
gaaccuggaacacccuauu

SEQ ID NO: 2212441 - RNA, 19 nt, Homo sapiens
  misc_RNA (1)...(19): siRNA sense strand
cuaaguuuaugccuaagaa

SEQ ID NO: 2212442 - RNA, 19 nt, Homo sapiens
  misc_RNA (1)...(19): siRNA sense strand
gcauccagauaccacauau

SEQ ID NO: 2212443 - RNA, 19 nt, Homo sapiens
  misc_RNA (1)...(19): siRNA sense strand
cggcacagcugaaacugau

SEQ ID NO: 2212444 - RNA, 19 nt, Homo sapiens
  misc_RNA (1)...(19): siRNA sense strand
guacuaagaaccuggaaca

SEQ ID NO: 2212445 - RNA, 19 nt, Homo sapiens
  misc_RNA (1)...(19): siRNA sense strand
gggccuguguuucauguau

SEQ ID NO: 2212446 - RNA, 19 nt, Homo sapiens
  misc_RNA (1)...(19): siRNA sense strand
ccucacaguuggauucaug

SEQ ID NO: 2212447 - RNA, 19 nt, Homo sapiens
  misc_RNA (1)...(19): siRNA sense strand
ugaaacugauguaaaugug

SEQ ID NO: 2212448 - RNA, 19 nt, Homo sapiens
  misc_RNA (1)...(19): siRNA sense strand
cuagagcaguuuaguaucu

SEQ ID NO: 2212449 - RNA, 19 nt, Homo sapiens
  misc_RNA (1)...(19): siRNA sense strand
uugaaugacaccuauguua

SEQ ID NO: 2212450 - RNA, 19 nt, Homo sapiens
  misc_RNA (1)...(19): siRNA sense strand
cagcugaaacugauguaaa

SEQ ID NO: 2212451 - RNA, 19 nt, Homo sapiens
  misc_RNA (1)...(19): siRNA sense strand
uaucaucauugcucuuugu

SEQ ID NO: 2212452 - RNA, 19 nt, Homo sapiens
  misc_RNA (1)...(19): siRNA sense strand
ugcaguauguuacaaguau

SEQ ID NO: 2212453 - RNA, 19 nt, Homo sapiens
  misc_RNA (1)...(19): siRNA sense strand
gagaaugaggagaaacuga

SEQ ID NO: 2212454 - RNA, 19 nt, Homo sapiens
  misc_RNA (1)...(19): siRNA sense strand
ucaggaaucccaaguuugu

SEQ ID NO: 2212455 - RNA, 19 nt, Homo sapiens
  misc_RNA (1)...(19): siRNA sense strand
ggaugaaaucuaugaggaa

SEQ ID NO: 2212456 - RNA, 19 nt, Homo sapiens
  misc_RNA (1)...(19): siRNA sense strand
caucauugcucuuuguacu

SEQ ID NO: 2212457 - RNA, 19 nt, Homo sapiens
  misc_RNA (1)...(19): siRNA sense strand
gaucccaaacucuuucuug

SEQ ID NO: 2212458 - RNA, 19 nt, Homo sapiens
  misc_RNA (1)...(19): siRNA sense strand
caaaauggcaugauauaug

SEQ ID NO: 2212459 - RNA, 19 nt, Homo sapiens
  misc_RNA (1)...(19): siRNA sense strand
gaaugacaccuauguuaac

SEQ ID NO: 2212460 - RNA, 19 nt, Homo sapiens
  misc_RNA (1)...(19): siRNA sense strand
ugaaaucuaugaggaagca

SEQ ID NO: 2212461 - RNA, 19 nt, Homo sapiens
  misc_RNA (1)...(19): siRNA sense strand
gagcaggaguauggauuag

SEQ ID NO: 2212462 - RNA, 19 nt, Homo sapiens
  misc_RNA (1)...(19): siRNA sense strand
ggacagugcggcuacucuu

SEQ ID NO: 2212463 - RNA, 19 nt, Homo sapiens
  misc_RNA (1)...(19): siRNA sense strand
ggaggaggacucauauucu

SEQ ID NO: 2212464 - RNA, 19 nt, Homo sapiens
  misc_RNA (1)...(19): siRNA sense strand
ugagcaggaguauggauua

SEQ ID NO: 2212465 - RNA, 19 nt, Homo sapiens
  misc_RNA (1)...(19): siRNA sense strand
aagauuugcugacuuugug

SEQ ID NO: 2212466 - RNA, 19 nt, Homo sapiens
  misc_RNA (1)...(19): siRNA sense strand
gcaguauguuacaaguaug

SEQ ID NO: 2212467 - RNA, 19 nt, Homo sapiens
  misc_RNA (1)...(19): siRNA sense strand
gguggagaaugaggagaaa

SEQ ID NO: 2212468 - RNA, 19 nt, Homo sapiens
  misc_RNA (1)...(19): siRNA sense strand
gagcauuauugcccaggau

SEQ ID NO: 2212469 - RNA, 19 nt, Homo sapiens
  misc_RNA (1)...(19): siRNA sense strand
gcacagcugaaacugaugu

SEQ ID NO: 2212470 - RNA, 19 nt, Homo sapiens
  misc_RNA (1)...(19): siRNA sense strand
gauacaaggagagguagaa

SEQ ID NO: 2212471 - RNA, 19 nt, Homo sapiens
  misc_RNA (1)...(19): siRNA sense strand
caguuggauucaugaguuu

SEQ ID NO: 2212472 - RNA, 19 nt, Homo sapiens
  misc_RNA (1)...(19): siRNA sense strand
ccaaguacagugucauugu

SEQ ID NO: 2212473 - RNA, 19 nt, Homo sapiens
  misc_RNA (1)...(19): siRNA sense strand
aguaaauaguuccagauug

SEQ ID NO: 2212474 - RNA, 19 nt, Homo sapiens
  misc_RNA (1)...(19): siRNA sense strand
gagaaggacaccaaguaca

SEQ ID NO: 2212475 - RNA, 19 nt, Homo sapiens
  misc_RNA (1)...(19): siRNA sense strand
ggaugacugugggaauugu

SEQ ID NO: 2212476 - RNA, 19 nt, Homo sapiens
  misc_RNA (1)...(19): siRNA sense strand
aaaugaaguuucuguccau

SEQ ID NO: 2212477 - RNA, 19 nt, Homo sapiens
  misc_RNA (1)...(19): siRNA sense strand
uaagaaaagucccauuuac

SEQ ID NO: 2212478 - RNA, 19 nt, Homo sapiens
  misc_RNA (1)...(19): siRNA sense strand
agaaugaggagaaacugaa

SEQ ID NO: 2212479 - RNA, 19 nt, Homo sapiens
  misc_RNA (1)...(19): siRNA sense strand
ugaaguuucuguccaugag

SEQ ID NO: 2212480 - RNA, 19 nt, Homo sapiens
  misc_RNA (1)...(19): siRNA sense strand
ccugacagaagaagaauau

SEQ ID NO: 2212481 - RNA, 19 nt, Homo sapiens
  misc_RNA (1)...(19): siRNA sense strand
ugggaugacugugggaauu

SEQ ID NO: 2212482 - RNA, 19 nt, Homo sapiens
  misc_RNA (1)...(19): siRNA sense strand
ugauguaaauguggucaug

SEQ ID NO: 2212483 - RNA, 19 nt, Homo sapiens
  misc_RNA (1)...(19): siRNA sense strand
guccugcuaucacacagaa

SEQ ID NO: 2212484 - RNA, 19 nt, Homo sapiens
  misc_RNA (1)...(19): siRNA sense strand
auauugcccuugccauuau

SEQ ID NO: 2212485 - RNA, 19 nt, Homo sapiens
  misc_RNA (1)...(19): siRNA sense strand
ggccuguguuucauguauu

SEQ ID NO: 2212486 - RNA, 19 nt, Homo sapiens
  misc_RNA (1)...(19): siRNA sense strand
cugagcagaagucaaauuu

SEQ ID NO: 2212487 - RNA, 19 nt, Homo sapiens
  misc_RNA (1)...(19): siRNA sense strand
agaaauugaaugacaccua

SEQ ID NO: 2212488 - RNA, 19 nt, Homo sapiens
  misc_RNA (1)...(19): siRNA sense strand
gaaggagcuagagcaguuu

SEQ ID NO: 2212489 - RNA, 19 nt, Homo sapiens
  misc_RNA (1)...(19): siRNA sense strand
uaucacacagaacaacuuu

SEQ ID NO: 2212490 - RNA, 19 nt, Homo sapiens
  misc_RNA (1)...(19): siRNA sense strand
gauacagauccgaguaaau

SEQ ID NO: 2212491 - RNA, 19 nt, Homo sapiens
  misc_RNA (1)...(19): siRNA sense strand
cagauccgaguaaauaguu

SEQ ID NO: 2212492 - RNA, 19 nt, Homo sapiens
  misc_RNA (1)...(19): siRNA sense strand
gcauuauugcccaggauga

SEQ ID NO: 2212493 - RNA, 19 nt, Homo sapiens
  misc_RNA (1)...(19): siRNA sense strand
uacaucaccugcagaaagg

SEQ ID NO: 2212494 - RNA, 19 nt, Homo sapiens
  misc_RNA (1)...(19): siRNA sense strand
cuaagaaaagucccauuua

SEQ ID NO: 2212495 - RNA, 19 nt, Homo sapiens
  misc_RNA (1)...(19): siRNA sense strand
gcugagcagaagucaaauu

SEQ ID NO: 2212496 - RNA, 19 nt, Homo sapiens
  misc_RNA (1)...(19): siRNA sense strand
ggaaucccaaguuugugaa

SEQ ID NO: 2212497 - RNA, 19 nt, Homo sapiens
  misc_RNA (1)...(19): siRNA sense strand
caauucuguuacacaaaug

SEQ ID NO: 2212498 - RNA, 19 nt, Homo sapiens
  misc_RNA (1)...(19): siRNA sense strand
gaggaggaggacucauauu

SEQ ID NO: 2212499 - RNA, 19 nt, Homo sapiens
  misc_RNA (1)...(19): siRNA sense strand
agcugaaacugauguaaau

SEQ ID NO: 2212500 - RNA, 19 nt, Homo sapiens
  misc_RNA (1)...(19): siRNA sense strand
ggagaaugaacgaaguauc

SEQ ID NO: 2212501 - RNA, 19 nt, Homo sapiens
  misc_RNA (1)...(19): siRNA sense strand
gaaggacaccaaguacagu

SEQ ID NO: 2212502 - RNA, 19 nt, Homo sapiens
  misc_RNA (1)...(19): siRNA sense strand
ugauauauggacacggaua

SEQ ID NO: 2212503 - RNA, 19 nt, Homo sapiens
  misc_RNA (1)...(19): siRNA sense strand
aaaauggcaugauauaugg

SEQ ID NO: 2212504 - RNA, 19 nt, Homo sapiens
  misc_RNA (1)...(19): siRNA sense strand
gaaucccaaguuugugaaa

SEQ ID NO: 2212505 - RNA, 19 nt, Homo sapiens
  misc_RNA (1)...(19): siRNA sense strand
ccaccucacgccaaaugaa

SEQ ID NO: 2212506 - RNA, 19 nt, Homo sapiens
  misc_RNA (1)...(19): siRNA sense strand
gaaugaggagaaacugaag

SEQ ID NO: 2212507 - RNA, 19 nt, Homo sapiens
  misc_RNA (1)...(19): siRNA sense strand
ugcccaggaugaaaucuau

SEQ ID NO: 2212508 - RNA, 19 nt, Homo sapiens
  misc_RNA (1)...(19): siRNA sense strand
agaggagcuccgagaauuu

SEQ ID NO: 2212509 - RNA, 19 nt, Homo sapiens
  misc_RNA (1)...(19): siRNA sense strand
uaugggcccuuggagaaug

SEQ ID NO: 2212510 - RNA, 19 nt, Homo sapiens
  misc_RNA (1)...(19): siRNA sense strand
gcccuugccauuaucauca

SEQ ID NO: 2212511 - RNA, 19 nt, Homo sapiens
  misc_RNA (1)...(19): siRNA sense strand
acauauugcccuugccauu

SEQ ID NO: 2212512 - RNA, 19 nt, Homo sapiens
  misc_RNA (1)...(19): siRNA sense strand
gccuguguuucauguauuc

SEQ ID NO: 2212513 - RNA, 19 nt, Homo sapiens
  misc_RNA (1)...(19): siRNA sense strand
gccaagcccuucaaaguca

SEQ ID NO: 2212514 - RNA, 19 nt, Homo sapiens
  misc_RNA (1)...(19): siRNA sense strand
gcaagaucguggaccaugu

SEQ ID NO: 2212515 - RNA, 19 nt, Homo sapiens
  misc_RNA (1)...(19): siRNA sense strand
gaaggugugcccagacuau

SEQ ID NO: 2212516 - RNA, 19 nt, Homo sapiens
  misc_RNA (1)...(19): siRNA sense strand
ggccgucagugcccagaua

SEQ ID NO: 2212517 - RNA, 19 nt, Homo sapiens
  misc_RNA (1)...(19): siRNA sense strand
ucaauugccacguggagua

SEQ ID NO: 2212518 - RNA, 19 nt, Homo sapiens
  misc_RNA (1)...(19): siRNA sense strand
caaagucaucuguaucuuc

SEQ ID NO: 2212519 - RNA, 19 nt, Homo sapiens
  misc_RNA (1)...(19): siRNA sense strand
acuacaaacuggugcagaa

SEQ ID NO: 2212520 - RNA, 19 nt, Homo sapiens
  misc_RNA (1)...(19): siRNA sense strand
acuauaacuuccagaguga

SEQ ID NO: 2212521 - RNA, 19 nt, Homo sapiens
  misc_RNA (1)...(19): siRNA sense strand
agaggaagccguccaucaa

SEQ ID NO: 2212522 - RNA, 19 nt, Homo sapiens
  misc_RNA (1)...(19): siRNA sense strand
gugccaagcccuucaaagu

SEQ ID NO: 2212523 - RNA, 19 nt, Homo sapiens
  misc_RNA (1)...(19): siRNA sense strand
guaccuucaguguguauuu

SEQ ID NO: 2212524 - RNA, 19 nt, Homo sapiens
  misc_RNA (1)...(19): siRNA sense strand
aacgguaccuucagugugu

SEQ ID NO: 2212525 - RNA, 19 nt, Homo sapiens
  misc_RNA (1)...(19): siRNA sense strand
gagucacgcgcuuucaauu

SEQ ID NO: 2212526 - RNA, 19 nt, Homo sapiens
  misc_RNA (1)...(19): siRNA sense strand
ucaaagucaucuguaucuu

SEQ ID NO: 2212527 - RNA, 19 nt, Homo sapiens
  misc_RNA (1)...(19): siRNA sense strand
gugcauacccucaaguuuu

SEQ ID NO: 2212528 - RNA, 19 nt, Homo sapiens
  misc_RNA (1)...(19): siRNA sense strand
gaucguggaccaugugaac

SEQ ID NO: 2212529 - RNA, 19 nt, Homo sapiens
  misc_RNA (1)...(19): siRNA sense strand
gaggaagccguccaucaag

SEQ ID NO: 2212530 - RNA, 19 nt, Homo sapiens
  misc_RNA (1)...(19): siRNA sense strand
cagaaggugugcccagacu

SEQ ID NO: 2212531 - RNA, 19 nt, Homo sapiens
  misc_RNA (1)...(19): siRNA sense strand
ccuucaaagucaucuguau

SEQ ID NO: 2212532 - RNA, 19 nt, Homo sapiens
  misc_RNA (1)...(19): siRNA sense strand
ggugcauacccucaaguuu

SEQ ID NO: 2212533 - RNA, 19 nt, Homo sapiens
  misc_RNA (1)...(19): siRNA sense strand
acaaacuggugcagaaggu

SEQ ID NO: 2212534 - RNA, 19 nt, Homo sapiens
  misc_RNA (1)...(19): siRNA sense strand
caagaucguggaccaugug

SEQ ID NO: 2212535 - RNA, 19 nt, Homo sapiens
  misc_RNA (1)...(19): siRNA sense strand
uggaguaugagaagacaaa

SEQ ID NO: 2212536 - RNA, 19 nt, Homo sapiens
  misc_RNA (1)...(19): siRNA sense strand
ucucuuuccucagcuuuga

SEQ ID NO: 2212537 - RNA, 19 nt, Homo sapiens
  misc_RNA (1)...(19): siRNA sense strand
ccuccaagcgugucgaguu

SEQ ID NO: 2212538 - RNA, 19 nt, Homo sapiens
  misc_RNA (1)...(19): siRNA sense strand
ccacguggaguaugagaag

SEQ ID NO: 2212539 - RNA, 19 nt, Homo sapiens
  misc_RNA (1)...(19): siRNA sense strand
gucacgcgcuuucaauugc

SEQ ID NO: 2212540 - RNA, 19 nt, Homo sapiens
  misc_RNA (1)...(19): siRNA sense strand
gugcccagacuauaacuuc

SEQ ID NO: 2212541 - RNA, 19 nt, Homo sapiens
  misc_RNA (1)...(19): siRNA sense strand
gcuggugaccggcaagauc

SEQ ID NO: 2212542 - RNA, 19 nt, Homo sapiens
  misc_RNA (1)...(19): siRNA sense strand
ucuguaucuucgucucuuu

SEQ ID NO: 2212543 - RNA, 19 nt, Homo sapiens
  misc_RNA (1)...(19): siRNA sense strand
uaccuucaguguguauuuc

SEQ ID NO: 2212544 - RNA, 19 nt, Homo sapiens
  misc_RNA (1)...(19): siRNA sense strand
aagaggaagccguccauca

SEQ ID NO: 2212545 - RNA, 19 nt, Homo sapiens
  misc_RNA (1)...(19): siRNA sense strand
gcaaugagauacuaccuua

SEQ ID NO: 2212546 - RNA, 19 nt, Homo sapiens
  misc_RNA (1)...(19): siRNA sense strand
gaugaaagauuaaguggua

SEQ ID NO: 2212547 - RNA, 19 nt, Homo sapiens
  misc_RNA (1)...(19): siRNA sense strand
gcaaggaucuucaacacua

SEQ ID NO: 2212548 - RNA, 19 nt, Homo sapiens
  misc_RNA (1)...(19): siRNA sense strand
gcaaauaguuguagauguu

SEQ ID NO: 2212549 - RNA, 19 nt, Homo sapiens
  misc_RNA (1)...(19): siRNA sense strand
uaaaggagauguccaauau

SEQ ID NO: 2212550 - RNA, 19 nt, Homo sapiens
  misc_RNA (1)...(19): siRNA sense strand
caaagaggcugcugaauca

SEQ ID NO: 2212551 - RNA, 19 nt, Homo sapiens
  misc_RNA (1)...(19): siRNA sense strand
gaacuuaagcuacuucaaa

SEQ ID NO: 2212552 - RNA, 19 nt, Homo sapiens
  misc_RNA (1)...(19): siRNA sense strand
gaaaggguauguccucuug

SEQ ID NO: 2212553 - RNA, 19 nt, Homo sapiens
  misc_RNA (1)...(19): siRNA sense strand
gaacgacacagagauauua

SEQ ID NO: 2212554 - RNA, 19 nt, Homo sapiens
  misc_RNA (1)...(19): siRNA sense strand
caaccaagcuggaaacaau

SEQ ID NO: 2212555 - RNA, 19 nt, Homo sapiens
  misc_RNA (1)...(19): siRNA sense strand
gaagaucacucagcuaugu

SEQ ID NO: 2212556 - RNA, 19 nt, Homo sapiens
  misc_RNA (1)...(19): siRNA sense strand
aaggagauguccaauauua

SEQ ID NO: 2212557 - RNA, 19 nt, Homo sapiens
  misc_RNA (1)...(19): siRNA sense strand
ugaagaagcugcuggagaa

SEQ ID NO: 2212558 - RNA, 19 nt, Homo sapiens
  misc_RNA (1)...(19): siRNA sense strand
gauauuugcugcagccuuu

SEQ ID NO: 2212559 - RNA, 19 nt, Homo sapiens
  misc_RNA (1)...(19): siRNA sense strand
gauaaucucucuauucaag

SEQ ID NO: 2212560 - RNA, 19 nt, Homo sapiens
  misc_RNA (1)...(19): siRNA sense strand
gaaagcacauggaaacuag

SEQ ID NO: 2212561 - RNA, 19 nt, Homo sapiens
  misc_RNA (1)...(19): siRNA sense strand
gcaauauucucauucauca

SEQ ID NO: 2212562 - RNA, 19 nt, Homo sapiens
  misc_RNA (1)...(19): siRNA sense strand
gauauggccuauggaaaua

SEQ ID NO: 2212563 - RNA, 19 nt, Homo sapiens
  misc_RNA (1)...(19): siRNA sense strand
cugaugagcuugaagauuu

SEQ ID NO: 2212564 - RNA, 19 nt, Homo sapiens
  misc_RNA (1)...(19): siRNA sense strand
gcacgaaacacugaaauuu

SEQ ID NO: 2212565 - RNA, 19 nt, Homo sapiens
  misc_RNA (1)...(19): siRNA sense strand
cauccaaacucucgaauga

SEQ ID NO: 2212566 - RNA, 19 nt, Homo sapiens
  misc_RNA (1)...(19): siRNA sense strand
agaaagugcuccagaauau

SEQ ID NO: 2212567 - RNA, 19 nt, Homo sapiens
  misc_RNA (1)...(19): siRNA sense strand
ggagaauccuugauacgaa

SEQ ID NO: 2212568 - RNA, 19 nt, Homo sapiens
  misc_RNA (1)...(19): siRNA sense strand
uaaaugcacugggaucuuu

SEQ ID NO: 2212569 - RNA, 19 nt, Homo sapiens
  misc_RNA (1)...(19): siRNA sense strand
ggaaauaccugggcacaag

SEQ ID NO: 2212570 - RNA, 19 nt, Homo sapiens
  misc_RNA (1)...(19): siRNA sense strand
caacagcagugaugacaga

SEQ ID NO: 2212571 - RNA, 19 nt, Homo sapiens
  misc_RNA (1)...(19): siRNA sense strand
uaggagagcuugaaacaga

SEQ ID NO: 2212572 - RNA, 19 nt, Homo sapiens
  misc_RNA (1)...(19): siRNA sense strand
gacugcagcuggaaauaua

SEQ ID NO: 2212573 - RNA, 19 nt, Homo sapiens
  misc_RNA (1)...(19): siRNA sense strand
gaaauucccaccugucaaa

SEQ ID NO: 2212574 - RNA, 19 nt, Homo sapiens
  misc_RNA (1)...(19): siRNA sense strand
gguauguccucuugugaua

SEQ ID NO: 2212575 - RNA, 19 nt, Homo sapiens
  misc_RNA (1)...(19): siRNA sense strand
aaacaaagcacauugcaaa

SEQ ID NO: 2212576 - RNA, 19 nt, Homo sapiens
  misc_RNA (1)...(19): siRNA sense strand
agaaguaguuguggauuua

SEQ ID NO: 2212577 - RNA, 19 nt, Homo sapiens
  misc_RNA (1)...(19): siRNA sense strand
ccucaaaccuugugcuaaa

SEQ ID NO: 2212578 - RNA, 19 nt, Homo sapiens
  misc_RNA (1)...(19): siRNA sense strand
gagaaagugcuccagaaua

SEQ ID NO: 2212579 - RNA, 19 nt, Homo sapiens
  misc_RNA (1)...(19): siRNA sense strand
ccaaauggauaaggaaauu

SEQ ID NO: 2212580 - RNA, 19 nt, Homo sapiens
  misc_RNA (1)...(19): siRNA sense strand
cgacagaacagcaggauuu

SEQ ID NO: 2212581 - RNA, 19 nt, Homo sapiens
  misc_RNA (1)...(19): siRNA sense strand
acaaagcaguggugaauga

SEQ ID NO: 2212582 - RNA, 19 nt, Homo sapiens
  misc_RNA (1)...(19): siRNA sense strand
uuaaagaggucccaagaug

SEQ ID NO: 2212583 - RNA, 19 nt, Homo sapiens
  misc_RNA (1)...(19): siRNA sense strand
gauacuaccuuaugccaau

SEQ ID NO: 2212584 - RNA, 19 nt, Homo sapiens
  misc_RNA (1)...(19): siRNA sense strand
ggacaguaaugcugacuuc

SEQ ID NO: 2212585 - RNA, 19 nt, Homo sapiens
  misc_RNA (1)...(19): siRNA sense strand
gaagagaaaggaguuguuu

SEQ ID NO: 2212586 - RNA, 19 nt, Homo sapiens
  misc_RNA (1)...(19): siRNA sense strand
cagcagugaugacagauuu

SEQ ID NO: 2212587 - RNA, 19 nt, Homo sapiens
  misc_RNA (1)...(19): siRNA sense strand
gaacagcucagagguugua

SEQ ID NO: 2212588 - RNA, 19 nt, Homo sapiens
  misc_RNA (1)...(19): siRNA sense strand
ggcagugggucaaccuuua

SEQ ID NO: 2212589 - RNA, 19 nt, Homo sapiens
  misc_RNA (1)...(19): siRNA sense strand
guucagggccaaaguguua

SEQ ID NO: 2212590 - RNA, 19 nt, Homo sapiens
  misc_RNA (1)...(19): siRNA sense strand
gaugguugcugaagaugaa

SEQ ID NO: 2212591 - RNA, 19 nt, Homo sapiens
  misc_RNA (1)...(19): siRNA sense strand
caacuuaucagcaaugaga

SEQ ID NO: 2212592 - RNA, 19 nt, Homo sapiens
  misc_RNA (1)...(19): siRNA sense strand
aaagugcuccagaauauua

SEQ ID NO: 2212593 - RNA, 19 nt, Homo sapiens
  misc_RNA (1)...(19): siRNA sense strand
agaauuggaucugaaagua

SEQ ID NO: 2212594 - RNA, 19 nt, Homo sapiens
  misc_RNA (1)...(19): siRNA sense strand
gguuaugucuuuaugcaaa

SEQ ID NO: 2212595 - RNA, 19 nt, Homo sapiens
  misc_RNA (1)...(19): siRNA sense strand
gcagcuggaaauauaauua

SEQ ID NO: 2212596 - RNA, 19 nt, Homo sapiens
  misc_RNA (1)...(19): siRNA sense strand
aacaagggcucaauacauu

SEQ ID NO: 2212597 - RNA, 19 nt, Homo sapiens
  misc_RNA (1)...(19): siRNA sense strand
aagcauaccuccagauaau

SEQ ID NO: 2212598 - RNA, 19 nt, Homo sapiens
  misc_RNA (1)...(19): siRNA sense strand
caauauggaugacuugcaa

SEQ ID NO: 2212599 - RNA, 19 nt, Homo sapiens
  misc_RNA (1)...(19): siRNA sense strand
guacuaagccuccuauuac

SEQ ID NO: 2212600 - RNA, 19 nt, Homo sapiens
  misc_RNA (1)...(19): siRNA sense strand
gcauggaacuuuauuacag

SEQ ID NO: 2212601 - RNA, 19 nt, Homo sapiens
  misc_RNA (1)...(19): siRNA sense strand
uucaagagaugccuuuaua

SEQ ID NO: 2212602 - RNA, 19 nt, Homo sapiens
  misc_RNA (1)...(19): siRNA sense strand
gaagauauaguagcucuga

SEQ ID NO: 2212603 - RNA, 19 nt, Homo sapiens
  misc_RNA (1)...(19): siRNA sense strand
gcugagacguggguauuaa

SEQ ID NO: 2212604 - RNA, 19 nt, Homo sapiens
  misc_RNA (1)...(19): siRNA sense strand
gaagguacucuuucaucua

SEQ ID NO: 2212605 - RNA, 19 nt, Homo sapiens
  misc_RNA (1)...(19): siRNA sense strand
gaugaacgacacagagaua

SEQ ID NO: 2212606 - RNA, 19 nt, Homo sapiens
  misc_RNA (1)...(19): siRNA sense strand
ucaguacucuuauugauuc

SEQ ID NO: 2212607 - RNA, 19 nt, Homo sapiens
  misc_RNA (1)...(19): siRNA sense strand
ccucagaguucuuucuauu

SEQ ID NO: 2212608 - RNA, 19 nt, Homo sapiens
  misc_RNA (1)...(19): siRNA sense strand
ggaagguacucuuucaucu

SEQ ID NO: 2212609 - RNA, 19 nt, Homo sapiens
  misc_RNA (1)...(19): siRNA sense strand
gcaguuagaaugcguguug

SEQ ID NO: 2212610 - RNA, 19 nt, Homo sapiens
  misc_RNA (1)...(19): siRNA sense strand
ggauauggccuauggaaau

SEQ ID NO: 2212611 - RNA, 19 nt, Homo sapiens
  misc_RNA (1)...(19): siRNA sense strand
gggaagaaauggugaaugc

SEQ ID NO: 2212612 - RNA, 19 nt, Homo sapiens
  misc_RNA (1)...(19): siRNA sense strand
aguaguaucuguucugauu

SEQ ID NO: 2212613 - RNA, 19 nt, Homo sapiens
  misc_RNA (1)...(19): siRNA sense strand
gaaaugacucggacguuug

SEQ ID NO: 2212614 - RNA, 19 nt, Homo sapiens
  misc_RNA (1)...(19): siRNA sense strand
ccaauacaguaguucauga

SEQ ID NO: 2212615 - RNA, 19 nt, Homo sapiens
  misc_RNA (1)...(19): siRNA sense strand
cacaguaucuugaugaugu

SEQ ID NO: 2212616 - RNA, 19 nt, Homo sapiens
  misc_RNA (1)...(19): siRNA sense strand
cagcuacacuuuccaacaa

SEQ ID NO: 2212617 - RNA, 19 nt, Homo sapiens
  misc_RNA (1)...(19): siRNA sense strand
gaaacagaaugucaaacca

SEQ ID NO: 2212618 - RNA, 19 nt, Homo sapiens
  misc_RNA (1)...(19): siRNA sense strand
ugggagagcuguagaagga

SEQ ID NO: 2212619 - RNA, 19 nt, Homo sapiens
  misc_RNA (1)...(19): siRNA sense strand
ucucagucaucuucauuua

SEQ ID NO: 2212620 - RNA, 19 nt, Homo sapiens
  misc_RNA (1)...(19): siRNA sense strand
gagcaggccauuuguaaga

SEQ ID NO: 2212621 - RNA, 19 nt, Homo sapiens
  misc_RNA (1)...(19): siRNA sense strand
agaaaugacucggacguuu

SEQ ID NO: 2212622 - RNA, 19 nt, Homo sapiens
  misc_RNA (1)...(19): siRNA sense strand
aaauauugaugucgaggua

SEQ ID NO: 2212623 - RNA, 19 nt, Homo sapiens
  misc_RNA (1)...(19): siRNA sense strand
ggaacuuuauuacagcauu

SEQ ID NO: 2212624 - RNA, 19 nt, Homo sapiens
  misc_RNA (1)...(19): siRNA sense strand
cagaaaugaucaaggagaa

SEQ ID NO: 2212625 - RNA, 19 nt, Homo sapiens
  misc_RNA (1)...(19): siRNA sense strand
gaaccuggauaccuauucu

SEQ ID NO: 2212626 - RNA, 19 nt, Homo sapiens
  misc_RNA (1)...(19): siRNA sense strand
gaggaugguugcugaagau

SEQ ID NO: 2212627 - RNA, 19 nt, Homo sapiens
  misc_RNA (1)...(19): siRNA sense strand
cacaaguaauugccuuaua

SEQ ID NO: 2212628 - RNA, 19 nt, Homo sapiens
  misc_RNA (1)...(19): siRNA sense strand
uagaaguaguuguggauuu

SEQ ID NO: 2212629 - RNA, 19 nt, Homo sapiens
  misc_RNA (1)...(19): siRNA sense strand
gaacuuuauuacagcauuc

SEQ ID NO: 2212630 - RNA, 19 nt, Homo sapiens
  misc_RNA (1)...(19): siRNA sense strand
ggagauguccaauauuaau

SEQ ID NO: 2212631 - RNA, 19 nt, Homo sapiens
  misc_RNA (1)...(19): siRNA sense strand
gacuauggcugcucuuugu

SEQ ID NO: 2212632 - RNA, 19 nt, Homo sapiens
  misc_RNA (1)...(19): siRNA sense strand
caucagaccaaauggauaa

SEQ ID NO: 2212633 - RNA, 19 nt, Homo sapiens
  misc_RNA (1)...(19): siRNA sense strand
ugugcagccucaacuauua

SEQ ID NO: 2212634 - RNA, 19 nt, Homo sapiens
  misc_RNA (1)...(19): siRNA sense strand
ggaaauaguaacagaagau

SEQ ID NO: 2212635 - RNA, 19 nt, Homo sapiens
  misc_RNA (1)...(19): siRNA sense strand
aaagaggucccaagaugua

SEQ ID NO: 2212636 - RNA, 19 nt, Homo sapiens
  misc_RNA (1)...(19): siRNA sense strand
ggaacaucauggcaacuug

SEQ ID NO: 2212637 - RNA, 19 nt, Homo sapiens
  misc_RNA (1)...(19): siRNA sense strand
ccauuaugcucuuacugua

SEQ ID NO: 2212638 - RNA, 19 nt, Homo sapiens
  misc_RNA (1)...(19): siRNA sense strand
ggaagacugggccuuguaa

SEQ ID NO: 2212639 - RNA, 19 nt, Homo sapiens
  misc_RNA (1)...(19): siRNA sense strand
ggccagaacuagccaauac

SEQ ID NO: 2212640 - RNA, 19 nt, Homo sapiens
  misc_RNA (1)...(19): siRNA sense strand
uguaugaggacuuuacuua

SEQ ID NO: 2212641 - RNA, 19 nt, Homo sapiens
  misc_RNA (1)...(19): siRNA sense strand
ccaaaguguuaugaugaua

SEQ ID NO: 2212642 - RNA, 19 nt, Homo sapiens
  misc_RNA (1)...(19): siRNA sense strand
gcaacaaguaacagaaauu

SEQ ID NO: 2212643 - RNA, 19 nt, Homo sapiens
  misc_RNA (1)...(19): siRNA sense strand
guauagaauuggaucugaa

SEQ ID NO: 2212644 - RNA, 19 nt, Homo sapiens
  misc_RNA (1)...(19): siRNA sense strand
agacguggguauuaacauu

SEQ ID NO: 2212645 - RNA, 19 nt, Homo sapiens
  misc_RNA (1)...(19): siRNA sense strand
gaacacagcuuugaaugaa

SEQ ID NO: 2212646 - RNA, 19 nt, Homo sapiens
  misc_RNA (1)...(19): siRNA sense strand
gcaguaaucucaucacaaa

SEQ ID NO: 2212647 - RNA, 19 nt, Homo sapiens
  misc_RNA (1)...(19): siRNA sense strand
gaacgaauaucuccuaaca

SEQ ID NO: 2212648 - RNA, 19 nt, Homo sapiens
  misc_RNA (1)...(19): siRNA sense strand
gaacagagcccuaagaaca

SEQ ID NO: 2212649 - RNA, 19 nt, Homo sapiens
  misc_RNA (1)...(19): siRNA sense strand
ggauauggaugauacguuu

SEQ ID NO: 2212650 - RNA, 19 nt, Homo sapiens
  misc_RNA (1)...(19): siRNA sense strand
gcgaagcucuguaaagaaa

SEQ ID NO: 2212651 - RNA, 19 nt, Homo sapiens
  misc_RNA (1)...(19): siRNA sense strand
gcaaacuccuccugacuuu

SEQ ID NO: 2212652 - RNA, 19 nt, Homo sapiens
  misc_RNA (1)...(19): siRNA sense strand
caugagggcuuagacauua

SEQ ID NO: 2212653 - RNA, 19 nt, Homo sapiens
  misc_RNA (1)...(19): siRNA sense strand
gaauaucuccuaacacuug

SEQ ID NO: 2212654 - RNA, 19 nt, Homo sapiens
  misc_RNA (1)...(19): siRNA sense strand
gauccagucuuccauauuc

SEQ ID NO: 2212655 - RNA, 19 nt, Homo sapiens
  misc_RNA (1)...(19): siRNA sense strand
ucaaucaucuaucacagua

SEQ ID NO: 2212656 - RNA, 19 nt, Homo sapiens
  misc_RNA (1)...(19): siRNA sense strand
gaaugaagagguuaagaaa

SEQ ID NO: 2212657 - RNA, 19 nt, Homo sapiens
  misc_RNA (1)...(19): siRNA sense strand
cgacagcccucccauuaga

SEQ ID NO: 2212658 - RNA, 19 nt, Homo sapiens
  misc_RNA (1)...(19): siRNA sense strand
guaugaaagucaagucaaa

SEQ ID NO: 2212659 - RNA, 19 nt, Homo sapiens
  misc_RNA (1)...(19): siRNA sense strand
ggacuaugauguuucugaa

SEQ ID NO: 2212660 - RNA, 19 nt, Homo sapiens
  misc_RNA (1)...(19): siRNA sense strand
gaaagucaagucaaagaaa

SEQ ID NO: 2212661 - RNA, 19 nt, Homo sapiens
  misc_RNA (1)...(19): siRNA sense strand
ccacacaagugaagaugaa

SEQ ID NO: 2212662 - RNA, 19 nt, Homo sapiens
  misc_RNA (1)...(19): siRNA sense strand
gaaguccacugucucugaa

SEQ ID NO: 2212663 - RNA, 19 nt, Homo sapiens
  misc_RNA (1)...(19): siRNA sense strand
gcacaugugaaugaaauua

SEQ ID NO: 2212664 - RNA, 19 nt, Homo sapiens
  misc_RNA (1)...(19): siRNA sense strand
gcaaagaccaugcaaccuu

SEQ ID NO: 2212665 - RNA, 19 nt, Homo sapiens
  misc_RNA (1)...(19): siRNA sense strand
guacagcgaugagaauaug

SEQ ID NO: 2212666 - RNA, 19 nt, Homo sapiens
  misc_RNA (1)...(19): siRNA sense strand
uuaacgaucugauuucuug

SEQ ID NO: 2212667 - RNA, 19 nt, Homo sapiens
  misc_RNA (1)...(19): siRNA sense strand
gcacagucguuccacagaa

SEQ ID NO: 2212668 - RNA, 19 nt, Homo sapiens
  misc_RNA (1)...(19): siRNA sense strand
gaucuuggcuaccaugcaa

SEQ ID NO: 2212669 - RNA, 19 nt, Homo sapiens
  misc_RNA (1)...(19): siRNA sense strand
gagcucaacugguagaaca

SEQ ID NO: 2212670 - RNA, 19 nt, Homo sapiens
  misc_RNA (1)...(19): siRNA sense strand
gacaauugcucaggauauu

SEQ ID NO: 2212671 - RNA, 19 nt, Homo sapiens
  misc_RNA (1)...(19): siRNA sense strand
agaauaugauggacccuua

SEQ ID NO: 2212672 - RNA, 19 nt, Homo sapiens
  misc_RNA (1)...(19): siRNA sense strand
ucaugaaacucagagaaua

SEQ ID NO: 2212673 - RNA, 19 nt, Homo sapiens
  misc_RNA (1)...(19): siRNA sense strand
gagauugcauuccaacuuc

SEQ ID NO: 2212674 - RNA, 19 nt, Homo sapiens
  misc_RNA (1)...(19): siRNA sense strand
cuaaggaucaucaacaaua

SEQ ID NO: 2212675 - RNA, 19 nt, Homo sapiens
  misc_RNA (1)...(19): siRNA sense strand
gcuuagacauuauugagaa

SEQ ID NO: 2212676 - RNA, 19 nt, Homo sapiens
  misc_RNA (1)...(19): siRNA sense strand
ccagagaacuauccuucaa

SEQ ID NO: 2212677 - RNA, 19 nt, Homo sapiens
  misc_RNA (1)...(19): siRNA sense strand
cagaguaaccaugauauua

SEQ ID NO: 2212678 - RNA, 19 nt, Homo sapiens
  misc_RNA (1)...(19): siRNA sense strand
ggucauagagcugaauaua

SEQ ID NO: 2212679 - RNA, 19 nt, Homo sapiens
  misc_RNA (1)...(19): siRNA sense strand
caaagaaauucgagcucaa

SEQ ID NO: 2212680 - RNA, 19 nt, Homo sapiens
  misc_RNA (1)...(19): siRNA sense strand
cggcgaagcucuguaaaga

SEQ ID NO: 2212681 - RNA, 19 nt, Homo sapiens
  misc_RNA (1)...(19): siRNA sense strand
cagaaagguucauggcaaa

SEQ ID NO: 2212682 - RNA, 19 nt, Homo sapiens
  misc_RNA (1)...(19): siRNA sense strand
gcacuaaggaucaucaaca

SEQ ID NO: 2212683 - RNA, 19 nt, Homo sapiens
  misc_RNA (1)...(19): siRNA sense strand
gaagacaaguccucaucca

SEQ ID NO: 2212684 - RNA, 19 nt, Homo sapiens
  misc_RNA (1)...(19): siRNA sense strand
cuuauaaccuggccauuug

SEQ ID NO: 2212685 - RNA, 19 nt, Homo sapiens
  misc_RNA (1)...(19): siRNA sense strand
cuacaaggccuccaaaugu

SEQ ID NO: 2212686 - RNA, 19 nt, Homo sapiens
  misc_RNA (1)...(19): siRNA sense strand
gcagauaagugaggauucu

SEQ ID NO: 2212687 - RNA, 19 nt, Homo sapiens
  misc_RNA (1)...(19): siRNA sense strand
caacggcgaagcucuguaa

SEQ ID NO: 2212688 - RNA, 19 nt, Homo sapiens
  misc_RNA (1)...(19): siRNA sense strand
gaaacucagagaauauuug

SEQ ID NO: 2212689 - RNA, 19 nt, Homo sapiens
  misc_RNA (1)...(19): siRNA sense strand
ucugaaaccuaccugagua

SEQ ID NO: 2212690 - RNA, 19 nt, Homo sapiens
  misc_RNA (1)...(19): siRNA sense strand
caaagagauugcauuccaa

SEQ ID NO: 2212691 - RNA, 19 nt, Homo sapiens
  misc_RNA (1)...(19): siRNA sense strand
cuagagaaguuagcagaaa

SEQ ID NO: 2212692 - RNA, 19 nt, Homo sapiens
  misc_RNA (1)...(19): siRNA sense strand
ggaaggcaguaaucucauc

SEQ ID NO: 2212693 - RNA, 19 nt, Homo sapiens
  misc_RNA (1)...(19): siRNA sense strand
gacaagucaugcacaaugu

SEQ ID NO: 2212694 - RNA, 19 nt, Homo sapiens
  misc_RNA (1)...(19): siRNA sense strand
gaaggacaaagagaucaua

SEQ ID NO: 2212695 - RNA, 19 nt, Homo sapiens
  misc_RNA (1)...(19): siRNA sense strand
caagugaagaugaauguga

SEQ ID NO: 2212696 - RNA, 19 nt, Homo sapiens
  misc_RNA (1)...(19): siRNA sense strand
gaaauugagacggaauauu

SEQ ID NO: 2212697 - RNA, 19 nt, Homo sapiens
  misc_RNA (1)...(19): siRNA sense strand
gcaauacacgggcuucaau

SEQ ID NO: 2212698 - RNA, 19 nt, Homo sapiens
  misc_RNA (1)...(19): siRNA sense strand
gaccagaguaaccaugaua

SEQ ID NO: 2212699 - RNA, 19 nt, Homo sapiens
  misc_RNA (1)...(19): siRNA sense strand
ccaaugaaguuugaguuuc

SEQ ID NO: 2212700 - RNA, 19 nt, Homo sapiens
  misc_RNA (1)...(19): siRNA sense strand
ugagugacaucuaucugaa

SEQ ID NO: 2212701 - RNA, 19 nt, Homo sapiens
  misc_RNA (1)...(19): siRNA sense strand
gaucaucaacaauacaaga

SEQ ID NO: 2212702 - RNA, 19 nt, Homo sapiens
  misc_RNA (1)...(19): siRNA sense strand
agagaacuauccuucaaga

SEQ ID NO: 2212703 - RNA, 19 nt, Homo sapiens
  misc_RNA (1)...(19): siRNA sense strand
uacaaggccuccaaauguu

SEQ ID NO: 2212704 - RNA, 19 nt, Homo sapiens
  misc_RNA (1)...(19): siRNA sense strand
acagagcccuaagaacaua

SEQ ID NO: 2212705 - RNA, 19 nt, Homo sapiens
  misc_RNA (1)...(19): siRNA sense strand
gcagagagcaagcugaaag

SEQ ID NO: 2212706 - RNA, 19 nt, Homo sapiens
  misc_RNA (1)...(19): siRNA sense strand
gaaagaccagaaccuguug

SEQ ID NO: 2212707 - RNA, 19 nt, Homo sapiens
  misc_RNA (1)...(19): siRNA sense strand
gaaugggcgugcagcugaa

SEQ ID NO: 2212708 - RNA, 19 nt, Homo sapiens
  misc_RNA (1)...(19): siRNA sense strand
uagaagcaauagccaaguu

SEQ ID NO: 2212709 - RNA, 19 nt, Homo sapiens
  misc_RNA (1)...(19): siRNA sense strand
aauucgagcucaacuggua

SEQ ID NO: 2212710 - RNA, 19 nt, Homo sapiens
  misc_RNA (1)...(19): siRNA sense strand
gagaaugcaguugauaauu

SEQ ID NO: 2212711 - RNA, 19 nt, Homo sapiens
  misc_RNA (1)...(19): siRNA sense strand
ccaacuucaugaggauuua

SEQ ID NO: 2212712 - RNA, 19 nt, Homo sapiens
  misc_RNA (1)...(19): siRNA sense strand
gauucuaccaggauguuua

SEQ ID NO: 2212713 - RNA, 19 nt, Homo sapiens
  misc_RNA (1)...(19): siRNA sense strand
aaauugagacggaauauuc

SEQ ID NO: 2212714 - RNA, 19 nt, Homo sapiens
  misc_RNA (1)...(19): siRNA sense strand
aaacggagaugcgaguuca

SEQ ID NO: 2212715 - RNA, 19 nt, Homo sapiens
  misc_RNA (1)...(19): siRNA sense strand
uagccaaguuugacuaugu

SEQ ID NO: 2212716 - RNA, 19 nt, Homo sapiens
  misc_RNA (1)...(19): siRNA sense strand
uaaccuggccauuugcuuu

SEQ ID NO: 2212717 - RNA, 19 nt, Homo sapiens
  misc_RNA (1)...(19): siRNA sense strand
cuugaaaccuccagacaug

SEQ ID NO: 2212718 - RNA, 19 nt, Homo sapiens
  misc_RNA (1)...(19): siRNA sense strand
ugacaucuaucugaacaau

SEQ ID NO: 2212719 - RNA, 19 nt, Homo sapiens
  misc_RNA (1)...(19): siRNA sense strand
caagaagcacuaaggauca

SEQ ID NO: 2212720 - RNA, 19 nt, Homo sapiens
  misc_RNA (1)...(19): siRNA sense strand
caagucaugcacaauguaa

SEQ ID NO: 2212721 - RNA, 19 nt, Homo sapiens
  misc_RNA (1)...(19): siRNA sense strand
cggaaucucucagcccuuu

SEQ ID NO: 2212722 - RNA, 19 nt, Homo sapiens
  misc_RNA (1)...(19): siRNA sense strand
gcacgacucccucaagaag

SEQ ID NO: 2212723 - RNA, 19 nt, Homo sapiens
  misc_RNA (1)...(19): siRNA sense strand
gaagcaauagccaaguuug

SEQ ID NO: 2212724 - RNA, 19 nt, Homo sapiens
  misc_RNA (1)...(19): siRNA sense strand
agagauucauggagaugua

SEQ ID NO: 2212725 - RNA, 19 nt, Homo sapiens
  misc_RNA (1)...(19): siRNA sense strand
gguauuugcuccugaacca

SEQ ID NO: 2212726 - RNA, 19 nt, Homo sapiens
  misc_RNA (1)...(19): siRNA sense strand
gaugaacacagcuuugaau

SEQ ID NO: 2212727 - RNA, 19 nt, Homo sapiens
  misc_RNA (1)...(19): siRNA sense strand
gcccaggucgguccuuaua

SEQ ID NO: 2212728 - RNA, 19 nt, Homo sapiens
  misc_RNA (1)...(19): siRNA sense strand
gcagaaccguggccucaac

SEQ ID NO: 2212729 - RNA, 19 nt, Homo sapiens
  misc_RNA (1)...(19): siRNA sense strand
gaaauacaggaucaagugu

SEQ ID NO: 2212730 - RNA, 19 nt, Homo sapiens
  misc_RNA (1)...(19): siRNA sense strand
acuaugauguuucugaaug

SEQ ID NO: 2212731 - RNA, 19 nt, Homo sapiens
  misc_RNA (1)...(19): siRNA sense strand
agaugaaugugagccaaua

SEQ ID NO: 2212732 - RNA, 19 nt, Homo sapiens
  misc_RNA (1)...(19): siRNA sense strand
ggauggcccuguuuaugag

SEQ ID NO: 2212733 - RNA, 19 nt, Homo sapiens
  misc_RNA (1)...(19): siRNA sense strand
ucuauggucuucagcauca

SEQ ID NO: 2212734 - RNA, 19 nt, Homo sapiens
  misc_RNA (1)...(19): siRNA sense strand
cugaauauaugacuacaag

SEQ ID NO: 2212735 - RNA, 19 nt, Homo sapiens
  misc_RNA (1)...(19): siRNA sense strand
caucaacaauacaagaaag

SEQ ID NO: 2212736 - RNA, 19 nt, Homo sapiens
  misc_RNA (1)...(19): siRNA sense strand
ccacaugcccuuucuaacu

SEQ ID NO: 2212737 - RNA, 19 nt, Homo sapiens
  misc_RNA (1)...(19): siRNA sense strand
ccaggucgguccuuauagu

SEQ ID NO: 2212738 - RNA, 19 nt, Homo sapiens
  misc_RNA (1)...(19): siRNA sense strand
ggacucaggacagguuauu

SEQ ID NO: 2212739 - RNA, 19 nt, Homo sapiens
  misc_RNA (1)...(19): siRNA sense strand
ccaaccagcaggaaacuga

SEQ ID NO: 2212740 - RNA, 19 nt, Homo sapiens
  misc_RNA (1)...(19): siRNA sense strand
uaaggaucaucaacaauac

SEQ ID NO: 2212741 - RNA, 19 nt, Homo sapiens
  misc_RNA (1)...(19): siRNA sense strand
gcacgagcuccuccaguga

SEQ ID NO: 2212742 - RNA, 19 nt, Homo sapiens
  misc_RNA (1)...(19): siRNA sense strand
gaguaaccaugauauuaac

SEQ ID NO: 2212743 - RNA, 19 nt, Homo sapiens
  misc_RNA (1)...(19): siRNA sense strand
uuaaggcacggaacgaaua

SEQ ID NO: 2212744 - RNA, 19 nt, Homo sapiens
  misc_RNA (1)...(19): siRNA sense strand
gauauugaagaaacgauga

SEQ ID NO: 2212745 - RNA, 19 nt, Homo sapiens
  misc_RNA (1)...(19): siRNA sense strand
gcacuucagucaacuuaaa

SEQ ID NO: 2212746 - RNA, 19 nt, Homo sapiens
  misc_RNA (1)...(19): siRNA sense strand
gaagaauucagguacuuua

SEQ ID NO: 2212747 - RNA, 19 nt, Homo sapiens
  misc_RNA (1)...(19): siRNA sense strand
gaagggagcacuauuuaau

SEQ ID NO: 2212748 - RNA, 19 nt, Homo sapiens
  misc_RNA (1)...(19): siRNA sense strand
gaaaucagccaacacauuc

SEQ ID NO: 2212749 - RNA, 19 nt, Homo sapiens
  misc_RNA (1)...(19): siRNA sense strand
ccauugaccugauugauga

SEQ ID NO: 2212750 - RNA, 19 nt, Homo sapiens
  misc_RNA (1)...(19): siRNA sense strand
gauaauguccuuucuacaa

SEQ ID NO: 2212751 - RNA, 19 nt, Homo sapiens
  misc_RNA (1)...(19): siRNA sense strand
gaggauacuuucuuuacuu

SEQ ID NO: 2212752 - RNA, 19 nt, Homo sapiens
  misc_RNA (1)...(19): siRNA sense strand
uaaaguagcagcccagaaa

SEQ ID NO: 2212753 - RNA, 19 nt, Homo sapiens
  misc_RNA (1)...(19): siRNA sense strand
guauugauguucagagaaa

SEQ ID NO: 2212754 - RNA, 19 nt, Homo sapiens
  misc_RNA (1)...(19): siRNA sense strand
ggauaagaaugcacuacaa

SEQ ID NO: 2212755 - RNA, 19 nt, Homo sapiens
  misc_RNA (1)...(19): siRNA sense strand
caaccuaccauucaacuuu

SEQ ID NO: 2212756 - RNA, 19 nt, Homo sapiens
  misc_RNA (1)...(19): siRNA sense strand
ccagugaccuuuucuauuu

SEQ ID NO: 2212757 - RNA, 19 nt, Homo sapiens
  misc_RNA (1)...(19): siRNA sense strand
uaagaagggagcacuauuu

SEQ ID NO: 2212758 - RNA, 19 nt, Homo sapiens
  misc_RNA (1)...(19): siRNA sense strand
caucacgccugaacacauu

SEQ ID NO: 2212759 - RNA, 19 nt, Homo sapiens
  misc_RNA (1)...(19): siRNA sense strand
gagaagaauucagguacuu

SEQ ID NO: 2212760 - RNA, 19 nt, Homo sapiens
  misc_RNA (1)...(19): siRNA sense strand
gccaagcaguucuguugua

SEQ ID NO: 2212761 - RNA, 19 nt, Homo sapiens
  misc_RNA (1)...(19): siRNA sense strand
acaagaaagucaaggaaga

SEQ ID NO: 2212762 - RNA, 19 nt, Homo sapiens
  misc_RNA (1)...(19): siRNA sense strand
ugaggaggauacuuucuuu

SEQ ID NO: 2212763 - RNA, 19 nt, Homo sapiens
  misc_RNA (1)...(19): siRNA sense strand
ggcaugcauugaaauuaua

SEQ ID NO: 2212764 - RNA, 19 nt, Homo sapiens
  misc_RNA (1)...(19): siRNA sense strand
gauaagaaugcacuacaaa

SEQ ID NO: 2212765 - RNA, 19 nt, Homo sapiens
  misc_RNA (1)...(19): siRNA sense strand
aaacaaacuucaugaguac

SEQ ID NO: 2212766 - RNA, 19 nt, Homo sapiens
  misc_RNA (1)...(19): siRNA sense strand
caaacagugucaggaaauu

SEQ ID NO: 2212767 - RNA, 19 nt, Homo sapiens
  misc_RNA (1)...(19): siRNA sense strand
ugauucagcuuuagucaga

SEQ ID NO: 2212768 - RNA, 19 nt, Homo sapiens
  misc_RNA (1)...(19): siRNA sense strand
cuacagcacuuuuauauga

SEQ ID NO: 2212769 - RNA, 19 nt, Homo sapiens
  misc_RNA (1)...(19): siRNA sense strand
gaauaacuacagagaagaa

SEQ ID NO: 2212770 - RNA, 19 nt, Homo sapiens
  misc_RNA (1)...(19): siRNA sense strand
ugagauacuucuggucuuu

SEQ ID NO: 2212771 - RNA, 19 nt, Homo sapiens
  misc_RNA (1)...(19): siRNA sense strand
agaaccacauccucaagua

SEQ ID NO: 2212772 - RNA, 19 nt, Homo sapiens
  misc_RNA (1)...(19): siRNA sense strand
aagaagggagcacuauuua

SEQ ID NO: 2212773 - RNA, 19 nt, Homo sapiens
  misc_RNA (1)...(19): siRNA sense strand
caacaagaaagucaaggaa

SEQ ID NO: 2212774 - RNA, 19 nt, Homo sapiens
  misc_RNA (1)...(19): siRNA sense strand
uggcaugcauugaaauuau

SEQ ID NO: 2212775 - RNA, 19 nt, Homo sapiens
  misc_RNA (1)...(19): siRNA sense strand
ucaugaaguucugaaauug

SEQ ID NO: 2212776 - RNA, 19 nt, Homo sapiens
  misc_RNA (1)...(19): siRNA sense strand
ggaggauacuuucuuuacu

SEQ ID NO: 2212777 - RNA, 19 nt, Homo sapiens
  misc_RNA (1)...(19): siRNA sense strand
guaaacaaacuucaugagu

SEQ ID NO: 2212778 - RNA, 19 nt, Homo sapiens
  misc_RNA (1)...(19): siRNA sense strand
gaggaggauacuuucuuua

SEQ ID NO: 2212779 - RNA, 19 nt, Homo sapiens
  misc_RNA (1)...(19): siRNA sense strand
gaaccacauccucaaguau

SEQ ID NO: 2212780 - RNA, 19 nt, Homo sapiens
  misc_RNA (1)...(19): siRNA sense strand
ggagcacuauuuaaucucu

SEQ ID NO: 2212781 - RNA, 19 nt, Homo sapiens
  misc_RNA (1)...(19): siRNA sense strand
aaacagaaaccgagucauc

SEQ ID NO: 2212782 - RNA, 19 nt, Homo sapiens
  misc_RNA (1)...(19): siRNA sense strand
ucaaguauguggugcuaag

SEQ ID NO: 2212783 - RNA, 19 nt, Homo sapiens
  misc_RNA (1)...(19): siRNA sense strand
agaaaucagccaacacauu

SEQ ID NO: 2212784 - RNA, 19 nt, Homo sapiens
  misc_RNA (1)...(19): siRNA sense strand
uaacuacagagaagaauuc

SEQ ID NO: 2212785 - RNA, 19 nt, Homo sapiens
  misc_RNA (1)...(19): siRNA sense strand
gcaaagaguccagaagucu

SEQ ID NO: 2212786 - RNA, 19 nt, Homo sapiens
  misc_RNA (1)...(19): siRNA sense strand
caagaaagucaaggaagaa

SEQ ID NO: 2212787 - RNA, 19 nt, Homo sapiens
  misc_RNA (1)...(19): siRNA sense strand
gucaaacagugucaggaaa

SEQ ID NO: 2212788 - RNA, 19 nt, Homo sapiens
  misc_RNA (1)...(19): siRNA sense strand
aaauuaagcacuucaguca

SEQ ID NO: 2212789 - RNA, 19 nt, Homo sapiens
  misc_RNA (1)...(19): siRNA sense strand
guucugaaauugguugaau

SEQ ID NO: 2212790 - RNA, 19 nt, Homo sapiens
  misc_RNA (1)...(19): siRNA sense strand
ucacucaaccuaccauuca

SEQ ID NO: 2212791 - RNA, 19 nt, Homo sapiens
  misc_RNA (1)...(19): siRNA sense strand
acacauucguaucaucuau

SEQ ID NO: 2212792 - RNA, 19 nt, Homo sapiens
  misc_RNA (1)...(19): siRNA sense strand
ugaacacauuggcagcuaa

SEQ ID NO: 2212793 - RNA, 19 nt, Homo sapiens
  misc_RNA (1)...(19): siRNA sense strand
caaacuucaugaguacuug

SEQ ID NO: 2212794 - RNA, 19 nt, Homo sapiens
  misc_RNA (1)...(19): siRNA sense strand
cuaaagcuaacaacaagaa

SEQ ID NO: 2212795 - RNA, 19 nt, Homo sapiens
  misc_RNA (1)...(19): siRNA sense strand
cguaucaucuauucuucaa

SEQ ID NO: 2212796 - RNA, 19 nt, Homo sapiens
  misc_RNA (1)...(19): siRNA sense strand
aggaauaacuacagagaag

SEQ ID NO: 2212797 - RNA, 19 nt, Homo sapiens
  misc_RNA (1)...(19): siRNA sense strand
gcuaacaacaagaaaguca

SEQ ID NO: 2212798 - RNA, 19 nt, Homo sapiens
  misc_RNA (1)...(19): siRNA sense strand
caacacauucguaucaucu

SEQ ID NO: 2212799 - RNA, 19 nt, Homo sapiens
  misc_RNA (1)...(19): siRNA sense strand
gaacagccgccuggaugug

SEQ ID NO: 2212800 - RNA, 19 nt, Homo sapiens
  misc_RNA (1)...(19): siRNA sense strand
guccucccaucauuacuuu

SEQ ID NO: 2212801 - RNA, 19 nt, Homo sapiens
  misc_RNA (1)...(19): siRNA sense strand
aagcuguccucccaucauu

SEQ ID NO: 2212802 - RNA, 19 nt, Homo sapiens
  misc_RNA (1)...(19): siRNA sense strand
aaucuuguccuguguuuga

SEQ ID NO: 2212803 - RNA, 19 nt, Homo sapiens
  misc_RNA (1)...(19): siRNA sense strand
gaagaccagugaccuuuuc

SEQ ID NO: 2212804 - RNA, 19 nt, Homo sapiens
  misc_RNA (1)...(19): siRNA sense strand
uacuaaagcuaacaacaag

SEQ ID NO: 2212805 - RNA, 19 nt, Homo sapiens
  misc_RNA (1)...(19): siRNA sense strand
cugaaagaaucuccucuca

SEQ ID NO: 2212806 - RNA, 19 nt, Homo sapiens
  misc_RNA (1)...(19): siRNA sense strand
gaccggcucgucuaccuaa

SEQ ID NO: 2212807 - RNA, 19 nt, Homo sapiens
  misc_RNA (1)...(19): siRNA sense strand
ggaauaacuacagagaaga

SEQ ID NO: 2212808 - RNA, 19 nt, Homo sapiens
  misc_RNA (1)...(19): siRNA sense strand
uggauaauguccuuucuac

SEQ ID NO: 2212809 - RNA, 19 nt, Homo sapiens
  misc_RNA (1)...(19): siRNA sense strand
uaguauugauguucagaga

SEQ ID NO: 2212810 - RNA, 19 nt, Homo sapiens
  misc_RNA (1)...(19): siRNA sense strand
ccucaaguauguggugcua

SEQ ID NO: 2212811 - RNA, 19 nt, Homo sapiens
  misc_RNA (1)...(19): siRNA sense strand
gccauugaccugauugaug

SEQ ID NO: 2212812 - RNA, 19 nt, Homo sapiens
  misc_RNA (1)...(19): siRNA sense strand
gaagcuuauucuggaguau

SEQ ID NO: 2212813 - RNA, 19 nt, Homo sapiens
  misc_RNA (1)...(19): siRNA sense strand
gagcugguggcaugcauug

SEQ ID NO: 2212814 - RNA, 19 nt, Homo sapiens
  misc_RNA (1)...(19): siRNA sense strand
gcugguggcaugcauugaa

SEQ ID NO: 2212815 - RNA, 19 nt, Homo sapiens
  misc_RNA (1)...(19): siRNA sense strand
agaaaaggcucccauugug

SEQ ID NO: 2212816 - RNA, 19 nt, Homo sapiens
  misc_RNA (1)...(19): siRNA sense strand
ucagguacuuuauucacau

SEQ ID NO: 2212817 - RNA, 19 nt, Homo sapiens
  misc_RNA (1)...(19): siRNA sense strand
gaacacauuggcagcuaag

SEQ ID NO: 2212818 - RNA, 19 nt, Homo sapiens
  misc_RNA (1)...(19): siRNA sense strand
gaagcaaagaguccagaag

SEQ ID NO: 2212819 - RNA, 19 nt, Homo sapiens
  misc_RNA (1)...(19): siRNA sense strand
gcugaguuacagaagcuua

SEQ ID NO: 2212820 - RNA, 19 nt, Homo sapiens
  misc_RNA (1)...(19): siRNA sense strand
ugaguucgccagauagaga

SEQ ID NO: 2212821 - RNA, 19 nt, Homo sapiens
  misc_RNA (1)...(19): siRNA sense strand
gagcacuauuuaaucucuu

SEQ ID NO: 2212822 - RNA, 19 nt, Homo sapiens
  misc_RNA (1)...(19): siRNA sense strand
agaagggagcacuauuuaa

SEQ ID NO: 2212823 - RNA, 19 nt, Homo sapiens
  misc_RNA (1)...(19): siRNA sense strand
ccaacacauucguaucauc

SEQ ID NO: 2212824 - RNA, 19 nt, Homo sapiens
  misc_RNA (1)...(19): siRNA sense strand
gcuaagaagggagcacuau

SEQ ID NO: 2212825 - RNA, 19 nt, Homo sapiens
  misc_RNA (1)...(19): siRNA sense strand
ggaacagccgccuggaugu

SEQ ID NO: 2212826 - RNA, 19 nt, Homo sapiens
  misc_RNA (1)...(19): siRNA sense strand
ggucugaggagaaaauuaa

SEQ ID NO: 2212827 - RNA, 19 nt, Homo sapiens
  misc_RNA (1)...(19): siRNA sense strand
ucaaacagugucaggaaau

SEQ ID NO: 2212828 - RNA, 19 nt, Homo sapiens
  misc_RNA (1)...(19): siRNA sense strand
acagagaagaauucaggua

SEQ ID NO: 2212829 - RNA, 19 nt, Homo sapiens
  misc_RNA (1)...(19): siRNA sense strand
ccaagcaguucuguuguac

SEQ ID NO: 2212830 - RNA, 19 nt, Homo sapiens
  misc_RNA (1)...(19): siRNA sense strand
gggauaagaaugcacuaca

SEQ ID NO: 2212831 - RNA, 19 nt, Homo sapiens
  misc_RNA (1)...(19): siRNA sense strand
gagaaccacauccucaagu

SEQ ID NO: 2212832 - RNA, 19 nt, Homo sapiens
  misc_RNA (1)...(19): siRNA sense strand
aagcacuucagucaacuua

SEQ ID NO: 2212833 - RNA, 19 nt, Homo sapiens
  misc_RNA (1)...(19): siRNA sense strand
gguggcaugcauugaaauu

SEQ ID NO: 2212834 - RNA, 19 nt, Homo sapiens
  misc_RNA (1)...(19): siRNA sense strand
uagcugaguauauuaggaa

SEQ ID NO: 2212835 - RNA, 19 nt, Homo sapiens
  misc_RNA (1)...(19): siRNA sense strand
agagaaaucagccaacaca

SEQ ID NO: 2212836 - RNA, 19 nt, Homo sapiens
  misc_RNA (1)...(19): siRNA sense strand
acauucguaucaucuauuc

SEQ ID NO: 2212837 - RNA, 19 nt, Homo sapiens
  misc_RNA (1)...(19): siRNA sense strand
aaaggcucccauuguguua

SEQ ID NO: 2212838 - RNA, 19 nt, Homo sapiens
  misc_RNA (1)...(19): siRNA sense strand
uugaccugauugaugauua

SEQ ID NO: 2212839 - RNA, 19 nt, Homo sapiens
  misc_RNA (1)...(19): siRNA sense strand
gggacgucguggccauuga

SEQ ID NO: 2212840 - RNA, 19 nt, Homo sapiens
  misc_RNA (1)...(19): siRNA sense strand
cuaagaagggagcacuauu

SEQ ID NO: 2212841 - RNA, 19 nt, Homo sapiens
  misc_RNA (1)...(19): siRNA sense strand
acacauuggcagcuaagaa

SEQ ID NO: 2212842 - RNA, 19 nt, Homo sapiens
  misc_RNA (1)...(19): siRNA sense strand
agaaugcacuacaaaauca

SEQ ID NO: 2212843 - RNA, 19 nt, Homo sapiens
  misc_RNA (1)...(19): siRNA sense strand
gcagaaaaggcucccauug

SEQ ID NO: 2212844 - RNA, 19 nt, Homo sapiens
  misc_RNA (1)...(19): siRNA sense strand
aagcaguucuguuguacca

SEQ ID NO: 2212845 - RNA, 19 nt, Homo sapiens
  misc_RNA (1)...(19): siRNA sense strand
guaaacaguucuccaguua

SEQ ID NO: 2212846 - RNA, 19 nt, Homo sapiens
  misc_RNA (1)...(19): siRNA sense strand
gaaugaagcugccggaauu

SEQ ID NO: 2212847 - RNA, 19 nt, Homo sapiens
  misc_RNA (1)...(19): siRNA sense strand
uaacagagcugccaagaau

SEQ ID NO: 2212848 - RNA, 19 nt, Homo sapiens
  misc_RNA (1)...(19): siRNA sense strand
gcaguacucucgaauuaaa

SEQ ID NO: 2212849 - RNA, 19 nt, Homo sapiens
  misc_RNA (1)...(19): siRNA sense strand
ucagagaacugcaaacaaa

SEQ ID NO: 2212850 - RNA, 19 nt, Homo sapiens
  misc_RNA (1)...(19): siRNA sense strand
aaacaguucuccaguuaua

SEQ ID NO: 2212851 - RNA, 19 nt, Homo sapiens
  misc_RNA (1)...(19): siRNA sense strand
ggauauggcugucuucaga

SEQ ID NO: 2212852 - RNA, 19 nt, Homo sapiens
  misc_RNA (1)...(19): siRNA sense strand
ccacaugccucccuaauca

SEQ ID NO: 2212853 - RNA, 19 nt, Homo sapiens
  misc_RNA (1)...(19): siRNA sense strand
ggaguaauccugaugauga

SEQ ID NO: 2212854 - RNA, 19 nt, Homo sapiens
  misc_RNA (1)...(19): siRNA sense strand
cggcaguacucucgaauua

SEQ ID NO: 2212855 - RNA, 19 nt, Homo sapiens
  misc_RNA (1)...(19): siRNA sense strand
gaucugggauucagucuuc

SEQ ID NO: 2212856 - RNA, 19 nt, Homo sapiens
  misc_RNA (1)...(19): siRNA sense strand
gagagcagauagaauguug

SEQ ID NO: 2212857 - RNA, 19 nt, Homo sapiens
  misc_RNA (1)...(19): siRNA sense strand
gaucauuauuugcacagua

SEQ ID NO: 2212858 - RNA, 19 nt, Homo sapiens
  misc_RNA (1)...(19): siRNA sense strand
gaacgcaugaccacagaua

SEQ ID NO: 2212859 - RNA, 19 nt, Homo sapiens
  misc_RNA (1)...(19): siRNA sense strand
cauccuggcugcacuaauu

SEQ ID NO: 2212860 - RNA, 19 nt, Homo sapiens
  misc_RNA (1)...(19): siRNA sense strand
gaauucagauagucaagga

SEQ ID NO: 2212861 - RNA, 19 nt, Homo sapiens
  misc_RNA (1)...(19): siRNA sense strand
gaacucaugcagacuguuu

SEQ ID NO: 2212862 - RNA, 19 nt, Homo sapiens
  misc_RNA (1)...(19): siRNA sense strand
gcaaucaauuccugucgaa

SEQ ID NO: 2212863 - RNA, 19 nt, Homo sapiens
  misc_RNA (1)...(19): siRNA sense strand
ccaaaggaauggaggagaa

SEQ ID NO: 2212864 - RNA, 19 nt, Homo sapiens
  misc_RNA (1)...(19): siRNA sense strand
gguaaacaguucuccaguu

SEQ ID NO: 2212865 - RNA, 19 nt, Homo sapiens
  misc_RNA (1)...(19): siRNA sense strand
aaacaaagccaccagcaaa

SEQ ID NO: 2212866 - RNA, 19 nt, Homo sapiens
  misc_RNA (1)...(19): siRNA sense strand
gggauucagucuucuuuga

SEQ ID NO: 2212867 - RNA, 19 nt, Homo sapiens
  misc_RNA (1)...(19): siRNA sense strand
gaauggaggagaaagguuu

SEQ ID NO: 2212868 - RNA, 19 nt, Homo sapiens
  misc_RNA (1)...(19): siRNA sense strand
cagauagaauguugugaaa

SEQ ID NO: 2212869 - RNA, 19 nt, Homo sapiens
  misc_RNA (1)...(19): siRNA sense strand
gcagauagaauguugugaa

SEQ ID NO: 2212870 - RNA, 19 nt, Homo sapiens
  misc_RNA (1)...(19): siRNA sense strand
ugaaacagcagaugaauuc

SEQ ID NO: 2212871 - RNA, 19 nt, Homo sapiens
  misc_RNA (1)...(19): siRNA sense strand
ccacaucccuggucacaca

SEQ ID NO: 2212872 - RNA, 19 nt, Homo sapiens
  misc_RNA (1)...(19): siRNA sense strand
ucaauaaucuccgggcauu

SEQ ID NO: 2212873 - RNA, 19 nt, Homo sapiens
  misc_RNA (1)...(19): siRNA sense strand
acgaagaccuuaagacgaa

SEQ ID NO: 2212874 - RNA, 19 nt, Homo sapiens
  misc_RNA (1)...(19): siRNA sense strand
guuauaaaccaccuucuuu

SEQ ID NO: 2212875 - RNA, 19 nt, Homo sapiens
  misc_RNA (1)...(19): siRNA sense strand
ccacaggaauaccaaagga

SEQ ID NO: 2212876 - RNA, 19 nt, Homo sapiens
  misc_RNA (1)...(19): siRNA sense strand
cuccugaacugcagaagua

SEQ ID NO: 2212877 - RNA, 19 nt, Homo sapiens
  misc_RNA (1)...(19): siRNA sense strand
uuacaaaugucuucacgau

SEQ ID NO: 2212878 - RNA, 19 nt, Homo sapiens
  misc_RNA (1)...(19): siRNA sense strand
gauaagguacuucccgaaa

SEQ ID NO: 2212879 - RNA, 19 nt, Homo sapiens
  misc_RNA (1)...(19): siRNA sense strand
ccaggaacuugggauuaua

SEQ ID NO: 2212880 - RNA, 19 nt, Homo sapiens
  misc_RNA (1)...(19): siRNA sense strand
ggaaagaagaugaaaauga

SEQ ID NO: 2212881 - RNA, 19 nt, Homo sapiens
  misc_RNA (1)...(19): siRNA sense strand
gugaauaccaugcagcuuu

SEQ ID NO: 2212882 - RNA, 19 nt, Homo sapiens
  misc_RNA (1)...(19): siRNA sense strand
ccguagggcugauagauga

SEQ ID NO: 2212883 - RNA, 19 nt, Homo sapiens
  misc_RNA (1)...(19): siRNA sense strand
gaaagaagaugaaaaugac

SEQ ID NO: 2212884 - RNA, 19 nt, Homo sapiens
  misc_RNA (1)...(19): siRNA sense strand
ggagaaagguuugguugac

SEQ ID NO: 2212885 - RNA, 19 nt, Homo sapiens
  misc_RNA (1)...(19): siRNA sense strand
gccaggaacuugggauuau

SEQ ID NO: 2212886 - RNA, 19 nt, Homo sapiens
  misc_RNA (1)...(19): siRNA sense strand
caaauuaaagagccaaaug

SEQ ID NO: 2212887 - RNA, 19 nt, Homo sapiens
  misc_RNA (1)...(19): siRNA sense strand
ggacaggguuguguugaag

SEQ ID NO: 2212888 - RNA, 19 nt, Homo sapiens
  misc_RNA (1)...(19): siRNA sense strand
agucugagaucuaauaaca

SEQ ID NO: 2212889 - RNA, 19 nt, Homo sapiens
  misc_RNA (1)...(19): siRNA sense strand
guucggagaugcugaugug

SEQ ID NO: 2212890 - RNA, 19 nt, Homo sapiens
  misc_RNA (1)...(19): siRNA sense strand
agacagugaugaagagaau

SEQ ID NO: 2212891 - RNA, 19 nt, Homo sapiens
  misc_RNA (1)...(19): siRNA sense strand
guucagaaaucauccuaag

SEQ ID NO: 2212892 - RNA, 19 nt, Homo sapiens
  misc_RNA (1)...(19): siRNA sense strand
gagggaugcugcagcugaa

SEQ ID NO: 2212893 - RNA, 19 nt, Homo sapiens
  misc_RNA (1)...(19): siRNA sense strand
gaccuuggcagaucauuau

SEQ ID NO: 2212894 - RNA, 19 nt, Homo sapiens
  misc_RNA (1)...(19): siRNA sense strand
gggauuauauggcccuaca

SEQ ID NO: 2212895 - RNA, 19 nt, Homo sapiens
  misc_RNA (1)...(19): siRNA sense strand
guacaucagggcagacaaa

SEQ ID NO: 2212896 - RNA, 19 nt, Homo sapiens
  misc_RNA (1)...(19): siRNA sense strand
gggaguugauaccaaguug

SEQ ID NO: 2212897 - RNA, 19 nt, Homo sapiens
  misc_RNA (1)...(19): siRNA sense strand
gaaguugggagcccuggaa

SEQ ID NO: 2212898 - RNA, 19 nt, Homo sapiens
  misc_RNA (1)...(19): siRNA sense strand
ugaggaugcugucguuaau

SEQ ID NO: 2212899 - RNA, 19 nt, Homo sapiens
  misc_RNA (1)...(19): siRNA sense strand
gaacugcaaacaaagaaag

SEQ ID NO: 2212900 - RNA, 19 nt, Homo sapiens
  misc_RNA (1)...(19): siRNA sense strand
gaaaguggagguggauaug

SEQ ID NO: 2212901 - RNA, 19 nt, Homo sapiens
  misc_RNA (1)...(19): siRNA sense strand
gcagacaaagggccaguga

SEQ ID NO: 2212902 - RNA, 19 nt, Homo sapiens
  misc_RNA (1)...(19): siRNA sense strand
gcaccauccugagcaaugu

SEQ ID NO: 2212903 - RNA, 19 nt, Homo sapiens
  misc_RNA (1)...(19): siRNA sense strand
gaccacagauaucaaugca

SEQ ID NO: 2212904 - RNA, 19 nt, Homo sapiens
  misc_RNA (1)...(19): siRNA sense strand
aagaagcgcagcugcauuu

SEQ ID NO: 2212905 - RNA, 19 nt, Homo sapiens
  misc_RNA (1)...(19): siRNA sense strand
ggggaugcccugaaaauua

SEQ ID NO: 2212906 - RNA, 19 nt, Homo sapiens
  misc_RNA (1)...(19): siRNA sense strand
gaacugcagaaguaccaaa

SEQ ID NO: 2212907 - RNA, 19 nt, Homo sapiens
  misc_RNA (1)...(19): siRNA sense strand
cccaggagaugcuagagaa

SEQ ID NO: 2212908 - RNA, 19 nt, Homo sapiens
  misc_RNA (1)...(19): siRNA sense strand
ucagagaccuuuuaagaau

SEQ ID NO: 2212909 - RNA, 19 nt, Homo sapiens
  misc_RNA (1)...(19): siRNA sense strand
uaggagagcagauagaaug

SEQ ID NO: 2212910 - RNA, 19 nt, Homo sapiens
  misc_RNA (1)...(19): siRNA sense strand
gaaggcagcagcccugaag

SEQ ID NO: 2212911 - RNA, 19 nt, Homo sapiens
  misc_RNA (1)...(19): siRNA sense strand
cgaugaggaugcugucguu

SEQ ID NO: 2212912 - RNA, 19 nt, Homo sapiens
  misc_RNA (1)...(19): siRNA sense strand
aaacagcagaugaauucua

SEQ ID NO: 2212913 - RNA, 19 nt, Homo sapiens
  misc_RNA (1)...(19): siRNA sense strand
caaaugaggagcagagucu

SEQ ID NO: 2212914 - RNA, 19 nt, Homo sapiens
  misc_RNA (1)...(19): siRNA sense strand
agaaugacccagacgauga

SEQ ID NO: 2212915 - RNA, 19 nt, Homo sapiens
  misc_RNA (1)...(19): siRNA sense strand
gagaacugcaaacaaagaa

SEQ ID NO: 2212916 - RNA, 19 nt, Homo sapiens
  misc_RNA (1)...(19): siRNA sense strand
uuauauggcccuacagaaa

SEQ ID NO: 2212917 - RNA, 19 nt, Homo sapiens
  misc_RNA (1)...(19): siRNA sense strand
gcugauagaugagcagaac

SEQ ID NO: 2212918 - RNA, 19 nt, Homo sapiens
  misc_RNA (1)...(19): siRNA sense strand
caaaugaguaggagcuuca

SEQ ID NO: 2212919 - RNA, 19 nt, Homo sapiens
  misc_RNA (1)...(19): siRNA sense strand
cuuggcagaucauuauuug

SEQ ID NO: 2212920 - RNA, 19 nt, Homo sapiens
  misc_RNA (1)...(19): siRNA sense strand
gaguugauaccaaguugaa

SEQ ID NO: 2212921 - RNA, 19 nt, Homo sapiens
  misc_RNA (1)...(19): siRNA sense strand
ccagagacagugaugaaga

SEQ ID NO: 2212922 - RNA, 19 nt, Homo sapiens
  misc_RNA (1)...(19): siRNA sense strand
aggagaugcuagagaauga

SEQ ID NO: 2212923 - RNA, 19 nt, Homo sapiens
  misc_RNA (1)...(19): siRNA sense strand
gggaugcccugaaaauuau

SEQ ID NO: 2212924 - RNA, 19 nt, Homo sapiens
  misc_RNA (1)...(19): siRNA sense strand
gaagcugccggaauuaucu

SEQ ID NO: 2212925 - RNA, 19 nt, Homo sapiens
  misc_RNA (1)...(19): siRNA sense strand
ggcauugucuguggauaug

SEQ ID NO: 2212926 - RNA, 19 nt, Homo sapiens
  misc_RNA (1)...(19): siRNA sense strand
aaaccaugcgcuucacuuu

SEQ ID NO: 2212927 - RNA, 19 nt, Homo sapiens
  misc_RNA (1)...(19): siRNA sense strand
aguaggagcuucagcaaac

SEQ ID NO: 2212928 - RNA, 19 nt, Homo sapiens
  misc_RNA (1)...(19): siRNA sense strand
acugugcacuuuccucaaa

SEQ ID NO: 2212929 - RNA, 19 nt, Homo sapiens
  misc_RNA (1)...(19): siRNA sense strand
gauuauauggcccuacaga

SEQ ID NO: 2212930 - RNA, 19 nt, Homo sapiens
  misc_RNA (1)...(19): siRNA sense strand
ggacaccguagggcugaua

SEQ ID NO: 2212931 - RNA, 19 nt, Homo sapiens
  misc_RNA (1)...(19): siRNA sense strand
gccaggcuauccacaggaa

SEQ ID NO: 2212932 - RNA, 19 nt, Homo sapiens
  misc_RNA (1)...(19): siRNA sense strand
ggccagagacagugaugaa

SEQ ID NO: 2212933 - RNA, 19 nt, Homo sapiens
  misc_RNA (1)...(19): siRNA sense strand
gagcagauagaauguugug

SEQ ID NO: 2212934 - RNA, 19 nt, Homo sapiens
  misc_RNA (1)...(19): siRNA sense strand
gcaggacaggguuguguug

SEQ ID NO: 2212935 - RNA, 19 nt, Homo sapiens
  misc_RNA (1)...(19): siRNA sense strand
caggcuauccacaggaaua

SEQ ID NO: 2212936 - RNA, 19 nt, Homo sapiens
  misc_RNA (1)...(19): siRNA sense strand
ggaugugucugcaguucag

SEQ ID NO: 2212937 - RNA, 19 nt, Homo sapiens
  misc_RNA (1)...(19): siRNA sense strand
cgucucagguaaacaguuc

SEQ ID NO: 2212938 - RNA, 19 nt, Homo sapiens
  misc_RNA (1)...(19): siRNA sense strand
guacuucccgaaagcuauu

SEQ ID NO: 2212939 - RNA, 19 nt, Homo sapiens
  misc_RNA (1)...(19): siRNA sense strand
ucacauccgaguccacaaa

SEQ ID NO: 2212940 - RNA, 19 nt, Homo sapiens
  misc_RNA (1)...(19): siRNA sense strand
cagagacagugaugaagag

SEQ ID NO: 2212941 - RNA, 19 nt, Homo sapiens
  misc_RNA (1)...(19): siRNA sense strand
uuaaagaucugggauucag

SEQ ID NO: 2212942 - RNA, 19 nt, Homo sapiens
  misc_RNA (1)...(19): siRNA sense strand
ggaggagaaagguuugguu

SEQ ID NO: 2212943 - RNA, 19 nt, Homo sapiens
  misc_RNA (1)...(19): siRNA sense strand
ugaccuuggcagaucauua

SEQ ID NO: 2212944 - RNA, 19 nt, Homo sapiens
  misc_RNA (1)...(19): siRNA sense strand
ggaauggaggagaaagguu

SEQ ID NO: 2212945 - RNA, 19 nt, Homo sapiens
  misc_RNA (1)...(19): siRNA sense strand
gaaucaaccuggccaaauu

SEQ ID NO: 2212946 - RNA, 19 nt, Homo sapiens
  misc_RNA (1)...(19): siRNA sense strand
gugcaaggaucaaguguua

SEQ ID NO: 2212947 - RNA, 19 nt, Homo sapiens
  misc_RNA (1)...(19): siRNA sense strand
gaacuuggaauaaccauaa

SEQ ID NO: 2212948 - RNA, 19 nt, Homo sapiens
  misc_RNA (1)...(19): siRNA sense strand
gauagaauaugaugucuca

SEQ ID NO: 2212949 - RNA, 19 nt, Homo sapiens
  misc_RNA (1)...(19): siRNA sense strand
uaaaugccguugucaaauu

SEQ ID NO: 2212950 - RNA, 19 nt, Homo sapiens
  misc_RNA (1)...(19): siRNA sense strand
gaaaggaguguaugucaaa

SEQ ID NO: 2212951 - RNA, 19 nt, Homo sapiens
  misc_RNA (1)...(19): siRNA sense strand
uaaacaauguggacaagaa

SEQ ID NO: 2212952 - RNA, 19 nt, Homo sapiens
  misc_RNA (1)...(19): siRNA sense strand
aaauaaaucucguccaguu

SEQ ID NO: 2212953 - RNA, 19 nt, Homo sapiens
  misc_RNA (1)...(19): siRNA sense strand
ugagagaacuggaggagaa

SEQ ID NO: 2212954 - RNA, 19 nt, Homo sapiens
  misc_RNA (1)...(19): siRNA sense strand
ugaaagaacuggcgcaauc

SEQ ID NO: 2212955 - RNA, 19 nt, Homo sapiens
  misc_RNA (1)...(19): siRNA sense strand
gaaagcaccuccuccaaac

SEQ ID NO: 2212956 - RNA, 19 nt, Homo sapiens
  misc_RNA (1)...(19): siRNA sense strand
gaaaguuccggagcaauua

SEQ ID NO: 2212957 - RNA, 19 nt, Homo sapiens
  misc_RNA (1)...(19): siRNA sense strand
gaagagccguuugauccua

SEQ ID NO: 2212958 - RNA, 19 nt, Homo sapiens
  misc_RNA (1)...(19): siRNA sense strand
gaaaucgaguuugauguug

SEQ ID NO: 2212959 - RNA, 19 nt, Homo sapiens
  misc_RNA (1)...(19): siRNA sense strand
ccaagaaguucccuauuuc

SEQ ID NO: 2212960 - RNA, 19 nt, Homo sapiens
  misc_RNA (1)...(19): siRNA sense strand
cccaagaaguucccuauuu

SEQ ID NO: 2212961 - RNA, 19 nt, Homo sapiens
  misc_RNA (1)...(19): siRNA sense strand
gaacugaagagccguuuga

SEQ ID NO: 2212962 - RNA, 19 nt, Homo sapiens
  misc_RNA (1)...(19): siRNA sense strand
gagagucccuacacuaaau

SEQ ID NO: 2212963 - RNA, 19 nt, Homo sapiens
  misc_RNA (1)...(19): siRNA sense strand
gcaacacccugccuucaga

SEQ ID NO: 2212964 - RNA, 19 nt, Homo sapiens
  misc_RNA (1)...(19): siRNA sense strand
gggauuagcugaaagaacu

SEQ ID NO: 2212965 - RNA, 19 nt, Homo sapiens
  misc_RNA (1)...(19): siRNA sense strand
aaacagcccuccagcuuug

SEQ ID NO: 2212966 - RNA, 19 nt, Homo sapiens
  misc_RNA (1)...(19): siRNA sense strand
ggaaaucgaguuugauguu

SEQ ID NO: 2212967 - RNA, 19 nt, Homo sapiens
  misc_RNA (1)...(19): siRNA sense strand
gcaaagaugaagauaauuc

SEQ ID NO: 2212968 - RNA, 19 nt, Homo sapiens
  misc_RNA (1)...(19): siRNA sense strand
ccgcaaagaugaagauaau

SEQ ID NO: 2212969 - RNA, 19 nt, Homo sapiens
  misc_RNA (1)...(19): siRNA sense strand
gcaaggaucaaguguuauu

SEQ ID NO: 2212970 - RNA, 19 nt, Homo sapiens
  misc_RNA (1)...(19): siRNA sense strand
gauacaauuucaacaccua

SEQ ID NO: 2212971 - RNA, 19 nt, Homo sapiens
  misc_RNA (1)...(19): siRNA sense strand
agacagauguggcgcauug

SEQ ID NO: 2212972 - RNA, 19 nt, Homo sapiens
  misc_RNA (1)...(19): siRNA sense strand
gcacaugaugauagaaaua

SEQ ID NO: 2212973 - RNA, 19 nt, Homo sapiens
  misc_RNA (1)...(19): siRNA sense strand
gaagccaugaguauucuua

SEQ ID NO: 2212974 - RNA, 19 nt, Homo sapiens
  misc_RNA (1)...(19): siRNA sense strand
caaauucugaggcgacuua

SEQ ID NO: 2212975 - RNA, 19 nt, Homo sapiens
  misc_RNA (1)...(19): siRNA sense strand
gaacaguggaggucacauu

SEQ ID NO: 2212976 - RNA, 19 nt, Homo sapiens
  misc_RNA (1)...(19): siRNA sense strand
ggaauucggcuucuuggaa

SEQ ID NO: 2212977 - RNA, 19 nt, Homo sapiens
  misc_RNA (1)...(19): siRNA sense strand
gagagacugucaccuugaa

SEQ ID NO: 2212978 - RNA, 19 nt, Homo sapiens
  misc_RNA (1)...(19): siRNA sense strand
agaauaugaugucucagua

SEQ ID NO: 2212979 - RNA, 19 nt, Homo sapiens
  misc_RNA (1)...(19): siRNA sense strand
gaaccagcauggaguacug

SEQ ID NO: 2212980 - RNA, 19 nt, Homo sapiens
  misc_RNA (1)...(19): siRNA sense strand
gaaacccacuggcuucaca

SEQ ID NO: 2212981 - RNA, 19 nt, Homo sapiens
  misc_RNA (1)...(19): siRNA sense strand
gaagugaccagcuggaugu

SEQ ID NO: 2212982 - RNA, 19 nt, Homo sapiens
  misc_RNA (1)...(19): siRNA sense strand
guacaaggacucugacaug

SEQ ID NO: 2212983 - RNA, 19 nt, Homo sapiens
  misc_RNA (1)...(19): siRNA sense strand
gaaauaaaggagaucaugu

SEQ ID NO: 2212984 - RNA, 19 nt, Homo sapiens
  misc_RNA (1)...(19): siRNA sense strand
ggaggucacauuacauaaa

SEQ ID NO: 2212985 - RNA, 19 nt, Homo sapiens
  misc_RNA (1)...(19): siRNA sense strand
gaauaugaugucucaguaa

SEQ ID NO: 2212986 - RNA, 19 nt, Homo sapiens
  misc_RNA (1)...(19): siRNA sense strand
gaugagagucccuacacua

SEQ ID NO: 2212987 - RNA, 19 nt, Homo sapiens
  misc_RNA (1)...(19): siRNA sense strand
gaggucacauuacauaaag

SEQ ID NO: 2212988 - RNA, 19 nt, Homo sapiens
  misc_RNA (1)...(19): siRNA sense strand
cucaagcgcuggaggauuu

SEQ ID NO: 2212989 - RNA, 19 nt, Homo sapiens
  misc_RNA (1)...(19): siRNA sense strand
ccacagaaacucucucuuc

SEQ ID NO: 2212990 - RNA, 19 nt, Homo sapiens
  misc_RNA (1)...(19): siRNA sense strand
gagcacaugaugauagaaa

SEQ ID NO: 2212991 - RNA, 19 nt, Homo sapiens
  misc_RNA (1)...(19): siRNA sense strand
caagaaaguuccggagcaa

SEQ ID NO: 2212992 - RNA, 19 nt, Homo sapiens
  misc_RNA (1)...(19): siRNA sense strand
cgaaagcaccuccuccaaa

SEQ ID NO: 2212993 - RNA, 19 nt, Homo sapiens
  misc_RNA (1)...(19): siRNA sense strand
ucaaagcagugaauggaau

SEQ ID NO: 2212994 - RNA, 19 nt, Homo sapiens
  misc_RNA (1)...(19): siRNA sense strand
gagaaaggaguguauguca

SEQ ID NO: 2212995 - RNA, 19 nt, Homo sapiens
  misc_RNA (1)...(19): siRNA sense strand
gggagcacaugaugauaga

SEQ ID NO: 2212996 - RNA, 19 nt, Homo sapiens
  misc_RNA (1)...(19): siRNA sense strand
acaccaaccaucacuauaa

SEQ ID NO: 2212997 - RNA, 19 nt, Homo sapiens
  misc_RNA (1)...(19): siRNA sense strand
gagaacccacuaauacauu

SEQ ID NO: 2212998 - RNA, 19 nt, Homo sapiens
  misc_RNA (1)...(19): siRNA sense strand
gugaagccauccauuuguu

SEQ ID NO: 2212999 - RNA, 19 nt, Homo sapiens
  misc_RNA (1)...(19): siRNA sense strand
ugaggcgacuuacuaaaga

SEQ ID NO: 2213000 - RNA, 19 nt, Homo sapiens
  misc_RNA (1)...(19): siRNA sense strand
gcagguuguucacacagaa

SEQ ID NO: 2213001 - RNA, 19 nt, Homo sapiens
  misc_RNA (1)...(19): siRNA sense strand
ccaaacagcccuccagcuu

SEQ ID NO: 2213002 - RNA, 19 nt, Homo sapiens
  misc_RNA (1)...(19): siRNA sense strand
gaagaaugugggagaaaga

SEQ ID NO: 2213003 - RNA, 19 nt, Homo sapiens
  misc_RNA (1)...(19): siRNA sense strand
acacgagaacccacuaaua

SEQ ID NO: 2213004 - RNA, 19 nt, Homo sapiens
  misc_RNA (1)...(19): siRNA sense strand
gagugaagccauccauuug

SEQ ID NO: 2213005 - RNA, 19 nt, Homo sapiens
  misc_RNA (1)...(19): siRNA sense strand
uaauucagaugagcaagaa

SEQ ID NO: 2213006 - RNA, 19 nt, Homo sapiens
  misc_RNA (1)...(19): siRNA sense strand
caauguggaacuuggaaua

SEQ ID NO: 2213007 - RNA, 19 nt, Homo sapiens
  misc_RNA (1)...(19): siRNA sense strand
agacagcaccuucgaagaa

SEQ ID NO: 2213008 - RNA, 19 nt, Homo sapiens
  misc_RNA (1)...(19): siRNA sense strand
caaacagcccuccagcuuu

SEQ ID NO: 2213009 - RNA, 19 nt, Homo sapiens
  misc_RNA (1)...(19): siRNA sense strand
gaugugcuguaacaaacaa

SEQ ID NO: 2213010 - RNA, 19 nt, Homo sapiens
  misc_RNA (1)...(19): siRNA sense strand
gcacgaugaguuugaauca

SEQ ID NO: 2213011 - RNA, 19 nt, Homo sapiens
  misc_RNA (1)...(19): siRNA sense strand
gugaagaccuggugaagcu

SEQ ID NO: 2213012 - RNA, 19 nt, Homo sapiens
  misc_RNA (1)...(19): siRNA sense strand
ugagugaagccauccauuu

SEQ ID NO: 2213013 - RNA, 19 nt, Homo sapiens
  misc_RNA (1)...(19): siRNA sense strand
ggaccugguuauuaguaga

SEQ ID NO: 2213014 - RNA, 19 nt, Homo sapiens
  misc_RNA (1)...(19): siRNA sense strand
caguguagcagauggcuua

SEQ ID NO: 2213015 - RNA, 19 nt, Homo sapiens
  misc_RNA (1)...(19): siRNA sense strand
ggagcacgaugaguuugaa

SEQ ID NO: 2213016 - RNA, 19 nt, Homo sapiens
  misc_RNA (1)...(19): siRNA sense strand
acagacagaugcccaguca

SEQ ID NO: 2213017 - RNA, 19 nt, Homo sapiens
  misc_RNA (1)...(19): siRNA sense strand
gggaggaauugauaaggau

SEQ ID NO: 2213018 - RNA, 19 nt, Homo sapiens
  misc_RNA (1)...(19): siRNA sense strand
gagauuggagugaacagaa

SEQ ID NO: 2213019 - RNA, 19 nt, Homo sapiens
  misc_RNA (1)...(19): siRNA sense strand
auguaaagcugccuaagaa

SEQ ID NO: 2213020 - RNA, 19 nt, Homo sapiens
  misc_RNA (1)...(19): siRNA sense strand
ggaaucaaccuggccaaau

SEQ ID NO: 2213021 - RNA, 19 nt, Homo sapiens
  misc_RNA (1)...(19): siRNA sense strand
ggacuuuggguucagugua

SEQ ID NO: 2213022 - RNA, 19 nt, Homo sapiens
  misc_RNA (1)...(19): siRNA sense strand
ccacauaggagaccgaauc

SEQ ID NO: 2213023 - RNA, 19 nt, Homo sapiens
  misc_RNA (1)...(19): siRNA sense strand
ccaugaguauucuuaaaca

SEQ ID NO: 2213024 - RNA, 19 nt, Homo sapiens
  misc_RNA (1)...(19): siRNA sense strand
guggaggucacauuacaua

SEQ ID NO: 2213025 - RNA, 19 nt, Homo sapiens
  misc_RNA (1)...(19): siRNA sense strand
cuaccucgaugugcuguaa

SEQ ID NO: 2213026 - RNA, 19 nt, Homo sapiens
  misc_RNA (1)...(19): siRNA sense strand
aagcuggaccugguuauua

SEQ ID NO: 2213027 - RNA, 19 nt, Homo sapiens
  misc_RNA (1)...(19): siRNA sense strand
agaaaggaguguaugucaa

SEQ ID NO: 2213028 - RNA, 19 nt, Homo sapiens
  misc_RNA (1)...(19): siRNA sense strand
ggaagaugcaguucagauc

SEQ ID NO: 2213029 - RNA, 19 nt, Homo sapiens
  misc_RNA (1)...(19): siRNA sense strand
gaacugggacccuggaacu

SEQ ID NO: 2213030 - RNA, 19 nt, Homo sapiens
  misc_RNA (1)...(19): siRNA sense strand
ggagagacugucaccuuga

SEQ ID NO: 2213031 - RNA, 19 nt, Homo sapiens
  misc_RNA (1)...(19): siRNA sense strand
ggaaaccugcggacaguca

SEQ ID NO: 2213032 - RNA, 19 nt, Homo sapiens
  misc_RNA (1)...(19): siRNA sense strand
gauggaauucggcuucuug

SEQ ID NO: 2213033 - RNA, 19 nt, Homo sapiens
  misc_RNA (1)...(19): siRNA sense strand
guucagauccuccagcaau

SEQ ID NO: 2213034 - RNA, 19 nt, Homo sapiens
  misc_RNA (1)...(19): siRNA sense strand
ccacguggaaccaugauga

SEQ ID NO: 2213035 - RNA, 19 nt, Homo sapiens
  misc_RNA (1)...(19): siRNA sense strand
gcugaagccaugaguauuc

SEQ ID NO: 2213036 - RNA, 19 nt, Homo sapiens
  misc_RNA (1)...(19): siRNA sense strand
gauggagcguuggcuguga

SEQ ID NO: 2213037 - RNA, 19 nt, Homo sapiens
  misc_RNA (1)...(19): siRNA sense strand
gagcaucccagaggaauuc

SEQ ID NO: 2213038 - RNA, 19 nt, Homo sapiens
  misc_RNA (1)...(19): siRNA sense strand
gcaagccaagaguaucuaa

SEQ ID NO: 2213039 - RNA, 19 nt, Homo sapiens
  misc_RNA (1)...(19): siRNA sense strand
gugcagagacagaacaaga

SEQ ID NO: 2213040 - RNA, 19 nt, Homo sapiens
  misc_RNA (1)...(19): siRNA sense strand
aaacagagaggcagcuugu

SEQ ID NO: 2213041 - RNA, 19 nt, Homo sapiens
  misc_RNA (1)...(19): siRNA sense strand
ugaagccauccauuuguua

SEQ ID NO: 2213042 - RNA, 19 nt, Homo sapiens
  misc_RNA (1)...(19): siRNA sense strand
aagggaagccucugaguga

SEQ ID NO: 2213043 - RNA, 19 nt, Homo sapiens
  misc_RNA (1)...(19): siRNA sense strand
cagaugagcaagaaaguuc

SEQ ID NO: 2213044 - RNA, 19 nt, Homo sapiens
  misc_RNA (1)...(19): siRNA sense strand
ccaaguaguggaacauuuc

SEQ ID NO: 2213045 - RNA, 19 nt, Homo sapiens
  misc_RNA (1)...(19): siRNA sense strand
caacauccguuccuuauua

SEQ ID NO: 2213046 - RNA, 19 nt, Homo sapiens
  misc_RNA (1)...(19): siRNA sense strand
gaacaugacucgaaugaga

SEQ ID NO: 2213047 - RNA, 19 nt, Homo sapiens
  misc_RNA (1)...(19): siRNA sense strand
gaaagaaguugacucacua

SEQ ID NO: 2213048 - RNA, 19 nt, Homo sapiens
  misc_RNA (1)...(19): siRNA sense strand
ggaaguauuucaagaauga

SEQ ID NO: 2213049 - RNA, 19 nt, Homo sapiens
  misc_RNA (1)...(19): siRNA sense strand
caucaaaccucuucaauuc

SEQ ID NO: 2213050 - RNA, 19 nt, Homo sapiens
  misc_RNA (1)...(19): siRNA sense strand
gaaguugacucacuauugu

SEQ ID NO: 2213051 - RNA, 19 nt, Homo sapiens
  misc_RNA (1)...(19): siRNA sense strand
gaagaucagcuacaucaua

SEQ ID NO: 2213052 - RNA, 19 nt, Homo sapiens
  misc_RNA (1)...(19): siRNA sense strand
cgaauaggaugguauaauc

SEQ ID NO: 2213053 - RNA, 19 nt, Homo sapiens
  misc_RNA (1)...(19): siRNA sense strand
gaaggaaguauuucaagaa

SEQ ID NO: 2213054 - RNA, 19 nt, Homo sapiens
  misc_RNA (1)...(19): siRNA sense strand
gagauauacuuaugccauu

SEQ ID NO: 2213055 - RNA, 19 nt, Homo sapiens
  misc_RNA (1)...(19): siRNA sense strand
gaaaaugcaucuagcugua

SEQ ID NO: 2213056 - RNA, 19 nt, Homo sapiens
  misc_RNA (1)...(19): siRNA sense strand
ccucuucaauuccauauuu

SEQ ID NO: 2213057 - RNA, 19 nt, Homo sapiens
  misc_RNA (1)...(19): siRNA sense strand
ggucauuucuacaaacauu

SEQ ID NO: 2213058 - RNA, 19 nt, Homo sapiens
  misc_RNA (1)...(19): siRNA sense strand
gauaagcaaccagcauuua

SEQ ID NO: 2213059 - RNA, 19 nt, Homo sapiens
  misc_RNA (1)...(19): siRNA sense strand
gaccagaucauuguauaua

SEQ ID NO: 2213060 - RNA, 19 nt, Homo sapiens
  misc_RNA (1)...(19): siRNA sense strand
gaaugagaaggaaguauuu

SEQ ID NO: 2213061 - RNA, 19 nt, Homo sapiens
  misc_RNA (1)...(19): siRNA sense strand
gaugauauuuggucuuuac

SEQ ID NO: 2213062 - RNA, 19 nt, Homo sapiens
  misc_RNA (1)...(19): siRNA sense strand
uaugacaacuguacgacua

SEQ ID NO: 2213063 - RNA, 19 nt, Homo sapiens
  misc_RNA (1)...(19): siRNA sense strand
agaaugauaugacaacugu

SEQ ID NO: 2213064 - RNA, 19 nt, Homo sapiens
  misc_RNA (1)...(19): siRNA sense strand
ccaagaagcagaagaagga

SEQ ID NO: 2213065 - RNA, 19 nt, Homo sapiens
  misc_RNA (1)...(19): siRNA sense strand
gaaacuaugaccauguuga

SEQ ID NO: 2213066 - RNA, 19 nt, Homo sapiens
  misc_RNA (1)...(19): siRNA sense strand
gcaucaaaccucuucaauu

SEQ ID NO: 2213067 - RNA, 19 nt, Homo sapiens
  misc_RNA (1)...(19): siRNA sense strand
ggacagguacagucugaaa

SEQ ID NO: 2213068 - RNA, 19 nt, Homo sapiens
  misc_RNA (1)...(19): siRNA sense strand
ggaauuaucgaccagauca

SEQ ID NO: 2213069 - RNA, 19 nt, Homo sapiens
  misc_RNA (1)...(19): siRNA sense strand
guaguugccuguggugaaa

SEQ ID NO: 2213070 - RNA, 19 nt, Homo sapiens
  misc_RNA (1)...(19): siRNA sense strand
gaagucagcuaucauuuuc

SEQ ID NO: 2213071 - RNA, 19 nt, Homo sapiens
  misc_RNA (1)...(19): siRNA sense strand
gaagaaacuaugaccaugu

SEQ ID NO: 2213072 - RNA, 19 nt, Homo sapiens
  misc_RNA (1)...(19): siRNA sense strand
ccagaucauuguauauaug

SEQ ID NO: 2213073 - RNA, 19 nt, Homo sapiens
  misc_RNA (1)...(19): siRNA sense strand
ugaaagaaguugacucacu

SEQ ID NO: 2213074 - RNA, 19 nt, Homo sapiens
  misc_RNA (1)...(19): siRNA sense strand
gugcauacauacuguggaa

SEQ ID NO: 2213075 - RNA, 19 nt, Homo sapiens
  misc_RNA (1)...(19): siRNA sense strand
acagagguguuuaccauga

SEQ ID NO: 2213076 - RNA, 19 nt, Homo sapiens
  misc_RNA (1)...(19): siRNA sense strand
caacuggucauuucuacaa

SEQ ID NO: 2213077 - RNA, 19 nt, Homo sapiens
  misc_RNA (1)...(19): siRNA sense strand
agaaggaaguauuucaaga

SEQ ID NO: 2213078 - RNA, 19 nt, Homo sapiens
  misc_RNA (1)...(19): siRNA sense strand
cgaaugagaaggaaguauu

SEQ ID NO: 2213079 - RNA, 19 nt, Homo sapiens
  misc_RNA (1)...(19): siRNA sense strand
ggaagcaauugccaagaag

SEQ ID NO: 2213080 - RNA, 19 nt, Homo sapiens
  misc_RNA (1)...(19): siRNA sense strand
auacuuaugccauugcuua

SEQ ID NO: 2213081 - RNA, 19 nt, Homo sapiens
  misc_RNA (1)...(19): siRNA sense strand
gacaacauccguuccuuau

SEQ ID NO: 2213082 - RNA, 19 nt, Homo sapiens
  misc_RNA (1)...(19): siRNA sense strand
ugacaacauccguuccuua

SEQ ID NO: 2213083 - RNA, 19 nt, Homo sapiens
  misc_RNA (1)...(19): siRNA sense strand
ggugaaagacuggaagaaa

SEQ ID NO: 2213084 - RNA, 19 nt, Homo sapiens
  misc_RNA (1)...(19): siRNA sense strand
uggaagcaauugccaagaa

SEQ ID NO: 2213085 - RNA, 19 nt, Homo sapiens
  misc_RNA (1)...(19): siRNA sense strand
cccauaaccuuuccaagug

SEQ ID NO: 2213086 - RNA, 19 nt, Homo sapiens
  misc_RNA (1)...(19): siRNA sense strand
aagaaacuaugaccauguu

SEQ ID NO: 2213087 - RNA, 19 nt, Homo sapiens
  misc_RNA (1)...(19): siRNA sense strand
ccauaaccuuuccaaguga

SEQ ID NO: 2213088 - RNA, 19 nt, Homo sapiens
  misc_RNA (1)...(19): siRNA sense strand
uugcuaggcauccauauua

SEQ ID NO: 2213089 - RNA, 19 nt, Homo sapiens
  misc_RNA (1)...(19): siRNA sense strand
gugaaagacuggaagaaac

SEQ ID NO: 2213090 - RNA, 19 nt, Homo sapiens
  misc_RNA (1)...(19): siRNA sense strand
aagaucagcuacaucauag

SEQ ID NO: 2213091 - RNA, 19 nt, Homo sapiens
  misc_RNA (1)...(19): siRNA sense strand
ucgaccagaucauuguaua

SEQ ID NO: 2213092 - RNA, 19 nt, Homo sapiens
  misc_RNA (1)...(19): siRNA sense strand
gcucgcuccuuuacgcuuu

SEQ ID NO: 2213093 - RNA, 19 nt, Homo sapiens
  misc_RNA (1)...(19): siRNA sense strand
uauuguaugucgacacuga

SEQ ID NO: 2213094 - RNA, 19 nt, Homo sapiens
  misc_RNA (1)...(19): siRNA sense strand
gaaagacuggaagaaacua

SEQ ID NO: 2213095 - RNA, 19 nt, Homo sapiens
  misc_RNA (1)...(19): siRNA sense strand
ucaaaccucuucaauucca

SEQ ID NO: 2213096 - RNA, 19 nt, Homo sapiens
  misc_RNA (1)...(19): siRNA sense strand
uaugaagcacugagaaauu

SEQ ID NO: 2213097 - RNA, 19 nt, Homo sapiens
  misc_RNA (1)...(19): siRNA sense strand
gaaugcagcagaguggaaa

SEQ ID NO: 2213098 - RNA, 19 nt, Homo sapiens
  misc_RNA (1)...(19): siRNA sense strand
agaaguugacucacuauug

SEQ ID NO: 2213099 - RNA, 19 nt, Homo sapiens
  misc_RNA (1)...(19): siRNA sense strand
gagauuguucuugccguua

SEQ ID NO: 2213100 - RNA, 19 nt, Homo sapiens
  misc_RNA (1)...(19): siRNA sense strand
gacaacuggucauuucuac

SEQ ID NO: 2213101 - RNA, 19 nt, Homo sapiens
  misc_RNA (1)...(19): siRNA sense strand
ugucgacacugauauccuu

SEQ ID NO: 2213102 - RNA, 19 nt, Homo sapiens
  misc_RNA (1)...(19): siRNA sense strand
gaagcacugagaaauuguu

SEQ ID NO: 2213103 - RNA, 19 nt, Homo sapiens
  misc_RNA (1)...(19): siRNA sense strand
augaagcacugagaaauug

SEQ ID NO: 2213104 - RNA, 19 nt, Homo sapiens
  misc_RNA (1)...(19): siRNA sense strand
uaagcaaccagcauuuaga

SEQ ID NO: 2213105 - RNA, 19 nt, Homo sapiens
  misc_RNA (1)...(19): siRNA sense strand
agaaggaggaaucuuuauu

SEQ ID NO: 2213106 - RNA, 19 nt, Homo sapiens
  misc_RNA (1)...(19): siRNA sense strand
aaacuaugaccauguugaa

SEQ ID NO: 2213107 - RNA, 19 nt, Homo sapiens
  misc_RNA (1)...(19): siRNA sense strand
gagaaggaaguauuucaag

SEQ ID NO: 2213108 - RNA, 19 nt, Homo sapiens
  misc_RNA (1)...(19): siRNA sense strand
guugaagucagcuaucauu

SEQ ID NO: 2213109 - RNA, 19 nt, Homo sapiens
  misc_RNA (1)...(19): siRNA sense strand
guguuuaccaugacgauaa

SEQ ID NO: 2213110 - RNA, 19 nt, Homo sapiens
  misc_RNA (1)...(19): siRNA sense strand
ugaugaacaugacucgaau

SEQ ID NO: 2213111 - RNA, 19 nt, Homo sapiens
  misc_RNA (1)...(19): siRNA sense strand
agauuguucuugccguuaa

SEQ ID NO: 2213112 - RNA, 19 nt, Homo sapiens
  misc_RNA (1)...(19): siRNA sense strand
caauggcaccagaacauga

SEQ ID NO: 2213113 - RNA, 19 nt, Homo sapiens
  misc_RNA (1)...(19): siRNA sense strand
gcauuuagagcuguuuaug

SEQ ID NO: 2213114 - RNA, 19 nt, Homo sapiens
  misc_RNA (1)...(19): siRNA sense strand
gcaauggcaccagaacaug

SEQ ID NO: 2213115 - RNA, 19 nt, Homo sapiens
  misc_RNA (1)...(19): siRNA sense strand
aacauccguuccuuauuaa

SEQ ID NO: 2213116 - RNA, 19 nt, Homo sapiens
  misc_RNA (1)...(19): siRNA sense strand
ucggacagguacagucuga

SEQ ID NO: 2213117 - RNA, 19 nt, Homo sapiens
  misc_RNA (1)...(19): siRNA sense strand
ccucgaauaggaugguaua

SEQ ID NO: 2213118 - RNA, 19 nt, Homo sapiens
  misc_RNA (1)...(19): siRNA sense strand
cgauaagcaaccagcauuu

SEQ ID NO: 2213119 - RNA, 19 nt, Homo sapiens
  misc_RNA (1)...(19): siRNA sense strand
ugagaaggaaguauuucaa

SEQ ID NO: 2213120 - RNA, 19 nt, Homo sapiens
  misc_RNA (1)...(19): siRNA sense strand
cauuuagagcuguuuauga

SEQ ID NO: 2213121 - RNA, 19 nt, Homo sapiens
  misc_RNA (1)...(19): siRNA sense strand
ccugaaagaaguugacuca

SEQ ID NO: 2213122 - RNA, 19 nt, Homo sapiens
  misc_RNA (1)...(19): siRNA sense strand
guauauauggaagcaauug

SEQ ID NO: 2213123 - RNA, 19 nt, Homo sapiens
  misc_RNA (1)...(19): siRNA sense strand
gaccaguugaugauauuug

SEQ ID NO: 2213124 - RNA, 19 nt, Homo sapiens
  misc_RNA (1)...(19): siRNA sense strand
ugacucgaaugagaaggaa

SEQ ID NO: 2213125 - RNA, 19 nt, Homo sapiens
  misc_RNA (1)...(19): siRNA sense strand
cuuuagaacuggaacuaca

SEQ ID NO: 2213126 - RNA, 19 nt, Homo sapiens
  misc_RNA (1)...(19): siRNA sense strand
cgacuacaauggggagaua

SEQ ID NO: 2213127 - RNA, 19 nt, Homo sapiens
  misc_RNA (1)...(19): siRNA sense strand
uacgaccaguugaugauau

SEQ ID NO: 2213128 - RNA, 19 nt, Homo sapiens
  misc_RNA (1)...(19): siRNA sense strand
aggaugguauaaucgcuuu

SEQ ID NO: 2213129 - RNA, 19 nt, Homo sapiens
  misc_RNA (1)...(19): siRNA sense strand
gaauaggaugguauaaucg

SEQ ID NO: 2213130 - RNA, 19 nt, Homo sapiens
  misc_RNA (1)...(19): siRNA sense strand
caagaaugauaugacaacu

SEQ ID NO: 2213131 - RNA, 19 nt, Homo sapiens
  misc_RNA (1)...(19): siRNA sense strand
agacuggaagaaacuauga

SEQ ID NO: 2213132 - RNA, 19 nt, Homo sapiens
  misc_RNA (1)...(19): siRNA sense strand
agauauacuuaugccauug

SEQ ID NO: 2213133 - RNA, 19 nt, Homo sapiens
  misc_RNA (1)...(19): siRNA sense strand
acgaccaguugaugauauu

SEQ ID NO: 2213134 - RNA, 19 nt, Homo sapiens
  misc_RNA (1)...(19): siRNA sense strand
gcauacauacuguggaaaa

SEQ ID NO: 2213135 - RNA, 19 nt, Homo sapiens
  misc_RNA (1)...(19): siRNA sense strand
ugaaagacuggaagaaacu

SEQ ID NO: 2213136 - RNA, 19 nt, Homo sapiens
  misc_RNA (1)...(19): siRNA sense strand
gcagaagaaggaggaaucu

SEQ ID NO: 2213137 - RNA, 19 nt, Homo sapiens
  misc_RNA (1)...(19): siRNA sense strand
ggcuucugcucgcuccuuu

SEQ ID NO: 2213138 - RNA, 19 nt, Homo sapiens
  misc_RNA (1)...(19): siRNA sense strand
cuaugaccauguugaaguc

SEQ ID NO: 2213139 - RNA, 19 nt, Homo sapiens
  misc_RNA (1)...(19): siRNA sense strand
ugccagaucaccaaaggaa

SEQ ID NO: 2213140 - RNA, 19 nt, Homo sapiens
  misc_RNA (1)...(19): siRNA sense strand
aaaccucuucaauuccaua

SEQ ID NO: 2213141 - RNA, 19 nt, Homo sapiens
  misc_RNA (1)...(19): siRNA sense strand
cagguacagucugaaaaua

SEQ ID NO: 2213142 - RNA, 19 nt, Homo sapiens
  misc_RNA (1)...(19): siRNA sense strand
cgaccagaucauuguauau

SEQ ID NO: 2213143 - RNA, 19 nt, Homo sapiens
  misc_RNA (1)...(19): siRNA sense strand
ucaagaaugauaugacaac

SEQ ID NO: 2213144 - RNA, 19 nt, Homo sapiens
  misc_RNA (1)...(19): siRNA sense strand
aaaugcaucuagcuguagu

SEQ ID NO: 2213145 - RNA, 19 nt, Homo sapiens
  misc_RNA (1)...(19): siRNA sense strand
ggauaggaguggcagaugu

SEQ ID NO: 2213146 - RNA, 19 nt, Homo sapiens
  misc_RNA (1)...(19): siRNA sense strand
gagaugauaugggugucaa

SEQ ID NO: 2213147 - RNA, 19 nt, Homo sapiens
  misc_RNA (1)...(19): siRNA sense strand
ggcuguugcuggaguauga

SEQ ID NO: 2213148 - RNA, 19 nt, Homo sapiens
  misc_RNA (1)...(19): siRNA sense strand
ccagagaggcgucaguuuc

SEQ ID NO: 2213149 - RNA, 19 nt, Homo sapiens
  misc_RNA (1)...(19): siRNA sense strand
gggagcugcugacccauuc

SEQ ID NO: 2213150 - RNA, 19 nt, Homo sapiens
  misc_RNA (1)...(19): siRNA sense strand
gagaggcgucaguuucaaa

SEQ ID NO: 2213151 - RNA, 19 nt, Homo sapiens
  misc_RNA (1)...(19): siRNA sense strand
gcacguucuuugcgcuugu

SEQ ID NO: 2213152 - RNA, 19 nt, Homo sapiens
  misc_RNA (1)...(19): siRNA sense strand
gaucguuccuggguguuca

SEQ ID NO: 2213153 - RNA, 19 nt, Homo sapiens
  misc_RNA (1)...(19): siRNA sense strand
cagagaggcgucaguuuca

SEQ ID NO: 2213154 - RNA, 19 nt, Homo sapiens
  misc_RNA (1)...(19): siRNA sense strand
gauaggaguggcagaugug

SEQ ID NO: 2213155 - RNA, 19 nt, Homo sapiens
  misc_RNA (1)...(19): siRNA sense strand
gaugauaugggugucaaau

SEQ ID NO: 2213156 - RNA, 19 nt, Homo sapiens
  misc_RNA (1)...(19): siRNA sense strand
guauugggcagccagagaa

SEQ ID NO: 2213157 - RNA, 19 nt, Homo sapiens
  misc_RNA (1)...(19): siRNA sense strand
gaagcgcucccagcaguuc

SEQ ID NO: 2213158 - RNA, 19 nt, Homo sapiens
  misc_RNA (1)...(19): siRNA sense strand
gguauugggcagccagaga

SEQ ID NO: 2213159 - RNA, 19 nt, Homo sapiens
  misc_RNA (1)...(19): siRNA sense strand
aauauggcuuggugggauu

SEQ ID NO: 2213160 - RNA, 19 nt, Homo sapiens
  misc_RNA (1)...(19): siRNA sense strand
gagccaggucucugugguu

SEQ ID NO: 2213161 - RNA, 19 nt, Homo sapiens
  misc_RNA (1)...(19): siRNA sense strand
ggauagcugcauugguguu

SEQ ID NO: 2213162 - RNA, 19 nt, Homo sapiens
  misc_RNA (1)...(19): siRNA sense strand
gauagcugcauugguguug

SEQ ID NO: 2213163 - RNA, 19 nt, Homo sapiens
  misc_RNA (1)...(19): siRNA sense strand
cugcauugguguugaugau

SEQ ID NO: 2213164 - RNA, 19 nt, Homo sapiens
  misc_RNA (1)...(19): siRNA sense strand
cagccuggcacucuucaga

SEQ ID NO: 2213165 - RNA, 19 nt, Homo sapiens
  misc_RNA (1)...(19): siRNA sense strand
uagcugcauugguguugau

SEQ ID NO: 2213166 - RNA, 19 nt, Homo sapiens
  misc_RNA (1)...(19): siRNA sense strand
agagaggcgucaguuucaa

SEQ ID NO: 2213167 - RNA, 19 nt, Homo sapiens
  misc_RNA (1)...(19): siRNA sense strand
ucccagcaguuccggauag

SEQ ID NO: 2213168 - RNA, 19 nt, Homo sapiens
  misc_RNA (1)...(19): siRNA sense strand
acacgcuacagacagauuu

SEQ ID NO: 2213169 - RNA, 19 nt, Homo sapiens
  misc_RNA (1)...(19): siRNA sense strand
gcccagagaggcgucaguu

SEQ ID NO: 2213170 - RNA, 19 nt, Homo sapiens
  misc_RNA (1)...(19): siRNA sense strand
gaaaggagcuuggaaagaa

SEQ ID NO: 2213171 - RNA, 19 nt, Homo sapiens
  misc_RNA (1)...(19): siRNA sense strand
caucagaaauggagaaauu

SEQ ID NO: 2213172 - RNA, 19 nt, Homo sapiens
  misc_RNA (1)...(19): siRNA sense strand
gaaagaagaugcucuacag

SEQ ID NO: 2213173 - RNA, 19 nt, Homo sapiens
  misc_RNA (1)...(19): siRNA sense strand
gagacgacauuucuguaua

SEQ ID NO: 2213174 - RNA, 19 nt, Homo sapiens
  misc_RNA (1)...(19): siRNA sense strand
gaggauggcggauaucuaa

SEQ ID NO: 2213175 - RNA, 19 nt, Homo sapiens
  misc_RNA (1)...(19): siRNA sense strand
uacagggacuuuaauauga

SEQ ID NO: 2213176 - RNA, 19 nt, Homo sapiens
  misc_RNA (1)...(19): siRNA sense strand
ucacucaguuucuuccuaa

SEQ ID NO: 2213177 - RNA, 19 nt, Homo sapiens
  misc_RNA (1)...(19): siRNA sense strand
ggacagaggauggcggaua

SEQ ID NO: 2213178 - RNA, 19 nt, Homo sapiens
  misc_RNA (1)...(19): siRNA sense strand
gacagaggauggcggauau

SEQ ID NO: 2213179 - RNA, 19 nt, Homo sapiens
  misc_RNA (1)...(19): siRNA sense strand
cagaugauccucacaggua

SEQ ID NO: 2213180 - RNA, 19 nt, Homo sapiens
  misc_RNA (1)...(19): siRNA sense strand
gauggcggauaucuaauga

SEQ ID NO: 2213181 - RNA, 19 nt, Homo sapiens
  misc_RNA (1)...(19): siRNA sense strand
cagaagcaaucacucaguu

SEQ ID NO: 2213182 - RNA, 19 nt, Homo sapiens
  misc_RNA (1)...(19): siRNA sense strand
caaggagaguacagagaaa

SEQ ID NO: 2213183 - RNA, 19 nt, Homo sapiens
  misc_RNA (1)...(19): siRNA sense strand
guucacacauuuggaguuu

SEQ ID NO: 2213184 - RNA, 19 nt, Homo sapiens
  misc_RNA (1)...(19): siRNA sense strand
gauggacucugggacguuu

SEQ ID NO: 2213185 - RNA, 19 nt, Homo sapiens
  misc_RNA (1)...(19): siRNA sense strand
ggacugggccauaaucauc

SEQ ID NO: 2213186 - RNA, 19 nt, Homo sapiens
  misc_RNA (1)...(19): siRNA sense strand
agacgacauuucuguauau

SEQ ID NO: 2213187 - RNA, 19 nt, Homo sapiens
  misc_RNA (1)...(19): siRNA sense strand
gaagcaaucacucaguuuc

SEQ ID NO: 2213188 - RNA, 19 nt, Homo sapiens
  misc_RNA (1)...(19): siRNA sense strand
ggagacgacauuucuguau

SEQ ID NO: 2213189 - RNA, 19 nt, Homo sapiens
  misc_RNA (1)...(19): siRNA sense strand
ccaaggagaguacagagaa

SEQ ID NO: 2213190 - RNA, 19 nt, Homo sapiens
  misc_RNA (1)...(19): siRNA sense strand
uaacugugauccagaugau

SEQ ID NO: 2213191 - RNA, 19 nt, Homo sapiens
  misc_RNA (1)...(19): siRNA sense strand
gaaucuacgaucuuucaaa

SEQ ID NO: 2213192 - RNA, 19 nt, Homo sapiens
  misc_RNA (1)...(19): siRNA sense strand
gugcaugacuccaacaucu

SEQ ID NO: 2213193 - RNA, 19 nt, Homo sapiens
  misc_RNA (1)...(19): siRNA sense strand
ggaaagaagaugcucuaca

SEQ ID NO: 2213194 - RNA, 19 nt, Homo sapiens
  misc_RNA (1)...(19): siRNA sense strand
cuacagggacuuuaauaug

SEQ ID NO: 2213195 - RNA, 19 nt, Homo sapiens
  misc_RNA (1)...(19): siRNA sense strand
gccauaaucaucagaaaug

SEQ ID NO: 2213196 - RNA, 19 nt, Homo sapiens
  misc_RNA (1)...(19): siRNA sense strand
acuccaacaucuacauuaa

SEQ ID NO: 2213197 - RNA, 19 nt, Homo sapiens
  misc_RNA (1)...(19): siRNA sense strand
gaaauuauccccaugucuu

SEQ ID NO: 2213198 - RNA, 19 nt, Homo sapiens
  misc_RNA (1)...(19): siRNA sense strand
cuguauaugucauuccuuu

SEQ ID NO: 2213199 - RNA, 19 nt, Homo sapiens
  misc_RNA (1)...(19): siRNA sense strand
gaucuuggccacugaugga

SEQ ID NO: 2213200 - RNA, 19 nt, Homo sapiens
  misc_RNA (1)...(19): siRNA sense strand
gaagccagcagucauagca

SEQ ID NO: 2213201 - RNA, 19 nt, Homo sapiens
  misc_RNA (1)...(19): siRNA sense strand
gucuucagcuccagaggua

SEQ ID NO: 2213202 - RNA, 19 nt, Homo sapiens
  misc_RNA (1)...(19): siRNA sense strand
gagaaaggagcuuggaaag

SEQ ID NO: 2213203 - RNA, 19 nt, Homo sapiens
  misc_RNA (1)...(19): siRNA sense strand
gggccauaaucaucagaaa

SEQ ID NO: 2213204 - RNA, 19 nt, Homo sapiens
  misc_RNA (1)...(19): siRNA sense strand
agaaguagcagaagcaauc

SEQ ID NO: 2213205 - RNA, 19 nt, Homo sapiens
  misc_RNA (1)...(19): siRNA sense strand
gguaauggcaacuauugga

SEQ ID NO: 2213206 - RNA, 19 nt, Homo sapiens
  misc_RNA (1)...(19): siRNA sense strand
ggauggcggauaucuaaug

SEQ ID NO: 2213207 - RNA, 19 nt, Homo sapiens
  misc_RNA (1)...(19): siRNA sense strand
ccccaugucuucagaauuu

SEQ ID NO: 2213208 - RNA, 19 nt, Homo sapiens
  misc_RNA (1)...(19): siRNA sense strand
agagaaaggagcuuggaaa

SEQ ID NO: 2213209 - RNA, 19 nt, Homo sapiens
  misc_RNA (1)...(19): siRNA sense strand
gcaaggacugggccauaau

SEQ ID NO: 2213210 - RNA, 19 nt, Homo sapiens
  misc_RNA (1)...(19): siRNA sense strand
caacaucuacauuaaacca

SEQ ID NO: 2213211 - RNA, 19 nt, Homo sapiens
  misc_RNA (1)...(19): siRNA sense strand
gacuccaacaucuacauua

SEQ ID NO: 2213212 - RNA, 19 nt, Homo sapiens
  misc_RNA (1)...(19): siRNA sense strand
gcaaucacucaguuucuuc

SEQ ID NO: 2213213 - RNA, 19 nt, Homo sapiens
  misc_RNA (1)...(19): siRNA sense strand
caucuacauuaaaccauuc

SEQ ID NO: 2213214 - RNA, 19 nt, Homo sapiens
  misc_RNA (1)...(19): siRNA sense strand
acaaaaccauugaggauga

SEQ ID NO: 2213215 - RNA, 19 nt, Homo sapiens
  misc_RNA (1)...(19): siRNA sense strand
gaagaaguagcagaagcaa

SEQ ID NO: 2213216 - RNA, 19 nt, Homo sapiens
  misc_RNA (1)...(19): siRNA sense strand
aaaugaagaaguagcagaa

SEQ ID NO: 2213217 - RNA, 19 nt, Homo sapiens
  misc_RNA (1)...(19): siRNA sense strand
gggcucaggagacgacauu

SEQ ID NO: 2213218 - RNA, 19 nt, Homo sapiens
  misc_RNA (1)...(19): siRNA sense strand
gcugggaaaugaguucaca

SEQ ID NO: 2213219 - RNA, 19 nt, Homo sapiens
  misc_RNA (1)...(19): siRNA sense strand
gacgacauuucuguauaug

SEQ ID NO: 2213220 - RNA, 19 nt, Homo sapiens
  misc_RNA (1)...(19): siRNA sense strand
gcagaagcaaucacucagu

SEQ ID NO: 2213221 - RNA, 19 nt, Homo sapiens
  misc_RNA (1)...(19): siRNA sense strand
uuaaaccauuccugucuuc

SEQ ID NO: 2213222 - RNA, 19 nt, Homo sapiens
  misc_RNA (1)...(19): siRNA sense strand
gucauuccuuuaauacaug

SEQ ID NO: 2213223 - RNA, 19 nt, Homo sapiens
  misc_RNA (1)...(19): siRNA sense strand
agcaaggacugggccauaa

SEQ ID NO: 2213224 - RNA, 19 nt, Homo sapiens
  misc_RNA (1)...(19): siRNA sense strand
uagcaaggacugggccaua

SEQ ID NO: 2213225 - RNA, 19 nt, Homo sapiens
  misc_RNA (1)...(19): siRNA sense strand
cauugaggaugaggacuug

SEQ ID NO: 2213226 - RNA, 19 nt, Homo sapiens
  misc_RNA (1)...(19): siRNA sense strand
uagcagaagcaaucacuca

SEQ ID NO: 2213227 - RNA, 19 nt, Homo sapiens
  misc_RNA (1)...(19): siRNA sense strand
ggagaguacagagaaagga

SEQ ID NO: 2213228 - RNA, 19 nt, Homo sapiens
  misc_RNA (1)...(19): siRNA sense strand
gcucaggagacgacauuuc

SEQ ID NO: 2213229 - RNA, 19 nt, Homo sapiens
  misc_RNA (1)...(19): siRNA sense strand
agaaaggagcuuggaaaga

SEQ ID NO: 2213230 - RNA, 19 nt, Homo sapiens
  misc_RNA (1)...(19): siRNA sense strand
gaaguagcagaagcaauca

SEQ ID NO: 2213231 - RNA, 19 nt, Homo sapiens
  misc_RNA (1)...(19): siRNA sense strand
uccaacaucuacauuaaac

SEQ ID NO: 2213232 - RNA, 19 nt, Homo sapiens
  misc_RNA (1)...(19): siRNA sense strand
gacaggcugggcauacaaa

SEQ ID NO: 2213233 - RNA, 19 nt, Homo sapiens
  misc_RNA (1)...(19): siRNA sense strand
aaaggagcuuggaaagaag

SEQ ID NO: 2213234 - RNA, 19 nt, Homo sapiens
  misc_RNA (1)...(19): siRNA sense strand
cggguaauggcaacuauug

SEQ ID NO: 2213235 - RNA, 19 nt, Homo sapiens
  misc_RNA (1)...(19): siRNA sense strand
ugaagaaguagcagaagca

SEQ ID NO: 2213236 - RNA, 19 nt, Homo sapiens
  misc_RNA (1)...(19): siRNA sense strand
cuccagagguaagaaucua

SEQ ID NO: 2213237 - RNA, 19 nt, Homo sapiens
  misc_RNA (1)...(19): siRNA sense strand
gcaugacuccaacaucuac

SEQ ID NO: 2213238 - RNA, 19 nt, Homo sapiens
  misc_RNA (1)...(19): siRNA sense strand
caggagacgacauuucugu

SEQ ID NO: 2213239 - RNA, 19 nt, Homo sapiens
  misc_RNA (1)...(19): siRNA sense strand
caaggacugggccauaauc

SEQ ID NO: 2213240 - RNA, 19 nt, Homo sapiens
  misc_RNA (1)...(19): siRNA sense strand
ggccauaaucaucagaaau

SEQ ID NO: 2213241 - RNA, 19 nt, Homo sapiens
  misc_RNA (1)...(19): siRNA sense strand
ucacacauuuggaguuucc

SEQ ID NO: 2213242 - RNA, 19 nt, Homo sapiens
  misc_RNA (1)...(19): siRNA sense strand
cagaaauggagaaauuauc

SEQ ID NO: 2213243 - RNA, 19 nt, Homo sapiens
  misc_RNA (1)...(19): siRNA sense strand
agaagcaaucacucaguuu

SEQ ID NO: 2213244 - RNA, 19 nt, Homo sapiens
  misc_RNA (1)...(19): siRNA sense strand
gcucuacagggacuuuaau

SEQ ID NO: 2213245 - RNA, 19 nt, Homo sapiens
  misc_RNA (1)...(19): siRNA sense strand
ugaaggugcaugacuccaa

SEQ ID NO: 2213246 - RNA, 19 nt, Homo sapiens
  misc_RNA (1)...(19): siRNA sense strand
cauuaaaccauuccugucu

SEQ ID NO: 2213247 - RNA, 19 nt, Homo sapiens
  misc_RNA (1)...(19): siRNA sense strand
ccauugaggaugaggacuu

SEQ ID NO: 2213248 - RNA, 19 nt, Homo sapiens
  misc_RNA (1)...(19): siRNA sense strand
ugacuccaacaucuacauu

SEQ ID NO: 2213249 - RNA, 19 nt, Homo sapiens
  misc_RNA (1)...(19): siRNA sense strand
cccaugucuucagaauuua

SEQ ID NO: 2213250 - RNA, 19 nt, Homo sapiens
  misc_RNA (1)...(19): siRNA sense strand
ggaguuuccaaggagagua

SEQ ID NO: 2213251 - RNA, 19 nt, Homo sapiens
  misc_RNA (1)...(19): siRNA sense strand
cagagaaaggagcuuggaa

SEQ ID NO: 2213252 - RNA, 19 nt, Homo sapiens
  misc_RNA (1)...(19): siRNA sense strand
ucuacagggacuuuaauau

SEQ ID NO: 2213253 - RNA, 19 nt, Homo sapiens
  misc_RNA (1)...(19): siRNA sense strand
gaacaugauggauuucuua

SEQ ID NO: 2213254 - RNA, 19 nt, Homo sapiens
  misc_RNA (1)...(19): siRNA sense strand
ugaagaagguucccaagaa

SEQ ID NO: 2213255 - RNA, 19 nt, Homo sapiens
  misc_RNA (1)...(19): siRNA sense strand
gaagaagguucccaagaag

SEQ ID NO: 2213256 - RNA, 19 nt, Homo sapiens
  misc_RNA (1)...(19): siRNA sense strand
gggcaggccuugcagaaug

SEQ ID NO: 2213257 - RNA, 19 nt, Homo sapiens
  misc_RNA (1)...(19): siRNA sense strand
ggucagggcucacccagau

SEQ ID NO: 2213258 - RNA, 19 nt, Homo sapiens
  misc_RNA (1)...(19): siRNA sense strand
ggaacaugauggauuucuu

SEQ ID NO: 2213259 - RNA, 19 nt, Homo sapiens
  misc_RNA (1)...(19): siRNA sense strand
aagcauaucuuaggcagaa

SEQ ID NO: 2213260 - RNA, 19 nt, Homo sapiens
  misc_RNA (1)...(19): siRNA sense strand
uaaagguuguggccagaaa

SEQ ID NO: 2213261 - RNA, 19 nt, Homo sapiens
  misc_RNA (1)...(19): siRNA sense strand
gaagguucccaagaaguua

SEQ ID NO: 2213262 - RNA, 19 nt, Homo sapiens
  misc_RNA (1)...(19): siRNA sense strand
aagggaacaugauggauuu

SEQ ID NO: 2213263 - RNA, 19 nt, Homo sapiens
  misc_RNA (1)...(19): siRNA sense strand
ggaagaggagcacuuugaa

SEQ ID NO: 2213264 - RNA, 19 nt, Homo sapiens
  misc_RNA (1)...(19): siRNA sense strand
caagggaacaugauggauu

SEQ ID NO: 2213265 - RNA, 19 nt, Homo sapiens
  misc_RNA (1)...(19): siRNA sense strand
ggacauugaagaagaggaa

SEQ ID NO: 2213266 - RNA, 19 nt, Homo sapiens
  misc_RNA (1)...(19): siRNA sense strand
caaggaguauuugauugaa

SEQ ID NO: 2213267 - RNA, 19 nt, Homo sapiens
  misc_RNA (1)...(19): siRNA sense strand
gcacuucuccagcgaccua

SEQ ID NO: 2213268 - RNA, 19 nt, Homo sapiens
  misc_RNA (1)...(19): siRNA sense strand
ccaagaaguuagaggagau

SEQ ID NO: 2213269 - RNA, 19 nt, Homo sapiens
  misc_RNA (1)...(19): siRNA sense strand
ugauggauuucuuagcuuu

SEQ ID NO: 2213270 - RNA, 19 nt, Homo sapiens
  misc_RNA (1)...(19): siRNA sense strand
ccagcgaccuaacaaauac

SEQ ID NO: 2213271 - RNA, 19 nt, Homo sapiens
  misc_RNA (1)...(19): siRNA sense strand
ccauuacaagcauaucuua

SEQ ID NO: 2213272 - RNA, 19 nt, Homo sapiens
  misc_RNA (1)...(19): siRNA sense strand
uaucuuaggcagaaugauu

SEQ ID NO: 2213273 - RNA, 19 nt, Homo sapiens
  misc_RNA (1)...(19): siRNA sense strand
ggaagcagugccuggacua

SEQ ID NO: 2213274 - RNA, 19 nt, Homo sapiens
  misc_RNA (1)...(19): siRNA sense strand
caugauggauuucuuagcu

SEQ ID NO: 2213275 - RNA, 19 nt, Homo sapiens
  misc_RNA (1)...(19): siRNA sense strand
cgaccuaacaaauacauau

SEQ ID NO: 2213276 - RNA, 19 nt, Homo sapiens
  misc_RNA (1)...(19): siRNA sense strand
ggaacacgggaaugaagaa

SEQ ID NO: 2213277 - RNA, 19 nt, Homo sapiens
  misc_RNA (1)...(19): siRNA sense strand
gaagaggagcacuuugaag

SEQ ID NO: 2213278 - RNA, 19 nt, Homo sapiens
  misc_RNA (1)...(19): siRNA sense strand
acacgggaaugaagaaggu

SEQ ID NO: 2213279 - RNA, 19 nt, Homo sapiens
  misc_RNA (1)...(19): siRNA sense strand
ccgcagaucagcagcauca

SEQ ID NO: 2213280 - RNA, 19 nt, Homo sapiens
  misc_RNA (1)...(19): siRNA sense strand
ggauuggaaugcacuucuc

SEQ ID NO: 2213281 - RNA, 19 nt, Homo sapiens
  misc_RNA (1)...(19): siRNA sense strand
agaagguucccaagaaguu

SEQ ID NO: 2213282 - RNA, 19 nt, Homo sapiens
  misc_RNA (1)...(19): siRNA sense strand
caucaccacggcuaacuug

SEQ ID NO: 2213283 - RNA, 19 nt, Homo sapiens
  misc_RNA (1)...(19): siRNA sense strand
gggaacacgggaaugaaga

SEQ ID NO: 2213284 - RNA, 19 nt, Homo sapiens
  misc_RNA (1)...(19): siRNA sense strand
gcagaucagcagcaucauc

SEQ ID NO: 2213285 - RNA, 19 nt, Homo sapiens
  misc_RNA (1)...(19): siRNA sense strand
ggcaggccuugcagaaugu

SEQ ID NO: 2213286 - RNA, 19 nt, Homo sapiens
  misc_RNA (1)...(19): siRNA sense strand
gaccuaacaaauacauaug

SEQ ID NO: 2213287 - RNA, 19 nt, Homo sapiens
  misc_RNA (1)...(19): siRNA sense strand
ggacuccuguugccauagc

SEQ ID NO: 2213288 - RNA, 19 nt, Homo sapiens
  misc_RNA (1)...(19): siRNA sense strand
aggaagaggagcacuuuga

SEQ ID NO: 2213289 - RNA, 19 nt, Homo sapiens
  misc_RNA (1)...(19): siRNA sense strand
ccaccacuguacugucugu

SEQ ID NO: 2213290 - RNA, 19 nt, Homo sapiens
  misc_RNA (1)...(19): siRNA sense strand
uccagcgaccuaacaaaua

SEQ ID NO: 2213291 - RNA, 19 nt, Homo sapiens
  misc_RNA (1)...(19): siRNA sense strand
gaagcagugccuggacuau

SEQ ID NO: 2213292 - RNA, 19 nt, Homo sapiens
  misc_RNA (1)...(19): siRNA sense strand
ugggacuccuguugccaua

SEQ ID NO: 2213293 - RNA, 19 nt, Homo sapiens
  misc_RNA (1)...(19): siRNA sense strand
ucaaggagagacuguaugg

SEQ ID NO: 2213294 - RNA, 19 nt, Homo sapiens
  misc_RNA (1)...(19): siRNA sense strand
ggagaugcaggcucugaag

SEQ ID NO: 2213295 - RNA, 19 nt, Homo sapiens
  misc_RNA (1)...(19): siRNA sense strand
agcagugccuggacuauca

SEQ ID NO: 2213296 - RNA, 19 nt, Homo sapiens
  misc_RNA (1)...(19): siRNA sense strand
gcauaucuuaggcagaaug

SEQ ID NO: 2213297 - RNA, 19 nt, Homo sapiens
  misc_RNA (1)...(19): siRNA sense strand
ugauuuggacauugaagaa

SEQ ID NO: 2213298 - RNA, 19 nt, Homo sapiens
  misc_RNA (1)...(19): siRNA sense strand
agaggaagaggagcacuuu

SEQ ID NO: 2213299 - RNA, 19 nt, Homo sapiens
  misc_RNA (1)...(19): siRNA sense strand
caagaaguuagaggagauu

SEQ ID NO: 2213300 - RNA, 19 nt, Homo sapiens
  misc_RNA (1)...(19): siRNA sense strand
gaacacgggaaugaagaag

SEQ ID NO: 2213301 - RNA, 19 nt, Homo sapiens
  misc_RNA (1)...(19): siRNA sense strand
cauuaaugaugagguaaag

SEQ ID NO: 2213302 - RNA, 19 nt, Homo sapiens
  misc_RNA (1)...(19): siRNA sense strand
ccggagauggcacagauga

SEQ ID NO: 2213303 - RNA, 19 nt, Homo sapiens
  misc_RNA (1)...(19): siRNA sense strand
uggcacagaugaggaagca

SEQ ID NO: 2213304 - RNA, 19 nt, Homo sapiens
  misc_RNA (1)...(19): siRNA sense strand
ggucuucaaggaguauuug

SEQ ID NO: 2213305 - RNA, 19 nt, Homo sapiens
  misc_RNA (1)...(19): siRNA sense strand
gcacccaccacuguacugu

SEQ ID NO: 2213306 - RNA, 19 nt, Homo sapiens
  misc_RNA (1)...(19): siRNA sense strand
gaggaagaggagcacuuug

SEQ ID NO: 2213307 - RNA, 19 nt, Homo sapiens
  misc_RNA (1)...(19): siRNA sense strand
cuccggagauggcacagau

SEQ ID NO: 2213308 - RNA, 19 nt, Homo sapiens
  misc_RNA (1)...(19): siRNA sense strand
gaccauuacaagcauaucu

SEQ ID NO: 2213309 - RNA, 19 nt, Homo sapiens
  misc_RNA (1)...(19): siRNA sense strand
gaacaugauggauuucuua

SEQ ID NO: 2213310 - RNA, 19 nt, Homo sapiens
  misc_RNA (1)...(19): siRNA sense strand
ugaagaagguucccaagaa

SEQ ID NO: 2213311 - RNA, 19 nt, Homo sapiens
  misc_RNA (1)...(19): siRNA sense strand
gaagaagguucccaagaag

SEQ ID NO: 2213312 - RNA, 19 nt, Homo sapiens
  misc_RNA (1)...(19): siRNA sense strand
gggcaggccuugcagaaug

SEQ ID NO: 2213313 - RNA, 19 nt, Homo sapiens
  misc_RNA (1)...(19): siRNA sense strand
ggucagggcucacccagau

SEQ ID NO: 2213314 - RNA, 19 nt, Homo sapiens
  misc_RNA (1)...(19): siRNA sense strand
ggaacaugauggauuucuu

SEQ ID NO: 2213315 - RNA, 19 nt, Homo sapiens
  misc_RNA (1)...(19): siRNA sense strand
aagcauaucuuaggcagaa

SEQ ID NO: 2213316 - RNA, 19 nt, Homo sapiens
  misc_RNA (1)...(19): siRNA sense strand
uaaagguuguggccagaaa

SEQ ID NO: 2213317 - RNA, 19 nt, Homo sapiens
  misc_RNA (1)...(19): siRNA sense strand
gaagguucccaagaaguua

SEQ ID NO: 2213318 - RNA, 19 nt, Homo sapiens
  misc_RNA (1)...(19): siRNA sense strand
aagggaacaugauggauuu

SEQ ID NO: 2213319 - RNA, 19 nt, Homo sapiens
  misc_RNA (1)...(19): siRNA sense strand
ggaagaggagcacuuugaa

SEQ ID NO: 2213320 - RNA, 19 nt, Homo sapiens
  misc_RNA (1)...(19): siRNA sense strand
caagggaacaugauggauu

SEQ ID NO: 2213321 - RNA, 19 nt, Homo sapiens
  misc_RNA (1)...(19): siRNA sense strand
ggacauugaagaagaggaa

SEQ ID NO: 2213322 - RNA, 19 nt, Homo sapiens
  misc_RNA (1)...(19): siRNA sense strand
caaggaguauuugauugaa

SEQ ID NO: 2213323 - RNA, 19 nt, Homo sapiens
  misc_RNA (1)...(19): siRNA sense strand
gcacuucuccagcgaccua

SEQ ID NO: 2213324 - RNA, 19 nt, Homo sapiens
  misc_RNA (1)...(19): siRNA sense strand
ccaagaaguuagaggagau

SEQ ID NO: 2213325 - RNA, 19 nt, Homo sapiens
  misc_RNA (1)...(19): siRNA sense strand
ugauggauuucuuagcuuu

SEQ ID NO: 2213326 - RNA, 19 nt, Homo sapiens
  misc_RNA (1)...(19): siRNA sense strand
ccagcgaccuaacaaauac

SEQ ID NO: 2213327 - RNA, 19 nt, Homo sapiens
  misc_RNA (1)...(19): siRNA sense strand
ccauuacaagcauaucuua

SEQ ID NO: 2213328 - RNA, 19 nt, Homo sapiens
  misc_RNA (1)...(19): siRNA sense strand
uaucuuaggcagaaugauu

SEQ ID NO: 2213329 - RNA, 19 nt, Homo sapiens
  misc_RNA (1)...(19): siRNA sense strand
ggaagcagugccuggacua

SEQ ID NO: 2213330 - RNA, 19 nt, Homo sapiens
  misc_RNA (1)...(19): siRNA sense strand
caugauggauuucuuagcu

SEQ ID NO: 2213331 - RNA, 19 nt, Homo sapiens
  misc_RNA (1)...(19): siRNA sense strand
cgaccuaacaaauacauau

SEQ ID NO: 2213332 - RNA, 19 nt, Homo sapiens
  misc_RNA (1)...(19): siRNA sense strand
ggaacacgggaaugaagaa

SEQ ID NO: 2213333 - RNA, 19 nt, Homo sapiens
  misc_RNA (1)...(19): siRNA sense strand
gaagaggagcacuuugaag

SEQ ID NO: 2213334 - RNA, 19 nt, Homo sapiens
  misc_RNA (1)...(19): siRNA sense strand
acacgggaaugaagaaggu

SEQ ID NO: 2213335 - RNA, 19 nt, Homo sapiens
  misc_RNA (1)...(19): siRNA sense strand
caucaccacggcuaacuug

SEQ ID NO: 2213336 - RNA, 19 nt, Homo sapiens
  misc_RNA (1)...(19): siRNA sense strand
ggauuggaaugcacuucuc

SEQ ID NO: 2213337 - RNA, 19 nt, Homo sapiens
  misc_RNA (1)...(19): siRNA sense strand
agaagguucccaagaaguu

SEQ ID NO: 2213338 - RNA, 19 nt, Homo sapiens
  misc_RNA (1)...(19): siRNA sense strand
gggaacacgggaaugaaga

SEQ ID NO: 2213339 - RNA, 19 nt, Homo sapiens
  misc_RNA (1)...(19): siRNA sense strand
gcagaucagcagcaucauc

SEQ ID NO: 2213340 - RNA, 19 nt, Homo sapiens
  misc_RNA (1)...(19): siRNA sense strand
ccgcagaucagcagcauca

SEQ ID NO: 2213341 - RNA, 19 nt, Homo sapiens
  misc_RNA (1)...(19): siRNA sense strand
ggcaggccuugcagaaugu

SEQ ID NO: 2213342 - RNA, 19 nt, Homo sapiens
  misc_RNA (1)...(19): siRNA sense strand
gaccuaacaaauacauaug

SEQ ID NO: 2213343 - RNA, 19 nt, Homo sapiens
  misc_RNA (1)...(19): siRNA sense strand
ggacuccuguugccauagc

SEQ ID NO: 2213344 - RNA, 19 nt, Homo sapiens
  misc_RNA (1)...(19): siRNA sense strand
aggaagaggagcacuuuga

SEQ ID NO: 2213345 - RNA, 19 nt, Homo sapiens
  misc_RNA (1)...(19): siRNA sense strand
ccaccacuguacugucugu

SEQ ID NO: 2213346 - RNA, 19 nt, Homo sapiens
  misc_RNA (1)...(19): siRNA sense strand
uccagcgaccuaacaaaua

SEQ ID NO: 2213347 - RNA, 19 nt, Homo sapiens
  misc_RNA (1)...(19): siRNA sense strand
agcauuuccugaagacgua

SEQ ID NO: 2213348 - RNA, 19 nt, Homo sapiens
  misc_RNA (1)...(19): siRNA sense strand
ugggacuccuguugccaua

SEQ ID NO: 2213349 - RNA, 19 nt, Homo sapiens
  misc_RNA (1)...(19): siRNA sense strand
ucaaggagagacuguaugg

SEQ ID NO: 2213350 - RNA, 19 nt, Homo sapiens
  misc_RNA (1)...(19): siRNA sense strand
ggagaugcaggcucugaag

SEQ ID NO: 2213351 - RNA, 19 nt, Homo sapiens
  misc_RNA (1)...(19): siRNA sense strand
agcagugccuggacuauca

SEQ ID NO: 2213352 - RNA, 19 nt, Homo sapiens
  misc_RNA (1)...(19): siRNA sense strand
gaagcagugccuggacuau

SEQ ID NO: 2213353 - RNA, 19 nt, Homo sapiens
  misc_RNA (1)...(19): siRNA sense strand
gcauaucuuaggcagaaug

SEQ ID NO: 2213354 - RNA, 19 nt, Homo sapiens
  misc_RNA (1)...(19): siRNA sense strand
ugauuuggacauugaagaa

SEQ ID NO: 2213355 - RNA, 19 nt, Homo sapiens
  misc_RNA (1)...(19): siRNA sense strand
agaggaagaggagcacuuu

SEQ ID NO: 2213356 - RNA, 19 nt, Homo sapiens
  misc_RNA (1)...(19): siRNA sense strand
caagaaguuagaggagauu

SEQ ID NO: 2213357 - RNA, 19 nt, Homo sapiens
  misc_RNA (1)...(19): siRNA sense strand
gaacacgggaaugaagaag

SEQ ID NO: 2213358 - RNA, 19 nt, Homo sapiens
  misc_RNA (1)...(19): siRNA sense strand
cauuaaugaugagguaaag

SEQ ID NO: 2213359 - RNA, 19 nt, Homo sapiens
  misc_RNA (1)...(19): siRNA sense strand
gggagcauuuccugaagac

SEQ ID NO: 2213360 - RNA, 19 nt, Homo sapiens
  misc_RNA (1)...(19): siRNA sense strand
ccggagauggcacagauga

SEQ ID NO: 2213361 - RNA, 19 nt, Homo sapiens
  misc_RNA (1)...(19): siRNA sense strand
uggcacagaugaggaagca

SEQ ID NO: 2213362 - RNA, 19 nt, Homo sapiens
  misc_RNA (1)...(19): siRNA sense strand
ggucuucaaggaguauuug

SEQ ID NO: 2213363 - RNA, 19 nt, Homo sapiens
  misc_RNA (1)...(19): siRNA sense strand
gcacccaccacuguacugu

SEQ ID NO: 2213364 - RNA, 19 nt, Homo sapiens
  misc_RNA (1)...(19): siRNA sense strand
gaggaagaggagcacuuug

SEQ ID NO: 2213365 - RNA, 19 nt, Homo sapiens
  misc_RNA (1)...(19): siRNA sense strand
cuccggagauggcacagau

SEQ ID NO: 2213366 - RNA, 19 nt, Homo sapiens
  misc_RNA (1)...(19): siRNA sense strand
cugaagacguagucaugca

SEQ ID NO: 2213367 - RNA, 19 nt, Homo sapiens
  misc_RNA (1)...(19): siRNA sense strand
gaccauuacaagcauaucu

SEQ ID NO: 2213368 - RNA, 19 nt, Homo sapiens
  misc_RNA (1)...(19): siRNA sense strand
ccaccaagcugcccuuuaa

SEQ ID NO: 2213369 - RNA, 19 nt, Homo sapiens
  misc_RNA (1)...(19): siRNA sense strand
gcacagcacuuccgucaug

SEQ ID NO: 2213370 - RNA, 19 nt, Homo sapiens
  misc_RNA (1)...(19): siRNA sense strand
gagauuaccuaugacuaua

SEQ ID NO: 2213371 - RNA, 19 nt, Homo sapiens
  misc_RNA (1)...(19): siRNA sense strand
gcaccggccuggaggauau

SEQ ID NO: 2213372 - RNA, 19 nt, Homo sapiens
  misc_RNA (1)...(19): siRNA sense strand
acagugaccugcucaaguu

SEQ ID NO: 2213373 - RNA, 19 nt, Homo sapiens
  misc_RNA (1)...(19): siRNA sense strand
uugccaagcugaaugauaa

SEQ ID NO: 2213374 - RNA, 19 nt, Homo sapiens
  misc_RNA (1)...(19): siRNA sense strand
ggagauuaccuaugacuau

SEQ ID NO: 2213375 - RNA, 19 nt, Homo sapiens
  misc_RNA (1)...(19): siRNA sense strand
gaacucaaggccaucauga

SEQ ID NO: 2213376 - RNA, 19 nt, Homo sapiens
  misc_RNA (1)...(19): siRNA sense strand
guuacaaguugaugauuga

SEQ ID NO: 2213377 - RNA, 19 nt, Homo sapiens
  misc_RNA (1)...(19): siRNA sense strand
ggaccugguuggagacaga

SEQ ID NO: 2213378 - RNA, 19 nt, Homo sapiens
  misc_RNA (1)...(19): siRNA sense strand
ggacacacccaacuccuau

SEQ ID NO: 2213379 - RNA, 19 nt, Homo sapiens
  misc_RNA (1)...(19): siRNA sense strand
uaacgucaaugaggagauu

SEQ ID NO: 2213380 - RNA, 19 nt, Homo sapiens
  misc_RNA (1)...(19): siRNA sense strand
ggacgagucugagaacgau

SEQ ID NO: 2213381 - RNA, 19 nt, Homo sapiens
  misc_RNA (1)...(19): siRNA sense strand
augaggagauuaccuauga

SEQ ID NO: 2213382 - RNA, 19 nt, Homo sapiens
  misc_RNA (1)...(19): siRNA sense strand
caagaucgaugaguucuac

SEQ ID NO: 2213383 - RNA, 19 nt, Homo sapiens
  misc_RNA (1)...(19): siRNA sense strand
acauggagaucucggauga

SEQ ID NO: 2213384 - RNA, 19 nt, Homo sapiens
  misc_RNA (1)...(19): siRNA sense strand
gcaccaagcugcucuuccu

SEQ ID NO: 2213385 - RNA, 19 nt, Homo sapiens
  misc_RNA (1)...(19): siRNA sense strand
gaaguuacaaguugaugau

SEQ ID NO: 2213386 - RNA, 19 nt, Homo sapiens
  misc_RNA (1)...(19): siRNA sense strand
ggacauccgcuuccugugu

SEQ ID NO: 2213387 - RNA, 19 nt, Homo sapiens
  misc_RNA (1)...(19): siRNA sense strand
acaccgagcugcagaugga

SEQ ID NO: 2213388 - RNA, 19 nt, Homo sapiens
  misc_RNA (1)...(19): siRNA sense strand
cagcugagguggccuugga

SEQ ID NO: 2213389 - RNA, 19 nt, Homo sapiens
  misc_RNA (1)...(19): siRNA sense strand
ucaaugaggagauuaccua

SEQ ID NO: 2213390 - RNA, 19 nt, Homo sapiens
  misc_RNA (1)...(19): siRNA sense strand
gcucggaguuugaggagau

SEQ ID NO: 2213391 - RNA, 19 nt, Homo sapiens
  misc_RNA (1)...(19): siRNA sense strand
gggaagaggaggaagaaga

SEQ ID NO: 2213392 - RNA, 19 nt, Homo sapiens
  misc_RNA (1)...(19): siRNA sense strand
ggccaccacugcccaaguu

SEQ ID NO: 2213393 - RNA, 19 nt, Homo sapiens
  misc_RNA (1)...(19): siRNA sense strand
caagggcgaugacgacgau

SEQ ID NO: 2213394 - RNA, 19 nt, Homo sapiens
  misc_RNA (1)...(19): siRNA sense strand
gaggagacagugagcauug

SEQ ID NO: 2213395 - RNA, 19 nt, Homo sapiens
  misc_RNA (1)...(19): siRNA sense strand
gaauauccgucaggugauc

SEQ ID NO: 2213396 - RNA, 19 nt, Homo sapiens
  misc_RNA (1)...(19): siRNA sense strand
caucuaugcucuccuugga

SEQ ID NO: 2213397 - RNA, 19 nt, Homo sapiens
  misc_RNA (1)...(19): siRNA sense strand
uuaaggagcuagacaacca

SEQ ID NO: 2213398 - RNA, 19 nt, Homo sapiens
  misc_RNA (1)...(19): siRNA sense strand
gguggaaauugucgaagau

SEQ ID NO: 2213399 - RNA, 19 nt, Homo sapiens
  misc_RNA (1)...(19): siRNA sense strand
agaaggacaagcucagaua

SEQ ID NO: 2213400 - RNA, 19 nt, Homo sapiens
  misc_RNA (1)...(19): siRNA sense strand
gaaccaccauuggagaagu

SEQ ID NO: 2213401 - RNA, 19 nt, Homo sapiens
  misc_RNA (1)...(19): siRNA sense strand
ugacgacgaugacgacagu

SEQ ID NO: 2213402 - RNA, 19 nt, Homo sapiens
  misc_RNA (1)...(19): siRNA sense strand
ccucagagaagauggauga

SEQ ID NO: 2213403 - RNA, 19 nt, Homo sapiens
  misc_RNA (1)...(19): siRNA sense strand
caagcugaaugauaacauc

SEQ ID NO: 2213404 - RNA, 19 nt, Homo sapiens
  misc_RNA (1)...(19): siRNA sense strand
cgaagcaggugacauuugc

SEQ ID NO: 2213405 - RNA, 19 nt, Homo sapiens
  misc_RNA (1)...(19): siRNA sense strand
ugagggacaugugcaagaa

SEQ ID NO: 2213406 - RNA, 19 nt, Homo sapiens
  misc_RNA (1)...(19): siRNA sense strand
cagcucaaguuccggaaga

SEQ ID NO: 2213407 - RNA, 19 nt, Homo sapiens
  misc_RNA (1)...(19): siRNA sense strand
ggagacagugagcauugua

SEQ ID NO: 2213408 - RNA, 19 nt, Homo sapiens
  misc_RNA (1)...(19): siRNA sense strand
uuggagaaguuacaaguug

SEQ ID NO: 2213409 - RNA, 19 nt, Homo sapiens
  misc_RNA (1)...(19): siRNA sense strand
acucgaagcagcacauuaa

SEQ ID NO: 2213410 - RNA, 19 nt, Homo sapiens
  misc_RNA (1)...(19): siRNA sense strand
aaugauaacauccgugaaa

SEQ ID NO: 2213411 - RNA, 19 nt, Homo sapiens
  misc_RNA (1)...(19): siRNA sense strand
ggacaugugcaagaaguau

SEQ ID NO: 2213412 - RNA, 19 nt, Homo sapiens
  misc_RNA (1)...(19): siRNA sense strand
uaacauccgugaaaacuuc

SEQ ID NO: 2213413 - RNA, 19 nt, Homo sapiens
  misc_RNA (1)...(19): siRNA sense strand
gagacagugagcauuguaa

SEQ ID NO: 2213414 - RNA, 19 nt, Homo sapiens
  misc_RNA (1)...(19): siRNA sense strand
ggaagaggaggaagaagag

SEQ ID NO: 2213415 - RNA, 19 nt, Homo sapiens
  misc_RNA (1)...(19): siRNA sense strand
ucacaggacuccagcuacu

SEQ ID NO: 2213416 - RNA, 19 nt, Homo sapiens
  misc_RNA (1)...(19): siRNA sense strand
gauuaccuaugacuauaag

SEQ ID NO: 2213417 - RNA, 19 nt, Homo sapiens
  misc_RNA (1)...(19): siRNA sense strand
gagaggaggaaccaccauu

SEQ ID NO: 2213418 - RNA, 19 nt, Homo sapiens
  misc_RNA (1)...(19): siRNA sense strand
ccaggaggacccacacaaa

SEQ ID NO: 2213419 - RNA, 19 nt, Homo sapiens
  misc_RNA (1)...(19): siRNA sense strand
ccaaauucaagaucgauga

SEQ ID NO: 2213420 - RNA, 19 nt, Homo sapiens
  misc_RNA (1)...(19): siRNA sense strand
uggagaaguuacaaguuga

SEQ ID NO: 2213421 - RNA, 19 nt, Homo sapiens
  misc_RNA (1)...(19): siRNA sense strand
gcagacacccagggcauga

SEQ ID NO: 2213422 - RNA, 19 nt, Homo sapiens
  misc_RNA (1)...(19): siRNA sense strand
ucucuccaaucgugaauga

SEQ ID NO: 2213423 - RNA, 19 nt, Homo sapiens
  misc_RNA (1)...(19): siRNA sense strand
ucgagaugcugcugaagga

SEQ ID NO: 2213424 - RNA, 19 nt, Homo sapiens
  misc_RNA (1)...(19): siRNA sense strand
aagcucaaguucugcaaga

SEQ ID NO: 2213425 - RNA, 19 nt, Homo sapiens
  misc_RNA (1)...(19): siRNA sense strand
caccaucuaugcucuccuu

SEQ ID NO: 2213426 - RNA, 19 nt, Homo sapiens
  misc_RNA (1)...(19): siRNA sense strand
uuccgagucuucugaguuu

SEQ ID NO: 2213427 - RNA, 19 nt, Homo sapiens
  misc_RNA (1)...(19): siRNA sense strand
gcccauguccuuccagaug

SEQ ID NO: 2213428 - RNA, 19 nt, Homo sapiens
  misc_RNA (1)...(19): siRNA sense strand
gcgaggacauggagaucuc

SEQ ID NO: 2213429 - RNA, 19 nt, Homo sapiens
  misc_RNA (1)...(19): siRNA sense strand
ggaacgguggcaucgauga

SEQ ID NO: 2213430 - RNA, 19 nt, Homo sapiens
  misc_RNA (1)...(19): siRNA sense strand
aagaggagguggacaucga

SEQ ID NO: 2213431 - RNA, 19 nt, Homo sapiens
  misc_RNA (1)...(19): siRNA sense strand
gcuacgaugggcagcauuu

SEQ ID NO: 2213432 - RNA, 19 nt, Homo sapiens
  misc_RNA (1)...(19): siRNA sense strand
ggagaugguggccgaggaa

SEQ ID NO: 2213433 - RNA, 19 nt, Homo sapiens
  misc_RNA (1)...(19): siRNA sense strand
ugaggucacugaggaauac

SEQ ID NO: 2213434 - RNA, 19 nt, Homo sapiens
  misc_RNA (1)...(19): siRNA sense strand
ucacagaagaagauaguca

SEQ ID NO: 2213435 - RNA, 19 nt, Homo sapiens
  misc_RNA (1)...(19): siRNA sense strand
gaaggacaagcucagauac

SEQ ID NO: 2213436 - RNA, 19 nt, Homo sapiens
  misc_RNA (1)...(19): siRNA sense strand
aauucaagaucgaugaguu

SEQ ID NO: 2213437 - RNA, 19 nt, Homo sapiens
  misc_RNA (1)...(19): siRNA sense strand
gcagcacauuaacgucaau

SEQ ID NO: 2213438 - RNA, 19 nt, Homo sapiens
  misc_RNA (1)...(19): siRNA sense strand
ggacggugacccuggacuu

SEQ ID NO: 2213439 - RNA, 19 nt, Homo sapiens
  misc_RNA (1)...(19): siRNA sense strand
uggaggagguggagauuuu

SEQ ID NO: 2213440 - RNA, 19 nt, Homo sapiens
  misc_RNA (1)...(19): siRNA sense strand
ggagucacagaagaagaua

SEQ ID NO: 2213441 - RNA, 19 nt, Homo sapiens
  misc_RNA (1)...(19): siRNA sense strand
gaugaagaggagacaguga

SEQ ID NO: 2213442 - RNA, 19 nt, Homo sapiens
  misc_RNA (1)...(19): siRNA sense strand
gaacgaugacgaggacaca

SEQ ID NO: 2213443 - RNA, 19 nt, Homo sapiens
  misc_RNA (1)...(19): siRNA sense strand
gauugacccggcucugaaa

SEQ ID NO: 2213444 - RNA, 19 nt, Homo sapiens
  misc_RNA (1)...(19): siRNA sense strand
cgguggaaauugucgaaga

SEQ ID NO: 2213445 - RNA, 19 nt, Homo sapiens
  misc_RNA (1)...(19): siRNA sense strand
cgaagcagcacauuaacgu

SEQ ID NO: 2213446 - RNA, 19 nt, Homo sapiens
  misc_RNA (1)...(19): siRNA sense strand
caagaaggacaagcucaga

SEQ ID NO: 2213447 - RNA, 19 nt, Homo sapiens
  misc_RNA (1)...(19): siRNA sense strand
ucuacaccaucgacaagaa

SEQ ID NO: 2213448 - RNA, 19 nt, Homo sapiens
  misc_RNA (1)...(19): siRNA sense strand
aguuacaaguugaugauug

SEQ ID NO: 2213449 - RNA, 19 nt, Homo sapiens
  misc_RNA (1)...(19): siRNA sense strand
ggaugccguucagcacuug

SEQ ID NO: 2213450 - RNA, 19 nt, Homo sapiens
  misc_RNA (1)...(19): siRNA sense strand
gacagugaccugcucaagu

SEQ ID NO: 2213451 - RNA, 19 nt, Homo sapiens
  misc_RNA (1)...(19): siRNA sense strand
caccugcaguggacucguu

SEQ ID NO: 2213452 - RNA, 19 nt, Homo sapiens
  misc_RNA (1)...(19): siRNA sense strand
cgagagcgagaccgggaua

SEQ ID NO: 2213453 - RNA, 19 nt, Homo sapiens
  misc_RNA (1)...(19): siRNA sense strand
gcuggugguccucaaagaa

SEQ ID NO: 2213454 - RNA, 19 nt, Homo sapiens
  misc_RNA (1)...(19): siRNA sense strand
ggagaaguuacaaguugau

SEQ ID NO: 2213455 - RNA, 19 nt, Homo sapiens
  misc_RNA (1)...(19): siRNA sense strand
ggcauggacuggcuuaacg

SEQ ID NO: 2213456 - RNA, 19 nt, Homo sapiens
  misc_RNA (1)...(19): siRNA sense strand
ccaagucgcagagcacaga

SEQ ID NO: 2213457 - RNA, 19 nt, Homo sapiens
  misc_RNA (1)...(19): siRNA sense strand
gacgaguggugggacaaga

SEQ ID NO: 2213458 - RNA, 19 nt, Homo sapiens
  misc_RNA (1)...(19): siRNA sense strand
ggauucaagucugcuuucu

SEQ ID NO: 2213459 - RNA, 19 nt, Homo sapiens
  misc_RNA (1)...(19): siRNA sense strand
guuggucacuggccgauac

SEQ ID NO: 2213460 - RNA, 19 nt, Homo sapiens
  misc_RNA (1)...(19): siRNA sense strand
gagccaaggaugccguuca

SEQ ID NO: 2213461 - RNA, 19 nt, Homo sapiens
  misc_RNA (1)...(19): siRNA sense strand
gaguacgugggccagaaua

SEQ ID NO: 2213462 - RNA, 19 nt, Homo sapiens
  misc_RNA (1)...(19): siRNA sense strand
ucaugaagcgugaccugaa

SEQ ID NO: 2213463 - RNA, 19 nt, Homo sapiens
  misc_RNA (1)...(19): siRNA sense strand
ggacaccgagcugcagaug

SEQ ID NO: 2213464 - RNA, 19 nt, Homo sapiens
  misc_RNA (1)...(19): siRNA sense strand
ucacugaggaauacaugga

SEQ ID NO: 2213465 - RNA, 19 nt, Homo sapiens
  misc_RNA (1)...(19): siRNA sense strand
aagcucagauaccucaaca

SEQ ID NO: 2213466 - RNA, 19 nt, Homo sapiens
  misc_RNA (1)...(19): siRNA sense strand
gaagaagaaacgggacgau

SEQ ID NO: 2213467 - RNA, 19 nt, Homo sapiens
  misc_RNA (1)...(19): siRNA sense strand
cagccucucuucagcuaag

SEQ ID NO: 2213468 - RNA, 19 nt, Homo sapiens
  misc_RNA (1)...(19): siRNA sense strand
gcaaaucccucaugcauac

SEQ ID NO: 2213469 - RNA, 19 nt, Homo sapiens
  misc_RNA (1)...(19): siRNA sense strand
gaaauuacagugaagauga

SEQ ID NO: 2213470 - RNA, 19 nt, Homo sapiens
  misc_RNA (1)...(19): siRNA sense strand
gaaacaguaucccgagaaa

SEQ ID NO: 2213471 - RNA, 19 nt, Homo sapiens
  misc_RNA (1)...(19): siRNA sense strand
aaagaaauguccaagagaa

SEQ ID NO: 2213472 - RNA, 19 nt, Homo sapiens
  misc_RNA (1)...(19): siRNA sense strand
gaauuugacaugacacaua

SEQ ID NO: 2213473 - RNA, 19 nt, Homo sapiens
  misc_RNA (1)...(19): siRNA sense strand
acagauaagucaaugguuu

SEQ ID NO: 2213474 - RNA, 19 nt, Homo sapiens
  misc_RNA (1)...(19): siRNA sense strand
caagagaaagcauaagaaa

SEQ ID NO: 2213475 - RNA, 19 nt, Homo sapiens
  misc_RNA (1)...(19): siRNA sense strand
aaaaggagcugcaagauga

SEQ ID NO: 2213476 - RNA, 19 nt, Homo sapiens
  misc_RNA (1)...(19): siRNA sense strand
caugacacauaaacagaua

SEQ ID NO: 2213477 - RNA, 19 nt, Homo sapiens
  misc_RNA (1)...(19): siRNA sense strand
ggaaaucgagaccaucuug

SEQ ID NO: 2213478 - RNA, 19 nt, Homo sapiens
  misc_RNA (1)...(19): siRNA sense strand
gaaauggagagaagaagga

SEQ ID NO: 2213479 - RNA, 19 nt, Homo sapiens
  misc_RNA (1)...(19): siRNA sense strand
caagagagucuaucacugu

SEQ ID NO: 2213480 - RNA, 19 nt, Homo sapiens
  misc_RNA (1)...(19): siRNA sense strand
gcugcaagaugaacaggaa

SEQ ID NO: 2213481 - RNA, 19 nt, Homo sapiens
  misc_RNA (1)...(19): siRNA sense strand
gaacaaucaacuggaaauu

SEQ ID NO: 2213482 - RNA, 19 nt, Homo sapiens
  misc_RNA (1)...(19): siRNA sense strand
gcagaaauggagagaagaa

SEQ ID NO: 2213483 - RNA, 19 nt, Homo sapiens
  misc_RNA (1)...(19): siRNA sense strand
acaaucaacuggaaauuac

SEQ ID NO: 2213484 - RNA, 19 nt, Homo sapiens
  misc_RNA (1)...(19): siRNA sense strand
guaaaacgaggaagaaaua

SEQ ID NO: 2213485 - RNA, 19 nt, Homo sapiens
  misc_RNA (1)...(19): siRNA sense strand
auaaagaaauguccaagag

SEQ ID NO: 2213486 - RNA, 19 nt, Homo sapiens
  misc_RNA (1)...(19): siRNA sense strand
ggagaagcaggcagaaaga

SEQ ID NO: 2213487 - RNA, 19 nt, Homo sapiens
  misc_RNA (1)...(19): siRNA sense strand
gagaccaucuuggcuaaca

SEQ ID NO: 2213488 - RNA, 19 nt, Homo sapiens
  misc_RNA (1)...(19): siRNA sense strand
gucuaucacugucauuuga

SEQ ID NO: 2213489 - RNA, 19 nt, Homo sapiens
  misc_RNA (1)...(19): siRNA sense strand
agaaagagagaacgagaaa

SEQ ID NO: 2213490 - RNA, 19 nt, Homo sapiens
  misc_RNA (1)...(19): siRNA sense strand
caagaaacaaucagcuaug

SEQ ID NO: 2213491 - RNA, 19 nt, Homo sapiens
  misc_RNA (1)...(19): siRNA sense strand
aagcagaaauggagagaag

SEQ ID NO: 2213492 - RNA, 19 nt, Homo sapiens
  misc_RNA (1)...(19): siRNA sense strand
gaacuccugcccucaagug

SEQ ID NO: 2213493 - RNA, 19 nt, Homo sapiens
  misc_RNA (1)...(19): siRNA sense strand
ugccaaggcuggucucgaa

SEQ ID NO: 2213494 - RNA, 19 nt, Homo sapiens
  misc_RNA (1)...(19): siRNA sense strand
gaaaagggaaaaugagaaa

SEQ ID NO: 2213495 - RNA, 19 nt, Homo sapiens
  misc_RNA (1)...(19): siRNA sense strand
gagagaagaaggagaagca

SEQ ID NO: 2213496 - RNA, 19 nt, Homo sapiens
  misc_RNA (1)...(19): siRNA sense strand
ggaaauuacagugaagaug

SEQ ID NO: 2213497 - RNA, 19 nt, Homo sapiens
  misc_RNA (1)...(19): siRNA sense strand
uaaagaaauguccaagaga

SEQ ID NO: 2213498 - RNA, 19 nt, Homo sapiens
  misc_RNA (1)...(19): siRNA sense strand
ccaagagaaagcauaagaa

SEQ ID NO: 2213499 - RNA, 19 nt, Homo sapiens
  misc_RNA (1)...(19): siRNA sense strand
gaaagcagaaauggagaga

SEQ ID NO: 2213500 - RNA, 19 nt, Homo sapiens
  misc_RNA (1)...(19): siRNA sense strand
aaacauaugagauggagau

SEQ ID NO: 2213501 - RNA, 19 nt, Homo sapiens
  misc_RNA (1)...(19): siRNA sense strand
gagagucuaucacugucau

SEQ ID NO: 2213502 - RNA, 19 nt, Homo sapiens
  misc_RNA (1)...(19): siRNA sense strand
gaaaagauuagucagcaaa

SEQ ID NO: 2213503 - RNA, 19 nt, Homo sapiens
  misc_RNA (1)...(19): siRNA sense strand
ucgagaccaucuuggcuaa

SEQ ID NO: 2213504 - RNA, 19 nt, Homo sapiens
  misc_RNA (1)...(19): siRNA sense strand
gacaugacacauaaacaga

SEQ ID NO: 2213505 - RNA, 19 nt, Homo sapiens
  misc_RNA (1)...(19): siRNA sense strand
cagcaaaucccucaugcau

SEQ ID NO: 2213506 - RNA, 19 nt, Homo sapiens
  misc_RNA (1)...(19): siRNA sense strand
gaaaaggagcugcaagaug

SEQ ID NO: 2213507 - RNA, 19 nt, Homo sapiens
  misc_RNA (1)...(19): siRNA sense strand
ucacugucauuugaauuug

SEQ ID NO: 2213508 - RNA, 19 nt, Homo sapiens
  misc_RNA (1)...(19): siRNA sense strand
cacauaaacagauaaguca

SEQ ID NO: 2213509 - RNA, 19 nt, Homo sapiens
  misc_RNA (1)...(19): siRNA sense strand
ugagaaacagaaacaguau

SEQ ID NO: 2213510 - RNA, 19 nt, Homo sapiens
  misc_RNA (1)...(19): siRNA sense strand
acacauaaacagauaaguc

SEQ ID NO: 2213511 - RNA, 19 nt, Homo sapiens
  misc_RNA (1)...(19): siRNA sense strand
aaacagauaagucaauggu

SEQ ID NO: 2213512 - RNA, 19 nt, Homo sapiens
  misc_RNA (1)...(19): siRNA sense strand
acaagaaacaaucagcuau

SEQ ID NO: 2213513 - RNA, 19 nt, Homo sapiens
  misc_RNA (1)...(19): siRNA sense strand
gauggagaucucuguguug

SEQ ID NO: 2213514 - RNA, 19 nt, Homo sapiens
  misc_RNA (1)...(19): siRNA sense strand
ucaagauccagaacaauca

SEQ ID NO: 2213515 - RNA, 19 nt, Homo sapiens
  misc_RNA (1)...(19): siRNA sense strand
ccuguaaucccagcacuuu

SEQ ID NO: 2213516 - RNA, 19 nt, Homo sapiens
  misc_RNA (1)...(19): siRNA sense strand
gagucuaucacugucauuu

SEQ ID NO: 2213517 - RNA, 19 nt, Homo sapiens
  misc_RNA (1)...(19): siRNA sense strand
gaagaugaacaaaauggaa

SEQ ID NO: 2213518 - RNA, 19 nt, Homo sapiens
  misc_RNA (1)...(19): siRNA sense strand
cagaaagagagaacgagaa

SEQ ID NO: 2213519 - RNA, 19 nt, Homo sapiens
  misc_RNA (1)...(19): siRNA sense strand
cauacucucugggcaaagu

SEQ ID NO: 2213520 - RNA, 19 nt, Homo sapiens
  misc_RNA (1)...(19): siRNA sense strand
ugacaugacacauaaacag

SEQ ID NO: 2213521 - RNA, 19 nt, Homo sapiens
  misc_RNA (1)...(19): siRNA sense strand
uuaaacaggugccccacua

SEQ ID NO: 2213522 - RNA, 19 nt, Homo sapiens
  misc_RNA (1)...(19): siRNA sense strand
gaaggagaagcaggcagaa

SEQ ID NO: 2213523 - RNA, 19 nt, Homo sapiens
  misc_RNA (1)...(19): siRNA sense strand
gaucacgaggucaggaaau

SEQ ID NO: 2213524 - RNA, 19 nt, Homo sapiens
  misc_RNA (1)...(19): siRNA sense strand
cagugaagaugaacaaaau

SEQ ID NO: 2213525 - RNA, 19 nt, Homo sapiens
  misc_RNA (1)...(19): siRNA sense strand
ggaaaagggaaaaugagaa

SEQ ID NO: 2213526 - RNA, 19 nt, Homo sapiens
  misc_RNA (1)...(19): siRNA sense strand
agaaacaguaucccgagaa

SEQ ID NO: 2213527 - RNA, 19 nt, Homo sapiens
  misc_RNA (1)...(19): siRNA sense strand
augagaaacagaaacagua

SEQ ID NO: 2213528 - RNA, 19 nt, Homo sapiens
  misc_RNA (1)...(19): siRNA sense strand
caagauccagaacaaucaa

SEQ ID NO: 2213529 - RNA, 19 nt, Homo sapiens
  misc_RNA (1)...(19): siRNA sense strand
gaaauguccaagagaaagc

SEQ ID NO: 2213530 - RNA, 19 nt, Homo sapiens
  misc_RNA (1)...(19): siRNA sense strand
aagaaauguccaagagaaa

SEQ ID NO: 2213531 - RNA, 19 nt, Homo sapiens
  misc_RNA (1)...(19): siRNA sense strand
gaacaggaaaacaaaagga

SEQ ID NO: 2213532 - RNA, 19 nt, Homo sapiens
  misc_RNA (1)...(19): siRNA sense strand
aacaagaaacaaucagcua

SEQ ID NO: 2213533 - RNA, 19 nt, Homo sapiens
  misc_RNA (1)...(19): siRNA sense strand
gucaggaaaucgagaccau

SEQ ID NO: 2213534 - RNA, 19 nt, Homo sapiens
  misc_RNA (1)...(19): siRNA sense strand
cacugucauuugaauuuga

SEQ ID NO: 2213535 - RNA, 19 nt, Homo sapiens
  misc_RNA (1)...(19): siRNA sense strand
uauacaagagagucuauca

SEQ ID NO: 2213536 - RNA, 19 nt, Homo sapiens
  misc_RNA (1)...(19): siRNA sense strand
ggaaaaugagaaacagaaa

SEQ ID NO: 2213537 - RNA, 19 nt, Homo sapiens
  misc_RNA (1)...(19): siRNA sense strand
agaagcaggcagaaagaga

SEQ ID NO: 2213538 - RNA, 19 nt, Homo sapiens
  misc_RNA (1)...(19): siRNA sense strand
uuacagugaagaugaacaa

SEQ ID NO: 2213539 - RNA, 19 nt, Homo sapiens
  misc_RNA (1)...(19): siRNA sense strand
gagaaacagaaacaguauc

SEQ ID NO: 2213540 - RNA, 19 nt, Homo sapiens
  misc_RNA (1)...(19): siRNA sense strand
caaggcuggucucgaacuc

SEQ ID NO: 2213541 - RNA, 19 nt, Homo sapiens
  misc_RNA (1)...(19): siRNA sense strand
aagaaacaaucagcuaugc

SEQ ID NO: 2213542 - RNA, 19 nt, Homo sapiens
  misc_RNA (1)...(19): siRNA sense strand
uccaagagaaagcauaaga

SEQ ID NO: 2213543 - RNA, 19 nt, Homo sapiens
  misc_RNA (1)...(19): siRNA sense strand
uguccaagagaaagcauaa

SEQ ID NO: 2213544 - RNA, 19 nt, Homo sapiens
  misc_RNA (1)...(19): siRNA sense strand
cagaacaaucaacuggaaa

SEQ ID NO: 2213545 - RNA, 19 nt, Homo sapiens
  misc_RNA (1)...(19): siRNA sense strand
cugggcaaaguuuaaguua

SEQ ID NO: 2213546 - RNA, 19 nt, Homo sapiens
  misc_RNA (1)...(19): siRNA sense strand
cuaucacugucauuugaau

SEQ ID NO: 2213547 - RNA, 19 nt, Homo sapiens
  misc_RNA (1)...(19): siRNA sense strand
agaacaaucaacuggaaau

SEQ ID NO: 2213548 - RNA, 19 nt, Homo sapiens
  misc_RNA (1)...(19): siRNA sense strand
gggaaaaugagaaacagaa

SEQ ID NO: 2213549 - RNA, 19 nt, Homo sapiens
  misc_RNA (1)...(19): siRNA sense strand
aaacaggugccccacuaua

SEQ ID NO: 2213550 - RNA, 19 nt, Homo sapiens
  misc_RNA (1)...(19): siRNA sense strand
gaagaugggaugucgguua

SEQ ID NO: 2213551 - RNA, 19 nt, Homo sapiens
  misc_RNA (1)...(19): siRNA sense strand
gcaaagugauagugacauc

SEQ ID NO: 2213552 - RNA, 19 nt, Homo sapiens
  misc_RNA (1)...(19): siRNA sense strand
ggaagcagcuagcuaucca

SEQ ID NO: 2213553 - RNA, 19 nt, Homo sapiens
  misc_RNA (1)...(19): siRNA sense strand
gaugggaugucgguuaaug

SEQ ID NO: 2213554 - RNA, 19 nt, Homo sapiens
  misc_RNA (1)...(19): siRNA sense strand
cgccauaccuguuccagaa

SEQ ID NO: 2213555 - RNA, 19 nt, Homo sapiens
  misc_RNA (1)...(19): siRNA sense strand
ccaaugguaguaaagaaua

SEQ ID NO: 2213556 - RNA, 19 nt, Homo sapiens
  misc_RNA (1)...(19): siRNA sense strand
gcggaucaauggagagcua

SEQ ID NO: 2213557 - RNA, 19 nt, Homo sapiens
  misc_RNA (1)...(19): siRNA sense strand
gggcuguggugauggauga

SEQ ID NO: 2213558 - RNA, 19 nt, Homo sapiens
  misc_RNA (1)...(19): siRNA sense strand
ccagaaguauguuaaagag

SEQ ID NO: 2213559 - RNA, 19 nt, Homo sapiens
  misc_RNA (1)...(19): siRNA sense strand
guuaauaaguucuggacau

SEQ ID NO: 2213560 - RNA, 19 nt, Homo sapiens
  misc_RNA (1)...(19): siRNA sense strand
aagaugggaugucgguuaa

SEQ ID NO: 2213561 - RNA, 19 nt, Homo sapiens
  misc_RNA (1)...(19): siRNA sense strand
ggauguacgugucauuguc

SEQ ID NO: 2213562 - RNA, 19 nt, Homo sapiens
  misc_RNA (1)...(19): siRNA sense strand
aauaaguucuggacauuuc

SEQ ID NO: 2213563 - RNA, 19 nt, Homo sapiens
  misc_RNA (1)...(19): siRNA sense strand
gaaguauguuaaagagucu

SEQ ID NO: 2213564 - RNA, 19 nt, Homo sapiens
  misc_RNA (1)...(19): siRNA sense strand
gaggaggaacuggacuuua

SEQ ID NO: 2213565 - RNA, 19 nt, Homo sapiens
  misc_RNA (1)...(19): siRNA sense strand
ccacgaaaauuuugcuaaa

SEQ ID NO: 2213566 - RNA, 19 nt, Homo sapiens
  misc_RNA (1)...(19): siRNA sense strand
caaauguugugaggaggaa

SEQ ID NO: 2213567 - RNA, 19 nt, Homo sapiens
  misc_RNA (1)...(19): siRNA sense strand
ggauguguguggcauugau

SEQ ID NO: 2213568 - RNA, 19 nt, Homo sapiens
  misc_RNA (1)...(19): siRNA sense strand
gcuauccaggugucuaaua

SEQ ID NO: 2213569 - RNA, 19 nt, Homo sapiens
  misc_RNA (1)...(19): siRNA sense strand
aggaggaacuggacuuuag

SEQ ID NO: 2213570 - RNA, 19 nt, Homo sapiens
  misc_RNA (1)...(19): siRNA sense strand
ccggauacuuucucuuaug

SEQ ID NO: 2213571 - RNA, 19 nt, Homo sapiens
  misc_RNA (1)...(19): siRNA sense strand
cuauccaggugucuaauau

SEQ ID NO: 2213572 - RNA, 19 nt, Homo sapiens
  misc_RNA (1)...(19): siRNA sense strand
ccauuuggcugaucuaagc

SEQ ID NO: 2213573 - RNA, 19 nt, Homo sapiens
  misc_RNA (1)...(19): siRNA sense strand
auccugaacugcguuaaua

SEQ ID NO: 2213574 - RNA, 19 nt, Homo sapiens
  misc_RNA (1)...(19): siRNA sense strand
ugccggauacuuucucuua

SEQ ID NO: 2213575 - RNA, 19 nt, Homo sapiens
  misc_RNA (1)...(19): siRNA sense strand
ggaguucccaaugguagua

SEQ ID NO: 2213576 - RNA, 19 nt, Homo sapiens
  misc_RNA (1)...(19): siRNA sense strand
caagggaagcagcuagcua

SEQ ID NO: 2213577 - RNA, 19 nt, Homo sapiens
  misc_RNA (1)...(19): siRNA sense strand
agggaagacuauccucaaa

SEQ ID NO: 2213578 - RNA, 19 nt, Homo sapiens
  misc_RNA (1)...(19): siRNA sense strand
gaugggagaaugcaaagca

SEQ ID NO: 2213579 - RNA, 19 nt, Homo sapiens
  misc_RNA (1)...(19): siRNA sense strand
cauaccuguuccagaagua

SEQ ID NO: 2213580 - RNA, 19 nt, Homo sapiens
  misc_RNA (1)...(19): siRNA sense strand
uuaaugaaccgaccucaag

SEQ ID NO: 2213581 - RNA, 19 nt, Homo sapiens
  misc_RNA (1)...(19): siRNA sense strand
gccggauacuuucucuuau

SEQ ID NO: 2213582 - RNA, 19 nt, Homo sapiens
  misc_RNA (1)...(19): siRNA sense strand
uuucuuggcucgagauaag

SEQ ID NO: 2213583 - RNA, 19 nt, Homo sapiens
  misc_RNA (1)...(19): siRNA sense strand
ggcaccauguuacguuguu

SEQ ID NO: 2213584 - RNA, 19 nt, Homo sapiens
  misc_RNA (1)...(19): siRNA sense strand
cggauacuuucucuuaugg

SEQ ID NO: 2213585 - RNA, 19 nt, Homo sapiens
  misc_RNA (1)...(19): siRNA sense strand
caaugguaguaaagaauac

SEQ ID NO: 2213586 - RNA, 19 nt, Homo sapiens
  misc_RNA (1)...(19): siRNA sense strand
ucccaaugguaguaaagaa

SEQ ID NO: 2213587 - RNA, 19 nt, Homo sapiens
  misc_RNA (1)...(19): siRNA sense strand
cuggacauuucaagaguug

SEQ ID NO: 2213588 - RNA, 19 nt, Homo sapiens
  misc_RNA (1)...(19): siRNA sense strand
acagaugggagaaugcaaa

SEQ ID NO: 2213589 - RNA, 19 nt, Homo sapiens
  misc_RNA (1)...(19): siRNA sense strand
ggacgggauguacguguca

SEQ ID NO: 2213590 - RNA, 19 nt, Homo sapiens
  misc_RNA (1)...(19): siRNA sense strand
agguaaagcuguuuucuug

SEQ ID NO: 2213591 - RNA, 19 nt, Homo sapiens
  misc_RNA (1)...(19): siRNA sense strand
cgagauaagcaccauuugg

SEQ ID NO: 2213592 - RNA, 19 nt, Homo sapiens
  misc_RNA (1)...(19): siRNA sense strand
uagcuauccaggugucuaa

SEQ ID NO: 2213593 - RNA, 19 nt, Homo sapiens
  misc_RNA (1)...(19): siRNA sense strand
gaucaauggagagcuaauc

SEQ ID NO: 2213594 - RNA, 19 nt, Homo sapiens
  misc_RNA (1)...(19): siRNA sense strand
caacagaugggagaaugca

SEQ ID NO: 2213595 - RNA, 19 nt, Homo sapiens
  misc_RNA (1)...(19): siRNA sense strand
ccauaccuguuccagaagu

SEQ ID NO: 2213596 - RNA, 19 nt, Homo sapiens
  misc_RNA (1)...(19): siRNA sense strand
cagggaagacuauccucaa

SEQ ID NO: 2213597 - RNA, 19 nt, Homo sapiens
  misc_RNA (1)...(19): siRNA sense strand
gaugagguggugcugacaa

SEQ ID NO: 2213598 - RNA, 19 nt, Homo sapiens
  misc_RNA (1)...(19): siRNA sense strand
gcaccauguuacguuguuc

SEQ ID NO: 2213599 - RNA, 19 nt, Homo sapiens
  misc_RNA (1)...(19): siRNA sense strand
aagggaagcagcuagcuau

SEQ ID NO: 2213600 - RNA, 19 nt, Homo sapiens
  misc_RNA (1)...(19): siRNA sense strand
ucugugaggccaaugcaaa

SEQ ID NO: 2213601 - RNA, 19 nt, Homo sapiens
  misc_RNA (1)...(19): siRNA sense strand
gacaaucgagcaaggaaac

SEQ ID NO: 2213602 - RNA, 19 nt, Homo sapiens
  misc_RNA (1)...(19): siRNA sense strand
gaccucaagccauccugaa

SEQ ID NO: 2213603 - RNA, 19 nt, Homo sapiens
  misc_RNA (1)...(19): siRNA sense strand
caauggagagcuaaucacu

SEQ ID NO: 2213604 - RNA, 19 nt, Homo sapiens
  misc_RNA (1)...(19): siRNA sense strand
gauugaugaggcugaaguu

SEQ ID NO: 2213605 - RNA, 19 nt, Homo sapiens
  misc_RNA (1)...(19): siRNA sense strand
gguguuccucugccggaua

SEQ ID NO: 2213606 - RNA, 19 nt, Homo sapiens
  misc_RNA (1)...(19): siRNA sense strand
guuaaugaaccgaccucaa

SEQ ID NO: 2213607 - RNA, 19 nt, Homo sapiens
  misc_RNA (1)...(19): siRNA sense strand
gggauguacgugucauugu

SEQ ID NO: 2213608 - RNA, 19 nt, Homo sapiens
  misc_RNA (1)...(19): siRNA sense strand
caucuuauucgccaugaag

SEQ ID NO: 2213609 - RNA, 19 nt, Homo sapiens
  misc_RNA (1)...(19): siRNA sense strand
uuagggcuguggugaugga

SEQ ID NO: 2213610 - RNA, 19 nt, Homo sapiens
  misc_RNA (1)...(19): siRNA sense strand
ugaggaggaacuggacuuu

SEQ ID NO: 2213611 - RNA, 19 nt, Homo sapiens
  misc_RNA (1)...(19): siRNA sense strand
ugacaaucgagcaaggaaa

SEQ ID NO: 2213612 - RNA, 19 nt, Homo sapiens
  misc_RNA (1)...(19): siRNA sense strand
ucuggacauuucaagaguu

SEQ ID NO: 2213613 - RNA, 19 nt, Homo sapiens
  misc_RNA (1)...(19): siRNA sense strand
ggagaaugcaaagcaacug

SEQ ID NO: 2213614 - RNA, 19 nt, Homo sapiens
  misc_RNA (1)...(19): siRNA sense strand
guuccagaaguauguuaaa

SEQ ID NO: 2213615 - RNA, 19 nt, Homo sapiens
  misc_RNA (1)...(19): siRNA sense strand
cuuuagggcuguggugaug

SEQ ID NO: 2213616 - RNA, 19 nt, Homo sapiens
  misc_RNA (1)...(19): siRNA sense strand
gaucaaagcucccaagaug

SEQ ID NO: 2213617 - RNA, 19 nt, Homo sapiens
  misc_RNA (1)...(19): siRNA sense strand
gaacucaaauuguuacuga

SEQ ID NO: 2213618 - RNA, 19 nt, Homo sapiens
  misc_RNA (1)...(19): siRNA sense strand
ggacaugucuuuagaugaa

SEQ ID NO: 2213619 - RNA, 19 nt, Homo sapiens
  misc_RNA (1)...(19): siRNA sense strand
agaugaagcuuacagauuu

SEQ ID NO: 2213620 - RNA, 19 nt, Homo sapiens
  misc_RNA (1)...(19): siRNA sense strand
gucagaagguuguaguuua

SEQ ID NO: 2213621 - RNA, 19 nt, Homo sapiens
  misc_RNA (1)...(19): siRNA sense strand
gauuggaacucaaauuguu

SEQ ID NO: 2213622 - RNA, 19 nt, Homo sapiens
  misc_RNA (1)...(19): siRNA sense strand
uacaauacaucccacauuu

SEQ ID NO: 2213623 - RNA, 19 nt, Homo sapiens
  misc_RNA (1)...(19): siRNA sense strand
cagaagaugcuuuggaaua

SEQ ID NO: 2213624 - RNA, 19 nt, Homo sapiens
  misc_RNA (1)...(19): siRNA sense strand
gaagagagccccuuugaaa

SEQ ID NO: 2213625 - RNA, 19 nt, Homo sapiens
  misc_RNA (1)...(19): siRNA sense strand
ggauggacaugucuuuaga

SEQ ID NO: 2213626 - RNA, 19 nt, Homo sapiens
  misc_RNA (1)...(19): siRNA sense strand
ggacaaaguguuaauuaca

SEQ ID NO: 2213627 - RNA, 19 nt, Homo sapiens
  misc_RNA (1)...(19): siRNA sense strand
gagagagcaucaugucaga

SEQ ID NO: 2213628 - RNA, 19 nt, Homo sapiens
  misc_RNA (1)...(19): siRNA sense strand
cagcauggcagcauccuua

SEQ ID NO: 2213629 - RNA, 19 nt, Homo sapiens
  misc_RNA (1)...(19): siRNA sense strand
ucacuguacuucuggguaa

SEQ ID NO: 2213630 - RNA, 19 nt, Homo sapiens
  misc_RNA (1)...(19): siRNA sense strand
caauggauguguucuagug

SEQ ID NO: 2213631 - RNA, 19 nt, Homo sapiens
  misc_RNA (1)...(19): siRNA sense strand
caggacaaaguguuaauua

SEQ ID NO: 2213632 - RNA, 19 nt, Homo sapiens
  misc_RNA (1)...(19): siRNA sense strand
ugggauugguuauguguua

SEQ ID NO: 2213633 - RNA, 19 nt, Homo sapiens
  misc_RNA (1)...(19): siRNA sense strand
aacauaagguugacauuga

SEQ ID NO: 2213634 - RNA, 19 nt, Homo sapiens
  misc_RNA (1)...(19): siRNA sense strand
gaauucuucccaaucuuua

SEQ ID NO: 2213635 - RNA, 19 nt, Homo sapiens
  misc_RNA (1)...(19): siRNA sense strand
agaagaagauuaagaacca

SEQ ID NO: 2213636 - RNA, 19 nt, Homo sapiens
  misc_RNA (1)...(19): siRNA sense strand
gaugaagcuuacagauuug

SEQ ID NO: 2213637 - RNA, 19 nt, Homo sapiens
  misc_RNA (1)...(19): siRNA sense strand
gcuaucgccuacaucauga

SEQ ID NO: 2213638 - RNA, 19 nt, Homo sapiens
  misc_RNA (1)...(19): siRNA sense strand
ccaacaagcuaugccaguu

SEQ ID NO: 2213639 - RNA, 19 nt, Homo sapiens
  misc_RNA (1)...(19): siRNA sense strand
gacaaaguguuaauuacag

SEQ ID NO: 2213640 - RNA, 19 nt, Homo sapiens
  misc_RNA (1)...(19): siRNA sense strand
cuacaaaccuuccacuacu

SEQ ID NO: 2213641 - RNA, 19 nt, Homo sapiens
  misc_RNA (1)...(19): siRNA sense strand
gccaacuccuggacuauga

SEQ ID NO: 2213642 - RNA, 19 nt, Homo sapiens
  misc_RNA (1)...(19): siRNA sense strand
gaaggaaaauccacucuag

SEQ ID NO: 2213643 - RNA, 19 nt, Homo sapiens
  misc_RNA (1)...(19): siRNA sense strand
gcugaguucucucguuguu

SEQ ID NO: 2213644 - RNA, 19 nt, Homo sapiens
  misc_RNA (1)...(19): siRNA sense strand
ucaaagcucccaagauguu

SEQ ID NO: 2213645 - RNA, 19 nt, Homo sapiens
  misc_RNA (1)...(19): siRNA sense strand
gauguugccucucucucuu

SEQ ID NO: 2213646 - RNA, 19 nt, Homo sapiens
  misc_RNA (1)...(19): siRNA sense strand
aaagugcugcuaauugaua

SEQ ID NO: 2213647 - RNA, 19 nt, Homo sapiens
  misc_RNA (1)...(19): siRNA sense strand
uacuauaucuccaaacuuc

SEQ ID NO: 2213648 - RNA, 19 nt, Homo sapiens
  misc_RNA (1)...(19): siRNA sense strand
ggagcguggaggacaauua

SEQ ID NO: 2213649 - RNA, 19 nt, Homo sapiens
  misc_RNA (1)...(19): siRNA sense strand
gagaugauuggaacucaaa

SEQ ID NO: 2213650 - RNA, 19 nt, Homo sapiens
  misc_RNA (1)...(19): siRNA sense strand
gaccuacuauaucuccaaa

SEQ ID NO: 2213651 - RNA, 19 nt, Homo sapiens
  misc_RNA (1)...(19): siRNA sense strand
gaaugggauugguuaugug

SEQ ID NO: 2213652 - RNA, 19 nt, Homo sapiens
  misc_RNA (1)...(19): siRNA sense strand
cagccuugcuuaccuguug

SEQ ID NO: 2213653 - RNA, 19 nt, Homo sapiens
  misc_RNA (1)...(19): siRNA sense strand
ugaguucucucguuguuuc

SEQ ID NO: 2213654 - RNA, 19 nt, Homo sapiens
  misc_RNA (1)...(19): siRNA sense strand
cgaauucuucccaaucuuu

SEQ ID NO: 2213655 - RNA, 19 nt, Homo sapiens
  misc_RNA (1)...(19): siRNA sense strand
gaggauggacaugucuuua

SEQ ID NO: 2213656 - RNA, 19 nt, Homo sapiens
  misc_RNA (1)...(19): siRNA sense strand
caguagauuucauugagaa

SEQ ID NO: 2213657 - RNA, 19 nt, Homo sapiens
  misc_RNA (1)...(19): siRNA sense strand
agaaugggauugguuaugu

SEQ ID NO: 2213658 - RNA, 19 nt, Homo sapiens
  misc_RNA (1)...(19): siRNA sense strand
gacauugauugcagucaga

SEQ ID NO: 2213659 - RNA, 19 nt, Homo sapiens
  misc_RNA (1)...(19): siRNA sense strand
gcucaagcguuccuucucu

SEQ ID NO: 2213660 - RNA, 19 nt, Homo sapiens
  misc_RNA (1)...(19): siRNA sense strand
gaagcuuacagauuuguga

SEQ ID NO: 2213661 - RNA, 19 nt, Homo sapiens
  misc_RNA (1)...(19): siRNA sense strand
gaaacauaagguugacauu

SEQ ID NO: 2213662 - RNA, 19 nt, Homo sapiens
  misc_RNA (1)...(19): siRNA sense strand
gagagcaucaugucagaga

SEQ ID NO: 2213663 - RNA, 19 nt, Homo sapiens
  misc_RNA (1)...(19): siRNA sense strand
ccacagaguccucacacuu

SEQ ID NO: 2213664 - RNA, 19 nt, Homo sapiens
  misc_RNA (1)...(19): siRNA sense strand
uuacauggcuucuccucau

SEQ ID NO: 2213665 - RNA, 19 nt, Homo sapiens
  misc_RNA (1)...(19): siRNA sense strand
uagaugaagcuuacagauu

SEQ ID NO: 2213666 - RNA, 19 nt, Homo sapiens
  misc_RNA (1)...(19): siRNA sense strand
aaacauaagguugacauug

SEQ ID NO: 2213667 - RNA, 19 nt, Homo sapiens
  misc_RNA (1)...(19): siRNA sense strand
gaaagugggcagucagucu

SEQ ID NO: 2213668 - RNA, 19 nt, Homo sapiens
  misc_RNA (1)...(19): siRNA sense strand
ugaagaggauggacauguc

SEQ ID NO: 2213669 - RNA, 19 nt, Homo sapiens
  misc_RNA (1)...(19): siRNA sense strand
gguuguaguuuacgaucaa

SEQ ID NO: 2213670 - RNA, 19 nt, Homo sapiens
  misc_RNA (1)...(19): siRNA sense strand
ucagaagguuguaguuuac

SEQ ID NO: 2213671 - RNA, 19 nt, Homo sapiens
  misc_RNA (1)...(19): siRNA sense strand
cagcgaaacauaagguuga

SEQ ID NO: 2213672 - RNA, 19 nt, Homo sapiens
  misc_RNA (1)...(19): siRNA sense strand
gaagcugccaaauggaauu

SEQ ID NO: 2213673 - RNA, 19 nt, Homo sapiens
  misc_RNA (1)...(19): siRNA sense strand
cgaaaccaguccugauaag

SEQ ID NO: 2213674 - RNA, 19 nt, Homo sapiens
  misc_RNA (1)...(19): siRNA sense strand
aagaugcuuuggaauacua

SEQ ID NO: 2213675 - RNA, 19 nt, Homo sapiens
  misc_RNA (1)...(19): siRNA sense strand
gcagguggguuugcugagu

SEQ ID NO: 2213676 - RNA, 19 nt, Homo sapiens
  misc_RNA (1)...(19): siRNA sense strand
gcagaagccaagugacaga

SEQ ID NO: 2213677 - RNA, 19 nt, Homo sapiens
  misc_RNA (1)...(19): siRNA sense strand
gaagaugcuuuggaauacu

SEQ ID NO: 2213678 - RNA, 19 nt, Homo sapiens
  misc_RNA (1)...(19): siRNA sense strand
ucaguagauuucauugaga

SEQ ID NO: 2213679 - RNA, 19 nt, Homo sapiens
  misc_RNA (1)...(19): siRNA sense strand
gggauugguuauguguuaa

SEQ ID NO: 2213680 - RNA, 19 nt, Homo sapiens
  misc_RNA (1)...(19): siRNA sense strand
uggaagccauuaauaucaa

SEQ ID NO: 2213681 - RNA, 19 nt, Homo sapiens
  misc_RNA (1)...(19): siRNA sense strand
gaugauuggaacucaaauu

SEQ ID NO: 2213682 - RNA, 19 nt, Homo sapiens
  misc_RNA (1)...(19): siRNA sense strand
ggauaucaaaucaguuuca

SEQ ID NO: 2213683 - RNA, 19 nt, Homo sapiens
  misc_RNA (1)...(19): siRNA sense strand
gaacaggucacgggaagag

SEQ ID NO: 2213684 - RNA, 19 nt, Homo sapiens
  misc_RNA (1)...(19): siRNA sense strand
gggccaacccgaauucuuc

SEQ ID NO: 2213685 - RNA, 19 nt, Homo sapiens
  misc_RNA (1)...(19): siRNA sense strand
gcccagaggucccuuuuau

SEQ ID NO: 2213686 - RNA, 19 nt, Homo sapiens
  misc_RNA (1)...(19): siRNA sense strand
agaagaugcuuuggaauac

SEQ ID NO: 2213687 - RNA, 19 nt, Homo sapiens
  misc_RNA (1)...(19): siRNA sense strand
cauccagcauucagcgaaa

SEQ ID NO: 2213688 - RNA, 19 nt, Homo sapiens
  misc_RNA (1)...(19): siRNA sense strand
gggaagagcuggggaaagu

SEQ ID NO: 2213689 - RNA, 19 nt, Homo sapiens
  misc_RNA (1)...(19): siRNA sense strand
gcgauugcauucggucaga

SEQ ID NO: 2213690 - RNA, 19 nt, Homo sapiens
  misc_RNA (1)...(19): siRNA sense strand
gacuaugagaagaagauua

SEQ ID NO: 2213691 - RNA, 19 nt, Homo sapiens
  misc_RNA (1)...(19): siRNA sense strand
cagaagcugccaaauggaa

SEQ ID NO: 2213692 - RNA, 19 nt, Homo sapiens
  misc_RNA (1)...(19): siRNA sense strand
ggaugggaccaacaagcua

SEQ ID NO: 2213693 - RNA, 19 nt, Homo sapiens
  misc_RNA (1)...(19): siRNA sense strand
caucagggccaaagagcaa

SEQ ID NO: 2213694 - RNA, 19 nt, Homo sapiens
  misc_RNA (1)...(19): siRNA sense strand
guugguggcucugcuggaa

SEQ ID NO: 2213695 - RNA, 19 nt, Homo sapiens
  misc_RNA (1)...(19): siRNA sense strand
gaauuuggagagagcauca

SEQ ID NO: 2213696 - RNA, 19 nt, Homo sapiens
  misc_RNA (1)...(19): siRNA sense strand
cccgaaaccaguccugaua

SEQ ID NO: 2213697 - RNA, 19 nt, Homo sapiens
  misc_RNA (1)...(19): siRNA sense strand
caacaagcuaugccaguuc

SEQ ID NO: 2213698 - RNA, 19 nt, Homo sapiens
  misc_RNA (1)...(19): siRNA sense strand
gaagguugcaacaggacaa

SEQ ID NO: 2213699 - RNA, 19 nt, Homo sapiens
  misc_RNA (1)...(19): siRNA sense strand
cagguggguuugcugaguu

SEQ ID NO: 2213700 - RNA, 19 nt, Homo sapiens
  misc_RNA (1)...(19): siRNA sense strand
caacucuguucaccugcuu

SEQ ID NO: 2213701 - RNA, 19 nt, Homo sapiens
  misc_RNA (1)...(19): siRNA sense strand
cagcauucagcgaaacaua

SEQ ID NO: 2213702 - RNA, 19 nt, Homo sapiens
  misc_RNA (1)...(19): siRNA sense strand
uggguaaacuggagaagag

SEQ ID NO: 2213703 - RNA, 19 nt, Homo sapiens
  misc_RNA (1)...(19): siRNA sense strand
gcuuacagauuugugaaag

SEQ ID NO: 2213704 - RNA, 19 nt, Homo sapiens
  misc_RNA (1)...(19): siRNA sense strand
ccagcgagauguccucaac

SEQ ID NO: 2213705 - RNA, 19 nt, Homo sapiens
  misc_RNA (1)...(19): siRNA sense strand
gcagacaggcuggaagaca

SEQ ID NO: 2213706 - RNA, 19 nt, Homo sapiens
  misc_RNA (1)...(19): siRNA sense strand
ccgaaaccaguccugauaa

SEQ ID NO: 2213707 - RNA, 19 nt, Homo sapiens
  misc_RNA (1)...(19): siRNA sense strand
gaugggaccaacaagcuau

SEQ ID NO: 2213708 - RNA, 19 nt, Homo sapiens
  misc_RNA (1)...(19): siRNA sense strand
ucuagucccuaccugcauu

SEQ ID NO: 2213709 - RNA, 19 nt, Homo sapiens
  misc_RNA (1)...(19): siRNA sense strand
aaagugggcagucagucua

SEQ ID NO: 2213710 - RNA, 19 nt, Homo sapiens
  misc_RNA (1)...(19): siRNA sense strand
acaauuaccacaccagcuu

SEQ ID NO: 2213711 - RNA, 19 nt, Homo sapiens
  misc_RNA (1)...(19): siRNA sense strand
cuggauaucaaaucaguuu

SEQ ID NO: 2213712 - RNA, 19 nt, Homo sapiens
  misc_RNA (1)...(19): siRNA sense strand
ccuacuauaucuccaaacu

SEQ ID NO: 2213713 - RNA, 19 nt, Homo sapiens
  misc_RNA (1)...(19): siRNA sense strand
gggcagcauggaaaucauu

SEQ ID NO: 2213714 - RNA, 19 nt, Homo sapiens
  misc_RNA (1)...(19): siRNA sense strand
acauaagguugacauugau

SEQ ID NO: 2213715 - RNA, 19 nt, Homo sapiens
  misc_RNA (1)...(19): siRNA sense strand
aucaacugcuccaagcuua

SEQ ID NO: 2213716 - RNA, 19 nt, Homo sapiens
  misc_RNA (1)...(19): siRNA sense strand
gaucaaagcucccaagaug

SEQ ID NO: 2213717 - RNA, 19 nt, Homo sapiens
  misc_RNA (1)...(19): siRNA sense strand
gaacucaaauuguuacuga

SEQ ID NO: 2213718 - RNA, 19 nt, Homo sapiens
  misc_RNA (1)...(19): siRNA sense strand
ggacaugucuuuagaugaa

SEQ ID NO: 2213719 - RNA, 19 nt, Homo sapiens
  misc_RNA (1)...(19): siRNA sense strand
agaugaagcuuacagauuu

SEQ ID NO: 2213720 - RNA, 19 nt, Homo sapiens
  misc_RNA (1)...(19): siRNA sense strand
gucagaagguuguaguuua

SEQ ID NO: 2213721 - RNA, 19 nt, Homo sapiens
  misc_RNA (1)...(19): siRNA sense strand
gauuggaacucaaauuguu

SEQ ID NO: 2213722 - RNA, 19 nt, Homo sapiens
  misc_RNA (1)...(19): siRNA sense strand
uacaauacaucccacauuu

SEQ ID NO: 2213723 - RNA, 19 nt, Homo sapiens
  misc_RNA (1)...(19): siRNA sense strand
cagaagaugcuuuggaaua

SEQ ID NO: 2213724 - RNA, 19 nt, Homo sapiens
  misc_RNA (1)...(19): siRNA sense strand
gaagagagccccuuugaaa

SEQ ID NO: 2213725 - RNA, 19 nt, Homo sapiens
  misc_RNA (1)...(19): siRNA sense strand
ggauggacaugucuuuaga

SEQ ID NO: 2213726 - RNA, 19 nt, Homo sapiens
  misc_RNA (1)...(19): siRNA sense strand
ggacaaaguguuaauuaca

SEQ ID NO: 2213727 - RNA, 19 nt, Homo sapiens
  misc_RNA (1)...(19): siRNA sense strand
gagagagcaucaugucaga

SEQ ID NO: 2213728 - RNA, 19 nt, Homo sapiens
  misc_RNA (1)...(19): siRNA sense strand
cagcauggcagcauccuua

SEQ ID NO: 2213729 - RNA, 19 nt, Homo sapiens
  misc_RNA (1)...(19): siRNA sense strand
ucacuguacuucuggguaa

SEQ ID NO: 2213730 - RNA, 19 nt, Homo sapiens
  misc_RNA (1)...(19): siRNA sense strand
caauggauguguucuagug

SEQ ID NO: 2213731 - RNA, 19 nt, Homo sapiens
  misc_RNA (1)...(19): siRNA sense strand
caggacaaaguguuaauua

SEQ ID NO: 2213732 - RNA, 19 nt, Homo sapiens
  misc_RNA (1)...(19): siRNA sense strand
ugggauugguuauguguua

SEQ ID NO: 2213733 - RNA, 19 nt, Homo sapiens
  misc_RNA (1)...(19): siRNA sense strand
aacauaagguugacauuga

SEQ ID NO: 2213734 - RNA, 19 nt, Homo sapiens
  misc_RNA (1)...(19): siRNA sense strand
gaauucuucccaaucuuua

SEQ ID NO: 2213735 - RNA, 19 nt, Homo sapiens
  misc_RNA (1)...(19): siRNA sense strand
agaagaagauuaagaacca

SEQ ID NO: 2213736 - RNA, 19 nt, Homo sapiens
  misc_RNA (1)...(19): siRNA sense strand
gaugaagcuuacagauuug

SEQ ID NO: 2213737 - RNA, 19 nt, Homo sapiens
  misc_RNA (1)...(19): siRNA sense strand
gcuaucgccuacaucauga

SEQ ID NO: 2213738 - RNA, 19 nt, Homo sapiens
  misc_RNA (1)...(19): siRNA sense strand
ccaacaagcuaugccaguu

SEQ ID NO: 2213739 - RNA, 19 nt, Homo sapiens
  misc_RNA (1)...(19): siRNA sense strand
gacaaaguguuaauuacag

SEQ ID NO: 2213740 - RNA, 19 nt, Homo sapiens
  misc_RNA (1)...(19): siRNA sense strand
cuacaaaccuuccacuacu

SEQ ID NO: 2213741 - RNA, 19 nt, Homo sapiens
  misc_RNA (1)...(19): siRNA sense strand
gccaacuccuggacuauga

SEQ ID NO: 2213742 - RNA, 19 nt, Homo sapiens
  misc_RNA (1)...(19): siRNA sense strand
gaaggaaaauccacucuag

SEQ ID NO: 2213743 - RNA, 19 nt, Homo sapiens
  misc_RNA (1)...(19): siRNA sense strand
gcugaguucucucguuguu

SEQ ID NO: 2213744 - RNA, 19 nt, Homo sapiens
  misc_RNA (1)...(19): siRNA sense strand
ucaaagcucccaagauguu

SEQ ID NO: 2213745 - RNA, 19 nt, Homo sapiens
  misc_RNA (1)...(19): siRNA sense strand
gauguugccucucucucuu

SEQ ID NO: 2213746 - RNA, 19 nt, Homo sapiens
  misc_RNA (1)...(19): siRNA sense strand
aaagugcugcuaauugaua

SEQ ID NO: 2213747 - RNA, 19 nt, Homo sapiens
  misc_RNA (1)...(19): siRNA sense strand
uacuauaucuccaaacuuc

SEQ ID NO: 2213748 - RNA, 19 nt, Homo sapiens
  misc_RNA (1)...(19): siRNA sense strand
ggagcguggaggacaauua

SEQ ID NO: 2213749 - RNA, 19 nt, Homo sapiens
  misc_RNA (1)...(19): siRNA sense strand
gagaugauuggaacucaaa

SEQ ID NO: 2213750 - RNA, 19 nt, Homo sapiens
  misc_RNA (1)...(19): siRNA sense strand
gaccuacuauaucuccaaa

SEQ ID NO: 2213751 - RNA, 19 nt, Homo sapiens
  misc_RNA (1)...(19): siRNA sense strand
gaaugggauugguuaugug

SEQ ID NO: 2213752 - RNA, 19 nt, Homo sapiens
  misc_RNA (1)...(19): siRNA sense strand
cagccuugcuuaccuguug

SEQ ID NO: 2213753 - RNA, 19 nt, Homo sapiens
  misc_RNA (1)...(19): siRNA sense strand
ugaguucucucguuguuuc

SEQ ID NO: 2213754 - RNA, 19 nt, Homo sapiens
  misc_RNA (1)...(19): siRNA sense strand
cgaauucuucccaaucuuu

SEQ ID NO: 2213755 - RNA, 19 nt, Homo sapiens
  misc_RNA (1)...(19): siRNA sense strand
gaggauggacaugucuuua

SEQ ID NO: 2213756 - RNA, 19 nt, Homo sapiens
  misc_RNA (1)...(19): siRNA sense strand
caguagauuucauugagaa

SEQ ID NO: 2213757 - RNA, 19 nt, Homo sapiens
  misc_RNA (1)...(19): siRNA sense strand
agaaugggauugguuaugu

SEQ ID NO: 2213758 - RNA, 19 nt, Homo sapiens
  misc_RNA (1)...(19): siRNA sense strand
gacauugauugcagucaga

SEQ ID NO: 2213759 - RNA, 19 nt, Homo sapiens
  misc_RNA (1)...(19): siRNA sense strand
gcucaagcguuccuucucu

SEQ ID NO: 2213760 - RNA, 19 nt, Homo sapiens
  misc_RNA (1)...(19): siRNA sense strand
gaagcuuacagauuuguga

SEQ ID NO: 2213761 - RNA, 19 nt, Homo sapiens
  misc_RNA (1)...(19): siRNA sense strand
gaaacauaagguugacauu

SEQ ID NO: 2213762 - RNA, 19 nt, Homo sapiens
  misc_RNA (1)...(19): siRNA sense strand
gagagcaucaugucagaga

SEQ ID NO: 2213763 - RNA, 19 nt, Homo sapiens
  misc_RNA (1)...(19): siRNA sense strand
ccacagaguccucacacuu

SEQ ID NO: 2213764 - RNA, 19 nt, Homo sapiens
  misc_RNA (1)...(19): siRNA sense strand
uuacauggcuucuccucau

SEQ ID NO: 2213765 - RNA, 19 nt, Homo sapiens
  misc_RNA (1)...(19): siRNA sense strand
uagaugaagcuuacagauu

SEQ ID NO: 2213766 - RNA, 19 nt, Homo sapiens
  misc_RNA (1)...(19): siRNA sense strand
aaacauaagguugacauug

SEQ ID NO: 2213767 - RNA, 19 nt, Homo sapiens
  misc_RNA (1)...(19): siRNA sense strand
gaaagugggcagucagucu

SEQ ID NO: 2213768 - RNA, 19 nt, Homo sapiens
  misc_RNA (1)...(19): siRNA sense strand
ugaagaggauggacauguc

SEQ ID NO: 2213769 - RNA, 19 nt, Homo sapiens
  misc_RNA (1)...(19): siRNA sense strand
gguuguaguuuacgaucaa

SEQ ID NO: 2213770 - RNA, 19 nt, Homo sapiens
  misc_RNA (1)...(19): siRNA sense strand
ucagaagguuguaguuuac

SEQ ID NO: 2213771 - RNA, 19 nt, Homo sapiens
  misc_RNA (1)...(19): siRNA sense strand
cagcgaaacauaagguuga

SEQ ID NO: 2213772 - RNA, 19 nt, Homo sapiens
  misc_RNA (1)...(19): siRNA sense strand
gaagcugccaaauggaauu

SEQ ID NO: 2213773 - RNA, 19 nt, Homo sapiens
  misc_RNA (1)...(19): siRNA sense strand
cgaaaccaguccugauaag

SEQ ID NO: 2213774 - RNA, 19 nt, Homo sapiens
  misc_RNA (1)...(19): siRNA sense strand
aagaugcuuuggaauacua

SEQ ID NO: 2213775 - RNA, 19 nt, Homo sapiens
  misc_RNA (1)...(19): siRNA sense strand
gcagguggguuugcugagu

SEQ ID NO: 2213776 - RNA, 19 nt, Homo sapiens
  misc_RNA (1)...(19): siRNA sense strand
gcagaagccaagugacaga

SEQ ID NO: 2213777 - RNA, 19 nt, Homo sapiens
  misc_RNA (1)...(19): siRNA sense strand
gaagaugcuuuggaauacu

SEQ ID NO: 2213778 - RNA, 19 nt, Homo sapiens
  misc_RNA (1)...(19): siRNA sense strand
ucaguagauuucauugaga

SEQ ID NO: 2213779 - RNA, 19 nt, Homo sapiens
  misc_RNA (1)...(19): siRNA sense strand
gggauugguuauguguuaa

SEQ ID NO: 2213780 - RNA, 19 nt, Homo sapiens
  misc_RNA (1)...(19): siRNA sense strand
uggaagccauuaauaucaa

SEQ ID NO: 2213781 - RNA, 19 nt, Homo sapiens
  misc_RNA (1)...(19): siRNA sense strand
gaugauuggaacucaaauu

SEQ ID NO: 2213782 - RNA, 19 nt, Homo sapiens
  misc_RNA (1)...(19): siRNA sense strand
ggauaucaaaucaguuuca

SEQ ID NO: 2213783 - RNA, 19 nt, Homo sapiens
  misc_RNA (1)...(19): siRNA sense strand
gaacaggucacgggaagag

SEQ ID NO: 2213784 - RNA, 19 nt, Homo sapiens
  misc_RNA (1)...(19): siRNA sense strand
gggccaacccgaauucuuc

SEQ ID NO: 2213785 - RNA, 19 nt, Homo sapiens
  misc_RNA (1)...(19): siRNA sense strand
gcccagaggucccuuuuau

SEQ ID NO: 2213786 - RNA, 19 nt, Homo sapiens
  misc_RNA (1)...(19): siRNA sense strand
agaagaugcuuuggaauac

SEQ ID NO: 2213787 - RNA, 19 nt, Homo sapiens
  misc_RNA (1)...(19): siRNA sense strand
cauccagcauucagcgaaa

SEQ ID NO: 2213788 - RNA, 19 nt, Homo sapiens
  misc_RNA (1)...(19): siRNA sense strand
gggaagagcuggggaaagu

SEQ ID NO: 2213789 - RNA, 19 nt, Homo sapiens
  misc_RNA (1)...(19): siRNA sense strand
gcgauugcauucggucaga

SEQ ID NO: 2213790 - RNA, 19 nt, Homo sapiens
  misc_RNA (1)...(19): siRNA sense strand
gacuaugagaagaagauua

SEQ ID NO: 2213791 - RNA, 19 nt, Homo sapiens
  misc_RNA (1)...(19): siRNA sense strand
cagaagcugccaaauggaa

SEQ ID NO: 2213792 - RNA, 19 nt, Homo sapiens
  misc_RNA (1)...(19): siRNA sense strand
ggaugggaccaacaagcua

SEQ ID NO: 2213793 - RNA, 19 nt, Homo sapiens
  misc_RNA (1)...(19): siRNA sense strand
caucagggccaaagagcaa

SEQ ID NO: 2213794 - RNA, 19 nt, Homo sapiens
  misc_RNA (1)...(19): siRNA sense strand
guugguggcucugcuggaa

SEQ ID NO: 2213795 - RNA, 19 nt, Homo sapiens
  misc_RNA (1)...(19): siRNA sense strand
gaauuuggagagagcauca

SEQ ID NO: 2213796 - RNA, 19 nt, Homo sapiens
  misc_RNA (1)...(19): siRNA sense strand
cccgaaaccaguccugaua

SEQ ID NO: 2213797 - RNA, 19 nt, Homo sapiens
  misc_RNA (1)...(19): siRNA sense strand
caacaagcuaugccaguuc

SEQ ID NO: 2213798 - RNA, 19 nt, Homo sapiens
  misc_RNA (1)...(19): siRNA sense strand
gaagguugcaacaggacaa

SEQ ID NO: 2213799 - RNA, 19 nt, Homo sapiens
  misc_RNA (1)...(19): siRNA sense strand
cagguggguuugcugaguu

SEQ ID NO: 2213800 - RNA, 19 nt, Homo sapiens
  misc_RNA (1)...(19): siRNA sense strand
caacucuguucaccugcuu

SEQ ID NO: 2213801 - RNA, 19 nt, Homo sapiens
  misc_RNA (1)...(19): siRNA sense strand
cagcauucagcgaaacaua

SEQ ID NO: 2213802 - RNA, 19 nt, Homo sapiens
  misc_RNA (1)...(19): siRNA sense strand
uggguaaacuggagaagag

SEQ ID NO: 2213803 - RNA, 19 nt, Homo sapiens
  misc_RNA (1)...(19): siRNA sense strand
gcuuacagauuugugaaag

SEQ ID NO: 2213804 - RNA, 19 nt, Homo sapiens
  misc_RNA (1)...(19): siRNA sense strand
ccagcgagauguccucaac

SEQ ID NO: 2213805 - RNA, 19 nt, Homo sapiens
  misc_RNA (1)...(19): siRNA sense strand
gcagacaggcuggaagaca

SEQ ID NO: 2213806 - RNA, 19 nt, Homo sapiens
  misc_RNA (1)...(19): siRNA sense strand
ccgaaaccaguccugauaa

SEQ ID NO: 2213807 - RNA, 19 nt, Homo sapiens
  misc_RNA (1)...(19): siRNA sense strand
gaugggaccaacaagcuau

SEQ ID NO: 2213808 - RNA, 19 nt, Homo sapiens
  misc_RNA (1)...(19): siRNA sense strand
ucuagucccuaccugcauu

SEQ ID NO: 2213809 - RNA, 19 nt, Homo sapiens
  misc_RNA (1)...(19): siRNA sense strand
aaagugggcagucagucua

SEQ ID NO: 2213810 - RNA, 19 nt, Homo sapiens
  misc_RNA (1)...(19): siRNA sense strand
acaauuaccacaccagcuu

SEQ ID NO: 2213811 - RNA, 19 nt, Homo sapiens
  misc_RNA (1)...(19): siRNA sense strand
cuggauaucaaaucaguuu

SEQ ID NO: 2213812 - RNA, 19 nt, Homo sapiens
  misc_RNA (1)...(19): siRNA sense strand
ccuacuauaucuccaaacu

SEQ ID NO: 2213813 - RNA, 19 nt, Homo sapiens
  misc_RNA (1)...(19): siRNA sense strand
gggcagcauggaaaucauu

SEQ ID NO: 2213814 - RNA, 19 nt, Homo sapiens
  misc_RNA (1)...(19): siRNA sense strand
acauaagguugacauugau

SEQ ID NO: 2213815 - RNA, 19 nt, Homo sapiens
  misc_RNA (1)...(19): siRNA sense strand
aucaacugcuccaagcuua

SEQ ID NO: 2213816 - RNA, 19 nt, Homo sapiens
  misc_RNA (1)...(19): siRNA sense strand
ggaauuggcugaugugaau

SEQ ID NO: 2213817 - RNA, 19 nt, Homo sapiens
  misc_RNA (1)...(19): siRNA sense strand
gaaaccaucugccuuguga

SEQ ID NO: 2213818 - RNA, 19 nt, Homo sapiens
  misc_RNA (1)...(19): siRNA sense strand
gaagauuucucucuaggau

SEQ ID NO: 2213819 - RNA, 19 nt, Homo sapiens
  misc_RNA (1)...(19): siRNA sense strand
cgaagaugcuuauuucaga

SEQ ID NO: 2213820 - RNA, 19 nt, Homo sapiens
  misc_RNA (1)...(19): siRNA sense strand
gaagaugcuuauuucagaa

SEQ ID NO: 2213821 - RNA, 19 nt, Homo sapiens
  misc_RNA (1)...(19): siRNA sense strand
ccaggaagcuuggcugaaa

SEQ ID NO: 2213822 - RNA, 19 nt, Homo sapiens
  misc_RNA (1)...(19): siRNA sense strand
gaaaugucccugacuguug

SEQ ID NO: 2213823 - RNA, 19 nt, Homo sapiens
  misc_RNA (1)...(19): siRNA sense strand
gcacauaggcaucgaagau

SEQ ID NO: 2213824 - RNA, 19 nt, Homo sapiens
  misc_RNA (1)...(19): siRNA sense strand
gaagaguccuuugggagaa

SEQ ID NO: 2213825 - RNA, 19 nt, Homo sapiens
  misc_RNA (1)...(19): siRNA sense strand
ggagauggccugcgugaug

SEQ ID NO: 2213826 - RNA, 19 nt, Homo sapiens
  misc_RNA (1)...(19): siRNA sense strand
ggcaaaaucugacaccuua

SEQ ID NO: 2213827 - RNA, 19 nt, Homo sapiens
  misc_RNA (1)...(19): siRNA sense strand
gcagcaaccuucugauuac

SEQ ID NO: 2213828 - RNA, 19 nt, Homo sapiens
  misc_RNA (1)...(19): siRNA sense strand
cgagacagcucaccaccuu

SEQ ID NO: 2213829 - RNA, 19 nt, Homo sapiens
  misc_RNA (1)...(19): siRNA sense strand
gaacgggagugcaguaggu

SEQ ID NO: 2213830 - RNA, 19 nt, Homo sapiens
  misc_RNA (1)...(19): siRNA sense strand
gacauuagauuuccuucug

SEQ ID NO: 2213831 - RNA, 19 nt, Homo sapiens
  misc_RNA (1)...(19): siRNA sense strand
gaagaagagcccagaccua

SEQ ID NO: 2213832 - RNA, 19 nt, Homo sapiens
  misc_RNA (1)...(19): siRNA sense strand
ugucugagcucauugaugu

SEQ ID NO: 2213833 - RNA, 19 nt, Homo sapiens
  misc_RNA (1)...(19): siRNA sense strand
gugcuucucuccuuuguga

SEQ ID NO: 2213834 - RNA, 19 nt, Homo sapiens
  misc_RNA (1)...(19): siRNA sense strand
cuucagagguuggaauuaa

SEQ ID NO: 2213835 - RNA, 19 nt, Homo sapiens
  misc_RNA (1)...(19): siRNA sense strand
agauuucucucuaggauaa

SEQ ID NO: 2213836 - RNA, 19 nt, Homo sapiens
  misc_RNA (1)...(19): siRNA sense strand
ucauugauguuuacaguga

SEQ ID NO: 2213837 - RNA, 19 nt, Homo sapiens
  misc_RNA (1)...(19): siRNA sense strand
caaccugucugagcucauu

SEQ ID NO: 2213838 - RNA, 19 nt, Homo sapiens
  misc_RNA (1)...(19): siRNA sense strand
ggauggaguugggaugaaa

SEQ ID NO: 2213839 - RNA, 19 nt, Homo sapiens
  misc_RNA (1)...(19): siRNA sense strand
gacucuggcuccauuguuu

SEQ ID NO: 2213840 - RNA, 19 nt, Homo sapiens
  misc_RNA (1)...(19): siRNA sense strand
aagacgaucuggugcuuaa

SEQ ID NO: 2213841 - RNA, 19 nt, Homo sapiens
  misc_RNA (1)...(19): siRNA sense strand
gcagauacaggauggaguu

SEQ ID NO: 2213842 - RNA, 19 nt, Homo sapiens
  misc_RNA (1)...(19): siRNA sense strand
gcucauugauguuuacagu

SEQ ID NO: 2213843 - RNA, 19 nt, Homo sapiens
  misc_RNA (1)...(19): siRNA sense strand
ccagccaccucagcaguua

SEQ ID NO: 2213844 - RNA, 19 nt, Homo sapiens
  misc_RNA (1)...(19): siRNA sense strand
gcagccagaucugugcuuu

SEQ ID NO: 2213845 - RNA, 19 nt, Homo sapiens
  misc_RNA (1)...(19): siRNA sense strand
gcacagugacggcuucaga

SEQ ID NO: 2213846 - RNA, 19 nt, Homo sapiens
  misc_RNA (1)...(19): siRNA sense strand
cgaccauuguuccuucuuu

SEQ ID NO: 2213847 - RNA, 19 nt, Homo sapiens
  misc_RNA (1)...(19): siRNA sense strand
gauaaaguuuguugaagcu

SEQ ID NO: 2213848 - RNA, 19 nt, Homo sapiens
  misc_RNA (1)...(19): siRNA sense strand
gauagaagagccagaaugg

SEQ ID NO: 2213849 - RNA, 19 nt, Homo sapiens
  misc_RNA (1)...(19): siRNA sense strand
ugaggaggcucgagauauc

SEQ ID NO: 2213850 - RNA, 19 nt, Homo sapiens
  misc_RNA (1)...(19): siRNA sense strand
ccuccucccuggugucaua

SEQ ID NO: 2213851 - RNA, 19 nt, Homo sapiens
  misc_RNA (1)...(19): siRNA sense strand
gagauggccugcgugaugu

SEQ ID NO: 2213852 - RNA, 19 nt, Homo sapiens
  misc_RNA (1)...(19): siRNA sense strand
uuacagugaugguguugaa

SEQ ID NO: 2213853 - RNA, 19 nt, Homo sapiens
  misc_RNA (1)...(19): siRNA sense strand
gcagauagaagagccagaa

SEQ ID NO: 2213854 - RNA, 19 nt, Homo sapiens
  misc_RNA (1)...(19): siRNA sense strand
gaugaucagacauuagauu

SEQ ID NO: 2213855 - RNA, 19 nt, Homo sapiens
  misc_RNA (1)...(19): siRNA sense strand
ggacuuuaaacccaaacua

SEQ ID NO: 2213856 - RNA, 19 nt, Homo sapiens
  misc_RNA (1)...(19): siRNA sense strand
gaauuaacgaccucuggaa

SEQ ID NO: 2213857 - RNA, 19 nt, Homo sapiens
  misc_RNA (1)...(19): siRNA sense strand
ccucagcaguuacuucaga

SEQ ID NO: 2213858 - RNA, 19 nt, Homo sapiens
  misc_RNA (1)...(19): siRNA sense strand
caccuucucugcagauaga

SEQ ID NO: 2213859 - RNA, 19 nt, Homo sapiens
  misc_RNA (1)...(19): siRNA sense strand
cucgagauaucacauguuu

SEQ ID NO: 2213860 - RNA, 19 nt, Homo sapiens
  misc_RNA (1)...(19): siRNA sense strand
cugcgaagauuucucucua

SEQ ID NO: 2213861 - RNA, 19 nt, Homo sapiens
  misc_RNA (1)...(19): siRNA sense strand
gaagacgaucuggugcuua

SEQ ID NO: 2213862 - RNA, 19 nt, Homo sapiens
  misc_RNA (1)...(19): siRNA sense strand
uuaacgaccucuggaaaga

SEQ ID NO: 2213863 - RNA, 19 nt, Homo sapiens
  misc_RNA (1)...(19): siRNA sense strand
caauuccgauaucauccua

SEQ ID NO: 2213864 - RNA, 19 nt, Homo sapiens
  misc_RNA (1)...(19): siRNA sense strand
gaucagacauuagauuucc

SEQ ID NO: 2213865 - RNA, 19 nt, Homo sapiens
  misc_RNA (1)...(19): siRNA sense strand
ugaugcagcuucacauaca

SEQ ID NO: 2213866 - RNA, 19 nt, Homo sapiens
  misc_RNA (1)...(19): siRNA sense strand
gugcuuaaccugcagaaga

SEQ ID NO: 2213867 - RNA, 19 nt, Homo sapiens
  misc_RNA (1)...(19): siRNA sense strand
cuguuuggcuuuggaaaua

SEQ ID NO: 2213868 - RNA, 19 nt, Homo sapiens
  misc_RNA (1)...(19): siRNA sense strand
uccacuauguuucaaauga

SEQ ID NO: 2213869 - RNA, 19 nt, Homo sapiens
  misc_RNA (1)...(19): siRNA sense strand
ccacaucuuucagaaguca

SEQ ID NO: 2213870 - RNA, 19 nt, Homo sapiens
  misc_RNA (1)...(19): siRNA sense strand
gaagagccagaaugggaaa

SEQ ID NO: 2213871 - RNA, 19 nt, Homo sapiens
  misc_RNA (1)...(19): siRNA sense strand
ugauugguccucagguuua

SEQ ID NO: 2213872 - RNA, 19 nt, Homo sapiens
  misc_RNA (1)...(19): siRNA sense strand
gugaugugcuucucuccuu

SEQ ID NO: 2213873 - RNA, 19 nt, Homo sapiens
  misc_RNA (1)...(19): siRNA sense strand
cgagauaucacauguuugg

SEQ ID NO: 2213874 - RNA, 19 nt, Homo sapiens
  misc_RNA (1)...(19): siRNA sense strand
cuggauauuucacugauga

SEQ ID NO: 2213875 - RNA, 19 nt, Homo sapiens
  misc_RNA (1)...(19): siRNA sense strand
ugacuacuuugcugugaau

SEQ ID NO: 2213876 - RNA, 19 nt, Homo sapiens
  misc_RNA (1)...(19): siRNA sense strand
gcacaacccacacagugau

SEQ ID NO: 2213877 - RNA, 19 nt, Homo sapiens
  misc_RNA (1)...(19): siRNA sense strand
cgaagacgaucuggugcuu

SEQ ID NO: 2213878 - RNA, 19 nt, Homo sapiens
  misc_RNA (1)...(19): siRNA sense strand
ugcaguaggugucucaaga

SEQ ID NO: 2213879 - RNA, 19 nt, Homo sapiens
  misc_RNA (1)...(19): siRNA sense strand
acacuguggucuagucuuc

SEQ ID NO: 2213880 - RNA, 19 nt, Homo sapiens
  misc_RNA (1)...(19): siRNA sense strand
acacagugaugcagcuuca

SEQ ID NO: 2213881 - RNA, 19 nt, Homo sapiens
  misc_RNA (1)...(19): siRNA sense strand
ugcagcaaccuucugauua

SEQ ID NO: 2213882 - RNA, 19 nt, Homo sapiens
  misc_RNA (1)...(19): siRNA sense strand
gaaaagcgaagauccauca

SEQ ID NO: 2213883 - RNA, 19 nt, Homo sapiens
  misc_RNA (1)...(19): siRNA sense strand
guuuggcuuuggaaauaua

SEQ ID NO: 2213884 - RNA, 19 nt, Homo sapiens
  misc_RNA (1)...(19): siRNA sense strand
ccagauggcucagcuacag

SEQ ID NO: 2213885 - RNA, 19 nt, Homo sapiens
  misc_RNA (1)...(19): siRNA sense strand
gcuaaucuuguaugccuuu

SEQ ID NO: 2213886 - RNA, 19 nt, Homo sapiens
  misc_RNA (1)...(19): siRNA sense strand
cagugaugguguugaacua

SEQ ID NO: 2213887 - RNA, 19 nt, Homo sapiens
  misc_RNA (1)...(19): siRNA sense strand
gggaaagccauuuggacuu

SEQ ID NO: 2213888 - RNA, 19 nt, Homo sapiens
  misc_RNA (1)...(19): siRNA sense strand
ucagcugcaucucccaauu

SEQ ID NO: 2213889 - RNA, 19 nt, Homo sapiens
  misc_RNA (1)...(19): siRNA sense strand
ggaugaagacgguguucga

SEQ ID NO: 2213890 - RNA, 19 nt, Homo sapiens
  misc_RNA (1)...(19): siRNA sense strand
gcaaccuucugauuacaac

SEQ ID NO: 2213891 - RNA, 19 nt, Homo sapiens
  misc_RNA (1)...(19): siRNA sense strand
guugcagccuccacuaugu

SEQ ID NO: 2213892 - RNA, 19 nt, Homo sapiens
  misc_RNA (1)...(19): siRNA sense strand
ucucuaggauaaaguuugu

SEQ ID NO: 2213893 - RNA, 19 nt, Homo sapiens
  misc_RNA (1)...(19): siRNA sense strand
gauaucauccuaggaacug

SEQ ID NO: 2213894 - RNA, 19 nt, Homo sapiens
  misc_RNA (1)...(19): siRNA sense strand
ugcuuaaccugcagaagaa

SEQ ID NO: 2213895 - RNA, 19 nt, Homo sapiens
  misc_RNA (1)...(19): siRNA sense strand
uagauuuccuucugcagau

SEQ ID NO: 2213896 - RNA, 19 nt, Homo sapiens
  misc_RNA (1)...(19): siRNA sense strand
ucacauguuuggagcugau

SEQ ID NO: 2213897 - RNA, 19 nt, Homo sapiens
  misc_RNA (1)...(19): siRNA sense strand
ugacagggacacacaagau

SEQ ID NO: 2213898 - RNA, 19 nt, Homo sapiens
  misc_RNA (1)...(19): siRNA sense strand
gaagcucccuacgagaucu

SEQ ID NO: 2213899 - RNA, 19 nt, Homo sapiens
  misc_RNA (1)...(19): siRNA sense strand
ugaugugcuucucuccuuu

SEQ ID NO: 2213900 - RNA, 19 nt, Homo sapiens
  misc_RNA (1)...(19): siRNA sense strand
agugacggcuucagagguu

SEQ ID NO: 2213901 - RNA, 19 nt, Homo sapiens
  misc_RNA (1)...(19): siRNA sense strand
gacagggacacacaagaug

SEQ ID NO: 2213902 - RNA, 19 nt, Homo sapiens
  misc_RNA (1)...(19): siRNA sense strand
agucuacggugggcacuaa

SEQ ID NO: 2213903 - RNA, 19 nt, Homo sapiens
  misc_RNA (1)...(19): siRNA sense strand
ggucagcaagcuuagucua

SEQ ID NO: 2213904 - RNA, 19 nt, Homo sapiens
  misc_RNA (1)...(19): siRNA sense strand
ggaagcacauaggcaucga

SEQ ID NO: 2213905 - RNA, 19 nt, Homo sapiens
  misc_RNA (1)...(19): siRNA sense strand
ugccagacuuggaugaaga

SEQ ID NO: 2213906 - RNA, 19 nt, Homo sapiens
  misc_RNA (1)...(19): siRNA sense strand
caaugcaacgucagggaaa

SEQ ID NO: 2213907 - RNA, 19 nt, Homo sapiens
  misc_RNA (1)...(19): siRNA sense strand
cgccagaacccgacucaga

SEQ ID NO: 2213908 - RNA, 19 nt, Homo sapiens
  misc_RNA (1)...(19): siRNA sense strand
gagcugcgaagauuucucu

SEQ ID NO: 2213909 - RNA, 19 nt, Homo sapiens
  misc_RNA (1)...(19): siRNA sense strand
gaugaugguuguggauggu

SEQ ID NO: 2213910 - RNA, 19 nt, Homo sapiens
  misc_RNA (1)...(19): siRNA sense strand
agguuuacaucaccacaaa

SEQ ID NO: 2213911 - RNA, 19 nt, Homo sapiens
  misc_RNA (1)...(19): siRNA sense strand
ccuccacuauguuucaaau

SEQ ID NO: 2213912 - RNA, 19 nt, Homo sapiens
  misc_RNA (1)...(19): siRNA sense strand
gaccagcugcuaaucuugu

SEQ ID NO: 2213913 - RNA, 19 nt, Homo sapiens
  misc_RNA (1)...(19): siRNA sense strand
gcacgcauugggcacaguu

SEQ ID NO: 2213914 - RNA, 19 nt, Homo sapiens
  misc_RNA (1)...(19): siRNA sense strand
gguuguggauggugacucu

SEQ ID NO: 2213915 - RNA, 19 nt, Homo sapiens
  misc_RNA (1)...(19): siRNA sense strand
gaccauuguuccuucuuuu

SEQ ID NO: 2213916 - RNA, 19 nt, Homo sapiens
  misc_RNA (1)...(19): siRNA sense strand
caaauuauacgcuuacauc

SEQ ID NO: 2213917 - RNA, 19 nt, Homo sapiens
  misc_RNA (1)...(19): siRNA sense strand
ccagaaauaugccaucucu

SEQ ID NO: 2213918 - RNA, 19 nt, Homo sapiens
  misc_RNA (1)...(19): siRNA sense strand
cuaauaagguacccacaau

SEQ ID NO: 2213919 - RNA, 19 nt, Homo sapiens
  misc_RNA (1)...(19): siRNA sense strand
cagcagagccagaaauaau

SEQ ID NO: 2213920 - RNA, 19 nt, Homo sapiens
  misc_RNA (1)...(19): siRNA sense strand
ccgaaugccaccagaaaua

SEQ ID NO: 2213921 - RNA, 19 nt, Homo sapiens
  misc_RNA (1)...(19): siRNA sense strand
caaaugcagacuuuacaaa

SEQ ID NO: 2213922 - RNA, 19 nt, Homo sapiens
  misc_RNA (1)...(19): siRNA sense strand
gcagagccagaaauaauau

SEQ ID NO: 2213923 - RNA, 19 nt, Homo sapiens
  misc_RNA (1)...(19): siRNA sense strand
aauaugccaucucuacuga

SEQ ID NO: 2213924 - RNA, 19 nt, Homo sapiens
  misc_RNA (1)...(19): siRNA sense strand
uaugccaucucuacugaaa

SEQ ID NO: 2213925 - RNA, 19 nt, Homo sapiens
  misc_RNA (1)...(19): siRNA sense strand
uugcccgucugacaaauua

SEQ ID NO: 2213926 - RNA, 19 nt, Homo sapiens
  misc_RNA (1)...(19): siRNA sense strand
cuucaguucuaauaaggua

SEQ ID NO: 2213927 - RNA, 19 nt, Homo sapiens
  misc_RNA (1)...(19): siRNA sense strand
gcaacacccagagacauuu

SEQ ID NO: 2213928 - RNA, 19 nt, Homo sapiens
  misc_RNA (1)...(19): siRNA sense strand
cagagacauuucccuccua

SEQ ID NO: 2213929 - RNA, 19 nt, Homo sapiens
  misc_RNA (1)...(19): siRNA sense strand
gcagcagagccagaaauaa

SEQ ID NO: 2213930 - RNA, 19 nt, Homo sapiens
  misc_RNA (1)...(19): siRNA sense strand
gaccauauugcccgucuga

SEQ ID NO: 2213931 - RNA, 19 nt, Homo sapiens
  misc_RNA (1)...(19): siRNA sense strand
gaaauaugccaucucuacu

SEQ ID NO: 2213932 - RNA, 19 nt, Homo sapiens
  misc_RNA (1)...(19): siRNA sense strand
agaaauaugccaucucuac

SEQ ID NO: 2213933 - RNA, 19 nt, Homo sapiens
  misc_RNA (1)...(19): siRNA sense strand
ggcaacacccagagacauu

SEQ ID NO: 2213934 - RNA, 19 nt, Homo sapiens
  misc_RNA (1)...(19): siRNA sense strand
cugacaaauuauacgcuua

SEQ ID NO: 2213935 - RNA, 19 nt, Homo sapiens
  misc_RNA (1)...(19): siRNA sense strand
gaaugccaccagaaauaug

SEQ ID NO: 2213936 - RNA, 19 nt, Homo sapiens
  misc_RNA (1)...(19): siRNA sense strand
cgaaugccaccagaaauau

SEQ ID NO: 2213937 - RNA, 19 nt, Homo sapiens
  misc_RNA (1)...(19): siRNA sense strand
gcccgucugacaaauuaua

SEQ ID NO: 2213938 - RNA, 19 nt, Homo sapiens
  misc_RNA (1)...(19): siRNA sense strand
ggucaaaugcagacuuuac

SEQ ID NO: 2213939 - RNA, 19 nt, Homo sapiens
  misc_RNA (1)...(19): siRNA sense strand
cauauugcccgucugacaa

SEQ ID NO: 2213940 - RNA, 19 nt, Homo sapiens
  misc_RNA (1)...(19): siRNA sense strand
caagauggagauuccuguu

SEQ ID NO: 2213941 - RNA, 19 nt, Homo sapiens
  misc_RNA (1)...(19): siRNA sense strand
ugccaucucuacugaaaca

SEQ ID NO: 2213942 - RNA, 19 nt, Homo sapiens
  misc_RNA (1)...(19): siRNA sense strand
acccugagcacguuuauga

SEQ ID NO: 2213943 - RNA, 19 nt, Homo sapiens
  misc_RNA (1)...(19): siRNA sense strand
gauccacuagaccauauug

SEQ ID NO: 2213944 - RNA, 19 nt, Homo sapiens
  misc_RNA (1)...(19): siRNA sense strand
cauccugcuucaguucuaa

SEQ ID NO: 2213945 - RNA, 19 nt, Homo sapiens
  misc_RNA (1)...(19): siRNA sense strand
gacauuucccuccuaguca

SEQ ID NO: 2213946 - RNA, 19 nt, Homo sapiens
  misc_RNA (1)...(19): siRNA sense strand
ucaaaugcagacuuuacaa

SEQ ID NO: 2213947 - RNA, 19 nt, Homo sapiens
  misc_RNA (1)...(19): siRNA sense strand
uggauccacuagaccauau

SEQ ID NO: 2213948 - RNA, 19 nt, Homo sapiens
  misc_RNA (1)...(19): siRNA sense strand
ggggucaaaugcagacuuu

SEQ ID NO: 2213949 - RNA, 19 nt, Homo sapiens
  misc_RNA (1)...(19): siRNA sense strand
acgcuuacauccugcuuca

SEQ ID NO: 2213950 - RNA, 19 nt, Homo sapiens
  misc_RNA (1)...(19): siRNA sense strand
agcagagccagaaauaaua

SEQ ID NO: 2213951 - RNA, 19 nt, Homo sapiens
  misc_RNA (1)...(19): siRNA sense strand
caaauucuggauccacuag

SEQ ID NO: 2213952 - RNA, 19 nt, Homo sapiens
  misc_RNA (1)...(19): siRNA sense strand
gcuuacauccugcuucagu

SEQ ID NO: 2213953 - RNA, 19 nt, Homo sapiens
  misc_RNA (1)...(19): siRNA sense strand
uaauaagguacccacaaug

SEQ ID NO: 2213954 - RNA, 19 nt, Homo sapiens
  misc_RNA (1)...(19): siRNA sense strand
ccauauugcccgucugaca

SEQ ID NO: 2213955 - RNA, 19 nt, Homo sapiens
  misc_RNA (1)...(19): siRNA sense strand
caacacccagagacauuuc

SEQ ID NO: 2213956 - RNA, 19 nt, Homo sapiens
  misc_RNA (1)...(19): siRNA sense strand
agacauuucccuccuaguc

SEQ ID NO: 2213957 - RNA, 19 nt, Homo sapiens
  misc_RNA (1)...(19): siRNA sense strand
gacaaauuauacgcuuaca

SEQ ID NO: 2213958 - RNA, 19 nt, Homo sapiens
  misc_RNA (1)...(19): siRNA sense strand
aaaagaaacccaagaugga

SEQ ID NO: 2213959 - RNA, 19 nt, Homo sapiens
  misc_RNA (1)...(19): siRNA sense strand
aaauaugccaucucuacug

SEQ ID NO: 2213960 - RNA, 19 nt, Homo sapiens
  misc_RNA (1)...(19): siRNA sense strand
ugacaaauuauacgcuuac

SEQ ID NO: 2213961 - RNA, 19 nt, Homo sapiens
  misc_RNA (1)...(19): siRNA sense strand
cugagcacguuuaugaaca

SEQ ID NO: 2213962 - RNA, 19 nt, Homo sapiens
  misc_RNA (1)...(19): siRNA sense strand
ccaacccugagcacguuua

SEQ ID NO: 2213963 - RNA, 19 nt, Homo sapiens
  misc_RNA (1)...(19): siRNA sense strand
cacaaugccggguucucua

SEQ ID NO: 2213964 - RNA, 19 nt, Homo sapiens
  misc_RNA (1)...(19): siRNA sense strand
ucuaauaagguacccacaa

SEQ ID NO: 2213965 - RNA, 19 nt, Homo sapiens
  misc_RNA (1)...(19): siRNA sense strand
cugcuucaguucuaauaag

SEQ ID NO: 2213966 - RNA, 19 nt, Homo sapiens
  misc_RNA (1)...(19): siRNA sense strand
ccacaaugccggguucucu

SEQ ID NO: 2213967 - RNA, 19 nt, Homo sapiens
  misc_RNA (1)...(19): siRNA sense strand
caccagaaauaugccaucu

SEQ ID NO: 2213968 - RNA, 19 nt, Homo sapiens
  misc_RNA (1)...(19): siRNA sense strand
agcagcagagccagaaaua

SEQ ID NO: 2213969 - RNA, 19 nt, Homo sapiens
  misc_RNA (1)...(19): siRNA sense strand
ggacauaacuugcugguuu

SEQ ID NO: 2213970 - RNA, 19 nt, Homo sapiens
  misc_RNA (1)...(19): siRNA sense strand
ggacaacuaccucuucaua

SEQ ID NO: 2213971 - RNA, 19 nt, Homo sapiens
  misc_RNA (1)...(19): siRNA sense strand
caaaucgggucuuaacuug

SEQ ID NO: 2213972 - RNA, 19 nt, Homo sapiens
  misc_RNA (1)...(19): siRNA sense strand
caauaaagcagaaacauga

SEQ ID NO: 2213973 - RNA, 19 nt, Homo sapiens
  misc_RNA (1)...(19): siRNA sense strand
ggucuuaacuugacuugug

SEQ ID NO: 2213974 - RNA, 19 nt, Homo sapiens
  misc_RNA (1)...(19): siRNA sense strand
gaccggaacaugaacauuu

SEQ ID NO: 2213975 - RNA, 19 nt, Homo sapiens
  misc_RNA (1)...(19): siRNA sense strand
ccaauccucuggcugaguu

SEQ ID NO: 2213976 - RNA, 19 nt, Homo sapiens
  misc_RNA (1)...(19): siRNA sense strand
gaggauacacuaccagaga

SEQ ID NO: 2213977 - RNA, 19 nt, Homo sapiens
  misc_RNA (1)...(19): siRNA sense strand
gacggcaucuacaucauga

SEQ ID NO: 2213978 - RNA, 19 nt, Homo sapiens
  misc_RNA (1)...(19): siRNA sense strand
gcugguuucuucucuuuau

SEQ ID NO: 2213979 - RNA, 19 nt, Homo sapiens
  misc_RNA (1)...(19): siRNA sense strand
gagggcaggccguuucuaa

SEQ ID NO: 2213980 - RNA, 19 nt, Homo sapiens
  misc_RNA (1)...(19): siRNA sense strand
ggucuaacuucaaacuugu

SEQ ID NO: 2213981 - RNA, 19 nt, Homo sapiens
  misc_RNA (1)...(19): siRNA sense strand
ucaaacuuguggcuguuaa

SEQ ID NO: 2213982 - RNA, 19 nt, Homo sapiens
  misc_RNA (1)...(19): siRNA sense strand
gacauaacuugcugguuuc

SEQ ID NO: 2213983 - RNA, 19 nt, Homo sapiens
  misc_RNA (1)...(19): siRNA sense strand
ccaaaucgggucuuaacuu

SEQ ID NO: 2213984 - RNA, 19 nt, Homo sapiens
  misc_RNA (1)...(19): siRNA sense strand
ccagagaccggaacaugaa

SEQ ID NO: 2213985 - RNA, 19 nt, Homo sapiens
  misc_RNA (1)...(19): siRNA sense strand
auaacugccuggagaugua

SEQ ID NO: 2213986 - RNA, 19 nt, Homo sapiens
  misc_RNA (1)...(19): siRNA sense strand
ggaagagaccaucuacauc

SEQ ID NO: 2213987 - RNA, 19 nt, Homo sapiens
  misc_RNA (1)...(19): siRNA sense strand
gaguguuccucaaguacaa

SEQ ID NO: 2213988 - RNA, 19 nt, Homo sapiens
  misc_RNA (1)...(19): siRNA sense strand
ugacuugugcgcuccauaa

SEQ ID NO: 2213989 - RNA, 19 nt, Homo sapiens
  misc_RNA (1)...(19): siRNA sense strand
ccaauaaagcagaaacaug

SEQ ID NO: 2213990 - RNA, 19 nt, Homo sapiens
  misc_RNA (1)...(19): siRNA sense strand
gggaagcauuucggcguuu

SEQ ID NO: 2213991 - RNA, 19 nt, Homo sapiens
  misc_RNA (1)...(19): siRNA sense strand
ggucugccauccuggacaa

SEQ ID NO: 2213992 - RNA, 19 nt, Homo sapiens
  misc_RNA (1)...(19): siRNA sense strand
ccgaggagauggugcagau

SEQ ID NO: 2213993 - RNA, 19 nt, Homo sapiens
  misc_RNA (1)...(19): siRNA sense strand
ggacgcucuuugaaacaug

SEQ ID NO: 2213994 - RNA, 19 nt, Homo sapiens
  misc_RNA (1)...(19): siRNA sense strand
ggagaacacguccaaaucg

SEQ ID NO: 2213995 - RNA, 19 nt, Homo sapiens
  misc_RNA (1)...(19): siRNA sense strand
gguacgaggagaugacuga

SEQ ID NO: 2213996 - RNA, 19 nt, Homo sapiens
  misc_RNA (1)...(19): siRNA sense strand
ggacgaggacgaggagaug

SEQ ID NO: 2213997 - RNA, 19 nt, Homo sapiens
  misc_RNA (1)...(19): siRNA sense strand
gauggugucuguggaagag

SEQ ID NO: 2213998 - RNA, 19 nt, Homo sapiens
  misc_RNA (1)...(19): siRNA sense strand
gagcaggaugcguggaauu

SEQ ID NO: 2213999 - RNA, 19 nt, Homo sapiens
  misc_RNA (1)...(19): siRNA sense strand
auaacuugcugguuucuuc

SEQ ID NO: 2214000 - RNA, 19 nt, Homo sapiens
  misc_RNA (1)...(19): siRNA sense strand
ccucaaguacaacaucuuu

SEQ ID NO: 2214001 - RNA, 19 nt, Homo sapiens
  misc_RNA (1)...(19): siRNA sense strand
gcaagaggaagcucaucga

SEQ ID NO: 2214002 - RNA, 19 nt, Homo sapiens
  misc_RNA (1)...(19): siRNA sense strand
ggcucuaccucaaggagaa

SEQ ID NO: 2214003 - RNA, 19 nt, Homo sapiens
  misc_RNA (1)...(19): siRNA sense strand
ucaaggagaacacguccaa

SEQ ID NO: 2214004 - RNA, 19 nt, Homo sapiens
  misc_RNA (1)...(19): siRNA sense strand
aggucuaacuucaaacuug

SEQ ID NO: 2214005 - RNA, 19 nt, Homo sapiens
  misc_RNA (1)...(19): siRNA sense strand
ucagauaguugggaagcau

SEQ ID NO: 2214006 - RNA, 19 nt, Homo sapiens
  misc_RNA (1)...(19): siRNA sense strand
uggaagagaccaucuacau

SEQ ID NO: 2214007 - RNA, 19 nt, Homo sapiens
  misc_RNA (1)...(19): siRNA sense strand
acuuguggcuguuaauuca

SEQ ID NO: 2214008 - RNA, 19 nt, Homo sapiens
  misc_RNA (1)...(19): siRNA sense strand
aaacuuguggcuguuaauu

SEQ ID NO: 2214009 - RNA, 19 nt, Homo sapiens
  misc_RNA (1)...(19): siRNA sense strand
cuugugcgcuccauaacga

SEQ ID NO: 2214010 - RNA, 19 nt, Homo sapiens
  misc_RNA (1)...(19): siRNA sense strand
uugcugguuucuucucuuu

SEQ ID NO: 2214011 - RNA, 19 nt, Homo sapiens
  misc_RNA (1)...(19): siRNA sense strand
uaacgacggcaucuacauc

SEQ ID NO: 2214012 - RNA, 19 nt, Homo sapiens
  misc_RNA (1)...(19): siRNA sense strand
gacaacuaccucuucauag

SEQ ID NO: 2214013 - RNA, 19 nt, Homo sapiens
  misc_RNA (1)...(19): siRNA sense strand
gguucccgcuggccaacaa

SEQ ID NO: 2214014 - RNA, 19 nt, Homo sapiens
  misc_RNA (1)...(19): siRNA sense strand
uguggacgcucuuugaaac

SEQ ID NO: 2214015 - RNA, 19 nt, Homo sapiens
  misc_RNA (1)...(19): siRNA sense strand
acaugaacauuuugcagua

SEQ ID NO: 2214016 - RNA, 19 nt, Homo sapiens
  misc_RNA (1)...(19): siRNA sense strand
cgacggcaucuacaucaug

SEQ ID NO: 2214017 - RNA, 19 nt, Homo sapiens
  misc_RNA (1)...(19): siRNA sense strand
aaggagaacacguccaaau

SEQ ID NO: 2214018 - RNA, 19 nt, Homo sapiens
  misc_RNA (1)...(19): siRNA sense strand
ccgcugcgcauuccuacaa

SEQ ID NO: 2214019 - RNA, 19 nt, Homo sapiens
  misc_RNA (1)...(19): siRNA sense strand
ggaagcauuucggcguuuu

SEQ ID NO: 2214020 - RNA, 19 nt, Homo sapiens
  misc_RNA (1)...(19): siRNA sense strand
gacgcucuuugaaacaugu

SEQ ID NO: 2214021 - RNA, 19 nt, Homo sapiens
  misc_RNA (1)...(19): siRNA sense strand
cugccauccuggacaacua

SEQ ID NO: 2214022 - RNA, 19 nt, Homo sapiens
  misc_RNA (1)...(19): siRNA sense strand
caccgaguguuccucaagu

SEQ ID NO: 2214023 - RNA, 19 nt, Homo sapiens
  misc_RNA (1)...(19): siRNA sense strand
ccauaacgacggcaucuac

SEQ ID NO: 2214024 - RNA, 19 nt, Homo sapiens
  misc_RNA (1)...(19): siRNA sense strand
cccaggugcggcucaauaa

SEQ ID NO: 2214025 - RNA, 19 nt, Homo sapiens
  misc_RNA (1)...(19): siRNA sense strand
aaucgggucuuaacuugac

SEQ ID NO: 2214026 - RNA, 19 nt, Homo sapiens
  misc_RNA (1)...(19): siRNA sense strand
cgacauguggacgcucuuu

SEQ ID NO: 2214027 - RNA, 19 nt, Homo sapiens
  misc_RNA (1)...(19): siRNA sense strand
ugaaccagaagaggucuaa

SEQ ID NO: 2214028 - RNA, 19 nt, Homo sapiens
  misc_RNA (1)...(19): siRNA sense strand
ccagguggccuccaugaac

SEQ ID NO: 2214029 - RNA, 19 nt, Homo sapiens
  misc_RNA (1)...(19): siRNA sense strand
gaucuccgcugcgcauucc

SEQ ID NO: 2214030 - RNA, 19 nt, Homo sapiens
  misc_RNA (1)...(19): siRNA sense strand
gcucagguacgaggagaug

SEQ ID NO: 2214031 - RNA, 19 nt, Homo sapiens
  misc_RNA (1)...(19): siRNA sense strand
cauguggacgcucuuugaa

SEQ ID NO: 2214032 - RNA, 19 nt, Homo sapiens
  misc_RNA (1)...(19): siRNA sense strand
acauguggacgcucuuuga

SEQ ID NO: 2214033 - RNA, 19 nt, Homo sapiens
  misc_RNA (1)...(19): siRNA sense strand
caggaugcguggaauuuug

SEQ ID NO: 2214034 - RNA, 19 nt, Homo sapiens
  misc_RNA (1)...(19): siRNA sense strand
caauaacugccuggagaug

SEQ ID NO: 2214035 - RNA, 19 nt, Homo sapiens
  misc_RNA (1)...(19): siRNA sense strand
ucccaggugcggcucaaua

SEQ ID NO: 2214036 - RNA, 19 nt, Homo sapiens
  misc_RNA (1)...(19): siRNA sense strand
gucauuggaggauacacua

SEQ ID NO: 2214037 - RNA, 19 nt, Homo sapiens
  misc_RNA (1)...(19): siRNA sense strand
cuggacaacuaccucuuca

SEQ ID NO: 2214038 - RNA, 19 nt, Homo sapiens
  misc_RNA (1)...(19): siRNA sense strand
accgaguguuccucaagua

SEQ ID NO: 2214039 - RNA, 19 nt, Homo sapiens
  misc_RNA (1)...(19): siRNA sense strand
uaccagagaccggaacaug

SEQ ID NO: 2214040 - RNA, 19 nt, Homo sapiens
  misc_RNA (1)...(19): siRNA sense strand
acacgaagcuucuuugaaa

SEQ ID NO: 2214041 - RNA, 19 nt, Homo sapiens
  misc_RNA (1)...(19): siRNA sense strand
caagugacauggacuguuu

SEQ ID NO: 2214042 - RNA, 19 nt, Homo sapiens
  misc_RNA (1)...(19): siRNA sense strand
ucacagacauuaagccuuu

SEQ ID NO: 2214043 - RNA, 19 nt, Homo sapiens
  misc_RNA (1)...(19): siRNA sense strand
gguggcugcuuaaguauua

SEQ ID NO: 2214044 - RNA, 19 nt, Homo sapiens
  misc_RNA (1)...(19): siRNA sense strand
cgauuuagguggcugcuua

SEQ ID NO: 2214045 - RNA, 19 nt, Homo sapiens
  misc_RNA (1)...(19): siRNA sense strand
gacauggacuguuuauuga

SEQ ID NO: 2214046 - RNA, 19 nt, Homo sapiens
  misc_RNA (1)...(19): siRNA sense strand
cuacggagcugcgauauau

SEQ ID NO: 2214047 - RNA, 19 nt, Homo sapiens
  misc_RNA (1)...(19): siRNA sense strand
uuagguggcugcuuaagua

SEQ ID NO: 2214048 - RNA, 19 nt, Homo sapiens
  misc_RNA (1)...(19): siRNA sense strand
ucgaagcuguccuuacuua

SEQ ID NO: 2214049 - RNA, 19 nt, Homo sapiens
  misc_RNA (1)...(19): siRNA sense strand
ugacauggacuguuuauug

SEQ ID NO: 2214050 - RNA, 19 nt, Homo sapiens
  misc_RNA (1)...(19): siRNA sense strand
gagaaguguuggagcaauu

SEQ ID NO: 2214051 - RNA, 19 nt, Homo sapiens
  misc_RNA (1)...(19): siRNA sense strand
caaacaaacuaaagcaagu

SEQ ID NO: 2214052 - RNA, 19 nt, Homo sapiens
  misc_RNA (1)...(19): siRNA sense strand
ccagauaucucacagacau

SEQ ID NO: 2214053 - RNA, 19 nt, Homo sapiens
  misc_RNA (1)...(19): siRNA sense strand
ggacauuguguaaaucuga

SEQ ID NO: 2214054 - RNA, 19 nt, Homo sapiens
  misc_RNA (1)...(19): siRNA sense strand
gagcugcgauauaucagau

SEQ ID NO: 2214055 - RNA, 19 nt, Homo sapiens
  misc_RNA (1)...(19): siRNA sense strand
gaagaaauuagaggagauu

SEQ ID NO: 2214056 - RNA, 19 nt, Homo sapiens
  misc_RNA (1)...(19): siRNA sense strand
ugcuaaagaucaucgauuu

SEQ ID NO: 2214057 - RNA, 19 nt, Homo sapiens
  misc_RNA (1)...(19): siRNA sense strand
uaugggacauuguguaaau

SEQ ID NO: 2214058 - RNA, 19 nt, Homo sapiens
  misc_RNA (1)...(19): siRNA sense strand
gccuuugccucccaacaua

SEQ ID NO: 2214059 - RNA, 19 nt, Homo sapiens
  misc_RNA (1)...(19): siRNA sense strand
gaucuacggagcugcgaua

SEQ ID NO: 2214060 - RNA, 19 nt, Homo sapiens
  misc_RNA (1)...(19): siRNA sense strand
caaucucacugacgaagga

SEQ ID NO: 2214061 - RNA, 19 nt, Homo sapiens
  misc_RNA (1)...(19): siRNA sense strand
gaaauuagaggagauucau

SEQ ID NO: 2214062 - RNA, 19 nt, Homo sapiens
  misc_RNA (1)...(19): siRNA sense strand
gggaaccgaguuucuguaa

SEQ ID NO: 2214063 - RNA, 19 nt, Homo sapiens
  misc_RNA (1)...(19): siRNA sense strand
gaccuugugcgaagaaauu

SEQ ID NO: 2214064 - RNA, 19 nt, Homo sapiens
  misc_RNA (1)...(19): siRNA sense strand
ggacagauaacagauucaa

SEQ ID NO: 2214065 - RNA, 19 nt, Homo sapiens
  misc_RNA (1)...(19): siRNA sense strand
cauaugggacauuguguaa

SEQ ID NO: 2214066 - RNA, 19 nt, Homo sapiens
  misc_RNA (1)...(19): siRNA sense strand
ggugugauugcacuuguua

SEQ ID NO: 2214067 - RNA, 19 nt, Homo sapiens
  misc_RNA (1)...(19): siRNA sense strand
ucagucagcuccuggaucu

SEQ ID NO: 2214068 - RNA, 19 nt, Homo sapiens
  misc_RNA (1)...(19): siRNA sense strand
aguccaaacucuagaucua

SEQ ID NO: 2214069 - RNA, 19 nt, Homo sapiens
  misc_RNA (1)...(19): siRNA sense strand
uuacugauguguccuuaca

SEQ ID NO: 2214070 - RNA, 19 nt, Homo sapiens
  misc_RNA (1)...(19): siRNA sense strand
gaaggagucguugcucuug

SEQ ID NO: 2214071 - RNA, 19 nt, Homo sapiens
  misc_RNA (1)...(19): siRNA sense strand
cgaagaaauuagaggagau

SEQ ID NO: 2214072 - RNA, 19 nt, Homo sapiens
  misc_RNA (1)...(19): siRNA sense strand
uacuuacuguccucaaaua

SEQ ID NO: 2214073 - RNA, 19 nt, Homo sapiens
  misc_RNA (1)...(19): siRNA sense strand
gaguaugcagggacagaua

SEQ ID NO: 2214074 - RNA, 19 nt, Homo sapiens
  misc_RNA (1)...(19): siRNA sense strand
ugucgaagcuguccuuacu

SEQ ID NO: 2214075 - RNA, 19 nt, Homo sapiens
  misc_RNA (1)...(19): siRNA sense strand
gaagcuguccuuacuuacu

SEQ ID NO: 2214076 - RNA, 19 nt, Homo sapiens
  misc_RNA (1)...(19): siRNA sense strand
gcaauuaguaggcccaaac

SEQ ID NO: 2214077 - RNA, 19 nt, Homo sapiens
  misc_RNA (1)...(19): siRNA sense strand
gcuguggcuucaucuuguu

SEQ ID NO: 2214078 - RNA, 19 nt, Homo sapiens
  misc_RNA (1)...(19): siRNA sense strand
caaacuaaagcaagugaca

SEQ ID NO: 2214079 - RNA, 19 nt, Homo sapiens
  misc_RNA (1)...(19): siRNA sense strand
agauaucucacagacauua

SEQ ID NO: 2214080 - RNA, 19 nt, Homo sapiens
  misc_RNA (1)...(19): siRNA sense strand
gcucucuucuuuccuugug

SEQ ID NO: 2214081 - RNA, 19 nt, Homo sapiens
  misc_RNA (1)...(19): siRNA sense strand
ucaauugccagcugcuaaa

SEQ ID NO: 2214082 - RNA, 19 nt, Homo sapiens
  misc_RNA (1)...(19): siRNA sense strand
gcaagugacauggacuguu

SEQ ID NO: 2214083 - RNA, 19 nt, Homo sapiens
  misc_RNA (1)...(19): siRNA sense strand
gauaucucacagacauuaa

SEQ ID NO: 2214084 - RNA, 19 nt, Homo sapiens
  misc_RNA (1)...(19): siRNA sense strand
cgagaaguguuggagcaau

SEQ ID NO: 2214085 - RNA, 19 nt, Homo sapiens
  misc_RNA (1)...(19): siRNA sense strand
gaucauucccgagaagugu

SEQ ID NO: 2214086 - RNA, 19 nt, Homo sapiens
  misc_RNA (1)...(19): siRNA sense strand
cgaaggagucguugcucuu

SEQ ID NO: 2214087 - RNA, 19 nt, Homo sapiens
  misc_RNA (1)...(19): siRNA sense strand
ucauaugggacauugugua

SEQ ID NO: 2214088 - RNA, 19 nt, Homo sapiens
  misc_RNA (1)...(19): siRNA sense strand
gaaguccaaacucuagauc

SEQ ID NO: 2214089 - RNA, 19 nt, Homo sapiens
  misc_RNA (1)...(19): siRNA sense strand
agaaguguuggagcaauua

SEQ ID NO: 2214090 - RNA, 19 nt, Homo sapiens
  misc_RNA (1)...(19): siRNA sense strand
cuuacuuacuguccucaaa

SEQ ID NO: 2214091 - RNA, 19 nt, Homo sapiens
  misc_RNA (1)...(19): siRNA sense strand
cauaaaagacagacugauu

SEQ ID NO: 2214092 - RNA, 19 nt, Homo sapiens
  misc_RNA (1)...(19): siRNA sense strand
uauuacugauguguccuua

SEQ ID NO: 2214093 - RNA, 19 nt, Homo sapiens
  misc_RNA (1)...(19): siRNA sense strand
ggcuucaucuuguucauac

SEQ ID NO: 2214094 - RNA, 19 nt, Homo sapiens
  misc_RNA (1)...(19): siRNA sense strand
cugcaccugucuaacugua

SEQ ID NO: 2214095 - RNA, 19 nt, Homo sapiens
  misc_RNA (1)...(19): siRNA sense strand
aagcuguccuuacuuacug

SEQ ID NO: 2214096 - RNA, 19 nt, Homo sapiens
  misc_RNA (1)...(19): siRNA sense strand
agggacagauaacagauuc

SEQ ID NO: 2214097 - RNA, 19 nt, Homo sapiens
  misc_RNA (1)...(19): siRNA sense strand
auuaguaggcccaaacaaa

SEQ ID NO: 2214098 - RNA, 19 nt, Homo sapiens
  misc_RNA (1)...(19): siRNA sense strand
ggaaccgaguuucuguaac

SEQ ID NO: 2214099 - RNA, 19 nt, Homo sapiens
  misc_RNA (1)...(19): siRNA sense strand
ugccuuuggugcuucauga

SEQ ID NO: 2214100 - RNA, 19 nt, Homo sapiens
  misc_RNA (1)...(19): siRNA sense strand
uuacuguccucaaauacgu

SEQ ID NO: 2214101 - RNA, 19 nt, Homo sapiens
  misc_RNA (1)...(19): siRNA sense strand
gcagggacagauaacagau

SEQ ID NO: 2214102 - RNA, 19 nt, Homo sapiens
  misc_RNA (1)...(19): siRNA sense strand
gacagauaacagauucaaa

SEQ ID NO: 2214103 - RNA, 19 nt, Homo sapiens
  misc_RNA (1)...(19): siRNA sense strand
gauuuagguggcugcuuaa

SEQ ID NO: 2214104 - RNA, 19 nt, Homo sapiens
  misc_RNA (1)...(19): siRNA sense strand
cuacacgaagcuucuuuga

SEQ ID NO: 2214105 - RNA, 19 nt, Homo sapiens
  misc_RNA (1)...(19): siRNA sense strand
ggagcugcgauauaucaga

SEQ ID NO: 2214106 - RNA, 19 nt, Homo sapiens
  misc_RNA (1)...(19): siRNA sense strand
ugacaguggugugauugca

SEQ ID NO: 2214107 - RNA, 19 nt, Homo sapiens
  misc_RNA (1)...(19): siRNA sense strand
agauucauaugggacauug

SEQ ID NO: 2214108 - RNA, 19 nt, Homo sapiens
  misc_RNA (1)...(19): siRNA sense strand
acagaucauucccgagaag

SEQ ID NO: 2214109 - RNA, 19 nt, Homo sapiens
  misc_RNA (1)...(19): siRNA sense strand
auauuacucuuccauggau

SEQ ID NO: 2214110 - RNA, 19 nt, Homo sapiens
  misc_RNA (1)...(19): siRNA sense strand
uauauuacucuuccaugga

SEQ ID NO: 2214111 - RNA, 19 nt, Homo sapiens
  misc_RNA (1)...(19): siRNA sense strand
gaugcugcaaucucacuga

SEQ ID NO: 2214112 - RNA, 19 nt, Homo sapiens
  misc_RNA (1)...(19): siRNA sense strand
cuaaagcaagugacaugga

SEQ ID NO: 2214113 - RNA, 19 nt, Homo sapiens
  misc_RNA (1)...(19): siRNA sense strand
gauuuuacauccugaaguc

SEQ ID NO: 2214114 - RNA, 19 nt, Homo sapiens
  misc_RNA (1)...(19): siRNA sense strand
aguguuggagcaauuagua

SEQ ID NO: 2214115 - RNA, 19 nt, Homo sapiens
  misc_RNA (1)...(19): siRNA sense strand
gagauucauaugggacauu

SEQ ID NO: 2214116 - RNA, 19 nt, Homo sapiens
  misc_RNA (1)...(19): siRNA sense strand
aaagaucaucgauuuaggu

SEQ ID NO: 2214117 - RNA, 19 nt, Homo sapiens
  misc_RNA (1)...(19): siRNA sense strand
guggugugauugcacuugu

SEQ ID NO: 2214118 - RNA, 19 nt, Homo sapiens
  misc_RNA (1)...(19): siRNA sense strand
guaggcccaaacaaacuaa

SEQ ID NO: 2214119 - RNA, 19 nt, Homo sapiens
  misc_RNA (1)...(19): siRNA sense strand
gaaguguuggagcaauuag

SEQ ID NO: 2214120 - RNA, 19 nt, Homo sapiens
  misc_RNA (1)...(19): siRNA sense strand
ggagauucauaugggacau

SEQ ID NO: 2214121 - RNA, 19 nt, Homo sapiens
  misc_RNA (1)...(19): siRNA sense strand
gggacauuguguaaaucug

SEQ ID NO: 2214122 - RNA, 19 nt, Homo sapiens
  misc_RNA (1)...(19): siRNA sense strand
caauuaguaggcccaaaca

SEQ ID NO: 2214123 - RNA, 19 nt, Homo sapiens
  misc_RNA (1)...(19): siRNA sense strand
gcucugaacuggagaagau

SEQ ID NO: 2214124 - RNA, 19 nt, Homo sapiens
  misc_RNA (1)...(19): siRNA sense strand
ggagaaggaugcucugagu

SEQ ID NO: 2214125 - RNA, 19 nt, Homo sapiens
  misc_RNA (1)...(19): siRNA sense strand
cagcucaacucgugaacua

SEQ ID NO: 2214126 - RNA, 19 nt, Homo sapiens
  misc_RNA (1)...(19): siRNA sense strand
agaaggcccugguggauaa

SEQ ID NO: 2214127 - RNA, 19 nt, Homo sapiens
  misc_RNA (1)...(19): siRNA sense strand
gaagagagagguggaaaug

SEQ ID NO: 2214128 - RNA, 19 nt, Homo sapiens
  misc_RNA (1)...(19): siRNA sense strand
gcagccaccucuaccacua

SEQ ID NO: 2214129 - RNA, 19 nt, Homo sapiens
  misc_RNA (1)...(19): siRNA sense strand
ccacuagccugcagaagga

SEQ ID NO: 2214130 - RNA, 19 nt, Homo sapiens
  misc_RNA (1)...(19): siRNA sense strand
acagggaccuccagauuga

SEQ ID NO: 2214131 - RNA, 19 nt, Homo sapiens
  misc_RNA (1)...(19): siRNA sense strand
acagugagcucguccaugu

SEQ ID NO: 2214132 - RNA, 19 nt, Homo sapiens
  misc_RNA (1)...(19): siRNA sense strand
cuguggagauguuugauua

SEQ ID NO: 2214133 - RNA, 19 nt, Homo sapiens
  misc_RNA (1)...(19): siRNA sense strand
cagaugagguacuggagaa

SEQ ID NO: 2214134 - RNA, 19 nt, Homo sapiens
  misc_RNA (1)...(19): siRNA sense strand
ggacagagacaccauggau

SEQ ID NO: 2214135 - RNA, 19 nt, Homo sapiens
  misc_RNA (1)...(19): siRNA sense strand
ugagagggcugccaaugug

SEQ ID NO: 2214136 - RNA, 19 nt, Homo sapiens
  misc_RNA (1)...(19): siRNA sense strand
ggugguggcugaccucuuc

SEQ ID NO: 2214137 - RNA, 19 nt, Homo sapiens
  misc_RNA (1)...(19): siRNA sense strand
ggaggugacagaugaggua

SEQ ID NO: 2214138 - RNA, 19 nt, Homo sapiens
  misc_RNA (1)...(19): siRNA sense strand
cgacagggaccuccagauu

SEQ ID NO: 2214139 - RNA, 19 nt, Homo sapiens
  misc_RNA (1)...(19): siRNA sense strand
gggugaagcuggaggugaa

SEQ ID NO: 2214140 - RNA, 19 nt, Homo sapiens
  misc_RNA (1)...(19): siRNA sense strand
gcugaagcuuucugaauca

SEQ ID NO: 2214141 - RNA, 19 nt, Homo sapiens
  misc_RNA (1)...(19): siRNA sense strand
gaaaugcuccgcucugaac

SEQ ID NO: 2214142 - RNA, 19 nt, Homo sapiens
  misc_RNA (1)...(19): siRNA sense strand
acagagacaccauggauuu

SEQ ID NO: 2214143 - RNA, 19 nt, Homo sapiens
  misc_RNA (1)...(19): siRNA sense strand
gaaguguaaccaccaagaa

SEQ ID NO: 2214144 - RNA, 19 nt, Homo sapiens
  misc_RNA (1)...(19): siRNA sense strand
uggcugaccucuucgauca

SEQ ID NO: 2214145 - RNA, 19 nt, Homo sapiens
  misc_RNA (1)...(19): siRNA sense strand
uugauuacauggauuguga

SEQ ID NO: 2214146 - RNA, 19 nt, Homo sapiens
  misc_RNA (1)...(19): siRNA sense strand
ggauugaggacaugaugaa

SEQ ID NO: 2214147 - RNA, 19 nt, Homo sapiens
  misc_RNA (1)...(19): siRNA sense strand
gccuggaggugacagauga

SEQ ID NO: 2214148 - RNA, 19 nt, Homo sapiens
  misc_RNA (1)...(19): siRNA sense strand
ucaucaagcugaagaagca

SEQ ID NO: 2214149 - RNA, 19 nt, Homo sapiens
  misc_RNA (1)...(19): siRNA sense strand
gcggauaccaucaucaaug

SEQ ID NO: 2214150 - RNA, 19 nt, Homo sapiens
  misc_RNA (1)...(19): siRNA sense strand
acaacaagcugaaggaaaa

SEQ ID NO: 2214151 - RNA, 19 nt, Homo sapiens
  misc_RNA (1)...(19): siRNA sense strand
ucaagcggcucauccagau

SEQ ID NO: 2214152 - RNA, 19 nt, Homo sapiens
  misc_RNA (1)...(19): siRNA sense strand
acggacagcuggugaaugu

SEQ ID NO: 2214153 - RNA, 19 nt, Homo sapiens
  misc_RNA (1)...(19): siRNA sense strand
ugaagaagcaggagaugga

SEQ ID NO: 2214154 - RNA, 19 nt, Homo sapiens
  misc_RNA (1)...(19): siRNA sense strand
gacagggaccuccagauug

SEQ ID NO: 2214155 - RNA, 19 nt, Homo sapiens
  misc_RNA (1)...(19): siRNA sense strand
ccaagcugcugcugaccaa

SEQ ID NO: 2214156 - RNA, 19 nt, Homo sapiens
  misc_RNA (1)...(19): siRNA sense strand
ggaaaugcuccgcucugaa

SEQ ID NO: 2214157 - RNA, 19 nt, Homo sapiens
  misc_RNA (1)...(19): siRNA sense strand
cccagcagcuccauucuca

SEQ ID NO: 2214158 - RNA, 19 nt, Homo sapiens
  misc_RNA (1)...(19): siRNA sense strand
ccacgcagcaggaauuuua

SEQ ID NO: 2214159 - RNA, 19 nt, Homo sapiens
  misc_RNA (1)...(19): siRNA sense strand
ccucuucgaucagacguuu

SEQ ID NO: 2214160 - RNA, 19 nt, Homo sapiens
  misc_RNA (1)...(19): siRNA sense strand
gcagaaggcccugguggau

SEQ ID NO: 2214161 - RNA, 19 nt, Homo sapiens
  misc_RNA (1)...(19): siRNA sense strand
gacaggaccaccagcuuga

SEQ ID NO: 2214162 - RNA, 19 nt, Homo sapiens
  misc_RNA (1)...(19): siRNA sense strand
ggugacagaugagguacug

SEQ ID NO: 2214163 - RNA, 19 nt, Homo sapiens
  misc_RNA (1)...(19): siRNA sense strand
ggaccaccagcuugacaaa

SEQ ID NO: 2214164 - RNA, 19 nt, Homo sapiens
  misc_RNA (1)...(19): siRNA sense strand
uggaaaugcuccgcucuga

SEQ ID NO: 2214165 - RNA, 19 nt, Homo sapiens
  misc_RNA (1)...(19): siRNA sense strand
cagaaggcccugguggaua

SEQ ID NO: 2214166 - RNA, 19 nt, Homo sapiens
  misc_RNA (1)...(19): siRNA sense strand
gugaggaggcugagaggaa

SEQ ID NO: 2214167 - RNA, 19 nt, Homo sapiens
  misc_RNA (1)...(19): siRNA sense strand
ugaccaagaucuccuucca

SEQ ID NO: 2214168 - RNA, 19 nt, Homo sapiens
  misc_RNA (1)...(19): siRNA sense strand
ccacauccgcagccauuga

SEQ ID NO: 2214169 - RNA, 19 nt, Homo sapiens
  misc_RNA (1)...(19): siRNA sense strand
cccaguaccugaccuccuu

SEQ ID NO: 2214170 - RNA, 19 nt, Homo sapiens
  misc_RNA (1)...(19): siRNA sense strand
agagagagguggaaaugcu

SEQ ID NO: 2214171 - RNA, 19 nt, Homo sapiens
  misc_RNA (1)...(19): siRNA sense strand
guggagauguuugauuaca

SEQ ID NO: 2214172 - RNA, 19 nt, Homo sapiens
  misc_RNA (1)...(19): siRNA sense strand
ccaaugggucugugaagga

SEQ ID NO: 2214173 - RNA, 19 nt, Homo sapiens
  misc_RNA (1)...(19): siRNA sense strand
ccuccgacaugcuguacuu

SEQ ID NO: 2214174 - RNA, 19 nt, Homo sapiens
  misc_RNA (1)...(19): siRNA sense strand
gacagagacaccauggauu

SEQ ID NO: 2214175 - RNA, 19 nt, Homo sapiens
  misc_RNA (1)...(19): siRNA sense strand
ggccacauccgcagccauu

SEQ ID NO: 2214176 - RNA, 19 nt, Homo sapiens
  misc_RNA (1)...(19): siRNA sense strand
gcagcaacauccgggagau

SEQ ID NO: 2214177 - RNA, 19 nt, Homo sapiens
  misc_RNA (1)...(19): siRNA sense strand
ggacugcagccaccucuac

SEQ ID NO: 2214178 - RNA, 19 nt, Homo sapiens
  misc_RNA (1)...(19): siRNA sense strand
guacaucgcgcagcugaag

SEQ ID NO: 2214179 - RNA, 19 nt, Homo sapiens
  misc_RNA (1)...(19): siRNA sense strand
gaggauugaggacaugaug

SEQ ID NO: 2214180 - RNA, 19 nt, Homo sapiens
  misc_RNA (1)...(19): siRNA sense strand
aguugaagcuagaggagaa

SEQ ID NO: 2214181 - RNA, 19 nt, Homo sapiens
  misc_RNA (1)...(19): siRNA sense strand
cggucaagcuccuguucaa

SEQ ID NO: 2214182 - RNA, 19 nt, Homo sapiens
  misc_RNA (1)...(19): siRNA sense strand
gcgagcaguucgacaagac

SEQ ID NO: 2214183 - RNA, 19 nt, Homo sapiens
  misc_RNA (1)...(19): siRNA sense strand
gacaagacccaggccauca

SEQ ID NO: 2214184 - RNA, 19 nt, Homo sapiens
  misc_RNA (1)...(19): siRNA sense strand
ccagcucacuguggagaug

SEQ ID NO: 2214185 - RNA, 19 nt, Homo sapiens
  misc_RNA (1)...(19): siRNA sense strand
cgaaguguaaccaccaaga

SEQ ID NO: 2214186 - RNA, 19 nt, Homo sapiens
  misc_RNA (1)...(19): siRNA sense strand
acacagagcagagcaaguc

SEQ ID NO: 2214187 - RNA, 19 nt, Homo sapiens
  misc_RNA (1)...(19): siRNA sense strand
agucggaguugaagcuaga

SEQ ID NO: 2214188 - RNA, 19 nt, Homo sapiens
  misc_RNA (1)...(19): siRNA sense strand
ccgacaugcuguacuucaa

SEQ ID NO: 2214189 - RNA, 19 nt, Homo sapiens
  misc_RNA (1)...(19): siRNA sense strand
ucacuguggagauguuuga

SEQ ID NO: 2214190 - RNA, 19 nt, Homo sapiens
  misc_RNA (1)...(19): siRNA sense strand
ggagcagauugaggacaga

SEQ ID NO: 2214191 - RNA, 19 nt, Homo sapiens
  misc_RNA (1)...(19): siRNA sense strand
cagccacgcagcaggaauu

SEQ ID NO: 2214192 - RNA, 19 nt, Homo sapiens
  misc_RNA (1)...(19): siRNA sense strand
gacgagcaguucgcagugu

SEQ ID NO: 2214193 - RNA, 19 nt, Homo sapiens
  misc_RNA (1)...(19): siRNA sense strand
gaagcgggagucggaguug

SEQ ID NO: 2214194 - RNA, 19 nt, Homo sapiens
  misc_RNA (1)...(19): siRNA sense strand
ccucaagcauccccaguuu

SEQ ID NO: 2214195 - RNA, 19 nt, Homo sapiens
  misc_RNA (1)...(19): siRNA sense strand
gcacagugagcucguccau

SEQ ID NO: 2214196 - RNA, 19 nt, Homo sapiens
  misc_RNA (1)...(19): siRNA sense strand
gcuacaacaagcugaagga

SEQ ID NO: 2214197 - RNA, 19 nt, Homo sapiens
  misc_RNA (1)...(19): siRNA sense strand
ucaagccggugguggugau

SEQ ID NO: 2214198 - RNA, 19 nt, Homo sapiens
  misc_RNA (1)...(19): siRNA sense strand
cugacaagguggugcuuca

SEQ ID NO: 2214199 - RNA, 19 nt, Homo sapiens
  misc_RNA (1)...(19): siRNA sense strand
gaugcugugcggaggauug

SEQ ID NO: 2214200 - RNA, 19 nt, Homo sapiens
  misc_RNA (1)...(19): siRNA sense strand
uacaacaagcugaaggaaa

SEQ ID NO: 2214201 - RNA, 19 nt, Homo sapiens
  misc_RNA (1)...(19): siRNA sense strand
gcggaggauugaggacaug

SEQ ID NO: 2214202 - RNA, 19 nt, Homo sapiens
  misc_RNA (1)...(19): siRNA sense strand
ugagccgccugcaggaaug

SEQ ID NO: 2214203 - RNA, 19 nt, Homo sapiens
  misc_RNA (1)...(19): siRNA sense strand
gggcacacaccacgagaag

SEQ ID NO: 2214204 - RNA, 19 nt, Homo sapiens
  misc_RNA (1)...(19): siRNA sense strand
aagaugaggagccggagaa

SEQ ID NO: 2214205 - RNA, 19 nt, Homo sapiens
  misc_RNA (1)...(19): siRNA sense strand
gccaucagcaucagcaaag

SEQ ID NO: 2214206 - RNA, 19 nt, Homo sapiens
  misc_RNA (1)...(19): siRNA sense strand
ccaaggugaaggccaacaa

SEQ ID NO: 2214207 - RNA, 19 nt, Homo sapiens
  misc_RNA (1)...(19): siRNA sense strand
caacauccgggagauugga

SEQ ID NO: 2214208 - RNA, 19 nt, Homo sapiens
  misc_RNA (1)...(19): siRNA sense strand
ggagucggaguugaagcua

SEQ ID NO: 2214209 - RNA, 19 nt, Homo sapiens
  misc_RNA (1)...(19): siRNA sense strand
cagauugagagcuugaaga

SEQ ID NO: 2214210 - RNA, 19 nt, Homo sapiens
  misc_RNA (1)...(19): siRNA sense strand
gagccuccgacaugcugua

SEQ ID NO: 2214211 - RNA, 19 nt, Homo sapiens
  misc_RNA (1)...(19): siRNA sense strand
gacaagguggugcuucaca

SEQ ID NO: 2214212 - RNA, 19 nt, Homo sapiens
  misc_RNA (1)...(19): siRNA sense strand
ugaagagagagguggaaau

SEQ ID NO: 2214213 - RNA, 19 nt, Homo sapiens
  misc_RNA (1)...(19): siRNA sense strand
aaguguaaccaccaagaaa

SEQ ID NO: 2214214 - RNA, 19 nt, Homo sapiens
  misc_RNA (1)...(19): siRNA sense strand
ggccaucagcaucagcaaa

SEQ ID NO: 2214215 - RNA, 19 nt, Homo sapiens
  misc_RNA (1)...(19): siRNA sense strand
gaauguucucgcacaguca

SEQ ID NO: 2214216 - RNA, 19 nt, Homo sapiens
  misc_RNA (1)...(19): siRNA sense strand
cagaccugaugaaggcuau

SEQ ID NO: 2214217 - RNA, 19 nt, Homo sapiens
  misc_RNA (1)...(19): siRNA sense strand
gaagagccaggugaaugca

SEQ ID NO: 2214218 - RNA, 19 nt, Homo sapiens
  misc_RNA (1)...(19): siRNA sense strand
gcaauaagaucuucaugga

SEQ ID NO: 2214219 - RNA, 19 nt, Homo sapiens
  misc_RNA (1)...(19): siRNA sense strand
ggaagaggguucugauauu

SEQ ID NO: 2214220 - RNA, 19 nt, Homo sapiens
  misc_RNA (1)...(19): siRNA sense strand
gagaagauguugagagguu

SEQ ID NO: 2214221 - RNA, 19 nt, Homo sapiens
  misc_RNA (1)...(19): siRNA sense strand
gaagaggguucugauauug

SEQ ID NO: 2214222 - RNA, 19 nt, Homo sapiens
  misc_RNA (1)...(19): siRNA sense strand
uuaaucagcugguccauuu

SEQ ID NO: 2214223 - RNA, 19 nt, Homo sapiens
  misc_RNA (1)...(19): siRNA sense strand
gagaagagaagagaaguua

SEQ ID NO: 2214224 - RNA, 19 nt, Homo sapiens
  misc_RNA (1)...(19): siRNA sense strand
caaggcagaugagaaauuu

SEQ ID NO: 2214225 - RNA, 19 nt, Homo sapiens
  misc_RNA (1)...(19): siRNA sense strand
gaagagaagagaaguuaaa

SEQ ID NO: 2214226 - RNA, 19 nt, Homo sapiens
  misc_RNA (1)...(19): siRNA sense strand
ugucauauguccaagcuua

SEQ ID NO: 2214227 - RNA, 19 nt, Homo sapiens
  misc_RNA (1)...(19): siRNA sense strand
gaagagucauacaucaauu

SEQ ID NO: 2214228 - RNA, 19 nt, Homo sapiens
  misc_RNA (1)...(19): siRNA sense strand
guucugauauugaagauga

SEQ ID NO: 2214229 - RNA, 19 nt, Homo sapiens
  misc_RNA (1)...(19): siRNA sense strand
gugaagggcgugaagauua

SEQ ID NO: 2214230 - RNA, 19 nt, Homo sapiens
  misc_RNA (1)...(19): siRNA sense strand
cagcggaccuucugccaaa

SEQ ID NO: 2214231 - RNA, 19 nt, Homo sapiens
  misc_RNA (1)...(19): siRNA sense strand
ggucacagguaguggcaaa

SEQ ID NO: 2214232 - RNA, 19 nt, Homo sapiens
  misc_RNA (1)...(19): siRNA sense strand
gcaaggcagaugagaaauu

SEQ ID NO: 2214233 - RNA, 19 nt, Homo sapiens
  misc_RNA (1)...(19): siRNA sense strand
gagcugggcuucccguaca

SEQ ID NO: 2214234 - RNA, 19 nt, Homo sapiens
  misc_RNA (1)...(19): siRNA sense strand
cgacacgauuccauuuaaa

SEQ ID NO: 2214235 - RNA, 19 nt, Homo sapiens
  misc_RNA (1)...(19): siRNA sense strand
gaagauguugagagguuua

SEQ ID NO: 2214236 - RNA, 19 nt, Homo sapiens
  misc_RNA (1)...(19): siRNA sense strand
gggaagaggguucugauau

SEQ ID NO: 2214237 - RNA, 19 nt, Homo sapiens
  misc_RNA (1)...(19): siRNA sense strand
aaauaaagcuuggucaaag

SEQ ID NO: 2214238 - RNA, 19 nt, Homo sapiens
  misc_RNA (1)...(19): siRNA sense strand
ggaagagucauacaucaau

SEQ ID NO: 2214239 - RNA, 19 nt, Homo sapiens
  misc_RNA (1)...(19): siRNA sense strand
gcaacaaggugggaacauc

SEQ ID NO: 2214240 - RNA, 19 nt, Homo sapiens
  misc_RNA (1)...(19): siRNA sense strand
caacaccauucuggaguuu

SEQ ID NO: 2214241 - RNA, 19 nt, Homo sapiens
  misc_RNA (1)...(19): siRNA sense strand
ugaagggcgugaagauuau

SEQ ID NO: 2214242 - RNA, 19 nt, Homo sapiens
  misc_RNA (1)...(19): siRNA sense strand
ucucagauuuggaagauga

SEQ ID NO: 2214243 - RNA, 19 nt, Homo sapiens
  misc_RNA (1)...(19): siRNA sense strand
ccgacacgauuccauuuaa

SEQ ID NO: 2214244 - RNA, 19 nt, Homo sapiens
  misc_RNA (1)...(19): siRNA sense strand
caugaaagcuuuuguguca

SEQ ID NO: 2214245 - RNA, 19 nt, Homo sapiens
  misc_RNA (1)...(19): siRNA sense strand
caagaugccagaauugaga

SEQ ID NO: 2214246 - RNA, 19 nt, Homo sapiens
  misc_RNA (1)...(19): siRNA sense strand
gaguucagccagauucuuu

SEQ ID NO: 2214247 - RNA, 19 nt, Homo sapiens
  misc_RNA (1)...(19): siRNA sense strand
aaagaacaaucaagacagu

SEQ ID NO: 2214248 - RNA, 19 nt, Homo sapiens
  misc_RNA (1)...(19): siRNA sense strand
gcagaagcggucacaggua

SEQ ID NO: 2214249 - RNA, 19 nt, Homo sapiens
  misc_RNA (1)...(19): siRNA sense strand
gagcuggccauucaaauag

SEQ ID NO: 2214250 - RNA, 19 nt, Homo sapiens
  misc_RNA (1)...(19): siRNA sense strand
gcaaucauaagcaggagaa

SEQ ID NO: 2214251 - RNA, 19 nt, Homo sapiens
  misc_RNA (1)...(19): siRNA sense strand
ggaaaacuacuacauggua

SEQ ID NO: 2214252 - RNA, 19 nt, Homo sapiens
  misc_RNA (1)...(19): siRNA sense strand
gcaacaaagaagagagaaa

SEQ ID NO: 2214253 - RNA, 19 nt, Homo sapiens
  misc_RNA (1)...(19): siRNA sense strand
gaagagagaaaacagaaaa

SEQ ID NO: 2214254 - RNA, 19 nt, Homo sapiens
  misc_RNA (1)...(19): siRNA sense strand
ggagaaacaccuggucuuc

SEQ ID NO: 2214255 - RNA, 19 nt, Homo sapiens
  misc_RNA (1)...(19): siRNA sense strand
gagcaacaaagaagagaga

SEQ ID NO: 2214256 - RNA, 19 nt, Homo sapiens
  misc_RNA (1)...(19): siRNA sense strand
gaaaagggcaugaaagcuu

SEQ ID NO: 2214257 - RNA, 19 nt, Homo sapiens
  misc_RNA (1)...(19): siRNA sense strand
caacaaggugggaacauca

SEQ ID NO: 2214258 - RNA, 19 nt, Homo sapiens
  misc_RNA (1)...(19): siRNA sense strand
uguccaagcuuaugcaaag

SEQ ID NO: 2214259 - RNA, 19 nt, Homo sapiens
  misc_RNA (1)...(19): siRNA sense strand
ugaaagcuuuugugucaua

SEQ ID NO: 2214260 - RNA, 19 nt, Homo sapiens
  misc_RNA (1)...(19): siRNA sense strand
gcaagcaucaacaccauuc

SEQ ID NO: 2214261 - RNA, 19 nt, Homo sapiens
  misc_RNA (1)...(19): siRNA sense strand
gaaaaugaagggagaagaa

SEQ ID NO: 2214262 - RNA, 19 nt, Homo sapiens
  misc_RNA (1)...(19): siRNA sense strand
agagcuggccauucaaaua

SEQ ID NO: 2214263 - RNA, 19 nt, Homo sapiens
  misc_RNA (1)...(19): siRNA sense strand
gcaaccaucccucuguuca

SEQ ID NO: 2214264 - RNA, 19 nt, Homo sapiens
  misc_RNA (1)...(19): siRNA sense strand
ucauggaguuccgcaaauu

SEQ ID NO: 2214265 - RNA, 19 nt, Homo sapiens
  misc_RNA (1)...(19): siRNA sense strand
gugccuguguggaauacua

SEQ ID NO: 2214266 - RNA, 19 nt, Homo sapiens
  misc_RNA (1)...(19): siRNA sense strand
gaaaacuacuacaugguau

SEQ ID NO: 2214267 - RNA, 19 nt, Homo sapiens
  misc_RNA (1)...(19): siRNA sense strand
ucaacaccauucuggaguu

SEQ ID NO: 2214268 - RNA, 19 nt, Homo sapiens
  misc_RNA (1)...(19): siRNA sense strand
gagucagguuggagccaua

SEQ ID NO: 2214269 - RNA, 19 nt, Homo sapiens
  misc_RNA (1)...(19): siRNA sense strand
gcagaugagaaauuuaauc

SEQ ID NO: 2214270 - RNA, 19 nt, Homo sapiens
  misc_RNA (1)...(19): siRNA sense strand
gcgugaagauuaugugcau

SEQ ID NO: 2214271 - RNA, 19 nt, Homo sapiens
  misc_RNA (1)...(19): siRNA sense strand
agaggguucugauauugaa

SEQ ID NO: 2214272 - RNA, 19 nt, Homo sapiens
  misc_RNA (1)...(19): siRNA sense strand
uaaaggaucuugauuuugc

SEQ ID NO: 2214273 - RNA, 19 nt, Homo sapiens
  misc_RNA (1)...(19): siRNA sense strand
guaugacccucccagcaau

SEQ ID NO: 2214274 - RNA, 19 nt, Homo sapiens
  misc_RNA (1)...(19): siRNA sense strand
cucgagagcuggccauuca

SEQ ID NO: 2214275 - RNA, 19 nt, Homo sapiens
  misc_RNA (1)...(19): siRNA sense strand
ugaagaagaauuugagaag

SEQ ID NO: 2214276 - RNA, 19 nt, Homo sapiens
  misc_RNA (1)...(19): siRNA sense strand
gagguccugucgcauuuca

SEQ ID NO: 2214277 - RNA, 19 nt, Homo sapiens
  misc_RNA (1)...(19): siRNA sense strand
gacgagguccugucgcauu

SEQ ID NO: 2214278 - RNA, 19 nt, Homo sapiens
  misc_RNA (1)...(19): siRNA sense strand
guuaauaccgacacgauuc

SEQ ID NO: 2214279 - RNA, 19 nt, Homo sapiens
  misc_RNA (1)...(19): siRNA sense strand
aggcagaugagaaauuuaa

SEQ ID NO: 2214280 - RNA, 19 nt, Homo sapiens
  misc_RNA (1)...(19): siRNA sense strand
ugcccaagaugccagaauu

SEQ ID NO: 2214281 - RNA, 19 nt, Homo sapiens
  misc_RNA (1)...(19): siRNA sense strand
gaagggagaagaaaauuca

SEQ ID NO: 2214282 - RNA, 19 nt, Homo sapiens
  misc_RNA (1)...(19): siRNA sense strand
ggaugaggcagacagacuu

SEQ ID NO: 2214283 - RNA, 19 nt, Homo sapiens
  misc_RNA (1)...(19): siRNA sense strand
ucaagacaguggauuuagg

SEQ ID NO: 2214284 - RNA, 19 nt, Homo sapiens
  misc_RNA (1)...(19): siRNA sense strand
ccuggaaauucuucugaga

SEQ ID NO: 2214285 - RNA, 19 nt, Homo sapiens
  misc_RNA (1)...(19): siRNA sense strand
gagagaaaacagaaaauga

SEQ ID NO: 2214286 - RNA, 19 nt, Homo sapiens
  misc_RNA (1)...(19): siRNA sense strand
caacaaagaagagagaaaa

SEQ ID NO: 2214287 - RNA, 19 nt, Homo sapiens
  misc_RNA (1)...(19): siRNA sense strand
caugaaugcaaccugauuu

SEQ ID NO: 2214288 - RNA, 19 nt, Homo sapiens
  misc_RNA (1)...(19): siRNA sense strand
aaacacagcggaccuucug

SEQ ID NO: 2214289 - RNA, 19 nt, Homo sapiens
  misc_RNA (1)...(19): siRNA sense strand
cacggaaagaugaaauaua

SEQ ID NO: 2214290 - RNA, 19 nt, Homo sapiens
  misc_RNA (1)...(19): siRNA sense strand
caaggugggaacaucauug

SEQ ID NO: 2214291 - RNA, 19 nt, Homo sapiens
  misc_RNA (1)...(19): siRNA sense strand
caaagaugucgcugcagaa

SEQ ID NO: 2214292 - RNA, 19 nt, Homo sapiens
  misc_RNA (1)...(19): siRNA sense strand
auacaucaauuuccuugca

SEQ ID NO: 2214293 - RNA, 19 nt, Homo sapiens
  misc_RNA (1)...(19): siRNA sense strand
acgagguccugucgcauuu

SEQ ID NO: 2214294 - RNA, 19 nt, Homo sapiens
  misc_RNA (1)...(19): siRNA sense strand
ucagccagauucuuuggau

SEQ ID NO: 2214295 - RNA, 19 nt, Homo sapiens
  misc_RNA (1)...(19): siRNA sense strand
cgagagcuggccauucaaa

SEQ ID NO: 2214296 - RNA, 19 nt, Homo sapiens
  misc_RNA (1)...(19): siRNA sense strand
gaaacaccuggucuucuuc

SEQ ID NO: 2214297 - RNA, 19 nt, Homo sapiens
  misc_RNA (1)...(19): siRNA sense strand
ccgcaaccaucccucuguu

SEQ ID NO: 2214298 - RNA, 19 nt, Homo sapiens
  misc_RNA (1)...(19): siRNA sense strand
ggugaagggcgugaagauu

SEQ ID NO: 2214299 - RNA, 19 nt, Homo sapiens
  misc_RNA (1)...(19): siRNA sense strand
uauugaagaugaggacaug

SEQ ID NO: 2214300 - RNA, 19 nt, Homo sapiens
  misc_RNA (1)...(19): siRNA sense strand
caaauugcaaagugggauu

SEQ ID NO: 2214301 - RNA, 19 nt, Homo sapiens
  misc_RNA (1)...(19): siRNA sense strand
uaaacgcaauaagaucuuc

SEQ ID NO: 2214302 - RNA, 19 nt, Homo sapiens
  misc_RNA (1)...(19): siRNA sense strand
ugggaaggcucuggaagug

SEQ ID NO: 2214303 - RNA, 19 nt, Homo sapiens
  misc_RNA (1)...(19): siRNA sense strand
agaagauguugagagguuu

SEQ ID NO: 2214304 - RNA, 19 nt, Homo sapiens
  misc_RNA (1)...(19): siRNA sense strand
ccacucagacgcaggaagu

SEQ ID NO: 2214305 - RNA, 19 nt, Homo sapiens
  misc_RNA (1)...(19): siRNA sense strand
gugaagauuaugugcauuc

SEQ ID NO: 2214306 - RNA, 19 nt, Homo sapiens
  misc_RNA (1)...(19): siRNA sense strand
gguuggagccauaaucauc

SEQ ID NO: 2214307 - RNA, 19 nt, Homo sapiens
  misc_RNA (1)...(19): siRNA sense strand
acacgauuccauuuaaaga

SEQ ID NO: 2214308 - RNA, 19 nt, Homo sapiens
  misc_RNA (1)...(19): siRNA sense strand
aaccaucccucuguucaug

SEQ ID NO: 2214309 - RNA, 19 nt, Homo sapiens
  misc_RNA (1)...(19): siRNA sense strand
gcaaaauaacugaagaaga

SEQ ID NO: 2214310 - RNA, 19 nt, Homo sapiens
  misc_RNA (1)...(19): siRNA sense strand
aagaugaggacauggaaga

SEQ ID NO: 2214311 - RNA, 19 nt, Homo sapiens
  misc_RNA (1)...(19): siRNA sense strand
gagaaaagcagaggcagaa

SEQ ID NO: 2214312 - RNA, 19 nt, Homo sapiens
  misc_RNA (1)...(19): siRNA sense strand
gaaacacagcggaccuucu

SEQ ID NO: 2214313 - RNA, 19 nt, Homo sapiens
  misc_RNA (1)...(19): siRNA sense strand
gagaaacacagcggaccuu

SEQ ID NO: 2214314 - RNA, 19 nt, Homo sapiens
  misc_RNA (1)...(19): siRNA sense strand
uuaugugcauucacggaaa

SEQ ID NO: 2214315 - RNA, 19 nt, Homo sapiens
  misc_RNA (1)...(19): siRNA sense strand
gggagaagaaaauucauaa

SEQ ID NO: 2214316 - RNA, 19 nt, Homo sapiens
  misc_RNA (1)...(19): siRNA sense strand
gaaugcaaccugauuuuca

SEQ ID NO: 2214317 - RNA, 19 nt, Homo sapiens
  misc_RNA (1)...(19): siRNA sense strand
ugauauuccugaagucaac

SEQ ID NO: 2214318 - RNA, 19 nt, Homo sapiens
  misc_RNA (1)...(19): siRNA sense strand
ggaaggagcugaacuguaa

SEQ ID NO: 2214319 - RNA, 19 nt, Homo sapiens
  misc_RNA (1)...(19): siRNA sense strand
ggaaagaaaugcaaccuua

SEQ ID NO: 2214320 - RNA, 19 nt, Homo sapiens
  misc_RNA (1)...(19): siRNA sense strand
ggaaauaugugauggauga

SEQ ID NO: 2214321 - RNA, 19 nt, Homo sapiens
  misc_RNA (1)...(19): siRNA sense strand
gaaauuugcugccaagaaa

SEQ ID NO: 2214322 - RNA, 19 nt, Homo sapiens
  misc_RNA (1)...(19): siRNA sense strand
caagauagcuuaugagguu

SEQ ID NO: 2214323 - RNA, 19 nt, Homo sapiens
  misc_RNA (1)...(19): siRNA sense strand
ccacugaucuuaugaaauu

SEQ ID NO: 2214324 - RNA, 19 nt, Homo sapiens
  misc_RNA (1)...(19): siRNA sense strand
gaaggaagcuauggaaauu

SEQ ID NO: 2214325 - RNA, 19 nt, Homo sapiens
  misc_RNA (1)...(19): siRNA sense strand
agaaagaacugguugauaa

SEQ ID NO: 2214326 - RNA, 19 nt, Homo sapiens
  misc_RNA (1)...(19): siRNA sense strand
gagaagaacuaauagacua

SEQ ID NO: 2214327 - RNA, 19 nt, Homo sapiens
  misc_RNA (1)...(19): siRNA sense strand
agaaagagcuggaaacauu

SEQ ID NO: 2214328 - RNA, 19 nt, Homo sapiens
  misc_RNA (1)...(19): siRNA sense strand
gaaguugacccaagauuua

SEQ ID NO: 2214329 - RNA, 19 nt, Homo sapiens
  misc_RNA (1)...(19): siRNA sense strand
gcaaauaaccugcacauug

SEQ ID NO: 2214330 - RNA, 19 nt, Homo sapiens
  misc_RNA (1)...(19): siRNA sense strand
aaacaaagcuuccaauagu

SEQ ID NO: 2214331 - RNA, 19 nt, Homo sapiens
  misc_RNA (1)...(19): siRNA sense strand
gagauuaggucguuugcua

SEQ ID NO: 2214332 - RNA, 19 nt, Homo sapiens
  misc_RNA (1)...(19): siRNA sense strand
caaauaaccugcacauugu

SEQ ID NO: 2214333 - RNA, 19 nt, Homo sapiens
  misc_RNA (1)...(19): siRNA sense strand
gcaguucuauuccaagaua

SEQ ID NO: 2214334 - RNA, 19 nt, Homo sapiens
  misc_RNA (1)...(19): siRNA sense strand
gaaauucacuguagucaag

SEQ ID NO: 2214335 - RNA, 19 nt, Homo sapiens
  misc_RNA (1)...(19): siRNA sense strand
ggaaagaacuuauggaaaa

SEQ ID NO: 2214336 - RNA, 19 nt, Homo sapiens
  misc_RNA (1)...(19): siRNA sense strand
caaaugagaucgacaagau

SEQ ID NO: 2214337 - RNA, 19 nt, Homo sapiens
  misc_RNA (1)...(19): siRNA sense strand
acaaagagcugaacuggaa

SEQ ID NO: 2214338 - RNA, 19 nt, Homo sapiens
  misc_RNA (1)...(19): siRNA sense strand
ugacaaagcucauccugaa

SEQ ID NO: 2214339 - RNA, 19 nt, Homo sapiens
  misc_RNA (1)...(19): siRNA sense strand
caagaucucucacgaaaug

SEQ ID NO: 2214340 - RNA, 19 nt, Homo sapiens
  misc_RNA (1)...(19): siRNA sense strand
gcaaguccgucgucauuaa

SEQ ID NO: 2214341 - RNA, 19 nt, Homo sapiens
  misc_RNA (1)...(19): siRNA sense strand
gagaugagaagaacuaaua

SEQ ID NO: 2214342 - RNA, 19 nt, Homo sapiens
  misc_RNA (1)...(19): siRNA sense strand
gguccaaucuguuuaauga

SEQ ID NO: 2214343 - RNA, 19 nt, Homo sapiens
  misc_RNA (1)...(19): siRNA sense strand
gaagaacuauggcaggaaa

SEQ ID NO: 2214344 - RNA, 19 nt, Homo sapiens
  misc_RNA (1)...(19): siRNA sense strand
gaugagggaucccauauug

SEQ ID NO: 2214345 - RNA, 19 nt, Homo sapiens
  misc_RNA (1)...(19): siRNA sense strand
gaucaugggugagaccuua

SEQ ID NO: 2214346 - RNA, 19 nt, Homo sapiens
  misc_RNA (1)...(19): siRNA sense strand
acacagauguucucaauga

SEQ ID NO: 2214347 - RNA, 19 nt, Homo sapiens
  misc_RNA (1)...(19): siRNA sense strand
ggaugaaauuugacgaaua

SEQ ID NO: 2214348 - RNA, 19 nt, Homo sapiens
  misc_RNA (1)...(19): siRNA sense strand
gaaauuuguugaagcugua

SEQ ID NO: 2214349 - RNA, 19 nt, Homo sapiens
  misc_RNA (1)...(19): siRNA sense strand
gagagucccucaagaagaa

SEQ ID NO: 2214350 - RNA, 19 nt, Homo sapiens
  misc_RNA (1)...(19): siRNA sense strand
guaaagagauugacaucau

SEQ ID NO: 2214351 - RNA, 19 nt, Homo sapiens
  misc_RNA (1)...(19): siRNA sense strand
gcagaucgaugaguuggua

SEQ ID NO: 2214352 - RNA, 19 nt, Homo sapiens
  misc_RNA (1)...(19): siRNA sense strand
ggaaaccguugacaucuug

SEQ ID NO: 2214353 - RNA, 19 nt, Homo sapiens
  misc_RNA (1)...(19): siRNA sense strand
ggacuaugauucaaauuuc

SEQ ID NO: 2214354 - RNA, 19 nt, Homo sapiens
  misc_RNA (1)...(19): siRNA sense strand
guaaauuaguuccagagua

SEQ ID NO: 2214355 - RNA, 19 nt, Homo sapiens
  misc_RNA (1)...(19): siRNA sense strand
uaacauauuugguccagaa

SEQ ID NO: 2214356 - RNA, 19 nt, Homo sapiens
  misc_RNA (1)...(19): siRNA sense strand
gaagacaccucaggguaaa

SEQ ID NO: 2214357 - RNA, 19 nt, Homo sapiens
  misc_RNA (1)...(19): siRNA sense strand
gaagacaaauuccuuaggu

SEQ ID NO: 2214358 - RNA, 19 nt, Homo sapiens
  misc_RNA (1)...(19): siRNA sense strand
ggaaagcuauggugaucaa

SEQ ID NO: 2214359 - RNA, 19 nt, Homo sapiens
  misc_RNA (1)...(19): siRNA sense strand
ccaaagaaauuuagaagca

SEQ ID NO: 2214360 - RNA, 19 nt, Homo sapiens
  misc_RNA (1)...(19): siRNA sense strand
ucaaacaucuucagggaaa

SEQ ID NO: 2214361 - RNA, 19 nt, Homo sapiens
  misc_RNA (1)...(19): siRNA sense strand
gaacugcuccgaguguuua

SEQ ID NO: 2214362 - RNA, 19 nt, Homo sapiens
  misc_RNA (1)...(19): siRNA sense strand
ugaaagaucuggagaaguc

SEQ ID NO: 2214363 - RNA, 19 nt, Homo sapiens
  misc_RNA (1)...(19): siRNA sense strand
gagcagagcacuccacauu

SEQ ID NO: 2214364 - RNA, 19 nt, Homo sapiens
  misc_RNA (1)...(19): siRNA sense strand
ucaaacgccuugcuucuuu

SEQ ID NO: 2214365 - RNA, 19 nt, Homo sapiens
  misc_RNA (1)...(19): siRNA sense strand
ccaagguucuucuucauuu

SEQ ID NO: 2214366 - RNA, 19 nt, Homo sapiens
  misc_RNA (1)...(19): siRNA sense strand
ggaagaggaaguuguuaua

SEQ ID NO: 2214367 - RNA, 19 nt, Homo sapiens
  misc_RNA (1)...(19): siRNA sense strand
aaagagagcuggcaagaca

SEQ ID NO: 2214368 - RNA, 19 nt, Homo sapiens
  misc_RNA (1)...(19): siRNA sense strand
gaaagagucuauccugagu

SEQ ID NO: 2214369 - RNA, 19 nt, Homo sapiens
  misc_RNA (1)...(19): siRNA sense strand
gacaagaugugcuuccauu

SEQ ID NO: 2214370 - RNA, 19 nt, Homo sapiens
  misc_RNA (1)...(19): siRNA sense strand
gaagaucggugggaguuug

SEQ ID NO: 2214371 - RNA, 19 nt, Homo sapiens
  misc_RNA (1)...(19): siRNA sense strand
gaccaaggaugggaagaua

SEQ ID NO: 2214372 - RNA, 19 nt, Homo sapiens
  misc_RNA (1)...(19): siRNA sense strand
gacaugaacuugcccaaau

SEQ ID NO: 2214373 - RNA, 19 nt, Homo sapiens
  misc_RNA (1)...(19): siRNA sense strand
gcaguagaauaucacagua

SEQ ID NO: 2214374 - RNA, 19 nt, Homo sapiens
  misc_RNA (1)...(19): siRNA sense strand
ucaaggaccuggaagauuc

SEQ ID NO: 2214375 - RNA, 19 nt, Homo sapiens
  misc_RNA (1)...(19): siRNA sense strand
acaaggaaguggacuauga

SEQ ID NO: 2214376 - RNA, 19 nt, Homo sapiens
  misc_RNA (1)...(19): siRNA sense strand
guaaugggcuacugugaug

SEQ ID NO: 2214377 - RNA, 19 nt, Homo sapiens
  misc_RNA (1)...(19): siRNA sense strand
gcagaaauuugcaaguaau

SEQ ID NO: 2214378 - RNA, 19 nt, Homo sapiens
  misc_RNA (1)...(19): siRNA sense strand
uaaugaacgugcagaaauu

SEQ ID NO: 2214379 - RNA, 19 nt, Homo sapiens
  misc_RNA (1)...(19): siRNA sense strand
gaaagaaaugcaaccuuaa

SEQ ID NO: 2214380 - RNA, 19 nt, Homo sapiens
  misc_RNA (1)...(19): siRNA sense strand
gcuggaacguguacuauga

SEQ ID NO: 2214381 - RNA, 19 nt, Homo sapiens
  misc_RNA (1)...(19): siRNA sense strand
aagcuauggugaucaauua

SEQ ID NO: 2214382 - RNA, 19 nt, Homo sapiens
  misc_RNA (1)...(19): siRNA sense strand
caaggacggcaguuuauua

SEQ ID NO: 2214383 - RNA, 19 nt, Homo sapiens
  misc_RNA (1)...(19): siRNA sense strand
gcagaaacuucccagguau

SEQ ID NO: 2214384 - RNA, 19 nt, Homo sapiens
  misc_RNA (1)...(19): siRNA sense strand
gcgaugaucuuucuguuca

SEQ ID NO: 2214385 - RNA, 19 nt, Homo sapiens
  misc_RNA (1)...(19): siRNA sense strand
gagaggaaauucaucaaca

SEQ ID NO: 2214386 - RNA, 19 nt, Homo sapiens
  misc_RNA (1)...(19): siRNA sense strand
guaaaucucuagucaugga

SEQ ID NO: 2214387 - RNA, 19 nt, Homo sapiens
  misc_RNA (1)...(19): siRNA sense strand
aaacaugaauucugugaug

SEQ ID NO: 2214388 - RNA, 19 nt, Homo sapiens
  misc_RNA (1)...(19): siRNA sense strand
ggacaaagagauuucagaa

SEQ ID NO: 2214389 - RNA, 19 nt, Homo sapiens
  misc_RNA (1)...(19): siRNA sense strand
cagaggagccuucgacuuu

SEQ ID NO: 2214390 - RNA, 19 nt, Homo sapiens
  misc_RNA (1)...(19): siRNA sense strand
gaaauuauucagucucuug

SEQ ID NO: 2214391 - RNA, 19 nt, Homo sapiens
  misc_RNA (1)...(19): siRNA sense strand
gaaauuggacaaagcuauu

SEQ ID NO: 2214392 - RNA, 19 nt, Homo sapiens
  misc_RNA (1)...(19): siRNA sense strand
gaagaggaaguuguuauaa

SEQ ID NO: 2214393 - RNA, 19 nt, Homo sapiens
  misc_RNA (1)...(19): siRNA sense strand
cuauauaacugguugcaaa

SEQ ID NO: 2214394 - RNA, 19 nt, Homo sapiens
  misc_RNA (1)...(19): siRNA sense strand
gaaggaaguuugggaagau

SEQ ID NO: 2214395 - RNA, 19 nt, Homo sapiens
  misc_RNA (1)...(19): siRNA sense strand
cugaugauguugagaauaa

SEQ ID NO: 2214396 - RNA, 19 nt, Homo sapiens
  misc_RNA (1)...(19): siRNA sense strand
gcacauaggcagcuugguu

SEQ ID NO: 2214397 - RNA, 19 nt, Homo sapiens
  misc_RNA (1)...(19): siRNA sense strand
uaaagugguucaaauguuc

SEQ ID NO: 2214398 - RNA, 19 nt, Homo sapiens
  misc_RNA (1)...(19): siRNA sense strand
gaaggagaaccacgcauuu

SEQ ID NO: 2214399 - RNA, 19 nt, Homo sapiens
  misc_RNA (1)...(19): siRNA sense strand
gaacacguacuuaacgaaa

SEQ ID NO: 2214400 - RNA, 19 nt, Homo sapiens
  misc_RNA (1)...(19): siRNA sense strand
acaagaaccugcucaagga

SEQ ID NO: 2214401 - RNA, 19 nt, Homo sapiens
  misc_RNA (1)...(19): siRNA sense strand
ggaagaagccgagaucaug

SEQ ID NO: 2214402 - RNA, 19 nt, Homo sapiens
  misc_RNA (1)...(19): siRNA sense strand
aaacagagaggaugaagaa

SEQ ID NO: 2214403 - RNA, 19 nt, Homo sapiens
  misc_RNA (1)...(19): siRNA sense strand
gaaaggauccagaaugagu

SEQ ID NO: 2214404 - RNA, 19 nt, Homo sapiens
  misc_RNA (1)...(19): siRNA sense strand
gacaauaguuccucagaca

SEQ ID NO: 2214405 - RNA, 19 nt, Homo sapiens
  misc_RNA (1)...(19): siRNA sense strand
cagagaggaugaagaaaug

SEQ ID NO: 2214406 - RNA, 19 nt, Homo sapiens
  misc_RNA (1)...(19): siRNA sense strand
uagcaucacugagguuuaa

SEQ ID NO: 2214407 - RNA, 19 nt, Homo sapiens
  misc_RNA (1)...(19): siRNA sense strand
gaacguguacuaugacuuc

SEQ ID NO: 2214408 - RNA, 19 nt, Homo sapiens
  misc_RNA (1)...(19): siRNA sense strand
ccaaugggcugaaacucaa

SEQ ID NO: 2214409 - RNA, 19 nt, Homo sapiens
  misc_RNA (1)...(19): siRNA sense strand
gcagaagucccuaaagguu

SEQ ID NO: 2214410 - RNA, 19 nt, Homo sapiens
  misc_RNA (1)...(19): siRNA sense strand
ugaauucugugauggauga

SEQ ID NO: 2214411 - RNA, 19 nt, Homo sapiens
  misc_RNA (1)...(19): siRNA sense strand
agacauaguugauucuuuc

SEQ ID NO: 2214412 - RNA, 19 nt, Homo sapiens
  misc_RNA (1)...(19): siRNA sense strand
ucuauaaucuccaugaaga

SEQ ID NO: 2214413 - RNA, 19 nt, Homo sapiens
  misc_RNA (1)...(19): siRNA sense strand
gcaacuuccugaugauguu

SEQ ID NO: 2214414 - RNA, 19 nt, Homo sapiens
  misc_RNA (1)...(19): siRNA sense strand
caagauagaacaagcagaa

SEQ ID NO: 2214415 - RNA, 19 nt, Homo sapiens
  misc_RNA (1)...(19): siRNA sense strand
ggaaguggacuaugauuca

SEQ ID NO: 2214416 - RNA, 19 nt, Homo sapiens
  misc_RNA (1)...(19): siRNA sense strand
ugaagaaacuaacauugug

SEQ ID NO: 2214417 - RNA, 19 nt, Homo sapiens
  misc_RNA (1)...(19): siRNA sense strand
acacacagauguucucaau

SEQ ID NO: 2214418 - RNA, 19 nt, Homo sapiens
  misc_RNA (1)...(19): siRNA sense strand
gcaaagagaucaaaggaaa

SEQ ID NO: 2214419 - RNA, 19 nt, Homo sapiens
  misc_RNA (1)...(19): siRNA sense strand
ggaagaaggugaaauuuac

SEQ ID NO: 2214420 - RNA, 19 nt, Homo sapiens
  misc_RNA (1)...(19): siRNA sense strand
gcagaugaacuuugaaaua

SEQ ID NO: 2214421 - RNA, 19 nt, Homo sapiens
  misc_RNA (1)...(19): siRNA sense strand
gaaacuaucuggagaaacu

SEQ ID NO: 2214422 - RNA, 19 nt, Homo sapiens
  misc_RNA (1)...(19): siRNA sense strand
ccaaggaacuuagaaacua

SEQ ID NO: 2214423 - RNA, 19 nt, Homo sapiens
  misc_RNA (1)...(19): siRNA sense strand
uggagaaacucaaagauaa

SEQ ID NO: 2214424 - RNA, 19 nt, Homo sapiens
  misc_RNA (1)...(19): siRNA sense strand
gagcagcaguuuauucaau

SEQ ID NO: 2214425 - RNA, 19 nt, Homo sapiens
  misc_RNA (1)...(19): siRNA sense strand
cagaugaacuuugaaauag

SEQ ID NO: 2214426 - RNA, 19 nt, Homo sapiens
  misc_RNA (1)...(19): siRNA sense strand
caauaaccgugcuagauga

SEQ ID NO: 2214427 - RNA, 19 nt, Homo sapiens
  misc_RNA (1)...(19): siRNA sense strand
ggagaacagugccgugaug

SEQ ID NO: 2214428 - RNA, 19 nt, Homo sapiens
  misc_RNA (1)...(19): siRNA sense strand
gaacaccgccguacucaca

SEQ ID NO: 2214429 - RNA, 19 nt, Homo sapiens
  misc_RNA (1)...(19): siRNA sense strand
gaagacagagcccacacua

SEQ ID NO: 2214430 - RNA, 19 nt, Homo sapiens
  misc_RNA (1)...(19): siRNA sense strand
cagccgaacuaccugcuua

SEQ ID NO: 2214431 - RNA, 19 nt, Homo sapiens
  misc_RNA (1)...(19): siRNA sense strand
ucaaugagguugugcagau

SEQ ID NO: 2214432 - RNA, 19 nt, Homo sapiens
  misc_RNA (1)...(19): siRNA sense strand
cgugcuagaugacaaagua

SEQ ID NO: 2214433 - RNA, 19 nt, Homo sapiens
  misc_RNA (1)...(19): siRNA sense strand
caaggaacuuagaaacuau

SEQ ID NO: 2214434 - RNA, 19 nt, Homo sapiens
  misc_RNA (1)...(19): siRNA sense strand
gcacguggcugcaguucag

SEQ ID NO: 2214435 - RNA, 19 nt, Homo sapiens
  misc_RNA (1)...(19): siRNA sense strand
acaacaaaguggugaagaa

SEQ ID NO: 2214436 - RNA, 19 nt, Homo sapiens
  misc_RNA (1)...(19): siRNA sense strand
ucaaaugggugugucaaga

SEQ ID NO: 2214437 - RNA, 19 nt, Homo sapiens
  misc_RNA (1)...(19): siRNA sense strand
gcaaccaucuccugcucaa

SEQ ID NO: 2214438 - RNA, 19 nt, Homo sapiens
  misc_RNA (1)...(19): siRNA sense strand
gacaggagcagcaguuuau

SEQ ID NO: 2214439 - RNA, 19 nt, Homo sapiens
  misc_RNA (1)...(19): siRNA sense strand
gaacuucacauaccaguac

SEQ ID NO: 2214440 - RNA, 19 nt, Homo sapiens
  misc_RNA (1)...(19): siRNA sense strand
gcagcaguuuauucaauga

SEQ ID NO: 2214441 - RNA, 19 nt, Homo sapiens
  misc_RNA (1)...(19): siRNA sense strand
gaucaacugcgccaccuuu

SEQ ID NO: 2214442 - RNA, 19 nt, Homo sapiens
  misc_RNA (1)...(19): siRNA sense strand
ggagugggcuggaggaaaa

SEQ ID NO: 2214443 - RNA, 19 nt, Homo sapiens
  misc_RNA (1)...(19): siRNA sense strand
agacagagcccacacuaga

SEQ ID NO: 2214444 - RNA, 19 nt, Homo sapiens
  misc_RNA (1)...(19): siRNA sense strand
ggaaggggcucuccgaaga

SEQ ID NO: 2214445 - RNA, 19 nt, Homo sapiens
  misc_RNA (1)...(19): siRNA sense strand
uuacaucaacccugagaua

SEQ ID NO: 2214446 - RNA, 19 nt, Homo sapiens
  misc_RNA (1)...(19): siRNA sense strand
ggguguggcuuggcaauga

SEQ ID NO: 2214447 - RNA, 19 nt, Homo sapiens
  misc_RNA (1)...(19): siRNA sense strand
uagaaacuaucuggagaaa

SEQ ID NO: 2214448 - RNA, 19 nt, Homo sapiens
  misc_RNA (1)...(19): siRNA sense strand
caucaacccugagauaugg

SEQ ID NO: 2214449 - RNA, 19 nt, Homo sapiens
  misc_RNA (1)...(19): siRNA sense strand
aggaagaaggugaaauuua

SEQ ID NO: 2214450 - RNA, 19 nt, Homo sapiens
  misc_RNA (1)...(19): siRNA sense strand
ucacccaguuugugucuga

SEQ ID NO: 2214451 - RNA, 19 nt, Homo sapiens
  misc_RNA (1)...(19): siRNA sense strand
ucacguggcagguggagua

SEQ ID NO: 2214452 - RNA, 19 nt, Homo sapiens
  misc_RNA (1)...(19): siRNA sense strand
gagcacaccaccaucauag

SEQ ID NO: 2214453 - RNA, 19 nt, Homo sapiens
  misc_RNA (1)...(19): siRNA sense strand
gaaggucaggccuccauga

SEQ ID NO: 2214454 - RNA, 19 nt, Homo sapiens
  misc_RNA (1)...(19): siRNA sense strand
gacaauaaccgugcuagau

SEQ ID NO: 2214455 - RNA, 19 nt, Homo sapiens
  misc_RNA (1)...(19): siRNA sense strand
ugacaggagcagcaguuua

SEQ ID NO: 2214456 - RNA, 19 nt, Homo sapiens
  misc_RNA (1)...(19): siRNA sense strand
gaggaagaaggugaaauuu

SEQ ID NO: 2214457 - RNA, 19 nt, Homo sapiens
  misc_RNA (1)...(19): siRNA sense strand
gcgcugugacuacaucuuu

SEQ ID NO: 2214458 - RNA, 19 nt, Homo sapiens
  misc_RNA (1)...(19): siRNA sense strand
agaggaagaaggugaaauu

SEQ ID NO: 2214459 - RNA, 19 nt, Homo sapiens
  misc_RNA (1)...(19): siRNA sense strand
gacuacaucuuugucaaug

SEQ ID NO: 2214460 - RNA, 19 nt, Homo sapiens
  misc_RNA (1)...(19): siRNA sense strand
cagagucgguggagugcaa

SEQ ID NO: 2214461 - RNA, 19 nt, Homo sapiens
  misc_RNA (1)...(19): siRNA sense strand
aagaugagaucaagaacca

SEQ ID NO: 2214462 - RNA, 19 nt, Homo sapiens
  misc_RNA (1)...(19): siRNA sense strand
acacggagcucagccagau

SEQ ID NO: 2214463 - RNA, 19 nt, Homo sapiens
  misc_RNA (1)...(19): siRNA sense strand
agacgaggacguuaucaaa

SEQ ID NO: 2214464 - RNA, 19 nt, Homo sapiens
  misc_RNA (1)...(19): siRNA sense strand
uaaccgugcuagaugacaa

SEQ ID NO: 2214465 - RNA, 19 nt, Homo sapiens
  misc_RNA (1)...(19): siRNA sense strand
gguguugucuccacugucu

SEQ ID NO: 2214466 - RNA, 19 nt, Homo sapiens
  misc_RNA (1)...(19): siRNA sense strand
cuggagaaacucaaagaua

SEQ ID NO: 2214467 - RNA, 19 nt, Homo sapiens
  misc_RNA (1)...(19): siRNA sense strand
ccauugacuucaccaacuu

SEQ ID NO: 2214468 - RNA, 19 nt, Homo sapiens
  misc_RNA (1)...(19): siRNA sense strand
acaauaaccgugcuagaug

SEQ ID NO: 2214469 - RNA, 19 nt, Homo sapiens
  misc_RNA (1)...(19): siRNA sense strand
gugcagagccagauucaca

SEQ ID NO: 2214470 - RNA, 19 nt, Homo sapiens
  misc_RNA (1)...(19): siRNA sense strand
ccacagacgaggacguuau

SEQ ID NO: 2214471 - RNA, 19 nt, Homo sapiens
  misc_RNA (1)...(19): siRNA sense strand
gaacauccccauugacuuc

SEQ ID NO: 2214472 - RNA, 19 nt, Homo sapiens
  misc_RNA (1)...(19): siRNA sense strand
ugaggaagaugagaucaag

SEQ ID NO: 2214473 - RNA, 19 nt, Homo sapiens
  misc_RNA (1)...(19): siRNA sense strand
gaagacaauaaccgugcua

SEQ ID NO: 2214474 - RNA, 19 nt, Homo sapiens
  misc_RNA (1)...(19): siRNA sense strand
ugacgaccauccagguguu

SEQ ID NO: 2214475 - RNA, 19 nt, Homo sapiens
  misc_RNA (1)...(19): siRNA sense strand
gagcucagccagauaaagg

SEQ ID NO: 2214476 - RNA, 19 nt, Homo sapiens
  misc_RNA (1)...(19): siRNA sense strand
cgaggacguuaucaaagug

SEQ ID NO: 2214477 - RNA, 19 nt, Homo sapiens
  misc_RNA (1)...(19): siRNA sense strand
ggagaaacucaaagauaag

SEQ ID NO: 2214478 - RNA, 19 nt, Homo sapiens
  misc_RNA (1)...(19): siRNA sense strand
gaaguacaggcacaagcaa

SEQ ID NO: 2214479 - RNA, 19 nt, Homo sapiens
  misc_RNA (1)...(19): siRNA sense strand
ccaagcuccuuaauucaag

SEQ ID NO: 2214480 - RNA, 19 nt, Homo sapiens
  misc_RNA (1)...(19): siRNA sense strand
ggcaggaauuccaguucaa

SEQ ID NO: 2214481 - RNA, 19 nt, Homo sapiens
  misc_RNA (1)...(19): siRNA sense strand
aaagagaucaaaggaaaga

SEQ ID NO: 2214482 - RNA, 19 nt, Homo sapiens
  misc_RNA (1)...(19): siRNA sense strand
guaaaucaggcaggaauuc

SEQ ID NO: 2214483 - RNA, 19 nt, Homo sapiens
  misc_RNA (1)...(19): siRNA sense strand
ggcugucugucgcccuuua

SEQ ID NO: 2214484 - RNA, 19 nt, Homo sapiens
  misc_RNA (1)...(19): siRNA sense strand
uggaugcgguggugaacuu

SEQ ID NO: 2214485 - RNA, 19 nt, Homo sapiens
  misc_RNA (1)...(19): siRNA sense strand
caaccaugauguuuucuga

SEQ ID NO: 2214486 - RNA, 19 nt, Homo sapiens
  misc_RNA (1)...(19): siRNA sense strand
acacugaaauucugaacac

SEQ ID NO: 2214487 - RNA, 19 nt, Homo sapiens
  misc_RNA (1)...(19): siRNA sense strand
gugcagaugaacuuugaaa

SEQ ID NO: 2214488 - RNA, 19 nt, Homo sapiens
  misc_RNA (1)...(19): siRNA sense strand
uauggacacugaaauucug

SEQ ID NO: 2214489 - RNA, 19 nt, Homo sapiens
  misc_RNA (1)...(19): siRNA sense strand
ggacaucaaaugggugugu

SEQ ID NO: 2214490 - RNA, 19 nt, Homo sapiens
  misc_RNA (1)...(19): siRNA sense strand
gcacgugcagagccagauu

SEQ ID NO: 2214491 - RNA, 19 nt, Homo sapiens
  misc_RNA (1)...(19): siRNA sense strand
caagcuccuuaauucaaga

SEQ ID NO: 2214492 - RNA, 19 nt, Homo sapiens
  misc_RNA (1)...(19): siRNA sense strand
cgagcacaccaccaucaua

SEQ ID NO: 2214493 - RNA, 19 nt, Homo sapiens
  misc_RNA (1)...(19): siRNA sense strand
acaaaguggugaagaacag

SEQ ID NO: 2214494 - RNA, 19 nt, Homo sapiens
  misc_RNA (1)...(19): siRNA sense strand
caagaugggcaccucuaug

SEQ ID NO: 2214495 - RNA, 19 nt, Homo sapiens
  misc_RNA (1)...(19): siRNA sense strand
caacgucagggucaaguuc

SEQ ID NO: 2214496 - RNA, 19 nt, Homo sapiens
  misc_RNA (1)...(19): siRNA sense strand
acgaggacguuaucaaagu

SEQ ID NO: 2214497 - RNA, 19 nt, Homo sapiens
  misc_RNA (1)...(19): siRNA sense strand
cuaucaagguggucucugu

SEQ ID NO: 2214498 - RNA, 19 nt, Homo sapiens
  misc_RNA (1)...(19): siRNA sense strand
gggacuaugaggaagauga

SEQ ID NO: 2214499 - RNA, 19 nt, Homo sapiens
  misc_RNA (1)...(19): siRNA sense strand
gaaaacagcaaggccguaa

SEQ ID NO: 2214500 - RNA, 19 nt, Homo sapiens
  misc_RNA (1)...(19): siRNA sense strand
ugacagacuuggccaucca

SEQ ID NO: 2214501 - RNA, 19 nt, Homo sapiens
  misc_RNA (1)...(19): siRNA sense strand
caaugagguugugcagaug

SEQ ID NO: 2214502 - RNA, 19 nt, Homo sapiens
  misc_RNA (1)...(19): siRNA sense strand
gaucaaaggaaagauggau

SEQ ID NO: 2214503 - RNA, 19 nt, Homo sapiens
  misc_RNA (1)...(19): siRNA sense strand
gcuauggacacugaaauuc

SEQ ID NO: 2214504 - RNA, 19 nt, Homo sapiens
  misc_RNA (1)...(19): siRNA sense strand
ccaagaggaagaaggugaa

SEQ ID NO: 2214505 - RNA, 19 nt, Homo sapiens
  misc_RNA (1)...(19): siRNA sense strand
gcacaccaccaucauagac

SEQ ID NO: 2214506 - RNA, 19 nt, Homo sapiens
  misc_RNA (1)...(19): siRNA sense strand
ccaguucaaccaugauguu

SEQ ID NO: 2214507 - RNA, 19 nt, Homo sapiens
  misc_RNA (1)...(19): siRNA sense strand
aaacagcaaggccguaaca

SEQ ID NO: 2214508 - RNA, 19 nt, Homo sapiens
  misc_RNA (1)...(19): siRNA sense strand
ggaauuccaguucaaccau

SEQ ID NO: 2214509 - RNA, 19 nt, Homo sapiens
  misc_RNA (1)...(19): siRNA sense strand
acuuugaaauagccaguuu

SEQ ID NO: 2214510 - RNA, 19 nt, Homo sapiens
  misc_RNA (1)...(19): siRNA sense strand
ccaccuuugcccugaagua

SEQ ID NO: 2214511 - RNA, 19 nt, Homo sapiens
  misc_RNA (1)...(19): siRNA sense strand
ggcuauggacacugaaauu

SEQ ID NO: 2214512 - RNA, 19 nt, Homo sapiens
  misc_RNA (1)...(19): siRNA sense strand
agaagggccagcaccauga

SEQ ID NO: 2214513 - RNA, 19 nt, Homo sapiens
  misc_RNA (1)...(19): siRNA sense strand
aggaagaugagaucaagaa

SEQ ID NO: 2214514 - RNA, 19 nt, Homo sapiens
  misc_RNA (1)...(19): siRNA sense strand
uggcugcaguucagugaug

SEQ ID NO: 2214515 - RNA, 19 nt, Homo sapiens
  misc_RNA (1)...(19): siRNA sense strand
gacgagcacaccaccauca

SEQ ID NO: 2214516 - RNA, 19 nt, Homo sapiens
  misc_RNA (1)...(19): siRNA sense strand
gugaaauuuaccaccuuua

SEQ ID NO: 2214517 - RNA, 19 nt, Homo sapiens
  misc_RNA (1)...(19): siRNA sense strand
gcgaggagagcaaccaucu

SEQ ID NO: 2214518 - RNA, 19 nt, Homo sapiens
  misc_RNA (1)...(19): siRNA sense strand
gcaaagagcugcacaacua

SEQ ID NO: 2214519 - RNA, 19 nt, Homo sapiens
  misc_RNA (1)...(19): siRNA sense strand
ucacggagcugauaaauga

SEQ ID NO: 2214520 - RNA, 19 nt, Homo sapiens
  misc_RNA (1)...(19): siRNA sense strand
gggaaagacuucuccuuga

SEQ ID NO: 2214521 - RNA, 19 nt, Homo sapiens
  misc_RNA (1)...(19): siRNA sense strand
ggaaagacuucuccuugau

SEQ ID NO: 2214522 - RNA, 19 nt, Homo sapiens
  misc_RNA (1)...(19): siRNA sense strand
ggaaaugguuauuagugaa

SEQ ID NO: 2214523 - RNA, 19 nt, Homo sapiens
  misc_RNA (1)...(19): siRNA sense strand
cggcaaacaucaaaguuaa

SEQ ID NO: 2214524 - RNA, 19 nt, Homo sapiens
  misc_RNA (1)...(19): siRNA sense strand
gauaaacugugugaccuuu

SEQ ID NO: 2214525 - RNA, 19 nt, Homo sapiens
  misc_RNA (1)...(19): siRNA sense strand
gggcauggauuucgaggaa

SEQ ID NO: 2214526 - RNA, 19 nt, Homo sapiens
  misc_RNA (1)...(19): siRNA sense strand
gcaaaucacugccauugac

SEQ ID NO: 2214527 - RNA, 19 nt, Homo sapiens
  misc_RNA (1)...(19): siRNA sense strand
gaaauugggauguaugcuu

SEQ ID NO: 2214528 - RNA, 19 nt, Homo sapiens
  misc_RNA (1)...(19): siRNA sense strand
gauccugucuccucuguca

SEQ ID NO: 2214529 - RNA, 19 nt, Homo sapiens
  misc_RNA (1)...(19): siRNA sense strand
gagaaucacaucaacuuug

SEQ ID NO: 2214530 - RNA, 19 nt, Homo sapiens
  misc_RNA (1)...(19): siRNA sense strand
aaauugggauguaugcuuu

SEQ ID NO: 2214531 - RNA, 19 nt, Homo sapiens
  misc_RNA (1)...(19): siRNA sense strand
gcugagcgacuuagaaauu

SEQ ID NO: 2214532 - RNA, 19 nt, Homo sapiens
  misc_RNA (1)...(19): siRNA sense strand
ccaaagggcugagcgacuu

SEQ ID NO: 2214533 - RNA, 19 nt, Homo sapiens
  misc_RNA (1)...(19): siRNA sense strand
ucacgcccuuggauauuua

SEQ ID NO: 2214534 - RNA, 19 nt, Homo sapiens
  misc_RNA (1)...(19): siRNA sense strand
ggaaagaucagaaaaguga

SEQ ID NO: 2214535 - RNA, 19 nt, Homo sapiens
  misc_RNA (1)...(19): siRNA sense strand
ucacugugcuggacgagaa

SEQ ID NO: 2214536 - RNA, 19 nt, Homo sapiens
  misc_RNA (1)...(19): siRNA sense strand
gagcaaaucacugccauug

SEQ ID NO: 2214537 - RNA, 19 nt, Homo sapiens
  misc_RNA (1)...(19): siRNA sense strand
gaaagacuucuccuugaug

SEQ ID NO: 2214538 - RNA, 19 nt, Homo sapiens
  misc_RNA (1)...(19): siRNA sense strand
ggacaguacuauggcaguu

SEQ ID NO: 2214539 - RNA, 19 nt, Homo sapiens
  misc_RNA (1)...(19): siRNA sense strand
acaccgagcucaaucagau

SEQ ID NO: 2214540 - RNA, 19 nt, Homo sapiens
  misc_RNA (1)...(19): siRNA sense strand
uggaaaugguuauuaguga

SEQ ID NO: 2214541 - RNA, 19 nt, Homo sapiens
  misc_RNA (1)...(19): siRNA sense strand
gaagaagaaaggccaggaa

SEQ ID NO: 2214542 - RNA, 19 nt, Homo sapiens
  misc_RNA (1)...(19): siRNA sense strand
ggaugggaaugaccuuaug

SEQ ID NO: 2214543 - RNA, 19 nt, Homo sapiens
  misc_RNA (1)...(19): siRNA sense strand
gggcagcuguucaaaccuu

SEQ ID NO: 2214544 - RNA, 19 nt, Homo sapiens
  misc_RNA (1)...(19): siRNA sense strand
gaacggcaaacaucaaagu

SEQ ID NO: 2214545 - RNA, 19 nt, Homo sapiens
  misc_RNA (1)...(19): siRNA sense strand
gggcugagcgacuuagaaa

SEQ ID NO: 2214546 - RNA, 19 nt, Homo sapiens
  misc_RNA (1)...(19): siRNA sense strand
ggaaauggaugggaaugac

SEQ ID NO: 2214547 - RNA, 19 nt, Homo sapiens
  misc_RNA (1)...(19): siRNA sense strand
ugugugaccuuugcauuaa

SEQ ID NO: 2214548 - RNA, 19 nt, Homo sapiens
  misc_RNA (1)...(19): siRNA sense strand
guagcgaggaugacauuaa

SEQ ID NO: 2214549 - RNA, 19 nt, Homo sapiens
  misc_RNA (1)...(19): siRNA sense strand
ggagaaucacaucaacuuu

SEQ ID NO: 2214550 - RNA, 19 nt, Homo sapiens
  misc_RNA (1)...(19): siRNA sense strand
acaaacagguucccuucga

SEQ ID NO: 2214551 - RNA, 19 nt, Homo sapiens
  misc_RNA (1)...(19): siRNA sense strand
gugaagaggaggaggauga

SEQ ID NO: 2214552 - RNA, 19 nt, Homo sapiens
  misc_RNA (1)...(19): siRNA sense strand
auggagagguuacaugaaa

SEQ ID NO: 2214553 - RNA, 19 nt, Homo sapiens
  misc_RNA (1)...(19): siRNA sense strand
acaacuacauggagagguu

SEQ ID NO: 2214554 - RNA, 19 nt, Homo sapiens
  misc_RNA (1)...(19): siRNA sense strand
gguccauccugcagaagaa

SEQ ID NO: 2214555 - RNA, 19 nt, Homo sapiens
  misc_RNA (1)...(19): siRNA sense strand
gaagaaaggccaggaaagc

SEQ ID NO: 2214556 - RNA, 19 nt, Homo sapiens
  misc_RNA (1)...(19): siRNA sense strand
gggaugaccaccauucaga

SEQ ID NO: 2214557 - RNA, 19 nt, Homo sapiens
  misc_RNA (1)...(19): siRNA sense strand
aaauucaaguggccuauca

SEQ ID NO: 2214558 - RNA, 19 nt, Homo sapiens
  misc_RNA (1)...(19): siRNA sense strand
ccagcgaccucaccagcuu

SEQ ID NO: 2214559 - RNA, 19 nt, Homo sapiens
  misc_RNA (1)...(19): siRNA sense strand
uaucauugcugcggaaaca

SEQ ID NO: 2214560 - RNA, 19 nt, Homo sapiens
  misc_RNA (1)...(19): siRNA sense strand
ugggauguaugcuuuguug

SEQ ID NO: 2214561 - RNA, 19 nt, Homo sapiens
  misc_RNA (1)...(19): siRNA sense strand
caacauccccuaccucaaa

SEQ ID NO: 2214562 - RNA, 19 nt, Homo sapiens
  misc_RNA (1)...(19): siRNA sense strand
cagaugugacuacgucuuu

SEQ ID NO: 2214563 - RNA, 19 nt, Homo sapiens
  misc_RNA (1)...(19): siRNA sense strand
uagcgaggaugacauuaag

SEQ ID NO: 2214564 - RNA, 19 nt, Homo sapiens
  misc_RNA (1)...(19): siRNA sense strand
caaagggcugagcgacuua

SEQ ID NO: 2214565 - RNA, 19 nt, Homo sapiens
  misc_RNA (1)...(19): siRNA sense strand
gaguagcgaggaugacauu

SEQ ID NO: 2214566 - RNA, 19 nt, Homo sapiens
  misc_RNA (1)...(19): siRNA sense strand
gucacgcccuuggauauuu

SEQ ID NO: 2214567 - RNA, 19 nt, Homo sapiens
  misc_RNA (1)...(19): siRNA sense strand
ggauauuuacgaugggaaa

SEQ ID NO: 2214568 - RNA, 19 nt, Homo sapiens
  misc_RNA (1)...(19): siRNA sense strand
gaagaguguguuagcuguu

SEQ ID NO: 2214569 - RNA, 19 nt, Homo sapiens
  misc_RNA (1)...(19): siRNA sense strand
gcccuuggauauuuacgau

SEQ ID NO: 2214570 - RNA, 19 nt, Homo sapiens
  misc_RNA (1)...(19): siRNA sense strand
caacuacauggagagguua

SEQ ID NO: 2214571 - RNA, 19 nt, Homo sapiens
  misc_RNA (1)...(19): siRNA sense strand
gcgaggaugacauuaagug

SEQ ID NO: 2214572 - RNA, 19 nt, Homo sapiens
  misc_RNA (1)...(19): siRNA sense strand
ucaacgugguggugaacuu

SEQ ID NO: 2214573 - RNA, 19 nt, Homo sapiens
  misc_RNA (1)...(19): siRNA sense strand
ggucaagguggaaaugguu

SEQ ID NO: 2214574 - RNA, 19 nt, Homo sapiens
  misc_RNA (1)...(19): siRNA sense strand
ucaaugggcagcuguucaa

SEQ ID NO: 2214575 - RNA, 19 nt, Homo sapiens
  misc_RNA (1)...(19): siRNA sense strand
caaugggaaagaaaugaaa

SEQ ID NO: 2214576 - RNA, 19 nt, Homo sapiens
  misc_RNA (1)...(19): siRNA sense strand
gaagcaacagggccaucuu

SEQ ID NO: 2214577 - RNA, 19 nt, Homo sapiens
  misc_RNA (1)...(19): siRNA sense strand
aaauaucuccucagcacaa

SEQ ID NO: 2214578 - RNA, 19 nt, Homo sapiens
  misc_RNA (1)...(19): siRNA sense strand
cgaggaaaguaaauaucuc

SEQ ID NO: 2214579 - RNA, 19 nt, Homo sapiens
  misc_RNA (1)...(19): siRNA sense strand
uaaacugugugaccuuugc

SEQ ID NO: 2214580 - RNA, 19 nt, Homo sapiens
  misc_RNA (1)...(19): siRNA sense strand
caagcggaagaguguguua

SEQ ID NO: 2214581 - RNA, 19 nt, Homo sapiens
  misc_RNA (1)...(19): siRNA sense strand
uagugaauccugccagaaa

SEQ ID NO: 2214582 - RNA, 19 nt, Homo sapiens
  misc_RNA (1)...(19): siRNA sense strand
ucaaguggccuaucauugc

SEQ ID NO: 2214583 - RNA, 19 nt, Homo sapiens
  misc_RNA (1)...(19): siRNA sense strand
aagaggaggaggaugauga

SEQ ID NO: 2214584 - RNA, 19 nt, Homo sapiens
  misc_RNA (1)...(19): siRNA sense strand
agaaucacaucaacuuugc

SEQ ID NO: 2214585 - RNA, 19 nt, Homo sapiens
  misc_RNA (1)...(19): siRNA sense strand
gacuacgucuuugucaaug

SEQ ID NO: 2214586 - RNA, 19 nt, Homo sapiens
  misc_RNA (1)...(19): siRNA sense strand
ucaccgccgucuccucaga

SEQ ID NO: 2214587 - RNA, 19 nt, Homo sapiens
  misc_RNA (1)...(19): siRNA sense strand
uauggcaguucuucuaugg

SEQ ID NO: 2214588 - RNA, 19 nt, Homo sapiens
  misc_RNA (1)...(19): siRNA sense strand
guggaaaugguuauuagug

SEQ ID NO: 2214589 - RNA, 19 nt, Homo sapiens
  misc_RNA (1)...(19): siRNA sense strand
caaguggccuaucauugcu

SEQ ID NO: 2214590 - RNA, 19 nt, Homo sapiens
  misc_RNA (1)...(19): siRNA sense strand
gacgagaaggugaccauca

SEQ ID NO: 2214591 - RNA, 19 nt, Homo sapiens
  misc_RNA (1)...(19): siRNA sense strand
acuuagaaauugggaugua

SEQ ID NO: 2214592 - RNA, 19 nt, Homo sapiens
  misc_RNA (1)...(19): siRNA sense strand
cugagcgacuuagaaauug

SEQ ID NO: 2214593 - RNA, 19 nt, Homo sapiens
  misc_RNA (1)...(19): siRNA sense strand
gggaaauggaugggaauga

SEQ ID NO: 2214594 - RNA, 19 nt, Homo sapiens
  misc_RNA (1)...(19): siRNA sense strand
acggcaaacaucaaaguua

SEQ ID NO: 2214595 - RNA, 19 nt, Homo sapiens
  misc_RNA (1)...(19): siRNA sense strand
ucagucacgcccuuggaua

SEQ ID NO: 2214596 - RNA, 19 nt, Homo sapiens
  misc_RNA (1)...(19): siRNA sense strand
aagaguguguuagcuguug

SEQ ID NO: 2214597 - RNA, 19 nt, Homo sapiens
  misc_RNA (1)...(19): siRNA sense strand
ucaaugggaaagaaaugaa

SEQ ID NO: 2214598 - RNA, 19 nt, Homo sapiens
  misc_RNA (1)...(19): siRNA sense strand
uggagaaucacaucaacuu

SEQ ID NO: 2214599 - RNA, 19 nt, Homo sapiens
  misc_RNA (1)...(19): siRNA sense strand
cagagcuguuggagaauca

SEQ ID NO: 2214600 - RNA, 19 nt, Homo sapiens
  misc_RNA (1)...(19): siRNA sense strand
uguugggagucuucuguuu

SEQ ID NO: 2214601 - RNA, 19 nt, Homo sapiens
  misc_RNA (1)...(19): siRNA sense strand
ccucuucacagguuucuga

SEQ ID NO: 2214602 - RNA, 19 nt, Homo sapiens
  misc_RNA (1)...(19): siRNA sense strand
ggcaaacaucaaaguuaaa

SEQ ID NO: 2214603 - RNA, 19 nt, Homo sapiens
  misc_RNA (1)...(19): siRNA sense strand
ggcagcuguucaaaccuuu

SEQ ID NO: 2214604 - RNA, 19 nt, Homo sapiens
  misc_RNA (1)...(19): siRNA sense strand
cugugugaccuuugcauua

SEQ ID NO: 2214605 - RNA, 19 nt, Homo sapiens
  misc_RNA (1)...(19): siRNA sense strand
aagaagaaaggccaggaaa

SEQ ID NO: 2214606 - RNA, 19 nt, Homo sapiens
  misc_RNA (1)...(19): siRNA sense strand
ggagucaggaaggacagua

SEQ ID NO: 2214607 - RNA, 19 nt, Homo sapiens
  misc_RNA (1)...(19): siRNA sense strand
aagcaacagggccaucuuu

SEQ ID NO: 2214608 - RNA, 19 nt, Homo sapiens
  misc_RNA (1)...(19): siRNA sense strand
auacagacacaaacagguu

SEQ ID NO: 2214609 - RNA, 19 nt, Homo sapiens
  misc_RNA (1)...(19): siRNA sense strand
gggcaggagcuugggauga

SEQ ID NO: 2214610 - RNA, 19 nt, Homo sapiens
  misc_RNA (1)...(19): siRNA sense strand
gugugaccuuugcauuaaa

SEQ ID NO: 2214611 - RNA, 19 nt, Homo sapiens
  misc_RNA (1)...(19): siRNA sense strand
gaugaccaccauucagauc

SEQ ID NO: 2214612 - RNA, 19 nt, Homo sapiens
  misc_RNA (1)...(19): siRNA sense strand
ggcaggagcuugggaugac

SEQ ID NO: 2214613 - RNA, 19 nt, Homo sapiens
  misc_RNA (1)...(19): siRNA sense strand
cuuagaaauugggauguau

SEQ ID NO: 2214614 - RNA, 19 nt, Homo sapiens
  misc_RNA (1)...(19): siRNA sense strand
gguagucuccauccaccaa

SEQ ID NO: 2214615 - RNA, 19 nt, Homo sapiens
  misc_RNA (1)...(19): siRNA sense strand
guugggagucuucuguuug

SEQ ID NO: 2214616 - RNA, 19 nt, Homo sapiens
  misc_RNA (1)...(19): siRNA sense strand
gcaagaugagcaaaucacu

SEQ ID NO: 2214617 - RNA, 19 nt, Homo sapiens
  misc_RNA (1)...(19): siRNA sense strand
gaagaggaggaggaugaug

SEQ ID NO: 2214618 - RNA, 19 nt, Homo sapiens
  misc_RNA (1)...(19): siRNA sense strand
gagaagacaucgugccuua

SEQ ID NO: 2214619 - RNA, 19 nt, Homo sapiens
  misc_RNA (1)...(19): siRNA sense strand
gaagaagaguguucauuuc

SEQ ID NO: 2214620 - RNA, 19 nt, Homo sapiens
  misc_RNA (1)...(19): siRNA sense strand
ggaagaagaguguucauuu

SEQ ID NO: 2214621 - RNA, 19 nt, Homo sapiens
  misc_RNA (1)...(19): siRNA sense strand
gaaaauaccucuacgucua

SEQ ID NO: 2214622 - RNA, 19 nt, Homo sapiens
  misc_RNA (1)...(19): siRNA sense strand
uaaagacgcugauggauuc

SEQ ID NO: 2214623 - RNA, 19 nt, Homo sapiens
  misc_RNA (1)...(19): siRNA sense strand
gaauacaccuguggagaaa

SEQ ID NO: 2214624 - RNA, 19 nt, Homo sapiens
  misc_RNA (1)...(19): siRNA sense strand
gcaagcagccgcacuguug

SEQ ID NO: 2214625 - RNA, 19 nt, Homo sapiens
  misc_RNA (1)...(19): siRNA sense strand
aggaggagcuucccuuuaa

SEQ ID NO: 2214626 - RNA, 19 nt, Homo sapiens
  misc_RNA (1)...(19): siRNA sense strand
ggagaaugguggcccugua

SEQ ID NO: 2214627 - RNA, 19 nt, Homo sapiens
  misc_RNA (1)...(19): siRNA sense strand
gagaaaugccggacucaaa

SEQ ID NO: 2214628 - RNA, 19 nt, Homo sapiens
  misc_RNA (1)...(19): siRNA sense strand
gaagaguguucauuucaca

SEQ ID NO: 2214629 - RNA, 19 nt, Homo sapiens
  misc_RNA (1)...(19): siRNA sense strand
agaagugccugaugacgua

SEQ ID NO: 2214630 - RNA, 19 nt, Homo sapiens
  misc_RNA (1)...(19): siRNA sense strand
cuaaagcccucaucgagaa

SEQ ID NO: 2214631 - RNA, 19 nt, Homo sapiens
  misc_RNA (1)...(19): siRNA sense strand
aggaggagcuguauucuga

SEQ ID NO: 2214632 - RNA, 19 nt, Homo sapiens
  misc_RNA (1)...(19): siRNA sense strand
gcucugcgaucggugaaua

SEQ ID NO: 2214633 - RNA, 19 nt, Homo sapiens
  misc_RNA (1)...(19): siRNA sense strand
ggagcuguauucugaaaug

SEQ ID NO: 2214634 - RNA, 19 nt, Homo sapiens
  misc_RNA (1)...(19): siRNA sense strand
ggaacgagcaggaucagaa

SEQ ID NO: 2214635 - RNA, 19 nt, Homo sapiens
  misc_RNA (1)...(19): siRNA sense strand
gaggagcuguauucugaaa

SEQ ID NO: 2214636 - RNA, 19 nt, Homo sapiens
  misc_RNA (1)...(19): siRNA sense strand
agucagacauggagaauga

SEQ ID NO: 2214637 - RNA, 19 nt, Homo sapiens
  misc_RNA (1)...(19): siRNA sense strand
gagagaagcaggagaagug

SEQ ID NO: 2214638 - RNA, 19 nt, Homo sapiens
  misc_RNA (1)...(19): siRNA sense strand
ggaggagcuucccuuuaaa

SEQ ID NO: 2214639 - RNA, 19 nt, Homo sapiens
  misc_RNA (1)...(19): siRNA sense strand
gaggguggcugaagucauc

SEQ ID NO: 2214640 - RNA, 19 nt, Homo sapiens
  misc_RNA (1)...(19): siRNA sense strand
gaggauggguucuaugaag

SEQ ID NO: 2214641 - RNA, 19 nt, Homo sapiens
  misc_RNA (1)...(19): siRNA sense strand
ccacaaugcccucaagauu

SEQ ID NO: 2214642 - RNA, 19 nt, Homo sapiens
  misc_RNA (1)...(19): siRNA sense strand
gaacggaauuccaauaccu

SEQ ID NO: 2214643 - RNA, 19 nt, Homo sapiens
  misc_RNA (1)...(19): siRNA sense strand
uggaagaagugccugauga

SEQ ID NO: 2214644 - RNA, 19 nt, Homo sapiens
  misc_RNA (1)...(19): siRNA sense strand
ugaaauugaugaagaugga

SEQ ID NO: 2214645 - RNA, 19 nt, Homo sapiens
  misc_RNA (1)...(19): siRNA sense strand
gaacuaaagcccucaucga

SEQ ID NO: 2214646 - RNA, 19 nt, Homo sapiens
  misc_RNA (1)...(19): siRNA sense strand
gaggaggagcuucccuuua

SEQ ID NO: 2214647 - RNA, 19 nt, Homo sapiens
  misc_RNA (1)...(19): siRNA sense strand
ccaagcagcaggaaauuga

SEQ ID NO: 2214648 - RNA, 19 nt, Homo sapiens
  misc_RNA (1)...(19): siRNA sense strand
caggagauauuauuacagu

SEQ ID NO: 2214649 - RNA, 19 nt, Homo sapiens
  misc_RNA (1)...(19): siRNA sense strand
ucaaagccauuagcaaguu

SEQ ID NO: 2214650 - RNA, 19 nt, Homo sapiens
  misc_RNA (1)...(19): siRNA sense strand
cacaaugcccucaagauuu

SEQ ID NO: 2214651 - RNA, 19 nt, Homo sapiens
  misc_RNA (1)...(19): siRNA sense strand
gaccagagagcgcgauuug

SEQ ID NO: 2214652 - RNA, 19 nt, Homo sapiens
  misc_RNA (1)...(19): siRNA sense strand
gccagaucaucaagguuua

SEQ ID NO: 2214653 - RNA, 19 nt, Homo sapiens
  misc_RNA (1)...(19): siRNA sense strand
ggccagaucaucaagguuu

SEQ ID NO: 2214654 - RNA, 19 nt, Homo sapiens
  misc_RNA (1)...(19): siRNA sense strand
gagagcagcagguuagaga

SEQ ID NO: 2214655 - RNA, 19 nt, Homo sapiens
  misc_RNA (1)...(19): siRNA sense strand
ggaugaggauggguucuau

SEQ ID NO: 2214656 - RNA, 19 nt, Homo sapiens
  misc_RNA (1)...(19): siRNA sense strand
gcaggaaauugaccuucug

SEQ ID NO: 2214657 - RNA, 19 nt, Homo sapiens
  misc_RNA (1)...(19): siRNA sense strand
gaaugguggcccuguauga

SEQ ID NO: 2214658 - RNA, 19 nt, Homo sapiens
  misc_RNA (1)...(19): siRNA sense strand
gcaagccuuucccacaguu

SEQ ID NO: 2214659 - RNA, 19 nt, Homo sapiens
  misc_RNA (1)...(19): siRNA sense strand
gagcagcagguuagagaaa

SEQ ID NO: 2214660 - RNA, 19 nt, Homo sapiens
  misc_RNA (1)...(19): siRNA sense strand
caucgugccuuacccuaga

SEQ ID NO: 2214661 - RNA, 19 nt, Homo sapiens
  misc_RNA (1)...(19): siRNA sense strand
cugaaaggcucugaacuug

SEQ ID NO: 2214662 - RNA, 19 nt, Homo sapiens
  misc_RNA (1)...(19): siRNA sense strand
cagaguaugugcaucucaa

SEQ ID NO: 2214663 - RNA, 19 nt, Homo sapiens
  misc_RNA (1)...(19): siRNA sense strand
gcacaggagauauuauuac

SEQ ID NO: 2214664 - RNA, 19 nt, Homo sapiens
  misc_RNA (1)...(19): siRNA sense strand
uggaucagcuucuuagaca

SEQ ID NO: 2214665 - RNA, 19 nt, Homo sapiens
  misc_RNA (1)...(19): siRNA sense strand
gaaaugcagcuggaagaug

SEQ ID NO: 2214666 - RNA, 19 nt, Homo sapiens
  misc_RNA (1)...(19): siRNA sense strand
ggaggacgccuaugacucu

SEQ ID NO: 2214667 - RNA, 19 nt, Homo sapiens
  misc_RNA (1)...(19): siRNA sense strand
gagauccgguagcgcaaga

SEQ ID NO: 2214668 - RNA, 19 nt, Homo sapiens
  misc_RNA (1)...(19): siRNA sense strand
cacaggagauauuauuaca

SEQ ID NO: 2214669 - RNA, 19 nt, Homo sapiens
  misc_RNA (1)...(19): siRNA sense strand
ugaauacaccuguggagaa

SEQ ID NO: 2214670 - RNA, 19 nt, Homo sapiens
  misc_RNA (1)...(19): siRNA sense strand
aaagaaggccagaucauca

SEQ ID NO: 2214671 - RNA, 19 nt, Homo sapiens
  misc_RNA (1)...(19): siRNA sense strand
ggagcuucccuuuaaagaa

SEQ ID NO: 2214672 - RNA, 19 nt, Homo sapiens
  misc_RNA (1)...(19): siRNA sense strand
ggagcugaaugggcagaaa

SEQ ID NO: 2214673 - RNA, 19 nt, Homo sapiens
  misc_RNA (1)...(19): siRNA sense strand
acaaugcccucaagauuuu

SEQ ID NO: 2214674 - RNA, 19 nt, Homo sapiens
  misc_RNA (1)...(19): siRNA sense strand
gagaaugguggcccuguau

SEQ ID NO: 2214675 - RNA, 19 nt, Homo sapiens
  misc_RNA (1)...(19): siRNA sense strand
uucgagagcuggaagagaa

SEQ ID NO: 2214676 - RNA, 19 nt, Homo sapiens
  misc_RNA (1)...(19): siRNA sense strand
ccacuacucucaagauacg

SEQ ID NO: 2214677 - RNA, 19 nt, Homo sapiens
  misc_RNA (1)...(19): siRNA sense strand
ccuauaaggugaagguucu

SEQ ID NO: 2214678 - RNA, 19 nt, Homo sapiens
  misc_RNA (1)...(19): siRNA sense strand
uaccaguucuucaaucuca

SEQ ID NO: 2214679 - RNA, 19 nt, Homo sapiens
  misc_RNA (1)...(19): siRNA sense strand
ggaauuccaauaccuccaa

SEQ ID NO: 2214680 - RNA, 19 nt, Homo sapiens
  misc_RNA (1)...(19): siRNA sense strand
cuuguaacauggucucuga

SEQ ID NO: 2214681 - RNA, 19 nt, Homo sapiens
  misc_RNA (1)...(19): siRNA sense strand
uccaauggcgcaaacguua

SEQ ID NO: 2214682 - RNA, 19 nt, Homo sapiens
  misc_RNA (1)...(19): siRNA sense strand
caucaaacaacucgccaaa

SEQ ID NO: 2214683 - RNA, 19 nt, Homo sapiens
  misc_RNA (1)...(19): siRNA sense strand
gguggacgacuuccugaaa

SEQ ID NO: 2214684 - RNA, 19 nt, Homo sapiens
  misc_RNA (1)...(19): siRNA sense strand
gauacaagcagaugaugag

SEQ ID NO: 2214685 - RNA, 19 nt, Homo sapiens
  misc_RNA (1)...(19): siRNA sense strand
uaaagaaggccagaucauc

SEQ ID NO: 2214686 - RNA, 19 nt, Homo sapiens
  misc_RNA (1)...(19): siRNA sense strand
gaaaugccggacucaaagu

SEQ ID NO: 2214687 - RNA, 19 nt, Homo sapiens
  misc_RNA (1)...(19): siRNA sense strand
ucccacuacucucaagaua

SEQ ID NO: 2214688 - RNA, 19 nt, Homo sapiens
  misc_RNA (1)...(19): siRNA sense strand
agaaguggcaggcgucauu

SEQ ID NO: 2214689 - RNA, 19 nt, Homo sapiens
  misc_RNA (1)...(19): siRNA sense strand
gaucuuuguggcucucuuu

SEQ ID NO: 2214690 - RNA, 19 nt, Homo sapiens
  misc_RNA (1)...(19): siRNA sense strand
cuaugacucuccagacuuc

SEQ ID NO: 2214691 - RNA, 19 nt, Homo sapiens
  misc_RNA (1)...(19): siRNA sense strand
caaagccauuagcaaguuc

SEQ ID NO: 2214692 - RNA, 19 nt, Homo sapiens
  misc_RNA (1)...(19): siRNA sense strand
aaaucacccucaucaaaca

SEQ ID NO: 2214693 - RNA, 19 nt, Homo sapiens
  misc_RNA (1)...(19): siRNA sense strand
cccgggaccuggagaaguu

SEQ ID NO: 2214694 - RNA, 19 nt, Homo sapiens
  misc_RNA (1)...(19): siRNA sense strand
gggcaucaccgacaacagu

SEQ ID NO: 2214695 - RNA, 19 nt, Homo sapiens
  misc_RNA (1)...(19): siRNA sense strand
auaaagacgcugauggauu

SEQ ID NO: 2214696 - RNA, 19 nt, Homo sapiens
  misc_RNA (1)...(19): siRNA sense strand
ccugaaaggcucugaacuu

SEQ ID NO: 2214697 - RNA, 19 nt, Homo sapiens
  misc_RNA (1)...(19): siRNA sense strand
ggugaagguucuggccaaa

SEQ ID NO: 2214698 - RNA, 19 nt, Homo sapiens
  misc_RNA (1)...(19): siRNA sense strand
ucaaacaacucgccaaaag

SEQ ID NO: 2214699 - RNA, 19 nt, Homo sapiens
  misc_RNA (1)...(19): siRNA sense strand
gacaaggagacacgcauga

SEQ ID NO: 2214700 - RNA, 19 nt, Homo sapiens
  misc_RNA (1)...(19): siRNA sense strand
ugauaaagacgcugaugga

SEQ ID NO: 2214701 - RNA, 19 nt, Homo sapiens
  misc_RNA (1)...(19): siRNA sense strand
gaaggcagaguaugugcau

SEQ ID NO: 2214702 - RNA, 19 nt, Homo sapiens
  misc_RNA (1)...(19): siRNA sense strand
ggacgaggaggagcuguau

SEQ ID NO: 2214703 - RNA, 19 nt, Homo sapiens
  misc_RNA (1)...(19): siRNA sense strand
cgacaucggagaagacauc

SEQ ID NO: 2214704 - RNA, 19 nt, Homo sapiens
  misc_RNA (1)...(19): siRNA sense strand
acaaguaccaguucuucaa

SEQ ID NO: 2214705 - RNA, 19 nt, Homo sapiens
  misc_RNA (1)...(19): siRNA sense strand
caacuacagccacgucauc

SEQ ID NO: 2214706 - RNA, 19 nt, Homo sapiens
  misc_RNA (1)...(19): siRNA sense strand
ggcccuggcuguucucagu

SEQ ID NO: 2214707 - RNA, 19 nt, Homo sapiens
  misc_RNA (1)...(19): siRNA sense strand
ggcuuucucccucugaaua

SEQ ID NO: 2214708 - RNA, 19 nt, Homo sapiens
  misc_RNA (1)...(19): siRNA sense strand
ggcagaggguggcugaagu

SEQ ID NO: 2214709 - RNA, 19 nt, Homo sapiens
  misc_RNA (1)...(19): siRNA sense strand
ccuuauuccuuguaacaug

SEQ ID NO: 2214710 - RNA, 19 nt, Homo sapiens
  misc_RNA (1)...(19): siRNA sense strand
cuccugagaucccaucaug

SEQ ID NO: 2214711 - RNA, 19 nt, Homo sapiens
  misc_RNA (1)...(19): siRNA sense strand
guguugcccgcuauaguua

SEQ ID NO: 2214712 - RNA, 19 nt, Homo sapiens
  misc_RNA (1)...(19): siRNA sense strand
uuggugaaauugaugaaga

SEQ ID NO: 2214713 - RNA, 19 nt, Homo sapiens
  misc_RNA (1)...(19): siRNA sense strand
caaggugaaggcagaguau

SEQ ID NO: 2214714 - RNA, 19 nt, Homo sapiens
  misc_RNA (1)...(19): siRNA sense strand
cgaggccgaacuuacauuu

SEQ ID NO: 2214715 - RNA, 19 nt, Homo sapiens
  misc_RNA (1)...(19): siRNA sense strand
gauaaagacgcugauggau

SEQ ID NO: 2214716 - RNA, 19 nt, Homo sapiens
  misc_RNA (1)...(19): siRNA sense strand
gaacggugagcagcuacaa

SEQ ID NO: 2214717 - RNA, 19 nt, Homo sapiens
  misc_RNA (1)...(19): siRNA sense strand
gaacgagcaggaucagaac

SEQ ID NO: 2214718 - RNA, 19 nt, Homo sapiens
  misc_RNA (1)...(19): siRNA sense strand
gcacucaccucaccaacuu

SEQ ID NO: 2214719 - RNA, 19 nt, Homo sapiens
  misc_RNA (1)...(19): siRNA sense strand
gcaagcaccguuacuacua

SEQ ID NO: 2214720 - RNA, 19 nt, Homo sapiens
  misc_RNA (1)...(19): siRNA sense strand
cauuugccauggacaguua

SEQ ID NO: 2214721 - RNA, 19 nt, Homo sapiens
  misc_RNA (1)...(19): siRNA sense strand
gaucagcgccgacaacuac

SEQ ID NO: 2214722 - RNA, 19 nt, Homo sapiens
  misc_RNA (1)...(19): siRNA sense strand
ucauauuccucuuucauug

SEQ ID NO: 2214723 - RNA, 19 nt, Homo sapiens
  misc_RNA (1)...(19): siRNA sense strand
gcaaccgagucuucgugua

SEQ ID NO: 2214724 - RNA, 19 nt, Homo sapiens
  misc_RNA (1)...(19): siRNA sense strand
caagcaccguuacuacuau

SEQ ID NO: 2214725 - RNA, 19 nt, Homo sapiens
  misc_RNA (1)...(19): siRNA sense strand
ggacuucagcuccggagaa

SEQ ID NO: 2214726 - RNA, 19 nt, Homo sapiens
  misc_RNA (1)...(19): siRNA sense strand
ggugagagccgccuucaag

SEQ ID NO: 2214727 - RNA, 19 nt, Homo sapiens
  misc_RNA (1)...(19): siRNA sense strand
caacuuugccauccucaug

SEQ ID NO: 2214728 - RNA, 19 nt, Homo sapiens
  misc_RNA (1)...(19): siRNA sense strand
gcagggacuguucauauuc

SEQ ID NO: 2214729 - RNA, 19 nt, Homo sapiens
  misc_RNA (1)...(19): siRNA sense strand
ugcagggacuguucauauu

SEQ ID NO: 2214730 - RNA, 19 nt, Homo sapiens
  misc_RNA (1)...(19): siRNA sense strand
acucggaccucaugaaugg

SEQ ID NO: 2214731 - RNA, 19 nt, Homo sapiens
  misc_RNA (1)...(19): siRNA sense strand
gaaccagcgcuaccacauc

SEQ ID NO: 2214732 - RNA, 19 nt, Homo sapiens
  misc_RNA (1)...(19): siRNA sense strand
gcauggugaucaaggucuu

SEQ ID NO: 2214733 - RNA, 19 nt, Homo sapiens
  misc_RNA (1)...(19): siRNA sense strand
cacguaagcagcacaguga

SEQ ID NO: 2214734 - RNA, 19 nt, Homo sapiens
  misc_RNA (1)...(19): siRNA sense strand
gcuccuacacuacuucuuc

SEQ ID NO: 2214735 - RNA, 19 nt, Homo sapiens
  misc_RNA (1)...(19): siRNA sense strand
caucauuucacugucauuu

SEQ ID NO: 2214736 - RNA, 19 nt, Homo sapiens
  misc_RNA (1)...(19): siRNA sense strand
caaccgagucuucguguac

SEQ ID NO: 2214737 - RNA, 19 nt, Homo sapiens
  misc_RNA (1)...(19): siRNA sense strand
ggaaccagcgcuaccacau

SEQ ID NO: 2214738 - RNA, 19 nt, Homo sapiens
  misc_RNA (1)...(19): siRNA sense strand
ucauuucacugucauuugc

SEQ ID NO: 2214739 - RNA, 19 nt, Homo sapiens
  misc_RNA (1)...(19): siRNA sense strand
cauggacaguuacggaaca

SEQ ID NO: 2214740 - RNA, 19 nt, Homo sapiens
  misc_RNA (1)...(19): siRNA sense strand
gagccgccuucaagcacaa

SEQ ID NO: 2214741 - RNA, 19 nt, Homo sapiens
  misc_RNA (1)...(19): siRNA sense strand
gagaaggggucuggucgaa

SEQ ID NO: 2214742 - RNA, 19 nt, Homo sapiens
  misc_RNA (1)...(19): siRNA sense strand
ccacucggaccucaugaau

SEQ ID NO: 2214743 - RNA, 19 nt, Homo sapiens
  misc_RNA (1)...(19): siRNA sense strand
cagcagcaaccgagucuuc

SEQ ID NO: 2214744 - RNA, 19 nt, Homo sapiens
  misc_RNA (1)...(19): siRNA sense strand
ggacagcaagcaccguuac

SEQ ID NO: 2214745 - RNA, 19 nt, Homo sapiens
  misc_RNA (1)...(19): siRNA sense strand
cugcaucauuucacuguca

SEQ ID NO: 2214746 - RNA, 19 nt, Homo sapiens
  misc_RNA (1)...(19): siRNA sense strand
cgaccugucagccguguga

SEQ ID NO: 2214747 - RNA, 19 nt, Homo sapiens
  misc_RNA (1)...(19): siRNA sense strand
cugcagggacuguucauau

SEQ ID NO: 2214748 - RNA, 19 nt, Homo sapiens
  misc_RNA (1)...(19): siRNA sense strand
uggccgugcuccuacacua

SEQ ID NO: 2214749 - RNA, 19 nt, Homo sapiens
  misc_RNA (1)...(19): siRNA sense strand
uggccacgcuggucaccuu

SEQ ID NO: 2214750 - RNA, 19 nt, Homo sapiens
  misc_RNA (1)...(19): siRNA sense strand
agguggcgcugucgucuau

SEQ ID NO: 2214751 - RNA, 19 nt, Homo sapiens
  misc_RNA (1)...(19): siRNA sense strand
caacuacaagauccaugga

SEQ ID NO: 2214752 - RNA, 19 nt, Homo sapiens
  misc_RNA (1)...(19): siRNA sense strand
guggcgcugucgucuauca

SEQ ID NO: 2214753 - RNA, 19 nt, Homo sapiens
  misc_RNA (1)...(19): siRNA sense strand
cauauuccucuuucauugu

SEQ ID NO: 2214754 - RNA, 19 nt, Homo sapiens
  misc_RNA (1)...(19): siRNA sense strand
guucauauuccucuuucau

SEQ ID NO: 2214755 - RNA, 19 nt, Homo sapiens
  misc_RNA (1)...(19): siRNA sense strand
acagcaagcaccguuacua

SEQ ID NO: 2214756 - RNA, 19 nt, Homo sapiens
  misc_RNA (1)...(19): siRNA sense strand
ugucgucuaucagcuaugu

SEQ ID NO: 2214757 - RNA, 19 nt, Homo sapiens
  misc_RNA (1)...(19): siRNA sense strand
cagcaagcaccguuacuac

SEQ ID NO: 2214758 - RNA, 19 nt, Homo sapiens
  misc_RNA (1)...(19): siRNA sense strand
ggaugggguuuuccucuuc

SEQ ID NO: 2214759 - RNA, 19 nt, Homo sapiens
  misc_RNA (1)...(19): siRNA sense strand
gugcugugguuuuccagua

SEQ ID NO: 2214760 - RNA, 19 nt, Homo sapiens
  misc_RNA (1)...(19): siRNA sense strand
gcacucaccucaccaacuu

SEQ ID NO: 2214761 - RNA, 19 nt, Homo sapiens
  misc_RNA (1)...(19): siRNA sense strand
gcaagcaccguuacuacua

SEQ ID NO: 2214762 - RNA, 19 nt, Homo sapiens
  misc_RNA (1)...(19): siRNA sense strand
cauuugccauggacaguua

SEQ ID NO: 2214763 - RNA, 19 nt, Homo sapiens
  misc_RNA (1)...(19): siRNA sense strand
gaucagcgccgacaacuac

SEQ ID NO: 2214764 - RNA, 19 nt, Homo sapiens
  misc_RNA (1)...(19): siRNA sense strand
ucauauuccucuuucauug

SEQ ID NO: 2214765 - RNA, 19 nt, Homo sapiens
  misc_RNA (1)...(19): siRNA sense strand
gcaaccgagucuucgugua

SEQ ID NO: 2214766 - RNA, 19 nt, Homo sapiens
  misc_RNA (1)...(19): siRNA sense strand
caagcaccguuacuacuau

SEQ ID NO: 2214767 - RNA, 19 nt, Homo sapiens
  misc_RNA (1)...(19): siRNA sense strand
ggacuucagcuccggagaa

SEQ ID NO: 2214768 - RNA, 19 nt, Homo sapiens
  misc_RNA (1)...(19): siRNA sense strand
ggugagagccgccuucaag

SEQ ID NO: 2214769 - RNA, 19 nt, Homo sapiens
  misc_RNA (1)...(19): siRNA sense strand
caacuuugccauccucaug

SEQ ID NO: 2214770 - RNA, 19 nt, Homo sapiens
  misc_RNA (1)...(19): siRNA sense strand
gcagggacuguucauauuc

SEQ ID NO: 2214771 - RNA, 19 nt, Homo sapiens
  misc_RNA (1)...(19): siRNA sense strand
ugcagggacuguucauauu

SEQ ID NO: 2214772 - RNA, 19 nt, Homo sapiens
  misc_RNA (1)...(19): siRNA sense strand
acucggaccucaugaaugg

SEQ ID NO: 2214773 - RNA, 19 nt, Homo sapiens
  misc_RNA (1)...(19): siRNA sense strand
gaaccagcgcuaccacauc

SEQ ID NO: 2214774 - RNA, 19 nt, Homo sapiens
  misc_RNA (1)...(19): siRNA sense strand
gcauggugaucaaggucuu

SEQ ID NO: 2214775 - RNA, 19 nt, Homo sapiens
  misc_RNA (1)...(19): siRNA sense strand
cacguaagcagcacaguga

SEQ ID NO: 2214776 - RNA, 19 nt, Homo sapiens
  misc_RNA (1)...(19): siRNA sense strand
gcuccuacacuacuucuuc

SEQ ID NO: 2214777 - RNA, 19 nt, Homo sapiens
  misc_RNA (1)...(19): siRNA sense strand
caucauuucacugucauuu

SEQ ID NO: 2214778 - RNA, 19 nt, Homo sapiens
  misc_RNA (1)...(19): siRNA sense strand
caaccgagucuucguguac

SEQ ID NO: 2214779 - RNA, 19 nt, Homo sapiens
  misc_RNA (1)...(19): siRNA sense strand
ggaaccagcgcuaccacau

SEQ ID NO: 2214780 - RNA, 19 nt, Homo sapiens
  misc_RNA (1)...(19): siRNA sense strand
ucauuucacugucauuugc

SEQ ID NO: 2214781 - RNA, 19 nt, Homo sapiens
  misc_RNA (1)...(19): siRNA sense strand
cauggacaguuacggaaca

SEQ ID NO: 2214782 - RNA, 19 nt, Homo sapiens
  misc_RNA (1)...(19): siRNA sense strand
gagccgccuucaagcacaa

SEQ ID NO: 2214783 - RNA, 19 nt, Homo sapiens
  misc_RNA (1)...(19): siRNA sense strand
gagaaggggucuggucgaa

SEQ ID NO: 2214784 - RNA, 19 nt, Homo sapiens
  misc_RNA (1)...(19): siRNA sense strand
ccacucggaccucaugaau

SEQ ID NO: 2214785 - RNA, 19 nt, Homo sapiens
  misc_RNA (1)...(19): siRNA sense strand
cagcagcaaccgagucuuc

SEQ ID NO: 2214786 - RNA, 19 nt, Homo sapiens
  misc_RNA (1)...(19): siRNA sense strand
ggacagcaagcaccguuac

SEQ ID NO: 2214787 - RNA, 19 nt, Homo sapiens
  misc_RNA (1)...(19): siRNA sense strand
cugcaucauuucacuguca

SEQ ID NO: 2214788 - RNA, 19 nt, Homo sapiens
  misc_RNA (1)...(19): siRNA sense strand
cgaccugucagccguguga

SEQ ID NO: 2214789 - RNA, 19 nt, Homo sapiens
  misc_RNA (1)...(19): siRNA sense strand
cugcagggacuguucauau

SEQ ID NO: 2214790 - RNA, 19 nt, Homo sapiens
  misc_RNA (1)...(19): siRNA sense strand
uggccgugcuccuacacua

SEQ ID NO: 2214791 - RNA, 19 nt, Homo sapiens
  misc_RNA (1)...(19): siRNA sense strand
uggccacgcuggucaccuu

SEQ ID NO: 2214792 - RNA, 19 nt, Homo sapiens
  misc_RNA (1)...(19): siRNA sense strand
agguggcgcugucgucuau

SEQ ID NO: 2214793 - RNA, 19 nt, Homo sapiens
  misc_RNA (1)...(19): siRNA sense strand
caacuacaagauccaugga

SEQ ID NO: 2214794 - RNA, 19 nt, Homo sapiens
  misc_RNA (1)...(19): siRNA sense strand
guggcgcugucgucuauca

SEQ ID NO: 2214795 - RNA, 19 nt, Homo sapiens
  misc_RNA (1)...(19): siRNA sense strand
cauauuccucuuucauugu

SEQ ID NO: 2214796 - RNA, 19 nt, Homo sapiens
  misc_RNA (1)...(19): siRNA sense strand
guucauauuccucuuucau

SEQ ID NO: 2214797 - RNA, 19 nt, Homo sapiens
  misc_RNA (1)...(19): siRNA sense strand
acagcaagcaccguuacua

SEQ ID NO: 2214798 - RNA, 19 nt, Homo sapiens
  misc_RNA (1)...(19): siRNA sense strand
ugucgucuaucagcuaugu

SEQ ID NO: 2214799 - RNA, 19 nt, Homo sapiens
  misc_RNA (1)...(19): siRNA sense strand
cagcaagcaccguuacuac

SEQ ID NO: 2214800 - RNA, 19 nt, Homo sapiens
  misc_RNA (1)...(19): siRNA sense strand
ggaugggguuuuccucuuc

SEQ ID NO: 2214801 - RNA, 19 nt, Homo sapiens
  misc_RNA (1)...(19): siRNA sense strand
gugcugugguuuuccagua

SEQ ID NO: 2214802 - RNA, 19 nt, Homo sapiens
  misc_RNA (1)...(19): siRNA sense strand
gggagggcacgaggaauaa

SEQ ID NO: 2214803 - RNA, 19 nt, Homo sapiens
  misc_RNA (1)...(19): siRNA sense strand
agggagggcacgaggaaua

SEQ ID NO: 2214804 - RNA, 19 nt, Homo sapiens
  misc_RNA (1)...(19): siRNA sense strand
ggcaguggcugacuuucua

SEQ ID NO: 2214805 - RNA, 19 nt, Homo sapiens
  misc_RNA (1)...(19): siRNA sense strand
aagaagaacugcugugugu

SEQ ID NO: 2214806 - RNA, 19 nt, Homo sapiens
  misc_RNA (1)...(19): siRNA sense strand
caggugagccagauaauaa

SEQ ID NO: 2214807 - RNA, 19 nt, Homo sapiens
  misc_RNA (1)...(19): siRNA sense strand
cagcagccaucaucucuug

SEQ ID NO: 2214808 - RNA, 19 nt, Homo sapiens
  misc_RNA (1)...(19): siRNA sense strand
gaccuggcguucuuuauca

SEQ ID NO: 2214809 - RNA, 19 nt, Homo sapiens
  misc_RNA (1)...(19): siRNA sense strand
gcagaauugugaaguguac

SEQ ID NO: 2214810 - RNA, 19 nt, Homo sapiens
  misc_RNA (1)...(19): siRNA sense strand
caucaucucuugccuucug

SEQ ID NO: 2214811 - RNA, 19 nt, Homo sapiens
  misc_RNA (1)...(19): siRNA sense strand
ugaacaagaucuccaaucg

SEQ ID NO: 2214812 - RNA, 19 nt, Homo sapiens
  misc_RNA (1)...(19): siRNA sense strand
gaagaugccgauccagaau

SEQ ID NO: 2214813 - RNA, 19 nt, Homo sapiens
  misc_RNA (1)...(19): siRNA sense strand
ggaccggcaugccaagauc

SEQ ID NO: 2214814 - RNA, 19 nt, Homo sapiens
  misc_RNA (1)...(19): siRNA sense strand
ggaaauagacaagaagaac

SEQ ID NO: 2214815 - RNA, 19 nt, Homo sapiens
  misc_RNA (1)...(19): siRNA sense strand
guggcugacuuucuacuga

SEQ ID NO: 2214816 - RNA, 19 nt, Homo sapiens
  misc_RNA (1)...(19): siRNA sense strand
ggaccuggcguucuuuauc

SEQ ID NO: 2214817 - RNA, 19 nt, Homo sapiens
  misc_RNA (1)...(19): siRNA sense strand
ggugguggccaucgucuuu

SEQ ID NO: 2214818 - RNA, 19 nt, Homo sapiens
  misc_RNA (1)...(19): siRNA sense strand
gaaauagacaagaagaacu

SEQ ID NO: 2214819 - RNA, 19 nt, Homo sapiens
  misc_RNA (1)...(19): siRNA sense strand
ggccuugcccuguggauuu

SEQ ID NO: 2214820 - RNA, 19 nt, Homo sapiens
  misc_RNA (1)...(19): siRNA sense strand
ccaacuucuucuccacuuu

SEQ ID NO: 2214821 - RNA, 19 nt, Homo sapiens
  misc_RNA (1)...(19): siRNA sense strand
agaagaagaugccgaucca

SEQ ID NO: 2214822 - RNA, 19 nt, Homo sapiens
  misc_RNA (1)...(19): siRNA sense strand
caacuucuucuccacuuug

SEQ ID NO: 2214823 - RNA, 19 nt, Homo sapiens
  misc_RNA (1)...(19): siRNA sense strand
gcccauccuuucccaacuu

SEQ ID NO: 2214824 - RNA, 19 nt, Homo sapiens
  misc_RNA (1)...(19): siRNA sense strand
ggcaccaucugcaggauca

SEQ ID NO: 2214825 - RNA, 19 nt, Homo sapiens
  misc_RNA (1)...(19): siRNA sense strand
gggcccaaccucuccuuaa

SEQ ID NO: 2214826 - RNA, 19 nt, Homo sapiens
  misc_RNA (1)...(19): siRNA sense strand
ucaccuacaugaacagcau

SEQ ID NO: 2214827 - RNA, 19 nt, Homo sapiens
  misc_RNA (1)...(19): siRNA sense strand
ggacagcagccaucaucuc

SEQ ID NO: 2214828 - RNA, 19 nt, Homo sapiens
  misc_RNA (1)...(19): siRNA sense strand
gcaggaucacuuucuggaa

SEQ ID NO: 2214829 - RNA, 19 nt, Homo sapiens
  misc_RNA (1)...(19): siRNA sense strand
agaagaugccgauccagaa

SEQ ID NO: 2214830 - RNA, 19 nt, Homo sapiens
  misc_RNA (1)...(19): siRNA sense strand
caguccaccuccugaagaa

SEQ ID NO: 2214831 - RNA, 19 nt, Homo sapiens
  misc_RNA (1)...(19): siRNA sense strand
caccucaaguccuggaaau

SEQ ID NO: 2214832 - RNA, 19 nt, Homo sapiens
  misc_RNA (1)...(19): siRNA sense strand
gcugaugcucuucauguug

SEQ ID NO: 2214833 - RNA, 19 nt, Homo sapiens
  misc_RNA (1)...(19): siRNA sense strand
ggcugaugcucuucauguu

SEQ ID NO: 2214834 - RNA, 19 nt, Homo sapiens
  misc_RNA (1)...(19): siRNA sense strand
ucacggugguggcgguaga

SEQ ID NO: 2214835 - RNA, 19 nt, Homo sapiens
  misc_RNA (1)...(19): siRNA sense strand
acucucagcuucaccuaca

SEQ ID NO: 2214836 - RNA, 19 nt, Homo sapiens
  misc_RNA (1)...(19): siRNA sense strand
cguugggacuggaaguuug

SEQ ID NO: 2214837 - RNA, 19 nt, Homo sapiens
  misc_RNA (1)...(19): siRNA sense strand
acaggugagccagauaaua

SEQ ID NO: 2214838 - RNA, 19 nt, Homo sapiens
  misc_RNA (1)...(19): siRNA sense strand
gcacgcagaauugugaagu

SEQ ID NO: 2214839 - RNA, 19 nt, Homo sapiens
  misc_RNA (1)...(19): siRNA sense strand
gacagcagccaucaucucu

SEQ ID NO: 2214840 - RNA, 19 nt, Homo sapiens
  misc_RNA (1)...(19): siRNA sense strand
ccagaauggcggugcaaau

SEQ ID NO: 2214841 - RNA, 19 nt, Homo sapiens
  misc_RNA (1)...(19): siRNA sense strand
ugcagcagcuucagcaucu

SEQ ID NO: 2214842 - RNA, 19 nt, Homo sapiens
  misc_RNA (1)...(19): siRNA sense strand
aaauagacaagaagaacug

SEQ ID NO: 2214843 - RNA, 19 nt, Homo sapiens
  misc_RNA (1)...(19): siRNA sense strand
agagagccaucaccuucau

SEQ ID NO: 2214844 - RNA, 19 nt, Homo sapiens
  misc_RNA (1)...(19): siRNA sense strand
cgguggaccuggcguucuu

SEQ ID NO: 2214845 - RNA, 19 nt, Homo sapiens
  misc_RNA (1)...(19): siRNA sense strand
gcuguguguuccgagauga

SEQ ID NO: 2214846 - RNA, 19 nt, Homo sapiens
  misc_RNA (1)...(19): siRNA sense strand
cggcugaugcucuucaugu

SEQ ID NO: 2214847 - RNA, 19 nt, Homo sapiens
  misc_RNA (1)...(19): siRNA sense strand
ucaagagagccaucaccuu

SEQ ID NO: 2214848 - RNA, 19 nt, Homo sapiens
  misc_RNA (1)...(19): siRNA sense strand
ggccaucgucuuugucauc

SEQ ID NO: 2214849 - RNA, 19 nt, Homo sapiens
  misc_RNA (1)...(19): siRNA sense strand
gcguugggacuggaaguuu

SEQ ID NO: 2214850 - RNA, 19 nt, Homo sapiens
  misc_RNA (1)...(19): siRNA sense strand
caccacgcccugaacaaga

SEQ ID NO: 2214851 - RNA, 19 nt, Homo sapiens
  misc_RNA (1)...(19): siRNA sense strand
guccaccuccugaagaaga

SEQ ID NO: 2214852 - RNA, 19 nt, Homo sapiens
  misc_RNA (1)...(19): siRNA sense strand
acaagaagaacugcugugu

SEQ ID NO: 2214853 - RNA, 19 nt, Homo sapiens
  misc_RNA (1)...(19): siRNA sense strand
acgcagaauugugaagugu

SEQ ID NO: 2214854 - RNA, 19 nt, Homo sapiens
  misc_RNA (1)...(19): siRNA sense strand
acacuucgggcacgcagaa

SEQ ID NO: 2214855 - RNA, 19 nt, Homo sapiens
  misc_RNA (1)...(19): siRNA sense strand
ggcaguggcugacuuucua

SEQ ID NO: 2214856 - RNA, 19 nt, Homo sapiens
  misc_RNA (1)...(19): siRNA sense strand
aagaagaacugcugugugu

SEQ ID NO: 2214857 - RNA, 19 nt, Homo sapiens
  misc_RNA (1)...(19): siRNA sense strand
caggugagccagauaauaa

SEQ ID NO: 2214858 - RNA, 19 nt, Homo sapiens
  misc_RNA (1)...(19): siRNA sense strand
cagcagccaucaucucuug

SEQ ID NO: 2214859 - RNA, 19 nt, Homo sapiens
  misc_RNA (1)...(19): siRNA sense strand
gaccuggcguucuuuauca

SEQ ID NO: 2214860 - RNA, 19 nt, Homo sapiens
  misc_RNA (1)...(19): siRNA sense strand
gcagaauugugaaguguac

SEQ ID NO: 2214861 - RNA, 19 nt, Homo sapiens
  misc_RNA (1)...(19): siRNA sense strand
caucaucucuugccuucug

SEQ ID NO: 2214862 - RNA, 19 nt, Homo sapiens
  misc_RNA (1)...(19): siRNA sense strand
ugaacaagaucuccaaucg

SEQ ID NO: 2214863 - RNA, 19 nt, Homo sapiens
  misc_RNA (1)...(19): siRNA sense strand
gaagaugccgauccagaau

SEQ ID NO: 2214864 - RNA, 19 nt, Homo sapiens
  misc_RNA (1)...(19): siRNA sense strand
ggaccggcaugccaagauc

SEQ ID NO: 2214865 - RNA, 19 nt, Homo sapiens
  misc_RNA (1)...(19): siRNA sense strand
ggaaauagacaagaagaac

SEQ ID NO: 2214866 - RNA, 19 nt, Homo sapiens
  misc_RNA (1)...(19): siRNA sense strand
guggcugacuuucuacuga

SEQ ID NO: 2214867 - RNA, 19 nt, Homo sapiens
  misc_RNA (1)...(19): siRNA sense strand
ggaccuggcguucuuuauc

SEQ ID NO: 2214868 - RNA, 19 nt, Homo sapiens
  misc_RNA (1)...(19): siRNA sense strand
ggugguggccaucgucuuu

SEQ ID NO: 2214869 - RNA, 19 nt, Homo sapiens
  misc_RNA (1)...(19): siRNA sense strand
gaaauagacaagaagaacu

SEQ ID NO: 2214870 - RNA, 19 nt, Homo sapiens
  misc_RNA (1)...(19): siRNA sense strand
ggccuugcccuguggauuu

SEQ ID NO: 2214871 - RNA, 19 nt, Homo sapiens
  misc_RNA (1)...(19): siRNA sense strand
ccaacuucuucuccacuuu

SEQ ID NO: 2214872 - RNA, 19 nt, Homo sapiens
  misc_RNA (1)...(19): siRNA sense strand
agaagaagaugccgaucca

SEQ ID NO: 2214873 - RNA, 19 nt, Homo sapiens
  misc_RNA (1)...(19): siRNA sense strand
caacuucuucuccacuuug

SEQ ID NO: 2214874 - RNA, 19 nt, Homo sapiens
  misc_RNA (1)...(19): siRNA sense strand
gcccauccuuucccaacuu

SEQ ID NO: 2214875 - RNA, 19 nt, Homo sapiens
  misc_RNA (1)...(19): siRNA sense strand
ggcaccaucugcaggauca

SEQ ID NO: 2214876 - RNA, 19 nt, Homo sapiens
  misc_RNA (1)...(19): siRNA sense strand
gggcccaaccucuccuuaa

SEQ ID NO: 2214877 - RNA, 19 nt, Homo sapiens
  misc_RNA (1)...(19): siRNA sense strand
ucaccuacaugaacagcau

SEQ ID NO: 2214878 - RNA, 19 nt, Homo sapiens
  misc_RNA (1)...(19): siRNA sense strand
ggacagcagccaucaucuc

SEQ ID NO: 2214879 - RNA, 19 nt, Homo sapiens
  misc_RNA (1)...(19): siRNA sense strand
gcaggaucacuuucuggaa

SEQ ID NO: 2214880 - RNA, 19 nt, Homo sapiens
  misc_RNA (1)...(19): siRNA sense strand
agaagaugccgauccagaa

SEQ ID NO: 2214881 - RNA, 19 nt, Homo sapiens
  misc_RNA (1)...(19): siRNA sense strand
caguccaccuccugaagaa

SEQ ID NO: 2214882 - RNA, 19 nt, Homo sapiens
  misc_RNA (1)...(19): siRNA sense strand
caccucaaguccuggaaau

SEQ ID NO: 2214883 - RNA, 19 nt, Homo sapiens
  misc_RNA (1)...(19): siRNA sense strand
gcugaugcucuucauguug

SEQ ID NO: 2214884 - RNA, 19 nt, Homo sapiens
  misc_RNA (1)...(19): siRNA sense strand
ggcugaugcucuucauguu

SEQ ID NO: 2214885 - RNA, 19 nt, Homo sapiens
  misc_RNA (1)...(19): siRNA sense strand
ucacggugguggcgguaga

SEQ ID NO: 2214886 - RNA, 19 nt, Homo sapiens
  misc_RNA (1)...(19): siRNA sense strand
acucucagcuucaccuaca

SEQ ID NO: 2214887 - RNA, 19 nt, Homo sapiens
  misc_RNA (1)...(19): siRNA sense strand
cguugggacuggaaguuug

SEQ ID NO: 2214888 - RNA, 19 nt, Homo sapiens
  misc_RNA (1)...(19): siRNA sense strand
acaggugagccagauaaua

SEQ ID NO: 2214889 - RNA, 19 nt, Homo sapiens
  misc_RNA (1)...(19): siRNA sense strand
gcacgcagaauugugaagu

SEQ ID NO: 2214890 - RNA, 19 nt, Homo sapiens
  misc_RNA (1)...(19): siRNA sense strand
gacagcagccaucaucucu

SEQ ID NO: 2214891 - RNA, 19 nt, Homo sapiens
  misc_RNA (1)...(19): siRNA sense strand
ccagaauggcggugcaaau

SEQ ID NO: 2214892 - RNA, 19 nt, Homo sapiens
  misc_RNA (1)...(19): siRNA sense strand
ugcagcagcuucagcaucu

SEQ ID NO: 2214893 - RNA, 19 nt, Homo sapiens
  misc_RNA (1)...(19): siRNA sense strand
aaauagacaagaagaacug

SEQ ID NO: 2214894 - RNA, 19 nt, Homo sapiens
  misc_RNA (1)...(19): siRNA sense strand
agagagccaucaccuucau

SEQ ID NO: 2214895 - RNA, 19 nt, Homo sapiens
  misc_RNA (1)...(19): siRNA sense strand
cgguggaccuggcguucuu

SEQ ID NO: 2214896 - RNA, 19 nt, Homo sapiens
  misc_RNA (1)...(19): siRNA sense strand
gcuguguguuccgagauga

SEQ ID NO: 2214897 - RNA, 19 nt, Homo sapiens
  misc_RNA (1)...(19): siRNA sense strand
cggcugaugcucuucaugu

SEQ ID NO: 2214898 - RNA, 19 nt, Homo sapiens
  misc_RNA (1)...(19): siRNA sense strand
ucaagagagccaucaccuu

SEQ ID NO: 2214899 - RNA, 19 nt, Homo sapiens
  misc_RNA (1)...(19): siRNA sense strand
ggccaucgucuuugucauc

SEQ ID NO: 2214900 - RNA, 19 nt, Homo sapiens
  misc_RNA (1)...(19): siRNA sense strand
gcguugggacuggaaguuu

SEQ ID NO: 2214901 - RNA, 19 nt, Homo sapiens
  misc_RNA (1)...(19): siRNA sense strand
caccacgcccugaacaaga

SEQ ID NO: 2214902 - RNA, 19 nt, Homo sapiens
  misc_RNA (1)...(19): siRNA sense strand
guccaccuccugaagaaga

SEQ ID NO: 2214903 - RNA, 19 nt, Homo sapiens
  misc_RNA (1)...(19): siRNA sense strand
acaagaagaacugcugugu

SEQ ID NO: 2214904 - RNA, 19 nt, Homo sapiens
  misc_RNA (1)...(19): siRNA sense strand
acgcagaauugugaagugu

SEQ ID NO: 2214905 - RNA, 19 nt, Homo sapiens
  misc_RNA (1)...(19): siRNA sense strand
acacuucgggcacgcagaa

SEQ ID NO: 2214906 - RNA, 19 nt, Homo sapiens
  misc_RNA (1)...(19): siRNA sense strand
gcagaccaguucacucuua

SEQ ID NO: 2214907 - RNA, 19 nt, Homo sapiens
  misc_RNA (1)...(19): siRNA sense strand
gaaggugucucugagcuaa

SEQ ID NO: 2214908 - RNA, 19 nt, Homo sapiens
  misc_RNA (1)...(19): siRNA sense strand
guaaauggauccuucuaug

SEQ ID NO: 2214909 - RNA, 19 nt, Homo sapiens
  misc_RNA (1)...(19): siRNA sense strand
gaagauaacggcagugaga

SEQ ID NO: 2214910 - RNA, 19 nt, Homo sapiens
  misc_RNA (1)...(19): siRNA sense strand
ccaguucacucuuagaauu

SEQ ID NO: 2214911 - RNA, 19 nt, Homo sapiens
  misc_RNA (1)...(19): siRNA sense strand
gaggaagugucacaaagaa

SEQ ID NO: 2214912 - RNA, 19 nt, Homo sapiens
  misc_RNA (1)...(19): siRNA sense strand
ugacaaggcuggccagugu

SEQ ID NO: 2214913 - RNA, 19 nt, Homo sapiens
  misc_RNA (1)...(19): siRNA sense strand
ggacaaauuucccuucaac

SEQ ID NO: 2214914 - RNA, 19 nt, Homo sapiens
  misc_RNA (1)...(19): siRNA sense strand
gcaagugggagaacaauau

SEQ ID NO: 2214915 - RNA, 19 nt, Homo sapiens
  misc_RNA (1)...(19): siRNA sense strand
gauaauggcagcacucaga

SEQ ID NO: 2214916 - RNA, 19 nt, Homo sapiens
  misc_RNA (1)...(19): siRNA sense strand
gaagaucuacccuguguca

SEQ ID NO: 2214917 - RNA, 19 nt, Homo sapiens
  misc_RNA (1)...(19): siRNA sense strand
gaucuacccugugucaaga

SEQ ID NO: 2214918 - RNA, 19 nt, Homo sapiens
  misc_RNA (1)...(19): siRNA sense strand
acagugaccuuacggaaga

SEQ ID NO: 2214919 - RNA, 19 nt, Homo sapiens
  misc_RNA (1)...(19): siRNA sense strand
uaagaaauccagaccagaa

SEQ ID NO: 2214920 - RNA, 19 nt, Homo sapiens
  misc_RNA (1)...(19): siRNA sense strand
gagcuccuguugacaucua

SEQ ID NO: 2214921 - RNA, 19 nt, Homo sapiens
  misc_RNA (1)...(19): siRNA sense strand
guugacaucuacagccuuu

SEQ ID NO: 2214922 - RNA, 19 nt, Homo sapiens
  misc_RNA (1)...(19): siRNA sense strand
ggcagcaggugugaagaua

SEQ ID NO: 2214923 - RNA, 19 nt, Homo sapiens
  misc_RNA (1)...(19): siRNA sense strand
uaaauggauccuucuauga

SEQ ID NO: 2214924 - RNA, 19 nt, Homo sapiens
  misc_RNA (1)...(19): siRNA sense strand
uuggaaacauggacaaauu

SEQ ID NO: 2214925 - RNA, 19 nt, Homo sapiens
  misc_RNA (1)...(19): siRNA sense strand
cggaagaucuacccugugu

SEQ ID NO: 2214926 - RNA, 19 nt, Homo sapiens
  misc_RNA (1)...(19): siRNA sense strand
gaaauugaaaucccacauc

SEQ ID NO: 2214927 - RNA, 19 nt, Homo sapiens
  misc_RNA (1)...(19): siRNA sense strand
gagagaggauugggagugu

SEQ ID NO: 2214928 - RNA, 19 nt, Homo sapiens
  misc_RNA (1)...(19): siRNA sense strand
gcaccacgauggagcucuu

SEQ ID NO: 2214929 - RNA, 19 nt, Homo sapiens
  misc_RNA (1)...(19): siRNA sense strand
gacagagagucgagggauu

SEQ ID NO: 2214930 - RNA, 19 nt, Homo sapiens
  misc_RNA (1)...(19): siRNA sense strand
uggauagccugcagaaguu

SEQ ID NO: 2214931 - RNA, 19 nt, Homo sapiens
  misc_RNA (1)...(19): siRNA sense strand
ggacgagaauguggucauc

SEQ ID NO: 2214932 - RNA, 19 nt, Homo sapiens
  misc_RNA (1)...(19): siRNA sense strand
ggaagugucacaaagaagu

SEQ ID NO: 2214933 - RNA, 19 nt, Homo sapiens
  misc_RNA (1)...(19): siRNA sense strand
gugucaagauguuugcuuu

SEQ ID NO: 2214934 - RNA, 19 nt, Homo sapiens
  misc_RNA (1)...(19): siRNA sense strand
cagaggaagugucacaaag

SEQ ID NO: 2214935 - RNA, 19 nt, Homo sapiens
  misc_RNA (1)...(19): siRNA sense strand
gaauugauaauagcaguga

SEQ ID NO: 2214936 - RNA, 19 nt, Homo sapiens
  misc_RNA (1)...(19): siRNA sense strand
ucuaugagaucuugcaagu

SEQ ID NO: 2214937 - RNA, 19 nt, Homo sapiens
  misc_RNA (1)...(19): siRNA sense strand
gaaggcaagugggagaaca

SEQ ID NO: 2214938 - RNA, 19 nt, Homo sapiens
  misc_RNA (1)...(19): siRNA sense strand
uuuccucgcucccugcuua

SEQ ID NO: 2214939 - RNA, 19 nt, Homo sapiens
  misc_RNA (1)...(19): siRNA sense strand
agucuucucugcucacauu

SEQ ID NO: 2214940 - RNA, 19 nt, Homo sapiens
  misc_RNA (1)...(19): siRNA sense strand
accaagaccucacaaggaa

SEQ ID NO: 2214941 - RNA, 19 nt, Homo sapiens
  misc_RNA (1)...(19): siRNA sense strand
uuaaagaagccaaccaaga

SEQ ID NO: 2214942 - RNA, 19 nt, Homo sapiens
  misc_RNA (1)...(19): siRNA sense strand
ugaaaucccacauccuuga

SEQ ID NO: 2214943 - RNA, 19 nt, Homo sapiens
  misc_RNA (1)...(19): siRNA sense strand
uaaagaagccaaccaagac

SEQ ID NO: 2214944 - RNA, 19 nt, Homo sapiens
  misc_RNA (1)...(19): siRNA sense strand
gaacuugcacaucuccaau

SEQ ID NO: 2214945 - RNA, 19 nt, Homo sapiens
  misc_RNA (1)...(19): siRNA sense strand
gugcagaccuuguuuuaug

SEQ ID NO: 2214946 - RNA, 19 nt, Homo sapiens
  misc_RNA (1)...(19): siRNA sense strand
caaagugcagaccuuguuu

SEQ ID NO: 2214947 - RNA, 19 nt, Homo sapiens
  misc_RNA (1)...(19): siRNA sense strand
ccaaagugcagaccuuguu

SEQ ID NO: 2214948 - RNA, 19 nt, Homo sapiens
  misc_RNA (1)...(19): siRNA sense strand
gaaauccagaccagaagga

SEQ ID NO: 2214949 - RNA, 19 nt, Homo sapiens
  misc_RNA (1)...(19): siRNA sense strand
gaagugucacaaagaaguu

SEQ ID NO: 2214950 - RNA, 19 nt, Homo sapiens
  misc_RNA (1)...(19): siRNA sense strand
gacccaaagugcagaccuu

SEQ ID NO: 2214951 - RNA, 19 nt, Homo sapiens
  misc_RNA (1)...(19): siRNA sense strand
guggauagccugcagaagu

SEQ ID NO: 2214952 - RNA, 19 nt, Homo sapiens
  misc_RNA (1)...(19): siRNA sense strand
gcagcaggugugaagauaa

SEQ ID NO: 2214953 - RNA, 19 nt, Homo sapiens
  misc_RNA (1)...(19): siRNA sense strand
gaccaguucacucuuagaa

SEQ ID NO: 2214954 - RNA, 19 nt, Homo sapiens
  misc_RNA (1)...(19): siRNA sense strand
caguucacucuuagaauua

SEQ ID NO: 2214955 - RNA, 19 nt, Homo sapiens
  misc_RNA (1)...(19): siRNA sense strand
gcagguggaguacccgauu

SEQ ID NO: 2214956 - RNA, 19 nt, Homo sapiens
  misc_RNA (1)...(19): siRNA sense strand
gguaaauggauccuucuau

SEQ ID NO: 2214957 - RNA, 19 nt, Homo sapiens
  misc_RNA (1)...(19): siRNA sense strand
aggaggaaauugauaaugg

SEQ ID NO: 2214958 - RNA, 19 nt, Homo sapiens
  misc_RNA (1)...(19): siRNA sense strand
cagcaggugugaagauaac

SEQ ID NO: 2214959 - RNA, 19 nt, Homo sapiens
  misc_RNA (1)...(19): siRNA sense strand
gucgagggauuguggauag

SEQ ID NO: 2214960 - RNA, 19 nt, Homo sapiens
  misc_RNA (1)...(19): siRNA sense strand
gcagagcaggguaaaugga

SEQ ID NO: 2214961 - RNA, 19 nt, Homo sapiens
  misc_RNA (1)...(19): siRNA sense strand
uauuaucaaugccagcuau

SEQ ID NO: 2214962 - RNA, 19 nt, Homo sapiens
  misc_RNA (1)...(19): siRNA sense strand
cgauggagcucuucuucac

SEQ ID NO: 2214963 - RNA, 19 nt, Homo sapiens
  misc_RNA (1)...(19): siRNA sense strand
ggacuuuggaauugauaau

SEQ ID NO: 2214964 - RNA, 19 nt, Homo sapiens
  misc_RNA (1)...(19): siRNA sense strand
ccacgaacuugcacaucuc

SEQ ID NO: 2214965 - RNA, 19 nt, Homo sapiens
  misc_RNA (1)...(19): siRNA sense strand
uggaauggcugaaguugcu

SEQ ID NO: 2214966 - RNA, 19 nt, Homo sapiens
  misc_RNA (1)...(19): siRNA sense strand
ggcaugggcugggaugaca

SEQ ID NO: 2214967 - RNA, 19 nt, Homo sapiens
  misc_RNA (1)...(19): siRNA sense strand
ucagaggaagugucacaaa

SEQ ID NO: 2214968 - RNA, 19 nt, Homo sapiens
  misc_RNA (1)...(19): siRNA sense strand
caucuacagccuuuggaaa

SEQ ID NO: 2214969 - RNA, 19 nt, Homo sapiens
  misc_RNA (1)...(19): siRNA sense strand
aauggauccuucuaugaga

SEQ ID NO: 2214970 - RNA, 19 nt, Homo sapiens
  misc_RNA (1)...(19): siRNA sense strand
uggaaacauggacaaauuu

SEQ ID NO: 2214971 - RNA, 19 nt, Homo sapiens
  misc_RNA (1)...(19): siRNA sense strand
guggagccauucuucaucu

SEQ ID NO: 2214972 - RNA, 19 nt, Homo sapiens
  misc_RNA (1)...(19): siRNA sense strand
acaaauuucccuucaacug

SEQ ID NO: 2214973 - RNA, 19 nt, Homo sapiens
  misc_RNA (1)...(19): siRNA sense strand
cagguggaguacccgauug

SEQ ID NO: 2214974 - RNA, 19 nt, Homo sapiens
  misc_RNA (1)...(19): siRNA sense strand
ggcaagugggagaacaaua

SEQ ID NO: 2214975 - RNA, 19 nt, Homo sapiens
  misc_RNA (1)...(19): siRNA sense strand
cugcucacauugacagaga

SEQ ID NO: 2214976 - RNA, 19 nt, Homo sapiens
  misc_RNA (1)...(19): siRNA sense strand
agaggaagugucacaaaga

SEQ ID NO: 2214977 - RNA, 19 nt, Homo sapiens
  misc_RNA (1)...(19): siRNA sense strand
ggaaauugaaaucccacau

SEQ ID NO: 2214978 - RNA, 19 nt, Homo sapiens
  misc_RNA (1)...(19): siRNA sense strand
gagcuuggacgagaaugug

SEQ ID NO: 2214979 - RNA, 19 nt, Homo sapiens
  misc_RNA (1)...(19): siRNA sense strand
ggagucuucucugcucaca

SEQ ID NO: 2214980 - RNA, 19 nt, Homo sapiens
  misc_RNA (1)...(19): siRNA sense strand
ucacaaggaacuccagucu

SEQ ID NO: 2214981 - RNA, 19 nt, Homo sapiens
  misc_RNA (1)...(19): siRNA sense strand
gugaagauaacggcaguga

SEQ ID NO: 2214982 - RNA, 19 nt, Homo sapiens
  misc_RNA (1)...(19): siRNA sense strand
cagaccaguucacucuuag

SEQ ID NO: 2214983 - RNA, 19 nt, Homo sapiens
  misc_RNA (1)...(19): siRNA sense strand
ggauagccugcagaaguuu

SEQ ID NO: 2214984 - RNA, 19 nt, Homo sapiens
  misc_RNA (1)...(19): siRNA sense strand
aaccaagaccucacaagga

SEQ ID NO: 2214985 - RNA, 19 nt, Homo sapiens
  misc_RNA (1)...(19): siRNA sense strand
acagagagucgagggauug

SEQ ID NO: 2214986 - RNA, 19 nt, Homo sapiens
  misc_RNA (1)...(19): siRNA sense strand
cccacgaacuugcacaucu

SEQ ID NO: 2214987 - RNA, 19 nt, Homo sapiens
  misc_RNA (1)...(19): siRNA sense strand
aaauggauccuucuaugag

SEQ ID NO: 2214988 - RNA, 19 nt, Homo sapiens
  misc_RNA (1)...(19): siRNA sense strand
acgcagagcaggguaaaug

SEQ ID NO: 2214989 - RNA, 19 nt, Homo sapiens
  misc_RNA (1)...(19): siRNA sense strand
ggaugacagugaccuuacg

SEQ ID NO: 2214990 - RNA, 19 nt, Homo sapiens
  misc_RNA (1)...(19): siRNA sense strand
caagugggagaacaauauc

SEQ ID NO: 2214991 - RNA, 19 nt, Homo sapiens
  misc_RNA (1)...(19): siRNA sense strand
guccaggaggaaauugaua

SEQ ID NO: 2214992 - RNA, 19 nt, Homo sapiens
  misc_RNA (1)...(19): siRNA sense strand
gaguggaauggcugaaguu

SEQ ID NO: 2214993 - RNA, 19 nt, Homo sapiens
  misc_RNA (1)...(19): siRNA sense strand
cuacagccuuuggaaacau

SEQ ID NO: 2214994 - RNA, 19 nt, Homo sapiens
  misc_RNA (1)...(19): siRNA sense strand
ggguaaauggauccuucua

SEQ ID NO: 2214995 - RNA, 19 nt, Homo sapiens
  misc_RNA (1)...(19): siRNA sense strand
uccaggaggaaauugauaa

SEQ ID NO: 2214996 - RNA, 19 nt, Homo sapiens
  misc_RNA (1)...(19): siRNA sense strand
gggcaguccaggaggaaau

SEQ ID NO: 2214997 - RNA, 19 nt, Homo sapiens
  misc_RNA (1)...(19): siRNA sense strand
ucucugagcuaagaaaucc

SEQ ID NO: 2214998 - RNA, 19 nt, Homo sapiens
  misc_RNA (1)...(19): siRNA sense strand
gaucuucgucagccagaca

SEQ ID NO: 2214999 - RNA, 19 nt, Homo sapiens
  misc_RNA (1)...(19): siRNA sense strand
uacccugugucaagauguu

SEQ ID NO: 2215000 - RNA, 19 nt, Homo sapiens
  misc_RNA (1)...(19): siRNA sense strand
cuugacagcuccaucuacu

SEQ ID NO: 2215001 - RNA, 19 nt, Homo sapiens
  misc_RNA (1)...(19): siRNA sense strand
uggacaaauuucccuucaa

SEQ ID NO: 2215002 - RNA, 19 nt, Homo sapiens
  misc_RNA (1)...(19): siRNA sense strand
gcucuacccagcugacaag

SEQ ID NO: 2215003 - RNA, 19 nt, Homo sapiens
  misc_RNA (1)...(19): siRNA sense strand
ccaggaggaaauugauaau

SEQ ID NO: 2215004 - RNA, 19 nt, Homo sapiens
  misc_RNA (1)...(19): siRNA sense strand
cgaacuugcacaucuccaa

SEQ ID NO: 2215005 - RNA, 19 nt, Homo sapiens
  misc_RNA (1)...(19): siRNA sense strand
ggagaacccuguugacauu

SEQ ID NO: 2215006 - RNA, 19 nt, Homo sapiens
  misc_RNA (1)...(19): siRNA sense strand
gcauaaaucgggaauauaa

SEQ ID NO: 2215007 - RNA, 19 nt, Homo sapiens
  misc_RNA (1)...(19): siRNA sense strand
gaagaugucauuaagguuu

SEQ ID NO: 2215008 - RNA, 19 nt, Homo sapiens
  misc_RNA (1)...(19): siRNA sense strand
ggaaggaaaugaagagcaa

SEQ ID NO: 2215009 - RNA, 19 nt, Homo sapiens
  misc_RNA (1)...(19): siRNA sense strand
caacaacugugauuccauu

SEQ ID NO: 2215010 - RNA, 19 nt, Homo sapiens
  misc_RNA (1)...(19): siRNA sense strand
gggcauaaaucgggaauau

SEQ ID NO: 2215011 - RNA, 19 nt, Homo sapiens
  misc_RNA (1)...(19): siRNA sense strand
ggagagagcaguccaggaa

SEQ ID NO: 2215012 - RNA, 19 nt, Homo sapiens
  misc_RNA (1)...(19): siRNA sense strand
gaugauaagugaaccuugu

SEQ ID NO: 2215013 - RNA, 19 nt, Homo sapiens
  misc_RNA (1)...(19): siRNA sense strand
gcucguagcuggcaugucu

SEQ ID NO: 2215014 - RNA, 19 nt, Homo sapiens
  misc_RNA (1)...(19): siRNA sense strand
caaggaggcagcaaugaua

SEQ ID NO: 2215015 - RNA, 19 nt, Homo sapiens
  misc_RNA (1)...(19): siRNA sense strand
ggaagggaagaauaaguua

SEQ ID NO: 2215016 - RNA, 19 nt, Homo sapiens
  misc_RNA (1)...(19): siRNA sense strand
ugacaucacugaccuugug

SEQ ID NO: 2215017 - RNA, 19 nt, Homo sapiens
  misc_RNA (1)...(19): siRNA sense strand
ugacaccuuuagacauuua

SEQ ID NO: 2215018 - RNA, 19 nt, Homo sapiens
  misc_RNA (1)...(19): siRNA sense strand
gaaaugucaaggucaaauu

SEQ ID NO: 2215019 - RNA, 19 nt, Homo sapiens
  misc_RNA (1)...(19): siRNA sense strand
gcagucagcuugggugugu

SEQ ID NO: 2215020 - RNA, 19 nt, Homo sapiens
  misc_RNA (1)...(19): siRNA sense strand
ccuaaggauuauucuguua

SEQ ID NO: 2215021 - RNA, 19 nt, Homo sapiens
  misc_RNA (1)...(19): siRNA sense strand
ucauuaagguuuccaacaa

SEQ ID NO: 2215022 - RNA, 19 nt, Homo sapiens
  misc_RNA (1)...(19): siRNA sense strand
gcaguucccagaagacuuu

SEQ ID NO: 2215023 - RNA, 19 nt, Homo sapiens
  misc_RNA (1)...(19): siRNA sense strand
gcacuucaccucccaguuc

SEQ ID NO: 2215024 - RNA, 19 nt, Homo sapiens
  misc_RNA (1)...(19): siRNA sense strand
gcaggaagcaauaguaagu

SEQ ID NO: 2215025 - RNA, 19 nt, Homo sapiens
  misc_RNA (1)...(19): siRNA sense strand
gaaaugaugauaagugaac

SEQ ID NO: 2215026 - RNA, 19 nt, Homo sapiens
  misc_RNA (1)...(19): siRNA sense strand
ccaacuccauccuguuuga

SEQ ID NO: 2215027 - RNA, 19 nt, Homo sapiens
  misc_RNA (1)...(19): siRNA sense strand
ggagugcacaaccaugaua

SEQ ID NO: 2215028 - RNA, 19 nt, Homo sapiens
  misc_RNA (1)...(19): siRNA sense strand
auaaagaccaccucaguaa

SEQ ID NO: 2215029 - RNA, 19 nt, Homo sapiens
  misc_RNA (1)...(19): siRNA sense strand
gagcaaaguggacacgauu

SEQ ID NO: 2215030 - RNA, 19 nt, Homo sapiens
  misc_RNA (1)...(19): siRNA sense strand
ucacaggacuuuagagacu

SEQ ID NO: 2215031 - RNA, 19 nt, Homo sapiens
  misc_RNA (1)...(19): siRNA sense strand
aaagaccaccucaguaauu

SEQ ID NO: 2215032 - RNA, 19 nt, Homo sapiens
  misc_RNA (1)...(19): siRNA sense strand
gcaagucugccgaugaaga

SEQ ID NO: 2215033 - RNA, 19 nt, Homo sapiens
  misc_RNA (1)...(19): siRNA sense strand
gcacaccuguuggccaaga

SEQ ID NO: 2215034 - RNA, 19 nt, Homo sapiens
  misc_RNA (1)...(19): siRNA sense strand
ccaccucaguaauuccaua

SEQ ID NO: 2215035 - RNA, 19 nt, Homo sapiens
  misc_RNA (1)...(19): siRNA sense strand
gaaaaucgcucaguuacag

SEQ ID NO: 2215036 - RNA, 19 nt, Homo sapiens
  misc_RNA (1)...(19): siRNA sense strand
ggaagaauaaguuacucaa

SEQ ID NO: 2215037 - RNA, 19 nt, Homo sapiens
  misc_RNA (1)...(19): siRNA sense strand
aggcaaaccuugaguccaa

SEQ ID NO: 2215038 - RNA, 19 nt, Homo sapiens
  misc_RNA (1)...(19): siRNA sense strand
gaauggcaguucccagaag

SEQ ID NO: 2215039 - RNA, 19 nt, Homo sapiens
  misc_RNA (1)...(19): siRNA sense strand
uaacggacuuggagauugg

SEQ ID NO: 2215040 - RNA, 19 nt, Homo sapiens
  misc_RNA (1)...(19): siRNA sense strand
ccagaugccuuuacaagcu

SEQ ID NO: 2215041 - RNA, 19 nt, Homo sapiens
  misc_RNA (1)...(19): siRNA sense strand
agaggaaaguaccaacaaa

SEQ ID NO: 2215042 - RNA, 19 nt, Homo sapiens
  misc_RNA (1)...(19): siRNA sense strand
ccauagagcgcgaaggaaa

SEQ ID NO: 2215043 - RNA, 19 nt, Homo sapiens
  misc_RNA (1)...(19): siRNA sense strand
ggacacgauugugaacuuc

SEQ ID NO: 2215044 - RNA, 19 nt, Homo sapiens
  misc_RNA (1)...(19): siRNA sense strand
gaggagugcacaaccauga

SEQ ID NO: 2215045 - RNA, 19 nt, Homo sapiens
  misc_RNA (1)...(19): siRNA sense strand
uauaaagaccaccucagua

SEQ ID NO: 2215046 - RNA, 19 nt, Homo sapiens
  misc_RNA (1)...(19): siRNA sense strand
ggccuuugauuaaguuaga

SEQ ID NO: 2215047 - RNA, 19 nt, Homo sapiens
  misc_RNA (1)...(19): siRNA sense strand
gaguccaaauggccaauug

SEQ ID NO: 2215048 - RNA, 19 nt, Homo sapiens
  misc_RNA (1)...(19): siRNA sense strand
ggaaaugaagagcaaagug

SEQ ID NO: 2215049 - RNA, 19 nt, Homo sapiens
  misc_RNA (1)...(19): siRNA sense strand
gaagcaauaguaaguucuu

SEQ ID NO: 2215050 - RNA, 19 nt, Homo sapiens
  misc_RNA (1)...(19): siRNA sense strand
gcaaaguggacacgauugu

SEQ ID NO: 2215051 - RNA, 19 nt, Homo sapiens
  misc_RNA (1)...(19): siRNA sense strand
ccaaagaggaagagaguca

SEQ ID NO: 2215052 - RNA, 19 nt, Homo sapiens
  misc_RNA (1)...(19): siRNA sense strand
ccauggaagggaagaauaa

SEQ ID NO: 2215053 - RNA, 19 nt, Homo sapiens
  misc_RNA (1)...(19): siRNA sense strand
uaagugaaccuugucagaa

SEQ ID NO: 2215054 - RNA, 19 nt, Homo sapiens
  misc_RNA (1)...(19): siRNA sense strand
cagcaggaagcaauaguaa

SEQ ID NO: 2215055 - RNA, 19 nt, Homo sapiens
  misc_RNA (1)...(19): siRNA sense strand
gcaauaguaaguucuugga

SEQ ID NO: 2215056 - RNA, 19 nt, Homo sapiens
  misc_RNA (1)...(19): siRNA sense strand
aagugggucugccaagaua

SEQ ID NO: 2215057 - RNA, 19 nt, Homo sapiens
  misc_RNA (1)...(19): siRNA sense strand
ucaagugggucugccaaga

SEQ ID NO: 2215058 - RNA, 19 nt, Homo sapiens
  misc_RNA (1)...(19): siRNA sense strand
gaacccuguugacauuaca

SEQ ID NO: 2215059 - RNA, 19 nt, Homo sapiens
  misc_RNA (1)...(19): siRNA sense strand
caaauggccaauugugguu

SEQ ID NO: 2215060 - RNA, 19 nt, Homo sapiens
  misc_RNA (1)...(19): siRNA sense strand
ggaagagagucaaguucac

SEQ ID NO: 2215061 - RNA, 19 nt, Homo sapiens
  misc_RNA (1)...(19): siRNA sense strand
acauuacacucccaucaga

SEQ ID NO: 2215062 - RNA, 19 nt, Homo sapiens
  misc_RNA (1)...(19): siRNA sense strand
gaucaacugcguggcguuu

SEQ ID NO: 2215063 - RNA, 19 nt, Homo sapiens
  misc_RNA (1)...(19): siRNA sense strand
agagagcaguccaggaaug

SEQ ID NO: 2215064 - RNA, 19 nt, Homo sapiens
  misc_RNA (1)...(19): siRNA sense strand
ggaaaugucaaggucaaau

SEQ ID NO: 2215065 - RNA, 19 nt, Homo sapiens
  misc_RNA (1)...(19): siRNA sense strand
ugaccgaguucaugaaggu

SEQ ID NO: 2215066 - RNA, 19 nt, Homo sapiens
  misc_RNA (1)...(19): siRNA sense strand
caccaacuccauccuguuu

SEQ ID NO: 2215067 - RNA, 19 nt, Homo sapiens
  misc_RNA (1)...(19): siRNA sense strand
gggucuggcuugggaauga

SEQ ID NO: 2215068 - RNA, 19 nt, Homo sapiens
  misc_RNA (1)...(19): siRNA sense strand
cuaacggacuuggagauug

SEQ ID NO: 2215069 - RNA, 19 nt, Homo sapiens
  misc_RNA (1)...(19): siRNA sense strand
gauauugagggcauaaauc

SEQ ID NO: 2215070 - RNA, 19 nt, Homo sapiens
  misc_RNA (1)...(19): siRNA sense strand
cagaagaccaagaggaaga

SEQ ID NO: 2215071 - RNA, 19 nt, Homo sapiens
  misc_RNA (1)...(19): siRNA sense strand
aaaguggacacgauuguga

SEQ ID NO: 2215072 - RNA, 19 nt, Homo sapiens
  misc_RNA (1)...(19): siRNA sense strand
gcguuugccuggaaauaca

SEQ ID NO: 2215073 - RNA, 19 nt, Homo sapiens
  misc_RNA (1)...(19): siRNA sense strand
gaacacugccauucucacu

SEQ ID NO: 2215074 - RNA, 19 nt, Homo sapiens
  misc_RNA (1)...(19): siRNA sense strand
gagcaguccaggaaugguu

SEQ ID NO: 2215075 - RNA, 19 nt, Homo sapiens
  misc_RNA (1)...(19): siRNA sense strand
gcgaugacgaggacgauga

SEQ ID NO: 2215076 - RNA, 19 nt, Homo sapiens
  misc_RNA (1)...(19): siRNA sense strand
ugaaugggaaggaaaugaa

SEQ ID NO: 2215077 - RNA, 19 nt, Homo sapiens
  misc_RNA (1)...(19): siRNA sense strand
ggacuuuagagacuauaug

SEQ ID NO: 2215078 - RNA, 19 nt, Homo sapiens
  misc_RNA (1)...(19): siRNA sense strand
gagaacccuguugacauua

SEQ ID NO: 2215079 - RNA, 19 nt, Homo sapiens
  misc_RNA (1)...(19): siRNA sense strand
gcuugggaaugaaguggaa

SEQ ID NO: 2215080 - RNA, 19 nt, Homo sapiens
  misc_RNA (1)...(19): siRNA sense strand
gcaccaaggaggcagcaau

SEQ ID NO: 2215081 - RNA, 19 nt, Homo sapiens
  misc_RNA (1)...(19): siRNA sense strand
ggucaaauucgaaccaagu

SEQ ID NO: 2215082 - RNA, 19 nt, Homo sapiens
  misc_RNA (1)...(19): siRNA sense strand
aaggaaaugucaaggucaa

SEQ ID NO: 2215083 - RNA, 19 nt, Homo sapiens
  misc_RNA (1)...(19): siRNA sense strand
guaaaggaaaugucaaggu

SEQ ID NO: 2215084 - RNA, 19 nt, Homo sapiens
  misc_RNA (1)...(19): siRNA sense strand
guuacugucucaucauugg

SEQ ID NO: 2215085 - RNA, 19 nt, Homo sapiens
  misc_RNA (1)...(19): siRNA sense strand
gaagguggaggagccgaaa

SEQ ID NO: 2215086 - RNA, 19 nt, Homo sapiens
  misc_RNA (1)...(19): siRNA sense strand
ugacuaugucuaugagaaa

SEQ ID NO: 2215087 - RNA, 19 nt, Homo sapiens
  misc_RNA (1)...(19): siRNA sense strand
cugacuaugucuaugagaa

SEQ ID NO: 2215088 - RNA, 19 nt, Homo sapiens
  misc_RNA (1)...(19): siRNA sense strand
caaauucgaaccaaguagu

SEQ ID NO: 2215089 - RNA, 19 nt, Homo sapiens
  misc_RNA (1)...(19): siRNA sense strand
acaccgagcugagccagau

SEQ ID NO: 2215090 - RNA, 19 nt, Homo sapiens
  misc_RNA (1)...(19): siRNA sense strand
gaggaagagagucaaguuc

SEQ ID NO: 2215091 - RNA, 19 nt, Homo sapiens
  misc_RNA (1)...(19): siRNA sense strand
gcuaacggacuuggagauu

SEQ ID NO: 2215092 - RNA, 19 nt, Homo sapiens
  misc_RNA (1)...(19): siRNA sense strand
cagaugccuuuacaagcuu

SEQ ID NO: 2215093 - RNA, 19 nt, Homo sapiens
  misc_RNA (1)...(19): siRNA sense strand
uaaagaccaccucaguaau

SEQ ID NO: 2215094 - RNA, 19 nt, Homo sapiens
  misc_RNA (1)...(19): siRNA sense strand
ggcauaaaucgggaauaua

SEQ ID NO: 2215095 - RNA, 19 nt, Homo sapiens
  misc_RNA (1)...(19): siRNA sense strand
gucagaagaccaagaggaa

SEQ ID NO: 2215096 - RNA, 19 nt, Homo sapiens
  misc_RNA (1)...(19): siRNA sense strand
guagaggacaccgagguuu

SEQ ID NO: 2215097 - RNA, 19 nt, Homo sapiens
  misc_RNA (1)...(19): siRNA sense strand
augcaagucugccgaugaa

SEQ ID NO: 2215098 - RNA, 19 nt, Homo sapiens
  misc_RNA (1)...(19): siRNA sense strand
uggacacgauugugaacuu

SEQ ID NO: 2215099 - RNA, 19 nt, Homo sapiens
  misc_RNA (1)...(19): siRNA sense strand
gggauucacaggacuuuag

SEQ ID NO: 2215100 - RNA, 19 nt, Homo sapiens
  misc_RNA (1)...(19): siRNA sense strand
ccagaagacuuuucauagu

SEQ ID NO: 2215101 - RNA, 19 nt, Homo sapiens
  misc_RNA (1)...(19): siRNA sense strand
gaagggaagaauaaguuac

SEQ ID NO: 2215102 - RNA, 19 nt, Homo sapiens
  misc_RNA (1)...(19): siRNA sense strand
uggaagggaagaauaaguu

SEQ ID NO: 2215103 - RNA, 19 nt, Homo sapiens
  misc_RNA (1)...(19): siRNA sense strand
ccaaggaggcagcaaugau

SEQ ID NO: 2215104 - RNA, 19 nt, Homo sapiens
  misc_RNA (1)...(19): siRNA sense strand
ucagaggagugcacaacca

SEQ ID NO: 2215105 - RNA, 19 nt, Homo sapiens
  misc_RNA (1)...(19): siRNA sense strand
gcaaacaaguucacaauug

SEQ ID NO: 2215106 - RNA, 19 nt, Homo sapiens
  misc_RNA (1)...(19): siRNA sense strand
gcacugaccuagcagaaga

SEQ ID NO: 2215107 - RNA, 19 nt, Homo sapiens
  misc_RNA (1)...(19): siRNA sense strand
caaacaaguucacaauuga

SEQ ID NO: 2215108 - RNA, 19 nt, Homo sapiens
  misc_RNA (1)...(19): siRNA sense strand
ggaauuggcugggagagaa

SEQ ID NO: 2215109 - RNA, 19 nt, Homo sapiens
  misc_RNA (1)...(19): siRNA sense strand
gaacugcucugccaaaauu

SEQ ID NO: 2215110 - RNA, 19 nt, Homo sapiens
  misc_RNA (1)...(19): siRNA sense strand
gcacuugucuuuuccauaa

SEQ ID NO: 2215111 - RNA, 19 nt, Homo sapiens
  misc_RNA (1)...(19): siRNA sense strand
gaagacagcccaaagagau

SEQ ID NO: 2215112 - RNA, 19 nt, Homo sapiens
  misc_RNA (1)...(19): siRNA sense strand
uauaauggcuccaguuugu

SEQ ID NO: 2215113 - RNA, 19 nt, Homo sapiens
  misc_RNA (1)...(19): siRNA sense strand
gaagacagcuuauuuugug

SEQ ID NO: 2215114 - RNA, 19 nt, Homo sapiens
  misc_RNA (1)...(19): siRNA sense strand
cagaagagaucagcgcuaa

SEQ ID NO: 2215115 - RNA, 19 nt, Homo sapiens
  misc_RNA (1)...(19): siRNA sense strand
gaucagcgcuaacuuugag

SEQ ID NO: 2215116 - RNA, 19 nt, Homo sapiens
  misc_RNA (1)...(19): siRNA sense strand
gcaccaguauugcaucaga

SEQ ID NO: 2215117 - RNA, 19 nt, Homo sapiens
  misc_RNA (1)...(19): siRNA sense strand
cgucuuagauguugauuca

SEQ ID NO: 2215118 - RNA, 19 nt, Homo sapiens
  misc_RNA (1)...(19): siRNA sense strand
gaaauaaggacaagagcau

SEQ ID NO: 2215119 - RNA, 19 nt, Homo sapiens
  misc_RNA (1)...(19): siRNA sense strand
gccgagccgugcacuauaa

SEQ ID NO: 2215120 - RNA, 19 nt, Homo sapiens
  misc_RNA (1)...(19): siRNA sense strand
ggagucgucuuagauguug

SEQ ID NO: 2215121 - RNA, 19 nt, Homo sapiens
  misc_RNA (1)...(19): siRNA sense strand
gcucagcaacaauaugaua

SEQ ID NO: 2215122 - RNA, 19 nt, Homo sapiens
  misc_RNA (1)...(19): siRNA sense strand
gagaucagcgcuaacuuug

SEQ ID NO: 2215123 - RNA, 19 nt, Homo sapiens
  misc_RNA (1)...(19): siRNA sense strand
gaaaaggucucacaguagu

SEQ ID NO: 2215124 - RNA, 19 nt, Homo sapiens
  misc_RNA (1)...(19): siRNA sense strand
uaauggcuccaguuuguua

SEQ ID NO: 2215125 - RNA, 19 nt, Homo sapiens
  misc_RNA (1)...(19): siRNA sense strand
gacagacgguugaauuucu

SEQ ID NO: 2215126 - RNA, 19 nt, Homo sapiens
  misc_RNA (1)...(19): siRNA sense strand
gagagcgacuugcaguugu

SEQ ID NO: 2215127 - RNA, 19 nt, Homo sapiens
  misc_RNA (1)...(19): siRNA sense strand
ggagagcgacuugcaguug

SEQ ID NO: 2215128 - RNA, 19 nt, Homo sapiens
  misc_RNA (1)...(19): siRNA sense strand
caucucaccuuaccucagu

SEQ ID NO: 2215129 - RNA, 19 nt, Homo sapiens
  misc_RNA (1)...(19): siRNA sense strand
ggcagcgccucucaccaua

SEQ ID NO: 2215130 - RNA, 19 nt, Homo sapiens
  misc_RNA (1)...(19): siRNA sense strand
guaacccgcucuccagaca

SEQ ID NO: 2215131 - RNA, 19 nt, Homo sapiens
  misc_RNA (1)...(19): siRNA sense strand
caucugacagugacaauga

SEQ ID NO: 2215132 - RNA, 19 nt, Homo sapiens
  misc_RNA (1)...(19): siRNA sense strand
gaagagaucagcgcuaacu

SEQ ID NO: 2215133 - RNA, 19 nt, Homo sapiens
  misc_RNA (1)...(19): siRNA sense strand
ugaaagcgaugaugaugac

SEQ ID NO: 2215134 - RNA, 19 nt, Homo sapiens
  misc_RNA (1)...(19): siRNA sense strand
ugaaguucuuaaccuagua

SEQ ID NO: 2215135 - RNA, 19 nt, Homo sapiens
  misc_RNA (1)...(19): siRNA sense strand
gaagcaaacaaguucacaa

SEQ ID NO: 2215136 - RNA, 19 nt, Homo sapiens
  misc_RNA (1)...(19): siRNA sense strand
ggccagugguucacauuca

SEQ ID NO: 2215137 - RNA, 19 nt, Homo sapiens
  misc_RNA (1)...(19): siRNA sense strand
gguugaauuucucuacgaa

SEQ ID NO: 2215138 - RNA, 19 nt, Homo sapiens
  misc_RNA (1)...(19): siRNA sense strand
gcgaugaugaugacgauga

SEQ ID NO: 2215139 - RNA, 19 nt, Homo sapiens
  misc_RNA (1)...(19): siRNA sense strand
gaugaaagcgaugaugaug

SEQ ID NO: 2215140 - RNA, 19 nt, Homo sapiens
  misc_RNA (1)...(19): siRNA sense strand
ccaccgcucagcaacaaua

SEQ ID NO: 2215141 - RNA, 19 nt, Homo sapiens
  misc_RNA (1)...(19): siRNA sense strand
ucgaaaaggucucacagua

SEQ ID NO: 2215142 - RNA, 19 nt, Homo sapiens
  misc_RNA (1)...(19): siRNA sense strand
gagccugcauguucucauc

SEQ ID NO: 2215143 - RNA, 19 nt, Homo sapiens
  misc_RNA (1)...(19): siRNA sense strand
agagaucagcgcuaacuuu

SEQ ID NO: 2215144 - RNA, 19 nt, Homo sapiens
  misc_RNA (1)...(19): siRNA sense strand
ugaagacauuaaagacgaa

SEQ ID NO: 2215145 - RNA, 19 nt, Homo sapiens
  misc_RNA (1)...(19): siRNA sense strand
ggucauggcccagcuuuua

SEQ ID NO: 2215146 - RNA, 19 nt, Homo sapiens
  misc_RNA (1)...(19): siRNA sense strand
ccagacagcaauaauguag

SEQ ID NO: 2215147 - RNA, 19 nt, Homo sapiens
  misc_RNA (1)...(19): siRNA sense strand
agacgaagcaaacaaguuc

SEQ ID NO: 2215148 - RNA, 19 nt, Homo sapiens
  misc_RNA (1)...(19): siRNA sense strand
caccuccugucauuauaaa

SEQ ID NO: 2215149 - RNA, 19 nt, Homo sapiens
  misc_RNA (1)...(19): siRNA sense strand
ggccaccgcucagcaacaa

SEQ ID NO: 2215150 - RNA, 19 nt, Homo sapiens
  misc_RNA (1)...(19): siRNA sense strand
agacagcccaaagagauua

SEQ ID NO: 2215151 - RNA, 19 nt, Homo sapiens
  misc_RNA (1)...(19): siRNA sense strand
uugaauuucucuacgaaga

SEQ ID NO: 2215152 - RNA, 19 nt, Homo sapiens
  misc_RNA (1)...(19): siRNA sense strand
gaugacaccggacccauag

SEQ ID NO: 2215153 - RNA, 19 nt, Homo sapiens
  misc_RNA (1)...(19): siRNA sense strand
uguugaaguucuuaaccua

SEQ ID NO: 2215154 - RNA, 19 nt, Homo sapiens
  misc_RNA (1)...(19): siRNA sense strand
ccauugaagacauuaaaga

SEQ ID NO: 2215155 - RNA, 19 nt, Homo sapiens
  misc_RNA (1)...(19): siRNA sense strand
caacuagguaugguggaua

SEQ ID NO: 2215156 - RNA, 19 nt, Homo sapiens
  misc_RNA (1)...(19): siRNA sense strand
cagcaacaauaugauagug

SEQ ID NO: 2215157 - RNA, 19 nt, Homo sapiens
  misc_RNA (1)...(19): siRNA sense strand
cugcugaccugugcacuga

SEQ ID NO: 2215158 - RNA, 19 nt, Homo sapiens
  misc_RNA (1)...(19): siRNA sense strand
cgaagacagcccaaagaga

SEQ ID NO: 2215159 - RNA, 19 nt, Homo sapiens
  misc_RNA (1)...(19): siRNA sense strand
ccuaguagcccaggaaugu

SEQ ID NO: 2215160 - RNA, 19 nt, Homo sapiens
  misc_RNA (1)...(19): siRNA sense strand
caaugaagcagagcggaaa

SEQ ID NO: 2215161 - RNA, 19 nt, Homo sapiens
  misc_RNA (1)...(19): siRNA sense strand
ggacccauaguuuccuuug

SEQ ID NO: 2215162 - RNA, 19 nt, Homo sapiens
  misc_RNA (1)...(19): siRNA sense strand
gagugaacagccauucuga

SEQ ID NO: 2215163 - RNA, 19 nt, Homo sapiens
  misc_RNA (1)...(19): siRNA sense strand
uaaagacgaagcaaacaag

SEQ ID NO: 2215164 - RNA, 19 nt, Homo sapiens
  misc_RNA (1)...(19): siRNA sense strand
ccgcucagcaacaauauga

SEQ ID NO: 2215165 - RNA, 19 nt, Homo sapiens
  misc_RNA (1)...(19): siRNA sense strand
ugaccuagcagaagagauc

SEQ ID NO: 2215166 - RNA, 19 nt, Homo sapiens
  misc_RNA (1)...(19): siRNA sense strand
cagcgccucucaccauauc

SEQ ID NO: 2215167 - RNA, 19 nt, Homo sapiens
  misc_RNA (1)...(19): siRNA sense strand
cagcuuauuuugugaagaa

SEQ ID NO: 2215168 - RNA, 19 nt, Homo sapiens
  misc_RNA (1)...(19): siRNA sense strand
cgacagacgguugaauuuc

SEQ ID NO: 2215169 - RNA, 19 nt, Homo sapiens
  misc_RNA (1)...(19): siRNA sense strand
aaaggucucacaguaguaa

SEQ ID NO: 2215170 - RNA, 19 nt, Homo sapiens
  misc_RNA (1)...(19): siRNA sense strand
guucgagccugcauguucu

SEQ ID NO: 2215171 - RNA, 19 nt, Homo sapiens
  misc_RNA (1)...(19): siRNA sense strand
ccgacagacgguugaauuu

SEQ ID NO: 2215172 - RNA, 19 nt, Homo sapiens
  misc_RNA (1)...(19): siRNA sense strand
gacaccggacccauaguuu

SEQ ID NO: 2215173 - RNA, 19 nt, Homo sapiens
  misc_RNA (1)...(19): siRNA sense strand
ugacaccggacccauaguu

SEQ ID NO: 2215174 - RNA, 19 nt, Homo sapiens
  misc_RNA (1)...(19): siRNA sense strand
ugaugacaccggacccaua

SEQ ID NO: 2215175 - RNA, 19 nt, Homo sapiens
  misc_RNA (1)...(19): siRNA sense strand
uaaccuaguagcccaggaa

SEQ ID NO: 2215176 - RNA, 19 nt, Homo sapiens
  misc_RNA (1)...(19): siRNA sense strand
ucuuagauguugauucagu

SEQ ID NO: 2215177 - RNA, 19 nt, Homo sapiens
  misc_RNA (1)...(19): siRNA sense strand
gcauguggccagugguuca

SEQ ID NO: 2215178 - RNA, 19 nt, Homo sapiens
  misc_RNA (1)...(19): siRNA sense strand
ccaguuuguuacaguggaa

SEQ ID NO: 2215179 - RNA, 19 nt, Homo sapiens
  misc_RNA (1)...(19): siRNA sense strand
ggguguacuucacauacug

SEQ ID NO: 2215180 - RNA, 19 nt, Homo sapiens
  misc_RNA (1)...(19): siRNA sense strand
gcaugggagaccaagguuu

SEQ ID NO: 2215181 - RNA, 19 nt, Homo sapiens
  misc_RNA (1)...(19): siRNA sense strand
ggccgagccgugcacuaua

SEQ ID NO: 2215182 - RNA, 19 nt, Homo sapiens
  misc_RNA (1)...(19): siRNA sense strand
aagcaaacaaguucacaau

SEQ ID NO: 2215183 - RNA, 19 nt, Homo sapiens
  misc_RNA (1)...(19): siRNA sense strand
caccauugaagacauuaaa

SEQ ID NO: 2215184 - RNA, 19 nt, Homo sapiens
  misc_RNA (1)...(19): siRNA sense strand
gcugaaauaaggacaagag

SEQ ID NO: 2215185 - RNA, 19 nt, Homo sapiens
  misc_RNA (1)...(19): siRNA sense strand
ucggcuccuugcugaaaua

SEQ ID NO: 2215186 - RNA, 19 nt, Homo sapiens
  misc_RNA (1)...(19): siRNA sense strand
cacaauugauaaaguucga

SEQ ID NO: 2215187 - RNA, 19 nt, Homo sapiens
  misc_RNA (1)...(19): siRNA sense strand
uuaaagacgaagcaaacaa

SEQ ID NO: 2215188 - RNA, 19 nt, Homo sapiens
  misc_RNA (1)...(19): siRNA sense strand
gaaugguggcaucccaaga

SEQ ID NO: 2215189 - RNA, 19 nt, Homo sapiens
  misc_RNA (1)...(19): siRNA sense strand
cgaugaugaugacgaugau

SEQ ID NO: 2215190 - RNA, 19 nt, Homo sapiens
  misc_RNA (1)...(19): siRNA sense strand
gaauucauacaacaauguc

SEQ ID NO: 2215191 - RNA, 19 nt, Homo sapiens
  misc_RNA (1)...(19): siRNA sense strand
gaaguucuuaaccuaguag

SEQ ID NO: 2215192 - RNA, 19 nt, Homo sapiens
  misc_RNA (1)...(19): siRNA sense strand
ccugugcacugaccuagca

SEQ ID NO: 2215193 - RNA, 19 nt, Homo sapiens
  misc_RNA (1)...(19): siRNA sense strand
acuauaauggcuccaguuu

SEQ ID NO: 2215194 - RNA, 19 nt, Homo sapiens
  misc_RNA (1)...(19): siRNA sense strand
cugggaaauugaaaucguu

SEQ ID NO: 2215195 - RNA, 19 nt, Homo sapiens
  misc_RNA (1)...(19): siRNA sense strand
gagccgugcacuauaaugg

SEQ ID NO: 2215196 - RNA, 19 nt, Homo sapiens
  misc_RNA (1)...(19): siRNA sense strand
cauuaaagacgaagcaaac

SEQ ID NO: 2215197 - RNA, 19 nt, Homo sapiens
  misc_RNA (1)...(19): siRNA sense strand
gaccgaagacagcccaaag

SEQ ID NO: 2215198 - RNA, 19 nt, Homo sapiens
  misc_RNA (1)...(19): siRNA sense strand
caucagacccaggcacuca

SEQ ID NO: 2215199 - RNA, 19 nt, Homo sapiens
  misc_RNA (1)...(19): siRNA sense strand
ccucucaccauaucuugaa

SEQ ID NO: 2215200 - RNA, 19 nt, Homo sapiens
  misc_RNA (1)...(19): siRNA sense strand
gagggaugcugaaaaccuu

SEQ ID NO: 2215201 - RNA, 19 nt, Homo sapiens
  misc_RNA (1)...(19): siRNA sense strand
guucggcuccuugcugaaa

SEQ ID NO: 2215202 - RNA, 19 nt, Homo sapiens
  misc_RNA (1)...(19): siRNA sense strand
acaccuccugucauuauaa

SEQ ID NO: 2215203 - RNA, 19 nt, Homo sapiens
  misc_RNA (1)...(19): siRNA sense strand
aagcgaugaugaugacgau

SEQ ID NO: 2215204 - RNA, 19 nt, Homo sapiens
  misc_RNA (1)...(19): siRNA sense strand
cauugcagaugaugaaagc

SEQ ID NO: 2215205 - RNA, 19 nt, Homo sapiens
  misc_RNA (1)...(19): siRNA sense strand
gggaggagaugaaggauga

SEQ ID NO: 2215206 - RNA, 19 nt, Homo sapiens
  misc_RNA (1)...(19): siRNA sense strand
gcaccgacaugaacacuga

SEQ ID NO: 2215207 - RNA, 19 nt, Homo sapiens
  misc_RNA (1)...(19): siRNA sense strand
ugacauggcuaucccaaau

SEQ ID NO: 2215208 - RNA, 19 nt, Homo sapiens
  misc_RNA (1)...(19): siRNA sense strand
gcauucaucucaagaacug

SEQ ID NO: 2215209 - RNA, 19 nt, Homo sapiens
  misc_RNA (1)...(19): siRNA sense strand
gaugaaggaugagggauuc

SEQ ID NO: 2215210 - RNA, 19 nt, Homo sapiens
  misc_RNA (1)...(19): siRNA sense strand
gggaagggcuccuguagac

SEQ ID NO: 2215211 - RNA, 19 nt, Homo sapiens
  misc_RNA (1)...(19): siRNA sense strand
ccacguggcugugcauuca

SEQ ID NO: 2215212 - RNA, 19 nt, Homo sapiens
  misc_RNA (1)...(19): siRNA sense strand
ccaagcccaucuacucgua

SEQ ID NO: 2215213 - RNA, 19 nt, Homo sapiens
  misc_RNA (1)...(19): siRNA sense strand
gaagggcuccuguagacuu

SEQ ID NO: 2215214 - RNA, 19 nt, Homo sapiens
  misc_RNA (1)...(19): siRNA sense strand
ucgagaagguggagaacaa

SEQ ID NO: 2215215 - RNA, 19 nt, Homo sapiens
  misc_RNA (1)...(19): siRNA sense strand
uauccuacauccacuacaa

SEQ ID NO: 2215216 - RNA, 19 nt, Homo sapiens
  misc_RNA (1)...(19): siRNA sense strand
ggcacaaccugucucugaa

SEQ ID NO: 2215217 - RNA, 19 nt, Homo sapiens
  misc_RNA (1)...(19): siRNA sense strand
caccagcgaugaugaccuu

SEQ ID NO: 2215218 - RNA, 19 nt, Homo sapiens
  misc_RNA (1)...(19): siRNA sense strand
gaagguggagaacaagaug

SEQ ID NO: 2215219 - RNA, 19 nt, Homo sapiens
  misc_RNA (1)...(19): siRNA sense strand
ugagcgagaucuacagcuu

SEQ ID NO: 2215220 - RNA, 19 nt, Homo sapiens
  misc_RNA (1)...(19): siRNA sense strand
gcaccuccaugggcagcua

SEQ ID NO: 2215221 - RNA, 19 nt, Homo sapiens
  misc_RNA (1)...(19): siRNA sense strand
caaccugucucugaacaag

SEQ ID NO: 2215222 - RNA, 19 nt, Homo sapiens
  misc_RNA (1)...(19): siRNA sense strand
ggagucgcguggcaagugu

SEQ ID NO: 2215223 - RNA, 19 nt, Homo sapiens
  misc_RNA (1)...(19): siRNA sense strand
aggaggagaugcacaagug

SEQ ID NO: 2215224 - RNA, 19 nt, Homo sapiens
  misc_RNA (1)...(19): siRNA sense strand
ccaaaucaccgaccugucu

SEQ ID NO: 2215225 - RNA, 19 nt, Homo sapiens
  misc_RNA (1)...(19): siRNA sense strand
cggcacaaccugucucuga

SEQ ID NO: 2215226 - RNA, 19 nt, Homo sapiens
  misc_RNA (1)...(19): siRNA sense strand
caacaucagcaccgacaug

SEQ ID NO: 2215227 - RNA, 19 nt, Homo sapiens
  misc_RNA (1)...(19): siRNA sense strand
ggugacgggucucuacaca

SEQ ID NO: 2215228 - RNA, 19 nt, Homo sapiens
  misc_RNA (1)...(19): siRNA sense strand
ccuguagacuucaucaaca

SEQ ID NO: 2215229 - RNA, 19 nt, Homo sapiens
  misc_RNA (1)...(19): siRNA sense strand
gagaugcacaaguggaaga

SEQ ID NO: 2215230 - RNA, 19 nt, Homo sapiens
  misc_RNA (1)...(19): siRNA sense strand
gagacagcaugagccaguu

SEQ ID NO: 2215231 - RNA, 19 nt, Homo sapiens
  misc_RNA (1)...(19): siRNA sense strand
gccuauagcccugcuuuga

SEQ ID NO: 2215232 - RNA, 19 nt, Homo sapiens
  misc_RNA (1)...(19): siRNA sense strand
cagaggaguuggacaagcu

SEQ ID NO: 2215233 - RNA, 19 nt, Homo sapiens
  misc_RNA (1)...(19): siRNA sense strand
gagaucuacagcuucauga

SEQ ID NO: 2215234 - RNA, 19 nt, Homo sapiens
  misc_RNA (1)...(19): siRNA sense strand
caugaacacugagguggau

SEQ ID NO: 2215235 - RNA, 19 nt, Homo sapiens
  misc_RNA (1)...(19): siRNA sense strand
gagaagguggagaacaaga

SEQ ID NO: 2215236 - RNA, 19 nt, Homo sapiens
  misc_RNA (1)...(19): siRNA sense strand
acauggcuaucccaaauca

SEQ ID NO: 2215237 - RNA, 19 nt, Homo sapiens
  misc_RNA (1)...(19): siRNA sense strand
guacuccacuccggacagu

SEQ ID NO: 2215238 - RNA, 19 nt, Homo sapiens
  misc_RNA (1)...(19): siRNA sense strand
caagauggaggaggagaug

SEQ ID NO: 2215239 - RNA, 19 nt, Homo sapiens
  misc_RNA (1)...(19): siRNA sense strand
gcaggugacgggucucuac

SEQ ID NO: 2215240 - RNA, 19 nt, Homo sapiens
  misc_RNA (1)...(19): siRNA sense strand
cgagaucuacagcuucaug

SEQ ID NO: 2215241 - RNA, 19 nt, Homo sapiens
  misc_RNA (1)...(19): siRNA sense strand
gcugugcauucaucucaag

SEQ ID NO: 2215242 - RNA, 19 nt, Homo sapiens
  misc_RNA (1)...(19): siRNA sense strand
caucagcaccgacaugaac

SEQ ID NO: 2215243 - RNA, 19 nt, Homo sapiens
  misc_RNA (1)...(19): siRNA sense strand
guagacuucaucaacauca

SEQ ID NO: 2215244 - RNA, 19 nt, Homo sapiens
  misc_RNA (1)...(19): siRNA sense strand
ugaacaagugcuucgagaa

SEQ ID NO: 2215245 - RNA, 19 nt, Homo sapiens
  misc_RNA (1)...(19): siRNA sense strand
cacaaccugucucugaaca

SEQ ID NO: 2215246 - RNA, 19 nt, Homo sapiens
  misc_RNA (1)...(19): siRNA sense strand
ccauggcccugaagaacag

SEQ ID NO: 2215247 - RNA, 19 nt, Homo sapiens
  misc_RNA (1)...(19): siRNA sense strand
ggccacagagacagcauga

SEQ ID NO: 2215248 - RNA, 19 nt, Homo sapiens
  misc_RNA (1)...(19): siRNA sense strand
gugcauucaucucaagaac

SEQ ID NO: 2215249 - RNA, 19 nt, Homo sapiens
  misc_RNA (1)...(19): siRNA sense strand
gcacaaccugucucugaac

SEQ ID NO: 2215250 - RNA, 19 nt, Homo sapiens
  misc_RNA (1)...(19): siRNA sense strand
ccccauaacuggccacaga

SEQ ID NO: 2215251 - RNA, 19 nt, Homo sapiens
  misc_RNA (1)...(19): siRNA sense strand
gaaccugugggaggagaug

SEQ ID NO: 2215252 - RNA, 19 nt, Homo sapiens
  misc_RNA (1)...(19): siRNA sense strand
ccaccaccagcgaugauga

SEQ ID NO: 2215253 - RNA, 19 nt, Homo sapiens
  misc_RNA (1)...(19): siRNA sense strand
gcacaucuugcuccagacu

SEQ ID NO: 2215254 - RNA, 19 nt, Homo sapiens
  misc_RNA (1)...(19): siRNA sense strand
gccauggcccugaagaaca

SEQ ID NO: 2215255 - RNA, 19 nt, Homo sapiens
  misc_RNA (1)...(19): siRNA sense strand
gcacuuccccuacuucaag

SEQ ID NO: 2215256 - RNA, 19 nt, Homo sapiens
  misc_RNA (1)...(19): siRNA sense strand
gaggaggagaugcacaagu

SEQ ID NO: 2215257 - RNA, 19 nt, Homo sapiens
  misc_RNA (1)...(19): siRNA sense strand
ggaaucugcucgagucuua

SEQ ID NO: 2215258 - RNA, 19 nt, Homo sapiens
  misc_RNA (1)...(19): siRNA sense strand
ccaaagagcuggaggaaug

SEQ ID NO: 2215259 - RNA, 19 nt, Homo sapiens
  misc_RNA (1)...(19): siRNA sense strand
cgaaagagcugacgauuag

SEQ ID NO: 2215260 - RNA, 19 nt, Homo sapiens
  misc_RNA (1)...(19): siRNA sense strand
ggaacccgcuggaaucuuu

SEQ ID NO: 2215261 - RNA, 19 nt, Homo sapiens
  misc_RNA (1)...(19): siRNA sense strand
cgaagaaucuguaucucaa

SEQ ID NO: 2215262 - RNA, 19 nt, Homo sapiens
  misc_RNA (1)...(19): siRNA sense strand
agaugaagauuacgagaua

SEQ ID NO: 2215263 - RNA, 19 nt, Homo sapiens
  misc_RNA (1)...(19): siRNA sense strand
cagaaguuguuaaugguua

SEQ ID NO: 2215264 - RNA, 19 nt, Homo sapiens
  misc_RNA (1)...(19): siRNA sense strand
ggaauucccaccuggauuu

SEQ ID NO: 2215265 - RNA, 19 nt, Homo sapiens
  misc_RNA (1)...(19): siRNA sense strand
ucacaagcccugucauuaa

SEQ ID NO: 2215266 - RNA, 19 nt, Homo sapiens
  misc_RNA (1)...(19): siRNA sense strand
gaggacagauaaagcagaa

SEQ ID NO: 2215267 - RNA, 19 nt, Homo sapiens
  misc_RNA (1)...(19): siRNA sense strand
acacagaaguuuaaagcaa

SEQ ID NO: 2215268 - RNA, 19 nt, Homo sapiens
  misc_RNA (1)...(19): siRNA sense strand
gcccuugguuucuagaaua

SEQ ID NO: 2215269 - RNA, 19 nt, Homo sapiens
  misc_RNA (1)...(19): siRNA sense strand
ucacauugcugggauuuga

SEQ ID NO: 2215270 - RNA, 19 nt, Homo sapiens
  misc_RNA (1)...(19): siRNA sense strand
guacacaguucuccaacau

SEQ ID NO: 2215271 - RNA, 19 nt, Homo sapiens
  misc_RNA (1)...(19): siRNA sense strand
acugagagauuucaucaaa

SEQ ID NO: 2215272 - RNA, 19 nt, Homo sapiens
  misc_RNA (1)...(19): siRNA sense strand
gcaggucauucccaucauu

SEQ ID NO: 2215273 - RNA, 19 nt, Homo sapiens
  misc_RNA (1)...(19): siRNA sense strand
acaccagccucgauacuaa

SEQ ID NO: 2215274 - RNA, 19 nt, Homo sapiens
  misc_RNA (1)...(19): siRNA sense strand
cccacgaggucgaacauua

SEQ ID NO: 2215275 - RNA, 19 nt, Homo sapiens
  misc_RNA (1)...(19): siRNA sense strand
guggaugugugaagaguuu

SEQ ID NO: 2215276 - RNA, 19 nt, Homo sapiens
  misc_RNA (1)...(19): siRNA sense strand
gaacacagaaguuuaaagc

SEQ ID NO: 2215277 - RNA, 19 nt, Homo sapiens
  misc_RNA (1)...(19): siRNA sense strand
gcgcgucgauaucacauug

SEQ ID NO: 2215278 - RNA, 19 nt, Homo sapiens
  misc_RNA (1)...(19): siRNA sense strand
ugaagaguuugaucugaaa

SEQ ID NO: 2215279 - RNA, 19 nt, Homo sapiens
  misc_RNA (1)...(19): siRNA sense strand
aagcaaagguuuacacagu

SEQ ID NO: 2215280 - RNA, 19 nt, Homo sapiens
  misc_RNA (1)...(19): siRNA sense strand
gaauaugcccaaaugaugu

SEQ ID NO: 2215281 - RNA, 19 nt, Homo sapiens
  misc_RNA (1)...(19): siRNA sense strand
aagcagaaguuguuaaugg

SEQ ID NO: 2215282 - RNA, 19 nt, Homo sapiens
  misc_RNA (1)...(19): siRNA sense strand
caaccaugaugacaaagug

SEQ ID NO: 2215283 - RNA, 19 nt, Homo sapiens
  misc_RNA (1)...(19): siRNA sense strand
ucuagaauaugcccaaaug

SEQ ID NO: 2215284 - RNA, 19 nt, Homo sapiens
  misc_RNA (1)...(19): siRNA sense strand
cgccagggauggacaguuu

SEQ ID NO: 2215285 - RNA, 19 nt, Homo sapiens
  misc_RNA (1)...(19): siRNA sense strand
gagacaagccguuuugaua

SEQ ID NO: 2215286 - RNA, 19 nt, Homo sapiens
  misc_RNA (1)...(19): siRNA sense strand
gauuagaacacagaaguuu

SEQ ID NO: 2215287 - RNA, 19 nt, Homo sapiens
  misc_RNA (1)...(19): siRNA sense strand
ggaaugugcuacugcaaac

SEQ ID NO: 2215288 - RNA, 19 nt, Homo sapiens
  misc_RNA (1)...(19): siRNA sense strand
gagaugguguacacaguuc

SEQ ID NO: 2215289 - RNA, 19 nt, Homo sapiens
  misc_RNA (1)...(19): siRNA sense strand
gaugaagauuacgagauaa

SEQ ID NO: 2215290 - RNA, 19 nt, Homo sapiens
  misc_RNA (1)...(19): siRNA sense strand
ucaagacaauggcagaaau

SEQ ID NO: 2215291 - RNA, 19 nt, Homo sapiens
  misc_RNA (1)...(19): siRNA sense strand
ccaccuggauuuccuguca

SEQ ID NO: 2215292 - RNA, 19 nt, Homo sapiens
  misc_RNA (1)...(19): siRNA sense strand
ccgaaagagcugacgauua

SEQ ID NO: 2215293 - RNA, 19 nt, Homo sapiens
  misc_RNA (1)...(19): siRNA sense strand
gauaaagcagaaguuguua

SEQ ID NO: 2215294 - RNA, 19 nt, Homo sapiens
  misc_RNA (1)...(19): siRNA sense strand
acacauccauggcccuuga

SEQ ID NO: 2215295 - RNA, 19 nt, Homo sapiens
  misc_RNA (1)...(19): siRNA sense strand
gaagggacccaggcugauu

SEQ ID NO: 2215296 - RNA, 19 nt, Homo sapiens
  misc_RNA (1)...(19): siRNA sense strand
gauauaaagcagacaggaa

SEQ ID NO: 2215297 - RNA, 19 nt, Homo sapiens
  misc_RNA (1)...(19): siRNA sense strand
guaaacaaugugaauguga

SEQ ID NO: 2215298 - RNA, 19 nt, Homo sapiens
  misc_RNA (1)...(19): siRNA sense strand
gaaaacaugagcuggauaa

SEQ ID NO: 2215299 - RNA, 19 nt, Homo sapiens
  misc_RNA (1)...(19): siRNA sense strand
gagcaggucauucccauca

SEQ ID NO: 2215300 - RNA, 19 nt, Homo sapiens
  misc_RNA (1)...(19): siRNA sense strand
gcacggauuacauuuggaa

SEQ ID NO: 2215301 - RNA, 19 nt, Homo sapiens
  misc_RNA (1)...(19): siRNA sense strand
gaaaaguggugccaaacug

SEQ ID NO: 2215302 - RNA, 19 nt, Homo sapiens
  misc_RNA (1)...(19): siRNA sense strand
ucccgaaucuuacuauguu

SEQ ID NO: 2215303 - RNA, 19 nt, Homo sapiens
  misc_RNA (1)...(19): siRNA sense strand
gaagaaucuguaucucaaa

SEQ ID NO: 2215304 - RNA, 19 nt, Homo sapiens
  misc_RNA (1)...(19): siRNA sense strand
ugucuuaaaugcacggauu

SEQ ID NO: 2215305 - RNA, 19 nt, Homo sapiens
  misc_RNA (1)...(19): siRNA sense strand
gaaguuuaaagcaauguug

SEQ ID NO: 2215306 - RNA, 19 nt, Homo sapiens
  misc_RNA (1)...(19): siRNA sense strand
gaacuguggaacaccaauu

SEQ ID NO: 2215307 - RNA, 19 nt, Homo sapiens
  misc_RNA (1)...(19): siRNA sense strand
cgaacauuauugcaucuug

SEQ ID NO: 2215308 - RNA, 19 nt, Homo sapiens
  misc_RNA (1)...(19): siRNA sense strand
aacaugagcuggauaagag

SEQ ID NO: 2215309 - RNA, 19 nt, Homo sapiens
  misc_RNA (1)...(19): siRNA sense strand
aaagcaauguuguggaugu

SEQ ID NO: 2215310 - RNA, 19 nt, Homo sapiens
  misc_RNA (1)...(19): siRNA sense strand
gaaagacagggacauugga

SEQ ID NO: 2215311 - RNA, 19 nt, Homo sapiens
  misc_RNA (1)...(19): siRNA sense strand
gcucacaagcccugucauu

SEQ ID NO: 2215312 - RNA, 19 nt, Homo sapiens
  misc_RNA (1)...(19): siRNA sense strand
uuaaagcaauguuguggau

SEQ ID NO: 2215313 - RNA, 19 nt, Homo sapiens
  misc_RNA (1)...(19): siRNA sense strand
cacagaaguuuaaagcaau

SEQ ID NO: 2215314 - RNA, 19 nt, Homo sapiens
  misc_RNA (1)...(19): siRNA sense strand
gcuucgaccuuucccaaga

SEQ ID NO: 2215315 - RNA, 19 nt, Homo sapiens
  misc_RNA (1)...(19): siRNA sense strand
ggagggaucagccagacaa

SEQ ID NO: 2215316 - RNA, 19 nt, Homo sapiens
  misc_RNA (1)...(19): siRNA sense strand
ugauucagcuucccacauc

SEQ ID NO: 2215317 - RNA, 19 nt, Homo sapiens
  misc_RNA (1)...(19): siRNA sense strand
uugcaagacugagagauuu

SEQ ID NO: 2215318 - RNA, 19 nt, Homo sapiens
  misc_RNA (1)...(19): siRNA sense strand
ggacagauaaagcagaagu

SEQ ID NO: 2215319 - RNA, 19 nt, Homo sapiens
  misc_RNA (1)...(19): siRNA sense strand
agauaaagcagaaguuguu

SEQ ID NO: 2215320 - RNA, 19 nt, Homo sapiens
  misc_RNA (1)...(19): siRNA sense strand
ggauuucuaugugcagaug

SEQ ID NO: 2215321 - RNA, 19 nt, Homo sapiens
  misc_RNA (1)...(19): siRNA sense strand
ucccuuguuucaugucuua

SEQ ID NO: 2215322 - RNA, 19 nt, Homo sapiens
  misc_RNA (1)...(19): siRNA sense strand
gcagaaguuguuaaugguu

SEQ ID NO: 2215323 - RNA, 19 nt, Homo sapiens
  misc_RNA (1)...(19): siRNA sense strand
gggcggaguuaauggaagu

SEQ ID NO: 2215324 - RNA, 19 nt, Homo sapiens
  misc_RNA (1)...(19): siRNA sense strand
ccuaugacgcccaguauga

SEQ ID NO: 2215325 - RNA, 19 nt, Homo sapiens
  misc_RNA (1)...(19): siRNA sense strand
agcaaagguuuacacagua

SEQ ID NO: 2215326 - RNA, 19 nt, Homo sapiens
  misc_RNA (1)...(19): siRNA sense strand
caucgagacuaccacaaca

SEQ ID NO: 2215327 - RNA, 19 nt, Homo sapiens
  misc_RNA (1)...(19): siRNA sense strand
gggaucagccagacaaaca

SEQ ID NO: 2215328 - RNA, 19 nt, Homo sapiens
  misc_RNA (1)...(19): siRNA sense strand
ccacgaggucgaacauuau

SEQ ID NO: 2215329 - RNA, 19 nt, Homo sapiens
  misc_RNA (1)...(19): siRNA sense strand
aaacaugagcuggauaaga

SEQ ID NO: 2215330 - RNA, 19 nt, Homo sapiens
  misc_RNA (1)...(19): siRNA sense strand
gcagaugaaaugggaauuc

SEQ ID NO: 2215331 - RNA, 19 nt, Homo sapiens
  misc_RNA (1)...(19): siRNA sense strand
gcgccucacucuggacuug

SEQ ID NO: 2215332 - RNA, 19 nt, Homo sapiens
  misc_RNA (1)...(19): siRNA sense strand
uaagagggaggcguaguuu

SEQ ID NO: 2215333 - RNA, 19 nt, Homo sapiens
  misc_RNA (1)...(19): siRNA sense strand
uaaagcagaugugacaaaa

SEQ ID NO: 2215334 - RNA, 19 nt, Homo sapiens
  misc_RNA (1)...(19): siRNA sense strand
agaauaugcccaaaugaug

SEQ ID NO: 2215335 - RNA, 19 nt, Homo sapiens
  misc_RNA (1)...(19): siRNA sense strand
gagacuaccacaacacauc

SEQ ID NO: 2215336 - RNA, 19 nt, Homo sapiens
  misc_RNA (1)...(19): siRNA sense strand
caagacaauggcagaaaug

SEQ ID NO: 2215337 - RNA, 19 nt, Homo sapiens
  misc_RNA (1)...(19): siRNA sense strand
caaucuguguuugaaauuc

SEQ ID NO: 2215338 - RNA, 19 nt, Homo sapiens
  misc_RNA (1)...(19): siRNA sense strand
gacaggaacccgcuggaau

SEQ ID NO: 2215339 - RNA, 19 nt, Homo sapiens
  misc_RNA (1)...(19): siRNA sense strand
cacaagcccugucauuaac

SEQ ID NO: 2215340 - RNA, 19 nt, Homo sapiens
  misc_RNA (1)...(19): siRNA sense strand
gauggacaguuuuacauga

SEQ ID NO: 2215341 - RNA, 19 nt, Homo sapiens
  misc_RNA (1)...(19): siRNA sense strand
uagaauaugcccaaaugau

SEQ ID NO: 2215342 - RNA, 19 nt, Homo sapiens
  misc_RNA (1)...(19): siRNA sense strand
gcuguuuccuugggacauu

SEQ ID NO: 2215343 - RNA, 19 nt, Homo sapiens
  misc_RNA (1)...(19): siRNA sense strand
cagcuucccacaucacaaa

SEQ ID NO: 2215344 - RNA, 19 nt, Homo sapiens
  misc_RNA (1)...(19): siRNA sense strand
gaaucuguaucucaaaaug

SEQ ID NO: 2215345 - RNA, 19 nt, Homo sapiens
  misc_RNA (1)...(19): siRNA sense strand
aaagagcugacgauuagaa

SEQ ID NO: 2215346 - RNA, 19 nt, Homo sapiens
  misc_RNA (1)...(19): siRNA sense strand
aaugaagaguuugaucuga

SEQ ID NO: 2215347 - RNA, 19 nt, Homo sapiens
  misc_RNA (1)...(19): siRNA sense strand
guuacgaagcaaagguuua

SEQ ID NO: 2215348 - RNA, 19 nt, Homo sapiens
  misc_RNA (1)...(19): siRNA sense strand
ccaaacugcgcgucgauau

SEQ ID NO: 2215349 - RNA, 19 nt, Homo sapiens
  misc_RNA (1)...(19): siRNA sense strand
augaagaguuugaucugaa

SEQ ID NO: 2215350 - RNA, 19 nt, Homo sapiens
  misc_RNA (1)...(19): siRNA sense strand
aaacugcgcgucgauauca

SEQ ID NO: 2215351 - RNA, 19 nt, Homo sapiens
  misc_RNA (1)...(19): siRNA sense strand
aagcagaugugacaaaaga

SEQ ID NO: 2215352 - RNA, 19 nt, Homo sapiens
  misc_RNA (1)...(19): siRNA sense strand
guugaucaaucuguguuug

SEQ ID NO: 2215353 - RNA, 19 nt, Homo sapiens
  misc_RNA (1)...(19): siRNA sense strand
acagaaguuuaaagcaaug

SEQ ID NO: 2215354 - RNA, 19 nt, Homo sapiens
  misc_RNA (1)...(19): siRNA sense strand
gaacuuucaggaccagcuu

SEQ ID NO: 2215355 - RNA, 19 nt, Homo sapiens
  misc_RNA (1)...(19): siRNA sense strand
gcaggagccaggaacuuuc

SEQ ID NO: 2215356 - RNA, 19 nt, Homo sapiens
  misc_RNA (1)...(19): siRNA sense strand
cuguagcacugccgaagaa

SEQ ID NO: 2215357 - RNA, 19 nt, Homo sapiens
  misc_RNA (1)...(19): siRNA sense strand
ggaaucugcucgagucuua

SEQ ID NO: 2215358 - RNA, 19 nt, Homo sapiens
  misc_RNA (1)...(19): siRNA sense strand
ccaaagagcuggaggaaug

SEQ ID NO: 2215359 - RNA, 19 nt, Homo sapiens
  misc_RNA (1)...(19): siRNA sense strand
cgaaagagcugacgauuag

SEQ ID NO: 2215360 - RNA, 19 nt, Homo sapiens
  misc_RNA (1)...(19): siRNA sense strand
ggaacccgcuggaaucuuu

SEQ ID NO: 2215361 - RNA, 19 nt, Homo sapiens
  misc_RNA (1)...(19): siRNA sense strand
cgaagaaucuguaucucaa

SEQ ID NO: 2215362 - RNA, 19 nt, Homo sapiens
  misc_RNA (1)...(19): siRNA sense strand
agaugaagauuacgagaua

SEQ ID NO: 2215363 - RNA, 19 nt, Homo sapiens
  misc_RNA (1)...(19): siRNA sense strand
cagaaguuguuaaugguua

SEQ ID NO: 2215364 - RNA, 19 nt, Homo sapiens
  misc_RNA (1)...(19): siRNA sense strand
ggaauucccaccuggauuu

SEQ ID NO: 2215365 - RNA, 19 nt, Homo sapiens
  misc_RNA (1)...(19): siRNA sense strand
ucacaagcccugucauuaa

SEQ ID NO: 2215366 - RNA, 19 nt, Homo sapiens
  misc_RNA (1)...(19): siRNA sense strand
gaggacagauaaagcagaa

SEQ ID NO: 2215367 - RNA, 19 nt, Homo sapiens
  misc_RNA (1)...(19): siRNA sense strand
acacagaaguuuaaagcaa

SEQ ID NO: 2215368 - RNA, 19 nt, Homo sapiens
  misc_RNA (1)...(19): siRNA sense strand
gcccuugguuucuagaaua

SEQ ID NO: 2215369 - RNA, 19 nt, Homo sapiens
  misc_RNA (1)...(19): siRNA sense strand
ucacauugcugggauuuga

SEQ ID NO: 2215370 - RNA, 19 nt, Homo sapiens
  misc_RNA (1)...(19): siRNA sense strand
guacacaguucuccaacau

SEQ ID NO: 2215371 - RNA, 19 nt, Homo sapiens
  misc_RNA (1)...(19): siRNA sense strand
acugagagauuucaucaaa

SEQ ID NO: 2215372 - RNA, 19 nt, Homo sapiens
  misc_RNA (1)...(19): siRNA sense strand
gcaggucauucccaucauu

SEQ ID NO: 2215373 - RNA, 19 nt, Homo sapiens
  misc_RNA (1)...(19): siRNA sense strand
acaccagccucgauacuaa

SEQ ID NO: 2215374 - RNA, 19 nt, Homo sapiens
  misc_RNA (1)...(19): siRNA sense strand
cccacgaggucgaacauua

SEQ ID NO: 2215375 - RNA, 19 nt, Homo sapiens
  misc_RNA (1)...(19): siRNA sense strand
guggaugugugaagaguuu

SEQ ID NO: 2215376 - RNA, 19 nt, Homo sapiens
  misc_RNA (1)...(19): siRNA sense strand
gaacacagaaguuuaaagc

SEQ ID NO: 2215377 - RNA, 19 nt, Homo sapiens
  misc_RNA (1)...(19): siRNA sense strand
gcgcgucgauaucacauug

SEQ ID NO: 2215378 - RNA, 19 nt, Homo sapiens
  misc_RNA (1)...(19): siRNA sense strand
ugaagaguuugaucugaaa

SEQ ID NO: 2215379 - RNA, 19 nt, Homo sapiens
  misc_RNA (1)...(19): siRNA sense strand
aagcaaagguuuacacagu

SEQ ID NO: 2215380 - RNA, 19 nt, Homo sapiens
  misc_RNA (1)...(19): siRNA sense strand
gaauaugcccaaaugaugu

SEQ ID NO: 2215381 - RNA, 19 nt, Homo sapiens
  misc_RNA (1)...(19): siRNA sense strand
aagcagaaguuguuaaugg

SEQ ID NO: 2215382 - RNA, 19 nt, Homo sapiens
  misc_RNA (1)...(19): siRNA sense strand
caaccaugaugacaaagug

SEQ ID NO: 2215383 - RNA, 19 nt, Homo sapiens
  misc_RNA (1)...(19): siRNA sense strand
ucuagaauaugcccaaaug

SEQ ID NO: 2215384 - RNA, 19 nt, Homo sapiens
  misc_RNA (1)...(19): siRNA sense strand
cgccagggauggacaguuu

SEQ ID NO: 2215385 - RNA, 19 nt, Homo sapiens
  misc_RNA (1)...(19): siRNA sense strand
gagacaagccguuuugaua

SEQ ID NO: 2215386 - RNA, 19 nt, Homo sapiens
  misc_RNA (1)...(19): siRNA sense strand
gauuagaacacagaaguuu

SEQ ID NO: 2215387 - RNA, 19 nt, Homo sapiens
  misc_RNA (1)...(19): siRNA sense strand
ggaaugugcuacugcaaac

SEQ ID NO: 2215388 - RNA, 19 nt, Homo sapiens
  misc_RNA (1)...(19): siRNA sense strand
gagaugguguacacaguuc

SEQ ID NO: 2215389 - RNA, 19 nt, Homo sapiens
  misc_RNA (1)...(19): siRNA sense strand
gaugaagauuacgagauaa

SEQ ID NO: 2215390 - RNA, 19 nt, Homo sapiens
  misc_RNA (1)...(19): siRNA sense strand
ucaagacaauggcagaaau

SEQ ID NO: 2215391 - RNA, 19 nt, Homo sapiens
  misc_RNA (1)...(19): siRNA sense strand
ccaccuggauuuccuguca

SEQ ID NO: 2215392 - RNA, 19 nt, Homo sapiens
  misc_RNA (1)...(19): siRNA sense strand
ccgaaagagcugacgauua

SEQ ID NO: 2215393 - RNA, 19 nt, Homo sapiens
  misc_RNA (1)...(19): siRNA sense strand
gauaaagcagaaguuguua

SEQ ID NO: 2215394 - RNA, 19 nt, Homo sapiens
  misc_RNA (1)...(19): siRNA sense strand
acacauccauggcccuuga

SEQ ID NO: 2215395 - RNA, 19 nt, Homo sapiens
  misc_RNA (1)...(19): siRNA sense strand
gaagggacccaggcugauu

SEQ ID NO: 2215396 - RNA, 19 nt, Homo sapiens
  misc_RNA (1)...(19): siRNA sense strand
guaaacaaugugaauguga

SEQ ID NO: 2215397 - RNA, 19 nt, Homo sapiens
  misc_RNA (1)...(19): siRNA sense strand
gaaaacaugagcuggauaa

SEQ ID NO: 2215398 - RNA, 19 nt, Homo sapiens
  misc_RNA (1)...(19): siRNA sense strand
gagcaggucauucccauca

SEQ ID NO: 2215399 - RNA, 19 nt, Homo sapiens
  misc_RNA (1)...(19): siRNA sense strand
gcacggauuacauuuggaa

SEQ ID NO: 2215400 - RNA, 19 nt, Homo sapiens
  misc_RNA (1)...(19): siRNA sense strand
gaaaaguggugccaaacug

SEQ ID NO: 2215401 - RNA, 19 nt, Homo sapiens
  misc_RNA (1)...(19): siRNA sense strand
ucccgaaucuuacuauguu

SEQ ID NO: 2215402 - RNA, 19 nt, Homo sapiens
  misc_RNA (1)...(19): siRNA sense strand
gaagaaucuguaucucaaa

SEQ ID NO: 2215403 - RNA, 19 nt, Homo sapiens
  misc_RNA (1)...(19): siRNA sense strand
ugucuuaaaugcacggauu

SEQ ID NO: 2215404 - RNA, 19 nt, Homo sapiens
  misc_RNA (1)...(19): siRNA sense strand
gaaguuuaaagcaauguug

SEQ ID NO: 2215405 - RNA, 19 nt, Homo sapiens
  misc_RNA (1)...(19): siRNA sense strand
gaacuguggaacaccaauu

SEQ ID NO: 2215406 - RNA, 19 nt, Homo sapiens
  misc_RNA (1)...(19): siRNA sense strand
cgaacauuauugcaucuug

SEQ ID NO: 2215407 - RNA, 19 nt, Homo sapiens
  misc_RNA (1)...(19): siRNA sense strand
aacaugagcuggauaagag

SEQ ID NO: 2215408 - RNA, 19 nt, Homo sapiens
  misc_RNA (1)...(19): siRNA sense strand
aaagcaauguuguggaugu

SEQ ID NO: 2215409 - RNA, 19 nt, Homo sapiens
  misc_RNA (1)...(19): siRNA sense strand
gaaagacagggacauugga

SEQ ID NO: 2215410 - RNA, 19 nt, Homo sapiens
  misc_RNA (1)...(19): siRNA sense strand
gcucacaagcccugucauu

SEQ ID NO: 2215411 - RNA, 19 nt, Homo sapiens
  misc_RNA (1)...(19): siRNA sense strand
uuaaagcaauguuguggau

SEQ ID NO: 2215412 - RNA, 19 nt, Homo sapiens
  misc_RNA (1)...(19): siRNA sense strand
cacagaaguuuaaagcaau

SEQ ID NO: 2215413 - RNA, 19 nt, Homo sapiens
  misc_RNA (1)...(19): siRNA sense strand
gcuucgaccuuucccaaga

SEQ ID NO: 2215414 - RNA, 19 nt, Homo sapiens
  misc_RNA (1)...(19): siRNA sense strand
ggagggaucagccagacaa

SEQ ID NO: 2215415 - RNA, 19 nt, Homo sapiens
  misc_RNA (1)...(19): siRNA sense strand
ugauucagcuucccacauc

SEQ ID NO: 2215416 - RNA, 19 nt, Homo sapiens
  misc_RNA (1)...(19): siRNA sense strand
uugcaagacugagagauuu

SEQ ID NO: 2215417 - RNA, 19 nt, Homo sapiens
  misc_RNA (1)...(19): siRNA sense strand
ggacagauaaagcagaagu

SEQ ID NO: 2215418 - RNA, 19 nt, Homo sapiens
  misc_RNA (1)...(19): siRNA sense strand
agauaaagcagaaguuguu

SEQ ID NO: 2215419 - RNA, 19 nt, Homo sapiens
  misc_RNA (1)...(19): siRNA sense strand
ggauuucuaugugcagaug

SEQ ID NO: 2215420 - RNA, 19 nt, Homo sapiens
  misc_RNA (1)...(19): siRNA sense strand
ucccuuguuucaugucuua

SEQ ID NO: 2215421 - RNA, 19 nt, Homo sapiens
  misc_RNA (1)...(19): siRNA sense strand
gcagaaguuguuaaugguu

SEQ ID NO: 2215422 - RNA, 19 nt, Homo sapiens
  misc_RNA (1)...(19): siRNA sense strand
gggcggaguuaauggaagu

SEQ ID NO: 2215423 - RNA, 19 nt, Homo sapiens
  misc_RNA (1)...(19): siRNA sense strand
ccuaugacgcccaguauga

SEQ ID NO: 2215424 - RNA, 19 nt, Homo sapiens
  misc_RNA (1)...(19): siRNA sense strand
agcaaagguuuacacagua

SEQ ID NO: 2215425 - RNA, 19 nt, Homo sapiens
  misc_RNA (1)...(19): siRNA sense strand
caucgagacuaccacaaca

SEQ ID NO: 2215426 - RNA, 19 nt, Homo sapiens
  misc_RNA (1)...(19): siRNA sense strand
gggaucagccagacaaaca

SEQ ID NO: 2215427 - RNA, 19 nt, Homo sapiens
  misc_RNA (1)...(19): siRNA sense strand
ccacgaggucgaacauuau

SEQ ID NO: 2215428 - RNA, 19 nt, Homo sapiens
  misc_RNA (1)...(19): siRNA sense strand
aaacaugagcuggauaaga

SEQ ID NO: 2215429 - RNA, 19 nt, Homo sapiens
  misc_RNA (1)...(19): siRNA sense strand
gcagaugaaaugggaauuc

SEQ ID NO: 2215430 - RNA, 19 nt, Homo sapiens
  misc_RNA (1)...(19): siRNA sense strand
uaaagcagaugugacaaaa

SEQ ID NO: 2215431 - RNA, 19 nt, Homo sapiens
  misc_RNA (1)...(19): siRNA sense strand
gcgccucacucuggacuug

SEQ ID NO: 2215432 - RNA, 19 nt, Homo sapiens
  misc_RNA (1)...(19): siRNA sense strand
uaagagggaggcguaguuu

SEQ ID NO: 2215433 - RNA, 19 nt, Homo sapiens
  misc_RNA (1)...(19): siRNA sense strand
agaauaugcccaaaugaug

SEQ ID NO: 2215434 - RNA, 19 nt, Homo sapiens
  misc_RNA (1)...(19): siRNA sense strand
gauggacaguuuuacauga

SEQ ID NO: 2215435 - RNA, 19 nt, Homo sapiens
  misc_RNA (1)...(19): siRNA sense strand
caagacaauggcagaaaug

SEQ ID NO: 2215436 - RNA, 19 nt, Homo sapiens
  misc_RNA (1)...(19): siRNA sense strand
caaucuguguuugaaauuc

SEQ ID NO: 2215437 - RNA, 19 nt, Homo sapiens
  misc_RNA (1)...(19): siRNA sense strand
cacaagcccugucauuaac

SEQ ID NO: 2215438 - RNA, 19 nt, Homo sapiens
  misc_RNA (1)...(19): siRNA sense strand
gagacuaccacaacacauc

SEQ ID NO: 2215439 - RNA, 19 nt, Homo sapiens
  misc_RNA (1)...(19): siRNA sense strand
uagaauaugcccaaaugau

SEQ ID NO: 2215440 - RNA, 19 nt, Homo sapiens
  misc_RNA (1)...(19): siRNA sense strand
gcuguuuccuugggacauu

SEQ ID NO: 2215441 - RNA, 19 nt, Homo sapiens
  misc_RNA (1)...(19): siRNA sense strand
cagcuucccacaucacaaa

SEQ ID NO: 2215442 - RNA, 19 nt, Homo sapiens
  misc_RNA (1)...(19): siRNA sense strand
gaaucuguaucucaaaaug

SEQ ID NO: 2215443 - RNA, 19 nt, Homo sapiens
  misc_RNA (1)...(19): siRNA sense strand
aaagagcugacgauuagaa

SEQ ID NO: 2215444 - RNA, 19 nt, Homo sapiens
  misc_RNA (1)...(19): siRNA sense strand
aaugaagaguuugaucuga

SEQ ID NO: 2215445 - RNA, 19 nt, Homo sapiens
  misc_RNA (1)...(19): siRNA sense strand
guuacgaagcaaagguuua

SEQ ID NO: 2215446 - RNA, 19 nt, Homo sapiens
  misc_RNA (1)...(19): siRNA sense strand
ccaaacugcgcgucgauau

SEQ ID NO: 2215447 - RNA, 19 nt, Homo sapiens
  misc_RNA (1)...(19): siRNA sense strand
augaagaguuugaucugaa

SEQ ID NO: 2215448 - RNA, 19 nt, Homo sapiens
  misc_RNA (1)...(19): siRNA sense strand
aaacugcgcgucgauauca

SEQ ID NO: 2215449 - RNA, 19 nt, Homo sapiens
  misc_RNA (1)...(19): siRNA sense strand
aagcagaugugacaaaaga

SEQ ID NO: 2215450 - RNA, 19 nt, Homo sapiens
  misc_RNA (1)...(19): siRNA sense strand
guugaucaaucuguguuug

SEQ ID NO: 2215451 - RNA, 19 nt, Homo sapiens
  misc_RNA (1)...(19): siRNA sense strand
acagaaguuuaaagcaaug

SEQ ID NO: 2215452 - RNA, 19 nt, Homo sapiens
  misc_RNA (1)...(19): siRNA sense strand
gaacuuucaggaccagcuu

SEQ ID NO: 2215453 - RNA, 19 nt, Homo sapiens
  misc_RNA (1)...(19): siRNA sense strand
gcaggagccaggaacuuuc

SEQ ID NO: 2215454 - RNA, 19 nt, Homo sapiens
  misc_RNA (1)...(19): siRNA sense strand
cuguagcacugccgaagaa

SEQ ID NO: 2215455 - RNA, 19 nt, Homo sapiens
  misc_RNA (1)...(19): siRNA sense strand
uauugcaucuugcuguuuc

SEQ ID NO: 2215456 - RNA, 19 nt, Homo sapiens
  misc_RNA (1)...(19): siRNA sense strand
ccugaugaguacuucaaug

SEQ ID NO: 2215457 - RNA, 19 nt, Homo sapiens
  misc_RNA (1)...(19): siRNA sense strand
gaagaaagccuaccugaaa

SEQ ID NO: 2215458 - RNA, 19 nt, Homo sapiens
  misc_RNA (1)...(19): siRNA sense strand
ugaagaagcuggagaagaa

SEQ ID NO: 2215459 - RNA, 19 nt, Homo sapiens
  misc_RNA (1)...(19): siRNA sense strand
ggaaagcccuccugacaga

SEQ ID NO: 2215460 - RNA, 19 nt, Homo sapiens
  misc_RNA (1)...(19): siRNA sense strand
gagaagagcuuugaaccuu

SEQ ID NO: 2215461 - RNA, 19 nt, Homo sapiens
  misc_RNA (1)...(19): siRNA sense strand
caacaucauuuaccgagua

SEQ ID NO: 2215462 - RNA, 19 nt, Homo sapiens
  misc_RNA (1)...(19): siRNA sense strand
ggagcaagcugacgcagaa

SEQ ID NO: 2215463 - RNA, 19 nt, Homo sapiens
  misc_RNA (1)...(19): siRNA sense strand
gaucgauguuucaauauug

SEQ ID NO: 2215464 - RNA, 19 nt, Homo sapiens
  misc_RNA (1)...(19): siRNA sense strand
gagugaacauucucauaaa

SEQ ID NO: 2215465 - RNA, 19 nt, Homo sapiens
  misc_RNA (1)...(19): siRNA sense strand
gaaccaagguccucaccau

SEQ ID NO: 2215466 - RNA, 19 nt, Homo sapiens
  misc_RNA (1)...(19): siRNA sense strand
ggaucgauguuucaauauu

SEQ ID NO: 2215467 - RNA, 19 nt, Homo sapiens
  misc_RNA (1)...(19): siRNA sense strand
ggaggaggaugcugaggaa

SEQ ID NO: 2215468 - RNA, 19 nt, Homo sapiens
  misc_RNA (1)...(19): siRNA sense strand
ccugaagacucacugcuua

SEQ ID NO: 2215469 - RNA, 19 nt, Homo sapiens
  misc_RNA (1)...(19): siRNA sense strand
gaagucggccugaucauga

SEQ ID NO: 2215470 - RNA, 19 nt, Homo sapiens
  misc_RNA (1)...(19): siRNA sense strand
ugggaucgauguuucaaua

SEQ ID NO: 2215471 - RNA, 19 nt, Homo sapiens
  misc_RNA (1)...(19): siRNA sense strand
gaaagcauccugggucuga

SEQ ID NO: 2215472 - RNA, 19 nt, Homo sapiens
  misc_RNA (1)...(19): siRNA sense strand
aaaccuugcugcagagaaa

SEQ ID NO: 2215473 - RNA, 19 nt, Homo sapiens
  misc_RNA (1)...(19): siRNA sense strand
ccacagagccugagaagag

SEQ ID NO: 2215474 - RNA, 19 nt, Homo sapiens
  misc_RNA (1)...(19): siRNA sense strand
aggagaagcuggccaagaa

SEQ ID NO: 2215475 - RNA, 19 nt, Homo sapiens
  misc_RNA (1)...(19): siRNA sense strand
gaauguggcccgaaucugu

SEQ ID NO: 2215476 - RNA, 19 nt, Homo sapiens
  misc_RNA (1)...(19): siRNA sense strand
ggcgagaccuccacacuuc

SEQ ID NO: 2215477 - RNA, 19 nt, Homo sapiens
  misc_RNA (1)...(19): siRNA sense strand
ggccaagccugaagacuca

SEQ ID NO: 2215478 - RNA, 19 nt, Homo sapiens
  misc_RNA (1)...(19): siRNA sense strand
uagaaaagcuggaagagaa

SEQ ID NO: 2215479 - RNA, 19 nt, Homo sapiens
  misc_RNA (1)...(19): siRNA sense strand
gaagacucacugcuuauug

SEQ ID NO: 2215480 - RNA, 19 nt, Homo sapiens
  misc_RNA (1)...(19): siRNA sense strand
ucaacugguuccacaacua

SEQ ID NO: 2215481 - RNA, 19 nt, Homo sapiens
  misc_RNA (1)...(19): siRNA sense strand
agagugaacauucucauaa

SEQ ID NO: 2215482 - RNA, 19 nt, Homo sapiens
  misc_RNA (1)...(19): siRNA sense strand
ggaggagagugaacauucu

SEQ ID NO: 2215483 - RNA, 19 nt, Homo sapiens
  misc_RNA (1)...(19): siRNA sense strand
uggagaagcugagggauau

SEQ ID NO: 2215484 - RNA, 19 nt, Homo sapiens
  misc_RNA (1)...(19): siRNA sense strand
gagcugagcauccugaaag

SEQ ID NO: 2215485 - RNA, 19 nt, Homo sapiens
  misc_RNA (1)...(19): siRNA sense strand
uuaauuccgucgcuucuga

SEQ ID NO: 2215486 - RNA, 19 nt, Homo sapiens
  misc_RNA (1)...(19): siRNA sense strand
caccagcugugcaguaaau

SEQ ID NO: 2215487 - RNA, 19 nt, Homo sapiens
  misc_RNA (1)...(19): siRNA sense strand
gaaggccuaucagcuggaa

SEQ ID NO: 2215488 - RNA, 19 nt, Homo sapiens
  misc_RNA (1)...(19): siRNA sense strand
ccaucgagcuccucuccuu

SEQ ID NO: 2215489 - RNA, 19 nt, Homo sapiens
  misc_RNA (1)...(19): siRNA sense strand
aaaucaaaguccuacauuc

SEQ ID NO: 2215490 - RNA, 19 nt, Homo sapiens
  misc_RNA (1)...(19): siRNA sense strand
gaucaagcaggaacagaug

SEQ ID NO: 2215491 - RNA, 19 nt, Homo sapiens
  misc_RNA (1)...(19): siRNA sense strand
gaugaagucggccugauca

SEQ ID NO: 2215492 - RNA, 19 nt, Homo sapiens
  misc_RNA (1)...(19): siRNA sense strand
ggaggaugcugaggaagag

SEQ ID NO: 2215493 - RNA, 19 nt, Homo sapiens
  misc_RNA (1)...(19): siRNA sense strand
gagacucacccuucagaga

SEQ ID NO: 2215494 - RNA, 19 nt, Homo sapiens
  misc_RNA (1)...(19): siRNA sense strand
gagaagcugagggauauga

SEQ ID NO: 2215495 - RNA, 19 nt, Homo sapiens
  misc_RNA (1)...(19): siRNA sense strand
guggagaagcugagggaua

SEQ ID NO: 2215496 - RNA, 19 nt, Homo sapiens
  misc_RNA (1)...(19): siRNA sense strand
ugaccaaccuggagaaagc

SEQ ID NO: 2215497 - RNA, 19 nt, Homo sapiens
  misc_RNA (1)...(19): siRNA sense strand
gcaugcagcuguggcucaa

SEQ ID NO: 2215498 - RNA, 19 nt, Homo sapiens
  misc_RNA (1)...(19): siRNA sense strand
aaucaaaguccuacauuca

SEQ ID NO: 2215499 - RNA, 19 nt, Homo sapiens
  misc_RNA (1)...(19): siRNA sense strand
gaagaagcuggagaagaaa

SEQ ID NO: 2215500 - RNA, 19 nt, Homo sapiens
  misc_RNA (1)...(19): siRNA sense strand
acucacugcuuauugcaaa

SEQ ID NO: 2215501 - RNA, 19 nt, Homo sapiens
  misc_RNA (1)...(19): siRNA sense strand
gaggugguggcccuuagua

SEQ ID NO: 2215502 - RNA, 19 nt, Homo sapiens
  misc_RNA (1)...(19): siRNA sense strand
guaaugauggacucccaaa

SEQ ID NO: 2215503 - RNA, 19 nt, Homo sapiens
  misc_RNA (1)...(19): siRNA sense strand
gaagccaaccgugaaggaa

SEQ ID NO: 2215504 - RNA, 19 nt, Homo sapiens
  misc_RNA (1)...(19): siRNA sense strand
ggcacaagcugagccugaa

SEQ ID NO: 2215505 - RNA, 19 nt, Homo sapiens
  misc_RNA (1)...(19): siRNA sense strand
gcucaggaccauccaagug

SEQ ID NO: 2215506 - RNA, 19 nt, Homo sapiens
  misc_RNA (1)...(19): siRNA sense strand
agacucacccuucagagaa

SEQ ID NO: 2215507 - RNA, 19 nt, Homo sapiens
  misc_RNA (1)...(19): siRNA sense strand
ccaacaccgucaucaacug

SEQ ID NO: 2215508 - RNA, 19 nt, Homo sapiens
  misc_RNA (1)...(19): siRNA sense strand
ugagggauaugaagaagcu

SEQ ID NO: 2215509 - RNA, 19 nt, Homo sapiens
  misc_RNA (1)...(19): siRNA sense strand
caccaggccucaugauguc

SEQ ID NO: 2215510 - RNA, 19 nt, Homo sapiens
  misc_RNA (1)...(19): siRNA sense strand
ggaucaagcaggaacagau

SEQ ID NO: 2215511 - RNA, 19 nt, Homo sapiens
  misc_RNA (1)...(19): siRNA sense strand
agaggacgauuccaucaag

SEQ ID NO: 2215512 - RNA, 19 nt, Homo sapiens
  misc_RNA (1)...(19): siRNA sense strand
uggccaaucugaacaacau

SEQ ID NO: 2215513 - RNA, 19 nt, Homo sapiens
  misc_RNA (1)...(19): siRNA sense strand
ucaccaggccucaugaugu

SEQ ID NO: 2215514 - RNA, 19 nt, Homo sapiens
  misc_RNA (1)...(19): siRNA sense strand
gacugucccucacuucauc

SEQ ID NO: 2215515 - RNA, 19 nt, Homo sapiens
  misc_RNA (1)...(19): siRNA sense strand
cggcagagaucgccuucca

SEQ ID NO: 2215516 - RNA, 19 nt, Homo sapiens
  misc_RNA (1)...(19): siRNA sense strand
ugacggcacucggacuuuc

SEQ ID NO: 2215517 - RNA, 19 nt, Homo sapiens
  misc_RNA (1)...(19): siRNA sense strand
cgggaaagcccuccugaca

SEQ ID NO: 2215518 - RNA, 19 nt, Homo sapiens
  misc_RNA (1)...(19): siRNA sense strand
gccuggaggugucacugaa

SEQ ID NO: 2215519 - RNA, 19 nt, Homo sapiens
  misc_RNA (1)...(19): siRNA sense strand
ccucacagacaacaaucua

SEQ ID NO: 2215520 - RNA, 19 nt, Homo sapiens
  misc_RNA (1)...(19): siRNA sense strand
caaguccgaggccauagaa

SEQ ID NO: 2215521 - RNA, 19 nt, Homo sapiens
  misc_RNA (1)...(19): siRNA sense strand
aaacggagcugagcauccu

SEQ ID NO: 2215522 - RNA, 19 nt, Homo sapiens
  misc_RNA (1)...(19): siRNA sense strand
gaccaacaccgucaucaac

SEQ ID NO: 2215523 - RNA, 19 nt, Homo sapiens
  misc_RNA (1)...(19): siRNA sense strand
agaagaaagccuaccugaa

SEQ ID NO: 2215524 - RNA, 19 nt, Homo sapiens
  misc_RNA (1)...(19): siRNA sense strand
ggacgauuccaucaaggau

SEQ ID NO: 2215525 - RNA, 19 nt, Homo sapiens
  misc_RNA (1)...(19): siRNA sense strand
gcucagacgacgccaucaa

SEQ ID NO: 2215526 - RNA, 19 nt, Homo sapiens
  misc_RNA (1)...(19): siRNA sense strand
acccggacccuuuaaguuu

SEQ ID NO: 2215527 - RNA, 19 nt, Homo sapiens
  misc_RNA (1)...(19): siRNA sense strand
aaugugggaucgauguuuc

SEQ ID NO: 2215528 - RNA, 19 nt, Homo sapiens
  misc_RNA (1)...(19): siRNA sense strand
ccaggccagucccacagaa

SEQ ID NO: 2215529 - RNA, 19 nt, Homo sapiens
  misc_RNA (1)...(19): siRNA sense strand
gugaacauucucauaaaca

SEQ ID NO: 2215530 - RNA, 19 nt, Homo sapiens
  misc_RNA (1)...(19): siRNA sense strand
caaugugggaucgauguuu

SEQ ID NO: 2215531 - RNA, 19 nt, Homo sapiens
  misc_RNA (1)...(19): siRNA sense strand
ugaagacucacugcuuauu

SEQ ID NO: 2215532 - RNA, 19 nt, Homo sapiens
  misc_RNA (1)...(19): siRNA sense strand
cagcuggccucugucaaca

SEQ ID NO: 2215533 - RNA, 19 nt, Homo sapiens
  misc_RNA (1)...(19): siRNA sense strand
gaaaccuugcugcagagaa

SEQ ID NO: 2215534 - RNA, 19 nt, Homo sapiens
  misc_RNA (1)...(19): siRNA sense strand
ggagcugagcauccugaaa

SEQ ID NO: 2215535 - RNA, 19 nt, Homo sapiens
  misc_RNA (1)...(19): siRNA sense strand
aagaaagccuaccugaaac

SEQ ID NO: 2215536 - RNA, 19 nt, Homo sapiens
  misc_RNA (1)...(19): siRNA sense strand
gcugagggauaugaagaag

SEQ ID NO: 2215537 - RNA, 19 nt, Homo sapiens
  misc_RNA (1)...(19): siRNA sense strand
acgauuccaucaaggauuc

SEQ ID NO: 2215538 - RNA, 19 nt, Homo sapiens
  misc_RNA (1)...(19): siRNA sense strand
caucagaggacgauuccau

SEQ ID NO: 2215539 - RNA, 19 nt, Homo sapiens
  misc_RNA (1)...(19): siRNA sense strand
gaguguuuacaagcaauua

SEQ ID NO: 2215540 - RNA, 19 nt, Homo sapiens
  misc_RNA (1)...(19): siRNA sense strand
uggaagcgauuugaucuac

SEQ ID NO: 2215541 - RNA, 19 nt, Homo sapiens
  misc_RNA (1)...(19): siRNA sense strand
gcccugacucugagacuga

SEQ ID NO: 2215542 - RNA, 19 nt, Homo sapiens
  misc_RNA (1)...(19): siRNA sense strand
uagagcaggccaagaagga

SEQ ID NO: 2215543 - RNA, 19 nt, Homo sapiens
  misc_RNA (1)...(19): siRNA sense strand
gaaaaucaaaguccuacau

SEQ ID NO: 2215544 - RNA, 19 nt, Homo sapiens
  misc_RNA (1)...(19): siRNA sense strand
cagcggguguuugggcauu

SEQ ID NO: 2215545 - RNA, 19 nt, Homo sapiens
  misc_RNA (1)...(19): siRNA sense strand
gacuucacccggacccuuu

SEQ ID NO: 2215546 - RNA, 19 nt, Homo sapiens
  misc_RNA (1)...(19): siRNA sense strand
caacugguuccacaacuac

SEQ ID NO: 2215547 - RNA, 19 nt, Homo sapiens
  misc_RNA (1)...(19): siRNA sense strand
gaaagcccuccugacagaa

SEQ ID NO: 2215548 - RNA, 19 nt, Homo sapiens
  misc_RNA (1)...(19): siRNA sense strand
gaaggugcugggccuguca

SEQ ID NO: 2215549 - RNA, 19 nt, Homo sapiens
  misc_RNA (1)...(19): siRNA sense strand
gacgauuccaucaaggauu

SEQ ID NO: 2215550 - RNA, 19 nt, Homo sapiens
  misc_RNA (1)...(19): siRNA sense strand
caauauuggaagcgauuug

SEQ ID NO: 2215551 - RNA, 19 nt, Homo sapiens
  misc_RNA (1)...(19): siRNA sense strand
uggaaagucuccgggaaca

SEQ ID NO: 2215552 - RNA, 19 nt, Homo sapiens
  misc_RNA (1)...(19): siRNA sense strand
cucaccagcugugcaguaa

SEQ ID NO: 2215553 - RNA, 19 nt, Homo sapiens
  misc_RNA (1)...(19): siRNA sense strand
aggaugagccagaccuuga

SEQ ID NO: 2215554 - RNA, 19 nt, Homo sapiens
  misc_RNA (1)...(19): siRNA sense strand
gaagcugagggauaugaag

SEQ ID NO: 2215555 - RNA, 19 nt, Homo sapiens
  misc_RNA (1)...(19): siRNA sense strand
gggcauggccaagccugaa

SEQ ID NO: 2215556 - RNA, 19 nt, Homo sapiens
  misc_RNA (1)...(19): siRNA sense strand
ggagaucgagucgcagaag

SEQ ID NO: 2215557 - RNA, 19 nt, Homo sapiens
  misc_RNA (1)...(19): siRNA sense strand
ggagaaagauucccugaaa

SEQ ID NO: 2215558 - RNA, 19 nt, Homo sapiens
  misc_RNA (1)...(19): siRNA sense strand
caacacaacucacagaauu

SEQ ID NO: 2215559 - RNA, 19 nt, Homo sapiens
  misc_RNA (1)...(19): siRNA sense strand
gaagaugaguuggauauuu

SEQ ID NO: 2215560 - RNA, 19 nt, Homo sapiens
  misc_RNA (1)...(19): siRNA sense strand
uaaaguaucugcacguaaa

SEQ ID NO: 2215561 - RNA, 19 nt, Homo sapiens
  misc_RNA (1)...(19): siRNA sense strand
cagaugagcuugugaguga

SEQ ID NO: 2215562 - RNA, 19 nt, Homo sapiens
  misc_RNA (1)...(19): siRNA sense strand
gauaagaacuucguuagga

SEQ ID NO: 2215563 - RNA, 19 nt, Homo sapiens
  misc_RNA (1)...(19): siRNA sense strand
gaaaggugccuaauggaua

SEQ ID NO: 2215564 - RNA, 19 nt, Homo sapiens
  misc_RNA (1)...(19): siRNA sense strand
ggacgaagcucuggugaga

SEQ ID NO: 2215565 - RNA, 19 nt, Homo sapiens
  misc_RNA (1)...(19): siRNA sense strand
gcagagaggcgcuuaauga

SEQ ID NO: 2215566 - RNA, 19 nt, Homo sapiens
  misc_RNA (1)...(19): siRNA sense strand
acacagaaaugcuggauaa

SEQ ID NO: 2215567 - RNA, 19 nt, Homo sapiens
  misc_RNA (1)...(19): siRNA sense strand
cuacacagauccacauuaa

SEQ ID NO: 2215568 - RNA, 19 nt, Homo sapiens
  misc_RNA (1)...(19): siRNA sense strand
ccagugcccucucuucuua

SEQ ID NO: 2215569 - RNA, 19 nt, Homo sapiens
  misc_RNA (1)...(19): siRNA sense strand
gcaaagaguuauggauauu

SEQ ID NO: 2215570 - RNA, 19 nt, Homo sapiens
  misc_RNA (1)...(19): siRNA sense strand
ggaaguggaagauggauua

SEQ ID NO: 2215571 - RNA, 19 nt, Homo sapiens
  misc_RNA (1)...(19): siRNA sense strand
gaagagcugcuguuccuua

SEQ ID NO: 2215572 - RNA, 19 nt, Homo sapiens
  misc_RNA (1)...(19): siRNA sense strand
gagaggcgcuuaaugaugu

SEQ ID NO: 2215573 - RNA, 19 nt, Homo sapiens
  misc_RNA (1)...(19): siRNA sense strand
cagaugauauggacaauga

SEQ ID NO: 2215574 - RNA, 19 nt, Homo sapiens
  misc_RNA (1)...(19): siRNA sense strand
ggaacagcauccugcauuu

SEQ ID NO: 2215575 - RNA, 19 nt, Homo sapiens
  misc_RNA (1)...(19): siRNA sense strand
cacagaagcugacagauga

SEQ ID NO: 2215576 - RNA, 19 nt, Homo sapiens
  misc_RNA (1)...(19): siRNA sense strand
gcccacagccucuauguua

SEQ ID NO: 2215577 - RNA, 19 nt, Homo sapiens
  misc_RNA (1)...(19): siRNA sense strand
gcaagcaaaugaaucugaa

SEQ ID NO: 2215578 - RNA, 19 nt, Homo sapiens
  misc_RNA (1)...(19): siRNA sense strand
gaaauacaaugugcucuuc

SEQ ID NO: 2215579 - RNA, 19 nt, Homo sapiens
  misc_RNA (1)...(19): siRNA sense strand
gaagaaggacucugggaaa

SEQ ID NO: 2215580 - RNA, 19 nt, Homo sapiens
  misc_RNA (1)...(19): siRNA sense strand
ucaccuagcaccuuauuua

SEQ ID NO: 2215581 - RNA, 19 nt, Homo sapiens
  misc_RNA (1)...(19): siRNA sense strand
gaagaauucugauauuggu

SEQ ID NO: 2215582 - RNA, 19 nt, Homo sapiens
  misc_RNA (1)...(19): siRNA sense strand
gaagauggauuaggaaguc

SEQ ID NO: 2215583 - RNA, 19 nt, Homo sapiens
  misc_RNA (1)...(19): siRNA sense strand
ucaagggucuguuaaguau

SEQ ID NO: 2215584 - RNA, 19 nt, Homo sapiens
  misc_RNA (1)...(19): siRNA sense strand
gcauagggauuguccaaau

SEQ ID NO: 2215585 - RNA, 19 nt, Homo sapiens
  misc_RNA (1)...(19): siRNA sense strand
gcaagcagauaauaaugau

SEQ ID NO: 2215586 - RNA, 19 nt, Homo sapiens
  misc_RNA (1)...(19): siRNA sense strand
gaaagaggaagacgaguug

SEQ ID NO: 2215587 - RNA, 19 nt, Homo sapiens
  misc_RNA (1)...(19): siRNA sense strand
gcacagaagcugacagaug

SEQ ID NO: 2215588 - RNA, 19 nt, Homo sapiens
  misc_RNA (1)...(19): siRNA sense strand
ggacuugagugcuguauac

SEQ ID NO: 2215589 - RNA, 19 nt, Homo sapiens
  misc_RNA (1)...(19): siRNA sense strand
gggaagaauucugauauug

SEQ ID NO: 2215590 - RNA, 19 nt, Homo sapiens
  misc_RNA (1)...(19): siRNA sense strand
caaucgaccucccacagua

SEQ ID NO: 2215591 - RNA, 19 nt, Homo sapiens
  misc_RNA (1)...(19): siRNA sense strand
aaaggugccuaauggauaa

SEQ ID NO: 2215592 - RNA, 19 nt, Homo sapiens
  misc_RNA (1)...(19): siRNA sense strand
ccaauucuguuaaguuuca

SEQ ID NO: 2215593 - RNA, 19 nt, Homo sapiens
  misc_RNA (1)...(19): siRNA sense strand
ggagaauguucacuacaga

SEQ ID NO: 2215594 - RNA, 19 nt, Homo sapiens
  misc_RNA (1)...(19): siRNA sense strand
ugagagaugugaugccaaa

SEQ ID NO: 2215595 - RNA, 19 nt, Homo sapiens
  misc_RNA (1)...(19): siRNA sense strand
gaaaagugguggcauaguu

SEQ ID NO: 2215596 - RNA, 19 nt, Homo sapiens
  misc_RNA (1)...(19): siRNA sense strand
caagauggagggaugauaa

SEQ ID NO: 2215597 - RNA, 19 nt, Homo sapiens
  misc_RNA (1)...(19): siRNA sense strand
guaaguugauugaggaaug

SEQ ID NO: 2215598 - RNA, 19 nt, Homo sapiens
  misc_RNA (1)...(19): siRNA sense strand
ucaaagcgauccacaaucu

SEQ ID NO: 2215599 - RNA, 19 nt, Homo sapiens
  misc_RNA (1)...(19): siRNA sense strand
caaccuaguggguguaaua

SEQ ID NO: 2215600 - RNA, 19 nt, Homo sapiens
  misc_RNA (1)...(19): siRNA sense strand
guaggacgcugcucuucaa

SEQ ID NO: 2215601 - RNA, 19 nt, Homo sapiens
  misc_RNA (1)...(19): siRNA sense strand
gaccugcguuguaaauauu

SEQ ID NO: 2215602 - RNA, 19 nt, Homo sapiens
  misc_RNA (1)...(19): siRNA sense strand
uuagagaccugcguuguaa

SEQ ID NO: 2215603 - RNA, 19 nt, Homo sapiens
  misc_RNA (1)...(19): siRNA sense strand
gguuuacccuucagcauuu

SEQ ID NO: 2215604 - RNA, 19 nt, Homo sapiens
  misc_RNA (1)...(19): siRNA sense strand
ggaaucaaauggcguaggu

SEQ ID NO: 2215605 - RNA, 19 nt, Homo sapiens
  misc_RNA (1)...(19): siRNA sense strand
acaaugccaucaugaauau

SEQ ID NO: 2215606 - RNA, 19 nt, Homo sapiens
  misc_RNA (1)...(19): siRNA sense strand
ugacuuagacaacaucuuu

SEQ ID NO: 2215607 - RNA, 19 nt, Homo sapiens
  misc_RNA (1)...(19): siRNA sense strand
caagagaguguuacagaaa

SEQ ID NO: 2215608 - RNA, 19 nt, Homo sapiens
  misc_RNA (1)...(19): siRNA sense strand
gaugauauggacaaugaua

SEQ ID NO: 2215609 - RNA, 19 nt, Homo sapiens
  misc_RNA (1)...(19): siRNA sense strand
caaaugaaucugaauccua

SEQ ID NO: 2215610 - RNA, 19 nt, Homo sapiens
  misc_RNA (1)...(19): siRNA sense strand
gccaucaccuagcaccuua

SEQ ID NO: 2215611 - RNA, 19 nt, Homo sapiens
  misc_RNA (1)...(19): siRNA sense strand
gcacaagcccaucugcaaa

SEQ ID NO: 2215612 - RNA, 19 nt, Homo sapiens
  misc_RNA (1)...(19): siRNA sense strand
ccauauaccuuugaagaug

SEQ ID NO: 2215613 - RNA, 19 nt, Homo sapiens
  misc_RNA (1)...(19): siRNA sense strand
gagacagccuuauauugug

SEQ ID NO: 2215614 - RNA, 19 nt, Homo sapiens
  misc_RNA (1)...(19): siRNA sense strand
gaaugcauccucaacagaa

SEQ ID NO: 2215615 - RNA, 19 nt, Homo sapiens
  misc_RNA (1)...(19): siRNA sense strand
gggcggaugucgggcuuua

SEQ ID NO: 2215616 - RNA, 19 nt, Homo sapiens
  misc_RNA (1)...(19): siRNA sense strand
cauuagagauggcuacaau

SEQ ID NO: 2215617 - RNA, 19 nt, Homo sapiens
  misc_RNA (1)...(19): siRNA sense strand
gaaugacccauauaccuuu

SEQ ID NO: 2215618 - RNA, 19 nt, Homo sapiens
  misc_RNA (1)...(19): siRNA sense strand
gaagugaaugacccauaua

SEQ ID NO: 2215619 - RNA, 19 nt, Homo sapiens
  misc_RNA (1)...(19): siRNA sense strand
gaaauacaagcaagcaaau

SEQ ID NO: 2215620 - RNA, 19 nt, Homo sapiens
  misc_RNA (1)...(19): siRNA sense strand
gcaguaggaaauaugauaa

SEQ ID NO: 2215621 - RNA, 19 nt, Homo sapiens
  misc_RNA (1)...(19): siRNA sense strand
agagucagcuguucuuguu

SEQ ID NO: 2215622 - RNA, 19 nt, Homo sapiens
  misc_RNA (1)...(19): siRNA sense strand
caaaccagauugcaaagag

SEQ ID NO: 2215623 - RNA, 19 nt, Homo sapiens
  misc_RNA (1)...(19): siRNA sense strand
gccaaacucuucccugugu

SEQ ID NO: 2215624 - RNA, 19 nt, Homo sapiens
  misc_RNA (1)...(19): siRNA sense strand
cgagacagccuuauauugu

SEQ ID NO: 2215625 - RNA, 19 nt, Homo sapiens
  misc_RNA (1)...(19): siRNA sense strand
gaaaguaauguaugcacaa

SEQ ID NO: 2215626 - RNA, 19 nt, Homo sapiens
  misc_RNA (1)...(19): siRNA sense strand
gggauaugaugaugauuuc

SEQ ID NO: 2215627 - RNA, 19 nt, Homo sapiens
  misc_RNA (1)...(19): siRNA sense strand
gaaagggagagaauaggaa

SEQ ID NO: 2215628 - RNA, 19 nt, Homo sapiens
  misc_RNA (1)...(19): siRNA sense strand
gacaagagaguguuacaga

SEQ ID NO: 2215629 - RNA, 19 nt, Homo sapiens
  misc_RNA (1)...(19): siRNA sense strand
uguguaagcuggaguuaug

SEQ ID NO: 2215630 - RNA, 19 nt, Homo sapiens
  misc_RNA (1)...(19): siRNA sense strand
gcaggaccaucaucaucuu

SEQ ID NO: 2215631 - RNA, 19 nt, Homo sapiens
  misc_RNA (1)...(19): siRNA sense strand
gaagacgaguugggauaug

SEQ ID NO: 2215632 - RNA, 19 nt, Homo sapiens
  misc_RNA (1)...(19): siRNA sense strand
acacagauccacauuaaau

SEQ ID NO: 2215633 - RNA, 19 nt, Homo sapiens
  misc_RNA (1)...(19): siRNA sense strand
uaauuuaccugagcauaug

SEQ ID NO: 2215634 - RNA, 19 nt, Homo sapiens
  misc_RNA (1)...(19): siRNA sense strand
gauaagcacuaccucuucu

SEQ ID NO: 2215635 - RNA, 19 nt, Homo sapiens
  misc_RNA (1)...(19): siRNA sense strand
aaucccaccucgaauagua

SEQ ID NO: 2215636 - RNA, 19 nt, Homo sapiens
  misc_RNA (1)...(19): siRNA sense strand
gcaguugucuacucuggau

SEQ ID NO: 2215637 - RNA, 19 nt, Homo sapiens
  misc_RNA (1)...(19): siRNA sense strand
caacaagaaaugcaaacaa

SEQ ID NO: 2215638 - RNA, 19 nt, Homo sapiens
  misc_RNA (1)...(19): siRNA sense strand
gcaaguaguucugcaucug

SEQ ID NO: 2215639 - RNA, 19 nt, Homo sapiens
  misc_RNA (1)...(19): siRNA sense strand
acaauaacgugccuagugu

SEQ ID NO: 2215640 - RNA, 19 nt, Homo sapiens
  misc_RNA (1)...(19): siRNA sense strand
aaaauggccuuuccuauga

SEQ ID NO: 2215641 - RNA, 19 nt, Homo sapiens
  misc_RNA (1)...(19): siRNA sense strand
ggacuguggacccauaauu

SEQ ID NO: 2215642 - RNA, 19 nt, Homo sapiens
  misc_RNA (1)...(19): siRNA sense strand
gacaaucauuccagacuca

SEQ ID NO: 2215643 - RNA, 19 nt, Homo sapiens
  misc_RNA (1)...(19): siRNA sense strand
ggucaagggucuguuaagu

SEQ ID NO: 2215644 - RNA, 19 nt, Homo sapiens
  misc_RNA (1)...(19): siRNA sense strand
agaagugaaugacccauau

SEQ ID NO: 2215645 - RNA, 19 nt, Homo sapiens
  misc_RNA (1)...(19): siRNA sense strand
gagaagugaaugacccaua

SEQ ID NO: 2215646 - RNA, 19 nt, Homo sapiens
  misc_RNA (1)...(19): siRNA sense strand
gcacaaaacagcagaaaga

SEQ ID NO: 2215647 - RNA, 19 nt, Homo sapiens
  misc_RNA (1)...(19): siRNA sense strand
gaaagaagaaucgaaagag

SEQ ID NO: 2215648 - RNA, 19 nt, Homo sapiens
  misc_RNA (1)...(19): siRNA sense strand
gaacucacgggaaucaaau

SEQ ID NO: 2215649 - RNA, 19 nt, Homo sapiens
  misc_RNA (1)...(19): siRNA sense strand
gagcuuaaagauuggagua

SEQ ID NO: 2215650 - RNA, 19 nt, Homo sapiens
  misc_RNA (1)...(19): siRNA sense strand
cuccagcuguugucauuua

SEQ ID NO: 2215651 - RNA, 19 nt, Homo sapiens
  misc_RNA (1)...(19): siRNA sense strand
uggacuacauuuccucuaa

SEQ ID NO: 2215652 - RNA, 19 nt, Homo sapiens
  misc_RNA (1)...(19): siRNA sense strand
cuuugaagauggugacaua

SEQ ID NO: 2215653 - RNA, 19 nt, Homo sapiens
  misc_RNA (1)...(19): siRNA sense strand
ccacuuccuugacccauug

SEQ ID NO: 2215654 - RNA, 19 nt, Homo sapiens
  misc_RNA (1)...(19): siRNA sense strand
gggauagacuccuccuuag

SEQ ID NO: 2215655 - RNA, 19 nt, Homo sapiens
  misc_RNA (1)...(19): siRNA sense strand
ccuagcagauccagacuau

SEQ ID NO: 2215656 - RNA, 19 nt, Homo sapiens
  misc_RNA (1)...(19): siRNA sense strand
acaagagaguguuacagaa

SEQ ID NO: 2215657 - RNA, 19 nt, Homo sapiens
  misc_RNA (1)...(19): siRNA sense strand
gcacaucccuccugucaga

SEQ ID NO: 2215658 - RNA, 19 nt, Homo sapiens
  misc_RNA (1)...(19): siRNA sense strand
gaacagaaccaaaggcuau

SEQ ID NO: 2215659 - RNA, 19 nt, Homo sapiens
  misc_RNA (1)...(19): siRNA sense strand
ugucagagcuggagaguga

SEQ ID NO: 2215660 - RNA, 19 nt, Homo sapiens
  misc_RNA (1)...(19): siRNA sense strand
gcacuuagagcaagagaaa

SEQ ID NO: 2215661 - RNA, 19 nt, Homo sapiens
  misc_RNA (1)...(19): siRNA sense strand
ggagaaggaucugguguug

SEQ ID NO: 2215662 - RNA, 19 nt, Homo sapiens
  misc_RNA (1)...(19): siRNA sense strand
gauaugaugucucugaaca

SEQ ID NO: 2215663 - RNA, 19 nt, Homo sapiens
  misc_RNA (1)...(19): siRNA sense strand
ugaagcagcuacaggauga

SEQ ID NO: 2215664 - RNA, 19 nt, Homo sapiens
  misc_RNA (1)...(19): siRNA sense strand
caaaggagcagcuucagaa

SEQ ID NO: 2215665 - RNA, 19 nt, Homo sapiens
  misc_RNA (1)...(19): siRNA sense strand
ggagagagaccgacucaga

SEQ ID NO: 2215666 - RNA, 19 nt, Homo sapiens
  misc_RNA (1)...(19): siRNA sense strand
ggagaugacugcccuaaaa

SEQ ID NO: 2215667 - RNA, 19 nt, Homo sapiens
  misc_RNA (1)...(19): siRNA sense strand
gaauugagaagacgauuug

SEQ ID NO: 2215668 - RNA, 19 nt, Homo sapiens
  misc_RNA (1)...(19): siRNA sense strand
agagaaacaugaauugaga

SEQ ID NO: 2215669 - RNA, 19 nt, Homo sapiens
  misc_RNA (1)...(19): siRNA sense strand
ucaaugagcucaagagacu

SEQ ID NO: 2215670 - RNA, 19 nt, Homo sapiens
  misc_RNA (1)...(19): siRNA sense strand
gcaagagaaacaugaauug

SEQ ID NO: 2215671 - RNA, 19 nt, Homo sapiens
  misc_RNA (1)...(19): siRNA sense strand
auaaggagcugacagacaa

SEQ ID NO: 2215672 - RNA, 19 nt, Homo sapiens
  misc_RNA (1)...(19): siRNA sense strand
caucagaaguugagagaca

SEQ ID NO: 2215673 - RNA, 19 nt, Homo sapiens
  misc_RNA (1)...(19): siRNA sense strand
gagaagacuuucgggagaa

SEQ ID NO: 2215674 - RNA, 19 nt, Homo sapiens
  misc_RNA (1)...(19): siRNA sense strand
cagacaagcucgagcacuu

SEQ ID NO: 2215675 - RNA, 19 nt, Homo sapiens
  misc_RNA (1)...(19): siRNA sense strand
ggacgagucuucagaaacc

SEQ ID NO: 2215676 - RNA, 19 nt, Homo sapiens
  misc_RNA (1)...(19): siRNA sense strand
caaccaaccagcacauuau

SEQ ID NO: 2215677 - RNA, 19 nt, Homo sapiens
  misc_RNA (1)...(19): siRNA sense strand
aaacaugaauugagaagac

SEQ ID NO: 2215678 - RNA, 19 nt, Homo sapiens
  misc_RNA (1)...(19): siRNA sense strand
cagcagggcaucagaaguu

SEQ ID NO: 2215679 - RNA, 19 nt, Homo sapiens
  misc_RNA (1)...(19): siRNA sense strand
ucaaccaaccagcacauua

SEQ ID NO: 2215680 - RNA, 19 nt, Homo sapiens
  misc_RNA (1)...(19): siRNA sense strand
cuaguggccuuucucaguu

SEQ ID NO: 2215681 - RNA, 19 nt, Homo sapiens
  misc_RNA (1)...(19): siRNA sense strand
gccgacagcugcaggugaa

SEQ ID NO: 2215682 - RNA, 19 nt, Homo sapiens
  misc_RNA (1)...(19): siRNA sense strand
caagagaaacaugaauuga

SEQ ID NO: 2215683 - RNA, 19 nt, Homo sapiens
  misc_RNA (1)...(19): siRNA sense strand
gcuggaagcuuggcagaca

SEQ ID NO: 2215684 - RNA, 19 nt, Homo sapiens
  misc_RNA (1)...(19): siRNA sense strand
ggagcuagaacuggcguua

SEQ ID NO: 2215685 - RNA, 19 nt, Homo sapiens
  misc_RNA (1)...(19): siRNA sense strand
caaugacagugcugacuca

SEQ ID NO: 2215686 - RNA, 19 nt, Homo sapiens
  misc_RNA (1)...(19): siRNA sense strand
gagaggaaccaggacauga

SEQ ID NO: 2215687 - RNA, 19 nt, Homo sapiens
  misc_RNA (1)...(19): siRNA sense strand
uuuacuaucuggcuccuuu

SEQ ID NO: 2215688 - RNA, 19 nt, Homo sapiens
  misc_RNA (1)...(19): siRNA sense strand
gcgggaagcagaucgagaa

SEQ ID NO: 2215689 - RNA, 19 nt, Homo sapiens
  misc_RNA (1)...(19): siRNA sense strand
gcugaccgcugcucucucu

SEQ ID NO: 2215690 - RNA, 19 nt, Homo sapiens
  misc_RNA (1)...(19): siRNA sense strand
gcagcuacaggaugaguug

SEQ ID NO: 2215691 - RNA, 19 nt, Homo sapiens
  misc_RNA (1)...(19): siRNA sense strand
guacaccccuccugccuuu

SEQ ID NO: 2215692 - RNA, 19 nt, Homo sapiens
  misc_RNA (1)...(19): siRNA sense strand
ucucagcgcuacuuuagag

SEQ ID NO: 2215693 - RNA, 19 nt, Homo sapiens
  misc_RNA (1)...(19): siRNA sense strand
cagcacaucccuccuguca

SEQ ID NO: 2215694 - RNA, 19 nt, Homo sapiens
  misc_RNA (1)...(19): siRNA sense strand
agaucaagaugcugucaga

SEQ ID NO: 2215695 - RNA, 19 nt, Homo sapiens
  misc_RNA (1)...(19): siRNA sense strand
gcgacgaggccauugcaaa

SEQ ID NO: 2215696 - RNA, 19 nt, Homo sapiens
  misc_RNA (1)...(19): siRNA sense strand
gagaagacgauuugagaac

SEQ ID NO: 2215697 - RNA, 19 nt, Homo sapiens
  misc_RNA (1)...(19): siRNA sense strand
cuaucuggcuccuuugguu

SEQ ID NO: 2215698 - RNA, 19 nt, Homo sapiens
  misc_RNA (1)...(19): siRNA sense strand
gguccacgcccucagagaa

SEQ ID NO: 2215699 - RNA, 19 nt, Homo sapiens
  misc_RNA (1)...(19): siRNA sense strand
gaggagagagaccgacuca

SEQ ID NO: 2215700 - RNA, 19 nt, Homo sapiens
  misc_RNA (1)...(19): siRNA sense strand
ggaagccuacugccagguu

SEQ ID NO: 2215701 - RNA, 19 nt, Homo sapiens
  misc_RNA (1)...(19): siRNA sense strand
cagcgcuacuuuagaggaa

SEQ ID NO: 2215702 - RNA, 19 nt, Homo sapiens
  misc_RNA (1)...(19): siRNA sense strand
acgagcagaugcauaagga

SEQ ID NO: 2215703 - RNA, 19 nt, Homo sapiens
  misc_RNA (1)...(19): siRNA sense strand
gaaacaugaauugagaaga

SEQ ID NO: 2215704 - RNA, 19 nt, Homo sapiens
  misc_RNA (1)...(19): siRNA sense strand
agacugauacagagcauug

SEQ ID NO: 2215705 - RNA, 19 nt, Homo sapiens
  misc_RNA (1)...(19): siRNA sense strand
aguacgagcagaugcauaa

SEQ ID NO: 2215706 - RNA, 19 nt, Homo sapiens
  misc_RNA (1)...(19): siRNA sense strand
gagaaacaugaauugagaa

SEQ ID NO: 2215707 - RNA, 19 nt, Homo sapiens
  misc_RNA (1)...(19): siRNA sense strand
cguaucaacagcuuuaguu

SEQ ID NO: 2215708 - RNA, 19 nt, Homo sapiens
  misc_RNA (1)...(19): siRNA sense strand
gaucuaguggccuuucuca

SEQ ID NO: 2215709 - RNA, 19 nt, Homo sapiens
  misc_RNA (1)...(19): siRNA sense strand
aagcuuggcagacagauga

SEQ ID NO: 2215710 - RNA, 19 nt, Homo sapiens
  misc_RNA (1)...(19): siRNA sense strand
ccaaaggagcagcuucaga

SEQ ID NO: 2215711 - RNA, 19 nt, Homo sapiens
  misc_RNA (1)...(19): siRNA sense strand
gaagguggaagaacucacu

SEQ ID NO: 2215712 - RNA, 19 nt, Homo sapiens
  misc_RNA (1)...(19): siRNA sense strand
gagcaagagaaacaugaau

SEQ ID NO: 2215713 - RNA, 19 nt, Homo sapiens
  misc_RNA (1)...(19): siRNA sense strand
cuacaggaccgggugcuaa

SEQ ID NO: 2215714 - RNA, 19 nt, Homo sapiens
  misc_RNA (1)...(19): siRNA sense strand
agacaagcucgagcacuua

SEQ ID NO: 2215715 - RNA, 19 nt, Homo sapiens
  misc_RNA (1)...(19): siRNA sense strand
ugaauugagaagacgauuu

SEQ ID NO: 2215716 - RNA, 19 nt, Homo sapiens
  misc_RNA (1)...(19): siRNA sense strand
gcuggagagugaugugaag

SEQ ID NO: 2215717 - RNA, 19 nt, Homo sapiens
  misc_RNA (1)...(19): siRNA sense strand
uggaugccauucagcagaa

SEQ ID NO: 2215718 - RNA, 19 nt, Homo sapiens
  misc_RNA (1)...(19): siRNA sense strand
acgaggccauugcaaagaa

SEQ ID NO: 2215719 - RNA, 19 nt, Homo sapiens
  misc_RNA (1)...(19): siRNA sense strand
uccaggaacugucggaaca

SEQ ID NO: 2215720 - RNA, 19 nt, Homo sapiens
  misc_RNA (1)...(19): siRNA sense strand
gcugcucucucucuucucu

SEQ ID NO: 2215721 - RNA, 19 nt, Homo sapiens
  misc_RNA (1)...(19): siRNA sense strand
cgacgaggccauugcaaag

SEQ ID NO: 2215722 - RNA, 19 nt, Homo sapiens
  misc_RNA (1)...(19): siRNA sense strand
ugagaagacgauuugagaa

SEQ ID NO: 2215723 - RNA, 19 nt, Homo sapiens
  misc_RNA (1)...(19): siRNA sense strand
gacagaaggagaaggaucu

SEQ ID NO: 2215724 - RNA, 19 nt, Homo sapiens
  misc_RNA (1)...(19): siRNA sense strand
gaccuacagcugcaccaaa

SEQ ID NO: 2215725 - RNA, 19 nt, Homo sapiens
  misc_RNA (1)...(19): siRNA sense strand
gcucagcagggcaucagaa

SEQ ID NO: 2215726 - RNA, 19 nt, Homo sapiens
  misc_RNA (1)...(19): siRNA sense strand
gaccgcugcucucucucuu

SEQ ID NO: 2215727 - RNA, 19 nt, Homo sapiens
  misc_RNA (1)...(19): siRNA sense strand
cucaagagacugauacaga

SEQ ID NO: 2215728 - RNA, 19 nt, Homo sapiens
  misc_RNA (1)...(19): siRNA sense strand
uggauaugaugucucugaa

SEQ ID NO: 2215729 - RNA, 19 nt, Homo sapiens
  misc_RNA (1)...(19): siRNA sense strand
uuucucaguucccguauca

SEQ ID NO: 2215730 - RNA, 19 nt, Homo sapiens
  misc_RNA (1)...(19): siRNA sense strand
ucuguggcuuuacaaggua

SEQ ID NO: 2215731 - RNA, 19 nt, Homo sapiens
  misc_RNA (1)...(19): siRNA sense strand
cauaaggagcugacagaca

SEQ ID NO: 2215732 - RNA, 19 nt, Homo sapiens
  misc_RNA (1)...(19): siRNA sense strand
ggaugccauucagcagaaa

SEQ ID NO: 2215733 - RNA, 19 nt, Homo sapiens
  misc_RNA (1)...(19): siRNA sense strand
uugagaagacgauuugaga

SEQ ID NO: 2215734 - RNA, 19 nt, Homo sapiens
  misc_RNA (1)...(19): siRNA sense strand
gaugcugucagaucggaaa

SEQ ID NO: 2215735 - RNA, 19 nt, Homo sapiens
  misc_RNA (1)...(19): siRNA sense strand
gggaaggccgagugucaga

SEQ ID NO: 2215736 - RNA, 19 nt, Homo sapiens
  misc_RNA (1)...(19): siRNA sense strand
ggacaugagccggcaguac

SEQ ID NO: 2215737 - RNA, 19 nt, Homo sapiens
  misc_RNA (1)...(19): siRNA sense strand
gcaggugaagguggaagaa

SEQ ID NO: 2215738 - RNA, 19 nt, Homo sapiens
  misc_RNA (1)...(19): siRNA sense strand
gaagcuuggcagacagaug

SEQ ID NO: 2215739 - RNA, 19 nt, Homo sapiens
  misc_RNA (1)...(19): siRNA sense strand
agcuagaacuggcguuaga

SEQ ID NO: 2215740 - RNA, 19 nt, Homo sapiens
  misc_RNA (1)...(19): siRNA sense strand
ggcaucagaaguugagaga

SEQ ID NO: 2215741 - RNA, 19 nt, Homo sapiens
  misc_RNA (1)...(19): siRNA sense strand
uagagcaagagaaacauga

SEQ ID NO: 2215742 - RNA, 19 nt, Homo sapiens
  misc_RNA (1)...(19): siRNA sense strand
gagcuggagcaucgucuca

SEQ ID NO: 2215743 - RNA, 19 nt, Homo sapiens
  misc_RNA (1)...(19): siRNA sense strand
cgucucagcgcuacuuuag

SEQ ID NO: 2215744 - RNA, 19 nt, Homo sapiens
  misc_RNA (1)...(19): siRNA sense strand
gacaugcacagggucauug

SEQ ID NO: 2215745 - RNA, 19 nt, Homo sapiens
  misc_RNA (1)...(19): siRNA sense strand
ucccguaucaacagcuuua

SEQ ID NO: 2215746 - RNA, 19 nt, Homo sapiens
  misc_RNA (1)...(19): siRNA sense strand
ccgcugcucucucucuucu

SEQ ID NO: 2215747 - RNA, 19 nt, Homo sapiens
  misc_RNA (1)...(19): siRNA sense strand
gucuguggcuuuacaaggu

SEQ ID NO: 2215748 - RNA, 19 nt, Homo sapiens
  misc_RNA (1)...(19): siRNA sense strand
gagcuggagagugauguga

SEQ ID NO: 2215749 - RNA, 19 nt, Homo sapiens
  misc_RNA (1)...(19): siRNA sense strand
gacgaggccauugcaaaga

SEQ ID NO: 2215750 - RNA, 19 nt, Homo sapiens
  misc_RNA (1)...(19): siRNA sense strand
gugggaaggccgaguguca

SEQ ID NO: 2215751 - RNA, 19 nt, Homo sapiens
  misc_RNA (1)...(19): siRNA sense strand
gcagggcaucagaaguuga

SEQ ID NO: 2215752 - RNA, 19 nt, Homo sapiens
  misc_RNA (1)...(19): siRNA sense strand
gagcucaagagacugauac

SEQ ID NO: 2215753 - RNA, 19 nt, Homo sapiens
  misc_RNA (1)...(19): siRNA sense strand
ccacggacuccuccaugga

SEQ ID NO: 2215754 - RNA, 19 nt, Homo sapiens
  misc_RNA (1)...(19): siRNA sense strand
ggagcgagagcagcugaga

SEQ ID NO: 2215755 - RNA, 19 nt, Homo sapiens
  misc_RNA (1)...(19): siRNA sense strand
ucacuucugaggacaagga

SEQ ID NO: 2215756 - RNA, 19 nt, Homo sapiens
  misc_RNA (1)...(19): siRNA sense strand
ucuaguggccuuucucagu

SEQ ID NO: 2215757 - RNA, 19 nt, Homo sapiens
  misc_RNA (1)...(19): siRNA sense strand
ggagagaaauccucaguga

SEQ ID NO: 2215758 - RNA, 19 nt, Homo sapiens
  misc_RNA (1)...(19): siRNA sense strand
ccaagaagcucacugaaug

SEQ ID NO: 2215759 - RNA, 19 nt, Homo sapiens
  misc_RNA (1)...(19): siRNA sense strand
gcaacaaaguucagcagua

SEQ ID NO: 2215760 - RNA, 19 nt, Homo sapiens
  misc_RNA (1)...(19): siRNA sense strand
gagacaaguuuacuccuua

SEQ ID NO: 2215761 - RNA, 19 nt, Homo sapiens
  misc_RNA (1)...(19): siRNA sense strand
cgagauggcuacauuauga

SEQ ID NO: 2215762 - RNA, 19 nt, Homo sapiens
  misc_RNA (1)...(19): siRNA sense strand
ucaacaagcucucccagua

SEQ ID NO: 2215763 - RNA, 19 nt, Homo sapiens
  misc_RNA (1)...(19): siRNA sense strand
ucaaagcucuugcugauga

SEQ ID NO: 2215764 - RNA, 19 nt, Homo sapiens
  misc_RNA (1)...(19): siRNA sense strand
cgaaguaccuguuggauag

SEQ ID NO: 2215765 - RNA, 19 nt, Homo sapiens
  misc_RNA (1)...(19): siRNA sense strand
gaagauggcagcccagauu

SEQ ID NO: 2215766 - RNA, 19 nt, Homo sapiens
  misc_RNA (1)...(19): siRNA sense strand
uaaaugccaucacuaagaa

SEQ ID NO: 2215767 - RNA, 19 nt, Homo sapiens
  misc_RNA (1)...(19): siRNA sense strand
gcagaccacuuucaccaaa

SEQ ID NO: 2215768 - RNA, 19 nt, Homo sapiens
  misc_RNA (1)...(19): siRNA sense strand
ggaaguguguugcuggaaa

SEQ ID NO: 2215769 - RNA, 19 nt, Homo sapiens
  misc_RNA (1)...(19): siRNA sense strand
gcagugauguucaggaaau

SEQ ID NO: 2215770 - RNA, 19 nt, Homo sapiens
  misc_RNA (1)...(19): siRNA sense strand
ucacgaagcuguggaaaga

SEQ ID NO: 2215771 - RNA, 19 nt, Homo sapiens
  misc_RNA (1)...(19): siRNA sense strand
ggaacaaacugguggaagu

SEQ ID NO: 2215772 - RNA, 19 nt, Homo sapiens
  misc_RNA (1)...(19): siRNA sense strand
gggaugccgugcuguauuu

SEQ ID NO: 2215773 - RNA, 19 nt, Homo sapiens
  misc_RNA (1)...(19): siRNA sense strand
gagcugggaugcccuaaau

SEQ ID NO: 2215774 - RNA, 19 nt, Homo sapiens
  misc_RNA (1)...(19): siRNA sense strand
ggucauggcuucagaggau

SEQ ID NO: 2215775 - RNA, 19 nt, Homo sapiens
  misc_RNA (1)...(19): siRNA sense strand
gaucgauccugaagccuuu

SEQ ID NO: 2215776 - RNA, 19 nt, Homo sapiens
  misc_RNA (1)...(19): siRNA sense strand
uaagugagaucaugaaguc

SEQ ID NO: 2215777 - RNA, 19 nt, Homo sapiens
  misc_RNA (1)...(19): siRNA sense strand
gaugauaacuuuggaacug

SEQ ID NO: 2215778 - RNA, 19 nt, Homo sapiens
  misc_RNA (1)...(19): siRNA sense strand
gagcaaggccucuuugaug

SEQ ID NO: 2215779 - RNA, 19 nt, Homo sapiens
  misc_RNA (1)...(19): siRNA sense strand
ggagacaucuggaacaaac

SEQ ID NO: 2215780 - RNA, 19 nt, Homo sapiens
  misc_RNA (1)...(19): siRNA sense strand
gggaggaguuugccauuau

SEQ ID NO: 2215781 - RNA, 19 nt, Homo sapiens
  misc_RNA (1)...(19): siRNA sense strand
auacagaaguccuuacuga

SEQ ID NO: 2215782 - RNA, 19 nt, Homo sapiens
  misc_RNA (1)...(19): siRNA sense strand
caaggaaggcuuuguguga

SEQ ID NO: 2215783 - RNA, 19 nt, Homo sapiens
  misc_RNA (1)...(19): siRNA sense strand
gcaggcucauggagauuua

SEQ ID NO: 2215784 - RNA, 19 nt, Homo sapiens
  misc_RNA (1)...(19): siRNA sense strand
gaugauggcugugccuuug

SEQ ID NO: 2215785 - RNA, 19 nt, Homo sapiens
  misc_RNA (1)...(19): siRNA sense strand
gaagaagaaaggcaucaaa

SEQ ID NO: 2215786 - RNA, 19 nt, Homo sapiens
  misc_RNA (1)...(19): siRNA sense strand
gcagauaagagaacgauug

SEQ ID NO: 2215787 - RNA, 19 nt, Homo sapiens
  misc_RNA (1)...(19): siRNA sense strand
gaagaaaggcaucaaagag

SEQ ID NO: 2215788 - RNA, 19 nt, Homo sapiens
  misc_RNA (1)...(19): siRNA sense strand
ccucuaggcucaaggcuuu

SEQ ID NO: 2215789 - RNA, 19 nt, Homo sapiens
  misc_RNA (1)...(19): siRNA sense strand
gaucguggcugagcuguuc

SEQ ID NO: 2215790 - RNA, 19 nt, Homo sapiens
  misc_RNA (1)...(19): siRNA sense strand
caacaaaguucagcaguac

SEQ ID NO: 2215791 - RNA, 19 nt, Homo sapiens
  misc_RNA (1)...(19): siRNA sense strand
cagaguguguccuggauaa

SEQ ID NO: 2215792 - RNA, 19 nt, Homo sapiens
  misc_RNA (1)...(19): siRNA sense strand
gaaggucccugaagaagcu

SEQ ID NO: 2215793 - RNA, 19 nt, Homo sapiens
  misc_RNA (1)...(19): siRNA sense strand
ggacagcucucaggugaag

SEQ ID NO: 2215794 - RNA, 19 nt, Homo sapiens
  misc_RNA (1)...(19): siRNA sense strand
guaaaggaacggagagaaa

SEQ ID NO: 2215795 - RNA, 19 nt, Homo sapiens
  misc_RNA (1)...(19): siRNA sense strand
uugaagagcugcacaagga

SEQ ID NO: 2215796 - RNA, 19 nt, Homo sapiens
  misc_RNA (1)...(19): siRNA sense strand
ccucaaagcucuugcugau

SEQ ID NO: 2215797 - RNA, 19 nt, Homo sapiens
  misc_RNA (1)...(19): siRNA sense strand
caaagcuuauuccuucaaa

SEQ ID NO: 2215798 - RNA, 19 nt, Homo sapiens
  misc_RNA (1)...(19): siRNA sense strand
gcuugacucugcaucgaua

SEQ ID NO: 2215799 - RNA, 19 nt, Homo sapiens
  misc_RNA (1)...(19): siRNA sense strand
gcacucagguucccaccau

SEQ ID NO: 2215800 - RNA, 19 nt, Homo sapiens
  misc_RNA (1)...(19): siRNA sense strand
uggagacacugaccuauga

SEQ ID NO: 2215801 - RNA, 19 nt, Homo sapiens
  misc_RNA (1)...(19): siRNA sense strand
gcaagcugcugccaucauc

SEQ ID NO: 2215802 - RNA, 19 nt, Homo sapiens
  misc_RNA (1)...(19): siRNA sense strand
gauccuacccacucucuuu

SEQ ID NO: 2215803 - RNA, 19 nt, Homo sapiens
  misc_RNA (1)...(19): siRNA sense strand
ggaagauuguugucuccaa

SEQ ID NO: 2215804 - RNA, 19 nt, Homo sapiens
  misc_RNA (1)...(19): siRNA sense strand
aagcagguguucccaguaa

SEQ ID NO: 2215805 - RNA, 19 nt, Homo sapiens
  misc_RNA (1)...(19): siRNA sense strand
ucgcaacgcucaacacuca

SEQ ID NO: 2215806 - RNA, 19 nt, Homo sapiens
  misc_RNA (1)...(19): siRNA sense strand
uggaggagcugaagacugu

SEQ ID NO: 2215807 - RNA, 19 nt, Homo sapiens
  misc_RNA (1)...(19): siRNA sense strand
ggauggugcugugaagaaa

SEQ ID NO: 2215808 - RNA, 19 nt, Homo sapiens
  misc_RNA (1)...(19): siRNA sense strand
caaguuuacuccuuaugug

SEQ ID NO: 2215809 - RNA, 19 nt, Homo sapiens
  misc_RNA (1)...(19): siRNA sense strand
ugaagaaacucacgaagcu

SEQ ID NO: 2215810 - RNA, 19 nt, Homo sapiens
  misc_RNA (1)...(19): siRNA sense strand
ggaggaguuugccauuaug

SEQ ID NO: 2215811 - RNA, 19 nt, Homo sapiens
  misc_RNA (1)...(19): siRNA sense strand
ucauuuccauccacauuaa

SEQ ID NO: 2215812 - RNA, 19 nt, Homo sapiens
  misc_RNA (1)...(19): siRNA sense strand
cugcaugucuggaagauug

SEQ ID NO: 2215813 - RNA, 19 nt, Homo sapiens
  misc_RNA (1)...(19): siRNA sense strand
ugaaggaggagauaaagaa

SEQ ID NO: 2215814 - RNA, 19 nt, Homo sapiens
  misc_RNA (1)...(19): siRNA sense strand
ggaagcugcuguccucucu

SEQ ID NO: 2215815 - RNA, 19 nt, Homo sapiens
  misc_RNA (1)...(19): siRNA sense strand
gaagagcugcacaaggaaa

SEQ ID NO: 2215816 - RNA, 19 nt, Homo sapiens
  misc_RNA (1)...(19): siRNA sense strand
gaagaugaccacagaaacu

SEQ ID NO: 2215817 - RNA, 19 nt, Homo sapiens
  misc_RNA (1)...(19): siRNA sense strand
ccaagcaccuggacaagag

SEQ ID NO: 2215818 - RNA, 19 nt, Homo sapiens
  misc_RNA (1)...(19): siRNA sense strand
cuaaaccaguccuccauga

SEQ ID NO: 2215819 - RNA, 19 nt, Homo sapiens
  misc_RNA (1)...(19): siRNA sense strand
uagacucacuggcaacaaa

SEQ ID NO: 2215820 - RNA, 19 nt, Homo sapiens
  misc_RNA (1)...(19): siRNA sense strand
gggaagaugaccacagaaa

SEQ ID NO: 2215821 - RNA, 19 nt, Homo sapiens
  misc_RNA (1)...(19): siRNA sense strand
gaugaccuuuggagaauca

SEQ ID NO: 2215822 - RNA, 19 nt, Homo sapiens
  misc_RNA (1)...(19): siRNA sense strand
uggagaaguuggagaaguu

SEQ ID NO: 2215823 - RNA, 19 nt, Homo sapiens
  misc_RNA (1)...(19): siRNA sense strand
ucaaagagcagaucaucga

SEQ ID NO: 2215824 - RNA, 19 nt, Homo sapiens
  misc_RNA (1)...(19): siRNA sense strand
cuaaaugccaucacuaaga

SEQ ID NO: 2215825 - RNA, 19 nt, Homo sapiens
  misc_RNA (1)...(19): siRNA sense strand
ugaagcaagucauggcuau

SEQ ID NO: 2215826 - RNA, 19 nt, Homo sapiens
  misc_RNA (1)...(19): siRNA sense strand
gaagccacucuuucaguuu

SEQ ID NO: 2215827 - RNA, 19 nt, Homo sapiens
  misc_RNA (1)...(19): siRNA sense strand
cagagaauguuauugaaac

SEQ ID NO: 2215828 - RNA, 19 nt, Homo sapiens
  misc_RNA (1)...(19): siRNA sense strand
uagcagugauguucaggaa

SEQ ID NO: 2215829 - RNA, 19 nt, Homo sapiens
  misc_RNA (1)...(19): siRNA sense strand
gaaggaggaggcagccaaa

SEQ ID NO: 2215830 - RNA, 19 nt, Homo sapiens
  misc_RNA (1)...(19): siRNA sense strand
cccaagcaguggcacguua

SEQ ID NO: 2215831 - RNA, 19 nt, Homo sapiens
  misc_RNA (1)...(19): siRNA sense strand
ggcaguugauuguggauga

SEQ ID NO: 2215832 - RNA, 19 nt, Homo sapiens
  misc_RNA (1)...(19): siRNA sense strand
gaaauccucagugaacuug

SEQ ID NO: 2215833 - RNA, 19 nt, Homo sapiens
  misc_RNA (1)...(19): siRNA sense strand
gaacaaacugguggaagug

SEQ ID NO: 2215834 - RNA, 19 nt, Homo sapiens
  misc_RNA (1)...(19): siRNA sense strand
gcgagcaugugccaggauu

SEQ ID NO: 2215835 - RNA, 19 nt, Homo sapiens
  misc_RNA (1)...(19): siRNA sense strand
gcagaucggcuccguuauc

SEQ ID NO: 2215836 - RNA, 19 nt, Homo sapiens
  misc_RNA (1)...(19): siRNA sense strand
gaccgacucccaugucaaa

SEQ ID NO: 2215837 - RNA, 19 nt, Homo sapiens
  misc_RNA (1)...(19): siRNA sense strand
ccaaggcugugaugagcaa

SEQ ID NO: 2215838 - RNA, 19 nt, Homo sapiens
  misc_RNA (1)...(19): siRNA sense strand
ggacaagagugaccccaaa

SEQ ID NO: 2215839 - RNA, 19 nt, Homo sapiens
  misc_RNA (1)...(19): siRNA sense strand
ccaaugaugccagcuauga

SEQ ID NO: 2215840 - RNA, 19 nt, Homo sapiens
  misc_RNA (1)...(19): siRNA sense strand
caacaagcucucccaguau

SEQ ID NO: 2215841 - RNA, 19 nt, Homo sapiens
  misc_RNA (1)...(19): siRNA sense strand
gggacgaguuauuucagaa

SEQ ID NO: 2215842 - RNA, 19 nt, Homo sapiens
  misc_RNA (1)...(19): siRNA sense strand
aggaggagauaaagaagaa

SEQ ID NO: 2215843 - RNA, 19 nt, Homo sapiens
  misc_RNA (1)...(19): siRNA sense strand
ccagagaauguuauugaaa

SEQ ID NO: 2215844 - RNA, 19 nt, Homo sapiens
  misc_RNA (1)...(19): siRNA sense strand
ccgagacacuaaagcguuu

SEQ ID NO: 2215845 - RNA, 19 nt, Homo sapiens
  misc_RNA (1)...(19): siRNA sense strand
aagcaagucauggcuauua

SEQ ID NO: 2215846 - RNA, 19 nt, Homo sapiens
  misc_RNA (1)...(19): siRNA sense strand
uguccgagauggcuacauu

SEQ ID NO: 2215847 - RNA, 19 nt, Homo sapiens
  misc_RNA (1)...(19): siRNA sense strand
ugacggaucccuccaggaa

SEQ ID NO: 2215848 - RNA, 19 nt, Homo sapiens
  misc_RNA (1)...(19): siRNA sense strand
gacaacagccaguguaaag

SEQ ID NO: 2215849 - RNA, 19 nt, Homo sapiens
  misc_RNA (1)...(19): siRNA sense strand
caacagccaguguaaagga

SEQ ID NO: 2215850 - RNA, 19 nt, Homo sapiens
  misc_RNA (1)...(19): siRNA sense strand
ggagauaaagaagaagaaa

SEQ ID NO: 2215851 - RNA, 19 nt, Homo sapiens
  misc_RNA (1)...(19): siRNA sense strand
gagagaacaaagcuuauuc

SEQ ID NO: 2215852 - RNA, 19 nt, Homo sapiens
  misc_RNA (1)...(19): siRNA sense strand
gcugguggcugagaagaug

SEQ ID NO: 2215853 - RNA, 19 nt, Homo sapiens
  misc_RNA (1)...(19): siRNA sense strand
gcccugagguuugugauuc

SEQ ID NO: 2215854 - RNA, 19 nt, Homo sapiens
  misc_RNA (1)...(19): siRNA sense strand
caacauguacucccugaca

SEQ ID NO: 2215855 - RNA, 19 nt, Homo sapiens
  misc_RNA (1)...(19): siRNA sense strand
gauggcagcccagauuauu

SEQ ID NO: 2215856 - RNA, 19 nt, Homo sapiens
  misc_RNA (1)...(19): siRNA sense strand
ggaaggagaacgucaacuc

SEQ ID NO: 2215857 - RNA, 19 nt, Homo sapiens
  misc_RNA (1)...(19): siRNA sense strand
ggaacugacuggagaaauu

SEQ ID NO: 2215858 - RNA, 19 nt, Homo sapiens
  misc_RNA (1)...(19): siRNA sense strand
gaagaagacuauguagaaa

SEQ ID NO: 2215859 - RNA, 19 nt, Homo sapiens
  misc_RNA (1)...(19): siRNA sense strand
gaaagaauuugaagacaag

SEQ ID NO: 2215860 - RNA, 19 nt, Homo sapiens
  misc_RNA (1)...(19): siRNA sense strand
gaagguacauuacaggaau

SEQ ID NO: 2215861 - RNA, 19 nt, Homo sapiens
  misc_RNA (1)...(19): siRNA sense strand
gauagaagauggcaaacug

SEQ ID NO: 2215862 - RNA, 19 nt, Homo sapiens
  misc_RNA (1)...(19): siRNA sense strand
gaacaaguggaacgaaauu

SEQ ID NO: 2215863 - RNA, 19 nt, Homo sapiens
  misc_RNA (1)...(19): siRNA sense strand
gcaagaagguacauuacag

SEQ ID NO: 2215864 - RNA, 19 nt, Homo sapiens
  misc_RNA (1)...(19): siRNA sense strand
aaacugagcugcgugauca

SEQ ID NO: 2215865 - RNA, 19 nt, Homo sapiens
  misc_RNA (1)...(19): siRNA sense strand
gcuggaaacugaacaagug

SEQ ID NO: 2215866 - RNA, 19 nt, Homo sapiens
  misc_RNA (1)...(19): siRNA sense strand
ugaagaagacuauguagaa

SEQ ID NO: 2215867 - RNA, 19 nt, Homo sapiens
  misc_RNA (1)...(19): siRNA sense strand
guucgaagcucggauagaa

SEQ ID NO: 2215868 - RNA, 19 nt, Homo sapiens
  misc_RNA (1)...(19): siRNA sense strand
aaacugaccuggcaaagca

SEQ ID NO: 2215869 - RNA, 19 nt, Homo sapiens
  misc_RNA (1)...(19): siRNA sense strand
gaaccugauugcugagcua

SEQ ID NO: 2215870 - RNA, 19 nt, Homo sapiens
  misc_RNA (1)...(19): siRNA sense strand
caaacuggcuucucucaag

SEQ ID NO: 2215871 - RNA, 19 nt, Homo sapiens
  misc_RNA (1)...(19): siRNA sense strand
gaucagcaguacaaagaga

SEQ ID NO: 2215872 - RNA, 19 nt, Homo sapiens
  misc_RNA (1)...(19): siRNA sense strand
ggcaaagcaugaugaagaa

SEQ ID NO: 2215873 - RNA, 19 nt, Homo sapiens
  misc_RNA (1)...(19): siRNA sense strand
caagaagguugagcugaaa

SEQ ID NO: 2215874 - RNA, 19 nt, Homo sapiens
  misc_RNA (1)...(19): siRNA sense strand
acaagaagguugagcugaa

SEQ ID NO: 2215875 - RNA, 19 nt, Homo sapiens
  misc_RNA (1)...(19): siRNA sense strand
ccaucuaucuggagucaaa

SEQ ID NO: 2215876 - RNA, 19 nt, Homo sapiens
  misc_RNA (1)...(19): siRNA sense strand
agaagacuauguagaaaug

SEQ ID NO: 2215877 - RNA, 19 nt, Homo sapiens
  misc_RNA (1)...(19): siRNA sense strand
guuaacagaugaacagauc

SEQ ID NO: 2215878 - RNA, 19 nt, Homo sapiens
  misc_RNA (1)...(19): siRNA sense strand
gaaggcagcagugaaagaa

SEQ ID NO: 2215879 - RNA, 19 nt, Homo sapiens
  misc_RNA (1)...(19): siRNA sense strand
gaaaugaaggaacagaugu

SEQ ID NO: 2215880 - RNA, 19 nt, Homo sapiens
  misc_RNA (1)...(19): siRNA sense strand
gaauaucagaagagaauga

SEQ ID NO: 2215881 - RNA, 19 nt, Homo sapiens
  misc_RNA (1)...(19): siRNA sense strand
ugaaggaacagauguauca

SEQ ID NO: 2215882 - RNA, 19 nt, Homo sapiens
  misc_RNA (1)...(19): siRNA sense strand
aaagaaggcagcagugaaa

SEQ ID NO: 2215883 - RNA, 19 nt, Homo sapiens
  misc_RNA (1)...(19): siRNA sense strand
guacauuacaggaauauca

SEQ ID NO: 2215884 - RNA, 19 nt, Homo sapiens
  misc_RNA (1)...(19): siRNA sense strand
caaaugauccccuaaacua

SEQ ID NO: 2215885 - RNA, 19 nt, Homo sapiens
  misc_RNA (1)...(19): siRNA sense strand
gaggaucugagaacauuaa

SEQ ID NO: 2215886 - RNA, 19 nt, Homo sapiens
  misc_RNA (1)...(19): siRNA sense strand
caaacuguacuaugacaaa

SEQ ID NO: 2215887 - RNA, 19 nt, Homo sapiens
  misc_RNA (1)...(19): siRNA sense strand
ggacgaagacacugaggau

SEQ ID NO: 2215888 - RNA, 19 nt, Homo sapiens
  misc_RNA (1)...(19): siRNA sense strand
uuggauagauuuacccauu

SEQ ID NO: 2215889 - RNA, 19 nt, Homo sapiens
  misc_RNA (1)...(19): siRNA sense strand
gaacugacuggagaaauuc

SEQ ID NO: 2215890 - RNA, 19 nt, Homo sapiens
  misc_RNA (1)...(19): siRNA sense strand
uggaggaucugagaacauu

SEQ ID NO: 2215891 - RNA, 19 nt, Homo sapiens
  misc_RNA (1)...(19): siRNA sense strand
aagcuuaagucacccaaga

SEQ ID NO: 2215892 - RNA, 19 nt, Homo sapiens
  misc_RNA (1)...(19): siRNA sense strand
aaacuggcuucucucaaga

SEQ ID NO: 2215893 - RNA, 19 nt, Homo sapiens
  misc_RNA (1)...(19): siRNA sense strand
guggaacgaaauuacauua

SEQ ID NO: 2215894 - RNA, 19 nt, Homo sapiens
  misc_RNA (1)...(19): siRNA sense strand
uuacaggaauaucagaaga

SEQ ID NO: 2215895 - RNA, 19 nt, Homo sapiens
  misc_RNA (1)...(19): siRNA sense strand
uggcaaagcaugaugaaga

SEQ ID NO: 2215896 - RNA, 19 nt, Homo sapiens
  misc_RNA (1)...(19): siRNA sense strand
ggucagaggcgacaugagu

SEQ ID NO: 2215897 - RNA, 19 nt, Homo sapiens
  misc_RNA (1)...(19): siRNA sense strand
aaagagaggauacggaaug

SEQ ID NO: 2215898 - RNA, 19 nt, Homo sapiens
  misc_RNA (1)...(19): siRNA sense strand
uagaucagcaguacaaaga

SEQ ID NO: 2215899 - RNA, 19 nt, Homo sapiens
  misc_RNA (1)...(19): siRNA sense strand
gcugaaagagaaccugauu

SEQ ID NO: 2215900 - RNA, 19 nt, Homo sapiens
  misc_RNA (1)...(19): siRNA sense strand
caaagcaugaugaagaaga

SEQ ID NO: 2215901 - RNA, 19 nt, Homo sapiens
  misc_RNA (1)...(19): siRNA sense strand
cagauucuauggaggugaa

SEQ ID NO: 2215902 - RNA, 19 nt, Homo sapiens
  misc_RNA (1)...(19): siRNA sense strand
caacaacugcaagaaggua

SEQ ID NO: 2215903 - RNA, 19 nt, Homo sapiens
  misc_RNA (1)...(19): siRNA sense strand
acagauguaucaggacaaa

SEQ ID NO: 2215904 - RNA, 19 nt, Homo sapiens
  misc_RNA (1)...(19): siRNA sense strand
gagguucgaagcucggaua

SEQ ID NO: 2215905 - RNA, 19 nt, Homo sapiens
  misc_RNA (1)...(19): siRNA sense strand
uaucaugaccagaaaguug

SEQ ID NO: 2215906 - RNA, 19 nt, Homo sapiens
  misc_RNA (1)...(19): siRNA sense strand
aggcagcagugaaagaauu

SEQ ID NO: 2215907 - RNA, 19 nt, Homo sapiens
  misc_RNA (1)...(19): siRNA sense strand
ggaaacugaacaaguggaa

SEQ ID NO: 2215908 - RNA, 19 nt, Homo sapiens
  misc_RNA (1)...(19): siRNA sense strand
agguugagcugaaagagaa

SEQ ID NO: 2215909 - RNA, 19 nt, Homo sapiens
  misc_RNA (1)...(19): siRNA sense strand
aaaccuaucaugaccagaa

SEQ ID NO: 2215910 - RNA, 19 nt, Homo sapiens
  misc_RNA (1)...(19): siRNA sense strand
ugaugaagaagacuaugua

SEQ ID NO: 2215911 - RNA, 19 nt, Homo sapiens
  misc_RNA (1)...(19): siRNA sense strand
uagaagauggcaaacugua

SEQ ID NO: 2215912 - RNA, 19 nt, Homo sapiens
  misc_RNA (1)...(19): siRNA sense strand
gaaacugagcugcgugauc

SEQ ID NO: 2215913 - RNA, 19 nt, Homo sapiens
  misc_RNA (1)...(19): siRNA sense strand
cugaacaaguggaacgaaa

SEQ ID NO: 2215914 - RNA, 19 nt, Homo sapiens
  misc_RNA (1)...(19): siRNA sense strand
cgugaucaguucuguagga

SEQ ID NO: 2215915 - RNA, 19 nt, Homo sapiens
  misc_RNA (1)...(19): siRNA sense strand
ccugauugcugagcuagaa

SEQ ID NO: 2215916 - RNA, 19 nt, Homo sapiens
  misc_RNA (1)...(19): siRNA sense strand
acaggaauaucagaagaga

SEQ ID NO: 2215917 - RNA, 19 nt, Homo sapiens
  misc_RNA (1)...(19): siRNA sense strand
gaagauggcaaacuguacu

SEQ ID NO: 2215918 - RNA, 19 nt, Homo sapiens
  misc_RNA (1)...(19): siRNA sense strand
gauacggaaugcagaacuc

SEQ ID NO: 2215919 - RNA, 19 nt, Homo sapiens
  misc_RNA (1)...(19): siRNA sense strand
caagagccaggccaucuau

SEQ ID NO: 2215920 - RNA, 19 nt, Homo sapiens
  misc_RNA (1)...(19): siRNA sense strand
auggcaaacuguacuauga

SEQ ID NO: 2215921 - RNA, 19 nt, Homo sapiens
  misc_RNA (1)...(19): siRNA sense strand
gugaaagaauuugaagaca

SEQ ID NO: 2215922 - RNA, 19 nt, Homo sapiens
  misc_RNA (1)...(19): siRNA sense strand
agugggaguuggauagauu

SEQ ID NO: 2215923 - RNA, 19 nt, Homo sapiens
  misc_RNA (1)...(19): siRNA sense strand
caaaggacaaccagaaacu

SEQ ID NO: 2215924 - RNA, 19 nt, Homo sapiens
  misc_RNA (1)...(19): siRNA sense strand
ggcaaacuguacuaugaca

SEQ ID NO: 2215925 - RNA, 19 nt, Homo sapiens
  misc_RNA (1)...(19): siRNA sense strand
gcaguacaaagagaggaua

SEQ ID NO: 2215926 - RNA, 19 nt, Homo sapiens
  misc_RNA (1)...(19): siRNA sense strand
caagugacagcaccaagau

SEQ ID NO: 2215927 - RNA, 19 nt, Homo sapiens
  misc_RNA (1)...(19): siRNA sense strand
gaggauacggaaugcagaa

SEQ ID NO: 2215928 - RNA, 19 nt, Homo sapiens
  misc_RNA (1)...(19): siRNA sense strand
caaguggaacgaaauuaca

SEQ ID NO: 2215929 - RNA, 19 nt, Homo sapiens
  misc_RNA (1)...(19): siRNA sense strand
ugaaagagaaccugauugc

SEQ ID NO: 2215930 - RNA, 19 nt, Homo sapiens
  misc_RNA (1)...(19): siRNA sense strand
gaaaagaaggcagcaguga

SEQ ID NO: 2215931 - RNA, 19 nt, Homo sapiens
  misc_RNA (1)...(19): siRNA sense strand
ucaagaggcaguugcaaca

SEQ ID NO: 2215932 - RNA, 19 nt, Homo sapiens
  misc_RNA (1)...(19): siRNA sense strand
ggccaucuaucuggaguca

SEQ ID NO: 2215933 - RNA, 19 nt, Homo sapiens
  misc_RNA (1)...(19): siRNA sense strand
aaaugaaggaacagaugua

SEQ ID NO: 2215934 - RNA, 19 nt, Homo sapiens
  misc_RNA (1)...(19): siRNA sense strand
aagguacauuacaggaaua

SEQ ID NO: 2215935 - RNA, 19 nt, Homo sapiens
  misc_RNA (1)...(19): siRNA sense strand
ggaggaucugagaacauua

SEQ ID NO: 2215936 - RNA, 19 nt, Homo sapiens
  misc_RNA (1)...(19): siRNA sense strand
ggaguuggauagauuuacc

SEQ ID NO: 2215937 - RNA, 19 nt, Homo sapiens
  misc_RNA (1)...(19): siRNA sense strand
gcagugaaagaauuugaag

SEQ ID NO: 2215938 - RNA, 19 nt, Homo sapiens
  misc_RNA (1)...(19): siRNA sense strand
gacaaacuggcuucucuca

SEQ ID NO: 2215939 - RNA, 19 nt, Homo sapiens
  misc_RNA (1)...(19): siRNA sense strand
gcaugaugaagaagacuau

SEQ ID NO: 2215940 - RNA, 19 nt, Homo sapiens
  misc_RNA (1)...(19): siRNA sense strand
aggaauaucagaagagaau

SEQ ID NO: 2215941 - RNA, 19 nt, Homo sapiens
  misc_RNA (1)...(19): siRNA sense strand
gaagacuauguagaaauga

SEQ ID NO: 2215942 - RNA, 19 nt, Homo sapiens
  misc_RNA (1)...(19): siRNA sense strand
agaaaugaaggaacagaug

SEQ ID NO: 2215943 - RNA, 19 nt, Homo sapiens
  misc_RNA (1)...(19): siRNA sense strand
gucaaaggacaaccagaaa

SEQ ID NO: 2215944 - RNA, 19 nt, Homo sapiens
  misc_RNA (1)...(19): siRNA sense strand
gauggcaaacuguacuaug

SEQ ID NO: 2215945 - RNA, 19 nt, Homo sapiens
  misc_RNA (1)...(19): siRNA sense strand
gaaauucuuacugacuuca

SEQ ID NO: 2215946 - RNA, 19 nt, Homo sapiens
  misc_RNA (1)...(19): siRNA sense strand
gcaaacuguacuaugacaa

SEQ ID NO: 2215947 - RNA, 19 nt, Homo sapiens
  misc_RNA (1)...(19): siRNA sense strand
cugagaacauuaaauaagc

SEQ ID NO: 2215948 - RNA, 19 nt, Homo sapiens
  misc_RNA (1)...(19): siRNA sense strand
ugaggaugcuagugaaacu

SEQ ID NO: 2215949 - RNA, 19 nt, Homo sapiens
  misc_RNA (1)...(19): siRNA sense strand
ggauagauuuacccauucc

SEQ ID NO: 2215950 - RNA, 19 nt, Homo sapiens
  misc_RNA (1)...(19): siRNA sense strand
ggcagcagugaaagaauuu

SEQ ID NO: 2215951 - RNA, 19 nt, Homo sapiens
  misc_RNA (1)...(19): siRNA sense strand
ugagcugcgugaucaguuc

SEQ ID NO: 2215952 - RNA, 19 nt, Homo sapiens
  misc_RNA (1)...(19): siRNA sense strand
agucaaaggacaaccagaa

SEQ ID NO: 2215953 - RNA, 19 nt, Homo sapiens
  misc_RNA (1)...(19): siRNA sense strand
gaagcucggauagaagaug

SEQ ID NO: 2215954 - RNA, 19 nt, Homo sapiens
  misc_RNA (1)...(19): siRNA sense strand
uagauuuacccauuccauu

SEQ ID NO: 2215955 - RNA, 19 nt, Homo sapiens
  misc_RNA (1)...(19): siRNA sense strand
uggauagauuuacccauuc

SEQ ID NO: 2215956 - RNA, 19 nt, Homo sapiens
  misc_RNA (1)...(19): siRNA sense strand
acugcaagaagguacauua

SEQ ID NO: 2215957 - RNA, 19 nt, Homo sapiens
  misc_RNA (1)...(19): siRNA sense strand
ggaaggagcauuucucuuu

SEQ ID NO: 2215958 - RNA, 19 nt, Homo sapiens
  misc_RNA (1)...(19): siRNA sense strand
gaacuucggguuauuaauu

SEQ ID NO: 2215959 - RNA, 19 nt, Homo sapiens
  misc_RNA (1)...(19): siRNA sense strand
caccagaacuucccauuaa

SEQ ID NO: 2215960 - RNA, 19 nt, Homo sapiens
  misc_RNA (1)...(19): siRNA sense strand
guaaaugcauugauggaaa

SEQ ID NO: 2215961 - RNA, 19 nt, Homo sapiens
  misc_RNA (1)...(19): siRNA sense strand
gaaggagcauuucucuuug

SEQ ID NO: 2215962 - RNA, 19 nt, Homo sapiens
  misc_RNA (1)...(19): siRNA sense strand
ggaagucugcugugaauuu

SEQ ID NO: 2215963 - RNA, 19 nt, Homo sapiens
  misc_RNA (1)...(19): siRNA sense strand
gcacacugauugccauauu

SEQ ID NO: 2215964 - RNA, 19 nt, Homo sapiens
  misc_RNA (1)...(19): siRNA sense strand
ugucacauguugccaaaua

SEQ ID NO: 2215965 - RNA, 19 nt, Homo sapiens
  misc_RNA (1)...(19): siRNA sense strand
gcaccagaacuucccauua

SEQ ID NO: 2215966 - RNA, 19 nt, Homo sapiens
  misc_RNA (1)...(19): siRNA sense strand
gaagucugcugugaauuug

SEQ ID NO: 2215967 - RNA, 19 nt, Homo sapiens
  misc_RNA (1)...(19): siRNA sense strand
gcucuucacugcaccagaa

SEQ ID NO: 2215968 - RNA, 19 nt, Homo sapiens
  misc_RNA (1)...(19): siRNA sense strand
cagaguggacguuggauua

SEQ ID NO: 2215969 - RNA, 19 nt, Homo sapiens
  misc_RNA (1)...(19): siRNA sense strand
ugaaucagcugccucaagu

SEQ ID NO: 2215970 - RNA, 19 nt, Homo sapiens
  misc_RNA (1)...(19): siRNA sense strand
ccacauaccauuccacaga

SEQ ID NO: 2215971 - RNA, 19 nt, Homo sapiens
  misc_RNA (1)...(19): siRNA sense strand
gccuugagcuccuuuaugu

SEQ ID NO: 2215972 - RNA, 19 nt, Homo sapiens
  misc_RNA (1)...(19): siRNA sense strand
gcauauggaaggagcauuu

SEQ ID NO: 2215973 - RNA, 19 nt, Homo sapiens
  misc_RNA (1)...(19): siRNA sense strand
gaaacuggcuugcuaucac

SEQ ID NO: 2215974 - RNA, 19 nt, Homo sapiens
  misc_RNA (1)...(19): siRNA sense strand
caccgaaacuggcuugcua

SEQ ID NO: 2215975 - RNA, 19 nt, Homo sapiens
  misc_RNA (1)...(19): siRNA sense strand
gcaggagacgcuucgauuu

SEQ ID NO: 2215976 - RNA, 19 nt, Homo sapiens
  misc_RNA (1)...(19): siRNA sense strand
uauaguauuucgucacuga

SEQ ID NO: 2215977 - RNA, 19 nt, Homo sapiens
  misc_RNA (1)...(19): siRNA sense strand
gaguauauccugucacaug

SEQ ID NO: 2215978 - RNA, 19 nt, Homo sapiens
  misc_RNA (1)...(19): siRNA sense strand
ccagaugggucuauucgau

SEQ ID NO: 2215979 - RNA, 19 nt, Homo sapiens
  misc_RNA (1)...(19): siRNA sense strand
ucagcugccucaagucuuu

SEQ ID NO: 2215980 - RNA, 19 nt, Homo sapiens
  misc_RNA (1)...(19): siRNA sense strand
ggacauuauucccucuuuc

SEQ ID NO: 2215981 - RNA, 19 nt, Homo sapiens
  misc_RNA (1)...(19): siRNA sense strand
gcauuucucuuugcuguuc

SEQ ID NO: 2215982 - RNA, 19 nt, Homo sapiens
  misc_RNA (1)...(19): siRNA sense strand
uuacuaaccucaguguauu

SEQ ID NO: 2215983 - RNA, 19 nt, Homo sapiens
  misc_RNA (1)...(19): siRNA sense strand
ugucaucgguuugaaauug

SEQ ID NO: 2215984 - RNA, 19 nt, Homo sapiens
  misc_RNA (1)...(19): siRNA sense strand
gggugacucuucucaaaug

SEQ ID NO: 2215985 - RNA, 19 nt, Homo sapiens
  misc_RNA (1)...(19): siRNA sense strand
gcaguaggcgucacauaug

SEQ ID NO: 2215986 - RNA, 19 nt, Homo sapiens
  misc_RNA (1)...(19): siRNA sense strand
uggaagaguuucagcuuug

SEQ ID NO: 2215987 - RNA, 19 nt, Homo sapiens
  misc_RNA (1)...(19): siRNA sense strand
ucaagcauaucuaccucua

SEQ ID NO: 2215988 - RNA, 19 nt, Homo sapiens
  misc_RNA (1)...(19): siRNA sense strand
gcaauugguuuucggcuuu

SEQ ID NO: 2215989 - RNA, 19 nt, Homo sapiens
  misc_RNA (1)...(19): siRNA sense strand
uuucgucacugaagacuuu

SEQ ID NO: 2215990 - RNA, 19 nt, Homo sapiens
  misc_RNA (1)...(19): siRNA sense strand
caagacaaagaaacaauga

SEQ ID NO: 2215991 - RNA, 19 nt, Homo sapiens
  misc_RNA (1)...(19): siRNA sense strand
gauguacucuuuguguaug

SEQ ID NO: 2215992 - RNA, 19 nt, Homo sapiens
  misc_RNA (1)...(19): siRNA sense strand
gcaagacaaagaaacaaug

SEQ ID NO: 2215993 - RNA, 19 nt, Homo sapiens
  misc_RNA (1)...(19): siRNA sense strand
acucacaguuugccaauau

SEQ ID NO: 2215994 - RNA, 19 nt, Homo sapiens
  misc_RNA (1)...(19): siRNA sense strand
cuucaucccuuuguuacua

SEQ ID NO: 2215995 - RNA, 19 nt, Homo sapiens
  misc_RNA (1)...(19): siRNA sense strand
cuuuauggauguacucuuu

SEQ ID NO: 2215996 - RNA, 19 nt, Homo sapiens
  misc_RNA (1)...(19): siRNA sense strand
gaucaagaaaugcugaaug

SEQ ID NO: 2215997 - RNA, 19 nt, Homo sapiens
  misc_RNA (1)...(19): siRNA sense strand
gaccacaacaggacauuau

SEQ ID NO: 2215998 - RNA, 19 nt, Homo sapiens
  misc_RNA (1)...(19): siRNA sense strand
ggaagaguuucagcuuugu

SEQ ID NO: 2215999 - RNA, 19 nt, Homo sapiens
  misc_RNA (1)...(19): siRNA sense strand
uaaaccagaugggucuauu

SEQ ID NO: 2216000 - RNA, 19 nt, Homo sapiens
  misc_RNA (1)...(19): siRNA sense strand
uugcaugguuugaguauau

SEQ ID NO: 2216001 - RNA, 19 nt, Homo sapiens
  misc_RNA (1)...(19): siRNA sense strand
ucuauucgauggaagaguu

SEQ ID NO: 2216002 - RNA, 19 nt, Homo sapiens
  misc_RNA (1)...(19): siRNA sense strand
ucucuuugcuguucuccua

SEQ ID NO: 2216003 - RNA, 19 nt, Homo sapiens
  misc_RNA (1)...(19): siRNA sense strand
cagcuuuguucguguuauu

SEQ ID NO: 2216004 - RNA, 19 nt, Homo sapiens
  misc_RNA (1)...(19): siRNA sense strand
gcuauuggcaagacaaaga

SEQ ID NO: 2216005 - RNA, 19 nt, Homo sapiens
  misc_RNA (1)...(19): siRNA sense strand
gaaaugcugaauguccaua

SEQ ID NO: 2216006 - RNA, 19 nt, Homo sapiens
  misc_RNA (1)...(19): siRNA sense strand
ggauguacucuuuguguau

SEQ ID NO: 2216007 - RNA, 19 nt, Homo sapiens
  misc_RNA (1)...(19): siRNA sense strand
uaucacagugguauuauga

SEQ ID NO: 2216008 - RNA, 19 nt, Homo sapiens
  misc_RNA (1)...(19): siRNA sense strand
cacauaugcuugguucaaa

SEQ ID NO: 2216009 - RNA, 19 nt, Homo sapiens
  misc_RNA (1)...(19): siRNA sense strand
gggccucugucaugcauau

SEQ ID NO: 2216010 - RNA, 19 nt, Homo sapiens
  misc_RNA (1)...(19): siRNA sense strand
uauauccugucacauguug

SEQ ID NO: 2216011 - RNA, 19 nt, Homo sapiens
  misc_RNA (1)...(19): siRNA sense strand
guucagcaguuccaacaca

SEQ ID NO: 2216012 - RNA, 19 nt, Homo sapiens
  misc_RNA (1)...(19): siRNA sense strand
ugcugaauguccauaauuu

SEQ ID NO: 2216013 - RNA, 19 nt, Homo sapiens
  misc_RNA (1)...(19): siRNA sense strand
agucugcugugaauuugua

SEQ ID NO: 2216014 - RNA, 19 nt, Homo sapiens
  misc_RNA (1)...(19): siRNA sense strand
gauggaagaguuucagcuu

SEQ ID NO: 2216015 - RNA, 19 nt, Homo sapiens
  misc_RNA (1)...(19): siRNA sense strand
uggauguacucuuugugua

SEQ ID NO: 2216016 - RNA, 19 nt, Homo sapiens
  misc_RNA (1)...(19): siRNA sense strand
gggacugguuguuuucuua

SEQ ID NO: 2216017 - RNA, 19 nt, Homo sapiens
  misc_RNA (1)...(19): siRNA sense strand
aaugacaagugguuugguu

SEQ ID NO: 2216018 - RNA, 19 nt, Homo sapiens
  misc_RNA (1)...(19): siRNA sense strand
gguauuaugaggcaacuuc

SEQ ID NO: 2216019 - RNA, 19 nt, Homo sapiens
  misc_RNA (1)...(19): siRNA sense strand
cuugagcuccuuuauguuu

SEQ ID NO: 2216020 - RNA, 19 nt, Homo sapiens
  misc_RNA (1)...(19): siRNA sense strand
cccaaggccucaaugacaa

SEQ ID NO: 2216021 - RNA, 19 nt, Homo sapiens
  misc_RNA (1)...(19): siRNA sense strand
acaaagugcugucugucau

SEQ ID NO: 2216022 - RNA, 19 nt, Homo sapiens
  misc_RNA (1)...(19): siRNA sense strand
gcuguucuccuacauuuca

SEQ ID NO: 2216023 - RNA, 19 nt, Homo sapiens
  misc_RNA (1)...(19): siRNA sense strand
uugcuguucuccuacauuu

SEQ ID NO: 2216024 - RNA, 19 nt, Homo sapiens
  misc_RNA (1)...(19): siRNA sense strand
gauuaaugcuacucuccau

SEQ ID NO: 2216025 - RNA, 19 nt, Homo sapiens
  misc_RNA (1)...(19): siRNA sense strand
ugagugcuguaaaugcauu

SEQ ID NO: 2216026 - RNA, 19 nt, Homo sapiens
  misc_RNA (1)...(19): siRNA sense strand
acacaguccuucccucagu

SEQ ID NO: 2216027 - RNA, 19 nt, Homo sapiens
  misc_RNA (1)...(19): siRNA sense strand
gaaaaggcauauggaagga

SEQ ID NO: 2216028 - RNA, 19 nt, Homo sapiens
  misc_RNA (1)...(19): siRNA sense strand
ccaagggcccagaggcuuu

SEQ ID NO: 2216029 - RNA, 19 nt, Homo sapiens
  misc_RNA (1)...(19): siRNA sense strand
uugauugacucugcuauug

SEQ ID NO: 2216030 - RNA, 19 nt, Homo sapiens
  misc_RNA (1)...(19): siRNA sense strand
ccacaacaggacauuauuc

SEQ ID NO: 2216031 - RNA, 19 nt, Homo sapiens
  misc_RNA (1)...(19): siRNA sense strand
agccauacuucuagcaauu

SEQ ID NO: 2216032 - RNA, 19 nt, Homo sapiens
  misc_RNA (1)...(19): siRNA sense strand
ucacauguugccaaauauu

SEQ ID NO: 2216033 - RNA, 19 nt, Homo sapiens
  misc_RNA (1)...(19): siRNA sense strand
gaacuucccauuaaaaucu

SEQ ID NO: 2216034 - RNA, 19 nt, Homo sapiens
  misc_RNA (1)...(19): siRNA sense strand
gucaucgguuugaaauuga

SEQ ID NO: 2216035 - RNA, 19 nt, Homo sapiens
  misc_RNA (1)...(19): siRNA sense strand
cuguuucacugcaaauaaa

SEQ ID NO: 2216036 - RNA, 19 nt, Homo sapiens
  misc_RNA (1)...(19): siRNA sense strand
aucaagaaaugcugaaugu

SEQ ID NO: 2216037 - RNA, 19 nt, Homo sapiens
  misc_RNA (1)...(19): siRNA sense strand
cuggaagucugcugugaau

SEQ ID NO: 2216038 - RNA, 19 nt, Homo sapiens
  misc_RNA (1)...(19): siRNA sense strand
caccauauauaguauuucg

SEQ ID NO: 2216039 - RNA, 19 nt, Homo sapiens
  misc_RNA (1)...(19): siRNA sense strand
gccauauugcccucuauuu

SEQ ID NO: 2216040 - RNA, 19 nt, Homo sapiens
  misc_RNA (1)...(19): siRNA sense strand
gaagaguuucagcuuuguu

SEQ ID NO: 2216041 - RNA, 19 nt, Homo sapiens
  misc_RNA (1)...(19): siRNA sense strand
guccgugagugcuguaaau

SEQ ID NO: 2216042 - RNA, 19 nt, Homo sapiens
  misc_RNA (1)...(19): siRNA sense strand
gcugaauguccauaauuug

SEQ ID NO: 2216043 - RNA, 19 nt, Homo sapiens
  misc_RNA (1)...(19): siRNA sense strand
cacauguugccaaauauuu

SEQ ID NO: 2216044 - RNA, 19 nt, Homo sapiens
  misc_RNA (1)...(19): siRNA sense strand
ucacauaugcuugguucaa

SEQ ID NO: 2216045 - RNA, 19 nt, Homo sapiens
  misc_RNA (1)...(19): siRNA sense strand
cacacugauugccauauug

SEQ ID NO: 2216046 - RNA, 19 nt, Homo sapiens
  misc_RNA (1)...(19): siRNA sense strand
acucuccauugcacgauua

SEQ ID NO: 2216047 - RNA, 19 nt, Homo sapiens
  misc_RNA (1)...(19): siRNA sense strand
guggaacuucggguuauua

SEQ ID NO: 2216048 - RNA, 19 nt, Homo sapiens
  misc_RNA (1)...(19): siRNA sense strand
cugaauguccauaauuuga

SEQ ID NO: 2216049 - RNA, 19 nt, Homo sapiens
  misc_RNA (1)...(19): siRNA sense strand
cuucugggcuuuguacaau

SEQ ID NO: 2216050 - RNA, 19 nt, Homo sapiens
  misc_RNA (1)...(19): siRNA sense strand
uagcaauucucccaaugag

SEQ ID NO: 2216051 - RNA, 19 nt, Homo sapiens
  misc_RNA (1)...(19): siRNA sense strand
gugguuugguucagcaguu

SEQ ID NO: 2216052 - RNA, 19 nt, Homo sapiens
  misc_RNA (1)...(19): siRNA sense strand
cucaguguauugugcagua

SEQ ID NO: 2216053 - RNA, 19 nt, Homo sapiens
  misc_RNA (1)...(19): siRNA sense strand
cauguuacuauucaccaua

SEQ ID NO: 2216054 - RNA, 19 nt, Homo sapiens
  misc_RNA (1)...(19): siRNA sense strand
ggcuuucuccgaugucuaa

SEQ ID NO: 2216055 - RNA, 19 nt, Homo sapiens
  misc_RNA (1)...(19): siRNA sense strand
cagaggcuuucuccgaugu

SEQ ID NO: 2216056 - RNA, 19 nt, Homo sapiens
  misc_RNA (1)...(19): siRNA sense strand
acccucaucugcacacuga

SEQ ID NO: 2216057 - RNA, 19 nt, Homo sapiens
  misc_RNA (1)...(19): siRNA sense strand
gcaaauuccuuuccaagaa

SEQ ID NO: 2216058 - RNA, 19 nt, Homo sapiens
  misc_RNA (1)...(19): siRNA sense strand
ggagaucuaggucuucuua

SEQ ID NO: 2216059 - RNA, 19 nt, Homo sapiens
  misc_RNA (1)...(19): siRNA sense strand
guacuuggaggauuuauuu

SEQ ID NO: 2216060 - RNA, 19 nt, Homo sapiens
  misc_RNA (1)...(19): siRNA sense strand
gcuaauaacacaacaaguu

SEQ ID NO: 2216061 - RNA, 19 nt, Homo sapiens
  misc_RNA (1)...(19): siRNA sense strand
gcugguacuuggaggauuu

SEQ ID NO: 2216062 - RNA, 19 nt, Homo sapiens
  misc_RNA (1)...(19): siRNA sense strand
caacagaacuggauuuuac

SEQ ID NO: 2216063 - RNA, 19 nt, Homo sapiens
  misc_RNA (1)...(19): siRNA sense strand
gggaggaccuuaucauguc

SEQ ID NO: 2216064 - RNA, 19 nt, Homo sapiens
  misc_RNA (1)...(19): siRNA sense strand
uuucagagcuucuacuuuc

SEQ ID NO: 2216065 - RNA, 19 nt, Homo sapiens
  misc_RNA (1)...(19): siRNA sense strand
gggaguccauggccagaaa

SEQ ID NO: 2216066 - RNA, 19 nt, Homo sapiens
  misc_RNA (1)...(19): siRNA sense strand
caucagcacuucccacagu

SEQ ID NO: 2216067 - RNA, 19 nt, Homo sapiens
  misc_RNA (1)...(19): siRNA sense strand
uaucauguccuucacugua

SEQ ID NO: 2216068 - RNA, 19 nt, Homo sapiens
  misc_RNA (1)...(19): siRNA sense strand
gaacaagcaaauuccuuuc

SEQ ID NO: 2216069 - RNA, 19 nt, Homo sapiens
  misc_RNA (1)...(19): siRNA sense strand
caagcaaauuccuuuccaa

SEQ ID NO: 2216070 - RNA, 19 nt, Homo sapiens
  misc_RNA (1)...(19): siRNA sense strand
ggauuuauuugggcugugu

SEQ ID NO: 2216071 - RNA, 19 nt, Homo sapiens
  misc_RNA (1)...(19): siRNA sense strand
ucaaggcauucccagauuc

SEQ ID NO: 2216072 - RNA, 19 nt, Homo sapiens
  misc_RNA (1)...(19): siRNA sense strand
gaccuuaucauguccuuca

SEQ ID NO: 2216073 - RNA, 19 nt, Homo sapiens
  misc_RNA (1)...(19): siRNA sense strand
uauuugggcuguguucauu

SEQ ID NO: 2216074 - RNA, 19 nt, Homo sapiens
  misc_RNA (1)...(19): siRNA sense strand
gcaaucgggcugguacuug

SEQ ID NO: 2216075 - RNA, 19 nt, Homo sapiens
  misc_RNA (1)...(19): siRNA sense strand
uaugagggguuguguaaaa

SEQ ID NO: 2216076 - RNA, 19 nt, Homo sapiens
  misc_RNA (1)...(19): siRNA sense strand
caucaaggcauucccagau

SEQ ID NO: 2216077 - RNA, 19 nt, Homo sapiens
  misc_RNA (1)...(19): siRNA sense strand
aaaucaaguuucagagcuu

SEQ ID NO: 2216078 - RNA, 19 nt, Homo sapiens
  misc_RNA (1)...(19): siRNA sense strand
agaucuaggucuucuuaca

SEQ ID NO: 2216079 - RNA, 19 nt, Homo sapiens
  misc_RNA (1)...(19): siRNA sense strand
gcuggugacucucccuucu

SEQ ID NO: 2216080 - RNA, 19 nt, Homo sapiens
  misc_RNA (1)...(19): siRNA sense strand
uuguggauauuauggcuaa

SEQ ID NO: 2216081 - RNA, 19 nt, Homo sapiens
  misc_RNA (1)...(19): siRNA sense strand
gggcuguguucauuugucu

SEQ ID NO: 2216082 - RNA, 19 nt, Homo sapiens
  misc_RNA (1)...(19): siRNA sense strand
acaagcaaauuccuuucca

SEQ ID NO: 2216083 - RNA, 19 nt, Homo sapiens
  misc_RNA (1)...(19): siRNA sense strand
ccagugcucccaucucaca

SEQ ID NO: 2216084 - RNA, 19 nt, Homo sapiens
  misc_RNA (1)...(19): siRNA sense strand
acucucccuucuuccaaua

SEQ ID NO: 2216085 - RNA, 19 nt, Homo sapiens
  misc_RNA (1)...(19): siRNA sense strand
agccagugcucccaucuca

SEQ ID NO: 2216086 - RNA, 19 nt, Homo sapiens
  misc_RNA (1)...(19): siRNA sense strand
gacucucccuucuuccaau

SEQ ID NO: 2216087 - RNA, 19 nt, Homo sapiens
  misc_RNA (1)...(19): siRNA sense strand
ccucaacagaacuggauuu

SEQ ID NO: 2216088 - RNA, 19 nt, Homo sapiens
  misc_RNA (1)...(19): siRNA sense strand
caggagaucuaggucuucu

SEQ ID NO: 2216089 - RNA, 19 nt, Homo sapiens
  misc_RNA (1)...(19): siRNA sense strand
gguacuuggaggauuuauu

SEQ ID NO: 2216090 - RNA, 19 nt, Homo sapiens
  misc_RNA (1)...(19): siRNA sense strand
uuccaucccuuucugcaau

SEQ ID NO: 2216091 - RNA, 19 nt, Homo sapiens
  misc_RNA (1)...(19): siRNA sense strand
uuugggcuguguucauuug

SEQ ID NO: 2216092 - RNA, 19 nt, Homo sapiens
  misc_RNA (1)...(19): siRNA sense strand
aucaaggcauucccagauu

SEQ ID NO: 2216093 - RNA, 19 nt, Homo sapiens
  misc_RNA (1)...(19): siRNA sense strand
uggugacucucccuucuuc

SEQ ID NO: 2216094 - RNA, 19 nt, Homo sapiens
  misc_RNA (1)...(19): siRNA sense strand
uauaugagggguuguguaa

SEQ ID NO: 2216095 - RNA, 19 nt, Homo sapiens
  misc_RNA (1)...(19): siRNA sense strand
gaucuaggucuucuuacac

SEQ ID NO: 2216096 - RNA, 19 nt, Homo sapiens
  misc_RNA (1)...(19): siRNA sense strand
ugggaggaccuuaucaugu

SEQ ID NO: 2216097 - RNA, 19 nt, Homo sapiens
  misc_RNA (1)...(19): siRNA sense strand
agcaggagaucuaggucuu

SEQ ID NO: 2216098 - RNA, 19 nt, Homo sapiens
  misc_RNA (1)...(19): siRNA sense strand
ucaagcaggagaucuaggu

SEQ ID NO: 2216099 - RNA, 19 nt, Homo sapiens
  misc_RNA (1)...(19): siRNA sense strand
caacaaauaucgcugugau

SEQ ID NO: 2216100 - RNA, 19 nt, Homo sapiens
  misc_RNA (1)...(19): siRNA sense strand
gucaauagcuacuucgauu

SEQ ID NO: 2216101 - RNA, 19 nt, Homo sapiens
  misc_RNA (1)...(19): siRNA sense strand
gaucugcucugaccuuaag

SEQ ID NO: 2216102 - RNA, 19 nt, Homo sapiens
  misc_RNA (1)...(19): siRNA sense strand
ggaggagaaggaagaguua

SEQ ID NO: 2216103 - RNA, 19 nt, Homo sapiens
  misc_RNA (1)...(19): siRNA sense strand
ggagaaggaagaguuauga

SEQ ID NO: 2216104 - RNA, 19 nt, Homo sapiens
  misc_RNA (1)...(19): siRNA sense strand
gcgggcagcuugcaucugu

SEQ ID NO: 2216105 - RNA, 19 nt, Homo sapiens
  misc_RNA (1)...(19): siRNA sense strand
gauggugucuccacucgau

SEQ ID NO: 2216106 - RNA, 19 nt, Homo sapiens
  misc_RNA (1)...(19): siRNA sense strand
aaauaucgcugugaugcaa

SEQ ID NO: 2216107 - RNA, 19 nt, Homo sapiens
  misc_RNA (1)...(19): siRNA sense strand
caagguaccagaaaguaug

SEQ ID NO: 2216108 - RNA, 19 nt, Homo sapiens
  misc_RNA (1)...(19): siRNA sense strand
ggaagaauggagucuguca

SEQ ID NO: 2216109 - RNA, 19 nt, Homo sapiens
  misc_RNA (1)...(19): siRNA sense strand
ccagcuggaugucuguuau

SEQ ID NO: 2216110 - RNA, 19 nt, Homo sapiens
  misc_RNA (1)...(19): siRNA sense strand
agaauggagucugucagua

SEQ ID NO: 2216111 - RNA, 19 nt, Homo sapiens
  misc_RNA (1)...(19): siRNA sense strand
gaauggagucugucaguac

SEQ ID NO: 2216112 - RNA, 19 nt, Homo sapiens
  misc_RNA (1)...(19): siRNA sense strand
caguacaggugccgauaug

SEQ ID NO: 2216113 - RNA, 19 nt, Homo sapiens
  misc_RNA (1)...(19): siRNA sense strand
guacaggugccgauaugga

SEQ ID NO: 2216114 - RNA, 19 nt, Homo sapiens
  misc_RNA (1)...(19): siRNA sense strand
auagcuacuucgauucuuu

SEQ ID NO: 2216115 - RNA, 19 nt, Homo sapiens
  misc_RNA (1)...(19): siRNA sense strand
gugcagaggaggagaagga

SEQ ID NO: 2216116 - RNA, 19 nt, Homo sapiens
  misc_RNA (1)...(19): siRNA sense strand
cagaggaggagaaggaaga

SEQ ID NO: 2216117 - RNA, 19 nt, Homo sapiens
  misc_RNA (1)...(19): siRNA sense strand
ggucucaagguaccagaaa

SEQ ID NO: 2216118 - RNA, 19 nt, Homo sapiens
  misc_RNA (1)...(19): siRNA sense strand
ucgaucugcucugaccuua

SEQ ID NO: 2216119 - RNA, 19 nt, Homo sapiens
  misc_RNA (1)...(19): siRNA sense strand
cacuugcggugccaacaaa

SEQ ID NO: 2216120 - RNA, 19 nt, Homo sapiens
  misc_RNA (1)...(19): siRNA sense strand
uuuccugggucucaaggua

SEQ ID NO: 2216121 - RNA, 19 nt, Homo sapiens
  misc_RNA (1)...(19): siRNA sense strand
caauagcuacuucgauucu

SEQ ID NO: 2216122 - RNA, 19 nt, Homo sapiens
  misc_RNA (1)...(19): siRNA sense strand
caaaguggaagccugugau

SEQ ID NO: 2216123 - RNA, 19 nt, Homo sapiens
  misc_RNA (1)...(19): siRNA sense strand
ccaaaguggaagccuguga

SEQ ID NO: 2216124 - RNA, 19 nt, Homo sapiens
  misc_RNA (1)...(19): siRNA sense strand
ucaagguaccagaaaguau

SEQ ID NO: 2216125 - RNA, 19 nt, Homo sapiens
  misc_RNA (1)...(19): siRNA sense strand
gauauggaaaggcaccaau

SEQ ID NO: 2216126 - RNA, 19 nt, Homo sapiens
  misc_RNA (1)...(19): siRNA sense strand
aaaguggaagccugugauu

SEQ ID NO: 2216127 - RNA, 19 nt, Homo sapiens
  misc_RNA (1)...(19): siRNA sense strand
aauggagucugucaguaca

SEQ ID NO: 2216128 - RNA, 19 nt, Homo sapiens
  misc_RNA (1)...(19): siRNA sense strand
agggaagaauggagucugu

SEQ ID NO: 2216129 - RNA, 19 nt, Homo sapiens
  misc_RNA (1)...(19): siRNA sense strand
aguauggacuugggcauuc

SEQ ID NO: 2216130 - RNA, 19 nt, Homo sapiens
  misc_RNA (1)...(19): siRNA sense strand
uuccagcaaugacaaagug

SEQ ID NO: 2216131 - RNA, 19 nt, Homo sapiens
  misc_RNA (1)...(19): siRNA sense strand
caaauaucgcugugaugca

SEQ ID NO: 2216132 - RNA, 19 nt, Homo sapiens
  misc_RNA (1)...(19): siRNA sense strand
gcuaugcaguuguuaauuu

SEQ ID NO: 2216133 - RNA, 19 nt, Homo sapiens
  misc_RNA (1)...(19): siRNA sense strand
gaaauucacuuaugcucau

SEQ ID NO: 2216134 - RNA, 19 nt, Homo sapiens
  misc_RNA (1)...(19): siRNA sense strand
ggaauuucguuacuucauu

SEQ ID NO: 2216135 - RNA, 19 nt, Homo sapiens
  misc_RNA (1)...(19): siRNA sense strand
caucugggcugucuucugu

SEQ ID NO: 2216136 - RNA, 19 nt, Homo sapiens
  misc_RNA (1)...(19): siRNA sense strand
gcagacaauagacauuaua

SEQ ID NO: 2216137 - RNA, 19 nt, Homo sapiens
  misc_RNA (1)...(19): siRNA sense strand
cauccagacucauuuguga

SEQ ID NO: 2216138 - RNA, 19 nt, Homo sapiens
  misc_RNA (1)...(19): siRNA sense strand
aaacugagcuacaaaagaa

SEQ ID NO: 2216139 - RNA, 19 nt, Homo sapiens
  misc_RNA (1)...(19): siRNA sense strand
uaaaggaccauuugcagaa

SEQ ID NO: 2216140 - RNA, 19 nt, Homo sapiens
  misc_RNA (1)...(19): siRNA sense strand
gacagacuuccaccuauua

SEQ ID NO: 2216141 - RNA, 19 nt, Homo sapiens
  misc_RNA (1)...(19): siRNA sense strand
guuaaugguggaauuguua

SEQ ID NO: 2216142 - RNA, 19 nt, Homo sapiens
  misc_RNA (1)...(19): siRNA sense strand
agacagacuuccaccuauu

SEQ ID NO: 2216143 - RNA, 19 nt, Homo sapiens
  misc_RNA (1)...(19): siRNA sense strand
ugaugugucuuuauggaaa

SEQ ID NO: 2216144 - RNA, 19 nt, Homo sapiens
  misc_RNA (1)...(19): siRNA sense strand
caaauagucaggacauuca

SEQ ID NO: 2216145 - RNA, 19 nt, Homo sapiens
  misc_RNA (1)...(19): siRNA sense strand
cuuauuccauguccuuuaa

SEQ ID NO: 2216146 - RNA, 19 nt, Homo sapiens
  misc_RNA (1)...(19): siRNA sense strand
gcuggaauuucguuacuuc

SEQ ID NO: 2216147 - RNA, 19 nt, Homo sapiens
  misc_RNA (1)...(19): siRNA sense strand
uagcagacaauagacauua

SEQ ID NO: 2216148 - RNA, 19 nt, Homo sapiens
  misc_RNA (1)...(19): siRNA sense strand
cguauuugaugugucuuua

SEQ ID NO: 2216149 - RNA, 19 nt, Homo sapiens
  misc_RNA (1)...(19): siRNA sense strand
cucagaaacugcuggaauu

SEQ ID NO: 2216150 - RNA, 19 nt, Homo sapiens
  misc_RNA (1)...(19): siRNA sense strand
uguuauaguuccucagaaa

SEQ ID NO: 2216151 - RNA, 19 nt, Homo sapiens
  misc_RNA (1)...(19): siRNA sense strand
guuccagccuauauauuug

SEQ ID NO: 2216152 - RNA, 19 nt, Homo sapiens
  misc_RNA (1)...(19): siRNA sense strand
ucaggacauucaaagguuu

SEQ ID NO: 2216153 - RNA, 19 nt, Homo sapiens
  misc_RNA (1)...(19): siRNA sense strand
gucaggacauucaaagguu

SEQ ID NO: 2216154 - RNA, 19 nt, Homo sapiens
  misc_RNA (1)...(19): siRNA sense strand
cuuguucacuguuauaguu

SEQ ID NO: 2216155 - RNA, 19 nt, Homo sapiens
  misc_RNA (1)...(19): siRNA sense strand
guacagcugacucauugaa

SEQ ID NO: 2216156 - RNA, 19 nt, Homo sapiens
  misc_RNA (1)...(19): siRNA sense strand
guuuggaaauucacuuaug

SEQ ID NO: 2216157 - RNA, 19 nt, Homo sapiens
  misc_RNA (1)...(19): siRNA sense strand
ucaaagguuuaugugguaa

SEQ ID NO: 2216158 - RNA, 19 nt, Homo sapiens
  misc_RNA (1)...(19): siRNA sense strand
ccucaucuccugucuccua

SEQ ID NO: 2216159 - RNA, 19 nt, Homo sapiens
  misc_RNA (1)...(19): siRNA sense strand
uaccuuagucucuguguuu

SEQ ID NO: 2216160 - RNA, 19 nt, Homo sapiens
  misc_RNA (1)...(19): siRNA sense strand
acagcugacucauugaaau

SEQ ID NO: 2216161 - RNA, 19 nt, Homo sapiens
  misc_RNA (1)...(19): siRNA sense strand
uucaaagguuuauguggua

SEQ ID NO: 2216162 - RNA, 19 nt, Homo sapiens
  misc_RNA (1)...(19): siRNA sense strand
gaugugucuuuauggaaau

SEQ ID NO: 2216163 - RNA, 19 nt, Homo sapiens
  misc_RNA (1)...(19): siRNA sense strand
gcuuauuccauguccuuua

SEQ ID NO: 2216164 - RNA, 19 nt, Homo sapiens
  misc_RNA (1)...(19): siRNA sense strand
guuauuggcgaucggagua

SEQ ID NO: 2216165 - RNA, 19 nt, Homo sapiens
  misc_RNA (1)...(19): siRNA sense strand
guuaguuccagccuauaua

SEQ ID NO: 2216166 - RNA, 19 nt, Homo sapiens
  misc_RNA (1)...(19): siRNA sense strand
cuaugcaguuguuaauuuc

SEQ ID NO: 2216167 - RNA, 19 nt, Homo sapiens
  misc_RNA (1)...(19): siRNA sense strand
gccuauauauuugcugguu

SEQ ID NO: 2216168 - RNA, 19 nt, Homo sapiens
  misc_RNA (1)...(19): siRNA sense strand
ggaaaacugagcuacaaaa

SEQ ID NO: 2216169 - RNA, 19 nt, Homo sapiens
  misc_RNA (1)...(19): siRNA sense strand
ccaaauagucaggacauuc

SEQ ID NO: 2216170 - RNA, 19 nt, Homo sapiens
  misc_RNA (1)...(19): siRNA sense strand
gccaaauagucaggacauu

SEQ ID NO: 2216171 - RNA, 19 nt, Homo sapiens
  misc_RNA (1)...(19): siRNA sense strand
agacucauuugugaacuga

SEQ ID NO: 2216172 - RNA, 19 nt, Homo sapiens
  misc_RNA (1)...(19): siRNA sense strand
ucagaaacugcuggaauuu

SEQ ID NO: 2216173 - RNA, 19 nt, Homo sapiens
  misc_RNA (1)...(19): siRNA sense strand
aagacagacuuccaccuau

SEQ ID NO: 2216174 - RNA, 19 nt, Homo sapiens
  misc_RNA (1)...(19): siRNA sense strand
ccuauuaaaggaccauuug

SEQ ID NO: 2216175 - RNA, 19 nt, Homo sapiens
  misc_RNA (1)...(19): siRNA sense strand
ccacauccagacucauuug

SEQ ID NO: 2216176 - RNA, 19 nt, Homo sapiens
  misc_RNA (1)...(19): siRNA sense strand
ucauaugcuuguucacugu

SEQ ID NO: 2216177 - RNA, 19 nt, Homo sapiens
  misc_RNA (1)...(19): siRNA sense strand
ucuccugucuccuagcaaa

SEQ ID NO: 2216178 - RNA, 19 nt, Homo sapiens
  misc_RNA (1)...(19): siRNA sense strand
aaaggaccauuugcagaau

SEQ ID NO: 2216179 - RNA, 19 nt, Homo sapiens
  misc_RNA (1)...(19): siRNA sense strand
caggacauucaaagguuua

SEQ ID NO: 2216180 - RNA, 19 nt, Homo sapiens
  misc_RNA (1)...(19): siRNA sense strand
ggaaacguagaauucuguu

SEQ ID NO: 2216181 - RNA, 19 nt, Homo sapiens
  misc_RNA (1)...(19): siRNA sense strand
ccucaacuauucuacuuuu

SEQ ID NO: 2216182 - RNA, 19 nt, Homo sapiens
  misc_RNA (1)...(19): siRNA sense strand
guaguuaaugguggaauug

SEQ ID NO: 2216183 - RNA, 19 nt, Homo sapiens
  misc_RNA (1)...(19): siRNA sense strand
ugucuucugugcaggaaau

SEQ ID NO: 2216184 - RNA, 19 nt, Homo sapiens
  misc_RNA (1)...(19): siRNA sense strand
guuuugugcuuuuguagua

SEQ ID NO: 2216185 - RNA, 19 nt, Homo sapiens
  misc_RNA (1)...(19): siRNA sense strand
aguaguuaaugguggaauu

SEQ ID NO: 2216186 - RNA, 19 nt, Homo sapiens
  misc_RNA (1)...(19): siRNA sense strand
ccucagaaacugcuggaau

SEQ ID NO: 2216187 - RNA, 19 nt, Homo sapiens
  misc_RNA (1)...(19): siRNA sense strand
agacuuccaccuauuaaag

SEQ ID NO: 2216188 - RNA, 19 nt, Homo sapiens
  misc_RNA (1)...(19): siRNA sense strand
uuugugaacugagcugcua

SEQ ID NO: 2216189 - RNA, 19 nt, Homo sapiens
  misc_RNA (1)...(19): siRNA sense strand
aguuccagccuauauauuu

SEQ ID NO: 2216190 - RNA, 19 nt, Homo sapiens
  misc_RNA (1)...(19): siRNA sense strand
cuucagccuuccuuggauu

SEQ ID NO: 2216191 - RNA, 19 nt, Homo sapiens
  misc_RNA (1)...(19): siRNA sense strand
ggcuucauguuucggcaaa

SEQ ID NO: 2216192 - RNA, 19 nt, Homo sapiens
  misc_RNA (1)...(19): siRNA sense strand
aaggaccauuugcagaauu

SEQ ID NO: 2216193 - RNA, 19 nt, Homo sapiens
  misc_RNA (1)...(19): siRNA sense strand
caucuccugucuccuagca

SEQ ID NO: 2216194 - RNA, 19 nt, Homo sapiens
  misc_RNA (1)...(19): siRNA sense strand
auaugcuuguucacuguua

SEQ ID NO: 2216195 - RNA, 19 nt, Homo sapiens
  misc_RNA (1)...(19): siRNA sense strand
uuuguuaguuccagccuau

SEQ ID NO: 2216196 - RNA, 19 nt, Homo sapiens
  misc_RNA (1)...(19): siRNA sense strand
uuugaugugucuuuaugga

SEQ ID NO: 2216197 - RNA, 19 nt, Homo sapiens
  misc_RNA (1)...(19): siRNA sense strand
cagacucauuugugaacug

SEQ ID NO: 2216198 - RNA, 19 nt, Homo sapiens
  misc_RNA (1)...(19): siRNA sense strand
guuaacggaggcuuggaaa

SEQ ID NO: 2216199 - RNA, 19 nt, Homo sapiens
  misc_RNA (1)...(19): siRNA sense strand
acagacuuccaccuauuaa

SEQ ID NO: 2216200 - RNA, 19 nt, Homo sapiens
  misc_RNA (1)...(19): siRNA sense strand
gcguauuugaugugucuuu

SEQ ID NO: 2216201 - RNA, 19 nt, Homo sapiens
  misc_RNA (1)...(19): siRNA sense strand
ugucauugcacaaaaguua

SEQ ID NO: 2216202 - RNA, 19 nt, Homo sapiens
  misc_RNA (1)...(19): siRNA sense strand
ggauuucuguuuugugcuu

SEQ ID NO: 2216203 - RNA, 19 nt, Homo sapiens
  misc_RNA (1)...(19): siRNA sense strand
aauacuugcuagcagacaa

SEQ ID NO: 2216204 - RNA, 19 nt, Homo sapiens
  misc_RNA (1)...(19): siRNA sense strand
aauaucaucugggcugucu

SEQ ID NO: 2216205 - RNA, 19 nt, Homo sapiens
  misc_RNA (1)...(19): siRNA sense strand
ccucccacauccagacuca

SEQ ID NO: 2216206 - RNA, 19 nt, Homo sapiens
  misc_RNA (1)...(19): siRNA sense strand
uuaguuccagccuauauau

SEQ ID NO: 2216207 - RNA, 19 nt, Homo sapiens
  misc_RNA (1)...(19): siRNA sense strand
aguuaaugguggaauuguu

SEQ ID NO: 2216208 - RNA, 19 nt, Homo sapiens
  misc_RNA (1)...(19): siRNA sense strand
ggacauucaaagguuuaug

SEQ ID NO: 2216209 - RNA, 19 nt, Homo sapiens
  misc_RNA (1)...(19): siRNA sense strand
aaacugcuggaauuucguu

SEQ ID NO: 2216210 - RNA, 19 nt, Homo sapiens
  misc_RNA (1)...(19): siRNA sense strand
cagcugacucauugaaauc

SEQ ID NO: 2216211 - RNA, 19 nt, Homo sapiens
  misc_RNA (1)...(19): siRNA sense strand
uaucaucugggcugucuuc

SEQ ID NO: 2216212 - RNA, 19 nt, Homo sapiens
  misc_RNA (1)...(19): siRNA sense strand
ggacagcgcggaucuauuu

SEQ ID NO: 2216213 - RNA, 19 nt, Homo sapiens
  misc_RNA (1)...(19): siRNA sense strand
ggaaucggcuggcugaaga

SEQ ID NO: 2216214 - RNA, 19 nt, Homo sapiens
  misc_RNA (1)...(19): siRNA sense strand
gauccggccuuacaugaaa

SEQ ID NO: 2216215 - RNA, 19 nt, Homo sapiens
  misc_RNA (1)...(19): siRNA sense strand
cugaugaccuggauauuaa

SEQ ID NO: 2216216 - RNA, 19 nt, Homo sapiens
  misc_RNA (1)...(19): siRNA sense strand
guauagaccugcacaugau

SEQ ID NO: 2216217 - RNA, 19 nt, Homo sapiens
  misc_RNA (1)...(19): siRNA sense strand
gaagaagugcuaccagaug

SEQ ID NO: 2216218 - RNA, 19 nt, Homo sapiens
  misc_RNA (1)...(19): siRNA sense strand
gaucaacauuucucuggau

SEQ ID NO: 2216219 - RNA, 19 nt, Homo sapiens
  misc_RNA (1)...(19): siRNA sense strand
uggagaaccucuuccugua

SEQ ID NO: 2216220 - RNA, 19 nt, Homo sapiens
  misc_RNA (1)...(19): siRNA sense strand
ccaacacgcuaaauuucaa

SEQ ID NO: 2216221 - RNA, 19 nt, Homo sapiens
  misc_RNA (1)...(19): siRNA sense strand
ggagcaagagcaccguaua

SEQ ID NO: 2216222 - RNA, 19 nt, Homo sapiens
  misc_RNA (1)...(19): siRNA sense strand
aagaagugcuaccagauga

SEQ ID NO: 2216223 - RNA, 19 nt, Homo sapiens
  misc_RNA (1)...(19): siRNA sense strand
cagacugcguccugcaaua

SEQ ID NO: 2216224 - RNA, 19 nt, Homo sapiens
  misc_RNA (1)...(19): siRNA sense strand
ccugaugaccuggauauua

SEQ ID NO: 2216225 - RNA, 19 nt, Homo sapiens
  misc_RNA (1)...(19): siRNA sense strand
ggacugugcuggccaucuc

SEQ ID NO: 2216226 - RNA, 19 nt, Homo sapiens
  misc_RNA (1)...(19): siRNA sense strand
gcuguccgaugacuucuug

SEQ ID NO: 2216227 - RNA, 19 nt, Homo sapiens
  misc_RNA (1)...(19): siRNA sense strand
gcaauacgaagaggaaaga

SEQ ID NO: 2216228 - RNA, 19 nt, Homo sapiens
  misc_RNA (1)...(19): siRNA sense strand
uccgaugacuucuuggaua

SEQ ID NO: 2216229 - RNA, 19 nt, Homo sapiens
  misc_RNA (1)...(19): siRNA sense strand
gcccaggucugaagagaag

SEQ ID NO: 2216230 - RNA, 19 nt, Homo sapiens
  misc_RNA (1)...(19): siRNA sense strand
gagcaacucaucccuaugg

SEQ ID NO: 2216231 - RNA, 19 nt, Homo sapiens
  misc_RNA (1)...(19): siRNA sense strand
ggccaucucucgcccuuuc

SEQ ID NO: 2216232 - RNA, 19 nt, Homo sapiens
  misc_RNA (1)...(19): siRNA sense strand
caacggagcgcaucguaag

SEQ ID NO: 2216233 - RNA, 19 nt, Homo sapiens
  misc_RNA (1)...(19): siRNA sense strand
ucaacaagauccaguacgu

SEQ ID NO: 2216234 - RNA, 19 nt, Homo sapiens
  misc_RNA (1)...(19): siRNA sense strand
gagcgcaucguaagaggaa

SEQ ID NO: 2216235 - RNA, 19 nt, Homo sapiens
  misc_RNA (1)...(19): siRNA sense strand
ucaaguucaucaacaagau

SEQ ID NO: 2216236 - RNA, 19 nt, Homo sapiens
  misc_RNA (1)...(19): siRNA sense strand
gaccggagguugcggaaaa

SEQ ID NO: 2216237 - RNA, 19 nt, Homo sapiens
  misc_RNA (1)...(19): siRNA sense strand
gaucaggaaacaagcaugu

SEQ ID NO: 2216238 - RNA, 19 nt, Homo sapiens
  misc_RNA (1)...(19): siRNA sense strand
ccaggccacucccagaaga

SEQ ID NO: 2216239 - RNA, 19 nt, Homo sapiens
  misc_RNA (1)...(19): siRNA sense strand
ggucccugcuguccgauga

SEQ ID NO: 2216240 - RNA, 19 nt, Homo sapiens
  misc_RNA (1)...(19): siRNA sense strand
cagaagaucaggaaacaag

SEQ ID NO: 2216241 - RNA, 19 nt, Homo sapiens
  misc_RNA (1)...(19): siRNA sense strand
guacgucaucagcagcuua

SEQ ID NO: 2216242 - RNA, 19 nt, Homo sapiens
  misc_RNA (1)...(19): siRNA sense strand
gagcaagagcaccguauag

SEQ ID NO: 2216243 - RNA, 19 nt, Homo sapiens
  misc_RNA (1)...(19): siRNA sense strand
gauauuaacguggaugaca

SEQ ID NO: 2216244 - RNA, 19 nt, Homo sapiens
  misc_RNA (1)...(19): siRNA sense strand
uggagcaacucaucccuau

SEQ ID NO: 2216245 - RNA, 19 nt, Homo sapiens
  misc_RNA (1)...(19): siRNA sense strand
cguauagaccugcacauga

SEQ ID NO: 2216246 - RNA, 19 nt, Homo sapiens
  misc_RNA (1)...(19): siRNA sense strand
uggaagaccuggagcaacu

SEQ ID NO: 2216247 - RNA, 19 nt, Homo sapiens
  misc_RNA (1)...(19): siRNA sense strand
gcgucaaguucaucaacaa

SEQ ID NO: 2216248 - RNA, 19 nt, Homo sapiens
  misc_RNA (1)...(19): siRNA sense strand
ggaauggcaggacgaagau

SEQ ID NO: 2216249 - RNA, 19 nt, Homo sapiens
  misc_RNA (1)...(19): siRNA sense strand
gaagaucaggaaacaagca

SEQ ID NO: 2216250 - RNA, 19 nt, Homo sapiens
  misc_RNA (1)...(19): siRNA sense strand
cgacuaccacuacaucaug

SEQ ID NO: 2216251 - RNA, 19 nt, Homo sapiens
  misc_RNA (1)...(19): siRNA sense strand
caacauuucucuggaucag

SEQ ID NO: 2216252 - RNA, 19 nt, Homo sapiens
  misc_RNA (1)...(19): siRNA sense strand
aaccugaaguccuugauca

SEQ ID NO: 2216253 - RNA, 19 nt, Homo sapiens
  misc_RNA (1)...(19): siRNA sense strand
ggucucagaagaucaggaa

SEQ ID NO: 2216254 - RNA, 19 nt, Homo sapiens
  misc_RNA (1)...(19): siRNA sense strand
gcaacucaucccuauggaa

SEQ ID NO: 2216255 - RNA, 19 nt, Homo sapiens
  misc_RNA (1)...(19): siRNA sense strand
gcaagagcaccguauagac

SEQ ID NO: 2216256 - RNA, 19 nt, Homo sapiens
  misc_RNA (1)...(19): siRNA sense strand
gaagugcuaccagaugauc

SEQ ID NO: 2216257 - RNA, 19 nt, Homo sapiens
  misc_RNA (1)...(19): siRNA sense strand
ggagaaccucuuccuguac

SEQ ID NO: 2216258 - RNA, 19 nt, Homo sapiens
  misc_RNA (1)...(19): siRNA sense strand
ccgaugacuucuuggauac

SEQ ID NO: 2216259 - RNA, 19 nt, Homo sapiens
  misc_RNA (1)...(19): siRNA sense strand
guacgugcacagcuuggaa

SEQ ID NO: 2216260 - RNA, 19 nt, Homo sapiens
  misc_RNA (1)...(19): siRNA sense strand
gaagaccuggagcaacuca

SEQ ID NO: 2216261 - RNA, 19 nt, Homo sapiens
  misc_RNA (1)...(19): siRNA sense strand
ucggcuggcugaagaagug

SEQ ID NO: 2216262 - RNA, 19 nt, Homo sapiens
  misc_RNA (1)...(19): siRNA sense strand
ggaggaauggcaggacgaa

SEQ ID NO: 2216263 - RNA, 19 nt, Homo sapiens
  misc_RNA (1)...(19): siRNA sense strand
cacaugauccggccuuaca

SEQ ID NO: 2216264 - RNA, 19 nt, Homo sapiens
  misc_RNA (1)...(19): siRNA sense strand
caucauggagaaccucuuc

SEQ ID NO: 2216265 - RNA, 19 nt, Homo sapiens
  misc_RNA (1)...(19): siRNA sense strand
ucaacggagcgcaucguaa

SEQ ID NO: 2216266 - RNA, 19 nt, Homo sapiens
  misc_RNA (1)...(19): siRNA sense strand
ugaagaagugcuaccagau

SEQ ID NO: 2216267 - RNA, 19 nt, Homo sapiens
  misc_RNA (1)...(19): siRNA sense strand
ggcggaggaugccuggaau

SEQ ID NO: 2216268 - RNA, 19 nt, Homo sapiens
  misc_RNA (1)...(19): siRNA sense strand
ucaacgccaucaucgucuu

SEQ ID NO: 2216269 - RNA, 19 nt, Homo sapiens
  misc_RNA (1)...(19): siRNA sense strand
ccccagagaucaacauuuc

SEQ ID NO: 2216270 - RNA, 19 nt, Homo sapiens
  misc_RNA (1)...(19): siRNA sense strand
aggaauggcaggacgaaga

SEQ ID NO: 2216271 - RNA, 19 nt, Homo sapiens
  misc_RNA (1)...(19): siRNA sense strand
cucagaagaucaggaaaca

SEQ ID NO: 2216272 - RNA, 19 nt, Homo sapiens
  misc_RNA (1)...(19): siRNA sense strand
ccucccaacacgcuaaauu

SEQ ID NO: 2216273 - RNA, 19 nt, Homo sapiens
  misc_RNA (1)...(19): siRNA sense strand
gcgcaucguaagaggaaga

SEQ ID NO: 2216274 - RNA, 19 nt, Homo sapiens
  misc_RNA (1)...(19): siRNA sense strand
ggacgugaaggaggaaugg

SEQ ID NO: 2216275 - RNA, 19 nt, Homo sapiens
  misc_RNA (1)...(19): siRNA sense strand
uccaguacgugcacagcuu

SEQ ID NO: 2216276 - RNA, 19 nt, Homo sapiens
  misc_RNA (1)...(19): siRNA sense strand
cucccaacacgcuaaauuu

SEQ ID NO: 2216277 - RNA, 19 nt, Homo sapiens
  misc_RNA (1)...(19): siRNA sense strand
ucaucaacaagauccagua

SEQ ID NO: 2216278 - RNA, 19 nt, Homo sapiens
  misc_RNA (1)...(19): siRNA sense strand
ggaagaagauccuauuuua

SEQ ID NO: 2216279 - RNA, 19 nt, Homo sapiens
  misc_RNA (1)...(19): siRNA sense strand
gaacagcucuaccgauaug

SEQ ID NO: 2216280 - RNA, 19 nt, Homo sapiens
  misc_RNA (1)...(19): siRNA sense strand
cagaacagcucuaccgaua

SEQ ID NO: 2216281 - RNA, 19 nt, Homo sapiens
  misc_RNA (1)...(19): siRNA sense strand
ggagaggguucaucugauc

SEQ ID NO: 2216282 - RNA, 19 nt, Homo sapiens
  misc_RNA (1)...(19): siRNA sense strand
ggaacauuaucaggaauug

SEQ ID NO: 2216283 - RNA, 19 nt, Homo sapiens
  misc_RNA (1)...(19): siRNA sense strand
cuaccgauauguuaccaaa

SEQ ID NO: 2216284 - RNA, 19 nt, Homo sapiens
  misc_RNA (1)...(19): siRNA sense strand
gaagauugacaucccaaga

SEQ ID NO: 2216285 - RNA, 19 nt, Homo sapiens
  misc_RNA (1)...(19): siRNA sense strand
agauugacaucccaagauu

SEQ ID NO: 2216286 - RNA, 19 nt, Homo sapiens
  misc_RNA (1)...(19): siRNA sense strand
gaccuuggccaguauguga

SEQ ID NO: 2216287 - RNA, 19 nt, Homo sapiens
  misc_RNA (1)...(19): siRNA sense strand
gaucguggcaggugguuau

SEQ ID NO: 2216288 - RNA, 19 nt, Homo sapiens
  misc_RNA (1)...(19): siRNA sense strand
gcccagucauugcuguuaa

SEQ ID NO: 2216289 - RNA, 19 nt, Homo sapiens
  misc_RNA (1)...(19): siRNA sense strand
agagaguccuggagaaugu

SEQ ID NO: 2216290 - RNA, 19 nt, Homo sapiens
  misc_RNA (1)...(19): siRNA sense strand
gccaguaugugaccuucuu

SEQ ID NO: 2216291 - RNA, 19 nt, Homo sapiens
  misc_RNA (1)...(19): siRNA sense strand
ucaagucccugucucacau

SEQ ID NO: 2216292 - RNA, 19 nt, Homo sapiens
  misc_RNA (1)...(19): siRNA sense strand
cagcucuaccgauauguua

SEQ ID NO: 2216293 - RNA, 19 nt, Homo sapiens
  misc_RNA (1)...(19): siRNA sense strand
gggagaggguucaucugau

SEQ ID NO: 2216294 - RNA, 19 nt, Homo sapiens
  misc_RNA (1)...(19): siRNA sense strand
uguggaacauuaucaggaa

SEQ ID NO: 2216295 - RNA, 19 nt, Homo sapiens
  misc_RNA (1)...(19): siRNA sense strand
gaagagccagagugaagga

SEQ ID NO: 2216296 - RNA, 19 nt, Homo sapiens
  misc_RNA (1)...(19): siRNA sense strand
cuaaaugucaccagcuuug

SEQ ID NO: 2216297 - RNA, 19 nt, Homo sapiens
  misc_RNA (1)...(19): siRNA sense strand
gaacauuaucaggaauuga

SEQ ID NO: 2216298 - RNA, 19 nt, Homo sapiens
  misc_RNA (1)...(19): siRNA sense strand
gcuagacggcggaagaaga

SEQ ID NO: 2216299 - RNA, 19 nt, Homo sapiens
  misc_RNA (1)...(19): siRNA sense strand
cagaucugcuucucaccaa

SEQ ID NO: 2216300 - RNA, 19 nt, Homo sapiens
  misc_RNA (1)...(19): siRNA sense strand
gcggaagaagauccuauuu

SEQ ID NO: 2216301 - RNA, 19 nt, Homo sapiens
  misc_RNA (1)...(19): siRNA sense strand
gagagaguccuggagaaug

SEQ ID NO: 2216302 - RNA, 19 nt, Homo sapiens
  misc_RNA (1)...(19): siRNA sense strand
caccagcuuugacucaguu

SEQ ID NO: 2216303 - RNA, 19 nt, Homo sapiens
  misc_RNA (1)...(19): siRNA sense strand
aaagcuggaugaccuaguc

SEQ ID NO: 2216304 - RNA, 19 nt, Homo sapiens
  misc_RNA (1)...(19): siRNA sense strand
gaucugcuucucaccaaga

SEQ ID NO: 2216305 - RNA, 19 nt, Homo sapiens
  misc_RNA (1)...(19): siRNA sense strand
ggaguucgacgugguagug

SEQ ID NO: 2216306 - RNA, 19 nt, Homo sapiens
  misc_RNA (1)...(19): siRNA sense strand
uugacuggauagaggaaua

SEQ ID NO: 2216307 - RNA, 19 nt, Homo sapiens
  misc_RNA (1)...(19): siRNA sense strand
ggaguccauugaccacagu

SEQ ID NO: 2216308 - RNA, 19 nt, Homo sapiens
  misc_RNA (1)...(19): siRNA sense strand
acagcugcguggaagauug

SEQ ID NO: 2216309 - RNA, 19 nt, Homo sapiens
  misc_RNA (1)...(19): siRNA sense strand
cagaagcaauagaaaaguu

SEQ ID NO: 2216310 - RNA, 19 nt, Homo sapiens
  misc_RNA (1)...(19): siRNA sense strand
gcacuggaagcccuaguac

SEQ ID NO: 2216311 - RNA, 19 nt, Homo sapiens
  misc_RNA (1)...(19): siRNA sense strand
gagccagagugaaggaaaa

SEQ ID NO: 2216312 - RNA, 19 nt, Homo sapiens
  misc_RNA (1)...(19): siRNA sense strand
agucauugcuguuaauucg

SEQ ID NO: 2216313 - RNA, 19 nt, Homo sapiens
  misc_RNA (1)...(19): siRNA sense strand
gguguagcgugaagaucug

SEQ ID NO: 2216314 - RNA, 19 nt, Homo sapiens
  misc_RNA (1)...(19): siRNA sense strand
ugggagaggguucaucuga

SEQ ID NO: 2216315 - RNA, 19 nt, Homo sapiens
  misc_RNA (1)...(19): siRNA sense strand
guacagcugcguggaagau

SEQ ID NO: 2216316 - RNA, 19 nt, Homo sapiens
  misc_RNA (1)...(19): siRNA sense strand
caagucccugucucacaua

SEQ ID NO: 2216317 - RNA, 19 nt, Homo sapiens
  misc_RNA (1)...(19): siRNA sense strand
uggaagagccagagugaag

SEQ ID NO: 2216318 - RNA, 19 nt, Homo sapiens
  misc_RNA (1)...(19): siRNA sense strand
ccgugaaccuuccuuaaaa

SEQ ID NO: 2216319 - RNA, 19 nt, Homo sapiens
  misc_RNA (1)...(19): siRNA sense strand
ccacagugucacaggguuu

SEQ ID NO: 2216320 - RNA, 19 nt, Homo sapiens
  misc_RNA (1)...(19): siRNA sense strand
aguccgaccuuggccagua

SEQ ID NO: 2216321 - RNA, 19 nt, Homo sapiens
  misc_RNA (1)...(19): siRNA sense strand
ugaagaaaaugguccaaca

SEQ ID NO: 2216322 - RNA, 19 nt, Homo sapiens
  misc_RNA (1)...(19): siRNA sense strand
cugcugcucuccaucaaca

SEQ ID NO: 2216323 - RNA, 19 nt, Homo sapiens
  misc_RNA (1)...(19): siRNA sense strand
cagcuuugacucaguuguu

SEQ ID NO: 2216324 - RNA, 19 nt, Homo sapiens
  misc_RNA (1)...(19): siRNA sense strand
cgagagaguccuggagaau

SEQ ID NO: 2216325 - RNA, 19 nt, Homo sapiens
  misc_RNA (1)...(19): siRNA sense strand
ucacuucccagaucugcuu

SEQ ID NO: 2216326 - RNA, 19 nt, Homo sapiens
  misc_RNA (1)...(19): siRNA sense strand
uacaugcagugcccaguca

SEQ ID NO: 2216327 - RNA, 19 nt, Homo sapiens
  misc_RNA (1)...(19): siRNA sense strand
accaagcaaugagcacuuu

SEQ ID NO: 2216328 - RNA, 19 nt, Homo sapiens
  misc_RNA (1)...(19): siRNA sense strand
gauugacaucccaagauug

SEQ ID NO: 2216329 - RNA, 19 nt, Homo sapiens
  misc_RNA (1)...(19): siRNA sense strand
ggcacuggaagcccuagua

SEQ ID NO: 2216330 - RNA, 19 nt, Homo sapiens
  misc_RNA (1)...(19): siRNA sense strand
cgaggaguucgacguggua

SEQ ID NO: 2216331 - RNA, 19 nt, Homo sapiens
  misc_RNA (1)...(19): siRNA sense strand
uaaaugucaccagcuuuga

SEQ ID NO: 2216332 - RNA, 19 nt, Homo sapiens
  misc_RNA (1)...(19): siRNA sense strand
ggcggaagaagauccuauu

SEQ ID NO: 2216333 - RNA, 19 nt, Homo sapiens
  misc_RNA (1)...(19): siRNA sense strand
uccgugaaccuuccuuaaa

SEQ ID NO: 2216334 - RNA, 19 nt, Homo sapiens
  misc_RNA (1)...(19): siRNA sense strand
cugaagcauuuacagaaca

SEQ ID NO: 2216335 - RNA, 19 nt, Homo sapiens
  misc_RNA (1)...(19): siRNA sense strand
ccugaagcauuuacagaac

SEQ ID NO: 2216336 - RNA, 19 nt, Homo sapiens
  misc_RNA (1)...(19): siRNA sense strand
agacccugauguccucuau

SEQ ID NO: 2216337 - RNA, 19 nt, Homo sapiens
  misc_RNA (1)...(19): siRNA sense strand
cauccgugaaccuuccuua

SEQ ID NO: 2216338 - RNA, 19 nt, Homo sapiens
  misc_RNA (1)...(19): siRNA sense strand
acgagagaguccuggagaa

SEQ ID NO: 2216339 - RNA, 19 nt, Homo sapiens
  misc_RNA (1)...(19): siRNA sense strand
ggguguagcgugaagaucu

SEQ ID NO: 2216340 - RNA, 19 nt, Homo sapiens
  misc_RNA (1)...(19): siRNA sense strand
cagcugcguggaagauuga

SEQ ID NO: 2216341 - RNA, 19 nt, Homo sapiens
  misc_RNA (1)...(19): siRNA sense strand
cugagcggcugguguugga

SEQ ID NO: 2216342 - RNA, 19 nt, Homo sapiens
  misc_RNA (1)...(19): siRNA sense strand
uuaaggaaacauucaaguc

SEQ ID NO: 2216343 - RNA, 19 nt, Homo sapiens
  misc_RNA (1)...(19): siRNA sense strand
cuagacggcggaagaagau

SEQ ID NO: 2216344 - RNA, 19 nt, Homo sapiens
  misc_RNA (1)...(19): siRNA sense strand
uguccucuauccaucucua

SEQ ID NO: 2216345 - RNA, 19 nt, Homo sapiens
  misc_RNA (1)...(19): siRNA sense strand
cuauccaucucuaaauguc

SEQ ID NO: 2216346 - RNA, 19 nt, Homo sapiens
  misc_RNA (1)...(19): siRNA sense strand
guccgaccuuggccaguau

SEQ ID NO: 2216347 - RNA, 19 nt, Homo sapiens
  misc_RNA (1)...(19): siRNA sense strand
ucaccagcuuugacucagu

SEQ ID NO: 2216348 - RNA, 19 nt, Homo sapiens
  misc_RNA (1)...(19): siRNA sense strand
ggaagaagauccuauuuua

SEQ ID NO: 2216349 - RNA, 19 nt, Homo sapiens
  misc_RNA (1)...(19): siRNA sense strand
gaacagcucuaccgauaug

SEQ ID NO: 2216350 - RNA, 19 nt, Homo sapiens
  misc_RNA (1)...(19): siRNA sense strand
cagaacagcucuaccgaua

SEQ ID NO: 2216351 - RNA, 19 nt, Homo sapiens
  misc_RNA (1)...(19): siRNA sense strand
ggagaggguucaucugauc

SEQ ID NO: 2216352 - RNA, 19 nt, Homo sapiens
  misc_RNA (1)...(19): siRNA sense strand
ggaacauuaucaggaauug

SEQ ID NO: 2216353 - RNA, 19 nt, Homo sapiens
  misc_RNA (1)...(19): siRNA sense strand
cuaccgauauguuaccaaa

SEQ ID NO: 2216354 - RNA, 19 nt, Homo sapiens
  misc_RNA (1)...(19): siRNA sense strand
gaagauugacaucccaaga

SEQ ID NO: 2216355 - RNA, 19 nt, Homo sapiens
  misc_RNA (1)...(19): siRNA sense strand
agauugacaucccaagauu

SEQ ID NO: 2216356 - RNA, 19 nt, Homo sapiens
  misc_RNA (1)...(19): siRNA sense strand
gaccuuggccaguauguga

SEQ ID NO: 2216357 - RNA, 19 nt, Homo sapiens
  misc_RNA (1)...(19): siRNA sense strand
gaucguggcaggugguuau

SEQ ID NO: 2216358 - RNA, 19 nt, Homo sapiens
  misc_RNA (1)...(19): siRNA sense strand
gcccagucauugcuguuaa

SEQ ID NO: 2216359 - RNA, 19 nt, Homo sapiens
  misc_RNA (1)...(19): siRNA sense strand
agagaguccuggagaaugu

SEQ ID NO: 2216360 - RNA, 19 nt, Homo sapiens
  misc_RNA (1)...(19): siRNA sense strand
gccaguaugugaccuucuu

SEQ ID NO: 2216361 - RNA, 19 nt, Homo sapiens
  misc_RNA (1)...(19): siRNA sense strand
ucaagucccugucucacau

SEQ ID NO: 2216362 - RNA, 19 nt, Homo sapiens
  misc_RNA (1)...(19): siRNA sense strand
cagcucuaccgauauguua

SEQ ID NO: 2216363 - RNA, 19 nt, Homo sapiens
  misc_RNA (1)...(19): siRNA sense strand
gggagaggguucaucugau

SEQ ID NO: 2216364 - RNA, 19 nt, Homo sapiens
  misc_RNA (1)...(19): siRNA sense strand
uguggaacauuaucaggaa

SEQ ID NO: 2216365 - RNA, 19 nt, Homo sapiens
  misc_RNA (1)...(19): siRNA sense strand
gaagagccagagugaagga

SEQ ID NO: 2216366 - RNA, 19 nt, Homo sapiens
  misc_RNA (1)...(19): siRNA sense strand
cuaaaugucaccagcuuug

SEQ ID NO: 2216367 - RNA, 19 nt, Homo sapiens
  misc_RNA (1)...(19): siRNA sense strand
gaacauuaucaggaauuga

SEQ ID NO: 2216368 - RNA, 19 nt, Homo sapiens
  misc_RNA (1)...(19): siRNA sense strand
cagaucugcuucucaccaa

SEQ ID NO: 2216369 - RNA, 19 nt, Homo sapiens
  misc_RNA (1)...(19): siRNA sense strand
gcggaagaagauccuauuu

SEQ ID NO: 2216370 - RNA, 19 nt, Homo sapiens
  misc_RNA (1)...(19): siRNA sense strand
gcuagacggcggaagaaga

SEQ ID NO: 2216371 - RNA, 19 nt, Homo sapiens
  misc_RNA (1)...(19): siRNA sense strand
gagagaguccuggagaaug

SEQ ID NO: 2216372 - RNA, 19 nt, Homo sapiens
  misc_RNA (1)...(19): siRNA sense strand
caccagcuuugacucaguu

SEQ ID NO: 2216373 - RNA, 19 nt, Homo sapiens
  misc_RNA (1)...(19): siRNA sense strand
aaagcuggaugaccuaguc

SEQ ID NO: 2216374 - RNA, 19 nt, Homo sapiens
  misc_RNA (1)...(19): siRNA sense strand
gaucugcuucucaccaaga

SEQ ID NO: 2216375 - RNA, 19 nt, Homo sapiens
  misc_RNA (1)...(19): siRNA sense strand
uugacuggauagaggaaua

SEQ ID NO: 2216376 - RNA, 19 nt, Homo sapiens
  misc_RNA (1)...(19): siRNA sense strand
ggaguccauugaccacagu

SEQ ID NO: 2216377 - RNA, 19 nt, Homo sapiens
  misc_RNA (1)...(19): siRNA sense strand
acagcugcguggaagauug

SEQ ID NO: 2216378 - RNA, 19 nt, Homo sapiens
  misc_RNA (1)...(19): siRNA sense strand
cagaagcaauagaaaaguu

SEQ ID NO: 2216379 - RNA, 19 nt, Homo sapiens
  misc_RNA (1)...(19): siRNA sense strand
gcacuggaagcccuaguac

SEQ ID NO: 2216380 - RNA, 19 nt, Homo sapiens
  misc_RNA (1)...(19): siRNA sense strand
gagccagagugaaggaaaa

SEQ ID NO: 2216381 - RNA, 19 nt, Homo sapiens
  misc_RNA (1)...(19): siRNA sense strand
agucauugcuguuaauucg

SEQ ID NO: 2216382 - RNA, 19 nt, Homo sapiens
  misc_RNA (1)...(19): siRNA sense strand
ugggagaggguucaucuga

SEQ ID NO: 2216383 - RNA, 19 nt, Homo sapiens
  misc_RNA (1)...(19): siRNA sense strand
guacagcugcguggaagau

SEQ ID NO: 2216384 - RNA, 19 nt, Homo sapiens
  misc_RNA (1)...(19): siRNA sense strand
caagucccugucucacaua

SEQ ID NO: 2216385 - RNA, 19 nt, Homo sapiens
  misc_RNA (1)...(19): siRNA sense strand
uggaagagccagagugaag

SEQ ID NO: 2216386 - RNA, 19 nt, Homo sapiens
  misc_RNA (1)...(19): siRNA sense strand
ccgugaaccuuccuuaaaa

SEQ ID NO: 2216387 - RNA, 19 nt, Homo sapiens
  misc_RNA (1)...(19): siRNA sense strand
ccacagugucacaggguuu

SEQ ID NO: 2216388 - RNA, 19 nt, Homo sapiens
  misc_RNA (1)...(19): siRNA sense strand
aguccgaccuuggccagua

SEQ ID NO: 2216389 - RNA, 19 nt, Homo sapiens
  misc_RNA (1)...(19): siRNA sense strand
ugaagaaaaugguccaaca

SEQ ID NO: 2216390 - RNA, 19 nt, Homo sapiens
  misc_RNA (1)...(19): siRNA sense strand
cugcugcucuccaucaaca

SEQ ID NO: 2216391 - RNA, 19 nt, Homo sapiens
  misc_RNA (1)...(19): siRNA sense strand
cagcuuugacucaguuguu

SEQ ID NO: 2216392 - RNA, 19 nt, Homo sapiens
  misc_RNA (1)...(19): siRNA sense strand
cgagagaguccuggagaau

SEQ ID NO: 2216393 - RNA, 19 nt, Homo sapiens
  misc_RNA (1)...(19): siRNA sense strand
uaaaugucaccagcuuuga

SEQ ID NO: 2216394 - RNA, 19 nt, Homo sapiens
  misc_RNA (1)...(19): siRNA sense strand
ucacuucccagaucugcuu

SEQ ID NO: 2216395 - RNA, 19 nt, Homo sapiens
  misc_RNA (1)...(19): siRNA sense strand
ggcggaagaagauccuauu

SEQ ID NO: 2216396 - RNA, 19 nt, Homo sapiens
  misc_RNA (1)...(19): siRNA sense strand
uacaugcagugcccaguca

SEQ ID NO: 2216397 - RNA, 19 nt, Homo sapiens
  misc_RNA (1)...(19): siRNA sense strand
accaagcaaugagcacuuu

SEQ ID NO: 2216398 - RNA, 19 nt, Homo sapiens
  misc_RNA (1)...(19): siRNA sense strand
gauugacaucccaagauug

SEQ ID NO: 2216399 - RNA, 19 nt, Homo sapiens
  misc_RNA (1)...(19): siRNA sense strand
ggcacuggaagcccuagua

SEQ ID NO: 2216400 - RNA, 19 nt, Homo sapiens
  misc_RNA (1)...(19): siRNA sense strand
uccgugaaccuuccuuaaa

SEQ ID NO: 2216401 - RNA, 19 nt, Homo sapiens
  misc_RNA (1)...(19): siRNA sense strand
cugaagcauuuacagaaca

SEQ ID NO: 2216402 - RNA, 19 nt, Homo sapiens
  misc_RNA (1)...(19): siRNA sense strand
ccugaagcauuuacagaac

SEQ ID NO: 2216403 - RNA, 19 nt, Homo sapiens
  misc_RNA (1)...(19): siRNA sense strand
agacccugauguccucuau

SEQ ID NO: 2216404 - RNA, 19 nt, Homo sapiens
  misc_RNA (1)...(19): siRNA sense strand
cauccgugaaccuuccuua

SEQ ID NO: 2216405 - RNA, 19 nt, Homo sapiens
  misc_RNA (1)...(19): siRNA sense strand
acgagagaguccuggagaa

SEQ ID NO: 2216406 - RNA, 19 nt, Homo sapiens
  misc_RNA (1)...(19): siRNA sense strand
cagcugcguggaagauuga

SEQ ID NO: 2216407 - RNA, 19 nt, Homo sapiens
  misc_RNA (1)...(19): siRNA sense strand
uguccucuauccaucucua

SEQ ID NO: 2216408 - RNA, 19 nt, Homo sapiens
  misc_RNA (1)...(19): siRNA sense strand
cuagacggcggaagaagau

SEQ ID NO: 2216409 - RNA, 19 nt, Homo sapiens
  misc_RNA (1)...(19): siRNA sense strand
uuaaggaaacauucaaguc

SEQ ID NO: 2216410 - RNA, 19 nt, Homo sapiens
  misc_RNA (1)...(19): siRNA sense strand
cuauccaucucuaaauguc

SEQ ID NO: 2216411 - RNA, 19 nt, Homo sapiens
  misc_RNA (1)...(19): siRNA sense strand
guccgaccuuggccaguau

SEQ ID NO: 2216412 - RNA, 19 nt, Homo sapiens
  misc_RNA (1)...(19): siRNA sense strand
ucaccagcuuugacucagu

SEQ ID NO: 2216413 - RNA, 19 nt, Homo sapiens
  misc_RNA (1)...(19): siRNA sense strand
gaaagaaagaggauaaaga

SEQ ID NO: 2216414 - RNA, 19 nt, Homo sapiens
  misc_RNA (1)...(19): siRNA sense strand
ucacaagccuuaccaguug

SEQ ID NO: 2216415 - RNA, 19 nt, Homo sapiens
  misc_RNA (1)...(19): siRNA sense strand
gcaggugguuucaucaguu

SEQ ID NO: 2216416 - RNA, 19 nt, Homo sapiens
  misc_RNA (1)...(19): siRNA sense strand
gagagcaggugguuucauc

SEQ ID NO: 2216417 - RNA, 19 nt, Homo sapiens
  misc_RNA (1)...(19): siRNA sense strand
guucagaaauagcagcaaa

SEQ ID NO: 2216418 - RNA, 19 nt, Homo sapiens
  misc_RNA (1)...(19): siRNA sense strand
ugaagaagcaguucgauuc

SEQ ID NO: 2216419 - RNA, 19 nt, Homo sapiens
  misc_RNA (1)...(19): siRNA sense strand
gagcauaguuuuacaguca

SEQ ID NO: 2216420 - RNA, 19 nt, Homo sapiens
  misc_RNA (1)...(19): siRNA sense strand
gaagaagcaguucgauuca

SEQ ID NO: 2216421 - RNA, 19 nt, Homo sapiens
  misc_RNA (1)...(19): siRNA sense strand
aggcugcccugacaauaua

SEQ ID NO: 2216422 - RNA, 19 nt, Homo sapiens
  misc_RNA (1)...(19): siRNA sense strand
ggcacaacguguuugauug

SEQ ID NO: 2216423 - RNA, 19 nt, Homo sapiens
  misc_RNA (1)...(19): siRNA sense strand
uaacagucaugguggugaa

SEQ ID NO: 2216424 - RNA, 19 nt, Homo sapiens
  misc_RNA (1)...(19): siRNA sense strand
gcuauuccuuugucucaug

SEQ ID NO: 2216425 - RNA, 19 nt, Homo sapiens
  misc_RNA (1)...(19): siRNA sense strand
gaaggaaagaaagaggaua

SEQ ID NO: 2216426 - RNA, 19 nt, Homo sapiens
  misc_RNA (1)...(19): siRNA sense strand
aaagagagcaggugguuuc

SEQ ID NO: 2216427 - RNA, 19 nt, Homo sapiens
  misc_RNA (1)...(19): siRNA sense strand
caggugguuucaucaguuu

SEQ ID NO: 2216428 - RNA, 19 nt, Homo sapiens
  misc_RNA (1)...(19): siRNA sense strand
ccagacauccugaccuuug

SEQ ID NO: 2216429 - RNA, 19 nt, Homo sapiens
  misc_RNA (1)...(19): siRNA sense strand
gaagcaggcacaacguguu

SEQ ID NO: 2216430 - RNA, 19 nt, Homo sapiens
  misc_RNA (1)...(19): siRNA sense strand
aaagaaagaggauaaagag

SEQ ID NO: 2216431 - RNA, 19 nt, Homo sapiens
  misc_RNA (1)...(19): siRNA sense strand
cagacauccugaccuuuga

SEQ ID NO: 2216432 - RNA, 19 nt, Homo sapiens
  misc_RNA (1)...(19): siRNA sense strand
gacuguauccuaugaugaa

SEQ ID NO: 2216433 - RNA, 19 nt, Homo sapiens
  misc_RNA (1)...(19): siRNA sense strand
gaggcugcccugacaauau

SEQ ID NO: 2216434 - RNA, 19 nt, Homo sapiens
  misc_RNA (1)...(19): siRNA sense strand
ggaaagaaagaggauaaag

SEQ ID NO: 2216435 - RNA, 19 nt, Homo sapiens
  misc_RNA (1)...(19): siRNA sense strand
gauggucucugggaugcuu

SEQ ID NO: 2216436 - RNA, 19 nt, Homo sapiens
  misc_RNA (1)...(19): siRNA sense strand
gguccugugugacaaagau

SEQ ID NO: 2216437 - RNA, 19 nt, Homo sapiens
  misc_RNA (1)...(19): siRNA sense strand
agaagcaguucgauucauc

SEQ ID NO: 2216438 - RNA, 19 nt, Homo sapiens
  misc_RNA (1)...(19): siRNA sense strand
gcaggcacaacguguuuga

SEQ ID NO: 2216439 - RNA, 19 nt, Homo sapiens
  misc_RNA (1)...(19): siRNA sense strand
gaacgcuauuccuuugucu

SEQ ID NO: 2216440 - RNA, 19 nt, Homo sapiens
  misc_RNA (1)...(19): siRNA sense strand
aaggaaagaaagaggauaa

SEQ ID NO: 2216441 - RNA, 19 nt, Homo sapiens
  misc_RNA (1)...(19): siRNA sense strand
gcacaacguguuugauugc

SEQ ID NO: 2216442 - RNA, 19 nt, Homo sapiens
  misc_RNA (1)...(19): siRNA sense strand
uacagaggcugcccugaca

SEQ ID NO: 2216443 - RNA, 19 nt, Homo sapiens
  misc_RNA (1)...(19): siRNA sense strand
gaagcaguucgauucauca

SEQ ID NO: 2216444 - RNA, 19 nt, Homo sapiens
  misc_RNA (1)...(19): siRNA sense strand
acaaagaugggaacgcuau

SEQ ID NO: 2216445 - RNA, 19 nt, Homo sapiens
  misc_RNA (1)...(19): siRNA sense strand
cucaugaucacaagccuua

SEQ ID NO: 2216446 - RNA, 19 nt, Homo sapiens
  misc_RNA (1)...(19): siRNA sense strand
gaaauagcagcaaaacaga

SEQ ID NO: 2216447 - RNA, 19 nt, Homo sapiens
  misc_RNA (1)...(19): siRNA sense strand
aauugacuguauccuauga

SEQ ID NO: 2216448 - RNA, 19 nt, Homo sapiens
  misc_RNA (1)...(19): siRNA sense strand
cagauaaagaccucacugu

SEQ ID NO: 2216449 - RNA, 19 nt, Homo sapiens
  misc_RNA (1)...(19): siRNA sense strand
caaugaagaagcaguucga

SEQ ID NO: 2216450 - RNA, 19 nt, Homo sapiens
  misc_RNA (1)...(19): siRNA sense strand
aggcacaacguguuugauu

SEQ ID NO: 2216451 - RNA, 19 nt, Homo sapiens
  misc_RNA (1)...(19): siRNA sense strand
cagcaaugaagaagcaguu

SEQ ID NO: 2216452 - RNA, 19 nt, Homo sapiens
  misc_RNA (1)...(19): siRNA sense strand
caaagaugggaacgcuauu

SEQ ID NO: 2216453 - RNA, 19 nt, Homo sapiens
  misc_RNA (1)...(19): siRNA sense strand
cacaagccuuaccaguuga

SEQ ID NO: 2216454 - RNA, 19 nt, Homo sapiens
  misc_RNA (1)...(19): siRNA sense strand
aagcaggcacaacguguuu

SEQ ID NO: 2216455 - RNA, 19 nt, Homo sapiens
  misc_RNA (1)...(19): siRNA sense strand
uaaagagagcaggugguuu

SEQ ID NO: 2216456 - RNA, 19 nt, Homo sapiens
  misc_RNA (1)...(19): siRNA sense strand
cagccugaguucaugaucu

SEQ ID NO: 2216457 - RNA, 19 nt, Homo sapiens
  misc_RNA (1)...(19): siRNA sense strand
gguuucaucaguuucaaug

SEQ ID NO: 2216458 - RNA, 19 nt, Homo sapiens
  misc_RNA (1)...(19): siRNA sense strand
acccagacauccugaccuu

SEQ ID NO: 2216459 - RNA, 19 nt, Homo sapiens
  misc_RNA (1)...(19): siRNA sense strand
ugacuguauccuaugauga

SEQ ID NO: 2216460 - RNA, 19 nt, Homo sapiens
  misc_RNA (1)...(19): siRNA sense strand
uggaugaaccucacuuugg

SEQ ID NO: 2216461 - RNA, 19 nt, Homo sapiens
  misc_RNA (1)...(19): siRNA sense strand
cuauuccuuugucucauga

SEQ ID NO: 2216462 - RNA, 19 nt, Homo sapiens
  misc_RNA (1)...(19): siRNA sense strand
guguuugauugcucugcua

SEQ ID NO: 2216463 - RNA, 19 nt, Homo sapiens
  misc_RNA (1)...(19): siRNA sense strand
auaaagagagcaggugguu

SEQ ID NO: 2216464 - RNA, 19 nt, Homo sapiens
  misc_RNA (1)...(19): siRNA sense strand
cagucaugguggugaaguu

SEQ ID NO: 2216465 - RNA, 19 nt, Homo sapiens
  misc_RNA (1)...(19): siRNA sense strand
agccugaguucaugaucuu

SEQ ID NO: 2216466 - RNA, 19 nt, Homo sapiens
  misc_RNA (1)...(19): siRNA sense strand
caaaacagaagagcaguga

SEQ ID NO: 2216467 - RNA, 19 nt, Homo sapiens
  misc_RNA (1)...(19): siRNA sense strand
gcuccuaccugcugaauaa

SEQ ID NO: 2216468 - RNA, 19 nt, Homo sapiens
  misc_RNA (1)...(19): siRNA sense strand
ggcaagaccuggagcagua

SEQ ID NO: 2216469 - RNA, 19 nt, Homo sapiens
  misc_RNA (1)...(19): siRNA sense strand
gagcuacgcuucaucaucu

SEQ ID NO: 2216470 - RNA, 19 nt, Homo sapiens
  misc_RNA (1)...(19): siRNA sense strand
cggcagggauccucuguuu

SEQ ID NO: 2216471 - RNA, 19 nt, Homo sapiens
  misc_RNA (1)...(19): siRNA sense strand
guacaacacuguccugaac

SEQ ID NO: 2216472 - RNA, 19 nt, Homo sapiens
  misc_RNA (1)...(19): siRNA sense strand
guacgaccaucuugaguuc

SEQ ID NO: 2216473 - RNA, 19 nt, Homo sapiens
  misc_RNA (1)...(19): siRNA sense strand
gcagggauccucuguuuag

SEQ ID NO: 2216474 - RNA, 19 nt, Homo sapiens
  misc_RNA (1)...(19): siRNA sense strand
ucacuuggccggaaggaaa

SEQ ID NO: 2216475 - RNA, 19 nt, Homo sapiens
  misc_RNA (1)...(19): siRNA sense strand
uguuagaaauguccaaguu

SEQ ID NO: 2216476 - RNA, 19 nt, Homo sapiens
  misc_RNA (1)...(19): siRNA sense strand
acacacacauccucaugga

SEQ ID NO: 2216477 - RNA, 19 nt, Homo sapiens
  misc_RNA (1)...(19): siRNA sense strand
uuacgugcuuucgcuguua

SEQ ID NO: 2216478 - RNA, 19 nt, Homo sapiens
  misc_RNA (1)...(19): siRNA sense strand
cgguugcuguggacucuua

SEQ ID NO: 2216479 - RNA, 19 nt, Homo sapiens
  misc_RNA (1)...(19): siRNA sense strand
cacaugaccugcucuacca

SEQ ID NO: 2216480 - RNA, 19 nt, Homo sapiens
  misc_RNA (1)...(19): siRNA sense strand
ccuaccugcugaauaacua

SEQ ID NO: 2216481 - RNA, 19 nt, Homo sapiens
  misc_RNA (1)...(19): siRNA sense strand
guuagaaauguccaaguuu

SEQ ID NO: 2216482 - RNA, 19 nt, Homo sapiens
  misc_RNA (1)...(19): siRNA sense strand
ggacucuggacguuacaaa

SEQ ID NO: 2216483 - RNA, 19 nt, Homo sapiens
  misc_RNA (1)...(19): siRNA sense strand
acaacacuguccugaacaa

SEQ ID NO: 2216484 - RNA, 19 nt, Homo sapiens
  misc_RNA (1)...(19): siRNA sense strand
gagcaguacgaccaucuug

SEQ ID NO: 2216485 - RNA, 19 nt, Homo sapiens
  misc_RNA (1)...(19): siRNA sense strand
ggugaaugccgccuacuca

SEQ ID NO: 2216486 - RNA, 19 nt, Homo sapiens
  misc_RNA (1)...(19): siRNA sense strand
ggguggagcugugccuguu

SEQ ID NO: 2216487 - RNA, 19 nt, Homo sapiens
  misc_RNA (1)...(19): siRNA sense strand
ggagcuacgcuucaucauc

SEQ ID NO: 2216488 - RNA, 19 nt, Homo sapiens
  misc_RNA (1)...(19): siRNA sense strand
gcaguacgaccaucuugag

SEQ ID NO: 2216489 - RNA, 19 nt, Homo sapiens
  misc_RNA (1)...(19): siRNA sense strand
cccuguaugugucccauuu

SEQ ID NO: 2216490 - RNA, 19 nt, Homo sapiens
  misc_RNA (1)...(19): siRNA sense strand
acaaggagcuacgcuucau

SEQ ID NO: 2216491 - RNA, 19 nt, Homo sapiens
  misc_RNA (1)...(19): siRNA sense strand
ccacacaugaccugcucua

SEQ ID NO: 2216492 - RNA, 19 nt, Homo sapiens
  misc_RNA (1)...(19): siRNA sense strand
ggcagggauccucuguuua

SEQ ID NO: 2216493 - RNA, 19 nt, Homo sapiens
  misc_RNA (1)...(19): siRNA sense strand
gguacaacacuguccugaa

SEQ ID NO: 2216494 - RNA, 19 nt, Homo sapiens
  misc_RNA (1)...(19): siRNA sense strand
agucuuggcuguacaaagc

SEQ ID NO: 2216495 - RNA, 19 nt, Homo sapiens
  misc_RNA (1)...(19): siRNA sense strand
caucugucccuacaccaaa

SEQ ID NO: 2216496 - RNA, 19 nt, Homo sapiens
  misc_RNA (1)...(19): siRNA sense strand
caacacuguccugaacaaa

SEQ ID NO: 2216497 - RNA, 19 nt, Homo sapiens
  misc_RNA (1)...(19): siRNA sense strand
gcaguuccaccugauguuc

SEQ ID NO: 2216498 - RNA, 19 nt, Homo sapiens
  misc_RNA (1)...(19): siRNA sense strand
agacguccuucugcacauu

SEQ ID NO: 2216499 - RNA, 19 nt, Homo sapiens
  misc_RNA (1)...(19): siRNA sense strand
cgcggacacugcccaaugu

SEQ ID NO: 2216500 - RNA, 19 nt, Homo sapiens
  misc_RNA (1)...(19): siRNA sense strand
acaggugugucucgguuuc

SEQ ID NO: 2216501 - RNA, 19 nt, Homo sapiens
  misc_RNA (1)...(19): siRNA sense strand
ccugcugaauaacuauaaa

SEQ ID NO: 2216502 - RNA, 19 nt, Homo sapiens
  misc_RNA (1)...(19): siRNA sense strand
gcugugguacuucuacuca

SEQ ID NO: 2216503 - RNA, 19 nt, Homo sapiens
  misc_RNA (1)...(19): siRNA sense strand
ccaaaguggaggagagcuu

SEQ ID NO: 2216504 - RNA, 19 nt, Homo sapiens
  misc_RNA (1)...(19): siRNA sense strand
ggagcaguacgaccaucuu

SEQ ID NO: 2216505 - RNA, 19 nt, Homo sapiens
  misc_RNA (1)...(19): siRNA sense strand
guuuuacucucagcuaaua

SEQ ID NO: 2216506 - RNA, 19 nt, Homo sapiens
  misc_RNA (1)...(19): siRNA sense strand
ugacggccaugcaguucca

SEQ ID NO: 2216507 - RNA, 19 nt, Homo sapiens
  misc_RNA (1)...(19): siRNA sense strand
cagccacggcccuguaugu

SEQ ID NO: 2216508 - RNA, 19 nt, Homo sapiens
  misc_RNA (1)...(19): siRNA sense strand
guaugugucccauuucaac

SEQ ID NO: 2216509 - RNA, 19 nt, Homo sapiens
  misc_RNA (1)...(19): siRNA sense strand
ggaaucagcucacagagau

SEQ ID NO: 2216510 - RNA, 19 nt, Homo sapiens
  misc_RNA (1)...(19): siRNA sense strand
ggacauugaaggcaacuua

SEQ ID NO: 2216511 - RNA, 19 nt, Homo sapiens
  misc_RNA (1)...(19): siRNA sense strand
acaacaagcuggagaagau

SEQ ID NO: 2216512 - RNA, 19 nt, Homo sapiens
  misc_RNA (1)...(19): siRNA sense strand
ggaggaagaggaaacaaga

SEQ ID NO: 2216513 - RNA, 19 nt, Homo sapiens
  misc_RNA (1)...(19): siRNA sense strand
caccugggcugccucgaaa

SEQ ID NO: 2216514 - RNA, 19 nt, Homo sapiens
  misc_RNA (1)...(19): siRNA sense strand
cugcagaacaacaagauua

SEQ ID NO: 2216515 - RNA, 19 nt, Homo sapiens
  misc_RNA (1)...(19): siRNA sense strand
gaaauguccaugugcugaa

SEQ ID NO: 2216516 - RNA, 19 nt, Homo sapiens
  misc_RNA (1)...(19): siRNA sense strand
ggaucuuucucagguuuaa

SEQ ID NO: 2216517 - RNA, 19 nt, Homo sapiens
  misc_RNA (1)...(19): siRNA sense strand
ggaagaggaaacaagauag

SEQ ID NO: 2216518 - RNA, 19 nt, Homo sapiens
  misc_RNA (1)...(19): siRNA sense strand
gggaaucagcucacagaga

SEQ ID NO: 2216519 - RNA, 19 nt, Homo sapiens
  misc_RNA (1)...(19): siRNA sense strand
ggaggaggaggaagaggaa

SEQ ID NO: 2216520 - RNA, 19 nt, Homo sapiens
  misc_RNA (1)...(19): siRNA sense strand
uguacaagcugcaccucaa

SEQ ID NO: 2216521 - RNA, 19 nt, Homo sapiens
  misc_RNA (1)...(19): siRNA sense strand
aggaagaggaaacaagaua

SEQ ID NO: 2216522 - RNA, 19 nt, Homo sapiens
  misc_RNA (1)...(19): siRNA sense strand
gaacaacaagcuggagaag

SEQ ID NO: 2216523 - RNA, 19 nt, Homo sapiens
  misc_RNA (1)...(19): siRNA sense strand
cugcaggucuuggacauug

SEQ ID NO: 2216524 - RNA, 19 nt, Homo sapiens
  misc_RNA (1)...(19): siRNA sense strand
acaacgagaccuucuggaa

SEQ ID NO: 2216525 - RNA, 19 nt, Homo sapiens
  misc_RNA (1)...(19): siRNA sense strand
gagcuauaccugcagaaca

SEQ ID NO: 2216526 - RNA, 19 nt, Homo sapiens
  misc_RNA (1)...(19): siRNA sense strand
cagaacaacaagauuagug

SEQ ID NO: 2216527 - RNA, 19 nt, Homo sapiens
  misc_RNA (1)...(19): siRNA sense strand
gcagaacaacuaccugacu

SEQ ID NO: 2216528 - RNA, 19 nt, Homo sapiens
  misc_RNA (1)...(19): siRNA sense strand
cuuagaguuuggugacauu

SEQ ID NO: 2216529 - RNA, 19 nt, Homo sapiens
  misc_RNA (1)...(19): siRNA sense strand
agcuauaccugcagaacaa

SEQ ID NO: 2216530 - RNA, 19 nt, Homo sapiens
  misc_RNA (1)...(19): siRNA sense strand
cggugcaccuguacaacaa

SEQ ID NO: 2216531 - RNA, 19 nt, Homo sapiens
  misc_RNA (1)...(19): siRNA sense strand
gcaggucuuggacauugaa

SEQ ID NO: 2216532 - RNA, 19 nt, Homo sapiens
  misc_RNA (1)...(19): siRNA sense strand
ggaggaggaagaggaaaca

SEQ ID NO: 2216533 - RNA, 19 nt, Homo sapiens
  misc_RNA (1)...(19): siRNA sense strand
gaaggucaagcgcaaugag

SEQ ID NO: 2216534 - RNA, 19 nt, Homo sapiens
  misc_RNA (1)...(19): siRNA sense strand
gcagaacaacaagauuagu

SEQ ID NO: 2216535 - RNA, 19 nt, Homo sapiens
  misc_RNA (1)...(19): siRNA sense strand
gaggaagaggaaacaagau

SEQ ID NO: 2216536 - RNA, 19 nt, Homo sapiens
  misc_RNA (1)...(19): siRNA sense strand
gggaucuuucucagguuua

SEQ ID NO: 2216537 - RNA, 19 nt, Homo sapiens
  misc_RNA (1)...(19): siRNA sense strand
cugcugcacuuggagaaga

SEQ ID NO: 2216538 - RNA, 19 nt, Homo sapiens
  misc_RNA (1)...(19): siRNA sense strand
acgagggccuggacaacga

SEQ ID NO: 2216539 - RNA, 19 nt, Homo sapiens
  misc_RNA (1)...(19): siRNA sense strand
ggggaucuuucucagguuu

SEQ ID NO: 2216540 - RNA, 19 nt, Homo sapiens
  misc_RNA (1)...(19): siRNA sense strand
acacggugcaccuguacaa

SEQ ID NO: 2216541 - RNA, 19 nt, Homo sapiens
  misc_RNA (1)...(19): siRNA sense strand
acaagcugcaccucaagaa

SEQ ID NO: 2216542 - RNA, 19 nt, Homo sapiens
  misc_RNA (1)...(19): siRNA sense strand
ccgagucacuugaguaccu

SEQ ID NO: 2216543 - RNA, 19 nt, Homo sapiens
  misc_RNA (1)...(19): siRNA sense strand
ggaagaagaugaagaagaa

SEQ ID NO: 2216544 - RNA, 19 nt, Homo sapiens
  misc_RNA (1)...(19): siRNA sense strand
gcggaaaggugaagaaaua

SEQ ID NO: 2216545 - RNA, 19 nt, Homo sapiens
  misc_RNA (1)...(19): siRNA sense strand
ggaagcagcucaaauuaga

SEQ ID NO: 2216546 - RNA, 19 nt, Homo sapiens
  misc_RNA (1)...(19): siRNA sense strand
agaaagaccugcuugauaa

SEQ ID NO: 2216547 - RNA, 19 nt, Homo sapiens
  misc_RNA (1)...(19): siRNA sense strand
gaaagagauuuaagggaua

SEQ ID NO: 2216548 - RNA, 19 nt, Homo sapiens
  misc_RNA (1)...(19): siRNA sense strand
gcaacuagcucgagaggaa

SEQ ID NO: 2216549 - RNA, 19 nt, Homo sapiens
  misc_RNA (1)...(19): siRNA sense strand
ggaggaagcuaccaagauu

SEQ ID NO: 2216550 - RNA, 19 nt, Homo sapiens
  misc_RNA (1)...(19): siRNA sense strand
gaagaucgcucgggaauuc

SEQ ID NO: 2216551 - RNA, 19 nt, Homo sapiens
  misc_RNA (1)...(19): siRNA sense strand
cgaaugaccucuuugauau

SEQ ID NO: 2216552 - RNA, 19 nt, Homo sapiens
  misc_RNA (1)...(19): siRNA sense strand
cagaauacaugccaauaaa

SEQ ID NO: 2216553 - RNA, 19 nt, Homo sapiens
  misc_RNA (1)...(19): siRNA sense strand
ggaaagggcucagcagaug

SEQ ID NO: 2216554 - RNA, 19 nt, Homo sapiens
  misc_RNA (1)...(19): siRNA sense strand
gcuuaaagaucuacugaaa

SEQ ID NO: 2216555 - RNA, 19 nt, Homo sapiens
  misc_RNA (1)...(19): siRNA sense strand
ugacuucgauggagugaua

SEQ ID NO: 2216556 - RNA, 19 nt, Homo sapiens
  misc_RNA (1)...(19): siRNA sense strand
gaaauccauuguaaacuug

SEQ ID NO: 2216557 - RNA, 19 nt, Homo sapiens
  misc_RNA (1)...(19): siRNA sense strand
aggagaagcuagaacauua

SEQ ID NO: 2216558 - RNA, 19 nt, Homo sapiens
  misc_RNA (1)...(19): siRNA sense strand
gcagauacuuguacucaug

SEQ ID NO: 2216559 - RNA, 19 nt, Homo sapiens
  misc_RNA (1)...(19): siRNA sense strand
gaauauugcuaucaucuca

SEQ ID NO: 2216560 - RNA, 19 nt, Homo sapiens
  misc_RNA (1)...(19): siRNA sense strand
ugaaagugaucccugguua

SEQ ID NO: 2216561 - RNA, 19 nt, Homo sapiens
  misc_RNA (1)...(19): siRNA sense strand
gaguaugucuuucugauau

SEQ ID NO: 2216562 - RNA, 19 nt, Homo sapiens
  misc_RNA (1)...(19): siRNA sense strand
gcacaaacgugaagaugca

SEQ ID NO: 2216563 - RNA, 19 nt, Homo sapiens
  misc_RNA (1)...(19): siRNA sense strand
gcuacuuacucuucacuua

SEQ ID NO: 2216564 - RNA, 19 nt, Homo sapiens
  misc_RNA (1)...(19): siRNA sense strand
gaagaguucauaugacuuu

SEQ ID NO: 2216565 - RNA, 19 nt, Homo sapiens
  misc_RNA (1)...(19): siRNA sense strand
agugaucccugguuaauua

SEQ ID NO: 2216566 - RNA, 19 nt, Homo sapiens
  misc_RNA (1)...(19): siRNA sense strand
caacauuugugcugaauca

SEQ ID NO: 2216567 - RNA, 19 nt, Homo sapiens
  misc_RNA (1)...(19): siRNA sense strand
gagaggaaaucaagaaugg

SEQ ID NO: 2216568 - RNA, 19 nt, Homo sapiens
  misc_RNA (1)...(19): siRNA sense strand
gaaaccagcucuuuaucca

SEQ ID NO: 2216569 - RNA, 19 nt, Homo sapiens
  misc_RNA (1)...(19): siRNA sense strand
ggagugaccuucaaaauug

SEQ ID NO: 2216570 - RNA, 19 nt, Homo sapiens
  misc_RNA (1)...(19): siRNA sense strand
gcauugugguuuaguguuu

SEQ ID NO: 2216571 - RNA, 19 nt, Homo sapiens
  misc_RNA (1)...(19): siRNA sense strand
guacauugcucgacaacug

SEQ ID NO: 2216572 - RNA, 19 nt, Homo sapiens
  misc_RNA (1)...(19): siRNA sense strand
gcagaauacaugccaauaa

SEQ ID NO: 2216573 - RNA, 19 nt, Homo sapiens
  misc_RNA (1)...(19): siRNA sense strand
guaaaucuccuaucaacuu

SEQ ID NO: 2216574 - RNA, 19 nt, Homo sapiens
  misc_RNA (1)...(19): siRNA sense strand
gauaguccuuguaaagaaa

SEQ ID NO: 2216575 - RNA, 19 nt, Homo sapiens
  misc_RNA (1)...(19): siRNA sense strand
gcagaaaccuaugcagaau

SEQ ID NO: 2216576 - RNA, 19 nt, Homo sapiens
  misc_RNA (1)...(19): siRNA sense strand
agacuauccuggagaauuu

SEQ ID NO: 2216577 - RNA, 19 nt, Homo sapiens
  misc_RNA (1)...(19): siRNA sense strand
uggaugaacuuaucgauga

SEQ ID NO: 2216578 - RNA, 19 nt, Homo sapiens
  misc_RNA (1)...(19): siRNA sense strand
uggaagaaaugcuuuagaa

SEQ ID NO: 2216579 - RNA, 19 nt, Homo sapiens
  misc_RNA (1)...(19): siRNA sense strand
gucaugaaauccauuguaa

SEQ ID NO: 2216580 - RNA, 19 nt, Homo sapiens
  misc_RNA (1)...(19): siRNA sense strand
agaaaugggucaugcagaa

SEQ ID NO: 2216581 - RNA, 19 nt, Homo sapiens
  misc_RNA (1)...(19): siRNA sense strand
caaagugccuuauuagcau

SEQ ID NO: 2216582 - RNA, 19 nt, Homo sapiens
  misc_RNA (1)...(19): siRNA sense strand
gaagaugggcaacggauug

SEQ ID NO: 2216583 - RNA, 19 nt, Homo sapiens
  misc_RNA (1)...(19): siRNA sense strand
gauuguagguuugaucauu

SEQ ID NO: 2216584 - RNA, 19 nt, Homo sapiens
  misc_RNA (1)...(19): siRNA sense strand
uaaaacaacuucugcauug

SEQ ID NO: 2216585 - RNA, 19 nt, Homo sapiens
  misc_RNA (1)...(19): siRNA sense strand
cagcucggguauuucauua

SEQ ID NO: 2216586 - RNA, 19 nt, Homo sapiens
  misc_RNA (1)...(19): siRNA sense strand
ggauggagauaagaauauu

SEQ ID NO: 2216587 - RNA, 19 nt, Homo sapiens
  misc_RNA (1)...(19): siRNA sense strand
gaacuuaucgaugaacuug

SEQ ID NO: 2216588 - RNA, 19 nt, Homo sapiens
  misc_RNA (1)...(19): siRNA sense strand
caccagagguucuucaaau

SEQ ID NO: 2216589 - RNA, 19 nt, Homo sapiens
  misc_RNA (1)...(19): siRNA sense strand
ggagcuagaauguggauaa

SEQ ID NO: 2216590 - RNA, 19 nt, Homo sapiens
  misc_RNA (1)...(19): siRNA sense strand
ggaagaaaugcuuuagaaa

SEQ ID NO: 2216591 - RNA, 19 nt, Homo sapiens
  misc_RNA (1)...(19): siRNA sense strand
caucaggucuuggaucaaa

SEQ ID NO: 2216592 - RNA, 19 nt, Homo sapiens
  misc_RNA (1)...(19): siRNA sense strand
gaaagugaucccugguuaa

SEQ ID NO: 2216593 - RNA, 19 nt, Homo sapiens
  misc_RNA (1)...(19): siRNA sense strand
guagguggccuuacuggua

SEQ ID NO: 2216594 - RNA, 19 nt, Homo sapiens
  misc_RNA (1)...(19): siRNA sense strand
gaaggacgauagcaggaau

SEQ ID NO: 2216595 - RNA, 19 nt, Homo sapiens
  misc_RNA (1)...(19): siRNA sense strand
ggacacacuuacugcaguu

SEQ ID NO: 2216596 - RNA, 19 nt, Homo sapiens
  misc_RNA (1)...(19): siRNA sense strand
caaugaugauggaagcaua

SEQ ID NO: 2216597 - RNA, 19 nt, Homo sapiens
  misc_RNA (1)...(19): siRNA sense strand
gagcuagaauguggauaaa

SEQ ID NO: 2216598 - RNA, 19 nt, Homo sapiens
  misc_RNA (1)...(19): siRNA sense strand
aaacuuggauucuccuaug

SEQ ID NO: 2216599 - RNA, 19 nt, Homo sapiens
  misc_RNA (1)...(19): siRNA sense strand
gaagaaagugacuaugaga

SEQ ID NO: 2216600 - RNA, 19 nt, Homo sapiens
  misc_RNA (1)...(19): siRNA sense strand
gauaugaagcuuagaggaa

SEQ ID NO: 2216601 - RNA, 19 nt, Homo sapiens
  misc_RNA (1)...(19): siRNA sense strand
caacauggccuauaugaac

SEQ ID NO: 2216602 - RNA, 19 nt, Homo sapiens
  misc_RNA (1)...(19): siRNA sense strand
gaagguuccuguuguaaaa

SEQ ID NO: 2216603 - RNA, 19 nt, Homo sapiens
  misc_RNA (1)...(19): siRNA sense strand
caugaagguuccuguugua

SEQ ID NO: 2216604 - RNA, 19 nt, Homo sapiens
  misc_RNA (1)...(19): siRNA sense strand
gaagcagcaguuccuguua

SEQ ID NO: 2216605 - RNA, 19 nt, Homo sapiens
  misc_RNA (1)...(19): siRNA sense strand
gauccagauucuauucaaa

SEQ ID NO: 2216606 - RNA, 19 nt, Homo sapiens
  misc_RNA (1)...(19): siRNA sense strand
gguuuaguguuucaaauga

SEQ ID NO: 2216607 - RNA, 19 nt, Homo sapiens
  misc_RNA (1)...(19): siRNA sense strand
ccgaaugaccucuuugaua

SEQ ID NO: 2216608 - RNA, 19 nt, Homo sapiens
  misc_RNA (1)...(19): siRNA sense strand
uaauauugcucagccagua

SEQ ID NO: 2216609 - RNA, 19 nt, Homo sapiens
  misc_RNA (1)...(19): siRNA sense strand
gaagaaauaacucgagaag

SEQ ID NO: 2216610 - RNA, 19 nt, Homo sapiens
  misc_RNA (1)...(19): siRNA sense strand
ggcaacggauuguagguuu

SEQ ID NO: 2216611 - RNA, 19 nt, Homo sapiens
  misc_RNA (1)...(19): siRNA sense strand
gaagaaagaccugcuugau

SEQ ID NO: 2216612 - RNA, 19 nt, Homo sapiens
  misc_RNA (1)...(19): siRNA sense strand
caaaccaucacuuuaacua

SEQ ID NO: 2216613 - RNA, 19 nt, Homo sapiens
  misc_RNA (1)...(19): siRNA sense strand
cuaaaagacuugagaguuu

SEQ ID NO: 2216614 - RNA, 19 nt, Homo sapiens
  misc_RNA (1)...(19): siRNA sense strand
ggagauaagaauauugcua

SEQ ID NO: 2216615 - RNA, 19 nt, Homo sapiens
  misc_RNA (1)...(19): siRNA sense strand
aagaaagaccugcuugaua

SEQ ID NO: 2216616 - RNA, 19 nt, Homo sapiens
  misc_RNA (1)...(19): siRNA sense strand
guacaccagcuaacaguaa

SEQ ID NO: 2216617 - RNA, 19 nt, Homo sapiens
  misc_RNA (1)...(19): siRNA sense strand
gaaaauguguuguaauugg

SEQ ID NO: 2216618 - RNA, 19 nt, Homo sapiens
  misc_RNA (1)...(19): siRNA sense strand
aaaguaugaugcugaaaga

SEQ ID NO: 2216619 - RNA, 19 nt, Homo sapiens
  misc_RNA (1)...(19): siRNA sense strand
aaagccaccugcuaauauu

SEQ ID NO: 2216620 - RNA, 19 nt, Homo sapiens
  misc_RNA (1)...(19): siRNA sense strand
auaagaaggucgucucaga

SEQ ID NO: 2216621 - RNA, 19 nt, Homo sapiens
  misc_RNA (1)...(19): siRNA sense strand
caaauaaggaacaacaaga

SEQ ID NO: 2216622 - RNA, 19 nt, Homo sapiens
  misc_RNA (1)...(19): siRNA sense strand
gcgaagaguucauaugacu

SEQ ID NO: 2216623 - RNA, 19 nt, Homo sapiens
  misc_RNA (1)...(19): siRNA sense strand
ggagccagggcaagauuua

SEQ ID NO: 2216624 - RNA, 19 nt, Homo sapiens
  misc_RNA (1)...(19): siRNA sense strand
aaacaugaguucuggagau

SEQ ID NO: 2216625 - RNA, 19 nt, Homo sapiens
  misc_RNA (1)...(19): siRNA sense strand
uaacaacaguucgccaaga

SEQ ID NO: 2216626 - RNA, 19 nt, Homo sapiens
  misc_RNA (1)...(19): siRNA sense strand
gauaguguuugaugagugu

SEQ ID NO: 2216627 - RNA, 19 nt, Homo sapiens
  misc_RNA (1)...(19): siRNA sense strand
gcaaugguacaguaaagaa

SEQ ID NO: 2216628 - RNA, 19 nt, Homo sapiens
  misc_RNA (1)...(19): siRNA sense strand
uaaagccaccugcuaauau

SEQ ID NO: 2216629 - RNA, 19 nt, Homo sapiens
  misc_RNA (1)...(19): siRNA sense strand
ugaugugccuguggaaaua

SEQ ID NO: 2216630 - RNA, 19 nt, Homo sapiens
  misc_RNA (1)...(19): siRNA sense strand
gaacguugcugagaugacu

SEQ ID NO: 2216631 - RNA, 19 nt, Homo sapiens
  misc_RNA (1)...(19): siRNA sense strand
caagacaggcuuagcaguu

SEQ ID NO: 2216632 - RNA, 19 nt, Homo sapiens
  misc_RNA (1)...(19): siRNA sense strand
uaaagaaggagcuagaaug

SEQ ID NO: 2216633 - RNA, 19 nt, Homo sapiens
  misc_RNA (1)...(19): siRNA sense strand
uaaugaggaugaugaaagu

SEQ ID NO: 2216634 - RNA, 19 nt, Homo sapiens
  misc_RNA (1)...(19): siRNA sense strand
agaaugcguuauuucagua

SEQ ID NO: 2216635 - RNA, 19 nt, Homo sapiens
  misc_RNA (1)...(19): siRNA sense strand
ccugauaaauguagaagau

SEQ ID NO: 2216636 - RNA, 19 nt, Homo sapiens
  misc_RNA (1)...(19): siRNA sense strand
uaagggauauuggagcaaa

SEQ ID NO: 2216637 - RNA, 19 nt, Homo sapiens
  misc_RNA (1)...(19): siRNA sense strand
gcaacggauuguagguuug

SEQ ID NO: 2216638 - RNA, 19 nt, Homo sapiens
  misc_RNA (1)...(19): siRNA sense strand
uaaagauguucgacaagga

SEQ ID NO: 2216639 - RNA, 19 nt, Homo sapiens
  misc_RNA (1)...(19): siRNA sense strand
cuagagaucugagcagguu

SEQ ID NO: 2216640 - RNA, 19 nt, Homo sapiens
  misc_RNA (1)...(19): siRNA sense strand
gauagaagggcaacagaau

SEQ ID NO: 2216641 - RNA, 19 nt, Homo sapiens
  misc_RNA (1)...(19): siRNA sense strand
gaguucauaugacuuuaga

SEQ ID NO: 2216642 - RNA, 19 nt, Homo sapiens
  misc_RNA (1)...(19): siRNA sense strand
gagauaguccuuguaaaga

SEQ ID NO: 2216643 - RNA, 19 nt, Homo sapiens
  misc_RNA (1)...(19): siRNA sense strand
ugaaauaccuggcauacaa

SEQ ID NO: 2216644 - RNA, 19 nt, Homo sapiens
  misc_RNA (1)...(19): siRNA sense strand
aaacagagcagacgaaauu

SEQ ID NO: 2216645 - RNA, 19 nt, Homo sapiens
  misc_RNA (1)...(19): siRNA sense strand
ggaaaugccugcagaaucg

SEQ ID NO: 2216646 - RNA, 19 nt, Homo sapiens
  misc_RNA (1)...(19): siRNA sense strand
agauguggcugcaagauua

SEQ ID NO: 2216647 - RNA, 19 nt, Homo sapiens
  misc_RNA (1)...(19): siRNA sense strand
gggauuaccuacaugaaau

SEQ ID NO: 2216648 - RNA, 19 nt, Homo sapiens
  misc_RNA (1)...(19): siRNA sense strand
gggcaucaccaaccaauuu

SEQ ID NO: 2216649 - RNA, 19 nt, Homo sapiens
  misc_RNA (1)...(19): siRNA sense strand
caagaaugaugaggaguau

SEQ ID NO: 2216650 - RNA, 19 nt, Homo sapiens
  misc_RNA (1)...(19): siRNA sense strand
gaugaggaguauaugaaau

SEQ ID NO: 2216651 - RNA, 19 nt, Homo sapiens
  misc_RNA (1)...(19): siRNA sense strand
gggagugaaugauccuuug

SEQ ID NO: 2216652 - RNA, 19 nt, Homo sapiens
  misc_RNA (1)...(19): siRNA sense strand
caaccaauuucuucuggau

SEQ ID NO: 2216653 - RNA, 19 nt, Homo sapiens
  misc_RNA (1)...(19): siRNA sense strand
aaucuuaccuccaccuuca

SEQ ID NO: 2216654 - RNA, 19 nt, Homo sapiens
  misc_RNA (1)...(19): siRNA sense strand
gaacaaucacuccgucauc

SEQ ID NO: 2216655 - RNA, 19 nt, Homo sapiens
  misc_RNA (1)...(19): siRNA sense strand
auccagagcucuuggcuuu

SEQ ID NO: 2216656 - RNA, 19 nt, Homo sapiens
  misc_RNA (1)...(19): siRNA sense strand
uggcagaguuuauugacuu

SEQ ID NO: 2216657 - RNA, 19 nt, Homo sapiens
  misc_RNA (1)...(19): siRNA sense strand
gaagcuggcagaguuuauu

SEQ ID NO: 2216658 - RNA, 19 nt, Homo sapiens
  misc_RNA (1)...(19): siRNA sense strand
uuaccuacaugaaaucuuc

SEQ ID NO: 2216659 - RNA, 19 nt, Homo sapiens
  misc_RNA (1)...(19): siRNA sense strand
gggacuggaugccgaacaa

SEQ ID NO: 2216660 - RNA, 19 nt, Homo sapiens
  misc_RNA (1)...(19): siRNA sense strand
gagaaugacaguuggaaag

SEQ ID NO: 2216661 - RNA, 19 nt, Homo sapiens
  misc_RNA (1)...(19): siRNA sense strand
gagauguggcugcaagauu

SEQ ID NO: 2216662 - RNA, 19 nt, Homo sapiens
  misc_RNA (1)...(19): siRNA sense strand
cucagaagcuggcagaguu

SEQ ID NO: 2216663 - RNA, 19 nt, Homo sapiens
  misc_RNA (1)...(19): siRNA sense strand
ggcagaguuuauugacuuu

SEQ ID NO: 2216664 - RNA, 19 nt, Homo sapiens
  misc_RNA (1)...(19): siRNA sense strand
ucacugccaugauccacaa

SEQ ID NO: 2216665 - RNA, 19 nt, Homo sapiens
  misc_RNA (1)...(19): siRNA sense strand
ucaacggcuucgaguguuu

SEQ ID NO: 2216666 - RNA, 19 nt, Homo sapiens
  misc_RNA (1)...(19): siRNA sense strand
agaaugaugaggaguauau

SEQ ID NO: 2216667 - RNA, 19 nt, Homo sapiens
  misc_RNA (1)...(19): siRNA sense strand
acaagaaugaugaggagua

SEQ ID NO: 2216668 - RNA, 19 nt, Homo sapiens
  misc_RNA (1)...(19): siRNA sense strand
gggaaaugccugcagaauc

SEQ ID NO: 2216669 - RNA, 19 nt, Homo sapiens
  misc_RNA (1)...(19): siRNA sense strand
aaugacaguuggaaagaga

SEQ ID NO: 2216670 - RNA, 19 nt, Homo sapiens
  misc_RNA (1)...(19): siRNA sense strand
gaaugacaguuggaaagag

SEQ ID NO: 2216671 - RNA, 19 nt, Homo sapiens
  misc_RNA (1)...(19): siRNA sense strand
gaaacagagcagacgaaau

SEQ ID NO: 2216672 - RNA, 19 nt, Homo sapiens
  misc_RNA (1)...(19): siRNA sense strand
gcaagauuauuggcaaggu

SEQ ID NO: 2216673 - RNA, 19 nt, Homo sapiens
  misc_RNA (1)...(19): siRNA sense strand
ccagagcucuuggcuuucu

SEQ ID NO: 2216674 - RNA, 19 nt, Homo sapiens
  misc_RNA (1)...(19): siRNA sense strand
gaaauaccuggcauacaag

SEQ ID NO: 2216675 - RNA, 19 nt, Homo sapiens
  misc_RNA (1)...(19): siRNA sense strand
acaccuggcuuuggcaaug

SEQ ID NO: 2216676 - RNA, 19 nt, Homo sapiens
  misc_RNA (1)...(19): siRNA sense strand
ucagucgccacucggauua

SEQ ID NO: 2216677 - RNA, 19 nt, Homo sapiens
  misc_RNA (1)...(19): siRNA sense strand
gcauccgccucuucaaucu

SEQ ID NO: 2216678 - RNA, 19 nt, Homo sapiens
  misc_RNA (1)...(19): siRNA sense strand
gccaugauccacaacaaug

SEQ ID NO: 2216679 - RNA, 19 nt, Homo sapiens
  misc_RNA (1)...(19): siRNA sense strand
gaagcucucacugccauga

SEQ ID NO: 2216680 - RNA, 19 nt, Homo sapiens
  misc_RNA (1)...(19): siRNA sense strand
cgaacuggcucggcuggau

SEQ ID NO: 2216681 - RNA, 19 nt, Homo sapiens
  misc_RNA (1)...(19): siRNA sense strand
agacgaaauuuugggauua

SEQ ID NO: 2216682 - RNA, 19 nt, Homo sapiens
  misc_RNA (1)...(19): siRNA sense strand
auccgccucuucaaucuua

SEQ ID NO: 2216683 - RNA, 19 nt, Homo sapiens
  misc_RNA (1)...(19): siRNA sense strand
gggcauccgccucuucaau

SEQ ID NO: 2216684 - RNA, 19 nt, Homo sapiens
  misc_RNA (1)...(19): siRNA sense strand
cagaagcuggcagaguuua

SEQ ID NO: 2216685 - RNA, 19 nt, Homo sapiens
  misc_RNA (1)...(19): siRNA sense strand
ucgaguguuucgucuguga

SEQ ID NO: 2216686 - RNA, 19 nt, Homo sapiens
  misc_RNA (1)...(19): siRNA sense strand
cagaguuuauugacuuucu

SEQ ID NO: 2216687 - RNA, 19 nt, Homo sapiens
  misc_RNA (1)...(19): siRNA sense strand
ugaugaggaguauaugaaa

SEQ ID NO: 2216688 - RNA, 19 nt, Homo sapiens
  misc_RNA (1)...(19): siRNA sense strand
ugaaacagagcagacgaaa

SEQ ID NO: 2216689 - RNA, 19 nt, Homo sapiens
  misc_RNA (1)...(19): siRNA sense strand
ccauuagggugguguuggu

SEQ ID NO: 2216690 - RNA, 19 nt, Homo sapiens
  misc_RNA (1)...(19): siRNA sense strand
ccucaacggcuucgagugu

SEQ ID NO: 2216691 - RNA, 19 nt, Homo sapiens
  misc_RNA (1)...(19): siRNA sense strand
guaacgacuacaugacaga

SEQ ID NO: 2216692 - RNA, 19 nt, Homo sapiens
  misc_RNA (1)...(19): siRNA sense strand
ucagaagcuggcagaguuu

SEQ ID NO: 2216693 - RNA, 19 nt, Homo sapiens
  misc_RNA (1)...(19): siRNA sense strand
gauccacaacaaugaaaca

SEQ ID NO: 2216694 - RNA, 19 nt, Homo sapiens
  misc_RNA (1)...(19): siRNA sense strand
ccaugauccacaacaauga

SEQ ID NO: 2216695 - RNA, 19 nt, Homo sapiens
  misc_RNA (1)...(19): siRNA sense strand
accaauuucuucuggauag

SEQ ID NO: 2216696 - RNA, 19 nt, Homo sapiens
  misc_RNA (1)...(19): siRNA sense strand
agaaugacaguuggaaaga

SEQ ID NO: 2216697 - RNA, 19 nt, Homo sapiens
  misc_RNA (1)...(19): siRNA sense strand
auccuuugcugccuaacua

SEQ ID NO: 2216698 - RNA, 19 nt, Homo sapiens
  misc_RNA (1)...(19): siRNA sense strand
gaaaaugccaucuguaacg

SEQ ID NO: 2216699 - RNA, 19 nt, Homo sapiens
  misc_RNA (1)...(19): siRNA sense strand
ugggauuaccuacaugaaa

SEQ ID NO: 2216700 - RNA, 19 nt, Homo sapiens
  misc_RNA (1)...(19): siRNA sense strand
ugagaaugacaguuggaaa

SEQ ID NO: 2216701 - RNA, 19 nt, Homo sapiens
  misc_RNA (1)...(19): siRNA sense strand
cuucgaguguuucgucugu

SEQ ID NO: 2216702 - RNA, 19 nt, Homo sapiens
  misc_RNA (1)...(19): siRNA sense strand
uuauugacuuucuggacaa

SEQ ID NO: 2216703 - RNA, 19 nt, Homo sapiens
  misc_RNA (1)...(19): siRNA sense strand
gcuuucuugucccgcuaua

SEQ ID NO: 2216704 - RNA, 19 nt, Homo sapiens
  misc_RNA (1)...(19): siRNA sense strand
gaaauuuugggauuaccua

SEQ ID NO: 2216705 - RNA, 19 nt, Homo sapiens
  misc_RNA (1)...(19): siRNA sense strand
caugauccacaacaaugaa

SEQ ID NO: 2216706 - RNA, 19 nt, Homo sapiens
  misc_RNA (1)...(19): siRNA sense strand
gaaagagauguggcugcaa

SEQ ID NO: 2216707 - RNA, 19 nt, Homo sapiens
  misc_RNA (1)...(19): siRNA sense strand
caucaccaaccaauuucuu

SEQ ID NO: 2216708 - RNA, 19 nt, Homo sapiens
  misc_RNA (1)...(19): siRNA sense strand
gaaugaugaggaguauaug

SEQ ID NO: 2216709 - RNA, 19 nt, Homo sapiens
  misc_RNA (1)...(19): siRNA sense strand
cagacgaaauuuugggauu

SEQ ID NO: 2216710 - RNA, 19 nt, Homo sapiens
  misc_RNA (1)...(19): siRNA sense strand
gauguggcugcaagauuau

SEQ ID NO: 2216711 - RNA, 19 nt, Homo sapiens
  misc_RNA (1)...(19): siRNA sense strand
uaacgacuacaugacagaa

SEQ ID NO: 2216712 - RNA, 19 nt, Homo sapiens
  misc_RNA (1)...(19): siRNA sense strand
ggcauccgccucuucaauc

SEQ ID NO: 2216713 - RNA, 19 nt, Homo sapiens
  misc_RNA (1)...(19): siRNA sense strand
uggaaaaugccaucuguaa

SEQ ID NO: 2216714 - RNA, 19 nt, Homo sapiens
  misc_RNA (1)...(19): siRNA sense strand
acacagagauugacuggaa

SEQ ID NO: 2216715 - RNA, 19 nt, Homo sapiens
  misc_RNA (1)...(19): siRNA sense strand
gugcugcucuuccucagua

SEQ ID NO: 2216716 - RNA, 19 nt, Homo sapiens
  misc_RNA (1)...(19): siRNA sense strand
gaaggcgucaucaauggua

SEQ ID NO: 2216717 - RNA, 19 nt, Homo sapiens
  misc_RNA (1)...(19): siRNA sense strand
guagaaggcgucaucaaug

SEQ ID NO: 2216718 - RNA, 19 nt, Homo sapiens
  misc_RNA (1)...(19): siRNA sense strand
gagggacucugcaagcaau

SEQ ID NO: 2216719 - RNA, 19 nt, Homo sapiens
  misc_RNA (1)...(19): siRNA sense strand
gaucguuucuacccucuuc

SEQ ID NO: 2216720 - RNA, 19 nt, Homo sapiens
  misc_RNA (1)...(19): siRNA sense strand
gguagaaggcgucaucaau

SEQ ID NO: 2216721 - RNA, 19 nt, Homo sapiens
  misc_RNA (1)...(19): siRNA sense strand
ucaucgagcucuccuggaa

SEQ ID NO: 2216722 - RNA, 19 nt, Homo sapiens
  misc_RNA (1)...(19): siRNA sense strand
cgucaucaaugguaccuau

SEQ ID NO: 2216723 - RNA, 19 nt, Homo sapiens
  misc_RNA (1)...(19): siRNA sense strand
acacauacccuuccacauc

SEQ ID NO: 2216724 - RNA, 19 nt, Homo sapiens
  misc_RNA (1)...(19): siRNA sense strand
ccaaccagaucguuucuac

SEQ ID NO: 2216725 - RNA, 19 nt, Homo sapiens
  misc_RNA (1)...(19): siRNA sense strand
uagaaggcgucaucaaugg

SEQ ID NO: 2216726 - RNA, 19 nt, Homo sapiens
  misc_RNA (1)...(19): siRNA sense strand
aaugguaccuaugacuaua

SEQ ID NO: 2216727 - RNA, 19 nt, Homo sapiens
  misc_RNA (1)...(19): siRNA sense strand
ucaaugguaccuaugacua

SEQ ID NO: 2216728 - RNA, 19 nt, Homo sapiens
  misc_RNA (1)...(19): siRNA sense strand
gguuucguguacaucuuua

SEQ ID NO: 2216729 - RNA, 19 nt, Homo sapiens
  misc_RNA (1)...(19): siRNA sense strand
ggcagucucugugaagaug

SEQ ID NO: 2216730 - RNA, 19 nt, Homo sapiens
  misc_RNA (1)...(19): siRNA sense strand
cauaugccaugccgucauc

SEQ ID NO: 2216731 - RNA, 19 nt, Homo sapiens
  misc_RNA (1)...(19): siRNA sense strand
caaugguaccuaugacuau

SEQ ID NO: 2216732 - RNA, 19 nt, Homo sapiens
  misc_RNA (1)...(19): siRNA sense strand
gcacccaacacagcaagaa

SEQ ID NO: 2216733 - RNA, 19 nt, Homo sapiens
  misc_RNA (1)...(19): siRNA sense strand
gcucuucgccccuggguua

SEQ ID NO: 2216734 - RNA, 19 nt, Homo sapiens
  misc_RNA (1)...(19): siRNA sense strand
cugcugcccugcacauaug

SEQ ID NO: 2216735 - RNA, 19 nt, Homo sapiens
  misc_RNA (1)...(19): siRNA sense strand
cagcaagaaagcccacuga

SEQ ID NO: 2216736 - RNA, 19 nt, Homo sapiens
  misc_RNA (1)...(19): siRNA sense strand
caucuuugcugugcucuac

SEQ ID NO: 2216737 - RNA, 19 nt, Homo sapiens
  misc_RNA (1)...(19): siRNA sense strand
gagcucuccuggaacacau

SEQ ID NO: 2216738 - RNA, 19 nt, Homo sapiens
  misc_RNA (1)...(19): siRNA sense strand
cgucugguauuuccacaca

SEQ ID NO: 2216739 - RNA, 19 nt, Homo sapiens
  misc_RNA (1)...(19): siRNA sense strand
uggcauacacagagauuga

SEQ ID NO: 2216740 - RNA, 19 nt, Homo sapiens
  misc_RNA (1)...(19): siRNA sense strand
gggcugggguugcugcuuu

SEQ ID NO: 2216741 - RNA, 19 nt, Homo sapiens
  misc_RNA (1)...(19): siRNA sense strand
cuaccuugcugcuugucuu

SEQ ID NO: 2216742 - RNA, 19 nt, Homo sapiens
  misc_RNA (1)...(19): siRNA sense strand
cugcuugucuucuugaucu

SEQ ID NO: 2216743 - RNA, 19 nt, Homo sapiens
  misc_RNA (1)...(19): siRNA sense strand
cguguccacuccaucuuug

SEQ ID NO: 2216744 - RNA, 19 nt, Homo sapiens
  misc_RNA (1)...(19): siRNA sense strand
cuaccugucccgcuccuuu

SEQ ID NO: 2216745 - RNA, 19 nt, Homo sapiens
  misc_RNA (1)...(19): siRNA sense strand
ccucuucaccuccaacuuc

SEQ ID NO: 2216746 - RNA, 19 nt, Homo sapiens
  misc_RNA (1)...(19): siRNA sense strand
cagcugguuucguguacau

SEQ ID NO: 2216747 - RNA, 19 nt, Homo sapiens
  misc_RNA (1)...(19): siRNA sense strand
gugcugcggcucuucaaug

SEQ ID NO: 2216748 - RNA, 19 nt, Homo sapiens
  misc_RNA (1)...(19): siRNA sense strand
cgagguagaaggcgucauc

SEQ ID NO: 2216749 - RNA, 19 nt, Homo sapiens
  misc_RNA (1)...(19): siRNA sense strand
gcauggcccagaacaucuu

SEQ ID NO: 2216750 - RNA, 19 nt, Homo sapiens
  misc_RNA (1)...(19): siRNA sense strand
ugcugcggcucuucaauga

SEQ ID NO: 2216751 - RNA, 19 nt, Homo sapiens
  misc_RNA (1)...(19): siRNA sense strand
cccaagagcacccaacaca

SEQ ID NO: 2216752 - RNA, 19 nt, Homo sapiens
  misc_RNA (1)...(19): siRNA sense strand
ucacccugcuccugcuguu

SEQ ID NO: 2216753 - RNA, 19 nt, Homo sapiens
  misc_RNA (1)...(19): siRNA sense strand
agaugaaugugcugcucuu

SEQ ID NO: 2216754 - RNA, 19 nt, Homo sapiens
  misc_RNA (1)...(19): siRNA sense strand
gguaccucccuucgucuuu

SEQ ID NO: 2216755 - RNA, 19 nt, Homo sapiens
  misc_RNA (1)...(19): siRNA sense strand
guaccucccuucgucuuuu

SEQ ID NO: 2216756 - RNA, 19 nt, Homo sapiens
  misc_RNA (1)...(19): siRNA sense strand
gguggcauacacagagauu

SEQ ID NO: 2216757 - RNA, 19 nt, Homo sapiens
  misc_RNA (1)...(19): siRNA sense strand
acacccaaccagaucguuu

SEQ ID NO: 2216758 - RNA, 19 nt, Homo sapiens
  misc_RNA (1)...(19): siRNA sense strand
cagucucugugaagaugaa

SEQ ID NO: 2216759 - RNA, 19 nt, Homo sapiens
  misc_RNA (1)...(19): siRNA sense strand
caucaaugguaccuaugac

SEQ ID NO: 2216760 - RNA, 19 nt, Homo sapiens
  misc_RNA (1)...(19): siRNA sense strand
gcugagagguccauaauag

SEQ ID NO: 2216761 - RNA, 19 nt, Homo sapiens
  misc_RNA (1)...(19): siRNA sense strand
gaaugaggauaagaagauu

SEQ ID NO: 2216762 - RNA, 19 nt, Homo sapiens
  misc_RNA (1)...(19): siRNA sense strand
cgacauguuucacaaauac

SEQ ID NO: 2216763 - RNA, 19 nt, Homo sapiens
  misc_RNA (1)...(19): siRNA sense strand
ggacaagaaugaggauaag

SEQ ID NO: 2216764 - RNA, 19 nt, Homo sapiens
  misc_RNA (1)...(19): siRNA sense strand
ugacgaugaugaaggagaa

SEQ ID NO: 2216765 - RNA, 19 nt, Homo sapiens
  misc_RNA (1)...(19): siRNA sense strand
gaggauaagaagauugauu

SEQ ID NO: 2216766 - RNA, 19 nt, Homo sapiens
  misc_RNA (1)...(19): siRNA sense strand
uacauuaccucgccacugu

SEQ ID NO: 2216767 - RNA, 19 nt, Homo sapiens
  misc_RNA (1)...(19): siRNA sense strand
ucgacauguuucacaaaua

SEQ ID NO: 2216768 - RNA, 19 nt, Homo sapiens
  misc_RNA (1)...(19): siRNA sense strand
acaagaaugaggauaagaa

SEQ ID NO: 2216769 - RNA, 19 nt, Homo sapiens
  misc_RNA (1)...(19): siRNA sense strand
caaauacaccggacgugau

SEQ ID NO: 2216770 - RNA, 19 nt, Homo sapiens
  misc_RNA (1)...(19): siRNA sense strand
agaaugaggauaagaagau

SEQ ID NO: 2216771 - RNA, 19 nt, Homo sapiens
  misc_RNA (1)...(19): siRNA sense strand
ccucagugccugugacaaa

SEQ ID NO: 2216772 - RNA, 19 nt, Homo sapiens
  misc_RNA (1)...(19): siRNA sense strand
ggacgugauggcaagauug

SEQ ID NO: 2216773 - RNA, 19 nt, Homo sapiens
  misc_RNA (1)...(19): siRNA sense strand
gaucgacauguuucacaaa

SEQ ID NO: 2216774 - RNA, 19 nt, Homo sapiens
  misc_RNA (1)...(19): siRNA sense strand
uaauaggcaugaucgacau

SEQ ID NO: 2216775 - RNA, 19 nt, Homo sapiens
  misc_RNA (1)...(19): siRNA sense strand
gacgugauggcaagauuga

SEQ ID NO: 2216776 - RNA, 19 nt, Homo sapiens
  misc_RNA (1)...(19): siRNA sense strand
aaggagaacuuccccaauu

SEQ ID NO: 2216777 - RNA, 19 nt, Homo sapiens
  misc_RNA (1)...(19): siRNA sense strand
uuaccucgccacugucuuu

SEQ ID NO: 2216778 - RNA, 19 nt, Homo sapiens
  misc_RNA (1)...(19): siRNA sense strand
caagcugagagguccauaa

SEQ ID NO: 2216779 - RNA, 19 nt, Homo sapiens
  misc_RNA (1)...(19): siRNA sense strand
ugaucgacauguuucacaa

SEQ ID NO: 2216780 - RNA, 19 nt, Homo sapiens
  misc_RNA (1)...(19): siRNA sense strand
caagccugcugacgaugau

SEQ ID NO: 2216781 - RNA, 19 nt, Homo sapiens
  misc_RNA (1)...(19): siRNA sense strand
caagaaugaggauaagaag

SEQ ID NO: 2216782 - RNA, 19 nt, Homo sapiens
  misc_RNA (1)...(19): siRNA sense strand
ccaagccugcugacgauga

SEQ ID NO: 2216783 - RNA, 19 nt, Homo sapiens
  misc_RNA (1)...(19): siRNA sense strand
uuucugaguuucuguccuu

SEQ ID NO: 2216784 - RNA, 19 nt, Homo sapiens
  misc_RNA (1)...(19): siRNA sense strand
cggacgugauggcaagauu

SEQ ID NO: 2216785 - RNA, 19 nt, Homo sapiens
  misc_RNA (1)...(19): siRNA sense strand
aggacaagaaugaggauaa

SEQ ID NO: 2216786 - RNA, 19 nt, Homo sapiens
  misc_RNA (1)...(19): siRNA sense strand
aaauacaccggacgugaug

SEQ ID NO: 2216787 - RNA, 19 nt, Homo sapiens
  misc_RNA (1)...(19): siRNA sense strand
aagcugagagguccauaau

SEQ ID NO: 2216788 - RNA, 19 nt, Homo sapiens
  misc_RNA (1)...(19): siRNA sense strand
ucgccacugucuuugagaa

SEQ ID NO: 2216789 - RNA, 19 nt, Homo sapiens
  misc_RNA (1)...(19): siRNA sense strand
gacaagaaugaggauaaga

SEQ ID NO: 2216790 - RNA, 19 nt, Homo sapiens
  misc_RNA (1)...(19): siRNA sense strand
cgugauggcaagauugaga

SEQ ID NO: 2216791 - RNA, 19 nt, Homo sapiens
  misc_RNA (1)...(19): siRNA sense strand
ggaggaagaugaagaggau

SEQ ID NO: 2216792 - RNA, 19 nt, Homo sapiens
  misc_RNA (1)...(19): siRNA sense strand
gggaggagcuggucaugga

SEQ ID NO: 2216793 - RNA, 19 nt, Homo sapiens
  misc_RNA (1)...(19): siRNA sense strand
gggcagugaugaagaagaa

SEQ ID NO: 2216794 - RNA, 19 nt, Homo sapiens
  misc_RNA (1)...(19): siRNA sense strand
ugaagaggaugaagaagag

SEQ ID NO: 2216795 - RNA, 19 nt, Homo sapiens
  misc_RNA (1)...(19): siRNA sense strand
gagcuuccucuuacacuuu

SEQ ID NO: 2216796 - RNA, 19 nt, Homo sapiens
  misc_RNA (1)...(19): siRNA sense strand
gcaacagacugaugaugcu

SEQ ID NO: 2216797 - RNA, 19 nt, Homo sapiens
  misc_RNA (1)...(19): siRNA sense strand
gcccagagcaacagacuga

SEQ ID NO: 2216798 - RNA, 19 nt, Homo sapiens
  misc_RNA (1)...(19): siRNA sense strand
gaugagcaggcccaaauga

SEQ ID NO: 2216799 - RNA, 19 nt, Homo sapiens
  misc_RNA (1)...(19): siRNA sense strand
gggaugagcaggcccaaau

SEQ ID NO: 2216800 - RNA, 19 nt, Homo sapiens
  misc_RNA (1)...(19): siRNA sense strand
aagaagaggaggaagauga

SEQ ID NO: 2216801 - RNA, 19 nt, Homo sapiens
  misc_RNA (1)...(19): siRNA sense strand
ugucauggcugggugaaga

SEQ ID NO: 2216802 - RNA, 19 nt, Homo sapiens
  misc_RNA (1)...(19): siRNA sense strand
agagggcagugaugaagaa

SEQ ID NO: 2216803 - RNA, 19 nt, Homo sapiens
  misc_RNA (1)...(19): siRNA sense strand
gcagugaugaagaagaaga

SEQ ID NO: 2216804 - RNA, 19 nt, Homo sapiens
  misc_RNA (1)...(19): siRNA sense strand
gggaucaccugggagacaa

SEQ ID NO: 2216805 - RNA, 19 nt, Homo sapiens
  misc_RNA (1)...(19): siRNA sense strand
ggacgaggaggccuaugug

SEQ ID NO: 2216806 - RNA, 19 nt, Homo sapiens
  misc_RNA (1)...(19): siRNA sense strand
cagagcaacagacugauga

SEQ ID NO: 2216807 - RNA, 19 nt, Homo sapiens
  misc_RNA (1)...(19): siRNA sense strand
agacugaugaugcuucuga

SEQ ID NO: 2216808 - RNA, 19 nt, Homo sapiens
  misc_RNA (1)...(19): siRNA sense strand
ggaugaagaagagcggaaa

SEQ ID NO: 2216809 - RNA, 19 nt, Homo sapiens
  misc_RNA (1)...(19): siRNA sense strand
cuccuucgcuggacacaug

SEQ ID NO: 2216810 - RNA, 19 nt, Homo sapiens
  misc_RNA (1)...(19): siRNA sense strand
ugaagaagaagaggaggaa

SEQ ID NO: 2216811 - RNA, 19 nt, Homo sapiens
  misc_RNA (1)...(19): siRNA sense strand
agaugaagaggaugaagaa

SEQ ID NO: 2216812 - RNA, 19 nt, Homo sapiens
  misc_RNA (1)...(19): siRNA sense strand
ggaagaugaagaggaugaa

SEQ ID NO: 2216813 - RNA, 19 nt, Homo sapiens
  misc_RNA (1)...(19): siRNA sense strand
cggcgucgcacgugugaaa

SEQ ID NO: 2216814 - RNA, 19 nt, Homo sapiens
  misc_RNA (1)...(19): siRNA sense strand
acacaugggcgagggcuuu

SEQ ID NO: 2216815 - RNA, 19 nt, Homo sapiens
  misc_RNA (1)...(19): siRNA sense strand
agaagaggaggaagaugaa

SEQ ID NO: 2216816 - RNA, 19 nt, Homo sapiens
  misc_RNA (1)...(19): siRNA sense strand
gaagaagaggaggaagaug

SEQ ID NO: 2216817 - RNA, 19 nt, Homo sapiens
  misc_RNA (1)...(19): siRNA sense strand
gagcaacagacugaugaug

SEQ ID NO: 2216818 - RNA, 19 nt, Homo sapiens
  misc_RNA (1)...(19): siRNA sense strand
aagaagaagaggaggaaga

SEQ ID NO: 2216819 - RNA, 19 nt, Homo sapiens
  misc_RNA (1)...(19): siRNA sense strand
ugaugaugcuucugaugca

SEQ ID NO: 2216820 - RNA, 19 nt, Homo sapiens
  misc_RNA (1)...(19): siRNA sense strand
ggaugagcaggcccaaaug

SEQ ID NO: 2216821 - RNA, 19 nt, Homo sapiens
  misc_RNA (1)...(19): siRNA sense strand
ucucagcuuugacauaguc

SEQ ID NO: 2216822 - RNA, 19 nt, Homo sapiens
  misc_RNA (1)...(19): siRNA sense strand
ccucuuacacuuuacuugu

SEQ ID NO: 2216823 - RNA, 19 nt, Homo sapiens
  misc_RNA (1)...(19): siRNA sense strand
ccagagcaacagacugaug

SEQ ID NO: 2216824 - RNA, 19 nt, Homo sapiens
  misc_RNA (1)...(19): siRNA sense strand
ucugggaccuucggcaguu

SEQ ID NO: 2216825 - RNA, 19 nt, Homo sapiens
  misc_RNA (1)...(19): siRNA sense strand
ggaggccuaugugcucuac

SEQ ID NO: 2216826 - RNA, 19 nt, Homo sapiens
  misc_RNA (1)...(19): siRNA sense strand
aagaugaagaggaugaaga

SEQ ID NO: 2216827 - RNA, 19 nt, Homo sapiens
  misc_RNA (1)...(19): siRNA sense strand
ugucaggcuucaccaucuu

SEQ ID NO: 2216828 - RNA, 19 nt, Homo sapiens
  misc_RNA (1)...(19): siRNA sense strand
gaagaugaagaggaugaag

SEQ ID NO: 2216829 - RNA, 19 nt, Homo sapiens
  misc_RNA (1)...(19): siRNA sense strand
agcuuccucuuacacuuua

SEQ ID NO: 2216830 - RNA, 19 nt, Homo sapiens
  misc_RNA (1)...(19): siRNA sense strand
agaagaagaggaggaagau

SEQ ID NO: 2216831 - RNA, 19 nt, Homo sapiens
  misc_RNA (1)...(19): siRNA sense strand
cagccuuccuccgggauga

SEQ ID NO: 2216832 - RNA, 19 nt, Homo sapiens
  misc_RNA (1)...(19): siRNA sense strand
augaagaggaugaagaaga

SEQ ID NO: 2216833 - RNA, 19 nt, Homo sapiens
  misc_RNA (1)...(19): siRNA sense strand
gagaagaccuggcggauaa

SEQ ID NO: 2216834 - RNA, 19 nt, Homo sapiens
  misc_RNA (1)...(19): siRNA sense strand
gaagcaagcucgucauuga

SEQ ID NO: 2216835 - RNA, 19 nt, Homo sapiens
  misc_RNA (1)...(19): siRNA sense strand
gcggauaacuggcacauca

SEQ ID NO: 2216836 - RNA, 19 nt, Homo sapiens
  misc_RNA (1)...(19): siRNA sense strand
ugacagaacuucagagucu

SEQ ID NO: 2216837 - RNA, 19 nt, Homo sapiens
  misc_RNA (1)...(19): siRNA sense strand
gaugagcucuugcagaaca

SEQ ID NO: 2216838 - RNA, 19 nt, Homo sapiens
  misc_RNA (1)...(19): siRNA sense strand
gaacaacagaauucagauu

SEQ ID NO: 2216839 - RNA, 19 nt, Homo sapiens
  misc_RNA (1)...(19): siRNA sense strand
gcccgcaucuuucuuuaaa

SEQ ID NO: 2216840 - RNA, 19 nt, Homo sapiens
  misc_RNA (1)...(19): siRNA sense strand
caccugaaccuguguguua

SEQ ID NO: 2216841 - RNA, 19 nt, Homo sapiens
  misc_RNA (1)...(19): siRNA sense strand
gaacaacugacucuugaug

SEQ ID NO: 2216842 - RNA, 19 nt, Homo sapiens
  misc_RNA (1)...(19): siRNA sense strand
gaaccuguguguuaccaau

SEQ ID NO: 2216843 - RNA, 19 nt, Homo sapiens
  misc_RNA (1)...(19): siRNA sense strand
ggacagaggacgaagacuu

SEQ ID NO: 2216844 - RNA, 19 nt, Homo sapiens
  misc_RNA (1)...(19): siRNA sense strand
uacaugagcuggugaaaca

SEQ ID NO: 2216845 - RNA, 19 nt, Homo sapiens
  misc_RNA (1)...(19): siRNA sense strand
caacagaauucagauugug

SEQ ID NO: 2216846 - RNA, 19 nt, Homo sapiens
  misc_RNA (1)...(19): siRNA sense strand
ggacugugcucccuuuggu

SEQ ID NO: 2216847 - RNA, 19 nt, Homo sapiens
  misc_RNA (1)...(19): siRNA sense strand
guacggagucaaaguugua

SEQ ID NO: 2216848 - RNA, 19 nt, Homo sapiens
  misc_RNA (1)...(19): siRNA sense strand
gacacaaccuuccuucucu

SEQ ID NO: 2216849 - RNA, 19 nt, Homo sapiens
  misc_RNA (1)...(19): siRNA sense strand
augaugagcucuugcagaa

SEQ ID NO: 2216850 - RNA, 19 nt, Homo sapiens
  misc_RNA (1)...(19): siRNA sense strand
ggagccaggugccuauauc

SEQ ID NO: 2216851 - RNA, 19 nt, Homo sapiens
  misc_RNA (1)...(19): siRNA sense strand
ggacacaaccuuccuucuc

SEQ ID NO: 2216852 - RNA, 19 nt, Homo sapiens
  misc_RNA (1)...(19): siRNA sense strand
uugaacaacugacucuuga

SEQ ID NO: 2216853 - RNA, 19 nt, Homo sapiens
  misc_RNA (1)...(19): siRNA sense strand
gccaggugccuauaucuuu

SEQ ID NO: 2216854 - RNA, 19 nt, Homo sapiens
  misc_RNA (1)...(19): siRNA sense strand
ugaaggugguggacauguu

SEQ ID NO: 2216855 - RNA, 19 nt, Homo sapiens
  misc_RNA (1)...(19): siRNA sense strand
cagaacaacagaauucaga

SEQ ID NO: 2216856 - RNA, 19 nt, Homo sapiens
  misc_RNA (1)...(19): siRNA sense strand
cuaaaccaguuccggaaga

SEQ ID NO: 2216857 - RNA, 19 nt, Homo sapiens
  misc_RNA (1)...(19): siRNA sense strand
gaaaauggccuggucuuug

SEQ ID NO: 2216858 - RNA, 19 nt, Homo sapiens
  misc_RNA (1)...(19): siRNA sense strand
ggugaaacaugaagaaaau

SEQ ID NO: 2216859 - RNA, 19 nt, Homo sapiens
  misc_RNA (1)...(19): siRNA sense strand
ccaaugcuaugcgagaaga

SEQ ID NO: 2216860 - RNA, 19 nt, Homo sapiens
  misc_RNA (1)...(19): siRNA sense strand
uaaaccaguuccggaagaa

SEQ ID NO: 2216861 - RNA, 19 nt, Homo sapiens
  misc_RNA (1)...(19): siRNA sense strand
ggccuaugagggaguauua

SEQ ID NO: 2216862 - RNA, 19 nt, Homo sapiens
  misc_RNA (1)...(19): siRNA sense strand
cgacaagcccgcaucuuuc

SEQ ID NO: 2216863 - RNA, 19 nt, Homo sapiens
  misc_RNA (1)...(19): siRNA sense strand
ccaggugccuauaucuuuc

SEQ ID NO: 2216864 - RNA, 19 nt, Homo sapiens
  misc_RNA (1)...(19): siRNA sense strand
aaaauggccuggucuuuga

SEQ ID NO: 2216865 - RNA, 19 nt, Homo sapiens
  misc_RNA (1)...(19): siRNA sense strand
ccuaugagggaguauuaua

SEQ ID NO: 2216866 - RNA, 19 nt, Homo sapiens
  misc_RNA (1)...(19): siRNA sense strand
ggaagcaagcucgucauug

SEQ ID NO: 2216867 - RNA, 19 nt, Homo sapiens
  misc_RNA (1)...(19): siRNA sense strand
caagcccgcaucuuucuuu

SEQ ID NO: 2216868 - RNA, 19 nt, Homo sapiens
  misc_RNA (1)...(19): siRNA sense strand
gaaggugguggacauguuc

SEQ ID NO: 2216869 - RNA, 19 nt, Homo sapiens
  misc_RNA (1)...(19): siRNA sense strand
acaacugacucuugaugga

SEQ ID NO: 2216870 - RNA, 19 nt, Homo sapiens
  misc_RNA (1)...(19): siRNA sense strand
cgagaagaccuggcggaua

SEQ ID NO: 2216871 - RNA, 19 nt, Homo sapiens
  misc_RNA (1)...(19): siRNA sense strand
gccuggaccugcccaugaa

SEQ ID NO: 2216872 - RNA, 19 nt, Homo sapiens
  misc_RNA (1)...(19): siRNA sense strand
cgggcaagcuaaaccaguu

SEQ ID NO: 2216873 - RNA, 19 nt, Homo sapiens
  misc_RNA (1)...(19): siRNA sense strand
ccaugaaggugguggacau

SEQ ID NO: 2216874 - RNA, 19 nt, Homo sapiens
  misc_RNA (1)...(19): siRNA sense strand
gcauugcugucugcugguu

SEQ ID NO: 2216875 - RNA, 19 nt, Homo sapiens
  misc_RNA (1)...(19): siRNA sense strand
gcucagcugcagaugcuuu

SEQ ID NO: 2216876 - RNA, 19 nt, Homo sapiens
  misc_RNA (1)...(19): siRNA sense strand
cagcaccggcucuucauga

SEQ ID NO: 2216877 - RNA, 19 nt, Homo sapiens
  misc_RNA (1)...(19): siRNA sense strand
acgacaagcccgcaucuuu

SEQ ID NO: 2216878 - RNA, 19 nt, Homo sapiens
  misc_RNA (1)...(19): siRNA sense strand
ccaguacggagucaaaguu

SEQ ID NO: 2216879 - RNA, 19 nt, Homo sapiens
  misc_RNA (1)...(19): siRNA sense strand
ucucucgucugugugauaa

SEQ ID NO: 2216880 - RNA, 19 nt, Homo sapiens
  misc_RNA (1)...(19): siRNA sense strand
ccaagugguacgagaaguu

SEQ ID NO: 2216881 - RNA, 19 nt, Homo sapiens
  misc_RNA (1)...(19): siRNA sense strand
aagcccgcaucuuucuuua

SEQ ID NO: 2216882 - RNA, 19 nt, Homo sapiens
  misc_RNA (1)...(19): siRNA sense strand
cuauguacuugcuguggaa

SEQ ID NO: 2216883 - RNA, 19 nt, Homo sapiens
  misc_RNA (1)...(19): siRNA sense strand
ucagggcugugaccgucua

SEQ ID NO: 2216884 - RNA, 19 nt, Homo sapiens
  misc_RNA (1)...(19): siRNA sense strand
ccaggucugccuagcauug

SEQ ID NO: 2216885 - RNA, 19 nt, Homo sapiens
  misc_RNA (1)...(19): siRNA sense strand
caucaugggucuggugcau

SEQ ID NO: 2216886 - RNA, 19 nt, Homo sapiens
  misc_RNA (1)...(19): siRNA sense strand
aacaacagaauucagauug

SEQ ID NO: 2216887 - RNA, 19 nt, Homo sapiens
  misc_RNA (1)...(19): siRNA sense strand
gacaagcccgcaucuuucu

SEQ ID NO: 2216888 - RNA, 19 nt, Homo sapiens
  misc_RNA (1)...(19): siRNA sense strand
acugugcucccuuugguua

SEQ ID NO: 2216889 - RNA, 19 nt, Homo sapiens
  misc_RNA (1)...(19): siRNA sense strand
gcuggugaaacaugaagaa

SEQ ID NO: 2216890 - RNA, 19 nt, Homo sapiens
  misc_RNA (1)...(19): siRNA sense strand
gacagaacuucagagucuu

SEQ ID NO: 2216891 - RNA, 19 nt, Homo sapiens
  misc_RNA (1)...(19): siRNA sense strand
gauccugcgggcaagcuaa

SEQ ID NO: 2216892 - RNA, 19 nt, Homo sapiens
  misc_RNA (1)...(19): siRNA sense strand
cagcuccgaugggaugaga

SEQ ID NO: 2216893 - RNA, 19 nt, Homo sapiens
  misc_RNA (1)...(19): siRNA sense strand
uaccaaugcuaugcgagaa

SEQ ID NO: 2216894 - RNA, 19 nt, Homo sapiens
  misc_RNA (1)...(19): siRNA sense strand
gagcuggacagaggacgaa

SEQ ID NO: 2216895 - RNA, 19 nt, Homo sapiens
  misc_RNA (1)...(19): siRNA sense strand
gaaccugaggacccaguca

SEQ ID NO: 2216896 - RNA, 19 nt, Homo sapiens
  misc_RNA (1)...(19): siRNA sense strand
gagggagccaggugccuau

SEQ ID NO: 2216897 - RNA, 19 nt, Homo sapiens
  misc_RNA (1)...(19): siRNA sense strand
cuucaaguguuuacaugag

SEQ ID NO: 2216898 - RNA, 19 nt, Homo sapiens
  misc_RNA (1)...(19): siRNA sense strand
uugcagaacaacagaauuc

SEQ ID NO: 2216899 - RNA, 19 nt, Homo sapiens
  misc_RNA (1)...(19): siRNA sense strand
caagugguacgagaaguuc

SEQ ID NO: 2216900 - RNA, 19 nt, Homo sapiens
  misc_RNA (1)...(19): siRNA sense strand
guucgugggcugccuuugu

SEQ ID NO: 2216901 - RNA, 19 nt, Homo sapiens
  misc_RNA (1)...(19): siRNA sense strand
gcagaacaacagaauucag

SEQ ID NO: 2216902 - RNA, 19 nt, Homo sapiens
  misc_RNA (1)...(19): siRNA sense strand
gaaaccagaugucuuacuu

SEQ ID NO: 2216903 - RNA, 19 nt, Homo sapiens
  misc_RNA (1)...(19): siRNA sense strand
gcaacaagaugcccaugaa

SEQ ID NO: 2216904 - RNA, 19 nt, Homo sapiens
  misc_RNA (1)...(19): siRNA sense strand
caucagauaucucaaagaa

SEQ ID NO: 2216905 - RNA, 19 nt, Homo sapiens
  misc_RNA (1)...(19): siRNA sense strand
ccagaugucuuacuuguga

SEQ ID NO: 2216906 - RNA, 19 nt, Homo sapiens
  misc_RNA (1)...(19): siRNA sense strand
gaaagagauugguccagaa

SEQ ID NO: 2216907 - RNA, 19 nt, Homo sapiens
  misc_RNA (1)...(19): siRNA sense strand
gcagaucucuuccauagca

SEQ ID NO: 2216908 - RNA, 19 nt, Homo sapiens
  misc_RNA (1)...(19): siRNA sense strand
uagcagaucucuuccauag

SEQ ID NO: 2216909 - RNA, 19 nt, Homo sapiens
  misc_RNA (1)...(19): siRNA sense strand
gaaacucugugcagugaau

SEQ ID NO: 2216910 - RNA, 19 nt, Homo sapiens
  misc_RNA (1)...(19): siRNA sense strand
gaaguucaucacaagauua

SEQ ID NO: 2216911 - RNA, 19 nt, Homo sapiens
  misc_RNA (1)...(19): siRNA sense strand
acaaacggaugaaaguuaa

SEQ ID NO: 2216912 - RNA, 19 nt, Homo sapiens
  misc_RNA (1)...(19): siRNA sense strand
gaagagagaaagcaggaaa

SEQ ID NO: 2216913 - RNA, 19 nt, Homo sapiens
  misc_RNA (1)...(19): siRNA sense strand
cagcaaagaugaagauuuu

SEQ ID NO: 2216914 - RNA, 19 nt, Homo sapiens
  misc_RNA (1)...(19): siRNA sense strand
caaauucgccuccaucugu

SEQ ID NO: 2216915 - RNA, 19 nt, Homo sapiens
  misc_RNA (1)...(19): siRNA sense strand
uaaugacagucuccaaauu

SEQ ID NO: 2216916 - RNA, 19 nt, Homo sapiens
  misc_RNA (1)...(19): siRNA sense strand
ucagauaucucaaagaacu

SEQ ID NO: 2216917 - RNA, 19 nt, Homo sapiens
  misc_RNA (1)...(19): siRNA sense strand
aaugaaaccagaugucuua

SEQ ID NO: 2216918 - RNA, 19 nt, Homo sapiens
  misc_RNA (1)...(19): siRNA sense strand
cacaagcuauugaagaauu

SEQ ID NO: 2216919 - RNA, 19 nt, Homo sapiens
  misc_RNA (1)...(19): siRNA sense strand
uggaucaacuucaucgaua

SEQ ID NO: 2216920 - RNA, 19 nt, Homo sapiens
  misc_RNA (1)...(19): siRNA sense strand
gaagaauucuacggguuga

SEQ ID NO: 2216921 - RNA, 19 nt, Homo sapiens
  misc_RNA (1)...(19): siRNA sense strand
ccuaagaaguucaucacaa

SEQ ID NO: 2216922 - RNA, 19 nt, Homo sapiens
  misc_RNA (1)...(19): siRNA sense strand
gaucaacuucaucgauaua

SEQ ID NO: 2216923 - RNA, 19 nt, Homo sapiens
  misc_RNA (1)...(19): siRNA sense strand
cacaaacggaugaaaguua

SEQ ID NO: 2216924 - RNA, 19 nt, Homo sapiens
  misc_RNA (1)...(19): siRNA sense strand
gcagcaaagaugaagauuu

SEQ ID NO: 2216925 - RNA, 19 nt, Homo sapiens
  misc_RNA (1)...(19): siRNA sense strand
ggaucaacuucaucgauau

SEQ ID NO: 2216926 - RNA, 19 nt, Homo sapiens
  misc_RNA (1)...(19): siRNA sense strand
cuaagaaguucaucacaag

SEQ ID NO: 2216927 - RNA, 19 nt, Homo sapiens
  misc_RNA (1)...(19): siRNA sense strand
acaacuacaugcaacaaga

SEQ ID NO: 2216928 - RNA, 19 nt, Homo sapiens
  misc_RNA (1)...(19): siRNA sense strand
gcacacaaacggaugaaag

SEQ ID NO: 2216929 - RNA, 19 nt, Homo sapiens
  misc_RNA (1)...(19): siRNA sense strand
ugaagagugucgcagcaaa

SEQ ID NO: 2216930 - RNA, 19 nt, Homo sapiens
  misc_RNA (1)...(19): siRNA sense strand
gcauagccacucagaagaa

SEQ ID NO: 2216931 - RNA, 19 nt, Homo sapiens
  misc_RNA (1)...(19): siRNA sense strand
gaaacuauaagcagcaaag

SEQ ID NO: 2216932 - RNA, 19 nt, Homo sapiens
  misc_RNA (1)...(19): siRNA sense strand
agaaguucaucacaagauu

SEQ ID NO: 2216933 - RNA, 19 nt, Homo sapiens
  misc_RNA (1)...(19): siRNA sense strand
gacaucagauaucucaaag

SEQ ID NO: 2216934 - RNA, 19 nt, Homo sapiens
  misc_RNA (1)...(19): siRNA sense strand
agaugcccaugaauucuua

SEQ ID NO: 2216935 - RNA, 19 nt, Homo sapiens
  misc_RNA (1)...(19): siRNA sense strand
ugacaucagauaucucaaa

SEQ ID NO: 2216936 - RNA, 19 nt, Homo sapiens
  misc_RNA (1)...(19): siRNA sense strand
caacuucaucgauauacaa

SEQ ID NO: 2216937 - RNA, 19 nt, Homo sapiens
  misc_RNA (1)...(19): siRNA sense strand
caaacaggaagcacacaaa

SEQ ID NO: 2216938 - RNA, 19 nt, Homo sapiens
  misc_RNA (1)...(19): siRNA sense strand
guauuacugugaagagugu

SEQ ID NO: 2216939 - RNA, 19 nt, Homo sapiens
  misc_RNA (1)...(19): siRNA sense strand
caauucaguucuucaagca

SEQ ID NO: 2216940 - RNA, 19 nt, Homo sapiens
  misc_RNA (1)...(19): siRNA sense strand
ugcacaagcuauugaagaa

SEQ ID NO: 2216941 - RNA, 19 nt, Homo sapiens
  misc_RNA (1)...(19): siRNA sense strand
guacgaccuuguugcuguu

SEQ ID NO: 2216942 - RNA, 19 nt, Homo sapiens
  misc_RNA (1)...(19): siRNA sense strand
gcaaacaggaagcacacaa

SEQ ID NO: 2216943 - RNA, 19 nt, Homo sapiens
  misc_RNA (1)...(19): siRNA sense strand
cauagccacucagaagaaa

SEQ ID NO: 2216944 - RNA, 19 nt, Homo sapiens
  misc_RNA (1)...(19): siRNA sense strand
guuguuugaugacgacauu

SEQ ID NO: 2216945 - RNA, 19 nt, Homo sapiens
  misc_RNA (1)...(19): siRNA sense strand
uuuagaacuucgucuguuu

SEQ ID NO: 2216946 - RNA, 19 nt, Homo sapiens
  misc_RNA (1)...(19): siRNA sense strand
gaagcacacaaacggauga

SEQ ID NO: 2216947 - RNA, 19 nt, Homo sapiens
  misc_RNA (1)...(19): siRNA sense strand
gagccuucuuacaugcuua

SEQ ID NO: 2216948 - RNA, 19 nt, Homo sapiens
  misc_RNA (1)...(19): siRNA sense strand
cagaacaguuuccggucaa

SEQ ID NO: 2216949 - RNA, 19 nt, Homo sapiens
  misc_RNA (1)...(19): siRNA sense strand
aaauucgccuccaucugua

SEQ ID NO: 2216950 - RNA, 19 nt, Homo sapiens
  misc_RNA (1)...(19): siRNA sense strand
acaagaugcccaugaauuc

SEQ ID NO: 2216951 - RNA, 19 nt, Homo sapiens
  misc_RNA (1)...(19): siRNA sense strand
gcccaugauucuagcucua

SEQ ID NO: 2216952 - RNA, 19 nt, Homo sapiens
  misc_RNA (1)...(19): siRNA sense strand
uagcauagccacucagaag

SEQ ID NO: 2216953 - RNA, 19 nt, Homo sapiens
  misc_RNA (1)...(19): siRNA sense strand
aucaauuacucacugcuua

SEQ ID NO: 2216954 - RNA, 19 nt, Homo sapiens
  misc_RNA (1)...(19): siRNA sense strand
uaacuaaugaaaccagaug

SEQ ID NO: 2216955 - RNA, 19 nt, Homo sapiens
  misc_RNA (1)...(19): siRNA sense strand
ucacaagauuacggaaaga

SEQ ID NO: 2216956 - RNA, 19 nt, Homo sapiens
  misc_RNA (1)...(19): siRNA sense strand
cagaauguacgaccuuguu

SEQ ID NO: 2216957 - RNA, 19 nt, Homo sapiens
  misc_RNA (1)...(19): siRNA sense strand
ggcauuagagaaagagauu

SEQ ID NO: 2216958 - RNA, 19 nt, Homo sapiens
  misc_RNA (1)...(19): siRNA sense strand
ucaauuacucacugcuuaa

SEQ ID NO: 2216959 - RNA, 19 nt, Homo sapiens
  misc_RNA (1)...(19): siRNA sense strand
ugucuuacuugugaaacua

SEQ ID NO: 2216960 - RNA, 19 nt, Homo sapiens
  misc_RNA (1)...(19): siRNA sense strand
aaccagaugucuuacuugu

SEQ ID NO: 2216961 - RNA, 19 nt, Homo sapiens
  misc_RNA (1)...(19): siRNA sense strand
aauggucguuuaccuaaug

SEQ ID NO: 2216962 - RNA, 19 nt, Homo sapiens
  misc_RNA (1)...(19): siRNA sense strand
aggagagccuucuuacaug

SEQ ID NO: 2216963 - RNA, 19 nt, Homo sapiens
  misc_RNA (1)...(19): siRNA sense strand
uuagaacuucgucuguuua

SEQ ID NO: 2216964 - RNA, 19 nt, Homo sapiens
  misc_RNA (1)...(19): siRNA sense strand
uauaagagucaaccuagga

SEQ ID NO: 2216965 - RNA, 19 nt, Homo sapiens
  misc_RNA (1)...(19): siRNA sense strand
gaaauccuaaugacagucu

SEQ ID NO: 2216966 - RNA, 19 nt, Homo sapiens
  misc_RNA (1)...(19): siRNA sense strand
caacaagaugcccaugaau

SEQ ID NO: 2216967 - RNA, 19 nt, Homo sapiens
  misc_RNA (1)...(19): siRNA sense strand
aacaagaugcccaugaauu

SEQ ID NO: 2216968 - RNA, 19 nt, Homo sapiens
  misc_RNA (1)...(19): siRNA sense strand
ccaccaauccagacagaau

SEQ ID NO: 2216969 - RNA, 19 nt, Homo sapiens
  misc_RNA (1)...(19): siRNA sense strand
cuacaccugaagagauuua

SEQ ID NO: 2216970 - RNA, 19 nt, Homo sapiens
  misc_RNA (1)...(19): siRNA sense strand
ugagcacuauuuuggauua

SEQ ID NO: 2216971 - RNA, 19 nt, Homo sapiens
  misc_RNA (1)...(19): siRNA sense strand
aaacugcccaugauucuag

SEQ ID NO: 2216972 - RNA, 19 nt, Homo sapiens
  misc_RNA (1)...(19): siRNA sense strand
caucacaagauuacggaaa

SEQ ID NO: 2216973 - RNA, 19 nt, Homo sapiens
  misc_RNA (1)...(19): siRNA sense strand
gagucugguuacauccuuu

SEQ ID NO: 2216974 - RNA, 19 nt, Homo sapiens
  misc_RNA (1)...(19): siRNA sense strand
gaugacgacauuguagaaa

SEQ ID NO: 2216975 - RNA, 19 nt, Homo sapiens
  misc_RNA (1)...(19): siRNA sense strand
acuauaagcagcaaagaug

SEQ ID NO: 2216976 - RNA, 19 nt, Homo sapiens
  misc_RNA (1)...(19): siRNA sense strand
caaaauggucguuuaccua

SEQ ID NO: 2216977 - RNA, 19 nt, Homo sapiens
  misc_RNA (1)...(19): siRNA sense strand
gaacaguuuccggucaaug

SEQ ID NO: 2216978 - RNA, 19 nt, Homo sapiens
  misc_RNA (1)...(19): siRNA sense strand
ccuaaugacagucuccaaa

SEQ ID NO: 2216979 - RNA, 19 nt, Homo sapiens
  misc_RNA (1)...(19): siRNA sense strand
gaauaccugcuacugcaau

SEQ ID NO: 2216980 - RNA, 19 nt, Homo sapiens
  misc_RNA (1)...(19): siRNA sense strand
gcguauaagagucaaccua

SEQ ID NO: 2216981 - RNA, 19 nt, Homo sapiens
  misc_RNA (1)...(19): siRNA sense strand
uagaacuucgucuguuuaa

SEQ ID NO: 2216982 - RNA, 19 nt, Homo sapiens
  misc_RNA (1)...(19): siRNA sense strand
gauugguccagaacaguuu

SEQ ID NO: 2216983 - RNA, 19 nt, Homo sapiens
  misc_RNA (1)...(19): siRNA sense strand
guugacaucagauaucuca

SEQ ID NO: 2216984 - RNA, 19 nt, Homo sapiens
  misc_RNA (1)...(19): siRNA sense strand
gcacaagcuauugaagaau

SEQ ID NO: 2216985 - RNA, 19 nt, Homo sapiens
  misc_RNA (1)...(19): siRNA sense strand
cuaaugacagucuccaaau

SEQ ID NO: 2216986 - RNA, 19 nt, Homo sapiens
  misc_RNA (1)...(19): siRNA sense strand
caacuacaugcaacaagau

SEQ ID NO: 2216987 - RNA, 19 nt, Homo sapiens
  misc_RNA (1)...(19): siRNA sense strand
uaagaaguucaucacaaga

SEQ ID NO: 2216988 - RNA, 19 nt, Homo sapiens
  misc_RNA (1)...(19): siRNA sense strand
guucuucaagcacuuuauu

SEQ ID NO: 2216989 - RNA, 19 nt, Homo sapiens
  misc_RNA (1)...(19): siRNA sense strand
caccugaagagauuuaaau

SEQ ID NO: 2216990 - RNA, 19 nt, Homo sapiens
  misc_RNA (1)...(19): siRNA sense strand
ggaauaccugcuacugcaa

SEQ ID NO: 2216991 - RNA, 19 nt, Homo sapiens
  misc_RNA (1)...(19): siRNA sense strand
acaagauuacggaaagaaa

SEQ ID NO: 2216992 - RNA, 19 nt, Homo sapiens
  misc_RNA (1)...(19): siRNA sense strand
ggguugacaucagauaucu

SEQ ID NO: 2216993 - RNA, 19 nt, Homo sapiens
  misc_RNA (1)...(19): siRNA sense strand
ccuuguugcuguugugguu

SEQ ID NO: 2216994 - RNA, 19 nt, Homo sapiens
  misc_RNA (1)...(19): siRNA sense strand
gaagagugucgcagcaaac

SEQ ID NO: 2216995 - RNA, 19 nt, Homo sapiens
  misc_RNA (1)...(19): siRNA sense strand
uuucagggaacauuaacua

SEQ ID NO: 2216996 - RNA, 19 nt, Homo sapiens
  misc_RNA (1)...(19): siRNA sense strand
uauaagcagcaaagaugaa

SEQ ID NO: 2216997 - RNA, 19 nt, Homo sapiens
  misc_RNA (1)...(19): siRNA sense strand
acaagcuauugaagaauuc

SEQ ID NO: 2216998 - RNA, 19 nt, Homo sapiens
  misc_RNA (1)...(19): siRNA sense strand
ucaacuucaucgauauaca

SEQ ID NO: 2216999 - RNA, 19 nt, Homo sapiens
  misc_RNA (1)...(19): siRNA sense strand
uaaugaaaccagaugucuu

SEQ ID NO: 2217000 - RNA, 19 nt, Homo sapiens
  misc_RNA (1)...(19): siRNA sense strand
aaugacagucuccaaauuc

SEQ ID NO: 2217001 - RNA, 19 nt, Homo sapiens
  misc_RNA (1)...(19): siRNA sense strand
gugaaacuauaagcagcaa

SEQ ID NO: 2217002 - RNA, 19 nt, Homo sapiens
  misc_RNA (1)...(19): siRNA sense strand
ccaagaaggucauccagua

SEQ ID NO: 2217003 - RNA, 19 nt, Homo sapiens
  misc_RNA (1)...(19): siRNA sense strand
ugacagaacuggaggauga

SEQ ID NO: 2217004 - RNA, 19 nt, Homo sapiens
  misc_RNA (1)...(19): siRNA sense strand
gaacgaggcugaguccaaa

SEQ ID NO: 2217005 - RNA, 19 nt, Homo sapiens
  misc_RNA (1)...(19): siRNA sense strand
caacacagcugcacagaag

SEQ ID NO: 2217006 - RNA, 19 nt, Homo sapiens
  misc_RNA (1)...(19): siRNA sense strand
gggaugagauggcagauga

SEQ ID NO: 2217007 - RNA, 19 nt, Homo sapiens
  misc_RNA (1)...(19): siRNA sense strand
ccaagacagugaagaauga

SEQ ID NO: 2217008 - RNA, 19 nt, Homo sapiens
  misc_RNA (1)...(19): siRNA sense strand
gaagaagcagcgcaaguuu

SEQ ID NO: 2217009 - RNA, 19 nt, Homo sapiens
  misc_RNA (1)...(19): siRNA sense strand
ugacggagcugaagaagac

SEQ ID NO: 2217010 - RNA, 19 nt, Homo sapiens
  misc_RNA (1)...(19): siRNA sense strand
ggagaaggcagcuguacuu

SEQ ID NO: 2217011 - RNA, 19 nt, Homo sapiens
  misc_RNA (1)...(19): siRNA sense strand
gagcacaggugacagaacu

SEQ ID NO: 2217012 - RNA, 19 nt, Homo sapiens
  misc_RNA (1)...(19): siRNA sense strand
cagaugagguggccaaugg

SEQ ID NO: 2217013 - RNA, 19 nt, Homo sapiens
  misc_RNA (1)...(19): siRNA sense strand
gcgccaacauugagaccua

SEQ ID NO: 2217014 - RNA, 19 nt, Homo sapiens
  misc_RNA (1)...(19): siRNA sense strand
gaaggucaccgacaucauc

SEQ ID NO: 2217015 - RNA, 19 nt, Homo sapiens
  misc_RNA (1)...(19): siRNA sense strand
gaccagauccagcgcauga

SEQ ID NO: 2217016 - RNA, 19 nt, Homo sapiens
  misc_RNA (1)...(19): siRNA sense strand
gagcggaggcugcugagaa

SEQ ID NO: 2217017 - RNA, 19 nt, Homo sapiens
  misc_RNA (1)...(19): siRNA sense strand
agaccuaccugcuggagaa

SEQ ID NO: 2217018 - RNA, 19 nt, Homo sapiens
  misc_RNA (1)...(19): siRNA sense strand
ggacagagcaagaucuucu

SEQ ID NO: 2217019 - RNA, 19 nt, Homo sapiens
  misc_RNA (1)...(19): siRNA sense strand
caacauugccuugaagaga

SEQ ID NO: 2217020 - RNA, 19 nt, Homo sapiens
  misc_RNA (1)...(19): siRNA sense strand
gaacaggcagccaaugauc

SEQ ID NO: 2217021 - RNA, 19 nt, Homo sapiens
  misc_RNA (1)...(19): siRNA sense strand
gcaaauucauccgcaucaa

SEQ ID NO: 2217022 - RNA, 19 nt, Homo sapiens
  misc_RNA (1)...(19): siRNA sense strand
aggcugaacuggagaaugu

SEQ ID NO: 2217023 - RNA, 19 nt, Homo sapiens
  misc_RNA (1)...(19): siRNA sense strand
ugggacagcucuacaagga

SEQ ID NO: 2217024 - RNA, 19 nt, Homo sapiens
  misc_RNA (1)...(19): siRNA sense strand
gagugcagcuuccacaucu

SEQ ID NO: 2217025 - RNA, 19 nt, Homo sapiens
  misc_RNA (1)...(19): siRNA sense strand
gagcgcauccucucuggaa

SEQ ID NO: 2217026 - RNA, 19 nt, Homo sapiens
  misc_RNA (1)...(19): siRNA sense strand
aggaggaccuggagucuga

SEQ ID NO: 2217027 - RNA, 19 nt, Homo sapiens
  misc_RNA (1)...(19): siRNA sense strand
uggagaaggugacgacaga

SEQ ID NO: 2217028 - RNA, 19 nt, Homo sapiens
  misc_RNA (1)...(19): siRNA sense strand
cccaggagcugcagaaagu

SEQ ID NO: 2217029 - RNA, 19 nt, Homo sapiens
  misc_RNA (1)...(19): siRNA sense strand
aaacauggacccucugaau

SEQ ID NO: 2217030 - RNA, 19 nt, Homo sapiens
  misc_RNA (1)...(19): siRNA sense strand
gcagaaagcccagacuaag

SEQ ID NO: 2217031 - RNA, 19 nt, Homo sapiens
  misc_RNA (1)...(19): siRNA sense strand
gcaaggaggaggcggugaa

SEQ ID NO: 2217032 - RNA, 19 nt, Homo sapiens
  misc_RNA (1)...(19): siRNA sense strand
ugacaacuccucccgauuc

SEQ ID NO: 2217033 - RNA, 19 nt, Homo sapiens
  misc_RNA (1)...(19): siRNA sense strand
ugagcacccuggagaagaa

SEQ ID NO: 2217034 - RNA, 19 nt, Homo sapiens
  misc_RNA (1)...(19): siRNA sense strand
gaacggaacaccgaucaag

SEQ ID NO: 2217035 - RNA, 19 nt, Homo sapiens
  misc_RNA (1)...(19): siRNA sense strand
uugcugcccuugagucuaa

SEQ ID NO: 2217036 - RNA, 19 nt, Homo sapiens
  misc_RNA (1)...(19): siRNA sense strand
cagaacaggcagccaauga

SEQ ID NO: 2217037 - RNA, 19 nt, Homo sapiens
  misc_RNA (1)...(19): siRNA sense strand
ucaauaagcuacggcucaa

SEQ ID NO: 2217038 - RNA, 19 nt, Homo sapiens
  misc_RNA (1)...(19): siRNA sense strand
caaaguuggccgagacuau

SEQ ID NO: 2217039 - RNA, 19 nt, Homo sapiens
  misc_RNA (1)...(19): siRNA sense strand
cagaagccauuguggagau

SEQ ID NO: 2217040 - RNA, 19 nt, Homo sapiens
  misc_RNA (1)...(19): siRNA sense strand
gaccauugcugcccuugag

SEQ ID NO: 2217041 - RNA, 19 nt, Homo sapiens
  misc_RNA (1)...(19): siRNA sense strand
ggaccaaggcggagaagca

SEQ ID NO: 2217042 - RNA, 19 nt, Homo sapiens
  misc_RNA (1)...(19): siRNA sense strand
ucaagagccucaauaagcu

SEQ ID NO: 2217043 - RNA, 19 nt, Homo sapiens
  misc_RNA (1)...(19): siRNA sense strand
ggagugcagccgucaaaug

SEQ ID NO: 2217044 - RNA, 19 nt, Homo sapiens
  misc_RNA (1)...(19): siRNA sense strand
ggaccuuccucgacuuugg

SEQ ID NO: 2217045 - RNA, 19 nt, Homo sapiens
  misc_RNA (1)...(19): siRNA sense strand
gagacuaugugcagaaagc

SEQ ID NO: 2217046 - RNA, 19 nt, Homo sapiens
  misc_RNA (1)...(19): siRNA sense strand
caccaugccugacaacaca

SEQ ID NO: 2217047 - RNA, 19 nt, Homo sapiens
  misc_RNA (1)...(19): siRNA sense strand
gguggcggcuguuuaccaa

SEQ ID NO: 2217048 - RNA, 19 nt, Homo sapiens
  misc_RNA (1)...(19): siRNA sense strand
agaagcagcgcaaguuuga

SEQ ID NO: 2217049 - RNA, 19 nt, Homo sapiens
  misc_RNA (1)...(19): siRNA sense strand
gaggagugcagccgucaaa

SEQ ID NO: 2217050 - RNA, 19 nt, Homo sapiens
  misc_RNA (1)...(19): siRNA sense strand
gaugagguggccaauggua

SEQ ID NO: 2217051 - RNA, 19 nt, Homo sapiens
  misc_RNA (1)...(19): siRNA sense strand
gagcgugcaugagcuggaa

SEQ ID NO: 2217052 - RNA, 19 nt, Homo sapiens
  misc_RNA (1)...(19): siRNA sense strand
gcgcaaguuugaccagcuu

SEQ ID NO: 2217053 - RNA, 19 nt, Homo sapiens
  misc_RNA (1)...(19): siRNA sense strand
acauggacccucugaauga

SEQ ID NO: 2217054 - RNA, 19 nt, Homo sapiens
  misc_RNA (1)...(19): siRNA sense strand
ucaaauaugaggccacaau

SEQ ID NO: 2217055 - RNA, 19 nt, Homo sapiens
  misc_RNA (1)...(19): siRNA sense strand
gcagaaagugcaggagcua

SEQ ID NO: 2217056 - RNA, 19 nt, Homo sapiens
  misc_RNA (1)...(19): siRNA sense strand
cagcaguucuccaguuugg

SEQ ID NO: 2217057 - RNA, 19 nt, Homo sapiens
  misc_RNA (1)...(19): siRNA sense strand
gaagcucugccgccucuug

SEQ ID NO: 2217058 - RNA, 19 nt, Homo sapiens
  misc_RNA (1)...(19): siRNA sense strand
cuagaggccuuuggcaaug

SEQ ID NO: 2217059 - RNA, 19 nt, Homo sapiens
  misc_RNA (1)...(19): siRNA sense strand
gggaaaccuucgagucaag

SEQ ID NO: 2217060 - RNA, 19 nt, Homo sapiens
  misc_RNA (1)...(19): siRNA sense strand
guacuacuccggccucauc

SEQ ID NO: 2217061 - RNA, 19 nt, Homo sapiens
  misc_RNA (1)...(19): siRNA sense strand
ucucagcaguucuccaguu

SEQ ID NO: 2217062 - RNA, 19 nt, Homo sapiens
  misc_RNA (1)...(19): siRNA sense strand
ugaugaggcuggugaagag

SEQ ID NO: 2217063 - RNA, 19 nt, Homo sapiens
  misc_RNA (1)...(19): siRNA sense strand
gcaaugccaagacagugaa

SEQ ID NO: 2217064 - RNA, 19 nt, Homo sapiens
  misc_RNA (1)...(19): siRNA sense strand
agaagaagcagcgcaaguu

SEQ ID NO: 2217065 - RNA, 19 nt, Homo sapiens
  misc_RNA (1)...(19): siRNA sense strand
gagaagaagcagcgcaagu

SEQ ID NO: 2217066 - RNA, 19 nt, Homo sapiens
  misc_RNA (1)...(19): siRNA sense strand
uaagcuacggcucaaauau

SEQ ID NO: 2217067 - RNA, 19 nt, Homo sapiens
  misc_RNA (1)...(19): siRNA sense strand
gagaacggaacaccgauca

SEQ ID NO: 2217068 - RNA, 19 nt, Homo sapiens
  misc_RNA (1)...(19): siRNA sense strand
cagaaucgggaaagugaaa

SEQ ID NO: 2217069 - RNA, 19 nt, Homo sapiens
  misc_RNA (1)...(19): siRNA sense strand
caacuacaccaacgagaag

SEQ ID NO: 2217070 - RNA, 19 nt, Homo sapiens
  misc_RNA (1)...(19): siRNA sense strand
agaaagcccagacuaagga

SEQ ID NO: 2217071 - RNA, 19 nt, Homo sapiens
  misc_RNA (1)...(19): siRNA sense strand
cgccaggucuuccgacuag

SEQ ID NO: 2217072 - RNA, 19 nt, Homo sapiens
  misc_RNA (1)...(19): siRNA sense strand
gcaagaugcaggcccagau

SEQ ID NO: 2217073 - RNA, 19 nt, Homo sapiens
  misc_RNA (1)...(19): siRNA sense strand
gcacauacaggagcuagag

SEQ ID NO: 2217074 - RNA, 19 nt, Homo sapiens
  misc_RNA (1)...(19): siRNA sense strand
gggaagcaggccugugaaa

SEQ ID NO: 2217075 - RNA, 19 nt, Homo sapiens
  misc_RNA (1)...(19): siRNA sense strand
gccaagacagugaagaaug

SEQ ID NO: 2217076 - RNA, 19 nt, Homo sapiens
  misc_RNA (1)...(19): siRNA sense strand
gcccagccguuccuguuca

SEQ ID NO: 2217077 - RNA, 19 nt, Homo sapiens
  misc_RNA (1)...(19): siRNA sense strand
gcaaaggugcaugggagaa

SEQ ID NO: 2217078 - RNA, 19 nt, Homo sapiens
  misc_RNA (1)...(19): siRNA sense strand
gucaagagccucaauaagc

SEQ ID NO: 2217079 - RNA, 19 nt, Homo sapiens
  misc_RNA (1)...(19): siRNA sense strand
ucaacuacaccaacgagaa

SEQ ID NO: 2217080 - RNA, 19 nt, Homo sapiens
  misc_RNA (1)...(19): siRNA sense strand
gugcagaaagcccagacua

SEQ ID NO: 2217081 - RNA, 19 nt, Homo sapiens
  misc_RNA (1)...(19): siRNA sense strand
gcucaccccucgcaucaaa

SEQ ID NO: 2217082 - RNA, 19 nt, Homo sapiens
  misc_RNA (1)...(19): siRNA sense strand
aggagcagcuagagcaaga

SEQ ID NO: 2217083 - RNA, 19 nt, Homo sapiens
  misc_RNA (1)...(19): siRNA sense strand
cagcagcggcagcuuguga

SEQ ID NO: 2217084 - RNA, 19 nt, Homo sapiens
  misc_RNA (1)...(19): siRNA sense strand
caagagccucaauaagcua

SEQ ID NO: 2217085 - RNA, 19 nt, Homo sapiens
  misc_RNA (1)...(19): siRNA sense strand
cgggcaaggucgacuacaa

SEQ ID NO: 2217086 - RNA, 19 nt, Homo sapiens
  misc_RNA (1)...(19): siRNA sense strand
gaaagcccagacuaaggaa

SEQ ID NO: 2217087 - RNA, 19 nt, Homo sapiens
  misc_RNA (1)...(19): siRNA sense strand
uaaggaacaggcugacuuc

SEQ ID NO: 2217088 - RNA, 19 nt, Homo sapiens
  misc_RNA (1)...(19): siRNA sense strand
gccacaagaugaccauugc

SEQ ID NO: 2217089 - RNA, 19 nt, Homo sapiens
  misc_RNA (1)...(19): siRNA sense strand
caucuacacagaagccauu

SEQ ID NO: 2217090 - RNA, 19 nt, Homo sapiens
  misc_RNA (1)...(19): siRNA sense strand
cagcaaggccgaggacaug

SEQ ID NO: 2217091 - RNA, 19 nt, Homo sapiens
  misc_RNA (1)...(19): siRNA sense strand
agcuacggcucaaauauga

SEQ ID NO: 2217092 - RNA, 19 nt, Homo sapiens
  misc_RNA (1)...(19): siRNA sense strand
cagcugaggaggaggagaa

SEQ ID NO: 2217093 - RNA, 19 nt, Homo sapiens
  misc_RNA (1)...(19): siRNA sense strand
agcggaagcugcuggaaga

SEQ ID NO: 2217094 - RNA, 19 nt, Homo sapiens
  misc_RNA (1)...(19): siRNA sense strand
ccgagacuaugugcagaaa

SEQ ID NO: 2217095 - RNA, 19 nt, Homo sapiens
  misc_RNA (1)...(19): siRNA sense strand
agcgugagcuggaagaugu

SEQ ID NO: 2217096 - RNA, 19 nt, Homo sapiens
  misc_RNA (1)...(19): siRNA sense strand
caagaugcaggcccagaug

SEQ ID NO: 2217097 - RNA, 19 nt, Homo sapiens
  misc_RNA (1)...(19): siRNA sense strand
ggucaagagccucaauaag

SEQ ID NO: 2217098 - RNA, 19 nt, Homo sapiens
  misc_RNA (1)...(19): siRNA sense strand
aagaucgucuggccgaguu

SEQ ID NO: 2217099 - RNA, 19 nt, Homo sapiens
  misc_RNA (1)...(19): siRNA sense strand
cuaaggaacaggcugacuu

SEQ ID NO: 2217100 - RNA, 19 nt, Homo sapiens
  misc_RNA (1)...(19): siRNA sense strand
gagcagcuagagcaagaga

SEQ ID NO: 2217101 - RNA, 19 nt, Homo sapiens
  misc_RNA (1)...(19): siRNA sense strand
cgacgaggaggcagaggaa

SEQ ID NO: 2217102 - RNA, 19 nt, Homo sapiens
  misc_RNA (1)...(19): siRNA sense strand
ggaagaagauccuauuuua

SEQ ID NO: 2217103 - RNA, 19 nt, Homo sapiens
  misc_RNA (1)...(19): siRNA sense strand
gaacagcucuaccgauaug

SEQ ID NO: 2217104 - RNA, 19 nt, Homo sapiens
  misc_RNA (1)...(19): siRNA sense strand
cagaacagcucuaccgaua

SEQ ID NO: 2217105 - RNA, 19 nt, Homo sapiens
  misc_RNA (1)...(19): siRNA sense strand
ggagaggguucaucugauc

SEQ ID NO: 2217106 - RNA, 19 nt, Homo sapiens
  misc_RNA (1)...(19): siRNA sense strand
ggaacauuaucaggaauug

SEQ ID NO: 2217107 - RNA, 19 nt, Homo sapiens
  misc_RNA (1)...(19): siRNA sense strand
cuaccgauauguuaccaaa

SEQ ID NO: 2217108 - RNA, 19 nt, Homo sapiens
  misc_RNA (1)...(19): siRNA sense strand
gaagauugacaucccaaga

SEQ ID NO: 2217109 - RNA, 19 nt, Homo sapiens
  misc_RNA (1)...(19): siRNA sense strand
agauugacaucccaagauu

SEQ ID NO: 2217110 - RNA, 19 nt, Homo sapiens
  misc_RNA (1)...(19): siRNA sense strand
gaccuuggccaguauguga

SEQ ID NO: 2217111 - RNA, 19 nt, Homo sapiens
  misc_RNA (1)...(19): siRNA sense strand
gaucguggcaggugguuau

SEQ ID NO: 2217112 - RNA, 19 nt, Homo sapiens
  misc_RNA (1)...(19): siRNA sense strand
gcccagucauugcuguuaa

SEQ ID NO: 2217113 - RNA, 19 nt, Homo sapiens
  misc_RNA (1)...(19): siRNA sense strand
agagaguccuggagaaugu

SEQ ID NO: 2217114 - RNA, 19 nt, Homo sapiens
  misc_RNA (1)...(19): siRNA sense strand
gccaguaugugaccuucuu

SEQ ID NO: 2217115 - RNA, 19 nt, Homo sapiens
  misc_RNA (1)...(19): siRNA sense strand
ucaagucccugucucacau

SEQ ID NO: 2217116 - RNA, 19 nt, Homo sapiens
  misc_RNA (1)...(19): siRNA sense strand
cagcucuaccgauauguua

SEQ ID NO: 2217117 - RNA, 19 nt, Homo sapiens
  misc_RNA (1)...(19): siRNA sense strand
gggagaggguucaucugau

SEQ ID NO: 2217118 - RNA, 19 nt, Homo sapiens
  misc_RNA (1)...(19): siRNA sense strand
uguggaacauuaucaggaa

SEQ ID NO: 2217119 - RNA, 19 nt, Homo sapiens
  misc_RNA (1)...(19): siRNA sense strand
gaagagccagagugaagga

SEQ ID NO: 2217120 - RNA, 19 nt, Homo sapiens
  misc_RNA (1)...(19): siRNA sense strand
cuaaaugucaccagcuuug

SEQ ID NO: 2217121 - RNA, 19 nt, Homo sapiens
  misc_RNA (1)...(19): siRNA sense strand
gaacauuaucaggaauuga

SEQ ID NO: 2217122 - RNA, 19 nt, Homo sapiens
  misc_RNA (1)...(19): siRNA sense strand
gcuagacggcggaagaaga

SEQ ID NO: 2217123 - RNA, 19 nt, Homo sapiens
  misc_RNA (1)...(19): siRNA sense strand
cagaucugcuucucaccaa

SEQ ID NO: 2217124 - RNA, 19 nt, Homo sapiens
  misc_RNA (1)...(19): siRNA sense strand
gcggaagaagauccuauuu

SEQ ID NO: 2217125 - RNA, 19 nt, Homo sapiens
  misc_RNA (1)...(19): siRNA sense strand
gagagaguccuggagaaug

SEQ ID NO: 2217126 - RNA, 19 nt, Homo sapiens
  misc_RNA (1)...(19): siRNA sense strand
caccagcuuugacucaguu

SEQ ID NO: 2217127 - RNA, 19 nt, Homo sapiens
  misc_RNA (1)...(19): siRNA sense strand
aaagcuggaugaccuaguc

SEQ ID NO: 2217128 - RNA, 19 nt, Homo sapiens
  misc_RNA (1)...(19): siRNA sense strand
gaucugcuucucaccaaga

SEQ ID NO: 2217129 - RNA, 19 nt, Homo sapiens
  misc_RNA (1)...(19): siRNA sense strand
ggaguucgacgugguagug

SEQ ID NO: 2217130 - RNA, 19 nt, Homo sapiens
  misc_RNA (1)...(19): siRNA sense strand
uugacuggauagaggaaua

SEQ ID NO: 2217131 - RNA, 19 nt, Homo sapiens
  misc_RNA (1)...(19): siRNA sense strand
ggaguccauugaccacagu

SEQ ID NO: 2217132 - RNA, 19 nt, Homo sapiens
  misc_RNA (1)...(19): siRNA sense strand
acagcugcguggaagauug

SEQ ID NO: 2217133 - RNA, 19 nt, Homo sapiens
  misc_RNA (1)...(19): siRNA sense strand
cagaagcaauagaaaaguu

SEQ ID NO: 2217134 - RNA, 19 nt, Homo sapiens
  misc_RNA (1)...(19): siRNA sense strand
gcacuggaagcccuaguac

SEQ ID NO: 2217135 - RNA, 19 nt, Homo sapiens
  misc_RNA (1)...(19): siRNA sense strand
gagccagagugaaggaaaa

SEQ ID NO: 2217136 - RNA, 19 nt, Homo sapiens
  misc_RNA (1)...(19): siRNA sense strand
agucauugcuguuaauucg

SEQ ID NO: 2217137 - RNA, 19 nt, Homo sapiens
  misc_RNA (1)...(19): siRNA sense strand
gguguagcgugaagaucug

SEQ ID NO: 2217138 - RNA, 19 nt, Homo sapiens
  misc_RNA (1)...(19): siRNA sense strand
ugggagaggguucaucuga

SEQ ID NO: 2217139 - RNA, 19 nt, Homo sapiens
  misc_RNA (1)...(19): siRNA sense strand
guacagcugcguggaagau

SEQ ID NO: 2217140 - RNA, 19 nt, Homo sapiens
  misc_RNA (1)...(19): siRNA sense strand
caagucccugucucacaua

SEQ ID NO: 2217141 - RNA, 19 nt, Homo sapiens
  misc_RNA (1)...(19): siRNA sense strand
uggaagagccagagugaag

SEQ ID NO: 2217142 - RNA, 19 nt, Homo sapiens
  misc_RNA (1)...(19): siRNA sense strand
ccgugaaccuuccuuaaaa

SEQ ID NO: 2217143 - RNA, 19 nt, Homo sapiens
  misc_RNA (1)...(19): siRNA sense strand
ccacagugucacaggguuu

SEQ ID NO: 2217144 - RNA, 19 nt, Homo sapiens
  misc_RNA (1)...(19): siRNA sense strand
aguccgaccuuggccagua

SEQ ID NO: 2217145 - RNA, 19 nt, Homo sapiens
  misc_RNA (1)...(19): siRNA sense strand
ugaagaaaaugguccaaca

SEQ ID NO: 2217146 - RNA, 19 nt, Homo sapiens
  misc_RNA (1)...(19): siRNA sense strand
cugcugcucuccaucaaca

SEQ ID NO: 2217147 - RNA, 19 nt, Homo sapiens
  misc_RNA (1)...(19): siRNA sense strand
cagcuuugacucaguuguu

SEQ ID NO: 2217148 - RNA, 19 nt, Homo sapiens
  misc_RNA (1)...(19): siRNA sense strand
cgagagaguccuggagaau

SEQ ID NO: 2217149 - RNA, 19 nt, Homo sapiens
  misc_RNA (1)...(19): siRNA sense strand
ucacuucccagaucugcuu

SEQ ID NO: 2217150 - RNA, 19 nt, Homo sapiens
  misc_RNA (1)...(19): siRNA sense strand
uacaugcagugcccaguca

SEQ ID NO: 2217151 - RNA, 19 nt, Homo sapiens
  misc_RNA (1)...(19): siRNA sense strand
accaagcaaugagcacuuu

SEQ ID NO: 2217152 - RNA, 19 nt, Homo sapiens
  misc_RNA (1)...(19): siRNA sense strand
gauugacaucccaagauug

SEQ ID NO: 2217153 - RNA, 19 nt, Homo sapiens
  misc_RNA (1)...(19): siRNA sense strand
ggcacuggaagcccuagua

SEQ ID NO: 2217154 - RNA, 19 nt, Homo sapiens
  misc_RNA (1)...(19): siRNA sense strand
cgaggaguucgacguggua

SEQ ID NO: 2217155 - RNA, 19 nt, Homo sapiens
  misc_RNA (1)...(19): siRNA sense strand
uaaaugucaccagcuuuga

SEQ ID NO: 2217156 - RNA, 19 nt, Homo sapiens
  misc_RNA (1)...(19): siRNA sense strand
ggcggaagaagauccuauu

SEQ ID NO: 2217157 - RNA, 19 nt, Homo sapiens
  misc_RNA (1)...(19): siRNA sense strand
uccgugaaccuuccuuaaa

SEQ ID NO: 2217158 - RNA, 19 nt, Homo sapiens
  misc_RNA (1)...(19): siRNA sense strand
cugaagcauuuacagaaca

SEQ ID NO: 2217159 - RNA, 19 nt, Homo sapiens
  misc_RNA (1)...(19): siRNA sense strand
ccugaagcauuuacagaac

SEQ ID NO: 2217160 - RNA, 19 nt, Homo sapiens
  misc_RNA (1)...(19): siRNA sense strand
agacccugauguccucuau

SEQ ID NO: 2217161 - RNA, 19 nt, Homo sapiens
  misc_RNA (1)...(19): siRNA sense strand
cauccgugaaccuuccuua

SEQ ID NO: 2217162 - RNA, 19 nt, Homo sapiens
  misc_RNA (1)...(19): siRNA sense strand
acgagagaguccuggagaa

SEQ ID NO: 2217163 - RNA, 19 nt, Homo sapiens
  misc_RNA (1)...(19): siRNA sense strand
ggguguagcgugaagaucu

SEQ ID NO: 2217164 - RNA, 19 nt, Homo sapiens
  misc_RNA (1)...(19): siRNA sense strand
cagcugcguggaagauuga

SEQ ID NO: 2217165 - RNA, 19 nt, Homo sapiens
  misc_RNA (1)...(19): siRNA sense strand
cugagcggcugguguugga

SEQ ID NO: 2217166 - RNA, 19 nt, Homo sapiens
  misc_RNA (1)...(19): siRNA sense strand
uuaaggaaacauucaaguc

SEQ ID NO: 2217167 - RNA, 19 nt, Homo sapiens
  misc_RNA (1)...(19): siRNA sense strand
cuagacggcggaagaagau

SEQ ID NO: 2217168 - RNA, 19 nt, Homo sapiens
  misc_RNA (1)...(19): siRNA sense strand
uguccucuauccaucucua

SEQ ID NO: 2217169 - RNA, 19 nt, Homo sapiens
  misc_RNA (1)...(19): siRNA sense strand
cuauccaucucuaaauguc

SEQ ID NO: 2217170 - RNA, 19 nt, Homo sapiens
  misc_RNA (1)...(19): siRNA sense strand
guccgaccuuggccaguau

SEQ ID NO: 2217171 - RNA, 19 nt, Homo sapiens
  misc_RNA (1)...(19): siRNA sense strand
ucaccagcuuugacucagu

SEQ ID NO: 2217172 - RNA, 19 nt, Homo sapiens
  misc_RNA (1)...(19): siRNA sense strand
ggaagaagauccuauuuua

SEQ ID NO: 2217173 - RNA, 19 nt, Homo sapiens
  misc_RNA (1)...(19): siRNA sense strand
gaacagcucuaccgauaug

SEQ ID NO: 2217174 - RNA, 19 nt, Homo sapiens
  misc_RNA (1)...(19): siRNA sense strand
cagaacagcucuaccgaua

SEQ ID NO: 2217175 - RNA, 19 nt, Homo sapiens
  misc_RNA (1)...(19): siRNA sense strand
ggagaggguucaucugauc

SEQ ID NO: 2217176 - RNA, 19 nt, Homo sapiens
  misc_RNA (1)...(19): siRNA sense strand
ggaacauuaucaggaauug

SEQ ID NO: 2217177 - RNA, 19 nt, Homo sapiens
  misc_RNA (1)...(19): siRNA sense strand
cuaccgauauguuaccaaa

SEQ ID NO: 2217178 - RNA, 19 nt, Homo sapiens
  misc_RNA (1)...(19): siRNA sense strand
gaagauugacaucccaaga

SEQ ID NO: 2217179 - RNA, 19 nt, Homo sapiens
  misc_RNA (1)...(19): siRNA sense strand
agauugacaucccaagauu

SEQ ID NO: 2217180 - RNA, 19 nt, Homo sapiens
  misc_RNA (1)...(19): siRNA sense strand
gaccuuggccaguauguga

SEQ ID NO: 2217181 - RNA, 19 nt, Homo sapiens
  misc_RNA (1)...(19): siRNA sense strand
gaucguggcaggugguuau

SEQ ID NO: 2217182 - RNA, 19 nt, Homo sapiens
  misc_RNA (1)...(19): siRNA sense strand
gcccagucauugcuguuaa

SEQ ID NO: 2217183 - RNA, 19 nt, Homo sapiens
  misc_RNA (1)...(19): siRNA sense strand
agagaguccuggagaaugu

SEQ ID NO: 2217184 - RNA, 19 nt, Homo sapiens
  misc_RNA (1)...(19): siRNA sense strand
gccaguaugugaccuucuu

SEQ ID NO: 2217185 - RNA, 19 nt, Homo sapiens
  misc_RNA (1)...(19): siRNA sense strand
ucaagucccugucucacau

SEQ ID NO: 2217186 - RNA, 19 nt, Homo sapiens
  misc_RNA (1)...(19): siRNA sense strand
cagcucuaccgauauguua

SEQ ID NO: 2217187 - RNA, 19 nt, Homo sapiens
  misc_RNA (1)...(19): siRNA sense strand
gggagaggguucaucugau

SEQ ID NO: 2217188 - RNA, 19 nt, Homo sapiens
  misc_RNA (1)...(19): siRNA sense strand
uguggaacauuaucaggaa

SEQ ID NO: 2217189 - RNA, 19 nt, Homo sapiens
  misc_RNA (1)...(19): siRNA sense strand
gaagagccagagugaagga

SEQ ID NO: 2217190 - RNA, 19 nt, Homo sapiens
  misc_RNA (1)...(19): siRNA sense strand
cuaaaugucaccagcuuug

SEQ ID NO: 2217191 - RNA, 19 nt, Homo sapiens
  misc_RNA (1)...(19): siRNA sense strand
gaacauuaucaggaauuga

SEQ ID NO: 2217192 - RNA, 19 nt, Homo sapiens
  misc_RNA (1)...(19): siRNA sense strand
cagaucugcuucucaccaa

SEQ ID NO: 2217193 - RNA, 19 nt, Homo sapiens
  misc_RNA (1)...(19): siRNA sense strand
gcggaagaagauccuauuu

SEQ ID NO: 2217194 - RNA, 19 nt, Homo sapiens
  misc_RNA (1)...(19): siRNA sense strand
gcuagacggcggaagaaga

SEQ ID NO: 2217195 - RNA, 19 nt, Homo sapiens
  misc_RNA (1)...(19): siRNA sense strand
gagagaguccuggagaaug

SEQ ID NO: 2217196 - RNA, 19 nt, Homo sapiens
  misc_RNA (1)...(19): siRNA sense strand
caccagcuuugacucaguu

SEQ ID NO: 2217197 - RNA, 19 nt, Homo sapiens
  misc_RNA (1)...(19): siRNA sense strand
aaagcuggaugaccuaguc

SEQ ID NO: 2217198 - RNA, 19 nt, Homo sapiens
  misc_RNA (1)...(19): siRNA sense strand
gaucugcuucucaccaaga

SEQ ID NO: 2217199 - RNA, 19 nt, Homo sapiens
  misc_RNA (1)...(19): siRNA sense strand
uugacuggauagaggaaua

SEQ ID NO: 2217200 - RNA, 19 nt, Homo sapiens
  misc_RNA (1)...(19): siRNA sense strand
ggaguccauugaccacagu

SEQ ID NO: 2217201 - RNA, 19 nt, Homo sapiens
  misc_RNA (1)...(19): siRNA sense strand
acagcugcguggaagauug

SEQ ID NO: 2217202 - RNA, 19 nt, Homo sapiens
  misc_RNA (1)...(19): siRNA sense strand
cagaagcaauagaaaaguu

SEQ ID NO: 2217203 - RNA, 19 nt, Homo sapiens
  misc_RNA (1)...(19): siRNA sense strand
gcacuggaagcccuaguac

SEQ ID NO: 2217204 - RNA, 19 nt, Homo sapiens
  misc_RNA (1)...(19): siRNA sense strand
gagccagagugaaggaaaa

SEQ ID NO: 2217205 - RNA, 19 nt, Homo sapiens
  misc_RNA (1)...(19): siRNA sense strand
agucauugcuguuaauucg

SEQ ID NO: 2217206 - RNA, 19 nt, Homo sapiens
  misc_RNA (1)...(19): siRNA sense strand
ugggagaggguucaucuga

SEQ ID NO: 2217207 - RNA, 19 nt, Homo sapiens
  misc_RNA (1)...(19): siRNA sense strand
guacagcugcguggaagau

SEQ ID NO: 2217208 - RNA, 19 nt, Homo sapiens
  misc_RNA (1)...(19): siRNA sense strand
caagucccugucucacaua

SEQ ID NO: 2217209 - RNA, 19 nt, Homo sapiens
  misc_RNA (1)...(19): siRNA sense strand
uggaagagccagagugaag

SEQ ID NO: 2217210 - RNA, 19 nt, Homo sapiens
  misc_RNA (1)...(19): siRNA sense strand
ccgugaaccuuccuuaaaa

SEQ ID NO: 2217211 - RNA, 19 nt, Homo sapiens
  misc_RNA (1)...(19): siRNA sense strand
ccacagugucacaggguuu

SEQ ID NO: 2217212 - RNA, 19 nt, Homo sapiens
  misc_RNA (1)...(19): siRNA sense strand
aguccgaccuuggccagua

SEQ ID NO: 2217213 - RNA, 19 nt, Homo sapiens
  misc_RNA (1)...(19): siRNA sense strand
ugaagaaaaugguccaaca

SEQ ID NO: 2217214 - RNA, 19 nt, Homo sapiens
  misc_RNA (1)...(19): siRNA sense strand
cugcugcucuccaucaaca

SEQ ID NO: 2217215 - RNA, 19 nt, Homo sapiens
  misc_RNA (1)...(19): siRNA sense strand
cagcuuugacucaguuguu

SEQ ID NO: 2217216 - RNA, 19 nt, Homo sapiens
  misc_RNA (1)...(19): siRNA sense strand
cgagagaguccuggagaau

SEQ ID NO: 2217217 - RNA, 19 nt, Homo sapiens
  misc_RNA (1)...(19): siRNA sense strand
uaaaugucaccagcuuuga

SEQ ID NO: 2217218 - RNA, 19 nt, Homo sapiens
  misc_RNA (1)...(19): siRNA sense strand
ucacuucccagaucugcuu

SEQ ID NO: 2217219 - RNA, 19 nt, Homo sapiens
  misc_RNA (1)...(19): siRNA sense strand
ggcggaagaagauccuauu

SEQ ID NO: 2217220 - RNA, 19 nt, Homo sapiens
  misc_RNA (1)...(19): siRNA sense strand
uacaugcagugcccaguca

SEQ ID NO: 2217221 - RNA, 19 nt, Homo sapiens
  misc_RNA (1)...(19): siRNA sense strand
accaagcaaugagcacuuu

SEQ ID NO: 2217222 - RNA, 19 nt, Homo sapiens
  misc_RNA (1)...(19): siRNA sense strand
gauugacaucccaagauug

SEQ ID NO: 2217223 - RNA, 19 nt, Homo sapiens
  misc_RNA (1)...(19): siRNA sense strand
ggcacuggaagcccuagua

SEQ ID NO: 2217224 - RNA, 19 nt, Homo sapiens
  misc_RNA (1)...(19): siRNA sense strand
uccgugaaccuuccuuaaa

SEQ ID NO: 2217225 - RNA, 19 nt, Homo sapiens
  misc_RNA (1)...(19): siRNA sense strand
cugaagcauuuacagaaca

SEQ ID NO: 2217226 - RNA, 19 nt, Homo sapiens
  misc_RNA (1)...(19): siRNA sense strand
ccugaagcauuuacagaac

SEQ ID NO: 2217227 - RNA, 19 nt, Homo sapiens
  misc_RNA (1)...(19): siRNA sense strand
agacccugauguccucuau

SEQ ID NO: 2217228 - RNA, 19 nt, Homo sapiens
  misc_RNA (1)...(19): siRNA sense strand
cauccgugaaccuuccuua

SEQ ID NO: 2217229 - RNA, 19 nt, Homo sapiens
  misc_RNA (1)...(19): siRNA sense strand
acgagagaguccuggagaa

SEQ ID NO: 2217230 - RNA, 19 nt, Homo sapiens
  misc_RNA (1)...(19): siRNA sense strand
cagcugcguggaagauuga

SEQ ID NO: 2217231 - RNA, 19 nt, Homo sapiens
  misc_RNA (1)...(19): siRNA sense strand
uguccucuauccaucucua

SEQ ID NO: 2217232 - RNA, 19 nt, Homo sapiens
  misc_RNA (1)...(19): siRNA sense strand
cuagacggcggaagaagau

SEQ ID NO: 2217233 - RNA, 19 nt, Homo sapiens
  misc_RNA (1)...(19): siRNA sense strand
uuaaggaaacauucaaguc

SEQ ID NO: 2217234 - RNA, 19 nt, Homo sapiens
  misc_RNA (1)...(19): siRNA sense strand
cuauccaucucuaaauguc

SEQ ID NO: 2217235 - RNA, 19 nt, Homo sapiens
  misc_RNA (1)...(19): siRNA sense strand
guccgaccuuggccaguau

SEQ ID NO: 2217236 - RNA, 19 nt, Homo sapiens
  misc_RNA (1)...(19): siRNA sense strand
ucaccagcuuugacucagu

SEQ ID NO: 2217237 - RNA, 19 nt, Homo sapiens
  misc_RNA (1)...(19): siRNA sense strand
ggaagaaucugaagccaua

SEQ ID NO: 2217238 - RNA, 19 nt, Homo sapiens
  misc_RNA (1)...(19): siRNA sense strand
uaacugagcuugucaaaga

SEQ ID NO: 2217239 - RNA, 19 nt, Homo sapiens
  misc_RNA (1)...(19): siRNA sense strand
gaaagagggucucacuuaa

SEQ ID NO: 2217240 - RNA, 19 nt, Homo sapiens
  misc_RNA (1)...(19): siRNA sense strand
gcacagaaguguuagauuc

SEQ ID NO: 2217241 - RNA, 19 nt, Homo sapiens
  misc_RNA (1)...(19): siRNA sense strand
gggcaaaccucaagaagaa

SEQ ID NO: 2217242 - RNA, 19 nt, Homo sapiens
  misc_RNA (1)...(19): siRNA sense strand
gcaaggaggucgaagaaga

SEQ ID NO: 2217243 - RNA, 19 nt, Homo sapiens
  misc_RNA (1)...(19): siRNA sense strand
ggaacaaggugauauugaa

SEQ ID NO: 2217244 - RNA, 19 nt, Homo sapiens
  misc_RNA (1)...(19): siRNA sense strand
caaagaaggauuacagaaa

SEQ ID NO: 2217245 - RNA, 19 nt, Homo sapiens
  misc_RNA (1)...(19): siRNA sense strand
agaaagagggucucacuua

SEQ ID NO: 2217246 - RNA, 19 nt, Homo sapiens
  misc_RNA (1)...(19): siRNA sense strand
cagaagaguuugagacaga

SEQ ID NO: 2217247 - RNA, 19 nt, Homo sapiens
  misc_RNA (1)...(19): siRNA sense strand
gaauacacuucugcaguaa

SEQ ID NO: 2217248 - RNA, 19 nt, Homo sapiens
  misc_RNA (1)...(19): siRNA sense strand
gugaagggauggaugauug

SEQ ID NO: 2217249 - RNA, 19 nt, Homo sapiens
  misc_RNA (1)...(19): siRNA sense strand
gaagaagaguccaaacaac

SEQ ID NO: 2217250 - RNA, 19 nt, Homo sapiens
  misc_RNA (1)...(19): siRNA sense strand
guauaccacuuggauauuu

SEQ ID NO: 2217251 - RNA, 19 nt, Homo sapiens
  misc_RNA (1)...(19): siRNA sense strand
ccaaggcacagaaguguua

SEQ ID NO: 2217252 - RNA, 19 nt, Homo sapiens
  misc_RNA (1)...(19): siRNA sense strand
aagagggucucacuuaauu

SEQ ID NO: 2217253 - RNA, 19 nt, Homo sapiens
  misc_RNA (1)...(19): siRNA sense strand
gaacgagagaugaaaguau

SEQ ID NO: 2217254 - RNA, 19 nt, Homo sapiens
  misc_RNA (1)...(19): siRNA sense strand
gauuugagauuccaaggau

SEQ ID NO: 2217255 - RNA, 19 nt, Homo sapiens
  misc_RNA (1)...(19): siRNA sense strand
ggaaauacucaaagaagga

SEQ ID NO: 2217256 - RNA, 19 nt, Homo sapiens
  misc_RNA (1)...(19): siRNA sense strand
ccaaggauauuagcaacaa

SEQ ID NO: 2217257 - RNA, 19 nt, Homo sapiens
  misc_RNA (1)...(19): siRNA sense strand
ugucaaagaugauguuaag

SEQ ID NO: 2217258 - RNA, 19 nt, Homo sapiens
  misc_RNA (1)...(19): siRNA sense strand
uagauucucugaaacacaa

SEQ ID NO: 2217259 - RNA, 19 nt, Homo sapiens
  misc_RNA (1)...(19): siRNA sense strand
gaguauaccacuuggauau

SEQ ID NO: 2217260 - RNA, 19 nt, Homo sapiens
  misc_RNA (1)...(19): siRNA sense strand
gagaugaaaguauuaagug

SEQ ID NO: 2217261 - RNA, 19 nt, Homo sapiens
  misc_RNA (1)...(19): siRNA sense strand
ggaggaacaaggugauauu

SEQ ID NO: 2217262 - RNA, 19 nt, Homo sapiens
  misc_RNA (1)...(19): siRNA sense strand
aguguuagauucucugaaa

SEQ ID NO: 2217263 - RNA, 19 nt, Homo sapiens
  misc_RNA (1)...(19): siRNA sense strand
gauggaugauuguggaaau

SEQ ID NO: 2217264 - RNA, 19 nt, Homo sapiens
  misc_RNA (1)...(19): siRNA sense strand
aagacaaugugguggauuu

SEQ ID NO: 2217265 - RNA, 19 nt, Homo sapiens
  misc_RNA (1)...(19): siRNA sense strand
cgaagaagaguccaaacaa

SEQ ID NO: 2217266 - RNA, 19 nt, Homo sapiens
  misc_RNA (1)...(19): siRNA sense strand
aacgagagaugaaaguauu

SEQ ID NO: 2217267 - RNA, 19 nt, Homo sapiens
  misc_RNA (1)...(19): siRNA sense strand
ggaguauaccacuuggaua

SEQ ID NO: 2217268 - RNA, 19 nt, Homo sapiens
  misc_RNA (1)...(19): siRNA sense strand
ccacuaugaucauguuucu

SEQ ID NO: 2217269 - RNA, 19 nt, Homo sapiens
  misc_RNA (1)...(19): siRNA sense strand
gaacaaggugauauugaag

SEQ ID NO: 2217270 - RNA, 19 nt, Homo sapiens
  misc_RNA (1)...(19): siRNA sense strand
acaaugugguggauuuaug

SEQ ID NO: 2217271 - RNA, 19 nt, Homo sapiens
  misc_RNA (1)...(19): siRNA sense strand
gcuguacgacuccugcaua

SEQ ID NO: 2217272 - RNA, 19 nt, Homo sapiens
  misc_RNA (1)...(19): siRNA sense strand
gagguccacuugagguuca

SEQ ID NO: 2217273 - RNA, 19 nt, Homo sapiens
  misc_RNA (1)...(19): siRNA sense strand
ucacuuaauucaggaggaa

SEQ ID NO: 2217274 - RNA, 19 nt, Homo sapiens
  misc_RNA (1)...(19): siRNA sense strand
cacuugagguucaugagaa

SEQ ID NO: 2217275 - RNA, 19 nt, Homo sapiens
  misc_RNA (1)...(19): siRNA sense strand
cagcaaggaggucgaagaa

SEQ ID NO: 2217276 - RNA, 19 nt, Homo sapiens
  misc_RNA (1)...(19): siRNA sense strand
ucaaagaaggauuacagaa

SEQ ID NO: 2217277 - RNA, 19 nt, Homo sapiens
  misc_RNA (1)...(19): siRNA sense strand
gcacugcacccuguuucaa

SEQ ID NO: 2217278 - RNA, 19 nt, Homo sapiens
  misc_RNA (1)...(19): siRNA sense strand
aaggugauauugaagugaa

SEQ ID NO: 2217279 - RNA, 19 nt, Homo sapiens
  misc_RNA (1)...(19): siRNA sense strand
gcaaaccucaagaagaauc

SEQ ID NO: 2217280 - RNA, 19 nt, Homo sapiens
  misc_RNA (1)...(19): siRNA sense strand
caagaaagagggucucacu

SEQ ID NO: 2217281 - RNA, 19 nt, Homo sapiens
  misc_RNA (1)...(19): siRNA sense strand
cuauagagguccacuugag

SEQ ID NO: 2217282 - RNA, 19 nt, Homo sapiens
  misc_RNA (1)...(19): siRNA sense strand
gaaauacucaaagaaggau

SEQ ID NO: 2217283 - RNA, 19 nt, Homo sapiens
  misc_RNA (1)...(19): siRNA sense strand
gagggucucacuuaauuca

SEQ ID NO: 2217284 - RNA, 19 nt, Homo sapiens
  misc_RNA (1)...(19): siRNA sense strand
gaggaacaaggugauauug

SEQ ID NO: 2217285 - RNA, 19 nt, Homo sapiens
  misc_RNA (1)...(19): siRNA sense strand
acacauauccuccggaaac

SEQ ID NO: 2217286 - RNA, 19 nt, Homo sapiens
  misc_RNA (1)...(19): siRNA sense strand
ccagugaagggauggauga

SEQ ID NO: 2217287 - RNA, 19 nt, Homo sapiens
  misc_RNA (1)...(19): siRNA sense strand
gaaguguuagauucucuga

SEQ ID NO: 2217288 - RNA, 19 nt, Homo sapiens
  misc_RNA (1)...(19): siRNA sense strand
cgagagaugaaaguauuaa

SEQ ID NO: 2217289 - RNA, 19 nt, Homo sapiens
  misc_RNA (1)...(19): siRNA sense strand
aaugaguucugcugaggaa

SEQ ID NO: 2217290 - RNA, 19 nt, Homo sapiens
  misc_RNA (1)...(19): siRNA sense strand
acaaggugauauugaagug

SEQ ID NO: 2217291 - RNA, 19 nt, Homo sapiens
  misc_RNA (1)...(19): siRNA sense strand
guccaaacaacaagaaaga

SEQ ID NO: 2217292 - RNA, 19 nt, Homo sapiens
  misc_RNA (1)...(19): siRNA sense strand
ugagauuccaaggauauua

SEQ ID NO: 2217293 - RNA, 19 nt, Homo sapiens
  misc_RNA (1)...(19): siRNA sense strand
gagauuccaaggauauuag

SEQ ID NO: 2217294 - RNA, 19 nt, Homo sapiens
  misc_RNA (1)...(19): siRNA sense strand
gaggaggaacaaggugaua

SEQ ID NO: 2217295 - RNA, 19 nt, Homo sapiens
  misc_RNA (1)...(19): siRNA sense strand
ggauauuagcaacaaguga

SEQ ID NO: 2217296 - RNA, 19 nt, Homo sapiens
  misc_RNA (1)...(19): siRNA sense strand
gaagaguuugagacagaaa

SEQ ID NO: 2217297 - RNA, 19 nt, Homo sapiens
  misc_RNA (1)...(19): siRNA sense strand
gagcuuccuccacagugua

SEQ ID NO: 2217298 - RNA, 19 nt, Homo sapiens
  misc_RNA (1)...(19): siRNA sense strand
gaagaguccaaacaacaag

SEQ ID NO: 2217299 - RNA, 19 nt, Homo sapiens
  misc_RNA (1)...(19): siRNA sense strand
aaagagggucucacuuaau

SEQ ID NO: 2217300 - RNA, 19 nt, Homo sapiens
  misc_RNA (1)...(19): siRNA sense strand
gaagacaaugugguggauu

SEQ ID NO: 2217301 - RNA, 19 nt, Homo sapiens
  misc_RNA (1)...(19): siRNA sense strand
ggucgaagaagaguccaaa

SEQ ID NO: 2217302 - RNA, 19 nt, Homo sapiens
  misc_RNA (1)...(19): siRNA sense strand
ugagguucaugagaaugua

SEQ ID NO: 2217303 - RNA, 19 nt, Homo sapiens
  misc_RNA (1)...(19): siRNA sense strand
agaagaguccaaacaacaa

SEQ ID NO: 2217304 - RNA, 19 nt, Homo sapiens
  misc_RNA (1)...(19): siRNA sense strand
aagaagaguccaaacaaca

SEQ ID NO: 2217305 - RNA, 19 nt, Homo sapiens
  misc_RNA (1)...(19): siRNA sense strand
ccacuugagguucaugaga

SEQ ID NO: 2217306 - RNA, 19 nt, Homo sapiens
  misc_RNA (1)...(19): siRNA sense strand
gaaggauuacagaaauaca

SEQ ID NO: 2217307 - RNA, 19 nt, Homo sapiens
  misc_RNA (1)...(19): siRNA sense strand
gauuguggaaauacucaaa

SEQ ID NO: 2217308 - RNA, 19 nt, Homo sapiens
  misc_RNA (1)...(19): siRNA sense strand
ugaacgagagaugaaagua

SEQ ID NO: 2217309 - RNA, 19 nt, Homo sapiens
  misc_RNA (1)...(19): siRNA sense strand
ggaggaagaaauaaaaguu

SEQ ID NO: 2217310 - RNA, 19 nt, Homo sapiens
  misc_RNA (1)...(19): siRNA sense strand
ggauuugagauuccaagga

SEQ ID NO: 2217311 - RNA, 19 nt, Homo sapiens
  misc_RNA (1)...(19): siRNA sense strand
guggaaauacucaaagaag

SEQ ID NO: 2217312 - RNA, 19 nt, Homo sapiens
  misc_RNA (1)...(19): siRNA sense strand
ugaagacaaugugguggau

SEQ ID NO: 2217313 - RNA, 19 nt, Homo sapiens
  misc_RNA (1)...(19): siRNA sense strand
gaagaauccaaggcacaga

SEQ ID NO: 2217314 - RNA, 19 nt, Homo sapiens
  misc_RNA (1)...(19): siRNA sense strand
gagguucaugagaauguaa

SEQ ID NO: 2217315 - RNA, 19 nt, Homo sapiens
  misc_RNA (1)...(19): siRNA sense strand
agaagaguuugagacagaa

SEQ ID NO: 2217316 - RNA, 19 nt, Homo sapiens
  misc_RNA (1)...(19): siRNA sense strand
ggaugauuguggaaauacu

SEQ ID NO: 2217317 - RNA, 19 nt, Homo sapiens
  misc_RNA (1)...(19): siRNA sense strand
agacaaugugguggauuua

SEQ ID NO: 2217318 - RNA, 19 nt, Homo sapiens
  misc_RNA (1)...(19): siRNA sense strand
gaagaaucugaagccauaa

SEQ ID NO: 2217319 - RNA, 19 nt, Homo sapiens
  misc_RNA (1)...(19): siRNA sense strand
gacaaugugguggauuuau

SEQ ID NO: 2217320 - RNA, 19 nt, Homo sapiens
  misc_RNA (1)...(19): siRNA sense strand
uaauucaggaggaagaaau

SEQ ID NO: 2217321 - RNA, 19 nt, Homo sapiens
  misc_RNA (1)...(19): siRNA sense strand
ggauggaugauuguggaaa

SEQ ID NO: 2217322 - RNA, 19 nt, Homo sapiens
  misc_RNA (1)...(19): siRNA sense strand
ggauuuaugccaguucaca

SEQ ID NO: 2217323 - RNA, 19 nt, Homo sapiens
  misc_RNA (1)...(19): siRNA sense strand
guggauuuaugccaguuca

SEQ ID NO: 2217324 - RNA, 19 nt, Homo sapiens
  misc_RNA (1)...(19): siRNA sense strand
caaggaggucgaagaagag

SEQ ID NO: 2217325 - RNA, 19 nt, Homo sapiens
  misc_RNA (1)...(19): siRNA sense strand
uacccacuaugaucauguu

SEQ ID NO: 2217326 - RNA, 19 nt, Homo sapiens
  misc_RNA (1)...(19): siRNA sense strand
gagcuugucaaagaugaug

SEQ ID NO: 2217327 - RNA, 19 nt, Homo sapiens
  misc_RNA (1)...(19): siRNA sense strand
auggaugauuguggaaaua

SEQ ID NO: 2217328 - RNA, 19 nt, Homo sapiens
  misc_RNA (1)...(19): siRNA sense strand
gaagggauggaugauugug

SEQ ID NO: 2217329 - RNA, 19 nt, Homo sapiens
  misc_RNA (1)...(19): siRNA sense strand
ugaguucugcugaggaaga

SEQ ID NO: 2217330 - RNA, 19 nt, Homo sapiens
  misc_RNA (1)...(19): siRNA sense strand
auacacuucugcaguaacu

SEQ ID NO: 2217331 - RNA, 19 nt, Homo sapiens
  misc_RNA (1)...(19): siRNA sense strand
ccacaguguaaaccaguga

SEQ ID NO: 2217332 - RNA, 19 nt, Homo sapiens
  misc_RNA (1)...(19): siRNA sense strand
gauuuaugccaguucacaa

SEQ ID NO: 2217333 - RNA, 19 nt, Homo sapiens
  misc_RNA (1)...(19): siRNA sense strand
ucgaagaagaguccaaaca

SEQ ID NO: 2217334 - RNA, 19 nt, Homo sapiens
  misc_RNA (1)...(19): siRNA sense strand
gaaaauguuacucuguaug

SEQ ID NO: 2217335 - RNA, 19 nt, Homo sapiens
  misc_RNA (1)...(19): siRNA sense strand
caaggauauuagcaacaag

SEQ ID NO: 2217336 - RNA, 19 nt, Homo sapiens
  misc_RNA (1)...(19): siRNA sense strand
aaauguuacucuguaugug

SEQ ID NO: 2217337 - RNA, 19 nt, Homo sapiens
  misc_RNA (1)...(19): siRNA sense strand
cgacauaaaaguuggggaa

SEQ ID NO: 2217338 - RNA, 19 nt, Homo sapiens
  misc_RNA (1)...(19): siRNA sense strand
uggcaagacaaguggguga

SEQ ID NO: 2217339 - RNA, 19 nt, Homo sapiens
  misc_RNA (1)...(19): siRNA sense strand
acauaaaaguuggggaauu

SEQ ID NO: 2217340 - RNA, 19 nt, Homo sapiens
  misc_RNA (1)...(19): siRNA sense strand
acaagugggugaacggcaa

SEQ ID NO: 2217341 - RNA, 19 nt, Homo sapiens
  misc_RNA (1)...(19): siRNA sense strand
uggaagaauggcaagacaa

SEQ ID NO: 2217342 - RNA, 19 nt, Homo sapiens
  misc_RNA (1)...(19): siRNA sense strand
guguaguugguguggaaau

SEQ ID NO: 2217343 - RNA, 19 nt, Homo sapiens
  misc_RNA (1)...(19): siRNA sense strand
cuggaagaauggcaagaca

SEQ ID NO: 2217344 - RNA, 19 nt, Homo sapiens
  misc_RNA (1)...(19): siRNA sense strand
cggaaaagcgguugagaug

SEQ ID NO: 2217345 - RNA, 19 nt, Homo sapiens
  misc_RNA (1)...(19): siRNA sense strand
uguggaaaucagugaacuu

SEQ ID NO: 2217346 - RNA, 19 nt, Homo sapiens
  misc_RNA (1)...(19): siRNA sense strand
uuugacaugauuugggaua

SEQ ID NO: 2217347 - RNA, 19 nt, Homo sapiens
  misc_RNA (1)...(19): siRNA sense strand
gcggaaaagcgguugagau

SEQ ID NO: 2217348 - RNA, 19 nt, Homo sapiens
  misc_RNA (1)...(19): siRNA sense strand
cagaagaaccaaucaccga

SEQ ID NO: 2217349 - RNA, 19 nt, Homo sapiens
  misc_RNA (1)...(19): siRNA sense strand
gggagaaggucacugagca

SEQ ID NO: 2217350 - RNA, 19 nt, Homo sapiens
  misc_RNA (1)...(19): siRNA sense strand
aggcugaagcagugaagaa

SEQ ID NO: 2217351 - RNA, 19 nt, Homo sapiens
  misc_RNA (1)...(19): siRNA sense strand
gcagaaagaagcugaccca

SEQ ID NO: 2217352 - RNA, 19 nt, Homo sapiens
  misc_RNA (1)...(19): siRNA sense strand
gagcaagucaagaucgaga

SEQ ID NO: 2217353 - RNA, 19 nt, Homo sapiens
  misc_RNA (1)...(19): siRNA sense strand
acaagagaaagcagugcaa

SEQ ID NO: 2217354 - RNA, 19 nt, Homo sapiens
  misc_RNA (1)...(19): siRNA sense strand
ucuccgagcugaaggcuga

SEQ ID NO: 2217355 - RNA, 19 nt, Homo sapiens
  misc_RNA (1)...(19): siRNA sense strand
agaaagaagcugacccagu

SEQ ID NO: 2217356 - RNA, 19 nt, Homo sapiens
  misc_RNA (1)...(19): siRNA sense strand
aagagaaagcagugcaaac

SEQ ID NO: 2217357 - RNA, 19 nt, Homo sapiens
  misc_RNA (1)...(19): siRNA sense strand
gucaagaucgagagagacu

SEQ ID NO: 2217358 - RNA, 19 nt, Homo sapiens
  misc_RNA (1)...(19): siRNA sense strand
ccaaggagcucgaggcguu

SEQ ID NO: 2217359 - RNA, 19 nt, Homo sapiens
  misc_RNA (1)...(19): siRNA sense strand
ccagauaccccgugggcaa

SEQ ID NO: 2217360 - RNA, 19 nt, Homo sapiens
  misc_RNA (1)...(19): siRNA sense strand
cggacaacuuccccagaua

SEQ ID NO: 2217361 - RNA, 19 nt, Homo sapiens
  misc_RNA (1)...(19): siRNA sense strand
gugaaauggaagagaacuu

SEQ ID NO: 2217362 - RNA, 19 nt, Homo sapiens
  misc_RNA (1)...(19): siRNA sense strand
gggagaaauugcaggagga

SEQ ID NO: 2217363 - RNA, 19 nt, Homo sapiens
  misc_RNA (1)...(19): siRNA sense strand
agaauaugaaggaggaaau

SEQ ID NO: 2217364 - RNA, 19 nt, Homo sapiens
  misc_RNA (1)...(19): siRNA sense strand
cagaauaugaaggaggaaa

SEQ ID NO: 2217365 - RNA, 19 nt, Homo sapiens
  misc_RNA (1)...(19): siRNA sense strand
ccaucaacaccgaguucaa

SEQ ID NO: 2217366 - RNA, 19 nt, Homo sapiens
  misc_RNA (1)...(19): siRNA sense strand
ccuugaacgcaaaguggaa

SEQ ID NO: 2217367 - RNA, 19 nt, Homo sapiens
  misc_RNA (1)...(19): siRNA sense strand
acgagaagguggagcugca

SEQ ID NO: 2217368 - RNA, 19 nt, Homo sapiens
  misc_RNA (1)...(19): siRNA sense strand
gcucaagggccaaggcaag

SEQ ID NO: 2217369 - RNA, 19 nt, Homo sapiens
  misc_RNA (1)...(19): siRNA sense strand
ggaagcugcuggaaggcga

SEQ ID NO: 2217370 - RNA, 19 nt, Homo sapiens
  misc_RNA (1)...(19): siRNA sense strand
gcgugaaauggaagagaac

SEQ ID NO: 2217371 - RNA, 19 nt, Homo sapiens
  misc_RNA (1)...(19): siRNA sense strand
agagagaggaagccgaaaa

SEQ ID NO: 2217372 - RNA, 19 nt, Homo sapiens
  misc_RNA (1)...(19): siRNA sense strand
aggcagaagaaugguacaa

SEQ ID NO: 2217373 - RNA, 19 nt, Homo sapiens
  misc_RNA (1)...(19): siRNA sense strand
cuagagauggacagguuau

SEQ ID NO: 2217374 - RNA, 19 nt, Homo sapiens
  misc_RNA (1)...(19): siRNA sense strand
ggcccuugacauugagauu

SEQ ID NO: 2217375 - RNA, 19 nt, Homo sapiens
  misc_RNA (1)...(19): siRNA sense strand
gagaaauugcaggaggaga

SEQ ID NO: 2217376 - RNA, 19 nt, Homo sapiens
  misc_RNA (1)...(19): siRNA sense strand
ggaagagaacuuugccguu

SEQ ID NO: 2217377 - RNA, 19 nt, Homo sapiens
  misc_RNA (1)...(19): siRNA sense strand
gucuugaccuugaacgcaa

SEQ ID NO: 2217378 - RNA, 19 nt, Homo sapiens
  misc_RNA (1)...(19): siRNA sense strand
gaaagaagacggaaagcga

SEQ ID NO: 2217379 - RNA, 19 nt, Homo sapiens
  misc_RNA (1)...(19): siRNA sense strand
aaaagaaagaagacggaaa

SEQ ID NO: 2217380 - RNA, 19 nt, Homo sapiens
  misc_RNA (1)...(19): siRNA sense strand
uggaaggaauagugguaca

SEQ ID NO: 2217381 - RNA, 19 nt, Homo sapiens
  misc_RNA (1)...(19): siRNA sense strand
gcaaaguguuggaggacag

SEQ ID NO: 2217382 - RNA, 19 nt, Homo sapiens
  misc_RNA (1)...(19): siRNA sense strand
ucaugauauugguggaaaa

SEQ ID NO: 2217383 - RNA, 19 nt, Homo sapiens
  misc_RNA (1)...(19): siRNA sense strand
aagaggugaaguugggaaa

SEQ ID NO: 2217384 - RNA, 19 nt, Homo sapiens
  misc_RNA (1)...(19): siRNA sense strand
gugguguaccugaaggaaa

SEQ ID NO: 2217385 - RNA, 19 nt, Homo sapiens
  misc_RNA (1)...(19): siRNA sense strand
acacuaucaaggagaagaa

SEQ ID NO: 2217386 - RNA, 19 nt, Homo sapiens
  misc_RNA (1)...(19): siRNA sense strand
agaagaaaagagugacuaa

SEQ ID NO: 2217387 - RNA, 19 nt, Homo sapiens
  misc_RNA (1)...(19): siRNA sense strand
acaaagagcugaaugccga

SEQ ID NO: 2217388 - RNA, 19 nt, Homo sapiens
  misc_RNA (1)...(19): siRNA sense strand
cgaccagcugccagugaaa

SEQ ID NO: 2217389 - RNA, 19 nt, Homo sapiens
  misc_RNA (1)...(19): siRNA sense strand
gugaaaacuacaugcgauu

SEQ ID NO: 2217390 - RNA, 19 nt, Homo sapiens
  misc_RNA (1)...(19): siRNA sense strand
cuugcaaaguguuggagga

SEQ ID NO: 2217391 - RNA, 19 nt, Homo sapiens
  misc_RNA (1)...(19): siRNA sense strand
gaagaggugaaguugggaa

SEQ ID NO: 2217392 - RNA, 19 nt, Homo sapiens
  misc_RNA (1)...(19): siRNA sense strand
caugggagcugaagccaga

SEQ ID NO: 2217393 - RNA, 19 nt, Homo sapiens
  misc_RNA (1)...(19): siRNA sense strand
auuggaaggaauaguggua

SEQ ID NO: 2217394 - RNA, 19 nt, Homo sapiens
  misc_RNA (1)...(19): siRNA sense strand
aaggagaagaaaagaguga

SEQ ID NO: 2217395 - RNA, 19 nt, Homo sapiens
  misc_RNA (1)...(19): siRNA sense strand
gcaaugaugucgaugacca

SEQ ID NO: 2217396 - RNA, 19 nt, Homo sapiens
  misc_RNA (1)...(19): siRNA sense strand
uggugaacgucgugcccaa

SEQ ID NO: 2217397 - RNA, 19 nt, Homo sapiens
  misc_RNA (1)...(19): siRNA sense strand
gggugaggcuggaugacga

SEQ ID NO: 2217398 - RNA, 19 nt, Homo sapiens
  misc_RNA (1)...(19): siRNA sense strand
acgagaaacuggaaaagau

SEQ ID NO: 2217399 - RNA, 19 nt, Homo sapiens
  misc_RNA (1)...(19): siRNA sense strand
aauacgagaaacuggaaaa

SEQ ID NO: 2217400 - RNA, 19 nt, Homo sapiens
  misc_RNA (1)...(19): siRNA sense strand
cugaagaaguauuuugaca

SEQ ID NO: 2217401 - RNA, 19 nt, Homo sapiens
  misc_RNA (1)...(19): siRNA sense strand
cgagaaacuggaaaagauu

SEQ ID NO: 2217402 - RNA, 19 nt, Homo sapiens
  misc_RNA (1)...(19): siRNA sense strand
agcugaagcacaagaacau

SEQ ID NO: 2217403 - RNA, 19 nt, Homo sapiens
  misc_RNA (1)...(19): siRNA sense strand
gugugaaagaggaggauau

SEQ ID NO: 2217404 - RNA, 19 nt, Homo sapiens
  misc_RNA (1)...(19): siRNA sense strand
gaagaagaauugagaccga

SEQ ID NO: 2217405 - RNA, 19 nt, Homo sapiens
  misc_RNA (1)...(19): siRNA sense strand
gagaagaggaugaagagga

SEQ ID NO: 2217406 - RNA, 19 nt, Homo sapiens
  misc_RNA (1)...(19): siRNA sense strand
augaaauacuugagccaga

SEQ ID NO: 2217407 - RNA, 19 nt, Homo sapiens
  misc_RNA (1)...(19): siRNA sense strand
auacagagguagaagagga

SEQ ID NO: 2217408 - RNA, 19 nt, Homo sapiens
  misc_RNA (1)...(19): siRNA sense strand
cagaagaaaaggaagcaua

SEQ ID NO: 2217409 - RNA, 19 nt, Homo sapiens
  misc_RNA (1)...(19): siRNA sense strand
cauauauagcaaugggaca

SEQ ID NO: 2217410 - RNA, 19 nt, Homo sapiens
  misc_RNA (1)...(19): siRNA sense strand
cagaaugaggguagagacu

SEQ ID NO: 2217411 - RNA, 19 nt, Homo sapiens
  misc_RNA (1)...(19): siRNA sense strand
cagagguagaagaggauga

SEQ ID NO: 2217412 - RNA, 19 nt, Homo sapiens
  misc_RNA (1)...(19): siRNA sense strand
gggaaaucugccaaagaga

SEQ ID NO: 2217413 - RNA, 19 nt, Homo sapiens
  misc_RNA (1)...(19): siRNA sense strand
aggaugaagaggaagauga

SEQ ID NO: 2217414 - RNA, 19 nt, Homo sapiens
  misc_RNA (1)...(19): siRNA sense strand
gagccucacuggaagggaa

SEQ ID NO: 2217415 - RNA, 19 nt, Homo sapiens
  misc_RNA (1)...(19): siRNA sense strand
aagaggaugaagaggaaga

SEQ ID NO: 2217416 - RNA, 19 nt, Homo sapiens
  misc_RNA (1)...(19): siRNA sense strand
aggaagaugacgaguuuga

SEQ ID NO: 2217417 - RNA, 19 nt, Homo sapiens
  misc_RNA (1)...(19): siRNA sense strand
auauauagcaaugggacaa

SEQ ID NO: 2217418 - RNA, 19 nt, Homo sapiens
  misc_RNA (1)...(19): siRNA sense strand
aagcgagaccagugaguca

SEQ ID NO: 2217419 - RNA, 19 nt, Homo sapiens
  misc_RNA (1)...(19): siRNA sense strand
cuaugaaauacuugagcca

SEQ ID NO: 2217420 - RNA, 19 nt, Homo sapiens
  misc_RNA (1)...(19): siRNA sense strand
auaaacgagaagaggauga

SEQ ID NO: 2217421 - RNA, 19 nt, Homo sapiens
  misc_RNA (1)...(19): siRNA sense strand
gagaagaagaauugagacc

SEQ ID NO: 2217422 - RNA, 19 nt, Homo sapiens
  misc_RNA (1)...(19): siRNA sense strand
gcauugaagcgguuagcca

SEQ ID NO: 2217423 - RNA, 19 nt, Homo sapiens
  misc_RNA (1)...(19): siRNA sense strand
augaagaggaagaugacga

SEQ ID NO: 2217424 - RNA, 19 nt, Homo sapiens
  misc_RNA (1)...(19): siRNA sense strand
ugaacuuggccuaugaaau

SEQ ID NO: 2217425 - RNA, 19 nt, Homo sapiens
  misc_RNA (1)...(19): siRNA sense strand
gagcaaggaccaugcagca

SEQ ID NO: 2217426 - RNA, 19 nt, Homo sapiens
  misc_RNA (1)...(19): siRNA sense strand
guuugaagaaguagcagau

SEQ ID NO: 2217427 - RNA, 19 nt, Homo sapiens
  misc_RNA (1)...(19): siRNA sense strand
aauugagaccgaugagaga

SEQ ID NO: 2217428 - RNA, 19 nt, Homo sapiens
  misc_RNA (1)...(19): siRNA sense strand
gcgaugacucagaaagcga

SEQ ID NO: 2217429 - RNA, 19 nt, Homo sapiens
  misc_RNA (1)...(19): siRNA sense strand
auuuaaagggagacaaguu

SEQ ID NO: 2217430 - RNA, 19 nt, Homo sapiens
  misc_RNA (1)...(19): siRNA sense strand
agguagaagaggaugaauc

SEQ ID NO: 2217431 - RNA, 19 nt, Homo sapiens
  misc_RNA (1)...(19): siRNA sense strand
augaacaaauugagcccau

SEQ ID NO: 2217432 - RNA, 19 nt, Homo sapiens
  misc_RNA (1)...(19): siRNA sense strand
gggagacagaggaugugaa

SEQ ID NO: 2217433 - RNA, 19 nt, Homo sapiens
  misc_RNA (1)...(19): siRNA sense strand
acuuauacacucagaaugu

SEQ ID NO: 2217434 - RNA, 19 nt, Homo sapiens
  misc_RNA (1)...(19): siRNA sense strand
cauugaagcgguuagccaa

SEQ ID NO: 2217435 - RNA, 19 nt, Homo sapiens
  misc_RNA (1)...(19): siRNA sense strand
gagaccgaugagagagauu

SEQ ID NO: 2217436 - RNA, 19 nt, Homo sapiens
  misc_RNA (1)...(19): siRNA sense strand
cagcagcauugaagcgguu

SEQ ID NO: 2217437 - RNA, 19 nt, Homo sapiens
  misc_RNA (1)...(19): siRNA sense strand
ugaaacagagcaaggacca

SEQ ID NO: 2217438 - RNA, 19 nt, Homo sapiens
  misc_RNA (1)...(19): siRNA sense strand
augaagacuuauacacuca

SEQ ID NO: 2217439 - RNA, 19 nt, Homo sapiens
  misc_RNA (1)...(19): siRNA sense strand
ggaccacaugagaagaaga

SEQ ID NO: 2217440 - RNA, 19 nt, Homo sapiens
  misc_RNA (1)...(19): siRNA sense strand
agaugacaccagaagaaaa

SEQ ID NO: 2217441 - RNA, 19 nt, Homo sapiens
  misc_RNA (1)...(19): siRNA sense strand
agaaagagccagaggccuu

SEQ ID NO: 2217442 - RNA, 19 nt, Homo sapiens
  misc_RNA (1)...(19): siRNA sense strand
aggaggagaaguugagaca

SEQ ID NO: 2217443 - RNA, 19 nt, Homo sapiens
  misc_RNA (1)...(19): siRNA sense strand
cuugaagggaacagaguca

SEQ ID NO: 2217444 - RNA, 19 nt, Homo sapiens
  misc_RNA (1)...(19): siRNA sense strand
ugugugaucuugaagggaa

SEQ ID NO: 2217445 - RNA, 19 nt, Homo sapiens
  misc_RNA (1)...(19): siRNA sense strand
gcuacuacaugauugguga

SEQ ID NO: 2217446 - RNA, 19 nt, Homo sapiens
  misc_RNA (1)...(19): siRNA sense strand
cuacaugauuggugagcag

SEQ ID NO: 2217447 - RNA, 19 nt, Homo sapiens
  misc_RNA (1)...(19): siRNA sense strand
gaggagaaguugagacagg

SEQ ID NO: 2217448 - RNA, 19 nt, Homo sapiens
  misc_RNA (1)...(19): siRNA sense strand
cugugaaagaggcuggcua

SEQ ID NO: 2217449 - RNA, 19 nt, Homo sapiens
  misc_RNA (1)...(19): siRNA sense strand
gagcuggagaaguggcuga

SEQ ID NO: 2217450 - RNA, 19 nt, Homo sapiens
  misc_RNA (1)...(19): siRNA sense strand
ggaacagagucaagggucc

SEQ ID NO: 2217451 - RNA, 19 nt, Homo sapiens
  misc_RNA (1)...(19): siRNA sense strand
ucuuaagcaccuucugaaa

SEQ ID NO: 2217452 - RNA, 19 nt, Homo sapiens
  misc_RNA (1)...(19): siRNA sense strand
aggugaucucgcaaaguua

SEQ ID NO: 2217453 - RNA, 19 nt, Homo sapiens
  misc_RNA (1)...(19): siRNA sense strand
uagacggugugaagggaga

SEQ ID NO: 2217454 - RNA, 19 nt, Homo sapiens
  misc_RNA (1)...(19): siRNA sense strand
cauuuuaacccucgggauu

SEQ ID NO: 2217455 - RNA, 19 nt, Homo sapiens
  misc_RNA (1)...(19): siRNA sense strand
ggaaacacaucaagcacaa

SEQ ID NO: 2217456 - RNA, 19 nt, Homo sapiens
  misc_RNA (1)...(19): siRNA sense strand
agcacaaguaugagaacaa

SEQ ID NO: 2217457 - RNA, 19 nt, Homo sapiens
  misc_RNA (1)...(19): siRNA sense strand
acaucaagcacaaguauga

SEQ ID NO: 2217458 - RNA, 19 nt, Homo sapiens
  misc_RNA (1)...(19): siRNA sense strand
acaaguaugagaacaagua

SEQ ID NO: 2217459 - RNA, 19 nt, Homo sapiens
  misc_RNA (1)...(19): siRNA sense strand
aacagaagaaagaggagaa

SEQ ID NO: 2217460 - RNA, 19 nt, Homo sapiens
  misc_RNA (1)...(19): siRNA sense strand
cacaggaggaacaggcaaa

SEQ ID NO: 2217461 - RNA, 19 nt, Homo sapiens
  misc_RNA (1)...(19): siRNA sense strand
ucuggaagcuggagcggau

SEQ ID NO: 2217462 - RNA, 19 nt, Homo sapiens
  misc_RNA (1)...(19): siRNA sense strand
acagaagaaagaggagaaa

SEQ ID NO: 2217463 - RNA, 19 nt, Homo sapiens
  misc_RNA (1)...(19): siRNA sense strand
gcacaggaggaacaggcaa

SEQ ID NO: 2217464 - RNA, 19 nt, Homo sapiens
  misc_RNA (1)...(19): siRNA sense strand
aggauugaguggcgaaaau

SEQ ID NO: 2217465 - RNA, 19 nt, Homo sapiens
  misc_RNA (1)...(19): siRNA sense strand
gcaccuacuuggccgguca

SEQ ID NO: 2217466 - RNA, 19 nt, Homo sapiens
  misc_RNA (1)...(19): siRNA sense strand
caaaggauugaguggcgaa

SEQ ID NO: 2217467 - RNA, 19 nt, Homo sapiens
  misc_RNA (1)...(19): siRNA sense strand
caacagaagaaagaggaga

SEQ ID NO: 2217468 - RNA, 19 nt, Homo sapiens
  misc_RNA (1)...(19): siRNA sense strand
aggcagcggcagagaagga

SEQ ID NO: 2217469 - RNA, 19 nt, Homo sapiens
  misc_RNA (1)...(19): siRNA sense strand
ccgaguuccgagagggcau

SEQ ID NO: 2217470 - RNA, 19 nt, Homo sapiens
  misc_RNA (1)...(19): siRNA sense strand
ccacaguaccugaggaagg

SEQ ID NO: 2217471 - RNA, 19 nt, Homo sapiens
  misc_RNA (1)...(19): siRNA sense strand
guccacaguaccugaggaa

SEQ ID NO: 2217472 - RNA, 19 nt, Homo sapiens
  misc_RNA (1)...(19): siRNA sense strand
gugacuaaggcgcagaaga

SEQ ID NO: 2217473 - RNA, 19 nt, Homo sapiens
  misc_RNA (1)...(19): siRNA sense strand
cuggcaacauggagaggau

SEQ ID NO: 2217474 - RNA, 19 nt, Homo sapiens
  misc_RNA (1)...(19): siRNA sense strand
ccacaaaucaagcucccaa

SEQ ID NO: 2217475 - RNA, 19 nt, Homo sapiens
  misc_RNA (1)...(19): siRNA sense strand
agcaaauacaggaaacaau

SEQ ID NO: 2217476 - RNA, 19 nt, Homo sapiens
  misc_RNA (1)...(19): siRNA sense strand
ccacaaaugcagggagaag

SEQ ID NO: 2217477 - RNA, 19 nt, Homo sapiens
  misc_RNA (1)...(19): siRNA sense strand
ccacaugauuagaaugcgu

SEQ ID NO: 2217478 - RNA, 19 nt, Homo sapiens
  misc_RNA (1)...(19): siRNA sense strand
gcgugaaugccgaggccaa

SEQ ID NO: 2217479 - RNA, 19 nt, Homo sapiens
  misc_RNA (1)...(19): siRNA sense strand
ucgccaagcugcaggccaa

SEQ ID NO: 2217480 - RNA, 19 nt, Homo sapiens
  misc_RNA (1)...(19): siRNA sense strand
cccaguacacacagagaaa

SEQ ID NO: 2217481 - RNA, 19 nt, Homo sapiens
  misc_RNA (1)...(19): siRNA sense strand
ccgacagaccauugagaca

SEQ ID NO: 2217482 - RNA, 19 nt, Homo sapiens
  misc_RNA (1)...(19): siRNA sense strand
cugagguggagcuggaaua

SEQ ID NO: 2217483 - RNA, 19 nt, Homo sapiens
  misc_RNA (1)...(19): siRNA sense strand
gggacaaagccaagguucu

SEQ ID NO: 2217484 - RNA, 19 nt, Homo sapiens
  misc_RNA (1)...(19): siRNA sense strand
uggagaagcggcaggccaa

SEQ ID NO: 2217485 - RNA, 19 nt, Homo sapiens
  misc_RNA (1)...(19): siRNA sense strand
gugacaaggaggagcagga

SEQ ID NO: 2217486 - RNA, 19 nt, Homo sapiens
  misc_RNA (1)...(19): siRNA sense strand
aggccaaguucauggagca

SEQ ID NO: 2217487 - RNA, 19 nt, Homo sapiens
  misc_RNA (1)...(19): siRNA sense strand
cagcagcaggagaccgaaa

SEQ ID NO: 2217488 - RNA, 19 nt, Homo sapiens
  misc_RNA (1)...(19): siRNA sense strand
ccgugaugccuucgagaga

SEQ ID NO: 2217489 - RNA, 19 nt, Homo sapiens
  misc_RNA (1)...(19): siRNA sense strand
gcagggaucuggagcagca

SEQ ID NO: 2217490 - RNA, 19 nt, Homo sapiens
  misc_RNA (1)...(19): siRNA sense strand
caguacacacagagaaaau

SEQ ID NO: 2217491 - RNA, 19 nt, Homo sapiens
  misc_RNA (1)...(19): siRNA sense strand
gggaguugcugcaggagcu

SEQ ID NO: 2217492 - RNA, 19 nt, Homo sapiens
  misc_RNA (1)...(19): siRNA sense strand
aguaugagacgcaagucaa

SEQ ID NO: 2217493 - RNA, 19 nt, Homo sapiens
  misc_RNA (1)...(19): siRNA sense strand
cuucggagcuggaggacac

SEQ ID NO: 2217494 - RNA, 19 nt, Homo sapiens
  misc_RNA (1)...(19): siRNA sense strand
aguacagcgaugagaacau

SEQ ID NO: 2217495 - RNA, 19 nt, Homo sapiens
  misc_RNA (1)...(19): siRNA sense strand
aagaagacguaccaggcau

SEQ ID NO: 2217496 - RNA, 19 nt, Homo sapiens
  misc_RNA (1)...(19): siRNA sense strand
ccaagguucucgaggugca

SEQ ID NO: 2217497 - RNA, 19 nt, Homo sapiens
  misc_RNA (1)...(19): siRNA sense strand
ccauugagacagaggaggu

SEQ ID NO: 2217498 - RNA, 19 nt, Homo sapiens
  misc_RNA (1)...(19): siRNA sense strand
ggucaagaagagcagggau

SEQ ID NO: 2217499 - RNA, 19 nt, Homo sapiens
  misc_RNA (1)...(19): siRNA sense strand
gucaagaagagcagggauc

SEQ ID NO: 2217500 - RNA, 19 nt, Homo sapiens
  misc_RNA (1)...(19): siRNA sense strand
aggccaagcacgagaagcu

SEQ ID NO: 2217501 - RNA, 19 nt, Homo sapiens
  misc_RNA (1)...(19): siRNA sense strand
aacacguggagguggauaa

SEQ ID NO: 2217502 - RNA, 19 nt, Homo sapiens
  misc_RNA (1)...(19): siRNA sense strand
caacagaggaauccaggca

SEQ ID NO: 2217503 - RNA, 19 nt, Homo sapiens
  misc_RNA (1)...(19): siRNA sense strand
cugcaaaauuguugggaua

SEQ ID NO: 2217504 - RNA, 19 nt, Homo sapiens
  misc_RNA (1)...(19): siRNA sense strand
cuaacaaggaagagaugaa

SEQ ID NO: 2217505 - RNA, 19 nt, Homo sapiens
  misc_RNA (1)...(19): siRNA sense strand
gcgagaaggagaugggaca

SEQ ID NO: 2217506 - RNA, 19 nt, Homo sapiens
  misc_RNA (1)...(19): siRNA sense strand
gggauaaugaagugaauca

SEQ ID NO: 2217507 - RNA, 19 nt, Homo sapiens
  misc_RNA (1)...(19): siRNA sense strand
ugacaaaggaagugaagca

SEQ ID NO: 2217508 - RNA, 19 nt, Homo sapiens
  misc_RNA (1)...(19): siRNA sense strand
ugaaggaggcggaggccaa

SEQ ID NO: 2217509 - RNA, 19 nt, Homo sapiens
  misc_RNA (1)...(19): siRNA sense strand
agugcaagaaagagacaaa

SEQ ID NO: 2217510 - RNA, 19 nt, Homo sapiens
  misc_RNA (1)...(19): siRNA sense strand
gucagaaagacgagaaaga

SEQ ID NO: 2217511 - RNA, 19 nt, Homo sapiens
  misc_RNA (1)...(19): siRNA sense strand
cuguaaggugagugguuua

SEQ ID NO: 2217512 - RNA, 19 nt, Homo sapiens
  misc_RNA (1)...(19): siRNA sense strand
uagccaaagaggugaagaa

SEQ ID NO: 2217513 - RNA, 19 nt, Homo sapiens
  misc_RNA (1)...(19): siRNA sense strand
acaaaguuaugcaggaaaa

SEQ ID NO: 2217514 - RNA, 19 nt, Homo sapiens
  misc_RNA (1)...(19): siRNA sense strand
uugcauagugguaggaauu

SEQ ID NO: 2217515 - RNA, 19 nt, Homo sapiens
  misc_RNA (1)...(19): siRNA sense strand
agaaagacaaugagaccau

SEQ ID NO: 2217516 - RNA, 19 nt, Homo sapiens
  misc_RNA (1)...(19): siRNA sense strand
agaaaugagcacugcaaaa

SEQ ID NO: 2217517 - RNA, 19 nt, Homo sapiens
  misc_RNA (1)...(19): siRNA sense strand
ccuaagguugagugguaua

SEQ ID NO: 2217518 - RNA, 19 nt, Homo sapiens
  misc_RNA (1)...(19): siRNA sense strand
cccaccagcucuaaagaaa

SEQ ID NO: 2217519 - RNA, 19 nt, Homo sapiens
  misc_RNA (1)...(19): siRNA sense strand
gucuuugaaugcagaguaa

SEQ ID NO: 2217520 - RNA, 19 nt, Homo sapiens
  misc_RNA (1)...(19): siRNA sense strand
cggcuggacuguaagguga

SEQ ID NO: 2217521 - RNA, 19 nt, Homo sapiens
  misc_RNA (1)...(19): siRNA sense strand
ugauaacauucgugaaacu

SEQ ID NO: 2217522 - RNA, 19 nt, Homo sapiens
  misc_RNA (1)...(19): siRNA sense strand
aagaagaauuagacgaaag

SEQ ID NO: 2217523 - RNA, 19 nt, Homo sapiens
  misc_RNA (1)...(19): siRNA sense strand
cagggauaaugaagugaau

SEQ ID NO: 2217524 - RNA, 19 nt, Homo sapiens
  misc_RNA (1)...(19): siRNA sense strand
acucagaaggcgacccuaa

SEQ ID NO: 2217525 - RNA, 19 nt, Homo sapiens
  misc_RNA (1)...(19): siRNA sense strand
ccaaagguuuacugguuca

SEQ ID NO: 2217526 - RNA, 19 nt, Homo sapiens
  misc_RNA (1)...(19): siRNA sense strand
uggaacagcaggaagccaa

SEQ ID NO: 2217527 - RNA, 19 nt, Homo sapiens
  misc_RNA (1)...(19): siRNA sense strand
guugagugguauagagaag

SEQ ID NO: 2217528 - RNA, 19 nt, Homo sapiens
  misc_RNA (1)...(19): siRNA sense strand
aggacagugagcaaagaaa

SEQ ID NO: 2217529 - RNA, 19 nt, Homo sapiens
  misc_RNA (1)...(19): siRNA sense strand
ugauucgagacuugggaaa

SEQ ID NO: 2217530 - RNA, 19 nt, Homo sapiens
  misc_RNA (1)...(19): siRNA sense strand
gaguacaguuggauugcau

SEQ ID NO: 2217531 - RNA, 19 nt, Homo sapiens
  misc_RNA (1)...(19): siRNA sense strand
cuucuaagagagagcuauu

SEQ ID NO: 2217532 - RNA, 19 nt, Homo sapiens
  misc_RNA (1)...(19): siRNA sense strand
gagaaaugagcacugcaaa

SEQ ID NO: 2217533 - RNA, 19 nt, Homo sapiens
  misc_RNA (1)...(19): siRNA sense strand
cagaaagacgagaaagauc

SEQ ID NO: 2217534 - RNA, 19 nt, Homo sapiens
  misc_RNA (1)...(19): siRNA sense strand
cuuugaaugcagaguaaaa

SEQ ID NO: 2217535 - RNA, 19 nt, Homo sapiens
  misc_RNA (1)...(19): siRNA sense strand
aggagagguucaacggaca

SEQ ID NO: 2217536 - RNA, 19 nt, Homo sapiens
  misc_RNA (1)...(19): siRNA sense strand
ggacaugcucucugcacau

SEQ ID NO: 2217537 - RNA, 19 nt, Homo sapiens
  misc_RNA (1)...(19): siRNA sense strand
ccagugaugacgauggcaa

SEQ ID NO: 2217538 - RNA, 19 nt, Homo sapiens
  misc_RNA (1)...(19): siRNA sense strand
cugucagaaagacgagaaa

SEQ ID NO: 2217539 - RNA, 19 nt, Homo sapiens
  misc_RNA (1)...(19): siRNA sense strand
gcuucauaaccaagucuua

SEQ ID NO: 2217540 - RNA, 19 nt, Homo sapiens
  misc_RNA (1)...(19): siRNA sense strand
gaggcugaugaaugaaaua

SEQ ID NO: 2217541 - RNA, 19 nt, Homo sapiens
  misc_RNA (1)...(19): siRNA sense strand
agagaaaugagcacugcaa

SEQ ID NO: 2217542 - RNA, 19 nt, Homo sapiens
  misc_RNA (1)...(19): siRNA sense strand
uggaaagcacgauggugua

SEQ ID NO: 2217543 - RNA, 19 nt, Homo sapiens
  misc_RNA (1)...(19): siRNA sense strand
ggugguacugugaaggcaa

SEQ ID NO: 2217544 - RNA, 19 nt, Homo sapiens
  misc_RNA (1)...(19): siRNA sense strand
cuugaaaauuccccagaua

SEQ ID NO: 2217545 - RNA, 19 nt, Homo sapiens
  misc_RNA (1)...(19): siRNA sense strand
accuauaagugcaucgcua

SEQ ID NO: 2217546 - RNA, 19 nt, Homo sapiens
  misc_RNA (1)...(19): siRNA sense strand
cuaacuucugccaggauaa

SEQ ID NO: 2217547 - RNA, 19 nt, Homo sapiens
  misc_RNA (1)...(19): siRNA sense strand
ugcagggauuggauggaaa

SEQ ID NO: 2217548 - RNA, 19 nt, Homo sapiens
  misc_RNA (1)...(19): siRNA sense strand
cagcaggaguacaaaauuu

SEQ ID NO: 2217549 - RNA, 19 nt, Homo sapiens
  misc_RNA (1)...(19): siRNA sense strand
cuauuuagcugaaaccaga

SEQ ID NO: 2217550 - RNA, 19 nt, Homo sapiens
  misc_RNA (1)...(19): siRNA sense strand
aagaauuagacgaaagugu

SEQ ID NO: 2217551 - RNA, 19 nt, Homo sapiens
  misc_RNA (1)...(19): siRNA sense strand
gaauuagacgaaaguguca

SEQ ID NO: 2217552 - RNA, 19 nt, Homo sapiens
  misc_RNA (1)...(19): siRNA sense strand
gaaagugucaauuuggcaa

SEQ ID NO: 2217553 - RNA, 19 nt, Homo sapiens
  misc_RNA (1)...(19): siRNA sense strand
cagcugcacgugagaggaa

SEQ ID NO: 2217554 - RNA, 19 nt, Homo sapiens
  misc_RNA (1)...(19): siRNA sense strand
caaaaugaggcgagaagga

SEQ ID NO: 2217555 - RNA, 19 nt, Homo sapiens
  misc_RNA (1)...(19): siRNA sense strand
acaagaugcuggucaggga

SEQ ID NO: 2217556 - RNA, 19 nt, Homo sapiens
  misc_RNA (1)...(19): siRNA sense strand
caacaaaaccgggcagaau

SEQ ID NO: 2217557 - RNA, 19 nt, Homo sapiens
  misc_RNA (1)...(19): siRNA sense strand
cugugauccuggagaaacu

SEQ ID NO: 2217558 - RNA, 19 nt, Homo sapiens
  misc_RNA (1)...(19): siRNA sense strand
guuacggagcagagaaguu

SEQ ID NO: 2217559 - RNA, 19 nt, Homo sapiens
  misc_RNA (1)...(19): siRNA sense strand
ccugaagaugacaaaggaa

SEQ ID NO: 2217560 - RNA, 19 nt, Homo sapiens
  misc_RNA (1)...(19): siRNA sense strand
agaugaagaaggaguacaa

SEQ ID NO: 2217561 - RNA, 19 nt, Homo sapiens
  misc_RNA (1)...(19): siRNA sense strand
gaacaaagcuuucggcauc

SEQ ID NO: 2217562 - RNA, 19 nt, Homo sapiens
  misc_RNA (1)...(19): siRNA sense strand
ggaaacagccagaccgaga

SEQ ID NO: 2217563 - RNA, 19 nt, Homo sapiens
  misc_RNA (1)...(19): siRNA sense strand
ccgagaagaagaaggccaa

SEQ ID NO: 2217564 - RNA, 19 nt, Homo sapiens
  misc_RNA (1)...(19): siRNA sense strand
agaagaaagagcugcaaau

SEQ ID NO: 2217565 - RNA, 19 nt, Homo sapiens
  misc_RNA (1)...(19): siRNA sense strand
ccaaagaagaggcggagga

SEQ ID NO: 2217566 - RNA, 19 nt, Homo sapiens
  misc_RNA (1)...(19): siRNA sense strand
cggagaugaagaaggagua

SEQ ID NO: 2217567 - RNA, 19 nt, Homo sapiens
  misc_RNA (1)...(19): siRNA sense strand
guaucaaggagcuggaaga

SEQ ID NO: 2217568 - RNA, 19 nt, Homo sapiens
  misc_RNA (1)...(19): siRNA sense strand
uggugaacgugcuggagaa

SEQ ID NO: 2217569 - RNA, 19 nt, Homo sapiens
  misc_RNA (1)...(19): siRNA sense strand
uggaacaagagaagaaaga

SEQ ID NO: 2217570 - RNA, 19 nt, Homo sapiens
  misc_RNA (1)...(19): siRNA sense strand
gagugaaguccgaggccau

SEQ ID NO: 2217571 - RNA, 19 nt, Homo sapiens
  misc_RNA (1)...(19): siRNA sense strand
agaccuacguggagcacau

SEQ ID NO: 2217572 - RNA, 19 nt, Homo sapiens
  misc_RNA (1)...(19): siRNA sense strand
cggcagggucugaggucau

SEQ ID NO: 2217573 - RNA, 19 nt, Homo sapiens
  misc_RNA (1)...(19): siRNA sense strand
gagaagaagaagucgacca

SEQ ID NO: 2217574 - RNA, 19 nt, Homo sapiens
  misc_RNA (1)...(19): siRNA sense strand
acgacgaggagguggucaa

SEQ ID NO: 2217575 - RNA, 19 nt, Homo sapiens
  misc_RNA (1)...(19): siRNA sense strand
gcgagaaccaggagcacga

SEQ ID NO: 2217576 - RNA, 19 nt, Homo sapiens
  misc_RNA (1)...(19): siRNA sense strand
gaagauggccagugggauc

SEQ ID NO: 2217577 - RNA, 19 nt, Homo sapiens
  misc_RNA (1)...(19): siRNA sense strand
agcugaaggccaagaacua

SEQ ID NO: 2217578 - RNA, 19 nt, Homo sapiens
  misc_RNA (1)...(19): siRNA sense strand
ccaaagucaagcuggaaaa

SEQ ID NO: 2217579 - RNA, 19 nt, Homo sapiens
  misc_RNA (1)...(19): siRNA sense strand
gggcaaagaaguggggaau

SEQ ID NO: 2217580 - RNA, 19 nt, Homo sapiens
  misc_RNA (1)...(19): siRNA sense strand
ucaaggagcuggaagagga

SEQ ID NO: 2217581 - RNA, 19 nt, Homo sapiens
  misc_RNA (1)...(19): siRNA sense strand
gccaaagucaagcuggaaa

SEQ ID NO: 2217582 - RNA, 19 nt, Homo sapiens
  misc_RNA (1)...(19): siRNA sense strand
gggacaugagccaggugaa

SEQ ID NO: 2217583 - RNA, 19 nt, Homo sapiens
  misc_RNA (1)...(19): siRNA sense strand
uugaagaugcucuggaaca

SEQ ID NO: 2217584 - RNA, 19 nt, Homo sapiens
  misc_RNA (1)...(19): siRNA sense strand
ugaacaaagcuuucggcau

SEQ ID NO: 2217585 - RNA, 19 nt, Homo sapiens
  misc_RNA (1)...(19): siRNA sense strand
agaaugaccugauugccaa

SEQ ID NO: 2217586 - RNA, 19 nt, Homo sapiens
  misc_RNA (1)...(19): siRNA sense strand
ccguccaggagaagaagaa

SEQ ID NO: 2217587 - RNA, 19 nt, Homo sapiens
  misc_RNA (1)...(19): siRNA sense strand
agcagaagcgcgagcagua

SEQ ID NO: 2217588 - RNA, 19 nt, Homo sapiens
  misc_RNA (1)...(19): siRNA sense strand
cauccguccaggagaagaa

SEQ ID NO: 2217589 - RNA, 19 nt, Homo sapiens
  misc_RNA (1)...(19): siRNA sense strand
agaagaaggccaaggagcu

SEQ ID NO: 2217590 - RNA, 19 nt, Homo sapiens
  misc_RNA (1)...(19): siRNA sense strand
gcuacaagaacaaggugca

SEQ ID NO: 2217591 - RNA, 19 nt, Homo sapiens
  misc_RNA (1)...(19): siRNA sense strand
acguggacauugagcccua

SEQ ID NO: 2217592 - RNA, 19 nt, Homo sapiens
  misc_RNA (1)...(19): siRNA sense strand
aggccaaagucaagcugga

SEQ ID NO: 2217593 - RNA, 19 nt, Homo sapiens
  misc_RNA (1)...(19): siRNA sense strand
gccagugggaucugagcaa

SEQ ID NO: 2217594 - RNA, 19 nt, Homo sapiens
  misc_RNA (1)...(19): siRNA sense strand
cccagggcaucgugaacaa

SEQ ID NO: 2217595 - RNA, 19 nt, Homo sapiens
  misc_RNA (1)...(19): siRNA sense strand
gaacaagagaagaaagagc

SEQ ID NO: 2217596 - RNA, 19 nt, Homo sapiens
  misc_RNA (1)...(19): siRNA sense strand
gguccaagaugcagcaggu

SEQ ID NO: 2217597 - RNA, 19 nt, Homo sapiens
  misc_RNA (1)...(19): siRNA sense strand
gagaggacgacgagacgga

SEQ ID NO: 2217598 - RNA, 19 nt, Homo sapiens
  misc_RNA (1)...(19): siRNA sense strand
caggagaagaagaagucga

SEQ ID NO: 2217599 - RNA, 19 nt, Homo sapiens
  misc_RNA (1)...(19): siRNA sense strand
gcgaguuggaggcugcuaa

SEQ ID NO: 2217600 - RNA, 19 nt, Homo sapiens
  misc_RNA (1)...(19): siRNA sense strand
agaagaagaagucgaccau

SEQ ID NO: 2217601 - RNA, 19 nt, Homo sapiens
  misc_RNA (1)...(19): siRNA sense strand
ccaccaucgccaacgggaa

SEQ ID NO: 2217602 - RNA, 19 nt, Homo sapiens
  misc_RNA (1)...(19): siRNA sense strand
gguguggcuacaagaacaa

SEQ ID NO: 2217603 - RNA, 19 nt, Homo sapiens
  misc_RNA (1)...(19): siRNA sense strand
gcagcaggucggaggaaac

SEQ ID NO: 2217604 - RNA, 19 nt, Homo sapiens
  misc_RNA (1)...(19): siRNA sense strand
aaggagacggcgagcccaa

SEQ ID NO: 2217605 - RNA, 19 nt, Homo sapiens
  misc_RNA (1)...(19): siRNA sense strand
ucgccaacgggaaggucaa

SEQ ID NO: 2217606 - RNA, 19 nt, Homo sapiens
  misc_RNA (1)...(19): siRNA sense strand
ugucaaaggccgugugcug

SEQ ID NO: 2217607 - RNA, 19 nt, Homo sapiens
  misc_RNA (1)...(19): siRNA sense strand
ugguguggcuacaagaaca

SEQ ID NO: 2217608 - RNA, 19 nt, Homo sapiens
  misc_RNA (1)...(19): siRNA sense strand
agaugaagaaggaguacaa

SEQ ID NO: 2217609 - RNA, 19 nt, Homo sapiens
  misc_RNA (1)...(19): siRNA sense strand
gaacaaagcuuucggcauc

SEQ ID NO: 2217610 - RNA, 19 nt, Homo sapiens
  misc_RNA (1)...(19): siRNA sense strand
ggaaacagccagaccgaga

SEQ ID NO: 2217611 - RNA, 19 nt, Homo sapiens
  misc_RNA (1)...(19): siRNA sense strand
ccgagaagaagaaggccaa

SEQ ID NO: 2217612 - RNA, 19 nt, Homo sapiens
  misc_RNA (1)...(19): siRNA sense strand
agaagaaagagcugcaaau

SEQ ID NO: 2217613 - RNA, 19 nt, Homo sapiens
  misc_RNA (1)...(19): siRNA sense strand
ccaaagaagaggcggagga

SEQ ID NO: 2217614 - RNA, 19 nt, Homo sapiens
  misc_RNA (1)...(19): siRNA sense strand
cggagaugaagaaggagua

SEQ ID NO: 2217615 - RNA, 19 nt, Homo sapiens
  misc_RNA (1)...(19): siRNA sense strand
guaucaaggagcuggaaga

SEQ ID NO: 2217616 - RNA, 19 nt, Homo sapiens
  misc_RNA (1)...(19): siRNA sense strand
uggugaacgugcuggagaa

SEQ ID NO: 2217617 - RNA, 19 nt, Homo sapiens
  misc_RNA (1)...(19): siRNA sense strand
uggaacaagagaagaaaga

SEQ ID NO: 2217618 - RNA, 19 nt, Homo sapiens
  misc_RNA (1)...(19): siRNA sense strand
gagugaaguccgaggccau

SEQ ID NO: 2217619 - RNA, 19 nt, Homo sapiens
  misc_RNA (1)...(19): siRNA sense strand
agaccuacguggagcacau

SEQ ID NO: 2217620 - RNA, 19 nt, Homo sapiens
  misc_RNA (1)...(19): siRNA sense strand
cggcagggucugaggucau

SEQ ID NO: 2217621 - RNA, 19 nt, Homo sapiens
  misc_RNA (1)...(19): siRNA sense strand
gagaagaagaagucgacca

SEQ ID NO: 2217622 - RNA, 19 nt, Homo sapiens
  misc_RNA (1)...(19): siRNA sense strand
acgacgaggagguggucaa

SEQ ID NO: 2217623 - RNA, 19 nt, Homo sapiens
  misc_RNA (1)...(19): siRNA sense strand
gcgagaaccaggagcacga

SEQ ID NO: 2217624 - RNA, 19 nt, Homo sapiens
  misc_RNA (1)...(19): siRNA sense strand
gaagauggccagugggauc

SEQ ID NO: 2217625 - RNA, 19 nt, Homo sapiens
  misc_RNA (1)...(19): siRNA sense strand
agcugaaggccaagaacua

SEQ ID NO: 2217626 - RNA, 19 nt, Homo sapiens
  misc_RNA (1)...(19): siRNA sense strand
ccaaagucaagcuggaaaa

SEQ ID NO: 2217627 - RNA, 19 nt, Homo sapiens
  misc_RNA (1)...(19): siRNA sense strand
gggcaaagaaguggggaau

SEQ ID NO: 2217628 - RNA, 19 nt, Homo sapiens
  misc_RNA (1)...(19): siRNA sense strand
ucaaggagcuggaagagga

SEQ ID NO: 2217629 - RNA, 19 nt, Homo sapiens
  misc_RNA (1)...(19): siRNA sense strand
gccaaagucaagcuggaaa

SEQ ID NO: 2217630 - RNA, 19 nt, Homo sapiens
  misc_RNA (1)...(19): siRNA sense strand
gggacaugagccaggugaa

SEQ ID NO: 2217631 - RNA, 19 nt, Homo sapiens
  misc_RNA (1)...(19): siRNA sense strand
uugaagaugcucuggaaca

SEQ ID NO: 2217632 - RNA, 19 nt, Homo sapiens
  misc_RNA (1)...(19): siRNA sense strand
ugaacaaagcuuucggcau

SEQ ID NO: 2217633 - RNA, 19 nt, Homo sapiens
  misc_RNA (1)...(19): siRNA sense strand
agaaugaccugauugccaa

SEQ ID NO: 2217634 - RNA, 19 nt, Homo sapiens
  misc_RNA (1)...(19): siRNA sense strand
ccguccaggagaagaagaa

SEQ ID NO: 2217635 - RNA, 19 nt, Homo sapiens
  misc_RNA (1)...(19): siRNA sense strand
agcagaagcgcgagcagua

SEQ ID NO: 2217636 - RNA, 19 nt, Homo sapiens
  misc_RNA (1)...(19): siRNA sense strand
cauccguccaggagaagaa

SEQ ID NO: 2217637 - RNA, 19 nt, Homo sapiens
  misc_RNA (1)...(19): siRNA sense strand
agaagaaggccaaggagcu

SEQ ID NO: 2217638 - RNA, 19 nt, Homo sapiens
  misc_RNA (1)...(19): siRNA sense strand
gcuacaagaacaaggugca

SEQ ID NO: 2217639 - RNA, 19 nt, Homo sapiens
  misc_RNA (1)...(19): siRNA sense strand
acguggacauugagcccua

SEQ ID NO: 2217640 - RNA, 19 nt, Homo sapiens
  misc_RNA (1)...(19): siRNA sense strand
aggccaaagucaagcugga

SEQ ID NO: 2217641 - RNA, 19 nt, Homo sapiens
  misc_RNA (1)...(19): siRNA sense strand
gccagugggaucugagcaa

SEQ ID NO: 2217642 - RNA, 19 nt, Homo sapiens
  misc_RNA (1)...(19): siRNA sense strand
cccagggcaucgugaacaa

SEQ ID NO: 2217643 - RNA, 19 nt, Homo sapiens
  misc_RNA (1)...(19): siRNA sense strand
gaacaagagaagaaagagc

SEQ ID NO: 2217644 - RNA, 19 nt, Homo sapiens
  misc_RNA (1)...(19): siRNA sense strand
gguccaagaugcagcaggu

SEQ ID NO: 2217645 - RNA, 19 nt, Homo sapiens
  misc_RNA (1)...(19): siRNA sense strand
gagaggacgacgagacgga

SEQ ID NO: 2217646 - RNA, 19 nt, Homo sapiens
  misc_RNA (1)...(19): siRNA sense strand
caggagaagaagaagucga

SEQ ID NO: 2217647 - RNA, 19 nt, Homo sapiens
  misc_RNA (1)...(19): siRNA sense strand
gcgaguuggaggcugcuaa

SEQ ID NO: 2217648 - RNA, 19 nt, Homo sapiens
  misc_RNA (1)...(19): siRNA sense strand
agaagaagaagucgaccau

SEQ ID NO: 2217649 - RNA, 19 nt, Homo sapiens
  misc_RNA (1)...(19): siRNA sense strand
ccaccaucgccaacgggaa

SEQ ID NO: 2217650 - RNA, 19 nt, Homo sapiens
  misc_RNA (1)...(19): siRNA sense strand
gguguggcuacaagaacaa

SEQ ID NO: 2217651 - RNA, 19 nt, Homo sapiens
  misc_RNA (1)...(19): siRNA sense strand
gcagcaggucggaggaaac

SEQ ID NO: 2217652 - RNA, 19 nt, Homo sapiens
  misc_RNA (1)...(19): siRNA sense strand
aaggagacggcgagcccaa

SEQ ID NO: 2217653 - RNA, 19 nt, Homo sapiens
  misc_RNA (1)...(19): siRNA sense strand
ucgccaacgggaaggucaa

SEQ ID NO: 2217654 - RNA, 19 nt, Homo sapiens
  misc_RNA (1)...(19): siRNA sense strand
ugucaaaggccgugugcug

SEQ ID NO: 2217655 - RNA, 19 nt, Homo sapiens
  misc_RNA (1)...(19): siRNA sense strand
ugguguggcuacaagaaca

SEQ ID NO: 2217656 - RNA, 19 nt, Homo sapiens
  misc_RNA (1)...(19): siRNA sense strand
cuguggaggugcaggucaa

SEQ ID NO: 2217657 - RNA, 19 nt, Homo sapiens
  misc_RNA (1)...(19): siRNA sense strand
agaugaaggcgaagcgaca

SEQ ID NO: 2217658 - RNA, 19 nt, Homo sapiens
  misc_RNA (1)...(19): siRNA sense strand
agcaauaaguccauggaga

SEQ ID NO: 2217659 - RNA, 19 nt, Homo sapiens
  misc_RNA (1)...(19): siRNA sense strand
cgcugaagaauguggacaa

SEQ ID NO: 2217660 - RNA, 19 nt, Homo sapiens
  misc_RNA (1)...(19): siRNA sense strand
cggcauugcaacagccaga

SEQ ID NO: 2217661 - RNA, 19 nt, Homo sapiens
  misc_RNA (1)...(19): siRNA sense strand
agaucgagguguuggugga

SEQ ID NO: 2217662 - RNA, 19 nt, Homo sapiens
  misc_RNA (1)...(19): siRNA sense strand
cuguggaggugcaggucaa

SEQ ID NO: 2217663 - RNA, 19 nt, Homo sapiens
  misc_RNA (1)...(19): siRNA sense strand
cgcugaagaauguggacaa

SEQ ID NO: 2217664 - RNA, 19 nt, Homo sapiens
  misc_RNA (1)...(19): siRNA sense strand
cggcauugcaacagccaga

SEQ ID NO: 2217665 - RNA, 19 nt, Homo sapiens
  misc_RNA (1)...(19): siRNA sense strand
cuguggaggugcaggucaa

SEQ ID NO: 2217666 - RNA, 19 nt, Homo sapiens
  misc_RNA (1)...(19): siRNA sense strand
cgcugaagaauguggacaa

SEQ ID NO: 2217667 - RNA, 19 nt, Homo sapiens
  misc_RNA (1)...(19): siRNA sense strand
cggcauugcaacagccaga

SEQ ID NO: 2217668 - RNA, 19 nt, Homo sapiens
  misc_RNA (1)...(19): siRNA sense strand
cuguggaggugcaggucaa

SEQ ID NO: 2217669 - RNA, 19 nt, Homo sapiens
  misc_RNA (1)...(19): siRNA sense strand
agaugaaggcgaagcgaca

SEQ ID NO: 2217670 - RNA, 19 nt, Homo sapiens
  misc_RNA (1)...(19): siRNA sense strand
agcaauaaguccauggaga

SEQ ID NO: 2217671 - RNA, 19 nt, Homo sapiens
  misc_RNA (1)...(19): siRNA sense strand
cgcugaagaauguggacaa

SEQ ID NO: 2217672 - RNA, 19 nt, Homo sapiens
  misc_RNA (1)...(19): siRNA sense strand
cggcauugcaacagccaga

SEQ ID NO: 2217673 - RNA, 19 nt, Homo sapiens
  misc_RNA (1)...(19): siRNA sense strand
agaucgagguguuggugga

SEQ ID NO: 2217674 - RNA, 19 nt, Homo sapiens
  misc_RNA (1)...(19): siRNA sense strand
cuguggaggugcaggucaa

SEQ ID NO: 2217675 - RNA, 19 nt, Homo sapiens
  misc_RNA (1)...(19): siRNA sense strand
agaugaaggcgaagcgaca

SEQ ID NO: 2217676 - RNA, 19 nt, Homo sapiens
  misc_RNA (1)...(19): siRNA sense strand
agcaauaaguccauggaga

SEQ ID NO: 2217677 - RNA, 19 nt, Homo sapiens
  misc_RNA (1)...(19): siRNA sense strand
cgcugaagaauguggacaa

SEQ ID NO: 2217678 - RNA, 19 nt, Homo sapiens
  misc_RNA (1)...(19): siRNA sense strand
cggcauugcaacagccaga

SEQ ID NO: 2217679 - RNA, 19 nt, Homo sapiens
  misc_RNA (1)...(19): siRNA sense strand
agaucgagguguuggugga

SEQ ID NO: 2217680 - RNA, 19 nt, Homo sapiens
  misc_RNA (1)...(19): siRNA sense strand
cuguggaggugcaggucaa

SEQ ID NO: 2217681 - RNA, 19 nt, Homo sapiens
  misc_RNA (1)...(19): siRNA sense strand
agaugaaggcgaagcgaca

SEQ ID NO: 2217682 - RNA, 19 nt, Homo sapiens
  misc_RNA (1)...(19): siRNA sense strand
agcaauaaguccauggaga

SEQ ID NO: 2217683 - RNA, 19 nt, Homo sapiens
  misc_RNA (1)...(19): siRNA sense strand
cgcugaagaauguggacaa

SEQ ID NO: 2217684 - RNA, 19 nt, Homo sapiens
  misc_RNA (1)...(19): siRNA sense strand
cggcauugcaacagccaga

SEQ ID NO: 2217685 - RNA, 19 nt, Homo sapiens
  misc_RNA (1)...(19): siRNA sense strand
agaucgagguguuggugga

SEQ ID NO: 2217686 - RNA, 19 nt, Homo sapiens
  misc_RNA (1)...(19): siRNA sense strand
gggcagagcuggaaggaga

SEQ ID NO: 2217687 - RNA, 19 nt, Homo sapiens
  misc_RNA (1)...(19): siRNA sense strand
guguaugggccaggagaaa

SEQ ID NO: 2217688 - RNA, 19 nt, Homo sapiens
  misc_RNA (1)...(19): siRNA sense strand
cgguagaguguaugggcca

SEQ ID NO: 2217689 - RNA, 19 nt, Homo sapiens
  misc_RNA (1)...(19): siRNA sense strand
aggggaauucagagaaaua

SEQ ID NO: 2217690 - RNA, 19 nt, Homo sapiens
  misc_RNA (1)...(19): siRNA sense strand
ggagauuggaaaagcaaau

SEQ ID NO: 2217691 - RNA, 19 nt, Homo sapiens
  misc_RNA (1)...(19): siRNA sense strand
aggaaagaaaacagccaaa

SEQ ID NO: 2217692 - RNA, 19 nt, Homo sapiens
  misc_RNA (1)...(19): siRNA sense strand
agaaaacagccaaaacaaa

SEQ ID NO: 2217693 - RNA, 19 nt, Homo sapiens
  misc_RNA (1)...(19): siRNA sense strand
uggauaaaggagaaaacua

SEQ ID NO: 2217694 - RNA, 19 nt, Homo sapiens
  misc_RNA (1)...(19): siRNA sense strand
ucauuggagcugugguauu

SEQ ID NO: 2217695 - RNA, 19 nt, Homo sapiens
  misc_RNA (1)...(19): siRNA sense strand
gugaaggaugugaagcaga

SEQ ID NO: 2217696 - RNA, 19 nt, Homo sapiens
  misc_RNA (1)...(19): siRNA sense strand
cagggaauguggagagcac

SEQ ID NO: 2217697 - RNA, 19 nt, Homo sapiens
  misc_RNA (1)...(19): siRNA sense strand
gggcaaagacggugcgcua

SEQ ID NO: 2217698 - RNA, 19 nt, Homo sapiens
  misc_RNA (1)...(19): siRNA sense strand
ccacaauggagcugggaaa

SEQ ID NO: 2217699 - RNA, 19 nt, Homo sapiens
  misc_RNA (1)...(19): siRNA sense strand
acauagacgugguggagaa

SEQ ID NO: 2217700 - RNA, 19 nt, Homo sapiens
  misc_RNA (1)...(19): siRNA sense strand
aggaagaggaauacgaaua

SEQ ID NO: 2217701 - RNA, 19 nt, Homo sapiens
  misc_RNA (1)...(19): siRNA sense strand
uuacaaagcugaugggcau

SEQ ID NO: 2217702 - RNA, 19 nt, Homo sapiens
  misc_RNA (1)...(19): siRNA sense strand
gcgugaagaaucugguaaa

SEQ ID NO: 2217703 - RNA, 19 nt, Homo sapiens
  misc_RNA (1)...(19): siRNA sense strand
gugcauuggucaagaacuu

SEQ ID NO: 2217704 - RNA, 19 nt, Homo sapiens
  misc_RNA (1)...(19): siRNA sense strand
ccuuaaacaucuagaaacu

SEQ ID NO: 2217705 - RNA, 19 nt, Homo sapiens
  misc_RNA (1)...(19): siRNA sense strand
gcuaaacagcagacugaaa

SEQ ID NO: 2217706 - RNA, 19 nt, Homo sapiens
  misc_RNA (1)...(19): siRNA sense strand
ugaagaaggcugugagcuu

SEQ ID NO: 2217707 - RNA, 19 nt, Homo sapiens
  misc_RNA (1)...(19): siRNA sense strand
gcucacaggacgagaacau

SEQ ID NO: 2217708 - RNA, 19 nt, Homo sapiens
  misc_RNA (1)...(19): siRNA sense strand
accaagaauucaagaguuu

SEQ ID NO: 2217709 - RNA, 19 nt, Homo sapiens
  misc_RNA (1)...(19): siRNA sense strand
agaaauggacacaggucaa

SEQ ID NO: 2217710 - RNA, 19 nt, Homo sapiens
  misc_RNA (1)...(19): siRNA sense strand
cuacaagaccugacggaca

SEQ ID NO: 2217711 - RNA, 19 nt, Homo sapiens
  misc_RNA (1)...(19): siRNA sense strand
gggucaaugaacagaggua

SEQ ID NO: 2217712 - RNA, 19 nt, Homo sapiens
  misc_RNA (1)...(19): siRNA sense strand
aagaaagagcccuggaaaa

SEQ ID NO: 2217713 - RNA, 19 nt, Homo sapiens
  misc_RNA (1)...(19): siRNA sense strand
ggagaaaaccaauaagauu

SEQ ID NO: 2217714 - RNA, 19 nt, Homo sapiens
  misc_RNA (1)...(19): siRNA sense strand
cauccagagccaaaggaaa

SEQ ID NO: 2217715 - RNA, 19 nt, Homo sapiens
  misc_RNA (1)...(19): siRNA sense strand
agugaauggugccggcaaa

SEQ ID NO: 2217716 - RNA, 19 nt, Homo sapiens
  misc_RNA (1)...(19): siRNA sense strand
augaacaugaucagagaua

SEQ ID NO: 2217717 - RNA, 19 nt, Homo sapiens
  misc_RNA (1)...(19): siRNA sense strand
aauugcaggaagaggaaua

SEQ ID NO: 2217718 - RNA, 19 nt, Homo sapiens
  misc_RNA (1)...(19): siRNA sense strand
ggguaugcgugaagaaucu

SEQ ID NO: 2217719 - RNA, 19 nt, Homo sapiens
  misc_RNA (1)...(19): siRNA sense strand
aggcaaagcugguggagug

SEQ ID NO: 2217720 - RNA, 19 nt, Homo sapiens
  misc_RNA (1)...(19): siRNA sense strand
ggagauggcuauaucguca

SEQ ID NO: 2217721 - RNA, 19 nt, Homo sapiens
  misc_RNA (1)...(19): siRNA sense strand
agccuuugcugaugggaaa

SEQ ID NO: 2217722 - RNA, 19 nt, Homo sapiens
  misc_RNA (1)...(19): siRNA sense strand
aauaagaacuucaagcaca

SEQ ID NO: 2217723 - RNA, 19 nt, Homo sapiens
  misc_RNA (1)...(19): siRNA sense strand
cugaagaaagacaaagaau

SEQ ID NO: 2217724 - RNA, 19 nt, Homo sapiens
  misc_RNA (1)...(19): siRNA sense strand
ggaacgucaucgugagcau

SEQ ID NO: 2217725 - RNA, 19 nt, Homo sapiens
  misc_RNA (1)...(19): siRNA sense strand
uggcaaggguauaucgaga

SEQ ID NO: 2217726 - RNA, 19 nt, Homo sapiens
  misc_RNA (1)...(19): siRNA sense strand
cagguggcaugcagagaaa

SEQ ID NO: 2217727 - RNA, 19 nt, Homo sapiens
  misc_RNA (1)...(19): siRNA sense strand
guguucaaccagagaagaa

SEQ ID NO: 2217728 - RNA, 19 nt, Homo sapiens
  misc_RNA (1)...(19): siRNA sense strand
gcucagcagaaaagagaaa

SEQ ID NO: 2217729 - RNA, 19 nt, Homo sapiens
  misc_RNA (1)...(19): siRNA sense strand
agucaaauccuuuaaccaa

SEQ ID NO: 2217730 - RNA, 19 nt, Homo sapiens
  misc_RNA (1)...(19): siRNA sense strand
cuacaagggcccucgggaa

SEQ ID NO: 2217731 - RNA, 19 nt, Homo sapiens
  misc_RNA (1)...(19): siRNA sense strand
cagcagaagaaaucgaaaa

SEQ ID NO: 2217732 - RNA, 19 nt, Homo sapiens
  misc_RNA (1)...(19): siRNA sense strand
agugcuugguccuggauaa

SEQ ID NO: 2217733 - RNA, 19 nt, Homo sapiens
  misc_RNA (1)...(19): siRNA sense strand
ucuccgacuucuugguaaa

SEQ ID NO: 2217734 - RNA, 19 nt, Homo sapiens
  misc_RNA (1)...(19): siRNA sense strand
gagaauugcaggaagagga

SEQ ID NO: 2217735 - RNA, 19 nt, Homo sapiens
  misc_RNA (1)...(19): siRNA sense strand
gggaagaaccuguuugcca

SEQ ID NO: 2217736 - RNA, 19 nt, Homo sapiens
  misc_RNA (1)...(19): siRNA sense strand
ggaagaaccuguuugccau

SEQ ID NO: 2217737 - RNA, 19 nt, Homo sapiens
  misc_RNA (1)...(19): siRNA sense strand
ccguauuuggacagagcua

SEQ ID NO: 2217738 - RNA, 19 nt, Homo sapiens
  misc_RNA (1)...(19): siRNA sense strand
gggcugcaguggagcaaca

SEQ ID NO: 2217739 - RNA, 19 nt, Homo sapiens
  misc_RNA (1)...(19): siRNA sense strand
cuucaagcacagagcauau

SEQ ID NO: 2217740 - RNA, 19 nt, Homo sapiens
  misc_RNA (1)...(19): siRNA sense strand
aggaauacgaauaagggau

SEQ ID NO: 2217741 - RNA, 19 nt, Homo sapiens
  misc_RNA (1)...(19): siRNA sense strand
gucaaauccuuuaaccaaa

SEQ ID NO: 2217742 - RNA, 19 nt, Homo sapiens
  misc_RNA (1)...(19): siRNA sense strand
agguguaccagcagaagaa

SEQ ID NO: 2217743 - RNA, 19 nt, Homo sapiens
  misc_RNA (1)...(19): siRNA sense strand
gcggaaaaggcaaaagauu

SEQ ID NO: 2217744 - RNA, 19 nt, Homo sapiens
  misc_RNA (1)...(19): siRNA sense strand
cacgaaggauacugaagaa

SEQ ID NO: 2217745 - RNA, 19 nt, Homo sapiens
  misc_RNA (1)...(19): siRNA sense strand
augcccagcugaaaggaaa

SEQ ID NO: 2217746 - RNA, 19 nt, Homo sapiens
  misc_RNA (1)...(19): siRNA sense strand
agaugaacaugaucagaga

SEQ ID NO: 2217747 - RNA, 19 nt, Homo sapiens
  misc_RNA (1)...(19): siRNA sense strand
agagcaucgucuuggagaa

SEQ ID NO: 2217748 - RNA, 19 nt, Homo sapiens
  misc_RNA (1)...(19): siRNA sense strand
ccaccauguuccagaggca

SEQ ID NO: 2217749 - RNA, 19 nt, Homo sapiens
  misc_RNA (1)...(19): siRNA sense strand
ggaccagguguuuguaaau

SEQ ID NO: 2217750 - RNA, 19 nt, Homo sapiens
  misc_RNA (1)...(19): siRNA sense strand
gggcuucgugagacagaua

SEQ ID NO: 2217751 - RNA, 19 nt, Homo sapiens
  misc_RNA (1)...(19): siRNA sense strand
uggucuaccuucugaucaa

SEQ ID NO: 2217752 - RNA, 19 nt, Homo sapiens
  misc_RNA (1)...(19): siRNA sense strand
acuuaaccuuggugcgcaa

SEQ ID NO: 2217753 - RNA, 19 nt, Homo sapiens
  misc_RNA (1)...(19): siRNA sense strand
gcccauuguugaugaagau

SEQ ID NO: 2217754 - RNA, 19 nt, Homo sapiens
  misc_RNA (1)...(19): siRNA sense strand
gggagaggcacuacaacau

SEQ ID NO: 2217755 - RNA, 19 nt, Homo sapiens
  misc_RNA (1)...(19): siRNA sense strand
uacaagggcccucgggaaa

SEQ ID NO: 2217756 - RNA, 19 nt, Homo sapiens
  misc_RNA (1)...(19): siRNA sense strand
aaggaaagucccaggagga

SEQ ID NO: 2217757 - RNA, 19 nt, Homo sapiens
  misc_RNA (1)...(19): siRNA sense strand
ucagagagcuggaggagac

SEQ ID NO: 2217758 - RNA, 19 nt, Homo sapiens
  misc_RNA (1)...(19): siRNA sense strand
ggcuuuaucuugugcuaau

SEQ ID NO: 2217759 - RNA, 19 nt, Homo sapiens
  misc_RNA (1)...(19): siRNA sense strand
ccguagcaggcaagaguau

SEQ ID NO: 2217760 - RNA, 19 nt, Homo sapiens
  misc_RNA (1)...(19): siRNA sense strand
gacaauaacuauaaggccu

SEQ ID NO: 2217761 - RNA, 19 nt, Homo sapiens
  misc_RNA (1)...(19): siRNA sense strand
guaaaugagcugauggaug

SEQ ID NO: 2217762 - RNA, 19 nt, Homo sapiens
  misc_RNA (1)...(19): siRNA sense strand
gaauauuucuccaagcaga

SEQ ID NO: 2217763 - RNA, 19 nt, Homo sapiens
  misc_RNA (1)...(19): siRNA sense strand
cagugauagggcagaagaa

SEQ ID NO: 2217764 - RNA, 19 nt, Homo sapiens
  misc_RNA (1)...(19): siRNA sense strand
ugucugacuacaaaggaaa

SEQ ID NO: 2217765 - RNA, 19 nt, Homo sapiens
  misc_RNA (1)...(19): siRNA sense strand
gaaacaaggaggacuggga

SEQ ID NO: 2217766 - RNA, 19 nt, Homo sapiens
  misc_RNA (1)...(19): siRNA sense strand
cugucugacuacaaaggaa

SEQ ID NO: 2217767 - RNA, 19 nt, Homo sapiens
  misc_RNA (1)...(19): siRNA sense strand
uggaugagacuuugagacu

SEQ ID NO: 2217768 - RNA, 19 nt, Homo sapiens
  misc_RNA (1)...(19): siRNA sense strand
gaauauuucuccaagcaga

SEQ ID NO: 2217769 - RNA, 19 nt, Homo sapiens
  misc_RNA (1)...(19): siRNA sense strand
cagugauagggcagaagaa

SEQ ID NO: 2217770 - RNA, 19 nt, Homo sapiens
  misc_RNA (1)...(19): siRNA sense strand
ugucugacuacaaaggaaa

SEQ ID NO: 2217771 - RNA, 19 nt, Homo sapiens
  misc_RNA (1)...(19): siRNA sense strand
gaaacaaggaggacuggga

SEQ ID NO: 2217772 - RNA, 19 nt, Homo sapiens
  misc_RNA (1)...(19): siRNA sense strand
cugucugacuacaaaggaa

SEQ ID NO: 2217773 - RNA, 19 nt, Homo sapiens
  misc_RNA (1)...(19): siRNA sense strand
uggaugagacuuugagacu

SEQ ID NO: 2217774 - RNA, 19 nt, Homo sapiens
  misc_RNA (1)...(19): siRNA sense strand
gaauauuucuccaagcaga

SEQ ID NO: 2217775 - RNA, 19 nt, Homo sapiens
  misc_RNA (1)...(19): siRNA sense strand
cagugauagggcagaagaa

SEQ ID NO: 2217776 - RNA, 19 nt, Homo sapiens
  misc_RNA (1)...(19): siRNA sense strand
ugucugacuacaaaggaaa

SEQ ID NO: 2217777 - RNA, 19 nt, Homo sapiens
  misc_RNA (1)...(19): siRNA sense strand
gaaacaaggaggacuggga

SEQ ID NO: 2217778 - RNA, 19 nt, Homo sapiens
  misc_RNA (1)...(19): siRNA sense strand
cugucugacuacaaaggaa

SEQ ID NO: 2217779 - RNA, 19 nt, Homo sapiens
  misc_RNA (1)...(19): siRNA sense strand
uggaugagacuuugagacu

SEQ ID NO: 2217780 - RNA, 19 nt, Homo sapiens
  misc_RNA (1)...(19): siRNA sense strand
gaacaugaacccugcacca

SEQ ID NO: 2217781 - RNA, 19 nt, Homo sapiens
  misc_RNA (1)...(19): siRNA sense strand
cugcaguggucccagucaa

SEQ ID NO: 2217782 - RNA, 19 nt, Homo sapiens
  misc_RNA (1)...(19): siRNA sense strand
cuguaaaugaacccaagaa

SEQ ID NO: 2217783 - RNA, 19 nt, Homo sapiens
  misc_RNA (1)...(19): siRNA sense strand
uuaccauugaggagggaaa

SEQ ID NO: 2217784 - RNA, 19 nt, Homo sapiens
  misc_RNA (1)...(19): siRNA sense strand
uggauguagucaaaggaga

SEQ ID NO: 2217785 - RNA, 19 nt, Homo sapiens
  misc_RNA (1)...(19): siRNA sense strand
uucaaagaccaaagaggaa

SEQ ID NO: 2217786 - RNA, 19 nt, Homo sapiens
  misc_RNA (1)...(19): siRNA sense strand
agaccaaagaggaagagga

SEQ ID NO: 2217787 - RNA, 19 nt, Homo sapiens
  misc_RNA (1)...(19): siRNA sense strand
uguagucaaaggagacaaa

SEQ ID NO: 2217788 - RNA, 19 nt, Homo sapiens
  misc_RNA (1)...(19): siRNA sense strand
gaacaugaacccugcacca

SEQ ID NO: 2217789 - RNA, 19 nt, Homo sapiens
  misc_RNA (1)...(19): siRNA sense strand
auucaaagaccaaagagga

SEQ ID NO: 2217790 - RNA, 19 nt, Homo sapiens
  misc_RNA (1)...(19): siRNA sense strand
ggugacauucagugaggau

SEQ ID NO: 2217791 - RNA, 19 nt, Homo sapiens
  misc_RNA (1)...(19): siRNA sense strand
cugcaguggucccagucaa

SEQ ID NO: 2217792 - RNA, 19 nt, Homo sapiens
  misc_RNA (1)...(19): siRNA sense strand
ggauguagucaaaggagac

SEQ ID NO: 2217793 - RNA, 19 nt, Homo sapiens
  misc_RNA (1)...(19): siRNA sense strand
cuguaaaugaacccaagaa

SEQ ID NO: 2217794 - RNA, 19 nt, Homo sapiens
  misc_RNA (1)...(19): siRNA sense strand
uuaccauugaggagggaaa

SEQ ID NO: 2217795 - RNA, 19 nt, Homo sapiens
  misc_RNA (1)...(19): siRNA sense strand
uucaaagaccaaagaggaa

SEQ ID NO: 2217796 - RNA, 19 nt, Homo sapiens
  misc_RNA (1)...(19): siRNA sense strand
agaccaaagaggaagagga

SEQ ID NO: 2217797 - RNA, 19 nt, Homo sapiens
  misc_RNA (1)...(19): siRNA sense strand
gaacaugaacccugcacca

SEQ ID NO: 2217798 - RNA, 19 nt, Homo sapiens
  misc_RNA (1)...(19): siRNA sense strand
auucaaagaccaaagagga

SEQ ID NO: 2217799 - RNA, 19 nt, Homo sapiens
  misc_RNA (1)...(19): siRNA sense strand
ggugacauucagugaggau

SEQ ID NO: 2217800 - RNA, 19 nt, Homo sapiens
  misc_RNA (1)...(19): siRNA sense strand
cugcaguggucccagucaa

SEQ ID NO: 2217801 - RNA, 19 nt, Homo sapiens
  misc_RNA (1)...(19): siRNA sense strand
cuguaaaugaacccaagaa

SEQ ID NO: 2217802 - RNA, 19 nt, Homo sapiens
  misc_RNA (1)...(19): siRNA sense strand
gaagauaacuugcugggua

SEQ ID NO: 2217803 - RNA, 19 nt, Homo sapiens
  misc_RNA (1)...(19): siRNA sense strand
uuaaacagucggugggaaa

SEQ ID NO: 2217804 - RNA, 19 nt, Homo sapiens
  misc_RNA (1)...(19): siRNA sense strand
cuguuugccuggagggaua

SEQ ID NO: 2217805 - RNA, 19 nt, Homo sapiens
  misc_RNA (1)...(19): siRNA sense strand
ccguaaggcagcagaauau

SEQ ID NO: 2217806 - RNA, 19 nt, Homo sapiens
  misc_RNA (1)...(19): siRNA sense strand
aggcaaaggaggcgugcaa

SEQ ID NO: 2217807 - RNA, 19 nt, Homo sapiens
  misc_RNA (1)...(19): siRNA sense strand
aagaagagagagcgagcaa

SEQ ID NO: 2217808 - RNA, 19 nt, Homo sapiens
  misc_RNA (1)...(19): siRNA sense strand
acggauauguacugccaaa

SEQ ID NO: 2217809 - RNA, 19 nt, Homo sapiens
  misc_RNA (1)...(19): siRNA sense strand
uggaugaacucguggaacu

SEQ ID NO: 2217810 - RNA, 19 nt, Homo sapiens
  misc_RNA (1)...(19): siRNA sense strand
aacagaaacaagagaagaa

SEQ ID NO: 2217811 - RNA, 19 nt, Homo sapiens
  misc_RNA (1)...(19): siRNA sense strand
ggaucgaaguaaagugacu

SEQ ID NO: 2217812 - RNA, 19 nt, Homo sapiens
  misc_RNA (1)...(19): siRNA sense strand
cuaaggaaccucagggcau

SEQ ID NO: 2217813 - RNA, 19 nt, Homo sapiens
  misc_RNA (1)...(19): siRNA sense strand
aagaugaaaguuacggaua

SEQ ID NO: 2217814 - RNA, 19 nt, Homo sapiens
  misc_RNA (1)...(19): siRNA sense strand
auguaauucuggagagagu

SEQ ID NO: 2217815 - RNA, 19 nt, Homo sapiens
  misc_RNA (1)...(19): siRNA sense strand
gcugaaaauagcugaagaa

SEQ ID NO: 2217816 - RNA, 19 nt, Homo sapiens
  misc_RNA (1)...(19): siRNA sense strand
cggcagcagaucaacgaaa

SEQ ID NO: 2217817 - RNA, 19 nt, Homo sapiens
  misc_RNA (1)...(19): siRNA sense strand
cagaacagaaacaagagaa

SEQ ID NO: 2217818 - RNA, 19 nt, Homo sapiens
  misc_RNA (1)...(19): siRNA sense strand
ggaccacagaacagaaaca

SEQ ID NO: 2217819 - RNA, 19 nt, Homo sapiens
  misc_RNA (1)...(19): siRNA sense strand
auugacaguugcacagaaa

SEQ ID NO: 2217820 - RNA, 19 nt, Homo sapiens
  misc_RNA (1)...(19): siRNA sense strand
agagaagaaacgacucaaa

SEQ ID NO: 2217821 - RNA, 19 nt, Homo sapiens
  misc_RNA (1)...(19): siRNA sense strand
cagugcaugagcagaguaa

SEQ ID NO: 2217822 - RNA, 19 nt, Homo sapiens
  misc_RNA (1)...(19): siRNA sense strand
uggcaacggagcagggaca

SEQ ID NO: 2217823 - RNA, 19 nt, Homo sapiens
  misc_RNA (1)...(19): siRNA sense strand
ccgacagcuuugugaaguu

SEQ ID NO: 2217824 - RNA, 19 nt, Homo sapiens
  misc_RNA (1)...(19): siRNA sense strand
ucuauaggaagcagaagaa

SEQ ID NO: 2217825 - RNA, 19 nt, Homo sapiens
  misc_RNA (1)...(19): siRNA sense strand
ugauguaauucuggagaga

SEQ ID NO: 2217826 - RNA, 19 nt, Homo sapiens
  misc_RNA (1)...(19): siRNA sense strand
gccaaaggacccagagcca

SEQ ID NO: 2217827 - RNA, 19 nt, Homo sapiens
  misc_RNA (1)...(19): siRNA sense strand
aagcagaagaagcaccuua

SEQ ID NO: 2217828 - RNA, 19 nt, Homo sapiens
  misc_RNA (1)...(19): siRNA sense strand
gcaaaggaggcgugcaaag

SEQ ID NO: 2217829 - RNA, 19 nt, Homo sapiens
  misc_RNA (1)...(19): siRNA sense strand
guaaagugacugagcugga

SEQ ID NO: 2217830 - RNA, 19 nt, Homo sapiens
  misc_RNA (1)...(19): siRNA sense strand
cccagcagguugagcaaga

SEQ ID NO: 2217831 - RNA, 19 nt, Homo sapiens
  misc_RNA (1)...(19): siRNA sense strand
aguccuaccuugaacucua

SEQ ID NO: 2217832 - RNA, 19 nt, Homo sapiens
  misc_RNA (1)...(19): siRNA sense strand
gugcaugagcagaguaaug

SEQ ID NO: 2217833 - RNA, 19 nt, Homo sapiens
  misc_RNA (1)...(19): siRNA sense strand
ccucaagaaauucaucaaa

SEQ ID NO: 2217834 - RNA, 19 nt, Homo sapiens
  misc_RNA (1)...(19): siRNA sense strand
ugagcagaguaaugcagua

SEQ ID NO: 2217835 - RNA, 19 nt, Homo sapiens
  misc_RNA (1)...(19): siRNA sense strand
acauuaaggaucgaaguaa

SEQ ID NO: 2217836 - RNA, 19 nt, Homo sapiens
  misc_RNA (1)...(19): siRNA sense strand
guguaaacaagaaucaaca

SEQ ID NO: 2217837 - RNA, 19 nt, Homo sapiens
  misc_RNA (1)...(19): siRNA sense strand
caguugacuuggagcacca

SEQ ID NO: 2217838 - RNA, 19 nt, Homo sapiens
  misc_RNA (1)...(19): siRNA sense strand
acaguuuggcgaugaguau

SEQ ID NO: 2217839 - RNA, 19 nt, Homo sapiens
  misc_RNA (1)...(19): siRNA sense strand
aggcagcagaauauggcaa

SEQ ID NO: 2217840 - RNA, 19 nt, Homo sapiens
  misc_RNA (1)...(19): siRNA sense strand
acugcaacguggacucaaa

SEQ ID NO: 2217841 - RNA, 19 nt, Homo sapiens
  misc_RNA (1)...(19): siRNA sense strand
gcaacguggacucaaacaa

SEQ ID NO: 2217842 - RNA, 19 nt, Homo sapiens
  misc_RNA (1)...(19): siRNA sense strand
acagaaacaagagaagaaa

SEQ ID NO: 2217843 - RNA, 19 nt, Homo sapiens
  misc_RNA (1)...(19): siRNA sense strand
accuugaacucuauaggaa

SEQ ID NO: 2217844 - RNA, 19 nt, Homo sapiens
  misc_RNA (1)...(19): siRNA sense strand
uagcugaagaacugccuaa

SEQ ID NO: 2217845 - RNA, 19 nt, Homo sapiens
  misc_RNA (1)...(19): siRNA sense strand
aguugaugccaaugaugua

SEQ ID NO: 2217846 - RNA, 19 nt, Homo sapiens
  misc_RNA (1)...(19): siRNA sense strand
ggcagcagaauauggcaaa

SEQ ID NO: 2217847 - RNA, 19 nt, Homo sapiens
  misc_RNA (1)...(19): siRNA sense strand
ccaacuggaaagucagaca

SEQ ID NO: 2217848 - RNA, 19 nt, Homo sapiens
  misc_RNA (1)...(19): siRNA sense strand
cagccaucguuaaggucuu

SEQ ID NO: 2217849 - RNA, 19 nt, Homo sapiens
  misc_RNA (1)...(19): siRNA sense strand
uaaaacagcucgcagggaa

SEQ ID NO: 2217850 - RNA, 19 nt, Homo sapiens
  misc_RNA (1)...(19): siRNA sense strand
ugaagaacugccuaaggaa

SEQ ID NO: 2217851 - RNA, 19 nt, Homo sapiens
  misc_RNA (1)...(19): siRNA sense strand
ccucagggcaucauagcuu

SEQ ID NO: 2217852 - RNA, 19 nt, Homo sapiens
  misc_RNA (1)...(19): siRNA sense strand
cuggaagacaaguuugauu

SEQ ID NO: 2217853 - RNA, 19 nt, Homo sapiens
  misc_RNA (1)...(19): siRNA sense strand
ggagagaguggguauuuua

SEQ ID NO: 2217854 - RNA, 19 nt, Homo sapiens
  misc_RNA (1)...(19): siRNA sense strand
acauagaauggcuacagaa

SEQ ID NO: 2217855 - RNA, 19 nt, Homo sapiens
  misc_RNA (1)...(19): siRNA sense strand
aagauaacuugcuggguac

SEQ ID NO: 2217856 - RNA, 19 nt, Homo sapiens
  misc_RNA (1)...(19): siRNA sense strand
ggaugaaaugaauggcaaa

SEQ ID NO: 2217857 - RNA, 19 nt, Homo sapiens
  misc_RNA (1)...(19): siRNA sense strand
agagaaaggcagaugggua

SEQ ID NO: 2217858 - RNA, 19 nt, Homo sapiens
  misc_RNA (1)...(19): siRNA sense strand
cggucagaauagaggguau

SEQ ID NO: 2217859 - RNA, 19 nt, Homo sapiens
  misc_RNA (1)...(19): siRNA sense strand
ggugaaugguaaugcggua

SEQ ID NO: 2217860 - RNA, 19 nt, Homo sapiens
  misc_RNA (1)...(19): siRNA sense strand
cuacaggcagagagagaaa

SEQ ID NO: 2217861 - RNA, 19 nt, Homo sapiens
  misc_RNA (1)...(19): siRNA sense strand
ugaaauucgcccugguaaa

SEQ ID NO: 2217862 - RNA, 19 nt, Homo sapiens
  misc_RNA (1)...(19): siRNA sense strand
aguaagaggaagaggagga

SEQ ID NO: 2217863 - RNA, 19 nt, Homo sapiens
  misc_RNA (1)...(19): siRNA sense strand
aguuaaaagaagaggaaga

SEQ ID NO: 2217864 - RNA, 19 nt, Homo sapiens
  misc_RNA (1)...(19): siRNA sense strand
gggauuuauaugaggauga

SEQ ID NO: 2217865 - RNA, 19 nt, Homo sapiens
  misc_RNA (1)...(19): siRNA sense strand
aaguaaaaguguggggaaa

SEQ ID NO: 2217866 - RNA, 19 nt, Homo sapiens
  misc_RNA (1)...(19): siRNA sense strand
auguaggaggcaagagaaa

SEQ ID NO: 2217867 - RNA, 19 nt, Homo sapiens
  misc_RNA (1)...(19): siRNA sense strand
cggagguauuuguaggcaa

SEQ ID NO: 2217868 - RNA, 19 nt, Homo sapiens
  misc_RNA (1)...(19): siRNA sense strand
gcaaagaaauagaagggga

SEQ ID NO: 2217869 - RNA, 19 nt, Homo sapiens
  misc_RNA (1)...(19): siRNA sense strand
ugguaaugcgguacaguua

SEQ ID NO: 2217870 - RNA, 19 nt, Homo sapiens
  misc_RNA (1)...(19): siRNA sense strand
auccagaagucauggcuaa

SEQ ID NO: 2217871 - RNA, 19 nt, Homo sapiens
  misc_RNA (1)...(19): siRNA sense strand
ggcagaaagacuugaugaa

SEQ ID NO: 2217872 - RNA, 19 nt, Homo sapiens
  misc_RNA (1)...(19): siRNA sense strand
uggaugaaaugaauggcaa

SEQ ID NO: 2217873 - RNA, 19 nt, Homo sapiens
  misc_RNA (1)...(19): siRNA sense strand
augaagaccuacaggcaga

SEQ ID NO: 2217874 - RNA, 19 nt, Homo sapiens
  misc_RNA (1)...(19): siRNA sense strand
caaagaaauagaaggggaa

SEQ ID NO: 2217875 - RNA, 19 nt, Homo sapiens
  misc_RNA (1)...(19): siRNA sense strand
cuguuaaggcuauggauga

SEQ ID NO: 2217876 - RNA, 19 nt, Homo sapiens
  misc_RNA (1)...(19): siRNA sense strand
cggcuaugaugauggcuau

SEQ ID NO: 2217877 - RNA, 19 nt, Homo sapiens
  misc_RNA (1)...(19): siRNA sense strand
ucaggauacuuaugggcaa

SEQ ID NO: 2217878 - RNA, 19 nt, Homo sapiens
  misc_RNA (1)...(19): siRNA sense strand
aagucauggcuaagguaaa

SEQ ID NO: 2217879 - RNA, 19 nt, Homo sapiens
  misc_RNA (1)...(19): siRNA sense strand
gagaaaggcagauggguac

SEQ ID NO: 2217880 - RNA, 19 nt, Homo sapiens
  misc_RNA (1)...(19): siRNA sense strand
aagaagaggaagaaccaau

SEQ ID NO: 2217881 - RNA, 19 nt, Homo sapiens
  misc_RNA (1)...(19): siRNA sense strand
uugaaauagucuuagccaa

SEQ ID NO: 2217882 - RNA, 19 nt, Homo sapiens
  misc_RNA (1)...(19): siRNA sense strand
ggcaaaauaccaagggauu

SEQ ID NO: 2217883 - RNA, 19 nt, Homo sapiens
  misc_RNA (1)...(19): siRNA sense strand
aggaagaaccaauggauac

SEQ ID NO: 2217884 - RNA, 19 nt, Homo sapiens
  misc_RNA (1)...(19): siRNA sense strand
aagcgaagaucaaggccuu

SEQ ID NO: 2217885 - RNA, 19 nt, Homo sapiens
  misc_RNA (1)...(19): siRNA sense strand
caguaaagucacagagggu

SEQ ID NO: 2217886 - RNA, 19 nt, Homo sapiens
  misc_RNA (1)...(19): siRNA sense strand
ucacaagucagcagcacaa

SEQ ID NO: 2217887 - RNA, 19 nt, Homo sapiens
  misc_RNA (1)...(19): siRNA sense strand
gggcaauguaggaggcaag

SEQ ID NO: 2217888 - RNA, 19 nt, Homo sapiens
  misc_RNA (1)...(19): siRNA sense strand
aggggaagaaauugaaaua

SEQ ID NO: 2217889 - RNA, 19 nt, Homo sapiens
  misc_RNA (1)...(19): siRNA sense strand
acagaagguggcagaaaga

SEQ ID NO: 2217890 - RNA, 19 nt, Homo sapiens
  misc_RNA (1)...(19): siRNA sense strand
aggccuugcuugagagaac

SEQ ID NO: 2217891 - RNA, 19 nt, Homo sapiens
  misc_RNA (1)...(19): siRNA sense strand
cagaauagaggguaugcau

SEQ ID NO: 2217892 - RNA, 19 nt, Homo sapiens
  misc_RNA (1)...(19): siRNA sense strand
gguuauacucuggauguaa

SEQ ID NO: 2217893 - RNA, 19 nt, Homo sapiens
  misc_RNA (1)...(19): siRNA sense strand
cacaaagggaccugaugaa

SEQ ID NO: 2217894 - RNA, 19 nt, Homo sapiens
  misc_RNA (1)...(19): siRNA sense strand
aagaggaagaggaggagga

SEQ ID NO: 2217895 - RNA, 19 nt, Homo sapiens
  misc_RNA (1)...(19): siRNA sense strand
caauaaugacaaccaggaa

SEQ ID NO: 2217896 - RNA, 19 nt, Homo sapiens
  misc_RNA (1)...(19): siRNA sense strand
aaauagaaggggaagaaau

SEQ ID NO: 2217897 - RNA, 19 nt, Homo sapiens
  misc_RNA (1)...(19): siRNA sense strand
accuacaggcagagagaga

SEQ ID NO: 2217898 - RNA, 19 nt, Homo sapiens
  misc_RNA (1)...(19): siRNA sense strand
gaugaguggaaaaguaaaa

SEQ ID NO: 2217899 - RNA, 19 nt, Homo sapiens
  misc_RNA (1)...(19): siRNA sense strand
auaaugacaaccaggaauu

SEQ ID NO: 2217900 - RNA, 19 nt, Homo sapiens
  misc_RNA (1)...(19): siRNA sense strand
uugaauaugaggaucacaa

SEQ ID NO: 2217901 - RNA, 19 nt, Homo sapiens
  misc_RNA (1)...(19): siRNA sense strand
aggcuauggaugaaaugaa

SEQ ID NO: 2217902 - RNA, 19 nt, Homo sapiens
  misc_RNA (1)...(19): siRNA sense strand
cuaugcaguaagaggaaga

SEQ ID NO: 2217903 - RNA, 19 nt, Homo sapiens
  misc_RNA (1)...(19): siRNA sense strand
acuacaagacacugauaga

SEQ ID NO: 2217904 - RNA, 19 nt, Homo sapiens
  misc_RNA (1)...(19): siRNA sense strand
cuacggugacagaagaaau

SEQ ID NO: 2217905 - RNA, 19 nt, Homo sapiens
  misc_RNA (1)...(19): siRNA sense strand
uguuaaggcuauggaugaa

SEQ ID NO: 2217906 - RNA, 19 nt, Homo sapiens
  misc_RNA (1)...(19): siRNA sense strand
agaaauagaaggggaagaa

SEQ ID NO: 2217907 - RNA, 19 nt, Homo sapiens
  misc_RNA (1)...(19): siRNA sense strand
agaccuacaggcagagaga

SEQ ID NO: 2217908 - RNA, 19 nt, Homo sapiens
  misc_RNA (1)...(19): siRNA sense strand
gagagaaacaggggagcaa

SEQ ID NO: 2217909 - RNA, 19 nt, Homo sapiens
  misc_RNA (1)...(19): siRNA sense strand
gcuugagagaacugguuau

SEQ ID NO: 2217910 - RNA, 19 nt, Homo sapiens
  misc_RNA (1)...(19): siRNA sense strand
guggcaaacaacagacuuu

SEQ ID NO: 2217911 - RNA, 19 nt, Homo sapiens
  misc_RNA (1)...(19): siRNA sense strand
ggagagguggauauggcua

SEQ ID NO: 2217912 - RNA, 19 nt, Homo sapiens
  misc_RNA (1)...(19): siRNA sense strand
ugaaauagucuuagccaag

SEQ ID NO: 2217913 - RNA, 19 nt, Homo sapiens
  misc_RNA (1)...(19): siRNA sense strand
aggaagaggaggaggaagg

SEQ ID NO: 2217914 - RNA, 19 nt, Homo sapiens
  misc_RNA (1)...(19): siRNA sense strand
aauagaaggggaagaaauu

SEQ ID NO: 2217915 - RNA, 19 nt, Homo sapiens
  misc_RNA (1)...(19): siRNA sense strand
cuccagaagcacugcguau

SEQ ID NO: 2217916 - RNA, 19 nt, Homo sapiens
  misc_RNA (1)...(19): siRNA sense strand
gcgaaaagagugaggagau

SEQ ID NO: 2217917 - RNA, 19 nt, Homo sapiens
  misc_RNA (1)...(19): siRNA sense strand
cugcaagaccugaccaaca

SEQ ID NO: 2217918 - RNA, 19 nt, Homo sapiens
  misc_RNA (1)...(19): siRNA sense strand
gccacaacaagcuggacaa

SEQ ID NO: 2217919 - RNA, 19 nt, Homo sapiens
  misc_RNA (1)...(19): siRNA sense strand
ucuccuacauugagcacau

SEQ ID NO: 2217920 - RNA, 19 nt, Homo sapiens
  misc_RNA (1)...(19): siRNA sense strand
ugguuuagcuuccuggaga

SEQ ID NO: 2217921 - RNA, 19 nt, Homo sapiens
  misc_RNA (1)...(19): siRNA sense strand
cuacauggaucaauggguu

SEQ ID NO: 2217922 - RNA, 19 nt, Homo sapiens
  misc_RNA (1)...(19): siRNA sense strand
ggguguacgaagcggccaa

SEQ ID NO: 2217923 - RNA, 19 nt, Homo sapiens
  misc_RNA (1)...(19): siRNA sense strand
acgaggacgacgacagaga

SEQ ID NO: 2217924 - RNA, 19 nt, Homo sapiens
  misc_RNA (1)...(19): siRNA sense strand
gcagaagaccgaaaggaug

SEQ ID NO: 2217925 - RNA, 19 nt, Homo sapiens
  misc_RNA (1)...(19): siRNA sense strand
cuggagagcagaagaccga

SEQ ID NO: 2217926 - RNA, 19 nt, Homo sapiens
  misc_RNA (1)...(19): siRNA sense strand
gcugcgagaacgacaucaa

SEQ ID NO: 2217927 - RNA, 19 nt, Homo sapiens
  misc_RNA (1)...(19): siRNA sense strand
uggcgaagaaacugggaau

SEQ ID NO: 2217928 - RNA, 19 nt, Homo sapiens
  misc_RNA (1)...(19): siRNA sense strand
gguacugcuuugugggcca

SEQ ID NO: 2217929 - RNA, 19 nt, Homo sapiens
  misc_RNA (1)...(19): siRNA sense strand
aagauugggccuacagcaa

SEQ ID NO: 2217930 - RNA, 19 nt, Homo sapiens
  misc_RNA (1)...(19): siRNA sense strand
gggaugaugugcugguacu

SEQ ID NO: 2217931 - RNA, 19 nt, Homo sapiens
  misc_RNA (1)...(19): siRNA sense strand
ccacccgaauugauggcaa

SEQ ID NO: 2217932 - RNA, 19 nt, Homo sapiens
  misc_RNA (1)...(19): siRNA sense strand
gggccuacagcaagggcuu

SEQ ID NO: 2217933 - RNA, 19 nt, Homo sapiens
  misc_RNA (1)...(19): siRNA sense strand
ucacaaaagaugcgauuca

SEQ ID NO: 2217934 - RNA, 19 nt, Homo sapiens
  misc_RNA (1)...(19): siRNA sense strand
cuggauagccugaagguug

SEQ ID NO: 2217935 - RNA, 19 nt, Homo sapiens
  misc_RNA (1)...(19): siRNA sense strand
ggaacuaccaugcaggcua

SEQ ID NO: 2217936 - RNA, 19 nt, Homo sapiens
  misc_RNA (1)...(19): siRNA sense strand
ccagagugaagauggguga

SEQ ID NO: 2217937 - RNA, 19 nt, Homo sapiens
  misc_RNA (1)...(19): siRNA sense strand
caucauugguggaggagug

SEQ ID NO: 2217938 - RNA, 19 nt, Homo sapiens
  misc_RNA (1)...(19): siRNA sense strand
ggaucaagaccaagaaccu

SEQ ID NO: 2217939 - RNA, 19 nt, Homo sapiens
  misc_RNA (1)...(19): siRNA sense strand
caaccugggcauuggccua

SEQ ID NO: 2217940 - RNA, 19 nt, Homo sapiens
  misc_RNA (1)...(19): siRNA sense strand
gggcauuggccuagcuauc

SEQ ID NO: 2217941 - RNA, 19 nt, Homo sapiens
  misc_RNA (1)...(19): siRNA sense strand
gcaugguuccugacggaga

SEQ ID NO: 2217942 - RNA, 19 nt, Homo sapiens
  misc_RNA (1)...(19): siRNA sense strand
ccacagaccccaaggccau

SEQ ID NO: 2217943 - RNA, 19 nt, Homo sapiens
  misc_RNA (1)...(19): siRNA sense strand
ccagaaacguuuuggacca

SEQ ID NO: 2217944 - RNA, 19 nt, Homo sapiens
  misc_RNA (1)...(19): siRNA sense strand
uguaaggauugaaaggcuu

SEQ ID NO: 2217945 - RNA, 19 nt, Homo sapiens
  misc_RNA (1)...(19): siRNA sense strand
gcacaugauggcuccgcua

SEQ ID NO: 2217946 - RNA, 19 nt, Homo sapiens
  misc_RNA (1)...(19): siRNA sense strand
gccaguugauuuugagcaa

SEQ ID NO: 2217947 - RNA, 19 nt, Homo sapiens
  misc_RNA (1)...(19): siRNA sense strand
ugaacugagacaagaacaa

SEQ ID NO: 2217948 - RNA, 19 nt, Homo sapiens
  misc_RNA (1)...(19): siRNA sense strand
ccuaucugcaaaugagaaa

SEQ ID NO: 2217949 - RNA, 19 nt, Homo sapiens
  misc_RNA (1)...(19): siRNA sense strand
gaagaggaguuguacgcau

SEQ ID NO: 2217950 - RNA, 19 nt, Homo sapiens
  misc_RNA (1)...(19): siRNA sense strand
ggaguuuaugaaugaacaa

SEQ ID NO: 2217951 - RNA, 19 nt, Homo sapiens
  misc_RNA (1)...(19): siRNA sense strand
cuuuggauuuguugugcaa

SEQ ID NO: 2217952 - RNA, 19 nt, Homo sapiens
  misc_RNA (1)...(19): siRNA sense strand
uugaagauggagaaaguga

SEQ ID NO: 2217953 - RNA, 19 nt, Homo sapiens
  misc_RNA (1)...(19): siRNA sense strand
agucuaagccagaaaucca

SEQ ID NO: 2217954 - RNA, 19 nt, Homo sapiens
  misc_RNA (1)...(19): siRNA sense strand
acccuaaggaagaggaguu

SEQ ID NO: 2217955 - RNA, 19 nt, Homo sapiens
  misc_RNA (1)...(19): siRNA sense strand
aguuuguggaugauggaau

SEQ ID NO: 2217956 - RNA, 19 nt, Homo sapiens
  misc_RNA (1)...(19): siRNA sense strand
gaaucaucucuaagcaaaa

SEQ ID NO: 2217957 - RNA, 19 nt, Homo sapiens
  misc_RNA (1)...(19): siRNA sense strand
aggaagacaaagagaaaga

SEQ ID NO: 2217958 - RNA, 19 nt, Homo sapiens
  misc_RNA (1)...(19): siRNA sense strand
aagaugaagaagaagacua

SEQ ID NO: 2217959 - RNA, 19 nt, Homo sapiens
  misc_RNA (1)...(19): siRNA sense strand
auuaaugaugugagagaca

SEQ ID NO: 2217960 - RNA, 19 nt, Homo sapiens
  misc_RNA (1)...(19): siRNA sense strand
augaugaggaggaagacaa

SEQ ID NO: 2217961 - RNA, 19 nt, Homo sapiens
  misc_RNA (1)...(19): siRNA sense strand
aggaggaagacaaagagaa

SEQ ID NO: 2217962 - RNA, 19 nt, Homo sapiens
  misc_RNA (1)...(19): siRNA sense strand
augaagaugaagaagaaga

SEQ ID NO: 2217963 - RNA, 19 nt, Homo sapiens
  misc_RNA (1)...(19): siRNA sense strand
ugaugaggaggaagacaaa

SEQ ID NO: 2217964 - RNA, 19 nt, Homo sapiens
  misc_RNA (1)...(19): siRNA sense strand
augaugaugaggaggaaga

SEQ ID NO: 2217965 - RNA, 19 nt, Homo sapiens
  misc_RNA (1)...(19): siRNA sense strand
ugauggaguggaugaacaa

SEQ ID NO: 2217966 - RNA, 19 nt, Homo sapiens
  misc_RNA (1)...(19): siRNA sense strand
acaacagguuauaccacaa

SEQ ID NO: 2217967 - RNA, 19 nt, Homo sapiens
  misc_RNA (1)...(19): siRNA sense strand
aagaugggcagguggaaga

SEQ ID NO: 2217968 - RNA, 19 nt, Homo sapiens
  misc_RNA (1)...(19): siRNA sense strand
aaguacugauggaacuaaa

SEQ ID NO: 2217969 - RNA, 19 nt, Homo sapiens
  misc_RNA (1)...(19): siRNA sense strand
augaagaagaagacuauga

SEQ ID NO: 2217970 - RNA, 19 nt, Homo sapiens
  misc_RNA (1)...(19): siRNA sense strand
gaacaaguacugauggaac

SEQ ID NO: 2217971 - RNA, 19 nt, Homo sapiens
  misc_RNA (1)...(19): siRNA sense strand
ugaugaggaaggacaggaa

SEQ ID NO: 2217972 - RNA, 19 nt, Homo sapiens
  misc_RNA (1)...(19): siRNA sense strand
agucagugguucuacaaca

SEQ ID NO: 2217973 - RNA, 19 nt, Homo sapiens
  misc_RNA (1)...(19): siRNA sense strand
augaggaggaagacaaaga

SEQ ID NO: 2217974 - RNA, 19 nt, Homo sapiens
  misc_RNA (1)...(19): siRNA sense strand
gguucuuauuccugcauca

SEQ ID NO: 2217975 - RNA, 19 nt, Homo sapiens
  misc_RNA (1)...(19): siRNA sense strand
aguuauuguuccagauucu

SEQ ID NO: 2217976 - RNA, 19 nt, Homo sapiens
  misc_RNA (1)...(19): siRNA sense strand
uggaugauggaguggauga

SEQ ID NO: 2217977 - RNA, 19 nt, Homo sapiens
  misc_RNA (1)...(19): siRNA sense strand
augauggaguggaugaaca

SEQ ID NO: 2217978 - RNA, 19 nt, Homo sapiens
  misc_RNA (1)...(19): siRNA sense strand
auacaucaucugaagaaga

SEQ ID NO: 2217979 - RNA, 19 nt, Homo sapiens
  misc_RNA (1)...(19): siRNA sense strand
aggaagacaaagagaaaga

SEQ ID NO: 2217980 - RNA, 19 nt, Homo sapiens
  misc_RNA (1)...(19): siRNA sense strand
aagaugaagaagaagacua

SEQ ID NO: 2217981 - RNA, 19 nt, Homo sapiens
  misc_RNA (1)...(19): siRNA sense strand
augaugaggaggaagacaa

SEQ ID NO: 2217982 - RNA, 19 nt, Homo sapiens
  misc_RNA (1)...(19): siRNA sense strand
aggaggaagacaaagagaa

SEQ ID NO: 2217983 - RNA, 19 nt, Homo sapiens
  misc_RNA (1)...(19): siRNA sense strand
augaagaugaagaagaaga

SEQ ID NO: 2217984 - RNA, 19 nt, Homo sapiens
  misc_RNA (1)...(19): siRNA sense strand
ugaugaggaggaagacaaa

SEQ ID NO: 2217985 - RNA, 19 nt, Homo sapiens
  misc_RNA (1)...(19): siRNA sense strand
augaugaugaggaggaaga

SEQ ID NO: 2217986 - RNA, 19 nt, Homo sapiens
  misc_RNA (1)...(19): siRNA sense strand
acaacagguuauaccacaa

SEQ ID NO: 2217987 - RNA, 19 nt, Homo sapiens
  misc_RNA (1)...(19): siRNA sense strand
aagaugggcagguggaaga

SEQ ID NO: 2217988 - RNA, 19 nt, Homo sapiens
  misc_RNA (1)...(19): siRNA sense strand
augaagaagaagacuauga

SEQ ID NO: 2217989 - RNA, 19 nt, Homo sapiens
  misc_RNA (1)...(19): siRNA sense strand
ugaugaggaaggacaggaa

SEQ ID NO: 2217990 - RNA, 19 nt, Homo sapiens
  misc_RNA (1)...(19): siRNA sense strand
agucagugguucuacaaca

SEQ ID NO: 2217991 - RNA, 19 nt, Homo sapiens
  misc_RNA (1)...(19): siRNA sense strand
augaggaggaagacaaaga

SEQ ID NO: 2217992 - RNA, 19 nt, Homo sapiens
  misc_RNA (1)...(19): siRNA sense strand
gguucuuauuccugcauca

SEQ ID NO: 2217993 - RNA, 19 nt, Homo sapiens
  misc_RNA (1)...(19): siRNA sense strand
aguuauuguuccagauucu

SEQ ID NO: 2217994 - RNA, 19 nt, Homo sapiens
  misc_RNA (1)...(19): siRNA sense strand
auacaucaucugaagaaga

SEQ ID NO: 2217995 - RNA, 19 nt, Homo sapiens
  misc_RNA (1)...(19): siRNA sense strand
gagaagaaccagaggacga

SEQ ID NO: 2217996 - RNA, 19 nt, Homo sapiens
  misc_RNA (1)...(19): siRNA sense strand
gugacaugucugagaguaa

SEQ ID NO: 2217997 - RNA, 19 nt, Homo sapiens
  misc_RNA (1)...(19): siRNA sense strand
ggugaugcuaggagaagaa

SEQ ID NO: 2217998 - RNA, 19 nt, Homo sapiens
  misc_RNA (1)...(19): siRNA sense strand
gcuaugauuucgaggagga

SEQ ID NO: 2217999 - RNA, 19 nt, Homo sapiens
  misc_RNA (1)...(19): siRNA sense strand
cgguggaagccuacagcua

SEQ ID NO: 2218000 - RNA, 19 nt, Homo sapiens
  misc_RNA (1)...(19): siRNA sense strand
agauagaaaucaaggacgu

SEQ ID NO: 2218001 - RNA, 19 nt, Homo sapiens
  misc_RNA (1)...(19): siRNA sense strand
aguccaaacgguugaagaa

SEQ ID NO: 2218002 - RNA, 19 nt, Homo sapiens
  misc_RNA (1)...(19): siRNA sense strand
auuaagaacccaaggacca

SEQ ID NO: 2218003 - RNA, 19 nt, Homo sapiens
  misc_RNA (1)...(19): siRNA sense strand
ccuggaagcaaguggcaga

SEQ ID NO: 2218004 - RNA, 19 nt, Homo sapiens
  misc_RNA (1)...(19): siRNA sense strand
cugaaaucgaggugacuga

SEQ ID NO: 2218005 - RNA, 19 nt, Homo sapiens
  misc_RNA (1)...(19): siRNA sense strand
cgaccaaugaauggauaua

SEQ ID NO: 2218006 - RNA, 19 nt, Homo sapiens
  misc_RNA (1)...(19): siRNA sense strand
acaaauaccuggaagcaag

SEQ ID NO: 2218007 - RNA, 19 nt, Homo sapiens
  misc_RNA (1)...(19): siRNA sense strand
augaaugaacugcggagua

SEQ ID NO: 2218008 - RNA, 19 nt, Homo sapiens
  misc_RNA (1)...(19): siRNA sense strand
gggaugaugagaagaacca

SEQ ID NO: 2218009 - RNA, 19 nt, Homo sapiens
  misc_RNA (1)...(19): siRNA sense strand
cgguugaagaagaagcuuu

SEQ ID NO: 2218010 - RNA, 19 nt, Homo sapiens
  misc_RNA (1)...(19): siRNA sense strand
cguuuagagcacauggcaa

SEQ ID NO: 2218011 - RNA, 19 nt, Homo sapiens
  misc_RNA (1)...(19): siRNA sense strand
ccgaugaacacgcggcaga

SEQ ID NO: 2218012 - RNA, 19 nt, Homo sapiens
  misc_RNA (1)...(19): siRNA sense strand
acgugaugauuguggcaga

SEQ ID NO: 2218013 - RNA, 19 nt, Homo sapiens
  misc_RNA (1)...(19): siRNA sense strand
gggccuuuggugaggaaga

SEQ ID NO: 2218014 - RNA, 19 nt, Homo sapiens
  misc_RNA (1)...(19): siRNA sense strand
uggcagaagaugucgagau

SEQ ID NO: 2218015 - RNA, 19 nt, Homo sapiens
  misc_RNA (1)...(19): siRNA sense strand
gucugagaguaaagccaaa

SEQ ID NO: 2218016 - RNA, 19 nt, Homo sapiens
  misc_RNA (1)...(19): siRNA sense strand
uagcaucgguggaagccua

SEQ ID NO: 2218017 - RNA, 19 nt, Homo sapiens
  misc_RNA (1)...(19): siRNA sense strand
ggugaaagugucaagcuga

SEQ ID NO: 2218018 - RNA, 19 nt, Homo sapiens
  misc_RNA (1)...(19): siRNA sense strand
aguacaacccagcgaccaa

SEQ ID NO: 2218019 - RNA, 19 nt, Homo sapiens
  misc_RNA (1)...(19): siRNA sense strand
gcacugaccuucugcagca

SEQ ID NO: 2218020 - RNA, 19 nt, Homo sapiens
  misc_RNA (1)...(19): siRNA sense strand
guggaagccuacagcuaca

SEQ ID NO: 2218021 - RNA, 19 nt, Homo sapiens
  misc_RNA (1)...(19): siRNA sense strand
gugaaggaccaguggacgu

SEQ ID NO: 2218022 - RNA, 19 nt, Homo sapiens
  misc_RNA (1)...(19): siRNA sense strand
cagaggugaugcuaggaga

SEQ ID NO: 2218023 - RNA, 19 nt, Homo sapiens
  misc_RNA (1)...(19): siRNA sense strand
cagaagaugcagagcaggu

SEQ ID NO: 2218024 - RNA, 19 nt, Homo sapiens
  misc_RNA (1)...(19): siRNA sense strand
caugaugggccuuugguga

SEQ ID NO: 2218025 - RNA, 19 nt, Homo sapiens
  misc_RNA (1)...(19): siRNA sense strand
gaugauuguggcagaagau

SEQ ID NO: 2218026 - RNA, 19 nt, Homo sapiens
  misc_RNA (1)...(19): siRNA sense strand
gggcagacgcugaguaagc

SEQ ID NO: 2218027 - RNA, 19 nt, Homo sapiens
  misc_RNA (1)...(19): siRNA sense strand
agaggugaugcuaggagaa

SEQ ID NO: 2218028 - RNA, 19 nt, Homo sapiens
  misc_RNA (1)...(19): siRNA sense strand
guaugugguuggaggggau

SEQ ID NO: 2218029 - RNA, 19 nt, Homo sapiens
  misc_RNA (1)...(19): siRNA sense strand
ccuacagcuacaagaccaa

SEQ ID NO: 2218030 - RNA, 19 nt, Homo sapiens
  misc_RNA (1)...(19): siRNA sense strand
gcgaccaaugaauggauau

SEQ ID NO: 2218031 - RNA, 19 nt, Homo sapiens
  misc_RNA (1)...(19): siRNA sense strand
augcaaaguccgagaacua

SEQ ID NO: 2218032 - RNA, 19 nt, Homo sapiens
  misc_RNA (1)...(19): siRNA sense strand
agcuacaacuauagagaaa

SEQ ID NO: 2218033 - RNA, 19 nt, Homo sapiens
  misc_RNA (1)...(19): siRNA sense strand
gcucaaaagccaagagaga

SEQ ID NO: 2218034 - RNA, 19 nt, Homo sapiens
  misc_RNA (1)...(19): siRNA sense strand
gaucaaaauggaaggcaua

SEQ ID NO: 2218035 - RNA, 19 nt, Homo sapiens
  misc_RNA (1)...(19): siRNA sense strand
cauacaaauaaguggaaca

SEQ ID NO: 2218036 - RNA, 19 nt, Homo sapiens
  misc_RNA (1)...(19): siRNA sense strand
ugucaauguuccugaugaa

SEQ ID NO: 2218037 - RNA, 19 nt, Homo sapiens
  misc_RNA (1)...(19): siRNA sense strand
ccaagcaagaggagaucaa

SEQ ID NO: 2218038 - RNA, 19 nt, Homo sapiens
  misc_RNA (1)...(19): siRNA sense strand
ggaaguuaucagaaaucaa

SEQ ID NO: 2218039 - RNA, 19 nt, Homo sapiens
  misc_RNA (1)...(19): siRNA sense strand
cuguaggaggaauggauaa

SEQ ID NO: 2218040 - RNA, 19 nt, Homo sapiens
  misc_RNA (1)...(19): siRNA sense strand
gcauugaugauguggguca

SEQ ID NO: 2218041 - RNA, 19 nt, Homo sapiens
  misc_RNA (1)...(19): siRNA sense strand
gaggaauggauaacaacaa

SEQ ID NO: 2218042 - RNA, 19 nt, Homo sapiens
  misc_RNA (1)...(19): siRNA sense strand
acuaaugaguggacacaga

SEQ ID NO: 2218043 - RNA, 19 nt, Homo sapiens
  misc_RNA (1)...(19): siRNA sense strand
aagccaagcaagaggagau

SEQ ID NO: 2218044 - RNA, 19 nt, Homo sapiens
  misc_RNA (1)...(19): siRNA sense strand
agaaauaugaucugagaac

SEQ ID NO: 2218045 - RNA, 19 nt, Homo sapiens
  misc_RNA (1)...(19): siRNA sense strand
gcuuaaagacauugaacac

SEQ ID NO: 2218046 - RNA, 19 nt, Homo sapiens
  misc_RNA (1)...(19): siRNA sense strand
ggcuguuauugaugacaaa

SEQ ID NO: 2218047 - RNA, 19 nt, Homo sapiens
  misc_RNA (1)...(19): siRNA sense strand
uggcuaugauggacagaca

SEQ ID NO: 2218048 - RNA, 19 nt, Homo sapiens
  misc_RNA (1)...(19): siRNA sense strand
uguugggaaccgaaagaua

SEQ ID NO: 2218049 - RNA, 19 nt, Homo sapiens
  misc_RNA (1)...(19): siRNA sense strand
agaacuaaacccagaaaau

SEQ ID NO: 2218050 - RNA, 19 nt, Homo sapiens
  misc_RNA (1)...(19): siRNA sense strand
cuuuguaauuggaggucga

SEQ ID NO: 2218051 - RNA, 19 nt, Homo sapiens
  misc_RNA (1)...(19): siRNA sense strand
uggucuagguguaacagua

SEQ ID NO: 2218052 - RNA, 19 nt, Homo sapiens
  misc_RNA (1)...(19): siRNA sense strand
ccgaaagauaccugcacau

SEQ ID NO: 2218053 - RNA, 19 nt, Homo sapiens
  misc_RNA (1)...(19): siRNA sense strand
cagaaagauggaaaguuau

SEQ ID NO: 2218054 - RNA, 19 nt, Homo sapiens
  misc_RNA (1)...(19): siRNA sense strand
aguuggaggucgugaugga

SEQ ID NO: 2218055 - RNA, 19 nt, Homo sapiens
  misc_RNA (1)...(19): siRNA sense strand
cuaucugaauacaguggaa

SEQ ID NO: 2218056 - RNA, 19 nt, Homo sapiens
  misc_RNA (1)...(19): siRNA sense strand
aaggaugcauugaguuaau

SEQ ID NO: 2218057 - RNA, 19 nt, Homo sapiens
  misc_RNA (1)...(19): siRNA sense strand
gagaaauaugaucugagaa

SEQ ID NO: 2218058 - RNA, 19 nt, Homo sapiens
  misc_RNA (1)...(19): siRNA sense strand
cuaucaagcuguucaucau

SEQ ID NO: 2218059 - RNA, 19 nt, Homo sapiens
  misc_RNA (1)...(19): siRNA sense strand
uggaaaacauaauggaagu

SEQ ID NO: 2218060 - RNA, 19 nt, Homo sapiens
  misc_RNA (1)...(19): siRNA sense strand
agauauuggcugaccuaga

SEQ ID NO: 2218061 - RNA, 19 nt, Homo sapiens
  misc_RNA (1)...(19): siRNA sense strand
ccaucuauugccagaaaga

SEQ ID NO: 2218062 - RNA, 19 nt, Homo sapiens
  misc_RNA (1)...(19): siRNA sense strand
agaucaaaauggaaggcau

SEQ ID NO: 2218063 - RNA, 19 nt, Homo sapiens
  misc_RNA (1)...(19): siRNA sense strand
ucgagauggcuuaaagaca

SEQ ID NO: 2218064 - RNA, 19 nt, Homo sapiens
  misc_RNA (1)...(19): siRNA sense strand
gugagcacuuucuggaaga

SEQ ID NO: 2218065 - RNA, 19 nt, Homo sapiens
  misc_RNA (1)...(19): siRNA sense strand
ccaguagcucugaagaauu

SEQ ID NO: 2218066 - RNA, 19 nt, Homo sapiens
  misc_RNA (1)...(19): siRNA sense strand
aagcaagaggagaucaaaa

SEQ ID NO: 2218067 - RNA, 19 nt, Homo sapiens
  misc_RNA (1)...(19): siRNA sense strand
acuggauuauguagaaaga

SEQ ID NO: 2218068 - RNA, 19 nt, Homo sapiens
  misc_RNA (1)...(19): siRNA sense strand
cagacauaccucaacacua

SEQ ID NO: 2218069 - RNA, 19 nt, Homo sapiens
  misc_RNA (1)...(19): siRNA sense strand
cuccaguagcucugaagaa

SEQ ID NO: 2218070 - RNA, 19 nt, Homo sapiens
  misc_RNA (1)...(19): siRNA sense strand
aaguaugacaugcagagua

SEQ ID NO: 2218071 - RNA, 19 nt, Homo sapiens
  misc_RNA (1)...(19): siRNA sense strand
uggagucacuagaggagga

SEQ ID NO: 2218072 - RNA, 19 nt, Homo sapiens
  misc_RNA (1)...(19): siRNA sense strand
ucaaaguggagccagacaa

SEQ ID NO: 2218073 - RNA, 19 nt, Homo sapiens
  misc_RNA (1)...(19): siRNA sense strand
auacaggcugcuuggaauu

SEQ ID NO: 2218074 - RNA, 19 nt, Homo sapiens
  misc_RNA (1)...(19): siRNA sense strand
caccacagauauuggcuga

SEQ ID NO: 2218075 - RNA, 19 nt, Homo sapiens
  misc_RNA (1)...(19): siRNA sense strand
uaacaacaaaggagcuaca

SEQ ID NO: 2218076 - RNA, 19 nt, Homo sapiens
  misc_RNA (1)...(19): siRNA sense strand
uguaauuggaggucgagau

SEQ ID NO: 2218077 - RNA, 19 nt, Homo sapiens
  misc_RNA (1)...(19): siRNA sense strand
uagaaagauaugaucccaa

SEQ ID NO: 2218078 - RNA, 19 nt, Homo sapiens
  misc_RNA (1)...(19): siRNA sense strand
ccaugagaguggagggcau

SEQ ID NO: 2218079 - RNA, 19 nt, Homo sapiens
  misc_RNA (1)...(19): siRNA sense strand
cgguaaaggagcuucgcaa

SEQ ID NO: 2218080 - RNA, 19 nt, Homo sapiens
  misc_RNA (1)...(19): siRNA sense strand
accaaaggcaagucggaaa

SEQ ID NO: 2218081 - RNA, 19 nt, Homo sapiens
  misc_RNA (1)...(19): siRNA sense strand
ccgacaaaugugaagaaca

SEQ ID NO: 2218082 - RNA, 19 nt, Homo sapiens
  misc_RNA (1)...(19): siRNA sense strand
cggagugggaagaagaaaa

SEQ ID NO: 2218083 - RNA, 19 nt, Homo sapiens
  misc_RNA (1)...(19): siRNA sense strand
accaaaggacagcgauaaa

SEQ ID NO: 2218084 - RNA, 19 nt, Homo sapiens
  misc_RNA (1)...(19): siRNA sense strand
gggaagaaauccaaggcug

SEQ ID NO: 2218085 - RNA, 19 nt, Homo sapiens
  misc_RNA (1)...(19): siRNA sense strand
uagguaaagccuuggaaaa

SEQ ID NO: 2218086 - RNA, 19 nt, Homo sapiens
  misc_RNA (1)...(19): siRNA sense strand
agauauagguaaagccuug

SEQ ID NO: 2218087 - RNA, 19 nt, Homo sapiens
  misc_RNA (1)...(19): siRNA sense strand
caguggacucgcagccaaa

SEQ ID NO: 2218088 - RNA, 19 nt, Homo sapiens
  misc_RNA (1)...(19): siRNA sense strand
cagccaaauuugucaucca

SEQ ID NO: 2218089 - RNA, 19 nt, Homo sapiens
  misc_RNA (1)...(19): siRNA sense strand
ggaccaaaggcaagucgga

SEQ ID NO: 2218090 - RNA, 19 nt, Homo sapiens
  misc_RNA (1)...(19): siRNA sense strand
ccaaggagcaccagggaga

SEQ ID NO: 2218091 - RNA, 19 nt, Homo sapiens
  misc_RNA (1)...(19): siRNA sense strand
ugacaaggaugaauggaca

SEQ ID NO: 2218092 - RNA, 19 nt, Homo sapiens
  misc_RNA (1)...(19): siRNA sense strand
ggggaauuuuagugauuua

SEQ ID NO: 2218093 - RNA, 19 nt, Homo sapiens
  misc_RNA (1)...(19): siRNA sense strand
ucauugagcgggugggcaa

SEQ ID NO: 2218094 - RNA, 19 nt, Homo sapiens
  misc_RNA (1)...(19): siRNA sense strand
agacauugacuaugagcuu

SEQ ID NO: 2218095 - RNA, 19 nt, Homo sapiens
  misc_RNA (1)...(19): siRNA sense strand
acauaauugaccuggcuaa

SEQ ID NO: 2218096 - RNA, 19 nt, Homo sapiens
  misc_RNA (1)...(19): siRNA sense strand
gaagagagggcaaagguca

SEQ ID NO: 2218097 - RNA, 19 nt, Homo sapiens
  misc_RNA (1)...(19): siRNA sense strand
gcuuaguuuuggaggaauu

SEQ ID NO: 2218098 - RNA, 19 nt, Homo sapiens
  misc_RNA (1)...(19): siRNA sense strand
ccuagaaaaucuuggcauu

SEQ ID NO: 2218099 - RNA, 19 nt, Homo sapiens
  misc_RNA (1)...(19): siRNA sense strand
ggacaaaugauacuggcuu

SEQ ID NO: 2218100 - RNA, 19 nt, Homo sapiens
  misc_RNA (1)...(19): siRNA sense strand
agaaaauggaccuggaaga

SEQ ID NO: 2218101 - RNA, 19 nt, Homo sapiens
  misc_RNA (1)...(19): siRNA sense strand
acaaacaagaagacagcau

SEQ ID NO: 2218102 - RNA, 19 nt, Homo sapiens
  misc_RNA (1)...(19): siRNA sense strand
ggcuaagagacgaaagcau

SEQ ID NO: 2218103 - RNA, 19 nt, Homo sapiens
  misc_RNA (1)...(19): siRNA sense strand
ccucauuucaguucagcaa

SEQ ID NO: 2218104 - RNA, 19 nt, Homo sapiens
  misc_RNA (1)...(19): siRNA sense strand
ugacagaacgcguagcuga

SEQ ID NO: 2218105 - RNA, 19 nt, Homo sapiens
  misc_RNA (1)...(19): siRNA sense strand
uaggauuaacagcgacaaa

SEQ ID NO: 2218106 - RNA, 19 nt, Homo sapiens
  misc_RNA (1)...(19): siRNA sense strand
caggaaacaugaaugcuga

SEQ ID NO: 2218107 - RNA, 19 nt, Homo sapiens
  misc_RNA (1)...(19): siRNA sense strand
ucaauuugggugacagcaa

SEQ ID NO: 2218108 - RNA, 19 nt, Homo sapiens
  misc_RNA (1)...(19): siRNA sense strand
gugagcaggagguggccua

SEQ ID NO: 2218109 - RNA, 19 nt, Homo sapiens
  misc_RNA (1)...(19): siRNA sense strand
gcuuguggcauuuaggauu

SEQ ID NO: 2218110 - RNA, 19 nt, Homo sapiens
  misc_RNA (1)...(19): siRNA sense strand
gcaucaacgccaggaggaa

SEQ ID NO: 2218111 - RNA, 19 nt, Homo sapiens
  misc_RNA (1)...(19): siRNA sense strand
gcacaacaauacagagcug

SEQ ID NO: 2218112 - RNA, 19 nt, Homo sapiens
  misc_RNA (1)...(19): siRNA sense strand
augccauggccuuggacua

SEQ ID NO: 2218113 - RNA, 19 nt, Homo sapiens
  misc_RNA (1)...(19): siRNA sense strand
gugacgaguuacagccuga

SEQ ID NO: 2218114 - RNA, 19 nt, Homo sapiens
  misc_RNA (1)...(19): siRNA sense strand
ugggcaagcaggugaacuu

SEQ ID NO: 2218115 - RNA, 19 nt, Homo sapiens
  misc_RNA (1)...(19): siRNA sense strand
cuguguagcaucaaagaca

SEQ ID NO: 2218116 - RNA, 19 nt, Homo sapiens
  misc_RNA (1)...(19): siRNA sense strand
gaggacaagaucuggacau

SEQ ID NO: 2218117 - RNA, 19 nt, Homo sapiens
  misc_RNA (1)...(19): siRNA sense strand
gacaaggaugaauggacaa

SEQ ID NO: 2218118 - RNA, 19 nt, Homo sapiens
  misc_RNA (1)...(19): siRNA sense strand
ugccaucgauguugggaau

SEQ ID NO: 2218119 - RNA, 19 nt, Homo sapiens
  misc_RNA (1)...(19): siRNA sense strand
gggaagauacggaagcucu

SEQ ID NO: 2218120 - RNA, 19 nt, Homo sapiens
  misc_RNA (1)...(19): siRNA sense strand
ccuuacacuugaauggaca

SEQ ID NO: 2218121 - RNA, 19 nt, Homo sapiens
  misc_RNA (1)...(19): siRNA sense strand
aaagacagguguuugccaa

SEQ ID NO: 2218122 - RNA, 19 nt, Homo sapiens
  misc_RNA (1)...(19): siRNA sense strand
uggaacagcuggaggccgu

SEQ ID NO: 2218123 - RNA, 19 nt, Homo sapiens
  misc_RNA (1)...(19): siRNA sense strand
ggaagauuggcaugagagu

SEQ ID NO: 2218124 - RNA, 19 nt, Homo sapiens
  misc_RNA (1)...(19): siRNA sense strand
ucaagagcaugcaaggaga

SEQ ID NO: 2218125 - RNA, 19 nt, Homo sapiens
  misc_RNA (1)...(19): siRNA sense strand
gguccuguuccauggagaa

SEQ ID NO: 2218126 - RNA, 19 nt, Homo sapiens
  misc_RNA (1)...(19): siRNA sense strand
ggauuaacagcgacaaacu

SEQ ID NO: 2218127 - RNA, 19 nt, Homo sapiens
  misc_RNA (1)...(19): siRNA sense strand
gagcuuaguuuuggaggaa

SEQ ID NO: 2218128 - RNA, 19 nt, Homo sapiens
  misc_RNA (1)...(19): siRNA sense strand
gcuaagagacgaaagcauc

SEQ ID NO: 2218129 - RNA, 19 nt, Homo sapiens
  misc_RNA (1)...(19): siRNA sense strand
gagucgaggucuacggaug

SEQ ID NO: 2218130 - RNA, 19 nt, Homo sapiens
  misc_RNA (1)...(19): siRNA sense strand
caucagaucuauacuggca

SEQ ID NO: 2218131 - RNA, 19 nt, Homo sapiens
  misc_RNA (1)...(19): siRNA sense strand
gcugaaauccucacaggca

SEQ ID NO: 2218132 - RNA, 19 nt, Homo sapiens
  misc_RNA (1)...(19): siRNA sense strand
gaccuggaagagagggcaa

SEQ ID NO: 2218133 - RNA, 19 nt, Homo sapiens
  misc_RNA (1)...(19): siRNA sense strand
gaguaaacauaauugaccu

SEQ ID NO: 2218134 - RNA, 19 nt, Homo sapiens
  misc_RNA (1)...(19): siRNA sense strand
cuaagagacgaaagcauca

SEQ ID NO: 2218135 - RNA, 19 nt, Homo sapiens
  misc_RNA (1)...(19): siRNA sense strand
cugagaagcccuaugccau

SEQ ID NO: 2218136 - RNA, 19 nt, Homo sapiens
  misc_RNA (1)...(19): siRNA sense strand
ccaaggagcaccagggaga

SEQ ID NO: 2218137 - RNA, 19 nt, Homo sapiens
  misc_RNA (1)...(19): siRNA sense strand
ugacaaggaugaauggaca

SEQ ID NO: 2218138 - RNA, 19 nt, Homo sapiens
  misc_RNA (1)...(19): siRNA sense strand
ggggaauuuuagugauuua

SEQ ID NO: 2218139 - RNA, 19 nt, Homo sapiens
  misc_RNA (1)...(19): siRNA sense strand
ucauugagcgggugggcaa

SEQ ID NO: 2218140 - RNA, 19 nt, Homo sapiens
  misc_RNA (1)...(19): siRNA sense strand
agacauugacuaugagcuu

SEQ ID NO: 2218141 - RNA, 19 nt, Homo sapiens
  misc_RNA (1)...(19): siRNA sense strand
acauaauugaccuggcuaa

SEQ ID NO: 2218142 - RNA, 19 nt, Homo sapiens
  misc_RNA (1)...(19): siRNA sense strand
gaagagagggcaaagguca

SEQ ID NO: 2218143 - RNA, 19 nt, Homo sapiens
  misc_RNA (1)...(19): siRNA sense strand
gcuuaguuuuggaggaauu

SEQ ID NO: 2218144 - RNA, 19 nt, Homo sapiens
  misc_RNA (1)...(19): siRNA sense strand
ccuagaaaaucuuggcauu

SEQ ID NO: 2218145 - RNA, 19 nt, Homo sapiens
  misc_RNA (1)...(19): siRNA sense strand
ggacaaaugauacuggcuu

SEQ ID NO: 2218146 - RNA, 19 nt, Homo sapiens
  misc_RNA (1)...(19): siRNA sense strand
agaaaauggaccuggaaga

SEQ ID NO: 2218147 - RNA, 19 nt, Homo sapiens
  misc_RNA (1)...(19): siRNA sense strand
acaaacaagaagacagcau

SEQ ID NO: 2218148 - RNA, 19 nt, Homo sapiens
  misc_RNA (1)...(19): siRNA sense strand
ggcuaagagacgaaagcau

SEQ ID NO: 2218149 - RNA, 19 nt, Homo sapiens
  misc_RNA (1)...(19): siRNA sense strand
ccucauuucaguucagcaa

SEQ ID NO: 2218150 - RNA, 19 nt, Homo sapiens
  misc_RNA (1)...(19): siRNA sense strand
ugacagaacgcguagcuga

SEQ ID NO: 2218151 - RNA, 19 nt, Homo sapiens
  misc_RNA (1)...(19): siRNA sense strand
uaggauuaacagcgacaaa

SEQ ID NO: 2218152 - RNA, 19 nt, Homo sapiens
  misc_RNA (1)...(19): siRNA sense strand
caggaaacaugaaugcuga

SEQ ID NO: 2218153 - RNA, 19 nt, Homo sapiens
  misc_RNA (1)...(19): siRNA sense strand
ucaauuugggugacagcaa

SEQ ID NO: 2218154 - RNA, 19 nt, Homo sapiens
  misc_RNA (1)...(19): siRNA sense strand
gcuuguggcauuuaggauu

SEQ ID NO: 2218155 - RNA, 19 nt, Homo sapiens
  misc_RNA (1)...(19): siRNA sense strand
gugagcaggagguggccua

SEQ ID NO: 2218156 - RNA, 19 nt, Homo sapiens
  misc_RNA (1)...(19): siRNA sense strand
gcaucaacgccaggaggaa

SEQ ID NO: 2218157 - RNA, 19 nt, Homo sapiens
  misc_RNA (1)...(19): siRNA sense strand
gcacaacaauacagagcug

SEQ ID NO: 2218158 - RNA, 19 nt, Homo sapiens
  misc_RNA (1)...(19): siRNA sense strand
augccauggccuuggacua

SEQ ID NO: 2218159 - RNA, 19 nt, Homo sapiens
  misc_RNA (1)...(19): siRNA sense strand
gugacgaguuacagccuga

SEQ ID NO: 2218160 - RNA, 19 nt, Homo sapiens
  misc_RNA (1)...(19): siRNA sense strand
ugggcaagcaggugaacuu

SEQ ID NO: 2218161 - RNA, 19 nt, Homo sapiens
  misc_RNA (1)...(19): siRNA sense strand
cuguguagcaucaaagaca

SEQ ID NO: 2218162 - RNA, 19 nt, Homo sapiens
  misc_RNA (1)...(19): siRNA sense strand
gaggacaagaucuggacau

SEQ ID NO: 2218163 - RNA, 19 nt, Homo sapiens
  misc_RNA (1)...(19): siRNA sense strand
gacaaggaugaauggacaa

SEQ ID NO: 2218164 - RNA, 19 nt, Homo sapiens
  misc_RNA (1)...(19): siRNA sense strand
ugccaucgauguugggaau

SEQ ID NO: 2218165 - RNA, 19 nt, Homo sapiens
  misc_RNA (1)...(19): siRNA sense strand
gggaagauacggaagcucu

SEQ ID NO: 2218166 - RNA, 19 nt, Homo sapiens
  misc_RNA (1)...(19): siRNA sense strand
ccuuacacuugaauggaca

SEQ ID NO: 2218167 - RNA, 19 nt, Homo sapiens
  misc_RNA (1)...(19): siRNA sense strand
aaagacagguguuugccaa

SEQ ID NO: 2218168 - RNA, 19 nt, Homo sapiens
  misc_RNA (1)...(19): siRNA sense strand
uggaacagcuggaggccgu

SEQ ID NO: 2218169 - RNA, 19 nt, Homo sapiens
  misc_RNA (1)...(19): siRNA sense strand
ggaagauuggcaugagagu

SEQ ID NO: 2218170 - RNA, 19 nt, Homo sapiens
  misc_RNA (1)...(19): siRNA sense strand
ucaagagcaugcaaggaga

SEQ ID NO: 2218171 - RNA, 19 nt, Homo sapiens
  misc_RNA (1)...(19): siRNA sense strand
gguccuguuccauggagaa

SEQ ID NO: 2218172 - RNA, 19 nt, Homo sapiens
  misc_RNA (1)...(19): siRNA sense strand
gagcuuaguuuuggaggaa

SEQ ID NO: 2218173 - RNA, 19 nt, Homo sapiens
  misc_RNA (1)...(19): siRNA sense strand
gcuaagagacgaaagcauc

SEQ ID NO: 2218174 - RNA, 19 nt, Homo sapiens
  misc_RNA (1)...(19): siRNA sense strand
ggauuaacagcgacaaacu

SEQ ID NO: 2218175 - RNA, 19 nt, Homo sapiens
  misc_RNA (1)...(19): siRNA sense strand
gagucgaggucuacggaug

SEQ ID NO: 2218176 - RNA, 19 nt, Homo sapiens
  misc_RNA (1)...(19): siRNA sense strand
caucagaucuauacuggca

SEQ ID NO: 2218177 - RNA, 19 nt, Homo sapiens
  misc_RNA (1)...(19): siRNA sense strand
gcugaaauccucacaggca

SEQ ID NO: 2218178 - RNA, 19 nt, Homo sapiens
  misc_RNA (1)...(19): siRNA sense strand
gaccuggaagagagggcaa

SEQ ID NO: 2218179 - RNA, 19 nt, Homo sapiens
  misc_RNA (1)...(19): siRNA sense strand
gaguaaacauaauugaccu

SEQ ID NO: 2218180 - RNA, 19 nt, Homo sapiens
  misc_RNA (1)...(19): siRNA sense strand
cuaagagacgaaagcauca

SEQ ID NO: 2218181 - RNA, 19 nt, Homo sapiens
  misc_RNA (1)...(19): siRNA sense strand
cugagaagcccuaugccau

SEQ ID NO: 2218182 - RNA, 19 nt, Homo sapiens
  misc_RNA (1)...(19): siRNA sense strand
ggaaggaguuaaagagggu

SEQ ID NO: 2218183 - RNA, 19 nt, Homo sapiens
  misc_RNA (1)...(19): siRNA sense strand
cugugaaggaacuggaaga

SEQ ID NO: 2218184 - RNA, 19 nt, Homo sapiens
  misc_RNA (1)...(19): siRNA sense strand
gaagaugugucaaggccau

SEQ ID NO: 2218185 - RNA, 19 nt, Homo sapiens
  misc_RNA (1)...(19): siRNA sense strand
ggaacuggaagaaggagga

SEQ ID NO: 2218186 - RNA, 19 nt, Homo sapiens
  misc_RNA (1)...(19): siRNA sense strand
ggcuguggaaggaguuaaa

SEQ ID NO: 2218187 - RNA, 19 nt, Homo sapiens
  misc_RNA (1)...(19): siRNA sense strand
aaggaguuaaagaggguau

SEQ ID NO: 2218188 - RNA, 19 nt, Homo sapiens
  misc_RNA (1)...(19): siRNA sense strand
uggaagaaggaggaaacaa

SEQ ID NO: 2218189 - RNA, 19 nt, Homo sapiens
  misc_RNA (1)...(19): siRNA sense strand
aaggaggaaacaaggauga

SEQ ID NO: 2218190 - RNA, 19 nt, Homo sapiens
  misc_RNA (1)...(19): siRNA sense strand
gcacguggcuuuugggagu

SEQ ID NO: 2218191 - RNA, 19 nt, Homo sapiens
  misc_RNA (1)...(19): siRNA sense strand
aggaggaaauagagcacaa

SEQ ID NO: 2218192 - RNA, 19 nt, Homo sapiens
  misc_RNA (1)...(19): siRNA sense strand
aaucauuguuggaggcaca

SEQ ID NO: 2218193 - RNA, 19 nt, Homo sapiens
  misc_RNA (1)...(19): siRNA sense strand
cguugaaggaggaaauaga

SEQ ID NO: 2218194 - RNA, 19 nt, Homo sapiens
  misc_RNA (1)...(19): siRNA sense strand
ugacguugaaggaggaaau

SEQ ID NO: 2218195 - RNA, 19 nt, Homo sapiens
  misc_RNA (1)...(19): siRNA sense strand
gcauaaaggagaugggcag

SEQ ID NO: 2218196 - RNA, 19 nt, Homo sapiens
  misc_RNA (1)...(19): siRNA sense strand
ccaaacaaagggaggagga

SEQ ID NO: 2218197 - RNA, 19 nt, Homo sapiens
  misc_RNA (1)...(19): siRNA sense strand
aacaaagggaggaggauga

SEQ ID NO: 2218198 - RNA, 19 nt, Homo sapiens
  misc_RNA (1)...(19): siRNA sense strand
cugcaauaccauacaugaa

SEQ ID NO: 2218199 - RNA, 19 nt, Homo sapiens
  misc_RNA (1)...(19): siRNA sense strand
caugugaccucuauggcaa

SEQ ID NO: 2218200 - RNA, 19 nt, Homo sapiens
  misc_RNA (1)...(19): siRNA sense strand
aauuugagaagcagaggaa

SEQ ID NO: 2218201 - RNA, 19 nt, Homo sapiens
  misc_RNA (1)...(19): siRNA sense strand
agauauaaacagcagagau

SEQ ID NO: 2218202 - RNA, 19 nt, Homo sapiens
  misc_RNA (1)...(19): siRNA sense strand
agagagagcaaaugagucu

SEQ ID NO: 2218203 - RNA, 19 nt, Homo sapiens
  misc_RNA (1)...(19): siRNA sense strand
ggaucaagugguauggcuu

SEQ ID NO: 2218204 - RNA, 19 nt, Homo sapiens
  misc_RNA (1)...(19): siRNA sense strand
agagauuccaaaaggguua

SEQ ID NO: 2218205 - RNA, 19 nt, Homo sapiens
  misc_RNA (1)...(19): siRNA sense strand
gagaagcagaggaacgaca

SEQ ID NO: 2218206 - RNA, 19 nt, Homo sapiens
  misc_RNA (1)...(19): siRNA sense strand
ccaugaaaacacaaagaau

SEQ ID NO: 2218207 - RNA, 19 nt, Homo sapiens
  misc_RNA (1)...(19): siRNA sense strand
agaaaguggaaucaccaaa

SEQ ID NO: 2218208 - RNA, 19 nt, Homo sapiens
  misc_RNA (1)...(19): siRNA sense strand
uguuggaggcacagcagaa

SEQ ID NO: 2218209 - RNA, 19 nt, Homo sapiens
  misc_RNA (1)...(19): siRNA sense strand
agaaaaucccaucguguua

SEQ ID NO: 2218210 - RNA, 19 nt, Homo sapiens
  misc_RNA (1)...(19): siRNA sense strand
aagaagacggcuaugaaca

SEQ ID NO: 2218211 - RNA, 19 nt, Homo sapiens
  misc_RNA (1)...(19): siRNA sense strand
auuuggaauuugagaagca

SEQ ID NO: 2218212 - RNA, 19 nt, Homo sapiens
  misc_RNA (1)...(19): siRNA sense strand
cggagcaacugcaaggguu

SEQ ID NO: 2218213 - RNA, 19 nt, Homo sapiens
  misc_RNA (1)...(19): siRNA sense strand
ccaucguguuacuuagcaa

SEQ ID NO: 2218214 - RNA, 19 nt, Homo sapiens
  misc_RNA (1)...(19): siRNA sense strand
gaacagaagacucacacca

SEQ ID NO: 2218215 - RNA, 19 nt, Homo sapiens
  misc_RNA (1)...(19): siRNA sense strand
acagauccagagagagcaa

SEQ ID NO: 2218216 - RNA, 19 nt, Homo sapiens
  misc_RNA (1)...(19): siRNA sense strand
cauuucaagucuagcaagu

SEQ ID NO: 2218217 - RNA, 19 nt, Homo sapiens
  misc_RNA (1)...(19): siRNA sense strand
guggaaucaccaaagaaga

SEQ ID NO: 2218218 - RNA, 19 nt, Homo sapiens
  misc_RNA (1)...(19): siRNA sense strand
agaaauacuacuuugggaa

SEQ ID NO: 2218219 - RNA, 19 nt, Homo sapiens
  misc_RNA (1)...(19): siRNA sense strand
ggaaacagucuucaggaga

SEQ ID NO: 2218220 - RNA, 19 nt, Homo sapiens
  misc_RNA (1)...(19): siRNA sense strand
gcacuggcucagaggguca

SEQ ID NO: 2218221 - RNA, 19 nt, Homo sapiens
  misc_RNA (1)...(19): siRNA sense strand
cagaaauacuacuuuggga

SEQ ID NO: 2218222 - RNA, 19 nt, Homo sapiens
  misc_RNA (1)...(19): siRNA sense strand
cucuaaauacguacagauu

SEQ ID NO: 2218223 - RNA, 19 nt, Homo sapiens
  misc_RNA (1)...(19): siRNA sense strand
acggcaaaggcaagaguaa

SEQ ID NO: 2218224 - RNA, 19 nt, Homo sapiens
  misc_RNA (1)...(19): siRNA sense strand
ggguccagguggugguaga

SEQ ID NO: 2218225 - RNA, 19 nt, Homo sapiens
  misc_RNA (1)...(19): siRNA sense strand
ggugguagaccuuggccaa

SEQ ID NO: 2218226 - RNA, 19 nt, Homo sapiens
  misc_RNA (1)...(19): siRNA sense strand
gcuccagagagacgugaaa

SEQ ID NO: 2218227 - RNA, 19 nt, Homo sapiens
  misc_RNA (1)...(19): siRNA sense strand
gaacauggguccagguggu

SEQ ID NO: 2218228 - RNA, 19 nt, Homo sapiens
  misc_RNA (1)...(19): siRNA sense strand
cccaauaauaugagccuga

SEQ ID NO: 2218229 - RNA, 19 nt, Homo sapiens
  misc_RNA (1)...(19): siRNA sense strand
uccaauggguccuggguca

SEQ ID NO: 2218230 - RNA, 19 nt, Homo sapiens
  misc_RNA (1)...(19): siRNA sense strand
gaggauaccuaaucaggca

SEQ ID NO: 2218231 - RNA, 19 nt, Homo sapiens
  misc_RNA (1)...(19): siRNA sense strand
ccaaauaugggugggccaa

SEQ ID NO: 2218232 - RNA, 19 nt, Homo sapiens
  misc_RNA (1)...(19): siRNA sense strand
caagaggaauggugcccuu

SEQ ID NO: 2218233 - RNA, 19 nt, Homo sapiens
  misc_RNA (1)...(19): siRNA sense strand
ccaacaaaugccaauucaa

SEQ ID NO: 2218234 - RNA, 19 nt, Homo sapiens
  misc_RNA (1)...(19): siRNA sense strand
cuaaagacagccagcgcua

SEQ ID NO: 2218235 - RNA, 19 nt, Homo sapiens
  misc_RNA (1)...(19): siRNA sense strand
aguccaagcgggagacaga

SEQ ID NO: 2218236 - RNA, 19 nt, Homo sapiens
  misc_RNA (1)...(19): siRNA sense strand
gaauauggucccugccgua

SEQ ID NO: 2218237 - RNA, 19 nt, Homo sapiens
  misc_RNA (1)...(19): siRNA sense strand
gagaaauggaagacacacu

SEQ ID NO: 2218238 - RNA, 19 nt, Homo sapiens
  misc_RNA (1)...(19): siRNA sense strand
aggaaaugcuagugagucg

SEQ ID NO: 2218239 - RNA, 19 nt, Homo sapiens
  misc_RNA (1)...(19): siRNA sense strand
guagagaaauggaagacac

SEQ ID NO: 2218240 - RNA, 19 nt, Homo sapiens
  misc_RNA (1)...(19): siRNA sense strand
uagagaaauggaagacaca

SEQ ID NO: 2218241 - RNA, 19 nt, Homo sapiens
  misc_RNA (1)...(19): siRNA sense strand
gaacgcaaguagagggagu

SEQ ID NO: 2218242 - RNA, 19 nt, Homo sapiens
  misc_RNA (1)...(19): siRNA sense strand
guacauuugaagaacgcaa

SEQ ID NO: 2218243 - RNA, 19 nt, Homo sapiens
  misc_RNA (1)...(19): siRNA sense strand
gaucuaaggaggcuggaga

SEQ ID NO: 2218244 - RNA, 19 nt, Homo sapiens
  misc_RNA (1)...(19): siRNA sense strand
ugugauuucuugaagguga

SEQ ID NO: 2218245 - RNA, 19 nt, Homo sapiens
  misc_RNA (1)...(19): siRNA sense strand
ucaacaagcccacagggua

SEQ ID NO: 2218246 - RNA, 19 nt, Homo sapiens
  misc_RNA (1)...(19): siRNA sense strand
ggguauggcuccagcaguc

SEQ ID NO: 2218247 - RNA, 19 nt, Homo sapiens
  misc_RNA (1)...(19): siRNA sense strand
cuuccggagcugugaucua

SEQ ID NO: 2218248 - RNA, 19 nt, Homo sapiens
  misc_RNA (1)...(19): siRNA sense strand
aaguagagggagugcagga

SEQ ID NO: 2218249 - RNA, 19 nt, Homo sapiens
  misc_RNA (1)...(19): siRNA sense strand
gugccaaaauagaugaaaa

SEQ ID NO: 2218250 - RNA, 19 nt, Homo sapiens
  misc_RNA (1)...(19): siRNA sense strand
uggaagagaagaacagaau

SEQ ID NO: 2218251 - RNA, 19 nt, Homo sapiens
  misc_RNA (1)...(19): siRNA sense strand
cagcagugaaagagcgaga

SEQ ID NO: 2218252 - RNA, 19 nt, Homo sapiens
  misc_RNA (1)...(19): siRNA sense strand
aaauuaguccagaaggaaa

SEQ ID NO: 2218253 - RNA, 19 nt, Homo sapiens
  misc_RNA (1)...(19): siRNA sense strand
cgaaauuacaagaguccau

SEQ ID NO: 2218254 - RNA, 19 nt, Homo sapiens
  misc_RNA (1)...(19): siRNA sense strand
cuguaacggucuaagauau

SEQ ID NO: 2218255 - RNA, 19 nt, Homo sapiens
  misc_RNA (1)...(19): siRNA sense strand
agaagaaaagguagugaaa

SEQ ID NO: 2218256 - RNA, 19 nt, Homo sapiens
  misc_RNA (1)...(19): siRNA sense strand
aagaacuggaagagaagaa

SEQ ID NO: 2218257 - RNA, 19 nt, Homo sapiens
  misc_RNA (1)...(19): siRNA sense strand
ugcccaaauucaagaggaa

SEQ ID NO: 2218258 - RNA, 19 nt, Homo sapiens
  misc_RNA (1)...(19): siRNA sense strand
aaccauuagaugagggcua

SEQ ID NO: 2218259 - RNA, 19 nt, Homo sapiens
  misc_RNA (1)...(19): siRNA sense strand
cguuuaaaugugaaugcaa

SEQ ID NO: 2218260 - RNA, 19 nt, Homo sapiens
  misc_RNA (1)...(19): siRNA sense strand
cugccaucaucaagagauu

SEQ ID NO: 2218261 - RNA, 19 nt, Homo sapiens
  misc_RNA (1)...(19): siRNA sense strand
cagaaaacaagaagcacaa

SEQ ID NO: 2218262 - RNA, 19 nt, Homo sapiens
  misc_RNA (1)...(19): siRNA sense strand
uguaacggucuaagauaua

SEQ ID NO: 2218263 - RNA, 19 nt, Homo sapiens
  misc_RNA (1)...(19): siRNA sense strand
ccagaaaauuaguccagaa

SEQ ID NO: 2218264 - RNA, 19 nt, Homo sapiens
  misc_RNA (1)...(19): siRNA sense strand
uuguaaagaaagugcguca

SEQ ID NO: 2218265 - RNA, 19 nt, Homo sapiens
  misc_RNA (1)...(19): siRNA sense strand
gcagggaggaacacagcaa

SEQ ID NO: 2218266 - RNA, 19 nt, Homo sapiens
  misc_RNA (1)...(19): siRNA sense strand
agaaagaauugcuugggca

SEQ ID NO: 2218267 - RNA, 19 nt, Homo sapiens
  misc_RNA (1)...(19): siRNA sense strand
cgccauuccuagaagaaaa

SEQ ID NO: 2218268 - RNA, 19 nt, Homo sapiens
  misc_RNA (1)...(19): siRNA sense strand
cagcaacauggauggaaau

SEQ ID NO: 2218269 - RNA, 19 nt, Homo sapiens
  misc_RNA (1)...(19): siRNA sense strand
agaggaaagcaaauaaaga

SEQ ID NO: 2218270 - RNA, 19 nt, Homo sapiens
  misc_RNA (1)...(19): siRNA sense strand
auucaagaggaaagcaaau

SEQ ID NO: 2218271 - RNA, 19 nt, Homo sapiens
  misc_RNA (1)...(19): siRNA sense strand
ccauugaauaugaagacuu

SEQ ID NO: 2218272 - RNA, 19 nt, Homo sapiens
  misc_RNA (1)...(19): siRNA sense strand
gcugaggaauucugggcca

SEQ ID NO: 2218273 - RNA, 19 nt, Homo sapiens
  misc_RNA (1)...(19): siRNA sense strand
gaaaacaagaagcacaaaa

SEQ ID NO: 2218274 - RNA, 19 nt, Homo sapiens
  misc_RNA (1)...(19): siRNA sense strand
aaauucaagaggaaagcaa

SEQ ID NO: 2218275 - RNA, 19 nt, Homo sapiens
  misc_RNA (1)...(19): siRNA sense strand
cuggaagagaagaacagaa

SEQ ID NO: 2218276 - RNA, 19 nt, Homo sapiens
  misc_RNA (1)...(19): siRNA sense strand
cugaaggcaaagauagauu

SEQ ID NO: 2218277 - RNA, 19 nt, Homo sapiens
  misc_RNA (1)...(19): siRNA sense strand
agagcgagaugcaguaaaa

SEQ ID NO: 2218278 - RNA, 19 nt, Homo sapiens
  misc_RNA (1)...(19): siRNA sense strand
agaugagggcuauggcauu

SEQ ID NO: 2218279 - RNA, 19 nt, Homo sapiens
  misc_RNA (1)...(19): siRNA sense strand
acaagaaauggaagcuuau

SEQ ID NO: 2218280 - RNA, 19 nt, Homo sapiens
  misc_RNA (1)...(19): siRNA sense strand
gcacaaaaugaacaaacua

SEQ ID NO: 2218281 - RNA, 19 nt, Homo sapiens
  misc_RNA (1)...(19): siRNA sense strand
agugaaagagcgagaugca

SEQ ID NO: 2218282 - RNA, 19 nt, Homo sapiens
  misc_RNA (1)...(19): siRNA sense strand
acaacaugacagagaagga

SEQ ID NO: 2218283 - RNA, 19 nt, Homo sapiens
  misc_RNA (1)...(19): siRNA sense strand
gcagauauuaaaugccaga

SEQ ID NO: 2218284 - RNA, 19 nt, Homo sapiens
  misc_RNA (1)...(19): siRNA sense strand
auuuaacagcuuuggaaga

SEQ ID NO: 2218285 - RNA, 19 nt, Homo sapiens
  misc_RNA (1)...(19): siRNA sense strand
cagaaugcugcaagaagau

SEQ ID NO: 2218286 - RNA, 19 nt, Homo sapiens
  misc_RNA (1)...(19): siRNA sense strand
acaugacagagaaggaauu

SEQ ID NO: 2218287 - RNA, 19 nt, Homo sapiens
  misc_RNA (1)...(19): siRNA sense strand
acuuaugcagggaggaaca

SEQ ID NO: 2218288 - RNA, 19 nt, Homo sapiens
  misc_RNA (1)...(19): siRNA sense strand
aggaacacagcaagccaua

SEQ ID NO: 2218289 - RNA, 19 nt, Homo sapiens
  misc_RNA (1)...(19): siRNA sense strand
aauuaguccagaaggaaaa

SEQ ID NO: 2218290 - RNA, 19 nt, Homo sapiens
  misc_RNA (1)...(19): siRNA sense strand
gaaaagauucggagacagu

SEQ ID NO: 2218291 - RNA, 19 nt, Homo sapiens
  misc_RNA (1)...(19): siRNA sense strand
aauucaagaggaaagcaaa

SEQ ID NO: 2218292 - RNA, 19 nt, Homo sapiens
  misc_RNA (1)...(19): siRNA sense strand
caucaagagauuuaaccau

SEQ ID NO: 2218293 - RNA, 19 nt, Homo sapiens
  misc_RNA (1)...(19): siRNA sense strand
uaugaagacuuggggaaaa

SEQ ID NO: 2218294 - RNA, 19 nt, Homo sapiens
  misc_RNA (1)...(19): siRNA sense strand
aagaaaagauucggagaca

SEQ ID NO: 2218295 - RNA, 19 nt, Homo sapiens
  misc_RNA (1)...(19): siRNA sense strand
cugaagaaguuuugcugau

SEQ ID NO: 2218296 - RNA, 19 nt, Homo sapiens
  misc_RNA (1)...(19): siRNA sense strand
aauaugaagacuuggggaa

SEQ ID NO: 2218297 - RNA, 19 nt, Homo sapiens
  misc_RNA (1)...(19): siRNA sense strand
ugaaagagcgagaugcagu

SEQ ID NO: 2218298 - RNA, 19 nt, Homo sapiens
  misc_RNA (1)...(19): siRNA sense strand
gcccaaauucaagaggaaa

SEQ ID NO: 2218299 - RNA, 19 nt, Homo sapiens
  misc_RNA (1)...(19): siRNA sense strand
aagaagucagauagguauu

SEQ ID NO: 2218300 - RNA, 19 nt, Homo sapiens
  misc_RNA (1)...(19): siRNA sense strand
guuuaaaugugaaugcaac

SEQ ID NO: 2218301 - RNA, 19 nt, Homo sapiens
  misc_RNA (1)...(19): siRNA sense strand
aaacccacuacuagauuua

SEQ ID NO: 2218302 - RNA, 19 nt, Homo sapiens
  misc_RNA (1)...(19): siRNA sense strand
gaaacaugauucugggcaa

SEQ ID NO: 2218303 - RNA, 19 nt, Homo sapiens
  misc_RNA (1)...(19): siRNA sense strand
ucucaaagaucauuggcaa

SEQ ID NO: 2218304 - RNA, 19 nt, Homo sapiens
  misc_RNA (1)...(19): siRNA sense strand
ugaccacauccgugagaaa

SEQ ID NO: 2218305 - RNA, 19 nt, Homo sapiens
  misc_RNA (1)...(19): siRNA sense strand
caguuaagacccaggcgua

SEQ ID NO: 2218306 - RNA, 19 nt, Homo sapiens
  misc_RNA (1)...(19): siRNA sense strand
cucaaagaucauuggcaaa

SEQ ID NO: 2218307 - RNA, 19 nt, Homo sapiens
  misc_RNA (1)...(19): siRNA sense strand
ggacauucucaaagaucau

SEQ ID NO: 2218308 - RNA, 19 nt, Homo sapiens
  misc_RNA (1)...(19): siRNA sense strand
gcgccaacuacgcggagaa

SEQ ID NO: 2218309 - RNA, 19 nt, Homo sapiens
  misc_RNA (1)...(19): siRNA sense strand
acaaaaugaugaaggacuu

SEQ ID NO: 2218310 - RNA, 19 nt, Homo sapiens
  misc_RNA (1)...(19): siRNA sense strand
caugaagucaggagagcau

SEQ ID NO: 2218311 - RNA, 19 nt, Homo sapiens
  misc_RNA (1)...(19): siRNA sense strand
acgaggagguggaagcuga

SEQ ID NO: 2218312 - RNA, 19 nt, Homo sapiens
  misc_RNA (1)...(19): siRNA sense strand
aaguuuacacuguggagaa

SEQ ID NO: 2218313 - RNA, 19 nt, Homo sapiens
  misc_RNA (1)...(19): siRNA sense strand
gcgcaaacaaaaugaugaa

SEQ ID NO: 2218314 - RNA, 19 nt, Homo sapiens
  misc_RNA (1)...(19): siRNA sense strand
gcggagaacuucauccaga

SEQ ID NO: 2218315 - RNA, 19 nt, Homo sapiens
  misc_RNA (1)...(19): siRNA sense strand
ggaaauuguggauucggua

SEQ ID NO: 2218316 - RNA, 19 nt, Homo sapiens
  misc_RNA (1)...(19): siRNA sense strand
aggacguugccaagauuaa

SEQ ID NO: 2218317 - RNA, 19 nt, Homo sapiens
  misc_RNA (1)...(19): siRNA sense strand
augagaaggacguugccaa

SEQ ID NO: 2218318 - RNA, 19 nt, Homo sapiens
  misc_RNA (1)...(19): siRNA sense strand
agucaggagagcaugauuu

SEQ ID NO: 2218319 - RNA, 19 nt, Homo sapiens
  misc_RNA (1)...(19): siRNA sense strand
cagcaguuugacuuggaaa

SEQ ID NO: 2218320 - RNA, 19 nt, Homo sapiens
  misc_RNA (1)...(19): siRNA sense strand
cuguggagaaggccgauaa

SEQ ID NO: 2218321 - RNA, 19 nt, Homo sapiens
  misc_RNA (1)...(19): siRNA sense strand
aggccgauaacuuugaaua

SEQ ID NO: 2218322 - RNA, 19 nt, Homo sapiens
  misc_RNA (1)...(19): siRNA sense strand
ccggguggcuagugcuaca

SEQ ID NO: 2218323 - RNA, 19 nt, Homo sapiens
  misc_RNA (1)...(19): siRNA sense strand
auuugauggacgcgagcaa

SEQ ID NO: 2218324 - RNA, 19 nt, Homo sapiens
  misc_RNA (1)...(19): siRNA sense strand
caauauuucuaauggaggu

SEQ ID NO: 2218325 - RNA, 19 nt, Homo sapiens
  misc_RNA (1)...(19): siRNA sense strand
cugccaacaucuucagcau

SEQ ID NO: 2218326 - RNA, 19 nt, Homo sapiens
  misc_RNA (1)...(19): siRNA sense strand
agcagaguguggaggacau

SEQ ID NO: 2218327 - RNA, 19 nt, Homo sapiens
  misc_RNA (1)...(19): siRNA sense strand
cugaagaaggagugaauaa

SEQ ID NO: 2218328 - RNA, 19 nt, Homo sapiens
  misc_RNA (1)...(19): siRNA sense strand
gagcaagguguuugggaaa

SEQ ID NO: 2218329 - RNA, 19 nt, Homo sapiens
  misc_RNA (1)...(19): siRNA sense strand
cugcuuaaauccaggguaa

SEQ ID NO: 2218330 - RNA, 19 nt, Homo sapiens
  misc_RNA (1)...(19): siRNA sense strand
acaaagaggagcaaggaaa

SEQ ID NO: 2218331 - RNA, 19 nt, Homo sapiens
  misc_RNA (1)...(19): siRNA sense strand
ccaagaaagauguggauau

SEQ ID NO: 2218332 - RNA, 19 nt, Homo sapiens
  misc_RNA (1)...(19): siRNA sense strand
ccagaaaaucuuaggaaaa

SEQ ID NO: 2218333 - RNA, 19 nt, Homo sapiens
  misc_RNA (1)...(19): siRNA sense strand
ccuuagggauagacagaaa

SEQ ID NO: 2218334 - RNA, 19 nt, Homo sapiens
  misc_RNA (1)...(19): siRNA sense strand
acuuaaagccugugagaga

SEQ ID NO: 2218335 - RNA, 19 nt, Homo sapiens
  misc_RNA (1)...(19): siRNA sense strand
guuaggaggagcagagaua

SEQ ID NO: 2218336 - RNA, 19 nt, Homo sapiens
  misc_RNA (1)...(19): siRNA sense strand
gcacaagagagaaagcaaa

SEQ ID NO: 2218337 - RNA, 19 nt, Homo sapiens
  misc_RNA (1)...(19): siRNA sense strand
agaaagaggcugauagaga

SEQ ID NO: 2218338 - RNA, 19 nt, Homo sapiens
  misc_RNA (1)...(19): siRNA sense strand
gguuuaauguggaguguau

SEQ ID NO: 2218339 - RNA, 19 nt, Homo sapiens
  misc_RNA (1)...(19): siRNA sense strand
cagauauguugcuggauaa

SEQ ID NO: 2218340 - RNA, 19 nt, Homo sapiens
  misc_RNA (1)...(19): siRNA sense strand
gcugagaguacuacagaaa

SEQ ID NO: 2218341 - RNA, 19 nt, Homo sapiens
  misc_RNA (1)...(19): siRNA sense strand
ccgaagaaccgguggcuuu

SEQ ID NO: 2218342 - RNA, 19 nt, Homo sapiens
  misc_RNA (1)...(19): siRNA sense strand
gaaaaugggaccugggaaa

SEQ ID NO: 2218343 - RNA, 19 nt, Homo sapiens
  misc_RNA (1)...(19): siRNA sense strand
gauuagacuuaaaggucaa

SEQ ID NO: 2218344 - RNA, 19 nt, Homo sapiens
  misc_RNA (1)...(19): siRNA sense strand
gcacgaaauugguggaacu

SEQ ID NO: 2218345 - RNA, 19 nt, Homo sapiens
  misc_RNA (1)...(19): siRNA sense strand
ugaaagacucauagaagaa

SEQ ID NO: 2218346 - RNA, 19 nt, Homo sapiens
  misc_RNA (1)...(19): siRNA sense strand
cccaaggaaaugagagaaa

SEQ ID NO: 2218347 - RNA, 19 nt, Homo sapiens
  misc_RNA (1)...(19): siRNA sense strand
aaauagaaauggagacuca

SEQ ID NO: 2218348 - RNA, 19 nt, Homo sapiens
  misc_RNA (1)...(19): siRNA sense strand
ccauaaauguggaagaagu

SEQ ID NO: 2218349 - RNA, 19 nt, Homo sapiens
  misc_RNA (1)...(19): siRNA sense strand
acaacauacucuugcauaa

SEQ ID NO: 2218350 - RNA, 19 nt, Homo sapiens
  misc_RNA (1)...(19): siRNA sense strand
caaaagaaguucagagcau

SEQ ID NO: 2218351 - RNA, 19 nt, Homo sapiens
  misc_RNA (1)...(19): siRNA sense strand
cugauuaccuaaagggauu

SEQ ID NO: 2218352 - RNA, 19 nt, Homo sapiens
  misc_RNA (1)...(19): siRNA sense strand
aaggaggauucaugggaaa

SEQ ID NO: 2218353 - RNA, 19 nt, Homo sapiens
  misc_RNA (1)...(19): siRNA sense strand
gcaagaucuuucaggagaa

SEQ ID NO: 2218354 - RNA, 19 nt, Homo sapiens
  misc_RNA (1)...(19): siRNA sense strand
agguaaauguggaauguau

SEQ ID NO: 2218355 - RNA, 19 nt, Homo sapiens
  misc_RNA (1)...(19): siRNA sense strand
aagagacacugcagggaaa

SEQ ID NO: 2218356 - RNA, 19 nt, Homo sapiens
  misc_RNA (1)...(19): siRNA sense strand
gaaccaaaucaucaggaaa

SEQ ID NO: 2218357 - RNA, 19 nt, Homo sapiens
  misc_RNA (1)...(19): siRNA sense strand
ccucagagucucagcaaau

SEQ ID NO: 2218358 - RNA, 19 nt, Homo sapiens
  misc_RNA (1)...(19): siRNA sense strand
agauaaugcuucugauaca

SEQ ID NO: 2218359 - RNA, 19 nt, Homo sapiens
  misc_RNA (1)...(19): siRNA sense strand
caaaggagccagagaagau

SEQ ID NO: 2218360 - RNA, 19 nt, Homo sapiens
  misc_RNA (1)...(19): siRNA sense strand
agauaaugcuguagaaauc

SEQ ID NO: 2218361 - RNA, 19 nt, Homo sapiens
  misc_RNA (1)...(19): siRNA sense strand
cagaagaagcugaggauuc

SEQ ID NO: 2218362 - RNA, 19 nt, Homo sapiens
  misc_RNA (1)...(19): siRNA sense strand
caaagggagugcugggauu

SEQ ID NO: 2218363 - RNA, 19 nt, Homo sapiens
  misc_RNA (1)...(19): siRNA sense strand
uugaagaugugauggacaa

SEQ ID NO: 2218364 - RNA, 19 nt, Homo sapiens
  misc_RNA (1)...(19): siRNA sense strand
gagauaaugcuguagaaau

SEQ ID NO: 2218365 - RNA, 19 nt, Homo sapiens
  misc_RNA (1)...(19): siRNA sense strand
cgcuagaaaccaugauaaa

SEQ ID NO: 2218366 - RNA, 19 nt, Homo sapiens
  misc_RNA (1)...(19): siRNA sense strand
caauauugaaggagagcuu

SEQ ID NO: 2218367 - RNA, 19 nt, Homo sapiens
  misc_RNA (1)...(19): siRNA sense strand
cuguaagagaugcaagaaa

SEQ ID NO: 2218368 - RNA, 19 nt, Homo sapiens
  misc_RNA (1)...(19): siRNA sense strand
gcagagaugaugccagaaa

SEQ ID NO: 2218369 - RNA, 19 nt, Homo sapiens
  misc_RNA (1)...(19): siRNA sense strand
cugaagauuuguuguggaa

SEQ ID NO: 2218370 - RNA, 19 nt, Homo sapiens
  misc_RNA (1)...(19): siRNA sense strand
ggaaauacuacgagacugu

SEQ ID NO: 2218371 - RNA, 19 nt, Homo sapiens
  misc_RNA (1)...(19): siRNA sense strand
gguauaagcaaaaggggaa

SEQ ID NO: 2218372 - RNA, 19 nt, Homo sapiens
  misc_RNA (1)...(19): siRNA sense strand
uguccauggucgaggauuu

SEQ ID NO: 2218373 - RNA, 19 nt, Homo sapiens
  misc_RNA (1)...(19): siRNA sense strand
ucaaagaagcuuauccaaa

SEQ ID NO: 2218374 - RNA, 19 nt, Homo sapiens
  misc_RNA (1)...(19): siRNA sense strand
cagcgaagccacagcacua

SEQ ID NO: 2218375 - RNA, 19 nt, Homo sapiens
  misc_RNA (1)...(19): siRNA sense strand
ccuaauaaauagugugaug

SEQ ID NO: 2218376 - RNA, 19 nt, Homo sapiens
  misc_RNA (1)...(19): siRNA sense strand
gcuuaaauccaggguaaua

SEQ ID NO: 2218377 - RNA, 19 nt, Homo sapiens
  misc_RNA (1)...(19): siRNA sense strand
acucaguagcugugaagaa

SEQ ID NO: 2218378 - RNA, 19 nt, Homo sapiens
  misc_RNA (1)...(19): siRNA sense strand
ugaacaaaucagagaacuu

SEQ ID NO: 2218379 - RNA, 19 nt, Homo sapiens
  misc_RNA (1)...(19): siRNA sense strand
gggaggaagaagaggagga

SEQ ID NO: 2218380 - RNA, 19 nt, Homo sapiens
  misc_RNA (1)...(19): siRNA sense strand
gaccgaaauuucugaggaa

SEQ ID NO: 2218381 - RNA, 19 nt, Homo sapiens
  misc_RNA (1)...(19): siRNA sense strand
gcauauuagaggaauguau

SEQ ID NO: 2218382 - RNA, 19 nt, Homo sapiens
  misc_RNA (1)...(19): siRNA sense strand
ucaucaaucugcagaagaa

SEQ ID NO: 2218383 - RNA, 19 nt, Homo sapiens
  misc_RNA (1)...(19): siRNA sense strand
gcauuagcacugcgaguua

SEQ ID NO: 2218384 - RNA, 19 nt, Homo sapiens
  misc_RNA (1)...(19): siRNA sense strand
guucuaagguagcagauau

SEQ ID NO: 2218385 - RNA, 19 nt, Homo sapiens
  misc_RNA (1)...(19): siRNA sense strand
gugaauugacugaagaaga

SEQ ID NO: 2218386 - RNA, 19 nt, Homo sapiens
  misc_RNA (1)...(19): siRNA sense strand
gcuguuuacuggaagcaaa

SEQ ID NO: 2218387 - RNA, 19 nt, Homo sapiens
  misc_RNA (1)...(19): siRNA sense strand
aggacgugcuucagauuua

SEQ ID NO: 2218388 - RNA, 19 nt, Homo sapiens
  misc_RNA (1)...(19): siRNA sense strand
gaacaaggugugagaagca

SEQ ID NO: 2218389 - RNA, 19 nt, Homo sapiens
  misc_RNA (1)...(19): siRNA sense strand
gcaccaagacaaaagaaaa

SEQ ID NO: 2218390 - RNA, 19 nt, Homo sapiens
  misc_RNA (1)...(19): siRNA sense strand
accuauaugcuguggauua

SEQ ID NO: 2218391 - RNA, 19 nt, Homo sapiens
  misc_RNA (1)...(19): siRNA sense strand
gagaaugagccaagagaac

SEQ ID NO: 2218392 - RNA, 19 nt, Homo sapiens
  misc_RNA (1)...(19): siRNA sense strand
ugguggcaauugagagaua

SEQ ID NO: 2218393 - RNA, 19 nt, Homo sapiens
  misc_RNA (1)...(19): siRNA sense strand
ggaagaaguuucagcuacu

SEQ ID NO: 2218394 - RNA, 19 nt, Homo sapiens
  misc_RNA (1)...(19): siRNA sense strand
caagcaugccagagaguau

SEQ ID NO: 2218395 - RNA, 19 nt, Homo sapiens
  misc_RNA (1)...(19): siRNA sense strand
cgagaacaggucaaagaaa

SEQ ID NO: 2218396 - RNA, 19 nt, Homo sapiens
  misc_RNA (1)...(19): siRNA sense strand
cuuuaaaggcuuaucagaa

SEQ ID NO: 2218397 - RNA, 19 nt, Homo sapiens
  misc_RNA (1)...(19): siRNA sense strand
ugucaacaccuaagcguua

SEQ ID NO: 2218398 - RNA, 19 nt, Homo sapiens
  misc_RNA (1)...(19): siRNA sense strand
cagcaagcuuauucagauu

SEQ ID NO: 2218399 - RNA, 19 nt, Homo sapiens
  misc_RNA (1)...(19): siRNA sense strand
uguaauaggcacagaacgu

SEQ ID NO: 2218400 - RNA, 19 nt, Homo sapiens
  misc_RNA (1)...(19): siRNA sense strand
gcaugggagaggaggaucu

SEQ ID NO: 2218401 - RNA, 19 nt, Homo sapiens
  misc_RNA (1)...(19): siRNA sense strand
ggguguaauaggcacagaa

SEQ ID NO: 2218402 - RNA, 19 nt, Homo sapiens
  misc_RNA (1)...(19): siRNA sense strand
cccuaaugagacuggaaau

SEQ ID NO: 2218403 - RNA, 19 nt, Homo sapiens
  misc_RNA (1)...(19): siRNA sense strand
aauuauguccacagagcuu

SEQ ID NO: 2218404 - RNA, 19 nt, Homo sapiens
  misc_RNA (1)...(19): siRNA sense strand
ccucuuuacaugugugcau

SEQ ID NO: 2218405 - RNA, 19 nt, Homo sapiens
  misc_RNA (1)...(19): siRNA sense strand
uaucagagaagaagggugu

SEQ ID NO: 2218406 - RNA, 19 nt, Homo sapiens
  misc_RNA (1)...(19): siRNA sense strand
acaacggccucgugggcau

SEQ ID NO: 2218407 - RNA, 19 nt, Homo sapiens
  misc_RNA (1)...(19): siRNA sense strand
aggcaaacguguucgugca

SEQ ID NO: 2218408 - RNA, 19 nt, Homo sapiens
  misc_RNA (1)...(19): siRNA sense strand
ucaugaaccucucugggaa

SEQ ID NO: 2218409 - RNA, 19 nt, Homo sapiens
  misc_RNA (1)...(19): siRNA sense strand
gcauugaggagcagagccu

SEQ ID NO: 2218410 - RNA, 19 nt, Homo sapiens
  misc_RNA (1)...(19): siRNA sense strand
ucaccaacguggcggucau

SEQ ID NO: 2218411 - RNA, 19 nt, Homo sapiens
  misc_RNA (1)...(19): siRNA sense strand
gggacuucgcccugcagaa

SEQ ID NO: 2218412 - RNA, 19 nt, Homo sapiens
  misc_RNA (1)...(19): siRNA sense strand
acgaugacgacgcggauga

SEQ ID NO: 2218413 - RNA, 19 nt, Homo sapiens
  misc_RNA (1)...(19): siRNA sense strand
ccaacguggcggucaugaa

SEQ ID NO: 2218414 - RNA, 19 nt, Homo sapiens
  misc_RNA (1)...(19): siRNA sense strand
aggcauaauaggaaggauu

SEQ ID NO: 2218415 - RNA, 19 nt, Homo sapiens
  misc_RNA (1)...(19): siRNA sense strand
aggaaggauuggagacaca

SEQ ID NO: 2218416 - RNA, 19 nt, Homo sapiens
  misc_RNA (1)...(19): siRNA sense strand
caaugaaguuguugagcca

SEQ ID NO: 2218417 - RNA, 19 nt, Homo sapiens
  misc_RNA (1)...(19): siRNA sense strand
caaaguagaauguuggaga

SEQ ID NO: 2218418 - RNA, 19 nt, Homo sapiens
  misc_RNA (1)...(19): siRNA sense strand
ggcuuaaguaugagugcua

SEQ ID NO: 2218419 - RNA, 19 nt, Homo sapiens
  misc_RNA (1)...(19): siRNA sense strand
gugcuaagaaagaggggaa

SEQ ID NO: 2218420 - RNA, 19 nt, Homo sapiens
  misc_RNA (1)...(19): siRNA sense strand
aagcauaggcggaggugca

SEQ ID NO: 2218421 - RNA, 19 nt, Homo sapiens
  misc_RNA (1)...(19): siRNA sense strand
aaguagaauguuggagaaa

SEQ ID NO: 2218422 - RNA, 19 nt, Homo sapiens
  misc_RNA (1)...(19): siRNA sense strand
ucuccaaaguucaggcuca

SEQ ID NO: 2218423 - RNA, 19 nt, Homo sapiens
  misc_RNA (1)...(19): siRNA sense strand
ugggacaagcuguggaaaa

SEQ ID NO: 2218424 - RNA, 19 nt, Homo sapiens
  misc_RNA (1)...(19): siRNA sense strand
ugcaggaauucauggacaa

SEQ ID NO: 2218425 - RNA, 19 nt, Homo sapiens
  misc_RNA (1)...(19): siRNA sense strand
cugcuuuauugaugguaau

SEQ ID NO: 2218426 - RNA, 19 nt, Homo sapiens
  misc_RNA (1)...(19): siRNA sense strand
cguaaaguuugcuuggcau

SEQ ID NO: 2218427 - RNA, 19 nt, Homo sapiens
  misc_RNA (1)...(19): siRNA sense strand
ucugaauaccaaaguagaa

SEQ ID NO: 2218428 - RNA, 19 nt, Homo sapiens
  misc_RNA (1)...(19): siRNA sense strand
ggaagcaguggcugggaca

SEQ ID NO: 2218429 - RNA, 19 nt, Homo sapiens
  misc_RNA (1)...(19): siRNA sense strand
uggcauaaggagacaucau

SEQ ID NO: 2218430 - RNA, 19 nt, Homo sapiens
  misc_RNA (1)...(19): siRNA sense strand
augcaggaauucauggaca

SEQ ID NO: 2218431 - RNA, 19 nt, Homo sapiens
  misc_RNA (1)...(19): siRNA sense strand
gauucuaagcauaggcgga

SEQ ID NO: 2218432 - RNA, 19 nt, Homo sapiens
  misc_RNA (1)...(19): siRNA sense strand
ugccaaauacaaagagcuu

SEQ ID NO: 2218433 - RNA, 19 nt, Homo sapiens
  misc_RNA (1)...(19): siRNA sense strand
cuuuaaugccacagcacca

SEQ ID NO: 2218434 - RNA, 19 nt, Homo sapiens
  misc_RNA (1)...(19): siRNA sense strand
gcauuauccacgaggcaaa

SEQ ID NO: 2218435 - RNA, 19 nt, Homo sapiens
  misc_RNA (1)...(19): siRNA sense strand
gagaaauuuuggagagaga

SEQ ID NO: 2218436 - RNA, 19 nt, Homo sapiens
  misc_RNA (1)...(19): siRNA sense strand
agugcaaaguucugaaaca

SEQ ID NO: 2218437 - RNA, 19 nt, Homo sapiens
  misc_RNA (1)...(19): siRNA sense strand
augauaugcugcaggaaaa

SEQ ID NO: 2218438 - RNA, 19 nt, Homo sapiens
  misc_RNA (1)...(19): siRNA sense strand
ggagucugucaaagagaaa

SEQ ID NO: 2218439 - RNA, 19 nt, Homo sapiens
  misc_RNA (1)...(19): siRNA sense strand
ugucaaagagaaaguaaca

SEQ ID NO: 2218440 - RNA, 19 nt, Homo sapiens
  misc_RNA (1)...(19): siRNA sense strand
uggcuaugauucagugcaa

SEQ ID NO: 2218441 - RNA, 19 nt, Homo sapiens
  misc_RNA (1)...(19): siRNA sense strand
ugcacaaaucugagaaauu

SEQ ID NO: 2218442 - RNA, 19 nt, Homo sapiens
  misc_RNA (1)...(19): siRNA sense strand
aagaauaugcccuggcuau

SEQ ID NO: 2218443 - RNA, 19 nt, Homo sapiens
  misc_RNA (1)...(19): siRNA sense strand
aauccuaucuucagggaca

SEQ ID NO: 2218444 - RNA, 19 nt, Homo sapiens
  misc_RNA (1)...(19): siRNA sense strand
ggagaauaugugcggcauu

SEQ ID NO: 2218445 - RNA, 19 nt, Homo sapiens
  misc_RNA (1)...(19): siRNA sense strand
agaaacucgccaagaauau

SEQ ID NO: 2218446 - RNA, 19 nt, Homo sapiens
  misc_RNA (1)...(19): siRNA sense strand
gcaagauguagcaagaaca

SEQ ID NO: 2218447 - RNA, 19 nt, Homo sapiens
  misc_RNA (1)...(19): siRNA sense strand
acuuaaaucuggaagguug

SEQ ID NO: 2218448 - RNA, 19 nt, Homo sapiens
  misc_RNA (1)...(19): siRNA sense strand
ugaaagagaaacucgccaa

SEQ ID NO: 2218449 - RNA, 19 nt, Homo sapiens
  misc_RNA (1)...(19): siRNA sense strand
ugagguuaaaugagaagaa

SEQ ID NO: 2218450 - RNA, 19 nt, Homo sapiens
  misc_RNA (1)...(19): siRNA sense strand
cuucagggacagaugauuu

SEQ ID NO: 2218451 - RNA, 19 nt, Homo sapiens
  misc_RNA (1)...(19): siRNA sense strand
cugaagagaagcaagagau

SEQ ID NO: 2218452 - RNA, 19 nt, Homo sapiens
  misc_RNA (1)...(19): siRNA sense strand
cugaagauugugaguuuau

SEQ ID NO: 2218453 - RNA, 19 nt, Homo sapiens
  misc_RNA (1)...(19): siRNA sense strand
gguggaagcagauggggua

SEQ ID NO: 2218454 - RNA, 19 nt, Homo sapiens
  misc_RNA (1)...(19): siRNA sense strand
guucugaaacaguuggaga

SEQ ID NO: 2218455 - RNA, 19 nt, Homo sapiens
  misc_RNA (1)...(19): siRNA sense strand
agaacuuggaacagcagaa

SEQ ID NO: 2218456 - RNA, 19 nt, Homo sapiens
  misc_RNA (1)...(19): siRNA sense strand
ccugaagagaagcaagaga

SEQ ID NO: 2218457 - RNA, 19 nt, Homo sapiens
  misc_RNA (1)...(19): siRNA sense strand
agagaaacucgccaagaau

SEQ ID NO: 2218458 - RNA, 19 nt, Homo sapiens
  misc_RNA (1)...(19): siRNA sense strand
gaaauuuuggagagagaau

SEQ ID NO: 2218459 - RNA, 19 nt, Homo sapiens
  misc_RNA (1)...(19): siRNA sense strand
aguacgaugaugaagauau

SEQ ID NO: 2218460 - RNA, 19 nt, Homo sapiens
  misc_RNA (1)...(19): siRNA sense strand
cugugagguuaaaugagaa

SEQ ID NO: 2218461 - RNA, 19 nt, Homo sapiens
  misc_RNA (1)...(19): siRNA sense strand
ccacgaggcaaacggguca

SEQ ID NO: 2218462 - RNA, 19 nt, Homo sapiens
  misc_RNA (1)...(19): siRNA sense strand
gguaaauugcauaauggga

SEQ ID NO: 2218463 - RNA, 19 nt, Homo sapiens
  misc_RNA (1)...(19): siRNA sense strand
gcccugaagagaagcaaga

SEQ ID NO: 2218464 - RNA, 19 nt, Homo sapiens
  misc_RNA (1)...(19): siRNA sense strand
ggaaaagaacugauggaag

SEQ ID NO: 2218465 - RNA, 19 nt, Homo sapiens
  misc_RNA (1)...(19): siRNA sense strand
ccgcuuugcuuggguggaa

SEQ ID NO: 2218466 - RNA, 19 nt, Homo sapiens
  misc_RNA (1)...(19): siRNA sense strand
gaaaagaacugauggaagg

SEQ ID NO: 2218467 - RNA, 19 nt, Homo sapiens
  misc_RNA (1)...(19): siRNA sense strand
agagaaaguaacaagaauc

SEQ ID NO: 2218468 - RNA, 19 nt, Homo sapiens
  misc_RNA (1)...(19): siRNA sense strand
cggcauuauccacgaggca

SEQ ID NO: 2218469 - RNA, 19 nt, Homo sapiens
  misc_RNA (1)...(19): siRNA sense strand
guuagcagcuuggggaaaa

SEQ ID NO: 2218470 - RNA, 19 nt, Homo sapiens
  misc_RNA (1)...(19): siRNA sense strand
gcaaacgggucaucgagca

SEQ ID NO: 2218471 - RNA, 19 nt, Homo sapiens
  misc_RNA (1)...(19): siRNA sense strand
gcaagcagcuccaguccga

SEQ ID NO: 2218472 - RNA, 19 nt, Homo sapiens
  misc_RNA (1)...(19): siRNA sense strand
uggcagaagacauggaaau

SEQ ID NO: 2218473 - RNA, 19 nt, Homo sapiens
  misc_RNA (1)...(19): siRNA sense strand
guguaugagcacagggaga

SEQ ID NO: 2218474 - RNA, 19 nt, Homo sapiens
  misc_RNA (1)...(19): siRNA sense strand
aguuacaggaugugaagaa

SEQ ID NO: 2218475 - RNA, 19 nt, Homo sapiens
  misc_RNA (1)...(19): siRNA sense strand
uguuguacuuagugaagaa

SEQ ID NO: 2218476 - RNA, 19 nt, Homo sapiens
  misc_RNA (1)...(19): siRNA sense strand
ggaugugaggcaagaguuu

SEQ ID NO: 2218477 - RNA, 19 nt, Homo sapiens
  misc_RNA (1)...(19): siRNA sense strand
gaacgaauuaagaagucaa

SEQ ID NO: 2218478 - RNA, 19 nt, Homo sapiens
  misc_RNA (1)...(19): siRNA sense strand
agcaaagagaguuagaaua

SEQ ID NO: 2218479 - RNA, 19 nt, Homo sapiens
  misc_RNA (1)...(19): siRNA sense strand
augaacaugugcagaagaa

SEQ ID NO: 2218480 - RNA, 19 nt, Homo sapiens
  misc_RNA (1)...(19): siRNA sense strand
ggguugaagaggaagcauu

SEQ ID NO: 2218481 - RNA, 19 nt, Homo sapiens
  misc_RNA (1)...(19): siRNA sense strand
aagaggaagcauuggucaa

SEQ ID NO: 2218482 - RNA, 19 nt, Homo sapiens
  misc_RNA (1)...(19): siRNA sense strand
gugaaggaccaguggacca

SEQ ID NO: 2218483 - RNA, 19 nt, Homo sapiens
  misc_RNA (1)...(19): siRNA sense strand
acagugaauccuuggcaua

SEQ ID NO: 2218484 - RNA, 19 nt, Homo sapiens
  misc_RNA (1)...(19): siRNA sense strand
cuuaaucucaagugacaaa

SEQ ID NO: 2218485 - RNA, 19 nt, Homo sapiens
  misc_RNA (1)...(19): siRNA sense strand
uggcauaugaagaaagcuu

SEQ ID NO: 2218486 - RNA, 19 nt, Homo sapiens
  misc_RNA (1)...(19): siRNA sense strand
aauucagguuacagaagaa

SEQ ID NO: 2218487 - RNA, 19 nt, Homo sapiens
  misc_RNA (1)...(19): siRNA sense strand
ccaaauugauggugguggu

SEQ ID NO: 2218488 - RNA, 19 nt, Homo sapiens
  misc_RNA (1)...(19): siRNA sense strand
gagcacagggagaaguuau

SEQ ID NO: 2218489 - RNA, 19 nt, Homo sapiens
  misc_RNA (1)...(19): siRNA sense strand
aggaagcauuggucaagaa

SEQ ID NO: 2218490 - RNA, 19 nt, Homo sapiens
  misc_RNA (1)...(19): siRNA sense strand
cugcagaaauucagguuac

SEQ ID NO: 2218491 - RNA, 19 nt, Homo sapiens
  misc_RNA (1)...(19): siRNA sense strand
ugacaaggaugugaggcaa

SEQ ID NO: 2218492 - RNA, 19 nt, Homo sapiens
  misc_RNA (1)...(19): siRNA sense strand
acaccuaugcagagcaaca

SEQ ID NO: 2218493 - RNA, 19 nt, Homo sapiens
  misc_RNA (1)...(19): siRNA sense strand
caaucuuggcaucgaacaa

SEQ ID NO: 2218494 - RNA, 19 nt, Homo sapiens
  misc_RNA (1)...(19): siRNA sense strand
ccaacagagcagcguauau

SEQ ID NO: 2218495 - RNA, 19 nt, Homo sapiens
  misc_RNA (1)...(19): siRNA sense strand
gcucuaugcuguaggaggu

SEQ ID NO: 2218496 - RNA, 19 nt, Homo sapiens
  misc_RNA (1)...(19): siRNA sense strand
gaaaugagcaccaggcgga

SEQ ID NO: 2218497 - RNA, 19 nt, Homo sapiens
  misc_RNA (1)...(19): siRNA sense strand
augaauacaaggaggagca

SEQ ID NO: 2218498 - RNA, 19 nt, Homo sapiens
  misc_RNA (1)...(19): siRNA sense strand
ggccaagcaccaaaggcua

SEQ ID NO: 2218499 - RNA, 19 nt, Homo sapiens
  misc_RNA (1)...(19): siRNA sense strand
caguuaauggucuguuaua

SEQ ID NO: 2218500 - RNA, 19 nt, Homo sapiens
  misc_RNA (1)...(19): siRNA sense strand
gcaguaauagcauggguga

SEQ ID NO: 2218501 - RNA, 19 nt, Homo sapiens
  misc_RNA (1)...(19): siRNA sense strand
agcagguguugguguguua

SEQ ID NO: 2218502 - RNA, 19 nt, Homo sapiens
  misc_RNA (1)...(19): siRNA sense strand
guauaugaucccaccacua

SEQ ID NO: 2218503 - RNA, 19 nt, Homo sapiens
  misc_RNA (1)...(19): siRNA sense strand
agccgagcaaagagaguua

SEQ ID NO: 2218504 - RNA, 19 nt, Homo sapiens
  misc_RNA (1)...(19): siRNA sense strand
ccacuaacgcauggagaca

SEQ ID NO: 2218505 - RNA, 19 nt, Homo sapiens
  misc_RNA (1)...(19): siRNA sense strand
guagauggcuggacccuga

SEQ ID NO: 2218506 - RNA, 19 nt, Homo sapiens
  misc_RNA (1)...(19): siRNA sense strand
gggugaaccaugacaagga

SEQ ID NO: 2218507 - RNA, 19 nt, Homo sapiens
  misc_RNA (1)...(19): siRNA sense strand
augacaaggaugugaggca

SEQ ID NO: 2218508 - RNA, 19 nt, Homo sapiens
  misc_RNA (1)...(19): siRNA sense strand
cagaaauucagguuacaga

SEQ ID NO: 2218509 - RNA, 19 nt, Homo sapiens
  misc_RNA (1)...(19): siRNA sense strand
agagaagguauuugaagca

SEQ ID NO: 2218510 - RNA, 19 nt, Homo sapiens
  misc_RNA (1)...(19): siRNA sense strand
ccuacgacccugugaagga

SEQ ID NO: 2218511 - RNA, 19 nt, Homo sapiens
  misc_RNA (1)...(19): siRNA sense strand
gcaucacgucagugucuua

SEQ ID NO: 2218512 - RNA, 19 nt, Homo sapiens
  misc_RNA (1)...(19): siRNA sense strand
caguaauagcaugggugaa

SEQ ID NO: 2218513 - RNA, 19 nt, Homo sapiens
  misc_RNA (1)...(19): siRNA sense strand
gagcaguguuggugugggu

SEQ ID NO: 2218514 - RNA, 19 nt, Homo sapiens
  misc_RNA (1)...(19): siRNA sense strand
caauuguggcagaagacau

SEQ ID NO: 2218515 - RNA, 19 nt, Homo sapiens
  misc_RNA (1)...(19): siRNA sense strand
ggcagaagacauggaaauu

SEQ ID NO: 2218516 - RNA, 19 nt, Homo sapiens
  misc_RNA (1)...(19): siRNA sense strand
cugcuguguuaaauggauu

SEQ ID NO: 2218517 - RNA, 19 nt, Homo sapiens
  misc_RNA (1)...(19): siRNA sense strand
uggaaugcuaugacuuuaa

SEQ ID NO: 2218518 - RNA, 19 nt, Homo sapiens
  misc_RNA (1)...(19): siRNA sense strand
uggaagcauacaacauaaa

SEQ ID NO: 2218519 - RNA, 19 nt, Homo sapiens
  misc_RNA (1)...(19): siRNA sense strand
aagaaaugcaggaguuugu

SEQ ID NO: 2218520 - RNA, 19 nt, Homo sapiens
  misc_RNA (1)...(19): siRNA sense strand
ggguguuguuggagguuug

SEQ ID NO: 2218521 - RNA, 19 nt, Homo sapiens
  misc_RNA (1)...(19): siRNA sense strand
acaggugagaugagugaga

SEQ ID NO: 2218522 - RNA, 19 nt, Homo sapiens
  misc_RNA (1)...(19): siRNA sense strand
agcuuaaucucaagugaca

SEQ ID NO: 2218523 - RNA, 19 nt, Homo sapiens
  misc_RNA (1)...(19): siRNA sense strand
gcgaggaguaggcagcaau

SEQ ID NO: 2218524 - RNA, 19 nt, Homo sapiens
  misc_RNA (1)...(19): siRNA sense strand
aggcaagacaagaagaaau

SEQ ID NO: 2218525 - RNA, 19 nt, Homo sapiens
  misc_RNA (1)...(19): siRNA sense strand
uggcacuagugaagaagaa

SEQ ID NO: 2218526 - RNA, 19 nt, Homo sapiens
  misc_RNA (1)...(19): siRNA sense strand
ccuaaugaggagacaauau

SEQ ID NO: 2218527 - RNA, 19 nt, Homo sapiens
  misc_RNA (1)...(19): siRNA sense strand
uggaagguguagaaccaaa

SEQ ID NO: 2218528 - RNA, 19 nt, Homo sapiens
  misc_RNA (1)...(19): siRNA sense strand
uugcagugcuagaugacaa

SEQ ID NO: 2218529 - RNA, 19 nt, Homo sapiens
  misc_RNA (1)...(19): siRNA sense strand
ccauuuauuaccagagaga

SEQ ID NO: 2218530 - RNA, 19 nt, Homo sapiens
  misc_RNA (1)...(19): siRNA sense strand
cagagaggcaagacaagaa

SEQ ID NO: 2218531 - RNA, 19 nt, Homo sapiens
  misc_RNA (1)...(19): siRNA sense strand
aauggaagguguagaacca

SEQ ID NO: 2218532 - RNA, 19 nt, Homo sapiens
  misc_RNA (1)...(19): siRNA sense strand
gcacuagugaagaagaaaa

SEQ ID NO: 2218533 - RNA, 19 nt, Homo sapiens
  misc_RNA (1)...(19): siRNA sense strand
uuaauaccguggaggcuua

SEQ ID NO: 2218534 - RNA, 19 nt, Homo sapiens
  misc_RNA (1)...(19): siRNA sense strand
gguuggaggaagagaugga

SEQ ID NO: 2218535 - RNA, 19 nt, Homo sapiens
  misc_RNA (1)...(19): siRNA sense strand
cggaaagaucuaaguaaac

SEQ ID NO: 2218536 - RNA, 19 nt, Homo sapiens
  misc_RNA (1)...(19): siRNA sense strand
acagagacggaaagaucua

SEQ ID NO: 2218537 - RNA, 19 nt, Homo sapiens
  misc_RNA (1)...(19): siRNA sense strand
gcaaacggugggagaaagu

SEQ ID NO: 2218538 - RNA, 19 nt, Homo sapiens
  misc_RNA (1)...(19): siRNA sense strand
ccaaauucguugugguccu

SEQ ID NO: 2218539 - RNA, 19 nt, Homo sapiens
  misc_RNA (1)...(19): siRNA sense strand
uuauggaagcaaugaagua

SEQ ID NO: 2218540 - RNA, 19 nt, Homo sapiens
  misc_RNA (1)...(19): siRNA sense strand
guucgguguugcagugcua

SEQ ID NO: 2218541 - RNA, 19 nt, Homo sapiens
  misc_RNA (1)...(19): siRNA sense strand
gcgaaauugcaaagcucuu

SEQ ID NO: 2218542 - RNA, 19 nt, Homo sapiens
  misc_RNA (1)...(19): siRNA sense strand
uugcaaagcucuuggcuag

SEQ ID NO: 2218543 - RNA, 19 nt, Homo sapiens
  misc_RNA (1)...(19): siRNA sense strand
ggcaguacuaaguggaaaa

SEQ ID NO: 2218544 - RNA, 19 nt, Homo sapiens
  misc_RNA (1)...(19): siRNA sense strand
ggaugauggcacuagugaa

SEQ ID NO: 2218545 - RNA, 19 nt, Homo sapiens
  misc_RNA (1)...(19): siRNA sense strand
aggacagacuggagcaaac

SEQ ID NO: 2218546 - RNA, 19 nt, Homo sapiens
  misc_RNA (1)...(19): siRNA sense strand
gcuacaaccccaaaacaaa

SEQ ID NO: 2218547 - RNA, 19 nt, Homo sapiens
  misc_RNA (1)...(19): siRNA sense strand
uggcaguacuaaguggaaa

SEQ ID NO: 2218548 - RNA, 19 nt, Homo sapiens
  misc_RNA (1)...(19): siRNA sense strand
uggagcaaacggugggaga

SEQ ID NO: 2218549 - RNA, 19 nt, Homo sapiens
  misc_RNA (1)...(19): siRNA sense strand
agagauggacugaagacuu

SEQ ID NO: 2218550 - RNA, 19 nt, Homo sapiens
  misc_RNA (1)...(19): siRNA sense strand
agaggcaagacaagaagaa

SEQ ID NO: 2218551 - RNA, 19 nt, Homo sapiens
  misc_RNA (1)...(19): siRNA sense strand
cagccagcagggagaauuu

SEQ ID NO: 2218552 - RNA, 19 nt, Homo sapiens
  misc_RNA (1)...(19): siRNA sense strand
uaaucagaaaccaggaauu

SEQ ID NO: 2218553 - RNA, 19 nt, Homo sapiens
  misc_RNA (1)...(19): siRNA sense strand
uggaaagauaugaucccaa

SEQ ID NO: 2218554 - RNA, 19 nt, Homo sapiens
  misc_RNA (1)...(19): siRNA sense strand
ggagcaaacggugggagaa

SEQ ID NO: 2218555 - RNA, 19 nt, Homo sapiens
  misc_RNA (1)...(19): siRNA sense strand
caauuauacuauggagcau

SEQ ID NO: 2218556 - RNA, 19 nt, Homo sapiens
  misc_RNA (1)...(19): siRNA sense strand
ggugcacauuggcuggaua

SEQ ID NO: 2218557 - RNA, 19 nt, Homo sapiens
  misc_RNA (1)...(19): siRNA sense strand
ggaagguguagaaccaaau

SEQ ID NO: 2218558 - RNA, 19 nt, Homo sapiens
  misc_RNA (1)...(19): siRNA sense strand
gguuguacagauuugcaua

SEQ ID NO: 2218559 - RNA, 19 nt, Homo sapiens
  misc_RNA (1)...(19): siRNA sense strand
guacaguagguguggcagu

SEQ ID NO: 2218560 - RNA, 19 nt, Homo sapiens
  misc_RNA (1)...(19): siRNA sense strand
gaggcaagacaagaagaaa

SEQ ID NO: 2218561 - RNA, 19 nt, Homo sapiens
  misc_RNA (1)...(19): siRNA sense strand
agacaauauugaaugcacu

SEQ ID NO: 2218562 - RNA, 19 nt, Homo sapiens
  misc_RNA (1)...(19): siRNA sense strand
ugacaaacuguaugugguu

SEQ ID NO: 2218563 - RNA, 19 nt, Homo sapiens
  misc_RNA (1)...(19): siRNA sense strand
agacauguggacugcagua

SEQ ID NO: 2218564 - RNA, 19 nt, Homo sapiens
  misc_RNA (1)...(19): siRNA sense strand
cuacaauugccuuuggcuu

SEQ ID NO: 2218565 - RNA, 19 nt, Homo sapiens
  misc_RNA (1)...(19): siRNA sense strand
uuacuaaugaugucagaga

SEQ ID NO: 2218566 - RNA, 19 nt, Homo sapiens
  misc_RNA (1)...(19): siRNA sense strand
guuguacagauuugcauaa

SEQ ID NO: 2218567 - RNA, 19 nt, Homo sapiens
  misc_RNA (1)...(19): siRNA sense strand
gcuagaugacaaacuguau

SEQ ID NO: 2218568 - RNA, 19 nt, Homo sapiens
  misc_RNA (1)...(19): siRNA sense strand
cuuaugauccccagacaaa

SEQ ID NO: 2218569 - RNA, 19 nt, Homo sapiens
  misc_RNA (1)...(19): siRNA sense strand
aggcaagacaagaagaaau

SEQ ID NO: 2218570 - RNA, 19 nt, Homo sapiens
  misc_RNA (1)...(19): siRNA sense strand
uggcacuagugaagaagaa

SEQ ID NO: 2218571 - RNA, 19 nt, Homo sapiens
  misc_RNA (1)...(19): siRNA sense strand
ccuaaugaggagacaauau

SEQ ID NO: 2218572 - RNA, 19 nt, Homo sapiens
  misc_RNA (1)...(19): siRNA sense strand
uggaagguguagaaccaaa

SEQ ID NO: 2218573 - RNA, 19 nt, Homo sapiens
  misc_RNA (1)...(19): siRNA sense strand
uugcagugcuagaugacaa

SEQ ID NO: 2218574 - RNA, 19 nt, Homo sapiens
  misc_RNA (1)...(19): siRNA sense strand
ccauuuauuaccagagaga

SEQ ID NO: 2218575 - RNA, 19 nt, Homo sapiens
  misc_RNA (1)...(19): siRNA sense strand
cagagaggcaagacaagaa

SEQ ID NO: 2218576 - RNA, 19 nt, Homo sapiens
  misc_RNA (1)...(19): siRNA sense strand
aauggaagguguagaacca

SEQ ID NO: 2218577 - RNA, 19 nt, Homo sapiens
  misc_RNA (1)...(19): siRNA sense strand
gcacuagugaagaagaaaa

SEQ ID NO: 2218578 - RNA, 19 nt, Homo sapiens
  misc_RNA (1)...(19): siRNA sense strand
gguuggaggaagagaugga

SEQ ID NO: 2218579 - RNA, 19 nt, Homo sapiens
  misc_RNA (1)...(19): siRNA sense strand
cggaaagaucuaaguaaac

SEQ ID NO: 2218580 - RNA, 19 nt, Homo sapiens
  misc_RNA (1)...(19): siRNA sense strand
acagagacggaaagaucua

SEQ ID NO: 2218581 - RNA, 19 nt, Homo sapiens
  misc_RNA (1)...(19): siRNA sense strand
gcaaacggugggagaaagu

SEQ ID NO: 2218582 - RNA, 19 nt, Homo sapiens
  misc_RNA (1)...(19): siRNA sense strand
ccaaauucguugugguccu

SEQ ID NO: 2218583 - RNA, 19 nt, Homo sapiens
  misc_RNA (1)...(19): siRNA sense strand
uuauggaagcaaugaagua

SEQ ID NO: 2218584 - RNA, 19 nt, Homo sapiens
  misc_RNA (1)...(19): siRNA sense strand
guucgguguugcagugcua

SEQ ID NO: 2218585 - RNA, 19 nt, Homo sapiens
  misc_RNA (1)...(19): siRNA sense strand
gcgaaauugcaaagcucuu

SEQ ID NO: 2218586 - RNA, 19 nt, Homo sapiens
  misc_RNA (1)...(19): siRNA sense strand
uugcaaagcucuuggcuag

SEQ ID NO: 2218587 - RNA, 19 nt, Homo sapiens
  misc_RNA (1)...(19): siRNA sense strand
ggcaguacuaaguggaaaa

SEQ ID NO: 2218588 - RNA, 19 nt, Homo sapiens
  misc_RNA (1)...(19): siRNA sense strand
ggaugauggcacuagugaa

SEQ ID NO: 2218589 - RNA, 19 nt, Homo sapiens
  misc_RNA (1)...(19): siRNA sense strand
aggacagacuggagcaaac

SEQ ID NO: 2218590 - RNA, 19 nt, Homo sapiens
  misc_RNA (1)...(19): siRNA sense strand
gcuacaaccccaaaacaaa

SEQ ID NO: 2218591 - RNA, 19 nt, Homo sapiens
  misc_RNA (1)...(19): siRNA sense strand
uggcaguacuaaguggaaa

SEQ ID NO: 2218592 - RNA, 19 nt, Homo sapiens
  misc_RNA (1)...(19): siRNA sense strand
uggagcaaacggugggaga

SEQ ID NO: 2218593 - RNA, 19 nt, Homo sapiens
  misc_RNA (1)...(19): siRNA sense strand
agagauggacugaagacuu

SEQ ID NO: 2218594 - RNA, 19 nt, Homo sapiens
  misc_RNA (1)...(19): siRNA sense strand
agaggcaagacaagaagaa

SEQ ID NO: 2218595 - RNA, 19 nt, Homo sapiens
  misc_RNA (1)...(19): siRNA sense strand
cagccagcagggagaauuu

SEQ ID NO: 2218596 - RNA, 19 nt, Homo sapiens
  misc_RNA (1)...(19): siRNA sense strand
uaaucagaaaccaggaauu

SEQ ID NO: 2218597 - RNA, 19 nt, Homo sapiens
  misc_RNA (1)...(19): siRNA sense strand
uggaaagauaugaucccaa

SEQ ID NO: 2218598 - RNA, 19 nt, Homo sapiens
  misc_RNA (1)...(19): siRNA sense strand
ggagcaaacggugggagaa

SEQ ID NO: 2218599 - RNA, 19 nt, Homo sapiens
  misc_RNA (1)...(19): siRNA sense strand
caauuauacuauggagcau

SEQ ID NO: 2218600 - RNA, 19 nt, Homo sapiens
  misc_RNA (1)...(19): siRNA sense strand
ggugcacauuggcuggaua

SEQ ID NO: 2218601 - RNA, 19 nt, Homo sapiens
  misc_RNA (1)...(19): siRNA sense strand
ggaagguguagaaccaaau

SEQ ID NO: 2218602 - RNA, 19 nt, Homo sapiens
  misc_RNA (1)...(19): siRNA sense strand
gguuguacagauuugcaua

SEQ ID NO: 2218603 - RNA, 19 nt, Homo sapiens
  misc_RNA (1)...(19): siRNA sense strand
guacaguagguguggcagu

SEQ ID NO: 2218604 - RNA, 19 nt, Homo sapiens
  misc_RNA (1)...(19): siRNA sense strand
gaggcaagacaagaagaaa

SEQ ID NO: 2218605 - RNA, 19 nt, Homo sapiens
  misc_RNA (1)...(19): siRNA sense strand
agacaauauugaaugcacu

SEQ ID NO: 2218606 - RNA, 19 nt, Homo sapiens
  misc_RNA (1)...(19): siRNA sense strand
ugacaaacuguaugugguu

SEQ ID NO: 2218607 - RNA, 19 nt, Homo sapiens
  misc_RNA (1)...(19): siRNA sense strand
agacauguggacugcagua

SEQ ID NO: 2218608 - RNA, 19 nt, Homo sapiens
  misc_RNA (1)...(19): siRNA sense strand
cuacaauugccuuuggcuu

SEQ ID NO: 2218609 - RNA, 19 nt, Homo sapiens
  misc_RNA (1)...(19): siRNA sense strand
uuacuaaugaugucagaga

SEQ ID NO: 2218610 - RNA, 19 nt, Homo sapiens
  misc_RNA (1)...(19): siRNA sense strand
guuguacagauuugcauaa

SEQ ID NO: 2218611 - RNA, 19 nt, Homo sapiens
  misc_RNA (1)...(19): siRNA sense strand
gcuagaugacaaacuguau

SEQ ID NO: 2218612 - RNA, 19 nt, Homo sapiens
  misc_RNA (1)...(19): siRNA sense strand
cuuaugauccccagacaaa

SEQ ID NO: 2218613 - RNA, 19 nt, Homo sapiens
  misc_RNA (1)...(19): siRNA sense strand
uggugaaggcugucauuaa

SEQ ID NO: 2218614 - RNA, 19 nt, Homo sapiens
  misc_RNA (1)...(19): siRNA sense strand
gcaccagauaauaguacaa

SEQ ID NO: 2218615 - RNA, 19 nt, Homo sapiens
  misc_RNA (1)...(19): siRNA sense strand
cagcgaggcaccagauaau

SEQ ID NO: 2218616 - RNA, 19 nt, Homo sapiens
  misc_RNA (1)...(19): siRNA sense strand
uggacgagcaacugaagaa

SEQ ID NO: 2218617 - RNA, 19 nt, Homo sapiens
  misc_RNA (1)...(19): siRNA sense strand
acacagaguccuauguaca

SEQ ID NO: 2218618 - RNA, 19 nt, Homo sapiens
  misc_RNA (1)...(19): siRNA sense strand
agaaauagaugaaucccuu

SEQ ID NO: 2218619 - RNA, 19 nt, Homo sapiens
  misc_RNA (1)...(19): siRNA sense strand
cgccaagugguuaggagaa

SEQ ID NO: 2218620 - RNA, 19 nt, Homo sapiens
  misc_RNA (1)...(19): siRNA sense strand
cagcuauggccaacagaga

SEQ ID NO: 2218621 - RNA, 19 nt, Homo sapiens
  misc_RNA (1)...(19): siRNA sense strand
ccacagaccuuucagccau

SEQ ID NO: 2218622 - RNA, 19 nt, Homo sapiens
  misc_RNA (1)...(19): siRNA sense strand
aguugaggcccguuacaua

SEQ ID NO: 2218623 - RNA, 19 nt, Homo sapiens
  misc_RNA (1)...(19): siRNA sense strand
ucugaacagcaaaggaaau

SEQ ID NO: 2218624 - RNA, 19 nt, Homo sapiens
  misc_RNA (1)...(19): siRNA sense strand
caccaguaaaccagaagaa

SEQ ID NO: 2218625 - RNA, 19 nt, Homo sapiens
  misc_RNA (1)...(19): siRNA sense strand
gggcaaggagauauggacu

SEQ ID NO: 2218626 - RNA, 19 nt, Homo sapiens
  misc_RNA (1)...(19): siRNA sense strand
ccagugaauccuuugggaa

SEQ ID NO: 2218627 - RNA, 19 nt, Homo sapiens
  misc_RNA (1)...(19): siRNA sense strand
aggaauaugccccaggaua

SEQ ID NO: 2218628 - RNA, 19 nt, Homo sapiens
  misc_RNA (1)...(19): siRNA sense strand
ggggaauggcuuugacaga

SEQ ID NO: 2218629 - RNA, 19 nt, Homo sapiens
  misc_RNA (1)...(19): siRNA sense strand
ucauuaaagaggagguuuu

SEQ ID NO: 2218630 - RNA, 19 nt, Homo sapiens
  misc_RNA (1)...(19): siRNA sense strand
accagaagaaauagaugaa

SEQ ID NO: 2218631 - RNA, 19 nt, Homo sapiens
  misc_RNA (1)...(19): siRNA sense strand
gccaguaaugagugagcau

SEQ ID NO: 2218632 - RNA, 19 nt, Homo sapiens
  misc_RNA (1)...(19): siRNA sense strand
guucuggacuagucgccaa

SEQ ID NO: 2218633 - RNA, 19 nt, Homo sapiens
  misc_RNA (1)...(19): siRNA sense strand
guuauggaaauuacagcua

SEQ ID NO: 2218634 - RNA, 19 nt, Homo sapiens
  misc_RNA (1)...(19): siRNA sense strand
agaucuacacagaguccua

SEQ ID NO: 2218635 - RNA, 19 nt, Homo sapiens
  misc_RNA (1)...(19): siRNA sense strand
aggaccaaaucguaguaau

SEQ ID NO: 2218636 - RNA, 19 nt, Homo sapiens
  misc_RNA (1)...(19): siRNA sense strand
cagcaaaggaaauucagca

SEQ ID NO: 2218637 - RNA, 19 nt, Homo sapiens
  misc_RNA (1)...(19): siRNA sense strand
ugagaaagacagagggaac

SEQ ID NO: 2218638 - RNA, 19 nt, Homo sapiens
  misc_RNA (1)...(19): siRNA sense strand
ccuucgagucuguggcuuu

SEQ ID NO: 2218639 - RNA, 19 nt, Homo sapiens
  misc_RNA (1)...(19): siRNA sense strand
cagcugaaggaaaaggaua

SEQ ID NO: 2218640 - RNA, 19 nt, Homo sapiens
  misc_RNA (1)...(19): siRNA sense strand
cacuacugacuuuggguua

SEQ ID NO: 2218641 - RNA, 19 nt, Homo sapiens
  misc_RNA (1)...(19): siRNA sense strand
ggauggaaaugcugggaga

SEQ ID NO: 2218642 - RNA, 19 nt, Homo sapiens
  misc_RNA (1)...(19): siRNA sense strand
gcacaggagcggaaggaca

SEQ ID NO: 2218643 - RNA, 19 nt, Homo sapiens
  misc_RNA (1)...(19): siRNA sense strand
acgagcaaguggauggaaa

SEQ ID NO: 2218644 - RNA, 19 nt, Homo sapiens
  misc_RNA (1)...(19): siRNA sense strand
ugggagaaugggagacaua

SEQ ID NO: 2218645 - RNA, 19 nt, Homo sapiens
  misc_RNA (1)...(19): siRNA sense strand
ccauguggcaucaggacaa

SEQ ID NO: 2218646 - RNA, 19 nt, Homo sapiens
  misc_RNA (1)...(19): siRNA sense strand
uggacuuaauucagaacaa

SEQ ID NO: 2218647 - RNA, 19 nt, Homo sapiens
  misc_RNA (1)...(19): siRNA sense strand
uguauuugguggaaggaga

SEQ ID NO: 2218648 - RNA, 19 nt, Homo sapiens
  misc_RNA (1)...(19): siRNA sense strand
ugaaguaugacaagggaca

SEQ ID NO: 2218649 - RNA, 19 nt, Homo sapiens
  misc_RNA (1)...(19): siRNA sense strand
cgagcaaguggauggaaau

SEQ ID NO: 2218650 - RNA, 19 nt, Homo sapiens
  misc_RNA (1)...(19): siRNA sense strand
cgguauggacuaagacuga

SEQ ID NO: 2218651 - RNA, 19 nt, Homo sapiens
  misc_RNA (1)...(19): siRNA sense strand
uggccuauucggaguauaa

SEQ ID NO: 2218652 - RNA, 19 nt, Homo sapiens
  misc_RNA (1)...(19): siRNA sense strand
cugcagaggccugggacaa

SEQ ID NO: 2218653 - RNA, 19 nt, Homo sapiens
  misc_RNA (1)...(19): siRNA sense strand
gaucgaguguacaagggaa

SEQ ID NO: 2218654 - RNA, 19 nt, Homo sapiens
  misc_RNA (1)...(19): siRNA sense strand
ucauagaucgaguguacaa

SEQ ID NO: 2218655 - RNA, 19 nt, Homo sapiens
  misc_RNA (1)...(19): siRNA sense strand
gucuaagcaaccugggaaa

SEQ ID NO: 2218656 - RNA, 19 nt, Homo sapiens
  misc_RNA (1)...(19): siRNA sense strand
cucuuaagguucagcagaa

SEQ ID NO: 2218657 - RNA, 19 nt, Homo sapiens
  misc_RNA (1)...(19): siRNA sense strand
ggucuaagcaaccugggaa

SEQ ID NO: 2218658 - RNA, 19 nt, Homo sapiens
  misc_RNA (1)...(19): siRNA sense strand
gugauuuagugcaggaacu

SEQ ID NO: 2218659 - RNA, 19 nt, Homo sapiens
  misc_RNA (1)...(19): siRNA sense strand
acauauaagcacaguagca

SEQ ID NO: 2218660 - RNA, 19 nt, Homo sapiens
  misc_RNA (1)...(19): siRNA sense strand
ggacagugauggccgacca

SEQ ID NO: 2218661 - RNA, 19 nt, Homo sapiens
  misc_RNA (1)...(19): siRNA sense strand
gcacgggaggcgaagaaaa

SEQ ID NO: 2218662 - RNA, 19 nt, Homo sapiens
  misc_RNA (1)...(19): siRNA sense strand
guauuugguggaaggagaa

SEQ ID NO: 2218663 - RNA, 19 nt, Homo sapiens
  misc_RNA (1)...(19): siRNA sense strand
gcauccagugcguuaguaa

SEQ ID NO: 2218664 - RNA, 19 nt, Homo sapiens
  misc_RNA (1)...(19): siRNA sense strand
guuacauggacuuagaaau

SEQ ID NO: 2218665 - RNA, 19 nt, Homo sapiens
  misc_RNA (1)...(19): siRNA sense strand
ugauuaaguuagaugguac

SEQ ID NO: 2218666 - RNA, 19 nt, Homo sapiens
  misc_RNA (1)...(19): siRNA sense strand
ugaaaaguacacagguuua

SEQ ID NO: 2218667 - RNA, 19 nt, Homo sapiens
  misc_RNA (1)...(19): siRNA sense strand
acacacagccacugacaca

SEQ ID NO: 2218668 - RNA, 19 nt, Homo sapiens
  misc_RNA (1)...(19): siRNA sense strand
gggcaagaggucaucugaa

SEQ ID NO: 2218669 - RNA, 19 nt, Homo sapiens
  misc_RNA (1)...(19): siRNA sense strand
caaccaucuaagaagaaau

SEQ ID NO: 2218670 - RNA, 19 nt, Homo sapiens
  misc_RNA (1)...(19): siRNA sense strand
cagaaguacaugauuccaa

SEQ ID NO: 2218671 - RNA, 19 nt, Homo sapiens
  misc_RNA (1)...(19): siRNA sense strand
cagauaguuugcaggcaca

SEQ ID NO: 2218672 - RNA, 19 nt, Homo sapiens
  misc_RNA (1)...(19): siRNA sense strand
agccauauguggaacugaa

SEQ ID NO: 2218673 - RNA, 19 nt, Homo sapiens
  misc_RNA (1)...(19): siRNA sense strand
agucacaacccaagaccau

SEQ ID NO: 2218674 - RNA, 19 nt, Homo sapiens
  misc_RNA (1)...(19): siRNA sense strand
ccggaagauaccagaucau

SEQ ID NO: 2218675 - RNA, 19 nt, Homo sapiens
  misc_RNA (1)...(19): siRNA sense strand
ggcuaaaugcuauggugau

SEQ ID NO: 2218676 - RNA, 19 nt, Homo sapiens
  misc_RNA (1)...(19): siRNA sense strand
gacugaauauggaugaaaa

SEQ ID NO: 2218677 - RNA, 19 nt, Homo sapiens
  misc_RNA (1)...(19): siRNA sense strand
acgaagaaacuaacaagga

SEQ ID NO: 2218678 - RNA, 19 nt, Homo sapiens
  misc_RNA (1)...(19): siRNA sense strand
cugcuggguccgugccaua

SEQ ID NO: 2218679 - RNA, 19 nt, Homo sapiens
  misc_RNA (1)...(19): siRNA sense strand
ccauaucccaggaggacca

SEQ ID NO: 2218680 - RNA, 19 nt, Homo sapiens
  misc_RNA (1)...(19): siRNA sense strand
gcagauaguuugcaggcac

SEQ ID NO: 2218681 - RNA, 19 nt, Homo sapiens
  misc_RNA (1)...(19): siRNA sense strand
acaaauccuacuagcagaa

SEQ ID NO: 2218682 - RNA, 19 nt, Homo sapiens
  misc_RNA (1)...(19): siRNA sense strand
auggaaaugcugggagaau

SEQ ID NO: 2218683 - RNA, 19 nt, Homo sapiens
  misc_RNA (1)...(19): siRNA sense strand
cgauauggagccaagcaga

SEQ ID NO: 2218684 - RNA, 19 nt, Homo sapiens
  misc_RNA (1)...(19): siRNA sense strand
ggaaguagcugcagaggcc

SEQ ID NO: 2218685 - RNA, 19 nt, Homo sapiens
  misc_RNA (1)...(19): siRNA sense strand
cugcacgggaggcgaagaa

SEQ ID NO: 2218686 - RNA, 19 nt, Homo sapiens
  misc_RNA (1)...(19): siRNA sense strand
acgaugacaccgugcucaa

SEQ ID NO: 2218687 - RNA, 19 nt, Homo sapiens
  misc_RNA (1)...(19): siRNA sense strand
ugaguuggccugaggagau

SEQ ID NO: 2218688 - RNA, 19 nt, Homo sapiens
  misc_RNA (1)...(19): siRNA sense strand
ugggagacauauaagcaca

SEQ ID NO: 2218689 - RNA, 19 nt, Homo sapiens
  misc_RNA (1)...(19): siRNA sense strand
ggagccaagcagagggaac

SEQ ID NO: 2218690 - RNA, 19 nt, Homo sapiens
  misc_RNA (1)...(19): siRNA sense strand
aggacaaaucccauuggua

SEQ ID NO: 2218691 - RNA, 19 nt, Homo sapiens
  misc_RNA (1)...(19): siRNA sense strand
uggcuaaaugcuaugguga

SEQ ID NO: 2218692 - RNA, 19 nt, Homo sapiens
  misc_RNA (1)...(19): siRNA sense strand
ggaaccugauugacgggau

SEQ ID NO: 2218693 - RNA, 19 nt, Homo sapiens
  misc_RNA (1)...(19): siRNA sense strand
gccucuacgaagaaacuaa

SEQ ID NO: 2218694 - RNA, 19 nt, Homo sapiens
  misc_RNA (1)...(19): siRNA sense strand
gaagaaacuaacaaggaag

SEQ ID NO: 2218695 - RNA, 19 nt, Homo sapiens
  misc_RNA (1)...(19): siRNA sense strand
ccauuaaagcuucggcgga

SEQ ID NO: 2218696 - RNA, 19 nt, Homo sapiens
  misc_RNA (1)...(19): siRNA sense strand
ugacaaucucagagcagaa

SEQ ID NO: 2218697 - RNA, 19 nt, Homo sapiens
  misc_RNA (1)...(19): siRNA sense strand
ccaagaagagaauggccaa

SEQ ID NO: 2218698 - RNA, 19 nt, Homo sapiens
  misc_RNA (1)...(19): siRNA sense strand
agagaauggccaagcccaa

SEQ ID NO: 2218699 - RNA, 19 nt, Homo sapiens
  misc_RNA (1)...(19): siRNA sense strand
aggacagggcccaggauga

SEQ ID NO: 2218700 - RNA, 19 nt, Homo sapiens
  misc_RNA (1)...(19): siRNA sense strand
acccaaagguggaggcaag

SEQ ID NO: 2218701 - RNA, 19 nt, Homo sapiens
  misc_RNA (1)...(19): siRNA sense strand
caagaaaagcaaaguugaa

SEQ ID NO: 2218702 - RNA, 19 nt, Homo sapiens
  misc_RNA (1)...(19): siRNA sense strand
ccaugaccucuuagugaaa

SEQ ID NO: 2218703 - RNA, 19 nt, Homo sapiens
  misc_RNA (1)...(19): siRNA sense strand
caugcaaucaagagacaau

SEQ ID NO: 2218704 - RNA, 19 nt, Homo sapiens
  misc_RNA (1)...(19): siRNA sense strand
cugagugagaauuaugaaa

SEQ ID NO: 2218705 - RNA, 19 nt, Homo sapiens
  misc_RNA (1)...(19): siRNA sense strand
gcaaaguugaaguagacga

SEQ ID NO: 2218706 - RNA, 19 nt, Homo sapiens
  misc_RNA (1)...(19): siRNA sense strand
gaagaagacccguugccau

SEQ ID NO: 2218707 - RNA, 19 nt, Homo sapiens
  misc_RNA (1)...(19): siRNA sense strand
ggacacaguuggagcugag

SEQ ID NO: 2218708 - RNA, 19 nt, Homo sapiens
  misc_RNA (1)...(19): siRNA sense strand
acucugagcccgagaccca

SEQ ID NO: 2218709 - RNA, 19 nt, Homo sapiens
  misc_RNA (1)...(19): siRNA sense strand
guguacaugaauaaaguga

SEQ ID NO: 2218710 - RNA, 19 nt, Homo sapiens
  misc_RNA (1)...(19): siRNA sense strand
gguggaggcaaggguguaa

SEQ ID NO: 2218711 - RNA, 19 nt, Homo sapiens
  misc_RNA (1)...(19): siRNA sense strand
ugacaaucucagagcagaa

SEQ ID NO: 2218712 - RNA, 19 nt, Homo sapiens
  misc_RNA (1)...(19): siRNA sense strand
ccaagaagagaauggccaa

SEQ ID NO: 2218713 - RNA, 19 nt, Homo sapiens
  misc_RNA (1)...(19): siRNA sense strand
agagaauggccaagcccaa

SEQ ID NO: 2218714 - RNA, 19 nt, Homo sapiens
  misc_RNA (1)...(19): siRNA sense strand
aggacagggcccaggauga

SEQ ID NO: 2218715 - RNA, 19 nt, Homo sapiens
  misc_RNA (1)...(19): siRNA sense strand
acccaaagguggaggcaag

SEQ ID NO: 2218716 - RNA, 19 nt, Homo sapiens
  misc_RNA (1)...(19): siRNA sense strand
caagaaaagcaaaguugaa

SEQ ID NO: 2218717 - RNA, 19 nt, Homo sapiens
  misc_RNA (1)...(19): siRNA sense strand
ccaugaccucuuagugaaa

SEQ ID NO: 2218718 - RNA, 19 nt, Homo sapiens
  misc_RNA (1)...(19): siRNA sense strand
caugcaaucaagagacaau

SEQ ID NO: 2218719 - RNA, 19 nt, Homo sapiens
  misc_RNA (1)...(19): siRNA sense strand
cugagugagaauuaugaaa

SEQ ID NO: 2218720 - RNA, 19 nt, Homo sapiens
  misc_RNA (1)...(19): siRNA sense strand
gcaaaguugaaguagacga

SEQ ID NO: 2218721 - RNA, 19 nt, Homo sapiens
  misc_RNA (1)...(19): siRNA sense strand
gaagaagacccguugccau

SEQ ID NO: 2218722 - RNA, 19 nt, Homo sapiens
  misc_RNA (1)...(19): siRNA sense strand
ggacacaguuggagcugag

SEQ ID NO: 2218723 - RNA, 19 nt, Homo sapiens
  misc_RNA (1)...(19): siRNA sense strand
acucugagcccgagaccca

SEQ ID NO: 2218724 - RNA, 19 nt, Homo sapiens
  misc_RNA (1)...(19): siRNA sense strand
guguacaugaauaaaguga

SEQ ID NO: 2218725 - RNA, 19 nt, Homo sapiens
  misc_RNA (1)...(19): siRNA sense strand
gguggaggcaaggguguaa

SEQ ID NO: 2218726 - RNA, 19 nt, Homo sapiens
  misc_RNA (1)...(19): siRNA sense strand
ggauauggcuggagacugg

SEQ ID NO: 2218727 - RNA, 19 nt, Homo sapiens
  misc_RNA (1)...(19): siRNA sense strand
ggacaguagcucugggcuc

SEQ ID NO: 2218728 - RNA, 19 nt, Homo sapiens
  misc_RNA (1)...(19): siRNA sense strand
gaucugagggcucuggcaa

SEQ ID NO: 2218729 - RNA, 19 nt, Homo sapiens
  misc_RNA (1)...(19): siRNA sense strand
ugaaggauauggcuggaga

SEQ ID NO: 2218730 - RNA, 19 nt, Homo sapiens
  misc_RNA (1)...(19): siRNA sense strand
cggcauuccugcugcguuc

SEQ ID NO: 2218731 - RNA, 19 nt, Homo sapiens
  misc_RNA (1)...(19): siRNA sense strand
gcaaagugaaagaaggcau

SEQ ID NO: 2218732 - RNA, 19 nt, Homo sapiens
  misc_RNA (1)...(19): siRNA sense strand
cugagugguuggauggcaa

SEQ ID NO: 2218733 - RNA, 19 nt, Homo sapiens
  misc_RNA (1)...(19): siRNA sense strand
ggauuugguuauaaggguu

SEQ ID NO: 2218734 - RNA, 19 nt, Homo sapiens
  misc_RNA (1)...(19): siRNA sense strand
ugaauauuguggaggccau

SEQ ID NO: 2218735 - RNA, 19 nt, Homo sapiens
  misc_RNA (1)...(19): siRNA sense strand
gcaagucaccacugggaga

SEQ ID NO: 2218736 - RNA, 19 nt, Homo sapiens
  misc_RNA (1)...(19): siRNA sense strand
gauuggagcuguuugcaga

SEQ ID NO: 2218737 - RNA, 19 nt, Homo sapiens
  misc_RNA (1)...(19): siRNA sense strand
cgaggaaaaccgugugcua

SEQ ID NO: 2218738 - RNA, 19 nt, Homo sapiens
  misc_RNA (1)...(19): siRNA sense strand
cugccaagacugagugguu

SEQ ID NO: 2218739 - RNA, 19 nt, Homo sapiens
  misc_RNA (1)...(19): siRNA sense strand
cuguggacaacucgaauaa

SEQ ID NO: 2218740 - RNA, 19 nt, Homo sapiens
  misc_RNA (1)...(19): siRNA sense strand
aaaucuuguccauggcaaa

SEQ ID NO: 2218741 - RNA, 19 nt, Homo sapiens
  misc_RNA (1)...(19): siRNA sense strand
agugaaagaaggcaugaau

SEQ ID NO: 2218742 - RNA, 19 nt, Homo sapiens
  misc_RNA (1)...(19): siRNA sense strand
cccaaagacagcagaaaau

SEQ ID NO: 2218743 - RNA, 19 nt, Homo sapiens
  misc_RNA (1)...(19): siRNA sense strand
aggaaaaccgugugcuauu

SEQ ID NO: 2218744 - RNA, 19 nt, Homo sapiens
  misc_RNA (1)...(19): siRNA sense strand
gaaaucuuguccauggcaa

SEQ ID NO: 2218745 - RNA, 19 nt, Homo sapiens
  misc_RNA (1)...(19): siRNA sense strand
uguuugaggaugagaguua

SEQ ID NO: 2218746 - RNA, 19 nt, Homo sapiens
  misc_RNA (1)...(19): siRNA sense strand
ggucaaggugggaggauca

SEQ ID NO: 2218747 - RNA, 19 nt, Homo sapiens
  misc_RNA (1)...(19): siRNA sense strand
gaaccaacuuccugcgcua

SEQ ID NO: 2218748 - RNA, 19 nt, Homo sapiens
  misc_RNA (1)...(19): siRNA sense strand
gggaaacaguugagggccu

SEQ ID NO: 2218749 - RNA, 19 nt, Homo sapiens
  misc_RNA (1)...(19): siRNA sense strand
gaugagaguuacuggcaga

SEQ ID NO: 2218750 - RNA, 19 nt, Homo sapiens
  misc_RNA (1)...(19): siRNA sense strand
cgaucaaccuguacgccaa

SEQ ID NO: 2218751 - RNA, 19 nt, Homo sapiens
  misc_RNA (1)...(19): siRNA sense strand
caggagaauaagaagaaga

SEQ ID NO: 2218752 - RNA, 19 nt, Homo sapiens
  misc_RNA (1)...(19): siRNA sense strand
guggagggacuuugggcaa

SEQ ID NO: 2218753 - RNA, 19 nt, Homo sapiens
  misc_RNA (1)...(19): siRNA sense strand
gggaaaacugggagguaca

SEQ ID NO: 2218754 - RNA, 19 nt, Homo sapiens
  misc_RNA (1)...(19): siRNA sense strand
ggaugaaagcuuugcagca

SEQ ID NO: 2218755 - RNA, 19 nt, Homo sapiens
  misc_RNA (1)...(19): siRNA sense strand
ggaaacaguugagggccua

SEQ ID NO: 2218756 - RNA, 19 nt, Homo sapiens
  misc_RNA (1)...(19): siRNA sense strand
ccaacaacauggacggcca

SEQ ID NO: 2218757 - RNA, 19 nt, Homo sapiens
  misc_RNA (1)...(19): siRNA sense strand
gcaaagagagagaggagag

SEQ ID NO: 2218758 - RNA, 19 nt, Homo sapiens
  misc_RNA (1)...(19): siRNA sense strand
uggcacaggcugaguguca

SEQ ID NO: 2218759 - RNA, 19 nt, Homo sapiens
  misc_RNA (1)...(19): siRNA sense strand
agaagaagacuguggugga

SEQ ID NO: 2218760 - RNA, 19 nt, Homo sapiens
  misc_RNA (1)...(19): siRNA sense strand
cauucaccuuggagagcaa

SEQ ID NO: 2218761 - RNA, 19 nt, Homo sapiens
  misc_RNA (1)...(19): siRNA sense strand
cugagagaacacuggacaa

SEQ ID NO: 2218762 - RNA, 19 nt, Homo sapiens
  misc_RNA (1)...(19): siRNA sense strand
gcucaaucagaucuggaaa

SEQ ID NO: 2218763 - RNA, 19 nt, Homo sapiens
  misc_RNA (1)...(19): siRNA sense strand
cugggaaaguggugcuuga

SEQ ID NO: 2218764 - RNA, 19 nt, Homo sapiens
  misc_RNA (1)...(19): siRNA sense strand
cagcaaagagagagaggag

SEQ ID NO: 2218765 - RNA, 19 nt, Homo sapiens
  misc_RNA (1)...(19): siRNA sense strand
gagaauaagaagaagacug

SEQ ID NO: 2218766 - RNA, 19 nt, Homo sapiens
  misc_RNA (1)...(19): siRNA sense strand
auagccaauuagaaggaaa

SEQ ID NO: 2218767 - RNA, 19 nt, Homo sapiens
  misc_RNA (1)...(19): siRNA sense strand
cgggccaggcugagaaaga

SEQ ID NO: 2218768 - RNA, 19 nt, Homo sapiens
  misc_RNA (1)...(19): siRNA sense strand
gcaggaagcugaaagccga

SEQ ID NO: 2218769 - RNA, 19 nt, Homo sapiens
  misc_RNA (1)...(19): siRNA sense strand
ggacagucucuaaggccau

SEQ ID NO: 2218770 - RNA, 19 nt, Homo sapiens
  misc_RNA (1)...(19): siRNA sense strand
cagcacauugggaggucaa

SEQ ID NO: 2218771 - RNA, 19 nt, Homo sapiens
  misc_RNA (1)...(19): siRNA sense strand
gaggacugggagugaggaa

SEQ ID NO: 2218772 - RNA, 19 nt, Homo sapiens
  misc_RNA (1)...(19): siRNA sense strand
aagagagagaggagaggga

SEQ ID NO: 2218773 - RNA, 19 nt, Homo sapiens
  misc_RNA (1)...(19): siRNA sense strand
gcacagagccaaugccaag

SEQ ID NO: 2218774 - RNA, 19 nt, Homo sapiens
  misc_RNA (1)...(19): siRNA sense strand
gugccaagaccuacgccua

SEQ ID NO: 2218775 - RNA, 19 nt, Homo sapiens
  misc_RNA (1)...(19): siRNA sense strand
gggacaggugccagguaga

SEQ ID NO: 2218776 - RNA, 19 nt, Homo sapiens
  misc_RNA (1)...(19): siRNA sense strand
ggaccggagguuugggcau

SEQ ID NO: 2218777 - RNA, 19 nt, Homo sapiens
  misc_RNA (1)...(19): siRNA sense strand
ccaugcaauauuugaaaca

SEQ ID NO: 2218778 - RNA, 19 nt, Homo sapiens
  misc_RNA (1)...(19): siRNA sense strand
gccaaugccaagugaggau

SEQ ID NO: 2218779 - RNA, 19 nt, Homo sapiens
  misc_RNA (1)...(19): siRNA sense strand
gaucagagaagggaggaca

SEQ ID NO: 2218780 - RNA, 19 nt, Homo sapiens
  misc_RNA (1)...(19): siRNA sense strand
gggccuauaccuuguccaa

SEQ ID NO: 2218781 - RNA, 19 nt, Homo sapiens
  misc_RNA (1)...(19): siRNA sense strand
ccuuguaaucccagcacau

SEQ ID NO: 2218782 - RNA, 19 nt, Homo sapiens
  misc_RNA (1)...(19): siRNA sense strand
ccauuuuacagaaggggaa

SEQ ID NO: 2218783 - RNA, 19 nt, Homo sapiens
  misc_RNA (1)...(19): siRNA sense strand
gaagggaggacauagccaa

SEQ ID NO: 2218784 - RNA, 19 nt, Homo sapiens
  misc_RNA (1)...(19): siRNA sense strand
aagucuaggaugaaagcuu

SEQ ID NO: 2218785 - RNA, 19 nt, Homo sapiens
  misc_RNA (1)...(19): siRNA sense strand
cugaaauuguggaacccau

SEQ ID NO: 2218786 - RNA, 19 nt, Homo sapiens
  misc_RNA (1)...(19): siRNA sense strand
gaagcugggagguggagau

SEQ ID NO: 2218787 - RNA, 19 nt, Homo sapiens
  misc_RNA (1)...(19): siRNA sense strand
gguccauagaucagagaag

SEQ ID NO: 2218788 - RNA, 19 nt, Homo sapiens
  misc_RNA (1)...(19): siRNA sense strand
cgaccauagagaugagauc

SEQ ID NO: 2218789 - RNA, 19 nt, Homo sapiens
  misc_RNA (1)...(19): siRNA sense strand
gcuggagacaucugugauu

SEQ ID NO: 2218790 - RNA, 19 nt, Homo sapiens
  misc_RNA (1)...(19): siRNA sense strand
gaaucaacccugcccggaa

SEQ ID NO: 2218791 - RNA, 19 nt, Homo sapiens
  misc_RNA (1)...(19): siRNA sense strand
uagccaauuagaaggaaaa

SEQ ID NO: 2218792 - RNA, 19 nt, Homo sapiens
  misc_RNA (1)...(19): siRNA sense strand
ccaggagugccaagaccua

SEQ ID NO: 2218793 - RNA, 19 nt, Homo sapiens
  misc_RNA (1)...(19): siRNA sense strand
cucaagaggccgagagggu

SEQ ID NO: 2218794 - RNA, 19 nt, Homo sapiens
  misc_RNA (1)...(19): siRNA sense strand
gauaauaacauaagggaga

SEQ ID NO: 2218795 - RNA, 19 nt, Homo sapiens
  misc_RNA (1)...(19): siRNA sense strand
cagaaaagcaugaugggaa

SEQ ID NO: 2218796 - RNA, 19 nt, Homo sapiens
  misc_RNA (1)...(19): siRNA sense strand
cagugugguuugggagaaa

SEQ ID NO: 2218797 - RNA, 19 nt, Homo sapiens
  misc_RNA (1)...(19): siRNA sense strand
cugaugaagacuagaaguu

SEQ ID NO: 2218798 - RNA, 19 nt, Homo sapiens
  misc_RNA (1)...(19): siRNA sense strand
guuugggagaaauggauaa

SEQ ID NO: 2218799 - RNA, 19 nt, Homo sapiens
  misc_RNA (1)...(19): siRNA sense strand
aaccaacaucuuugagaaa

SEQ ID NO: 2218800 - RNA, 19 nt, Homo sapiens
  misc_RNA (1)...(19): siRNA sense strand
ucacuaaacuugaagcagu

SEQ ID NO: 2218801 - RNA, 19 nt, Homo sapiens
  misc_RNA (1)...(19): siRNA sense strand
guguguguguguugagaca

SEQ ID NO: 2218802 - RNA, 19 nt, Homo sapiens
  misc_RNA (1)...(19): siRNA sense strand
ggggcaggguucugugaaa

SEQ ID NO: 2218803 - RNA, 19 nt, Homo sapiens
  misc_RNA (1)...(19): siRNA sense strand
aacaaaacccagcgggaaa

SEQ ID NO: 2218804 - RNA, 19 nt, Homo sapiens
  misc_RNA (1)...(19): siRNA sense strand
ggggaaggaugaagggcga

SEQ ID NO: 2218805 - RNA, 19 nt, Homo sapiens
  misc_RNA (1)...(19): siRNA sense strand
ggucaauaaauuuagagga

SEQ ID NO: 2218806 - RNA, 19 nt, Homo sapiens
  misc_RNA (1)...(19): siRNA sense strand
gguuugggagaaauggaua

SEQ ID NO: 2218807 - RNA, 19 nt, Homo sapiens
  misc_RNA (1)...(19): siRNA sense strand
gagggcaaauggaugggaa

SEQ ID NO: 2218808 - RNA, 19 nt, Homo sapiens
  misc_RNA (1)...(19): siRNA sense strand
cagcguucuaccaggcaaa

SEQ ID NO: 2218809 - RNA, 19 nt, Homo sapiens
  misc_RNA (1)...(19): siRNA sense strand
agggcaaauggaugggaau

SEQ ID NO: 2218810 - RNA, 19 nt, Homo sapiens
  misc_RNA (1)...(19): siRNA sense strand
gcguccuaauugagaagau

SEQ ID NO: 2218811 - RNA, 19 nt, Homo sapiens
  misc_RNA (1)...(19): siRNA sense strand
gggaaaaguuugccugcca

SEQ ID NO: 2218812 - RNA, 19 nt, Homo sapiens
  misc_RNA (1)...(19): siRNA sense strand
gggcaggguucugugaaaa

SEQ ID NO: 2218813 - RNA, 19 nt, Homo sapiens
  misc_RNA (1)...(19): siRNA sense strand
ccuggagauaauaacauaa

SEQ ID NO: 2218814 - RNA, 19 nt, Homo sapiens
  misc_RNA (1)...(19): siRNA sense strand
aggcaaauucacuguuuca

SEQ ID NO: 2218815 - RNA, 19 nt, Homo sapiens
  misc_RNA (1)...(19): siRNA sense strand
guagauugggguuggggaa

SEQ ID NO: 2218816 - RNA, 19 nt, Homo sapiens
  misc_RNA (1)...(19): siRNA sense strand
gcgcaaaagaacuugaaaa

SEQ ID NO: 2218817 - RNA, 19 nt, Homo sapiens
  misc_RNA (1)...(19): siRNA sense strand
gaacugggacugaggccaa

SEQ ID NO: 2218818 - RNA, 19 nt, Homo sapiens
  misc_RNA (1)...(19): siRNA sense strand
cauuaaagaacuagguacu

SEQ ID NO: 2218819 - RNA, 19 nt, Homo sapiens
  misc_RNA (1)...(19): siRNA sense strand
ccacauacagcaagcccaa

SEQ ID NO: 2218820 - RNA, 19 nt, Homo sapiens
  misc_RNA (1)...(19): siRNA sense strand
aagcaagagcacuggccaa

SEQ ID NO: 2218821 - RNA, 19 nt, Homo sapiens
  misc_RNA (1)...(19): siRNA sense strand
cugauugaacgaagaagaa

SEQ ID NO: 2218822 - RNA, 19 nt, Homo sapiens
  misc_RNA (1)...(19): siRNA sense strand
augaggaaaucuugggcuu

SEQ ID NO: 2218823 - RNA, 19 nt, Homo sapiens
  misc_RNA (1)...(19): siRNA sense strand
ccugauugaacgaagaaga

SEQ ID NO: 2218824 - RNA, 19 nt, Homo sapiens
  misc_RNA (1)...(19): siRNA sense strand
cgagaacagcaacgcgcaa

SEQ ID NO: 2218825 - RNA, 19 nt, Homo sapiens
  misc_RNA (1)...(19): siRNA sense strand
cccaacggcagcagguaaa

SEQ ID NO: 2218826 - RNA, 19 nt, Homo sapiens
  misc_RNA (1)...(19): siRNA sense strand
ccgaaaguugcaacgagaa

SEQ ID NO: 2218827 - RNA, 19 nt, Homo sapiens
  misc_RNA (1)...(19): siRNA sense strand
ccaccaaguaccacauaca

SEQ ID NO: 2218828 - RNA, 19 nt, Homo sapiens
  misc_RNA (1)...(19): siRNA sense strand
gccaaagagaggcagaaaa

SEQ ID NO: 2218829 - RNA, 19 nt, Homo sapiens
  misc_RNA (1)...(19): siRNA sense strand
cuuaacuccaacugugaaa

SEQ ID NO: 2218830 - RNA, 19 nt, Homo sapiens
  misc_RNA (1)...(19): siRNA sense strand
gcauuaaagaacuagguac

SEQ ID NO: 2218831 - RNA, 19 nt, Homo sapiens
  misc_RNA (1)...(19): siRNA sense strand
uugaaaaccgacagaagaa

SEQ ID NO: 2218832 - RNA, 19 nt, Homo sapiens
  misc_RNA (1)...(19): siRNA sense strand
acaagcagccggaggagca

SEQ ID NO: 2218833 - RNA, 19 nt, Homo sapiens
  misc_RNA (1)...(19): siRNA sense strand
ccuguaugcagauggauga

SEQ ID NO: 2218834 - RNA, 19 nt, Homo sapiens
  misc_RNA (1)...(19): siRNA sense strand
uggaagagacggagcacac

SEQ ID NO: 2218835 - RNA, 19 nt, Homo sapiens
  misc_RNA (1)...(19): siRNA sense strand
gcgcaaaagaacuugaaaa

SEQ ID NO: 2218836 - RNA, 19 nt, Homo sapiens
  misc_RNA (1)...(19): siRNA sense strand
gaacugggacugaggccaa

SEQ ID NO: 2218837 - RNA, 19 nt, Homo sapiens
  misc_RNA (1)...(19): siRNA sense strand
cauuaaagaacuagguacu

SEQ ID NO: 2218838 - RNA, 19 nt, Homo sapiens
  misc_RNA (1)...(19): siRNA sense strand
ccacauacagcaagcccaa

SEQ ID NO: 2218839 - RNA, 19 nt, Homo sapiens
  misc_RNA (1)...(19): siRNA sense strand
aagcaagagcacuggccaa

SEQ ID NO: 2218840 - RNA, 19 nt, Homo sapiens
  misc_RNA (1)...(19): siRNA sense strand
cugauugaacgaagaagaa

SEQ ID NO: 2218841 - RNA, 19 nt, Homo sapiens
  misc_RNA (1)...(19): siRNA sense strand
augaggaaaucuugggcuu

SEQ ID NO: 2218842 - RNA, 19 nt, Homo sapiens
  misc_RNA (1)...(19): siRNA sense strand
ccugauugaacgaagaaga

SEQ ID NO: 2218843 - RNA, 19 nt, Homo sapiens
  misc_RNA (1)...(19): siRNA sense strand
cgagaacagcaacgcgcaa

SEQ ID NO: 2218844 - RNA, 19 nt, Homo sapiens
  misc_RNA (1)...(19): siRNA sense strand
cccaacggcagcagguaaa

SEQ ID NO: 2218845 - RNA, 19 nt, Homo sapiens
  misc_RNA (1)...(19): siRNA sense strand
ccgaaaguugcaacgagaa

SEQ ID NO: 2218846 - RNA, 19 nt, Homo sapiens
  misc_RNA (1)...(19): siRNA sense strand
ccaccaaguaccacauaca

SEQ ID NO: 2218847 - RNA, 19 nt, Homo sapiens
  misc_RNA (1)...(19): siRNA sense strand
gccaaagagaggcagaaaa

SEQ ID NO: 2218848 - RNA, 19 nt, Homo sapiens
  misc_RNA (1)...(19): siRNA sense strand
cuuaacuccaacugugaaa

SEQ ID NO: 2218849 - RNA, 19 nt, Homo sapiens
  misc_RNA (1)...(19): siRNA sense strand
gcauuaaagaacuagguac

SEQ ID NO: 2218850 - RNA, 19 nt, Homo sapiens
  misc_RNA (1)...(19): siRNA sense strand
uugaaaaccgacagaagaa

SEQ ID NO: 2218851 - RNA, 19 nt, Homo sapiens
  misc_RNA (1)...(19): siRNA sense strand
acaagcagccggaggagca

SEQ ID NO: 2218852 - RNA, 19 nt, Homo sapiens
  misc_RNA (1)...(19): siRNA sense strand
ccuguaugcagauggauga

SEQ ID NO: 2218853 - RNA, 19 nt, Homo sapiens
  misc_RNA (1)...(19): siRNA sense strand
uggaagagacggagcacac

SEQ ID NO: 2218854 - RNA, 19 nt, Homo sapiens
  misc_RNA (1)...(19): siRNA sense strand
gcgcaaaagaacuugaaaa

SEQ ID NO: 2218855 - RNA, 19 nt, Homo sapiens
  misc_RNA (1)...(19): siRNA sense strand
gaacugggacugaggccaa

SEQ ID NO: 2218856 - RNA, 19 nt, Homo sapiens
  misc_RNA (1)...(19): siRNA sense strand
cauuaaagaacuagguacu

SEQ ID NO: 2218857 - RNA, 19 nt, Homo sapiens
  misc_RNA (1)...(19): siRNA sense strand
ccacauacagcaagcccaa

SEQ ID NO: 2218858 - RNA, 19 nt, Homo sapiens
  misc_RNA (1)...(19): siRNA sense strand
aagcaagagcacuggccaa

SEQ ID NO: 2218859 - RNA, 19 nt, Homo sapiens
  misc_RNA (1)...(19): siRNA sense strand
cugauugaacgaagaagaa

SEQ ID NO: 2218860 - RNA, 19 nt, Homo sapiens
  misc_RNA (1)...(19): siRNA sense strand
augaggaaaucuugggcuu

SEQ ID NO: 2218861 - RNA, 19 nt, Homo sapiens
  misc_RNA (1)...(19): siRNA sense strand
ccugauugaacgaagaaga

SEQ ID NO: 2218862 - RNA, 19 nt, Homo sapiens
  misc_RNA (1)...(19): siRNA sense strand
cgagaacagcaacgcgcaa

SEQ ID NO: 2218863 - RNA, 19 nt, Homo sapiens
  misc_RNA (1)...(19): siRNA sense strand
cccaacggcagcagguaaa

SEQ ID NO: 2218864 - RNA, 19 nt, Homo sapiens
  misc_RNA (1)...(19): siRNA sense strand
ccgaaaguugcaacgagaa

SEQ ID NO: 2218865 - RNA, 19 nt, Homo sapiens
  misc_RNA (1)...(19): siRNA sense strand
ccaccaaguaccacauaca

SEQ ID NO: 2218866 - RNA, 19 nt, Homo sapiens
  misc_RNA (1)...(19): siRNA sense strand
gccaaagagaggcagaaaa

SEQ ID NO: 2218867 - RNA, 19 nt, Homo sapiens
  misc_RNA (1)...(19): siRNA sense strand
cuuaacuccaacugugaaa

SEQ ID NO: 2218868 - RNA, 19 nt, Homo sapiens
  misc_RNA (1)...(19): siRNA sense strand
gcauuaaagaacuagguac

SEQ ID NO: 2218869 - RNA, 19 nt, Homo sapiens
  misc_RNA (1)...(19): siRNA sense strand
uugaaaaccgacagaagaa

SEQ ID NO: 2218870 - RNA, 19 nt, Homo sapiens
  misc_RNA (1)...(19): siRNA sense strand
acaagcagccggaggagca

SEQ ID NO: 2218871 - RNA, 19 nt, Homo sapiens
  misc_RNA (1)...(19): siRNA sense strand
ccuguaugcagauggauga

SEQ ID NO: 2218872 - RNA, 19 nt, Homo sapiens
  misc_RNA (1)...(19): siRNA sense strand
uggaagagacggagcacac

SEQ ID NO: 2218873 - RNA, 19 nt, Homo sapiens
  misc_RNA (1)...(19): siRNA sense strand
gcgcaaaagaacuugaaaa

SEQ ID NO: 2218874 - RNA, 19 nt, Homo sapiens
  misc_RNA (1)...(19): siRNA sense strand
gaacugggacugaggccaa

SEQ ID NO: 2218875 - RNA, 19 nt, Homo sapiens
  misc_RNA (1)...(19): siRNA sense strand
cauuaaagaacuagguacu

SEQ ID NO: 2218876 - RNA, 19 nt, Homo sapiens
  misc_RNA (1)...(19): siRNA sense strand
ccacauacagcaagcccaa

SEQ ID NO: 2218877 - RNA, 19 nt, Homo sapiens
  misc_RNA (1)...(19): siRNA sense strand
aagcaagagcacuggccaa

SEQ ID NO: 2218878 - RNA, 19 nt, Homo sapiens
  misc_RNA (1)...(19): siRNA sense strand
cugauugaacgaagaagaa

SEQ ID NO: 2218879 - RNA, 19 nt, Homo sapiens
  misc_RNA (1)...(19): siRNA sense strand
augaggaaaucuugggcuu

SEQ ID NO: 2218880 - RNA, 19 nt, Homo sapiens
  misc_RNA (1)...(19): siRNA sense strand
ccugauugaacgaagaaga

SEQ ID NO: 2218881 - RNA, 19 nt, Homo sapiens
  misc_RNA (1)...(19): siRNA sense strand
cgagaacagcaacgcgcaa

SEQ ID NO: 2218882 - RNA, 19 nt, Homo sapiens
  misc_RNA (1)...(19): siRNA sense strand
cccaacggcagcagguaaa

SEQ ID NO: 2218883 - RNA, 19 nt, Homo sapiens
  misc_RNA (1)...(19): siRNA sense strand
ccgaaaguugcaacgagaa

SEQ ID NO: 2218884 - RNA, 19 nt, Homo sapiens
  misc_RNA (1)...(19): siRNA sense strand
ccaccaaguaccacauaca

SEQ ID NO: 2218885 - RNA, 19 nt, Homo sapiens
  misc_RNA (1)...(19): siRNA sense strand
gccaaagagaggcagaaaa

SEQ ID NO: 2218886 - RNA, 19 nt, Homo sapiens
  misc_RNA (1)...(19): siRNA sense strand
cuuaacuccaacugugaaa

SEQ ID NO: 2218887 - RNA, 19 nt, Homo sapiens
  misc_RNA (1)...(19): siRNA sense strand
gcauuaaagaacuagguac

SEQ ID NO: 2218888 - RNA, 19 nt, Homo sapiens
  misc_RNA (1)...(19): siRNA sense strand
uugaaaaccgacagaagaa

SEQ ID NO: 2218889 - RNA, 19 nt, Homo sapiens
  misc_RNA (1)...(19): siRNA sense strand
acaagcagccggaggagca

SEQ ID NO: 2218890 - RNA, 19 nt, Homo sapiens
  misc_RNA (1)...(19): siRNA sense strand
ccuguaugcagauggauga

SEQ ID NO: 2218891 - RNA, 19 nt, Homo sapiens
  misc_RNA (1)...(19): siRNA sense strand
uggaagagacggagcacac

SEQ ID NO: 2218892 - RNA, 19 nt, Homo sapiens
  misc_RNA (1)...(19): siRNA sense strand
gcgcaaaagaacuugaaaa

SEQ ID NO: 2218893 - RNA, 19 nt, Homo sapiens
  misc_RNA (1)...(19): siRNA sense strand
gaacugggacugaggccaa

SEQ ID NO: 2218894 - RNA, 19 nt, Homo sapiens
  misc_RNA (1)...(19): siRNA sense strand
cauuaaagaacuagguacu

SEQ ID NO: 2218895 - RNA, 19 nt, Homo sapiens
  misc_RNA (1)...(19): siRNA sense strand
ccacauacagcaagcccaa

SEQ ID NO: 2218896 - RNA, 19 nt, Homo sapiens
  misc_RNA (1)...(19): siRNA sense strand
aagcaagagcacuggccaa

SEQ ID NO: 2218897 - RNA, 19 nt, Homo sapiens
  misc_RNA (1)...(19): siRNA sense strand
cugauugaacgaagaagaa

SEQ ID NO: 2218898 - RNA, 19 nt, Homo sapiens
  misc_RNA (1)...(19): siRNA sense strand
augaggaaaucuugggcuu

SEQ ID NO: 2218899 - RNA, 19 nt, Homo sapiens
  misc_RNA (1)...(19): siRNA sense strand
ccugauugaacgaagaaga

SEQ ID NO: 2218900 - RNA, 19 nt, Homo sapiens
  misc_RNA (1)...(19): siRNA sense strand
cgagaacagcaacgcgcaa

SEQ ID NO: 2218901 - RNA, 19 nt, Homo sapiens
  misc_RNA (1)...(19): siRNA sense strand
cccaacggcagcagguaaa

SEQ ID NO: 2218902 - RNA, 19 nt, Homo sapiens
  misc_RNA (1)...(19): siRNA sense strand
ccgaaaguugcaacgagaa

SEQ ID NO: 2218903 - RNA, 19 nt, Homo sapiens
  misc_RNA (1)...(19): siRNA sense strand
ccaccaaguaccacauaca

SEQ ID NO: 2218904 - RNA, 19 nt, Homo sapiens
  misc_RNA (1)...(19): siRNA sense strand
gccaaagagaggcagaaaa

SEQ ID NO: 2218905 - RNA, 19 nt, Homo sapiens
  misc_RNA (1)...(19): siRNA sense strand
cuuaacuccaacugugaaa

SEQ ID NO: 2218906 - RNA, 19 nt, Homo sapiens
  misc_RNA (1)...(19): siRNA sense strand
gcauuaaagaacuagguac

SEQ ID NO: 2218907 - RNA, 19 nt, Homo sapiens
  misc_RNA (1)...(19): siRNA sense strand
uugaaaaccgacagaagaa

SEQ ID NO: 2218908 - RNA, 19 nt, Homo sapiens
  misc_RNA (1)...(19): siRNA sense strand
acaagcagccggaggagca

SEQ ID NO: 2218909 - RNA, 19 nt, Homo sapiens
  misc_RNA (1)...(19): siRNA sense strand
ccuguaugcagauggauga

SEQ ID NO: 2218910 - RNA, 19 nt, Homo sapiens
  misc_RNA (1)...(19): siRNA sense strand
uggaagagacggagcacac

SEQ ID NO: 2218911 - RNA, 19 nt, Homo sapiens
  misc_RNA (1)...(19): siRNA sense strand
gcgcaaaagaacuugaaaa

SEQ ID NO: 2218912 - RNA, 19 nt, Homo sapiens
  misc_RNA (1)...(19): siRNA sense strand
gaacugggacugaggccaa

SEQ ID NO: 2218913 - RNA, 19 nt, Homo sapiens
  misc_RNA (1)...(19): siRNA sense strand
cauuaaagaacuagguacu

SEQ ID NO: 2218914 - RNA, 19 nt, Homo sapiens
  misc_RNA (1)...(19): siRNA sense strand
ccacauacagcaagcccaa

SEQ ID NO: 2218915 - RNA, 19 nt, Homo sapiens
  misc_RNA (1)...(19): siRNA sense strand
aagcaagagcacuggccaa

SEQ ID NO: 2218916 - RNA, 19 nt, Homo sapiens
  misc_RNA (1)...(19): siRNA sense strand
cugauugaacgaagaagaa

SEQ ID NO: 2218917 - RNA, 19 nt, Homo sapiens
  misc_RNA (1)...(19): siRNA sense strand
augaggaaaucuugggcuu

SEQ ID NO: 2218918 - RNA, 19 nt, Homo sapiens
  misc_RNA (1)...(19): siRNA sense strand
ccugauugaacgaagaaga

SEQ ID NO: 2218919 - RNA, 19 nt, Homo sapiens
  misc_RNA (1)...(19): siRNA sense strand
cgagaacagcaacgcgcaa

SEQ ID NO: 2218920 - RNA, 19 nt, Homo sapiens
  misc_RNA (1)...(19): siRNA sense strand
cccaacggcagcagguaaa

SEQ ID NO: 2218921 - RNA, 19 nt, Homo sapiens
  misc_RNA (1)...(19): siRNA sense strand
ccgaaaguugcaacgagaa

SEQ ID NO: 2218922 - RNA, 19 nt, Homo sapiens
  misc_RNA (1)...(19): siRNA sense strand
ccaccaaguaccacauaca

SEQ ID NO: 2218923 - RNA, 19 nt, Homo sapiens
  misc_RNA (1)...(19): siRNA sense strand
gccaaagagaggcagaaaa

SEQ ID NO: 2218924 - RNA, 19 nt, Homo sapiens
  misc_RNA (1)...(19): siRNA sense strand
cuuaacuccaacugugaaa

SEQ ID NO: 2218925 - RNA, 19 nt, Homo sapiens
  misc_RNA (1)...(19): siRNA sense strand
gcauuaaagaacuagguac

SEQ ID NO: 2218926 - RNA, 19 nt, Homo sapiens
  misc_RNA (1)...(19): siRNA sense strand
uugaaaaccgacagaagaa

SEQ ID NO: 2218927 - RNA, 19 nt, Homo sapiens
  misc_RNA (1)...(19): siRNA sense strand
acaagcagccggaggagca

SEQ ID NO: 2218928 - RNA, 19 nt, Homo sapiens
  misc_RNA (1)...(19): siRNA sense strand
ccuguaugcagauggauga

SEQ ID NO: 2218929 - RNA, 19 nt, Homo sapiens
  misc_RNA (1)...(19): siRNA sense strand
uggaagagacggagcacac

SEQ ID NO: 2218930 - RNA, 19 nt, Homo sapiens
  misc_RNA (1)...(19): siRNA sense strand
ucuaaauauuggagagcaa

SEQ ID NO: 2218931 - RNA, 19 nt, Homo sapiens
  misc_RNA (1)...(19): siRNA sense strand
uggaaauggacaagauaaa

SEQ ID NO: 2218932 - RNA, 19 nt, Homo sapiens
  misc_RNA (1)...(19): siRNA sense strand
ccuuaaggauaauggacaa

SEQ ID NO: 2218933 - RNA, 19 nt, Homo sapiens
  misc_RNA (1)...(19): siRNA sense strand
ugauuuaaagggagugaua

SEQ ID NO: 2218934 - RNA, 19 nt, Homo sapiens
  misc_RNA (1)...(19): siRNA sense strand
caauaguggaaauggacaa

SEQ ID NO: 2218935 - RNA, 19 nt, Homo sapiens
  misc_RNA (1)...(19): siRNA sense strand
ucucaggaaccuuggguaa

SEQ ID NO: 2218936 - RNA, 19 nt, Homo sapiens
  misc_RNA (1)...(19): siRNA sense strand
aggugaauguaauggguuu

SEQ ID NO: 2218937 - RNA, 19 nt, Homo sapiens
  misc_RNA (1)...(19): siRNA sense strand
uauuugagcaggagagcua

SEQ ID NO: 2218938 - RNA, 19 nt, Homo sapiens
  misc_RNA (1)...(19): siRNA sense strand
guggaaauggacaagauaa

SEQ ID NO: 2218939 - RNA, 19 nt, Homo sapiens
  misc_RNA (1)...(19): siRNA sense strand
cagaugcaguggaggaaaa

SEQ ID NO: 2218940 - RNA, 19 nt, Homo sapiens
  misc_RNA (1)...(19): siRNA sense strand
acacaagccaacugaagaa

SEQ ID NO: 2218941 - RNA, 19 nt, Homo sapiens
  misc_RNA (1)...(19): siRNA sense strand
agauggagcucaagccgaa

SEQ ID NO: 2218942 - RNA, 19 nt, Homo sapiens
  misc_RNA (1)...(19): siRNA sense strand
guucuaaggagcaggcuuu

SEQ ID NO: 2218943 - RNA, 19 nt, Homo sapiens
  misc_RNA (1)...(19): siRNA sense strand
aaaacuugguucuggaaaa

SEQ ID NO: 2218944 - RNA, 19 nt, Homo sapiens
  misc_RNA (1)...(19): siRNA sense strand
gcgcuguggcagaagcuua

SEQ ID NO: 2218945 - RNA, 19 nt, Homo sapiens
  misc_RNA (1)...(19): siRNA sense strand
uggguagcuuuaugggaua

SEQ ID NO: 2218946 - RNA, 19 nt, Homo sapiens
  misc_RNA (1)...(19): siRNA sense strand
aagaaagaucaguagaaca

SEQ ID NO: 2218947 - RNA, 19 nt, Homo sapiens
  misc_RNA (1)...(19): siRNA sense strand
gcgaguuauccaauguaaa

SEQ ID NO: 2218948 - RNA, 19 nt, Homo sapiens
  misc_RNA (1)...(19): siRNA sense strand
ccuagaagaaagaucagua

SEQ ID NO: 2218949 - RNA, 19 nt, Homo sapiens
  misc_RNA (1)...(19): siRNA sense strand
ggcccaugacugagagaga

SEQ ID NO: 2218950 - RNA, 19 nt, Homo sapiens
  misc_RNA (1)...(19): siRNA sense strand
cuacaaucccagagucaga

SEQ ID NO: 2218951 - RNA, 19 nt, Homo sapiens
  misc_RNA (1)...(19): siRNA sense strand
acagagugauauugcaaaa

SEQ ID NO: 2218952 - RNA, 19 nt, Homo sapiens
  misc_RNA (1)...(19): siRNA sense strand
gugaacaauuugaagaucu

SEQ ID NO: 2218953 - RNA, 19 nt, Homo sapiens
  misc_RNA (1)...(19): siRNA sense strand
agucagaccuagaagaaag

SEQ ID NO: 2218954 - RNA, 19 nt, Homo sapiens
  misc_RNA (1)...(19): siRNA sense strand
augaugaacuugauguaga

SEQ ID NO: 2218955 - RNA, 19 nt, Homo sapiens
  misc_RNA (1)...(19): siRNA sense strand
uguugacaauaguggaaau

SEQ ID NO: 2218956 - RNA, 19 nt, Homo sapiens
  misc_RNA (1)...(19): siRNA sense strand
gggaagaaacgguggaugc

SEQ ID NO: 2218957 - RNA, 19 nt, Homo sapiens
  misc_RNA (1)...(19): siRNA sense strand
aguggaaguaggaaaguuu

SEQ ID NO: 2218958 - RNA, 19 nt, Homo sapiens
  misc_RNA (1)...(19): siRNA sense strand
guggauuggacucuaaaua

SEQ ID NO: 2218959 - RNA, 19 nt, Homo sapiens
  misc_RNA (1)...(19): siRNA sense strand
gagaagaugacuugaacgu

SEQ ID NO: 2218960 - RNA, 19 nt, Homo sapiens
  misc_RNA (1)...(19): siRNA sense strand
acugcagaacagagugaua

SEQ ID NO: 2218961 - RNA, 19 nt, Homo sapiens
  misc_RNA (1)...(19): siRNA sense strand
gagugaacaauuugaagau

SEQ ID NO: 2218962 - RNA, 19 nt, Homo sapiens
  misc_RNA (1)...(19): siRNA sense strand
ccaacaaguggaaaguuau

SEQ ID NO: 2218963 - RNA, 19 nt, Homo sapiens
  misc_RNA (1)...(19): siRNA sense strand
ggaggaaaaccaaggcaau

SEQ ID NO: 2218964 - RNA, 19 nt, Homo sapiens
  misc_RNA (1)...(19): siRNA sense strand
agagagaagaugacuugaa

SEQ ID NO: 2218965 - RNA, 19 nt, Homo sapiens
  misc_RNA (1)...(19): siRNA sense strand
guggguagcuuuaugggau

SEQ ID NO: 2218966 - RNA, 19 nt, Homo sapiens
  misc_RNA (1)...(19): siRNA sense strand
agagucagaccuagaagaa

SEQ ID NO: 2218967 - RNA, 19 nt, Homo sapiens
  misc_RNA (1)...(19): siRNA sense strand
agaacaagacucuacagaa

SEQ ID NO: 2218968 - RNA, 19 nt, Homo sapiens
  misc_RNA (1)...(19): siRNA sense strand
ggaaccaaugucagaugaa

SEQ ID NO: 2218969 - RNA, 19 nt, Homo sapiens
  misc_RNA (1)...(19): siRNA sense strand
ugggagauaaagaagaauu

SEQ ID NO: 2218970 - RNA, 19 nt, Homo sapiens
  misc_RNA (1)...(19): siRNA sense strand
auuuaaagggagugauagu

SEQ ID NO: 2218971 - RNA, 19 nt, Homo sapiens
  misc_RNA (1)...(19): siRNA sense strand
uagcagaugcaguggagga

SEQ ID NO: 2218972 - RNA, 19 nt, Homo sapiens
  misc_RNA (1)...(19): siRNA sense strand
aacaggagauggagcucaa

SEQ ID NO: 2218973 - RNA, 19 nt, Homo sapiens
  misc_RNA (1)...(19): siRNA sense strand
cuaugaugaacuugaugua

SEQ ID NO: 2218974 - RNA, 19 nt, Homo sapiens
  misc_RNA (1)...(19): siRNA sense strand
ggucaugccaggugguugu

SEQ ID NO: 2218975 - RNA, 19 nt, Homo sapiens
  misc_RNA (1)...(19): siRNA sense strand
uucaaguggaaguaggaaa

SEQ ID NO: 2218976 - RNA, 19 nt, Homo sapiens
  misc_RNA (1)...(19): siRNA sense strand
agaauugggcugggaagaa

SEQ ID NO: 2218977 - RNA, 19 nt, Homo sapiens
  misc_RNA (1)...(19): siRNA sense strand
auaaaaggcaggagacuga

SEQ ID NO: 2218978 - RNA, 19 nt, Homo sapiens
  misc_RNA (1)...(19): siRNA sense strand
cugagagagcuguacaauu

SEQ ID NO: 2218979 - RNA, 19 nt, Homo sapiens
  misc_RNA (1)...(19): siRNA sense strand
agaccuagaagaaagauca

SEQ ID NO: 2218980 - RNA, 19 nt, Homo sapiens
  misc_RNA (1)...(19): siRNA sense strand
ggauaauggacaaauucga

SEQ ID NO: 2218981 - RNA, 19 nt, Homo sapiens
  misc_RNA (1)...(19): siRNA sense strand
cguacagauuccuuccuua

SEQ ID NO: 2218982 - RNA, 19 nt, Homo sapiens
  misc_RNA (1)...(19): siRNA sense strand
aaccaaugucagaugaaau

SEQ ID NO: 2218983 - RNA, 19 nt, Homo sapiens
  misc_RNA (1)...(19): siRNA sense strand
gcagauaaaaggcaggaga

SEQ ID NO: 2218984 - RNA, 19 nt, Homo sapiens
  misc_RNA (1)...(19): siRNA sense strand
gggcuguuugcaugauuua

SEQ ID NO: 2218985 - RNA, 19 nt, Homo sapiens
  misc_RNA (1)...(19): siRNA sense strand
gcuguuugcaugauuuaaa

SEQ ID NO: 2218986 - RNA, 19 nt, Homo sapiens
  misc_RNA (1)...(19): siRNA sense strand
acccaaagacacaagccaa

SEQ ID NO: 2218987 - RNA, 19 nt, Homo sapiens
  misc_RNA (1)...(19): siRNA sense strand
agaauuugaucaaggcugu

SEQ ID NO: 2218988 - RNA, 19 nt, Homo sapiens
  misc_RNA (1)...(19): siRNA sense strand
gccuuaaggauaauggaca

SEQ ID NO: 2218989 - RNA, 19 nt, Homo sapiens
  misc_RNA (1)...(19): siRNA sense strand
cuuaaggauaauggacaaa

SEQ ID NO: 2218990 - RNA, 19 nt, Homo sapiens
  misc_RNA (1)...(19): siRNA sense strand
ucuaaauauuggagagcaa

SEQ ID NO: 2218991 - RNA, 19 nt, Homo sapiens
  misc_RNA (1)...(19): siRNA sense strand
uggaaauggacaagauaaa

SEQ ID NO: 2218992 - RNA, 19 nt, Homo sapiens
  misc_RNA (1)...(19): siRNA sense strand
ccuuaaggauaauggacaa

SEQ ID NO: 2218993 - RNA, 19 nt, Homo sapiens
  misc_RNA (1)...(19): siRNA sense strand
ugauuuaaagggagugaua

SEQ ID NO: 2218994 - RNA, 19 nt, Homo sapiens
  misc_RNA (1)...(19): siRNA sense strand
caauaguggaaauggacaa

SEQ ID NO: 2218995 - RNA, 19 nt, Homo sapiens
  misc_RNA (1)...(19): siRNA sense strand
ucucaggaaccuuggguaa

SEQ ID NO: 2218996 - RNA, 19 nt, Homo sapiens
  misc_RNA (1)...(19): siRNA sense strand
aggugaauguaauggguuu

SEQ ID NO: 2218997 - RNA, 19 nt, Homo sapiens
  misc_RNA (1)...(19): siRNA sense strand
uauuugagcaggagagcua

SEQ ID NO: 2218998 - RNA, 19 nt, Homo sapiens
  misc_RNA (1)...(19): siRNA sense strand
guggaaauggacaagauaa

SEQ ID NO: 2218999 - RNA, 19 nt, Homo sapiens
  misc_RNA (1)...(19): siRNA sense strand
cagaugcaguggaggaaaa

SEQ ID NO: 2219000 - RNA, 19 nt, Homo sapiens
  misc_RNA (1)...(19): siRNA sense strand
acacaagccaacugaagaa

SEQ ID NO: 2219001 - RNA, 19 nt, Homo sapiens
  misc_RNA (1)...(19): siRNA sense strand
agauggagcucaagccgaa

SEQ ID NO: 2219002 - RNA, 19 nt, Homo sapiens
  misc_RNA (1)...(19): siRNA sense strand
guucuaaggagcaggcuuu

SEQ ID NO: 2219003 - RNA, 19 nt, Homo sapiens
  misc_RNA (1)...(19): siRNA sense strand
aaaacuugguucuggaaaa

SEQ ID NO: 2219004 - RNA, 19 nt, Homo sapiens
  misc_RNA (1)...(19): siRNA sense strand
gcgcuguggcagaagcuua

SEQ ID NO: 2219005 - RNA, 19 nt, Homo sapiens
  misc_RNA (1)...(19): siRNA sense strand
uggguagcuuuaugggaua

SEQ ID NO: 2219006 - RNA, 19 nt, Homo sapiens
  misc_RNA (1)...(19): siRNA sense strand
aagaaagaucaguagaaca

SEQ ID NO: 2219007 - RNA, 19 nt, Homo sapiens
  misc_RNA (1)...(19): siRNA sense strand
gcgaguuauccaauguaaa

SEQ ID NO: 2219008 - RNA, 19 nt, Homo sapiens
  misc_RNA (1)...(19): siRNA sense strand
ccuagaagaaagaucagua

SEQ ID NO: 2219009 - RNA, 19 nt, Homo sapiens
  misc_RNA (1)...(19): siRNA sense strand
ggcccaugacugagagaga

SEQ ID NO: 2219010 - RNA, 19 nt, Homo sapiens
  misc_RNA (1)...(19): siRNA sense strand
cuacaaucccagagucaga

SEQ ID NO: 2219011 - RNA, 19 nt, Homo sapiens
  misc_RNA (1)...(19): siRNA sense strand
acagagugauauugcaaaa

SEQ ID NO: 2219012 - RNA, 19 nt, Homo sapiens
  misc_RNA (1)...(19): siRNA sense strand
gugaacaauuugaagaucu

SEQ ID NO: 2219013 - RNA, 19 nt, Homo sapiens
  misc_RNA (1)...(19): siRNA sense strand
agucagaccuagaagaaag

SEQ ID NO: 2219014 - RNA, 19 nt, Homo sapiens
  misc_RNA (1)...(19): siRNA sense strand
augaugaacuugauguaga

SEQ ID NO: 2219015 - RNA, 19 nt, Homo sapiens
  misc_RNA (1)...(19): siRNA sense strand
uguugacaauaguggaaau

SEQ ID NO: 2219016 - RNA, 19 nt, Homo sapiens
  misc_RNA (1)...(19): siRNA sense strand
gggaagaaacgguggaugc

SEQ ID NO: 2219017 - RNA, 19 nt, Homo sapiens
  misc_RNA (1)...(19): siRNA sense strand
aguggaaguaggaaaguuu

SEQ ID NO: 2219018 - RNA, 19 nt, Homo sapiens
  misc_RNA (1)...(19): siRNA sense strand
guggauuggacucuaaaua

SEQ ID NO: 2219019 - RNA, 19 nt, Homo sapiens
  misc_RNA (1)...(19): siRNA sense strand
gagaagaugacuugaacgu

SEQ ID NO: 2219020 - RNA, 19 nt, Homo sapiens
  misc_RNA (1)...(19): siRNA sense strand
acugcagaacagagugaua

SEQ ID NO: 2219021 - RNA, 19 nt, Homo sapiens
  misc_RNA (1)...(19): siRNA sense strand
gagugaacaauuugaagau

SEQ ID NO: 2219022 - RNA, 19 nt, Homo sapiens
  misc_RNA (1)...(19): siRNA sense strand
ccaacaaguggaaaguuau

SEQ ID NO: 2219023 - RNA, 19 nt, Homo sapiens
  misc_RNA (1)...(19): siRNA sense strand
ggaggaaaaccaaggcaau

SEQ ID NO: 2219024 - RNA, 19 nt, Homo sapiens
  misc_RNA (1)...(19): siRNA sense strand
agagagaagaugacuugaa

SEQ ID NO: 2219025 - RNA, 19 nt, Homo sapiens
  misc_RNA (1)...(19): siRNA sense strand
guggguagcuuuaugggau

SEQ ID NO: 2219026 - RNA, 19 nt, Homo sapiens
  misc_RNA (1)...(19): siRNA sense strand
agagucagaccuagaagaa

SEQ ID NO: 2219027 - RNA, 19 nt, Homo sapiens
  misc_RNA (1)...(19): siRNA sense strand
agaacaagacucuacagaa

SEQ ID NO: 2219028 - RNA, 19 nt, Homo sapiens
  misc_RNA (1)...(19): siRNA sense strand
ggaaccaaugucagaugaa

SEQ ID NO: 2219029 - RNA, 19 nt, Homo sapiens
  misc_RNA (1)...(19): siRNA sense strand
ugggagauaaagaagaauu

SEQ ID NO: 2219030 - RNA, 19 nt, Homo sapiens
  misc_RNA (1)...(19): siRNA sense strand
auuuaaagggagugauagu

SEQ ID NO: 2219031 - RNA, 19 nt, Homo sapiens
  misc_RNA (1)...(19): siRNA sense strand
uagcagaugcaguggagga

SEQ ID NO: 2219032 - RNA, 19 nt, Homo sapiens
  misc_RNA (1)...(19): siRNA sense strand
aacaggagauggagcucaa

SEQ ID NO: 2219033 - RNA, 19 nt, Homo sapiens
  misc_RNA (1)...(19): siRNA sense strand
cuaugaugaacuugaugua

SEQ ID NO: 2219034 - RNA, 19 nt, Homo sapiens
  misc_RNA (1)...(19): siRNA sense strand
ggucaugccaggugguugu

SEQ ID NO: 2219035 - RNA, 19 nt, Homo sapiens
  misc_RNA (1)...(19): siRNA sense strand
uucaaguggaaguaggaaa

SEQ ID NO: 2219036 - RNA, 19 nt, Homo sapiens
  misc_RNA (1)...(19): siRNA sense strand
agaauugggcugggaagaa

SEQ ID NO: 2219037 - RNA, 19 nt, Homo sapiens
  misc_RNA (1)...(19): siRNA sense strand
auaaaaggcaggagacuga

SEQ ID NO: 2219038 - RNA, 19 nt, Homo sapiens
  misc_RNA (1)...(19): siRNA sense strand
cugagagagcuguacaauu

SEQ ID NO: 2219039 - RNA, 19 nt, Homo sapiens
  misc_RNA (1)...(19): siRNA sense strand
agaccuagaagaaagauca

SEQ ID NO: 2219040 - RNA, 19 nt, Homo sapiens
  misc_RNA (1)...(19): siRNA sense strand
ggauaauggacaaauucga

SEQ ID NO: 2219041 - RNA, 19 nt, Homo sapiens
  misc_RNA (1)...(19): siRNA sense strand
cguacagauuccuuccuua

SEQ ID NO: 2219042 - RNA, 19 nt, Homo sapiens
  misc_RNA (1)...(19): siRNA sense strand
aaccaaugucagaugaaau

SEQ ID NO: 2219043 - RNA, 19 nt, Homo sapiens
  misc_RNA (1)...(19): siRNA sense strand
gcagauaaaaggcaggaga

SEQ ID NO: 2219044 - RNA, 19 nt, Homo sapiens
  misc_RNA (1)...(19): siRNA sense strand
gggcuguuugcaugauuua

SEQ ID NO: 2219045 - RNA, 19 nt, Homo sapiens
  misc_RNA (1)...(19): siRNA sense strand
gcuguuugcaugauuuaaa

SEQ ID NO: 2219046 - RNA, 19 nt, Homo sapiens
  misc_RNA (1)...(19): siRNA sense strand
acccaaagacacaagccaa

SEQ ID NO: 2219047 - RNA, 19 nt, Homo sapiens
  misc_RNA (1)...(19): siRNA sense strand
agaauuugaucaaggcugu

SEQ ID NO: 2219048 - RNA, 19 nt, Homo sapiens
  misc_RNA (1)...(19): siRNA sense strand
gccuuaaggauaauggaca

SEQ ID NO: 2219049 - RNA, 19 nt, Homo sapiens
  misc_RNA (1)...(19): siRNA sense strand
cuuaaggauaauggacaaa

SEQ ID NO: 2219050 - RNA, 19 nt, Homo sapiens
  misc_RNA (1)...(19): siRNA sense strand
cagaagaagagcagaaaau

SEQ ID NO: 2219051 - RNA, 19 nt, Homo sapiens
  misc_RNA (1)...(19): siRNA sense strand
gcacaucucugaaagccaa

SEQ ID NO: 2219052 - RNA, 19 nt, Homo sapiens
  misc_RNA (1)...(19): siRNA sense strand
aaccaguggaagaggucaa

SEQ ID NO: 2219053 - RNA, 19 nt, Homo sapiens
  misc_RNA (1)...(19): siRNA sense strand
gcagaagaagagcagaaaa

SEQ ID NO: 2219054 - RNA, 19 nt, Homo sapiens
  misc_RNA (1)...(19): siRNA sense strand
gaggaagcccagaaaggga

SEQ ID NO: 2219055 - RNA, 19 nt, Homo sapiens
  misc_RNA (1)...(19): siRNA sense strand
agaaaauagcagccaggaa

SEQ ID NO: 2219056 - RNA, 19 nt, Homo sapiens
  misc_RNA (1)...(19): siRNA sense strand
gcuuaagacacuagagauu

SEQ ID NO: 2219057 - RNA, 19 nt, Homo sapiens
  misc_RNA (1)...(19): siRNA sense strand
aagugaaagaccagaauaa

SEQ ID NO: 2219058 - RNA, 19 nt, Homo sapiens
  misc_RNA (1)...(19): siRNA sense strand
gcuuaaaggagcagaggga

SEQ ID NO: 2219059 - RNA, 19 nt, Homo sapiens
  misc_RNA (1)...(19): siRNA sense strand
uggaaguaaaggagagcaa

SEQ ID NO: 2219060 - RNA, 19 nt, Homo sapiens
  misc_RNA (1)...(19): siRNA sense strand
aggaaguucuggagaugaa

SEQ ID NO: 2219061 - RNA, 19 nt, Homo sapiens
  misc_RNA (1)...(19): siRNA sense strand
uggagguggcagugggaaa

SEQ ID NO: 2219062 - RNA, 19 nt, Homo sapiens
  misc_RNA (1)...(19): siRNA sense strand
aaggaaacacuuagaggaa

SEQ ID NO: 2219063 - RNA, 19 nt, Homo sapiens
  misc_RNA (1)...(19): siRNA sense strand
aggaacgagcccugagaaa

SEQ ID NO: 2219064 - RNA, 19 nt, Homo sapiens
  misc_RNA (1)...(19): siRNA sense strand
gcagagaaagagcggacaa

SEQ ID NO: 2219065 - RNA, 19 nt, Homo sapiens
  misc_RNA (1)...(19): siRNA sense strand
gggacagagaugagcgaga

SEQ ID NO: 2219066 - RNA, 19 nt, Homo sapiens
  misc_RNA (1)...(19): siRNA sense strand
acaaggaacagguggaaaa

SEQ ID NO: 2219067 - RNA, 19 nt, Homo sapiens
  misc_RNA (1)...(19): siRNA sense strand
uuaaaggagcagagggaca

SEQ ID NO: 2219068 - RNA, 19 nt, Homo sapiens
  misc_RNA (1)...(19): siRNA sense strand
cagcuuagagacaaggaaa

SEQ ID NO: 2219069 - RNA, 19 nt, Homo sapiens
  misc_RNA (1)...(19): siRNA sense strand
gaaugaagcuaauggccga

SEQ ID NO: 2219070 - RNA, 19 nt, Homo sapiens
  misc_RNA (1)...(19): siRNA sense strand
gcgagagaagcaagaggaa

SEQ ID NO: 2219071 - RNA, 19 nt, Homo sapiens
  misc_RNA (1)...(19): siRNA sense strand
ccgacaacuacgaggauga

SEQ ID NO: 2219072 - RNA, 19 nt, Homo sapiens
  misc_RNA (1)...(19): siRNA sense strand
cgagagaagcaagaggaaa

SEQ ID NO: 2219073 - RNA, 19 nt, Homo sapiens
  misc_RNA (1)...(19): siRNA sense strand
caacaguacgggagggagu

SEQ ID NO: 2219074 - RNA, 19 nt, Homo sapiens
  misc_RNA (1)...(19): siRNA sense strand
aggauauggcugaagagaa

SEQ ID NO: 2219075 - RNA, 19 nt, Homo sapiens
  misc_RNA (1)...(19): siRNA sense strand
gaguuguacaggaggaaaa

SEQ ID NO: 2219076 - RNA, 19 nt, Homo sapiens
  misc_RNA (1)...(19): siRNA sense strand
ucuugaaggagguggaaaa

SEQ ID NO: 2219077 - RNA, 19 nt, Homo sapiens
  misc_RNA (1)...(19): siRNA sense strand
cuagaauccaugaaagcaa

SEQ ID NO: 2219078 - RNA, 19 nt, Homo sapiens
  misc_RNA (1)...(19): siRNA sense strand
uggccauggagaagguaaa

SEQ ID NO: 2219079 - RNA, 19 nt, Homo sapiens
  misc_RNA (1)...(19): siRNA sense strand
aggcagaaguugaucgacu

SEQ ID NO: 2219080 - RNA, 19 nt, Homo sapiens
  misc_RNA (1)...(19): siRNA sense strand
cagaauaagaagguagcaa

SEQ ID NO: 2219081 - RNA, 19 nt, Homo sapiens
  misc_RNA (1)...(19): siRNA sense strand
cguuuggaagagaaggaaa

SEQ ID NO: 2219082 - RNA, 19 nt, Homo sapiens
  misc_RNA (1)...(19): siRNA sense strand
aggaaacucacuugacuaa

SEQ ID NO: 2219083 - RNA, 19 nt, Homo sapiens
  misc_RNA (1)...(19): siRNA sense strand
cuucgucaggcgagagaua

SEQ ID NO: 2219084 - RNA, 19 nt, Homo sapiens
  misc_RNA (1)...(19): siRNA sense strand
agcaagaggaaauugauaa

SEQ ID NO: 2219085 - RNA, 19 nt, Homo sapiens
  misc_RNA (1)...(19): siRNA sense strand
agaagaaggaggagugucu

SEQ ID NO: 2219086 - RNA, 19 nt, Homo sapiens
  misc_RNA (1)...(19): siRNA sense strand
caagagcagcuuagagaca

SEQ ID NO: 2219087 - RNA, 19 nt, Homo sapiens
  misc_RNA (1)...(19): siRNA sense strand
aagcaagaggaaauugaua

SEQ ID NO: 2219088 - RNA, 19 nt, Homo sapiens
  misc_RNA (1)...(19): siRNA sense strand
uggaaaaugagaagaauga

SEQ ID NO: 2219089 - RNA, 19 nt, Homo sapiens
  misc_RNA (1)...(19): siRNA sense strand
cuuaagcagcagacgcaaa

SEQ ID NO: 2219090 - RNA, 19 nt, Homo sapiens
  misc_RNA (1)...(19): siRNA sense strand
cauagcauuuggagagcau

SEQ ID NO: 2219091 - RNA, 19 nt, Homo sapiens
  misc_RNA (1)...(19): siRNA sense strand
augagaagaaugacaaaga

SEQ ID NO: 2219092 - RNA, 19 nt, Homo sapiens
  misc_RNA (1)...(19): siRNA sense strand
uggaagagaaggaaaccau

SEQ ID NO: 2219093 - RNA, 19 nt, Homo sapiens
  misc_RNA (1)...(19): siRNA sense strand
auacaugaccucaaggaca

SEQ ID NO: 2219094 - RNA, 19 nt, Homo sapiens
  misc_RNA (1)...(19): siRNA sense strand
agagagaucaccagguaca

SEQ ID NO: 2219095 - RNA, 19 nt, Homo sapiens
  misc_RNA (1)...(19): siRNA sense strand
agcuaauggccgacaacua

SEQ ID NO: 2219096 - RNA, 19 nt, Homo sapiens
  misc_RNA (1)...(19): siRNA sense strand
gggcagagagaaggaaaca

SEQ ID NO: 2219097 - RNA, 19 nt, Homo sapiens
  misc_RNA (1)...(19): siRNA sense strand
cggaaggauguggaaguaa

SEQ ID NO: 2219098 - RNA, 19 nt, Homo sapiens
  misc_RNA (1)...(19): siRNA sense strand
cuagcaaggcccaggcaga

SEQ ID NO: 2219099 - RNA, 19 nt, Homo sapiens
  misc_RNA (1)...(19): siRNA sense strand
gaaaaugagaagaaugaca

SEQ ID NO: 2219100 - RNA, 19 nt, Homo sapiens
  misc_RNA (1)...(19): siRNA sense strand
agaaggaaaccauguugaa

SEQ ID NO: 2219101 - RNA, 19 nt, Homo sapiens
  misc_RNA (1)...(19): siRNA sense strand
gagagauacaugaccucaa

SEQ ID NO: 2219102 - RNA, 19 nt, Homo sapiens
  misc_RNA (1)...(19): siRNA sense strand
gggaagcaguguuggaggu

SEQ ID NO: 2219103 - RNA, 19 nt, Homo sapiens
  misc_RNA (1)...(19): siRNA sense strand
gcggaagguuaauguucuu

SEQ ID NO: 2219104 - RNA, 19 nt, Homo sapiens
  misc_RNA (1)...(19): siRNA sense strand
uggaugugaaggagcggaa

SEQ ID NO: 2219105 - RNA, 19 nt, Homo sapiens
  misc_RNA (1)...(19): siRNA sense strand
gcacuuggagagagagauc

SEQ ID NO: 2219106 - RNA, 19 nt, Homo sapiens
  misc_RNA (1)...(19): siRNA sense strand
agguggaaaaugagaagaa

SEQ ID NO: 2219107 - RNA, 19 nt, Homo sapiens
  misc_RNA (1)...(19): siRNA sense strand
agaagaagacccaagagga

SEQ ID NO: 2219108 - RNA, 19 nt, Homo sapiens
  misc_RNA (1)...(19): siRNA sense strand
gcuuaagacacuagagauu

SEQ ID NO: 2219109 - RNA, 19 nt, Homo sapiens
  misc_RNA (1)...(19): siRNA sense strand
aagugaaagaccagaauaa

SEQ ID NO: 2219110 - RNA, 19 nt, Homo sapiens
  misc_RNA (1)...(19): siRNA sense strand
gcuuaaaggagcagaggga

SEQ ID NO: 2219111 - RNA, 19 nt, Homo sapiens
  misc_RNA (1)...(19): siRNA sense strand
uggaaguaaaggagagcaa

SEQ ID NO: 2219112 - RNA, 19 nt, Homo sapiens
  misc_RNA (1)...(19): siRNA sense strand
aggaaguucuggagaugaa

SEQ ID NO: 2219113 - RNA, 19 nt, Homo sapiens
  misc_RNA (1)...(19): siRNA sense strand
uggagguggcagugggaaa

SEQ ID NO: 2219114 - RNA, 19 nt, Homo sapiens
  misc_RNA (1)...(19): siRNA sense strand
aaggaaacacuuagaggaa

SEQ ID NO: 2219115 - RNA, 19 nt, Homo sapiens
  misc_RNA (1)...(19): siRNA sense strand
aggaacgagcccugagaaa

SEQ ID NO: 2219116 - RNA, 19 nt, Homo sapiens
  misc_RNA (1)...(19): siRNA sense strand
gcagagaaagagcggacaa

SEQ ID NO: 2219117 - RNA, 19 nt, Homo sapiens
  misc_RNA (1)...(19): siRNA sense strand
gggacagagaugagcgaga

SEQ ID NO: 2219118 - RNA, 19 nt, Homo sapiens
  misc_RNA (1)...(19): siRNA sense strand
acaaggaacagguggaaaa

SEQ ID NO: 2219119 - RNA, 19 nt, Homo sapiens
  misc_RNA (1)...(19): siRNA sense strand
uuaaaggagcagagggaca

SEQ ID NO: 2219120 - RNA, 19 nt, Homo sapiens
  misc_RNA (1)...(19): siRNA sense strand
cagcuuagagacaaggaaa

SEQ ID NO: 2219121 - RNA, 19 nt, Homo sapiens
  misc_RNA (1)...(19): siRNA sense strand
gaaugaagcuaauggccga

SEQ ID NO: 2219122 - RNA, 19 nt, Homo sapiens
  misc_RNA (1)...(19): siRNA sense strand
gcgagagaagcaagaggaa

SEQ ID NO: 2219123 - RNA, 19 nt, Homo sapiens
  misc_RNA (1)...(19): siRNA sense strand
ccgacaacuacgaggauga

SEQ ID NO: 2219124 - RNA, 19 nt, Homo sapiens
  misc_RNA (1)...(19): siRNA sense strand
cgagagaagcaagaggaaa

SEQ ID NO: 2219125 - RNA, 19 nt, Homo sapiens
  misc_RNA (1)...(19): siRNA sense strand
caacaguacgggagggagu

SEQ ID NO: 2219126 - RNA, 19 nt, Homo sapiens
  misc_RNA (1)...(19): siRNA sense strand
aggauauggcugaagagaa

SEQ ID NO: 2219127 - RNA, 19 nt, Homo sapiens
  misc_RNA (1)...(19): siRNA sense strand
gaguuguacaggaggaaaa

SEQ ID NO: 2219128 - RNA, 19 nt, Homo sapiens
  misc_RNA (1)...(19): siRNA sense strand
ucuugaaggagguggaaaa

SEQ ID NO: 2219129 - RNA, 19 nt, Homo sapiens
  misc_RNA (1)...(19): siRNA sense strand
cuagaauccaugaaagcaa

SEQ ID NO: 2219130 - RNA, 19 nt, Homo sapiens
  misc_RNA (1)...(19): siRNA sense strand
uggccauggagaagguaaa

SEQ ID NO: 2219131 - RNA, 19 nt, Homo sapiens
  misc_RNA (1)...(19): siRNA sense strand
aggcagaaguugaucgacu

SEQ ID NO: 2219132 - RNA, 19 nt, Homo sapiens
  misc_RNA (1)...(19): siRNA sense strand
cagaauaagaagguagcaa

SEQ ID NO: 2219133 - RNA, 19 nt, Homo sapiens
  misc_RNA (1)...(19): siRNA sense strand
cguuuggaagagaaggaaa

SEQ ID NO: 2219134 - RNA, 19 nt, Homo sapiens
  misc_RNA (1)...(19): siRNA sense strand
aggaaacucacuugacuaa

SEQ ID NO: 2219135 - RNA, 19 nt, Homo sapiens
  misc_RNA (1)...(19): siRNA sense strand
cuucgucaggcgagagaua

SEQ ID NO: 2219136 - RNA, 19 nt, Homo sapiens
  misc_RNA (1)...(19): siRNA sense strand
agcaagaggaaauugauaa

SEQ ID NO: 2219137 - RNA, 19 nt, Homo sapiens
  misc_RNA (1)...(19): siRNA sense strand
agaagaaggaggagugucu

SEQ ID NO: 2219138 - RNA, 19 nt, Homo sapiens
  misc_RNA (1)...(19): siRNA sense strand
caagagcagcuuagagaca

SEQ ID NO: 2219139 - RNA, 19 nt, Homo sapiens
  misc_RNA (1)...(19): siRNA sense strand
aagcaagaggaaauugaua

SEQ ID NO: 2219140 - RNA, 19 nt, Homo sapiens
  misc_RNA (1)...(19): siRNA sense strand
uggaaaaugagaagaauga

SEQ ID NO: 2219141 - RNA, 19 nt, Homo sapiens
  misc_RNA (1)...(19): siRNA sense strand
cuuaagcagcagacgcaaa

SEQ ID NO: 2219142 - RNA, 19 nt, Homo sapiens
  misc_RNA (1)...(19): siRNA sense strand
cauagcauuuggagagcau

SEQ ID NO: 2219143 - RNA, 19 nt, Homo sapiens
  misc_RNA (1)...(19): siRNA sense strand
augagaagaaugacaaaga

SEQ ID NO: 2219144 - RNA, 19 nt, Homo sapiens
  misc_RNA (1)...(19): siRNA sense strand
uggaagagaaggaaaccau

SEQ ID NO: 2219145 - RNA, 19 nt, Homo sapiens
  misc_RNA (1)...(19): siRNA sense strand
auacaugaccucaaggaca

SEQ ID NO: 2219146 - RNA, 19 nt, Homo sapiens
  misc_RNA (1)...(19): siRNA sense strand
agagagaucaccagguaca

SEQ ID NO: 2219147 - RNA, 19 nt, Homo sapiens
  misc_RNA (1)...(19): siRNA sense strand
agcuaauggccgacaacua

SEQ ID NO: 2219148 - RNA, 19 nt, Homo sapiens
  misc_RNA (1)...(19): siRNA sense strand
gggcagagagaaggaaaca

SEQ ID NO: 2219149 - RNA, 19 nt, Homo sapiens
  misc_RNA (1)...(19): siRNA sense strand
cggaaggauguggaaguaa

SEQ ID NO: 2219150 - RNA, 19 nt, Homo sapiens
  misc_RNA (1)...(19): siRNA sense strand
cuagcaaggcccaggcaga

SEQ ID NO: 2219151 - RNA, 19 nt, Homo sapiens
  misc_RNA (1)...(19): siRNA sense strand
gaaaaugagaagaaugaca

SEQ ID NO: 2219152 - RNA, 19 nt, Homo sapiens
  misc_RNA (1)...(19): siRNA sense strand
agaaggaaaccauguugaa

SEQ ID NO: 2219153 - RNA, 19 nt, Homo sapiens
  misc_RNA (1)...(19): siRNA sense strand
gagagauacaugaccucaa

SEQ ID NO: 2219154 - RNA, 19 nt, Homo sapiens
  misc_RNA (1)...(19): siRNA sense strand
gggaagcaguguuggaggu

SEQ ID NO: 2219155 - RNA, 19 nt, Homo sapiens
  misc_RNA (1)...(19): siRNA sense strand
gcggaagguuaauguucuu

SEQ ID NO: 2219156 - RNA, 19 nt, Homo sapiens
  misc_RNA (1)...(19): siRNA sense strand
uggaugugaaggagcggaa

SEQ ID NO: 2219157 - RNA, 19 nt, Homo sapiens
  misc_RNA (1)...(19): siRNA sense strand
gcacuuggagagagagauc

SEQ ID NO: 2219158 - RNA, 19 nt, Homo sapiens
  misc_RNA (1)...(19): siRNA sense strand
agguggaaaaugagaagaa

SEQ ID NO: 2219159 - RNA, 19 nt, Homo sapiens
  misc_RNA (1)...(19): siRNA sense strand
agaagaagacccaagagga

SEQ ID NO: 2219160 - RNA, 19 nt, Homo sapiens
  misc_RNA (1)...(19): siRNA sense strand
gcuuaagacacuagagauu

SEQ ID NO: 2219161 - RNA, 19 nt, Homo sapiens
  misc_RNA (1)...(19): siRNA sense strand
aagugaaagaccagaauaa

SEQ ID NO: 2219162 - RNA, 19 nt, Homo sapiens
  misc_RNA (1)...(19): siRNA sense strand
gcuuaaaggagcagaggga

SEQ ID NO: 2219163 - RNA, 19 nt, Homo sapiens
  misc_RNA (1)...(19): siRNA sense strand
uggaaguaaaggagagcaa

SEQ ID NO: 2219164 - RNA, 19 nt, Homo sapiens
  misc_RNA (1)...(19): siRNA sense strand
aggaaguucuggagaugaa

SEQ ID NO: 2219165 - RNA, 19 nt, Homo sapiens
  misc_RNA (1)...(19): siRNA sense strand
uggagguggcagugggaaa

SEQ ID NO: 2219166 - RNA, 19 nt, Homo sapiens
  misc_RNA (1)...(19): siRNA sense strand
aaggaaacacuuagaggaa

SEQ ID NO: 2219167 - RNA, 19 nt, Homo sapiens
  misc_RNA (1)...(19): siRNA sense strand
aggaacgagcccugagaaa

SEQ ID NO: 2219168 - RNA, 19 nt, Homo sapiens
  misc_RNA (1)...(19): siRNA sense strand
gcagagaaagagcggacaa

SEQ ID NO: 2219169 - RNA, 19 nt, Homo sapiens
  misc_RNA (1)...(19): siRNA sense strand
gggacagagaugagcgaga

SEQ ID NO: 2219170 - RNA, 19 nt, Homo sapiens
  misc_RNA (1)...(19): siRNA sense strand
acaaggaacagguggaaaa

SEQ ID NO: 2219171 - RNA, 19 nt, Homo sapiens
  misc_RNA (1)...(19): siRNA sense strand
uuaaaggagcagagggaca

SEQ ID NO: 2219172 - RNA, 19 nt, Homo sapiens
  misc_RNA (1)...(19): siRNA sense strand
cagcuuagagacaaggaaa

SEQ ID NO: 2219173 - RNA, 19 nt, Homo sapiens
  misc_RNA (1)...(19): siRNA sense strand
gaaugaagcuaauggccga

SEQ ID NO: 2219174 - RNA, 19 nt, Homo sapiens
  misc_RNA (1)...(19): siRNA sense strand
gcgagagaagcaagaggaa

SEQ ID NO: 2219175 - RNA, 19 nt, Homo sapiens
  misc_RNA (1)...(19): siRNA sense strand
ccgacaacuacgaggauga

SEQ ID NO: 2219176 - RNA, 19 nt, Homo sapiens
  misc_RNA (1)...(19): siRNA sense strand
cgagagaagcaagaggaaa

SEQ ID NO: 2219177 - RNA, 19 nt, Homo sapiens
  misc_RNA (1)...(19): siRNA sense strand
caacaguacgggagggagu

SEQ ID NO: 2219178 - RNA, 19 nt, Homo sapiens
  misc_RNA (1)...(19): siRNA sense strand
aggauauggcugaagagaa

SEQ ID NO: 2219179 - RNA, 19 nt, Homo sapiens
  misc_RNA (1)...(19): siRNA sense strand
gaguuguacaggaggaaaa

SEQ ID NO: 2219180 - RNA, 19 nt, Homo sapiens
  misc_RNA (1)...(19): siRNA sense strand
ucuugaaggagguggaaaa

SEQ ID NO: 2219181 - RNA, 19 nt, Homo sapiens
  misc_RNA (1)...(19): siRNA sense strand
cuagaauccaugaaagcaa

SEQ ID NO: 2219182 - RNA, 19 nt, Homo sapiens
  misc_RNA (1)...(19): siRNA sense strand
uggccauggagaagguaaa

SEQ ID NO: 2219183 - RNA, 19 nt, Homo sapiens
  misc_RNA (1)...(19): siRNA sense strand
aggcagaaguugaucgacu

SEQ ID NO: 2219184 - RNA, 19 nt, Homo sapiens
  misc_RNA (1)...(19): siRNA sense strand
cagaauaagaagguagcaa

SEQ ID NO: 2219185 - RNA, 19 nt, Homo sapiens
  misc_RNA (1)...(19): siRNA sense strand
cguuuggaagagaaggaaa

SEQ ID NO: 2219186 - RNA, 19 nt, Homo sapiens
  misc_RNA (1)...(19): siRNA sense strand
aggaaacucacuugacuaa

SEQ ID NO: 2219187 - RNA, 19 nt, Homo sapiens
  misc_RNA (1)...(19): siRNA sense strand
cuucgucaggcgagagaua

SEQ ID NO: 2219188 - RNA, 19 nt, Homo sapiens
  misc_RNA (1)...(19): siRNA sense strand
agcaagaggaaauugauaa

SEQ ID NO: 2219189 - RNA, 19 nt, Homo sapiens
  misc_RNA (1)...(19): siRNA sense strand
agaagaaggaggagugucu

SEQ ID NO: 2219190 - RNA, 19 nt, Homo sapiens
  misc_RNA (1)...(19): siRNA sense strand
caagagcagcuuagagaca

SEQ ID NO: 2219191 - RNA, 19 nt, Homo sapiens
  misc_RNA (1)...(19): siRNA sense strand
aagcaagaggaaauugaua

SEQ ID NO: 2219192 - RNA, 19 nt, Homo sapiens
  misc_RNA (1)...(19): siRNA sense strand
uggaaaaugagaagaauga

SEQ ID NO: 2219193 - RNA, 19 nt, Homo sapiens
  misc_RNA (1)...(19): siRNA sense strand
cuuaagcagcagacgcaaa

SEQ ID NO: 2219194 - RNA, 19 nt, Homo sapiens
  misc_RNA (1)...(19): siRNA sense strand
cauagcauuuggagagcau

SEQ ID NO: 2219195 - RNA, 19 nt, Homo sapiens
  misc_RNA (1)...(19): siRNA sense strand
augagaagaaugacaaaga

SEQ ID NO: 2219196 - RNA, 19 nt, Homo sapiens
  misc_RNA (1)...(19): siRNA sense strand
uggaagagaaggaaaccau

SEQ ID NO: 2219197 - RNA, 19 nt, Homo sapiens
  misc_RNA (1)...(19): siRNA sense strand
auacaugaccucaaggaca

SEQ ID NO: 2219198 - RNA, 19 nt, Homo sapiens
  misc_RNA (1)...(19): siRNA sense strand
agagagaucaccagguaca

SEQ ID NO: 2219199 - RNA, 19 nt, Homo sapiens
  misc_RNA (1)...(19): siRNA sense strand
agcuaauggccgacaacua

SEQ ID NO: 2219200 - RNA, 19 nt, Homo sapiens
  misc_RNA (1)...(19): siRNA sense strand
gggcagagagaaggaaaca

SEQ ID NO: 2219201 - RNA, 19 nt, Homo sapiens
  misc_RNA (1)...(19): siRNA sense strand
cggaaggauguggaaguaa

SEQ ID NO: 2219202 - RNA, 19 nt, Homo sapiens
  misc_RNA (1)...(19): siRNA sense strand
cuagcaaggcccaggcaga

SEQ ID NO: 2219203 - RNA, 19 nt, Homo sapiens
  misc_RNA (1)...(19): siRNA sense strand
gaaaaugagaagaaugaca

SEQ ID NO: 2219204 - RNA, 19 nt, Homo sapiens
  misc_RNA (1)...(19): siRNA sense strand
agaaggaaaccauguugaa

SEQ ID NO: 2219205 - RNA, 19 nt, Homo sapiens
  misc_RNA (1)...(19): siRNA sense strand
gagagauacaugaccucaa

SEQ ID NO: 2219206 - RNA, 19 nt, Homo sapiens
  misc_RNA (1)...(19): siRNA sense strand
gggaagcaguguuggaggu

SEQ ID NO: 2219207 - RNA, 19 nt, Homo sapiens
  misc_RNA (1)...(19): siRNA sense strand
gcggaagguuaauguucuu

SEQ ID NO: 2219208 - RNA, 19 nt, Homo sapiens
  misc_RNA (1)...(19): siRNA sense strand
uggaugugaaggagcggaa

SEQ ID NO: 2219209 - RNA, 19 nt, Homo sapiens
  misc_RNA (1)...(19): siRNA sense strand
gcacuuggagagagagauc

SEQ ID NO: 2219210 - RNA, 19 nt, Homo sapiens
  misc_RNA (1)...(19): siRNA sense strand
agguggaaaaugagaagaa

SEQ ID NO: 2219211 - RNA, 19 nt, Homo sapiens
  misc_RNA (1)...(19): siRNA sense strand
agaagaagacccaagagga

SEQ ID NO: 2219212 - RNA, 19 nt, Homo sapiens
  misc_RNA (1)...(19): siRNA sense strand
gcuuaagacacuagagauu

SEQ ID NO: 2219213 - RNA, 19 nt, Homo sapiens
  misc_RNA (1)...(19): siRNA sense strand
aagugaaagaccagaauaa

SEQ ID NO: 2219214 - RNA, 19 nt, Homo sapiens
  misc_RNA (1)...(19): siRNA sense strand
gcuuaaaggagcagaggga

SEQ ID NO: 2219215 - RNA, 19 nt, Homo sapiens
  misc_RNA (1)...(19): siRNA sense strand
uggaaguaaaggagagcaa

SEQ ID NO: 2219216 - RNA, 19 nt, Homo sapiens
  misc_RNA (1)...(19): siRNA sense strand
aggaaguucuggagaugaa

SEQ ID NO: 2219217 - RNA, 19 nt, Homo sapiens
  misc_RNA (1)...(19): siRNA sense strand
uggagguggcagugggaaa

SEQ ID NO: 2219218 - RNA, 19 nt, Homo sapiens
  misc_RNA (1)...(19): siRNA sense strand
aaggaaacacuuagaggaa

SEQ ID NO: 2219219 - RNA, 19 nt, Homo sapiens
  misc_RNA (1)...(19): siRNA sense strand
aggaacgagcccugagaaa

SEQ ID NO: 2219220 - RNA, 19 nt, Homo sapiens
  misc_RNA (1)...(19): siRNA sense strand
gcagagaaagagcggacaa

SEQ ID NO: 2219221 - RNA, 19 nt, Homo sapiens
  misc_RNA (1)...(19): siRNA sense strand
gggacagagaugagcgaga

SEQ ID NO: 2219222 - RNA, 19 nt, Homo sapiens
  misc_RNA (1)...(19): siRNA sense strand
acaaggaacagguggaaaa

SEQ ID NO: 2219223 - RNA, 19 nt, Homo sapiens
  misc_RNA (1)...(19): siRNA sense strand
uuaaaggagcagagggaca

SEQ ID NO: 2219224 - RNA, 19 nt, Homo sapiens
  misc_RNA (1)...(19): siRNA sense strand
cagcuuagagacaaggaaa

SEQ ID NO: 2219225 - RNA, 19 nt, Homo sapiens
  misc_RNA (1)...(19): siRNA sense strand
gaaugaagcuaauggccga

SEQ ID NO: 2219226 - RNA, 19 nt, Homo sapiens
  misc_RNA (1)...(19): siRNA sense strand
gcgagagaagcaagaggaa

SEQ ID NO: 2219227 - RNA, 19 nt, Homo sapiens
  misc_RNA (1)...(19): siRNA sense strand
ccgacaacuacgaggauga

SEQ ID NO: 2219228 - RNA, 19 nt, Homo sapiens
  misc_RNA (1)...(19): siRNA sense strand
ucuuagaacuugaccaaaa

SEQ ID NO: 2219229 - RNA, 19 nt, Homo sapiens
  misc_RNA (1)...(19): siRNA sense strand
gggagaaugagcugcagaa

SEQ ID NO: 2219230 - RNA, 19 nt, Homo sapiens
  misc_RNA (1)...(19): siRNA sense strand
cgagagaagcaagaggaaa

SEQ ID NO: 2219231 - RNA, 19 nt, Homo sapiens
  misc_RNA (1)...(19): siRNA sense strand
caacaguacgggagggagu

SEQ ID NO: 2219232 - RNA, 19 nt, Homo sapiens
  misc_RNA (1)...(19): siRNA sense strand
aggauauggcugaagagaa

SEQ ID NO: 2219233 - RNA, 19 nt, Homo sapiens
  misc_RNA (1)...(19): siRNA sense strand
ccucuuagaacuugaccaa

SEQ ID NO: 2219234 - RNA, 19 nt, Homo sapiens
  misc_RNA (1)...(19): siRNA sense strand
gaguuguacaggaggaaaa

SEQ ID NO: 2219235 - RNA, 19 nt, Homo sapiens
  misc_RNA (1)...(19): siRNA sense strand
ucuugaaggagguggaaaa

SEQ ID NO: 2219236 - RNA, 19 nt, Homo sapiens
  misc_RNA (1)...(19): siRNA sense strand
cuagaauccaugaaagcaa

SEQ ID NO: 2219237 - RNA, 19 nt, Homo sapiens
  misc_RNA (1)...(19): siRNA sense strand
uggccauggagaagguaaa

SEQ ID NO: 2219238 - RNA, 19 nt, Homo sapiens
  misc_RNA (1)...(19): siRNA sense strand
ucaggaugaguuagagaaa

SEQ ID NO: 2219239 - RNA, 19 nt, Homo sapiens
  misc_RNA (1)...(19): siRNA sense strand
aggcagaaguugaucgacu

SEQ ID NO: 2219240 - RNA, 19 nt, Homo sapiens
  misc_RNA (1)...(19): siRNA sense strand
cagaauaagaagguagcaa

SEQ ID NO: 2219241 - RNA, 19 nt, Homo sapiens
  misc_RNA (1)...(19): siRNA sense strand
cguuuggaagagaaggaaa

SEQ ID NO: 2219242 - RNA, 19 nt, Homo sapiens
  misc_RNA (1)...(19): siRNA sense strand
aggaaacucacuugacuaa

SEQ ID NO: 2219243 - RNA, 19 nt, Homo sapiens
  misc_RNA (1)...(19): siRNA sense strand
cuucgucaggcgagagaua

SEQ ID NO: 2219244 - RNA, 19 nt, Homo sapiens
  misc_RNA (1)...(19): siRNA sense strand
agcaagaggaaauugauaa

SEQ ID NO: 2219245 - RNA, 19 nt, Homo sapiens
  misc_RNA (1)...(19): siRNA sense strand
agaagaaggaggagugucu

SEQ ID NO: 2219246 - RNA, 19 nt, Homo sapiens
  misc_RNA (1)...(19): siRNA sense strand
gagaaaggugaacgggaca

SEQ ID NO: 2219247 - RNA, 19 nt, Homo sapiens
  misc_RNA (1)...(19): siRNA sense strand
caagagcagcuuagagaca

SEQ ID NO: 2219248 - RNA, 19 nt, Homo sapiens
  misc_RNA (1)...(19): siRNA sense strand
aagcaagaggaaauugaua

SEQ ID NO: 2219249 - RNA, 19 nt, Homo sapiens
  misc_RNA (1)...(19): siRNA sense strand
uggaaaaugagaagaauga

SEQ ID NO: 2219250 - RNA, 19 nt, Homo sapiens
  misc_RNA (1)...(19): siRNA sense strand
cuuaagcagcagacgcaaa

SEQ ID NO: 2219251 - RNA, 19 nt, Homo sapiens
  misc_RNA (1)...(19): siRNA sense strand
cauagcauuuggagagcau

SEQ ID NO: 2219252 - RNA, 19 nt, Homo sapiens
  misc_RNA (1)...(19): siRNA sense strand
augagaagaaugacaaaga

SEQ ID NO: 2219253 - RNA, 19 nt, Homo sapiens
  misc_RNA (1)...(19): siRNA sense strand
uggaagagaaggaaaccau

SEQ ID NO: 2219254 - RNA, 19 nt, Homo sapiens
  misc_RNA (1)...(19): siRNA sense strand
auacaugaccucaaggaca

SEQ ID NO: 2219255 - RNA, 19 nt, Homo sapiens
  misc_RNA (1)...(19): siRNA sense strand
agagagaucaccagguaca

SEQ ID NO: 2219256 - RNA, 19 nt, Homo sapiens
  misc_RNA (1)...(19): siRNA sense strand
agcuaauggccgacaacua

SEQ ID NO: 2219257 - RNA, 19 nt, Homo sapiens
  misc_RNA (1)...(19): siRNA sense strand
gggcagagagaaggaaaca

SEQ ID NO: 2219258 - RNA, 19 nt, Homo sapiens
  misc_RNA (1)...(19): siRNA sense strand
uccuagagcaaguggucaa

SEQ ID NO: 2219259 - RNA, 19 nt, Homo sapiens
  misc_RNA (1)...(19): siRNA sense strand
cggaaggauguggaaguaa

SEQ ID NO: 2219260 - RNA, 19 nt, Homo sapiens
  misc_RNA (1)...(19): siRNA sense strand
cuagcaaggcccaggcaga

SEQ ID NO: 2219261 - RNA, 19 nt, Homo sapiens
  misc_RNA (1)...(19): siRNA sense strand
gaaaaugagaagaaugaca

SEQ ID NO: 2219262 - RNA, 19 nt, Homo sapiens
  misc_RNA (1)...(19): siRNA sense strand
agaaggaaaccauguugaa

SEQ ID NO: 2219263 - RNA, 19 nt, Homo sapiens
  misc_RNA (1)...(19): siRNA sense strand
gagagauacaugaccucaa

SEQ ID NO: 2219264 - RNA, 19 nt, Homo sapiens
  misc_RNA (1)...(19): siRNA sense strand
gggaagcaguguuggaggu

SEQ ID NO: 2219265 - RNA, 19 nt, Homo sapiens
  misc_RNA (1)...(19): siRNA sense strand
ccgacauccuagagcaagu

SEQ ID NO: 2219266 - RNA, 19 nt, Homo sapiens
  misc_RNA (1)...(19): siRNA sense strand
gcggaagguuaauguucuu

SEQ ID NO: 2219267 - RNA, 19 nt, Homo sapiens
  misc_RNA (1)...(19): siRNA sense strand
gcuuaagacacuagagauu

SEQ ID NO: 2219268 - RNA, 19 nt, Homo sapiens
  misc_RNA (1)...(19): siRNA sense strand
aagugaaagaccagaauaa

SEQ ID NO: 2219269 - RNA, 19 nt, Homo sapiens
  misc_RNA (1)...(19): siRNA sense strand
gcuuaaaggagcagaggga

SEQ ID NO: 2219270 - RNA, 19 nt, Homo sapiens
  misc_RNA (1)...(19): siRNA sense strand
uggaaguaaaggagagcaa

SEQ ID NO: 2219271 - RNA, 19 nt, Homo sapiens
  misc_RNA (1)...(19): siRNA sense strand
aggaaguucuggagaugaa

SEQ ID NO: 2219272 - RNA, 19 nt, Homo sapiens
  misc_RNA (1)...(19): siRNA sense strand
uggagguggcagugggaaa

SEQ ID NO: 2219273 - RNA, 19 nt, Homo sapiens
  misc_RNA (1)...(19): siRNA sense strand
aaggaaacacuuagaggaa

SEQ ID NO: 2219274 - RNA, 19 nt, Homo sapiens
  misc_RNA (1)...(19): siRNA sense strand
aggaacgagcccugagaaa

SEQ ID NO: 2219275 - RNA, 19 nt, Homo sapiens
  misc_RNA (1)...(19): siRNA sense strand
gcagagaaagagcggacaa

SEQ ID NO: 2219276 - RNA, 19 nt, Homo sapiens
  misc_RNA (1)...(19): siRNA sense strand
gggacagagaugagcgaga

SEQ ID NO: 2219277 - RNA, 19 nt, Homo sapiens
  misc_RNA (1)...(19): siRNA sense strand
acaaggaacagguggaaaa

SEQ ID NO: 2219278 - RNA, 19 nt, Homo sapiens
  misc_RNA (1)...(19): siRNA sense strand
uuaaaggagcagagggaca

SEQ ID NO: 2219279 - RNA, 19 nt, Homo sapiens
  misc_RNA (1)...(19): siRNA sense strand
cagcuuagagacaaggaaa

SEQ ID NO: 2219280 - RNA, 19 nt, Homo sapiens
  misc_RNA (1)...(19): siRNA sense strand
gaaugaagcuaauggccga

SEQ ID NO: 2219281 - RNA, 19 nt, Homo sapiens
  misc_RNA (1)...(19): siRNA sense strand
gcgagagaagcaagaggaa

SEQ ID NO: 2219282 - RNA, 19 nt, Homo sapiens
  misc_RNA (1)...(19): siRNA sense strand
ccgacaacuacgaggauga

SEQ ID NO: 2219283 - RNA, 19 nt, Homo sapiens
  misc_RNA (1)...(19): siRNA sense strand
ucuuagaacuugaccaaaa

SEQ ID NO: 2219284 - RNA, 19 nt, Homo sapiens
  misc_RNA (1)...(19): siRNA sense strand
gggagaaugagcugcagaa

SEQ ID NO: 2219285 - RNA, 19 nt, Homo sapiens
  misc_RNA (1)...(19): siRNA sense strand
cgagagaagcaagaggaaa

SEQ ID NO: 2219286 - RNA, 19 nt, Homo sapiens
  misc_RNA (1)...(19): siRNA sense strand
caacaguacgggagggagu

SEQ ID NO: 2219287 - RNA, 19 nt, Homo sapiens
  misc_RNA (1)...(19): siRNA sense strand
aggauauggcugaagagaa

SEQ ID NO: 2219288 - RNA, 19 nt, Homo sapiens
  misc_RNA (1)...(19): siRNA sense strand
ccucuuagaacuugaccaa

SEQ ID NO: 2219289 - RNA, 19 nt, Homo sapiens
  misc_RNA (1)...(19): siRNA sense strand
gaguuguacaggaggaaaa

SEQ ID NO: 2219290 - RNA, 19 nt, Homo sapiens
  misc_RNA (1)...(19): siRNA sense strand
ucuugaaggagguggaaaa

SEQ ID NO: 2219291 - RNA, 19 nt, Homo sapiens
  misc_RNA (1)...(19): siRNA sense strand
cuagaauccaugaaagcaa

SEQ ID NO: 2219292 - RNA, 19 nt, Homo sapiens
  misc_RNA (1)...(19): siRNA sense strand
uggccauggagaagguaaa

SEQ ID NO: 2219293 - RNA, 19 nt, Homo sapiens
  misc_RNA (1)...(19): siRNA sense strand
ucaggaugaguuagagaaa

SEQ ID NO: 2219294 - RNA, 19 nt, Homo sapiens
  misc_RNA (1)...(19): siRNA sense strand
aggcagaaguugaucgacu

SEQ ID NO: 2219295 - RNA, 19 nt, Homo sapiens
  misc_RNA (1)...(19): siRNA sense strand
cagaauaagaagguagcaa

SEQ ID NO: 2219296 - RNA, 19 nt, Homo sapiens
  misc_RNA (1)...(19): siRNA sense strand
cguuuggaagagaaggaaa

SEQ ID NO: 2219297 - RNA, 19 nt, Homo sapiens
  misc_RNA (1)...(19): siRNA sense strand
aggaaacucacuugacuaa

SEQ ID NO: 2219298 - RNA, 19 nt, Homo sapiens
  misc_RNA (1)...(19): siRNA sense strand
cuucgucaggcgagagaua

SEQ ID NO: 2219299 - RNA, 19 nt, Homo sapiens
  misc_RNA (1)...(19): siRNA sense strand
agcaagaggaaauugauaa

SEQ ID NO: 2219300 - RNA, 19 nt, Homo sapiens
  misc_RNA (1)...(19): siRNA sense strand
agaagaaggaggagugucu

SEQ ID NO: 2219301 - RNA, 19 nt, Homo sapiens
  misc_RNA (1)...(19): siRNA sense strand
gagaaaggugaacgggaca

SEQ ID NO: 2219302 - RNA, 19 nt, Homo sapiens
  misc_RNA (1)...(19): siRNA sense strand
caagagcagcuuagagaca

SEQ ID NO: 2219303 - RNA, 19 nt, Homo sapiens
  misc_RNA (1)...(19): siRNA sense strand
aagcaagaggaaauugaua

SEQ ID NO: 2219304 - RNA, 19 nt, Homo sapiens
  misc_RNA (1)...(19): siRNA sense strand
uggaaaaugagaagaauga

SEQ ID NO: 2219305 - RNA, 19 nt, Homo sapiens
  misc_RNA (1)...(19): siRNA sense strand
cuuaagcagcagacgcaaa

SEQ ID NO: 2219306 - RNA, 19 nt, Homo sapiens
  misc_RNA (1)...(19): siRNA sense strand
cauagcauuuggagagcau

SEQ ID NO: 2219307 - RNA, 19 nt, Homo sapiens
  misc_RNA (1)...(19): siRNA sense strand
augagaagaaugacaaaga

SEQ ID NO: 2219308 - RNA, 19 nt, Homo sapiens
  misc_RNA (1)...(19): siRNA sense strand
uggaagagaaggaaaccau

SEQ ID NO: 2219309 - RNA, 19 nt, Homo sapiens
  misc_RNA (1)...(19): siRNA sense strand
auacaugaccucaaggaca

SEQ ID NO: 2219310 - RNA, 19 nt, Homo sapiens
  misc_RNA (1)...(19): siRNA sense strand
agagagaucaccagguaca

SEQ ID NO: 2219311 - RNA, 19 nt, Homo sapiens
  misc_RNA (1)...(19): siRNA sense strand
agcuaauggccgacaacua

SEQ ID NO: 2219312 - RNA, 19 nt, Homo sapiens
  misc_RNA (1)...(19): siRNA sense strand
gggcagagagaaggaaaca

SEQ ID NO: 2219313 - RNA, 19 nt, Homo sapiens
  misc_RNA (1)...(19): siRNA sense strand
uccuagagcaaguggucaa

SEQ ID NO: 2219314 - RNA, 19 nt, Homo sapiens
  misc_RNA (1)...(19): siRNA sense strand
cggaaggauguggaaguaa

SEQ ID NO: 2219315 - RNA, 19 nt, Homo sapiens
  misc_RNA (1)...(19): siRNA sense strand
cuagcaaggcccaggcaga

SEQ ID NO: 2219316 - RNA, 19 nt, Homo sapiens
  misc_RNA (1)...(19): siRNA sense strand
gaaaaugagaagaaugaca

SEQ ID NO: 2219317 - RNA, 19 nt, Homo sapiens
  misc_RNA (1)...(19): siRNA sense strand
agaaggaaaccauguugaa

SEQ ID NO: 2219318 - RNA, 19 nt, Homo sapiens
  misc_RNA (1)...(19): siRNA sense strand
gagagauacaugaccucaa

SEQ ID NO: 2219319 - RNA, 19 nt, Homo sapiens
  misc_RNA (1)...(19): siRNA sense strand
gggaagcaguguuggaggu

SEQ ID NO: 2219320 - RNA, 19 nt, Homo sapiens
  misc_RNA (1)...(19): siRNA sense strand
ccgacauccuagagcaagu

SEQ ID NO: 2219321 - RNA, 19 nt, Homo sapiens
  misc_RNA (1)...(19): siRNA sense strand
gcggaagguuaauguucuu

SEQ ID NO: 2219322 - RNA, 19 nt, Homo sapiens
  misc_RNA (1)...(19): siRNA sense strand
gggaugaagaugaagacau

SEQ ID NO: 2219323 - RNA, 19 nt, Homo sapiens
  misc_RNA (1)...(19): siRNA sense strand
agaaacagggcgaggacuu

SEQ ID NO: 2219324 - RNA, 19 nt, Homo sapiens
  misc_RNA (1)...(19): siRNA sense strand
gcgcuaagaaacagggcga

SEQ ID NO: 2219325 - RNA, 19 nt, Homo sapiens
  misc_RNA (1)...(19): siRNA sense strand
uggacaaucuguauggcua

SEQ ID NO: 2219326 - RNA, 19 nt, Homo sapiens
  misc_RNA (1)...(19): siRNA sense strand
ggcaagaccuggagcacca

SEQ ID NO: 2219327 - RNA, 19 nt, Homo sapiens
  misc_RNA (1)...(19): siRNA sense strand
ccaaggagcugguagagca

SEQ ID NO: 2219328 - RNA, 19 nt, Homo sapiens
  misc_RNA (1)...(19): siRNA sense strand
auggcuauccugaggguaa

SEQ ID NO: 2219329 - RNA, 19 nt, Homo sapiens
  misc_RNA (1)...(19): siRNA sense strand
cuaucggguuggagugcua

SEQ ID NO: 2219330 - RNA, 19 nt, Homo sapiens
  misc_RNA (1)...(19): siRNA sense strand
gugccaaggagcugguaga

SEQ ID NO: 2219331 - RNA, 19 nt, Homo sapiens
  misc_RNA (1)...(19): siRNA sense strand
gggcgaggacuuagcggau

SEQ ID NO: 2219332 - RNA, 19 nt, Homo sapiens
  misc_RNA (1)...(19): siRNA sense strand
acuaccaaccagugaagua

SEQ ID NO: 2219333 - RNA, 19 nt, Homo sapiens
  misc_RNA (1)...(19): siRNA sense strand
ucuacuaccguaaggacaa

SEQ ID NO: 2219334 - RNA, 19 nt, Homo sapiens
  misc_RNA (1)...(19): siRNA sense strand
guaaggacacccugcgaga

SEQ ID NO: 2219335 - RNA, 19 nt, Homo sapiens
  misc_RNA (1)...(19): siRNA sense strand
gcugggugagcgagaauau

SEQ ID NO: 2219336 - RNA, 19 nt, Homo sapiens
  misc_RNA (1)...(19): siRNA sense strand
aggacuuagcggauaauga

SEQ ID NO: 2219337 - RNA, 19 nt, Homo sapiens
  misc_RNA (1)...(19): siRNA sense strand
gugcuagaccaaagagaaa

SEQ ID NO: 2219338 - RNA, 19 nt, Homo sapiens
  misc_RNA (1)...(19): siRNA sense strand
gugaaggagcuaagagaca

SEQ ID NO: 2219339 - RNA, 19 nt, Homo sapiens
  misc_RNA (1)...(19): siRNA sense strand
gccagaacuccuugagaaa

SEQ ID NO: 2219340 - RNA, 19 nt, Homo sapiens
  misc_RNA (1)...(19): siRNA sense strand
agucaugaauacaggauca

SEQ ID NO: 2219341 - RNA, 19 nt, Homo sapiens
  misc_RNA (1)...(19): siRNA sense strand
uuauauaagcacacagcaa

SEQ ID NO: 2219342 - RNA, 19 nt, Homo sapiens
  misc_RNA (1)...(19): siRNA sense strand
ugauggaaggagugaagaa

SEQ ID NO: 2219343 - RNA, 19 nt, Homo sapiens
  misc_RNA (1)...(19): siRNA sense strand
agacaagaaacuucgagaa

SEQ ID NO: 2219344 - RNA, 19 nt, Homo sapiens
  misc_RNA (1)...(19): siRNA sense strand
ccacuaaaccaaugggucu

SEQ ID NO: 2219345 - RNA, 19 nt, Homo sapiens
  misc_RNA (1)...(19): siRNA sense strand
acuggaagauauugcaaau

SEQ ID NO: 2219346 - RNA, 19 nt, Homo sapiens
  misc_RNA (1)...(19): siRNA sense strand
cagcagaaaugguagcagu

SEQ ID NO: 2219347 - RNA, 19 nt, Homo sapiens
  misc_RNA (1)...(19): siRNA sense strand
gagcuaagagacaugggaa

SEQ ID NO: 2219348 - RNA, 19 nt, Homo sapiens
  misc_RNA (1)...(19): siRNA sense strand
agugaaacuagacaagaaa

SEQ ID NO: 2219349 - RNA, 19 nt, Homo sapiens
  misc_RNA (1)...(19): siRNA sense strand
cacaggaagaugaggucaa

SEQ ID NO: 2219350 - RNA, 19 nt, Homo sapiens
  misc_RNA (1)...(19): siRNA sense strand
aggaacuccagaagauaaa

SEQ ID NO: 2219351 - RNA, 19 nt, Homo sapiens
  misc_RNA (1)...(19): siRNA sense strand
uguaaugccaacugaagaa

SEQ ID NO: 2219352 - RNA, 19 nt, Homo sapiens
  misc_RNA (1)...(19): siRNA sense strand
ggguuaauuuggaagaauc

SEQ ID NO: 2219353 - RNA, 19 nt, Homo sapiens
  misc_RNA (1)...(19): siRNA sense strand
agcuaagagacaugggaau

SEQ ID NO: 2219354 - RNA, 19 nt, Homo sapiens
  misc_RNA (1)...(19): siRNA sense strand
aagaggaacagcagcagaa

SEQ ID NO: 2219355 - RNA, 19 nt, Homo sapiens
  misc_RNA (1)...(19): siRNA sense strand
cuuacagagcacaggaaga

SEQ ID NO: 2219356 - RNA, 19 nt, Homo sapiens
  misc_RNA (1)...(19): siRNA sense strand
gcagccaguauucgggaaa

SEQ ID NO: 2219357 - RNA, 19 nt, Homo sapiens
  misc_RNA (1)...(19): siRNA sense strand
cuaagagaugcaagaaaca

SEQ ID NO: 2219358 - RNA, 19 nt, Homo sapiens
  misc_RNA (1)...(19): siRNA sense strand
ccaggaucuucgaaaucaa

SEQ ID NO: 2219359 - RNA, 19 nt, Homo sapiens
  misc_RNA (1)...(19): siRNA sense strand
caagaaguaaacuggaaga

SEQ ID NO: 2219360 - RNA, 19 nt, Homo sapiens
  misc_RNA (1)...(19): siRNA sense strand
ccuauaaucagauguucaa

SEQ ID NO: 2219361 - RNA, 19 nt, Homo sapiens
  misc_RNA (1)...(19): siRNA sense strand
aaguaugcuuucugacaau

SEQ ID NO: 2219362 - RNA, 19 nt, Homo sapiens
  misc_RNA (1)...(19): siRNA sense strand
cugugaaggagcuaagaga

SEQ ID NO: 2219363 - RNA, 19 nt, Homo sapiens
  misc_RNA (1)...(19): siRNA sense strand
uggaaggagugaagaaccu

SEQ ID NO: 2219364 - RNA, 19 nt, Homo sapiens
  misc_RNA (1)...(19): siRNA sense strand
aggcaacuacauugaauau

SEQ ID NO: 2219365 - RNA, 19 nt, Homo sapiens
  misc_RNA (1)...(19): siRNA sense strand
ccuuauuaguccuuguuga

SEQ ID NO: 2219366 - RNA, 19 nt, Homo sapiens
  misc_RNA (1)...(19): siRNA sense strand
augaaggagccauaaguau

SEQ ID NO: 2219367 - RNA, 19 nt, Homo sapiens
  misc_RNA (1)...(19): siRNA sense strand
caguaacacaaguagccaa

SEQ ID NO: 2219368 - RNA, 19 nt, Homo sapiens
  misc_RNA (1)...(19): siRNA sense strand
acggaaauggaaacuguua

SEQ ID NO: 2219369 - RNA, 19 nt, Homo sapiens
  misc_RNA (1)...(19): siRNA sense strand
cggaaauggaaacuguuau

SEQ ID NO: 2219370 - RNA, 19 nt, Homo sapiens
  misc_RNA (1)...(19): siRNA sense strand
aaucagauguucaagagga

SEQ ID NO: 2219371 - RNA, 19 nt, Homo sapiens
  misc_RNA (1)...(19): siRNA sense strand
aucagauguucaagaggaa

SEQ ID NO: 2219372 - RNA, 19 nt, Homo sapiens
  misc_RNA (1)...(19): siRNA sense strand
gaggaacagcagcagaaau

SEQ ID NO: 2219373 - RNA, 19 nt, Homo sapiens
  misc_RNA (1)...(19): siRNA sense strand
cugauuuggagcaauauaa

SEQ ID NO: 2219374 - RNA, 19 nt, Homo sapiens
  misc_RNA (1)...(19): siRNA sense strand
acagacacggaaauggaaa

SEQ ID NO: 2219375 - RNA, 19 nt, Homo sapiens
  misc_RNA (1)...(19): siRNA sense strand
aaacauaaaggaaguccau

SEQ ID NO: 2219376 - RNA, 19 nt, Homo sapiens
  misc_RNA (1)...(19): siRNA sense strand
gaagauaaaaugagguugu

SEQ ID NO: 2219377 - RNA, 19 nt, Homo sapiens
  misc_RNA (1)...(19): siRNA sense strand
aggaacagcagcagaaaug

SEQ ID NO: 2219378 - RNA, 19 nt, Homo sapiens
  misc_RNA (1)...(19): siRNA sense strand
ccauacaaauguugccacu

SEQ ID NO: 2219379 - RNA, 19 nt, Homo sapiens
  misc_RNA (1)...(19): siRNA sense strand
acacaaguagccaagguuu

SEQ ID NO: 2219380 - RNA, 19 nt, Homo sapiens
  misc_RNA (1)...(19): siRNA sense strand
caaaacuacucuggauaaa

SEQ ID NO: 2219381 - RNA, 19 nt, Homo sapiens
  misc_RNA (1)...(19): siRNA sense strand
cuuauggagaugaagucaa

SEQ ID NO: 2219382 - RNA, 19 nt, Homo sapiens
  misc_RNA (1)...(19): siRNA sense strand
gugcuagaccaaagagaaa

SEQ ID NO: 2219383 - RNA, 19 nt, Homo sapiens
  misc_RNA (1)...(19): siRNA sense strand
gccagaacuccuugagaaa

SEQ ID NO: 2219384 - RNA, 19 nt, Homo sapiens
  misc_RNA (1)...(19): siRNA sense strand
agucaugaauacaggauca

SEQ ID NO: 2219385 - RNA, 19 nt, Homo sapiens
  misc_RNA (1)...(19): siRNA sense strand
uuauauaagcacacagcaa

SEQ ID NO: 2219386 - RNA, 19 nt, Homo sapiens
  misc_RNA (1)...(19): siRNA sense strand
ugauggaaggagugaagaa

SEQ ID NO: 2219387 - RNA, 19 nt, Homo sapiens
  misc_RNA (1)...(19): siRNA sense strand
agacaagaaacuucgagaa

SEQ ID NO: 2219388 - RNA, 19 nt, Homo sapiens
  misc_RNA (1)...(19): siRNA sense strand
ccacuaaaccaaugggucu

SEQ ID NO: 2219389 - RNA, 19 nt, Homo sapiens
  misc_RNA (1)...(19): siRNA sense strand
acuggaagauauugcaaau

SEQ ID NO: 2219390 - RNA, 19 nt, Homo sapiens
  misc_RNA (1)...(19): siRNA sense strand
cagcagaaaugguagcagu

SEQ ID NO: 2219391 - RNA, 19 nt, Homo sapiens
  misc_RNA (1)...(19): siRNA sense strand
agugaaacuagacaagaaa

SEQ ID NO: 2219392 - RNA, 19 nt, Homo sapiens
  misc_RNA (1)...(19): siRNA sense strand
cacaggaagaugaggucaa

SEQ ID NO: 2219393 - RNA, 19 nt, Homo sapiens
  misc_RNA (1)...(19): siRNA sense strand
aggaacuccagaagauaaa

SEQ ID NO: 2219394 - RNA, 19 nt, Homo sapiens
  misc_RNA (1)...(19): siRNA sense strand
uguaaugccaacugaagaa

SEQ ID NO: 2219395 - RNA, 19 nt, Homo sapiens
  misc_RNA (1)...(19): siRNA sense strand
ggguuaauuuggaagaauc

SEQ ID NO: 2219396 - RNA, 19 nt, Homo sapiens
  misc_RNA (1)...(19): siRNA sense strand
aagaggaacagcagcagaa

SEQ ID NO: 2219397 - RNA, 19 nt, Homo sapiens
  misc_RNA (1)...(19): siRNA sense strand
cuuacagagcacaggaaga

SEQ ID NO: 2219398 - RNA, 19 nt, Homo sapiens
  misc_RNA (1)...(19): siRNA sense strand
cuaagagaugcaagaaaca

SEQ ID NO: 2219399 - RNA, 19 nt, Homo sapiens
  misc_RNA (1)...(19): siRNA sense strand
ccaggaucuucgaaaucaa

SEQ ID NO: 2219400 - RNA, 19 nt, Homo sapiens
  misc_RNA (1)...(19): siRNA sense strand
caagaaguaaacuggaaga

SEQ ID NO: 2219401 - RNA, 19 nt, Homo sapiens
  misc_RNA (1)...(19): siRNA sense strand
ccuauaaucagauguucaa

SEQ ID NO: 2219402 - RNA, 19 nt, Homo sapiens
  misc_RNA (1)...(19): siRNA sense strand
aaguaugcuuucugacaau

SEQ ID NO: 2219403 - RNA, 19 nt, Homo sapiens
  misc_RNA (1)...(19): siRNA sense strand
uggaaggagugaagaaccu

SEQ ID NO: 2219404 - RNA, 19 nt, Homo sapiens
  misc_RNA (1)...(19): siRNA sense strand
aggcaacuacauugaauau

SEQ ID NO: 2219405 - RNA, 19 nt, Homo sapiens
  misc_RNA (1)...(19): siRNA sense strand
ccuuauuaguccuuguuga

SEQ ID NO: 2219406 - RNA, 19 nt, Homo sapiens
  misc_RNA (1)...(19): siRNA sense strand
augaaggagccauaaguau

SEQ ID NO: 2219407 - RNA, 19 nt, Homo sapiens
  misc_RNA (1)...(19): siRNA sense strand
caguaacacaaguagccaa

SEQ ID NO: 2219408 - RNA, 19 nt, Homo sapiens
  misc_RNA (1)...(19): siRNA sense strand
acggaaauggaaacuguua

SEQ ID NO: 2219409 - RNA, 19 nt, Homo sapiens
  misc_RNA (1)...(19): siRNA sense strand
cggaaauggaaacuguuau

SEQ ID NO: 2219410 - RNA, 19 nt, Homo sapiens
  misc_RNA (1)...(19): siRNA sense strand
aaucagauguucaagagga

SEQ ID NO: 2219411 - RNA, 19 nt, Homo sapiens
  misc_RNA (1)...(19): siRNA sense strand
aucagauguucaagaggaa

SEQ ID NO: 2219412 - RNA, 19 nt, Homo sapiens
  misc_RNA (1)...(19): siRNA sense strand
gaggaacagcagcagaaau

SEQ ID NO: 2219413 - RNA, 19 nt, Homo sapiens
  misc_RNA (1)...(19): siRNA sense strand
cugauuuggagcaauauaa

SEQ ID NO: 2219414 - RNA, 19 nt, Homo sapiens
  misc_RNA (1)...(19): siRNA sense strand
acagacacggaaauggaaa

SEQ ID NO: 2219415 - RNA, 19 nt, Homo sapiens
  misc_RNA (1)...(19): siRNA sense strand
aaacauaaaggaaguccau

SEQ ID NO: 2219416 - RNA, 19 nt, Homo sapiens
  misc_RNA (1)...(19): siRNA sense strand
gaagauaaaaugagguugu

SEQ ID NO: 2219417 - RNA, 19 nt, Homo sapiens
  misc_RNA (1)...(19): siRNA sense strand
aggaacagcagcagaaaug

SEQ ID NO: 2219418 - RNA, 19 nt, Homo sapiens
  misc_RNA (1)...(19): siRNA sense strand
ccauacaaauguugccacu

SEQ ID NO: 2219419 - RNA, 19 nt, Homo sapiens
  misc_RNA (1)...(19): siRNA sense strand
acacaaguagccaagguuu

SEQ ID NO: 2219420 - RNA, 19 nt, Homo sapiens
  misc_RNA (1)...(19): siRNA sense strand
caaaacuacucuggauaaa

SEQ ID NO: 2219421 - RNA, 19 nt, Homo sapiens
  misc_RNA (1)...(19): siRNA sense strand
cuuauggagaugaagucaa

SEQ ID NO: 2219422 - RNA, 19 nt, Homo sapiens
  misc_RNA (1)...(19): siRNA sense strand
gggaaagcugggaggagaa

SEQ ID NO: 2219423 - RNA, 19 nt, Homo sapiens
  misc_RNA (1)...(19): siRNA sense strand
gcuccaagucuauggcaaa

SEQ ID NO: 2219424 - RNA, 19 nt, Homo sapiens
  misc_RNA (1)...(19): siRNA sense strand
aagguaaaucccagagaua

SEQ ID NO: 2219425 - RNA, 19 nt, Homo sapiens
  misc_RNA (1)...(19): siRNA sense strand
caagcauggaggaggauua

SEQ ID NO: 2219426 - RNA, 19 nt, Homo sapiens
  misc_RNA (1)...(19): siRNA sense strand
guuaaauauuggaggaaag

SEQ ID NO: 2219427 - RNA, 19 nt, Homo sapiens
  misc_RNA (1)...(19): siRNA sense strand
gaaucaaagucgagggccu

SEQ ID NO: 2219428 - RNA, 19 nt, Homo sapiens
  misc_RNA (1)...(19): siRNA sense strand
aagcaaugggccagauuua

SEQ ID NO: 2219429 - RNA, 19 nt, Homo sapiens
  misc_RNA (1)...(19): siRNA sense strand
aaauaaagagggacagaca

SEQ ID NO: 2219430 - RNA, 19 nt, Homo sapiens
  misc_RNA (1)...(19): siRNA sense strand
ugguaaaaguugaaaguca

SEQ ID NO: 2219431 - RNA, 19 nt, Homo sapiens
  misc_RNA (1)...(19): siRNA sense strand
aaguguaaccucugguaaa

SEQ ID NO: 2219432 - RNA, 19 nt, Homo sapiens
  misc_RNA (1)...(19): siRNA sense strand
aggcaaaggagaagucaga

SEQ ID NO: 2219433 - RNA, 19 nt, Homo sapiens
  misc_RNA (1)...(19): siRNA sense strand
gcucuuugugucugggaaa

SEQ ID NO: 2219434 - RNA, 19 nt, Homo sapiens
  misc_RNA (1)...(19): siRNA sense strand
auaaagagggacagacauu

SEQ ID NO: 2219435 - RNA, 19 nt, Homo sapiens
  misc_RNA (1)...(19): siRNA sense strand
gguaaaucccagagauaac

SEQ ID NO: 2219436 - RNA, 19 nt, Homo sapiens
  misc_RNA (1)...(19): siRNA sense strand
caugaaagagaccgacaaa

SEQ ID NO: 2219437 - RNA, 19 nt, Homo sapiens
  misc_RNA (1)...(19): siRNA sense strand
ccguagaccauguguuaau

SEQ ID NO: 2219438 - RNA, 19 nt, Homo sapiens
  misc_RNA (1)...(19): siRNA sense strand
acguguuggugacggguaa

SEQ ID NO: 2219439 - RNA, 19 nt, Homo sapiens
  misc_RNA (1)...(19): siRNA sense strand
cccaguuauugaagguaaa

SEQ ID NO: 2219440 - RNA, 19 nt, Homo sapiens
  misc_RNA (1)...(19): siRNA sense strand
gcuuggagcaggaguucua

SEQ ID NO: 2219441 - RNA, 19 nt, Homo sapiens
  misc_RNA (1)...(19): siRNA sense strand
ggguaagaagagugaggca

SEQ ID NO: 2219442 - RNA, 19 nt, Homo sapiens
  misc_RNA (1)...(19): siRNA sense strand
aucacuuagucaagagaaa

SEQ ID NO: 2219443 - RNA, 19 nt, Homo sapiens
  misc_RNA (1)...(19): siRNA sense strand
ggacaggaggccauggaca

SEQ ID NO: 2219444 - RNA, 19 nt, Homo sapiens
  misc_RNA (1)...(19): siRNA sense strand
gggcaggccaggaacagaa

SEQ ID NO: 2219445 - RNA, 19 nt, Homo sapiens
  misc_RNA (1)...(19): siRNA sense strand
gcagggacucagagguauu

SEQ ID NO: 2219446 - RNA, 19 nt, Homo sapiens
  misc_RNA (1)...(19): siRNA sense strand
aaauauuggaggaaagcau

SEQ ID NO: 2219447 - RNA, 19 nt, Homo sapiens
  misc_RNA (1)...(19): siRNA sense strand
gcaugaaagagaccgacaa

SEQ ID NO: 2219448 - RNA, 19 nt, Homo sapiens
  misc_RNA (1)...(19): siRNA sense strand
cgaacaacccaaaacgaaa

SEQ ID NO: 2219449 - RNA, 19 nt, Homo sapiens
  misc_RNA (1)...(19): siRNA sense strand
caguugaaaaugagagaau

SEQ ID NO: 2219450 - RNA, 19 nt, Homo sapiens
  misc_RNA (1)...(19): siRNA sense strand
cgaaaagugaagaaggaga

SEQ ID NO: 2219451 - RNA, 19 nt, Homo sapiens
  misc_RNA (1)...(19): siRNA sense strand
caaaauaauuccauggcga

SEQ ID NO: 2219452 - RNA, 19 nt, Homo sapiens
  misc_RNA (1)...(19): siRNA sense strand
ugggaaagcugggaggaga

SEQ ID NO: 2219453 - RNA, 19 nt, Homo sapiens
  misc_RNA (1)...(19): siRNA sense strand
acccaguuauugaagguaa

SEQ ID NO: 2219454 - RNA, 19 nt, Homo sapiens
  misc_RNA (1)...(19): siRNA sense strand
gcaucagggauaugggcau

SEQ ID NO: 2219455 - RNA, 19 nt, Homo sapiens
  misc_RNA (1)...(19): siRNA sense strand
gaccaagcauggaggagga

SEQ ID NO: 2219456 - RNA, 19 nt, Homo sapiens
  misc_RNA (1)...(19): siRNA sense strand
cugagcaacaagaaugaaa

SEQ ID NO: 2219457 - RNA, 19 nt, Homo sapiens
  misc_RNA (1)...(19): siRNA sense strand
ugagauuaguaaacaccaa

SEQ ID NO: 2219458 - RNA, 19 nt, Homo sapiens
  misc_RNA (1)...(19): siRNA sense strand
ucucaguccuggagggcca

SEQ ID NO: 2219459 - RNA, 19 nt, Homo sapiens
  misc_RNA (1)...(19): siRNA sense strand
ccugcauggucaagagcuu

SEQ ID NO: 2219460 - RNA, 19 nt, Homo sapiens
  misc_RNA (1)...(19): siRNA sense strand
ccucgaggguccugaucau

SEQ ID NO: 2219461 - RNA, 19 nt, Homo sapiens
  misc_RNA (1)...(19): siRNA sense strand
gaagaaaucagcaaggcca

SEQ ID NO: 2219462 - RNA, 19 nt, Homo sapiens
  misc_RNA (1)...(19): siRNA sense strand
ggauaugggcauggaggau

SEQ ID NO: 2219463 - RNA, 19 nt, Homo sapiens
  misc_RNA (1)...(19): siRNA sense strand
ugaaaugagccguagacca

SEQ ID NO: 2219464 - RNA, 19 nt, Homo sapiens
  misc_RNA (1)...(19): siRNA sense strand
agaggaagcaugagaugga

SEQ ID NO: 2219465 - RNA, 19 nt, Homo sapiens
  misc_RNA (1)...(19): siRNA sense strand
agguaaaucccagagauaa

SEQ ID NO: 2219466 - RNA, 19 nt, Homo sapiens
  misc_RNA (1)...(19): siRNA sense strand
gggaccaucuggaaggcau

SEQ ID NO: 2219467 - RNA, 19 nt, Homo sapiens
  misc_RNA (1)...(19): siRNA sense strand
uagaaugaaaugagccgua

SEQ ID NO: 2219468 - RNA, 19 nt, Homo sapiens
  misc_RNA (1)...(19): siRNA sense strand
ggagguugaggcaggagaa

SEQ ID NO: 2219469 - RNA, 19 nt, Homo sapiens
  misc_RNA (1)...(19): siRNA sense strand
guugaaaaugagagaauca

SEQ ID NO: 2219470 - RNA, 19 nt, Homo sapiens
  misc_RNA (1)...(19): siRNA sense strand
cggauaaaagugaccauua

SEQ ID NO: 2219471 - RNA, 19 nt, Homo sapiens
  misc_RNA (1)...(19): siRNA sense strand
ugagagaaucaaagucgaa

SEQ ID NO: 2219472 - RNA, 19 nt, Homo sapiens
  misc_RNA (1)...(19): siRNA sense strand
gucagaagaucaagaccau

SEQ ID NO: 2219473 - RNA, 19 nt, Homo sapiens
  misc_RNA (1)...(19): siRNA sense strand
gugcucaguaaguguuaaa

SEQ ID NO: 2219474 - RNA, 19 nt, Homo sapiens
  misc_RNA (1)...(19): siRNA sense strand
ggagggacagggacagcaa

SEQ ID NO: 2219475 - RNA, 19 nt, Homo sapiens
  misc_RNA (1)...(19): siRNA sense strand
gcaaaggagaagucagaag

SEQ ID NO: 2219476 - RNA, 19 nt, Homo sapiens
  misc_RNA (1)...(19): siRNA sense strand
agaacuugacuguggcuau

SEQ ID NO: 2219477 - RNA, 19 nt, Homo sapiens
  misc_RNA (1)...(19): siRNA sense strand
cagcagaaggugaggagac

SEQ ID NO: 2219478 - RNA, 19 nt, Homo sapiens
  misc_RNA (1)...(19): siRNA sense strand
cgguacagacugaaagacu

SEQ ID NO: 2219479 - RNA, 19 nt, Homo sapiens
  misc_RNA (1)...(19): siRNA sense strand
uccaggagggccagaguua

SEQ ID NO: 2219480 - RNA, 19 nt, Homo sapiens
  misc_RNA (1)...(19): siRNA sense strand
ugcucuagguauacguaaa

SEQ ID NO: 2219481 - RNA, 19 nt, Homo sapiens
  misc_RNA (1)...(19): siRNA sense strand
ccagaagcagcacaagaaa

SEQ ID NO: 2219482 - RNA, 19 nt, Homo sapiens
  misc_RNA (1)...(19): siRNA sense strand
aaccaaaacuaaagcaaga

SEQ ID NO: 2219483 - RNA, 19 nt, Homo sapiens
  misc_RNA (1)...(19): siRNA sense strand
uggaggaaagcaugaaaga

SEQ ID NO: 2219484 - RNA, 19 nt, Homo sapiens
  misc_RNA (1)...(19): siRNA sense strand
agucaagagagaugagcaa

SEQ ID NO: 2219485 - RNA, 19 nt, Homo sapiens
  misc_RNA (1)...(19): siRNA sense strand
ugagcaagaaugugagcaa

SEQ ID NO: 2219486 - RNA, 19 nt, Homo sapiens
  misc_RNA (1)...(19): siRNA sense strand
uggagaagcaggaggcaca

SEQ ID NO: 2219487 - RNA, 19 nt, Homo sapiens
  misc_RNA (1)...(19): siRNA sense strand
uagaggagcaggagggaca

SEQ ID NO: 2219488 - RNA, 19 nt, Homo sapiens
  misc_RNA (1)...(19): siRNA sense strand
agccaaagcaccuggaaca

SEQ ID NO: 2219489 - RNA, 19 nt, Homo sapiens
  misc_RNA (1)...(19): siRNA sense strand
ccaucaaagcaagaggaaa

SEQ ID NO: 2219490 - RNA, 19 nt, Homo sapiens
  misc_RNA (1)...(19): siRNA sense strand
cugagcagcaggagggaca

SEQ ID NO: 2219491 - RNA, 19 nt, Homo sapiens
  misc_RNA (1)...(19): siRNA sense strand
caaagcaccuggaggagga

SEQ ID NO: 2219492 - RNA, 19 nt, Homo sapiens
  misc_RNA (1)...(19): siRNA sense strand
ggagaaaacacaaagggau

SEQ ID NO: 2219493 - RNA, 19 nt, Homo sapiens
  misc_RNA (1)...(19): siRNA sense strand
gagcaaaugaaacagccaa

SEQ ID NO: 2219494 - RNA, 19 nt, Homo sapiens
  misc_RNA (1)...(19): siRNA sense strand
agaaggagccacaggagca

SEQ ID NO: 2219495 - RNA, 19 nt, Homo sapiens
  misc_RNA (1)...(19): siRNA sense strand
aggaauaucagaaagcaga

SEQ ID NO: 2219496 - RNA, 19 nt, Homo sapiens
  misc_RNA (1)...(19): siRNA sense strand
agcuggaagaagagaagaa

SEQ ID NO: 2219497 - RNA, 19 nt, Homo sapiens
  misc_RNA (1)...(19): siRNA sense strand
ugaaggaccuggagcagca

SEQ ID NO: 2219498 - RNA, 19 nt, Homo sapiens
  misc_RNA (1)...(19): siRNA sense strand
agcaagagggccaggugaa

SEQ ID NO: 2219499 - RNA, 19 nt, Homo sapiens
  misc_RNA (1)...(19): siRNA sense strand
agcaagaaugugagcaaca

SEQ ID NO: 2219500 - RNA, 19 nt, Homo sapiens
  misc_RNA (1)...(19): siRNA sense strand
uagagcagcaggagggaca

SEQ ID NO: 2219501 - RNA, 19 nt, Homo sapiens
  misc_RNA (1)...(19): siRNA sense strand
uggagcagcuggaggagca

SEQ ID NO: 2219502 - RNA, 19 nt, Homo sapiens
  misc_RNA (1)...(19): siRNA sense strand
gagaaaacacaaagggauc

SEQ ID NO: 2219503 - RNA, 19 nt, Homo sapiens
  misc_RNA (1)...(19): siRNA sense strand
aagagcuagucaagagaga

SEQ ID NO: 2219504 - RNA, 19 nt, Homo sapiens
  misc_RNA (1)...(19): siRNA sense strand
cagaaaacccagagcagca

SEQ ID NO: 2219505 - RNA, 19 nt, Homo sapiens
  misc_RNA (1)...(19): siRNA sense strand
uggaagaagagaagaagcu

SEQ ID NO: 2219506 - RNA, 19 nt, Homo sapiens
  misc_RNA (1)...(19): siRNA sense strand
cagagcagcaagagggcca

SEQ ID NO: 2219507 - RNA, 19 nt, Homo sapiens
  misc_RNA (1)...(19): siRNA sense strand
cuguaaagggacugccuga

SEQ ID NO: 2219508 - RNA, 19 nt, Homo sapiens
  misc_RNA (1)...(19): siRNA sense strand
agccaaagcaccuggagga

SEQ ID NO: 2219509 - RNA, 19 nt, Homo sapiens
  misc_RNA (1)...(19): siRNA sense strand
ugaagcaccuagaggagca

SEQ ID NO: 2219510 - RNA, 19 nt, Homo sapiens
  misc_RNA (1)...(19): siRNA sense strand
aggccagguccaagacauu

SEQ ID NO: 2219511 - RNA, 19 nt, Homo sapiens
  misc_RNA (1)...(19): siRNA sense strand
cuguagagcaccagcagca

SEQ ID NO: 2219512 - RNA, 19 nt, Homo sapiens
  misc_RNA (1)...(19): siRNA sense strand
cagagcagcaggacggaca

SEQ ID NO: 2219513 - RNA, 19 nt, Homo sapiens
  misc_RNA (1)...(19): siRNA sense strand
gguccaagacauucaacca

SEQ ID NO: 2219514 - RNA, 19 nt, Homo sapiens
  misc_RNA (1)...(19): siRNA sense strand
aggagaggcagguggagca

SEQ ID NO: 2219515 - RNA, 19 nt, Homo sapiens
  misc_RNA (1)...(19): siRNA sense strand
cagagcagcagguaggaca

SEQ ID NO: 2219516 - RNA, 19 nt, Homo sapiens
  misc_RNA (1)...(19): siRNA sense strand
ugaaguaccuggaacagca

SEQ ID NO: 2219517 - RNA, 19 nt, Homo sapiens
  misc_RNA (1)...(19): siRNA sense strand
uuaaagagaucaaugggaa

SEQ ID NO: 2219518 - RNA, 19 nt, Homo sapiens
  misc_RNA (1)...(19): siRNA sense strand
gccaagaaccgcagggaca

SEQ ID NO: 2219519 - RNA, 19 nt, Homo sapiens
  misc_RNA (1)...(19): siRNA sense strand
cagcaguuggagagugaaa

SEQ ID NO: 2219520 - RNA, 19 nt, Homo sapiens
  misc_RNA (1)...(19): siRNA sense strand
uggacuucauguugagaua

SEQ ID NO: 2219521 - RNA, 19 nt, Homo sapiens
  misc_RNA (1)...(19): siRNA sense strand
gcaauaugauaaugggacu

SEQ ID NO: 2219522 - RNA, 19 nt, Homo sapiens
  misc_RNA (1)...(19): siRNA sense strand
ccaaaugacuugcagacca

SEQ ID NO: 2219523 - RNA, 19 nt, Homo sapiens
  misc_RNA (1)...(19): siRNA sense strand
cagaagaggaggagccagu

SEQ ID NO: 2219524 - RNA, 19 nt, Homo sapiens
  misc_RNA (1)...(19): siRNA sense strand
gagugaaauagaugaacuu

SEQ ID NO: 2219525 - RNA, 19 nt, Homo sapiens
  misc_RNA (1)...(19): siRNA sense strand
gcuuaaaaguagcuaccaa

SEQ ID NO: 2219526 - RNA, 19 nt, Homo sapiens
  misc_RNA (1)...(19): siRNA sense strand
augaagaacuacagaacgu

SEQ ID NO: 2219527 - RNA, 19 nt, Homo sapiens
  misc_RNA (1)...(19): siRNA sense strand
uaaagagaucaaugggaau

SEQ ID NO: 2219528 - RNA, 19 nt, Homo sapiens
  misc_RNA (1)...(19): siRNA sense strand
gugaaaucuuccuuaucaa

SEQ ID NO: 2219529 - RNA, 19 nt, Homo sapiens
  misc_RNA (1)...(19): siRNA sense strand
ccucaaggucucagggaac

SEQ ID NO: 2219530 - RNA, 19 nt, Homo sapiens
  misc_RNA (1)...(19): siRNA sense strand
ccuagauauuaaagagauc

SEQ ID NO: 2219531 - RNA, 19 nt, Homo sapiens
  misc_RNA (1)...(19): siRNA sense strand
agccgaugguggugccaaa

SEQ ID NO: 2219532 - RNA, 19 nt, Homo sapiens
  misc_RNA (1)...(19): siRNA sense strand
gaagaagauggguggggaa

SEQ ID NO: 2219533 - RNA, 19 nt, Homo sapiens
  misc_RNA (1)...(19): siRNA sense strand
guauuugcccuuagcacaa

SEQ ID NO: 2219534 - RNA, 19 nt, Homo sapiens
  misc_RNA (1)...(19): siRNA sense strand
guuacaggccacagcagaa

SEQ ID NO: 2219535 - RNA, 19 nt, Homo sapiens
  misc_RNA (1)...(19): siRNA sense strand
ggaagagauuugugguggu

SEQ ID NO: 2219536 - RNA, 19 nt, Homo sapiens
  misc_RNA (1)...(19): siRNA sense strand
aggaagaaucugugaagcu

SEQ ID NO: 2219537 - RNA, 19 nt, Homo sapiens
  misc_RNA (1)...(19): siRNA sense strand
agaggaggagccagugaaa

SEQ ID NO: 2219538 - RNA, 19 nt, Homo sapiens
  misc_RNA (1)...(19): siRNA sense strand
gaguauggcagacuggcaa

SEQ ID NO: 2219539 - RNA, 19 nt, Homo sapiens
  misc_RNA (1)...(19): siRNA sense strand
ugauauuucuuguucgaga

SEQ ID NO: 2219540 - RNA, 19 nt, Homo sapiens
  misc_RNA (1)...(19): siRNA sense strand
gcaugaagaacuacagaac

SEQ ID NO: 2219541 - RNA, 19 nt, Homo sapiens
  misc_RNA (1)...(19): siRNA sense strand
gccucaaggucucagggaa

SEQ ID NO: 2219542 - RNA, 19 nt, Homo sapiens
  misc_RNA (1)...(19): siRNA sense strand
guggaguacuucaaggcuu

SEQ ID NO: 2219543 - RNA, 19 nt, Homo sapiens
  misc_RNA (1)...(19): siRNA sense strand
gguuuggacaucauagcua

SEQ ID NO: 2219544 - RNA, 19 nt, Homo sapiens
  misc_RNA (1)...(19): siRNA sense strand
uguuauugauggauacuca

SEQ ID NO: 2219545 - RNA, 19 nt, Homo sapiens
  misc_RNA (1)...(19): siRNA sense strand
ccuuugaguuagaugaaac

SEQ ID NO: 2219546 - RNA, 19 nt, Homo sapiens
  misc_RNA (1)...(19): siRNA sense strand
gagcauuuagaaaaggaaa

SEQ ID NO: 2219547 - RNA, 19 nt, Homo sapiens
  misc_RNA (1)...(19): siRNA sense strand
ggguuggagacuacaauga

SEQ ID NO: 2219548 - RNA, 19 nt, Homo sapiens
  misc_RNA (1)...(19): siRNA sense strand
ccacagcagaagcuaacaa

SEQ ID NO: 2219549 - RNA, 19 nt, Homo sapiens
  misc_RNA (1)...(19): siRNA sense strand
ugugauugcuggugugacu

SEQ ID NO: 2219550 - RNA, 19 nt, Homo sapiens
  misc_RNA (1)...(19): siRNA sense strand
ggacaucauagcuagccua

SEQ ID NO: 2219551 - RNA, 19 nt, Homo sapiens
  misc_RNA (1)...(19): siRNA sense strand
aacuacagaacgucagaaa

SEQ ID NO: 2219552 - RNA, 19 nt, Homo sapiens
  misc_RNA (1)...(19): siRNA sense strand
ugcagcaguuggagaguga

SEQ ID NO: 2219553 - RNA, 19 nt, Homo sapiens
  misc_RNA (1)...(19): siRNA sense strand
ccacacuguuuguagucau

SEQ ID NO: 2219554 - RNA, 19 nt, Homo sapiens
  misc_RNA (1)...(19): siRNA sense strand
acucagggaaccuuugaua

SEQ ID NO: 2219555 - RNA, 19 nt, Homo sapiens
  misc_RNA (1)...(19): siRNA sense strand
aggccacagcagaagcuaa

SEQ ID NO: 2219556 - RNA, 19 nt, Homo sapiens
  misc_RNA (1)...(19): siRNA sense strand
agagugaaauagaugaacu

SEQ ID NO: 2219557 - RNA, 19 nt, Homo sapiens
  misc_RNA (1)...(19): siRNA sense strand
aagcacaaugauagcaaaa

SEQ ID NO: 2219558 - RNA, 19 nt, Homo sapiens
  misc_RNA (1)...(19): siRNA sense strand
uuaaagagaucaaugggaa

SEQ ID NO: 2219559 - RNA, 19 nt, Homo sapiens
  misc_RNA (1)...(19): siRNA sense strand
gccaagaaccgcagggaca

SEQ ID NO: 2219560 - RNA, 19 nt, Homo sapiens
  misc_RNA (1)...(19): siRNA sense strand
cagcaguuggagagugaaa

SEQ ID NO: 2219561 - RNA, 19 nt, Homo sapiens
  misc_RNA (1)...(19): siRNA sense strand
uggacuucauguugagaua

SEQ ID NO: 2219562 - RNA, 19 nt, Homo sapiens
  misc_RNA (1)...(19): siRNA sense strand
gcaauaugauaaugggacu

SEQ ID NO: 2219563 - RNA, 19 nt, Homo sapiens
  misc_RNA (1)...(19): siRNA sense strand
ccaaaugacuugcagacca

SEQ ID NO: 2219564 - RNA, 19 nt, Homo sapiens
  misc_RNA (1)...(19): siRNA sense strand
cagaagaggaggagccagu

SEQ ID NO: 2219565 - RNA, 19 nt, Homo sapiens
  misc_RNA (1)...(19): siRNA sense strand
gagugaaauagaugaacuu

SEQ ID NO: 2219566 - RNA, 19 nt, Homo sapiens
  misc_RNA (1)...(19): siRNA sense strand
gcuuaaaaguagcuaccaa

SEQ ID NO: 2219567 - RNA, 19 nt, Homo sapiens
  misc_RNA (1)...(19): siRNA sense strand
augaagaacuacagaacgu

SEQ ID NO: 2219568 - RNA, 19 nt, Homo sapiens
  misc_RNA (1)...(19): siRNA sense strand
uaaagagaucaaugggaau

SEQ ID NO: 2219569 - RNA, 19 nt, Homo sapiens
  misc_RNA (1)...(19): siRNA sense strand
gugaaaucuuccuuaucaa

SEQ ID NO: 2219570 - RNA, 19 nt, Homo sapiens
  misc_RNA (1)...(19): siRNA sense strand
ccucaaggucucagggaac

SEQ ID NO: 2219571 - RNA, 19 nt, Homo sapiens
  misc_RNA (1)...(19): siRNA sense strand
ccuagauauuaaagagauc

SEQ ID NO: 2219572 - RNA, 19 nt, Homo sapiens
  misc_RNA (1)...(19): siRNA sense strand
agccgaugguggugccaaa

SEQ ID NO: 2219573 - RNA, 19 nt, Homo sapiens
  misc_RNA (1)...(19): siRNA sense strand
gaagaagauggguggggaa

SEQ ID NO: 2219574 - RNA, 19 nt, Homo sapiens
  misc_RNA (1)...(19): siRNA sense strand
guauuugcccuuagcacaa

SEQ ID NO: 2219575 - RNA, 19 nt, Homo sapiens
  misc_RNA (1)...(19): siRNA sense strand
guuacaggccacagcagaa

SEQ ID NO: 2219576 - RNA, 19 nt, Homo sapiens
  misc_RNA (1)...(19): siRNA sense strand
ggaagagauuugugguggu

SEQ ID NO: 2219577 - RNA, 19 nt, Homo sapiens
  misc_RNA (1)...(19): siRNA sense strand
aggaagaaucugugaagcu

SEQ ID NO: 2219578 - RNA, 19 nt, Homo sapiens
  misc_RNA (1)...(19): siRNA sense strand
agaggaggagccagugaaa

SEQ ID NO: 2219579 - RNA, 19 nt, Homo sapiens
  misc_RNA (1)...(19): siRNA sense strand
gaguauggcagacuggcaa

SEQ ID NO: 2219580 - RNA, 19 nt, Homo sapiens
  misc_RNA (1)...(19): siRNA sense strand
ugauauuucuuguucgaga

SEQ ID NO: 2219581 - RNA, 19 nt, Homo sapiens
  misc_RNA (1)...(19): siRNA sense strand
gcaugaagaacuacagaac

SEQ ID NO: 2219582 - RNA, 19 nt, Homo sapiens
  misc_RNA (1)...(19): siRNA sense strand
gccucaaggucucagggaa

SEQ ID NO: 2219583 - RNA, 19 nt, Homo sapiens
  misc_RNA (1)...(19): siRNA sense strand
guggaguacuucaaggcuu

SEQ ID NO: 2219584 - RNA, 19 nt, Homo sapiens
  misc_RNA (1)...(19): siRNA sense strand
gguuuggacaucauagcua

SEQ ID NO: 2219585 - RNA, 19 nt, Homo sapiens
  misc_RNA (1)...(19): siRNA sense strand
uguuauugauggauacuca

SEQ ID NO: 2219586 - RNA, 19 nt, Homo sapiens
  misc_RNA (1)...(19): siRNA sense strand
ccuuugaguuagaugaaac

SEQ ID NO: 2219587 - RNA, 19 nt, Homo sapiens
  misc_RNA (1)...(19): siRNA sense strand
gagcauuuagaaaaggaaa

SEQ ID NO: 2219588 - RNA, 19 nt, Homo sapiens
  misc_RNA (1)...(19): siRNA sense strand
ggguuggagacuacaauga

SEQ ID NO: 2219589 - RNA, 19 nt, Homo sapiens
  misc_RNA (1)...(19): siRNA sense strand
ccacagcagaagcuaacaa

SEQ ID NO: 2219590 - RNA, 19 nt, Homo sapiens
  misc_RNA (1)...(19): siRNA sense strand
ugugauugcuggugugacu

SEQ ID NO: 2219591 - RNA, 19 nt, Homo sapiens
  misc_RNA (1)...(19): siRNA sense strand
ggacaucauagcuagccua

SEQ ID NO: 2219592 - RNA, 19 nt, Homo sapiens
  misc_RNA (1)...(19): siRNA sense strand
aacuacagaacgucagaaa

SEQ ID NO: 2219593 - RNA, 19 nt, Homo sapiens
  misc_RNA (1)...(19): siRNA sense strand
ugcagcaguuggagaguga

SEQ ID NO: 2219594 - RNA, 19 nt, Homo sapiens
  misc_RNA (1)...(19): siRNA sense strand
ccacacuguuuguagucau

SEQ ID NO: 2219595 - RNA, 19 nt, Homo sapiens
  misc_RNA (1)...(19): siRNA sense strand
acucagggaaccuuugaua

SEQ ID NO: 2219596 - RNA, 19 nt, Homo sapiens
  misc_RNA (1)...(19): siRNA sense strand
aggccacagcagaagcuaa

SEQ ID NO: 2219597 - RNA, 19 nt, Homo sapiens
  misc_RNA (1)...(19): siRNA sense strand
agagugaaauagaugaacu

SEQ ID NO: 2219598 - RNA, 19 nt, Homo sapiens
  misc_RNA (1)...(19): siRNA sense strand
aagcacaaugauagcaaaa

SEQ ID NO: 2219599 - RNA, 19 nt, Homo sapiens
  misc_RNA (1)...(19): siRNA sense strand
cuuaaauccgggaggcaaa

SEQ ID NO: 2219600 - RNA, 19 nt, Homo sapiens
  misc_RNA (1)...(19): siRNA sense strand
gcuuaaauccgggaggcaa

SEQ ID NO: 2219601 - RNA, 19 nt, Homo sapiens
  misc_RNA (1)...(19): siRNA sense strand
aggcaggagaaucgcuuaa

SEQ ID NO: 2219602 - RNA, 19 nt, Homo sapiens
  misc_RNA (1)...(19): siRNA sense strand
ugguaaaggucgccccuaa

SEQ ID NO: 2219603 - RNA, 19 nt, Homo sapiens
  misc_RNA (1)...(19): siRNA sense strand
acuggacgacagagcgaaa

SEQ ID NO: 2219604 - RNA, 19 nt, Homo sapiens
  misc_RNA (1)...(19): siRNA sense strand
agggagaugcagagagaaa

SEQ ID NO: 2219605 - RNA, 19 nt, Homo sapiens
  misc_RNA (1)...(19): siRNA sense strand
aaacauggcugaugggcaa

SEQ ID NO: 2219606 - RNA, 19 nt, Homo sapiens
  misc_RNA (1)...(19): siRNA sense strand
gcaucuaucaacagagaaa

SEQ ID NO: 2219607 - RNA, 19 nt, Homo sapiens
  misc_RNA (1)...(19): siRNA sense strand
acgugagggcagagagaaa

SEQ ID NO: 2219608 - RNA, 19 nt, Homo sapiens
  misc_RNA (1)...(19): siRNA sense strand
gagaagaagcuguggucau

SEQ ID NO: 2219609 - RNA, 19 nt, Homo sapiens
  misc_RNA (1)...(19): siRNA sense strand
guucagugauggugggaga

SEQ ID NO: 2219610 - RNA, 19 nt, Homo sapiens
  misc_RNA (1)...(19): siRNA sense strand
ccgaauuagccaagaaaca

SEQ ID NO: 2219611 - RNA, 19 nt, Homo sapiens
  misc_RNA (1)...(19): siRNA sense strand
uggucaugguagagguuaa

SEQ ID NO: 2219612 - RNA, 19 nt, Homo sapiens
  misc_RNA (1)...(19): siRNA sense strand
uggaagaaccaaugaaaca

SEQ ID NO: 2219613 - RNA, 19 nt, Homo sapiens
  misc_RNA (1)...(19): siRNA sense strand
guaacauugaccagagaaa

SEQ ID NO: 2219614 - RNA, 19 nt, Homo sapiens
  misc_RNA (1)...(19): siRNA sense strand
gcucuuucuaugaggaaua

SEQ ID NO: 2219615 - RNA, 19 nt, Homo sapiens
  misc_RNA (1)...(19): siRNA sense strand
gagguuaaccagagcacaa

SEQ ID NO: 2219616 - RNA, 19 nt, Homo sapiens
  misc_RNA (1)...(19): siRNA sense strand
agaaaguuacgcaaagaaa

SEQ ID NO: 2219617 - RNA, 19 nt, Homo sapiens
  misc_RNA (1)...(19): siRNA sense strand
gcaguaucgccgagaagaa

SEQ ID NO: 2219618 - RNA, 19 nt, Homo sapiens
  misc_RNA (1)...(19): siRNA sense strand
gcuguauagacuugauaaa

SEQ ID NO: 2219619 - RNA, 19 nt, Homo sapiens
  misc_RNA (1)...(19): siRNA sense strand
ugucaucggaggugugaua

SEQ ID NO: 2219620 - RNA, 19 nt, Homo sapiens
  misc_RNA (1)...(19): siRNA sense strand
uaaccagagcacaaagaaa

SEQ ID NO: 2219621 - RNA, 19 nt, Homo sapiens
  misc_RNA (1)...(19): siRNA sense strand
cuaucaacagagaaaguua

SEQ ID NO: 2219622 - RNA, 19 nt, Homo sapiens
  misc_RNA (1)...(19): siRNA sense strand
agaaggacaacauggaaau

SEQ ID NO: 2219623 - RNA, 19 nt, Homo sapiens
  misc_RNA (1)...(19): siRNA sense strand
ucacagagaaggacaacau

SEQ ID NO: 2219624 - RNA, 19 nt, Homo sapiens
  misc_RNA (1)...(19): siRNA sense strand
ugaauguggugguggacga

SEQ ID NO: 2219625 - RNA, 19 nt, Homo sapiens
  misc_RNA (1)...(19): siRNA sense strand
acagagaaaguuacgcaaa

SEQ ID NO: 2219626 - RNA, 19 nt, Homo sapiens
  misc_RNA (1)...(19): siRNA sense strand
ccacgugagggcagagaga

SEQ ID NO: 2219627 - RNA, 19 nt, Homo sapiens
  misc_RNA (1)...(19): siRNA sense strand
caucacugccauagccaua

SEQ ID NO: 2219628 - RNA, 19 nt, Homo sapiens
  misc_RNA (1)...(19): siRNA sense strand
gaagaaagcaucugggguu

SEQ ID NO: 2219629 - RNA, 19 nt, Homo sapiens
  misc_RNA (1)...(19): siRNA sense strand
gguuaaugcagacagaaga

SEQ ID NO: 2219630 - RNA, 19 nt, Homo sapiens
  misc_RNA (1)...(19): siRNA sense strand
gcuuaaucgaagagaugga

SEQ ID NO: 2219631 - RNA, 19 nt, Homo sapiens
  misc_RNA (1)...(19): siRNA sense strand
acacgaacuccgagcuuau

SEQ ID NO: 2219632 - RNA, 19 nt, Homo sapiens
  misc_RNA (1)...(19): siRNA sense strand
ggaucgaaguguacggaug

SEQ ID NO: 2219633 - RNA, 19 nt, Homo sapiens
  misc_RNA (1)...(19): siRNA sense strand
aguggauguuaccgaauua

SEQ ID NO: 2219634 - RNA, 19 nt, Homo sapiens
  misc_RNA (1)...(19): siRNA sense strand
gaugacagacacaggccaa

SEQ ID NO: 2219635 - RNA, 19 nt, Homo sapiens
  misc_RNA (1)...(19): siRNA sense strand
gggaaagguuuuagaggcu

SEQ ID NO: 2219636 - RNA, 19 nt, Homo sapiens
  misc_RNA (1)...(19): siRNA sense strand
acgcaaagaaaaugaguca

SEQ ID NO: 2219637 - RNA, 19 nt, Homo sapiens
  misc_RNA (1)...(19): siRNA sense strand
gggacagucaccaaggaau

SEQ ID NO: 2219638 - RNA, 19 nt, Homo sapiens
  misc_RNA (1)...(19): siRNA sense strand
ggacagaauucaacgccgu

SEQ ID NO: 2219639 - RNA, 19 nt, Homo sapiens
  misc_RNA (1)...(19): siRNA sense strand
ccaagaaacacaaaccaca

SEQ ID NO: 2219640 - RNA, 19 nt, Homo sapiens
  misc_RNA (1)...(19): siRNA sense strand
aaugaauggacuagugaca

SEQ ID NO: 2219641 - RNA, 19 nt, Homo sapiens
  misc_RNA (1)...(19): siRNA sense strand
gaccagcggaugagggaga

SEQ ID NO: 2219642 - RNA, 19 nt, Homo sapiens
  misc_RNA (1)...(19): siRNA sense strand
ugugauagcaguggugaua

SEQ ID NO: 2219643 - RNA, 19 nt, Homo sapiens
  misc_RNA (1)...(19): siRNA sense strand
gaaaguuacgcaaagaaaa

SEQ ID NO: 2219644 - RNA, 19 nt, Homo sapiens
  misc_RNA (1)...(19): siRNA sense strand
ggcagagagaaauguuaaa

SEQ ID NO: 2219645 - RNA, 19 nt, Homo sapiens
  misc_RNA (1)...(19): siRNA sense strand
gugucgcaauggagggaga

SEQ ID NO: 2219646 - RNA, 19 nt, Homo sapiens
  misc_RNA (1)...(19): siRNA sense strand
ccucagggacagaauucaa

SEQ ID NO: 2219647 - RNA, 19 nt, Homo sapiens
  misc_RNA (1)...(19): siRNA sense strand
ucaacuucaccguggacaa

SEQ ID NO: 2219648 - RNA, 19 nt, Homo sapiens
  misc_RNA (1)...(19): siRNA sense strand
agauccucaugaugggaaa

SEQ ID NO: 2219649 - RNA, 19 nt, Homo sapiens
  misc_RNA (1)...(19): siRNA sense strand
gugaagauuaacagagaag

SEQ ID NO: 2219650 - RNA, 19 nt, Homo sapiens
  misc_RNA (1)...(19): siRNA sense strand
aaucucucauauugggaaa

SEQ ID NO: 2219651 - RNA, 19 nt, Homo sapiens
  misc_RNA (1)...(19): siRNA sense strand
cugugaugcuggccggaau

SEQ ID NO: 2219652 - RNA, 19 nt, Homo sapiens
  misc_RNA (1)...(19): siRNA sense strand
guuuacagcucaacagcca

SEQ ID NO: 2219653 - RNA, 19 nt, Homo sapiens
  misc_RNA (1)...(19): siRNA sense strand
gcagauuagguacaagcua

SEQ ID NO: 2219654 - RNA, 19 nt, Homo sapiens
  misc_RNA (1)...(19): siRNA sense strand
caugcagagcaauggaauu

SEQ ID NO: 2219655 - RNA, 19 nt, Homo sapiens
  misc_RNA (1)...(19): siRNA sense strand
caguuauccucgccaacaa

SEQ ID NO: 2219656 - RNA, 19 nt, Homo sapiens
  misc_RNA (1)...(19): siRNA sense strand
gcaaauugaccuuggagag

SEQ ID NO: 2219657 - RNA, 19 nt, Homo sapiens
  misc_RNA (1)...(19): siRNA sense strand
agugaagauuaacagagaa

SEQ ID NO: 2219658 - RNA, 19 nt, Homo sapiens
  misc_RNA (1)...(19): siRNA sense strand
aagcuguggucaugguaga

SEQ ID NO: 2219659 - RNA, 19 nt, Homo sapiens
  misc_RNA (1)...(19): siRNA sense strand
gguuuauuuugauggacaa

SEQ ID NO: 2219660 - RNA, 19 nt, Homo sapiens
  misc_RNA (1)...(19): siRNA sense strand
ggaacggccaccagacaga

SEQ ID NO: 2219661 - RNA, 19 nt, Homo sapiens
  misc_RNA (1)...(19): siRNA sense strand
acgcacagaaggaggaaga

SEQ ID NO: 2219662 - RNA, 19 nt, Homo sapiens
  misc_RNA (1)...(19): siRNA sense strand
cagaaggacuuuauggaac

SEQ ID NO: 2219663 - RNA, 19 nt, Homo sapiens
  misc_RNA (1)...(19): siRNA sense strand
cugaauggacaggaggaaa

SEQ ID NO: 2219664 - RNA, 19 nt, Homo sapiens
  misc_RNA (1)...(19): siRNA sense strand
gcgaguacuucaauagcca

SEQ ID NO: 2219665 - RNA, 19 nt, Homo sapiens
  misc_RNA (1)...(19): siRNA sense strand
ugacagauuucuacccaga

SEQ ID NO: 2219666 - RNA, 19 nt, Homo sapiens
  misc_RNA (1)...(19): siRNA sense strand
aggaacggcaggaaugcua

SEQ ID NO: 2219667 - RNA, 19 nt, Homo sapiens
  misc_RNA (1)...(19): siRNA sense strand
cugcauaaacaggcaauau

SEQ ID NO: 2219668 - RNA, 19 nt, Homo sapiens
  misc_RNA (1)...(19): siRNA sense strand
ugaauggacaggaggaaac

SEQ ID NO: 2219669 - RNA, 19 nt, Homo sapiens
  misc_RNA (1)...(19): siRNA sense strand
ggguaaagcugauggagga

SEQ ID NO: 2219670 - RNA, 19 nt, Homo sapiens
  misc_RNA (1)...(19): siRNA sense strand
gaggguaggaagaggguaa

SEQ ID NO: 2219671 - RNA, 19 nt, Homo sapiens
  misc_RNA (1)...(19): siRNA sense strand
ggcaagagguauagggagu

SEQ ID NO: 2219672 - RNA, 19 nt, Homo sapiens
  misc_RNA (1)...(19): siRNA sense strand
cauugaagguggagcucua

SEQ ID NO: 2219673 - RNA, 19 nt, Homo sapiens
  misc_RNA (1)...(19): siRNA sense strand
aguaguugcucuagggauu

SEQ ID NO: 2219674 - RNA, 19 nt, Homo sapiens
  misc_RNA (1)...(19): siRNA sense strand
uguuagggcaagagguaua

SEQ ID NO: 2219675 - RNA, 19 nt, Homo sapiens
  misc_RNA (1)...(19): siRNA sense strand
agacauaacacgagccaca

SEQ ID NO: 2219676 - RNA, 19 nt, Homo sapiens
  misc_RNA (1)...(19): siRNA sense strand
aguaagagugugaggguca

SEQ ID NO: 2219677 - RNA, 19 nt, Homo sapiens
  misc_RNA (1)...(19): siRNA sense strand
auguagaacuggaggucuu

SEQ ID NO: 2219678 - RNA, 19 nt, Homo sapiens
  misc_RNA (1)...(19): siRNA sense strand
augagaaggcaaugguuua

SEQ ID NO: 2219679 - RNA, 19 nt, Homo sapiens
  misc_RNA (1)...(19): siRNA sense strand
gugcuggguuagagggaca

SEQ ID NO: 2219680 - RNA, 19 nt, Homo sapiens
  misc_RNA (1)...(19): siRNA sense strand
ggacaaaggugggagagca

SEQ ID NO: 2219681 - RNA, 19 nt, Homo sapiens
  misc_RNA (1)...(19): siRNA sense strand
ccaccaauacaguaguaaa

SEQ ID NO: 2219682 - RNA, 19 nt, Homo sapiens
  misc_RNA (1)...(19): siRNA sense strand
gggaagaaucucuggaucu

SEQ ID NO: 2219683 - RNA, 19 nt, Homo sapiens
  misc_RNA (1)...(19): siRNA sense strand
cuggacaccuugugggcaa

SEQ ID NO: 2219684 - RNA, 19 nt, Homo sapiens
  misc_RNA (1)...(19): siRNA sense strand
gggcaggcuggaugauaaa

SEQ ID NO: 2219685 - RNA, 19 nt, Homo sapiens
  misc_RNA (1)...(19): siRNA sense strand
gggacuuggucgugugcau

SEQ ID NO: 2219686 - RNA, 19 nt, Homo sapiens
  misc_RNA (1)...(19): siRNA sense strand
ccauccagcccuagggaau

SEQ ID NO: 2219687 - RNA, 19 nt, Homo sapiens
  misc_RNA (1)...(19): siRNA sense strand
agggcaggcuggaugauaa

SEQ ID NO: 2219688 - RNA, 19 nt, Homo sapiens
  misc_RNA (1)...(19): siRNA sense strand
ggcuuagaaugcagguuua

SEQ ID NO: 2219689 - RNA, 19 nt, Homo sapiens
  misc_RNA (1)...(19): siRNA sense strand
uggauuaauucauggacuu

SEQ ID NO: 2219690 - RNA, 19 nt, Homo sapiens
  misc_RNA (1)...(19): siRNA sense strand
ccaggauggagguggagaa

SEQ ID NO: 2219691 - RNA, 19 nt, Homo sapiens
  misc_RNA (1)...(19): siRNA sense strand
acgaaacaggugaaauuaa

SEQ ID NO: 2219692 - RNA, 19 nt, Homo sapiens
  misc_RNA (1)...(19): siRNA sense strand
gcuuauagggcaaggguag

SEQ ID NO: 2219693 - RNA, 19 nt, Homo sapiens
  misc_RNA (1)...(19): siRNA sense strand
cuaggaaacaggaugagaa

SEQ ID NO: 2219694 - RNA, 19 nt, Homo sapiens
  misc_RNA (1)...(19): siRNA sense strand
aaacaggaugagaaggcaa

SEQ ID NO: 2219695 - RNA, 19 nt, Homo sapiens
  misc_RNA (1)...(19): siRNA sense strand
ggaacuugagugaagguuu

SEQ ID NO: 2219696 - RNA, 19 nt, Homo sapiens
  misc_RNA (1)...(19): siRNA sense strand
ggacaauuaucuuaccaga

SEQ ID NO: 2219697 - RNA, 19 nt, Homo sapiens
  misc_RNA (1)...(19): siRNA sense strand
gacuaggcccugacagaua

SEQ ID NO: 2219698 - RNA, 19 nt, Homo sapiens
  misc_RNA (1)...(19): siRNA sense strand
gugugagggucauggcgua

SEQ ID NO: 2219699 - RNA, 19 nt, Homo sapiens
  misc_RNA (1)...(19): siRNA sense strand
gguuacuauuugcaugaua

SEQ ID NO: 2219700 - RNA, 19 nt, Homo sapiens
  misc_RNA (1)...(19): siRNA sense strand
ccugggugacagagugaaa

SEQ ID NO: 2219701 - RNA, 19 nt, Homo sapiens
  misc_RNA (1)...(19): siRNA sense strand
aggaagaauuuaaccacuu

SEQ ID NO: 2219702 - RNA, 19 nt, Homo sapiens
  misc_RNA (1)...(19): siRNA sense strand
ggucaugagaagaggcauc

SEQ ID NO: 2219703 - RNA, 19 nt, Homo sapiens
  misc_RNA (1)...(19): siRNA sense strand
uagaggagauagaugguga

SEQ ID NO: 2219704 - RNA, 19 nt, Homo sapiens
  misc_RNA (1)...(19): siRNA sense strand
gguugaggugggaggauca

SEQ ID NO: 2219705 - RNA, 19 nt, Homo sapiens
  misc_RNA (1)...(19): siRNA sense strand
uugggauggugcuggguua

SEQ ID NO: 2219706 - RNA, 19 nt, Homo sapiens
  misc_RNA (1)...(19): siRNA sense strand
guacauuuggggaaggaaa

SEQ ID NO: 2219707 - RNA, 19 nt, Homo sapiens
  misc_RNA (1)...(19): siRNA sense strand
aguggagcuuauagggcaa

SEQ ID NO: 2219708 - RNA, 19 nt, Homo sapiens
  misc_RNA (1)...(19): siRNA sense strand
aguguuagggcaagaggua

SEQ ID NO: 2219709 - RNA, 19 nt, Homo sapiens
  misc_RNA (1)...(19): siRNA sense strand
gugggaagauccagagucu

SEQ ID NO: 2219710 - RNA, 19 nt, Homo sapiens
  misc_RNA (1)...(19): siRNA sense strand
auugaaaucuccagcuauu

SEQ ID NO: 2219711 - RNA, 19 nt, Homo sapiens
  misc_RNA (1)...(19): siRNA sense strand
gcuccuggucagaguguau

SEQ ID NO: 2219712 - RNA, 19 nt, Homo sapiens
  misc_RNA (1)...(19): siRNA sense strand
agaucaugccauugcacaa

SEQ ID NO: 2219713 - RNA, 19 nt, Homo sapiens
  misc_RNA (1)...(19): siRNA sense strand
uggagguggagaagaggaa

SEQ ID NO: 2219714 - RNA, 19 nt, Homo sapiens
  misc_RNA (1)...(19): siRNA sense strand
agguauagggaguaagagu

SEQ ID NO: 2219715 - RNA, 19 nt, Homo sapiens
  misc_RNA (1)...(19): siRNA sense strand
uggcauacacagugggaac

SEQ ID NO: 2219716 - RNA, 19 nt, Homo sapiens
  misc_RNA (1)...(19): siRNA sense strand
gguugaaggggauggggaa

SEQ ID NO: 2219717 - RNA, 19 nt, Homo sapiens
  misc_RNA (1)...(19): siRNA sense strand
augaagaugaaauggauga

SEQ ID NO: 2219718 - RNA, 19 nt, Homo sapiens
  misc_RNA (1)...(19): siRNA sense strand
ugggcaaguucaagguaca

SEQ ID NO: 2219719 - RNA, 19 nt, Homo sapiens
  misc_RNA (1)...(19): siRNA sense strand
auaaugggccaaauaguaa

SEQ ID NO: 2219720 - RNA, 19 nt, Homo sapiens
  misc_RNA (1)...(19): siRNA sense strand
gucuuugaaucuagaguau

SEQ ID NO: 2219721 - RNA, 19 nt, Homo sapiens
  misc_RNA (1)...(19): siRNA sense strand
acuugaacccagaggcaga

SEQ ID NO: 2219722 - RNA, 19 nt, Homo sapiens
  misc_RNA (1)...(19): siRNA sense strand
gcacauugcaauucagacu

SEQ ID NO: 2219723 - RNA, 19 nt, Homo sapiens
  misc_RNA (1)...(19): siRNA sense strand
gugaaagagggcaguggau

SEQ ID NO: 2219724 - RNA, 19 nt, Homo sapiens
  misc_RNA (1)...(19): siRNA sense strand
cgggagaaguggaguggag

SEQ ID NO: 2219725 - RNA, 19 nt, Homo sapiens
  misc_RNA (1)...(19): siRNA sense strand
guuaacaaucucugacuuu

SEQ ID NO: 2219726 - RNA, 19 nt, Homo sapiens
  misc_RNA (1)...(19): siRNA sense strand
caccaauacaguaguaaaa

SEQ ID NO: 2219727 - RNA, 19 nt, Homo sapiens
  misc_RNA (1)...(19): siRNA sense strand
ggauuacaggcaugagaca

SEQ ID NO: 2219728 - RNA, 19 nt, Homo sapiens
  misc_RNA (1)...(19): siRNA sense strand
ccauaaguacauaccacua

SEQ ID NO: 2219729 - RNA, 19 nt, Homo sapiens
  misc_RNA (1)...(19): siRNA sense strand
cugacuaggcccugacaga

SEQ ID NO: 2219730 - RNA, 19 nt, Homo sapiens
  misc_RNA (1)...(19): siRNA sense strand
cuggaaaagauaacugaaa

SEQ ID NO: 2219731 - RNA, 19 nt, Homo sapiens
  misc_RNA (1)...(19): siRNA sense strand
cagagaaauuaaaggucua

SEQ ID NO: 2219732 - RNA, 19 nt, Homo sapiens
  misc_RNA (1)...(19): siRNA sense strand
aggagaaacaguugacaaa

SEQ ID NO: 2219733 - RNA, 19 nt, Homo sapiens
  misc_RNA (1)...(19): siRNA sense strand
aguuagaccacuuggauaa

SEQ ID NO: 2219734 - RNA, 19 nt, Homo sapiens
  misc_RNA (1)...(19): siRNA sense strand
ggaacauaugguuggauua

SEQ ID NO: 2219735 - RNA, 19 nt, Homo sapiens
  misc_RNA (1)...(19): siRNA sense strand
aauuaaaggcauccagaua

SEQ ID NO: 2219736 - RNA, 19 nt, Homo sapiens
  misc_RNA (1)...(19): siRNA sense strand
accaauucgugcagagaua

SEQ ID NO: 2219737 - RNA, 19 nt, Homo sapiens
  misc_RNA (1)...(19): siRNA sense strand
agagauagaaauugccaaa

SEQ ID NO: 2219738 - RNA, 19 nt, Homo sapiens
  misc_RNA (1)...(19): siRNA sense strand
gagagaugcgaguuggaaa

SEQ ID NO: 2219739 - RNA, 19 nt, Homo sapiens
  misc_RNA (1)...(19): siRNA sense strand
gcacuguauuaauggaaaa

SEQ ID NO: 2219740 - RNA, 19 nt, Homo sapiens
  misc_RNA (1)...(19): siRNA sense strand
cagcaggauuuuauagaaa

SEQ ID NO: 2219741 - RNA, 19 nt, Homo sapiens
  misc_RNA (1)...(19): siRNA sense strand
uaucaaagucacagcaaga

SEQ ID NO: 2219742 - RNA, 19 nt, Homo sapiens
  misc_RNA (1)...(19): siRNA sense strand
aggagaaaccagggacaaa

SEQ ID NO: 2219743 - RNA, 19 nt, Homo sapiens
  misc_RNA (1)...(19): siRNA sense strand
aagaauggucucagggaca

SEQ ID NO: 2219744 - RNA, 19 nt, Homo sapiens
  misc_RNA (1)...(19): siRNA sense strand
caggagaaacaguugacaa

SEQ ID NO: 2219745 - RNA, 19 nt, Homo sapiens
  misc_RNA (1)...(19): siRNA sense strand
uuguaacaguaaagaggua

SEQ ID NO: 2219746 - RNA, 19 nt, Homo sapiens
  misc_RNA (1)...(19): siRNA sense strand
ggguagguuauauagguaa

SEQ ID NO: 2219747 - RNA, 19 nt, Homo sapiens
  misc_RNA (1)...(19): siRNA sense strand
cugugaacuaagucagaaa

SEQ ID NO: 2219748 - RNA, 19 nt, Homo sapiens
  misc_RNA (1)...(19): siRNA sense strand
cucaaaagaugcaggagaa

SEQ ID NO: 2219749 - RNA, 19 nt, Homo sapiens
  misc_RNA (1)...(19): siRNA sense strand
caagaagagaggagggaag

SEQ ID NO: 2219750 - RNA, 19 nt, Homo sapiens
  misc_RNA (1)...(19): siRNA sense strand
gcauauuaucagagucuca

SEQ ID NO: 2219751 - RNA, 19 nt, Homo sapiens
  misc_RNA (1)...(19): siRNA sense strand
gagcauagcccaauccaga

SEQ ID NO: 2219752 - RNA, 19 nt, Homo sapiens
  misc_RNA (1)...(19): siRNA sense strand
ccuuugaggaguuaagcua

SEQ ID NO: 2219753 - RNA, 19 nt, Homo sapiens
  misc_RNA (1)...(19): siRNA sense strand
aggaacauaugguuggauu

SEQ ID NO: 2219754 - RNA, 19 nt, Homo sapiens
  misc_RNA (1)...(19): siRNA sense strand
cuggaaaaccugaagagaa

SEQ ID NO: 2219755 - RNA, 19 nt, Homo sapiens
  misc_RNA (1)...(19): siRNA sense strand
acauaugguuggauuaaca

SEQ ID NO: 2219756 - RNA, 19 nt, Homo sapiens
  misc_RNA (1)...(19): siRNA sense strand
gacccaaauuaacuggaaa

SEQ ID NO: 2219757 - RNA, 19 nt, Homo sapiens
  misc_RNA (1)...(19): siRNA sense strand
uggaaaaccugaagagaac

SEQ ID NO: 2219758 - RNA, 19 nt, Homo sapiens
  misc_RNA (1)...(19): siRNA sense strand
agaagggcccauaggauau

SEQ ID NO: 2219759 - RNA, 19 nt, Homo sapiens
  misc_RNA (1)...(19): siRNA sense strand
aggucuaaauaaauggaga

SEQ ID NO: 2219760 - RNA, 19 nt, Homo sapiens
  misc_RNA (1)...(19): siRNA sense strand
guaacaguaaagagguauu

SEQ ID NO: 2219761 - RNA, 19 nt, Homo sapiens
  misc_RNA (1)...(19): siRNA sense strand
ccauaggauaucaaaucaa

SEQ ID NO: 2219762 - RNA, 19 nt, Homo sapiens
  misc_RNA (1)...(19): siRNA sense strand
auuaaaggcauccagauaa

SEQ ID NO: 2219763 - RNA, 19 nt, Homo sapiens
  misc_RNA (1)...(19): siRNA sense strand
aguuaccagaagagcgaaa

SEQ ID NO: 2219764 - RNA, 19 nt, Homo sapiens
  misc_RNA (1)...(19): siRNA sense strand
cucuauagaagcaaugaaa

SEQ ID NO: 2219765 - RNA, 19 nt, Homo sapiens
  misc_RNA (1)...(19): siRNA sense strand
uuguauagcccuugaagca

SEQ ID NO: 2219766 - RNA, 19 nt, Homo sapiens
  misc_RNA (1)...(19): siRNA sense strand
gugcaauaaggcagaaaau

SEQ ID NO: 2219767 - RNA, 19 nt, Homo sapiens
  misc_RNA (1)...(19): siRNA sense strand
gaaugaaaucacucagcuu

SEQ ID NO: 2219768 - RNA, 19 nt, Homo sapiens
  misc_RNA (1)...(19): siRNA sense strand
cuugaagcauugacaucua

SEQ ID NO: 2219769 - RNA, 19 nt, Homo sapiens
  misc_RNA (1)...(19): siRNA sense strand
gugaacuaagucagaaauu

SEQ ID NO: 2219770 - RNA, 19 nt, Homo sapiens
  misc_RNA (1)...(19): siRNA sense strand
cuuaacaaacauuggcaga

SEQ ID NO: 2219771 - RNA, 19 nt, Homo sapiens
  misc_RNA (1)...(19): siRNA sense strand
ccagaagggcccauaggau

SEQ ID NO: 2219772 - RNA, 19 nt, Homo sapiens
  misc_RNA (1)...(19): siRNA sense strand
aaaacauuccucagagaaa

SEQ ID NO: 2219773 - RNA, 19 nt, Homo sapiens
  misc_RNA (1)...(19): siRNA sense strand
guauaauugaccuaaguga

SEQ ID NO: 2219774 - RNA, 19 nt, Homo sapiens
  misc_RNA (1)...(19): siRNA sense strand
gauuacacuccaugaccaa

SEQ ID NO: 2219775 - RNA, 19 nt, Homo sapiens
  misc_RNA (1)...(19): siRNA sense strand
gaagaaagacugaagacug

SEQ ID NO: 2219776 - RNA, 19 nt, Homo sapiens
  misc_RNA (1)...(19): siRNA sense strand
acaucagaaucuugagcca

SEQ ID NO: 2219777 - RNA, 19 nt, Homo sapiens
  misc_RNA (1)...(19): siRNA sense strand
caagagagucuaagguuuu

SEQ ID NO: 2219778 - RNA, 19 nt, Homo sapiens
  misc_RNA (1)...(19): siRNA sense strand
aggguagguuauauaggua

SEQ ID NO: 2219779 - RNA, 19 nt, Homo sapiens
  misc_RNA (1)...(19): siRNA sense strand
accugaagccaauaaguua

SEQ ID NO: 2219780 - RNA, 19 nt, Homo sapiens
  misc_RNA (1)...(19): siRNA sense strand
agcaagacucacaggaaaa

SEQ ID NO: 2219781 - RNA, 19 nt, Homo sapiens
  misc_RNA (1)...(19): siRNA sense strand
aucuauagguucaacacaa

SEQ ID NO: 2219782 - RNA, 19 nt, Homo sapiens
  misc_RNA (1)...(19): siRNA sense strand
gcuaccuaguggaguuauu

SEQ ID NO: 2219783 - RNA, 19 nt, Homo sapiens
  misc_RNA (1)...(19): siRNA sense strand
aaaagaugcaggagaaaca

SEQ ID NO: 2219784 - RNA, 19 nt, Homo sapiens
  misc_RNA (1)...(19): siRNA sense strand
agaaagagguuaaaggaga

SEQ ID NO: 2219785 - RNA, 19 nt, Homo sapiens
  misc_RNA (1)...(19): siRNA sense strand
ccuuaugacauguuggaaa

SEQ ID NO: 2219786 - RNA, 19 nt, Homo sapiens
  misc_RNA (1)...(19): siRNA sense strand
ggagaugacugaagcccaa

SEQ ID NO: 2219787 - RNA, 19 nt, Homo sapiens
  misc_RNA (1)...(19): siRNA sense strand
uguuagaagaccagaggau

SEQ ID NO: 2219788 - RNA, 19 nt, Homo sapiens
  misc_RNA (1)...(19): siRNA sense strand
ggcaaauguuagaagacca

SEQ ID NO: 2219789 - RNA, 19 nt, Homo sapiens
  misc_RNA (1)...(19): siRNA sense strand
augcuggagugaagaggaa

SEQ ID NO: 2219790 - RNA, 19 nt, Homo sapiens
  misc_RNA (1)...(19): siRNA sense strand
cagucaaagccuacaccaa

SEQ ID NO: 2219791 - RNA, 19 nt, Homo sapiens
  misc_RNA (1)...(19): siRNA sense strand
ggagagaggauguugccuu

SEQ ID NO: 2219792 - RNA, 19 nt, Homo sapiens
  misc_RNA (1)...(19): siRNA sense strand
uuaaaggagaccuggaaaa

SEQ ID NO: 2219793 - RNA, 19 nt, Homo sapiens
  misc_RNA (1)...(19): siRNA sense strand
gugaaaucuaugaugugaa

SEQ ID NO: 2219794 - RNA, 19 nt, Homo sapiens
  misc_RNA (1)...(19): siRNA sense strand
ggagugaagaggaaaagaa

SEQ ID NO: 2219795 - RNA, 19 nt, Homo sapiens
  misc_RNA (1)...(19): siRNA sense strand
uugauagguacaagagcua

SEQ ID NO: 2219796 - RNA, 19 nt, Homo sapiens
  misc_RNA (1)...(19): siRNA sense strand
gcuggagugaagaggaaaa

SEQ ID NO: 2219797 - RNA, 19 nt, Homo sapiens
  misc_RNA (1)...(19): siRNA sense strand
gugaagaugacauuagcau

SEQ ID NO: 2219798 - RNA, 19 nt, Homo sapiens
  misc_RNA (1)...(19): siRNA sense strand
gaaagagguuaaaggagac

SEQ ID NO: 2219799 - RNA, 19 nt, Homo sapiens
  misc_RNA (1)...(19): siRNA sense strand
ugaaaggaccaucaggaca

SEQ ID NO: 2219800 - RNA, 19 nt, Homo sapiens
  misc_RNA (1)...(19): siRNA sense strand
caggaaauuaacagagucu

SEQ ID NO: 2219801 - RNA, 19 nt, Homo sapiens
  misc_RNA (1)...(19): siRNA sense strand
gauagguacaagagcuaca

SEQ ID NO: 2219802 - RNA, 19 nt, Homo sapiens
  misc_RNA (1)...(19): siRNA sense strand
acaccaacuuugaugcuga

SEQ ID NO: 2219803 - RNA, 19 nt, Homo sapiens
  misc_RNA (1)...(19): siRNA sense strand
augacauguuggaaagcau

SEQ ID NO: 2219804 - RNA, 19 nt, Homo sapiens
  misc_RNA (1)...(19): siRNA sense strand
aggucugaauucaagagaa

SEQ ID NO: 2219805 - RNA, 19 nt, Homo sapiens
  misc_RNA (1)...(19): siRNA sense strand
acauuauuucggacacaua

SEQ ID NO: 2219806 - RNA, 19 nt, Homo sapiens
  misc_RNA (1)...(19): siRNA sense strand
gaaaguauuugauagguac

SEQ ID NO: 2219807 - RNA, 19 nt, Homo sapiens
  misc_RNA (1)...(19): siRNA sense strand
caucaagaaagagguuaaa

SEQ ID NO: 2219808 - RNA, 19 nt, Homo sapiens
  misc_RNA (1)...(19): siRNA sense strand
ccucauuuuaguugcguaa

SEQ ID NO: 2219809 - RNA, 19 nt, Homo sapiens
  misc_RNA (1)...(19): siRNA sense strand
gcacgaguggagaggacau

SEQ ID NO: 2219810 - RNA, 19 nt, Homo sapiens
  misc_RNA (1)...(19): siRNA sense strand
cugucuaggcucuaagcaa

SEQ ID NO: 2219811 - RNA, 19 nt, Homo sapiens
  misc_RNA (1)...(19): siRNA sense strand
cguuugaggaggucgcauu

SEQ ID NO: 2219812 - RNA, 19 nt, Homo sapiens
  misc_RNA (1)...(19): siRNA sense strand
uggcuaagguugggaggga

SEQ ID NO: 2219813 - RNA, 19 nt, Homo sapiens
  misc_RNA (1)...(19): siRNA sense strand
acacaaacuccaaagguac

SEQ ID NO: 2219814 - RNA, 19 nt, Homo sapiens
  misc_RNA (1)...(19): siRNA sense strand
gcuaagguugggagggaac

SEQ ID NO: 2219815 - RNA, 19 nt, Homo sapiens
  misc_RNA (1)...(19): siRNA sense strand
gcucgaauguggcagggca

SEQ ID NO: 2219816 - RNA, 19 nt, Homo sapiens
  misc_RNA (1)...(19): siRNA sense strand
ggcuaagguugggagggaa

SEQ ID NO: 2219817 - RNA, 19 nt, Homo sapiens
  misc_RNA (1)...(19): siRNA sense strand
gggugaaauaggagggugc

SEQ ID NO: 2219818 - RNA, 19 nt, Homo sapiens
  misc_RNA (1)...(19): siRNA sense strand
gcacagaggauggcgcaca

SEQ ID NO: 2219819 - RNA, 19 nt, Homo sapiens
  misc_RNA (1)...(19): siRNA sense strand
caugauuaccauagggaaa

SEQ ID NO: 2219820 - RNA, 19 nt, Homo sapiens
  misc_RNA (1)...(19): siRNA sense strand
ccacaauuccagagaagau

SEQ ID NO: 2219821 - RNA, 19 nt, Homo sapiens
  misc_RNA (1)...(19): siRNA sense strand
guuggaaggaagugaagaa

SEQ ID NO: 2219822 - RNA, 19 nt, Homo sapiens
  misc_RNA (1)...(19): siRNA sense strand
caggagaauauguggcaau

SEQ ID NO: 2219823 - RNA, 19 nt, Homo sapiens
  misc_RNA (1)...(19): siRNA sense strand
auggauauguugcggguau

SEQ ID NO: 2219824 - RNA, 19 nt, Homo sapiens
  misc_RNA (1)...(19): siRNA sense strand
gguuuaauucagaguauca

SEQ ID NO: 2219825 - RNA, 19 nt, Homo sapiens
  misc_RNA (1)...(19): siRNA sense strand
aaccauugccauugugaaa

SEQ ID NO: 2219826 - RNA, 19 nt, Homo sapiens
  misc_RNA (1)...(19): siRNA sense strand
ggaacaaugcagcugaaaa

SEQ ID NO: 2219827 - RNA, 19 nt, Homo sapiens
  misc_RNA (1)...(19): siRNA sense strand
cgucauggaguuugcaaca

SEQ ID NO: 2219828 - RNA, 19 nt, Homo sapiens
  misc_RNA (1)...(19): siRNA sense strand
augggaacacagagacuua

SEQ ID NO: 2219829 - RNA, 19 nt, Homo sapiens
  misc_RNA (1)...(19): siRNA sense strand
uuuaauuggaagagguuca

SEQ ID NO: 2219830 - RNA, 19 nt, Homo sapiens
  misc_RNA (1)...(19): siRNA sense strand
ggaagagguucaagaggug

SEQ ID NO: 2219831 - RNA, 19 nt, Homo sapiens
  misc_RNA (1)...(19): siRNA sense strand
agcugaagacagagaugaa

SEQ ID NO: 2219832 - RNA, 19 nt, Homo sapiens
  misc_RNA (1)...(19): siRNA sense strand
ggggaaaaugaaagugaga

SEQ ID NO: 2219833 - RNA, 19 nt, Homo sapiens
  misc_RNA (1)...(19): siRNA sense strand
uaccauagggaaagccaua

SEQ ID NO: 2219834 - RNA, 19 nt, Homo sapiens
  misc_RNA (1)...(19): siRNA sense strand
ucuuauuacuacugccauu

SEQ ID NO: 2219835 - RNA, 19 nt, Homo sapiens
  misc_RNA (1)...(19): siRNA sense strand
uggaagagguucaagaggu

SEQ ID NO: 2219836 - RNA, 19 nt, Homo sapiens
  misc_RNA (1)...(19): siRNA sense strand
aagucaucccucagugaaa

SEQ ID NO: 2219837 - RNA, 19 nt, Homo sapiens
  misc_RNA (1)...(19): siRNA sense strand
gaggagacaauuuuggaaa

SEQ ID NO: 2219838 - RNA, 19 nt, Homo sapiens
  misc_RNA (1)...(19): siRNA sense strand
acauggaggagggaagaua

SEQ ID NO: 2219839 - RNA, 19 nt, Homo sapiens
  misc_RNA (1)...(19): siRNA sense strand
ccagagaagauuucaucau

SEQ ID NO: 2219840 - RNA, 19 nt, Homo sapiens
  misc_RNA (1)...(19): siRNA sense strand
ggcaauggguuguuggaag

SEQ ID NO: 2219841 - RNA, 19 nt, Homo sapiens
  misc_RNA (1)...(19): siRNA sense strand
gauuuaauuggaagagguu

SEQ ID NO: 2219842 - RNA, 19 nt, Homo sapiens
  misc_RNA (1)...(19): siRNA sense strand
uggaaguauugaugaugga

SEQ ID NO: 2219843 - RNA, 19 nt, Homo sapiens
  misc_RNA (1)...(19): siRNA sense strand
uugagagagcuaugcuaua

SEQ ID NO: 2219844 - RNA, 19 nt, Homo sapiens
  misc_RNA (1)...(19): siRNA sense strand
guuacauggaggagggaag

SEQ ID NO: 2219845 - RNA, 19 nt, Homo sapiens
  misc_RNA (1)...(19): siRNA sense strand
auguuagauuccugaugaa

SEQ ID NO: 2219846 - RNA, 19 nt, Homo sapiens
  misc_RNA (1)...(19): siRNA sense strand
gaaauuaauaccagaggag

SEQ ID NO: 2219847 - RNA, 19 nt, Homo sapiens
  misc_RNA (1)...(19): siRNA sense strand
ugaagacagagaugaaaca

SEQ ID NO: 2219848 - RNA, 19 nt, Homo sapiens
  misc_RNA (1)...(19): siRNA sense strand
caaccaaagcaaggagcau

SEQ ID NO: 2219849 - RNA, 19 nt, Homo sapiens
  misc_RNA (1)...(19): siRNA sense strand
cagcaguaacagcaaguca

SEQ ID NO: 2219850 - RNA, 19 nt, Homo sapiens
  misc_RNA (1)...(19): siRNA sense strand
gacacuuauacuugguuua

SEQ ID NO: 2219851 - RNA, 19 nt, Homo sapiens
  misc_RNA (1)...(19): siRNA sense strand
aagacagagaugaaacauu

SEQ ID NO: 2219852 - RNA, 19 nt, Homo sapiens
  misc_RNA (1)...(19): siRNA sense strand
gggaaaauaugcagagaaa

SEQ ID NO: 2219853 - RNA, 19 nt, Homo sapiens
  misc_RNA (1)...(19): siRNA sense strand
aggaaagauuagugaggaa

SEQ ID NO: 2219854 - RNA, 19 nt, Homo sapiens
  misc_RNA (1)...(19): siRNA sense strand
ugauagaggcaaacggaua

SEQ ID NO: 2219855 - RNA, 19 nt, Homo sapiens
  misc_RNA (1)...(19): siRNA sense strand
aaguauaucugcagaacua

SEQ ID NO: 2219856 - RNA, 19 nt, Homo sapiens
  misc_RNA (1)...(19): siRNA sense strand
ccugaaagaauaaagguaa

SEQ ID NO: 2219857 - RNA, 19 nt, Homo sapiens
  misc_RNA (1)...(19): siRNA sense strand
ccagaaaguuagaggaaag

SEQ ID NO: 2219858 - RNA, 19 nt, Homo sapiens
  misc_RNA (1)...(19): siRNA sense strand
ggucaaaugccacgggaau

SEQ ID NO: 2219859 - RNA, 19 nt, Homo sapiens
  misc_RNA (1)...(19): siRNA sense strand
agaagagacacaugaaaua

SEQ ID NO: 2219860 - RNA, 19 nt, Homo sapiens
  misc_RNA (1)...(19): siRNA sense strand
guugaaacucagagaacua

SEQ ID NO: 2219861 - RNA, 19 nt, Homo sapiens
  misc_RNA (1)...(19): siRNA sense strand
caauuuggaaggugagaua

SEQ ID NO: 2219862 - RNA, 19 nt, Homo sapiens
  misc_RNA (1)...(19): siRNA sense strand
aagcaaaaccagugcaaaa

SEQ ID NO: 2219863 - RNA, 19 nt, Homo sapiens
  misc_RNA (1)...(19): siRNA sense strand
ucauauaccuccugagaca

SEQ ID NO: 2219864 - RNA, 19 nt, Homo sapiens
  misc_RNA (1)...(19): siRNA sense strand
gcuagacacuggagagaca

SEQ ID NO: 2219865 - RNA, 19 nt, Homo sapiens
  misc_RNA (1)...(19): siRNA sense strand
uggcaaaucaacaagguaa

SEQ ID NO: 2219866 - RNA, 19 nt, Homo sapiens
  misc_RNA (1)...(19): siRNA sense strand
cgggaauguaacagguaaa

SEQ ID NO: 2219867 - RNA, 19 nt, Homo sapiens
  misc_RNA (1)...(19): siRNA sense strand
ccacagugacccugcaaua

SEQ ID NO: 2219868 - RNA, 19 nt, Homo sapiens
  misc_RNA (1)...(19): siRNA sense strand
caugugaagucaagaggaa

SEQ ID NO: 2219869 - RNA, 19 nt, Homo sapiens
  misc_RNA (1)...(19): siRNA sense strand
aaguaaaagggaagggaaa

SEQ ID NO: 2219870 - RNA, 19 nt, Homo sapiens
  misc_RNA (1)...(19): siRNA sense strand
ucugacagcuaaugagaua

SEQ ID NO: 2219871 - RNA, 19 nt, Homo sapiens
  misc_RNA (1)...(19): siRNA sense strand
ggcaagagaaggaaggcaa

SEQ ID NO: 2219872 - RNA, 19 nt, Homo sapiens
  misc_RNA (1)...(19): siRNA sense strand
ggauagaauuuaaccugaa

SEQ ID NO: 2219873 - RNA, 19 nt, Homo sapiens
  misc_RNA (1)...(19): siRNA sense strand
aguuauuccuacagaacaa

SEQ ID NO: 2219874 - RNA, 19 nt, Homo sapiens
  misc_RNA (1)...(19): siRNA sense strand
ccaaaguaagucaaaguaa

SEQ ID NO: 2219875 - RNA, 19 nt, Homo sapiens
  misc_RNA (1)...(19): siRNA sense strand
gcaagagaaggaaggcaaa

SEQ ID NO: 2219876 - RNA, 19 nt, Homo sapiens
  misc_RNA (1)...(19): siRNA sense strand
gcggcagaauauagagaau

SEQ ID NO: 2219877 - RNA, 19 nt, Homo sapiens
  misc_RNA (1)...(19): siRNA sense strand
ucucagacucuuaaggaaa

SEQ ID NO: 2219878 - RNA, 19 nt, Homo sapiens
  misc_RNA (1)...(19): siRNA sense strand
acaaaugcagucugagaaa

SEQ ID NO: 2219879 - RNA, 19 nt, Homo sapiens
  misc_RNA (1)...(19): siRNA sense strand
guccaaaguuucacagaau

SEQ ID NO: 2219880 - RNA, 19 nt, Homo sapiens
  misc_RNA (1)...(19): siRNA sense strand
gaggauggagugaggacua

SEQ ID NO: 2219881 - RNA, 19 nt, Homo sapiens
  misc_RNA (1)...(19): siRNA sense strand
ggcagaauauagagaauca

SEQ ID NO: 2219882 - RNA, 19 nt, Homo sapiens
  misc_RNA (1)...(19): siRNA sense strand
gguaaauguaucugggcuu

SEQ ID NO: 2219883 - RNA, 19 nt, Homo sapiens
  misc_RNA (1)...(19): siRNA sense strand
ccacaaucgcuuugguuau

SEQ ID NO: 2219884 - RNA, 19 nt, Homo sapiens
  misc_RNA (1)...(19): siRNA sense strand
aggucaggguguugaggaa

SEQ ID NO: 2219885 - RNA, 19 nt, Homo sapiens
  misc_RNA (1)...(19): siRNA sense strand
aagaauugccugucauaua

SEQ ID NO: 2219886 - RNA, 19 nt, Homo sapiens
  misc_RNA (1)...(19): siRNA sense strand
aagaaaagggcgaguuaua

SEQ ID NO: 2219887 - RNA, 19 nt, Homo sapiens
  misc_RNA (1)...(19): siRNA sense strand
cuugagaaucuaauggaaa

SEQ ID NO: 2219888 - RNA, 19 nt, Homo sapiens
  misc_RNA (1)...(19): siRNA sense strand
aggcacuggcagaaggaaa

SEQ ID NO: 2219889 - RNA, 19 nt, Homo sapiens
  misc_RNA (1)...(19): siRNA sense strand
guacaugguucuaugcaau

SEQ ID NO: 2219890 - RNA, 19 nt, Homo sapiens
  misc_RNA (1)...(19): siRNA sense strand
caccaagauuucaggauau

SEQ ID NO: 2219891 - RNA, 19 nt, Homo sapiens
  misc_RNA (1)...(19): siRNA sense strand
gcucuaaugguaaggaauu

SEQ ID NO: 2219892 - RNA, 19 nt, Homo sapiens
  misc_RNA (1)...(19): siRNA sense strand
ggaaaggccaucaggacau

SEQ ID NO: 2219893 - RNA, 19 nt, Homo sapiens
  misc_RNA (1)...(19): siRNA sense strand
gucaaauagaugaggucaa

SEQ ID NO: 2219894 - RNA, 19 nt, Homo sapiens
  misc_RNA (1)...(19): siRNA sense strand
ggguuaaggcacuggcaga

SEQ ID NO: 2219895 - RNA, 19 nt, Homo sapiens
  misc_RNA (1)...(19): siRNA sense strand
acaaaacacuccagagcaa

SEQ ID NO: 2219896 - RNA, 19 nt, Homo sapiens
  misc_RNA (1)...(19): siRNA sense strand
ccaaauaggaaucaacauu

SEQ ID NO: 2219897 - RNA, 19 nt, Homo sapiens
  misc_RNA (1)...(19): siRNA sense strand
augcagagccucaagcaaa

SEQ ID NO: 2219898 - RNA, 19 nt, Homo sapiens
  misc_RNA (1)...(19): siRNA sense strand
caccagaaagugaggcuua

SEQ ID NO: 2219899 - RNA, 19 nt, Homo sapiens
  misc_RNA (1)...(19): siRNA sense strand
ccaagaaaucguuguuauu

SEQ ID NO: 2219900 - RNA, 19 nt, Homo sapiens
  misc_RNA (1)...(19): siRNA sense strand
gaaaauaugcagagaaagu

SEQ ID NO: 2219901 - RNA, 19 nt, Homo sapiens
  misc_RNA (1)...(19): siRNA sense strand
agguguaucuagugccuaa

SEQ ID NO: 2219902 - RNA, 19 nt, Homo sapiens
  misc_RNA (1)...(19): siRNA sense strand
gcauaaacagugaacucaa

SEQ ID NO: 2219903 - RNA, 19 nt, Homo sapiens
  misc_RNA (1)...(19): siRNA sense strand
ucuuaaagggaaacugaaa

SEQ ID NO: 2219904 - RNA, 19 nt, Homo sapiens
  misc_RNA (1)...(19): siRNA sense strand
aggcauaaauagcuugaau

SEQ ID NO: 2219905 - RNA, 19 nt, Homo sapiens
  misc_RNA (1)...(19): siRNA sense strand
cuuaaguggcuguaguuua

SEQ ID NO: 2219906 - RNA, 19 nt, Homo sapiens
  misc_RNA (1)...(19): siRNA sense strand
guucaauuauacaguggua

SEQ ID NO: 2219907 - RNA, 19 nt, Homo sapiens
  misc_RNA (1)...(19): siRNA sense strand
gcugaaaacgacagaacaa

SEQ ID NO: 2219908 - RNA, 19 nt, Homo sapiens
  misc_RNA (1)...(19): siRNA sense strand
gguaaauggucuuugccuu

SEQ ID NO: 2219909 - RNA, 19 nt, Homo sapiens
  misc_RNA (1)...(19): siRNA sense strand
cagaaaagcgaaagcacua

SEQ ID NO: 2219910 - RNA, 19 nt, Homo sapiens
  misc_RNA (1)...(19): siRNA sense strand
gcuuuaugcuggacaugaa

SEQ ID NO: 2219911 - RNA, 19 nt, Homo sapiens
  misc_RNA (1)...(19): siRNA sense strand
cugagaauaagcagcaaua

SEQ ID NO: 2219912 - RNA, 19 nt, Homo sapiens
  misc_RNA (1)...(19): siRNA sense strand
cugagaaaguaaagacguu

SEQ ID NO: 2219913 - RNA, 19 nt, Homo sapiens
  misc_RNA (1)...(19): siRNA sense strand
cguguaagacaaugaauuu

SEQ ID NO: 2219914 - RNA, 19 nt, Homo sapiens
  misc_RNA (1)...(19): siRNA sense strand
gcagagaaaguuaccuaaa

SEQ ID NO: 2219915 - RNA, 19 nt, Homo sapiens
  misc_RNA (1)...(19): siRNA sense strand
ccagaacuuuaaugacaaa

SEQ ID NO: 2219916 - RNA, 19 nt, Homo sapiens
  misc_RNA (1)...(19): siRNA sense strand
aagggaaacugaaaggcua

SEQ ID NO: 2219917 - RNA, 19 nt, Homo sapiens
  misc_RNA (1)...(19): siRNA sense strand
cugaugaaauucugugauu

SEQ ID NO: 2219918 - RNA, 19 nt, Homo sapiens
  misc_RNA (1)...(19): siRNA sense strand
aagaagagacacaugaaau

SEQ ID NO: 2219919 - RNA, 19 nt, Homo sapiens
  misc_RNA (1)...(19): siRNA sense strand
aauucaguguugagcauaa

SEQ ID NO: 2219920 - RNA, 19 nt, Homo sapiens
  misc_RNA (1)...(19): siRNA sense strand
cauaaauguuaaaguggga

SEQ ID NO: 2219921 - RNA, 19 nt, Homo sapiens
  misc_RNA (1)...(19): siRNA sense strand
uaggaaauuggcaggguua

SEQ ID NO: 2219922 - RNA, 19 nt, Homo sapiens
  misc_RNA (1)...(19): siRNA sense strand
ccacaaguccagacgauga

SEQ ID NO: 2219923 - RNA, 19 nt, Homo sapiens
  misc_RNA (1)...(19): siRNA sense strand
cugaaaugcuccagugcca

SEQ ID NO: 2219924 - RNA, 19 nt, Homo sapiens
  misc_RNA (1)...(19): siRNA sense strand
acuucuagguucuguuaua

SEQ ID NO: 2219925 - RNA, 19 nt, Homo sapiens
  misc_RNA (1)...(19): siRNA sense strand
gguucaaguucaauagcuu

SEQ ID NO: 2219926 - RNA, 19 nt, Homo sapiens
  misc_RNA (1)...(19): siRNA sense strand
ucaaauaggcacaucauau

SEQ ID NO: 2219927 - RNA, 19 nt, Homo sapiens
  misc_RNA (1)...(19): siRNA sense strand
gcgcuaucugagagggcaa

SEQ ID NO: 2219928 - RNA, 19 nt, Homo sapiens
  misc_RNA (1)...(19): siRNA sense strand
ggagaaaagacaucaaaau

SEQ ID NO: 2219929 - RNA, 19 nt, Homo sapiens
  misc_RNA (1)...(19): siRNA sense strand
ggaaagaacauguugggaa

SEQ ID NO: 2219930 - RNA, 19 nt, Homo sapiens
  misc_RNA (1)...(19): siRNA sense strand
gcucaagaguucaagacca

SEQ ID NO: 2219931 - RNA, 19 nt, Homo sapiens
  misc_RNA (1)...(19): siRNA sense strand
cgaagagaugauuggaaga

SEQ ID NO: 2219932 - RNA, 19 nt, Homo sapiens
  misc_RNA (1)...(19): siRNA sense strand
caaaugaguuucaggugga

SEQ ID NO: 2219933 - RNA, 19 nt, Homo sapiens
  misc_RNA (1)...(19): siRNA sense strand
cugcagacugagugaaaca

SEQ ID NO: 2219934 - RNA, 19 nt, Homo sapiens
  misc_RNA (1)...(19): siRNA sense strand
gggaauugguacuggcuag

SEQ ID NO: 2219935 - RNA, 19 nt, Homo sapiens
  misc_RNA (1)...(19): siRNA sense strand
acaacaugcccuacagcua

SEQ ID NO: 2219936 - RNA, 19 nt, Homo sapiens
  misc_RNA (1)...(19): siRNA sense strand
ccgaagagaugauuggaag

SEQ ID NO: 2219937 - RNA, 19 nt, Homo sapiens
  misc_RNA (1)...(19): siRNA sense strand
gcaucuugauacuggacuu

SEQ ID NO: 2219938 - RNA, 19 nt, Homo sapiens
  misc_RNA (1)...(19): siRNA sense strand
ucuccagaacugugggcaa

SEQ ID NO: 2219939 - RNA, 19 nt, Homo sapiens
  misc_RNA (1)...(19): siRNA sense strand
cccaaauggacuaagaaaa

SEQ ID NO: 2219940 - RNA, 19 nt, Homo sapiens
  misc_RNA (1)...(19): siRNA sense strand
acccaaauggacuaagaaa

SEQ ID NO: 2219941 - RNA, 19 nt, Homo sapiens
  misc_RNA (1)...(19): siRNA sense strand
aauugguacuggcuagaaa

SEQ ID NO: 2219942 - RNA, 19 nt, Homo sapiens
  misc_RNA (1)...(19): siRNA sense strand
agacugagugaaacagcaa

SEQ ID NO: 2219943 - RNA, 19 nt, Homo sapiens
  misc_RNA (1)...(19): siRNA sense strand
cagguuaagauaaagugaa

SEQ ID NO: 2219944 - RNA, 19 nt, Homo sapiens
  misc_RNA (1)...(19): siRNA sense strand
cagcauguuccgaagagau

SEQ ID NO: 2219945 - RNA, 19 nt, Homo sapiens
  misc_RNA (1)...(19): siRNA sense strand
ugucuaugaaugagaaagu

SEQ ID NO: 2219946 - RNA, 19 nt, Homo sapiens
  misc_RNA (1)...(19): siRNA sense strand
acuaauaggauugguucaa

SEQ ID NO: 2219947 - RNA, 19 nt, Homo sapiens
  misc_RNA (1)...(19): siRNA sense strand
gugaggacacagagggaag

SEQ ID NO: 2219948 - RNA, 19 nt, Homo sapiens
  misc_RNA (1)...(19): siRNA sense strand
uagcaacccaaauggacua

SEQ ID NO: 2219949 - RNA, 19 nt, Homo sapiens
  misc_RNA (1)...(19): siRNA sense strand
aucaauucaugcugguuua

SEQ ID NO: 2219950 - RNA, 19 nt, Homo sapiens
  misc_RNA (1)...(19): siRNA sense strand
gagugaaacagcaagaucu

SEQ ID NO: 2219951 - RNA, 19 nt, Homo sapiens
  misc_RNA (1)...(19): siRNA sense strand
ccaaauggacuaagaaaac

SEQ ID NO: 2219952 - RNA, 19 nt, Homo sapiens
  misc_RNA (1)...(19): siRNA sense strand
cuguagugguuuaagauaa

SEQ ID NO: 2219953 - RNA, 19 nt, Homo sapiens
  misc_RNA (1)...(19): siRNA sense strand
aaguagugguagagaauuu

SEQ ID NO: 2219954 - RNA, 19 nt, Homo sapiens
  misc_RNA (1)...(19): siRNA sense strand
cugauaagucauagggaau

SEQ ID NO: 2219955 - RNA, 19 nt, Homo sapiens
  misc_RNA (1)...(19): siRNA sense strand
aggccagagaagagaaaua

SEQ ID NO: 2219956 - RNA, 19 nt, Homo sapiens
  misc_RNA (1)...(19): siRNA sense strand
cccaagaaguagugguaga

SEQ ID NO: 2219957 - RNA, 19 nt, Homo sapiens
  misc_RNA (1)...(19): siRNA sense strand
ugggaaacauggugaaaca

SEQ ID NO: 2219958 - RNA, 19 nt, Homo sapiens
  misc_RNA (1)...(19): siRNA sense strand
agaaguagugguagagaau

SEQ ID NO: 2219959 - RNA, 19 nt, Homo sapiens
  misc_RNA (1)...(19): siRNA sense strand
cuggaaaggccucaggaaa

SEQ ID NO: 2219960 - RNA, 19 nt, Homo sapiens
  misc_RNA (1)...(19): siRNA sense strand
caguuugggaagaaagaaa

SEQ ID NO: 2219961 - RNA, 19 nt, Homo sapiens
  misc_RNA (1)...(19): siRNA sense strand
aaagugaagccuagugaaa

SEQ ID NO: 2219962 - RNA, 19 nt, Homo sapiens
  misc_RNA (1)...(19): siRNA sense strand
aagaaguagugguagagaa

SEQ ID NO: 2219963 - RNA, 19 nt, Homo sapiens
  misc_RNA (1)...(19): siRNA sense strand
gcauguuauuguugaucaa

SEQ ID NO: 2219964 - RNA, 19 nt, Homo sapiens
  misc_RNA (1)...(19): siRNA sense strand
acugauaagucauagggaa

SEQ ID NO: 2219965 - RNA, 19 nt, Homo sapiens
  misc_RNA (1)...(19): siRNA sense strand
cggugaaugaaaugauuaa

SEQ ID NO: 2219966 - RNA, 19 nt, Homo sapiens
  misc_RNA (1)...(19): siRNA sense strand
ccgaaaaccgcgagaaaga

SEQ ID NO: 2219967 - RNA, 19 nt, Homo sapiens
  misc_RNA (1)...(19): siRNA sense strand
agggauaagucaaguuaga

SEQ ID NO: 2219968 - RNA, 19 nt, Homo sapiens
  misc_RNA (1)...(19): siRNA sense strand
caugaggucaggagauaaa

SEQ ID NO: 2219969 - RNA, 19 nt, Homo sapiens
  misc_RNA (1)...(19): siRNA sense strand
gcagaucaccugaggguca

SEQ ID NO: 2219970 - RNA, 19 nt, Homo sapiens
  misc_RNA (1)...(19): siRNA sense strand
ccuuagagcacuucaguuu

SEQ ID NO: 2219971 - RNA, 19 nt, Homo sapiens
  misc_RNA (1)...(19): siRNA sense strand
acuuaaaccucagaagaaa

SEQ ID NO: 2219972 - RNA, 19 nt, Homo sapiens
  misc_RNA (1)...(19): siRNA sense strand
aggcauuuauugcuagaua

SEQ ID NO: 2219973 - RNA, 19 nt, Homo sapiens
  misc_RNA (1)...(19): siRNA sense strand
gggcaagcaagcaagacaa

SEQ ID NO: 2219974 - RNA, 19 nt, Homo sapiens
  misc_RNA (1)...(19): siRNA sense strand
ccauauaggaauaaaccau

SEQ ID NO: 2219975 - RNA, 19 nt, Homo sapiens
  misc_RNA (1)...(19): siRNA sense strand
gugaauaugcugucaugaa

SEQ ID NO: 2219976 - RNA, 19 nt, Homo sapiens
  misc_RNA (1)...(19): siRNA sense strand
cagaagcugacgagagauu

SEQ ID NO: 2219977 - RNA, 19 nt, Homo sapiens
  misc_RNA (1)...(19): siRNA sense strand
ggauuuucauguagguaaa

SEQ ID NO: 2219978 - RNA, 19 nt, Homo sapiens
  misc_RNA (1)...(19): siRNA sense strand
aagaaagagugaagcggga

SEQ ID NO: 2219979 - RNA, 19 nt, Homo sapiens
  misc_RNA (1)...(19): siRNA sense strand
ggugauuauuggcagaauu

SEQ ID NO: 2219980 - RNA, 19 nt, Homo sapiens
  misc_RNA (1)...(19): siRNA sense strand
guuuaacggugaaugaaau

SEQ ID NO: 2219981 - RNA, 19 nt, Homo sapiens
  misc_RNA (1)...(19): siRNA sense strand
ggucaggaguucaaggcca

SEQ ID NO: 2219982 - RNA, 19 nt, Homo sapiens
  misc_RNA (1)...(19): siRNA sense strand
ugaaagauugacugaguau

SEQ ID NO: 2219983 - RNA, 19 nt, Homo sapiens
  misc_RNA (1)...(19): siRNA sense strand
ccaugagagaucagaugaa

SEQ ID NO: 2219984 - RNA, 19 nt, Homo sapiens
  misc_RNA (1)...(19): siRNA sense strand
ucauguagguaaaggaacu

SEQ ID NO: 2219985 - RNA, 19 nt, Homo sapiens
  misc_RNA (1)...(19): siRNA sense strand
ggaagaaagaaaaccuaaa

SEQ ID NO: 2219986 - RNA, 19 nt, Homo sapiens
  misc_RNA (1)...(19): siRNA sense strand
agugggauaugaaaggaaa

SEQ ID NO: 2219987 - RNA, 19 nt, Homo sapiens
  misc_RNA (1)...(19): siRNA sense strand
gaucaugaggucaggagau

SEQ ID NO: 2219988 - RNA, 19 nt, Homo sapiens
  misc_RNA (1)...(19): siRNA sense strand
ggccgaaaaccgcgagaaa

SEQ ID NO: 2219989 - RNA, 19 nt, Homo sapiens
  misc_RNA (1)...(19): siRNA sense strand
aguaagugaugcaagccaa

SEQ ID NO: 2219990 - RNA, 19 nt, Homo sapiens
  misc_RNA (1)...(19): siRNA sense strand
gagcagagaucaugccacu

SEQ ID NO: 2219991 - RNA, 19 nt, Homo sapiens
  misc_RNA (1)...(19): siRNA sense strand
ccagagaagagaaauaaaa

SEQ ID NO: 2219992 - RNA, 19 nt, Homo sapiens
  misc_RNA (1)...(19): siRNA sense strand
uguuuaacggugaaugaaa

SEQ ID NO: 2219993 - RNA, 19 nt, Homo sapiens
  misc_RNA (1)...(19): siRNA sense strand
cagaagaaaauaacagcaa

SEQ ID NO: 2219994 - RNA, 19 nt, Homo sapiens
  misc_RNA (1)...(19): siRNA sense strand
gggcaaauucugagggagg

SEQ ID NO: 2219995 - RNA, 19 nt, Homo sapiens
  misc_RNA (1)...(19): siRNA sense strand
uggaaaggccucaggaaac

SEQ ID NO: 2219996 - RNA, 19 nt, Homo sapiens
  misc_RNA (1)...(19): siRNA sense strand
ucuuaagaguugaaagucu

SEQ ID NO: 2219997 - RNA, 19 nt, Homo sapiens
  misc_RNA (1)...(19): siRNA sense strand
augcaaugauguagaauac

SEQ ID NO: 2219998 - RNA, 19 nt, Homo sapiens
  misc_RNA (1)...(19): siRNA sense strand
gacacaaggcagaggggaa

SEQ ID NO: 2219999 - RNA, 19 nt, Homo sapiens
  misc_RNA (1)...(19): siRNA sense strand
agaacagcaccaaggguau

SEQ ID NO: 2220000 - RNA, 19 nt, Homo sapiens
  misc_RNA (1)...(19): siRNA sense strand
caagacaagcugcagcaaa

SEQ ID NO: 2220001 - RNA, 19 nt, Homo sapiens
  misc_RNA (1)...(19): siRNA sense strand
agaacaugguuauuggaca

SEQ ID NO: 2220002 - RNA, 19 nt, Homo sapiens
  misc_RNA (1)...(19): siRNA sense strand
agugaagccuagugaaacu

SEQ ID NO: 2220003 - RNA, 19 nt, Homo sapiens
  misc_RNA (1)...(19): siRNA sense strand
ccuugaaguccuacaguca

SEQ ID NO: 2220004 - RNA, 19 nt, Homo sapiens
  misc_RNA (1)...(19): siRNA sense strand
gugugaaaguuaugcaugu

SEQ ID NO: 2220005 - RNA, 19 nt, Homo sapiens
  misc_RNA (1)...(19): siRNA sense strand
cugaaagauugacugagua

SEQ ID NO: 2220006 - RNA, 19 nt, Homo sapiens
  misc_RNA (1)...(19): siRNA sense strand
ggauaugaaaggaaaauga

SEQ ID NO: 2220007 - RNA, 19 nt, Homo sapiens
  misc_RNA (1)...(19): siRNA sense strand
guaagugaugcaagccaaa

SEQ ID NO: 2220008 - RNA, 19 nt, Homo sapiens
  misc_RNA (1)...(19): siRNA sense strand
aagaacagcaccaagggua

SEQ ID NO: 2220009 - RNA, 19 nt, Homo sapiens
  misc_RNA (1)...(19): siRNA sense strand
cauuagggcaagcaagcaa

SEQ ID NO: 2220010 - RNA, 19 nt, Homo sapiens
  misc_RNA (1)...(19): siRNA sense strand
cguuggugauucaagggaa

SEQ ID NO: 2220011 - RNA, 19 nt, Homo sapiens
  misc_RNA (1)...(19): siRNA sense strand
aacuuaaaccucagaagaa

SEQ ID NO: 2220012 - RNA, 19 nt, Homo sapiens
  misc_RNA (1)...(19): siRNA sense strand
ugucaucaacugaaagauu

SEQ ID NO: 2220013 - RNA, 19 nt, Homo sapiens
  misc_RNA (1)...(19): siRNA sense strand
ucaucaacgaaucgguaua

SEQ ID NO: 2220014 - RNA, 19 nt, Homo sapiens
  misc_RNA (1)...(19): siRNA sense strand
aaaccugagaccagagaga

SEQ ID NO: 2220015 - RNA, 19 nt, Homo sapiens
  misc_RNA (1)...(19): siRNA sense strand
gagugggauaugaaaggaa

SEQ ID NO: 2220016 - RNA, 19 nt, Homo sapiens
  misc_RNA (1)...(19): siRNA sense strand
acugaaagauugacugagu

SEQ ID NO: 2220017 - RNA, 19 nt, Homo sapiens
  misc_RNA (1)...(19): siRNA sense strand
gugaaaguuaugcauguua

SEQ ID NO: 2220018 - RNA, 19 nt, Homo sapiens
  misc_RNA (1)...(19): siRNA sense strand
aaagagauuuauuggcuca

SEQ ID NO: 2220019 - RNA, 19 nt, Homo sapiens
  misc_RNA (1)...(19): siRNA sense strand
auagaucgcuggagacaca

SEQ ID NO: 2220020 - RNA, 19 nt, Homo sapiens
  misc_RNA (1)...(19): siRNA sense strand
gcagggagcaagaaagagu

SEQ ID NO: 2220021 - RNA, 19 nt, Homo sapiens
  misc_RNA (1)...(19): siRNA sense strand
caaauaagcuagagugaca

SEQ ID NO: 2220022 - RNA, 19 nt, Homo sapiens
  misc_RNA (1)...(19): siRNA sense strand
ggguacaggcauuggguaa

SEQ ID NO: 2220023 - RNA, 19 nt, Homo sapiens
  misc_RNA (1)...(19): siRNA sense strand
gggcaggaguaaaggaaca

SEQ ID NO: 2220024 - RNA, 19 nt, Homo sapiens
  misc_RNA (1)...(19): siRNA sense strand
aggcauuugugaagaauaa

SEQ ID NO: 2220025 - RNA, 19 nt, Homo sapiens
  misc_RNA (1)...(19): siRNA sense strand
agucagagggagaggcaaa

SEQ ID NO: 2220026 - RNA, 19 nt, Homo sapiens
  misc_RNA (1)...(19): siRNA sense strand
gcaaguagcuauugugaca

SEQ ID NO: 2220027 - RNA, 19 nt, Homo sapiens
  misc_RNA (1)...(19): siRNA sense strand
cuucagaacucaaaggcua

SEQ ID NO: 2220028 - RNA, 19 nt, Homo sapiens
  misc_RNA (1)...(19): siRNA sense strand
ggacaagaagccugggcaa

SEQ ID NO: 2220029 - RNA, 19 nt, Homo sapiens
  misc_RNA (1)...(19): siRNA sense strand
gggaauuccucuuauuaaa

SEQ ID NO: 2220030 - RNA, 19 nt, Homo sapiens
  misc_RNA (1)...(19): siRNA sense strand
cgugggaauucaagauuaa

SEQ ID NO: 2220031 - RNA, 19 nt, Homo sapiens
  misc_RNA (1)...(19): siRNA sense strand
acagaagguuccagaagua

SEQ ID NO: 2220032 - RNA, 19 nt, Homo sapiens
  misc_RNA (1)...(19): siRNA sense strand
ugaaauagauccagagaug

SEQ ID NO: 2220033 - RNA, 19 nt, Homo sapiens
  misc_RNA (1)...(19): siRNA sense strand
ugucaaagccauucaacaa

SEQ ID NO: 2220034 - RNA, 19 nt, Homo sapiens
  misc_RNA (1)...(19): siRNA sense strand
gaagagagcucguguggga

SEQ ID NO: 2220035 - RNA, 19 nt, Homo sapiens
  misc_RNA (1)...(19): siRNA sense strand
ccacaaaucucuagggcag

SEQ ID NO: 2220036 - RNA, 19 nt, Homo sapiens
  misc_RNA (1)...(19): siRNA sense strand
ggguaaauacacugaggau

SEQ ID NO: 2220037 - RNA, 19 nt, Homo sapiens
  misc_RNA (1)...(19): siRNA sense strand
acacacacacacagaauaa

SEQ ID NO: 2220038 - RNA, 19 nt, Homo sapiens
  misc_RNA (1)...(19): siRNA sense strand
gagacugggaagaaauaaa

SEQ ID NO: 2220039 - RNA, 19 nt, Homo sapiens
  misc_RNA (1)...(19): siRNA sense strand
acagagagauggacaguca

SEQ ID NO: 2220040 - RNA, 19 nt, Homo sapiens
  misc_RNA (1)...(19): siRNA sense strand
ccaaguaaaucauuccaua

SEQ ID NO: 2220041 - RNA, 19 nt, Homo sapiens
  misc_RNA (1)...(19): siRNA sense strand
cguacuaugugccaggaaa

SEQ ID NO: 2220042 - RNA, 19 nt, Homo sapiens
  misc_RNA (1)...(19): siRNA sense strand
aggcaaaccaugcaggcaa

SEQ ID NO: 2220043 - RNA, 19 nt, Homo sapiens
  misc_RNA (1)...(19): siRNA sense strand
gugcacaccuaacaagaaa

SEQ ID NO: 2220044 - RNA, 19 nt, Homo sapiens
  misc_RNA (1)...(19): siRNA sense strand
cuccagaaggugaggaaau

SEQ ID NO: 2220045 - RNA, 19 nt, Homo sapiens
  misc_RNA (1)...(19): siRNA sense strand
aagaagggcaggagacuau

SEQ ID NO: 2220046 - RNA, 19 nt, Homo sapiens
  misc_RNA (1)...(19): siRNA sense strand
ccaacaagcugcaagagga

SEQ ID NO: 2220047 - RNA, 19 nt, Homo sapiens
  misc_RNA (1)...(19): siRNA sense strand
ggcagaaggugaaaggcau

SEQ ID NO: 2220048 - RNA, 19 nt, Homo sapiens
  misc_RNA (1)...(19): siRNA sense strand
ggacacagagagauggaca

SEQ ID NO: 2220049 - RNA, 19 nt, Homo sapiens
  misc_RNA (1)...(19): siRNA sense strand
gaaauuucuuccaccaaua

SEQ ID NO: 2220050 - RNA, 19 nt, Homo sapiens
  misc_RNA (1)...(19): siRNA sense strand
ggacacagccaaaccauau

SEQ ID NO: 2220051 - RNA, 19 nt, Homo sapiens
  misc_RNA (1)...(19): siRNA sense strand
guucaaaguuccacaaauc

SEQ ID NO: 2220052 - RNA, 19 nt, Homo sapiens
  misc_RNA (1)...(19): siRNA sense strand
augagaacagcaugggaaa

SEQ ID NO: 2220053 - RNA, 19 nt, Homo sapiens
  misc_RNA (1)...(19): siRNA sense strand
gggaauucaagauaagauu

SEQ ID NO: 2220054 - RNA, 19 nt, Homo sapiens
  misc_RNA (1)...(19): siRNA sense strand
ggacacagccaaaccauau

SEQ ID NO: 2220055 - RNA, 19 nt, Homo sapiens
  misc_RNA (1)...(19): siRNA sense strand
gaggagcacucaagaccaa

SEQ ID NO: 2220056 - RNA, 19 nt, Homo sapiens
  misc_RNA (1)...(19): siRNA sense strand
ugacuuguauugagggaca

SEQ ID NO: 2220057 - RNA, 19 nt, Homo sapiens
  misc_RNA (1)...(19): siRNA sense strand
ggaaagaugcuaagggcac

SEQ ID NO: 2220058 - RNA, 19 nt, Homo sapiens
  misc_RNA (1)...(19): siRNA sense strand
aagcauggcagaaggugaa

SEQ ID NO: 2220059 - RNA, 19 nt, Homo sapiens
  misc_RNA (1)...(19): siRNA sense strand
gagaguuagugcaggggaa

SEQ ID NO: 2220060 - RNA, 19 nt, Homo sapiens
  misc_RNA (1)...(19): siRNA sense strand
guaaaguggaaaugcuaau

SEQ ID NO: 2220061 - RNA, 19 nt, Homo sapiens
  misc_RNA (1)...(19): siRNA sense strand
gggaagguguugucagcga

SEQ ID NO: 2220062 - RNA, 19 nt, Homo sapiens
  misc_RNA (1)...(19): siRNA sense strand
cagcagacaagaaaagaaa

SEQ ID NO: 2220063 - RNA, 19 nt, Homo sapiens
  misc_RNA (1)...(19): siRNA sense strand
caugagaacagcacaggaa

SEQ ID NO: 2220064 - RNA, 19 nt, Homo sapiens
  misc_RNA (1)...(19): siRNA sense strand
agggagaggcaaagcuaau

SEQ ID NO: 2220065 - RNA, 19 nt, Homo sapiens
  misc_RNA (1)...(19): siRNA sense strand
gaguugaaguggaucccua

SEQ ID NO: 2220066 - RNA, 19 nt, Homo sapiens
  misc_RNA (1)...(19): siRNA sense strand
aaucauggcagaaggugaa

SEQ ID NO: 2220067 - RNA, 19 nt, Homo sapiens
  misc_RNA (1)...(19): siRNA sense strand
auguaaaggauucagcaua

SEQ ID NO: 2220068 - RNA, 19 nt, Homo sapiens
  misc_RNA (1)...(19): siRNA sense strand
uaguacagcacuugaaauu

SEQ ID NO: 2220069 - RNA, 19 nt, Homo sapiens
  misc_RNA (1)...(19): siRNA sense strand
caauaaagagagacccuau

SEQ ID NO: 2220070 - RNA, 19 nt, Homo sapiens
  misc_RNA (1)...(19): siRNA sense strand
aaauagauccagagauguu

SEQ ID NO: 2220071 - RNA, 19 nt, Homo sapiens
  misc_RNA (1)...(19): siRNA sense strand
guuaugaguugaaguggau

SEQ ID NO: 2220072 - RNA, 19 nt, Homo sapiens
  misc_RNA (1)...(19): siRNA sense strand
ggcuaaggugggagaauca

SEQ ID NO: 2220073 - RNA, 19 nt, Homo sapiens
  misc_RNA (1)...(19): siRNA sense strand
gcauuaacuuagaaaucca

SEQ ID NO: 2220074 - RNA, 19 nt, Homo sapiens
  misc_RNA (1)...(19): siRNA sense strand
cagcauagugacuggcaca

SEQ ID NO: 2220075 - RNA, 19 nt, Homo sapiens
  misc_RNA (1)...(19): siRNA sense strand
cccuaugcauuguuaauaa

SEQ ID NO: 2220076 - RNA, 19 nt, Homo sapiens
  misc_RNA (1)...(19): siRNA sense strand
cagcauuaacuuagaaauc

SEQ ID NO: 2220077 - RNA, 19 nt, Homo sapiens
  misc_RNA (1)...(19): siRNA sense strand
augcuuugcugcuuagaaa

SEQ ID NO: 2220078 - RNA, 19 nt, Homo sapiens
  misc_RNA (1)...(19): siRNA sense strand
gagaacagcaugggaaaga

SEQ ID NO: 2220079 - RNA, 19 nt, Homo sapiens
  misc_RNA (1)...(19): siRNA sense strand
cuguaaaguggaaaugcua

SEQ ID NO: 2220080 - RNA, 19 nt, Homo sapiens
  misc_RNA (1)...(19): siRNA sense strand
ggcugauacuggagcuauu

SEQ ID NO: 2220081 - RNA, 19 nt, Homo sapiens
  misc_RNA (1)...(19): siRNA sense strand
cagcccagguggucaacaa

SEQ ID NO: 2220082 - RNA, 19 nt, Homo sapiens
  misc_RNA (1)...(19): siRNA sense strand
caaucauggcagaagguga

SEQ ID NO: 2220083 - RNA, 19 nt, Homo sapiens
  misc_RNA (1)...(19): siRNA sense strand
caacaagcugcaagaggau

SEQ ID NO: 2220084 - RNA, 19 nt, Homo sapiens
  misc_RNA (1)...(19): siRNA sense strand
gcucaaggucacacagcau

SEQ ID NO: 2220085 - RNA, 19 nt, Homo sapiens
  misc_RNA (1)...(19): siRNA sense strand
cagaaguagagcagaggca

SEQ ID NO: 2220086 - RNA, 19 nt, Homo sapiens
  misc_RNA (1)...(19): siRNA sense strand
ucuuaaagcuccaaaauga

SEQ ID NO: 2220087 - RNA, 19 nt, Homo sapiens
  misc_RNA (1)...(19): siRNA sense strand
ccaccagucucuuugcuaa

SEQ ID NO: 2220088 - RNA, 19 nt, Homo sapiens
  misc_RNA (1)...(19): siRNA sense strand
uggcuacgcaggaggcuaa

SEQ ID NO: 2220089 - RNA, 19 nt, Homo sapiens
  misc_RNA (1)...(19): siRNA sense strand
gguacaggcauuggguaaa

SEQ ID NO: 2220090 - RNA, 19 nt, Homo sapiens
  misc_RNA (1)...(19): siRNA sense strand
uaacugaaauugggaagaa

SEQ ID NO: 2220091 - RNA, 19 nt, Homo sapiens
  misc_RNA (1)...(19): siRNA sense strand
gucaaauaagcuagaguga

SEQ ID NO: 2220092 - RNA, 19 nt, Homo sapiens
  misc_RNA (1)...(19): siRNA sense strand
cugcaggugacuugaauuu

SEQ ID NO: 2220093 - RNA, 19 nt, Homo sapiens
  misc_RNA (1)...(19): siRNA sense strand
cugaggcauuugugaagaa

SEQ ID NO: 2220094 - RNA, 19 nt, Homo sapiens
  misc_RNA (1)...(19): siRNA sense strand
aauauaaacuccagaaggu

SEQ ID NO: 2220095 - RNA, 19 nt, Homo sapiens
  misc_RNA (1)...(19): siRNA sense strand
gagcagaggcaggacacaa

SEQ ID NO: 2220096 - RNA, 19 nt, Homo sapiens
  misc_RNA (1)...(19): siRNA sense strand
ccugagacugggaagaaau

SEQ ID NO: 2220097 - RNA, 19 nt, Homo sapiens
  misc_RNA (1)...(19): siRNA sense strand
agacaagaaaagaaagaga

SEQ ID NO: 2220098 - RNA, 19 nt, Homo sapiens
  misc_RNA (1)...(19): siRNA sense strand
caucaguugucaugagacu

SEQ ID NO: 2220099 - RNA, 19 nt, Homo sapiens
  misc_RNA (1)...(19): siRNA sense strand
acgugggaauucaagauua

SEQ ID NO: 2220100 - RNA, 19 nt, Homo sapiens
  misc_RNA (1)...(19): siRNA sense strand
ggagaggcaaagcuaauaa

SEQ ID NO: 2220101 - RNA, 19 nt, Homo sapiens
  misc_RNA (1)...(19): siRNA sense strand
gcugauaagacauaacuga

SEQ ID NO: 2220102 - RNA, 19 nt, Homo sapiens
  misc_RNA (1)...(19): siRNA sense strand
aggugaaaggcaugucuua

SEQ ID NO: 2220103 - RNA, 19 nt, Homo sapiens
  misc_RNA (1)...(19): siRNA sense strand
ugagaaggcugcugcuuga

SEQ ID NO: 2220104 - RNA, 19 nt, Homo sapiens
  misc_RNA (1)...(19): siRNA sense strand
cagcaaguggugagcacau

SEQ ID NO: 2220105 - RNA, 19 nt, Homo sapiens
  misc_RNA (1)...(19): siRNA sense strand
acacacacacgcagaaaca

SEQ ID NO: 2220106 - RNA, 19 nt, Homo sapiens
  misc_RNA (1)...(19): siRNA sense strand
ccagagauguuaaggaggu

SEQ ID NO: 2220107 - RNA, 19 nt, Homo sapiens
  misc_RNA (1)...(19): siRNA sense strand
gcucugucauguugccuua

SEQ ID NO: 2220108 - RNA, 19 nt, Homo sapiens
  misc_RNA (1)...(19): siRNA sense strand
gcagaaacacacacacaca

SEQ ID NO: 2220109 - RNA, 19 nt, Homo sapiens
  misc_RNA (1)...(19): siRNA sense strand
auguuaaggaggugcucaa

SEQ ID NO: 2220110 - RNA, 19 nt, Homo sapiens
  misc_RNA (1)...(19): siRNA sense strand
ggaacuauaaguccauuaa

SEQ ID NO: 2220111 - RNA, 19 nt, Homo sapiens
  misc_RNA (1)...(19): siRNA sense strand
uagcagagguucuccauga

SEQ ID NO: 2220112 - RNA, 19 nt, Homo sapiens
  misc_RNA (1)...(19): siRNA sense strand
ggaagugggaagaugcuga

SEQ ID NO: 2220113 - RNA, 19 nt, Homo sapiens
  misc_RNA (1)...(19): siRNA sense strand
caagaugguccaaggcuca

SEQ ID NO: 2220114 - RNA, 19 nt, Homo sapiens
  misc_RNA (1)...(19): siRNA sense strand
gcagacaagaaaagaaaga

SEQ ID NO: 2220115 - RNA, 19 nt, Homo sapiens
  misc_RNA (1)...(19): siRNA sense strand
uggcagaaggugaaaggca

SEQ ID NO: 2220116 - RNA, 19 nt, Homo sapiens
  misc_RNA (1)...(19): siRNA sense strand
auggacagucagagggaga

SEQ ID NO: 2220117 - RNA, 19 nt, Homo sapiens
  misc_RNA (1)...(19): siRNA sense strand
gugcuauauuaguccguuu

SEQ ID NO: 2220118 - RNA, 19 nt, Homo sapiens
  misc_RNA (1)...(19): siRNA sense strand
guaaauacacugaggaugc

SEQ ID NO: 2220119 - RNA, 19 nt, Homo sapiens
  misc_RNA (1)...(19): siRNA sense strand
cugauaagacauaacugaa

SEQ ID NO: 2220120 - RNA, 19 nt, Homo sapiens
  misc_RNA (1)...(19): siRNA sense strand
aaagaagaacucaggcaca

SEQ ID NO: 2220121 - RNA, 19 nt, Homo sapiens
  misc_RNA (1)...(19): siRNA sense strand
agaaagagguuaaaggaga

SEQ ID NO: 2220122 - RNA, 19 nt, Homo sapiens
  misc_RNA (1)...(19): siRNA sense strand
ggguagaagagcagaggau

SEQ ID NO: 2220123 - RNA, 19 nt, Homo sapiens
  misc_RNA (1)...(19): siRNA sense strand
accaagagcugcaggaaau

SEQ ID NO: 2220124 - RNA, 19 nt, Homo sapiens
  misc_RNA (1)...(19): siRNA sense strand
gaggaugacguuagcauua

SEQ ID NO: 2220125 - RNA, 19 nt, Homo sapiens
  misc_RNA (1)...(19): siRNA sense strand
agaccaaagguguggauga

SEQ ID NO: 2220126 - RNA, 19 nt, Homo sapiens
  misc_RNA (1)...(19): siRNA sense strand
aagagaaaguauagcaagu

SEQ ID NO: 2220127 - RNA, 19 nt, Homo sapiens
  misc_RNA (1)...(19): siRNA sense strand
agucaaagccuacaccaaa

SEQ ID NO: 2220128 - RNA, 19 nt, Homo sapiens
  misc_RNA (1)...(19): siRNA sense strand
ccaaagguguggaugagau

SEQ ID NO: 2220129 - RNA, 19 nt, Homo sapiens
  misc_RNA (1)...(19): siRNA sense strand
ggcaaaggguagaagagca

SEQ ID NO: 2220130 - RNA, 19 nt, Homo sapiens
  misc_RNA (1)...(19): siRNA sense strand
aggaaauguacaagacuga

SEQ ID NO: 2220131 - RNA, 19 nt, Homo sapiens
  misc_RNA (1)...(19): siRNA sense strand
gugaagucuaugauguaaa

SEQ ID NO: 2220132 - RNA, 19 nt, Homo sapiens
  misc_RNA (1)...(19): siRNA sense strand
uggagagcaucaagaaaga

SEQ ID NO: 2220133 - RNA, 19 nt, Homo sapiens
  misc_RNA (1)...(19): siRNA sense strand
ccuuaugacauguuggaga

SEQ ID NO: 2220134 - RNA, 19 nt, Homo sapiens
  misc_RNA (1)...(19): siRNA sense strand
augacauguuggagagcau

SEQ ID NO: 2220135 - RNA, 19 nt, Homo sapiens
  misc_RNA (1)...(19): siRNA sense strand
acaccaaauuugaugcuga

SEQ ID NO: 2220136 - RNA, 19 nt, Homo sapiens
  misc_RNA (1)...(19): siRNA sense strand
ccacagcaaugcacagaga

SEQ ID NO: 2220137 - RNA, 19 nt, Homo sapiens
  misc_RNA (1)...(19): siRNA sense strand
ggagauggcugaaguccga

SEQ ID NO: 2220138 - RNA, 19 nt, Homo sapiens
  misc_RNA (1)...(19): siRNA sense strand
cagucaaagccuacaccaa

SEQ ID NO: 2220139 - RNA, 19 nt, Homo sapiens
  misc_RNA (1)...(19): siRNA sense strand
gcucaagaaccaaccaaga

SEQ ID NO: 2220140 - RNA, 19 nt, Homo sapiens
  misc_RNA (1)...(19): siRNA sense strand
acaaugaaguggacauguu

SEQ ID NO: 2220141 - RNA, 19 nt, Homo sapiens
  misc_RNA (1)...(19): siRNA sense strand
aaccaagagcugcaggaaa

SEQ ID NO: 2220142 - RNA, 19 nt, Homo sapiens
  misc_RNA (1)...(19): siRNA sense strand
uuaaaggagaccuggaaaa

SEQ ID NO: 2220143 - RNA, 19 nt, Homo sapiens
  misc_RNA (1)...(19): siRNA sense strand
ggugaagaggaaaggaacu

SEQ ID NO: 2220144 - RNA, 19 nt, Homo sapiens
  misc_RNA (1)...(19): siRNA sense strand
gcacgagcguccagaaaug

SEQ ID NO: 2220145 - RNA, 19 nt, Homo sapiens
  misc_RNA (1)...(19): siRNA sense strand
aagugaagucuaugaugua

SEQ ID NO: 2220146 - RNA, 19 nt, Homo sapiens
  misc_RNA (1)...(19): siRNA sense strand
aagccaaagaaaugaacau

SEQ ID NO: 2220147 - RNA, 19 nt, Homo sapiens
  misc_RNA (1)...(19): siRNA sense strand
uugauagguacaagagcua

SEQ ID NO: 2220148 - RNA, 19 nt, Homo sapiens
  misc_RNA (1)...(19): siRNA sense strand
gaagugaagucuaugaugu

SEQ ID NO: 2220149 - RNA, 19 nt, Homo sapiens
  misc_RNA (1)...(19): siRNA sense strand
ucaagagaaaguauagcaa

SEQ ID NO: 2220150 - RNA, 19 nt, Homo sapiens
  misc_RNA (1)...(19): siRNA sense strand
cagcacgagcguccagaaa

SEQ ID NO: 2220151 - RNA, 19 nt, Homo sapiens
  misc_RNA (1)...(19): siRNA sense strand
acagcaaugcacagagaca

SEQ ID NO: 2220152 - RNA, 19 nt, Homo sapiens
  misc_RNA (1)...(19): siRNA sense strand
acagagucuacaaggaaau

SEQ ID NO: 2220153 - RNA, 19 nt, Homo sapiens
  misc_RNA (1)...(19): siRNA sense strand
aauuggaagugaagucuau

SEQ ID NO: 2220154 - RNA, 19 nt, Homo sapiens
  misc_RNA (1)...(19): siRNA sense strand
guuggagagcaucaagaaa

SEQ ID NO: 2220155 - RNA, 19 nt, Homo sapiens
  misc_RNA (1)...(19): siRNA sense strand
gaaagagguuaaaggagac

SEQ ID NO: 2220156 - RNA, 19 nt, Homo sapiens
  misc_RNA (1)...(19): siRNA sense strand
gaaucauggucucccacaa

SEQ ID NO: 2220157 - RNA, 19 nt, Homo sapiens
  misc_RNA (1)...(19): siRNA sense strand
caggaaauuaacagagucu

SEQ ID NO: 2220158 - RNA, 19 nt, Homo sapiens
  misc_RNA (1)...(19): siRNA sense strand
ggggugaagaggaaaggaa

SEQ ID NO: 2220159 - RNA, 19 nt, Homo sapiens
  misc_RNA (1)...(19): siRNA sense strand
gauagguacaagagcuaca

SEQ ID NO: 2220160 - RNA, 19 nt, Homo sapiens
  misc_RNA (1)...(19): siRNA sense strand
gaagaggaaaggaacugaa

SEQ ID NO: 2220161 - RNA, 19 nt, Homo sapiens
  misc_RNA (1)...(19): siRNA sense strand
ggaacuuguaucagcacuu

SEQ ID NO: 2220162 - RNA, 19 nt, Homo sapiens
  misc_RNA (1)...(19): siRNA sense strand
gcaaaggguagaagagcag

SEQ ID NO: 2220163 - RNA, 19 nt, Homo sapiens
  misc_RNA (1)...(19): siRNA sense strand
ggaucagcgucaugaccga

SEQ ID NO: 2220164 - RNA, 19 nt, Homo sapiens
  misc_RNA (1)...(19): siRNA sense strand
ccaucaagaccaaaggugu

SEQ ID NO: 2220165 - RNA, 19 nt, Homo sapiens
  misc_RNA (1)...(19): siRNA sense strand
caaaauaucugcuguucau

SEQ ID NO: 2220166 - RNA, 19 nt, Homo sapiens
  misc_RNA (1)...(19): siRNA sense strand
acgcuggggugaagaggaa

SEQ ID NO: 2220167 - RNA, 19 nt, Homo sapiens
  misc_RNA (1)...(19): siRNA sense strand
gagcaucaagaaagagguu

SEQ ID NO: 2220168 - RNA, 19 nt, Homo sapiens
  misc_RNA (1)...(19): siRNA sense strand
aggucugaauucaagagaa

SEQ ID NO: 2220169 - RNA, 19 nt, Homo sapiens
  misc_RNA (1)...(19): siRNA sense strand
gauaguggcuuugggccua

SEQ ID NO: 2220170 - RNA, 19 nt, Homo sapiens
  misc_RNA (1)...(19): siRNA sense strand
gaaccaaccaagagcugca

SEQ ID NO: 2220171 - RNA, 19 nt, Homo sapiens
  misc_RNA (1)...(19): siRNA sense strand
augcacagagacaggauau

SEQ ID NO: 2220172 - RNA, 19 nt, Homo sapiens
  misc_RNA (1)...(19): siRNA sense strand
gaaaguauuugauagguac

SEQ ID NO: 2220173 - RNA, 19 nt, Homo sapiens
  misc_RNA (1)...(19): siRNA sense strand
caucaagaaagagguuaaa

SEQ ID NO: 2220174 - RNA, 19 nt, Homo sapiens
  misc_RNA (1)...(19): siRNA sense strand
gucaaagccuacaccaaau

SEQ ID NO: 2220175 - RNA, 19 nt, Homo sapiens
  misc_RNA (1)...(19): siRNA sense strand
gcaagucccuguacuacua

SEQ ID NO: 2220176 - RNA, 19 nt, Homo sapiens
  misc_RNA (1)...(19): siRNA sense strand
gaauuggaagugaagucua

SEQ ID NO: 2220177 - RNA, 19 nt, Homo sapiens
  misc_RNA (1)...(19): siRNA sense strand
cggagaaggcggacguaca

SEQ ID NO: 2220178 - RNA, 19 nt, Homo sapiens
  misc_RNA (1)...(19): siRNA sense strand
acaauauggaagaguguga

SEQ ID NO: 2220179 - RNA, 19 nt, Homo sapiens
  misc_RNA (1)...(19): siRNA sense strand
agacaauauggaagagugu

SEQ ID NO: 2220180 - RNA, 19 nt, Homo sapiens
  misc_RNA (1)...(19): siRNA sense strand
ccgagaaguucgcggacuc

SEQ ID NO: 2220181 - RNA, 19 nt, Homo sapiens
  misc_RNA (1)...(19): siRNA sense strand
cggagaaggcggacguaca

SEQ ID NO: 2220182 - RNA, 19 nt, Homo sapiens
  misc_RNA (1)...(19): siRNA sense strand
acaauauggaagaguguga

SEQ ID NO: 2220183 - RNA, 19 nt, Homo sapiens
  misc_RNA (1)...(19): siRNA sense strand
aggucuggagauugggaua

SEQ ID NO: 2220184 - RNA, 19 nt, Homo sapiens
  misc_RNA (1)...(19): siRNA sense strand
agacaauauggaagagugu

SEQ ID NO: 2220185 - RNA, 19 nt, Homo sapiens
  misc_RNA (1)...(19): siRNA sense strand
ccgagaaguucgcggacuc

SEQ ID NO: 2220186 - RNA, 19 nt, Homo sapiens
  misc_RNA (1)...(19): siRNA sense strand
acgucuaagugguguguau

SEQ ID NO: 2220187 - RNA, 19 nt, Homo sapiens
  misc_RNA (1)...(19): siRNA sense strand
gcccugaguuacuggguga

SEQ ID NO: 2220188 - RNA, 19 nt, Homo sapiens
  misc_RNA (1)...(19): siRNA sense strand
guuucuaggcagucccaaa

SEQ ID NO: 2220189 - RNA, 19 nt, Homo sapiens
  misc_RNA (1)...(19): siRNA sense strand
cgugagcauaugagggcau

SEQ ID NO: 2220190 - RNA, 19 nt, Homo sapiens
  misc_RNA (1)...(19): siRNA sense strand
auuagguauuaaaggccaa

SEQ ID NO: 2220191 - RNA, 19 nt, Homo sapiens
  misc_RNA (1)...(19): siRNA sense strand
guugacugaaugaaugaaa

SEQ ID NO: 2220192 - RNA, 19 nt, Homo sapiens
  misc_RNA (1)...(19): siRNA sense strand
agacaauguaucugugacu

SEQ ID NO: 2220193 - RNA, 19 nt, Homo sapiens
  misc_RNA (1)...(19): siRNA sense strand
cugcgggacuugagggaca

SEQ ID NO: 2220194 - RNA, 19 nt, Homo sapiens
  misc_RNA (1)...(19): siRNA sense strand
cgcaggaagcggagaaaca

SEQ ID NO: 2220195 - RNA, 19 nt, Homo sapiens
  misc_RNA (1)...(19): siRNA sense strand
aggacgaggacgaggacga

SEQ ID NO: 2220196 - RNA, 19 nt, Homo sapiens
  misc_RNA (1)...(19): siRNA sense strand
agucgaaccuccuggggaa

SEQ ID NO: 2220197 - RNA, 19 nt, Homo sapiens
  misc_RNA (1)...(19): siRNA sense strand
cggaugaaauggaaacgca

SEQ ID NO: 2220198 - RNA, 19 nt, Homo sapiens
  misc_RNA (1)...(19): siRNA sense strand
gugaagauuugguuccaga

SEQ ID NO: 2220199 - RNA, 19 nt, Homo sapiens
  misc_RNA (1)...(19): siRNA sense strand
aaauggaaacgcagcaaaa

SEQ ID NO: 2220200 - RNA, 19 nt, Homo sapiens
  misc_RNA (1)...(19): siRNA sense strand
gggacuugagggacaguga

SEQ ID NO: 2220201 - RNA, 19 nt, Homo sapiens
  misc_RNA (1)...(19): siRNA sense strand
acgaggacgacgaggacca

SEQ ID NO: 2220202 - RNA, 19 nt, Homo sapiens
  misc_RNA (1)...(19): siRNA sense strand
cugaaaugcuccugcgagu

SEQ ID NO: 2220203 - RNA, 19 nt, Homo sapiens
  misc_RNA (1)...(19): siRNA sense strand
ggaaguggguggauggaac

SEQ ID NO: 2220204 - RNA, 19 nt, Homo sapiens
  misc_RNA (1)...(19): siRNA sense strand
agaauaaggugaaagucca

SEQ ID NO: 2220205 - RNA, 19 nt, Homo sapiens
  misc_RNA (1)...(19): siRNA sense strand
ccucaaacacuguggcgga

SEQ ID NO: 2220206 - RNA, 19 nt, Homo sapiens
  misc_RNA (1)...(19): siRNA sense strand
agaccagccaggagaguca

SEQ ID NO: 2220207 - RNA, 19 nt, Homo sapiens
  misc_RNA (1)...(19): siRNA sense strand
auuccaaauuucagaggga

SEQ ID NO: 2220208 - RNA, 19 nt, Homo sapiens
  misc_RNA (1)...(19): siRNA sense strand
aggugaaaguccagggguu

SEQ ID NO: 2220209 - RNA, 19 nt, Homo sapiens
  misc_RNA (1)...(19): siRNA sense strand
gguggauggaacagacuau

SEQ ID NO: 2220210 - RNA, 19 nt, Homo sapiens
  misc_RNA (1)...(19): siRNA sense strand
acuuggagaauaaggugaa

SEQ ID NO: 2220211 - RNA, 19 nt, Homo sapiens
  misc_RNA (1)...(19): siRNA sense strand
gagaaguacugccagcuga

SEQ ID NO: 2220212 - RNA, 19 nt, Homo sapiens
  misc_RNA (1)...(19): siRNA sense strand
uggagaauaaggugaaagu

SEQ ID NO: 2220213 - RNA, 19 nt, Homo sapiens
  misc_RNA (1)...(19): siRNA sense strand
gagaauaaggugaaagucc

SEQ ID NO: 2220214 - RNA, 19 nt, Homo sapiens
  misc_RNA (1)...(19): siRNA sense strand
cugaaaugcuccugcgagu

SEQ ID NO: 2220215 - RNA, 19 nt, Homo sapiens
  misc_RNA (1)...(19): siRNA sense strand
ggaaguggguggauggaac

SEQ ID NO: 2220216 - RNA, 19 nt, Homo sapiens
  misc_RNA (1)...(19): siRNA sense strand
agaauaaggugaaagucca

SEQ ID NO: 2220217 - RNA, 19 nt, Homo sapiens
  misc_RNA (1)...(19): siRNA sense strand
ccucaaacacuguggcgga

SEQ ID NO: 2220218 - RNA, 19 nt, Homo sapiens
  misc_RNA (1)...(19): siRNA sense strand
agaccagccaggagaguca

SEQ ID NO: 2220219 - RNA, 19 nt, Homo sapiens
  misc_RNA (1)...(19): siRNA sense strand
auuccaaauuucagaggga

SEQ ID NO: 2220220 - RNA, 19 nt, Homo sapiens
  misc_RNA (1)...(19): siRNA sense strand
aggugaaaguccagggguu

SEQ ID NO: 2220221 - RNA, 19 nt, Homo sapiens
  misc_RNA (1)...(19): siRNA sense strand
gguggauggaacagacuau

SEQ ID NO: 2220222 - RNA, 19 nt, Homo sapiens
  misc_RNA (1)...(19): siRNA sense strand
acuuggagaauaaggugaa

SEQ ID NO: 2220223 - RNA, 19 nt, Homo sapiens
  misc_RNA (1)...(19): siRNA sense strand
gagaaguacugccagcuga

SEQ ID NO: 2220224 - RNA, 19 nt, Homo sapiens
  misc_RNA (1)...(19): siRNA sense strand
uggagaauaaggugaaagu

SEQ ID NO: 2220225 - RNA, 19 nt, Homo sapiens
  misc_RNA (1)...(19): siRNA sense strand
gagaauaaggugaaagucc

SEQ ID NO: 2220226 - RNA, 19 nt, Homo sapiens
  misc_RNA (1)...(19): siRNA sense strand
gggcagacccucaagcaga

SEQ ID NO: 2220227 - RNA, 19 nt, Homo sapiens
  misc_RNA (1)...(19): siRNA sense strand
acacaaacucgcacaacca

SEQ ID NO: 2220228 - RNA, 19 nt, Homo sapiens
  misc_RNA (1)...(19): siRNA sense strand
gggcagacccucaagcaga

SEQ ID NO: 2220229 - RNA, 19 nt, Homo sapiens
  misc_RNA (1)...(19): siRNA sense strand
acacaaacucgcacaacca

SEQ ID NO: 2220230 - RNA, 19 nt, Homo sapiens
  misc_RNA (1)...(19): siRNA sense strand
gggcagacccucaagcaga

SEQ ID NO: 2220231 - RNA, 19 nt, Homo sapiens
  misc_RNA (1)...(19): siRNA sense strand
acacaaacucgcacaacca

SEQ ID NO: 2220232 - RNA, 19 nt, Homo sapiens
  misc_RNA (1)...(19): siRNA sense strand
gggcagacccucaagcaga

SEQ ID NO: 2220233 - RNA, 19 nt, Homo sapiens
  misc_RNA (1)...(19): siRNA sense strand
acacaaacucgcacaacca

SEQ ID NO: 2220234 - RNA, 19 nt, Homo sapiens
  misc_RNA (1)...(19): siRNA sense strand
cugaaaugccagugaauua

SEQ ID NO: 2220235 - RNA, 19 nt, Homo sapiens
  misc_RNA (1)...(19): siRNA sense strand
agauagagaagaugggaaa

SEQ ID NO: 2220236 - RNA, 19 nt, Homo sapiens
  misc_RNA (1)...(19): siRNA sense strand
ugguagauguagauggaaa

SEQ ID NO: 2220237 - RNA, 19 nt, Homo sapiens
  misc_RNA (1)...(19): siRNA sense strand
cgaacuauguugaaagcaa

SEQ ID NO: 2220238 - RNA, 19 nt, Homo sapiens
  misc_RNA (1)...(19): siRNA sense strand
agugagaguuacagcgaaa

SEQ ID NO: 2220239 - RNA, 19 nt, Homo sapiens
  misc_RNA (1)...(19): siRNA sense strand
cagcagagaaggaaguaaa

SEQ ID NO: 2220240 - RNA, 19 nt, Homo sapiens
  misc_RNA (1)...(19): siRNA sense strand
cgaagaagccagagguuca

SEQ ID NO: 2220241 - RNA, 19 nt, Homo sapiens
  misc_RNA (1)...(19): siRNA sense strand
agucagaaauugaagaaga

SEQ ID NO: 2220242 - RNA, 19 nt, Homo sapiens
  misc_RNA (1)...(19): siRNA sense strand
gguuaaaaucucagacaaa

SEQ ID NO: 2220243 - RNA, 19 nt, Homo sapiens
  misc_RNA (1)...(19): siRNA sense strand
aaagaagacgaaagagaaa

SEQ ID NO: 2220244 - RNA, 19 nt, Homo sapiens
  misc_RNA (1)...(19): siRNA sense strand
ccaaauuaugguagaagaa

SEQ ID NO: 2220245 - RNA, 19 nt, Homo sapiens
  misc_RNA (1)...(19): siRNA sense strand
gaggaaaacgaaaggaaaa

SEQ ID NO: 2220246 - RNA, 19 nt, Homo sapiens
  misc_RNA (1)...(19): siRNA sense strand
uugaagaagaggagcuaaa

SEQ ID NO: 2220247 - RNA, 19 nt, Homo sapiens
  misc_RNA (1)...(19): siRNA sense strand
gaacauaaugccagaacau

SEQ ID NO: 2220248 - RNA, 19 nt, Homo sapiens
  misc_RNA (1)...(19): siRNA sense strand
caaccaaguaucagagauu

SEQ ID NO: 2220249 - RNA, 19 nt, Homo sapiens
  misc_RNA (1)...(19): siRNA sense strand
cugaaaaugaugagcaaaa

SEQ ID NO: 2220250 - RNA, 19 nt, Homo sapiens
  misc_RNA (1)...(19): siRNA sense strand
gagaauuugcggaggauga

SEQ ID NO: 2220251 - RNA, 19 nt, Homo sapiens
  misc_RNA (1)...(19): siRNA sense strand
gcuuaaagucagaaauuga

SEQ ID NO: 2220252 - RNA, 19 nt, Homo sapiens
  misc_RNA (1)...(19): siRNA sense strand
cugaagagcaagauagaga

SEQ ID NO: 2220253 - RNA, 19 nt, Homo sapiens
  misc_RNA (1)...(19): siRNA sense strand
ccaaaggcucucaaagaua

SEQ ID NO: 2220254 - RNA, 19 nt, Homo sapiens
  misc_RNA (1)...(19): siRNA sense strand
guaucacagucuagacaaa

SEQ ID NO: 2220255 - RNA, 19 nt, Homo sapiens
  misc_RNA (1)...(19): siRNA sense strand
aguaugaccuugagauuau

SEQ ID NO: 2220256 - RNA, 19 nt, Homo sapiens
  misc_RNA (1)...(19): siRNA sense strand
uaucagugguauagaucaa

SEQ ID NO: 2220257 - RNA, 19 nt, Homo sapiens
  misc_RNA (1)...(19): siRNA sense strand
gggaucaagaauugguuaa

SEQ ID NO: 2220258 - RNA, 19 nt, Homo sapiens
  misc_RNA (1)...(19): siRNA sense strand
cuaagaagaaauugaguga

SEQ ID NO: 2220259 - RNA, 19 nt, Homo sapiens
  misc_RNA (1)...(19): siRNA sense strand
cuggaaaacuuauggacaa

SEQ ID NO: 2220260 - RNA, 19 nt, Homo sapiens
  misc_RNA (1)...(19): siRNA sense strand
ccgcaaugcuucugcugua

SEQ ID NO: 2220261 - RNA, 19 nt, Homo sapiens
  misc_RNA (1)...(19): siRNA sense strand
ccaauaagaucaagcucau

SEQ ID NO: 2220262 - RNA, 19 nt, Homo sapiens
  misc_RNA (1)...(19): siRNA sense strand
gcaaaagacugcaggcaca

SEQ ID NO: 2220263 - RNA, 19 nt, Homo sapiens
  misc_RNA (1)...(19): siRNA sense strand
agagcaagauagagaagau

SEQ ID NO: 2220264 - RNA, 19 nt, Homo sapiens
  misc_RNA (1)...(19): siRNA sense strand
caaaggacauguaggcgua

SEQ ID NO: 2220265 - RNA, 19 nt, Homo sapiens
  misc_RNA (1)...(19): siRNA sense strand
ucagaaaucaagagaugaa

SEQ ID NO: 2220266 - RNA, 19 nt, Homo sapiens
  misc_RNA (1)...(19): siRNA sense strand
ucgcagaacuugaaagcca

SEQ ID NO: 2220267 - RNA, 19 nt, Homo sapiens
  misc_RNA (1)...(19): siRNA sense strand
gauugaaggacaaggacau

SEQ ID NO: 2220268 - RNA, 19 nt, Homo sapiens
  misc_RNA (1)...(19): siRNA sense strand
gagcaauguugaugaaucu

SEQ ID NO: 2220269 - RNA, 19 nt, Homo sapiens
  misc_RNA (1)...(19): siRNA sense strand
cuugaaagccacacugaua

SEQ ID NO: 2220270 - RNA, 19 nt, Homo sapiens
  misc_RNA (1)...(19): siRNA sense strand
ggacaugauggcagcauau

SEQ ID NO: 2220271 - RNA, 19 nt, Homo sapiens
  misc_RNA (1)...(19): siRNA sense strand
gguagauguagauggaaau

SEQ ID NO: 2220272 - RNA, 19 nt, Homo sapiens
  misc_RNA (1)...(19): siRNA sense strand
guuuacaggugguuaagaa

SEQ ID NO: 2220273 - RNA, 19 nt, Homo sapiens
  misc_RNA (1)...(19): siRNA sense strand
aaggugaagaggaaagaaa

SEQ ID NO: 2220274 - RNA, 19 nt, Homo sapiens
  misc_RNA (1)...(19): siRNA sense strand
cugaaagugaaguggaaga

SEQ ID NO: 2220275 - RNA, 19 nt, Homo sapiens
  misc_RNA (1)...(19): siRNA sense strand
aaacuuagcccaugggaca

SEQ ID NO: 2220276 - RNA, 19 nt, Homo sapiens
  misc_RNA (1)...(19): siRNA sense strand
agaugaagaaugugauaga

SEQ ID NO: 2220277 - RNA, 19 nt, Homo sapiens
  misc_RNA (1)...(19): siRNA sense strand
gagugauguagaagagaau

SEQ ID NO: 2220278 - RNA, 19 nt, Homo sapiens
  misc_RNA (1)...(19): siRNA sense strand
agauucagaugaugacaaa

SEQ ID NO: 2220279 - RNA, 19 nt, Homo sapiens
  misc_RNA (1)...(19): siRNA sense strand
aaguguacauugugaagua

SEQ ID NO: 2220280 - RNA, 19 nt, Homo sapiens
  misc_RNA (1)...(19): siRNA sense strand
ggcaguaaacuaugagaau

SEQ ID NO: 2220281 - RNA, 19 nt, Homo sapiens
  misc_RNA (1)...(19): siRNA sense strand
aagacgaaagagaaagaaa

SEQ ID NO: 2220282 - RNA, 19 nt, Homo sapiens
  misc_RNA (1)...(19): siRNA sense strand
aggaaaagaaauagaccua

SEQ ID NO: 2220283 - RNA, 19 nt, Homo sapiens
  misc_RNA (1)...(19): siRNA sense strand
ggaggaaaacgaaaggaaa

SEQ ID NO: 2220284 - RNA, 19 nt, Homo sapiens
  misc_RNA (1)...(19): siRNA sense strand
cugcagaaauuucagauau

SEQ ID NO: 2220285 - RNA, 19 nt, Homo sapiens
  misc_RNA (1)...(19): siRNA sense strand
ucagaaaccucaagccgaa

SEQ ID NO: 2220286 - RNA, 19 nt, Homo sapiens
  misc_RNA (1)...(19): siRNA sense strand
cuacauuaucugaaaguga

SEQ ID NO: 2220287 - RNA, 19 nt, Homo sapiens
  misc_RNA (1)...(19): siRNA sense strand
cagauauggcaguaaacua

SEQ ID NO: 2220288 - RNA, 19 nt, Homo sapiens
  misc_RNA (1)...(19): siRNA sense strand
aauaaggagccauggagaa

SEQ ID NO: 2220289 - RNA, 19 nt, Homo sapiens
  misc_RNA (1)...(19): siRNA sense strand
uugaaguggaacugaauua

SEQ ID NO: 2220290 - RNA, 19 nt, Homo sapiens
  misc_RNA (1)...(19): siRNA sense strand
agagguaccacuaggcaua

SEQ ID NO: 2220291 - RNA, 19 nt, Homo sapiens
  misc_RNA (1)...(19): siRNA sense strand
guacaaaagugcuuaguca

SEQ ID NO: 2220292 - RNA, 19 nt, Homo sapiens
  misc_RNA (1)...(19): siRNA sense strand
ggccaaaggcucucaaaga

SEQ ID NO: 2220293 - RNA, 19 nt, Homo sapiens
  misc_RNA (1)...(19): siRNA sense strand
agacuuccgauuagagaaa

SEQ ID NO: 2220294 - RNA, 19 nt, Homo sapiens
  misc_RNA (1)...(19): siRNA sense strand
caguaaacuaugagaauac

SEQ ID NO: 2220295 - RNA, 19 nt, Homo sapiens
  misc_RNA (1)...(19): siRNA sense strand
ugucacaacagaugagcua

SEQ ID NO: 2220296 - RNA, 19 nt, Homo sapiens
  misc_RNA (1)...(19): siRNA sense strand
caacagaugagcuagagaa

SEQ ID NO: 2220297 - RNA, 19 nt, Homo sapiens
  misc_RNA (1)...(19): siRNA sense strand
gguucuacauuaucugaaa

SEQ ID NO: 2220298 - RNA, 19 nt, Homo sapiens
  misc_RNA (1)...(19): siRNA sense strand
guaguuuacaggugguuaa

SEQ ID NO: 2220299 - RNA, 19 nt, Homo sapiens
  misc_RNA (1)...(19): siRNA sense strand
cagaugacuguuugguaaa

SEQ ID NO: 2220300 - RNA, 19 nt, Homo sapiens
  misc_RNA (1)...(19): siRNA sense strand
cugaaaugccagugaauua

SEQ ID NO: 2220301 - RNA, 19 nt, Homo sapiens
  misc_RNA (1)...(19): siRNA sense strand
agauagagaagaugggaaa

SEQ ID NO: 2220302 - RNA, 19 nt, Homo sapiens
  misc_RNA (1)...(19): siRNA sense strand
ugguagauguagauggaaa

SEQ ID NO: 2220303 - RNA, 19 nt, Homo sapiens
  misc_RNA (1)...(19): siRNA sense strand
cgaacuauguugaaagcaa

SEQ ID NO: 2220304 - RNA, 19 nt, Homo sapiens
  misc_RNA (1)...(19): siRNA sense strand
agugagaguuacagcgaaa

SEQ ID NO: 2220305 - RNA, 19 nt, Homo sapiens
  misc_RNA (1)...(19): siRNA sense strand
cagcagagaaggaaguaaa

SEQ ID NO: 2220306 - RNA, 19 nt, Homo sapiens
  misc_RNA (1)...(19): siRNA sense strand
cgaagaagccagagguuca

SEQ ID NO: 2220307 - RNA, 19 nt, Homo sapiens
  misc_RNA (1)...(19): siRNA sense strand
agucagaaauugaagaaga

SEQ ID NO: 2220308 - RNA, 19 nt, Homo sapiens
  misc_RNA (1)...(19): siRNA sense strand
gguuaaaaucucagacaaa

SEQ ID NO: 2220309 - RNA, 19 nt, Homo sapiens
  misc_RNA (1)...(19): siRNA sense strand
aaagaagacgaaagagaaa

SEQ ID NO: 2220310 - RNA, 19 nt, Homo sapiens
  misc_RNA (1)...(19): siRNA sense strand
ccaaauuaugguagaagaa

SEQ ID NO: 2220311 - RNA, 19 nt, Homo sapiens
  misc_RNA (1)...(19): siRNA sense strand
gaggaaaacgaaaggaaaa

SEQ ID NO: 2220312 - RNA, 19 nt, Homo sapiens
  misc_RNA (1)...(19): siRNA sense strand
uugaagaagaggagcuaaa

SEQ ID NO: 2220313 - RNA, 19 nt, Homo sapiens
  misc_RNA (1)...(19): siRNA sense strand
gaacauaaugccagaacau

SEQ ID NO: 2220314 - RNA, 19 nt, Homo sapiens
  misc_RNA (1)...(19): siRNA sense strand
caaccaaguaucagagauu

SEQ ID NO: 2220315 - RNA, 19 nt, Homo sapiens
  misc_RNA (1)...(19): siRNA sense strand
cugaaaaugaugagcaaaa

SEQ ID NO: 2220316 - RNA, 19 nt, Homo sapiens
  misc_RNA (1)...(19): siRNA sense strand
gagaauuugcggaggauga

SEQ ID NO: 2220317 - RNA, 19 nt, Homo sapiens
  misc_RNA (1)...(19): siRNA sense strand
gcuuaaagucagaaauuga

SEQ ID NO: 2220318 - RNA, 19 nt, Homo sapiens
  misc_RNA (1)...(19): siRNA sense strand
cugaagagcaagauagaga

SEQ ID NO: 2220319 - RNA, 19 nt, Homo sapiens
  misc_RNA (1)...(19): siRNA sense strand
ccaaaggcucucaaagaua

SEQ ID NO: 2220320 - RNA, 19 nt, Homo sapiens
  misc_RNA (1)...(19): siRNA sense strand
guaucacagucuagacaaa

SEQ ID NO: 2220321 - RNA, 19 nt, Homo sapiens
  misc_RNA (1)...(19): siRNA sense strand
aguaugaccuugagauuau

SEQ ID NO: 2220322 - RNA, 19 nt, Homo sapiens
  misc_RNA (1)...(19): siRNA sense strand
uaucagugguauagaucaa

SEQ ID NO: 2220323 - RNA, 19 nt, Homo sapiens
  misc_RNA (1)...(19): siRNA sense strand
gggaucaagaauugguuaa

SEQ ID NO: 2220324 - RNA, 19 nt, Homo sapiens
  misc_RNA (1)...(19): siRNA sense strand
cuaagaagaaauugaguga

SEQ ID NO: 2220325 - RNA, 19 nt, Homo sapiens
  misc_RNA (1)...(19): siRNA sense strand
cuggaaaacuuauggacaa

SEQ ID NO: 2220326 - RNA, 19 nt, Homo sapiens
  misc_RNA (1)...(19): siRNA sense strand
ccgcaaugcuucugcugua

SEQ ID NO: 2220327 - RNA, 19 nt, Homo sapiens
  misc_RNA (1)...(19): siRNA sense strand
ccaauaagaucaagcucau

SEQ ID NO: 2220328 - RNA, 19 nt, Homo sapiens
  misc_RNA (1)...(19): siRNA sense strand
gcaaaagacugcaggcaca

SEQ ID NO: 2220329 - RNA, 19 nt, Homo sapiens
  misc_RNA (1)...(19): siRNA sense strand
agagcaagauagagaagau

SEQ ID NO: 2220330 - RNA, 19 nt, Homo sapiens
  misc_RNA (1)...(19): siRNA sense strand
caaaggacauguaggcgua

SEQ ID NO: 2220331 - RNA, 19 nt, Homo sapiens
  misc_RNA (1)...(19): siRNA sense strand
ucagaaaucaagagaugaa

SEQ ID NO: 2220332 - RNA, 19 nt, Homo sapiens
  misc_RNA (1)...(19): siRNA sense strand
ucgcagaacuugaaagcca

SEQ ID NO: 2220333 - RNA, 19 nt, Homo sapiens
  misc_RNA (1)...(19): siRNA sense strand
gauugaaggacaaggacau

SEQ ID NO: 2220334 - RNA, 19 nt, Homo sapiens
  misc_RNA (1)...(19): siRNA sense strand
gagcaauguugaugaaucu

SEQ ID NO: 2220335 - RNA, 19 nt, Homo sapiens
  misc_RNA (1)...(19): siRNA sense strand
cuugaaagccacacugaua

SEQ ID NO: 2220336 - RNA, 19 nt, Homo sapiens
  misc_RNA (1)...(19): siRNA sense strand
ggacaugauggcagcauau

SEQ ID NO: 2220337 - RNA, 19 nt, Homo sapiens
  misc_RNA (1)...(19): siRNA sense strand
gguagauguagauggaaau

SEQ ID NO: 2220338 - RNA, 19 nt, Homo sapiens
  misc_RNA (1)...(19): siRNA sense strand
guuuacaggugguuaagaa

SEQ ID NO: 2220339 - RNA, 19 nt, Homo sapiens
  misc_RNA (1)...(19): siRNA sense strand
aaggugaagaggaaagaaa

SEQ ID NO: 2220340 - RNA, 19 nt, Homo sapiens
  misc_RNA (1)...(19): siRNA sense strand
cugaaagugaaguggaaga

SEQ ID NO: 2220341 - RNA, 19 nt, Homo sapiens
  misc_RNA (1)...(19): siRNA sense strand
aaacuuagcccaugggaca

SEQ ID NO: 2220342 - RNA, 19 nt, Homo sapiens
  misc_RNA (1)...(19): siRNA sense strand
agaugaagaaugugauaga

SEQ ID NO: 2220343 - RNA, 19 nt, Homo sapiens
  misc_RNA (1)...(19): siRNA sense strand
gagugauguagaagagaau

SEQ ID NO: 2220344 - RNA, 19 nt, Homo sapiens
  misc_RNA (1)...(19): siRNA sense strand
agauucagaugaugacaaa

SEQ ID NO: 2220345 - RNA, 19 nt, Homo sapiens
  misc_RNA (1)...(19): siRNA sense strand
aaguguacauugugaagua

SEQ ID NO: 2220346 - RNA, 19 nt, Homo sapiens
  misc_RNA (1)...(19): siRNA sense strand
ggcaguaaacuaugagaau

SEQ ID NO: 2220347 - RNA, 19 nt, Homo sapiens
  misc_RNA (1)...(19): siRNA sense strand
aagacgaaagagaaagaaa

SEQ ID NO: 2220348 - RNA, 19 nt, Homo sapiens
  misc_RNA (1)...(19): siRNA sense strand
aggaaaagaaauagaccua

SEQ ID NO: 2220349 - RNA, 19 nt, Homo sapiens
  misc_RNA (1)...(19): siRNA sense strand
ggaggaaaacgaaaggaaa

SEQ ID NO: 2220350 - RNA, 19 nt, Homo sapiens
  misc_RNA (1)...(19): siRNA sense strand
cugcagaaauuucagauau

SEQ ID NO: 2220351 - RNA, 19 nt, Homo sapiens
  misc_RNA (1)...(19): siRNA sense strand
ucagaaaccucaagccgaa

SEQ ID NO: 2220352 - RNA, 19 nt, Homo sapiens
  misc_RNA (1)...(19): siRNA sense strand
cuacauuaucugaaaguga

SEQ ID NO: 2220353 - RNA, 19 nt, Homo sapiens
  misc_RNA (1)...(19): siRNA sense strand
cagauauggcaguaaacua

SEQ ID NO: 2220354 - RNA, 19 nt, Homo sapiens
  misc_RNA (1)...(19): siRNA sense strand
aauaaggagccauggagaa

SEQ ID NO: 2220355 - RNA, 19 nt, Homo sapiens
  misc_RNA (1)...(19): siRNA sense strand
uugaaguggaacugaauua

SEQ ID NO: 2220356 - RNA, 19 nt, Homo sapiens
  misc_RNA (1)...(19): siRNA sense strand
agagguaccacuaggcaua

SEQ ID NO: 2220357 - RNA, 19 nt, Homo sapiens
  misc_RNA (1)...(19): siRNA sense strand
guacaaaagugcuuaguca

SEQ ID NO: 2220358 - RNA, 19 nt, Homo sapiens
  misc_RNA (1)...(19): siRNA sense strand
ggccaaaggcucucaaaga

SEQ ID NO: 2220359 - RNA, 19 nt, Homo sapiens
  misc_RNA (1)...(19): siRNA sense strand
agacuuccgauuagagaaa

SEQ ID NO: 2220360 - RNA, 19 nt, Homo sapiens
  misc_RNA (1)...(19): siRNA sense strand
caguaaacuaugagaauac

SEQ ID NO: 2220361 - RNA, 19 nt, Homo sapiens
  misc_RNA (1)...(19): siRNA sense strand
ugucacaacagaugagcua

SEQ ID NO: 2220362 - RNA, 19 nt, Homo sapiens
  misc_RNA (1)...(19): siRNA sense strand
caacagaugagcuagagaa

SEQ ID NO: 2220363 - RNA, 19 nt, Homo sapiens
  misc_RNA (1)...(19): siRNA sense strand
gguucuacauuaucugaaa

SEQ ID NO: 2220364 - RNA, 19 nt, Homo sapiens
  misc_RNA (1)...(19): siRNA sense strand
guaguuuacaggugguuaa

SEQ ID NO: 2220365 - RNA, 19 nt, Homo sapiens
  misc_RNA (1)...(19): siRNA sense strand
cagaugacuguuugguaaa

SEQ ID NO: 2220366 - RNA, 19 nt, Homo sapiens
  misc_RNA (1)...(19): siRNA sense strand
gcagacuaucagugaaaca

SEQ ID NO: 2220367 - RNA, 19 nt, Homo sapiens
  misc_RNA (1)...(19): siRNA sense strand
acaagaagcacgugggcgu

SEQ ID NO: 2220368 - RNA, 19 nt, Homo sapiens
  misc_RNA (1)...(19): siRNA sense strand
cggauacugugcaggccaa

SEQ ID NO: 2220369 - RNA, 19 nt, Homo sapiens
  misc_RNA (1)...(19): siRNA sense strand
ucagugguguggugggcaa

SEQ ID NO: 2220370 - RNA, 19 nt, Homo sapiens
  misc_RNA (1)...(19): siRNA sense strand
gugucaacgguguggccaa

SEQ ID NO: 2220371 - RNA, 19 nt, Homo sapiens
  misc_RNA (1)...(19): siRNA sense strand
cagugaaacagcuggucau

SEQ ID NO: 2220372 - RNA, 19 nt, Homo sapiens
  misc_RNA (1)...(19): siRNA sense strand
acacaguggcccuggacca

SEQ ID NO: 2220373 - RNA, 19 nt, Homo sapiens
  misc_RNA (1)...(19): siRNA sense strand
cagaccugggccugagaaa

SEQ ID NO: 2220374 - RNA, 19 nt, Homo sapiens
  misc_RNA (1)...(19): siRNA sense strand
ugucaaugucugcggaguu

SEQ ID NO: 2220375 - RNA, 19 nt, Homo sapiens
  misc_RNA (1)...(19): siRNA sense strand
ccuugaugucucagagcuu

SEQ ID NO: 2220376 - RNA, 19 nt, Homo sapiens
  misc_RNA (1)...(19): siRNA sense strand
auucaaggucugagugcca

SEQ ID NO: 2220377 - RNA, 19 nt, Homo sapiens
  misc_RNA (1)...(19): siRNA sense strand
ggagaugaucaaugagaau

SEQ ID NO: 2220378 - RNA, 19 nt, Homo sapiens
  misc_RNA (1)...(19): siRNA sense strand
gagcugagcgagaggaaga

SEQ ID NO: 2220379 - RNA, 19 nt, Homo sapiens
  misc_RNA (1)...(19): siRNA sense strand
agagaaaugaagugauaga

SEQ ID NO: 2220380 - RNA, 19 nt, Homo sapiens
  misc_RNA (1)...(19): siRNA sense strand
aaguaggaguggugcauau

SEQ ID NO: 2220381 - RNA, 19 nt, Homo sapiens
  misc_RNA (1)...(19): siRNA sense strand
ccgcaaaauuucugaacuu

SEQ ID NO: 2220382 - RNA, 19 nt, Homo sapiens
  misc_RNA (1)...(19): siRNA sense strand
caguagggauucuggccaa

SEQ ID NO: 2220383 - RNA, 19 nt, Homo sapiens
  misc_RNA (1)...(19): siRNA sense strand
guaacacagaagugagcaa

SEQ ID NO: 2220384 - RNA, 19 nt, Homo sapiens
  misc_RNA (1)...(19): siRNA sense strand
gaguauuaacagugaaacu

SEQ ID NO: 2220385 - RNA, 19 nt, Homo sapiens
  misc_RNA (1)...(19): siRNA sense strand
gaacacaaucggaaggguu

SEQ ID NO: 2220386 - RNA, 19 nt, Homo sapiens
  misc_RNA (1)...(19): siRNA sense strand
aggaaauucaguauggcua

SEQ ID NO: 2220387 - RNA, 19 nt, Homo sapiens
  misc_RNA (1)...(19): siRNA sense strand
cccaaugaagggagaguuu

SEQ ID NO: 2220388 - RNA, 19 nt, Homo sapiens
  misc_RNA (1)...(19): siRNA sense strand
ggggaauauugaagagcuu

SEQ ID NO: 2220389 - RNA, 19 nt, Homo sapiens
  misc_RNA (1)...(19): siRNA sense strand
acaauacaauucagggaca

SEQ ID NO: 2220390 - RNA, 19 nt, Homo sapiens
  misc_RNA (1)...(19): siRNA sense strand
caauacaauucagggacaa

SEQ ID NO: 2220391 - RNA, 19 nt, Homo sapiens
  misc_RNA (1)...(19): siRNA sense strand
ggaaguaggaagaugcguu

SEQ ID NO: 2220392 - RNA, 19 nt, Homo sapiens
  misc_RNA (1)...(19): siRNA sense strand
gcaaagaggaccagcagcu

SEQ ID NO: 2220393 - RNA, 19 nt, Homo sapiens
  misc_RNA (1)...(19): siRNA sense strand
auauugaagagcuuggaaa

SEQ ID NO: 2220394 - RNA, 19 nt, Homo sapiens
  misc_RNA (1)...(19): siRNA sense strand
ggucuuacgagaugcaaca

SEQ ID NO: 2220395 - RNA, 19 nt, Homo sapiens
  misc_RNA (1)...(19): siRNA sense strand
uggagaugaucaaugagaa

SEQ ID NO: 2220396 - RNA, 19 nt, Homo sapiens
  misc_RNA (1)...(19): siRNA sense strand
ucuugagauucauggagaa

SEQ ID NO: 2220397 - RNA, 19 nt, Homo sapiens
  misc_RNA (1)...(19): siRNA sense strand
cuucaaggaaauucaguau

SEQ ID NO: 2220398 - RNA, 19 nt, Homo sapiens
  misc_RNA (1)...(19): siRNA sense strand
cuccaacgauguagagaca

SEQ ID NO: 2220399 - RNA, 19 nt, Homo sapiens
  misc_RNA (1)...(19): siRNA sense strand
gggugaugaccgcgcagaa

SEQ ID NO: 2220400 - RNA, 19 nt, Homo sapiens
  misc_RNA (1)...(19): siRNA sense strand
gaaaugacccugaucccaa

SEQ ID NO: 2220401 - RNA, 19 nt, Homo sapiens
  misc_RNA (1)...(19): siRNA sense strand
gcgcagaaguaccugggca

SEQ ID NO: 2220402 - RNA, 19 nt, Homo sapiens
  misc_RNA (1)...(19): siRNA sense strand
gagaaauguacacgacuca

SEQ ID NO: 2220403 - RNA, 19 nt, Homo sapiens
  misc_RNA (1)...(19): siRNA sense strand
agggacaacagguguacua

SEQ ID NO: 2220404 - RNA, 19 nt, Homo sapiens
  misc_RNA (1)...(19): siRNA sense strand
uuggagagacuauggauau

SEQ ID NO: 2220405 - RNA, 19 nt, Homo sapiens
  misc_RNA (1)...(19): siRNA sense strand
agucauucuaucuggcuua

SEQ ID NO: 2220406 - RNA, 19 nt, Homo sapiens
  misc_RNA (1)...(19): siRNA sense strand
ccauaacacuucaucccaa

SEQ ID NO: 2220407 - RNA, 19 nt, Homo sapiens
  misc_RNA (1)...(19): siRNA sense strand
uggacaaguaugagugguu

SEQ ID NO: 2220408 - RNA, 19 nt, Homo sapiens
  misc_RNA (1)...(19): siRNA sense strand
agugagacgucaugccuau

SEQ ID NO: 2220409 - RNA, 19 nt, Homo sapiens
  misc_RNA (1)...(19): siRNA sense strand
aagcauauugagcugauaa

SEQ ID NO: 2220410 - RNA, 19 nt, Homo sapiens
  misc_RNA (1)...(19): siRNA sense strand
gggacuagaagauguagau

SEQ ID NO: 2220411 - RNA, 19 nt, Homo sapiens
  misc_RNA (1)...(19): siRNA sense strand
cggagcugagcgagaggaa

SEQ ID NO: 2220412 - RNA, 19 nt, Homo sapiens
  misc_RNA (1)...(19): siRNA sense strand
aagccuuucuucagagaga

SEQ ID NO: 2220413 - RNA, 19 nt, Homo sapiens
  misc_RNA (1)...(19): siRNA sense strand
agacaauacaauucaggga

SEQ ID NO: 2220414 - RNA, 19 nt, Homo sapiens
  misc_RNA (1)...(19): siRNA sense strand
gcgccgacgacgaugucua

SEQ ID NO: 2220415 - RNA, 19 nt, Homo sapiens
  misc_RNA (1)...(19): siRNA sense strand
aacacaaucggaaggguua

SEQ ID NO: 2220416 - RNA, 19 nt, Homo sapiens
  misc_RNA (1)...(19): siRNA sense strand
agucuuguggagaguauua

SEQ ID NO: 2220417 - RNA, 19 nt, Homo sapiens
  misc_RNA (1)...(19): siRNA sense strand
uaaaaggguaccagaacaa

SEQ ID NO: 2220418 - RNA, 19 nt, Homo sapiens
  misc_RNA (1)...(19): siRNA sense strand
uggugaaugccuuagagaa

SEQ ID NO: 2220419 - RNA, 19 nt, Homo sapiens
  misc_RNA (1)...(19): siRNA sense strand
ucuaggugcagguggauuu

SEQ ID NO: 2220420 - RNA, 19 nt, Homo sapiens
  misc_RNA (1)...(19): siRNA sense strand
gggagagaaaugaagugau

SEQ ID NO: 2220421 - RNA, 19 nt, Homo sapiens
  misc_RNA (1)...(19): siRNA sense strand
uggaguacauuuuggauuu

SEQ ID NO: 2220422 - RNA, 19 nt, Homo sapiens
  misc_RNA (1)...(19): siRNA sense strand
aagacacaagggaaggaaa

SEQ ID NO: 2220423 - RNA, 19 nt, Homo sapiens
  misc_RNA (1)...(19): siRNA sense strand
acauauuggugaaugccuu

SEQ ID NO: 2220424 - RNA, 19 nt, Homo sapiens
  misc_RNA (1)...(19): siRNA sense strand
accaauacaggcugcauaa

SEQ ID NO: 2220425 - RNA, 19 nt, Homo sapiens
  misc_RNA (1)...(19): siRNA sense strand
gggaguagccacaacggca

SEQ ID NO: 2220426 - RNA, 19 nt, Homo sapiens
  misc_RNA (1)...(19): siRNA sense strand
ggacuggagccuggggaaa

SEQ ID NO: 2220427 - RNA, 19 nt, Homo sapiens
  misc_RNA (1)...(19): siRNA sense strand
agacacaagggaaggaaac

SEQ ID NO: 2220428 - RNA, 19 nt, Homo sapiens
  misc_RNA (1)...(19): siRNA sense strand
gcuuaaggccauucagaag

SEQ ID NO: 2220429 - RNA, 19 nt, Homo sapiens
  misc_RNA (1)...(19): siRNA sense strand
cagaauguaaaguugguca

SEQ ID NO: 2220430 - RNA, 19 nt, Homo sapiens
  misc_RNA (1)...(19): siRNA sense strand
aguacaugcacgaccacua

SEQ ID NO: 2220431 - RNA, 19 nt, Homo sapiens
  misc_RNA (1)...(19): siRNA sense strand
guggaugagcguggcauua

SEQ ID NO: 2220432 - RNA, 19 nt, Homo sapiens
  misc_RNA (1)...(19): siRNA sense strand
aucccaaagcagaauguaa

SEQ ID NO: 2220433 - RNA, 19 nt, Homo sapiens
  misc_RNA (1)...(19): siRNA sense strand
cagaaaugcgagagcuuau

SEQ ID NO: 2220434 - RNA, 19 nt, Homo sapiens
  misc_RNA (1)...(19): siRNA sense strand
acgcuaaugcugagaucua

SEQ ID NO: 2220435 - RNA, 19 nt, Homo sapiens
  misc_RNA (1)...(19): siRNA sense strand
ccuuaaaugcccagauuca

SEQ ID NO: 2220436 - RNA, 19 nt, Homo sapiens
  misc_RNA (1)...(19): siRNA sense strand
cggcaaauacccaggcuca

SEQ ID NO: 2220437 - RNA, 19 nt, Homo sapiens
  misc_RNA (1)...(19): siRNA sense strand
agacaacauuacugggcau

SEQ ID NO: 2220438 - RNA, 19 nt, Homo sapiens
  misc_RNA (1)...(19): siRNA sense strand
gugccuggguaguagaaau

SEQ ID NO: 2220439 - RNA, 19 nt, Homo sapiens
  misc_RNA (1)...(19): siRNA sense strand
ggcagaaaugcgagagcuu

SEQ ID NO: 2220440 - RNA, 19 nt, Homo sapiens
  misc_RNA (1)...(19): siRNA sense strand
gguagaguucacaaguaaa

SEQ ID NO: 2220441 - RNA, 19 nt, Homo sapiens
  misc_RNA (1)...(19): siRNA sense strand
cccagauguuagacagcaa

SEQ ID NO: 2220442 - RNA, 19 nt, Homo sapiens
  misc_RNA (1)...(19): siRNA sense strand
uugcagacacagauguuaa

SEQ ID NO: 2220443 - RNA, 19 nt, Homo sapiens
  misc_RNA (1)...(19): siRNA sense strand
gagccaaugcugagaucca

SEQ ID NO: 2220444 - RNA, 19 nt, Homo sapiens
  misc_RNA (1)...(19): siRNA sense strand
uugaaugccaguuuggaaa

SEQ ID NO: 2220445 - RNA, 19 nt, Homo sapiens
  misc_RNA (1)...(19): siRNA sense strand
uuaagaggucauuuggaaa

SEQ ID NO: 2220446 - RNA, 19 nt, Homo sapiens
  misc_RNA (1)...(19): siRNA sense strand
agacaagaccuguuccgaa

SEQ ID NO: 2220447 - RNA, 19 nt, Homo sapiens
  misc_RNA (1)...(19): siRNA sense strand
gcagagagauacagacccu

SEQ ID NO: 2220448 - RNA, 19 nt, Homo sapiens
  misc_RNA (1)...(19): siRNA sense strand
acagauaaccagugugucu

SEQ ID NO: 2220449 - RNA, 19 nt, Homo sapiens
  misc_RNA (1)...(19): siRNA sense strand
ucggugaucaucugggaaa

SEQ ID NO: 2220450 - RNA, 19 nt, Homo sapiens
  misc_RNA (1)...(19): siRNA sense strand
aggaacagcuacaaagaac

SEQ ID NO: 2220451 - RNA, 19 nt, Homo sapiens
  misc_RNA (1)...(19): siRNA sense strand
ccguaauucugggagacaa

SEQ ID NO: 2220452 - RNA, 19 nt, Homo sapiens
  misc_RNA (1)...(19): siRNA sense strand
gaaaauuugcagaacacaa

SEQ ID NO: 2220453 - RNA, 19 nt, Homo sapiens
  misc_RNA (1)...(19): siRNA sense strand
aaaugccagcagagagaua

SEQ ID NO: 2220454 - RNA, 19 nt, Homo sapiens
  misc_RNA (1)...(19): siRNA sense strand
guugaaugccaguuuggaa

SEQ ID NO: 2220455 - RNA, 19 nt, Homo sapiens
  misc_RNA (1)...(19): siRNA sense strand
uuuaaaggccacauggaga

SEQ ID NO: 2220456 - RNA, 19 nt, Homo sapiens
  misc_RNA (1)...(19): siRNA sense strand
ugaagugcagaguggacaa

SEQ ID NO: 2220457 - RNA, 19 nt, Homo sapiens
  misc_RNA (1)...(19): siRNA sense strand
augcugagauccagggacu

SEQ ID NO: 2220458 - RNA, 19 nt, Homo sapiens
  misc_RNA (1)...(19): siRNA sense strand
aagaaauaguuuggaagga

SEQ ID NO: 2220459 - RNA, 19 nt, Homo sapiens
  misc_RNA (1)...(19): siRNA sense strand
agucagagauggaaaaugu

SEQ ID NO: 2220460 - RNA, 19 nt, Homo sapiens
  misc_RNA (1)...(19): siRNA sense strand
agucuuggcaugaggcuga

SEQ ID NO: 2220461 - RNA, 19 nt, Homo sapiens
  misc_RNA (1)...(19): siRNA sense strand
aagccguaauucugggaga

SEQ ID NO: 2220462 - RNA, 19 nt, Homo sapiens
  misc_RNA (1)...(19): siRNA sense strand
gauacagacccuaaaacaa

SEQ ID NO: 2220463 - RNA, 19 nt, Homo sapiens
  misc_RNA (1)...(19): siRNA sense strand
agguggacucuguggcaau

SEQ ID NO: 2220464 - RNA, 19 nt, Homo sapiens
  misc_RNA (1)...(19): siRNA sense strand
ugguaaaaggaguucuaaa

SEQ ID NO: 2220465 - RNA, 19 nt, Homo sapiens
  misc_RNA (1)...(19): siRNA sense strand
cauuuauggcugugaccuu

SEQ ID NO: 2220466 - RNA, 19 nt, Homo sapiens
  misc_RNA (1)...(19): siRNA sense strand
auccagggacuaaaggaaa

SEQ ID NO: 2220467 - RNA, 19 nt, Homo sapiens
  misc_RNA (1)...(19): siRNA sense strand
cuuuaaacucccagaccca

SEQ ID NO: 2220468 - RNA, 19 nt, Homo sapiens
  misc_RNA (1)...(19): siRNA sense strand
ggacaguaaagaaggguga

SEQ ID NO: 2220469 - RNA, 19 nt, Homo sapiens
  misc_RNA (1)...(19): siRNA sense strand
cugcacguuuaaagagaaa

SEQ ID NO: 2220470 - RNA, 19 nt, Homo sapiens
  misc_RNA (1)...(19): siRNA sense strand
cagucugcauagagagcua

SEQ ID NO: 2220471 - RNA, 19 nt, Homo sapiens
  misc_RNA (1)...(19): siRNA sense strand
uauugaaggcccugggaau

SEQ ID NO: 2220472 - RNA, 19 nt, Homo sapiens
  misc_RNA (1)...(19): siRNA sense strand
aagaagggugacaaggaaa

SEQ ID NO: 2220473 - RNA, 19 nt, Homo sapiens
  misc_RNA (1)...(19): siRNA sense strand
uugacaaccaggacaguaa

SEQ ID NO: 2220474 - RNA, 19 nt, Homo sapiens
  misc_RNA (1)...(19): siRNA sense strand
auucagaagaucagguaca

SEQ ID NO: 2220475 - RNA, 19 nt, Homo sapiens
  misc_RNA (1)...(19): siRNA sense strand
auaacagaauugaggggua

SEQ ID NO: 2220476 - RNA, 19 nt, Homo sapiens
  misc_RNA (1)...(19): siRNA sense strand
caguaaagaagggugacaa

SEQ ID NO: 2220477 - RNA, 19 nt, Homo sapiens
  misc_RNA (1)...(19): siRNA sense strand
cgagaacaggagaaaucaa

SEQ ID NO: 2220478 - RNA, 19 nt, Homo sapiens
  misc_RNA (1)...(19): siRNA sense strand
ugacaauagcuguuggaac

SEQ ID NO: 2220479 - RNA, 19 nt, Homo sapiens
  misc_RNA (1)...(19): siRNA sense strand
ucaacauugcaguaacaaa

SEQ ID NO: 2220480 - RNA, 19 nt, Homo sapiens
  misc_RNA (1)...(19): siRNA sense strand
auggaaaggcucaccagaa

SEQ ID NO: 2220481 - RNA, 19 nt, Homo sapiens
  misc_RNA (1)...(19): siRNA sense strand
gcacguuuaaagagaaaau

SEQ ID NO: 2220482 - RNA, 19 nt, Homo sapiens
  misc_RNA (1)...(19): siRNA sense strand
acgcgagccaggaguacua

SEQ ID NO: 2220483 - RNA, 19 nt, Homo sapiens
  misc_RNA (1)...(19): siRNA sense strand
cgacaacucccuuggccuu

SEQ ID NO: 2220484 - RNA, 19 nt, Homo sapiens
  misc_RNA (1)...(19): siRNA sense strand
agaagaucagguacacaaa

SEQ ID NO: 2220485 - RNA, 19 nt, Homo sapiens
  misc_RNA (1)...(19): siRNA sense strand
cagugaaagagaugagaau

SEQ ID NO: 2220486 - RNA, 19 nt, Homo sapiens
  misc_RNA (1)...(19): siRNA sense strand
ccgucaaagugaucaacaa

SEQ ID NO: 2220487 - RNA, 19 nt, Homo sapiens
  misc_RNA (1)...(19): siRNA sense strand
agaugaauacagugaaaga

SEQ ID NO: 2220488 - RNA, 19 nt, Homo sapiens
  misc_RNA (1)...(19): siRNA sense strand
agaugaagacauaggagau

SEQ ID NO: 2220489 - RNA, 19 nt, Homo sapiens
  misc_RNA (1)...(19): siRNA sense strand
gggaaaugcagaagagccu

SEQ ID NO: 2220490 - RNA, 19 nt, Homo sapiens
  misc_RNA (1)...(19): siRNA sense strand
cugaaaucccuuacagcua

SEQ ID NO: 2220491 - RNA, 19 nt, Homo sapiens
  misc_RNA (1)...(19): siRNA sense strand
guuacauguaugagaaaga

SEQ ID NO: 2220492 - RNA, 19 nt, Homo sapiens
  misc_RNA (1)...(19): siRNA sense strand
cugcgauguguguggauua

SEQ ID NO: 2220493 - RNA, 19 nt, Homo sapiens
  misc_RNA (1)...(19): siRNA sense strand
agaaagagagugagcucau

SEQ ID NO: 2220494 - RNA, 19 nt, Homo sapiens
  misc_RNA (1)...(19): siRNA sense strand
augaagaacgccagaauca

SEQ ID NO: 2220495 - RNA, 19 nt, Homo sapiens
  misc_RNA (1)...(19): siRNA sense strand
uggagaaggcccagccaau

SEQ ID NO: 2220496 - RNA, 19 nt, Homo sapiens
  misc_RNA (1)...(19): siRNA sense strand
ggacaguggagaaggccca

SEQ ID NO: 2220497 - RNA, 19 nt, Homo sapiens
  misc_RNA (1)...(19): siRNA sense strand
cgcagaaagugcagcgguu

SEQ ID NO: 2220498 - RNA, 19 nt, Homo sapiens
  misc_RNA (1)...(19): siRNA sense strand
augaauacagugaaagaga

SEQ ID NO: 2220499 - RNA, 19 nt, Homo sapiens
  misc_RNA (1)...(19): siRNA sense strand
guguaacauguguggauau

SEQ ID NO: 2220500 - RNA, 19 nt, Homo sapiens
  misc_RNA (1)...(19): siRNA sense strand
aaauguggacaguggagaa

SEQ ID NO: 2220501 - RNA, 19 nt, Homo sapiens
  misc_RNA (1)...(19): siRNA sense strand
uauacaaacaaaugcggaa

SEQ ID NO: 2220502 - RNA, 19 nt, Homo sapiens
  misc_RNA (1)...(19): siRNA sense strand
ggaaagaugaacugcgaug

SEQ ID NO: 2220503 - RNA, 19 nt, Homo sapiens
  misc_RNA (1)...(19): siRNA sense strand
cagccaaugaagaugaaga

SEQ ID NO: 2220504 - RNA, 19 nt, Homo sapiens
  misc_RNA (1)...(19): siRNA sense strand
guggaaagaugaacugcga

SEQ ID NO: 2220505 - RNA, 19 nt, Homo sapiens
  misc_RNA (1)...(19): siRNA sense strand
aagaugaagacauaggaga

SEQ ID NO: 2220506 - RNA, 19 nt, Homo sapiens
  misc_RNA (1)...(19): siRNA sense strand
cagugaaagagaugagaau

SEQ ID NO: 2220507 - RNA, 19 nt, Homo sapiens
  misc_RNA (1)...(19): siRNA sense strand
ccgucaaagugaucaacaa

SEQ ID NO: 2220508 - RNA, 19 nt, Homo sapiens
  misc_RNA (1)...(19): siRNA sense strand
agaugaauacagugaaaga

SEQ ID NO: 2220509 - RNA, 19 nt, Homo sapiens
  misc_RNA (1)...(19): siRNA sense strand
agaugaagacauaggagau

SEQ ID NO: 2220510 - RNA, 19 nt, Homo sapiens
  misc_RNA (1)...(19): siRNA sense strand
gggaaaugcagaagagccu

SEQ ID NO: 2220511 - RNA, 19 nt, Homo sapiens
  misc_RNA (1)...(19): siRNA sense strand
cugaaaucccuuacagcua

SEQ ID NO: 2220512 - RNA, 19 nt, Homo sapiens
  misc_RNA (1)...(19): siRNA sense strand
guuacauguaugagaaaga

SEQ ID NO: 2220513 - RNA, 19 nt, Homo sapiens
  misc_RNA (1)...(19): siRNA sense strand
cugcgauguguguggauua

SEQ ID NO: 2220514 - RNA, 19 nt, Homo sapiens
  misc_RNA (1)...(19): siRNA sense strand
agaaagagagugagcucau

SEQ ID NO: 2220515 - RNA, 19 nt, Homo sapiens
  misc_RNA (1)...(19): siRNA sense strand
augaagaacgccagaauca

SEQ ID NO: 2220516 - RNA, 19 nt, Homo sapiens
  misc_RNA (1)...(19): siRNA sense strand
uggagaaggcccagccaau

SEQ ID NO: 2220517 - RNA, 19 nt, Homo sapiens
  misc_RNA (1)...(19): siRNA sense strand
ggacaguggagaaggccca

SEQ ID NO: 2220518 - RNA, 19 nt, Homo sapiens
  misc_RNA (1)...(19): siRNA sense strand
cgcagaaagugcagcgguu

SEQ ID NO: 2220519 - RNA, 19 nt, Homo sapiens
  misc_RNA (1)...(19): siRNA sense strand
augaauacagugaaagaga

SEQ ID NO: 2220520 - RNA, 19 nt, Homo sapiens
  misc_RNA (1)...(19): siRNA sense strand
guguaacauguguggauau

SEQ ID NO: 2220521 - RNA, 19 nt, Homo sapiens
  misc_RNA (1)...(19): siRNA sense strand
aaauguggacaguggagaa

SEQ ID NO: 2220522 - RNA, 19 nt, Homo sapiens
  misc_RNA (1)...(19): siRNA sense strand
uauacaaacaaaugcggaa

SEQ ID NO: 2220523 - RNA, 19 nt, Homo sapiens
  misc_RNA (1)...(19): siRNA sense strand
ggaaagaugaacugcgaug

SEQ ID NO: 2220524 - RNA, 19 nt, Homo sapiens
  misc_RNA (1)...(19): siRNA sense strand
cagccaaugaagaugaaga

SEQ ID NO: 2220525 - RNA, 19 nt, Homo sapiens
  misc_RNA (1)...(19): siRNA sense strand
guggaaagaugaacugcga

SEQ ID NO: 2220526 - RNA, 19 nt, Homo sapiens
  misc_RNA (1)...(19): siRNA sense strand
aagaugaagacauaggaga

SEQ ID NO: 2220527 - RNA, 19 nt, Homo sapiens
  misc_RNA (1)...(19): siRNA sense strand
cagugaaagagaugagaau

SEQ ID NO: 2220528 - RNA, 19 nt, Homo sapiens
  misc_RNA (1)...(19): siRNA sense strand
ccgucaaagugaucaacaa

SEQ ID NO: 2220529 - RNA, 19 nt, Homo sapiens
  misc_RNA (1)...(19): siRNA sense strand
agaugaauacagugaaaga

SEQ ID NO: 2220530 - RNA, 19 nt, Homo sapiens
  misc_RNA (1)...(19): siRNA sense strand
agaugaagacauaggagau

SEQ ID NO: 2220531 - RNA, 19 nt, Homo sapiens
  misc_RNA (1)...(19): siRNA sense strand
gggaaaugcagaagagccu

SEQ ID NO: 2220532 - RNA, 19 nt, Homo sapiens
  misc_RNA (1)...(19): siRNA sense strand
cugaaaucccuuacagcua

SEQ ID NO: 2220533 - RNA, 19 nt, Homo sapiens
  misc_RNA (1)...(19): siRNA sense strand
guuacauguaugagaaaga

SEQ ID NO: 2220534 - RNA, 19 nt, Homo sapiens
  misc_RNA (1)...(19): siRNA sense strand
cugcgauguguguggauua

SEQ ID NO: 2220535 - RNA, 19 nt, Homo sapiens
  misc_RNA (1)...(19): siRNA sense strand
agaaagagagugagcucau

SEQ ID NO: 2220536 - RNA, 19 nt, Homo sapiens
  misc_RNA (1)...(19): siRNA sense strand
augaagaacgccagaauca

SEQ ID NO: 2220537 - RNA, 19 nt, Homo sapiens
  misc_RNA (1)...(19): siRNA sense strand
uggagaaggcccagccaau

SEQ ID NO: 2220538 - RNA, 19 nt, Homo sapiens
  misc_RNA (1)...(19): siRNA sense strand
ggacaguggagaaggccca

SEQ ID NO: 2220539 - RNA, 19 nt, Homo sapiens
  misc_RNA (1)...(19): siRNA sense strand
cgcagaaagugcagcgguu

SEQ ID NO: 2220540 - RNA, 19 nt, Homo sapiens
  misc_RNA (1)...(19): siRNA sense strand
augaauacagugaaagaga

SEQ ID NO: 2220541 - RNA, 19 nt, Homo sapiens
  misc_RNA (1)...(19): siRNA sense strand
guguaacauguguggauau

SEQ ID NO: 2220542 - RNA, 19 nt, Homo sapiens
  misc_RNA (1)...(19): siRNA sense strand
aaauguggacaguggagaa

SEQ ID NO: 2220543 - RNA, 19 nt, Homo sapiens
  misc_RNA (1)...(19): siRNA sense strand
uauacaaacaaaugcggaa

SEQ ID NO: 2220544 - RNA, 19 nt, Homo sapiens
  misc_RNA (1)...(19): siRNA sense strand
ggaaagaugaacugcgaug

SEQ ID NO: 2220545 - RNA, 19 nt, Homo sapiens
  misc_RNA (1)...(19): siRNA sense strand
cagccaaugaagaugaaga

SEQ ID NO: 2220546 - RNA, 19 nt, Homo sapiens
  misc_RNA (1)...(19): siRNA sense strand
guggaaagaugaacugcga

SEQ ID NO: 2220547 - RNA, 19 nt, Homo sapiens
  misc_RNA (1)...(19): siRNA sense strand
aagaugaagacauaggaga

SEQ ID NO: 2220548 - RNA, 19 nt, Homo sapiens
  misc_RNA (1)...(19): siRNA sense strand
cagugaaagagaugagaau

SEQ ID NO: 2220549 - RNA, 19 nt, Homo sapiens
  misc_RNA (1)...(19): siRNA sense strand
ccgucaaagugaucaacaa

SEQ ID NO: 2220550 - RNA, 19 nt, Homo sapiens
  misc_RNA (1)...(19): siRNA sense strand
agaugaauacagugaaaga

SEQ ID NO: 2220551 - RNA, 19 nt, Homo sapiens
  misc_RNA (1)...(19): siRNA sense strand
agaugaagacauaggagau

SEQ ID NO: 2220552 - RNA, 19 nt, Homo sapiens
  misc_RNA (1)...(19): siRNA sense strand
gggaaaugcagaagagccu

SEQ ID NO: 2220553 - RNA, 19 nt, Homo sapiens
  misc_RNA (1)...(19): siRNA sense strand
cugaaaucccuuacagcua

SEQ ID NO: 2220554 - RNA, 19 nt, Homo sapiens
  misc_RNA (1)...(19): siRNA sense strand
guuacauguaugagaaaga

SEQ ID NO: 2220555 - RNA, 19 nt, Homo sapiens
  misc_RNA (1)...(19): siRNA sense strand
cugcgauguguguggauua

SEQ ID NO: 2220556 - RNA, 19 nt, Homo sapiens
  misc_RNA (1)...(19): siRNA sense strand
agaaagagagugagcucau

SEQ ID NO: 2220557 - RNA, 19 nt, Homo sapiens
  misc_RNA (1)...(19): siRNA sense strand
augaagaacgccagaauca

SEQ ID NO: 2220558 - RNA, 19 nt, Homo sapiens
  misc_RNA (1)...(19): siRNA sense strand
uggagaaggcccagccaau

SEQ ID NO: 2220559 - RNA, 19 nt, Homo sapiens
  misc_RNA (1)...(19): siRNA sense strand
ggacaguggagaaggccca

SEQ ID NO: 2220560 - RNA, 19 nt, Homo sapiens
  misc_RNA (1)...(19): siRNA sense strand
cgcagaaagugcagcgguu

SEQ ID NO: 2220561 - RNA, 19 nt, Homo sapiens
  misc_RNA (1)...(19): siRNA sense strand
augaauacagugaaagaga

SEQ ID NO: 2220562 - RNA, 19 nt, Homo sapiens
  misc_RNA (1)...(19): siRNA sense strand
guguaacauguguggauau

SEQ ID NO: 2220563 - RNA, 19 nt, Homo sapiens
  misc_RNA (1)...(19): siRNA sense strand
aaauguggacaguggagaa

SEQ ID NO: 2220564 - RNA, 19 nt, Homo sapiens
  misc_RNA (1)...(19): siRNA sense strand
uauacaaacaaaugcggaa

SEQ ID NO: 2220565 - RNA, 19 nt, Homo sapiens
  misc_RNA (1)...(19): siRNA sense strand
ggaaagaugaacugcgaug

SEQ ID NO: 2220566 - RNA, 19 nt, Homo sapiens
  misc_RNA (1)...(19): siRNA sense strand
cagccaaugaagaugaaga

SEQ ID NO: 2220567 - RNA, 19 nt, Homo sapiens
  misc_RNA (1)...(19): siRNA sense strand
guggaaagaugaacugcga

SEQ ID NO: 2220568 - RNA, 19 nt, Homo sapiens
  misc_RNA (1)...(19): siRNA sense strand
aagaugaagacauaggaga

SEQ ID NO: 2220569 - RNA, 19 nt, Homo sapiens
  misc_RNA (1)...(19): siRNA sense strand
cagugaaagagaugagaau

SEQ ID NO: 2220570 - RNA, 19 nt, Homo sapiens
  misc_RNA (1)...(19): siRNA sense strand
ccgucaaagugaucaacaa

SEQ ID NO: 2220571 - RNA, 19 nt, Homo sapiens
  misc_RNA (1)...(19): siRNA sense strand
agaugaauacagugaaaga

SEQ ID NO: 2220572 - RNA, 19 nt, Homo sapiens
  misc_RNA (1)...(19): siRNA sense strand
agaugaagacauaggagau

SEQ ID NO: 2220573 - RNA, 19 nt, Homo sapiens
  misc_RNA (1)...(19): siRNA sense strand
gggaaaugcagaagagccu

SEQ ID NO: 2220574 - RNA, 19 nt, Homo sapiens
  misc_RNA (1)...(19): siRNA sense strand
cugaaaucccuuacagcua

SEQ ID NO: 2220575 - RNA, 19 nt, Homo sapiens
  misc_RNA (1)...(19): siRNA sense strand
guuacauguaugagaaaga

SEQ ID NO: 2220576 - RNA, 19 nt, Homo sapiens
  misc_RNA (1)...(19): siRNA sense strand
cugcgauguguguggauua

SEQ ID NO: 2220577 - RNA, 19 nt, Homo sapiens
  misc_RNA (1)...(19): siRNA sense strand
agaaagagagugagcucau

SEQ ID NO: 2220578 - RNA, 19 nt, Homo sapiens
  misc_RNA (1)...(19): siRNA sense strand
augaagaacgccagaauca

SEQ ID NO: 2220579 - RNA, 19 nt, Homo sapiens
  misc_RNA (1)...(19): siRNA sense strand
uggagaaggcccagccaau

SEQ ID NO: 2220580 - RNA, 19 nt, Homo sapiens
  misc_RNA (1)...(19): siRNA sense strand
ggacaguggagaaggccca

SEQ ID NO: 2220581 - RNA, 19 nt, Homo sapiens
  misc_RNA (1)...(19): siRNA sense strand
cgcagaaagugcagcgguu

SEQ ID NO: 2220582 - RNA, 19 nt, Homo sapiens
  misc_RNA (1)...(19): siRNA sense strand
augaauacagugaaagaga

SEQ ID NO: 2220583 - RNA, 19 nt, Homo sapiens
  misc_RNA (1)...(19): siRNA sense strand
guguaacauguguggauau

SEQ ID NO: 2220584 - RNA, 19 nt, Homo sapiens
  misc_RNA (1)...(19): siRNA sense strand
aaauguggacaguggagaa

SEQ ID NO: 2220585 - RNA, 19 nt, Homo sapiens
  misc_RNA (1)...(19): siRNA sense strand
uauacaaacaaaugcggaa

SEQ ID NO: 2220586 - RNA, 19 nt, Homo sapiens
  misc_RNA (1)...(19): siRNA sense strand
ggaaagaugaacugcgaug

SEQ ID NO: 2220587 - RNA, 19 nt, Homo sapiens
  misc_RNA (1)...(19): siRNA sense strand
cagccaaugaagaugaaga

SEQ ID NO: 2220588 - RNA, 19 nt, Homo sapiens
  misc_RNA (1)...(19): siRNA sense strand
guggaaagaugaacugcga

SEQ ID NO: 2220589 - RNA, 19 nt, Homo sapiens
  misc_RNA (1)...(19): siRNA sense strand
aagaugaagacauaggaga

SEQ ID NO: 2220590 - RNA, 19 nt, Homo sapiens
  misc_RNA (1)...(19): siRNA sense strand
cagugaaagagaugagaau

SEQ ID NO: 2220591 - RNA, 19 nt, Homo sapiens
  misc_RNA (1)...(19): siRNA sense strand
ccgucaaagugaucaacaa

SEQ ID NO: 2220592 - RNA, 19 nt, Homo sapiens
  misc_RNA (1)...(19): siRNA sense strand
agaugaauacagugaaaga

SEQ ID NO: 2220593 - RNA, 19 nt, Homo sapiens
  misc_RNA (1)...(19): siRNA sense strand
agaugaagacauaggagau

SEQ ID NO: 2220594 - RNA, 19 nt, Homo sapiens
  misc_RNA (1)...(19): siRNA sense strand
gggaaaugcagaagagccu

SEQ ID NO: 2220595 - RNA, 19 nt, Homo sapiens
  misc_RNA (1)...(19): siRNA sense strand
cugaaaucccuuacagcua

SEQ ID NO: 2220596 - RNA, 19 nt, Homo sapiens
  misc_RNA (1)...(19): siRNA sense strand
guuacauguaugagaaaga

SEQ ID NO: 2220597 - RNA, 19 nt, Homo sapiens
  misc_RNA (1)...(19): siRNA sense strand
cugcgauguguguggauua

SEQ ID NO: 2220598 - RNA, 19 nt, Homo sapiens
  misc_RNA (1)...(19): siRNA sense strand
agaaagagagugagcucau

SEQ ID NO: 2220599 - RNA, 19 nt, Homo sapiens
  misc_RNA (1)...(19): siRNA sense strand
augaagaacgccagaauca

SEQ ID NO: 2220600 - RNA, 19 nt, Homo sapiens
  misc_RNA (1)...(19): siRNA sense strand
uggagaaggcccagccaau

SEQ ID NO: 2220601 - RNA, 19 nt, Homo sapiens
  misc_RNA (1)...(19): siRNA sense strand
ggacaguggagaaggccca

SEQ ID NO: 2220602 - RNA, 19 nt, Homo sapiens
  misc_RNA (1)...(19): siRNA sense strand
cgcagaaagugcagcgguu

SEQ ID NO: 2220603 - RNA, 19 nt, Homo sapiens
  misc_RNA (1)...(19): siRNA sense strand
augaauacagugaaagaga

SEQ ID NO: 2220604 - RNA, 19 nt, Homo sapiens
  misc_RNA (1)...(19): siRNA sense strand
guguaacauguguggauau

SEQ ID NO: 2220605 - RNA, 19 nt, Homo sapiens
  misc_RNA (1)...(19): siRNA sense strand
aaauguggacaguggagaa

SEQ ID NO: 2220606 - RNA, 19 nt, Homo sapiens
  misc_RNA (1)...(19): siRNA sense strand
uauacaaacaaaugcggaa

SEQ ID NO: 2220607 - RNA, 19 nt, Homo sapiens
  misc_RNA (1)...(19): siRNA sense strand
ggaaagaugaacugcgaug

SEQ ID NO: 2220608 - RNA, 19 nt, Homo sapiens
  misc_RNA (1)...(19): siRNA sense strand
cagccaaugaagaugaaga

SEQ ID NO: 2220609 - RNA, 19 nt, Homo sapiens
  misc_RNA (1)...(19): siRNA sense strand
guggaaagaugaacugcga

SEQ ID NO: 2220610 - RNA, 19 nt, Homo sapiens
  misc_RNA (1)...(19): siRNA sense strand
aagaugaagacauaggaga

SEQ ID NO: 2220611 - RNA, 19 nt, Homo sapiens
  misc_RNA (1)...(19): siRNA sense strand
cagagaacaucaaggccuu

SEQ ID NO: 2220612 - RNA, 19 nt, Homo sapiens
  misc_RNA (1)...(19): siRNA sense strand
acauggacuuggagacaca

SEQ ID NO: 2220613 - RNA, 19 nt, Homo sapiens
  misc_RNA (1)...(19): siRNA sense strand
agaaagaggcccagccacu

SEQ ID NO: 2220614 - RNA, 19 nt, Homo sapiens
  misc_RNA (1)...(19): siRNA sense strand
agaaggcagcagagaacau

SEQ ID NO: 2220615 - RNA, 19 nt, Homo sapiens
  misc_RNA (1)...(19): siRNA sense strand
cuacaggcagcuggagaaa

SEQ ID NO: 2220616 - RNA, 19 nt, Homo sapiens
  misc_RNA (1)...(19): siRNA sense strand
gcaucaagaaggcagcaga

SEQ ID NO: 2220617 - RNA, 19 nt, Homo sapiens
  misc_RNA (1)...(19): siRNA sense strand
aggaaaggacauagaagau

SEQ ID NO: 2220618 - RNA, 19 nt, Homo sapiens
  misc_RNA (1)...(19): siRNA sense strand
guccaaguuacgagaguau

SEQ ID NO: 2220619 - RNA, 19 nt, Homo sapiens
  misc_RNA (1)...(19): siRNA sense strand
ccugcgucauggaaggaaa

SEQ ID NO: 2220620 - RNA, 19 nt, Homo sapiens
  misc_RNA (1)...(19): siRNA sense strand
agucaauuugcaagaugaa

SEQ ID NO: 2220621 - RNA, 19 nt, Homo sapiens
  misc_RNA (1)...(19): siRNA sense strand
agaagagccucaagaccga

SEQ ID NO: 2220622 - RNA, 19 nt, Homo sapiens
  misc_RNA (1)...(19): siRNA sense strand
uggaaggaaaggacauaga

SEQ ID NO: 2220623 - RNA, 19 nt, Homo sapiens
  misc_RNA (1)...(19): siRNA sense strand
ucauggaaggaaaggacau

SEQ ID NO: 2220624 - RNA, 19 nt, Homo sapiens
  misc_RNA (1)...(19): siRNA sense strand
aggaaaggacauagaagau

SEQ ID NO: 2220625 - RNA, 19 nt, Homo sapiens
  misc_RNA (1)...(19): siRNA sense strand
guccaaguuacgagaguau

SEQ ID NO: 2220626 - RNA, 19 nt, Homo sapiens
  misc_RNA (1)...(19): siRNA sense strand
ccugcgucauggaaggaaa

SEQ ID NO: 2220627 - RNA, 19 nt, Homo sapiens
  misc_RNA (1)...(19): siRNA sense strand
agucaauuugcaagaugaa

SEQ ID NO: 2220628 - RNA, 19 nt, Homo sapiens
  misc_RNA (1)...(19): siRNA sense strand
agaagagccucaagaccga

SEQ ID NO: 2220629 - RNA, 19 nt, Homo sapiens
  misc_RNA (1)...(19): siRNA sense strand
uggaaggaaaggacauaga

SEQ ID NO: 2220630 - RNA, 19 nt, Homo sapiens
  misc_RNA (1)...(19): siRNA sense strand
ucauggaaggaaaggacau

SEQ ID NO: 2220631 - RNA, 19 nt, Homo sapiens
  misc_RNA (1)...(19): siRNA sense strand
gcaaauaagcuuuaaggca

SEQ ID NO: 2220632 - RNA, 19 nt, Homo sapiens
  misc_RNA (1)...(19): siRNA sense strand
gcuuuaaggcagaagucaa

SEQ ID NO: 2220633 - RNA, 19 nt, Homo sapiens
  misc_RNA (1)...(19): siRNA sense strand
ccaaagaacuggcuaggca

SEQ ID NO: 2220634 - RNA, 19 nt, Homo sapiens
  misc_RNA (1)...(19): siRNA sense strand
cgacgaauauaucuggcaa

SEQ ID NO: 2220635 - RNA, 19 nt, Homo sapiens
  misc_RNA (1)...(19): siRNA sense strand
aaauaagcuuuaaggcaga

SEQ ID NO: 2220636 - RNA, 19 nt, Homo sapiens
  misc_RNA (1)...(19): siRNA sense strand
caaauaagcuuuaaggcag

SEQ ID NO: 2220637 - RNA, 19 nt, Homo sapiens
  misc_RNA (1)...(19): siRNA sense strand
ugaggaaagaagagcacuu

SEQ ID NO: 2220638 - RNA, 19 nt, Homo sapiens
  misc_RNA (1)...(19): siRNA sense strand
caaagaacuggcuaggcaa

SEQ ID NO: 2220639 - RNA, 19 nt, Homo sapiens
  misc_RNA (1)...(19): siRNA sense strand
cuuuaaggcagaagucaau

SEQ ID NO: 2220640 - RNA, 19 nt, Homo sapiens
  misc_RNA (1)...(19): siRNA sense strand
gacgaauauaucuggcaaa

SEQ ID NO: 2220641 - RNA, 19 nt, Homo sapiens
  misc_RNA (1)...(19): siRNA sense strand
cagauguaauccagggcca

SEQ ID NO: 2220642 - RNA, 19 nt, Homo sapiens
  misc_RNA (1)...(19): siRNA sense strand
auuugaagugggcaagaaa

SEQ ID NO: 2220643 - RNA, 19 nt, Homo sapiens
  misc_RNA (1)...(19): siRNA sense strand
uaaugaaagaagcggcaga

SEQ ID NO: 2220644 - RNA, 19 nt, Homo sapiens
  misc_RNA (1)...(19): siRNA sense strand
ggacagcauuauuagccau

SEQ ID NO: 2220645 - RNA, 19 nt, Homo sapiens
  misc_RNA (1)...(19): siRNA sense strand
ccaugaaaccaccaagcau

SEQ ID NO: 2220646 - RNA, 19 nt, Homo sapiens
  misc_RNA (1)...(19): siRNA sense strand
ggauaguacugccaccaga

SEQ ID NO: 2220647 - RNA, 19 nt, Homo sapiens
  misc_RNA (1)...(19): siRNA sense strand
ccuaacggcuaauggucga

SEQ ID NO: 2220648 - RNA, 19 nt, Homo sapiens
  misc_RNA (1)...(19): siRNA sense strand
uggaagcgauucaagccaa

SEQ ID NO: 2220649 - RNA, 19 nt, Homo sapiens
  misc_RNA (1)...(19): siRNA sense strand
gcacagaagaagugaauuu

SEQ ID NO: 2220650 - RNA, 19 nt, Homo sapiens
  misc_RNA (1)...(19): siRNA sense strand
ccaagaaacucacgauuaa

SEQ ID NO: 2220651 - RNA, 19 nt, Homo sapiens
  misc_RNA (1)...(19): siRNA sense strand
ugugaaagcugcugauuua

SEQ ID NO: 2220652 - RNA, 19 nt, Homo sapiens
  misc_RNA (1)...(19): siRNA sense strand
ggaucaugcuguaacaaua

SEQ ID NO: 2220653 - RNA, 19 nt, Homo sapiens
  misc_RNA (1)...(19): siRNA sense strand
ggauggauuuaaacggaua

SEQ ID NO: 2220654 - RNA, 19 nt, Homo sapiens
  misc_RNA (1)...(19): siRNA sense strand
guucacaguuauuuggaaa

SEQ ID NO: 2220655 - RNA, 19 nt, Homo sapiens
  misc_RNA (1)...(19): siRNA sense strand
cagcuuaauaugacaguua

SEQ ID NO: 2220656 - RNA, 19 nt, Homo sapiens
  misc_RNA (1)...(19): siRNA sense strand
cuggauacauucagaacua

SEQ ID NO: 2220657 - RNA, 19 nt, Homo sapiens
  misc_RNA (1)...(19): siRNA sense strand
cuacaggauucuugucaaa

SEQ ID NO: 2220658 - RNA, 19 nt, Homo sapiens
  misc_RNA (1)...(19): siRNA sense strand
augaaauacuacagcgauu

SEQ ID NO: 2220659 - RNA, 19 nt, Homo sapiens
  misc_RNA (1)...(19): siRNA sense strand
cagcauggauggauuuaaa

SEQ ID NO: 2220660 - RNA, 19 nt, Homo sapiens
  misc_RNA (1)...(19): siRNA sense strand
gagcaaagugggaacagua

SEQ ID NO: 2220661 - RNA, 19 nt, Homo sapiens
  misc_RNA (1)...(19): siRNA sense strand
uuucaaaggucucaugaua

SEQ ID NO: 2220662 - RNA, 19 nt, Homo sapiens
  misc_RNA (1)...(19): siRNA sense strand
aagacuagcuauugcuuua

SEQ ID NO: 2220663 - RNA, 19 nt, Homo sapiens
  misc_RNA (1)...(19): siRNA sense strand
gcauguaguuuaucgaauu

SEQ ID NO: 2220664 - RNA, 19 nt, Homo sapiens
  misc_RNA (1)...(19): siRNA sense strand
ggcaguugcaguugagaaa

SEQ ID NO: 2220665 - RNA, 19 nt, Homo sapiens
  misc_RNA (1)...(19): siRNA sense strand
cgaaaagaacucugaaaau

SEQ ID NO: 2220666 - RNA, 19 nt, Homo sapiens
  misc_RNA (1)...(19): siRNA sense strand
aaugaauccugaugcgaua

SEQ ID NO: 2220667 - RNA, 19 nt, Homo sapiens
  misc_RNA (1)...(19): siRNA sense strand
gaagaaaggauauuaccaa

SEQ ID NO: 2220668 - RNA, 19 nt, Homo sapiens
  misc_RNA (1)...(19): siRNA sense strand
aggauaugcugcagacauu

SEQ ID NO: 2220669 - RNA, 19 nt, Homo sapiens
  misc_RNA (1)...(19): siRNA sense strand
aaaggaguaugcagagaaa

SEQ ID NO: 2220670 - RNA, 19 nt, Homo sapiens
  misc_RNA (1)...(19): siRNA sense strand
auaaagagagacaggauuu

SEQ ID NO: 2220671 - RNA, 19 nt, Homo sapiens
  misc_RNA (1)...(19): siRNA sense strand
caauggaacaucugaguuu

SEQ ID NO: 2220672 - RNA, 19 nt, Homo sapiens
  misc_RNA (1)...(19): siRNA sense strand
gcagagaaagggauagaca

SEQ ID NO: 2220673 - RNA, 19 nt, Homo sapiens
  misc_RNA (1)...(19): siRNA sense strand
ggaacuacaugcauaauga

SEQ ID NO: 2220674 - RNA, 19 nt, Homo sapiens
  misc_RNA (1)...(19): siRNA sense strand
gauuguggcuauaaagaga

SEQ ID NO: 2220675 - RNA, 19 nt, Homo sapiens
  misc_RNA (1)...(19): siRNA sense strand
agucacagaguuaaaguaa

SEQ ID NO: 2220676 - RNA, 19 nt, Homo sapiens
  misc_RNA (1)...(19): siRNA sense strand
ccagaauauugcaauggaa

SEQ ID NO: 2220677 - RNA, 19 nt, Homo sapiens
  misc_RNA (1)...(19): siRNA sense strand
guggaaagauuguuuguca

SEQ ID NO: 2220678 - RNA, 19 nt, Homo sapiens
  misc_RNA (1)...(19): siRNA sense strand
ugacagacuuagacauaca

SEQ ID NO: 2220679 - RNA, 19 nt, Homo sapiens
  misc_RNA (1)...(19): siRNA sense strand
guaugcagagaaagggaua

SEQ ID NO: 2220680 - RNA, 19 nt, Homo sapiens
  misc_RNA (1)...(19): siRNA sense strand
gcacaguugcuuggaauua

SEQ ID NO: 2220681 - RNA, 19 nt, Homo sapiens
  misc_RNA (1)...(19): siRNA sense strand
cuauaaagagagacaggau

SEQ ID NO: 2220682 - RNA, 19 nt, Homo sapiens
  misc_RNA (1)...(19): siRNA sense strand
gcagccagucacagaguua

SEQ ID NO: 2220683 - RNA, 19 nt, Homo sapiens
  misc_RNA (1)...(19): siRNA sense strand
gaggauuacugcaguuaga

SEQ ID NO: 2220684 - RNA, 19 nt, Homo sapiens
  misc_RNA (1)...(19): siRNA sense strand
ccaggaacuacaugcauaa

SEQ ID NO: 2220685 - RNA, 19 nt, Homo sapiens
  misc_RNA (1)...(19): siRNA sense strand
ccuacagagcagugugauu

SEQ ID NO: 2220686 - RNA, 19 nt, Homo sapiens
  misc_RNA (1)...(19): siRNA sense strand
uuguguaccugaugugaaa

SEQ ID NO: 2220687 - RNA, 19 nt, Homo sapiens
  misc_RNA (1)...(19): siRNA sense strand
acaguaagcagcagaucua

SEQ ID NO: 2220688 - RNA, 19 nt, Homo sapiens
  misc_RNA (1)...(19): siRNA sense strand
ggauuacugcaguuagaua

SEQ ID NO: 2220689 - RNA, 19 nt, Homo sapiens
  misc_RNA (1)...(19): siRNA sense strand
aguuagaucugcagaaugu

SEQ ID NO: 2220690 - RNA, 19 nt, Homo sapiens
  misc_RNA (1)...(19): siRNA sense strand
agaaagggauagacagugu

SEQ ID NO: 2220691 - RNA, 19 nt, Homo sapiens
  misc_RNA (1)...(19): siRNA sense strand
gugcacagaagaagugaau

SEQ ID NO: 2220692 - RNA, 19 nt, Homo sapiens
  misc_RNA (1)...(19): siRNA sense strand
aaugacagacuuagacaua

SEQ ID NO: 2220693 - RNA, 19 nt, Homo sapiens
  misc_RNA (1)...(19): siRNA sense strand
gaagacagcaguaguaaca

SEQ ID NO: 2220694 - RNA, 19 nt, Homo sapiens
  misc_RNA (1)...(19): siRNA sense strand
gcagauuguacucuaguua

SEQ ID NO: 2220695 - RNA, 19 nt, Homo sapiens
  misc_RNA (1)...(19): siRNA sense strand
ggauaguucugcagccuga

SEQ ID NO: 2220696 - RNA, 19 nt, Homo sapiens
  misc_RNA (1)...(19): siRNA sense strand
gcagugugauuguggcuau

SEQ ID NO: 2220697 - RNA, 19 nt, Homo sapiens
  misc_RNA (1)...(19): siRNA sense strand
gaucaugcuguaacaauaa

SEQ ID NO: 2220698 - RNA, 19 nt, Homo sapiens
  misc_RNA (1)...(19): siRNA sense strand
cuuuaaaggaguaugcaga

SEQ ID NO: 2220699 - RNA, 19 nt, Homo sapiens
  misc_RNA (1)...(19): siRNA sense strand
gauuacugcaguuagauaa

SEQ ID NO: 2220700 - RNA, 19 nt, Homo sapiens
  misc_RNA (1)...(19): siRNA sense strand
auucagaacuaguaccaau

SEQ ID NO: 2220701 - RNA, 19 nt, Homo sapiens
  misc_RNA (1)...(19): siRNA sense strand
agagaaagggauagacagu

SEQ ID NO: 2220702 - RNA, 19 nt, Homo sapiens
  misc_RNA (1)...(19): siRNA sense strand
caaaacaaucggagaccua

SEQ ID NO: 2220703 - RNA, 19 nt, Homo sapiens
  misc_RNA (1)...(19): siRNA sense strand
cucucaaggugcugggauu

SEQ ID NO: 2220704 - RNA, 19 nt, Homo sapiens
  misc_RNA (1)...(19): siRNA sense strand
ugacaaauuuggaaacugu

SEQ ID NO: 2220705 - RNA, 19 nt, Homo sapiens
  misc_RNA (1)...(19): siRNA sense strand
accaagaaacucacgauua

SEQ ID NO: 2220706 - RNA, 19 nt, Homo sapiens
  misc_RNA (1)...(19): siRNA sense strand
gagcaacauaucacggaau

SEQ ID NO: 2220707 - RNA, 19 nt, Homo sapiens
  misc_RNA (1)...(19): siRNA sense strand
uggcacaguugcuuggaau

SEQ ID NO: 2220708 - RNA, 19 nt, Homo sapiens
  misc_RNA (1)...(19): siRNA sense strand
gguauugaaccauuggaau

SEQ ID NO: 2220709 - RNA, 19 nt, Homo sapiens
  misc_RNA (1)...(19): siRNA sense strand
agaccuauacagaagauau

SEQ ID NO: 2220710 - RNA, 19 nt, Homo sapiens
  misc_RNA (1)...(19): siRNA sense strand
ggaugaagaaaggauauua

SEQ ID NO: 2220711 - RNA, 19 nt, Homo sapiens
  misc_RNA (1)...(19): siRNA sense strand
ucgaaaagaacucugaaaa

SEQ ID NO: 2220712 - RNA, 19 nt, Homo sapiens
  misc_RNA (1)...(19): siRNA sense strand
uagacaguguucacaguua

SEQ ID NO: 2220713 - RNA, 19 nt, Homo sapiens
  misc_RNA (1)...(19): siRNA sense strand
aaacaaucggagaccuaua

SEQ ID NO: 2220714 - RNA, 19 nt, Homo sapiens
  misc_RNA (1)...(19): siRNA sense strand
ucagaagacagcaguagua

SEQ ID NO: 2220715 - RNA, 19 nt, Homo sapiens
  misc_RNA (1)...(19): siRNA sense strand
gaaaggauauuaccaagaa

SEQ ID NO: 2220716 - RNA, 19 nt, Homo sapiens
  misc_RNA (1)...(19): siRNA sense strand
ggauuuaaacggauaguuc

SEQ ID NO: 2220717 - RNA, 19 nt, Homo sapiens
  misc_RNA (1)...(19): siRNA sense strand
caauaaaacuuguacgauc

SEQ ID NO: 2220718 - RNA, 19 nt, Homo sapiens
  misc_RNA (1)...(19): siRNA sense strand
agaauauugcaauggaaca

SEQ ID NO: 2220719 - RNA, 19 nt, Homo sapiens
  misc_RNA (1)...(19): siRNA sense strand
cggaauggcaugcgaucca

SEQ ID NO: 2220720 - RNA, 19 nt, Homo sapiens
  misc_RNA (1)...(19): siRNA sense strand
ccuuagaggucacguaugu

SEQ ID NO: 2220721 - RNA, 19 nt, Homo sapiens
  misc_RNA (1)...(19): siRNA sense strand
ggauugacauaugaugaua

SEQ ID NO: 2220722 - RNA, 19 nt, Homo sapiens
  misc_RNA (1)...(19): siRNA sense strand
guauugaaccauuggaauc

SEQ ID NO: 2220723 - RNA, 19 nt, Homo sapiens
  misc_RNA (1)...(19): siRNA sense strand
cagacuuagacauacaaua

SEQ ID NO: 2220724 - RNA, 19 nt, Homo sapiens
  misc_RNA (1)...(19): siRNA sense strand
guaugucacucccgagaau

SEQ ID NO: 2220725 - RNA, 19 nt, Homo sapiens
  misc_RNA (1)...(19): siRNA sense strand
gauauuaccaagaaacuca

SEQ ID NO: 2220726 - RNA, 19 nt, Homo sapiens
  misc_RNA (1)...(19): siRNA sense strand
auacaacaaaucaggaaca

SEQ ID NO: 2220727 - RNA, 19 nt, Homo sapiens
  misc_RNA (1)...(19): siRNA sense strand
guggcuauaaagagagaca

SEQ ID NO: 2220728 - RNA, 19 nt, Homo sapiens
  misc_RNA (1)...(19): siRNA sense strand
uggccaggcuagucucaaa

SEQ ID NO: 2220729 - RNA, 19 nt, Homo sapiens
  misc_RNA (1)...(19): siRNA sense strand
ucaaugugauccugguuau

SEQ ID NO: 2220730 - RNA, 19 nt, Homo sapiens
  misc_RNA (1)...(19): siRNA sense strand
gaaucuucaccuacauaua

SEQ ID NO: 2220731 - RNA, 19 nt, Homo sapiens
  misc_RNA (1)...(19): siRNA sense strand
gggauugacauaugaugau

SEQ ID NO: 2220732 - RNA, 19 nt, Homo sapiens
  misc_RNA (1)...(19): siRNA sense strand
gugugauuguggcuauaaa

SEQ ID NO: 2220733 - RNA, 19 nt, Homo sapiens
  misc_RNA (1)...(19): siRNA sense strand
agaauguggcacuggauca

SEQ ID NO: 2220734 - RNA, 19 nt, Homo sapiens
  misc_RNA (1)...(19): siRNA sense strand
gauuguuugucacuggaua

SEQ ID NO: 2220735 - RNA, 19 nt, Homo sapiens
  misc_RNA (1)...(19): siRNA sense strand
agaaaggauauuaccaaga

SEQ ID NO: 2220736 - RNA, 19 nt, Homo sapiens
  misc_RNA (1)...(19): siRNA sense strand
ggagcaacauaucacggaa

SEQ ID NO: 2220737 - RNA, 19 nt, Homo sapiens
  misc_RNA (1)...(19): siRNA sense strand
gaauauugcaauggaacau

SEQ ID NO: 2220738 - RNA, 19 nt, Homo sapiens
  misc_RNA (1)...(19): siRNA sense strand
caguugcaguugagaaagu

SEQ ID NO: 2220739 - RNA, 19 nt, Homo sapiens
  misc_RNA (1)...(19): siRNA sense strand
aaaguuugcaacaggaauu

SEQ ID NO: 2220740 - RNA, 19 nt, Homo sapiens
  misc_RNA (1)...(19): siRNA sense strand
ugcaagaaaugguucaaaa

SEQ ID NO: 2220741 - RNA, 19 nt, Homo sapiens
  misc_RNA (1)...(19): siRNA sense strand
caacaaaucaggaacauug

SEQ ID NO: 2220742 - RNA, 19 nt, Homo sapiens
  misc_RNA (1)...(19): siRNA sense strand
uauaaagagagacaggauu

SEQ ID NO: 2220743 - RNA, 19 nt, Homo sapiens
  misc_RNA (1)...(19): siRNA sense strand
agacaguguucacaguuau

SEQ ID NO: 2220744 - RNA, 19 nt, Homo sapiens
  misc_RNA (1)...(19): siRNA sense strand
aaugauggauuuuggcuua

SEQ ID NO: 2220745 - RNA, 19 nt, Homo sapiens
  misc_RNA (1)...(19): siRNA sense strand
ccuacaggauucuugucaa

SEQ ID NO: 2220746 - RNA, 19 nt, Homo sapiens
  misc_RNA (1)...(19): siRNA sense strand
gaaugggauuugcaaugaa

SEQ ID NO: 2220747 - RNA, 19 nt, Homo sapiens
  misc_RNA (1)...(19): siRNA sense strand
ccauuggaaucuucaccua

SEQ ID NO: 2220748 - RNA, 19 nt, Homo sapiens
  misc_RNA (1)...(19): siRNA sense strand
gguuaugcuccuccagauu

SEQ ID NO: 2220749 - RNA, 19 nt, Homo sapiens
  misc_RNA (1)...(19): siRNA sense strand
ugaaagagcuaaagaggca

SEQ ID NO: 2220750 - RNA, 19 nt, Homo sapiens
  misc_RNA (1)...(19): siRNA sense strand
gggaucagcacgaggguca

SEQ ID NO: 2220751 - RNA, 19 nt, Homo sapiens
  misc_RNA (1)...(19): siRNA sense strand
gucuggaauaagagagaaa

SEQ ID NO: 2220752 - RNA, 19 nt, Homo sapiens
  misc_RNA (1)...(19): siRNA sense strand
agagaagggaacaggaaaa

SEQ ID NO: 2220753 - RNA, 19 nt, Homo sapiens
  misc_RNA (1)...(19): siRNA sense strand
gguaaggaaaccagcccua

SEQ ID NO: 2220754 - RNA, 19 nt, Homo sapiens
  misc_RNA (1)...(19): siRNA sense strand
aacuauaacccaaaggaau

SEQ ID NO: 2220755 - RNA, 19 nt, Homo sapiens
  misc_RNA (1)...(19): siRNA sense strand
cuguauggagagaagggaa

SEQ ID NO: 2220756 - RNA, 19 nt, Homo sapiens
  misc_RNA (1)...(19): siRNA sense strand
gaaaggaauaacaaggcuu

SEQ ID NO: 2220757 - RNA, 19 nt, Homo sapiens
  misc_RNA (1)...(19): siRNA sense strand
uccuacagaagaagggaaa

SEQ ID NO: 2220758 - RNA, 19 nt, Homo sapiens
  misc_RNA (1)...(19): siRNA sense strand
ggaauaagagagaaagcac

SEQ ID NO: 2220759 - RNA, 19 nt, Homo sapiens
  misc_RNA (1)...(19): siRNA sense strand
aagagaaguaugucuggaa

SEQ ID NO: 2220760 - RNA, 19 nt, Homo sapiens
  misc_RNA (1)...(19): siRNA sense strand
uuggaauugugcugaaaga

SEQ ID NO: 2220761 - RNA, 19 nt, Homo sapiens
  misc_RNA (1)...(19): siRNA sense strand
gcuacaacaaacagcgcuu

SEQ ID NO: 2220762 - RNA, 19 nt, Homo sapiens
  misc_RNA (1)...(19): siRNA sense strand
gaauaagagagaaagcacu

SEQ ID NO: 2220763 - RNA, 19 nt, Homo sapiens
  misc_RNA (1)...(19): siRNA sense strand
ugaucaaccuuuagaggcu

SEQ ID NO: 2220764 - RNA, 19 nt, Homo sapiens
  misc_RNA (1)...(19): siRNA sense strand
aaagagcuaaagaggcaaa

SEQ ID NO: 2220765 - RNA, 19 nt, Homo sapiens
  misc_RNA (1)...(19): siRNA sense strand
ugaaagagcuaaagaggca

SEQ ID NO: 2220766 - RNA, 19 nt, Homo sapiens
  misc_RNA (1)...(19): siRNA sense strand
gggaucagcacgaggguca

SEQ ID NO: 2220767 - RNA, 19 nt, Homo sapiens
  misc_RNA (1)...(19): siRNA sense strand
gucuggaauaagagagaaa

SEQ ID NO: 2220768 - RNA, 19 nt, Homo sapiens
  misc_RNA (1)...(19): siRNA sense strand
agagaagggaacaggaaaa

SEQ ID NO: 2220769 - RNA, 19 nt, Homo sapiens
  misc_RNA (1)...(19): siRNA sense strand
gguaaggaaaccagcccua

SEQ ID NO: 2220770 - RNA, 19 nt, Homo sapiens
  misc_RNA (1)...(19): siRNA sense strand
aacuauaacccaaaggaau

SEQ ID NO: 2220771 - RNA, 19 nt, Homo sapiens
  misc_RNA (1)...(19): siRNA sense strand
cuguauggagagaagggaa

SEQ ID NO: 2220772 - RNA, 19 nt, Homo sapiens
  misc_RNA (1)...(19): siRNA sense strand
gaaaggaauaacaaggcuu

SEQ ID NO: 2220773 - RNA, 19 nt, Homo sapiens
  misc_RNA (1)...(19): siRNA sense strand
uccuacagaagaagggaaa

SEQ ID NO: 2220774 - RNA, 19 nt, Homo sapiens
  misc_RNA (1)...(19): siRNA sense strand
ggaauaagagagaaagcac

SEQ ID NO: 2220775 - RNA, 19 nt, Homo sapiens
  misc_RNA (1)...(19): siRNA sense strand
aagagaaguaugucuggaa

SEQ ID NO: 2220776 - RNA, 19 nt, Homo sapiens
  misc_RNA (1)...(19): siRNA sense strand
uuggaauugugcugaaaga

SEQ ID NO: 2220777 - RNA, 19 nt, Homo sapiens
  misc_RNA (1)...(19): siRNA sense strand
gcuacaacaaacagcgcuu

SEQ ID NO: 2220778 - RNA, 19 nt, Homo sapiens
  misc_RNA (1)...(19): siRNA sense strand
gaauaagagagaaagcacu

SEQ ID NO: 2220779 - RNA, 19 nt, Homo sapiens
  misc_RNA (1)...(19): siRNA sense strand
ugaucaaccuuuagaggcu

SEQ ID NO: 2220780 - RNA, 19 nt, Homo sapiens
  misc_RNA (1)...(19): siRNA sense strand
aaagagcuaaagaggcaaa

SEQ ID NO: 2220781 - RNA, 19 nt, Homo sapiens
  misc_RNA (1)...(19): siRNA sense strand
agacaaucaagcugggaaa

SEQ ID NO: 2220782 - RNA, 19 nt, Homo sapiens
  misc_RNA (1)...(19): siRNA sense strand
cuguggaagcucaguguaa

SEQ ID NO: 2220783 - RNA, 19 nt, Homo sapiens
  misc_RNA (1)...(19): siRNA sense strand
gcugaaaguuacaggcacu

SEQ ID NO: 2220784 - RNA, 19 nt, Homo sapiens
  misc_RNA (1)...(19): siRNA sense strand
ccauuguaugugaaagaaa

SEQ ID NO: 2220785 - RNA, 19 nt, Homo sapiens
  misc_RNA (1)...(19): siRNA sense strand
gggaauuuauggauggcga

SEQ ID NO: 2220786 - RNA, 19 nt, Homo sapiens
  misc_RNA (1)...(19): siRNA sense strand
cuacagaaggggagauauu

SEQ ID NO: 2220787 - RNA, 19 nt, Homo sapiens
  misc_RNA (1)...(19): siRNA sense strand
cuguggaugguaugggaaa

SEQ ID NO: 2220788 - RNA, 19 nt, Homo sapiens
  misc_RNA (1)...(19): siRNA sense strand
gcacaucagagcagagcca

SEQ ID NO: 2220789 - RNA, 19 nt, Homo sapiens
  misc_RNA (1)...(19): siRNA sense strand
uggcgaaagaggugcuuau

SEQ ID NO: 2220790 - RNA, 19 nt, Homo sapiens
  misc_RNA (1)...(19): siRNA sense strand
augggaaaucugagaguca

SEQ ID NO: 2220791 - RNA, 19 nt, Homo sapiens
  misc_RNA (1)...(19): siRNA sense strand
auucauucucgaaaggaua

SEQ ID NO: 2220792 - RNA, 19 nt, Homo sapiens
  misc_RNA (1)...(19): siRNA sense strand
ggaauuuauggauggcgaa

SEQ ID NO: 2220793 - RNA, 19 nt, Homo sapiens
  misc_RNA (1)...(19): siRNA sense strand
gagacaaucaagcugggaa

SEQ ID NO: 2220794 - RNA, 19 nt, Homo sapiens
  misc_RNA (1)...(19): siRNA sense strand
ucuuacagucugacaggaa

SEQ ID NO: 2220795 - RNA, 19 nt, Homo sapiens
  misc_RNA (1)...(19): siRNA sense strand
gcaggagacuucaaggcca

SEQ ID NO: 2220796 - RNA, 19 nt, Homo sapiens
  misc_RNA (1)...(19): siRNA sense strand
cugcagaugaagaugagau

SEQ ID NO: 2220797 - RNA, 19 nt, Homo sapiens
  misc_RNA (1)...(19): siRNA sense strand
guggaagcucaguguaaaa

SEQ ID NO: 2220798 - RNA, 19 nt, Homo sapiens
  misc_RNA (1)...(19): siRNA sense strand
caacagaauaaccugccaa

SEQ ID NO: 2220799 - RNA, 19 nt, Homo sapiens
  misc_RNA (1)...(19): siRNA sense strand
ggaaggagcuccaucugca

SEQ ID NO: 2220800 - RNA, 19 nt, Homo sapiens
  misc_RNA (1)...(19): siRNA sense strand
ugucaguccaguagcaaca

SEQ ID NO: 2220801 - RNA, 19 nt, Homo sapiens
  misc_RNA (1)...(19): siRNA sense strand
ggaaagaauuagacagcgu

SEQ ID NO: 2220802 - RNA, 19 nt, Homo sapiens
  misc_RNA (1)...(19): siRNA sense strand
ucagaggaaaguagagaaa

SEQ ID NO: 2220803 - RNA, 19 nt, Homo sapiens
  misc_RNA (1)...(19): siRNA sense strand
gaauauaggaagugugcca

SEQ ID NO: 2220804 - RNA, 19 nt, Homo sapiens
  misc_RNA (1)...(19): siRNA sense strand
agaggaaaguagagaaacu

SEQ ID NO: 2220805 - RNA, 19 nt, Homo sapiens
  misc_RNA (1)...(19): siRNA sense strand
caguggaggcucagaaauu

SEQ ID NO: 2220806 - RNA, 19 nt, Homo sapiens
  misc_RNA (1)...(19): siRNA sense strand
cuucaguaauccagaaaca

SEQ ID NO: 2220807 - RNA, 19 nt, Homo sapiens
  misc_RNA (1)...(19): siRNA sense strand
aguagagaaacuagagcaa

SEQ ID NO: 2220808 - RNA, 19 nt, Homo sapiens
  misc_RNA (1)...(19): siRNA sense strand
uugaacaaauggagaugaa

SEQ ID NO: 2220809 - RNA, 19 nt, Homo sapiens
  misc_RNA (1)...(19): siRNA sense strand
auuugaagacgcuggaaua

SEQ ID NO: 2220810 - RNA, 19 nt, Homo sapiens
  misc_RNA (1)...(19): siRNA sense strand
aguccgaugcagagcaaua

SEQ ID NO: 2220811 - RNA, 19 nt, Homo sapiens
  misc_RNA (1)...(19): siRNA sense strand
ucaaagaagaggugaaauc

SEQ ID NO: 2220812 - RNA, 19 nt, Homo sapiens
  misc_RNA (1)...(19): siRNA sense strand
agauaauggaugaaaggau

SEQ ID NO: 2220813 - RNA, 19 nt, Homo sapiens
  misc_RNA (1)...(19): siRNA sense strand
cagaaagaagccaaggaau

SEQ ID NO: 2220814 - RNA, 19 nt, Homo sapiens
  misc_RNA (1)...(19): siRNA sense strand
guacaagagcugcagaaaa

SEQ ID NO: 2220815 - RNA, 19 nt, Homo sapiens
  misc_RNA (1)...(19): siRNA sense strand
uaagaaaacaaguggagaa

SEQ ID NO: 2220816 - RNA, 19 nt, Homo sapiens
  misc_RNA (1)...(19): siRNA sense strand
ugaacaaacaaguuggaga

SEQ ID NO: 2220817 - RNA, 19 nt, Homo sapiens
  misc_RNA (1)...(19): siRNA sense strand
ccaacauuuccaagaacua

SEQ ID NO: 2220818 - RNA, 19 nt, Homo sapiens
  misc_RNA (1)...(19): siRNA sense strand
agauaaaggaagcagcaga

SEQ ID NO: 2220819 - RNA, 19 nt, Homo sapiens
  misc_RNA (1)...(19): siRNA sense strand
uggaauacucugucaaaga

SEQ ID NO: 2220820 - RNA, 19 nt, Homo sapiens
  misc_RNA (1)...(19): siRNA sense strand
uuuccuauuuggagaacua

SEQ ID NO: 2220821 - RNA, 19 nt, Homo sapiens
  misc_RNA (1)...(19): siRNA sense strand
agagcaacaaugucagaaa

SEQ ID NO: 2220822 - RNA, 19 nt, Homo sapiens
  misc_RNA (1)...(19): siRNA sense strand
cuucaagauuccaauggua

SEQ ID NO: 2220823 - RNA, 19 nt, Homo sapiens
  misc_RNA (1)...(19): siRNA sense strand
cuccagaaugagagaagua

SEQ ID NO: 2220824 - RNA, 19 nt, Homo sapiens
  misc_RNA (1)...(19): siRNA sense strand
ggaaaguagagaaacuaga

SEQ ID NO: 2220825 - RNA, 19 nt, Homo sapiens
  misc_RNA (1)...(19): siRNA sense strand
gucaaagagugaacaaaca

SEQ ID NO: 2220826 - RNA, 19 nt, Homo sapiens
  misc_RNA (1)...(19): siRNA sense strand
caacaaugucagaaagaag

SEQ ID NO: 2220827 - RNA, 19 nt, Homo sapiens
  misc_RNA (1)...(19): siRNA sense strand
cuaugauccuacagcgcua

SEQ ID NO: 2220828 - RNA, 19 nt, Homo sapiens
  misc_RNA (1)...(19): siRNA sense strand
cccagauaauuuaaagcaa

SEQ ID NO: 2220829 - RNA, 19 nt, Homo sapiens
  misc_RNA (1)...(19): siRNA sense strand
ggaguuuaccagugcucaa

SEQ ID NO: 2220830 - RNA, 19 nt, Homo sapiens
  misc_RNA (1)...(19): siRNA sense strand
gagagaaguagcagcaguu

SEQ ID NO: 2220831 - RNA, 19 nt, Homo sapiens
  misc_RNA (1)...(19): siRNA sense strand
acuacagaguuuugugaaa

SEQ ID NO: 2220832 - RNA, 19 nt, Homo sapiens
  misc_RNA (1)...(19): siRNA sense strand
caggagaacaacuugcuaa

SEQ ID NO: 2220833 - RNA, 19 nt, Homo sapiens
  misc_RNA (1)...(19): siRNA sense strand
aacaaguggagaagauuaa

SEQ ID NO: 2220834 - RNA, 19 nt, Homo sapiens
  misc_RNA (1)...(19): siRNA sense strand
uuagaagaauguaggaagu

SEQ ID NO: 2220835 - RNA, 19 nt, Homo sapiens
  misc_RNA (1)...(19): siRNA sense strand
agaacuauauugaggugga

SEQ ID NO: 2220836 - RNA, 19 nt, Homo sapiens
  misc_RNA (1)...(19): siRNA sense strand
gguacaagagcugcagaaa

SEQ ID NO: 2220837 - RNA, 19 nt, Homo sapiens
  misc_RNA (1)...(19): siRNA sense strand
gguaaacacacccagacaa

SEQ ID NO: 2220838 - RNA, 19 nt, Homo sapiens
  misc_RNA (1)...(19): siRNA sense strand
caacuuaccacuugggcca

SEQ ID NO: 2220839 - RNA, 19 nt, Homo sapiens
  misc_RNA (1)...(19): siRNA sense strand
cguacaacuucgugcugau

SEQ ID NO: 2220840 - RNA, 19 nt, Homo sapiens
  misc_RNA (1)...(19): siRNA sense strand
gagacuggauauuugaaaa

SEQ ID NO: 2220841 - RNA, 19 nt, Homo sapiens
  misc_RNA (1)...(19): siRNA sense strand
ggaaacaggacuugcugga

SEQ ID NO: 2220842 - RNA, 19 nt, Homo sapiens
  misc_RNA (1)...(19): siRNA sense strand
ccaagaagguacaagagcu

SEQ ID NO: 2220843 - RNA, 19 nt, Homo sapiens
  misc_RNA (1)...(19): siRNA sense strand
ggaguuuaauuuagguacu

SEQ ID NO: 2220844 - RNA, 19 nt, Homo sapiens
  misc_RNA (1)...(19): siRNA sense strand
auauaggaagugugccaaa

SEQ ID NO: 2220845 - RNA, 19 nt, Homo sapiens
  misc_RNA (1)...(19): siRNA sense strand
ucaaagagugaacaaacaa

SEQ ID NO: 2220846 - RNA, 19 nt, Homo sapiens
  misc_RNA (1)...(19): siRNA sense strand
agguacaagagcugcagaa

SEQ ID NO: 2220847 - RNA, 19 nt, Homo sapiens
  misc_RNA (1)...(19): siRNA sense strand
agaaguagcagcaguuuua

SEQ ID NO: 2220848 - RNA, 19 nt, Homo sapiens
  misc_RNA (1)...(19): siRNA sense strand
gugaaagagcaguuagaag

SEQ ID NO: 2220849 - RNA, 19 nt, Homo sapiens
  misc_RNA (1)...(19): siRNA sense strand
cagacaucauucagaaguu

SEQ ID NO: 2220850 - RNA, 19 nt, Homo sapiens
  misc_RNA (1)...(19): siRNA sense strand
ggagacuggauauuugaaa

SEQ ID NO: 2220851 - RNA, 19 nt, Homo sapiens
  misc_RNA (1)...(19): siRNA sense strand
aggagaacaacuugcuaau

SEQ ID NO: 2220852 - RNA, 19 nt, Homo sapiens
  misc_RNA (1)...(19): siRNA sense strand
gggcaguggaggcucagaa

SEQ ID NO: 2220853 - RNA, 19 nt, Homo sapiens
  misc_RNA (1)...(19): siRNA sense strand
cagaaugagagaaguagca

SEQ ID NO: 2220854 - RNA, 19 nt, Homo sapiens
  misc_RNA (1)...(19): siRNA sense strand
ggauauuugaaaagcagaa

SEQ ID NO: 2220855 - RNA, 19 nt, Homo sapiens
  misc_RNA (1)...(19): siRNA sense strand
cugugaaggccgugcaaca

SEQ ID NO: 2220856 - RNA, 19 nt, Homo sapiens
  misc_RNA (1)...(19): siRNA sense strand
cugugaaggccgugcaaca

SEQ ID NO: 2220857 - RNA, 19 nt, Homo sapiens
  misc_RNA (1)...(19): siRNA sense strand
cugugaaggccgugcaaca

SEQ ID NO: 2220858 - RNA, 19 nt, Homo sapiens
  misc_RNA (1)...(19): siRNA sense strand
aguucuaugaggagacaau

SEQ ID NO: 2220859 - RNA, 19 nt, Homo sapiens
  misc_RNA (1)...(19): siRNA sense strand
aguaugaaccugaccgcaa

SEQ ID NO: 2220860 - RNA, 19 nt, Homo sapiens
  misc_RNA (1)...(19): siRNA sense strand
ugaccgcaagaaagggaaa

SEQ ID NO: 2220861 - RNA, 19 nt, Homo sapiens
  misc_RNA (1)...(19): siRNA sense strand
caagaaagggaaagcacgu

SEQ ID NO: 2220862 - RNA, 19 nt, Homo sapiens
  misc_RNA (1)...(19): siRNA sense strand
cagcaagaugagaugccua

SEQ ID NO: 2220863 - RNA, 19 nt, Homo sapiens
  misc_RNA (1)...(19): siRNA sense strand
uuucugugcugaagggaga

SEQ ID NO: 2220864 - RNA, 19 nt, Homo sapiens
  misc_RNA (1)...(19): siRNA sense strand
ugcugaagggagaggagua

SEQ ID NO: 2220865 - RNA, 19 nt, Homo sapiens
  misc_RNA (1)...(19): siRNA sense strand
ccgcuguagaugagaaacu

SEQ ID NO: 2220866 - RNA, 19 nt, Homo sapiens
  misc_RNA (1)...(19): siRNA sense strand
cggcugaucuggcuggcua

SEQ ID NO: 2220867 - RNA, 19 nt, Homo sapiens
  misc_RNA (1)...(19): siRNA sense strand
uguaggagaacguagggua

SEQ ID NO: 2220868 - RNA, 19 nt, Homo sapiens
  misc_RNA (1)...(19): siRNA sense strand
agguccauuuguaggagaa

SEQ ID NO: 2220869 - RNA, 19 nt, Homo sapiens
  misc_RNA (1)...(19): siRNA sense strand
gggagauagaggaagacaa

SEQ ID NO: 2220870 - RNA, 19 nt, Homo sapiens
  misc_RNA (1)...(19): siRNA sense strand
ggugauaaugacugggcua

SEQ ID NO: 2220871 - RNA, 19 nt, Homo sapiens
  misc_RNA (1)...(19): siRNA sense strand
ccugggagauagaggaaga

SEQ ID NO: 2220872 - RNA, 19 nt, Homo sapiens
  misc_RNA (1)...(19): siRNA sense strand
cagguaaaucagaggaaca

SEQ ID NO: 2220873 - RNA, 19 nt, Homo sapiens
  misc_RNA (1)...(19): siRNA sense strand
gaauaaauccggaagagca

SEQ ID NO: 2220874 - RNA, 19 nt, Homo sapiens
  misc_RNA (1)...(19): siRNA sense strand
aaugagaagcagauacaaa

SEQ ID NO: 2220875 - RNA, 19 nt, Homo sapiens
  misc_RNA (1)...(19): siRNA sense strand
gggaagaauaaauccggaa

SEQ ID NO: 2220876 - RNA, 19 nt, Homo sapiens
  misc_RNA (1)...(19): siRNA sense strand
acuuauauccugagacaga

SEQ ID NO: 2220877 - RNA, 19 nt, Homo sapiens
  misc_RNA (1)...(19): siRNA sense strand
caggagaagaauuugcaaa

SEQ ID NO: 2220878 - RNA, 19 nt, Homo sapiens
  misc_RNA (1)...(19): siRNA sense strand
aaagcauacuccagaggaa

SEQ ID NO: 2220879 - RNA, 19 nt, Homo sapiens
  misc_RNA (1)...(19): siRNA sense strand
agggagaccuggugcccaa

SEQ ID NO: 2220880 - RNA, 19 nt, Homo sapiens
  misc_RNA (1)...(19): siRNA sense strand
cgaaagucucaaugucaua

SEQ ID NO: 2220881 - RNA, 19 nt, Homo sapiens
  misc_RNA (1)...(19): siRNA sense strand
cucuuaaagugcugggauu

SEQ ID NO: 2220882 - RNA, 19 nt, Homo sapiens
  misc_RNA (1)...(19): siRNA sense strand
caauguugcuggaggugau

SEQ ID NO: 2220883 - RNA, 19 nt, Homo sapiens
  misc_RNA (1)...(19): siRNA sense strand
guuuaugcuuugagagugu

SEQ ID NO: 2220884 - RNA, 19 nt, Homo sapiens
  misc_RNA (1)...(19): siRNA sense strand
ucaaauaauccuucggcau

SEQ ID NO: 2220885 - RNA, 19 nt, Homo sapiens
  misc_RNA (1)...(19): siRNA sense strand
gauacaaagcaguguggga

SEQ ID NO: 2220886 - RNA, 19 nt, Homo sapiens
  misc_RNA (1)...(19): siRNA sense strand
aagcuuugcagucgagaua

SEQ ID NO: 2220887 - RNA, 19 nt, Homo sapiens
  misc_RNA (1)...(19): siRNA sense strand
cuuaaauaacgaacagaga

SEQ ID NO: 2220888 - RNA, 19 nt, Homo sapiens
  misc_RNA (1)...(19): siRNA sense strand
gcucagaagcaguugucuu

SEQ ID NO: 2220889 - RNA, 19 nt, Homo sapiens
  misc_RNA (1)...(19): siRNA sense strand
agaacaguaaugaggagua

SEQ ID NO: 2220890 - RNA, 19 nt, Homo sapiens
  misc_RNA (1)...(19): siRNA sense strand
ucuuaaagugcugggauua

SEQ ID NO: 2220891 - RNA, 19 nt, Homo sapiens
  misc_RNA (1)...(19): siRNA sense strand
auucauugauuccagguaa

SEQ ID NO: 2220892 - RNA, 19 nt, Homo sapiens
  misc_RNA (1)...(19): siRNA sense strand
agcaacaugaacagaaaua

SEQ ID NO: 2220893 - RNA, 19 nt, Homo sapiens
  misc_RNA (1)...(19): siRNA sense strand
ugagaaaaugcaugcgaua

SEQ ID NO: 2220894 - RNA, 19 nt, Homo sapiens
  misc_RNA (1)...(19): siRNA sense strand
aggcaaaacaagagggaag

SEQ ID NO: 2220895 - RNA, 19 nt, Homo sapiens
  misc_RNA (1)...(19): siRNA sense strand
aaguaaacucggcacauua

SEQ ID NO: 2220896 - RNA, 19 nt, Homo sapiens
  misc_RNA (1)...(19): siRNA sense strand
gggccuaggaucaggaaag

SEQ ID NO: 2220897 - RNA, 19 nt, Homo sapiens
  misc_RNA (1)...(19): siRNA sense strand
cgcggaauguccagggaga

SEQ ID NO: 2220898 - RNA, 19 nt, Homo sapiens
  misc_RNA (1)...(19): siRNA sense strand
ccgaaagucucaaugucau

SEQ ID NO: 2220899 - RNA, 19 nt, Homo sapiens
  misc_RNA (1)...(19): siRNA sense strand
acuacaaggaucaguaaca

SEQ ID NO: 2220900 - RNA, 19 nt, Homo sapiens
  misc_RNA (1)...(19): siRNA sense strand
agguaaaucagaggaacaa

SEQ ID NO: 2220901 - RNA, 19 nt, Homo sapiens
  misc_RNA (1)...(19): siRNA sense strand
uuaguuaauuggagagacu

SEQ ID NO: 2220902 - RNA, 19 nt, Homo sapiens
  misc_RNA (1)...(19): siRNA sense strand
cagggcaacgagaggcaaa

SEQ ID NO: 2220903 - RNA, 19 nt, Homo sapiens
  misc_RNA (1)...(19): siRNA sense strand
aaaucaugucagugaguga

SEQ ID NO: 2220904 - RNA, 19 nt, Homo sapiens
  misc_RNA (1)...(19): siRNA sense strand
gugagaaaugagaagcaga

SEQ ID NO: 2220905 - RNA, 19 nt, Homo sapiens
  misc_RNA (1)...(19): siRNA sense strand
cuuugagaguguucgaauu

SEQ ID NO: 2220906 - RNA, 19 nt, Homo sapiens
  misc_RNA (1)...(19): siRNA sense strand
cagaaaaucaugucaguga

SEQ ID NO: 2220907 - RNA, 19 nt, Homo sapiens
  misc_RNA (1)...(19): siRNA sense strand
ugagaaaugagaagcagau

SEQ ID NO: 2220908 - RNA, 19 nt, Homo sapiens
  misc_RNA (1)...(19): siRNA sense strand
caacaguaagagaagcuuu

SEQ ID NO: 2220909 - RNA, 19 nt, Homo sapiens
  misc_RNA (1)...(19): siRNA sense strand
acaccagacuugcagaaaa

SEQ ID NO: 2220910 - RNA, 19 nt, Homo sapiens
  misc_RNA (1)...(19): siRNA sense strand
gcaugaaaccugagccuag

SEQ ID NO: 2220911 - RNA, 19 nt, Homo sapiens
  misc_RNA (1)...(19): siRNA sense strand
uacuauuggucgucggcaa

SEQ ID NO: 2220912 - RNA, 19 nt, Homo sapiens
  misc_RNA (1)...(19): siRNA sense strand
uuucagaaguccagcaucu

SEQ ID NO: 2220913 - RNA, 19 nt, Homo sapiens
  misc_RNA (1)...(19): siRNA sense strand
ccuguugggccuaggauca

SEQ ID NO: 2220914 - RNA, 19 nt, Homo sapiens
  misc_RNA (1)...(19): siRNA sense strand
caggaauagagcacugcaa

SEQ ID NO: 2220915 - RNA, 19 nt, Homo sapiens
  misc_RNA (1)...(19): siRNA sense strand
guuccuuaccuaauguaua

SEQ ID NO: 2220916 - RNA, 19 nt, Homo sapiens
  misc_RNA (1)...(19): siRNA sense strand
cagaggaagcugaggcaug

SEQ ID NO: 2220917 - RNA, 19 nt, Homo sapiens
  misc_RNA (1)...(19): siRNA sense strand
ggauuacaggcgugagcca

SEQ ID NO: 2220918 - RNA, 19 nt, Homo sapiens
  misc_RNA (1)...(19): siRNA sense strand
agagcacugcaaugagaaa

SEQ ID NO: 2220919 - RNA, 19 nt, Homo sapiens
  misc_RNA (1)...(19): siRNA sense strand
cguuguauuaaguugagaa

SEQ ID NO: 2220920 - RNA, 19 nt, Homo sapiens
  misc_RNA (1)...(19): siRNA sense strand
ccuaggaucaggaaagguu

SEQ ID NO: 2220921 - RNA, 19 nt, Homo sapiens
  misc_RNA (1)...(19): siRNA sense strand
gcuuugagaguguucgaau

SEQ ID NO: 2220922 - RNA, 19 nt, Homo sapiens
  misc_RNA (1)...(19): siRNA sense strand
acaagagggaagacgacuu

SEQ ID NO: 2220923 - RNA, 19 nt, Homo sapiens
  misc_RNA (1)...(19): siRNA sense strand
uucauugauuccagguaaa

SEQ ID NO: 2220924 - RNA, 19 nt, Homo sapiens
  misc_RNA (1)...(19): siRNA sense strand
acaagcaacaugaacagaa

SEQ ID NO: 2220925 - RNA, 19 nt, Homo sapiens
  misc_RNA (1)...(19): siRNA sense strand
aagaguaauccuugagaag

SEQ ID NO: 2220926 - RNA, 19 nt, Homo sapiens
  misc_RNA (1)...(19): siRNA sense strand
ggacaaaccuaaaggagcu

SEQ ID NO: 2220927 - RNA, 19 nt, Homo sapiens
  misc_RNA (1)...(19): siRNA sense strand
ggauaaugauucuggagga

SEQ ID NO: 2220928 - RNA, 19 nt, Homo sapiens
  misc_RNA (1)...(19): siRNA sense strand
ugugaagaugagugggaaa

SEQ ID NO: 2220929 - RNA, 19 nt, Homo sapiens
  misc_RNA (1)...(19): siRNA sense strand
aaacuaaagaagacgguca

SEQ ID NO: 2220930 - RNA, 19 nt, Homo sapiens
  misc_RNA (1)...(19): siRNA sense strand
agcaaagggaagaaacuaa

SEQ ID NO: 2220931 - RNA, 19 nt, Homo sapiens
  misc_RNA (1)...(19): siRNA sense strand
ccuccaaguuccagcggca

SEQ ID NO: 2220932 - RNA, 19 nt, Homo sapiens
  misc_RNA (1)...(19): siRNA sense strand
caacaagccuccagugccu

SEQ ID NO: 2220933 - RNA, 19 nt, Homo sapiens
  misc_RNA (1)...(19): siRNA sense strand
gcaagaaacgaaagccgga

SEQ ID NO: 2220934 - RNA, 19 nt, Homo sapiens
  misc_RNA (1)...(19): siRNA sense strand
uaaaggagcuggugcugga

SEQ ID NO: 2220935 - RNA, 19 nt, Homo sapiens
  misc_RNA (1)...(19): siRNA sense strand
gccaauacagagaagccua

SEQ ID NO: 2220936 - RNA, 19 nt, Homo sapiens
  misc_RNA (1)...(19): siRNA sense strand
cgacguuugcacuggccaa

SEQ ID NO: 2220937 - RNA, 19 nt, Homo sapiens
  misc_RNA (1)...(19): siRNA sense strand
cggauuuggcggaggaggu

SEQ ID NO: 2220938 - RNA, 19 nt, Homo sapiens
  misc_RNA (1)...(19): siRNA sense strand
cggaguggauccaaccgaa

SEQ ID NO: 2220939 - RNA, 19 nt, Homo sapiens
  misc_RNA (1)...(19): siRNA sense strand
cuuuaagggccucguggaa

SEQ ID NO: 2220940 - RNA, 19 nt, Homo sapiens
  misc_RNA (1)...(19): siRNA sense strand
aagaggaagcgcuggccaa

SEQ ID NO: 2220941 - RNA, 19 nt, Homo sapiens
  misc_RNA (1)...(19): siRNA sense strand
acuacuugacgaagaggaa

SEQ ID NO: 2220942 - RNA, 19 nt, Homo sapiens
  misc_RNA (1)...(19): siRNA sense strand
uguuuaaagcagcuggcaa

SEQ ID NO: 2220943 - RNA, 19 nt, Homo sapiens
  misc_RNA (1)...(19): siRNA sense strand
acaacauaacccagauaga

SEQ ID NO: 2220944 - RNA, 19 nt, Homo sapiens
  misc_RNA (1)...(19): siRNA sense strand
aaaccuggcugaaggggaa

SEQ ID NO: 2220945 - RNA, 19 nt, Homo sapiens
  misc_RNA (1)...(19): siRNA sense strand
ccaagaauguuuaaagcag

SEQ ID NO: 2220946 - RNA, 19 nt, Homo sapiens
  misc_RNA (1)...(19): siRNA sense strand
gcucaaggcuaaugcagag

SEQ ID NO: 2220947 - RNA, 19 nt, Homo sapiens
  misc_RNA (1)...(19): siRNA sense strand
cuuuaagggccucguggaa

SEQ ID NO: 2220948 - RNA, 19 nt, Homo sapiens
  misc_RNA (1)...(19): siRNA sense strand
aagaggaagcgcuggccaa

SEQ ID NO: 2220949 - RNA, 19 nt, Homo sapiens
  misc_RNA (1)...(19): siRNA sense strand
acuacuugacgaagaggaa

SEQ ID NO: 2220950 - RNA, 19 nt, Homo sapiens
  misc_RNA (1)...(19): siRNA sense strand
uguuuaaagcagcuggcaa

SEQ ID NO: 2220951 - RNA, 19 nt, Homo sapiens
  misc_RNA (1)...(19): siRNA sense strand
acaacauaacccagauaga

SEQ ID NO: 2220952 - RNA, 19 nt, Homo sapiens
  misc_RNA (1)...(19): siRNA sense strand
aaaccuggcugaaggggaa

SEQ ID NO: 2220953 - RNA, 19 nt, Homo sapiens
  misc_RNA (1)...(19): siRNA sense strand
ccaagaauguuuaaagcag

SEQ ID NO: 2220954 - RNA, 19 nt, Homo sapiens
  misc_RNA (1)...(19): siRNA sense strand
gcucaaggcuaaugcagag

SEQ ID NO: 2220955 - RNA, 19 nt, Homo sapiens
  misc_RNA (1)...(19): siRNA sense strand
cuuuaagggccucguggaa

SEQ ID NO: 2220956 - RNA, 19 nt, Homo sapiens
  misc_RNA (1)...(19): siRNA sense strand
aagaggaagcgcuggccaa

SEQ ID NO: 2220957 - RNA, 19 nt, Homo sapiens
  misc_RNA (1)...(19): siRNA sense strand
acuacuugacgaagaggaa

SEQ ID NO: 2220958 - RNA, 19 nt, Homo sapiens
  misc_RNA (1)...(19): siRNA sense strand
uguuuaaagcagcuggcaa

SEQ ID NO: 2220959 - RNA, 19 nt, Homo sapiens
  misc_RNA (1)...(19): siRNA sense strand
acaacauaacccagauaga

SEQ ID NO: 2220960 - RNA, 19 nt, Homo sapiens
  misc_RNA (1)...(19): siRNA sense strand
aaaccuggcugaaggggaa

SEQ ID NO: 2220961 - RNA, 19 nt, Homo sapiens
  misc_RNA (1)...(19): siRNA sense strand
ccaagaauguuuaaagcag

SEQ ID NO: 2220962 - RNA, 19 nt, Homo sapiens
  misc_RNA (1)...(19): siRNA sense strand
gcucaaggcuaaugcagag

SEQ ID NO: 2220963 - RNA, 19 nt, Homo sapiens
  misc_RNA (1)...(19): siRNA sense strand
cuuuaagggccucguggaa

SEQ ID NO: 2220964 - RNA, 19 nt, Homo sapiens
  misc_RNA (1)...(19): siRNA sense strand
aagaggaagcgcuggccaa

SEQ ID NO: 2220965 - RNA, 19 nt, Homo sapiens
  misc_RNA (1)...(19): siRNA sense strand
acuacuugacgaagaggaa

SEQ ID NO: 2220966 - RNA, 19 nt, Homo sapiens
  misc_RNA (1)...(19): siRNA sense strand
uguuuaaagcagcuggcaa

SEQ ID NO: 2220967 - RNA, 19 nt, Homo sapiens
  misc_RNA (1)...(19): siRNA sense strand
acaacauaacccagauaga

SEQ ID NO: 2220968 - RNA, 19 nt, Homo sapiens
  misc_RNA (1)...(19): siRNA sense strand
aaaccuggcugaaggggaa

SEQ ID NO: 2220969 - RNA, 19 nt, Homo sapiens
  misc_RNA (1)...(19): siRNA sense strand
ccaagaauguuuaaagcag

SEQ ID NO: 2220970 - RNA, 19 nt, Homo sapiens
  misc_RNA (1)...(19): siRNA sense strand
gcucaaggcuaaugcagag

SEQ ID NO: 2220971 - RNA, 19 nt, Homo sapiens
  misc_RNA (1)...(19): siRNA sense strand
gaagaagacagaaacgcaa

SEQ ID NO: 2220972 - RNA, 19 nt, Homo sapiens
  misc_RNA (1)...(19): siRNA sense strand
cuaucgaacaggagaggca

SEQ ID NO: 2220973 - RNA, 19 nt, Homo sapiens
  misc_RNA (1)...(19): siRNA sense strand
ggagaggcaagcaggcgaa

SEQ ID NO: 2220974 - RNA, 19 nt, Homo sapiens
  misc_RNA (1)...(19): siRNA sense strand
aagucgaaacugaagaaga

SEQ ID NO: 2220975 - RNA, 19 nt, Homo sapiens
  misc_RNA (1)...(19): siRNA sense strand
ugacaaaccugguauggcu

SEQ ID NO: 2220976 - RNA, 19 nt, Homo sapiens
  misc_RNA (1)...(19): siRNA sense strand
gaguaugacaagcaggaca

SEQ ID NO: 2220977 - RNA, 19 nt, Homo sapiens
  misc_RNA (1)...(19): siRNA sense strand
gagcguugggagugcacua

SEQ ID NO: 2220978 - RNA, 19 nt, Homo sapiens
  misc_RNA (1)...(19): siRNA sense strand
gaguaugacaagcaggaca

SEQ ID NO: 2220979 - RNA, 19 nt, Homo sapiens
  misc_RNA (1)...(19): siRNA sense strand
gagcguugggagugcacua

SEQ ID NO: 2220980 - RNA, 19 nt, Homo sapiens
  misc_RNA (1)...(19): siRNA sense strand
gcaagggagcagcaggaga

SEQ ID NO: 2220981 - RNA, 19 nt, Homo sapiens
  misc_RNA (1)...(19): siRNA sense strand
gagacagcgagaagagcuu

SEQ ID NO: 2220982 - RNA, 19 nt, Homo sapiens
  misc_RNA (1)...(19): siRNA sense strand
caagcauagaccagauauu

SEQ ID NO: 2220983 - RNA, 19 nt, Homo sapiens
  misc_RNA (1)...(19): siRNA sense strand
aguuaaaguaugaugucca

SEQ ID NO: 2220984 - RNA, 19 nt, Homo sapiens
  misc_RNA (1)...(19): siRNA sense strand
ucucgaaccuucaccacua

SEQ ID NO: 2220985 - RNA, 19 nt, Homo sapiens
  misc_RNA (1)...(19): siRNA sense strand
gcaagggagcagcaggaga

SEQ ID NO: 2220986 - RNA, 19 nt, Homo sapiens
  misc_RNA (1)...(19): siRNA sense strand
gagacagcgagaagagcuu

SEQ ID NO: 2220987 - RNA, 19 nt, Homo sapiens
  misc_RNA (1)...(19): siRNA sense strand
caagcauagaccagauauu

SEQ ID NO: 2220988 - RNA, 19 nt, Homo sapiens
  misc_RNA (1)...(19): siRNA sense strand
aguuaaaguaugaugucca

SEQ ID NO: 2220989 - RNA, 19 nt, Homo sapiens
  misc_RNA (1)...(19): siRNA sense strand
ucucgaaccuucaccacua

SEQ ID NO: 2220990 - RNA, 19 nt, Homo sapiens
  misc_RNA (1)...(19): siRNA sense strand
gaaaugagauacaaggcua

SEQ ID NO: 2220991 - RNA, 19 nt, Homo sapiens
  misc_RNA (1)...(19): siRNA sense strand
agacagaagaagagcaaca

SEQ ID NO: 2220992 - RNA, 19 nt, Homo sapiens
  misc_RNA (1)...(19): siRNA sense strand
ugugaagaguuuagagaca

SEQ ID NO: 2220993 - RNA, 19 nt, Homo sapiens
  misc_RNA (1)...(19): siRNA sense strand
ccuggaugauauagugaua

SEQ ID NO: 2220994 - RNA, 19 nt, Homo sapiens
  misc_RNA (1)...(19): siRNA sense strand
ccaugauuacagagauaaa

SEQ ID NO: 2220995 - RNA, 19 nt, Homo sapiens
  misc_RNA (1)...(19): siRNA sense strand
guuuagagacagaagaaga

SEQ ID NO: 2220996 - RNA, 19 nt, Homo sapiens
  misc_RNA (1)...(19): siRNA sense strand
ucccaugauuacagagaua

SEQ ID NO: 2220997 - RNA, 19 nt, Homo sapiens
  misc_RNA (1)...(19): siRNA sense strand
agugagaugucaagaaaca

SEQ ID NO: 2220998 - RNA, 19 nt, Homo sapiens
  misc_RNA (1)...(19): siRNA sense strand
gaguuuagagacagaagaa

SEQ ID NO: 2220999 - RNA, 19 nt, Homo sapiens
  misc_RNA (1)...(19): siRNA sense strand
ugacaacagaggagacauu

SEQ ID NO: 2221000 - RNA, 19 nt, Homo sapiens
  misc_RNA (1)...(19): siRNA sense strand
ugguacaugugaagaguuu

SEQ ID NO: 2221001 - RNA, 19 nt, Homo sapiens
  misc_RNA (1)...(19): siRNA sense strand
agagacagaagaagagcaa

SEQ ID NO: 2221002 - RNA, 19 nt, Homo sapiens
  misc_RNA (1)...(19): siRNA sense strand
acacaauauuucuuggaga

SEQ ID NO: 2221003 - RNA, 19 nt, Homo sapiens
  misc_RNA (1)...(19): siRNA sense strand
ggguagaaccagccacaau

SEQ ID NO: 2221004 - RNA, 19 nt, Homo sapiens
  misc_RNA (1)...(19): siRNA sense strand
cagacuacaagaaggagaa

SEQ ID NO: 2221005 - RNA, 19 nt, Homo sapiens
  misc_RNA (1)...(19): siRNA sense strand
cagcaaacgcacuaggcau

SEQ ID NO: 2221006 - RNA, 19 nt, Homo sapiens
  misc_RNA (1)...(19): siRNA sense strand
gugaaaaugcuacaggaaa

SEQ ID NO: 2221007 - RNA, 19 nt, Homo sapiens
  misc_RNA (1)...(19): siRNA sense strand
acacaaaauacgugguaca

SEQ ID NO: 2221008 - RNA, 19 nt, Homo sapiens
  misc_RNA (1)...(19): siRNA sense strand
ugaagaguuuagagacaga

SEQ ID NO: 2221009 - RNA, 19 nt, Homo sapiens
  misc_RNA (1)...(19): siRNA sense strand
ugggauagucaaacaacaa

SEQ ID NO: 2221010 - RNA, 19 nt, Homo sapiens
  misc_RNA (1)...(19): siRNA sense strand
augucaagaaacaggcaaa

SEQ ID NO: 2221011 - RNA, 19 nt, Homo sapiens
  misc_RNA (1)...(19): siRNA sense strand
ucauaaaacaccugaaaca

SEQ ID NO: 2221012 - RNA, 19 nt, Homo sapiens
  misc_RNA (1)...(19): siRNA sense strand
cagaggagacauuggacuu

SEQ ID NO: 2221013 - RNA, 19 nt, Homo sapiens
  misc_RNA (1)...(19): siRNA sense strand
agucaaaacaacugcaaau

SEQ ID NO: 2221014 - RNA, 19 nt, Homo sapiens
  misc_RNA (1)...(19): siRNA sense strand
agauacaaggcuacaacaa

SEQ ID NO: 2221015 - RNA, 19 nt, Homo sapiens
  misc_RNA (1)...(19): siRNA sense strand
cuacagacuacaagaagga

SEQ ID NO: 2221016 - RNA, 19 nt, Homo sapiens
  misc_RNA (1)...(19): siRNA sense strand
cuacagugcccaagaccau

SEQ ID NO: 2221017 - RNA, 19 nt, Homo sapiens
  misc_RNA (1)...(19): siRNA sense strand
acagcaauguugugaaaau

SEQ ID NO: 2221018 - RNA, 19 nt, Homo sapiens
  misc_RNA (1)...(19): siRNA sense strand
ggaucgugaaugaggaguu

SEQ ID NO: 2221019 - RNA, 19 nt, Homo sapiens
  misc_RNA (1)...(19): siRNA sense strand
ccuuagacucaggaaauaa

SEQ ID NO: 2221020 - RNA, 19 nt, Homo sapiens
  misc_RNA (1)...(19): siRNA sense strand
gccagauauuccugaugaa

SEQ ID NO: 2221021 - RNA, 19 nt, Homo sapiens
  misc_RNA (1)...(19): siRNA sense strand
acauggaauucugggcuaa

SEQ ID NO: 2221022 - RNA, 19 nt, Homo sapiens
  misc_RNA (1)...(19): siRNA sense strand
acuacaagaaggagaauac

SEQ ID NO: 2221023 - RNA, 19 nt, Homo sapiens
  misc_RNA (1)...(19): siRNA sense strand
cuggugucauggaggaauu

SEQ ID NO: 2221024 - RNA, 19 nt, Homo sapiens
  misc_RNA (1)...(19): siRNA sense strand
acucaguagaggaggaaac

SEQ ID NO: 2221025 - RNA, 19 nt, Homo sapiens
  misc_RNA (1)...(19): siRNA sense strand
ggauagucaaacaacaauu

SEQ ID NO: 2221026 - RNA, 19 nt, Homo sapiens
  misc_RNA (1)...(19): siRNA sense strand
gcugagacuauaaaugcua

SEQ ID NO: 2221027 - RNA, 19 nt, Homo sapiens
  misc_RNA (1)...(19): siRNA sense strand
ccaaacauuaaguacguau

SEQ ID NO: 2221028 - RNA, 19 nt, Homo sapiens
  misc_RNA (1)...(19): siRNA sense strand
cacauggaauucugggcua

SEQ ID NO: 2221029 - RNA, 19 nt, Homo sapiens
  misc_RNA (1)...(19): siRNA sense strand
aagaagagcaacaguaucu

SEQ ID NO: 2221030 - RNA, 19 nt, Homo sapiens
  misc_RNA (1)...(19): siRNA sense strand
acaggaaaauagugaacuu

SEQ ID NO: 2221031 - RNA, 19 nt, Homo sapiens
  misc_RNA (1)...(19): siRNA sense strand
ucaagugagaugucaagaa

SEQ ID NO: 2221032 - RNA, 19 nt, Homo sapiens
  misc_RNA (1)...(19): siRNA sense strand
caaacauuuucaagagaca

SEQ ID NO: 2221033 - RNA, 19 nt, Homo sapiens
  misc_RNA (1)...(19): siRNA sense strand
caucaaaagcauuccaaca

SEQ ID NO: 2221034 - RNA, 19 nt, Homo sapiens
  misc_RNA (1)...(19): siRNA sense strand
agacacugauauguggaaa

SEQ ID NO: 2221035 - RNA, 19 nt, Homo sapiens
  misc_RNA (1)...(19): siRNA sense strand
auucaaaguucacagccua

SEQ ID NO: 2221036 - RNA, 19 nt, Homo sapiens
  misc_RNA (1)...(19): siRNA sense strand
ccccaaaacugucaggaau

SEQ ID NO: 2221037 - RNA, 19 nt, Homo sapiens
  misc_RNA (1)...(19): siRNA sense strand
cugaaacagccaaggaacu

SEQ ID NO: 2221038 - RNA, 19 nt, Homo sapiens
  misc_RNA (1)...(19): siRNA sense strand
auucaaaguucacagccua

SEQ ID NO: 2221039 - RNA, 19 nt, Homo sapiens
  misc_RNA (1)...(19): siRNA sense strand
ccccaaaacugucaggaau

SEQ ID NO: 2221040 - RNA, 19 nt, Homo sapiens
  misc_RNA (1)...(19): siRNA sense strand
cugaaacagccaaggaacu

SEQ ID NO: 2221041 - RNA, 19 nt, Homo sapiens
  misc_RNA (1)...(19): siRNA sense strand
augaagaaacugagggaca

SEQ ID NO: 2221042 - RNA, 19 nt, Homo sapiens
  misc_RNA (1)...(19): siRNA sense strand
agaagauggcagaggacau

SEQ ID NO: 2221043 - RNA, 19 nt, Homo sapiens
  misc_RNA (1)...(19): siRNA sense strand
aggaagaggggcagggcaa

SEQ ID NO: 2221044 - RNA, 19 nt, Homo sapiens
  misc_RNA (1)...(19): siRNA sense strand
caagagaaggugaucgaga

SEQ ID NO: 2221045 - RNA, 19 nt, Homo sapiens
  misc_RNA (1)...(19): siRNA sense strand
aguucaaccuccuggccaa

SEQ ID NO: 2221046 - RNA, 19 nt, Homo sapiens
  misc_RNA (1)...(19): siRNA sense strand
ugaagcaguaccagggcaa

SEQ ID NO: 2221047 - RNA, 19 nt, Homo sapiens
  misc_RNA (1)...(19): siRNA sense strand
agaugaaggcgcuggagga

SEQ ID NO: 2221048 - RNA, 19 nt, Homo sapiens
  misc_RNA (1)...(19): siRNA sense strand
cugaacaggcagcagggaa

SEQ ID NO: 2221049 - RNA, 19 nt, Homo sapiens
  misc_RNA (1)...(19): siRNA sense strand
ccaucauucugcagcaaca

SEQ ID NO: 2221050 - RNA, 19 nt, Homo sapiens
  misc_RNA (1)...(19): siRNA sense strand
caggaggagacuugacaga

SEQ ID NO: 2221051 - RNA, 19 nt, Homo sapiens
  misc_RNA (1)...(19): siRNA sense strand
ucgagaagauggagcgggu

SEQ ID NO: 2221052 - RNA, 19 nt, Homo sapiens
  misc_RNA (1)...(19): siRNA sense strand
cugcugagugagcuggaua

SEQ ID NO: 2221053 - RNA, 19 nt, Homo sapiens
  misc_RNA (1)...(19): siRNA sense strand
gaggacaggcugcaggaca

SEQ ID NO: 2221054 - RNA, 19 nt, Homo sapiens
  misc_RNA (1)...(19): siRNA sense strand
cccagcaggaggaggaaga

SEQ ID NO: 2221055 - RNA, 19 nt, Homo sapiens
  misc_RNA (1)...(19): siRNA sense strand
ggaguugggagcaggagga

SEQ ID NO: 2221056 - RNA, 19 nt, Homo sapiens
  misc_RNA (1)...(19): siRNA sense strand
ccaaagucgucgagaggau

SEQ ID NO: 2221057 - RNA, 19 nt, Homo sapiens
  misc_RNA (1)...(19): siRNA sense strand
gauugggagcagagaguaa

SEQ ID NO: 2221058 - RNA, 19 nt, Homo sapiens
  misc_RNA (1)...(19): siRNA sense strand
cugaaaagguugugugaga

SEQ ID NO: 2221059 - RNA, 19 nt, Homo sapiens
  misc_RNA (1)...(19): siRNA sense strand
gcuucaaacacaagaauuu

SEQ ID NO: 2221060 - RNA, 19 nt, Homo sapiens
  misc_RNA (1)...(19): siRNA sense strand
gcagagaagcagagcacuu

SEQ ID NO: 2221061 - RNA, 19 nt, Homo sapiens
  misc_RNA (1)...(19): siRNA sense strand
aauuaaacgagauggcaaa

SEQ ID NO: 2221062 - RNA, 19 nt, Homo sapiens
  misc_RNA (1)...(19): siRNA sense strand
ccgaaaguagugugcguaa

SEQ ID NO: 2221063 - RNA, 19 nt, Homo sapiens
  misc_RNA (1)...(19): siRNA sense strand
caauuaaacgagauggcaa

SEQ ID NO: 2221064 - RNA, 19 nt, Homo sapiens
  misc_RNA (1)...(19): siRNA sense strand
gguuaugacaacaccgaaa

SEQ ID NO: 2221065 - RNA, 19 nt, Homo sapiens
  misc_RNA (1)...(19): siRNA sense strand
caagaauagaagccagaaa

SEQ ID NO: 2221066 - RNA, 19 nt, Homo sapiens
  misc_RNA (1)...(19): siRNA sense strand
gaaacaauaaagaagggaa

SEQ ID NO: 2221067 - RNA, 19 nt, Homo sapiens
  misc_RNA (1)...(19): siRNA sense strand
cagacuaggagaugcuaaa

SEQ ID NO: 2221068 - RNA, 19 nt, Homo sapiens
  misc_RNA (1)...(19): siRNA sense strand
ggacuaugauacagagaac

SEQ ID NO: 2221069 - RNA, 19 nt, Homo sapiens
  misc_RNA (1)...(19): siRNA sense strand
cagccgagaccuugaggaa

SEQ ID NO: 2221070 - RNA, 19 nt, Homo sapiens
  misc_RNA (1)...(19): siRNA sense strand
gggaagugguuauggugga

SEQ ID NO: 2221071 - RNA, 19 nt, Homo sapiens
  misc_RNA (1)...(19): siRNA sense strand
gcguaaggccagcguguuu

SEQ ID NO: 2221072 - RNA, 19 nt, Homo sapiens
  misc_RNA (1)...(19): siRNA sense strand
uguaaacucuagugagaca

SEQ ID NO: 2221073 - RNA, 19 nt, Homo sapiens
  misc_RNA (1)...(19): siRNA sense strand
caguauuagcugaaacaau

SEQ ID NO: 2221074 - RNA, 19 nt, Homo sapiens
  misc_RNA (1)...(19): siRNA sense strand
cuaaagacucugugaggga

SEQ ID NO: 2221075 - RNA, 19 nt, Homo sapiens
  misc_RNA (1)...(19): siRNA sense strand
ggaaacaaguccaaaccga

SEQ ID NO: 2221076 - RNA, 19 nt, Homo sapiens
  misc_RNA (1)...(19): siRNA sense strand
uaaacagcuuaguggaaau

SEQ ID NO: 2221077 - RNA, 19 nt, Homo sapiens
  misc_RNA (1)...(19): siRNA sense strand
gagaaaucaaccagcaaga

SEQ ID NO: 2221078 - RNA, 19 nt, Homo sapiens
  misc_RNA (1)...(19): siRNA sense strand
gcagaaggauguggggaaa

SEQ ID NO: 2221079 - RNA, 19 nt, Homo sapiens
  misc_RNA (1)...(19): siRNA sense strand
agaaaggaaagaagggcuu

SEQ ID NO: 2221080 - RNA, 19 nt, Homo sapiens
  misc_RNA (1)...(19): siRNA sense strand
agaguucagacgugagaaa

SEQ ID NO: 2221081 - RNA, 19 nt, Homo sapiens
  misc_RNA (1)...(19): siRNA sense strand
caaacuggucagaaaggaa

SEQ ID NO: 2221082 - RNA, 19 nt, Homo sapiens
  misc_RNA (1)...(19): siRNA sense strand
aauaaacagcuuaguggaa

SEQ ID NO: 2221083 - RNA, 19 nt, Homo sapiens
  misc_RNA (1)...(19): siRNA sense strand
ggguagugaaguagaagga

SEQ ID NO: 2221084 - RNA, 19 nt, Homo sapiens
  misc_RNA (1)...(19): siRNA sense strand
agacuauuucucagacaaa

SEQ ID NO: 2221085 - RNA, 19 nt, Homo sapiens
  misc_RNA (1)...(19): siRNA sense strand
uuaagaguuuugagggaaa

SEQ ID NO: 2221086 - RNA, 19 nt, Homo sapiens
  misc_RNA (1)...(19): siRNA sense strand
cagcgaucucgaagugaua

SEQ ID NO: 2221087 - RNA, 19 nt, Homo sapiens
  misc_RNA (1)...(19): siRNA sense strand
agaacuuacugaagagcca

SEQ ID NO: 2221088 - RNA, 19 nt, Homo sapiens
  misc_RNA (1)...(19): siRNA sense strand
ugaaagaggcuguguucga

SEQ ID NO: 2221089 - RNA, 19 nt, Homo sapiens
  misc_RNA (1)...(19): siRNA sense strand
gagaagaccugaaaccuca

SEQ ID NO: 2221090 - RNA, 19 nt, Homo sapiens
  misc_RNA (1)...(19): siRNA sense strand
acagcuuaguggaaauuua

SEQ ID NO: 2221091 - RNA, 19 nt, Homo sapiens
  misc_RNA (1)...(19): siRNA sense strand
ugagauuuauuguggauca

SEQ ID NO: 2221092 - RNA, 19 nt, Homo sapiens
  misc_RNA (1)...(19): siRNA sense strand
ccaucaacaccuacgacaa

SEQ ID NO: 2221093 - RNA, 19 nt, Homo sapiens
  misc_RNA (1)...(19): siRNA sense strand
ggauguauucugacgauga

SEQ ID NO: 2221094 - RNA, 19 nt, Homo sapiens
  misc_RNA (1)...(19): siRNA sense strand
cucaagaauuccaguaaca

SEQ ID NO: 2221095 - RNA, 19 nt, Homo sapiens
  misc_RNA (1)...(19): siRNA sense strand
cguuaagaguuuugaggga

SEQ ID NO: 2221096 - RNA, 19 nt, Homo sapiens
  misc_RNA (1)...(19): siRNA sense strand
cuguugaugaagaggauuu

SEQ ID NO: 2221097 - RNA, 19 nt, Homo sapiens
  misc_RNA (1)...(19): siRNA sense strand
gugacaccgucuucagaaa

SEQ ID NO: 2221098 - RNA, 19 nt, Homo sapiens
  misc_RNA (1)...(19): siRNA sense strand
uuuguaaacucuagugaga

SEQ ID NO: 2221099 - RNA, 19 nt, Homo sapiens
  misc_RNA (1)...(19): siRNA sense strand
gaaacaaguccaaaccgaa

SEQ ID NO: 2221100 - RNA, 19 nt, Homo sapiens
  misc_RNA (1)...(19): siRNA sense strand
gauaugagccguaugggau

SEQ ID NO: 2221101 - RNA, 19 nt, Homo sapiens
  misc_RNA (1)...(19): siRNA sense strand
agaaaauguuacugggguu

SEQ ID NO: 2221102 - RNA, 19 nt, Homo sapiens
  misc_RNA (1)...(19): siRNA sense strand
caugauacaaucugcaaau

SEQ ID NO: 2221103 - RNA, 19 nt, Homo sapiens
  misc_RNA (1)...(19): siRNA sense strand
ggucucagguagugcggga

SEQ ID NO: 2221104 - RNA, 19 nt, Homo sapiens
  misc_RNA (1)...(19): siRNA sense strand
gugaaugccaugagaguuc

SEQ ID NO: 2221105 - RNA, 19 nt, Homo sapiens
  misc_RNA (1)...(19): siRNA sense strand
gcucauauggcuccaggaa

SEQ ID NO: 2221106 - RNA, 19 nt, Homo sapiens
  misc_RNA (1)...(19): siRNA sense strand
ggaucaaacucaaacucca

SEQ ID NO: 2221107 - RNA, 19 nt, Homo sapiens
  misc_RNA (1)...(19): siRNA sense strand
gagaaacguuggaauggga

SEQ ID NO: 2221108 - RNA, 19 nt, Homo sapiens
  misc_RNA (1)...(19): siRNA sense strand
ccaggaaaauuguugggaa

SEQ ID NO: 2221109 - RNA, 19 nt, Homo sapiens
  misc_RNA (1)...(19): siRNA sense strand
gaucaaacucaaacuccaa

SEQ ID NO: 2221110 - RNA, 19 nt, Homo sapiens
  misc_RNA (1)...(19): siRNA sense strand
uuacagaagccauugaaaa

SEQ ID NO: 2221111 - RNA, 19 nt, Homo sapiens
  misc_RNA (1)...(19): siRNA sense strand
ggccaguaaaggaggaaga

SEQ ID NO: 2221112 - RNA, 19 nt, Homo sapiens
  misc_RNA (1)...(19): siRNA sense strand
uaaaggaggaagagcccaa

SEQ ID NO: 2221113 - RNA, 19 nt, Homo sapiens
  misc_RNA (1)...(19): siRNA sense strand
ggccaguaaaggaggaaga

SEQ ID NO: 2221114 - RNA, 19 nt, Homo sapiens
  misc_RNA (1)...(19): siRNA sense strand
uaaaggaggaagagcccaa

SEQ ID NO: 2221115 - RNA, 19 nt, Homo sapiens
  misc_RNA (1)...(19): siRNA sense strand
ggccaguaaaggaggaaga

SEQ ID NO: 2221116 - RNA, 19 nt, Homo sapiens
  misc_RNA (1)...(19): siRNA sense strand
uaaaggaggaagagcccaa

SEQ ID NO: 2221117 - RNA, 19 nt, Homo sapiens
  misc_RNA (1)...(19): siRNA sense strand
ggccaguaaaggaggaaga

SEQ ID NO: 2221118 - RNA, 19 nt, Homo sapiens
  misc_RNA (1)...(19): siRNA sense strand
uaaaggaggaagagcccaa

SEQ ID NO: 2221119 - RNA, 19 nt, Homo sapiens
  misc_RNA (1)...(19): siRNA sense strand
ggccaguaaaggaggaaga

SEQ ID NO: 2221120 - RNA, 19 nt, Homo sapiens
  misc_RNA (1)...(19): siRNA sense strand
uaaaggaggaagagcccaa

SEQ ID NO: 2221121 - RNA, 19 nt, Homo sapiens
  misc_RNA (1)...(19): siRNA sense strand
ggccaguaaaggaggaaga

SEQ ID NO: 2221122 - RNA, 19 nt, Homo sapiens
  misc_RNA (1)...(19): siRNA sense strand
uaaaggaggaagagcccaa

SEQ ID NO: 2221123 - RNA, 19 nt, Homo sapiens
  misc_RNA (1)...(19): siRNA sense strand
aggauuuaccggaggaaaa

SEQ ID NO: 2221124 - RNA, 19 nt, Homo sapiens
  misc_RNA (1)...(19): siRNA sense strand
ucuacagggccuugggcua

SEQ ID NO: 2221125 - RNA, 19 nt, Homo sapiens
  misc_RNA (1)...(19): siRNA sense strand
uggaacugguagagaagga

SEQ ID NO: 2221126 - RNA, 19 nt, Homo sapiens
  misc_RNA (1)...(19): siRNA sense strand
ccgcaagaccaaaggggau

SEQ ID NO: 2221127 - RNA, 19 nt, Homo sapiens
  misc_RNA (1)...(19): siRNA sense strand
gagcagacuucuuccggca

SEQ ID NO: 2221128 - RNA, 19 nt, Homo sapiens
  misc_RNA (1)...(19): siRNA sense strand
aaaucgaggaacucagcaa

SEQ ID NO: 2221129 - RNA, 19 nt, Homo sapiens
  misc_RNA (1)...(19): siRNA sense strand
caauauggcugcuggcucu

SEQ ID NO: 2221130 - RNA, 19 nt, Homo sapiens
  misc_RNA (1)...(19): siRNA sense strand
ccgaaaaguguguggagga

SEQ ID NO: 2221131 - RNA, 19 nt, Homo sapiens
  misc_RNA (1)...(19): siRNA sense strand
ggaaauggaucuaccaccu

SEQ ID NO: 2221132 - RNA, 19 nt, Homo sapiens
  misc_RNA (1)...(19): siRNA sense strand
augagacaggccaggguua

SEQ ID NO: 2221133 - RNA, 19 nt, Homo sapiens
  misc_RNA (1)...(19): siRNA sense strand
agguagauggcgaggaaga

SEQ ID NO: 2221134 - RNA, 19 nt, Homo sapiens
  misc_RNA (1)...(19): siRNA sense strand
auuaaagaccucagcacaa

SEQ ID NO: 2221135 - RNA, 19 nt, Homo sapiens
  misc_RNA (1)...(19): siRNA sense strand
uggaagaugaggagggcga

SEQ ID NO: 2221136 - RNA, 19 nt, Homo sapiens
  misc_RNA (1)...(19): siRNA sense strand
aggaggaggaggaagguga

SEQ ID NO: 2221137 - RNA, 19 nt, Homo sapiens
  misc_RNA (1)...(19): siRNA sense strand
augacgaggaggaggguga

SEQ ID NO: 2221138 - RNA, 19 nt, Homo sapiens
  misc_RNA (1)...(19): siRNA sense strand
ggaggaaggugaagaggag

SEQ ID NO: 2221139 - RNA, 19 nt, Homo sapiens
  misc_RNA (1)...(19): siRNA sense strand
cugaacgacuacggagaaa

SEQ ID NO: 2221140 - RNA, 19 nt, Homo sapiens
  misc_RNA (1)...(19): siRNA sense strand
aggaggagggugagcauga

SEQ ID NO: 2221141 - RNA, 19 nt, Homo sapiens
  misc_RNA (1)...(19): siRNA sense strand
augcucagguaguggaaga

SEQ ID NO: 2221142 - RNA, 19 nt, Homo sapiens
  misc_RNA (1)...(19): siRNA sense strand
uggaaguauuggcagaaaa

SEQ ID NO: 2221143 - RNA, 19 nt, Homo sapiens
  misc_RNA (1)...(19): siRNA sense strand
aggaggaguaugaugaaga

SEQ ID NO: 2221144 - RNA, 19 nt, Homo sapiens
  misc_RNA (1)...(19): siRNA sense strand
gccuggaaguauuggcaga

SEQ ID NO: 2221145 - RNA, 19 nt, Homo sapiens
  misc_RNA (1)...(19): siRNA sense strand
auggagagguagauggcga

SEQ ID NO: 2221146 - RNA, 19 nt, Homo sapiens
  misc_RNA (1)...(19): siRNA sense strand
aaguuaaaguugagaaagc

SEQ ID NO: 2221147 - RNA, 19 nt, Homo sapiens
  misc_RNA (1)...(19): siRNA sense strand
uggcgaggaagaugaagaa

SEQ ID NO: 2221148 - RNA, 19 nt, Homo sapiens
  misc_RNA (1)...(19): siRNA sense strand
aggaaggugaagaggagga

SEQ ID NO: 2221149 - RNA, 19 nt, Homo sapiens
  misc_RNA (1)...(19): siRNA sense strand
cgaggaggagggugagcau

SEQ ID NO: 2221150 - RNA, 19 nt, Homo sapiens
  misc_RNA (1)...(19): siRNA sense strand
gaagaagguuauaacgaug

SEQ ID NO: 2221151 - RNA, 19 nt, Homo sapiens
  misc_RNA (1)...(19): siRNA sense strand
augaagaagagcuugguga

SEQ ID NO: 2221152 - RNA, 19 nt, Homo sapiens
  misc_RNA (1)...(19): siRNA sense strand
ccucagcacaauagagcca

SEQ ID NO: 2221153 - RNA, 19 nt, Homo sapiens
  misc_RNA (1)...(19): siRNA sense strand
cauucagagcugcggaaca

SEQ ID NO: 2221154 - RNA, 19 nt, Homo sapiens
  misc_RNA (1)...(19): siRNA sense strand
guuaaaguugagaaagcuu

SEQ ID NO: 2221155 - RNA, 19 nt, Homo sapiens
  misc_RNA (1)...(19): siRNA sense strand
agggugagcaugaggagga

SEQ ID NO: 2221156 - RNA, 19 nt, Homo sapiens
  misc_RNA (1)...(19): siRNA sense strand
caucuauauuuaaguggca

SEQ ID NO: 2221157 - RNA, 19 nt, Homo sapiens
  misc_RNA (1)...(19): siRNA sense strand
ccaaaaugccugagaagaa

SEQ ID NO: 2221158 - RNA, 19 nt, Homo sapiens
  misc_RNA (1)...(19): siRNA sense strand
caagagacucacaggauaa

SEQ ID NO: 2221159 - RNA, 19 nt, Homo sapiens
  misc_RNA (1)...(19): siRNA sense strand
cagcagcguugaaguauua

SEQ ID NO: 2221160 - RNA, 19 nt, Homo sapiens
  misc_RNA (1)...(19): siRNA sense strand
acaagagacucacaggaua

SEQ ID NO: 2221161 - RNA, 19 nt, Homo sapiens
  misc_RNA (1)...(19): siRNA sense strand
caaggaagccuauugguua

SEQ ID NO: 2221162 - RNA, 19 nt, Homo sapiens
  misc_RNA (1)...(19): siRNA sense strand
cagaaguagacaacguuua

SEQ ID NO: 2221163 - RNA, 19 nt, Homo sapiens
  misc_RNA (1)...(19): siRNA sense strand
guccgaguguuguggguua

SEQ ID NO: 2221164 - RNA, 19 nt, Homo sapiens
  misc_RNA (1)...(19): siRNA sense strand
guugacgguuugaacgaaa

SEQ ID NO: 2221165 - RNA, 19 nt, Homo sapiens
  misc_RNA (1)...(19): siRNA sense strand
aaggaagccuauugguuau

SEQ ID NO: 2221166 - RNA, 19 nt, Homo sapiens
  misc_RNA (1)...(19): siRNA sense strand
uaacagaaguagacaacgu

SEQ ID NO: 2221167 - RNA, 19 nt, Homo sapiens
  misc_RNA (1)...(19): siRNA sense strand
cccugaaacugacacgaaa

SEQ ID NO: 2221168 - RNA, 19 nt, Homo sapiens
  misc_RNA (1)...(19): siRNA sense strand
gcacgcgagugacgggauu

SEQ ID NO: 2221169 - RNA, 19 nt, Homo sapiens
  misc_RNA (1)...(19): siRNA sense strand
cuaaguaggcacuauaaau

SEQ ID NO: 2221170 - RNA, 19 nt, Homo sapiens
  misc_RNA (1)...(19): siRNA sense strand
cacccagacuaaagcgcaa

SEQ ID NO: 2221171 - RNA, 19 nt, Homo sapiens
  misc_RNA (1)...(19): siRNA sense strand
guagacaacguuuacauaa

SEQ ID NO: 2221172 - RNA, 19 nt, Homo sapiens
  misc_RNA (1)...(19): siRNA sense strand
ccagcagcguugaaguauu

SEQ ID NO: 2221173 - RNA, 19 nt, Homo sapiens
  misc_RNA (1)...(19): siRNA sense strand
gccuauugguuauaagcuu

SEQ ID NO: 2221174 - RNA, 19 nt, Homo sapiens
  misc_RNA (1)...(19): siRNA sense strand
cgguuugaacgaaagagua

SEQ ID NO: 2221175 - RNA, 19 nt, Homo sapiens
  misc_RNA (1)...(19): siRNA sense strand
agagagagcauuugguuuu

SEQ ID NO: 2221176 - RNA, 19 nt, Homo sapiens
  misc_RNA (1)...(19): siRNA sense strand
uguuguggguuauuguuaa

SEQ ID NO: 2221177 - RNA, 19 nt, Homo sapiens
  misc_RNA (1)...(19): siRNA sense strand
caaaaugccugagaagaaa

SEQ ID NO: 2221178 - RNA, 19 nt, Homo sapiens
  misc_RNA (1)...(19): siRNA sense strand
ccacaaccgcgcuugacua

SEQ ID NO: 2221179 - RNA, 19 nt, Homo sapiens
  misc_RNA (1)...(19): siRNA sense strand
guaaaagugaaaugcagaa

SEQ ID NO: 2221180 - RNA, 19 nt, Homo sapiens
  misc_RNA (1)...(19): siRNA sense strand
gguuugaacgaaagaguag

SEQ ID NO: 2221181 - RNA, 19 nt, Homo sapiens
  misc_RNA (1)...(19): siRNA sense strand
gcgccuaguagaugggaaa

SEQ ID NO: 2221182 - RNA, 19 nt, Homo sapiens
  misc_RNA (1)...(19): siRNA sense strand
ccuacaagguggugguaca

SEQ ID NO: 2221183 - RNA, 19 nt, Homo sapiens
  misc_RNA (1)...(19): siRNA sense strand
gaaaucagguggaaggaca

SEQ ID NO: 2221184 - RNA, 19 nt, Homo sapiens
  misc_RNA (1)...(19): siRNA sense strand
gcuuaaaggcauucaccaa

SEQ ID NO: 2221185 - RNA, 19 nt, Homo sapiens
  misc_RNA (1)...(19): siRNA sense strand
cugaaggacuagagaagga

SEQ ID NO: 2221186 - RNA, 19 nt, Homo sapiens
  misc_RNA (1)...(19): siRNA sense strand
gcagcaaagaucuuggaaa

SEQ ID NO: 2221187 - RNA, 19 nt, Homo sapiens
  misc_RNA (1)...(19): siRNA sense strand
gggaggaguagaagaugaa

SEQ ID NO: 2221188 - RNA, 19 nt, Homo sapiens
  misc_RNA (1)...(19): siRNA sense strand
gagcauuugcagaaaguau

SEQ ID NO: 2221189 - RNA, 19 nt, Homo sapiens
  misc_RNA (1)...(19): siRNA sense strand
gauccaagaagaaggaaca

SEQ ID NO: 2221190 - RNA, 19 nt, Homo sapiens
  misc_RNA (1)...(19): siRNA sense strand
gccucaaacuugugaugaa

SEQ ID NO: 2221191 - RNA, 19 nt, Homo sapiens
  misc_RNA (1)...(19): siRNA sense strand
aggaagacaugaagggcca

SEQ ID NO: 2221192 - RNA, 19 nt, Homo sapiens
  misc_RNA (1)...(19): siRNA sense strand
aaggaacagugguggaauu

SEQ ID NO: 2221193 - RNA, 19 nt, Homo sapiens
  misc_RNA (1)...(19): siRNA sense strand
ccugaagccaacagugaaa

SEQ ID NO: 2221194 - RNA, 19 nt, Homo sapiens
  misc_RNA (1)...(19): siRNA sense strand
ggacaugggcuuaaaggca

SEQ ID NO: 2221195 - RNA, 19 nt, Homo sapiens
  misc_RNA (1)...(19): siRNA sense strand
augaggaagcugugaagaa

SEQ ID NO: 2221196 - RNA, 19 nt, Homo sapiens
  misc_RNA (1)...(19): siRNA sense strand
gagacauggaucugggauu

SEQ ID NO: 2221197 - RNA, 19 nt, Homo sapiens
  misc_RNA (1)...(19): siRNA sense strand
cauccaaugaggagguaau

SEQ ID NO: 2221198 - RNA, 19 nt, Homo sapiens
  misc_RNA (1)...(19): siRNA sense strand
aguaacagugccaaagaua

SEQ ID NO: 2221199 - RNA, 19 nt, Homo sapiens
  misc_RNA (1)...(19): siRNA sense strand
caacaaugccauaaaggga

SEQ ID NO: 2221200 - RNA, 19 nt, Homo sapiens
  misc_RNA (1)...(19): siRNA sense strand
guaaccaggacaagaggaa

SEQ ID NO: 2221201 - RNA, 19 nt, Homo sapiens
  misc_RNA (1)...(19): siRNA sense strand
agguggugguacagaagaa

SEQ ID NO: 2221202 - RNA, 19 nt, Homo sapiens
  misc_RNA (1)...(19): siRNA sense strand
cccaaagucauuaggaaau

SEQ ID NO: 2221203 - RNA, 19 nt, Homo sapiens
  misc_RNA (1)...(19): siRNA sense strand
cacaagaaccauaaccaaa

SEQ ID NO: 2221204 - RNA, 19 nt, Homo sapiens
  misc_RNA (1)...(19): siRNA sense strand
cagugaugguuaagaacga

SEQ ID NO: 2221205 - RNA, 19 nt, Homo sapiens
  misc_RNA (1)...(19): siRNA sense strand
caucagaggaaaugaagca

SEQ ID NO: 2221206 - RNA, 19 nt, Homo sapiens
  misc_RNA (1)...(19): siRNA sense strand
ugccauaaagggaggagua

SEQ ID NO: 2221207 - RNA, 19 nt, Homo sapiens
  misc_RNA (1)...(19): siRNA sense strand
agggaggaguagaagauga

SEQ ID NO: 2221208 - RNA, 19 nt, Homo sapiens
  misc_RNA (1)...(19): siRNA sense strand
aggaagcugugaagaaaga

SEQ ID NO: 2221209 - RNA, 19 nt, Homo sapiens
  misc_RNA (1)...(19): siRNA sense strand
agaggaaggaguaugaaau

SEQ ID NO: 2221210 - RNA, 19 nt, Homo sapiens
  misc_RNA (1)...(19): siRNA sense strand
uggaagaagagaugaaugu

SEQ ID NO: 2221211 - RNA, 19 nt, Homo sapiens
  misc_RNA (1)...(19): siRNA sense strand
ccccaaagucauuaggaaa

SEQ ID NO: 2221212 - RNA, 19 nt, Homo sapiens
  misc_RNA (1)...(19): siRNA sense strand
aagaggaaggaguaugaaa

SEQ ID NO: 2221213 - RNA, 19 nt, Homo sapiens
  misc_RNA (1)...(19): siRNA sense strand
cauauucaucagaggaaau

SEQ ID NO: 2221214 - RNA, 19 nt, Homo sapiens
  misc_RNA (1)...(19): siRNA sense strand
uugcaaucgcugaguacaa

SEQ ID NO: 2221215 - RNA, 19 nt, Homo sapiens
  misc_RNA (1)...(19): siRNA sense strand
gaauuuaagaagcggacca

SEQ ID NO: 2221216 - RNA, 19 nt, Homo sapiens
  misc_RNA (1)...(19): siRNA sense strand
agucagauguaaugggaag

SEQ ID NO: 2221217 - RNA, 19 nt, Homo sapiens
  misc_RNA (1)...(19): siRNA sense strand
cagccauagugaaagucua

SEQ ID NO: 2221218 - RNA, 19 nt, Homo sapiens
  misc_RNA (1)...(19): siRNA sense strand
aggaaaucgcaucgcacaa

SEQ ID NO: 2221219 - RNA, 19 nt, Homo sapiens
  misc_RNA (1)...(19): siRNA sense strand
gcuucuaucagcaaguaaa

SEQ ID NO: 2221220 - RNA, 19 nt, Homo sapiens
  misc_RNA (1)...(19): siRNA sense strand
ucagaggaaaugaagcaaa

SEQ ID NO: 2221221 - RNA, 19 nt, Homo sapiens
  misc_RNA (1)...(19): siRNA sense strand
uggccaacaagguggauuu

SEQ ID NO: 2221222 - RNA, 19 nt, Homo sapiens
  misc_RNA (1)...(19): siRNA sense strand
guuugaaguacaaguaaca

SEQ ID NO: 2221223 - RNA, 19 nt, Homo sapiens
  misc_RNA (1)...(19): siRNA sense strand
agaagaacacgaagaggca

SEQ ID NO: 2221224 - RNA, 19 nt, Homo sapiens
  misc_RNA (1)...(19): siRNA sense strand
gauuugagcuucagcccau

SEQ ID NO: 2221225 - RNA, 19 nt, Homo sapiens
  misc_RNA (1)...(19): siRNA sense strand
ggaaggaaagacacaguca

SEQ ID NO: 2221226 - RNA, 19 nt, Homo sapiens
  misc_RNA (1)...(19): siRNA sense strand
cuacgagacggaugaguuu

SEQ ID NO: 2221227 - RNA, 19 nt, Homo sapiens
  misc_RNA (1)...(19): siRNA sense strand
aggaccaacccaagaauuu

SEQ ID NO: 2221228 - RNA, 19 nt, Homo sapiens
  misc_RNA (1)...(19): siRNA sense strand
acaagguggugguacagaa

SEQ ID NO: 2221229 - RNA, 19 nt, Homo sapiens
  misc_RNA (1)...(19): siRNA sense strand
cccagaggcagaaggacaa

SEQ ID NO: 2221230 - RNA, 19 nt, Homo sapiens
  misc_RNA (1)...(19): siRNA sense strand
gccuauacacauaugggaa

SEQ ID NO: 2221231 - RNA, 19 nt, Homo sapiens
  misc_RNA (1)...(19): siRNA sense strand
cagaggaaaugaagcaaac

SEQ ID NO: 2221232 - RNA, 19 nt, Homo sapiens
  misc_RNA (1)...(19): siRNA sense strand
aggaaaugaagcaaacuau

SEQ ID NO: 2221233 - RNA, 19 nt, Homo sapiens
  misc_RNA (1)...(19): siRNA sense strand
uggcagguaaccaggacaa

SEQ ID NO: 2221234 - RNA, 19 nt, Homo sapiens
  misc_RNA (1)...(19): siRNA sense strand
ccaacaucgugaaguggau

SEQ ID NO: 2221235 - RNA, 19 nt, Homo sapiens
  misc_RNA (1)...(19): siRNA sense strand
ucacaagaaccauaaccaa

SEQ ID NO: 2221236 - RNA, 19 nt, Homo sapiens
  misc_RNA (1)...(19): siRNA sense strand
ugaaaaugcuugaaagauc

SEQ ID NO: 2221237 - RNA, 19 nt, Homo sapiens
  misc_RNA (1)...(19): siRNA sense strand
cuuucaccguggaggaauu

SEQ ID NO: 2221238 - RNA, 19 nt, Homo sapiens
  misc_RNA (1)...(19): siRNA sense strand
cagcugaagaggaaggagu

SEQ ID NO: 2221239 - RNA, 19 nt, Homo sapiens
  misc_RNA (1)...(19): siRNA sense strand
ggcccagauccaagaagaa

SEQ ID NO: 2221240 - RNA, 19 nt, Homo sapiens
  misc_RNA (1)...(19): siRNA sense strand
ggaauugacuggaaggcag

SEQ ID NO: 2221241 - RNA, 19 nt, Homo sapiens
  misc_RNA (1)...(19): siRNA sense strand
ucccagaggcagaaggaca

SEQ ID NO: 2221242 - RNA, 19 nt, Homo sapiens
  misc_RNA (1)...(19): siRNA sense strand
agugaaaggaccaacccaa

SEQ ID NO: 2221243 - RNA, 19 nt, Homo sapiens
  misc_RNA (1)...(19): siRNA sense strand
cugcaucaaucgucauaau

SEQ ID NO: 2221244 - RNA, 19 nt, Homo sapiens
  misc_RNA (1)...(19): siRNA sense strand
ggacuagagaaggaaacaa

SEQ ID NO: 2221245 - RNA, 19 nt, Homo sapiens
  misc_RNA (1)...(19): siRNA sense strand
aagaacacgaagaggcaca

SEQ ID NO: 2221246 - RNA, 19 nt, Homo sapiens
  misc_RNA (1)...(19): siRNA sense strand
ucgcacaauggcagaguuu

SEQ ID NO: 2221247 - RNA, 19 nt, Homo sapiens
  misc_RNA (1)...(19): siRNA sense strand
uaacaugcauugugggcaa

SEQ ID NO: 2221248 - RNA, 19 nt, Homo sapiens
  misc_RNA (1)...(19): siRNA sense strand
ccacaauguuaggagggua

SEQ ID NO: 2221249 - RNA, 19 nt, Homo sapiens
  misc_RNA (1)...(19): siRNA sense strand
acaaauuggacuuggaaac

SEQ ID NO: 2221250 - RNA, 19 nt, Homo sapiens
  misc_RNA (1)...(19): siRNA sense strand
cugcuugacagaagagaga

SEQ ID NO: 2221251 - RNA, 19 nt, Homo sapiens
  misc_RNA (1)...(19): siRNA sense strand
cacaauguuaggaggguau

SEQ ID NO: 2221252 - RNA, 19 nt, Homo sapiens
  misc_RNA (1)...(19): siRNA sense strand
cugaggaagagguugaaga

SEQ ID NO: 2221253 - RNA, 19 nt, Homo sapiens
  misc_RNA (1)...(19): siRNA sense strand
uugacagaagagagaggaa

SEQ ID NO: 2221254 - RNA, 19 nt, Homo sapiens
  misc_RNA (1)...(19): siRNA sense strand
ugacagaagagagaggaau

SEQ ID NO: 2221255 - RNA, 19 nt, Homo sapiens
  misc_RNA (1)...(19): siRNA sense strand
guauaaagaccaaagcaga

SEQ ID NO: 2221256 - RNA, 19 nt, Homo sapiens
  misc_RNA (1)...(19): siRNA sense strand
aggaaaagcuaauugguau

SEQ ID NO: 2221257 - RNA, 19 nt, Homo sapiens
  misc_RNA (1)...(19): siRNA sense strand
cuguggaggucuuggacuu

SEQ ID NO: 2221258 - RNA, 19 nt, Homo sapiens
  misc_RNA (1)...(19): siRNA sense strand
acaacgugaaccaggauua

SEQ ID NO: 2221259 - RNA, 19 nt, Homo sapiens
  misc_RNA (1)...(19): siRNA sense strand
cugaaauggcaaugaaagu

SEQ ID NO: 2221260 - RNA, 19 nt, Homo sapiens
  misc_RNA (1)...(19): siRNA sense strand
acuaaugagggaugccaaa

SEQ ID NO: 2221261 - RNA, 19 nt, Homo sapiens
  misc_RNA (1)...(19): siRNA sense strand
ggaaaagcuaauugguauu

SEQ ID NO: 2221262 - RNA, 19 nt, Homo sapiens
  misc_RNA (1)...(19): siRNA sense strand
cagauugggagaaaggaau

SEQ ID NO: 2221263 - RNA, 19 nt, Homo sapiens
  misc_RNA (1)...(19): siRNA sense strand
ggauuagcacaaagagcuu

SEQ ID NO: 2221264 - RNA, 19 nt, Homo sapiens
  misc_RNA (1)...(19): siRNA sense strand
agaccaaagcagaaaagaa

SEQ ID NO: 2221265 - RNA, 19 nt, Homo sapiens
  misc_RNA (1)...(19): siRNA sense strand
gauaaccaacggaggaaaa

SEQ ID NO: 2221266 - RNA, 19 nt, Homo sapiens
  misc_RNA (1)...(19): siRNA sense strand
aggaauucagauugggaga

SEQ ID NO: 2221267 - RNA, 19 nt, Homo sapiens
  misc_RNA (1)...(19): siRNA sense strand
ucagauugggagaaaggaa

SEQ ID NO: 2221268 - RNA, 19 nt, Homo sapiens
  misc_RNA (1)...(19): siRNA sense strand
uucagauacuagaggaauu

SEQ ID NO: 2221269 - RNA, 19 nt, Homo sapiens
  misc_RNA (1)...(19): siRNA sense strand
acuuggaggcaauggauuu

SEQ ID NO: 2221270 - RNA, 19 nt, Homo sapiens
  misc_RNA (1)...(19): siRNA sense strand
gagaaugacugaggagcca

SEQ ID NO: 2221271 - RNA, 19 nt, Homo sapiens
  misc_RNA (1)...(19): siRNA sense strand
aggcaauggauuuaauaca

SEQ ID NO: 2221272 - RNA, 19 nt, Homo sapiens
  misc_RNA (1)...(19): siRNA sense strand
uguucagauacuagaggaa

SEQ ID NO: 2221273 - RNA, 19 nt, Homo sapiens
  misc_RNA (1)...(19): siRNA sense strand
ggauaaccaacggaggaaa

SEQ ID NO: 2221274 - RNA, 19 nt, Homo sapiens
  misc_RNA (1)...(19): siRNA sense strand
aggaauuaaacaugggcca

SEQ ID NO: 2221275 - RNA, 19 nt, Homo sapiens
  misc_RNA (1)...(19): siRNA sense strand
agagaacuguggaggucuu

SEQ ID NO: 2221276 - RNA, 19 nt, Homo sapiens
  misc_RNA (1)...(19): siRNA sense strand
ugugaaagugccuaaagaa

SEQ ID NO: 2221277 - RNA, 19 nt, Homo sapiens
  misc_RNA (1)...(19): siRNA sense strand
uuagugaagaauuggcuua

SEQ ID NO: 2221278 - RNA, 19 nt, Homo sapiens
  misc_RNA (1)...(19): siRNA sense strand
ggcugaaauggcaaugaaa

SEQ ID NO: 2221279 - RNA, 19 nt, Homo sapiens
  misc_RNA (1)...(19): siRNA sense strand
guggauaaccaacggagga

SEQ ID NO: 2221280 - RNA, 19 nt, Homo sapiens
  misc_RNA (1)...(19): siRNA sense strand
agauugggagaaaggaauu

SEQ ID NO: 2221281 - RNA, 19 nt, Homo sapiens
  misc_RNA (1)...(19): siRNA sense strand
gauucauuguggaagcaga

SEQ ID NO: 2221282 - RNA, 19 nt, Homo sapiens
  misc_RNA (1)...(19): siRNA sense strand
ugauaaaaccagaccugua

SEQ ID NO: 2221283 - RNA, 19 nt, Homo sapiens
  misc_RNA (1)...(19): siRNA sense strand
augugugcuuauuguguaa

SEQ ID NO: 2221284 - RNA, 19 nt, Homo sapiens
  misc_RNA (1)...(19): siRNA sense strand
auaaagaccaaagcagaaa

SEQ ID NO: 2221285 - RNA, 19 nt, Homo sapiens
  misc_RNA (1)...(19): siRNA sense strand
gcuggaaaugaucaacaaa

SEQ ID NO: 2221286 - RNA, 19 nt, Homo sapiens
  misc_RNA (1)...(19): siRNA sense strand
aagaugugaaagugccuaa

SEQ ID NO: 2221287 - RNA, 19 nt, Homo sapiens
  misc_RNA (1)...(19): siRNA sense strand
uuguagagcaccaagcaau

SEQ ID NO: 2221288 - RNA, 19 nt, Homo sapiens
  misc_RNA (1)...(19): siRNA sense strand
ggcugcagaauaugauaaa

SEQ ID NO: 2221289 - RNA, 19 nt, Homo sapiens
  misc_RNA (1)...(19): siRNA sense strand
cuucacaaauucaaagacu

SEQ ID NO: 2221290 - RNA, 19 nt, Homo sapiens
  misc_RNA (1)...(19): siRNA sense strand
ugacagagaugccggcaga

SEQ ID NO: 2221291 - RNA, 19 nt, Homo sapiens
  misc_RNA (1)...(19): siRNA sense strand
cggcaugggcuacgugaca

SEQ ID NO: 2221292 - RNA, 19 nt, Homo sapiens
  misc_RNA (1)...(19): siRNA sense strand
cagaagcaggcguggguca

SEQ ID NO: 2221293 - RNA, 19 nt, Homo sapiens
  misc_RNA (1)...(19): siRNA sense strand
cggacagagcccugcaaaa

SEQ ID NO: 2221294 - RNA, 19 nt, Homo sapiens
  misc_RNA (1)...(19): siRNA sense strand
aagaagacaagcugggcau

SEQ ID NO: 2221295 - RNA, 19 nt, Homo sapiens
  misc_RNA (1)...(19): siRNA sense strand
gggacuuugccgagaagga

SEQ ID NO: 2221296 - RNA, 19 nt, Homo sapiens
  misc_RNA (1)...(19): siRNA sense strand
uggaacugcccgagacaca

SEQ ID NO: 2221297 - RNA, 19 nt, Homo sapiens
  misc_RNA (1)...(19): siRNA sense strand
cggcagugaugcaggagcu

SEQ ID NO: 2221298 - RNA, 19 nt, Homo sapiens
  misc_RNA (1)...(19): siRNA sense strand
aguucaaguuggcagacau

SEQ ID NO: 2221299 - RNA, 19 nt, Homo sapiens
  misc_RNA (1)...(19): siRNA sense strand
cggagaacgugcuggguga

SEQ ID NO: 2221300 - RNA, 19 nt, Homo sapiens
  misc_RNA (1)...(19): siRNA sense strand
gcuguauggacaaaggaaa

SEQ ID NO: 2221301 - RNA, 19 nt, Homo sapiens
  misc_RNA (1)...(19): siRNA sense strand
agcaagagcucuaccgcaa

SEQ ID NO: 2221302 - RNA, 19 nt, Homo sapiens
  misc_RNA (1)...(19): siRNA sense strand
cugcagggcuguauggaca

SEQ ID NO: 2221303 - RNA, 19 nt, Homo sapiens
  misc_RNA (1)...(19): siRNA sense strand
ugguggagaucgugggcau

SEQ ID NO: 2221304 - RNA, 19 nt, Homo sapiens
  misc_RNA (1)...(19): siRNA sense strand
cugagaagaagaugggcau

SEQ ID NO: 2221305 - RNA, 19 nt, Homo sapiens
  misc_RNA (1)...(19): siRNA sense strand
gcagguaccaugagaggca

SEQ ID NO: 2221306 - RNA, 19 nt, Homo sapiens
  misc_RNA (1)...(19): siRNA sense strand
aggagaagcuggcacggau

SEQ ID NO: 2221307 - RNA, 19 nt, Homo sapiens
  misc_RNA (1)...(19): siRNA sense strand
aguccuuugcugugggaau

SEQ ID NO: 2221308 - RNA, 19 nt, Homo sapiens
  misc_RNA (1)...(19): siRNA sense strand
guaacugaguccauggcuu

SEQ ID NO: 2221309 - RNA, 19 nt, Homo sapiens
  misc_RNA (1)...(19): siRNA sense strand
ucaacgaagagcagacaca

SEQ ID NO: 2221310 - RNA, 19 nt, Homo sapiens
  misc_RNA (1)...(19): siRNA sense strand
gagccgugaaggagaagau

SEQ ID NO: 2221311 - RNA, 19 nt, Homo sapiens
  misc_RNA (1)...(19): siRNA sense strand
ccugagaagaagaugggca

SEQ ID NO: 2221312 - RNA, 19 nt, Homo sapiens
  misc_RNA (1)...(19): siRNA sense strand
cggcccagcaugagaaaau

SEQ ID NO: 2221313 - RNA, 19 nt, Homo sapiens
  misc_RNA (1)...(19): siRNA sense strand
cuggaaggugacagaugaa

SEQ ID NO: 2221314 - RNA, 19 nt, Homo sapiens
  misc_RNA (1)...(19): siRNA sense strand
ggacaaaggaaaggagcuc

SEQ ID NO: 2221315 - RNA, 19 nt, Homo sapiens
  misc_RNA (1)...(19): siRNA sense strand
ugggaauguucaaaggcca

SEQ ID NO: 2221316 - RNA, 19 nt, Homo sapiens
  misc_RNA (1)...(19): siRNA sense strand
gggaguggcuucaagguug

SEQ ID NO: 2221317 - RNA, 19 nt, Homo sapiens
  misc_RNA (1)...(19): siRNA sense strand
aggccaagcugauaaaaca

SEQ ID NO: 2221318 - RNA, 19 nt, Homo sapiens
  misc_RNA (1)...(19): siRNA sense strand
ggucauaguaagugcuaca

SEQ ID NO: 2221319 - RNA, 19 nt, Homo sapiens
  misc_RNA (1)...(19): siRNA sense strand
uguaaugaacagaggauca

SEQ ID NO: 2221320 - RNA, 19 nt, Homo sapiens
  misc_RNA (1)...(19): siRNA sense strand
aaguaaagcagcaugggaa

SEQ ID NO: 2221321 - RNA, 19 nt, Homo sapiens
  misc_RNA (1)...(19): siRNA sense strand
aagaagugaaagaagcaua

SEQ ID NO: 2221322 - RNA, 19 nt, Homo sapiens
  misc_RNA (1)...(19): siRNA sense strand
aagaagcauacauggguaa

SEQ ID NO: 2221323 - RNA, 19 nt, Homo sapiens
  misc_RNA (1)...(19): siRNA sense strand
uggugaaagaagaugaaga

SEQ ID NO: 2221324 - RNA, 19 nt, Homo sapiens
  misc_RNA (1)...(19): siRNA sense strand
uugcaaugugggaaguaaa

SEQ ID NO: 2221325 - RNA, 19 nt, Homo sapiens
  misc_RNA (1)...(19): siRNA sense strand
gaacagaggaucaacacca

SEQ ID NO: 2221326 - RNA, 19 nt, Homo sapiens
  misc_RNA (1)...(19): siRNA sense strand
caggugggauggagagcau

SEQ ID NO: 2221327 - RNA, 19 nt, Homo sapiens
  misc_RNA (1)...(19): siRNA sense strand
gagccaggauuguugguca

SEQ ID NO: 2221328 - RNA, 19 nt, Homo sapiens
  misc_RNA (1)...(19): siRNA sense strand
auguaguggugaaagaaga

SEQ ID NO: 2221329 - RNA, 19 nt, Homo sapiens
  misc_RNA (1)...(19): siRNA sense strand
gggaaguaaaugaagccuu

SEQ ID NO: 2221330 - RNA, 19 nt, Homo sapiens
  misc_RNA (1)...(19): siRNA sense strand
uccaaaagaagaagugaaa

SEQ ID NO: 2221331 - RNA, 19 nt, Homo sapiens
  misc_RNA (1)...(19): siRNA sense strand
agaagaagugaaagaagca

SEQ ID NO: 2221332 - RNA, 19 nt, Homo sapiens
  misc_RNA (1)...(19): siRNA sense strand
gaauaucaauggaggagcu

SEQ ID NO: 2221333 - RNA, 19 nt, Homo sapiens
  misc_RNA (1)...(19): siRNA sense strand
cuuugaaggaaguggucau

SEQ ID NO: 2221334 - RNA, 19 nt, Homo sapiens
  misc_RNA (1)...(19): siRNA sense strand
ucuacaaggaggugaagga

SEQ ID NO: 2221335 - RNA, 19 nt, Homo sapiens
  misc_RNA (1)...(19): siRNA sense strand
aaagaagcauacaugggua

SEQ ID NO: 2221336 - RNA, 19 nt, Homo sapiens
  misc_RNA (1)...(19): siRNA sense strand
agaaaauggcacaguaaca

SEQ ID NO: 2221337 - RNA, 19 nt, Homo sapiens
  misc_RNA (1)...(19): siRNA sense strand
aaagaaaauggcacaguaa

SEQ ID NO: 2221338 - RNA, 19 nt, Homo sapiens
  misc_RNA (1)...(19): siRNA sense strand
gcacaguaacagcugccaa

SEQ ID NO: 2221339 - RNA, 19 nt, Homo sapiens
  misc_RNA (1)...(19): siRNA sense strand
aguaaaaggucaaccagau

SEQ ID NO: 2221340 - RNA, 19 nt, Homo sapiens
  misc_RNA (1)...(19): siRNA sense strand
ccagaaagaaaauggcaca

SEQ ID NO: 2221341 - RNA, 19 nt, Homo sapiens
  misc_RNA (1)...(19): siRNA sense strand
uggugcaggaaauaagaua

SEQ ID NO: 2221342 - RNA, 19 nt, Homo sapiens
  misc_RNA (1)...(19): siRNA sense strand
uguucuacaaggaggugaa

SEQ ID NO: 2221343 - RNA, 19 nt, Homo sapiens
  misc_RNA (1)...(19): siRNA sense strand
aagcugggaaauuuggaaa

SEQ ID NO: 2221344 - RNA, 19 nt, Homo sapiens
  misc_RNA (1)...(19): siRNA sense strand
cauugaaaaggcagggauu

SEQ ID NO: 2221345 - RNA, 19 nt, Homo sapiens
  misc_RNA (1)...(19): siRNA sense strand
cugagaauacagcaaagaa

SEQ ID NO: 2221346 - RNA, 19 nt, Homo sapiens
  misc_RNA (1)...(19): siRNA sense strand
agcaugggaagcugggaaa

SEQ ID NO: 2221347 - RNA, 19 nt, Homo sapiens
  misc_RNA (1)...(19): siRNA sense strand
ggugcaggaaauaagauau

SEQ ID NO: 2221348 - RNA, 19 nt, Homo sapiens
  misc_RNA (1)...(19): siRNA sense strand
aaggaaguggucauaguaa

SEQ ID NO: 2221349 - RNA, 19 nt, Homo sapiens
  misc_RNA (1)...(19): siRNA sense strand
uaucaauggaggagcuguu

SEQ ID NO: 2221350 - RNA, 19 nt, Homo sapiens
  misc_RNA (1)...(19): siRNA sense strand
ccucggacaagcugagcaa

SEQ ID NO: 2221351 - RNA, 19 nt, Homo sapiens
  misc_RNA (1)...(19): siRNA sense strand
ccgacgacagccugagcaa

SEQ ID NO: 2221352 - RNA, 19 nt, Homo sapiens
  misc_RNA (1)...(19): siRNA sense strand
aggaagagccagaccggca

SEQ ID NO: 2221353 - RNA, 19 nt, Homo sapiens
  misc_RNA (1)...(19): siRNA sense strand
ucggacaagcugagcaaga

SEQ ID NO: 2221354 - RNA, 19 nt, Homo sapiens
  misc_RNA (1)...(19): siRNA sense strand
ugagcaacagcgaggaaga

SEQ ID NO: 2221355 - RNA, 19 nt, Homo sapiens
  misc_RNA (1)...(19): siRNA sense strand
acgaggagcugcagacgca

SEQ ID NO: 2221356 - RNA, 19 nt, Homo sapiens
  misc_RNA (1)...(19): siRNA sense strand
gcaagaagucugcgggcug

SEQ ID NO: 2221357 - RNA, 19 nt, Homo sapiens
  misc_RNA (1)...(19): siRNA sense strand
ugguggagugugugggaaa

SEQ ID NO: 2221358 - RNA, 19 nt, Homo sapiens
  misc_RNA (1)...(19): siRNA sense strand
caguagugcuggugcggga

SEQ ID NO: 2221359 - RNA, 19 nt, Homo sapiens
  misc_RNA (1)...(19): siRNA sense strand
gcucagaugaugcgggagu

SEQ ID NO: 2221360 - RNA, 19 nt, Homo sapiens
  misc_RNA (1)...(19): siRNA sense strand
cgggagugcugguacccaa

SEQ ID NO: 2221361 - RNA, 19 nt, Homo sapiens
  misc_RNA (1)...(19): siRNA sense strand
ucuaugauguggugcccaa

SEQ ID NO: 2221362 - RNA, 19 nt, Homo sapiens
  misc_RNA (1)...(19): siRNA sense strand
acgacuuucugcagagaca

SEQ ID NO: 2221363 - RNA, 19 nt, Homo sapiens
  misc_RNA (1)...(19): siRNA sense strand
auggcaucguggaggacua

SEQ ID NO: 2221364 - RNA, 19 nt, Homo sapiens
  misc_RNA (1)...(19): siRNA sense strand
ccuuggugacccagggaga

SEQ ID NO: 2221365 - RNA, 19 nt, Homo sapiens
  misc_RNA (1)...(19): siRNA sense strand
agacagagcggcugggaca

SEQ ID NO: 2221366 - RNA, 19 nt, Homo sapiens
  misc_RNA (1)...(19): siRNA sense strand
uuguagagaugaaggccaa

SEQ ID NO: 2221367 - RNA, 19 nt, Homo sapiens
  misc_RNA (1)...(19): siRNA sense strand
cuauaaagccuaugggaug

SEQ ID NO: 2221368 - RNA, 19 nt, Homo sapiens
  misc_RNA (1)...(19): siRNA sense strand
augaguuuguagagaugaa

SEQ ID NO: 2221369 - RNA, 19 nt, Homo sapiens
  misc_RNA (1)...(19): siRNA sense strand
ccauugaccuggcuggaga

SEQ ID NO: 2221370 - RNA, 19 nt, Homo sapiens
  misc_RNA (1)...(19): siRNA sense strand
cggccgaaguaguaaaaga

SEQ ID NO: 2221371 - RNA, 19 nt, Homo sapiens
  misc_RNA (1)...(19): siRNA sense strand
cugauuaccagaugaccaa

SEQ ID NO: 2221372 - RNA, 19 nt, Homo sapiens
  misc_RNA (1)...(19): siRNA sense strand
ccaaacgggacaugggcuu

SEQ ID NO: 2221373 - RNA, 19 nt, Homo sapiens
  misc_RNA (1)...(19): siRNA sense strand
ucuauaaagccuaugggau

SEQ ID NO: 2221374 - RNA, 19 nt, Homo sapiens
  misc_RNA (1)...(19): siRNA sense strand
aggugguggagcuguguaa

SEQ ID NO: 2221375 - RNA, 19 nt, Homo sapiens
  misc_RNA (1)...(19): siRNA sense strand
uguauguggaggugcggua

SEQ ID NO: 2221376 - RNA, 19 nt, Homo sapiens
  misc_RNA (1)...(19): siRNA sense strand
ccaaaguagaacugcaugu

SEQ ID NO: 2221377 - RNA, 19 nt, Homo sapiens
  misc_RNA (1)...(19): siRNA sense strand
cagaugaccaaacgggaca

SEQ ID NO: 2221378 - RNA, 19 nt, Homo sapiens
  misc_RNA (1)...(19): siRNA sense strand
gggcuuuacugaagaggag

SEQ ID NO: 2221379 - RNA, 19 nt, Homo sapiens
  misc_RNA (1)...(19): siRNA sense strand
uggcaggaggagagggauc

SEQ ID NO: 2221380 - RNA, 19 nt, Homo sapiens
  misc_RNA (1)...(19): siRNA sense strand
aaguagaacugcaugucca

SEQ ID NO: 2221381 - RNA, 19 nt, Homo sapiens
  misc_RNA (1)...(19): siRNA sense strand
cggaagacuuugugggcca

SEQ ID NO: 2221382 - RNA, 19 nt, Homo sapiens
  misc_RNA (1)...(19): siRNA sense strand
acguggaacaggagaaaga

SEQ ID NO: 2221383 - RNA, 19 nt, Homo sapiens
  misc_RNA (1)...(19): siRNA sense strand
guggaacaggagaaagaaa

SEQ ID NO: 2221384 - RNA, 19 nt, Homo sapiens
  misc_RNA (1)...(19): siRNA sense strand
gcuccagaagauugacaaa

SEQ ID NO: 2221385 - RNA, 19 nt, Homo sapiens
  misc_RNA (1)...(19): siRNA sense strand
agguguggguggugggcau

SEQ ID NO: 2221386 - RNA, 19 nt, Homo sapiens
  misc_RNA (1)...(19): siRNA sense strand
uggaacaggagaaagaaaa

SEQ ID NO: 2221387 - RNA, 19 nt, Homo sapiens
  misc_RNA (1)...(19): siRNA sense strand
ggaacaggagaaagaaaau

SEQ ID NO: 2221388 - RNA, 19 nt, Homo sapiens
  misc_RNA (1)...(19): siRNA sense strand
gggucuuucaggaggccaa

SEQ ID NO: 2221389 - RNA, 19 nt, Homo sapiens
  misc_RNA (1)...(19): siRNA sense strand
ugaucauggucuucgucua

SEQ ID NO: 2221390 - RNA, 19 nt, Homo sapiens
  misc_RNA (1)...(19): siRNA sense strand
uugccaaguucgagcgucu

SEQ ID NO: 2221391 - RNA, 19 nt, Homo sapiens
  misc_RNA (1)...(19): siRNA sense strand
ccucaagacguuaggcauc

SEQ ID NO: 2221392 - RNA, 19 nt, Homo sapiens
  misc_RNA (1)...(19): siRNA sense strand
gcuaccuggcugugaccaa

SEQ ID NO: 2221393 - RNA, 19 nt, Homo sapiens
  misc_RNA (1)...(19): siRNA sense strand
ggucaaagcuggagguagc

SEQ ID NO: 2221394 - RNA, 19 nt, Homo sapiens
  misc_RNA (1)...(19): siRNA sense strand
ccaggauugccaugagaaa

SEQ ID NO: 2221395 - RNA, 19 nt, Homo sapiens
  misc_RNA (1)...(19): siRNA sense strand
agguauaaauuccggacau

SEQ ID NO: 2221396 - RNA, 19 nt, Homo sapiens
  misc_RNA (1)...(19): siRNA sense strand
ugaugaaggugaaagcaga

SEQ ID NO: 2221397 - RNA, 19 nt, Homo sapiens
  misc_RNA (1)...(19): siRNA sense strand
agguagagcagcuugacaa

SEQ ID NO: 2221398 - RNA, 19 nt, Homo sapiens
  misc_RNA (1)...(19): siRNA sense strand
uugcuauguuggagacaau

SEQ ID NO: 2221399 - RNA, 19 nt, Homo sapiens
  misc_RNA (1)...(19): siRNA sense strand
augaacaaauccaggagau

SEQ ID NO: 2221400 - RNA, 19 nt, Homo sapiens
  misc_RNA (1)...(19): siRNA sense strand
gcugaccacaguugggaaa

SEQ ID NO: 2221401 - RNA, 19 nt, Homo sapiens
  misc_RNA (1)...(19): siRNA sense strand
ccgagcagacauuggguuu

SEQ ID NO: 2221402 - RNA, 19 nt, Homo sapiens
  misc_RNA (1)...(19): siRNA sense strand
cagauuggcucaagugcga

SEQ ID NO: 2221403 - RNA, 19 nt, Homo sapiens
  misc_RNA (1)...(19): siRNA sense strand
agacauuggguuugccuau

SEQ ID NO: 2221404 - RNA, 19 nt, Homo sapiens
  misc_RNA (1)...(19): siRNA sense strand
aggcagcuucugugguuaa

SEQ ID NO: 2221405 - RNA, 19 nt, Homo sapiens
  misc_RNA (1)...(19): siRNA sense strand
aacaaauccaggagaugaa

SEQ ID NO: 2221406 - RNA, 19 nt, Homo sapiens
  misc_RNA (1)...(19): siRNA sense strand
guauccagguugaugccua

SEQ ID NO: 2221407 - RNA, 19 nt, Homo sapiens
  misc_RNA (1)...(19): siRNA sense strand
agauggcagcugaggaaga

SEQ ID NO: 2221408 - RNA, 19 nt, Homo sapiens
  misc_RNA (1)...(19): siRNA sense strand
acaagauggugacagaaaa

SEQ ID NO: 2221409 - RNA, 19 nt, Homo sapiens
  misc_RNA (1)...(19): siRNA sense strand
gccuaucacagaugaacaa

SEQ ID NO: 2221410 - RNA, 19 nt, Homo sapiens
  misc_RNA (1)...(19): siRNA sense strand
ggagaugaccauaagguag

SEQ ID NO: 2221411 - RNA, 19 nt, Homo sapiens
  misc_RNA (1)...(19): siRNA sense strand
gcaggauuuaagagagcuu

SEQ ID NO: 2221412 - RNA, 19 nt, Homo sapiens
  misc_RNA (1)...(19): siRNA sense strand
cgcagauacuauauugaau

SEQ ID NO: 2221413 - RNA, 19 nt, Homo sapiens
  misc_RNA (1)...(19): siRNA sense strand
ugagaaaaucagagugcuu

SEQ ID NO: 2221414 - RNA, 19 nt, Homo sapiens
  misc_RNA (1)...(19): siRNA sense strand
cuggcaaaccucaaggaga

SEQ ID NO: 2221415 - RNA, 19 nt, Homo sapiens
  misc_RNA (1)...(19): siRNA sense strand
cugaggaagagaaacguuu

SEQ ID NO: 2221416 - RNA, 19 nt, Homo sapiens
  misc_RNA (1)...(19): siRNA sense strand
ccacauuagguuucacaca

SEQ ID NO: 2221417 - RNA, 19 nt, Homo sapiens
  misc_RNA (1)...(19): siRNA sense strand
auacaugagaagaggagaa

SEQ ID NO: 2221418 - RNA, 19 nt, Homo sapiens
  misc_RNA (1)...(19): siRNA sense strand
gaagcagcguggagggcau

SEQ ID NO: 2221419 - RNA, 19 nt, Homo sapiens
  misc_RNA (1)...(19): siRNA sense strand
ccugaugaacuuggagaaa

SEQ ID NO: 2221420 - RNA, 19 nt, Homo sapiens
  misc_RNA (1)...(19): siRNA sense strand
gguuguaauccauaagaca

SEQ ID NO: 2221421 - RNA, 19 nt, Homo sapiens
  misc_RNA (1)...(19): siRNA sense strand
gugccaugugugagagaga

SEQ ID NO: 2221422 - RNA, 19 nt, Homo sapiens
  misc_RNA (1)...(19): siRNA sense strand
gcucaaaguaugggguuua

SEQ ID NO: 2221423 - RNA, 19 nt, Homo sapiens
  misc_RNA (1)...(19): siRNA sense strand
gugauauauugaugcgcuu

SEQ ID NO: 2221424 - RNA, 19 nt, Homo sapiens
  misc_RNA (1)...(19): siRNA sense strand
gugagagagagcaguguga

SEQ ID NO: 2221425 - RNA, 19 nt, Homo sapiens
  misc_RNA (1)...(19): siRNA sense strand
cuuuaagaaugcaaccgaa

SEQ ID NO: 2221426 - RNA, 19 nt, Homo sapiens
  misc_RNA (1)...(19): siRNA sense strand
cagauuggcuugcucggaa

SEQ ID NO: 2221427 - RNA, 19 nt, Homo sapiens
  misc_RNA (1)...(19): siRNA sense strand
auguaggagcaguaggaga

SEQ ID NO: 2221428 - RNA, 19 nt, Homo sapiens
  misc_RNA (1)...(19): siRNA sense strand
ggaggaauguuauaccaga

SEQ ID NO: 2221429 - RNA, 19 nt, Homo sapiens
  misc_RNA (1)...(19): siRNA sense strand
ggaacauacaacacacaca

SEQ ID NO: 2221430 - RNA, 19 nt, Homo sapiens
  misc_RNA (1)...(19): siRNA sense strand
gcucggaauugccagccaa

SEQ ID NO: 2221431 - RNA, 19 nt, Homo sapiens
  misc_RNA (1)...(19): siRNA sense strand
aggagaucucagacgaauu

SEQ ID NO: 2221432 - RNA, 19 nt, Homo sapiens
  misc_RNA (1)...(19): siRNA sense strand
ggagaaagugacagagcua

SEQ ID NO: 2221433 - RNA, 19 nt, Homo sapiens
  misc_RNA (1)...(19): siRNA sense strand
gguaaaugguugcaggcua

SEQ ID NO: 2221434 - RNA, 19 nt, Homo sapiens
  misc_RNA (1)...(19): siRNA sense strand
gcacacaauggauggguaa

SEQ ID NO: 2221435 - RNA, 19 nt, Homo sapiens
  misc_RNA (1)...(19): siRNA sense strand
uggcaaaauugaagaagua

SEQ ID NO: 2221436 - RNA, 19 nt, Homo sapiens
  misc_RNA (1)...(19): siRNA sense strand
ugacaaugcauuagacaau

SEQ ID NO: 2221437 - RNA, 19 nt, Homo sapiens
  misc_RNA (1)...(19): siRNA sense strand
gguuaaaugagaucacaaa

SEQ ID NO: 2221438 - RNA, 19 nt, Homo sapiens
  misc_RNA (1)...(19): siRNA sense strand
caagaaaauaggcgaguaa

SEQ ID NO: 2221439 - RNA, 19 nt, Homo sapiens
  misc_RNA (1)...(19): siRNA sense strand
ugauguugcagaagggaaa

SEQ ID NO: 2221440 - RNA, 19 nt, Homo sapiens
  misc_RNA (1)...(19): siRNA sense strand
agcuagaacuauugagaga

SEQ ID NO: 2221441 - RNA, 19 nt, Homo sapiens
  misc_RNA (1)...(19): siRNA sense strand
acacgaaaccuuauaggaa

SEQ ID NO: 2221442 - RNA, 19 nt, Homo sapiens
  misc_RNA (1)...(19): siRNA sense strand
gcccaacuuuacagggaaa

SEQ ID NO: 2221443 - RNA, 19 nt, Homo sapiens
  misc_RNA (1)...(19): siRNA sense strand
acaugaaggacgaagguuu

SEQ ID NO: 2221444 - RNA, 19 nt, Homo sapiens
  misc_RNA (1)...(19): siRNA sense strand
cugcaggaguugaugaaga

SEQ ID NO: 2221445 - RNA, 19 nt, Homo sapiens
  misc_RNA (1)...(19): siRNA sense strand
gaagugaagaucuggacaa

SEQ ID NO: 2221446 - RNA, 19 nt, Homo sapiens
  misc_RNA (1)...(19): siRNA sense strand
ccuuaaauaugcaggucuu

SEQ ID NO: 2221447 - RNA, 19 nt, Homo sapiens
  misc_RNA (1)...(19): siRNA sense strand
ggaauaaaccagaggacug

SEQ ID NO: 2221448 - RNA, 19 nt, Homo sapiens
  misc_RNA (1)...(19): siRNA sense strand
ggauaaaaugggagaaagu

SEQ ID NO: 2221449 - RNA, 19 nt, Homo sapiens
  misc_RNA (1)...(19): siRNA sense strand
gcauggaagcagaugucaa

SEQ ID NO: 2221450 - RNA, 19 nt, Homo sapiens
  misc_RNA (1)...(19): siRNA sense strand
ugaugaagaaacaggauuu

SEQ ID NO: 2221451 - RNA, 19 nt, Homo sapiens
  misc_RNA (1)...(19): siRNA sense strand
agauaugaacauugcacua

SEQ ID NO: 2221452 - RNA, 19 nt, Homo sapiens
  misc_RNA (1)...(19): siRNA sense strand
uaaauuacgcuaugggaau

SEQ ID NO: 2221453 - RNA, 19 nt, Homo sapiens
  misc_RNA (1)...(19): siRNA sense strand
uaacuuuggcugagcuaaa

SEQ ID NO: 2221454 - RNA, 19 nt, Homo sapiens
  misc_RNA (1)...(19): siRNA sense strand
aggaguugaugaagaaaca

SEQ ID NO: 2221455 - RNA, 19 nt, Homo sapiens
  misc_RNA (1)...(19): siRNA sense strand
uggaaguacaagaggcuau

SEQ ID NO: 2221456 - RNA, 19 nt, Homo sapiens
  misc_RNA (1)...(19): siRNA sense strand
agacauaguggcaguaaca

SEQ ID NO: 2221457 - RNA, 19 nt, Homo sapiens
  misc_RNA (1)...(19): siRNA sense strand
ucuacugggugaagggauu

SEQ ID NO: 2221458 - RNA, 19 nt, Homo sapiens
  misc_RNA (1)...(19): siRNA sense strand
agaacugaccaaugagaau

SEQ ID NO: 2221459 - RNA, 19 nt, Homo sapiens
  misc_RNA (1)...(19): siRNA sense strand
agaaagugacagagcuaga

SEQ ID NO: 2221460 - RNA, 19 nt, Homo sapiens
  misc_RNA (1)...(19): siRNA sense strand
ggcauacaguuccgagaaa

SEQ ID NO: 2221461 - RNA, 19 nt, Homo sapiens
  misc_RNA (1)...(19): siRNA sense strand
caacuuauuuccagggagu

SEQ ID NO: 2221462 - RNA, 19 nt, Homo sapiens
  misc_RNA (1)...(19): siRNA sense strand
gggaguacgucuugauaac

SEQ ID NO: 2221463 - RNA, 19 nt, Homo sapiens
  misc_RNA (1)...(19): siRNA sense strand
ggcaaugagugcauauaau

SEQ ID NO: 2221464 - RNA, 19 nt, Homo sapiens
  misc_RNA (1)...(19): siRNA sense strand
uuaccgauauggaggagaa

SEQ ID NO: 2221465 - RNA, 19 nt, Homo sapiens
  misc_RNA (1)...(19): siRNA sense strand
guacaagaggcuaugauga

SEQ ID NO: 2221466 - RNA, 19 nt, Homo sapiens
  misc_RNA (1)...(19): siRNA sense strand
gagagaaacacgaaaccuu

SEQ ID NO: 2221467 - RNA, 19 nt, Homo sapiens
  misc_RNA (1)...(19): siRNA sense strand
guuugaagucauacaggaa

SEQ ID NO: 2221468 - RNA, 19 nt, Homo sapiens
  misc_RNA (1)...(19): siRNA sense strand
cuguaaacuuaaucugcaa

SEQ ID NO: 2221469 - RNA, 19 nt, Homo sapiens
  misc_RNA (1)...(19): siRNA sense strand
auggauggguaaugggaga

SEQ ID NO: 2221470 - RNA, 19 nt, Homo sapiens
  misc_RNA (1)...(19): siRNA sense strand
cugaaauaacugcaacuua

SEQ ID NO: 2221471 - RNA, 19 nt, Homo sapiens
  misc_RNA (1)...(19): siRNA sense strand
ggaagaugguggagggugc

SEQ ID NO: 2221472 - RNA, 19 nt, Homo sapiens
  misc_RNA (1)...(19): siRNA sense strand
cgaaaucaucugacacaau

SEQ ID NO: 2221473 - RNA, 19 nt, Homo sapiens
  misc_RNA (1)...(19): siRNA sense strand
cuuuaaaucuggcagccua

SEQ ID NO: 2221474 - RNA, 19 nt, Homo sapiens
  misc_RNA (1)...(19): siRNA sense strand
agagcuagaaacagaggaa

SEQ ID NO: 2221475 - RNA, 19 nt, Homo sapiens
  misc_RNA (1)...(19): siRNA sense strand
cuguggaauuuaugacaau

SEQ ID NO: 2221476 - RNA, 19 nt, Homo sapiens
  misc_RNA (1)...(19): siRNA sense strand
cuuuagauccagaugauau

SEQ ID NO: 2221477 - RNA, 19 nt, Homo sapiens
  misc_RNA (1)...(19): siRNA sense strand
ccugaguggcuguggccua

SEQ ID NO: 2221478 - RNA, 19 nt, Homo sapiens
  misc_RNA (1)...(19): siRNA sense strand
cagaagggaaauacaaaga

SEQ ID NO: 2221479 - RNA, 19 nt, Homo sapiens
  misc_RNA (1)...(19): siRNA sense strand
agaacuauugagagaaaca

SEQ ID NO: 2221480 - RNA, 19 nt, Homo sapiens
  misc_RNA (1)...(19): siRNA sense strand
ccgaugugaaucagaagaa

SEQ ID NO: 2221481 - RNA, 19 nt, Homo sapiens
  misc_RNA (1)...(19): siRNA sense strand
caaacguggcauauacaaa

SEQ ID NO: 2221482 - RNA, 19 nt, Homo sapiens
  misc_RNA (1)...(19): siRNA sense strand
uuggacagcuaguggaaaa

SEQ ID NO: 2221483 - RNA, 19 nt, Homo sapiens
  misc_RNA (1)...(19): siRNA sense strand
ucuugaagcuagaacuauu

SEQ ID NO: 2221484 - RNA, 19 nt, Homo sapiens
  misc_RNA (1)...(19): siRNA sense strand
gguucacaaacguggcaua

SEQ ID NO: 2221485 - RNA, 19 nt, Homo sapiens
  misc_RNA (1)...(19): siRNA sense strand
caaucauacugcugcuaau

SEQ ID NO: 2221486 - RNA, 19 nt, Homo sapiens
  misc_RNA (1)...(19): siRNA sense strand
caugaaaacuuuagaucca

SEQ ID NO: 2221487 - RNA, 19 nt, Homo sapiens
  misc_RNA (1)...(19): siRNA sense strand
uaaccaagucugauccaaa

SEQ ID NO: 2221488 - RNA, 19 nt, Homo sapiens
  misc_RNA (1)...(19): siRNA sense strand
aaauugugggccugaguaa

SEQ ID NO: 2221489 - RNA, 19 nt, Homo sapiens
  misc_RNA (1)...(19): siRNA sense strand
cgaugugaaucagaagaaa

SEQ ID NO: 2221490 - RNA, 19 nt, Homo sapiens
  misc_RNA (1)...(19): siRNA sense strand
aaucagaagaaaaggaaga

SEQ ID NO: 2221491 - RNA, 19 nt, Homo sapiens
  misc_RNA (1)...(19): siRNA sense strand
uaugaugaguggaacagaa

SEQ ID NO: 2221492 - RNA, 19 nt, Homo sapiens
  misc_RNA (1)...(19): siRNA sense strand
gcuguggccuauuggguau

SEQ ID NO: 2221493 - RNA, 19 nt, Homo sapiens
  misc_RNA (1)...(19): siRNA sense strand
gaaaagugguggagguuac

SEQ ID NO: 2221494 - RNA, 19 nt, Homo sapiens
  misc_RNA (1)...(19): siRNA sense strand
uuaauugccuuuugggaaa

SEQ ID NO: 2221495 - RNA, 19 nt, Homo sapiens
  misc_RNA (1)...(19): siRNA sense strand
ggagaaagugacagagcua

SEQ ID NO: 2221496 - RNA, 19 nt, Homo sapiens
  misc_RNA (1)...(19): siRNA sense strand
gguaaaugguugcaggcua

SEQ ID NO: 2221497 - RNA, 19 nt, Homo sapiens
  misc_RNA (1)...(19): siRNA sense strand
gcacacaauggauggguaa

SEQ ID NO: 2221498 - RNA, 19 nt, Homo sapiens
  misc_RNA (1)...(19): siRNA sense strand
uggcaaaauugaagaagua

SEQ ID NO: 2221499 - RNA, 19 nt, Homo sapiens
  misc_RNA (1)...(19): siRNA sense strand
ugacaaugcauuagacaau

SEQ ID NO: 2221500 - RNA, 19 nt, Homo sapiens
  misc_RNA (1)...(19): siRNA sense strand
gguuaaaugagaucacaaa

SEQ ID NO: 2221501 - RNA, 19 nt, Homo sapiens
  misc_RNA (1)...(19): siRNA sense strand
caagaaaauaggcgaguaa

SEQ ID NO: 2221502 - RNA, 19 nt, Homo sapiens
  misc_RNA (1)...(19): siRNA sense strand
ugauguugcagaagggaaa

SEQ ID NO: 2221503 - RNA, 19 nt, Homo sapiens
  misc_RNA (1)...(19): siRNA sense strand
agcuagaacuauugagaga

SEQ ID NO: 2221504 - RNA, 19 nt, Homo sapiens
  misc_RNA (1)...(19): siRNA sense strand
acacgaaaccuuauaggaa

SEQ ID NO: 2221505 - RNA, 19 nt, Homo sapiens
  misc_RNA (1)...(19): siRNA sense strand
gcccaacuuuacagggaaa

SEQ ID NO: 2221506 - RNA, 19 nt, Homo sapiens
  misc_RNA (1)...(19): siRNA sense strand
acaugaaggacgaagguuu

SEQ ID NO: 2221507 - RNA, 19 nt, Homo sapiens
  misc_RNA (1)...(19): siRNA sense strand
cugcaggaguugaugaaga

SEQ ID NO: 2221508 - RNA, 19 nt, Homo sapiens
  misc_RNA (1)...(19): siRNA sense strand
gaagugaagaucuggacaa

SEQ ID NO: 2221509 - RNA, 19 nt, Homo sapiens
  misc_RNA (1)...(19): siRNA sense strand
ccuuaaauaugcaggucuu

SEQ ID NO: 2221510 - RNA, 19 nt, Homo sapiens
  misc_RNA (1)...(19): siRNA sense strand
ggaauaaaccagaggacug

SEQ ID NO: 2221511 - RNA, 19 nt, Homo sapiens
  misc_RNA (1)...(19): siRNA sense strand
ggauaaaaugggagaaagu

SEQ ID NO: 2221512 - RNA, 19 nt, Homo sapiens
  misc_RNA (1)...(19): siRNA sense strand
gcauggaagcagaugucaa

SEQ ID NO: 2221513 - RNA, 19 nt, Homo sapiens
  misc_RNA (1)...(19): siRNA sense strand
ugaugaagaaacaggauuu

SEQ ID NO: 2221514 - RNA, 19 nt, Homo sapiens
  misc_RNA (1)...(19): siRNA sense strand
agauaugaacauugcacua

SEQ ID NO: 2221515 - RNA, 19 nt, Homo sapiens
  misc_RNA (1)...(19): siRNA sense strand
uaaauuacgcuaugggaau

SEQ ID NO: 2221516 - RNA, 19 nt, Homo sapiens
  misc_RNA (1)...(19): siRNA sense strand
uaacuuuggcugagcuaaa

SEQ ID NO: 2221517 - RNA, 19 nt, Homo sapiens
  misc_RNA (1)...(19): siRNA sense strand
aggaguugaugaagaaaca

SEQ ID NO: 2221518 - RNA, 19 nt, Homo sapiens
  misc_RNA (1)...(19): siRNA sense strand
uggaaguacaagaggcuau

SEQ ID NO: 2221519 - RNA, 19 nt, Homo sapiens
  misc_RNA (1)...(19): siRNA sense strand
agacauaguggcaguaaca

SEQ ID NO: 2221520 - RNA, 19 nt, Homo sapiens
  misc_RNA (1)...(19): siRNA sense strand
ucuacugggugaagggauu

SEQ ID NO: 2221521 - RNA, 19 nt, Homo sapiens
  misc_RNA (1)...(19): siRNA sense strand
agaacugaccaaugagaau

SEQ ID NO: 2221522 - RNA, 19 nt, Homo sapiens
  misc_RNA (1)...(19): siRNA sense strand
agaaagugacagagcuaga

SEQ ID NO: 2221523 - RNA, 19 nt, Homo sapiens
  misc_RNA (1)...(19): siRNA sense strand
ggcauacaguuccgagaaa

SEQ ID NO: 2221524 - RNA, 19 nt, Homo sapiens
  misc_RNA (1)...(19): siRNA sense strand
caacuuauuuccagggagu

SEQ ID NO: 2221525 - RNA, 19 nt, Homo sapiens
  misc_RNA (1)...(19): siRNA sense strand
gggaguacgucuugauaac

SEQ ID NO: 2221526 - RNA, 19 nt, Homo sapiens
  misc_RNA (1)...(19): siRNA sense strand
ggcaaugagugcauauaau

SEQ ID NO: 2221527 - RNA, 19 nt, Homo sapiens
  misc_RNA (1)...(19): siRNA sense strand
uuaccgauauggaggagaa

SEQ ID NO: 2221528 - RNA, 19 nt, Homo sapiens
  misc_RNA (1)...(19): siRNA sense strand
guacaagaggcuaugauga

SEQ ID NO: 2221529 - RNA, 19 nt, Homo sapiens
  misc_RNA (1)...(19): siRNA sense strand
gagagaaacacgaaaccuu

SEQ ID NO: 2221530 - RNA, 19 nt, Homo sapiens
  misc_RNA (1)...(19): siRNA sense strand
guuugaagucauacaggaa

SEQ ID NO: 2221531 - RNA, 19 nt, Homo sapiens
  misc_RNA (1)...(19): siRNA sense strand
cuguaaacuuaaucugcaa

SEQ ID NO: 2221532 - RNA, 19 nt, Homo sapiens
  misc_RNA (1)...(19): siRNA sense strand
auggauggguaaugggaga

SEQ ID NO: 2221533 - RNA, 19 nt, Homo sapiens
  misc_RNA (1)...(19): siRNA sense strand
cugaaauaacugcaacuua

SEQ ID NO: 2221534 - RNA, 19 nt, Homo sapiens
  misc_RNA (1)...(19): siRNA sense strand
ggaagaugguggagggugc

SEQ ID NO: 2221535 - RNA, 19 nt, Homo sapiens
  misc_RNA (1)...(19): siRNA sense strand
cgaaaucaucugacacaau

SEQ ID NO: 2221536 - RNA, 19 nt, Homo sapiens
  misc_RNA (1)...(19): siRNA sense strand
cuuuaaaucuggcagccua

SEQ ID NO: 2221537 - RNA, 19 nt, Homo sapiens
  misc_RNA (1)...(19): siRNA sense strand
agagcuagaaacagaggaa

SEQ ID NO: 2221538 - RNA, 19 nt, Homo sapiens
  misc_RNA (1)...(19): siRNA sense strand
cuguggaauuuaugacaau

SEQ ID NO: 2221539 - RNA, 19 nt, Homo sapiens
  misc_RNA (1)...(19): siRNA sense strand
cuuuagauccagaugauau

SEQ ID NO: 2221540 - RNA, 19 nt, Homo sapiens
  misc_RNA (1)...(19): siRNA sense strand
ccugaguggcuguggccua

SEQ ID NO: 2221541 - RNA, 19 nt, Homo sapiens
  misc_RNA (1)...(19): siRNA sense strand
cagaagggaaauacaaaga

SEQ ID NO: 2221542 - RNA, 19 nt, Homo sapiens
  misc_RNA (1)...(19): siRNA sense strand
agaacuauugagagaaaca

SEQ ID NO: 2221543 - RNA, 19 nt, Homo sapiens
  misc_RNA (1)...(19): siRNA sense strand
ccgaugugaaucagaagaa

SEQ ID NO: 2221544 - RNA, 19 nt, Homo sapiens
  misc_RNA (1)...(19): siRNA sense strand
caaacguggcauauacaaa

SEQ ID NO: 2221545 - RNA, 19 nt, Homo sapiens
  misc_RNA (1)...(19): siRNA sense strand
uuggacagcuaguggaaaa

SEQ ID NO: 2221546 - RNA, 19 nt, Homo sapiens
  misc_RNA (1)...(19): siRNA sense strand
ucuugaagcuagaacuauu

SEQ ID NO: 2221547 - RNA, 19 nt, Homo sapiens
  misc_RNA (1)...(19): siRNA sense strand
gguucacaaacguggcaua

SEQ ID NO: 2221548 - RNA, 19 nt, Homo sapiens
  misc_RNA (1)...(19): siRNA sense strand
caaucauacugcugcuaau

SEQ ID NO: 2221549 - RNA, 19 nt, Homo sapiens
  misc_RNA (1)...(19): siRNA sense strand
caugaaaacuuuagaucca

SEQ ID NO: 2221550 - RNA, 19 nt, Homo sapiens
  misc_RNA (1)...(19): siRNA sense strand
uaaccaagucugauccaaa

SEQ ID NO: 2221551 - RNA, 19 nt, Homo sapiens
  misc_RNA (1)...(19): siRNA sense strand
aaauugugggccugaguaa

SEQ ID NO: 2221552 - RNA, 19 nt, Homo sapiens
  misc_RNA (1)...(19): siRNA sense strand
cgaugugaaucagaagaaa

SEQ ID NO: 2221553 - RNA, 19 nt, Homo sapiens
  misc_RNA (1)...(19): siRNA sense strand
aaucagaagaaaaggaaga

SEQ ID NO: 2221554 - RNA, 19 nt, Homo sapiens
  misc_RNA (1)...(19): siRNA sense strand
uaugaugaguggaacagaa

SEQ ID NO: 2221555 - RNA, 19 nt, Homo sapiens
  misc_RNA (1)...(19): siRNA sense strand
gcuguggccuauuggguau

SEQ ID NO: 2221556 - RNA, 19 nt, Homo sapiens
  misc_RNA (1)...(19): siRNA sense strand
gaaaagugguggagguuac

SEQ ID NO: 2221557 - RNA, 19 nt, Homo sapiens
  misc_RNA (1)...(19): siRNA sense strand
uuaauugccuuuugggaaa

SEQ ID NO: 2221558 - RNA, 19 nt, Homo sapiens
  misc_RNA (1)...(19): siRNA sense strand
ggagaaagugacagagcua

SEQ ID NO: 2221559 - RNA, 19 nt, Homo sapiens
  misc_RNA (1)...(19): siRNA sense strand
gguaaaugguugcaggcua

SEQ ID NO: 2221560 - RNA, 19 nt, Homo sapiens
  misc_RNA (1)...(19): siRNA sense strand
gcacacaauggauggguaa

SEQ ID NO: 2221561 - RNA, 19 nt, Homo sapiens
  misc_RNA (1)...(19): siRNA sense strand
uggcaaaauugaagaagua

SEQ ID NO: 2221562 - RNA, 19 nt, Homo sapiens
  misc_RNA (1)...(19): siRNA sense strand
ugacaaugcauuagacaau

SEQ ID NO: 2221563 - RNA, 19 nt, Homo sapiens
  misc_RNA (1)...(19): siRNA sense strand
gguuaaaugagaucacaaa

SEQ ID NO: 2221564 - RNA, 19 nt, Homo sapiens
  misc_RNA (1)...(19): siRNA sense strand
caagaaaauaggcgaguaa

SEQ ID NO: 2221565 - RNA, 19 nt, Homo sapiens
  misc_RNA (1)...(19): siRNA sense strand
ugauguugcagaagggaaa

SEQ ID NO: 2221566 - RNA, 19 nt, Homo sapiens
  misc_RNA (1)...(19): siRNA sense strand
agcuagaacuauugagaga

SEQ ID NO: 2221567 - RNA, 19 nt, Homo sapiens
  misc_RNA (1)...(19): siRNA sense strand
acacgaaaccuuauaggaa

SEQ ID NO: 2221568 - RNA, 19 nt, Homo sapiens
  misc_RNA (1)...(19): siRNA sense strand
gcccaacuuuacagggaaa

SEQ ID NO: 2221569 - RNA, 19 nt, Homo sapiens
  misc_RNA (1)...(19): siRNA sense strand
acaugaaggacgaagguuu

SEQ ID NO: 2221570 - RNA, 19 nt, Homo sapiens
  misc_RNA (1)...(19): siRNA sense strand
cugcaggaguugaugaaga

SEQ ID NO: 2221571 - RNA, 19 nt, Homo sapiens
  misc_RNA (1)...(19): siRNA sense strand
gaagugaagaucuggacaa

SEQ ID NO: 2221572 - RNA, 19 nt, Homo sapiens
  misc_RNA (1)...(19): siRNA sense strand
ccuuaaauaugcaggucuu

SEQ ID NO: 2221573 - RNA, 19 nt, Homo sapiens
  misc_RNA (1)...(19): siRNA sense strand
ggaauaaaccagaggacug

SEQ ID NO: 2221574 - RNA, 19 nt, Homo sapiens
  misc_RNA (1)...(19): siRNA sense strand
ggauaaaaugggagaaagu

SEQ ID NO: 2221575 - RNA, 19 nt, Homo sapiens
  misc_RNA (1)...(19): siRNA sense strand
gcauggaagcagaugucaa

SEQ ID NO: 2221576 - RNA, 19 nt, Homo sapiens
  misc_RNA (1)...(19): siRNA sense strand
ugaugaagaaacaggauuu

SEQ ID NO: 2221577 - RNA, 19 nt, Homo sapiens
  misc_RNA (1)...(19): siRNA sense strand
agauaugaacauugcacua

SEQ ID NO: 2221578 - RNA, 19 nt, Homo sapiens
  misc_RNA (1)...(19): siRNA sense strand
uaaauuacgcuaugggaau

SEQ ID NO: 2221579 - RNA, 19 nt, Homo sapiens
  misc_RNA (1)...(19): siRNA sense strand
uaacuuuggcugagcuaaa

SEQ ID NO: 2221580 - RNA, 19 nt, Homo sapiens
  misc_RNA (1)...(19): siRNA sense strand
aggaguugaugaagaaaca

SEQ ID NO: 2221581 - RNA, 19 nt, Homo sapiens
  misc_RNA (1)...(19): siRNA sense strand
uggaaguacaagaggcuau

SEQ ID NO: 2221582 - RNA, 19 nt, Homo sapiens
  misc_RNA (1)...(19): siRNA sense strand
agacauaguggcaguaaca

SEQ ID NO: 2221583 - RNA, 19 nt, Homo sapiens
  misc_RNA (1)...(19): siRNA sense strand
ucuacugggugaagggauu

SEQ ID NO: 2221584 - RNA, 19 nt, Homo sapiens
  misc_RNA (1)...(19): siRNA sense strand
agaacugaccaaugagaau

SEQ ID NO: 2221585 - RNA, 19 nt, Homo sapiens
  misc_RNA (1)...(19): siRNA sense strand
agaaagugacagagcuaga

SEQ ID NO: 2221586 - RNA, 19 nt, Homo sapiens
  misc_RNA (1)...(19): siRNA sense strand
ggcauacaguuccgagaaa

SEQ ID NO: 2221587 - RNA, 19 nt, Homo sapiens
  misc_RNA (1)...(19): siRNA sense strand
caacuuauuuccagggagu

SEQ ID NO: 2221588 - RNA, 19 nt, Homo sapiens
  misc_RNA (1)...(19): siRNA sense strand
gggaguacgucuugauaac

SEQ ID NO: 2221589 - RNA, 19 nt, Homo sapiens
  misc_RNA (1)...(19): siRNA sense strand
ggcaaugagugcauauaau

SEQ ID NO: 2221590 - RNA, 19 nt, Homo sapiens
  misc_RNA (1)...(19): siRNA sense strand
uuaccgauauggaggagaa

SEQ ID NO: 2221591 - RNA, 19 nt, Homo sapiens
  misc_RNA (1)...(19): siRNA sense strand
guacaagaggcuaugauga

SEQ ID NO: 2221592 - RNA, 19 nt, Homo sapiens
  misc_RNA (1)...(19): siRNA sense strand
gagagaaacacgaaaccuu

SEQ ID NO: 2221593 - RNA, 19 nt, Homo sapiens
  misc_RNA (1)...(19): siRNA sense strand
guuugaagucauacaggaa

SEQ ID NO: 2221594 - RNA, 19 nt, Homo sapiens
  misc_RNA (1)...(19): siRNA sense strand
cuguaaacuuaaucugcaa

SEQ ID NO: 2221595 - RNA, 19 nt, Homo sapiens
  misc_RNA (1)...(19): siRNA sense strand
auggauggguaaugggaga

SEQ ID NO: 2221596 - RNA, 19 nt, Homo sapiens
  misc_RNA (1)...(19): siRNA sense strand
cugaaauaacugcaacuua

SEQ ID NO: 2221597 - RNA, 19 nt, Homo sapiens
  misc_RNA (1)...(19): siRNA sense strand
ggaagaugguggagggugc

SEQ ID NO: 2221598 - RNA, 19 nt, Homo sapiens
  misc_RNA (1)...(19): siRNA sense strand
cgaaaucaucugacacaau

SEQ ID NO: 2221599 - RNA, 19 nt, Homo sapiens
  misc_RNA (1)...(19): siRNA sense strand
cuuuaaaucuggcagccua

SEQ ID NO: 2221600 - RNA, 19 nt, Homo sapiens
  misc_RNA (1)...(19): siRNA sense strand
agagcuagaaacagaggaa

SEQ ID NO: 2221601 - RNA, 19 nt, Homo sapiens
  misc_RNA (1)...(19): siRNA sense strand
cuguggaauuuaugacaau

SEQ ID NO: 2221602 - RNA, 19 nt, Homo sapiens
  misc_RNA (1)...(19): siRNA sense strand
cuuuagauccagaugauau

SEQ ID NO: 2221603 - RNA, 19 nt, Homo sapiens
  misc_RNA (1)...(19): siRNA sense strand
ccugaguggcuguggccua

SEQ ID NO: 2221604 - RNA, 19 nt, Homo sapiens
  misc_RNA (1)...(19): siRNA sense strand
cagaagggaaauacaaaga

SEQ ID NO: 2221605 - RNA, 19 nt, Homo sapiens
  misc_RNA (1)...(19): siRNA sense strand
agaacuauugagagaaaca

SEQ ID NO: 2221606 - RNA, 19 nt, Homo sapiens
  misc_RNA (1)...(19): siRNA sense strand
ccgaugugaaucagaagaa

SEQ ID NO: 2221607 - RNA, 19 nt, Homo sapiens
  misc_RNA (1)...(19): siRNA sense strand
caaacguggcauauacaaa

SEQ ID NO: 2221608 - RNA, 19 nt, Homo sapiens
  misc_RNA (1)...(19): siRNA sense strand
uuggacagcuaguggaaaa

SEQ ID NO: 2221609 - RNA, 19 nt, Homo sapiens
  misc_RNA (1)...(19): siRNA sense strand
ucuugaagcuagaacuauu

SEQ ID NO: 2221610 - RNA, 19 nt, Homo sapiens
  misc_RNA (1)...(19): siRNA sense strand
gguucacaaacguggcaua

SEQ ID NO: 2221611 - RNA, 19 nt, Homo sapiens
  misc_RNA (1)...(19): siRNA sense strand
caaucauacugcugcuaau

SEQ ID NO: 2221612 - RNA, 19 nt, Homo sapiens
  misc_RNA (1)...(19): siRNA sense strand
caugaaaacuuuagaucca

SEQ ID NO: 2221613 - RNA, 19 nt, Homo sapiens
  misc_RNA (1)...(19): siRNA sense strand
uaaccaagucugauccaaa

SEQ ID NO: 2221614 - RNA, 19 nt, Homo sapiens
  misc_RNA (1)...(19): siRNA sense strand
aaauugugggccugaguaa

SEQ ID NO: 2221615 - RNA, 19 nt, Homo sapiens
  misc_RNA (1)...(19): siRNA sense strand
cgaugugaaucagaagaaa

SEQ ID NO: 2221616 - RNA, 19 nt, Homo sapiens
  misc_RNA (1)...(19): siRNA sense strand
aaucagaagaaaaggaaga

SEQ ID NO: 2221617 - RNA, 19 nt, Homo sapiens
  misc_RNA (1)...(19): siRNA sense strand
uaugaugaguggaacagaa

SEQ ID NO: 2221618 - RNA, 19 nt, Homo sapiens
  misc_RNA (1)...(19): siRNA sense strand
gcuguggccuauuggguau

SEQ ID NO: 2221619 - RNA, 19 nt, Homo sapiens
  misc_RNA (1)...(19): siRNA sense strand
gaaaagugguggagguuac

SEQ ID NO: 2221620 - RNA, 19 nt, Homo sapiens
  misc_RNA (1)...(19): siRNA sense strand
uuaauugccuuuugggaaa

SEQ ID NO: 2221621 - RNA, 19 nt, Homo sapiens
  misc_RNA (1)...(19): siRNA sense strand
ggagaaagugacagagcua

SEQ ID NO: 2221622 - RNA, 19 nt, Homo sapiens
  misc_RNA (1)...(19): siRNA sense strand
gguaaaugguugcaggcua

SEQ ID NO: 2221623 - RNA, 19 nt, Homo sapiens
  misc_RNA (1)...(19): siRNA sense strand
gcacacaauggauggguaa

SEQ ID NO: 2221624 - RNA, 19 nt, Homo sapiens
  misc_RNA (1)...(19): siRNA sense strand
uggcaaaauugaagaagua

SEQ ID NO: 2221625 - RNA, 19 nt, Homo sapiens
  misc_RNA (1)...(19): siRNA sense strand
ugacaaugcauuagacaau

SEQ ID NO: 2221626 - RNA, 19 nt, Homo sapiens
  misc_RNA (1)...(19): siRNA sense strand
gguuaaaugagaucacaaa

SEQ ID NO: 2221627 - RNA, 19 nt, Homo sapiens
  misc_RNA (1)...(19): siRNA sense strand
caagaaaauaggcgaguaa

SEQ ID NO: 2221628 - RNA, 19 nt, Homo sapiens
  misc_RNA (1)...(19): siRNA sense strand
ugauguugcagaagggaaa

SEQ ID NO: 2221629 - RNA, 19 nt, Homo sapiens
  misc_RNA (1)...(19): siRNA sense strand
agcuagaacuauugagaga

SEQ ID NO: 2221630 - RNA, 19 nt, Homo sapiens
  misc_RNA (1)...(19): siRNA sense strand
acacgaaaccuuauaggaa

SEQ ID NO: 2221631 - RNA, 19 nt, Homo sapiens
  misc_RNA (1)...(19): siRNA sense strand
gcccaacuuuacagggaaa

SEQ ID NO: 2221632 - RNA, 19 nt, Homo sapiens
  misc_RNA (1)...(19): siRNA sense strand
acaugaaggacgaagguuu

SEQ ID NO: 2221633 - RNA, 19 nt, Homo sapiens
  misc_RNA (1)...(19): siRNA sense strand
cugcaggaguugaugaaga

SEQ ID NO: 2221634 - RNA, 19 nt, Homo sapiens
  misc_RNA (1)...(19): siRNA sense strand
gaagugaagaucuggacaa

SEQ ID NO: 2221635 - RNA, 19 nt, Homo sapiens
  misc_RNA (1)...(19): siRNA sense strand
ccuuaaauaugcaggucuu

SEQ ID NO: 2221636 - RNA, 19 nt, Homo sapiens
  misc_RNA (1)...(19): siRNA sense strand
ggaauaaaccagaggacug

SEQ ID NO: 2221637 - RNA, 19 nt, Homo sapiens
  misc_RNA (1)...(19): siRNA sense strand
ggauaaaaugggagaaagu

SEQ ID NO: 2221638 - RNA, 19 nt, Homo sapiens
  misc_RNA (1)...(19): siRNA sense strand
gcauggaagcagaugucaa

SEQ ID NO: 2221639 - RNA, 19 nt, Homo sapiens
  misc_RNA (1)...(19): siRNA sense strand
ugaugaagaaacaggauuu

SEQ ID NO: 2221640 - RNA, 19 nt, Homo sapiens
  misc_RNA (1)...(19): siRNA sense strand
agauaugaacauugcacua

SEQ ID NO: 2221641 - RNA, 19 nt, Homo sapiens
  misc_RNA (1)...(19): siRNA sense strand
uaaauuacgcuaugggaau

SEQ ID NO: 2221642 - RNA, 19 nt, Homo sapiens
  misc_RNA (1)...(19): siRNA sense strand
uaacuuuggcugagcuaaa

SEQ ID NO: 2221643 - RNA, 19 nt, Homo sapiens
  misc_RNA (1)...(19): siRNA sense strand
aggaguugaugaagaaaca

SEQ ID NO: 2221644 - RNA, 19 nt, Homo sapiens
  misc_RNA (1)...(19): siRNA sense strand
uggaaguacaagaggcuau

SEQ ID NO: 2221645 - RNA, 19 nt, Homo sapiens
  misc_RNA (1)...(19): siRNA sense strand
agacauaguggcaguaaca

SEQ ID NO: 2221646 - RNA, 19 nt, Homo sapiens
  misc_RNA (1)...(19): siRNA sense strand
ucuacugggugaagggauu

SEQ ID NO: 2221647 - RNA, 19 nt, Homo sapiens
  misc_RNA (1)...(19): siRNA sense strand
agaacugaccaaugagaau

SEQ ID NO: 2221648 - RNA, 19 nt, Homo sapiens
  misc_RNA (1)...(19): siRNA sense strand
agaaagugacagagcuaga

SEQ ID NO: 2221649 - RNA, 19 nt, Homo sapiens
  misc_RNA (1)...(19): siRNA sense strand
ggcauacaguuccgagaaa

SEQ ID NO: 2221650 - RNA, 19 nt, Homo sapiens
  misc_RNA (1)...(19): siRNA sense strand
caacuuauuuccagggagu

SEQ ID NO: 2221651 - RNA, 19 nt, Homo sapiens
  misc_RNA (1)...(19): siRNA sense strand
gggaguacgucuugauaac

SEQ ID NO: 2221652 - RNA, 19 nt, Homo sapiens
  misc_RNA (1)...(19): siRNA sense strand
ggcaaugagugcauauaau

SEQ ID NO: 2221653 - RNA, 19 nt, Homo sapiens
  misc_RNA (1)...(19): siRNA sense strand
uuaccgauauggaggagaa

SEQ ID NO: 2221654 - RNA, 19 nt, Homo sapiens
  misc_RNA (1)...(19): siRNA sense strand
guacaagaggcuaugauga

SEQ ID NO: 2221655 - RNA, 19 nt, Homo sapiens
  misc_RNA (1)...(19): siRNA sense strand
gagagaaacacgaaaccuu

SEQ ID NO: 2221656 - RNA, 19 nt, Homo sapiens
  misc_RNA (1)...(19): siRNA sense strand
guuugaagucauacaggaa

SEQ ID NO: 2221657 - RNA, 19 nt, Homo sapiens
  misc_RNA (1)...(19): siRNA sense strand
cuguaaacuuaaucugcaa

SEQ ID NO: 2221658 - RNA, 19 nt, Homo sapiens
  misc_RNA (1)...(19): siRNA sense strand
auggauggguaaugggaga

SEQ ID NO: 2221659 - RNA, 19 nt, Homo sapiens
  misc_RNA (1)...(19): siRNA sense strand
cugaaauaacugcaacuua

SEQ ID NO: 2221660 - RNA, 19 nt, Homo sapiens
  misc_RNA (1)...(19): siRNA sense strand
ggaagaugguggagggugc

SEQ ID NO: 2221661 - RNA, 19 nt, Homo sapiens
  misc_RNA (1)...(19): siRNA sense strand
cgaaaucaucugacacaau

SEQ ID NO: 2221662 - RNA, 19 nt, Homo sapiens
  misc_RNA (1)...(19): siRNA sense strand
cuuuaaaucuggcagccua

SEQ ID NO: 2221663 - RNA, 19 nt, Homo sapiens
  misc_RNA (1)...(19): siRNA sense strand
agagcuagaaacagaggaa

SEQ ID NO: 2221664 - RNA, 19 nt, Homo sapiens
  misc_RNA (1)...(19): siRNA sense strand
cuguggaauuuaugacaau

SEQ ID NO: 2221665 - RNA, 19 nt, Homo sapiens
  misc_RNA (1)...(19): siRNA sense strand
cuuuagauccagaugauau

SEQ ID NO: 2221666 - RNA, 19 nt, Homo sapiens
  misc_RNA (1)...(19): siRNA sense strand
ccugaguggcuguggccua

SEQ ID NO: 2221667 - RNA, 19 nt, Homo sapiens
  misc_RNA (1)...(19): siRNA sense strand
cagaagggaaauacaaaga

SEQ ID NO: 2221668 - RNA, 19 nt, Homo sapiens
  misc_RNA (1)...(19): siRNA sense strand
agaacuauugagagaaaca

SEQ ID NO: 2221669 - RNA, 19 nt, Homo sapiens
  misc_RNA (1)...(19): siRNA sense strand
ccgaugugaaucagaagaa

SEQ ID NO: 2221670 - RNA, 19 nt, Homo sapiens
  misc_RNA (1)...(19): siRNA sense strand
caaacguggcauauacaaa

SEQ ID NO: 2221671 - RNA, 19 nt, Homo sapiens
  misc_RNA (1)...(19): siRNA sense strand
uuggacagcuaguggaaaa

SEQ ID NO: 2221672 - RNA, 19 nt, Homo sapiens
  misc_RNA (1)...(19): siRNA sense strand
ucuugaagcuagaacuauu

SEQ ID NO: 2221673 - RNA, 19 nt, Homo sapiens
  misc_RNA (1)...(19): siRNA sense strand
gguucacaaacguggcaua

SEQ ID NO: 2221674 - RNA, 19 nt, Homo sapiens
  misc_RNA (1)...(19): siRNA sense strand
caaucauacugcugcuaau

SEQ ID NO: 2221675 - RNA, 19 nt, Homo sapiens
  misc_RNA (1)...(19): siRNA sense strand
caugaaaacuuuagaucca

SEQ ID NO: 2221676 - RNA, 19 nt, Homo sapiens
  misc_RNA (1)...(19): siRNA sense strand
uaaccaagucugauccaaa

SEQ ID NO: 2221677 - RNA, 19 nt, Homo sapiens
  misc_RNA (1)...(19): siRNA sense strand
aaauugugggccugaguaa

SEQ ID NO: 2221678 - RNA, 19 nt, Homo sapiens
  misc_RNA (1)...(19): siRNA sense strand
cgaugugaaucagaagaaa

SEQ ID NO: 2221679 - RNA, 19 nt, Homo sapiens
  misc_RNA (1)...(19): siRNA sense strand
aaucagaagaaaaggaaga

SEQ ID NO: 2221680 - RNA, 19 nt, Homo sapiens
  misc_RNA (1)...(19): siRNA sense strand
uaugaugaguggaacagaa

SEQ ID NO: 2221681 - RNA, 19 nt, Homo sapiens
  misc_RNA (1)...(19): siRNA sense strand
gcuguggccuauuggguau

SEQ ID NO: 2221682 - RNA, 19 nt, Homo sapiens
  misc_RNA (1)...(19): siRNA sense strand
gaaaagugguggagguuac

SEQ ID NO: 2221683 - RNA, 19 nt, Homo sapiens
  misc_RNA (1)...(19): siRNA sense strand
uuaauugccuuuugggaaa

SEQ ID NO: 2221684 - RNA, 19 nt, Homo sapiens
  misc_RNA (1)...(19): siRNA sense strand
ggagaaagugacagagcua

SEQ ID NO: 2221685 - RNA, 19 nt, Homo sapiens
  misc_RNA (1)...(19): siRNA sense strand
gguaaaugguugcaggcua

SEQ ID NO: 2221686 - RNA, 19 nt, Homo sapiens
  misc_RNA (1)...(19): siRNA sense strand
gcacacaauggauggguaa

SEQ ID NO: 2221687 - RNA, 19 nt, Homo sapiens
  misc_RNA (1)...(19): siRNA sense strand
uggcaaaauugaagaagua

SEQ ID NO: 2221688 - RNA, 19 nt, Homo sapiens
  misc_RNA (1)...(19): siRNA sense strand
ugacaaugcauuagacaau

SEQ ID NO: 2221689 - RNA, 19 nt, Homo sapiens
  misc_RNA (1)...(19): siRNA sense strand
gguuaaaugagaucacaaa

SEQ ID NO: 2221690 - RNA, 19 nt, Homo sapiens
  misc_RNA (1)...(19): siRNA sense strand
caagaaaauaggcgaguaa

SEQ ID NO: 2221691 - RNA, 19 nt, Homo sapiens
  misc_RNA (1)...(19): siRNA sense strand
ugauguugcagaagggaaa

SEQ ID NO: 2221692 - RNA, 19 nt, Homo sapiens
  misc_RNA (1)...(19): siRNA sense strand
agcuagaacuauugagaga

SEQ ID NO: 2221693 - RNA, 19 nt, Homo sapiens
  misc_RNA (1)...(19): siRNA sense strand
acacgaaaccuuauaggaa

SEQ ID NO: 2221694 - RNA, 19 nt, Homo sapiens
  misc_RNA (1)...(19): siRNA sense strand
gcccaacuuuacagggaaa

SEQ ID NO: 2221695 - RNA, 19 nt, Homo sapiens
  misc_RNA (1)...(19): siRNA sense strand
acaugaaggacgaagguuu

SEQ ID NO: 2221696 - RNA, 19 nt, Homo sapiens
  misc_RNA (1)...(19): siRNA sense strand
cugcaggaguugaugaaga

SEQ ID NO: 2221697 - RNA, 19 nt, Homo sapiens
  misc_RNA (1)...(19): siRNA sense strand
gaagugaagaucuggacaa

SEQ ID NO: 2221698 - RNA, 19 nt, Homo sapiens
  misc_RNA (1)...(19): siRNA sense strand
ccuuaaauaugcaggucuu

SEQ ID NO: 2221699 - RNA, 19 nt, Homo sapiens
  misc_RNA (1)...(19): siRNA sense strand
ggaauaaaccagaggacug

SEQ ID NO: 2221700 - RNA, 19 nt, Homo sapiens
  misc_RNA (1)...(19): siRNA sense strand
ggauaaaaugggagaaagu

SEQ ID NO: 2221701 - RNA, 19 nt, Homo sapiens
  misc_RNA (1)...(19): siRNA sense strand
gcauggaagcagaugucaa

SEQ ID NO: 2221702 - RNA, 19 nt, Homo sapiens
  misc_RNA (1)...(19): siRNA sense strand
ggaaaauccaacagaaaga

SEQ ID NO: 2221703 - RNA, 19 nt, Homo sapiens
  misc_RNA (1)...(19): siRNA sense strand
ugaugaagaaacaggauuu

SEQ ID NO: 2221704 - RNA, 19 nt, Homo sapiens
  misc_RNA (1)...(19): siRNA sense strand
agauaugaacauugcacua

SEQ ID NO: 2221705 - RNA, 19 nt, Homo sapiens
  misc_RNA (1)...(19): siRNA sense strand
uaaauuacgcuaugggaau

SEQ ID NO: 2221706 - RNA, 19 nt, Homo sapiens
  misc_RNA (1)...(19): siRNA sense strand
uaacuuuggcugagcuaaa

SEQ ID NO: 2221707 - RNA, 19 nt, Homo sapiens
  misc_RNA (1)...(19): siRNA sense strand
aggaguugaugaagaaaca

SEQ ID NO: 2221708 - RNA, 19 nt, Homo sapiens
  misc_RNA (1)...(19): siRNA sense strand
uggaaguacaagaggcuau

SEQ ID NO: 2221709 - RNA, 19 nt, Homo sapiens
  misc_RNA (1)...(19): siRNA sense strand
agacauaguggcaguaaca

SEQ ID NO: 2221710 - RNA, 19 nt, Homo sapiens
  misc_RNA (1)...(19): siRNA sense strand
ucuacugggugaagggauu

SEQ ID NO: 2221711 - RNA, 19 nt, Homo sapiens
  misc_RNA (1)...(19): siRNA sense strand
agaacugaccaaugagaau

SEQ ID NO: 2221712 - RNA, 19 nt, Homo sapiens
  misc_RNA (1)...(19): siRNA sense strand
agaaagugacagagcuaga

SEQ ID NO: 2221713 - RNA, 19 nt, Homo sapiens
  misc_RNA (1)...(19): siRNA sense strand
ggcauacaguuccgagaaa

SEQ ID NO: 2221714 - RNA, 19 nt, Homo sapiens
  misc_RNA (1)...(19): siRNA sense strand
caacuuauuuccagggagu

SEQ ID NO: 2221715 - RNA, 19 nt, Homo sapiens
  misc_RNA (1)...(19): siRNA sense strand
gggaguacgucuugauaac

SEQ ID NO: 2221716 - RNA, 19 nt, Homo sapiens
  misc_RNA (1)...(19): siRNA sense strand
ggcaaugagugcauauaau

SEQ ID NO: 2221717 - RNA, 19 nt, Homo sapiens
  misc_RNA (1)...(19): siRNA sense strand
uuaccgauauggaggagaa

SEQ ID NO: 2221718 - RNA, 19 nt, Homo sapiens
  misc_RNA (1)...(19): siRNA sense strand
guacaagaggcuaugauga

SEQ ID NO: 2221719 - RNA, 19 nt, Homo sapiens
  misc_RNA (1)...(19): siRNA sense strand
gagagaaacacgaaaccuu

SEQ ID NO: 2221720 - RNA, 19 nt, Homo sapiens
  misc_RNA (1)...(19): siRNA sense strand
guuugaagucauacaggaa

SEQ ID NO: 2221721 - RNA, 19 nt, Homo sapiens
  misc_RNA (1)...(19): siRNA sense strand
cuguaaacuuaaucugcaa

SEQ ID NO: 2221722 - RNA, 19 nt, Homo sapiens
  misc_RNA (1)...(19): siRNA sense strand
auggauggguaaugggaga

SEQ ID NO: 2221723 - RNA, 19 nt, Homo sapiens
  misc_RNA (1)...(19): siRNA sense strand
cugaaauaacugcaacuua

SEQ ID NO: 2221724 - RNA, 19 nt, Homo sapiens
  misc_RNA (1)...(19): siRNA sense strand
ggaagaugguggagggugc

SEQ ID NO: 2221725 - RNA, 19 nt, Homo sapiens
  misc_RNA (1)...(19): siRNA sense strand
cgaaaucaucugacacaau

SEQ ID NO: 2221726 - RNA, 19 nt, Homo sapiens
  misc_RNA (1)...(19): siRNA sense strand
cuuuaaaucuggcagccua

SEQ ID NO: 2221727 - RNA, 19 nt, Homo sapiens
  misc_RNA (1)...(19): siRNA sense strand
ugggaaaauccaacagaaa

SEQ ID NO: 2221728 - RNA, 19 nt, Homo sapiens
  misc_RNA (1)...(19): siRNA sense strand
agagcuagaaacagaggaa

SEQ ID NO: 2221729 - RNA, 19 nt, Homo sapiens
  misc_RNA (1)...(19): siRNA sense strand
cuguggaauuuaugacaau

SEQ ID NO: 2221730 - RNA, 19 nt, Homo sapiens
  misc_RNA (1)...(19): siRNA sense strand
cuuuagauccagaugauau

SEQ ID NO: 2221731 - RNA, 19 nt, Homo sapiens
  misc_RNA (1)...(19): siRNA sense strand
ccugaguggcuguggccua

SEQ ID NO: 2221732 - RNA, 19 nt, Homo sapiens
  misc_RNA (1)...(19): siRNA sense strand
cagaagggaaauacaaaga

SEQ ID NO: 2221733 - RNA, 19 nt, Homo sapiens
  misc_RNA (1)...(19): siRNA sense strand
agaacuauugagagaaaca

SEQ ID NO: 2221734 - RNA, 19 nt, Homo sapiens
  misc_RNA (1)...(19): siRNA sense strand
ccgaugugaaucagaagaa

SEQ ID NO: 2221735 - RNA, 19 nt, Homo sapiens
  misc_RNA (1)...(19): siRNA sense strand
caaacguggcauauacaaa

SEQ ID NO: 2221736 - RNA, 19 nt, Homo sapiens
  misc_RNA (1)...(19): siRNA sense strand
uuggacagcuaguggaaaa

SEQ ID NO: 2221737 - RNA, 19 nt, Homo sapiens
  misc_RNA (1)...(19): siRNA sense strand
ucuugaagcuagaacuauu

SEQ ID NO: 2221738 - RNA, 19 nt, Homo sapiens
  misc_RNA (1)...(19): siRNA sense strand
gguucacaaacguggcaua

SEQ ID NO: 2221739 - RNA, 19 nt, Homo sapiens
  misc_RNA (1)...(19): siRNA sense strand
caaucauacugcugcuaau

SEQ ID NO: 2221740 - RNA, 19 nt, Homo sapiens
  misc_RNA (1)...(19): siRNA sense strand
caugaaaacuuuagaucca

SEQ ID NO: 2221741 - RNA, 19 nt, Homo sapiens
  misc_RNA (1)...(19): siRNA sense strand
uaaccaagucugauccaaa

SEQ ID NO: 2221742 - RNA, 19 nt, Homo sapiens
  misc_RNA (1)...(19): siRNA sense strand
aaauugugggccugaguaa

SEQ ID NO: 2221743 - RNA, 19 nt, Homo sapiens
  misc_RNA (1)...(19): siRNA sense strand
cgaugugaaucagaagaaa

SEQ ID NO: 2221744 - RNA, 19 nt, Homo sapiens
  misc_RNA (1)...(19): siRNA sense strand
aaucagaagaaaaggaaga

SEQ ID NO: 2221745 - RNA, 19 nt, Homo sapiens
  misc_RNA (1)...(19): siRNA sense strand
uaugaugaguggaacagaa

SEQ ID NO: 2221746 - RNA, 19 nt, Homo sapiens
  misc_RNA (1)...(19): siRNA sense strand
gcuguggccuauuggguau

SEQ ID NO: 2221747 - RNA, 19 nt, Homo sapiens
  misc_RNA (1)...(19): siRNA sense strand
ggagaaagugacagagcua

SEQ ID NO: 2221748 - RNA, 19 nt, Homo sapiens
  misc_RNA (1)...(19): siRNA sense strand
gguaaaugguugcaggcua

SEQ ID NO: 2221749 - RNA, 19 nt, Homo sapiens
  misc_RNA (1)...(19): siRNA sense strand
gcacacaauggauggguaa

SEQ ID NO: 2221750 - RNA, 19 nt, Homo sapiens
  misc_RNA (1)...(19): siRNA sense strand
uggcaaaauugaagaagua

SEQ ID NO: 2221751 - RNA, 19 nt, Homo sapiens
  misc_RNA (1)...(19): siRNA sense strand
ugacaaugcauuagacaau

SEQ ID NO: 2221752 - RNA, 19 nt, Homo sapiens
  misc_RNA (1)...(19): siRNA sense strand
gguuaaaugagaucacaaa

SEQ ID NO: 2221753 - RNA, 19 nt, Homo sapiens
  misc_RNA (1)...(19): siRNA sense strand
caagaaaauaggcgaguaa

SEQ ID NO: 2221754 - RNA, 19 nt, Homo sapiens
  misc_RNA (1)...(19): siRNA sense strand
ugauguugcagaagggaaa

SEQ ID NO: 2221755 - RNA, 19 nt, Homo sapiens
  misc_RNA (1)...(19): siRNA sense strand
agcuagaacuauugagaga

SEQ ID NO: 2221756 - RNA, 19 nt, Homo sapiens
  misc_RNA (1)...(19): siRNA sense strand
acacgaaaccuuauaggaa

SEQ ID NO: 2221757 - RNA, 19 nt, Homo sapiens
  misc_RNA (1)...(19): siRNA sense strand
gcccaacuuuacagggaaa

SEQ ID NO: 2221758 - RNA, 19 nt, Homo sapiens
  misc_RNA (1)...(19): siRNA sense strand
acaugaaggacgaagguuu

SEQ ID NO: 2221759 - RNA, 19 nt, Homo sapiens
  misc_RNA (1)...(19): siRNA sense strand
cugcaggaguugaugaaga

SEQ ID NO: 2221760 - RNA, 19 nt, Homo sapiens
  misc_RNA (1)...(19): siRNA sense strand
gaagugaagaucuggacaa

SEQ ID NO: 2221761 - RNA, 19 nt, Homo sapiens
  misc_RNA (1)...(19): siRNA sense strand
ccuuaaauaugcaggucuu

SEQ ID NO: 2221762 - RNA, 19 nt, Homo sapiens
  misc_RNA (1)...(19): siRNA sense strand
ggaauaaaccagaggacug

SEQ ID NO: 2221763 - RNA, 19 nt, Homo sapiens
  misc_RNA (1)...(19): siRNA sense strand
ggauaaaaugggagaaagu

SEQ ID NO: 2221764 - RNA, 19 nt, Homo sapiens
  misc_RNA (1)...(19): siRNA sense strand
gcauggaagcagaugucaa

SEQ ID NO: 2221765 - RNA, 19 nt, Homo sapiens
  misc_RNA (1)...(19): siRNA sense strand
ggaaaauccaacagaaaga

SEQ ID NO: 2221766 - RNA, 19 nt, Homo sapiens
  misc_RNA (1)...(19): siRNA sense strand
ugaugaagaaacaggauuu

SEQ ID NO: 2221767 - RNA, 19 nt, Homo sapiens
  misc_RNA (1)...(19): siRNA sense strand
agauaugaacauugcacua

SEQ ID NO: 2221768 - RNA, 19 nt, Homo sapiens
  misc_RNA (1)...(19): siRNA sense strand
uaaauuacgcuaugggaau

SEQ ID NO: 2221769 - RNA, 19 nt, Homo sapiens
  misc_RNA (1)...(19): siRNA sense strand
uaacuuuggcugagcuaaa

SEQ ID NO: 2221770 - RNA, 19 nt, Homo sapiens
  misc_RNA (1)...(19): siRNA sense strand
aggaguugaugaagaaaca

SEQ ID NO: 2221771 - RNA, 19 nt, Homo sapiens
  misc_RNA (1)...(19): siRNA sense strand
uggaaguacaagaggcuau

SEQ ID NO: 2221772 - RNA, 19 nt, Homo sapiens
  misc_RNA (1)...(19): siRNA sense strand
agacauaguggcaguaaca

SEQ ID NO: 2221773 - RNA, 19 nt, Homo sapiens
  misc_RNA (1)...(19): siRNA sense strand
ucuacugggugaagggauu

SEQ ID NO: 2221774 - RNA, 19 nt, Homo sapiens
  misc_RNA (1)...(19): siRNA sense strand
agaacugaccaaugagaau

SEQ ID NO: 2221775 - RNA, 19 nt, Homo sapiens
  misc_RNA (1)...(19): siRNA sense strand
agaaagugacagagcuaga

SEQ ID NO: 2221776 - RNA, 19 nt, Homo sapiens
  misc_RNA (1)...(19): siRNA sense strand
ggcauacaguuccgagaaa

SEQ ID NO: 2221777 - RNA, 19 nt, Homo sapiens
  misc_RNA (1)...(19): siRNA sense strand
caacuuauuuccagggagu

SEQ ID NO: 2221778 - RNA, 19 nt, Homo sapiens
  misc_RNA (1)...(19): siRNA sense strand
gggaguacgucuugauaac

SEQ ID NO: 2221779 - RNA, 19 nt, Homo sapiens
  misc_RNA (1)...(19): siRNA sense strand
ggcaaugagugcauauaau

SEQ ID NO: 2221780 - RNA, 19 nt, Homo sapiens
  misc_RNA (1)...(19): siRNA sense strand
uuaccgauauggaggagaa

SEQ ID NO: 2221781 - RNA, 19 nt, Homo sapiens
  misc_RNA (1)...(19): siRNA sense strand
guacaagaggcuaugauga

SEQ ID NO: 2221782 - RNA, 19 nt, Homo sapiens
  misc_RNA (1)...(19): siRNA sense strand
gagagaaacacgaaaccuu

SEQ ID NO: 2221783 - RNA, 19 nt, Homo sapiens
  misc_RNA (1)...(19): siRNA sense strand
guuugaagucauacaggaa

SEQ ID NO: 2221784 - RNA, 19 nt, Homo sapiens
  misc_RNA (1)...(19): siRNA sense strand
cuguaaacuuaaucugcaa

SEQ ID NO: 2221785 - RNA, 19 nt, Homo sapiens
  misc_RNA (1)...(19): siRNA sense strand
auggauggguaaugggaga

SEQ ID NO: 2221786 - RNA, 19 nt, Homo sapiens
  misc_RNA (1)...(19): siRNA sense strand
cugaaauaacugcaacuua

SEQ ID NO: 2221787 - RNA, 19 nt, Homo sapiens
  misc_RNA (1)...(19): siRNA sense strand
ggaagaugguggagggugc

SEQ ID NO: 2221788 - RNA, 19 nt, Homo sapiens
  misc_RNA (1)...(19): siRNA sense strand
cgaaaucaucugacacaau

SEQ ID NO: 2221789 - RNA, 19 nt, Homo sapiens
  misc_RNA (1)...(19): siRNA sense strand
cuuuaaaucuggcagccua

SEQ ID NO: 2221790 - RNA, 19 nt, Homo sapiens
  misc_RNA (1)...(19): siRNA sense strand
ugggaaaauccaacagaaa

SEQ ID NO: 2221791 - RNA, 19 nt, Homo sapiens
  misc_RNA (1)...(19): siRNA sense strand
agagcuagaaacagaggaa

SEQ ID NO: 2221792 - RNA, 19 nt, Homo sapiens
  misc_RNA (1)...(19): siRNA sense strand
cuguggaauuuaugacaau

SEQ ID NO: 2221793 - RNA, 19 nt, Homo sapiens
  misc_RNA (1)...(19): siRNA sense strand
cuuuagauccagaugauau

SEQ ID NO: 2221794 - RNA, 19 nt, Homo sapiens
  misc_RNA (1)...(19): siRNA sense strand
ccugaguggcuguggccua

SEQ ID NO: 2221795 - RNA, 19 nt, Homo sapiens
  misc_RNA (1)...(19): siRNA sense strand
cagaagggaaauacaaaga

SEQ ID NO: 2221796 - RNA, 19 nt, Homo sapiens
  misc_RNA (1)...(19): siRNA sense strand
agaacuauugagagaaaca

SEQ ID NO: 2221797 - RNA, 19 nt, Homo sapiens
  misc_RNA (1)...(19): siRNA sense strand
ccgaugugaaucagaagaa

SEQ ID NO: 2221798 - RNA, 19 nt, Homo sapiens
  misc_RNA (1)...(19): siRNA sense strand
caaacguggcauauacaaa

SEQ ID NO: 2221799 - RNA, 19 nt, Homo sapiens
  misc_RNA (1)...(19): siRNA sense strand
uuggacagcuaguggaaaa

SEQ ID NO: 2221800 - RNA, 19 nt, Homo sapiens
  misc_RNA (1)...(19): siRNA sense strand
ucuugaagcuagaacuauu

SEQ ID NO: 2221801 - RNA, 19 nt, Homo sapiens
  misc_RNA (1)...(19): siRNA sense strand
gguucacaaacguggcaua

SEQ ID NO: 2221802 - RNA, 19 nt, Homo sapiens
  misc_RNA (1)...(19): siRNA sense strand
caaucauacugcugcuaau

SEQ ID NO: 2221803 - RNA, 19 nt, Homo sapiens
  misc_RNA (1)...(19): siRNA sense strand
caugaaaacuuuagaucca

SEQ ID NO: 2221804 - RNA, 19 nt, Homo sapiens
  misc_RNA (1)...(19): siRNA sense strand
uaaccaagucugauccaaa

SEQ ID NO: 2221805 - RNA, 19 nt, Homo sapiens
  misc_RNA (1)...(19): siRNA sense strand
aaauugugggccugaguaa

SEQ ID NO: 2221806 - RNA, 19 nt, Homo sapiens
  misc_RNA (1)...(19): siRNA sense strand
cgaugugaaucagaagaaa

SEQ ID NO: 2221807 - RNA, 19 nt, Homo sapiens
  misc_RNA (1)...(19): siRNA sense strand
aaucagaagaaaaggaaga

SEQ ID NO: 2221808 - RNA, 19 nt, Homo sapiens
  misc_RNA (1)...(19): siRNA sense strand
uaugaugaguggaacagaa

SEQ ID NO: 2221809 - RNA, 19 nt, Homo sapiens
  misc_RNA (1)...(19): siRNA sense strand
gcuguggccuauuggguau

SEQ ID NO: 2221810 - RNA, 19 nt, Homo sapiens
  misc_RNA (1)...(19): siRNA sense strand
uggacaagguggagggucu

SEQ ID NO: 2221811 - RNA, 19 nt, Homo sapiens
  misc_RNA (1)...(19): siRNA sense strand
ccacacagcugacaggcua

SEQ ID NO: 2221812 - RNA, 19 nt, Homo sapiens
  misc_RNA (1)...(19): siRNA sense strand
uggcaugcacagugagcua

SEQ ID NO: 2221813 - RNA, 19 nt, Homo sapiens
  misc_RNA (1)...(19): siRNA sense strand
cugacaggcuacaggcaau

SEQ ID NO: 2221814 - RNA, 19 nt, Homo sapiens
  misc_RNA (1)...(19): siRNA sense strand
aagggaagaugaagggcuu

SEQ ID NO: 2221815 - RNA, 19 nt, Homo sapiens
  misc_RNA (1)...(19): siRNA sense strand
uugaagcggaugagagaga

SEQ ID NO: 2221816 - RNA, 19 nt, Homo sapiens
  misc_RNA (1)...(19): siRNA sense strand
caggacaacuucucgguga

SEQ ID NO: 2221817 - RNA, 19 nt, Homo sapiens
  misc_RNA (1)...(19): siRNA sense strand
ucaacuggaugaagaaacu

SEQ ID NO: 2221818 - RNA, 19 nt, Homo sapiens
  misc_RNA (1)...(19): siRNA sense strand
gcugacaggcuacaggcaa

SEQ ID NO: 2221819 - RNA, 19 nt, Homo sapiens
  misc_RNA (1)...(19): siRNA sense strand
aggaguucuggguggacaa

SEQ ID NO: 2221820 - RNA, 19 nt, Homo sapiens
  misc_RNA (1)...(19): siRNA sense strand
guguaugaucaaagcgcca

SEQ ID NO: 2221821 - RNA, 19 nt, Homo sapiens
  misc_RNA (1)...(19): siRNA sense strand
cuguacagccugagagaga

SEQ ID NO: 2221822 - RNA, 19 nt, Homo sapiens
  misc_RNA (1)...(19): siRNA sense strand
gguccaugagcaaggauau

SEQ ID NO: 2221823 - RNA, 19 nt, Homo sapiens
  misc_RNA (1)...(19): siRNA sense strand
ggguccaugagcaaggaua

SEQ ID NO: 2221824 - RNA, 19 nt, Homo sapiens
  misc_RNA (1)...(19): siRNA sense strand
ugaucggguccaugagcaa

SEQ ID NO: 2221825 - RNA, 19 nt, Homo sapiens
  misc_RNA (1)...(19): siRNA sense strand
acuucgacauugagaucau

SEQ ID NO: 2221826 - RNA, 19 nt, Homo sapiens
  misc_RNA (1)...(19): siRNA sense strand
augauaugaugcuggaaau

SEQ ID NO: 2221827 - RNA, 19 nt, Homo sapiens
  misc_RNA (1)...(19): siRNA sense strand
gcucacuagcucaaagcaa

SEQ ID NO: 2221828 - RNA, 19 nt, Homo sapiens
  misc_RNA (1)...(19): siRNA sense strand
cugacgagcgcaaagcaaa

SEQ ID NO: 2221829 - RNA, 19 nt, Homo sapiens
  misc_RNA (1)...(19): siRNA sense strand
gcugacgagcgcaaagcaa

SEQ ID NO: 2221830 - RNA, 19 nt, Homo sapiens
  misc_RNA (1)...(19): siRNA sense strand
agugaacacaccaggauga

SEQ ID NO: 2221831 - RNA, 19 nt, Homo sapiens
  misc_RNA (1)...(19): siRNA sense strand
gcucaaagcaaacgcacgu

SEQ ID NO: 2221832 - RNA, 19 nt, Homo sapiens
  misc_RNA (1)...(19): siRNA sense strand
gagaagaguuugagcgacg

SEQ ID NO: 2221833 - RNA, 19 nt, Homo sapiens
  misc_RNA (1)...(19): siRNA sense strand
gcauugugcgcaaggucaa

SEQ ID NO: 2221834 - RNA, 19 nt, Homo sapiens
  misc_RNA (1)...(19): siRNA sense strand
aggagaagaguuugagcga

SEQ ID NO: 2221835 - RNA, 19 nt, Homo sapiens
  misc_RNA (1)...(19): siRNA sense strand
gggaggugcagcaaggaga

SEQ ID NO: 2221836 - RNA, 19 nt, Homo sapiens
  misc_RNA (1)...(19): siRNA sense strand
cuaugagaaacguggcauu

SEQ ID NO: 2221837 - RNA, 19 nt, Homo sapiens
  misc_RNA (1)...(19): siRNA sense strand
uggagacaguguuggacau

SEQ ID NO: 2221838 - RNA, 19 nt, Homo sapiens
  misc_RNA (1)...(19): siRNA sense strand
cuugaaacguggagagacc

SEQ ID NO: 2221839 - RNA, 19 nt, Homo sapiens
  misc_RNA (1)...(19): siRNA sense strand
acgacaaugaggagaccau

SEQ ID NO: 2221840 - RNA, 19 nt, Homo sapiens
  misc_RNA (1)...(19): siRNA sense strand
ccaugguggccaaagucaa

SEQ ID NO: 2221841 - RNA, 19 nt, Homo sapiens
  misc_RNA (1)...(19): siRNA sense strand
gugaagagcuccugcgcuu

SEQ ID NO: 2221842 - RNA, 19 nt, Homo sapiens
  misc_RNA (1)...(19): siRNA sense strand
caacaaaggcuggaggaga

SEQ ID NO: 2221843 - RNA, 19 nt, Homo sapiens
  misc_RNA (1)...(19): siRNA sense strand
uggaagauuuuguggagaa

SEQ ID NO: 2221844 - RNA, 19 nt, Homo sapiens
  misc_RNA (1)...(19): siRNA sense strand
caggaugggaagagcaaga

SEQ ID NO: 2221845 - RNA, 19 nt, Homo sapiens
  misc_RNA (1)...(19): siRNA sense strand
uggagaagaaacaggauca

SEQ ID NO: 2221846 - RNA, 19 nt, Homo sapiens
  misc_RNA (1)...(19): siRNA sense strand
ccccagaaguccaggaaga

SEQ ID NO: 2221847 - RNA, 19 nt, Homo sapiens
  misc_RNA (1)...(19): siRNA sense strand
gcaucuaugugcaggccau

SEQ ID NO: 2221848 - RNA, 19 nt, Homo sapiens
  misc_RNA (1)...(19): siRNA sense strand
agaucauggagaagaaaca

SEQ ID NO: 2221849 - RNA, 19 nt, Homo sapiens
  misc_RNA (1)...(19): siRNA sense strand
cuuccaugauccaagguau

SEQ ID NO: 2221850 - RNA, 19 nt, Homo sapiens
  misc_RNA (1)...(19): siRNA sense strand
cggaacuccaggaugggaa

SEQ ID NO: 2221851 - RNA, 19 nt, Homo sapiens
  misc_RNA (1)...(19): siRNA sense strand
ccucaaaggauguguccgu

SEQ ID NO: 2221852 - RNA, 19 nt, Homo sapiens
  misc_RNA (1)...(19): siRNA sense strand
auguggagcuugagcagga

SEQ ID NO: 2221853 - RNA, 19 nt, Homo sapiens
  misc_RNA (1)...(19): siRNA sense strand
caggaagaugugaaggcuu

SEQ ID NO: 2221854 - RNA, 19 nt, Homo sapiens
  misc_RNA (1)...(19): siRNA sense strand
caucuugggcgaagggcca

SEQ ID NO: 2221855 - RNA, 19 nt, Homo sapiens
  misc_RNA (1)...(19): siRNA sense strand
ggacaagaucauggagaag

SEQ ID NO: 2221856 - RNA, 19 nt, Homo sapiens
  misc_RNA (1)...(19): siRNA sense strand
uggcaaggccuuuggcugu

SEQ ID NO: 2221857 - RNA, 19 nt, Homo sapiens
  misc_RNA (1)...(19): siRNA sense strand
ucaagggagaggagggcca

SEQ ID NO: 2221858 - RNA, 19 nt, Homo sapiens
  misc_RNA (1)...(19): siRNA sense strand
gguuuaaagauuugggaga

SEQ ID NO: 2221859 - RNA, 19 nt, Homo sapiens
  misc_RNA (1)...(19): siRNA sense strand
ccaaagaguuuaaugcuga

SEQ ID NO: 2221860 - RNA, 19 nt, Homo sapiens
  misc_RNA (1)...(19): siRNA sense strand
ugaaauugccagaagacau

SEQ ID NO: 2221861 - RNA, 19 nt, Homo sapiens
  misc_RNA (1)...(19): siRNA sense strand
cugcauugccgaaguggaa

SEQ ID NO: 2221862 - RNA, 19 nt, Homo sapiens
  misc_RNA (1)...(19): siRNA sense strand
aaacacaagcccaaggcaa

SEQ ID NO: 2221863 - RNA, 19 nt, Homo sapiens
  misc_RNA (1)...(19): siRNA sense strand
uggaagucgaugaaacaua

SEQ ID NO: 2221864 - RNA, 19 nt, Homo sapiens
  misc_RNA (1)...(19): siRNA sense strand
gccaaguauaucugugaaa

SEQ ID NO: 2221865 - RNA, 19 nt, Homo sapiens
  misc_RNA (1)...(19): siRNA sense strand
aagaaugcccugugcagaa

SEQ ID NO: 2221866 - RNA, 19 nt, Homo sapiens
  misc_RNA (1)...(19): siRNA sense strand
accaaaugcugcacagaau

SEQ ID NO: 2221867 - RNA, 19 nt, Homo sapiens
  misc_RNA (1)...(19): siRNA sense strand
cgaugaacuucgggaugaa

SEQ ID NO: 2221868 - RNA, 19 nt, Homo sapiens
  misc_RNA (1)...(19): siRNA sense strand
ucgugaaaccuauggugaa

SEQ ID NO: 2221869 - RNA, 19 nt, Homo sapiens
  misc_RNA (1)...(19): siRNA sense strand
uuuccaaguuagugacaga

SEQ ID NO: 2221870 - RNA, 19 nt, Homo sapiens
  misc_RNA (1)...(19): siRNA sense strand
ucaugaaugcuaugccaaa

SEQ ID NO: 2221871 - RNA, 19 nt, Homo sapiens
  misc_RNA (1)...(19): siRNA sense strand
aguuauguguguugcauga

SEQ ID NO: 2221872 - RNA, 19 nt, Homo sapiens
  misc_RNA (1)...(19): siRNA sense strand
ggaaaagugggcagcaaau

SEQ ID NO: 2221873 - RNA, 19 nt, Homo sapiens
  misc_RNA (1)...(19): siRNA sense strand
gcuaaaagguauaaagcug

SEQ ID NO: 2221874 - RNA, 19 nt, Homo sapiens
  misc_RNA (1)...(19): siRNA sense strand
augccaaaguguucgauga

SEQ ID NO: 2221875 - RNA, 19 nt, Homo sapiens
  misc_RNA (1)...(19): siRNA sense strand
cugccugccuguugccaaa

SEQ ID NO: 2221876 - RNA, 19 nt, Homo sapiens
  misc_RNA (1)...(19): siRNA sense strand
uaaacauccugaagcaaaa

SEQ ID NO: 2221877 - RNA, 19 nt, Homo sapiens
  misc_RNA (1)...(19): siRNA sense strand
caacaaaagagcaacugaa

SEQ ID NO: 2221878 - RNA, 19 nt, Homo sapiens
  misc_RNA (1)...(19): siRNA sense strand
uaaagauuugggagaagaa

SEQ ID NO: 2221879 - RNA, 19 nt, Homo sapiens
  misc_RNA (1)...(19): siRNA sense strand
aggaaaagugggcagcaaa

SEQ ID NO: 2221880 - RNA, 19 nt, Homo sapiens
  misc_RNA (1)...(19): siRNA sense strand
uuguaaacauccugaagca

SEQ ID NO: 2221881 - RNA, 19 nt, Homo sapiens
  misc_RNA (1)...(19): siRNA sense strand
gugaaugaaguaacugaau

SEQ ID NO: 2221882 - RNA, 19 nt, Homo sapiens
  misc_RNA (1)...(19): siRNA sense strand
agaaggagagacaaaucaa

SEQ ID NO: 2221883 - RNA, 19 nt, Homo sapiens
  misc_RNA (1)...(19): siRNA sense strand
gagccagagauuucccaaa

SEQ ID NO: 2221884 - RNA, 19 nt, Homo sapiens
  misc_RNA (1)...(19): siRNA sense strand
aaaacaagaaccugagaga

SEQ ID NO: 2221885 - RNA, 19 nt, Homo sapiens
  misc_RNA (1)...(19): siRNA sense strand
uuucaaagcaugggcagua

SEQ ID NO: 2221886 - RNA, 19 nt, Homo sapiens
  misc_RNA (1)...(19): siRNA sense strand
ucuggaagucgaugaaaca

SEQ ID NO: 2221887 - RNA, 19 nt, Homo sapiens
  misc_RNA (1)...(19): siRNA sense strand
aggagagacaaaucaagaa

SEQ ID NO: 2221888 - RNA, 19 nt, Homo sapiens
  misc_RNA (1)...(19): siRNA sense strand
auacguucccaaagaguuu

SEQ ID NO: 2221889 - RNA, 19 nt, Homo sapiens
  misc_RNA (1)...(19): siRNA sense strand
gcaucgacguggaaggcaa

SEQ ID NO: 2221890 - RNA, 19 nt, Homo sapiens
  misc_RNA (1)...(19): siRNA sense strand
aggaggagcuggugagcga

SEQ ID NO: 2221891 - RNA, 19 nt, Homo sapiens
  misc_RNA (1)...(19): siRNA sense strand
acgagauguuccagguauu

SEQ ID NO: 2221892 - RNA, 19 nt, Homo sapiens
  misc_RNA (1)...(19): siRNA sense strand
cggacucaguggaggacau

SEQ ID NO: 2221893 - RNA, 19 nt, Homo sapiens
  misc_RNA (1)...(19): siRNA sense strand
ugacggagcuggcuggcua

SEQ ID NO: 2221894 - RNA, 19 nt, Homo sapiens
  misc_RNA (1)...(19): siRNA sense strand
uggaaaagaaggaggagga

SEQ ID NO: 2221895 - RNA, 19 nt, Homo sapiens
  misc_RNA (1)...(19): siRNA sense strand
cguacaaggaggugacgga

SEQ ID NO: 2221896 - RNA, 19 nt, Homo sapiens
  misc_RNA (1)...(19): siRNA sense strand
guggcgagaagcagagaau

SEQ ID NO: 2221897 - RNA, 19 nt, Homo sapiens
  misc_RNA (1)...(19): siRNA sense strand
ggaucaugucgucguacaa

SEQ ID NO: 2221898 - RNA, 19 nt, Homo sapiens
  misc_RNA (1)...(19): siRNA sense strand
ggaucaucugcgagaacau

SEQ ID NO: 2221899 - RNA, 19 nt, Homo sapiens
  misc_RNA (1)...(19): siRNA sense strand
ccuacuaccgggucagcaa

SEQ ID NO: 2221900 - RNA, 19 nt, Homo sapiens
  misc_RNA (1)...(19): siRNA sense strand
uggccaacucggaggagau

SEQ ID NO: 2221901 - RNA, 19 nt, Homo sapiens
  misc_RNA (1)...(19): siRNA sense strand
aggugguggauguggaaca

SEQ ID NO: 2221902 - RNA, 19 nt, Homo sapiens
  misc_RNA (1)...(19): siRNA sense strand
auacaugaauuguggccaa

SEQ ID NO: 2221903 - RNA, 19 nt, Homo sapiens
  misc_RNA (1)...(19): siRNA sense strand
ucuugaacugggagggaaa

SEQ ID NO: 2221904 - RNA, 19 nt, Homo sapiens
  misc_RNA (1)...(19): siRNA sense strand
ccuucugaacugagugaaa

SEQ ID NO: 2221905 - RNA, 19 nt, Homo sapiens
  misc_RNA (1)...(19): siRNA sense strand
gcuugaaggacaaaagaua

SEQ ID NO: 2221906 - RNA, 19 nt, Homo sapiens
  misc_RNA (1)...(19): siRNA sense strand
acggaugauugaugagaca

SEQ ID NO: 2221907 - RNA, 19 nt, Homo sapiens
  misc_RNA (1)...(19): siRNA sense strand
acgcauaaccuggggaaaa

SEQ ID NO: 2221908 - RNA, 19 nt, Homo sapiens
  misc_RNA (1)...(19): siRNA sense strand
ugggaguggugcugauaau

SEQ ID NO: 2221909 - RNA, 19 nt, Homo sapiens
  misc_RNA (1)...(19): siRNA sense strand
aaggaaacagugaaggaau

SEQ ID NO: 2221910 - RNA, 19 nt, Homo sapiens
  misc_RNA (1)...(19): siRNA sense strand
gagccaucgcugcaggaaa

SEQ ID NO: 2221911 - RNA, 19 nt, Homo sapiens
  misc_RNA (1)...(19): siRNA sense strand
aggugaugcaagaagaaau

SEQ ID NO: 2221912 - RNA, 19 nt, Homo sapiens
  misc_RNA (1)...(19): siRNA sense strand
uccaauagugccugugaaa

SEQ ID NO: 2221913 - RNA, 19 nt, Homo sapiens
  misc_RNA (1)...(19): siRNA sense strand
ugauaaagauugugaccug

SEQ ID NO: 2221914 - RNA, 19 nt, Homo sapiens
  misc_RNA (1)...(19): siRNA sense strand
uguuauuaauggugguguu

SEQ ID NO: 2221915 - RNA, 19 nt, Homo sapiens
  misc_RNA (1)...(19): siRNA sense strand
ucgcauaaccauaagcuca

SEQ ID NO: 2221916 - RNA, 19 nt, Homo sapiens
  misc_RNA (1)...(19): siRNA sense strand
uugucaaggcagaauauua

SEQ ID NO: 2221917 - RNA, 19 nt, Homo sapiens
  misc_RNA (1)...(19): siRNA sense strand
aaguuugcuugaaggacaa

SEQ ID NO: 2221918 - RNA, 19 nt, Homo sapiens
  misc_RNA (1)...(19): siRNA sense strand
agagagaaggugcuaacaa

SEQ ID NO: 2221919 - RNA, 19 nt, Homo sapiens
  misc_RNA (1)...(19): siRNA sense strand
uggcaaagcuucucccuca

SEQ ID NO: 2221920 - RNA, 19 nt, Homo sapiens
  misc_RNA (1)...(19): siRNA sense strand
uaaguuugcuugaaggaca

SEQ ID NO: 2221921 - RNA, 19 nt, Homo sapiens
  misc_RNA (1)...(19): siRNA sense strand
agggaaaaguccauguuau

SEQ ID NO: 2221922 - RNA, 19 nt, Homo sapiens
  misc_RNA (1)...(19): siRNA sense strand
aauucaauguguacaguca

SEQ ID NO: 2221923 - RNA, 19 nt, Homo sapiens
  misc_RNA (1)...(19): siRNA sense strand
aaacgguucaacaaagaaa

SEQ ID NO: 2221924 - RNA, 19 nt, Homo sapiens
  misc_RNA (1)...(19): siRNA sense strand
ugaaggaauuuuauggaga

SEQ ID NO: 2221925 - RNA, 19 nt, Homo sapiens
  misc_RNA (1)...(19): siRNA sense strand
ccugaauggguuacugcua

SEQ ID NO: 2221926 - RNA, 19 nt, Homo sapiens
  misc_RNA (1)...(19): siRNA sense strand
cuauauucucugugaagca

SEQ ID NO: 2221927 - RNA, 19 nt, Homo sapiens
  misc_RNA (1)...(19): siRNA sense strand
aagauuaaggaaacaguga

SEQ ID NO: 2221928 - RNA, 19 nt, Homo sapiens
  misc_RNA (1)...(19): siRNA sense strand
auguagaugaggccauaaa

SEQ ID NO: 2221929 - RNA, 19 nt, Homo sapiens
  misc_RNA (1)...(19): siRNA sense strand
gaaacacugcgguuggcaa

SEQ ID NO: 2221930 - RNA, 19 nt, Homo sapiens
  misc_RNA (1)...(19): siRNA sense strand
uggcaaaauugucauggaa

SEQ ID NO: 2221931 - RNA, 19 nt, Homo sapiens
  misc_RNA (1)...(19): siRNA sense strand
uuaaggaaacagugaagga

SEQ ID NO: 2221932 - RNA, 19 nt, Homo sapiens
  misc_RNA (1)...(19): siRNA sense strand
gaccugugcaagagugaau

SEQ ID NO: 2221933 - RNA, 19 nt, Homo sapiens
  misc_RNA (1)...(19): siRNA sense strand
cagaaauugcccagagcau

SEQ ID NO: 2221934 - RNA, 19 nt, Homo sapiens
  misc_RNA (1)...(19): siRNA sense strand
gggaaucaaguuagaccaa

SEQ ID NO: 2221935 - RNA, 19 nt, Homo sapiens
  misc_RNA (1)...(19): siRNA sense strand
agguaauuccugauggaga

SEQ ID NO: 2221936 - RNA, 19 nt, Homo sapiens
  misc_RNA (1)...(19): siRNA sense strand
uuguugaaccagagguaau

SEQ ID NO: 2221937 - RNA, 19 nt, Homo sapiens
  misc_RNA (1)...(19): siRNA sense strand
cugcaaacaaggaggcaac

SEQ ID NO: 2221938 - RNA, 19 nt, Homo sapiens
  misc_RNA (1)...(19): siRNA sense strand
aggcaacccaggaggcuuu

SEQ ID NO: 2221939 - RNA, 19 nt, Homo sapiens
  misc_RNA (1)...(19): siRNA sense strand
gguaauuccugauggagac

SEQ ID NO: 2221940 - RNA, 19 nt, Homo sapiens
  misc_RNA (1)...(19): siRNA sense strand
cuaccaaagcccuggaaac

SEQ ID NO: 2221941 - RNA, 19 nt, Homo sapiens
  misc_RNA (1)...(19): siRNA sense strand
cagaaggacagccagggaa

SEQ ID NO: 2221942 - RNA, 19 nt, Homo sapiens
  misc_RNA (1)...(19): siRNA sense strand
gcacccugcuaaagcccaa

SEQ ID NO: 2221943 - RNA, 19 nt, Homo sapiens
  misc_RNA (1)...(19): siRNA sense strand
aaugauauccggaggacaa

SEQ ID NO: 2221944 - RNA, 19 nt, Homo sapiens
  misc_RNA (1)...(19): siRNA sense strand
aaguaaaguuucugggcga

SEQ ID NO: 2221945 - RNA, 19 nt, Homo sapiens
  misc_RNA (1)...(19): siRNA sense strand
uguaggagcaagugagcua

SEQ ID NO: 2221946 - RNA, 19 nt, Homo sapiens
  misc_RNA (1)...(19): siRNA sense strand
acgagauggacgaguuaaa

SEQ ID NO: 2221947 - RNA, 19 nt, Homo sapiens
  misc_RNA (1)...(19): siRNA sense strand
agucaaagaugaaggaggu

SEQ ID NO: 2221948 - RNA, 19 nt, Homo sapiens
  misc_RNA (1)...(19): siRNA sense strand
gaacauugauggugaggcu

SEQ ID NO: 2221949 - RNA, 19 nt, Homo sapiens
  misc_RNA (1)...(19): siRNA sense strand
gcacaagucuucaagcuga

SEQ ID NO: 2221950 - RNA, 19 nt, Homo sapiens
  misc_RNA (1)...(19): siRNA sense strand
gugagaaauacaugcagaa

SEQ ID NO: 2221951 - RNA, 19 nt, Homo sapiens
  misc_RNA (1)...(19): siRNA sense strand
gaggacaaauguagcccaa

SEQ ID NO: 2221952 - RNA, 19 nt, Homo sapiens
  misc_RNA (1)...(19): siRNA sense strand
ucagcaaagaugagccuaa

SEQ ID NO: 2221953 - RNA, 19 nt, Homo sapiens
  misc_RNA (1)...(19): siRNA sense strand
ggguagcaaaugagagcuu

SEQ ID NO: 2221954 - RNA, 19 nt, Homo sapiens
  misc_RNA (1)...(19): siRNA sense strand
caggaguggacauuggaaa

SEQ ID NO: 2221955 - RNA, 19 nt, Homo sapiens
  misc_RNA (1)...(19): siRNA sense strand
caaacaucauggugcucaa

SEQ ID NO: 2221956 - RNA, 19 nt, Homo sapiens
  misc_RNA (1)...(19): siRNA sense strand
aggaaggcccugcuggaaa

SEQ ID NO: 2221957 - RNA, 19 nt, Homo sapiens
  misc_RNA (1)...(19): siRNA sense strand
acuaugcauacgugagaaa

SEQ ID NO: 2221958 - RNA, 19 nt, Homo sapiens
  misc_RNA (1)...(19): siRNA sense strand
uaugcauacgugagaaaua

SEQ ID NO: 2221959 - RNA, 19 nt, Homo sapiens
  misc_RNA (1)...(19): siRNA sense strand
cgugagaaauacaugcaga

SEQ ID NO: 2221960 - RNA, 19 nt, Homo sapiens
  misc_RNA (1)...(19): siRNA sense strand
gagaaaggaacgaggcaug

SEQ ID NO: 2221961 - RNA, 19 nt, Homo sapiens
  misc_RNA (1)...(19): siRNA sense strand
gguuacaguugaagauuuu

SEQ ID NO: 2221962 - RNA, 19 nt, Homo sapiens
  misc_RNA (1)...(19): siRNA sense strand
uccaaauacuugcggaaca

SEQ ID NO: 2221963 - RNA, 19 nt, Homo sapiens
  misc_RNA (1)...(19): siRNA sense strand
ccugaugaguggagcaaac

SEQ ID NO: 2221964 - RNA, 19 nt, Homo sapiens
  misc_RNA (1)...(19): siRNA sense strand
ggaugagaucuguccgauu

SEQ ID NO: 2221965 - RNA, 19 nt, Homo sapiens
  misc_RNA (1)...(19): siRNA sense strand
gucuauagcaccaaagaga

SEQ ID NO: 2221966 - RNA, 19 nt, Homo sapiens
  misc_RNA (1)...(19): siRNA sense strand
ggaaaugauauccggagga

SEQ ID NO: 2221967 - RNA, 19 nt, Homo sapiens
  misc_RNA (1)...(19): siRNA sense strand
gagaaauacaugcagaagu

SEQ ID NO: 2221968 - RNA, 19 nt, Homo sapiens
  misc_RNA (1)...(19): siRNA sense strand
cagcugaagagaaacaaau

SEQ ID NO: 2221969 - RNA, 19 nt, Homo sapiens
  misc_RNA (1)...(19): siRNA sense strand
cugaagagaaacaaauuga

SEQ ID NO: 2221970 - RNA, 19 nt, Homo sapiens
  misc_RNA (1)...(19): siRNA sense strand
aggaguggacauuggaaaa

SEQ ID NO: 2221971 - RNA, 19 nt, Homo sapiens
  misc_RNA (1)...(19): siRNA sense strand
gcugagggucuuaaaucaa

SEQ ID NO: 2221972 - RNA, 19 nt, Homo sapiens
  misc_RNA (1)...(19): siRNA sense strand
gcuuugacaguguggauga

SEQ ID NO: 2221973 - RNA, 19 nt, Homo sapiens
  misc_RNA (1)...(19): siRNA sense strand
augcagaagucguuucaga

SEQ ID NO: 2221974 - RNA, 19 nt, Homo sapiens
  misc_RNA (1)...(19): siRNA sense strand
ugauaucucucauggccua

SEQ ID NO: 2221975 - RNA, 19 nt, Homo sapiens
  misc_RNA (1)...(19): siRNA sense strand
cagaaagggcuaaugaucu

SEQ ID NO: 2221976 - RNA, 19 nt, Homo sapiens
  misc_RNA (1)...(19): siRNA sense strand
ccuuugauguggaugagau

SEQ ID NO: 2221977 - RNA, 19 nt, Homo sapiens
  misc_RNA (1)...(19): siRNA sense strand
cgucuauccuaaugaagca

SEQ ID NO: 2221978 - RNA, 19 nt, Homo sapiens
  misc_RNA (1)...(19): siRNA sense strand
gaguuaaaggagcugaaaa

SEQ ID NO: 2221979 - RNA, 19 nt, Homo sapiens
  misc_RNA (1)...(19): siRNA sense strand
ccuaaaaccccuuccaaau

SEQ ID NO: 2221980 - RNA, 19 nt, Homo sapiens
  misc_RNA (1)...(19): siRNA sense strand
cgguguaguuuacgucuau

SEQ ID NO: 2221981 - RNA, 19 nt, Homo sapiens
  misc_RNA (1)...(19): siRNA sense strand
gugucuuccucaagcauau

SEQ ID NO: 2221982 - RNA, 19 nt, Homo sapiens
  misc_RNA (1)...(19): siRNA sense strand
guaucgggcacuaugcaua

SEQ ID NO: 2221983 - RNA, 19 nt, Homo sapiens
  misc_RNA (1)...(19): siRNA sense strand
ccuccugguucgucugcaa

SEQ ID NO: 2221984 - RNA, 19 nt, Homo sapiens
  misc_RNA (1)...(19): siRNA sense strand
cagcauucaugauagcaga

SEQ ID NO: 2221985 - RNA, 19 nt, Homo sapiens
  misc_RNA (1)...(19): siRNA sense strand
cucaugaggagaaaguaaa

SEQ ID NO: 2221986 - RNA, 19 nt, Homo sapiens
  misc_RNA (1)...(19): siRNA sense strand
ccagcugaagagaaacaaa

SEQ ID NO: 2221987 - RNA, 19 nt, Homo sapiens
  misc_RNA (1)...(19): siRNA sense strand
ggaccuguuaagaccuaua

SEQ ID NO: 2221988 - RNA, 19 nt, Homo sapiens
  misc_RNA (1)...(19): siRNA sense strand
acaccuucuuagacgauau

SEQ ID NO: 2221989 - RNA, 19 nt, Homo sapiens
  misc_RNA (1)...(19): siRNA sense strand
ugugcgaaguggcaaggaa

SEQ ID NO: 2221990 - RNA, 19 nt, Homo sapiens
  misc_RNA (1)...(19): siRNA sense strand
ggacuaaaucagaugaaua

SEQ ID NO: 2221991 - RNA, 19 nt, Homo sapiens
  misc_RNA (1)...(19): siRNA sense strand
guaaauggaagcagagaaa

SEQ ID NO: 2221992 - RNA, 19 nt, Homo sapiens
  misc_RNA (1)...(19): siRNA sense strand
ugauaaugauggagaacua

SEQ ID NO: 2221993 - RNA, 19 nt, Homo sapiens
  misc_RNA (1)...(19): siRNA sense strand
ugaaaguggaggugggaua

SEQ ID NO: 2221994 - RNA, 19 nt, Homo sapiens
  misc_RNA (1)...(19): siRNA sense strand
ccagaaggcaauuggaaua

SEQ ID NO: 2221995 - RNA, 19 nt, Homo sapiens
  misc_RNA (1)...(19): siRNA sense strand
cagagaaaguacuggauau

SEQ ID NO: 2221996 - RNA, 19 nt, Homo sapiens
  misc_RNA (1)...(19): siRNA sense strand
cugaagaugaugaaaguaa

SEQ ID NO: 2221997 - RNA, 19 nt, Homo sapiens
  misc_RNA (1)...(19): siRNA sense strand
aggcaaauccuaagagaga

SEQ ID NO: 2221998 - RNA, 19 nt, Homo sapiens
  misc_RNA (1)...(19): siRNA sense strand
cuucaagacucaaggguga

SEQ ID NO: 2221999 - RNA, 19 nt, Homo sapiens
  misc_RNA (1)...(19): siRNA sense strand
gcaugaagaagaagagaga

SEQ ID NO: 2222000 - RNA, 19 nt, Homo sapiens
  misc_RNA (1)...(19): siRNA sense strand
ggaugauaaugauggagaa

SEQ ID NO: 2222001 - RNA, 19 nt, Homo sapiens
  misc_RNA (1)...(19): siRNA sense strand
gaauaugaagcaaggcaaa

SEQ ID NO: 2222002 - RNA, 19 nt, Homo sapiens
  misc_RNA (1)...(19): siRNA sense strand
ggugcaaauuccauaguaa

SEQ ID NO: 2222003 - RNA, 19 nt, Homo sapiens
  misc_RNA (1)...(19): siRNA sense strand
gugaaagcauugauggaau

SEQ ID NO: 2222004 - RNA, 19 nt, Homo sapiens
  misc_RNA (1)...(19): siRNA sense strand
cgaguaagcacuuggagaa

SEQ ID NO: 2222005 - RNA, 19 nt, Homo sapiens
  misc_RNA (1)...(19): siRNA sense strand
gcaaagacaaucaaggaau

SEQ ID NO: 2222006 - RNA, 19 nt, Homo sapiens
  misc_RNA (1)...(19): siRNA sense strand
agauaugaccagaaggcaa

SEQ ID NO: 2222007 - RNA, 19 nt, Homo sapiens
  misc_RNA (1)...(19): siRNA sense strand
ggucaaggagugggagaaa

SEQ ID NO: 2222008 - RNA, 19 nt, Homo sapiens
  misc_RNA (1)...(19): siRNA sense strand
ugacaauaaagcagaggaa

SEQ ID NO: 2222009 - RNA, 19 nt, Homo sapiens
  misc_RNA (1)...(19): siRNA sense strand
gagaaaaguacauuggaaa

SEQ ID NO: 2222010 - RNA, 19 nt, Homo sapiens
  misc_RNA (1)...(19): siRNA sense strand
agaaaugcacuuagaagaa

SEQ ID NO: 2222011 - RNA, 19 nt, Homo sapiens
  misc_RNA (1)...(19): siRNA sense strand
cagaaugaaagaugggcaa

SEQ ID NO: 2222012 - RNA, 19 nt, Homo sapiens
  misc_RNA (1)...(19): siRNA sense strand
ggaaaaugacaaugggaau

SEQ ID NO: 2222013 - RNA, 19 nt, Homo sapiens
  misc_RNA (1)...(19): siRNA sense strand
gcuaauaagacacaagcua

SEQ ID NO: 2222014 - RNA, 19 nt, Homo sapiens
  misc_RNA (1)...(19): siRNA sense strand
ggagaaaucaacauggcaa

SEQ ID NO: 2222015 - RNA, 19 nt, Homo sapiens
  misc_RNA (1)...(19): siRNA sense strand
agaaguuggaagugugaaa

SEQ ID NO: 2222016 - RNA, 19 nt, Homo sapiens
  misc_RNA (1)...(19): siRNA sense strand
cguaguaagcagagacaca

SEQ ID NO: 2222017 - RNA, 19 nt, Homo sapiens
  misc_RNA (1)...(19): siRNA sense strand
gugugacagaugagagaaa

SEQ ID NO: 2222018 - RNA, 19 nt, Homo sapiens
  misc_RNA (1)...(19): siRNA sense strand
aggaaguauugaagaugaa

SEQ ID NO: 2222019 - RNA, 19 nt, Homo sapiens
  misc_RNA (1)...(19): siRNA sense strand
caaaacaaaauguggguaa

SEQ ID NO: 2222020 - RNA, 19 nt, Homo sapiens
  misc_RNA (1)...(19): siRNA sense strand
acucuguauuguugggaaa

SEQ ID NO: 2222021 - RNA, 19 nt, Homo sapiens
  misc_RNA (1)...(19): siRNA sense strand
gagaaaugcacuuagaaga

SEQ ID NO: 2222022 - RNA, 19 nt, Homo sapiens
  misc_RNA (1)...(19): siRNA sense strand
agauagaaguuuggagaga

SEQ ID NO: 2222023 - RNA, 19 nt, Homo sapiens
  misc_RNA (1)...(19): siRNA sense strand
agauagagucagaggaagu

SEQ ID NO: 2222024 - RNA, 19 nt, Homo sapiens
  misc_RNA (1)...(19): siRNA sense strand
aggcaaauccaaacauuaa

SEQ ID NO: 2222025 - RNA, 19 nt, Homo sapiens
  misc_RNA (1)...(19): siRNA sense strand
gugaauaacaacacaaaga

SEQ ID NO: 2222026 - RNA, 19 nt, Homo sapiens
  misc_RNA (1)...(19): siRNA sense strand
gaagaagaagagagaccaa

SEQ ID NO: 2222027 - RNA, 19 nt, Homo sapiens
  misc_RNA (1)...(19): siRNA sense strand
aaguaaaccucaagcauca

SEQ ID NO: 2222028 - RNA, 19 nt, Homo sapiens
  misc_RNA (1)...(19): siRNA sense strand
uaauaaaggcccacgaauu

SEQ ID NO: 2222029 - RNA, 19 nt, Homo sapiens
  misc_RNA (1)...(19): siRNA sense strand
agaaggaguuagaggagga

SEQ ID NO: 2222030 - RNA, 19 nt, Homo sapiens
  misc_RNA (1)...(19): siRNA sense strand
auaaggaaucagaggcuaa

SEQ ID NO: 2222031 - RNA, 19 nt, Homo sapiens
  misc_RNA (1)...(19): siRNA sense strand
ugaaaguucuauaguggaa

SEQ ID NO: 2222032 - RNA, 19 nt, Homo sapiens
  misc_RNA (1)...(19): siRNA sense strand
acaaggaaguauugaagau

SEQ ID NO: 2222033 - RNA, 19 nt, Homo sapiens
  misc_RNA (1)...(19): siRNA sense strand
cagcaaagcgccaugauau

SEQ ID NO: 2222034 - RNA, 19 nt, Homo sapiens
  misc_RNA (1)...(19): siRNA sense strand
guaagcacuuggagaagaa

SEQ ID NO: 2222035 - RNA, 19 nt, Homo sapiens
  misc_RNA (1)...(19): siRNA sense strand
ggacaaaccaugccaccaa

SEQ ID NO: 2222036 - RNA, 19 nt, Homo sapiens
  misc_RNA (1)...(19): siRNA sense strand
ucaacuaaaucaaguggaa

SEQ ID NO: 2222037 - RNA, 19 nt, Homo sapiens
  misc_RNA (1)...(19): siRNA sense strand
ggaauaugaagcaaggcaa

SEQ ID NO: 2222038 - RNA, 19 nt, Homo sapiens
  misc_RNA (1)...(19): siRNA sense strand
caguaguagugaugguuau

SEQ ID NO: 2222039 - RNA, 19 nt, Homo sapiens
  misc_RNA (1)...(19): siRNA sense strand
cugaauuaagaaaggcaaa

SEQ ID NO: 2222040 - RNA, 19 nt, Homo sapiens
  misc_RNA (1)...(19): siRNA sense strand
cgacaagagcuagaagaua

SEQ ID NO: 2222041 - RNA, 19 nt, Homo sapiens
  misc_RNA (1)...(19): siRNA sense strand
cggaauuggucuaggcaac

SEQ ID NO: 2222042 - RNA, 19 nt, Homo sapiens
  misc_RNA (1)...(19): siRNA sense strand
gaaucagaggcuaaaguua

SEQ ID NO: 2222043 - RNA, 19 nt, Homo sapiens
  misc_RNA (1)...(19): siRNA sense strand
guauaaugauggaagacca

SEQ ID NO: 2222044 - RNA, 19 nt, Homo sapiens
  misc_RNA (1)...(19): siRNA sense strand
ucaucagaauccagugaaa

SEQ ID NO: 2222045 - RNA, 19 nt, Homo sapiens
  misc_RNA (1)...(19): siRNA sense strand
aagcagagacacaagcaaa

SEQ ID NO: 2222046 - RNA, 19 nt, Homo sapiens
  misc_RNA (1)...(19): siRNA sense strand
ucaaauaggacauguucua

SEQ ID NO: 2222047 - RNA, 19 nt, Homo sapiens
  misc_RNA (1)...(19): siRNA sense strand
uagugaugguuaugguaaa

SEQ ID NO: 2222048 - RNA, 19 nt, Homo sapiens
  misc_RNA (1)...(19): siRNA sense strand
gaagaaaauuggaggaauc

SEQ ID NO: 2222049 - RNA, 19 nt, Homo sapiens
  misc_RNA (1)...(19): siRNA sense strand
aagaagaggguuuguaaau

SEQ ID NO: 2222050 - RNA, 19 nt, Homo sapiens
  misc_RNA (1)...(19): siRNA sense strand
auagaaguuuggagagaga

SEQ ID NO: 2222051 - RNA, 19 nt, Homo sapiens
  misc_RNA (1)...(19): siRNA sense strand
agaacagcaugaagaagaa

SEQ ID NO: 2222052 - RNA, 19 nt, Homo sapiens
  misc_RNA (1)...(19): siRNA sense strand
ccaccaagcagaaguaaaa

SEQ ID NO: 2222053 - RNA, 19 nt, Homo sapiens
  misc_RNA (1)...(19): siRNA sense strand
gcaaaaggaacauggagaa

SEQ ID NO: 2222054 - RNA, 19 nt, Homo sapiens
  misc_RNA (1)...(19): siRNA sense strand
gauaaaaccaggacaaaau

SEQ ID NO: 2222055 - RNA, 19 nt, Homo sapiens
  misc_RNA (1)...(19): siRNA sense strand
agccaaugguucagaaaca

SEQ ID NO: 2222056 - RNA, 19 nt, Homo sapiens
  misc_RNA (1)...(19): siRNA sense strand
cugaagaagaacagcauga

SEQ ID NO: 2222057 - RNA, 19 nt, Homo sapiens
  misc_RNA (1)...(19): siRNA sense strand
uuggaaagcuauucaggaa

SEQ ID NO: 2222058 - RNA, 19 nt, Homo sapiens
  misc_RNA (1)...(19): siRNA sense strand
caacaguccaggaggugca

SEQ ID NO: 2222059 - RNA, 19 nt, Homo sapiens
  misc_RNA (1)...(19): siRNA sense strand
guguggguccugaggguca

SEQ ID NO: 2222060 - RNA, 19 nt, Homo sapiens
  misc_RNA (1)...(19): siRNA sense strand
caacaguccaggaggugca

SEQ ID NO: 2222061 - RNA, 19 nt, Homo sapiens
  misc_RNA (1)...(19): siRNA sense strand
guguggguccugaggguca

SEQ ID NO: 2222062 - RNA, 19 nt, Homo sapiens
  misc_RNA (1)...(19): siRNA sense strand
caacaguccaggaggugca

SEQ ID NO: 2222063 - RNA, 19 nt, Homo sapiens
  misc_RNA (1)...(19): siRNA sense strand
guguggguccugaggguca

SEQ ID NO: 2222064 - RNA, 19 nt, Homo sapiens
  misc_RNA (1)...(19): siRNA sense strand
gcucaaagacagcggcaga

SEQ ID NO: 2222065 - RNA, 19 nt, Homo sapiens
  misc_RNA (1)...(19): siRNA sense strand
uggaggaggugaaggccaa

SEQ ID NO: 2222066 - RNA, 19 nt, Homo sapiens
  misc_RNA (1)...(19): siRNA sense strand
aggccaaggugcagcccua

SEQ ID NO: 2222067 - RNA, 19 nt, Homo sapiens
  misc_RNA (1)...(19): siRNA sense strand
cuggagagcuucaagguca

SEQ ID NO: 2222068 - RNA, 19 nt, Homo sapiens
  misc_RNA (1)...(19): siRNA sense strand
gcaaggaucuggaggaggu

SEQ ID NO: 2222069 - RNA, 19 nt, Homo sapiens
  misc_RNA (1)...(19): siRNA sense strand
cuaagaagcucaacaccca

SEQ ID NO: 2222070 - RNA, 19 nt, Homo sapiens
  misc_RNA (1)...(19): siRNA sense strand
aggugaaggccaaggugca

SEQ ID NO: 2222071 - RNA, 19 nt, Homo sapiens
  misc_RNA (1)...(19): siRNA sense strand
agauggagcucuaccgcca

SEQ ID NO: 2222072 - RNA, 19 nt, Homo sapiens
  misc_RNA (1)...(19): siRNA sense strand
gagaaggaccugagggaca

SEQ ID NO: 2222073 - RNA, 19 nt, Homo sapiens
  misc_RNA (1)...(19): siRNA sense strand
cggagaaacugaaggagga

SEQ ID NO: 2222074 - RNA, 19 nt, Homo sapiens
  misc_RNA (1)...(19): siRNA sense strand
ccgacgagcucaaggccaa

SEQ ID NO: 2222075 - RNA, 19 nt, Homo sapiens
  misc_RNA (1)...(19): siRNA sense strand
agaagaagcuggugcccuu

SEQ ID NO: 2222076 - RNA, 19 nt, Homo sapiens
  misc_RNA (1)...(19): siRNA sense strand
uggccaaggacucggagaa

SEQ ID NO: 2222077 - RNA, 19 nt, Homo sapiens
  misc_RNA (1)...(19): siRNA sense strand
gagaaagagagccaggaca

SEQ ID NO: 2222078 - RNA, 19 nt, Homo sapiens
  misc_RNA (1)...(19): siRNA sense strand
gcucaggacacgcaggaga

SEQ ID NO: 2222079 - RNA, 19 nt, Homo sapiens
  misc_RNA (1)...(19): siRNA sense strand
ucaaggagaaagagagcca

SEQ ID NO: 2222080 - RNA, 19 nt, Homo sapiens
  misc_RNA (1)...(19): siRNA sense strand
gagagagugcugcgggaga

SEQ ID NO: 2222081 - RNA, 19 nt, Homo sapiens
  misc_RNA (1)...(19): siRNA sense strand
agaaacugaaggaggagau

SEQ ID NO: 2222082 - RNA, 19 nt, Homo sapiens
  misc_RNA (1)...(19): siRNA sense strand
ugaaggaggagauugggaa

SEQ ID NO: 2222083 - RNA, 19 nt, Homo sapiens
  misc_RNA (1)...(19): siRNA sense strand
uggagaaggaccugaggga

SEQ ID NO: 2222084 - RNA, 19 nt, Homo sapiens
  misc_RNA (1)...(19): siRNA sense strand
agaacguggaggagcucaa

SEQ ID NO: 2222085 - RNA, 19 nt, Homo sapiens
  misc_RNA (1)...(19): siRNA sense strand
aggagaagcucaaccacca

SEQ ID NO: 2222086 - RNA, 19 nt, Homo sapiens
  misc_RNA (1)...(19): siRNA sense strand
agaagaacgccgaggagcu

SEQ ID NO: 2222087 - RNA, 19 nt, Homo sapiens
  misc_RNA (1)...(19): siRNA sense strand
uggaaggccacuugagcuu

SEQ ID NO: 2222088 - RNA, 19 nt, Homo sapiens
  misc_RNA (1)...(19): siRNA sense strand
aggaacagcaucaggagca

SEQ ID NO: 2222089 - RNA, 19 nt, Homo sapiens
  misc_RNA (1)...(19): siRNA sense strand
acuugagcuuccuggagaa

SEQ ID NO: 2222090 - RNA, 19 nt, Homo sapiens
  misc_RNA (1)...(19): siRNA sense strand
gccaaugaggugagccaga

SEQ ID NO: 2222091 - RNA, 19 nt, Homo sapiens
  misc_RNA (1)...(19): siRNA sense strand
uggagcaacagcaggaaca

SEQ ID NO: 2222092 - RNA, 19 nt, Homo sapiens
  misc_RNA (1)...(19): siRNA sense strand
acacaaaggaagaaagaaa

SEQ ID NO: 2222093 - RNA, 19 nt, Homo sapiens
  misc_RNA (1)...(19): siRNA sense strand
ggauaugguaaauggaaua

SEQ ID NO: 2222094 - RNA, 19 nt, Homo sapiens
  misc_RNA (1)...(19): siRNA sense strand
agauagacuuccugaauaa

SEQ ID NO: 2222095 - RNA, 19 nt, Homo sapiens
  misc_RNA (1)...(19): siRNA sense strand
uggaaaacguacagagaaa

SEQ ID NO: 2222096 - RNA, 19 nt, Homo sapiens
  misc_RNA (1)...(19): siRNA sense strand
ggaaaagggucauggaaau

SEQ ID NO: 2222097 - RNA, 19 nt, Homo sapiens
  misc_RNA (1)...(19): siRNA sense strand
aggcugaacugguggcaaa

SEQ ID NO: 2222098 - RNA, 19 nt, Homo sapiens
  misc_RNA (1)...(19): siRNA sense strand
ggacauuccucuagcgaga

SEQ ID NO: 2222099 - RNA, 19 nt, Homo sapiens
  misc_RNA (1)...(19): siRNA sense strand
gaucaaaguuaauugggaa

SEQ ID NO: 2222100 - RNA, 19 nt, Homo sapiens
  misc_RNA (1)...(19): siRNA sense strand
ccacaaacaaugaagggaa

SEQ ID NO: 2222101 - RNA, 19 nt, Homo sapiens
  misc_RNA (1)...(19): siRNA sense strand
caguauaaguacaaccaaa

SEQ ID NO: 2222102 - RNA, 19 nt, Homo sapiens
  misc_RNA (1)...(19): siRNA sense strand
ccucagaguuaaugaugaa

SEQ ID NO: 2222103 - RNA, 19 nt, Homo sapiens
  misc_RNA (1)...(19): siRNA sense strand
ccagaagaucagauggaaa

SEQ ID NO: 2222104 - RNA, 19 nt, Homo sapiens
  misc_RNA (1)...(19): siRNA sense strand
gugcaaggaucuggagaaa

SEQ ID NO: 2222105 - RNA, 19 nt, Homo sapiens
  misc_RNA (1)...(19): siRNA sense strand
gcuuacaacacuaaagaua

SEQ ID NO: 2222106 - RNA, 19 nt, Homo sapiens
  misc_RNA (1)...(19): siRNA sense strand
ucucaaacccuaagauuaa

SEQ ID NO: 2222107 - RNA, 19 nt, Homo sapiens
  misc_RNA (1)...(19): siRNA sense strand
gcuuaguaauggagugauu

SEQ ID NO: 2222108 - RNA, 19 nt, Homo sapiens
  misc_RNA (1)...(19): siRNA sense strand
agcaagaacuuaauggaaa

SEQ ID NO: 2222109 - RNA, 19 nt, Homo sapiens
  misc_RNA (1)...(19): siRNA sense strand
caaaauauccagagagcua

SEQ ID NO: 2222110 - RNA, 19 nt, Homo sapiens
  misc_RNA (1)...(19): siRNA sense strand
ugaaagaagcucugaaaga

SEQ ID NO: 2222111 - RNA, 19 nt, Homo sapiens
  misc_RNA (1)...(19): siRNA sense strand
caauacaaguugaaggaga

SEQ ID NO: 2222112 - RNA, 19 nt, Homo sapiens
  misc_RNA (1)...(19): siRNA sense strand
agaugaaaccaaugacaaa

SEQ ID NO: 2222113 - RNA, 19 nt, Homo sapiens
  misc_RNA (1)...(19): siRNA sense strand
ccacgaaugucuacagcaa

SEQ ID NO: 2222114 - RNA, 19 nt, Homo sapiens
  misc_RNA (1)...(19): siRNA sense strand
ccagauaacaggaagauau

SEQ ID NO: 2222115 - RNA, 19 nt, Homo sapiens
  misc_RNA (1)...(19): siRNA sense strand
cccuaaaguaugagaacua

SEQ ID NO: 2222116 - RNA, 19 nt, Homo sapiens
  misc_RNA (1)...(19): siRNA sense strand
agaaugagcaagugaagaa

SEQ ID NO: 2222117 - RNA, 19 nt, Homo sapiens
  misc_RNA (1)...(19): siRNA sense strand
agccaaaguccaugaguua

SEQ ID NO: 2222118 - RNA, 19 nt, Homo sapiens
  misc_RNA (1)...(19): siRNA sense strand
gagugauugucaagauaaa

SEQ ID NO: 2222119 - RNA, 19 nt, Homo sapiens
  misc_RNA (1)...(19): siRNA sense strand
agaaauauccacugaaaga

SEQ ID NO: 2222120 - RNA, 19 nt, Homo sapiens
  misc_RNA (1)...(19): siRNA sense strand
ugaaagagguguauggcuu

SEQ ID NO: 2222121 - RNA, 19 nt, Homo sapiens
  misc_RNA (1)...(19): siRNA sense strand
cggagaacauacaagcaaa

SEQ ID NO: 2222122 - RNA, 19 nt, Homo sapiens
  misc_RNA (1)...(19): siRNA sense strand
caauguggcaacagaaaua

SEQ ID NO: 2222123 - RNA, 19 nt, Homo sapiens
  misc_RNA (1)...(19): siRNA sense strand
caucuuaggcacugacaaa

SEQ ID NO: 2222124 - RNA, 19 nt, Homo sapiens
  misc_RNA (1)...(19): siRNA sense strand
uauaagaagcugagaacuu

SEQ ID NO: 2222125 - RNA, 19 nt, Homo sapiens
  misc_RNA (1)...(19): siRNA sense strand
acucagaagaauuggauau

SEQ ID NO: 2222126 - RNA, 19 nt, Homo sapiens
  misc_RNA (1)...(19): siRNA sense strand
ccguacaguuccuagaaua

SEQ ID NO: 2222127 - RNA, 19 nt, Homo sapiens
  misc_RNA (1)...(19): siRNA sense strand
acauaugaccacaagaaua

SEQ ID NO: 2222128 - RNA, 19 nt, Homo sapiens
  misc_RNA (1)...(19): siRNA sense strand
guguaaaagcucaguauaa

SEQ ID NO: 2222129 - RNA, 19 nt, Homo sapiens
  misc_RNA (1)...(19): siRNA sense strand
guuuguaacucaagcagaa

SEQ ID NO: 2222130 - RNA, 19 nt, Homo sapiens
  misc_RNA (1)...(19): siRNA sense strand
ggaccuaccaagaguggaa

SEQ ID NO: 2222131 - RNA, 19 nt, Homo sapiens
  misc_RNA (1)...(19): siRNA sense strand
gcaccaauguagauaccaa

SEQ ID NO: 2222132 - RNA, 19 nt, Homo sapiens
  misc_RNA (1)...(19): siRNA sense strand
gugcagaauaugaagaaga

SEQ ID NO: 2222133 - RNA, 19 nt, Homo sapiens
  misc_RNA (1)...(19): siRNA sense strand
uggcaaauuugaaggacuu

SEQ ID NO: 2222134 - RNA, 19 nt, Homo sapiens
  misc_RNA (1)...(19): siRNA sense strand
gguaugaaguagaccaaca

SEQ ID NO: 2222135 - RNA, 19 nt, Homo sapiens
  misc_RNA (1)...(19): siRNA sense strand
uggaaaugcuauugaggga

SEQ ID NO: 2222136 - RNA, 19 nt, Homo sapiens
  misc_RNA (1)...(19): siRNA sense strand
cuaauuaccugauggaaca

SEQ ID NO: 2222137 - RNA, 19 nt, Homo sapiens
  misc_RNA (1)...(19): siRNA sense strand
agagaaaccugaagcacau

SEQ ID NO: 2222138 - RNA, 19 nt, Homo sapiens
  misc_RNA (1)...(19): siRNA sense strand
cagaagaucagauggaaaa

SEQ ID NO: 2222139 - RNA, 19 nt, Homo sapiens
  misc_RNA (1)...(19): siRNA sense strand
aaacaggcuugaaggaauu

SEQ ID NO: 2222140 - RNA, 19 nt, Homo sapiens
  misc_RNA (1)...(19): siRNA sense strand
acuaagaaccagaagauca

SEQ ID NO: 2222141 - RNA, 19 nt, Homo sapiens
  misc_RNA (1)...(19): siRNA sense strand
caacaagaucgcagacuuu

SEQ ID NO: 2222142 - RNA, 19 nt, Homo sapiens
  misc_RNA (1)...(19): siRNA sense strand
ccgggaaucugaugaggaa

SEQ ID NO: 2222143 - RNA, 19 nt, Homo sapiens
  misc_RNA (1)...(19): siRNA sense strand
gaaagaagcucugaaagaa

SEQ ID NO: 2222144 - RNA, 19 nt, Homo sapiens
  misc_RNA (1)...(19): siRNA sense strand
guaugaaagcauugguaga

SEQ ID NO: 2222145 - RNA, 19 nt, Homo sapiens
  misc_RNA (1)...(19): siRNA sense strand
agagaagauugcagagcuu

SEQ ID NO: 2222146 - RNA, 19 nt, Homo sapiens
  misc_RNA (1)...(19): siRNA sense strand
ccuacaacaaguuaagaua

SEQ ID NO: 2222147 - RNA, 19 nt, Homo sapiens
  misc_RNA (1)...(19): siRNA sense strand
agauuggcuuggaaggaaa

SEQ ID NO: 2222148 - RNA, 19 nt, Homo sapiens
  misc_RNA (1)...(19): siRNA sense strand
gggcagcuguauagcaaau

SEQ ID NO: 2222149 - RNA, 19 nt, Homo sapiens
  misc_RNA (1)...(19): siRNA sense strand
augaguuaaucgagaggua

SEQ ID NO: 2222150 - RNA, 19 nt, Homo sapiens
  misc_RNA (1)...(19): siRNA sense strand
ggauaaauuaguagaguug

SEQ ID NO: 2222151 - RNA, 19 nt, Homo sapiens
  misc_RNA (1)...(19): siRNA sense strand
ugaagaagauggcaaauuu

SEQ ID NO: 2222152 - RNA, 19 nt, Homo sapiens
  misc_RNA (1)...(19): siRNA sense strand
cuaauagacuccuggauca

SEQ ID NO: 2222153 - RNA, 19 nt, Homo sapiens
  misc_RNA (1)...(19): siRNA sense strand
agcaaacaccuaagaguaa

SEQ ID NO: 2222154 - RNA, 19 nt, Homo sapiens
  misc_RNA (1)...(19): siRNA sense strand
cagaagaagccaagcaagu

SEQ ID NO: 2222155 - RNA, 19 nt, Homo sapiens
  misc_RNA (1)...(19): siRNA sense strand
acuucuaacaagauggaua

SEQ ID NO: 2222156 - RNA, 19 nt, Homo sapiens
  misc_RNA (1)...(19): siRNA sense strand
cagauaaacuucaaagacu

SEQ ID NO: 2222157 - RNA, 19 nt, Homo sapiens
  misc_RNA (1)...(19): siRNA sense strand
acauuaaacagcugaaaga

SEQ ID NO: 2222158 - RNA, 19 nt, Homo sapiens
  misc_RNA (1)...(19): siRNA sense strand
aggauaugguaaauggaau

SEQ ID NO: 2222159 - RNA, 19 nt, Homo sapiens
  misc_RNA (1)...(19): siRNA sense strand
cagcaaacgaagcagguau

SEQ ID NO: 2222160 - RNA, 19 nt, Homo sapiens
  misc_RNA (1)...(19): siRNA sense strand
gguuauuggaacuuugaaa

SEQ ID NO: 2222161 - RNA, 19 nt, Homo sapiens
  misc_RNA (1)...(19): siRNA sense strand
cugaaagacuacuggagca

SEQ ID NO: 2222162 - RNA, 19 nt, Homo sapiens
  misc_RNA (1)...(19): siRNA sense strand
cuucagaggccgaggaugc

SEQ ID NO: 2222163 - RNA, 19 nt, Homo sapiens
  misc_RNA (1)...(19): siRNA sense strand
acaugaagcacgccaccaa

SEQ ID NO: 2222164 - RNA, 19 nt, Homo sapiens
  misc_RNA (1)...(19): siRNA sense strand
ugaaggaguugaaggccua

SEQ ID NO: 2222165 - RNA, 19 nt, Homo sapiens
  misc_RNA (1)...(19): siRNA sense strand
cagcagaccgaguggcaga

SEQ ID NO: 2222166 - RNA, 19 nt, Homo sapiens
  misc_RNA (1)...(19): siRNA sense strand
uggacgaggugaaggagca

SEQ ID NO: 2222167 - RNA, 19 nt, Homo sapiens
  misc_RNA (1)...(19): siRNA sense strand
uggaagacaugcagcgcca

SEQ ID NO: 2222168 - RNA, 19 nt, Homo sapiens
  misc_RNA (1)...(19): siRNA sense strand
agaccaugaaggaguugaa

SEQ ID NO: 2222169 - RNA, 19 nt, Homo sapiens
  misc_RNA (1)...(19): siRNA sense strand
cugagcaggugcaggagga

SEQ ID NO: 2222170 - RNA, 19 nt, Homo sapiens
  misc_RNA (1)...(19): siRNA sense strand
ugaaggagcagguggcgga

SEQ ID NO: 2222171 - RNA, 19 nt, Homo sapiens
  misc_RNA (1)...(19): siRNA sense strand
aggagagagaguaaagauu

SEQ ID NO: 2222172 - RNA, 19 nt, Homo sapiens
  misc_RNA (1)...(19): siRNA sense strand
uuacaaggauaaagccaca

SEQ ID NO: 2222173 - RNA, 19 nt, Homo sapiens
  misc_RNA (1)...(19): siRNA sense strand
cccgaggagggaugagaaa

SEQ ID NO: 2222174 - RNA, 19 nt, Homo sapiens
  misc_RNA (1)...(19): siRNA sense strand
cuuagaaaauggagccgua

SEQ ID NO: 2222175 - RNA, 19 nt, Homo sapiens
  misc_RNA (1)...(19): siRNA sense strand
cugcacgacacauggaaau

SEQ ID NO: 2222176 - RNA, 19 nt, Homo sapiens
  misc_RNA (1)...(19): siRNA sense strand
ccauguugcuauugcagga

SEQ ID NO: 2222177 - RNA, 19 nt, Homo sapiens
  misc_RNA (1)...(19): siRNA sense strand
auggaaugcuacaugguga

SEQ ID NO: 2222178 - RNA, 19 nt, Homo sapiens
  misc_RNA (1)...(19): siRNA sense strand
gguguaccaaggagagaga

SEQ ID NO: 2222179 - RNA, 19 nt, Homo sapiens
  misc_RNA (1)...(19): siRNA sense strand
ucgcuuaagggcagggaga

SEQ ID NO: 2222180 - RNA, 19 nt, Homo sapiens
  misc_RNA (1)...(19): siRNA sense strand
cgacuacaucgcaggccua

SEQ ID NO: 2222181 - RNA, 19 nt, Homo sapiens
  misc_RNA (1)...(19): siRNA sense strand
gggagaagcuggcaccugu

SEQ ID NO: 2222182 - RNA, 19 nt, Homo sapiens
  misc_RNA (1)...(19): siRNA sense strand
ucuacuaggaagaaagaaa

SEQ ID NO: 2222183 - RNA, 19 nt, Homo sapiens
  misc_RNA (1)...(19): siRNA sense strand
ggaagaaagaaaaggccaa

SEQ ID NO: 2222184 - RNA, 19 nt, Homo sapiens
  misc_RNA (1)...(19): siRNA sense strand
auccaaggucugugggaaa

SEQ ID NO: 2222185 - RNA, 19 nt, Homo sapiens
  misc_RNA (1)...(19): siRNA sense strand
acuuaaagaacaagagugu

SEQ ID NO: 2222186 - RNA, 19 nt, Homo sapiens
  misc_RNA (1)...(19): siRNA sense strand
guggaaacuugcauggaca

SEQ ID NO: 2222187 - RNA, 19 nt, Homo sapiens
  misc_RNA (1)...(19): siRNA sense strand
ggggaagacaccagaagaa

SEQ ID NO: 2222188 - RNA, 19 nt, Homo sapiens
  misc_RNA (1)...(19): siRNA sense strand
agggcuacucucaggauua

SEQ ID NO: 2222189 - RNA, 19 nt, Homo sapiens
  misc_RNA (1)...(19): siRNA sense strand
uuugaaaacucuaggcauu

SEQ ID NO: 2222190 - RNA, 19 nt, Homo sapiens
  misc_RNA (1)...(19): siRNA sense strand
uuggcaaggugauggaaga

SEQ ID NO: 2222191 - RNA, 19 nt, Homo sapiens
  misc_RNA (1)...(19): siRNA sense strand
cagcuaucuacuaggaaga

SEQ ID NO: 2222192 - RNA, 19 nt, Homo sapiens
  misc_RNA (1)...(19): siRNA sense strand
agaagaaguaacucgaaca

SEQ ID NO: 2222193 - RNA, 19 nt, Homo sapiens
  misc_RNA (1)...(19): siRNA sense strand
gagugugaugugaaggauu

SEQ ID NO: 2222194 - RNA, 19 nt, Homo sapiens
  misc_RNA (1)...(19): siRNA sense strand
agauauaauggaagugaac

SEQ ID NO: 2222195 - RNA, 19 nt, Homo sapiens
  misc_RNA (1)...(19): siRNA sense strand
agucaagaagaacggaaga

SEQ ID NO: 2222196 - RNA, 19 nt, Homo sapiens
  misc_RNA (1)...(19): siRNA sense strand
cuacuaggaagaaagaaaa

SEQ ID NO: 2222197 - RNA, 19 nt, Homo sapiens
  misc_RNA (1)...(19): siRNA sense strand
gggaaaagcaagcgagcag

SEQ ID NO: 2222198 - RNA, 19 nt, Homo sapiens
  misc_RNA (1)...(19): siRNA sense strand
cuggaaaguacaaggcuca

SEQ ID NO: 2222199 - RNA, 19 nt, Homo sapiens
  misc_RNA (1)...(19): siRNA sense strand
uugaagagacgcuggucau

SEQ ID NO: 2222200 - RNA, 19 nt, Homo sapiens
  misc_RNA (1)...(19): siRNA sense strand
uggaugaagcaguaggaaa

SEQ ID NO: 2222201 - RNA, 19 nt, Homo sapiens
  misc_RNA (1)...(19): siRNA sense strand
gaggaauacuugaagccau

SEQ ID NO: 2222202 - RNA, 19 nt, Homo sapiens
  misc_RNA (1)...(19): siRNA sense strand
ccuaaaagaagcagguuau

SEQ ID NO: 2222203 - RNA, 19 nt, Homo sapiens
  misc_RNA (1)...(19): siRNA sense strand
cgaagaaguugcaacagga

SEQ ID NO: 2222204 - RNA, 19 nt, Homo sapiens
  misc_RNA (1)...(19): siRNA sense strand
agcagaagggcgugaagaa

SEQ ID NO: 2222205 - RNA, 19 nt, Homo sapiens
  misc_RNA (1)...(19): siRNA sense strand
gcacaaagccucuggaugg

SEQ ID NO: 2222206 - RNA, 19 nt, Homo sapiens
  misc_RNA (1)...(19): siRNA sense strand
ggaagaaaauggagccugu

SEQ ID NO: 2222207 - RNA, 19 nt, Homo sapiens
  misc_RNA (1)...(19): siRNA sense strand
uggcgaagaaguugcaaca

SEQ ID NO: 2222208 - RNA, 19 nt, Homo sapiens
  misc_RNA (1)...(19): siRNA sense strand
ggaaaauggcaccugggaa

SEQ ID NO: 2222209 - RNA, 19 nt, Homo sapiens
  misc_RNA (1)...(19): siRNA sense strand
guacauuaauugacgcucu

SEQ ID NO: 2222210 - RNA, 19 nt, Homo sapiens
  misc_RNA (1)...(19): siRNA sense strand
ucuccuggguagugaagau

SEQ ID NO: 2222211 - RNA, 19 nt, Homo sapiens
  misc_RNA (1)...(19): siRNA sense strand
aagaaguugcaacaggaua

SEQ ID NO: 2222212 - RNA, 19 nt, Homo sapiens
  misc_RNA (1)...(19): siRNA sense strand
aguugcaacaggauauaaa

SEQ ID NO: 2222213 - RNA, 19 nt, Homo sapiens
  misc_RNA (1)...(19): siRNA sense strand
aaauggagccugugggaag

SEQ ID NO: 2222214 - RNA, 19 nt, Homo sapiens
  misc_RNA (1)...(19): siRNA sense strand
guacagguuuacagcacca

SEQ ID NO: 2222215 - RNA, 19 nt, Homo sapiens
  misc_RNA (1)...(19): siRNA sense strand
ucgagauggcgaagaaguu

SEQ ID NO: 2222216 - RNA, 19 nt, Homo sapiens
  misc_RNA (1)...(19): siRNA sense strand
acuugaagccauaugacuu

SEQ ID NO: 2222217 - RNA, 19 nt, Homo sapiens
  misc_RNA (1)...(19): siRNA sense strand
ugaagaaccgggagcucau

SEQ ID NO: 2222218 - RNA, 19 nt, Homo sapiens
  misc_RNA (1)...(19): siRNA sense strand
uggaugaagcaguaggaaa

SEQ ID NO: 2222219 - RNA, 19 nt, Homo sapiens
  misc_RNA (1)...(19): siRNA sense strand
gaggaauacuugaagccau

SEQ ID NO: 2222220 - RNA, 19 nt, Homo sapiens
  misc_RNA (1)...(19): siRNA sense strand
ccuaaaagaagcagguuau

SEQ ID NO: 2222221 - RNA, 19 nt, Homo sapiens
  misc_RNA (1)...(19): siRNA sense strand
cgaagaaguugcaacagga

SEQ ID NO: 2222222 - RNA, 19 nt, Homo sapiens
  misc_RNA (1)...(19): siRNA sense strand
agcagaagggcgugaagaa

SEQ ID NO: 2222223 - RNA, 19 nt, Homo sapiens
  misc_RNA (1)...(19): siRNA sense strand
gcacaaagccucuggaugg

SEQ ID NO: 2222224 - RNA, 19 nt, Homo sapiens
  misc_RNA (1)...(19): siRNA sense strand
ggaagaaaauggagccugu

SEQ ID NO: 2222225 - RNA, 19 nt, Homo sapiens
  misc_RNA (1)...(19): siRNA sense strand
uggcgaagaaguugcaaca

SEQ ID NO: 2222226 - RNA, 19 nt, Homo sapiens
  misc_RNA (1)...(19): siRNA sense strand
ggaaaauggcaccugggaa

SEQ ID NO: 2222227 - RNA, 19 nt, Homo sapiens
  misc_RNA (1)...(19): siRNA sense strand
guacauuaauugacgcucu

SEQ ID NO: 2222228 - RNA, 19 nt, Homo sapiens
  misc_RNA (1)...(19): siRNA sense strand
ucuccuggguagugaagau

SEQ ID NO: 2222229 - RNA, 19 nt, Homo sapiens
  misc_RNA (1)...(19): siRNA sense strand
aagaaguugcaacaggaua

SEQ ID NO: 2222230 - RNA, 19 nt, Homo sapiens
  misc_RNA (1)...(19): siRNA sense strand
aguugcaacaggauauaaa

SEQ ID NO: 2222231 - RNA, 19 nt, Homo sapiens
  misc_RNA (1)...(19): siRNA sense strand
aaauggagccugugggaag

SEQ ID NO: 2222232 - RNA, 19 nt, Homo sapiens
  misc_RNA (1)...(19): siRNA sense strand
guacagguuuacagcacca

SEQ ID NO: 2222233 - RNA, 19 nt, Homo sapiens
  misc_RNA (1)...(19): siRNA sense strand
ucgagauggcgaagaaguu

SEQ ID NO: 2222234 - RNA, 19 nt, Homo sapiens
  misc_RNA (1)...(19): siRNA sense strand
acuugaagccauaugacuu

SEQ ID NO: 2222235 - RNA, 19 nt, Homo sapiens
  misc_RNA (1)...(19): siRNA sense strand
ugaagaaccgggagcucau

SEQ ID NO: 2222236 - RNA, 19 nt, Homo sapiens
  misc_RNA (1)...(19): siRNA sense strand
gggcaugggaggaugggaa

SEQ ID NO: 2222237 - RNA, 19 nt, Homo sapiens
  misc_RNA (1)...(19): siRNA sense strand
cggcgguucccuagagaau

SEQ ID NO: 2222238 - RNA, 19 nt, Homo sapiens
  misc_RNA (1)...(19): siRNA sense strand
acguggaggguuugagcaa

SEQ ID NO: 2222239 - RNA, 19 nt, Homo sapiens
  misc_RNA (1)...(19): siRNA sense strand
gugucaaccuggaacaaaa

SEQ ID NO: 2222240 - RNA, 19 nt, Homo sapiens
  misc_RNA (1)...(19): siRNA sense strand
gcagauacccugugcgauc

SEQ ID NO: 2222241 - RNA, 19 nt, Homo sapiens
  misc_RNA (1)...(19): siRNA sense strand
acugaaagagaaaggcuau

SEQ ID NO: 2222242 - RNA, 19 nt, Homo sapiens
  misc_RNA (1)...(19): siRNA sense strand
ccaacaaaugagacaacuu

SEQ ID NO: 2222243 - RNA, 19 nt, Homo sapiens
  misc_RNA (1)...(19): siRNA sense strand
gggaagggcaugggaggau

SEQ ID NO: 2222244 - RNA, 19 nt, Homo sapiens
  misc_RNA (1)...(19): siRNA sense strand
gggcagauacccugugcga

SEQ ID NO: 2222245 - RNA, 19 nt, Homo sapiens
  misc_RNA (1)...(19): siRNA sense strand
ucaacgggacagaggaaca

SEQ ID NO: 2222246 - RNA, 19 nt, Homo sapiens
  misc_RNA (1)...(19): siRNA sense strand
ccaucagcuuccagcgaca

SEQ ID NO: 2222247 - RNA, 19 nt, Homo sapiens
  misc_RNA (1)...(19): siRNA sense strand
ccucuuaucacuauggaga

SEQ ID NO: 2222248 - RNA, 19 nt, Homo sapiens
  misc_RNA (1)...(19): siRNA sense strand
cagagugauugacggccaa

SEQ ID NO: 2222249 - RNA, 19 nt, Homo sapiens
  misc_RNA (1)...(19): siRNA sense strand
cagaggaacaauguggaaa

SEQ ID NO: 2222250 - RNA, 19 nt, Homo sapiens
  misc_RNA (1)...(19): siRNA sense strand
ucacacugguagcagggaa

SEQ ID NO: 2222251 - RNA, 19 nt, Homo sapiens
  misc_RNA (1)...(19): siRNA sense strand
ggaacaauguggaaagucc

SEQ ID NO: 2222252 - RNA, 19 nt, Homo sapiens
  misc_RNA (1)...(19): siRNA sense strand
agagaaaggcuaugccacu

SEQ ID NO: 2222253 - RNA, 19 nt, Homo sapiens
  misc_RNA (1)...(19): siRNA sense strand
acagaggaacaauguggaa

SEQ ID NO: 2222254 - RNA, 19 nt, Homo sapiens
  misc_RNA (1)...(19): siRNA sense strand
acagagugauugacggcca

SEQ ID NO: 2222255 - RNA, 19 nt, Homo sapiens
  misc_RNA (1)...(19): siRNA sense strand
ccuugaaaaucuuggcaaa

SEQ ID NO: 2222256 - RNA, 19 nt, Homo sapiens
  misc_RNA (1)...(19): siRNA sense strand
ucuuggaucaaaugagaaa

SEQ ID NO: 2222257 - RNA, 19 nt, Homo sapiens
  misc_RNA (1)...(19): siRNA sense strand
ggaaugagcuaaccggagu

SEQ ID NO: 2222258 - RNA, 19 nt, Homo sapiens
  misc_RNA (1)...(19): siRNA sense strand
ccgcauauuacgaaaagaa

SEQ ID NO: 2222259 - RNA, 19 nt, Homo sapiens
  misc_RNA (1)...(19): siRNA sense strand
ggguauagaaguugguccu

SEQ ID NO: 2222260 - RNA, 19 nt, Homo sapiens
  misc_RNA (1)...(19): siRNA sense strand
agaacagggcuggagguaa

SEQ ID NO: 2222261 - RNA, 19 nt, Homo sapiens
  misc_RNA (1)...(19): siRNA sense strand
gaucaagacuggaaaccac

SEQ ID NO: 2222262 - RNA, 19 nt, Homo sapiens
  misc_RNA (1)...(19): siRNA sense strand
gcaugaacgugcaggguga

SEQ ID NO: 2222263 - RNA, 19 nt, Homo sapiens
  misc_RNA (1)...(19): siRNA sense strand
gcagggaguuuguggagga

SEQ ID NO: 2222264 - RNA, 19 nt, Homo sapiens
  misc_RNA (1)...(19): siRNA sense strand
cccaagaacccguggagca

SEQ ID NO: 2222265 - RNA, 19 nt, Homo sapiens
  misc_RNA (1)...(19): siRNA sense strand
ggcugaaggaacaaggcua

SEQ ID NO: 2222266 - RNA, 19 nt, Homo sapiens
  misc_RNA (1)...(19): siRNA sense strand
gcuccgugguucuggccua

SEQ ID NO: 2222267 - RNA, 19 nt, Homo sapiens
  misc_RNA (1)...(19): siRNA sense strand
auuuagacaucgaggccuu

SEQ ID NO: 2222268 - RNA, 19 nt, Homo sapiens
  misc_RNA (1)...(19): siRNA sense strand
cccgcaaacaaguggaaau

SEQ ID NO: 2222269 - RNA, 19 nt, Homo sapiens
  misc_RNA (1)...(19): siRNA sense strand
gaacaaggcuaugacguca

SEQ ID NO: 2222270 - RNA, 19 nt, Homo sapiens
  misc_RNA (1)...(19): siRNA sense strand
aggagcgaguggaagggaa

SEQ ID NO: 2222271 - RNA, 19 nt, Homo sapiens
  misc_RNA (1)...(19): siRNA sense strand
uggaguacgcaaagcaaca

SEQ ID NO: 2222272 - RNA, 19 nt, Homo sapiens
  misc_RNA (1)...(19): siRNA sense strand
gcagggugauuaugagcca

SEQ ID NO: 2222273 - RNA, 19 nt, Homo sapiens
  misc_RNA (1)...(19): siRNA sense strand
gcaugaacgugcaggguga

SEQ ID NO: 2222274 - RNA, 19 nt, Homo sapiens
  misc_RNA (1)...(19): siRNA sense strand
gcagggaguuuguggagga

SEQ ID NO: 2222275 - RNA, 19 nt, Homo sapiens
  misc_RNA (1)...(19): siRNA sense strand
cccaagaacccguggagca

SEQ ID NO: 2222276 - RNA, 19 nt, Homo sapiens
  misc_RNA (1)...(19): siRNA sense strand
ggcugaaggaacaaggcua

SEQ ID NO: 2222277 - RNA, 19 nt, Homo sapiens
  misc_RNA (1)...(19): siRNA sense strand
gcuccgugguucuggccua

SEQ ID NO: 2222278 - RNA, 19 nt, Homo sapiens
  misc_RNA (1)...(19): siRNA sense strand
auuuagacaucgaggccuu

SEQ ID NO: 2222279 - RNA, 19 nt, Homo sapiens
  misc_RNA (1)...(19): siRNA sense strand
cccgcaaacaaguggaaau

SEQ ID NO: 2222280 - RNA, 19 nt, Homo sapiens
  misc_RNA (1)...(19): siRNA sense strand
gaacaaggcuaugacguca

SEQ ID NO: 2222281 - RNA, 19 nt, Homo sapiens
  misc_RNA (1)...(19): siRNA sense strand
aggagcgaguggaagggaa

SEQ ID NO: 2222282 - RNA, 19 nt, Homo sapiens
  misc_RNA (1)...(19): siRNA sense strand
uggaguacgcaaagcaaca

SEQ ID NO: 2222283 - RNA, 19 nt, Homo sapiens
  misc_RNA (1)...(19): siRNA sense strand
gcagggugauuaugagcca

SEQ ID NO: 2222284 - RNA, 19 nt, Homo sapiens
  misc_RNA (1)...(19): siRNA sense strand
ccagcaaauucuagugcca

SEQ ID NO: 2222285 - RNA, 19 nt, Homo sapiens
  misc_RNA (1)...(19): siRNA sense strand
guuuauaagaagcacagaa

SEQ ID NO: 2222286 - RNA, 19 nt, Homo sapiens
  misc_RNA (1)...(19): siRNA sense strand
ucgcaugugauuaaagcaa

SEQ ID NO: 2222287 - RNA, 19 nt, Homo sapiens
  misc_RNA (1)...(19): siRNA sense strand
agagauugugguggaguua

SEQ ID NO: 2222288 - RNA, 19 nt, Homo sapiens
  misc_RNA (1)...(19): siRNA sense strand
guuacaugagccagcaaau

SEQ ID NO: 2222289 - RNA, 19 nt, Homo sapiens
  misc_RNA (1)...(19): siRNA sense strand
ccagcaaauucuagugcca

SEQ ID NO: 2222290 - RNA, 19 nt, Homo sapiens
  misc_RNA (1)...(19): siRNA sense strand
guuuauaagaagcacagaa

SEQ ID NO: 2222291 - RNA, 19 nt, Homo sapiens
  misc_RNA (1)...(19): siRNA sense strand
ucgcaugugauuaaagcaa

SEQ ID NO: 2222292 - RNA, 19 nt, Homo sapiens
  misc_RNA (1)...(19): siRNA sense strand
guuacaugagccagcaaau

SEQ ID NO: 2222293 - RNA, 19 nt, Homo sapiens
  misc_RNA (1)...(19): siRNA sense strand
ccagcaaauucuagugcca

SEQ ID NO: 2222294 - RNA, 19 nt, Homo sapiens
  misc_RNA (1)...(19): siRNA sense strand
guuuauaagaagcacagaa

SEQ ID NO: 2222295 - RNA, 19 nt, Homo sapiens
  misc_RNA (1)...(19): siRNA sense strand
ucgcaugugauuaaagcaa

SEQ ID NO: 2222296 - RNA, 19 nt, Homo sapiens
  misc_RNA (1)...(19): siRNA sense strand
guuacaugagccagcaaau

SEQ ID NO: 2222297 - RNA, 19 nt, Homo sapiens
  misc_RNA (1)...(19): siRNA sense strand
uggccaagacugugaggau

SEQ ID NO: 2222298 - RNA, 19 nt, Homo sapiens
  misc_RNA (1)...(19): siRNA sense strand
caagaugaguccugcacca

SEQ ID NO: 2222299 - RNA, 19 nt, Homo sapiens
  misc_RNA (1)...(19): siRNA sense strand
uggcuguggcccugagcaa

SEQ ID NO: 2222300 - RNA, 19 nt, Homo sapiens
  misc_RNA (1)...(19): siRNA sense strand
ccauagucuuuguggcugu

SEQ ID NO: 2222301 - RNA, 19 nt, Homo sapiens
  misc_RNA (1)...(19): siRNA sense strand
ccuacaugauccuggccau

SEQ ID NO: 2222302 - RNA, 19 nt, Homo sapiens
  misc_RNA (1)...(19): siRNA sense strand
caggagaggccacuggaca

SEQ ID NO: 2222303 - RNA, 19 nt, Homo sapiens
  misc_RNA (1)...(19): siRNA sense strand
uaauaaagaugaagggaca

SEQ ID NO: 2222304 - RNA, 19 nt, Homo sapiens
  misc_RNA (1)...(19): siRNA sense strand
acacaaaagccgaggaaau

SEQ ID NO: 2222305 - RNA, 19 nt, Homo sapiens
  misc_RNA (1)...(19): siRNA sense strand
acucagaacaauagcacaa

SEQ ID NO: 2222306 - RNA, 19 nt, Homo sapiens
  misc_RNA (1)...(19): siRNA sense strand
ggguguuaauaaagaugaa

SEQ ID NO: 2222307 - RNA, 19 nt, Homo sapiens
  misc_RNA (1)...(19): siRNA sense strand
aagcagaaugggaguggaa

SEQ ID NO: 2222308 - RNA, 19 nt, Homo sapiens
  misc_RNA (1)...(19): siRNA sense strand
gaaagaaaguugugugggu

SEQ ID NO: 2222309 - RNA, 19 nt, Homo sapiens
  misc_RNA (1)...(19): siRNA sense strand
agagagaaugagacugaaa

SEQ ID NO: 2222310 - RNA, 19 nt, Homo sapiens
  misc_RNA (1)...(19): siRNA sense strand
uggagaaagugcaggagca

SEQ ID NO: 2222311 - RNA, 19 nt, Homo sapiens
  misc_RNA (1)...(19): siRNA sense strand
aggaaauauugaugaagca

SEQ ID NO: 2222312 - RNA, 19 nt, Homo sapiens
  misc_RNA (1)...(19): siRNA sense strand
acagagucaacaagaauaa

SEQ ID NO: 2222313 - RNA, 19 nt, Homo sapiens
  misc_RNA (1)...(19): siRNA sense strand
ucuggaaagaagagauaau

SEQ ID NO: 2222314 - RNA, 19 nt, Homo sapiens
  misc_RNA (1)...(19): siRNA sense strand
uacacuagcaagaaagaaa

SEQ ID NO: 2222315 - RNA, 19 nt, Homo sapiens
  misc_RNA (1)...(19): siRNA sense strand
cugaaauaaucaagugucu

SEQ ID NO: 2222316 - RNA, 19 nt, Homo sapiens
  misc_RNA (1)...(19): siRNA sense strand
auagugaaacggugggcaa

SEQ ID NO: 2222317 - RNA, 19 nt, Homo sapiens
  misc_RNA (1)...(19): siRNA sense strand
cguugaacuuagcuaaauu

SEQ ID NO: 2222318 - RNA, 19 nt, Homo sapiens
  misc_RNA (1)...(19): siRNA sense strand
gagugagugaguuuggaaa

SEQ ID NO: 2222319 - RNA, 19 nt, Homo sapiens
  misc_RNA (1)...(19): siRNA sense strand
cagacuggguagaugauca

SEQ ID NO: 2222320 - RNA, 19 nt, Homo sapiens
  misc_RNA (1)...(19): siRNA sense strand
cuuuaugaagcuaggaaca

SEQ ID NO: 2222321 - RNA, 19 nt, Homo sapiens
  misc_RNA (1)...(19): siRNA sense strand
aagaauuucaggaagguuu

SEQ ID NO: 2222322 - RNA, 19 nt, Homo sapiens
  misc_RNA (1)...(19): siRNA sense strand
ucuuggaaaugacaggaaa

SEQ ID NO: 2222323 - RNA, 19 nt, Homo sapiens
  misc_RNA (1)...(19): siRNA sense strand
gcagaaugggaguggaaag

SEQ ID NO: 2222324 - RNA, 19 nt, Homo sapiens
  misc_RNA (1)...(19): siRNA sense strand
ucagagauguggaacccaa

SEQ ID NO: 2222325 - RNA, 19 nt, Homo sapiens
  misc_RNA (1)...(19): siRNA sense strand
gcucggguugaaagaguua

SEQ ID NO: 2222326 - RNA, 19 nt, Homo sapiens
  misc_RNA (1)...(19): siRNA sense strand
auacagagucaacaagaau

SEQ ID NO: 2222327 - RNA, 19 nt, Homo sapiens
  misc_RNA (1)...(19): siRNA sense strand
gauuuaugguggugguuuu

SEQ ID NO: 2222328 - RNA, 19 nt, Homo sapiens
  misc_RNA (1)...(19): siRNA sense strand
ccagaauggaugggaguga

SEQ ID NO: 2222329 - RNA, 19 nt, Homo sapiens
  misc_RNA (1)...(19): siRNA sense strand
uggaaaagucagagggaug

SEQ ID NO: 2222330 - RNA, 19 nt, Homo sapiens
  misc_RNA (1)...(19): siRNA sense strand
ggaaauccuaaaaguguaa

SEQ ID NO: 2222331 - RNA, 19 nt, Homo sapiens
  misc_RNA (1)...(19): siRNA sense strand
ucaaaagcacugaacaaaa

SEQ ID NO: 2222332 - RNA, 19 nt, Homo sapiens
  misc_RNA (1)...(19): siRNA sense strand
cuuggaaaugacaggaaau

SEQ ID NO: 2222333 - RNA, 19 nt, Homo sapiens
  misc_RNA (1)...(19): siRNA sense strand
gaaauauugaugaagcaga

SEQ ID NO: 2222334 - RNA, 19 nt, Homo sapiens
  misc_RNA (1)...(19): siRNA sense strand
aagaguuauuguaguguca

SEQ ID NO: 2222335 - RNA, 19 nt, Homo sapiens
  misc_RNA (1)...(19): siRNA sense strand
agaauuucaggaagguuua

SEQ ID NO: 2222336 - RNA, 19 nt, Homo sapiens
  misc_RNA (1)...(19): siRNA sense strand
gggaguggaaagcaggauu

SEQ ID NO: 2222337 - RNA, 19 nt, Homo sapiens
  misc_RNA (1)...(19): siRNA sense strand
cuuauugggaagucacaua

SEQ ID NO: 2222338 - RNA, 19 nt, Homo sapiens
  misc_RNA (1)...(19): siRNA sense strand
ugggagugaugcauggcua

SEQ ID NO: 2222339 - RNA, 19 nt, Homo sapiens
  misc_RNA (1)...(19): siRNA sense strand
uugcaacaaagaauggaaa

SEQ ID NO: 2222340 - RNA, 19 nt, Homo sapiens
  misc_RNA (1)...(19): siRNA sense strand
acacagacuggguagauga

SEQ ID NO: 2222341 - RNA, 19 nt, Homo sapiens
  misc_RNA (1)...(19): siRNA sense strand
gacgaaacuacgugcucaa

SEQ ID NO: 2222342 - RNA, 19 nt, Homo sapiens
  misc_RNA (1)...(19): siRNA sense strand
cugacaugccagacauauu

SEQ ID NO: 2222343 - RNA, 19 nt, Homo sapiens
  misc_RNA (1)...(19): siRNA sense strand
cugcaugcuuauugggaag

SEQ ID NO: 2222344 - RNA, 19 nt, Homo sapiens
  misc_RNA (1)...(19): siRNA sense strand
gggugauguuguuggggau

SEQ ID NO: 2222345 - RNA, 19 nt, Homo sapiens
  misc_RNA (1)...(19): siRNA sense strand
ggccagaauggaugggagu

SEQ ID NO: 2222346 - RNA, 19 nt, Homo sapiens
  misc_RNA (1)...(19): siRNA sense strand
gggagugaugcauggcuau

SEQ ID NO: 2222347 - RNA, 19 nt, Homo sapiens
  misc_RNA (1)...(19): siRNA sense strand
gcuucagcaaagauaacaa

SEQ ID NO: 2222348 - RNA, 19 nt, Homo sapiens
  misc_RNA (1)...(19): siRNA sense strand
uuggaaaugacaggaaaua

SEQ ID NO: 2222349 - RNA, 19 nt, Homo sapiens
  misc_RNA (1)...(19): siRNA sense strand
uguuuaugauggcaaguuu

SEQ ID NO: 2222350 - RNA, 19 nt, Homo sapiens
  misc_RNA (1)...(19): siRNA sense strand
gaaagagauaauagcgaaa

SEQ ID NO: 2222351 - RNA, 19 nt, Homo sapiens
  misc_RNA (1)...(19): siRNA sense strand
cugugaaagaucagaauaa

SEQ ID NO: 2222352 - RNA, 19 nt, Homo sapiens
  misc_RNA (1)...(19): siRNA sense strand
ggaagaugaaagagauaau

SEQ ID NO: 2222353 - RNA, 19 nt, Homo sapiens
  misc_RNA (1)...(19): siRNA sense strand
ugucaaaaccugagaaaau

SEQ ID NO: 2222354 - RNA, 19 nt, Homo sapiens
  misc_RNA (1)...(19): siRNA sense strand
aaugaaaggaagaggaaaa

SEQ ID NO: 2222355 - RNA, 19 nt, Homo sapiens
  misc_RNA (1)...(19): siRNA sense strand
caucacaaggaaugagaaa

SEQ ID NO: 2222356 - RNA, 19 nt, Homo sapiens
  misc_RNA (1)...(19): siRNA sense strand
agaagaagaauuuggaaga

SEQ ID NO: 2222357 - RNA, 19 nt, Homo sapiens
  misc_RNA (1)...(19): siRNA sense strand
cccauaugauucagggaua

SEQ ID NO: 2222358 - RNA, 19 nt, Homo sapiens
  misc_RNA (1)...(19): siRNA sense strand
ccauaugauucagggauaa

SEQ ID NO: 2222359 - RNA, 19 nt, Homo sapiens
  misc_RNA (1)...(19): siRNA sense strand
gugcagcagaaguggauua

SEQ ID NO: 2222360 - RNA, 19 nt, Homo sapiens
  misc_RNA (1)...(19): siRNA sense strand
gcggaacauaagaaggaaa

SEQ ID NO: 2222361 - RNA, 19 nt, Homo sapiens
  misc_RNA (1)...(19): siRNA sense strand
ugaaagagauaauagcgaa

SEQ ID NO: 2222362 - RNA, 19 nt, Homo sapiens
  misc_RNA (1)...(19): siRNA sense strand
ugguguuacugaagacaaa

SEQ ID NO: 2222363 - RNA, 19 nt, Homo sapiens
  misc_RNA (1)...(19): siRNA sense strand
acagagagguggaucaaaa

SEQ ID NO: 2222364 - RNA, 19 nt, Homo sapiens
  misc_RNA (1)...(19): siRNA sense strand
gcucggaaauaaagcccaa

SEQ ID NO: 2222365 - RNA, 19 nt, Homo sapiens
  misc_RNA (1)...(19): siRNA sense strand
uggaagagauggggaaaua

SEQ ID NO: 2222366 - RNA, 19 nt, Homo sapiens
  misc_RNA (1)...(19): siRNA sense strand
agucagguauauuuggaaa

SEQ ID NO: 2222367 - RNA, 19 nt, Homo sapiens
  misc_RNA (1)...(19): siRNA sense strand
cugcaaaucucuggggaaa

SEQ ID NO: 2222368 - RNA, 19 nt, Homo sapiens
  misc_RNA (1)...(19): siRNA sense strand
agcaaagggucaaggacuu

SEQ ID NO: 2222369 - RNA, 19 nt, Homo sapiens
  misc_RNA (1)...(19): siRNA sense strand
gcuguaaaacaaaggauua

SEQ ID NO: 2222370 - RNA, 19 nt, Homo sapiens
  misc_RNA (1)...(19): siRNA sense strand
caucaggagccaauagcaa

SEQ ID NO: 2222371 - RNA, 19 nt, Homo sapiens
  misc_RNA (1)...(19): siRNA sense strand
gaauacagcuuuuggccua

SEQ ID NO: 2222372 - RNA, 19 nt, Homo sapiens
  misc_RNA (1)...(19): siRNA sense strand
aaauaaagcccaaacugua

SEQ ID NO: 2222373 - RNA, 19 nt, Homo sapiens
  misc_RNA (1)...(19): siRNA sense strand
acgaaauccuccagcauca

SEQ ID NO: 2222374 - RNA, 19 nt, Homo sapiens
  misc_RNA (1)...(19): siRNA sense strand
ccucugaaagcgagcaaau

SEQ ID NO: 2222375 - RNA, 19 nt, Homo sapiens
  misc_RNA (1)...(19): siRNA sense strand
aaggaaacuucuaacggaa

SEQ ID NO: 2222376 - RNA, 19 nt, Homo sapiens
  misc_RNA (1)...(19): siRNA sense strand
agagggaagagaugguuaa

SEQ ID NO: 2222377 - RNA, 19 nt, Homo sapiens
  misc_RNA (1)...(19): siRNA sense strand
ugccacauguagaaagaua

SEQ ID NO: 2222378 - RNA, 19 nt, Homo sapiens
  misc_RNA (1)...(19): siRNA sense strand
cugaggaacagaaggauga

SEQ ID NO: 2222379 - RNA, 19 nt, Homo sapiens
  misc_RNA (1)...(19): siRNA sense strand
uuggaagaugaaagagaua

SEQ ID NO: 2222380 - RNA, 19 nt, Homo sapiens
  misc_RNA (1)...(19): siRNA sense strand
acaaaucagcaaaggguca

SEQ ID NO: 2222381 - RNA, 19 nt, Homo sapiens
  misc_RNA (1)...(19): siRNA sense strand
cuacauaucugacagguga

SEQ ID NO: 2222382 - RNA, 19 nt, Homo sapiens
  misc_RNA (1)...(19): siRNA sense strand
cgucaagauuacaaaagaa

SEQ ID NO: 2222383 - RNA, 19 nt, Homo sapiens
  misc_RNA (1)...(19): siRNA sense strand
cugaagacaaacuggaaaa

SEQ ID NO: 2222384 - RNA, 19 nt, Homo sapiens
  misc_RNA (1)...(19): siRNA sense strand
gggucaaggacuucuuuaa

SEQ ID NO: 2222385 - RNA, 19 nt, Homo sapiens
  misc_RNA (1)...(19): siRNA sense strand
uugcugaagugcauauaaa

SEQ ID NO: 2222386 - RNA, 19 nt, Homo sapiens
  misc_RNA (1)...(19): siRNA sense strand
acaaaggaaaugaugaaga

SEQ ID NO: 2222387 - RNA, 19 nt, Homo sapiens
  misc_RNA (1)...(19): siRNA sense strand
cagcaaagggucaaggacu

SEQ ID NO: 2222388 - RNA, 19 nt, Homo sapiens
  misc_RNA (1)...(19): siRNA sense strand
cagaauaaacauacugcuu

SEQ ID NO: 2222389 - RNA, 19 nt, Homo sapiens
  misc_RNA (1)...(19): siRNA sense strand
gccuagaauggaucagaaa

SEQ ID NO: 2222390 - RNA, 19 nt, Homo sapiens
  misc_RNA (1)...(19): siRNA sense strand
cuacaauugcauuuggaau

SEQ ID NO: 2222391 - RNA, 19 nt, Homo sapiens
  misc_RNA (1)...(19): siRNA sense strand
agagaaacucacuucaaua

SEQ ID NO: 2222392 - RNA, 19 nt, Homo sapiens
  misc_RNA (1)...(19): siRNA sense strand
caaaggucuaagaggagaa

SEQ ID NO: 2222393 - RNA, 19 nt, Homo sapiens
  misc_RNA (1)...(19): siRNA sense strand
uggaagaagcugaauuaca

SEQ ID NO: 2222394 - RNA, 19 nt, Homo sapiens
  misc_RNA (1)...(19): siRNA sense strand
cuuaugugaugcucggaaa

SEQ ID NO: 2222395 - RNA, 19 nt, Homo sapiens
  misc_RNA (1)...(19): siRNA sense strand
acacaaugccgaaagacuu

SEQ ID NO: 2222396 - RNA, 19 nt, Homo sapiens
  misc_RNA (1)...(19): siRNA sense strand
gauaauagcgaaaagaaga

SEQ ID NO: 2222397 - RNA, 19 nt, Homo sapiens
  misc_RNA (1)...(19): siRNA sense strand
ugaugugaccagacugaaa

SEQ ID NO: 2222398 - RNA, 19 nt, Homo sapiens
  misc_RNA (1)...(19): siRNA sense strand
ugaauaugcuggucgacau

SEQ ID NO: 2222399 - RNA, 19 nt, Homo sapiens
  misc_RNA (1)...(19): siRNA sense strand
aaacuguacuaaauggcaa

SEQ ID NO: 2222400 - RNA, 19 nt, Homo sapiens
  misc_RNA (1)...(19): siRNA sense strand
cuaaucagcuagaggcgau

SEQ ID NO: 2222401 - RNA, 19 nt, Homo sapiens
  misc_RNA (1)...(19): siRNA sense strand
gggaauucuaugaaggagu

SEQ ID NO: 2222402 - RNA, 19 nt, Homo sapiens
  misc_RNA (1)...(19): siRNA sense strand
uguuauugaugaagcacau

SEQ ID NO: 2222403 - RNA, 19 nt, Homo sapiens
  misc_RNA (1)...(19): siRNA sense strand
auaacggaaugcaggagaa

SEQ ID NO: 2222404 - RNA, 19 nt, Homo sapiens
  misc_RNA (1)...(19): siRNA sense strand
uagauuugacugaggaaca

SEQ ID NO: 2222405 - RNA, 19 nt, Homo sapiens
  misc_RNA (1)...(19): siRNA sense strand
cuucagcagcggaacauaa

SEQ ID NO: 2222406 - RNA, 19 nt, Homo sapiens
  misc_RNA (1)...(19): siRNA sense strand
ggcugaaacaccaagacua

SEQ ID NO: 2222407 - RNA, 19 nt, Homo sapiens
  misc_RNA (1)...(19): siRNA sense strand
cuauaugucacuccagaaa

SEQ ID NO: 2222408 - RNA, 19 nt, Homo sapiens
  misc_RNA (1)...(19): siRNA sense strand
gcaugagcuuuaacagaca

SEQ ID NO: 2222409 - RNA, 19 nt, Homo sapiens
  misc_RNA (1)...(19): siRNA sense strand
ccaucauacaagagaaacu

SEQ ID NO: 2222410 - RNA, 19 nt, Homo sapiens
  misc_RNA (1)...(19): siRNA sense strand
cagcaggacaggaaacaca

SEQ ID NO: 2222411 - RNA, 19 nt, Homo sapiens
  misc_RNA (1)...(19): siRNA sense strand
agagaaugcaacaggugaa

SEQ ID NO: 2222412 - RNA, 19 nt, Homo sapiens
  misc_RNA (1)...(19): siRNA sense strand
cugagaugauguaugacaa

SEQ ID NO: 2222413 - RNA, 19 nt, Homo sapiens
  misc_RNA (1)...(19): siRNA sense strand
agugaugacugcagcccaa

SEQ ID NO: 2222414 - RNA, 19 nt, Homo sapiens
  misc_RNA (1)...(19): siRNA sense strand
ccaucagaguccucagaga

SEQ ID NO: 2222415 - RNA, 19 nt, Homo sapiens
  misc_RNA (1)...(19): siRNA sense strand
cagcaauaauggaacccuu

SEQ ID NO: 2222416 - RNA, 19 nt, Homo sapiens
  misc_RNA (1)...(19): siRNA sense strand
gcgcauauucagggcggaa

SEQ ID NO: 2222417 - RNA, 19 nt, Homo sapiens
  misc_RNA (1)...(19): siRNA sense strand
ccaaagagcuguaugcccu

SEQ ID NO: 2222418 - RNA, 19 nt, Homo sapiens
  misc_RNA (1)...(19): siRNA sense strand
gggagauaccaguucaaca

SEQ ID NO: 2222419 - RNA, 19 nt, Homo sapiens
  misc_RNA (1)...(19): siRNA sense strand
ucagagacuacaaggugaa

SEQ ID NO: 2222420 - RNA, 19 nt, Homo sapiens
  misc_RNA (1)...(19): siRNA sense strand
aggugaagcauguugugua

SEQ ID NO: 2222421 - RNA, 19 nt, Homo sapiens
  misc_RNA (1)...(19): siRNA sense strand
agcaauugagauucagaaa

SEQ ID NO: 2222422 - RNA, 19 nt, Homo sapiens
  misc_RNA (1)...(19): siRNA sense strand
gagacuacaaggugaagca

SEQ ID NO: 2222423 - RNA, 19 nt, Homo sapiens
  misc_RNA (1)...(19): siRNA sense strand
agaaggaugcucaggaagu

SEQ ID NO: 2222424 - RNA, 19 nt, Homo sapiens
  misc_RNA (1)...(19): siRNA sense strand
uggaaaaucccaaaaguca

SEQ ID NO: 2222425 - RNA, 19 nt, Homo sapiens
  misc_RNA (1)...(19): siRNA sense strand
cgaucaaggaguuguuaaa

SEQ ID NO: 2222426 - RNA, 19 nt, Homo sapiens
  misc_RNA (1)...(19): siRNA sense strand
gguagugaaguaugggaaa

SEQ ID NO: 2222427 - RNA, 19 nt, Homo sapiens
  misc_RNA (1)...(19): siRNA sense strand
acacauugcccaaggccua

SEQ ID NO: 2222428 - RNA, 19 nt, Homo sapiens
  misc_RNA (1)...(19): siRNA sense strand
uagaaauguaugaguggua

SEQ ID NO: 2222429 - RNA, 19 nt, Homo sapiens
  misc_RNA (1)...(19): siRNA sense strand
gagaagaggugaagagucc

SEQ ID NO: 2222430 - RNA, 19 nt, Homo sapiens
  misc_RNA (1)...(19): siRNA sense strand
cagaagacuccauagaaau

SEQ ID NO: 2222431 - RNA, 19 nt, Homo sapiens
  misc_RNA (1)...(19): siRNA sense strand
cagugauucuggagagcau

SEQ ID NO: 2222432 - RNA, 19 nt, Homo sapiens
  misc_RNA (1)...(19): siRNA sense strand
ggguagugaaguaugggaa

SEQ ID NO: 2222433 - RNA, 19 nt, Homo sapiens
  misc_RNA (1)...(19): siRNA sense strand
cugaacuaccugagggaga

SEQ ID NO: 2222434 - RNA, 19 nt, Homo sapiens
  misc_RNA (1)...(19): siRNA sense strand
ucugugaagccauggaaua

SEQ ID NO: 2222435 - RNA, 19 nt, Homo sapiens
  misc_RNA (1)...(19): siRNA sense strand
caguaagaaggguucaaua

SEQ ID NO: 2222436 - RNA, 19 nt, Homo sapiens
  misc_RNA (1)...(19): siRNA sense strand
ucaaaauucuucugagcaa

SEQ ID NO: 2222437 - RNA, 19 nt, Homo sapiens
  misc_RNA (1)...(19): siRNA sense strand
ugacuuugaacgugggaga

SEQ ID NO: 2222438 - RNA, 19 nt, Homo sapiens
  misc_RNA (1)...(19): siRNA sense strand
gaaauguaugagugguauu

SEQ ID NO: 2222439 - RNA, 19 nt, Homo sapiens
  misc_RNA (1)...(19): siRNA sense strand
gaacuaaggaagcggugga

SEQ ID NO: 2222440 - RNA, 19 nt, Homo sapiens
  misc_RNA (1)...(19): siRNA sense strand
ccacugcaggccugggaua

SEQ ID NO: 2222441 - RNA, 19 nt, Homo sapiens
  misc_RNA (1)...(19): siRNA sense strand
ggaaauugauccaaaggac

SEQ ID NO: 2222442 - RNA, 19 nt, Homo sapiens
  misc_RNA (1)...(19): siRNA sense strand
uggcaaauauacagugucu

SEQ ID NO: 2222443 - RNA, 19 nt, Homo sapiens
  misc_RNA (1)...(19): siRNA sense strand
ugguggagagcacgagaua

SEQ ID NO: 2222444 - RNA, 19 nt, Homo sapiens
  misc_RNA (1)...(19): siRNA sense strand
gcuccaugucugaagauga

SEQ ID NO: 2222445 - RNA, 19 nt, Homo sapiens
  misc_RNA (1)...(19): siRNA sense strand
gaacgugggagaagaggca

SEQ ID NO: 2222446 - RNA, 19 nt, Homo sapiens
  misc_RNA (1)...(19): siRNA sense strand
cuaaggaagcgguggauuc

SEQ ID NO: 2222447 - RNA, 19 nt, Homo sapiens
  misc_RNA (1)...(19): siRNA sense strand
ccauaugagagauuuacua

SEQ ID NO: 2222448 - RNA, 19 nt, Homo sapiens
  misc_RNA (1)...(19): siRNA sense strand
ugagaaagcagaugagcgu

SEQ ID NO: 2222449 - RNA, 19 nt, Homo sapiens
  misc_RNA (1)...(19): siRNA sense strand
gggguuuugaugugggaaa

SEQ ID NO: 2222450 - RNA, 19 nt, Homo sapiens
  misc_RNA (1)...(19): siRNA sense strand
cuuuaugauuacaugccaa

SEQ ID NO: 2222451 - RNA, 19 nt, Homo sapiens
  misc_RNA (1)...(19): siRNA sense strand
gggauacggaucaugggaa

SEQ ID NO: 2222452 - RNA, 19 nt, Homo sapiens
  misc_RNA (1)...(19): siRNA sense strand
ucacugaguacauggccaa

SEQ ID NO: 2222453 - RNA, 19 nt, Homo sapiens
  misc_RNA (1)...(19): siRNA sense strand
ggacucauauccaggcuca

SEQ ID NO: 2222454 - RNA, 19 nt, Homo sapiens
  misc_RNA (1)...(19): siRNA sense strand
augccauaugagagauuua

SEQ ID NO: 2222455 - RNA, 19 nt, Homo sapiens
  misc_RNA (1)...(19): siRNA sense strand
agucaaagcaguuccuuca

SEQ ID NO: 2222456 - RNA, 19 nt, Homo sapiens
  misc_RNA (1)...(19): siRNA sense strand
cugaggaggaccagaucuu

SEQ ID NO: 2222457 - RNA, 19 nt, Homo sapiens
  misc_RNA (1)...(19): siRNA sense strand
gaggaaagcaacuuaccau

SEQ ID NO: 2222458 - RNA, 19 nt, Homo sapiens
  misc_RNA (1)...(19): siRNA sense strand
ugguaaacgaucaaggagu

SEQ ID NO: 2222459 - RNA, 19 nt, Homo sapiens
  misc_RNA (1)...(19): siRNA sense strand
uuggagaacaggaauggaa

SEQ ID NO: 2222460 - RNA, 19 nt, Homo sapiens
  misc_RNA (1)...(19): siRNA sense strand
agauuuacuaacagugaga

SEQ ID NO: 2222461 - RNA, 19 nt, Homo sapiens
  misc_RNA (1)...(19): siRNA sense strand
guucucaccggaagacaaa

SEQ ID NO: 2222462 - RNA, 19 nt, Homo sapiens
  misc_RNA (1)...(19): siRNA sense strand
uuaacuaccaucagcacaa

SEQ ID NO: 2222463 - RNA, 19 nt, Homo sapiens
  misc_RNA (1)...(19): siRNA sense strand
gcucaguaggcuccaaauu

SEQ ID NO: 2222464 - RNA, 19 nt, Homo sapiens
  misc_RNA (1)...(19): siRNA sense strand
gcaccaucccugagcucau

SEQ ID NO: 2222465 - RNA, 19 nt, Homo sapiens
  misc_RNA (1)...(19): siRNA sense strand
agaaagacagauuccgaga

SEQ ID NO: 2222466 - RNA, 19 nt, Homo sapiens
  misc_RNA (1)...(19): siRNA sense strand
uugaagaagccaaagucau

SEQ ID NO: 2222467 - RNA, 19 nt, Homo sapiens
  misc_RNA (1)...(19): siRNA sense strand
gcaacaacagugacgccaa

SEQ ID NO: 2222468 - RNA, 19 nt, Homo sapiens
  misc_RNA (1)...(19): siRNA sense strand
agacaacauuugaucccaa

SEQ ID NO: 2222469 - RNA, 19 nt, Homo sapiens
  misc_RNA (1)...(19): siRNA sense strand
ccgacaaccaacucaacaa

SEQ ID NO: 2222470 - RNA, 19 nt, Homo sapiens
  misc_RNA (1)...(19): siRNA sense strand
cagcaaugaagaaggugga

SEQ ID NO: 2222471 - RNA, 19 nt, Homo sapiens
  misc_RNA (1)...(19): siRNA sense strand
agugccaaguggaagacaa

SEQ ID NO: 2222472 - RNA, 19 nt, Homo sapiens
  misc_RNA (1)...(19): siRNA sense strand
cugagugccaaguggaaga

SEQ ID NO: 2222473 - RNA, 19 nt, Homo sapiens
  misc_RNA (1)...(19): siRNA sense strand
gcaaugaagaagguggaga

SEQ ID NO: 2222474 - RNA, 19 nt, Homo sapiens
  misc_RNA (1)...(19): siRNA sense strand
agaaguacccuguggccca

SEQ ID NO: 2222475 - RNA, 19 nt, Homo sapiens
  misc_RNA (1)...(19): siRNA sense strand
agcuaauaccacugaugaa

SEQ ID NO: 2222476 - RNA, 19 nt, Homo sapiens
  misc_RNA (1)...(19): siRNA sense strand
gccaaguggaagacaacau

SEQ ID NO: 2222477 - RNA, 19 nt, Homo sapiens
  misc_RNA (1)...(19): siRNA sense strand
agggauaaaaggagagaaa

SEQ ID NO: 2222478 - RNA, 19 nt, Homo sapiens
  misc_RNA (1)...(19): siRNA sense strand
cgagggaaccugugcguga

SEQ ID NO: 2222479 - RNA, 19 nt, Homo sapiens
  misc_RNA (1)...(19): siRNA sense strand
ccaaaggugaaucgggaga

SEQ ID NO: 2222480 - RNA, 19 nt, Homo sapiens
  misc_RNA (1)...(19): siRNA sense strand
ggauaaaaggagagaaagg

SEQ ID NO: 2222481 - RNA, 19 nt, Homo sapiens
  misc_RNA (1)...(19): siRNA sense strand
agaacucacuacugggcau

SEQ ID NO: 2222482 - RNA, 19 nt, Homo sapiens
  misc_RNA (1)...(19): siRNA sense strand
ucgcagagugugucggaaa

SEQ ID NO: 2222483 - RNA, 19 nt, Homo sapiens
  misc_RNA (1)...(19): siRNA sense strand
acccagaagacaaaggaaa

SEQ ID NO: 2222484 - RNA, 19 nt, Homo sapiens
  misc_RNA (1)...(19): siRNA sense strand
gguccaagaaggaugguga

SEQ ID NO: 2222485 - RNA, 19 nt, Homo sapiens
  misc_RNA (1)...(19): siRNA sense strand
acaucaaccagaagaggaa

SEQ ID NO: 2222486 - RNA, 19 nt, Homo sapiens
  misc_RNA (1)...(19): siRNA sense strand
cuauuaagcccaagagcca

SEQ ID NO: 2222487 - RNA, 19 nt, Homo sapiens
  misc_RNA (1)...(19): siRNA sense strand
cuguagggaccaugagaau

SEQ ID NO: 2222488 - RNA, 19 nt, Homo sapiens
  misc_RNA (1)...(19): siRNA sense strand
acacaaaggcucugcacca

SEQ ID NO: 2222489 - RNA, 19 nt, Homo sapiens
  misc_RNA (1)...(19): siRNA sense strand
cggcaugugggauggagaa

SEQ ID NO: 2222490 - RNA, 19 nt, Homo sapiens
  misc_RNA (1)...(19): siRNA sense strand
aggaaugacuaucuggaca

SEQ ID NO: 2222491 - RNA, 19 nt, Homo sapiens
  misc_RNA (1)...(19): siRNA sense strand
ccagaagaggaaugacuau

SEQ ID NO: 2222492 - RNA, 19 nt, Homo sapiens
  misc_RNA (1)...(19): siRNA sense strand
ugucuaaggcggucugcaa

SEQ ID NO: 2222493 - RNA, 19 nt, Homo sapiens
  misc_RNA (1)...(19): siRNA sense strand
gguuugaugucuuugccaa

SEQ ID NO: 2222494 - RNA, 19 nt, Homo sapiens
  misc_RNA (1)...(19): siRNA sense strand
ggagagaacugaaugagcu

SEQ ID NO: 2222495 - RNA, 19 nt, Homo sapiens
  misc_RNA (1)...(19): siRNA sense strand
ggagggucaaugugggaga

SEQ ID NO: 2222496 - RNA, 19 nt, Homo sapiens
  misc_RNA (1)...(19): siRNA sense strand
caagaaggauggugagagg

SEQ ID NO: 2222497 - RNA, 19 nt, Homo sapiens
  misc_RNA (1)...(19): siRNA sense strand
agaaggauggugagaggca

SEQ ID NO: 2222498 - RNA, 19 nt, Homo sapiens
  misc_RNA (1)...(19): siRNA sense strand
ccugcacgauggaggccaa

SEQ ID NO: 2222499 - RNA, 19 nt, Homo sapiens
  misc_RNA (1)...(19): siRNA sense strand
gugaauaucucggguggca

SEQ ID NO: 2222500 - RNA, 19 nt, Homo sapiens
  misc_RNA (1)...(19): siRNA sense strand
gcucauugcuuccgcgaug

SEQ ID NO: 2222501 - RNA, 19 nt, Homo sapiens
  misc_RNA (1)...(19): siRNA sense strand
ggaagaaaguggagggaac

SEQ ID NO: 2222502 - RNA, 19 nt, Homo sapiens
  misc_RNA (1)...(19): siRNA sense strand
cggaaaaggaggauggaaa

SEQ ID NO: 2222503 - RNA, 19 nt, Homo sapiens
  misc_RNA (1)...(19): siRNA sense strand
cagaagagaccaaggaaaa

SEQ ID NO: 2222504 - RNA, 19 nt, Homo sapiens
  misc_RNA (1)...(19): siRNA sense strand
ggacaaggccugugagcca

SEQ ID NO: 2222505 - RNA, 19 nt, Homo sapiens
  misc_RNA (1)...(19): siRNA sense strand
cccugaagcuggaggagaa

SEQ ID NO: 2222506 - RNA, 19 nt, Homo sapiens
  misc_RNA (1)...(19): siRNA sense strand
cagaagaccugguggggaa

SEQ ID NO: 2222507 - RNA, 19 nt, Homo sapiens
  misc_RNA (1)...(19): siRNA sense strand
cggagaagcgaauggacaa

SEQ ID NO: 2222508 - RNA, 19 nt, Homo sapiens
  misc_RNA (1)...(19): siRNA sense strand
agucacagcugaaggaaaa

SEQ ID NO: 2222509 - RNA, 19 nt, Homo sapiens
  misc_RNA (1)...(19): siRNA sense strand
acgaagagaaccagaaaca

SEQ ID NO: 2222510 - RNA, 19 nt, Homo sapiens
  misc_RNA (1)...(19): siRNA sense strand
uggaagaacggcuggacaa

SEQ ID NO: 2222511 - RNA, 19 nt, Homo sapiens
  misc_RNA (1)...(19): siRNA sense strand
ccaccaaccacaugggcaa

SEQ ID NO: 2222512 - RNA, 19 nt, Homo sapiens
  misc_RNA (1)...(19): siRNA sense strand
aguggagccuacagagaaa

SEQ ID NO: 2222513 - RNA, 19 nt, Homo sapiens
  misc_RNA (1)...(19): siRNA sense strand
cugcaggaggcuaaagaua

SEQ ID NO: 2222514 - RNA, 19 nt, Homo sapiens
  misc_RNA (1)...(19): siRNA sense strand
ucagaagagaccaaggaaa

SEQ ID NO: 2222515 - RNA, 19 nt, Homo sapiens
  misc_RNA (1)...(19): siRNA sense strand
gaaacggagcagugggaga

SEQ ID NO: 2222516 - RNA, 19 nt, Homo sapiens
  misc_RNA (1)...(19): siRNA sense strand
ccaaguaugagcuggacaa

SEQ ID NO: 2222517 - RNA, 19 nt, Homo sapiens
  misc_RNA (1)...(19): siRNA sense strand
ggcucaaugaacagagaua

SEQ ID NO: 2222518 - RNA, 19 nt, Homo sapiens
  misc_RNA (1)...(19): siRNA sense strand
cagucaaggucuacgccua

SEQ ID NO: 2222519 - RNA, 19 nt, Homo sapiens
  misc_RNA (1)...(19): siRNA sense strand
ccaaggaaaaugaggguuu

SEQ ID NO: 2222520 - RNA, 19 nt, Homo sapiens
  misc_RNA (1)...(19): siRNA sense strand
gcaacaaguucgugaccgu

SEQ ID NO: 2222521 - RNA, 19 nt, Homo sapiens
  misc_RNA (1)...(19): siRNA sense strand
gccagaagcccuugagcau

SEQ ID NO: 2222522 - RNA, 19 nt, Homo sapiens
  misc_RNA (1)...(19): siRNA sense strand
ccggaaggaaucagaauga

SEQ ID NO: 2222523 - RNA, 19 nt, Homo sapiens
  misc_RNA (1)...(19): siRNA sense strand
cggucaucgcugugcauua

SEQ ID NO: 2222524 - RNA, 19 nt, Homo sapiens
  misc_RNA (1)...(19): siRNA sense strand
cuacaugaaccuacagaga

SEQ ID NO: 2222525 - RNA, 19 nt, Homo sapiens
  misc_RNA (1)...(19): siRNA sense strand
cagucacagcugaaggaaa

SEQ ID NO: 2222526 - RNA, 19 nt, Homo sapiens
  misc_RNA (1)...(19): siRNA sense strand
gugacauggugcaggcaga

SEQ ID NO: 2222527 - RNA, 19 nt, Homo sapiens
  misc_RNA (1)...(19): siRNA sense strand
ccuacagcaccgugggcaa

SEQ ID NO: 2222528 - RNA, 19 nt, Homo sapiens
  misc_RNA (1)...(19): siRNA sense strand
ggaguaaccuggaugagga

SEQ ID NO: 2222529 - RNA, 19 nt, Homo sapiens
  misc_RNA (1)...(19): siRNA sense strand
gaacagaacaugaucggca

SEQ ID NO: 2222530 - RNA, 19 nt, Homo sapiens
  misc_RNA (1)...(19): siRNA sense strand
uguggaacguugaggacuu

SEQ ID NO: 2222531 - RNA, 19 nt, Homo sapiens
  misc_RNA (1)...(19): siRNA sense strand
cuugaaagagccaccgaaa

SEQ ID NO: 2222532 - RNA, 19 nt, Homo sapiens
  misc_RNA (1)...(19): siRNA sense strand
ugacaauguaccaugcuaa

SEQ ID NO: 2222533 - RNA, 19 nt, Homo sapiens
  misc_RNA (1)...(19): siRNA sense strand
acguugaggacuugaaaga

SEQ ID NO: 2222534 - RNA, 19 nt, Homo sapiens
  misc_RNA (1)...(19): siRNA sense strand
cggaaggcaucccggucaa

SEQ ID NO: 2222535 - RNA, 19 nt, Homo sapiens
  misc_RNA (1)...(19): siRNA sense strand
ccguguggguggacgucaa

SEQ ID NO: 2222536 - RNA, 19 nt, Homo sapiens
  misc_RNA (1)...(19): siRNA sense strand
ucuacgaagcucaugaaua

SEQ ID NO: 2222537 - RNA, 19 nt, Homo sapiens
  misc_RNA (1)...(19): siRNA sense strand
gccaagacgaagagaacca

SEQ ID NO: 2222538 - RNA, 19 nt, Homo sapiens
  misc_RNA (1)...(19): siRNA sense strand
agacgaagagaaccagaaa

SEQ ID NO: 2222539 - RNA, 19 nt, Homo sapiens
  misc_RNA (1)...(19): siRNA sense strand
gggaagaaaguggagggaa

SEQ ID NO: 2222540 - RNA, 19 nt, Homo sapiens
  misc_RNA (1)...(19): siRNA sense strand
ggagaagcgaauggacaaa

SEQ ID NO: 2222541 - RNA, 19 nt, Homo sapiens
  misc_RNA (1)...(19): siRNA sense strand
caucauugcagaagagaac

SEQ ID NO: 2222542 - RNA, 19 nt, Homo sapiens
  misc_RNA (1)...(19): siRNA sense strand
ggcagaaccaagagcucaa

SEQ ID NO: 2222543 - RNA, 19 nt, Homo sapiens
  misc_RNA (1)...(19): siRNA sense strand
gugcugaauaagaagaaca

SEQ ID NO: 2222544 - RNA, 19 nt, Homo sapiens
  misc_RNA (1)...(19): siRNA sense strand
acaugaaccuacagagauc

SEQ ID NO: 2222545 - RNA, 19 nt, Homo sapiens
  misc_RNA (1)...(19): siRNA sense strand
ucugggacgugguggagaa

SEQ ID NO: 2222546 - RNA, 19 nt, Homo sapiens
  misc_RNA (1)...(19): siRNA sense strand
gaauggacaaagucggcaa

SEQ ID NO: 2222547 - RNA, 19 nt, Homo sapiens
  misc_RNA (1)...(19): siRNA sense strand
gcgcauuccgauugaggau

SEQ ID NO: 2222548 - RNA, 19 nt, Homo sapiens
  misc_RNA (1)...(19): siRNA sense strand
gaguggacuauguguacaa

SEQ ID NO: 2222549 - RNA, 19 nt, Homo sapiens
  misc_RNA (1)...(19): siRNA sense strand
agggaguucaagucagaaa

SEQ ID NO: 2222550 - RNA, 19 nt, Homo sapiens
  misc_RNA (1)...(19): siRNA sense strand
ggaaucagaaugaacaaaa

SEQ ID NO: 2222551 - RNA, 19 nt, Homo sapiens
  misc_RNA (1)...(19): siRNA sense strand
ccgugaaggagugcagaaa

SEQ ID NO: 2222552 - RNA, 19 nt, Homo sapiens
  misc_RNA (1)...(19): siRNA sense strand
cugaauaagaagaacaaac

SEQ ID NO: 2222553 - RNA, 19 nt, Homo sapiens
  misc_RNA (1)...(19): siRNA sense strand
acggaacaacaacgagaaa

SEQ ID NO: 2222554 - RNA, 19 nt, Homo sapiens
  misc_RNA (1)...(19): siRNA sense strand
cgaaacgagcagguggaaa

SEQ ID NO: 2222555 - RNA, 19 nt, Homo sapiens
  misc_RNA (1)...(19): siRNA sense strand
acggagaagcgaauggaca

SEQ ID NO: 2222556 - RNA, 19 nt, Homo sapiens
  misc_RNA (1)...(19): siRNA sense strand
gugcauuaccuggaugaaa

SEQ ID NO: 2222557 - RNA, 19 nt, Homo sapiens
  misc_RNA (1)...(19): siRNA sense strand
ccgugauacaccaagaaau

SEQ ID NO: 2222558 - RNA, 19 nt, Homo sapiens
  misc_RNA (1)...(19): siRNA sense strand
uggcuuugcuccagacaca

SEQ ID NO: 2222559 - RNA, 19 nt, Homo sapiens
  misc_RNA (1)...(19): siRNA sense strand
cuggagcagucaaggucua

SEQ ID NO: 2222560 - RNA, 19 nt, Homo sapiens
  misc_RNA (1)...(19): siRNA sense strand
ugaagcuggaggagaagaa

SEQ ID NO: 2222561 - RNA, 19 nt, Homo sapiens
  misc_RNA (1)...(19): siRNA sense strand
ggagagaagcccaaccuca

SEQ ID NO: 2222562 - RNA, 19 nt, Homo sapiens
  misc_RNA (1)...(19): siRNA sense strand
acgaaugccaagacgaaga

SEQ ID NO: 2222563 - RNA, 19 nt, Homo sapiens
  misc_RNA (1)...(19): siRNA sense strand
ugcaggaaguggaagucaa

SEQ ID NO: 2222564 - RNA, 19 nt, Homo sapiens
  misc_RNA (1)...(19): siRNA sense strand
aagaaaugauugguggauu

SEQ ID NO: 2222565 - RNA, 19 nt, Homo sapiens
  misc_RNA (1)...(19): siRNA sense strand
ugcuaaggccaaagaucaa

SEQ ID NO: 2222566 - RNA, 19 nt, Homo sapiens
  misc_RNA (1)...(19): siRNA sense strand
ccuaccugaucaugaacaa

SEQ ID NO: 2222567 - RNA, 19 nt, Homo sapiens
  misc_RNA (1)...(19): siRNA sense strand
cgggcagugggaaggauua

SEQ ID NO: 2222568 - RNA, 19 nt, Homo sapiens
  misc_RNA (1)...(19): siRNA sense strand
ugaccacagccaaagauaa

SEQ ID NO: 2222569 - RNA, 19 nt, Homo sapiens
  misc_RNA (1)...(19): siRNA sense strand
auuacaaccuggaggaaag

SEQ ID NO: 2222570 - RNA, 19 nt, Homo sapiens
  misc_RNA (1)...(19): siRNA sense strand
aggauggaaagcugaacaa

SEQ ID NO: 2222571 - RNA, 19 nt, Homo sapiens
  misc_RNA (1)...(19): siRNA sense strand
gcgccuucaccgagagcau

SEQ ID NO: 2222572 - RNA, 19 nt, Homo sapiens
  misc_RNA (1)...(19): siRNA sense strand
ccucaagcgcauuccgauu

SEQ ID NO: 2222573 - RNA, 19 nt, Homo sapiens
  misc_RNA (1)...(19): siRNA sense strand
ggaaggaaucagaaugaac

SEQ ID NO: 2222574 - RNA, 19 nt, Homo sapiens
  misc_RNA (1)...(19): siRNA sense strand
gagugcagaaagaggacau

SEQ ID NO: 2222575 - RNA, 19 nt, Homo sapiens
  misc_RNA (1)...(19): siRNA sense strand
cagcaucacuaaagcagga

SEQ ID NO: 2222576 - RNA, 19 nt, Homo sapiens
  misc_RNA (1)...(19): siRNA sense strand
ccuaugaccucgagggaca

SEQ ID NO: 2222577 - RNA, 19 nt, Homo sapiens
  misc_RNA (1)...(19): siRNA sense strand
ggaugagggugcagagcca

SEQ ID NO: 2222578 - RNA, 19 nt, Homo sapiens
  misc_RNA (1)...(19): siRNA sense strand
gggagauggaggaggcaga

SEQ ID NO: 2222579 - RNA, 19 nt, Homo sapiens
  misc_RNA (1)...(19): siRNA sense strand
cgcaagaagagcagggaca

SEQ ID NO: 2222580 - RNA, 19 nt, Homo sapiens
  misc_RNA (1)...(19): siRNA sense strand
ccgaggacagguagugaaa

SEQ ID NO: 2222581 - RNA, 19 nt, Homo sapiens
  misc_RNA (1)...(19): siRNA sense strand
ccaaggugguggaggagca

SEQ ID NO: 2222582 - RNA, 19 nt, Homo sapiens
  misc_RNA (1)...(19): siRNA sense strand
ucuauaacuaccuggauaa

SEQ ID NO: 2222583 - RNA, 19 nt, Homo sapiens
  misc_RNA (1)...(19): siRNA sense strand
uggaagcaaacgaggacua

SEQ ID NO: 2222584 - RNA, 19 nt, Homo sapiens
  misc_RNA (1)...(19): siRNA sense strand
gagaagacaacccggaaaa

SEQ ID NO: 2222585 - RNA, 19 nt, Homo sapiens
  misc_RNA (1)...(19): siRNA sense strand
agaaauauguccuucccaa

SEQ ID NO: 2222586 - RNA, 19 nt, Homo sapiens
  misc_RNA (1)...(19): siRNA sense strand
ccagguacaucuaugggaa

SEQ ID NO: 2222587 - RNA, 19 nt, Homo sapiens
  misc_RNA (1)...(19): siRNA sense strand
gugaauggacagagccaca

SEQ ID NO: 2222588 - RNA, 19 nt, Homo sapiens
  misc_RNA (1)...(19): siRNA sense strand
cucuauaacuaccuggaua

SEQ ID NO: 2222589 - RNA, 19 nt, Homo sapiens
  misc_RNA (1)...(19): siRNA sense strand
augugaaggugggaggaaa

SEQ ID NO: 2222590 - RNA, 19 nt, Homo sapiens
  misc_RNA (1)...(19): siRNA sense strand
cugccaggaccuacagaua

SEQ ID NO: 2222591 - RNA, 19 nt, Homo sapiens
  misc_RNA (1)...(19): siRNA sense strand
ucgcuuggaaccugggaaa

SEQ ID NO: 2222592 - RNA, 19 nt, Homo sapiens
  misc_RNA (1)...(19): siRNA sense strand
aguacacgauggaagcaaa

SEQ ID NO: 2222593 - RNA, 19 nt, Homo sapiens
  misc_RNA (1)...(19): siRNA sense strand
ucucaaaggcagaguucca

SEQ ID NO: 2222594 - RNA, 19 nt, Homo sapiens
  misc_RNA (1)...(19): siRNA sense strand
aggcgauuaaugagaaauu

SEQ ID NO: 2222595 - RNA, 19 nt, Homo sapiens
  misc_RNA (1)...(19): siRNA sense strand
gcaaagcagagauggcaga

SEQ ID NO: 2222596 - RNA, 19 nt, Homo sapiens
  misc_RNA (1)...(19): siRNA sense strand
gugccaagcaguaccggaa

SEQ ID NO: 2222597 - RNA, 19 nt, Homo sapiens
  misc_RNA (1)...(19): siRNA sense strand
cgucaggguuacagccuca

SEQ ID NO: 2222598 - RNA, 19 nt, Homo sapiens
  misc_RNA (1)...(19): siRNA sense strand
ccuccaucucaaaggcaaa

SEQ ID NO: 2222599 - RNA, 19 nt, Homo sapiens
  misc_RNA (1)...(19): siRNA sense strand
cugcuaaucagaugcgcaa

SEQ ID NO: 2222600 - RNA, 19 nt, Homo sapiens
  misc_RNA (1)...(19): siRNA sense strand
aguacggcuuccagguuaa

SEQ ID NO: 2222601 - RNA, 19 nt, Homo sapiens
  misc_RNA (1)...(19): siRNA sense strand
ugucaaggccgcugcuaau

SEQ ID NO: 2222602 - RNA, 19 nt, Homo sapiens
  misc_RNA (1)...(19): siRNA sense strand
gggcaaggucuuugaagcu

SEQ ID NO: 2222603 - RNA, 19 nt, Homo sapiens
  misc_RNA (1)...(19): siRNA sense strand
gguuacagccucagaucca

SEQ ID NO: 2222604 - RNA, 19 nt, Homo sapiens
  misc_RNA (1)...(19): siRNA sense strand
aaaggcgauuaaugagaaa

SEQ ID NO: 2222605 - RNA, 19 nt, Homo sapiens
  misc_RNA (1)...(19): siRNA sense strand
uguccaagguucugcagau

SEQ ID NO: 2222606 - RNA, 19 nt, Homo sapiens
  misc_RNA (1)...(19): siRNA sense strand
caguuugaggugaagaaau

SEQ ID NO: 2222607 - RNA, 19 nt, Homo sapiens
  misc_RNA (1)...(19): siRNA sense strand
uuaaugagaaauuggguca

SEQ ID NO: 2222608 - RNA, 19 nt, Homo sapiens
  misc_RNA (1)...(19): siRNA sense strand
ugagaaauugggucaguau

SEQ ID NO: 2222609 - RNA, 19 nt, Homo sapiens
  misc_RNA (1)...(19): siRNA sense strand
aggaggaggaccugauuga

SEQ ID NO: 2222610 - RNA, 19 nt, Homo sapiens
  misc_RNA (1)...(19): siRNA sense strand
cagaaaggcuacaugcgga

SEQ ID NO: 2222611 - RNA, 19 nt, Homo sapiens
  misc_RNA (1)...(19): siRNA sense strand
gcuuugaggcugugcagga

SEQ ID NO: 2222612 - RNA, 19 nt, Homo sapiens
  misc_RNA (1)...(19): siRNA sense strand
gcuuggaaccugggaaaga

SEQ ID NO: 2222613 - RNA, 19 nt, Homo sapiens
  misc_RNA (1)...(19): siRNA sense strand
gaggaugguaagaagacuu

SEQ ID NO: 2222614 - RNA, 19 nt, Homo sapiens
  misc_RNA (1)...(19): siRNA sense strand
uggaaacaguggaccgcuu

SEQ ID NO: 2222615 - RNA, 19 nt, Homo sapiens
  misc_RNA (1)...(19): siRNA sense strand
cugagaaacugcaggagac

SEQ ID NO: 2222616 - RNA, 19 nt, Homo sapiens
  misc_RNA (1)...(19): siRNA sense strand
aagcagagauggcagacca

SEQ ID NO: 2222617 - RNA, 19 nt, Homo sapiens
  misc_RNA (1)...(19): siRNA sense strand
ggaaccugggaaagaauau

SEQ ID NO: 2222618 - RNA, 19 nt, Homo sapiens
  misc_RNA (1)...(19): siRNA sense strand
guccaaaaccaaaggccua

SEQ ID NO: 2222619 - RNA, 19 nt, Homo sapiens
  misc_RNA (1)...(19): siRNA sense strand
ccuucuacuuuguggccuu

SEQ ID NO: 2222620 - RNA, 19 nt, Homo sapiens
  misc_RNA (1)...(19): siRNA sense strand
gcaucuggcggaacggcaa

SEQ ID NO: 2222621 - RNA, 19 nt, Homo sapiens
  misc_RNA (1)...(19): siRNA sense strand
augaaaugcaguuagacau

SEQ ID NO: 2222622 - RNA, 19 nt, Homo sapiens
  misc_RNA (1)...(19): siRNA sense strand
cugccaauuugcugagagu

SEQ ID NO: 2222623 - RNA, 19 nt, Homo sapiens
  misc_RNA (1)...(19): siRNA sense strand
gccaauuugcugagagucu

SEQ ID NO: 2222624 - RNA, 19 nt, Homo sapiens
  misc_RNA (1)...(19): siRNA sense strand
ccaacuuugaggugaagau

SEQ ID NO: 2222625 - RNA, 19 nt, Homo sapiens
  misc_RNA (1)...(19): siRNA sense strand
cagaaagagacuaagcugu

SEQ ID NO: 2222626 - RNA, 19 nt, Homo sapiens
  misc_RNA (1)...(19): siRNA sense strand
ugggagaugcgguguccaa

SEQ ID NO: 2222627 - RNA, 19 nt, Homo sapiens
  misc_RNA (1)...(19): siRNA sense strand
cacaacaaccucauggcaa

SEQ ID NO: 2222628 - RNA, 19 nt, Homo sapiens
  misc_RNA (1)...(19): siRNA sense strand
ggugggaggaaacagcaaa

SEQ ID NO: 2222629 - RNA, 19 nt, Homo sapiens
  misc_RNA (1)...(19): siRNA sense strand
ccuacagauagaagugaca

SEQ ID NO: 2222630 - RNA, 19 nt, Homo sapiens
  misc_RNA (1)...(19): siRNA sense strand
ucaugaaucgagagcccaa

SEQ ID NO: 2222631 - RNA, 19 nt, Homo sapiens
  misc_RNA (1)...(19): siRNA sense strand
ggauugaaaccacagccua

SEQ ID NO: 2222632 - RNA, 19 nt, Homo sapiens
  misc_RNA (1)...(19): siRNA sense strand
cagccaaggaugacccaga

SEQ ID NO: 2222633 - RNA, 19 nt, Homo sapiens
  misc_RNA (1)...(19): siRNA sense strand
cagucaugguggagaacuc

SEQ ID NO: 2222634 - RNA, 19 nt, Homo sapiens
  misc_RNA (1)...(19): siRNA sense strand
ccaagcuggugaauggaca

SEQ ID NO: 2222635 - RNA, 19 nt, Homo sapiens
  misc_RNA (1)...(19): siRNA sense strand
uuauccagaaagagacuaa

SEQ ID NO: 2222636 - RNA, 19 nt, Homo sapiens
  misc_RNA (1)...(19): siRNA sense strand
guguacaguugaugggcaa

SEQ ID NO: 2222637 - RNA, 19 nt, Homo sapiens
  misc_RNA (1)...(19): siRNA sense strand
cuucaaggguggaaaccaa

SEQ ID NO: 2222638 - RNA, 19 nt, Homo sapiens
  misc_RNA (1)...(19): siRNA sense strand
uggugagaacugugagaaa

SEQ ID NO: 2222639 - RNA, 19 nt, Homo sapiens
  misc_RNA (1)...(19): siRNA sense strand
aagcaggagacuagagaau

SEQ ID NO: 2222640 - RNA, 19 nt, Homo sapiens
  misc_RNA (1)...(19): siRNA sense strand
gguuagaaucagugaagga

SEQ ID NO: 2222641 - RNA, 19 nt, Homo sapiens
  misc_RNA (1)...(19): siRNA sense strand
gugucaggauugaaacaaa

SEQ ID NO: 2222642 - RNA, 19 nt, Homo sapiens
  misc_RNA (1)...(19): siRNA sense strand
uauacagggagcagagaaa

SEQ ID NO: 2222643 - RNA, 19 nt, Homo sapiens
  misc_RNA (1)...(19): siRNA sense strand
caggauugaaacaaagaaa

SEQ ID NO: 2222644 - RNA, 19 nt, Homo sapiens
  misc_RNA (1)...(19): siRNA sense strand
agagaauguaacuggcaaa

SEQ ID NO: 2222645 - RNA, 19 nt, Homo sapiens
  misc_RNA (1)...(19): siRNA sense strand
guuagaaugcaauggagaa

SEQ ID NO: 2222646 - RNA, 19 nt, Homo sapiens
  misc_RNA (1)...(19): siRNA sense strand
uagaaucagugaaggaaaa

SEQ ID NO: 2222647 - RNA, 19 nt, Homo sapiens
  misc_RNA (1)...(19): siRNA sense strand
ucguggacuugguaagaaa

SEQ ID NO: 2222648 - RNA, 19 nt, Homo sapiens
  misc_RNA (1)...(19): siRNA sense strand
gucaaaagcaguaggacaa

SEQ ID NO: 2222649 - RNA, 19 nt, Homo sapiens
  misc_RNA (1)...(19): siRNA sense strand
gugagaacugugagaaaca

SEQ ID NO: 2222650 - RNA, 19 nt, Homo sapiens
  misc_RNA (1)...(19): siRNA sense strand
aggagagcccagaggagaa

SEQ ID NO: 2222651 - RNA, 19 nt, Homo sapiens
  misc_RNA (1)...(19): siRNA sense strand
caaacaggaagauggaaau

SEQ ID NO: 2222652 - RNA, 19 nt, Homo sapiens
  misc_RNA (1)...(19): siRNA sense strand
uggugaauccauugagcua

SEQ ID NO: 2222653 - RNA, 19 nt, Homo sapiens
  misc_RNA (1)...(19): siRNA sense strand
aggcugacugcaagaauaa

SEQ ID NO: 2222654 - RNA, 19 nt, Homo sapiens
  misc_RNA (1)...(19): siRNA sense strand
cagagcagacacagacaaa

SEQ ID NO: 2222655 - RNA, 19 nt, Homo sapiens
  misc_RNA (1)...(19): siRNA sense strand
uugaagaggcugacugcaa

SEQ ID NO: 2222656 - RNA, 19 nt, Homo sapiens
  misc_RNA (1)...(19): siRNA sense strand
guugaugggcaauggguuu

SEQ ID NO: 2222657 - RNA, 19 nt, Homo sapiens
  misc_RNA (1)...(19): siRNA sense strand
gauucgagguggaaggagu

SEQ ID NO: 2222658 - RNA, 19 nt, Homo sapiens
  misc_RNA (1)...(19): siRNA sense strand
agguggaaggagugaauau

SEQ ID NO: 2222659 - RNA, 19 nt, Homo sapiens
  misc_RNA (1)...(19): siRNA sense strand
uuguaugucuccagaagaa

SEQ ID NO: 2222660 - RNA, 19 nt, Homo sapiens
  misc_RNA (1)...(19): siRNA sense strand
acuuauaagagaucgagaa

SEQ ID NO: 2222661 - RNA, 19 nt, Homo sapiens
  misc_RNA (1)...(19): siRNA sense strand
cuggaaaguguuuggccua

SEQ ID NO: 2222662 - RNA, 19 nt, Homo sapiens
  misc_RNA (1)...(19): siRNA sense strand
ggacaaaggcaguaugcac

SEQ ID NO: 2222663 - RNA, 19 nt, Homo sapiens
  misc_RNA (1)...(19): siRNA sense strand
cauucaagccucucacaaa

SEQ ID NO: 2222664 - RNA, 19 nt, Homo sapiens
  misc_RNA (1)...(19): siRNA sense strand
cuucacaacgaaagcuaaa

SEQ ID NO: 2222665 - RNA, 19 nt, Homo sapiens
  misc_RNA (1)...(19): siRNA sense strand
ccaucuaagcucugcaaaa

SEQ ID NO: 2222666 - RNA, 19 nt, Homo sapiens
  misc_RNA (1)...(19): siRNA sense strand
ccaacagcacaaagaaaga

SEQ ID NO: 2222667 - RNA, 19 nt, Homo sapiens
  misc_RNA (1)...(19): siRNA sense strand
cucuuucacuggaggaaua

SEQ ID NO: 2222668 - RNA, 19 nt, Homo sapiens
  misc_RNA (1)...(19): siRNA sense strand
cgagguggaaggagugaau

SEQ ID NO: 2222669 - RNA, 19 nt, Homo sapiens
  misc_RNA (1)...(19): siRNA sense strand
auacuugguuggagaagau

SEQ ID NO: 2222670 - RNA, 19 nt, Homo sapiens
  misc_RNA (1)...(19): siRNA sense strand
cggaacaaccucaggaaag

SEQ ID NO: 2222671 - RNA, 19 nt, Homo sapiens
  misc_RNA (1)...(19): siRNA sense strand
aagaaaugaaagaggucga

SEQ ID NO: 2222672 - RNA, 19 nt, Homo sapiens
  misc_RNA (1)...(19): siRNA sense strand
cuuugaaacuguuggauac

SEQ ID NO: 2222673 - RNA, 19 nt, Homo sapiens
  misc_RNA (1)...(19): siRNA sense strand
gaagaagacuguagccauc

SEQ ID NO: 2222674 - RNA, 19 nt, Homo sapiens
  misc_RNA (1)...(19): siRNA sense strand
gcaaaauugaagaggcuga

SEQ ID NO: 2222675 - RNA, 19 nt, Homo sapiens
  misc_RNA (1)...(19): siRNA sense strand
cugcagaagaugacuugaa

SEQ ID NO: 2222676 - RNA, 19 nt, Homo sapiens
  misc_RNA (1)...(19): siRNA sense strand
ccaaugcaguagacggaca

SEQ ID NO: 2222677 - RNA, 19 nt, Homo sapiens
  misc_RNA (1)...(19): siRNA sense strand
guauagaauuggugaaucc

SEQ ID NO: 2222678 - RNA, 19 nt, Homo sapiens
  misc_RNA (1)...(19): siRNA sense strand
cagacaaauaguaguagau

SEQ ID NO: 2222679 - RNA, 19 nt, Homo sapiens
  misc_RNA (1)...(19): siRNA sense strand
ucaguuuagcagugaggaa

SEQ ID NO: 2222680 - RNA, 19 nt, Homo sapiens
  misc_RNA (1)...(19): siRNA sense strand
uuagaaucagugaaggaaa

SEQ ID NO: 2222681 - RNA, 19 nt, Homo sapiens
  misc_RNA (1)...(19): siRNA sense strand
cagagaaacaugaagguuc

SEQ ID NO: 2222682 - RNA, 19 nt, Homo sapiens
  misc_RNA (1)...(19): siRNA sense strand
ucaggaaagcuuugcaaga

SEQ ID NO: 2222683 - RNA, 19 nt, Homo sapiens
  misc_RNA (1)...(19): siRNA sense strand
cugugaagugggaacuaua

SEQ ID NO: 2222684 - RNA, 19 nt, Homo sapiens
  misc_RNA (1)...(19): siRNA sense strand
uuagaaugcaauggagaaa

SEQ ID NO: 2222685 - RNA, 19 nt, Homo sapiens
  misc_RNA (1)...(19): siRNA sense strand
gggagaagcgacaagagga

SEQ ID NO: 2222686 - RNA, 19 nt, Homo sapiens
  misc_RNA (1)...(19): siRNA sense strand
aguuagaaugcaauggaga

SEQ ID NO: 2222687 - RNA, 19 nt, Homo sapiens
  misc_RNA (1)...(19): siRNA sense strand
uccucaaagagaagugaaa

SEQ ID NO: 2222688 - RNA, 19 nt, Homo sapiens
  misc_RNA (1)...(19): siRNA sense strand
agaagaagacuguagccau

SEQ ID NO: 2222689 - RNA, 19 nt, Homo sapiens
  misc_RNA (1)...(19): siRNA sense strand
gcauggacucaguggacca

SEQ ID NO: 2222690 - RNA, 19 nt, Homo sapiens
  misc_RNA (1)...(19): siRNA sense strand
agaagcgacaagaggaaga

SEQ ID NO: 2222691 - RNA, 19 nt, Homo sapiens
  misc_RNA (1)...(19): siRNA sense strand
agaaagaauccuguggcua

SEQ ID NO: 2222692 - RNA, 19 nt, Homo sapiens
  misc_RNA (1)...(19): siRNA sense strand
auaaguacuaccaggaaaa

SEQ ID NO: 2222693 - RNA, 19 nt, Homo sapiens
  misc_RNA (1)...(19): siRNA sense strand
agaaugcaauggagaaaau

SEQ ID NO: 2222694 - RNA, 19 nt, Homo sapiens
  misc_RNA (1)...(19): siRNA sense strand
aaaugacuguggagacaau

SEQ ID NO: 2222695 - RNA, 19 nt, Homo sapiens
  misc_RNA (1)...(19): siRNA sense strand
agaucgagaacccgagaau

SEQ ID NO: 2222696 - RNA, 19 nt, Homo sapiens
  misc_RNA (1)...(19): siRNA sense strand
ggaaaacaauggacaacca

SEQ ID NO: 2222697 - RNA, 19 nt, Homo sapiens
  misc_RNA (1)...(19): siRNA sense strand
agaagaucucuguguguuu

SEQ ID NO: 2222698 - RNA, 19 nt, Homo sapiens
  misc_RNA (1)...(19): siRNA sense strand
cagauuucuacaaggauuu

SEQ ID NO: 2222699 - RNA, 19 nt, Homo sapiens
  misc_RNA (1)...(19): siRNA sense strand
acgcaaugucacagagaaa

SEQ ID NO: 2222700 - RNA, 19 nt, Homo sapiens
  misc_RNA (1)...(19): siRNA sense strand
aggcaaaugcagagguauu

SEQ ID NO: 2222701 - RNA, 19 nt, Homo sapiens
  misc_RNA (1)...(19): siRNA sense strand
cagucuggccagugggaua

SEQ ID NO: 2222702 - RNA, 19 nt, Homo sapiens
  misc_RNA (1)...(19): siRNA sense strand
gacagaaacaagagggaca

SEQ ID NO: 2222703 - RNA, 19 nt, Homo sapiens
  misc_RNA (1)...(19): siRNA sense strand
cguccaugccugugccaaa

SEQ ID NO: 2222704 - RNA, 19 nt, Homo sapiens
  misc_RNA (1)...(19): siRNA sense strand
gccacagacccaaggcaaa

SEQ ID NO: 2222705 - RNA, 19 nt, Homo sapiens
  misc_RNA (1)...(19): siRNA sense strand
cuauauuaggagaaccaaa

SEQ ID NO: 2222706 - RNA, 19 nt, Homo sapiens
  misc_RNA (1)...(19): siRNA sense strand
ggacaaugacuguggagac

SEQ ID NO: 2222707 - RNA, 19 nt, Homo sapiens
  misc_RNA (1)...(19): siRNA sense strand
cagagaaaauggcaagcaa

SEQ ID NO: 2222708 - RNA, 19 nt, Homo sapiens
  misc_RNA (1)...(19): siRNA sense strand
cugacaaggaagucgaaga

SEQ ID NO: 2222709 - RNA, 19 nt, Homo sapiens
  misc_RNA (1)...(19): siRNA sense strand
aaguggaauugcuggucaa

SEQ ID NO: 2222710 - RNA, 19 nt, Homo sapiens
  misc_RNA (1)...(19): siRNA sense strand
auugaugggaaguggaauu

SEQ ID NO: 2222711 - RNA, 19 nt, Homo sapiens
  misc_RNA (1)...(19): siRNA sense strand
ucaucaaaguuaaggugga

SEQ ID NO: 2222712 - RNA, 19 nt, Homo sapiens
  misc_RNA (1)...(19): siRNA sense strand
cauggagagaggagauuau

SEQ ID NO: 2222713 - RNA, 19 nt, Homo sapiens
  misc_RNA (1)...(19): siRNA sense strand
ggggagacgcugugcagua

SEQ ID NO: 2222714 - RNA, 19 nt, Homo sapiens
  misc_RNA (1)...(19): siRNA sense strand
gcaaugucacagagaaaau

SEQ ID NO: 2222715 - RNA, 19 nt, Homo sapiens
  misc_RNA (1)...(19): siRNA sense strand
auccugaacacgagguuua

SEQ ID NO: 2222716 - RNA, 19 nt, Homo sapiens
  misc_RNA (1)...(19): siRNA sense strand
ggccauggagagaggagau

SEQ ID NO: 2222717 - RNA, 19 nt, Homo sapiens
  misc_RNA (1)...(19): siRNA sense strand
gugccauugaagaggucua

SEQ ID NO: 2222718 - RNA, 19 nt, Homo sapiens
  misc_RNA (1)...(19): siRNA sense strand
agcaaacuguagaaggauu

SEQ ID NO: 2222719 - RNA, 19 nt, Homo sapiens
  misc_RNA (1)...(19): siRNA sense strand
agucaaagugaucgaggca

SEQ ID NO: 2222720 - RNA, 19 nt, Homo sapiens
  misc_RNA (1)...(19): siRNA sense strand
ucuggaagacguaagacaa

SEQ ID NO: 2222721 - RNA, 19 nt, Homo sapiens
  misc_RNA (1)...(19): siRNA sense strand
aagaaaagguacagguaug

SEQ ID NO: 2222722 - RNA, 19 nt, Homo sapiens
  misc_RNA (1)...(19): siRNA sense strand
aaguuaagguggagccucu

SEQ ID NO: 2222723 - RNA, 19 nt, Homo sapiens
  misc_RNA (1)...(19): siRNA sense strand
acucagauuuugaacgcaa

SEQ ID NO: 2222724 - RNA, 19 nt, Homo sapiens
  misc_RNA (1)...(19): siRNA sense strand
guucuugaucacagguauu

SEQ ID NO: 2222725 - RNA, 19 nt, Homo sapiens
  misc_RNA (1)...(19): siRNA sense strand
cgccacagacccaaggcaa

SEQ ID NO: 2222726 - RNA, 19 nt, Homo sapiens
  misc_RNA (1)...(19): siRNA sense strand
cuccagaggugaaaggcca

SEQ ID NO: 2222727 - RNA, 19 nt, Homo sapiens
  misc_RNA (1)...(19): siRNA sense strand
acaaagaggccauggagag

SEQ ID NO: 2222728 - RNA, 19 nt, Homo sapiens
  misc_RNA (1)...(19): siRNA sense strand
ugucagaagaaaagguaca

SEQ ID NO: 2222729 - RNA, 19 nt, Homo sapiens
  misc_RNA (1)...(19): siRNA sense strand
augcggaagucaagugcga

SEQ ID NO: 2222730 - RNA, 19 nt, Homo sapiens
  misc_RNA (1)...(19): siRNA sense strand
cacuauauuaggagaacca

SEQ ID NO: 2222731 - RNA, 19 nt, Homo sapiens
  misc_RNA (1)...(19): siRNA sense strand
acgaguuccuucagagagu

SEQ ID NO: 2222732 - RNA, 19 nt, Homo sapiens
  misc_RNA (1)...(19): siRNA sense strand
ccgaagaacugauggugga

SEQ ID NO: 2222733 - RNA, 19 nt, Homo sapiens
  misc_RNA (1)...(19): siRNA sense strand
ccauuaaaacaaagggcaa

SEQ ID NO: 2222734 - RNA, 19 nt, Homo sapiens
  misc_RNA (1)...(19): siRNA sense strand
auauggggauuuugggaaa

SEQ ID NO: 2222735 - RNA, 19 nt, Homo sapiens
  misc_RNA (1)...(19): siRNA sense strand
uugaugacucucaggacaa

SEQ ID NO: 2222736 - RNA, 19 nt, Homo sapiens
  misc_RNA (1)...(19): siRNA sense strand
aaacaaagggcaagagugc

SEQ ID NO: 2222737 - RNA, 19 nt, Homo sapiens
  misc_RNA (1)...(19): siRNA sense strand
aagacaacguggugagaaa

SEQ ID NO: 2222738 - RNA, 19 nt, Homo sapiens
  misc_RNA (1)...(19): siRNA sense strand
ccgaagaggcugaggauca

SEQ ID NO: 2222739 - RNA, 19 nt, Homo sapiens
  misc_RNA (1)...(19): siRNA sense strand
agaaggaggaggaggaaga

SEQ ID NO: 2222740 - RNA, 19 nt, Homo sapiens
  misc_RNA (1)...(19): siRNA sense strand
ccaagaagcugcaggccau

SEQ ID NO: 2222741 - RNA, 19 nt, Homo sapiens
  misc_RNA (1)...(19): siRNA sense strand
gagaauagccuuaucguca

SEQ ID NO: 2222742 - RNA, 19 nt, Homo sapiens
  misc_RNA (1)...(19): siRNA sense strand
gggacaagaugauggagga

SEQ ID NO: 2222743 - RNA, 19 nt, Homo sapiens
  misc_RNA (1)...(19): siRNA sense strand
uggcaauagcaaaggaaaa

SEQ ID NO: 2222744 - RNA, 19 nt, Homo sapiens
  misc_RNA (1)...(19): siRNA sense strand
cggauucauuauaaggaua

SEQ ID NO: 2222745 - RNA, 19 nt, Homo sapiens
  misc_RNA (1)...(19): siRNA sense strand
agaagaaggaggaggagga

SEQ ID NO: 2222746 - RNA, 19 nt, Homo sapiens
  misc_RNA (1)...(19): siRNA sense strand
acgagaagaaugaggugaa

SEQ ID NO: 2222747 - RNA, 19 nt, Homo sapiens
  misc_RNA (1)...(19): siRNA sense strand
aggacgagcaagaggaaga

SEQ ID NO: 2222748 - RNA, 19 nt, Homo sapiens
  misc_RNA (1)...(19): siRNA sense strand
gcaucgacguggaggacga

SEQ ID NO: 2222749 - RNA, 19 nt, Homo sapiens
  misc_RNA (1)...(19): siRNA sense strand
ggaccagugagaugcgaaa

SEQ ID NO: 2222750 - RNA, 19 nt, Homo sapiens
  misc_RNA (1)...(19): siRNA sense strand
cagaugacauucaggguga

SEQ ID NO: 2222751 - RNA, 19 nt, Homo sapiens
  misc_RNA (1)...(19): siRNA sense strand
gggacagaccugagcauga

SEQ ID NO: 2222752 - RNA, 19 nt, Homo sapiens
  misc_RNA (1)...(19): siRNA sense strand
gagaaagauugucgaggca

SEQ ID NO: 2222753 - RNA, 19 nt, Homo sapiens
  misc_RNA (1)...(19): siRNA sense strand
ggaaggagaugauggcgau

SEQ ID NO: 2222754 - RNA, 19 nt, Homo sapiens
  misc_RNA (1)...(19): siRNA sense strand
ucaccaaggacgagcaaga

SEQ ID NO: 2222755 - RNA, 19 nt, Homo sapiens
  misc_RNA (1)...(19): siRNA sense strand
cgagcaagaggaagaagaa

SEQ ID NO: 2222756 - RNA, 19 nt, Homo sapiens
  misc_RNA (1)...(19): siRNA sense strand
agucauggcuuuugggauu

SEQ ID NO: 2222757 - RNA, 19 nt, Homo sapiens
  misc_RNA (1)...(19): siRNA sense strand
aagaaaagcaagacagauu

SEQ ID NO: 2222758 - RNA, 19 nt, Homo sapiens
  misc_RNA (1)...(19): siRNA sense strand
uugacaacaugaagaacaa

SEQ ID NO: 2222759 - RNA, 19 nt, Homo sapiens
  misc_RNA (1)...(19): siRNA sense strand
aggaauacagccuggagaa

SEQ ID NO: 2222760 - RNA, 19 nt, Homo sapiens
  misc_RNA (1)...(19): siRNA sense strand
gagcaacagaagaaucaaa

SEQ ID NO: 2222761 - RNA, 19 nt, Homo sapiens
  misc_RNA (1)...(19): siRNA sense strand
caucggaggaggaaagaga

SEQ ID NO: 2222762 - RNA, 19 nt, Homo sapiens
  misc_RNA (1)...(19): siRNA sense strand
ggaaagagaaccagggcuc

SEQ ID NO: 2222763 - RNA, 19 nt, Homo sapiens
  misc_RNA (1)...(19): siRNA sense strand
aggaagagaagaaggagga

SEQ ID NO: 2222764 - RNA, 19 nt, Homo sapiens
  misc_RNA (1)...(19): siRNA sense strand
ccaucaagcggcugccaaa

SEQ ID NO: 2222765 - RNA, 19 nt, Homo sapiens
  misc_RNA (1)...(19): siRNA sense strand
uggcagaggauauugacaa

SEQ ID NO: 2222766 - RNA, 19 nt, Homo sapiens
  misc_RNA (1)...(19): siRNA sense strand
ggacaagaugauggaggaa

SEQ ID NO: 2222767 - RNA, 19 nt, Homo sapiens
  misc_RNA (1)...(19): siRNA sense strand
ccgauauccucgugacuga

SEQ ID NO: 2222768 - RNA, 19 nt, Homo sapiens
  misc_RNA (1)...(19): siRNA sense strand
gugacugaguuugggaaua

SEQ ID NO: 2222769 - RNA, 19 nt, Homo sapiens
  misc_RNA (1)...(19): siRNA sense strand
ggaagaagaagcagcgaac

SEQ ID NO: 2222770 - RNA, 19 nt, Homo sapiens
  misc_RNA (1)...(19): siRNA sense strand
ugucuauagcugugaaaga

SEQ ID NO: 2222771 - RNA, 19 nt, Homo sapiens
  misc_RNA (1)...(19): siRNA sense strand
ggaccaaaugucagcccua

SEQ ID NO: 2222772 - RNA, 19 nt, Homo sapiens
  misc_RNA (1)...(19): siRNA sense strand
gugccaagcuggagaacuc

SEQ ID NO: 2222773 - RNA, 19 nt, Homo sapiens
  misc_RNA (1)...(19): siRNA sense strand
aagaagaagcagcgaacca

SEQ ID NO: 2222774 - RNA, 19 nt, Homo sapiens
  misc_RNA (1)...(19): siRNA sense strand
caauaaugacgguguuuca

SEQ ID NO: 2222775 - RNA, 19 nt, Homo sapiens
  misc_RNA (1)...(19): siRNA sense strand
aagagaagaaggaggagga

SEQ ID NO: 2222776 - RNA, 19 nt, Homo sapiens
  misc_RNA (1)...(19): siRNA sense strand
cggagaaccaccauaaaga

SEQ ID NO: 2222777 - RNA, 19 nt, Homo sapiens
  misc_RNA (1)...(19): siRNA sense strand
agcuaagacugccaggaaa

SEQ ID NO: 2222778 - RNA, 19 nt, Homo sapiens
  misc_RNA (1)...(19): siRNA sense strand
cggaaggagaugauggcga

SEQ ID NO: 2222779 - RNA, 19 nt, Homo sapiens
  misc_RNA (1)...(19): siRNA sense strand
aguacuaccggcagagcaa

SEQ ID NO: 2222780 - RNA, 19 nt, Homo sapiens
  misc_RNA (1)...(19): siRNA sense strand
gaguggaagaaguaugaau

SEQ ID NO: 2222781 - RNA, 19 nt, Homo sapiens
  misc_RNA (1)...(19): siRNA sense strand
gucacaaaguacugggcau

SEQ ID NO: 2222782 - RNA, 19 nt, Homo sapiens
  misc_RNA (1)...(19): siRNA sense strand
aggaagaagaagcagcgaa

SEQ ID NO: 2222783 - RNA, 19 nt, Homo sapiens
  misc_RNA (1)...(19): siRNA sense strand
gcaagaggaagaagaagca

SEQ ID NO: 2222784 - RNA, 19 nt, Homo sapiens
  misc_RNA (1)...(19): siRNA sense strand
gugaaagagcaacagaaga

SEQ ID NO: 2222785 - RNA, 19 nt, Homo sapiens
  misc_RNA (1)...(19): siRNA sense strand
ggaggaggaaagagaacca

SEQ ID NO: 2222786 - RNA, 19 nt, Homo sapiens
  misc_RNA (1)...(19): siRNA sense strand
gacacaugccgcagaacaa

SEQ ID NO: 2222787 - RNA, 19 nt, Homo sapiens
  misc_RNA (1)...(19): siRNA sense strand
aaagggaacggguggagaa

SEQ ID NO: 2222788 - RNA, 19 nt, Homo sapiens
  misc_RNA (1)...(19): siRNA sense strand
cucaauggguacauggaau

SEQ ID NO: 2222789 - RNA, 19 nt, Homo sapiens
  misc_RNA (1)...(19): siRNA sense strand
ggagcaucuucgaggucau

SEQ ID NO: 2222790 - RNA, 19 nt, Homo sapiens
  misc_RNA (1)...(19): siRNA sense strand
uggccaucgcuguggacaa

SEQ ID NO: 2222791 - RNA, 19 nt, Homo sapiens
  misc_RNA (1)...(19): siRNA sense strand
uggaaugugugcugaaagu

SEQ ID NO: 2222792 - RNA, 19 nt, Homo sapiens
  misc_RNA (1)...(19): siRNA sense strand
cuuuggaaucagcguguua

SEQ ID NO: 2222793 - RNA, 19 nt, Homo sapiens
  misc_RNA (1)...(19): siRNA sense strand
cagcaauaaugacgguguu

SEQ ID NO: 2222794 - RNA, 19 nt, Homo sapiens
  misc_RNA (1)...(19): siRNA sense strand
gugagaugcgaaagcagaa

SEQ ID NO: 2222795 - RNA, 19 nt, Homo sapiens
  misc_RNA (1)...(19): siRNA sense strand
ggaagacgaccguggggaa

SEQ ID NO: 2222796 - RNA, 19 nt, Homo sapiens
  misc_RNA (1)...(19): siRNA sense strand
ugccaaagcucaaggcugu

SEQ ID NO: 2222797 - RNA, 19 nt, Homo sapiens
  misc_RNA (1)...(19): siRNA sense strand
gagcagcggaccagugaga

SEQ ID NO: 2222798 - RNA, 19 nt, Homo sapiens
  misc_RNA (1)...(19): siRNA sense strand
aggagaaccgcaacaacaa

SEQ ID NO: 2222799 - RNA, 19 nt, Homo sapiens
  misc_RNA (1)...(19): siRNA sense strand
ggauguacaagcagucaau

SEQ ID NO: 2222800 - RNA, 19 nt, Homo sapiens
  misc_RNA (1)...(19): siRNA sense strand
ccgacaaacagcagaugga

SEQ ID NO: 2222801 - RNA, 19 nt, Homo sapiens
  misc_RNA (1)...(19): siRNA sense strand
guuuacaagucguccugaa

SEQ ID NO: 2222802 - RNA, 19 nt, Homo sapiens
  misc_RNA (1)...(19): siRNA sense strand
ugguggacccgcaggagaa

SEQ ID NO: 2222803 - RNA, 19 nt, Homo sapiens
  misc_RNA (1)...(19): siRNA sense strand
caggagaaccgcaacaaca

SEQ ID NO: 2222804 - RNA, 19 nt, Homo sapiens
  misc_RNA (1)...(19): siRNA sense strand
gcuaagacugccaggaaac

SEQ ID NO: 2222805 - RNA, 19 nt, Homo sapiens
  misc_RNA (1)...(19): siRNA sense strand
aagacaacguggugagaaa

SEQ ID NO: 2222806 - RNA, 19 nt, Homo sapiens
  misc_RNA (1)...(19): siRNA sense strand
ccgaagaggcugaggauca

SEQ ID NO: 2222807 - RNA, 19 nt, Homo sapiens
  misc_RNA (1)...(19): siRNA sense strand
agaaggaggaggaggaaga

SEQ ID NO: 2222808 - RNA, 19 nt, Homo sapiens
  misc_RNA (1)...(19): siRNA sense strand
ccaagaagcugcaggccau

SEQ ID NO: 2222809 - RNA, 19 nt, Homo sapiens
  misc_RNA (1)...(19): siRNA sense strand
gagaauagccuuaucguca

SEQ ID NO: 2222810 - RNA, 19 nt, Homo sapiens
  misc_RNA (1)...(19): siRNA sense strand
gggacaagaugauggagga

SEQ ID NO: 2222811 - RNA, 19 nt, Homo sapiens
  misc_RNA (1)...(19): siRNA sense strand
uggcaauagcaaaggaaaa

SEQ ID NO: 2222812 - RNA, 19 nt, Homo sapiens
  misc_RNA (1)...(19): siRNA sense strand
cggauucauuauaaggaua

SEQ ID NO: 2222813 - RNA, 19 nt, Homo sapiens
  misc_RNA (1)...(19): siRNA sense strand
agaagaaggaggaggagga

SEQ ID NO: 2222814 - RNA, 19 nt, Homo sapiens
  misc_RNA (1)...(19): siRNA sense strand
acgagaagaaugaggugaa

SEQ ID NO: 2222815 - RNA, 19 nt, Homo sapiens
  misc_RNA (1)...(19): siRNA sense strand
aggacgagcaagaggaaga

SEQ ID NO: 2222816 - RNA, 19 nt, Homo sapiens
  misc_RNA (1)...(19): siRNA sense strand
gcaucgacguggaggacga

SEQ ID NO: 2222817 - RNA, 19 nt, Homo sapiens
  misc_RNA (1)...(19): siRNA sense strand
ggaccagugagaugcgaaa

SEQ ID NO: 2222818 - RNA, 19 nt, Homo sapiens
  misc_RNA (1)...(19): siRNA sense strand
cagaugacauucaggguga

SEQ ID NO: 2222819 - RNA, 19 nt, Homo sapiens
  misc_RNA (1)...(19): siRNA sense strand
gggacagaccugagcauga

SEQ ID NO: 2222820 - RNA, 19 nt, Homo sapiens
  misc_RNA (1)...(19): siRNA sense strand
gagaaagauugucgaggca

SEQ ID NO: 2222821 - RNA, 19 nt, Homo sapiens
  misc_RNA (1)...(19): siRNA sense strand
ggaaggagaugauggcgau

SEQ ID NO: 2222822 - RNA, 19 nt, Homo sapiens
  misc_RNA (1)...(19): siRNA sense strand
ucaccaaggacgagcaaga

SEQ ID NO: 2222823 - RNA, 19 nt, Homo sapiens
  misc_RNA (1)...(19): siRNA sense strand
cgagcaagaggaagaagaa

SEQ ID NO: 2222824 - RNA, 19 nt, Homo sapiens
  misc_RNA (1)...(19): siRNA sense strand
agucauggcuuuugggauu

SEQ ID NO: 2222825 - RNA, 19 nt, Homo sapiens
  misc_RNA (1)...(19): siRNA sense strand
aagaaaagcaagacagauu

SEQ ID NO: 2222826 - RNA, 19 nt, Homo sapiens
  misc_RNA (1)...(19): siRNA sense strand
uugacaacaugaagaacaa

SEQ ID NO: 2222827 - RNA, 19 nt, Homo sapiens
  misc_RNA (1)...(19): siRNA sense strand
aggaauacagccuggagaa

SEQ ID NO: 2222828 - RNA, 19 nt, Homo sapiens
  misc_RNA (1)...(19): siRNA sense strand
gagcaacagaagaaucaaa

SEQ ID NO: 2222829 - RNA, 19 nt, Homo sapiens
  misc_RNA (1)...(19): siRNA sense strand
caucggaggaggaaagaga

SEQ ID NO: 2222830 - RNA, 19 nt, Homo sapiens
  misc_RNA (1)...(19): siRNA sense strand
ggaaagagaaccagggcuc

SEQ ID NO: 2222831 - RNA, 19 nt, Homo sapiens
  misc_RNA (1)...(19): siRNA sense strand
aggaagagaagaaggagga

SEQ ID NO: 2222832 - RNA, 19 nt, Homo sapiens
  misc_RNA (1)...(19): siRNA sense strand
ccaucaagcggcugccaaa

SEQ ID NO: 2222833 - RNA, 19 nt, Homo sapiens
  misc_RNA (1)...(19): siRNA sense strand
uggcagaggauauugacaa

SEQ ID NO: 2222834 - RNA, 19 nt, Homo sapiens
  misc_RNA (1)...(19): siRNA sense strand
ggacaagaugauggaggaa

SEQ ID NO: 2222835 - RNA, 19 nt, Homo sapiens
  misc_RNA (1)...(19): siRNA sense strand
ccgauauccucgugacuga

SEQ ID NO: 2222836 - RNA, 19 nt, Homo sapiens
  misc_RNA (1)...(19): siRNA sense strand
gugacugaguuugggaaua

SEQ ID NO: 2222837 - RNA, 19 nt, Homo sapiens
  misc_RNA (1)...(19): siRNA sense strand
ggaagaagaagcagcgaac

SEQ ID NO: 2222838 - RNA, 19 nt, Homo sapiens
  misc_RNA (1)...(19): siRNA sense strand
ugucuauagcugugaaaga

SEQ ID NO: 2222839 - RNA, 19 nt, Homo sapiens
  misc_RNA (1)...(19): siRNA sense strand
ggaccaaaugucagcccua

SEQ ID NO: 2222840 - RNA, 19 nt, Homo sapiens
  misc_RNA (1)...(19): siRNA sense strand
gugccaagcuggagaacuc

SEQ ID NO: 2222841 - RNA, 19 nt, Homo sapiens
  misc_RNA (1)...(19): siRNA sense strand
aagaagaagcagcgaacca

SEQ ID NO: 2222842 - RNA, 19 nt, Homo sapiens
  misc_RNA (1)...(19): siRNA sense strand
caauaaugacgguguuuca

SEQ ID NO: 2222843 - RNA, 19 nt, Homo sapiens
  misc_RNA (1)...(19): siRNA sense strand
aagagaagaaggaggagga

SEQ ID NO: 2222844 - RNA, 19 nt, Homo sapiens
  misc_RNA (1)...(19): siRNA sense strand
cggagaaccaccauaaaga

SEQ ID NO: 2222845 - RNA, 19 nt, Homo sapiens
  misc_RNA (1)...(19): siRNA sense strand
agcuaagacugccaggaaa

SEQ ID NO: 2222846 - RNA, 19 nt, Homo sapiens
  misc_RNA (1)...(19): siRNA sense strand
cggaaggagaugauggcga

SEQ ID NO: 2222847 - RNA, 19 nt, Homo sapiens
  misc_RNA (1)...(19): siRNA sense strand
aguacuaccggcagagcaa

SEQ ID NO: 2222848 - RNA, 19 nt, Homo sapiens
  misc_RNA (1)...(19): siRNA sense strand
gaguggaagaaguaugaau

SEQ ID NO: 2222849 - RNA, 19 nt, Homo sapiens
  misc_RNA (1)...(19): siRNA sense strand
gucacaaaguacugggcau

SEQ ID NO: 2222850 - RNA, 19 nt, Homo sapiens
  misc_RNA (1)...(19): siRNA sense strand
aggaagaagaagcagcgaa

SEQ ID NO: 2222851 - RNA, 19 nt, Homo sapiens
  misc_RNA (1)...(19): siRNA sense strand
gcaagaggaagaagaagca

SEQ ID NO: 2222852 - RNA, 19 nt, Homo sapiens
  misc_RNA (1)...(19): siRNA sense strand
gugaaagagcaacagaaga

SEQ ID NO: 2222853 - RNA, 19 nt, Homo sapiens
  misc_RNA (1)...(19): siRNA sense strand
ggaggaggaaagagaacca

SEQ ID NO: 2222854 - RNA, 19 nt, Homo sapiens
  misc_RNA (1)...(19): siRNA sense strand
gacacaugccgcagaacaa

SEQ ID NO: 2222855 - RNA, 19 nt, Homo sapiens
  misc_RNA (1)...(19): siRNA sense strand
aaagggaacggguggagaa

SEQ ID NO: 2222856 - RNA, 19 nt, Homo sapiens
  misc_RNA (1)...(19): siRNA sense strand
cucaauggguacauggaau

SEQ ID NO: 2222857 - RNA, 19 nt, Homo sapiens
  misc_RNA (1)...(19): siRNA sense strand
ggagcaucuucgaggucau

SEQ ID NO: 2222858 - RNA, 19 nt, Homo sapiens
  misc_RNA (1)...(19): siRNA sense strand
uggccaucgcuguggacaa

SEQ ID NO: 2222859 - RNA, 19 nt, Homo sapiens
  misc_RNA (1)...(19): siRNA sense strand
uggaaugugugcugaaagu

SEQ ID NO: 2222860 - RNA, 19 nt, Homo sapiens
  misc_RNA (1)...(19): siRNA sense strand
cuuuggaaucagcguguua

SEQ ID NO: 2222861 - RNA, 19 nt, Homo sapiens
  misc_RNA (1)...(19): siRNA sense strand
cagcaauaaugacgguguu

SEQ ID NO: 2222862 - RNA, 19 nt, Homo sapiens
  misc_RNA (1)...(19): siRNA sense strand
gugagaugcgaaagcagaa

SEQ ID NO: 2222863 - RNA, 19 nt, Homo sapiens
  misc_RNA (1)...(19): siRNA sense strand
ggaagacgaccguggggaa

SEQ ID NO: 2222864 - RNA, 19 nt, Homo sapiens
  misc_RNA (1)...(19): siRNA sense strand
ugccaaagcucaaggcugu

SEQ ID NO: 2222865 - RNA, 19 nt, Homo sapiens
  misc_RNA (1)...(19): siRNA sense strand
gagcagcggaccagugaga

SEQ ID NO: 2222866 - RNA, 19 nt, Homo sapiens
  misc_RNA (1)...(19): siRNA sense strand
aggagaaccgcaacaacaa

SEQ ID NO: 2222867 - RNA, 19 nt, Homo sapiens
  misc_RNA (1)...(19): siRNA sense strand
ggauguacaagcagucaau

SEQ ID NO: 2222868 - RNA, 19 nt, Homo sapiens
  misc_RNA (1)...(19): siRNA sense strand
ccgacaaacagcagaugga

SEQ ID NO: 2222869 - RNA, 19 nt, Homo sapiens
  misc_RNA (1)...(19): siRNA sense strand
guuuacaagucguccugaa

SEQ ID NO: 2222870 - RNA, 19 nt, Homo sapiens
  misc_RNA (1)...(19): siRNA sense strand
ugguggacccgcaggagaa

SEQ ID NO: 2222871 - RNA, 19 nt, Homo sapiens
  misc_RNA (1)...(19): siRNA sense strand
caggagaaccgcaacaaca

SEQ ID NO: 2222872 - RNA, 19 nt, Homo sapiens
  misc_RNA (1)...(19): siRNA sense strand
gcuaagacugccaggaaac

SEQ ID NO: 2222873 - RNA, 19 nt, Homo sapiens
  misc_RNA (1)...(19): siRNA sense strand
aggccaaggcugaggagaa

SEQ ID NO: 2222874 - RNA, 19 nt, Homo sapiens
  misc_RNA (1)...(19): siRNA sense strand
agaucaagacggaagguaa

SEQ ID NO: 2222875 - RNA, 19 nt, Homo sapiens
  misc_RNA (1)...(19): siRNA sense strand
gcaugaagcucuuggacca

SEQ ID NO: 2222876 - RNA, 19 nt, Homo sapiens
  misc_RNA (1)...(19): siRNA sense strand
cagaggaaguggagaucau

SEQ ID NO: 2222877 - RNA, 19 nt, Homo sapiens
  misc_RNA (1)...(19): siRNA sense strand
agggagagacugaguacaa

SEQ ID NO: 2222878 - RNA, 19 nt, Homo sapiens
  misc_RNA (1)...(19): siRNA sense strand
aguaugacccagaggcuaa

SEQ ID NO: 2222879 - RNA, 19 nt, Homo sapiens
  misc_RNA (1)...(19): siRNA sense strand
ccuccaguuugcugagaua

SEQ ID NO: 2222880 - RNA, 19 nt, Homo sapiens
  misc_RNA (1)...(19): siRNA sense strand
cugcugacccagagggcaa

SEQ ID NO: 2222881 - RNA, 19 nt, Homo sapiens
  misc_RNA (1)...(19): siRNA sense strand
cuuugaagacacagaagua

SEQ ID NO: 2222882 - RNA, 19 nt, Homo sapiens
  misc_RNA (1)...(19): siRNA sense strand
gggaugacgaggaagauga

SEQ ID NO: 2222883 - RNA, 19 nt, Homo sapiens
  misc_RNA (1)...(19): siRNA sense strand
gggcagaaggagugcgaac

SEQ ID NO: 2222884 - RNA, 19 nt, Homo sapiens
  misc_RNA (1)...(19): siRNA sense strand
gcugaaaaucgaugaguuu

SEQ ID NO: 2222885 - RNA, 19 nt, Homo sapiens
  misc_RNA (1)...(19): siRNA sense strand
uggaagagaaccagcauga

SEQ ID NO: 2222886 - RNA, 19 nt, Homo sapiens
  misc_RNA (1)...(19): siRNA sense strand
aggaugaaggccugaggaa

SEQ ID NO: 2222887 - RNA, 19 nt, Homo sapiens
  misc_RNA (1)...(19): siRNA sense strand
ucauggauguugaggacuu

SEQ ID NO: 2222888 - RNA, 19 nt, Homo sapiens
  misc_RNA (1)...(19): siRNA sense strand
ccaagaugacagaggagga

SEQ ID NO: 2222889 - RNA, 19 nt, Homo sapiens
  misc_RNA (1)...(19): siRNA sense strand
gcuacuacuacguguacaa

SEQ ID NO: 2222890 - RNA, 19 nt, Homo sapiens
  misc_RNA (1)...(19): siRNA sense strand
gggcagaguaugacccaga

SEQ ID NO: 2222891 - RNA, 19 nt, Homo sapiens
  misc_RNA (1)...(19): siRNA sense strand
aggacgagcccuuggccaa

SEQ ID NO: 2222892 - RNA, 19 nt, Homo sapiens
  misc_RNA (1)...(19): siRNA sense strand
ggaagauguccaagggucu

SEQ ID NO: 2222893 - RNA, 19 nt, Homo sapiens
  misc_RNA (1)...(19): siRNA sense strand
cugagaugcugaugaagau

SEQ ID NO: 2222894 - RNA, 19 nt, Homo sapiens
  misc_RNA (1)...(19): siRNA sense strand
gggccaucaucaagaagau

SEQ ID NO: 2222895 - RNA, 19 nt, Homo sapiens
  misc_RNA (1)...(19): siRNA sense strand
ggucauggauguugaggac

SEQ ID NO: 2222896 - RNA, 19 nt, Homo sapiens
  misc_RNA (1)...(19): siRNA sense strand
gcaugcagauguuugggaa

SEQ ID NO: 2222897 - RNA, 19 nt, Homo sapiens
  misc_RNA (1)...(19): siRNA sense strand
aaauggaaccagaggaagu

SEQ ID NO: 2222898 - RNA, 19 nt, Homo sapiens
  misc_RNA (1)...(19): siRNA sense strand
acaagucagaagaggagaa

SEQ ID NO: 2222899 - RNA, 19 nt, Homo sapiens
  misc_RNA (1)...(19): siRNA sense strand
ugaaacgccaagaggagua

SEQ ID NO: 2222900 - RNA, 19 nt, Homo sapiens
  misc_RNA (1)...(19): siRNA sense strand
uggagaugcugaagggacu

SEQ ID NO: 2222901 - RNA, 19 nt, Homo sapiens
  misc_RNA (1)...(19): siRNA sense strand
gguggagaaugaagagcca

SEQ ID NO: 2222902 - RNA, 19 nt, Homo sapiens
  misc_RNA (1)...(19): siRNA sense strand
uggaugaguucaaggccau

SEQ ID NO: 2222903 - RNA, 19 nt, Homo sapiens
  misc_RNA (1)...(19): siRNA sense strand
guaagcggcuggugggcau

SEQ ID NO: 2222904 - RNA, 19 nt, Homo sapiens
  misc_RNA (1)...(19): siRNA sense strand
ccaagaaggacauuguaca

SEQ ID NO: 2222905 - RNA, 19 nt, Homo sapiens
  misc_RNA (1)...(19): siRNA sense strand
ugaacaucuuugugggcuu

SEQ ID NO: 2222906 - RNA, 19 nt, Homo sapiens
  misc_RNA (1)...(19): siRNA sense strand
cugagauagagauggaaga

SEQ ID NO: 2222907 - RNA, 19 nt, Homo sapiens
  misc_RNA (1)...(19): siRNA sense strand
gagaauacuuccaggugcu

SEQ ID NO: 2222908 - RNA, 19 nt, Homo sapiens
  misc_RNA (1)...(19): siRNA sense strand
acaacaacuuccagaccuu

SEQ ID NO: 2222909 - RNA, 19 nt, Homo sapiens
  misc_RNA (1)...(19): siRNA sense strand
ccaacaaugccaacgccaa

SEQ ID NO: 2222910 - RNA, 19 nt, Homo sapiens
  misc_RNA (1)...(19): siRNA sense strand
cagacaagucagaagagga

SEQ ID NO: 2222911 - RNA, 19 nt, Homo sapiens
  misc_RNA (1)...(19): siRNA sense strand
ggacccaaauaaaccggaa

SEQ ID NO: 2222912 - RNA, 19 nt, Homo sapiens
  misc_RNA (1)...(19): siRNA sense strand
ccucagagcaccacaacca

SEQ ID NO: 2222913 - RNA, 19 nt, Homo sapiens
  misc_RNA (1)...(19): siRNA sense strand
uggccauugccguggacaa

SEQ ID NO: 2222914 - RNA, 19 nt, Homo sapiens
  misc_RNA (1)...(19): siRNA sense strand
aagaggaguauuauggcua

SEQ ID NO: 2222915 - RNA, 19 nt, Homo sapiens
  misc_RNA (1)...(19): siRNA sense strand
aggaggagcuggagagagc

SEQ ID NO: 2222916 - RNA, 19 nt, Homo sapiens
  misc_RNA (1)...(19): siRNA sense strand
cuucauugguacagauauc

SEQ ID NO: 2222917 - RNA, 19 nt, Homo sapiens
  misc_RNA (1)...(19): siRNA sense strand
ccaagaagccaguuccuga

SEQ ID NO: 2222918 - RNA, 19 nt, Homo sapiens
  misc_RNA (1)...(19): siRNA sense strand
ggggaagacuggaccucaa

SEQ ID NO: 2222919 - RNA, 19 nt, Homo sapiens
  misc_RNA (1)...(19): siRNA sense strand
agucagaagaggagaaguc

SEQ ID NO: 2222920 - RNA, 19 nt, Homo sapiens
  misc_RNA (1)...(19): siRNA sense strand
acaacaaccguguggagau

SEQ ID NO: 2222921 - RNA, 19 nt, Homo sapiens
  misc_RNA (1)...(19): siRNA sense strand
ggcaacagagcuacugaaa

SEQ ID NO: 2222922 - RNA, 19 nt, Homo sapiens
  misc_RNA (1)...(19): siRNA sense strand
cgauugaagccgccaugaa

SEQ ID NO: 2222923 - RNA, 19 nt, Homo sapiens
  misc_RNA (1)...(19): siRNA sense strand
ucagaagaggagaagucaa

SEQ ID NO: 2222924 - RNA, 19 nt, Homo sapiens
  misc_RNA (1)...(19): siRNA sense strand
gcgaguggguacacagcga

SEQ ID NO: 2222925 - RNA, 19 nt, Homo sapiens
  misc_RNA (1)...(19): siRNA sense strand
guacaagaacugugagcug

SEQ ID NO: 2222926 - RNA, 19 nt, Homo sapiens
  misc_RNA (1)...(19): siRNA sense strand
ggaucaaacaccuggacgu

SEQ ID NO: 2222927 - RNA, 19 nt, Homo sapiens
  misc_RNA (1)...(19): siRNA sense strand
gcugcggaccauugaggaa

SEQ ID NO: 2222928 - RNA, 19 nt, Homo sapiens
  misc_RNA (1)...(19): siRNA sense strand
cccagaaggccaaggcuga

SEQ ID NO: 2222929 - RNA, 19 nt, Homo sapiens
  misc_RNA (1)...(19): siRNA sense strand
ggagagacugaguacaaga

SEQ ID NO: 2222930 - RNA, 19 nt, Homo sapiens
  misc_RNA (1)...(19): siRNA sense strand
aagagaaggccgugcccau

SEQ ID NO: 2222931 - RNA, 19 nt, Homo sapiens
  misc_RNA (1)...(19): siRNA sense strand
augagaaaucagauccuua

SEQ ID NO: 2222932 - RNA, 19 nt, Homo sapiens
  misc_RNA (1)...(19): siRNA sense strand
ggugcauguucguggccau

SEQ ID NO: 2222933 - RNA, 19 nt, Homo sapiens
  misc_RNA (1)...(19): siRNA sense strand
cugcaucagcauuguagaa

SEQ ID NO: 2222934 - RNA, 19 nt, Homo sapiens
  misc_RNA (1)...(19): siRNA sense strand
gaucaagacggaagguaac

SEQ ID NO: 2222935 - RNA, 19 nt, Homo sapiens
  misc_RNA (1)...(19): siRNA sense strand
ugucauggccaaucagaga

SEQ ID NO: 2222936 - RNA, 19 nt, Homo sapiens
  misc_RNA (1)...(19): siRNA sense strand
cgaacagcaaccauagcaa

SEQ ID NO: 2222937 - RNA, 19 nt, Homo sapiens
  misc_RNA (1)...(19): siRNA sense strand
aaccagaggaaguggagau

SEQ ID NO: 2222938 - RNA, 19 nt, Homo sapiens
  misc_RNA (1)...(19): siRNA sense strand
acugagaugcugaugaaga

SEQ ID NO: 2222939 - RNA, 19 nt, Homo sapiens
  misc_RNA (1)...(19): siRNA sense strand
acgaggaagaugagccuga

SEQ ID NO: 2222940 - RNA, 19 nt, Homo sapiens
  misc_RNA (1)...(19): siRNA sense strand
gguugaagcacguggcuag

SEQ ID NO: 2222941 - RNA, 19 nt, Homo sapiens
  misc_RNA (1)...(19): siRNA sense strand
aucaagaagaucuggaaga

SEQ ID NO: 2222942 - RNA, 19 nt, Homo sapiens
  misc_RNA (1)...(19): siRNA sense strand
aggaagaaacagcccaaga

SEQ ID NO: 2222943 - RNA, 19 nt, Homo sapiens
  misc_RNA (1)...(19): siRNA sense strand
gcaaacuucaucauggcaa

SEQ ID NO: 2222944 - RNA, 19 nt, Homo sapiens
  misc_RNA (1)...(19): siRNA sense strand
caaagaagcuguaccagga

SEQ ID NO: 2222945 - RNA, 19 nt, Homo sapiens
  misc_RNA (1)...(19): siRNA sense strand
ccggagggaaagaggguca

SEQ ID NO: 2222946 - RNA, 19 nt, Homo sapiens
  misc_RNA (1)...(19): siRNA sense strand
agaaacuacaacagaaaca

SEQ ID NO: 2222947 - RNA, 19 nt, Homo sapiens
  misc_RNA (1)...(19): siRNA sense strand
acauaugaauggcugaaaa

SEQ ID NO: 2222948 - RNA, 19 nt, Homo sapiens
  misc_RNA (1)...(19): siRNA sense strand
gguucaaugcagugaugau

SEQ ID NO: 2222949 - RNA, 19 nt, Homo sapiens
  misc_RNA (1)...(19): siRNA sense strand
ucaacugggcuguggcaau

SEQ ID NO: 2222950 - RNA, 19 nt, Homo sapiens
  misc_RNA (1)...(19): siRNA sense strand
ucuucacuccggagggaaa

SEQ ID NO: 2222951 - RNA, 19 nt, Homo sapiens
  misc_RNA (1)...(19): siRNA sense strand
ggaaagagggucagugagc

SEQ ID NO: 2222952 - RNA, 19 nt, Homo sapiens
  misc_RNA (1)...(19): siRNA sense strand
ucguuaggcuggagggcau

SEQ ID NO: 2222953 - RNA, 19 nt, Homo sapiens
  misc_RNA (1)...(19): siRNA sense strand
ugaucaggaaagugaggaa

SEQ ID NO: 2222954 - RNA, 19 nt, Homo sapiens
  misc_RNA (1)...(19): siRNA sense strand
acagcuacgagaugcgaaa

SEQ ID NO: 2222955 - RNA, 19 nt, Homo sapiens
  misc_RNA (1)...(19): siRNA sense strand
ggaacaagauuaaggccug

SEQ ID NO: 2222956 - RNA, 19 nt, Homo sapiens
  misc_RNA (1)...(19): siRNA sense strand
caggagaugacauggagau

SEQ ID NO: 2222957 - RNA, 19 nt, Homo sapiens
  misc_RNA (1)...(19): siRNA sense strand
agauuaaggccuggcagaa

SEQ ID NO: 2222958 - RNA, 19 nt, Homo sapiens
  misc_RNA (1)...(19): siRNA sense strand
cagucaacgacgcaggauu

SEQ ID NO: 2222959 - RNA, 19 nt, Homo sapiens
  misc_RNA (1)...(19): siRNA sense strand
acaaggauggagaugguau

SEQ ID NO: 2222960 - RNA, 19 nt, Homo sapiens
  misc_RNA (1)...(19): siRNA sense strand
ugaacaaacacaaggaccu

SEQ ID NO: 2222961 - RNA, 19 nt, Homo sapiens
  misc_RNA (1)...(19): siRNA sense strand
aagauuaaggccuggcaga

SEQ ID NO: 2222962 - RNA, 19 nt, Homo sapiens
  misc_RNA (1)...(19): siRNA sense strand
ucguuaggcuggagggcau

SEQ ID NO: 2222963 - RNA, 19 nt, Homo sapiens
  misc_RNA (1)...(19): siRNA sense strand
ugaucaggaaagugaggaa

SEQ ID NO: 2222964 - RNA, 19 nt, Homo sapiens
  misc_RNA (1)...(19): siRNA sense strand
acagcuacgagaugcgaaa

SEQ ID NO: 2222965 - RNA, 19 nt, Homo sapiens
  misc_RNA (1)...(19): siRNA sense strand
ggaacaagauuaaggccug

SEQ ID NO: 2222966 - RNA, 19 nt, Homo sapiens
  misc_RNA (1)...(19): siRNA sense strand
caggagaugacauggagau

SEQ ID NO: 2222967 - RNA, 19 nt, Homo sapiens
  misc_RNA (1)...(19): siRNA sense strand
agauuaaggccuggcagaa

SEQ ID NO: 2222968 - RNA, 19 nt, Homo sapiens
  misc_RNA (1)...(19): siRNA sense strand
cagucaacgacgcaggauu

SEQ ID NO: 2222969 - RNA, 19 nt, Homo sapiens
  misc_RNA (1)...(19): siRNA sense strand
acaaggauggagaugguau

SEQ ID NO: 2222970 - RNA, 19 nt, Homo sapiens
  misc_RNA (1)...(19): siRNA sense strand
ugaacaaacacaaggaccu

SEQ ID NO: 2222971 - RNA, 19 nt, Homo sapiens
  misc_RNA (1)...(19): siRNA sense strand
aagauuaaggccuggcaga

SEQ ID NO: 2222972 - RNA, 19 nt, Homo sapiens
  misc_RNA (1)...(19): siRNA sense strand
ucguuaggcuggagggcau

SEQ ID NO: 2222973 - RNA, 19 nt, Homo sapiens
  misc_RNA (1)...(19): siRNA sense strand
ugaucaggaaagugaggaa

SEQ ID NO: 2222974 - RNA, 19 nt, Homo sapiens
  misc_RNA (1)...(19): siRNA sense strand
acagcuacgagaugcgaaa

SEQ ID NO: 2222975 - RNA, 19 nt, Homo sapiens
  misc_RNA (1)...(19): siRNA sense strand
ggaacaagauuaaggccug

SEQ ID NO: 2222976 - RNA, 19 nt, Homo sapiens
  misc_RNA (1)...(19): siRNA sense strand
caggagaugacauggagau

SEQ ID NO: 2222977 - RNA, 19 nt, Homo sapiens
  misc_RNA (1)...(19): siRNA sense strand
agauuaaggccuggcagaa

SEQ ID NO: 2222978 - RNA, 19 nt, Homo sapiens
  misc_RNA (1)...(19): siRNA sense strand
cagucaacgacgcaggauu

SEQ ID NO: 2222979 - RNA, 19 nt, Homo sapiens
  misc_RNA (1)...(19): siRNA sense strand
acaaggauggagaugguau

SEQ ID NO: 2222980 - RNA, 19 nt, Homo sapiens
  misc_RNA (1)...(19): siRNA sense strand
ugaacaaacacaaggaccu

SEQ ID NO: 2222981 - RNA, 19 nt, Homo sapiens
  misc_RNA (1)...(19): siRNA sense strand
aagauuaaggccuggcaga

SEQ ID NO: 2222982 - RNA, 19 nt, Homo sapiens
  misc_RNA (1)...(19): siRNA sense strand
ucguuaggcuggagggcau

SEQ ID NO: 2222983 - RNA, 19 nt, Homo sapiens
  misc_RNA (1)...(19): siRNA sense strand
ugaucaggaaagugaggaa

SEQ ID NO: 2222984 - RNA, 19 nt, Homo sapiens
  misc_RNA (1)...(19): siRNA sense strand
acagcuacgagaugcgaaa

SEQ ID NO: 2222985 - RNA, 19 nt, Homo sapiens
  misc_RNA (1)...(19): siRNA sense strand
ggaacaagauuaaggccug

SEQ ID NO: 2222986 - RNA, 19 nt, Homo sapiens
  misc_RNA (1)...(19): siRNA sense strand
caggagaugacauggagau

SEQ ID NO: 2222987 - RNA, 19 nt, Homo sapiens
  misc_RNA (1)...(19): siRNA sense strand
agauuaaggccuggcagaa

SEQ ID NO: 2222988 - RNA, 19 nt, Homo sapiens
  misc_RNA (1)...(19): siRNA sense strand
cagucaacgacgcaggauu

SEQ ID NO: 2222989 - RNA, 19 nt, Homo sapiens
  misc_RNA (1)...(19): siRNA sense strand
acaaggauggagaugguau

SEQ ID NO: 2222990 - RNA, 19 nt, Homo sapiens
  misc_RNA (1)...(19): siRNA sense strand
ugaacaaacacaaggaccu

SEQ ID NO: 2222991 - RNA, 19 nt, Homo sapiens
  misc_RNA (1)...(19): siRNA sense strand
aagauuaaggccuggcaga

SEQ ID NO: 2222992 - RNA, 19 nt, Homo sapiens
  misc_RNA (1)...(19): siRNA sense strand
ucguuaggcuggagggcau

SEQ ID NO: 2222993 - RNA, 19 nt, Homo sapiens
  misc_RNA (1)...(19): siRNA sense strand
acagcuacgagaugcgaaa

SEQ ID NO: 2222994 - RNA, 19 nt, Homo sapiens
  misc_RNA (1)...(19): siRNA sense strand
ggaacaagauuaaggccug

SEQ ID NO: 2222995 - RNA, 19 nt, Homo sapiens
  misc_RNA (1)...(19): siRNA sense strand
agauuaaggccuggcagaa

SEQ ID NO: 2222996 - RNA, 19 nt, Homo sapiens
  misc_RNA (1)...(19): siRNA sense strand
cagucaacgacgcaggauu

SEQ ID NO: 2222997 - RNA, 19 nt, Homo sapiens
  misc_RNA (1)...(19): siRNA sense strand
acaaggauggagaugguau

SEQ ID NO: 2222998 - RNA, 19 nt, Homo sapiens
  misc_RNA (1)...(19): siRNA sense strand
ugaacaaacacaaggaccu

SEQ ID NO: 2222999 - RNA, 19 nt, Homo sapiens
  misc_RNA (1)...(19): siRNA sense strand
aagauuaaggccuggcaga

SEQ ID NO: 2223000 - RNA, 19 nt, Homo sapiens
  misc_RNA (1)...(19): siRNA sense strand
ucguuaggcuggagggcau

SEQ ID NO: 2223001 - RNA, 19 nt, Homo sapiens
  misc_RNA (1)...(19): siRNA sense strand
acagcuacgagaugcgaaa

SEQ ID NO: 2223002 - RNA, 19 nt, Homo sapiens
  misc_RNA (1)...(19): siRNA sense strand
ggaacaagauuaaggccug

SEQ ID NO: 2223003 - RNA, 19 nt, Homo sapiens
  misc_RNA (1)...(19): siRNA sense strand
agauuaaggccuggcagaa

SEQ ID NO: 2223004 - RNA, 19 nt, Homo sapiens
  misc_RNA (1)...(19): siRNA sense strand
cagucaacgacgcaggauu

SEQ ID NO: 2223005 - RNA, 19 nt, Homo sapiens
  misc_RNA (1)...(19): siRNA sense strand
acaaggauggagaugguau

SEQ ID NO: 2223006 - RNA, 19 nt, Homo sapiens
  misc_RNA (1)...(19): siRNA sense strand
ugaacaaacacaaggaccu

SEQ ID NO: 2223007 - RNA, 19 nt, Homo sapiens
  misc_RNA (1)...(19): siRNA sense strand
aagauuaaggccuggcaga

SEQ ID NO: 2223008 - RNA, 19 nt, Homo sapiens
  misc_RNA (1)...(19): siRNA sense strand
ccuacgagguggaagggau

SEQ ID NO: 2223009 - RNA, 19 nt, Homo sapiens
  misc_RNA (1)...(19): siRNA sense strand
ugaccaaguuccugagcga

SEQ ID NO: 2223010 - RNA, 19 nt, Homo sapiens
  misc_RNA (1)...(19): siRNA sense strand
agugugagcucuuggccaa

SEQ ID NO: 2223011 - RNA, 19 nt, Homo sapiens
  misc_RNA (1)...(19): siRNA sense strand
gggcugagauugugaggac

SEQ ID NO: 2223012 - RNA, 19 nt, Homo sapiens
  misc_RNA (1)...(19): siRNA sense strand
gccaggaagcugaaggaga

SEQ ID NO: 2223013 - RNA, 19 nt, Homo sapiens
  misc_RNA (1)...(19): siRNA sense strand
gggaagaaguucggccuga

SEQ ID NO: 2223014 - RNA, 19 nt, Homo sapiens
  misc_RNA (1)...(19): siRNA sense strand
gagaagaugagcuccgaga

SEQ ID NO: 2223015 - RNA, 19 nt, Homo sapiens
  misc_RNA (1)...(19): siRNA sense strand
gagaagaagcccugguggu

SEQ ID NO: 2223016 - RNA, 19 nt, Homo sapiens
  misc_RNA (1)...(19): siRNA sense strand
gagcagauccaguaccaca

SEQ ID NO: 2223017 - RNA, 19 nt, Homo sapiens
  misc_RNA (1)...(19): siRNA sense strand
ucgugaugccagagaagau

SEQ ID NO: 2223018 - RNA, 19 nt, Homo sapiens
  misc_RNA (1)...(19): siRNA sense strand
cagaggauaaggaagccaa

SEQ ID NO: 2223019 - RNA, 19 nt, Homo sapiens
  misc_RNA (1)...(19): siRNA sense strand
gugcggaacuacaugacca

SEQ ID NO: 2223020 - RNA, 19 nt, Homo sapiens
  misc_RNA (1)...(19): siRNA sense strand
ccgagaagguggacgugcu

SEQ ID NO: 2223021 - RNA, 19 nt, Homo sapiens
  misc_RNA (1)...(19): siRNA sense strand
ccuuauacguacagaguuc

SEQ ID NO: 2223022 - RNA, 19 nt, Homo sapiens
  misc_RNA (1)...(19): siRNA sense strand
gauuaaugguacagaugca

SEQ ID NO: 2223023 - RNA, 19 nt, Homo sapiens
  misc_RNA (1)...(19): siRNA sense strand
cauaaguaaaguugccaua

SEQ ID NO: 2223024 - RNA, 19 nt, Homo sapiens
  misc_RNA (1)...(19): siRNA sense strand
acguuaaucugaaaggaau

SEQ ID NO: 2223025 - RNA, 19 nt, Homo sapiens
  misc_RNA (1)...(19): siRNA sense strand
ucugauauuugcaggucaa

SEQ ID NO: 2223026 - RNA, 19 nt, Homo sapiens
  misc_RNA (1)...(19): siRNA sense strand
cugcuuauccagaagacaa

SEQ ID NO: 2223027 - RNA, 19 nt, Homo sapiens
  misc_RNA (1)...(19): siRNA sense strand
cccaggacgcugaggacaa

SEQ ID NO: 2223028 - RNA, 19 nt, Homo sapiens
  misc_RNA (1)...(19): siRNA sense strand
agacaucagcaaaugcaaa

SEQ ID NO: 2223029 - RNA, 19 nt, Homo sapiens
  misc_RNA (1)...(19): siRNA sense strand
ugggaaagucacugcgaca

SEQ ID NO: 2223030 - RNA, 19 nt, Homo sapiens
  misc_RNA (1)...(19): siRNA sense strand
ugaagaagaacauaggaca

SEQ ID NO: 2223031 - RNA, 19 nt, Homo sapiens
  misc_RNA (1)...(19): siRNA sense strand
cugcagauggaguuuauaa

SEQ ID NO: 2223032 - RNA, 19 nt, Homo sapiens
  misc_RNA (1)...(19): siRNA sense strand
cccaaaugaagaagaacau

SEQ ID NO: 2223033 - RNA, 19 nt, Homo sapiens
  misc_RNA (1)...(19): siRNA sense strand
uuaaagaaucugaagagga

SEQ ID NO: 2223034 - RNA, 19 nt, Homo sapiens
  misc_RNA (1)...(19): siRNA sense strand
gguuaaaacaggcacagaa

SEQ ID NO: 2223035 - RNA, 19 nt, Homo sapiens
  misc_RNA (1)...(19): siRNA sense strand
uugccauaaucgacacaua

SEQ ID NO: 2223036 - RNA, 19 nt, Homo sapiens
  misc_RNA (1)...(19): siRNA sense strand
aaacauguucagaagucaa

SEQ ID NO: 2223037 - RNA, 19 nt, Homo sapiens
  misc_RNA (1)...(19): siRNA sense strand
gucagaacuuugagagaac

SEQ ID NO: 2223038 - RNA, 19 nt, Homo sapiens
  misc_RNA (1)...(19): siRNA sense strand
uauuugaauccgacguuaa

SEQ ID NO: 2223039 - RNA, 19 nt, Homo sapiens
  misc_RNA (1)...(19): siRNA sense strand
uggauuaaacccaaaugaa

SEQ ID NO: 2223040 - RNA, 19 nt, Homo sapiens
  misc_RNA (1)...(19): siRNA sense strand
aagucaaguaacuggaaaa

SEQ ID NO: 2223041 - RNA, 19 nt, Homo sapiens
  misc_RNA (1)...(19): siRNA sense strand
cuccuuggccugauagaaa

SEQ ID NO: 2223042 - RNA, 19 nt, Homo sapiens
  misc_RNA (1)...(19): siRNA sense strand
acccaaaugaagaagaaca

SEQ ID NO: 2223043 - RNA, 19 nt, Homo sapiens
  misc_RNA (1)...(19): siRNA sense strand
uugaaaacccagacaacua

SEQ ID NO: 2223044 - RNA, 19 nt, Homo sapiens
  misc_RNA (1)...(19): siRNA sense strand
caggaagugaugaugaaca

SEQ ID NO: 2223045 - RNA, 19 nt, Homo sapiens
  misc_RNA (1)...(19): siRNA sense strand
gacguuaaucugaaaggaa

SEQ ID NO: 2223046 - RNA, 19 nt, Homo sapiens
  misc_RNA (1)...(19): siRNA sense strand
caaaugcaaagaagggaga

SEQ ID NO: 2223047 - RNA, 19 nt, Homo sapiens
  misc_RNA (1)...(19): siRNA sense strand
ggcuguguuuggagguauu

SEQ ID NO: 2223048 - RNA, 19 nt, Homo sapiens
  misc_RNA (1)...(19): siRNA sense strand
augaugaacagcagcaaca

SEQ ID NO: 2223049 - RNA, 19 nt, Homo sapiens
  misc_RNA (1)...(19): siRNA sense strand
ggucaaucuaugcuguauu

SEQ ID NO: 2223050 - RNA, 19 nt, Homo sapiens
  misc_RNA (1)...(19): siRNA sense strand
ggaaaccaguugaggagga

SEQ ID NO: 2223051 - RNA, 19 nt, Homo sapiens
  misc_RNA (1)...(19): siRNA sense strand
ucaagaagaugguucggua

SEQ ID NO: 2223052 - RNA, 19 nt, Homo sapiens
  misc_RNA (1)...(19): siRNA sense strand
guguaaaggaucacagaac

SEQ ID NO: 2223053 - RNA, 19 nt, Homo sapiens
  misc_RNA (1)...(19): siRNA sense strand
gguuuaaagaugggaagau

SEQ ID NO: 2223054 - RNA, 19 nt, Homo sapiens
  misc_RNA (1)...(19): siRNA sense strand
uuuaaagaugggaagauga

SEQ ID NO: 2223055 - RNA, 19 nt, Homo sapiens
  misc_RNA (1)...(19): siRNA sense strand
augcaacacaggagaaaga

SEQ ID NO: 2223056 - RNA, 19 nt, Homo sapiens
  misc_RNA (1)...(19): siRNA sense strand
cgaagaaagaaaacagcuu

SEQ ID NO: 2223057 - RNA, 19 nt, Homo sapiens
  misc_RNA (1)...(19): siRNA sense strand
caugaaaacgauacagaga

SEQ ID NO: 2223058 - RNA, 19 nt, Homo sapiens
  misc_RNA (1)...(19): siRNA sense strand
agaugcaacacaggagaaa

SEQ ID NO: 2223059 - RNA, 19 nt, Homo sapiens
  misc_RNA (1)...(19): siRNA sense strand
aagugaggccagcaguaaa

SEQ ID NO: 2223060 - RNA, 19 nt, Homo sapiens
  misc_RNA (1)...(19): siRNA sense strand
cgucagaacccaugcggca

SEQ ID NO: 2223061 - RNA, 19 nt, Homo sapiens
  misc_RNA (1)...(19): siRNA sense strand
ggacagcagaggaagacca

SEQ ID NO: 2223062 - RNA, 19 nt, Homo sapiens
  misc_RNA (1)...(19): siRNA sense strand
cagaccagcaugacagauu

SEQ ID NO: 2223063 - RNA, 19 nt, Homo sapiens
  misc_RNA (1)...(19): siRNA sense strand
aggaagaccauguggaccu

SEQ ID NO: 2223064 - RNA, 19 nt, Homo sapiens
  misc_RNA (1)...(19): siRNA sense strand
cgucagaacccaugcggca

SEQ ID NO: 2223065 - RNA, 19 nt, Homo sapiens
  misc_RNA (1)...(19): siRNA sense strand
ggacagcagaggaagacca

SEQ ID NO: 2223066 - RNA, 19 nt, Homo sapiens
  misc_RNA (1)...(19): siRNA sense strand
cagaccagcaugacagauu

SEQ ID NO: 2223067 - RNA, 19 nt, Homo sapiens
  misc_RNA (1)...(19): siRNA sense strand
aggaagaccauguggaccu

SEQ ID NO: 2223068 - RNA, 19 nt, Homo sapiens
  misc_RNA (1)...(19): siRNA sense strand
ggaccgaaguggacagcga

SEQ ID NO: 2223069 - RNA, 19 nt, Homo sapiens
  misc_RNA (1)...(19): siRNA sense strand
cugagaagucgucgggcga

SEQ ID NO: 2223070 - RNA, 19 nt, Homo sapiens
  misc_RNA (1)...(19): siRNA sense strand
acacauuugaagaggauau

SEQ ID NO: 2223071 - RNA, 19 nt, Homo sapiens
  misc_RNA (1)...(19): siRNA sense strand
gagacgaguucaaggcagu

SEQ ID NO: 2223072 - RNA, 19 nt, Homo sapiens
  misc_RNA (1)...(19): siRNA sense strand
caugaugcuccuuggccaa

SEQ ID NO: 2223073 - RNA, 19 nt, Homo sapiens
  misc_RNA (1)...(19): siRNA sense strand
ccagauaucacgggcgaga

SEQ ID NO: 2223074 - RNA, 19 nt, Homo sapiens
  misc_RNA (1)...(19): siRNA sense strand
ugaugggagacgaguucaa

SEQ ID NO: 2223075 - RNA, 19 nt, Homo sapiens
  misc_RNA (1)...(19): siRNA sense strand
cagagaaaagcaagacaaa

SEQ ID NO: 2223076 - RNA, 19 nt, Homo sapiens
  misc_RNA (1)...(19): siRNA sense strand
aggucgacucauugaauua

SEQ ID NO: 2223077 - RNA, 19 nt, Homo sapiens
  misc_RNA (1)...(19): siRNA sense strand
cggaaagcgaccagccaga

SEQ ID NO: 2223078 - RNA, 19 nt, Homo sapiens
  misc_RNA (1)...(19): siRNA sense strand
gaaguaaaucagaucguga

SEQ ID NO: 2223079 - RNA, 19 nt, Homo sapiens
  misc_RNA (1)...(19): siRNA sense strand
ccaucaacccggaaagcga

SEQ ID NO: 2223080 - RNA, 19 nt, Homo sapiens
  misc_RNA (1)...(19): siRNA sense strand
agaagaugacucugagcau

SEQ ID NO: 2223081 - RNA, 19 nt, Homo sapiens
  misc_RNA (1)...(19): siRNA sense strand
auaacaaugcagaugguga

SEQ ID NO: 2223082 - RNA, 19 nt, Homo sapiens
  misc_RNA (1)...(19): siRNA sense strand
ccagagaaaagcaagacaa

SEQ ID NO: 2223083 - RNA, 19 nt, Homo sapiens
  misc_RNA (1)...(19): siRNA sense strand
cugagcaacuucauggaga

SEQ ID NO: 2223084 - RNA, 19 nt, Homo sapiens
  misc_RNA (1)...(19): siRNA sense strand
auucacauuccuucagaaa

SEQ ID NO: 2223085 - RNA, 19 nt, Homo sapiens
  misc_RNA (1)...(19): siRNA sense strand
ggguggauuacaaccuaaa

SEQ ID NO: 2223086 - RNA, 19 nt, Homo sapiens
  misc_RNA (1)...(19): siRNA sense strand
gcaucaaguacaucgcaga

SEQ ID NO: 2223087 - RNA, 19 nt, Homo sapiens
  misc_RNA (1)...(19): siRNA sense strand
auuaaaucagcaaggauga

SEQ ID NO: 2223088 - RNA, 19 nt, Homo sapiens
  misc_RNA (1)...(19): siRNA sense strand
cagagauugugcuggaaaa

SEQ ID NO: 2223089 - RNA, 19 nt, Homo sapiens
  misc_RNA (1)...(19): siRNA sense strand
guauagaaacccugcgagu

SEQ ID NO: 2223090 - RNA, 19 nt, Homo sapiens
  misc_RNA (1)...(19): siRNA sense strand
cuucagaacucguguggcu

SEQ ID NO: 2223091 - RNA, 19 nt, Homo sapiens
  misc_RNA (1)...(19): siRNA sense strand
ccgugaacuucguggccga

SEQ ID NO: 2223092 - RNA, 19 nt, Homo sapiens
  misc_RNA (1)...(19): siRNA sense strand
ccagaaaaucccagagacu

SEQ ID NO: 2223093 - RNA, 19 nt, Homo sapiens
  misc_RNA (1)...(19): siRNA sense strand
guguggaugccgugaacuu

SEQ ID NO: 2223094 - RNA, 19 nt, Homo sapiens
  misc_RNA (1)...(19): siRNA sense strand
acaucgacacagaggccua

SEQ ID NO: 2223095 - RNA, 19 nt, Homo sapiens
  misc_RNA (1)...(19): siRNA sense strand
guacaaugccgaagaggug

SEQ ID NO: 2223096 - RNA, 19 nt, Homo sapiens
  misc_RNA (1)...(19): siRNA sense strand
ggccagaaaugcacggucu

SEQ ID NO: 2223097 - RNA, 19 nt, Homo sapiens
  misc_RNA (1)...(19): siRNA sense strand
gggucacagacaagaaaua

SEQ ID NO: 2223098 - RNA, 19 nt, Homo sapiens
  misc_RNA (1)...(19): siRNA sense strand
uaacuaugcuuaagggaca

SEQ ID NO: 2223099 - RNA, 19 nt, Homo sapiens
  misc_RNA (1)...(19): siRNA sense strand
agugcugacaguagaguaa

SEQ ID NO: 2223100 - RNA, 19 nt, Homo sapiens
  misc_RNA (1)...(19): siRNA sense strand
gaagaugccuggagcagca

SEQ ID NO: 2223101 - RNA, 19 nt, Homo sapiens
  misc_RNA (1)...(19): siRNA sense strand
cagugaugaagaaggauga

SEQ ID NO: 2223102 - RNA, 19 nt, Homo sapiens
  misc_RNA (1)...(19): siRNA sense strand
gguacagauaaucgaauga

SEQ ID NO: 2223103 - RNA, 19 nt, Homo sapiens
  misc_RNA (1)...(19): siRNA sense strand
ugaugagacuacaacaaaa

SEQ ID NO: 2223104 - RNA, 19 nt, Homo sapiens
  misc_RNA (1)...(19): siRNA sense strand
ugaaccuguugaagggaga

SEQ ID NO: 2223105 - RNA, 19 nt, Homo sapiens
  misc_RNA (1)...(19): siRNA sense strand
aauuaugggaugugagaag

SEQ ID NO: 2223106 - RNA, 19 nt, Homo sapiens
  misc_RNA (1)...(19): siRNA sense strand
acuuuauagugguagcaga

SEQ ID NO: 2223107 - RNA, 19 nt, Homo sapiens
  misc_RNA (1)...(19): siRNA sense strand
gacaagaaauauuagcagu

SEQ ID NO: 2223108 - RNA, 19 nt, Homo sapiens
  misc_RNA (1)...(19): siRNA sense strand
gaacaaagcugguggggua

SEQ ID NO: 2223109 - RNA, 19 nt, Homo sapiens
  misc_RNA (1)...(19): siRNA sense strand
gagaagaaaauuaggggaa

SEQ ID NO: 2223110 - RNA, 19 nt, Homo sapiens
  misc_RNA (1)...(19): siRNA sense strand
cggaacuacuggagaggau

SEQ ID NO: 2223111 - RNA, 19 nt, Homo sapiens
  misc_RNA (1)...(19): siRNA sense strand
gggugaaacacgcggguga

SEQ ID NO: 2223112 - RNA, 19 nt, Homo sapiens
  misc_RNA (1)...(19): siRNA sense strand
caggcaagguagagggcga

SEQ ID NO: 2223113 - RNA, 19 nt, Homo sapiens
  misc_RNA (1)...(19): siRNA sense strand
acgaggaggaugaggauga

SEQ ID NO: 2223114 - RNA, 19 nt, Homo sapiens
  misc_RNA (1)...(19): siRNA sense strand
acagcaaggaugaggauca

SEQ ID NO: 2223115 - RNA, 19 nt, Homo sapiens
  misc_RNA (1)...(19): siRNA sense strand
acgaagaucucucuggcaa

SEQ ID NO: 2223116 - RNA, 19 nt, Homo sapiens
  misc_RNA (1)...(19): siRNA sense strand
ccaucuuuguugaggacau

SEQ ID NO: 2223117 - RNA, 19 nt, Homo sapiens
  misc_RNA (1)...(19): siRNA sense strand
cagauuuaguggauaacau

SEQ ID NO: 2223118 - RNA, 19 nt, Homo sapiens
  misc_RNA (1)...(19): siRNA sense strand
uggaugaggaugaggacga

SEQ ID NO: 2223119 - RNA, 19 nt, Homo sapiens
  misc_RNA (1)...(19): siRNA sense strand
ccacacagauuuauggcca

SEQ ID NO: 2223120 - RNA, 19 nt, Homo sapiens
  misc_RNA (1)...(19): siRNA sense strand
uuggaaggcugguaggaga

SEQ ID NO: 2223121 - RNA, 19 nt, Homo sapiens
  misc_RNA (1)...(19): siRNA sense strand
cggacugcccucugagaau

SEQ ID NO: 2223122 - RNA, 19 nt, Homo sapiens
  misc_RNA (1)...(19): siRNA sense strand
ccuuuguggaugaggauga

SEQ ID NO: 2223123 - RNA, 19 nt, Homo sapiens
  misc_RNA (1)...(19): siRNA sense strand
gggucaacguugucaucau

SEQ ID NO: 2223124 - RNA, 19 nt, Homo sapiens
  misc_RNA (1)...(19): siRNA sense strand
gcuucgaauuaacggguca

SEQ ID NO: 2223125 - RNA, 19 nt, Homo sapiens
  misc_RNA (1)...(19): siRNA sense strand
uggaaggcugguaggagaa

SEQ ID NO: 2223126 - RNA, 19 nt, Homo sapiens
  misc_RNA (1)...(19): siRNA sense strand
cagacagggagcaggacau

SEQ ID NO: 2223127 - RNA, 19 nt, Homo sapiens
  misc_RNA (1)...(19): siRNA sense strand
cugaagagauugaggccug

SEQ ID NO: 2223128 - RNA, 19 nt, Homo sapiens
  misc_RNA (1)...(19): siRNA sense strand
ugggacagguggugagaag

SEQ ID NO: 2223129 - RNA, 19 nt, Homo sapiens
  misc_RNA (1)...(19): siRNA sense strand
gacaauacuucgugggguu

SEQ ID NO: 2223130 - RNA, 19 nt, Homo sapiens
  misc_RNA (1)...(19): siRNA sense strand
uaggagaaaucauggccau

SEQ ID NO: 2223131 - RNA, 19 nt, Homo sapiens
  misc_RNA (1)...(19): siRNA sense strand
uggaagaggagcuggccga

SEQ ID NO: 2223132 - RNA, 19 nt, Homo sapiens
  misc_RNA (1)...(19): siRNA sense strand
gcaucauccaggucaagaa

SEQ ID NO: 2223133 - RNA, 19 nt, Homo sapiens
  misc_RNA (1)...(19): siRNA sense strand
gacaacaauacauggguga

SEQ ID NO: 2223134 - RNA, 19 nt, Homo sapiens
  misc_RNA (1)...(19): siRNA sense strand
uggccaucacaaagaacaa

SEQ ID NO: 2223135 - RNA, 19 nt, Homo sapiens
  misc_RNA (1)...(19): siRNA sense strand
gguggugagaagaaaauua

SEQ ID NO: 2223136 - RNA, 19 nt, Homo sapiens
  misc_RNA (1)...(19): siRNA sense strand
agguagagggcgaguugga

SEQ ID NO: 2223137 - RNA, 19 nt, Homo sapiens
  misc_RNA (1)...(19): siRNA sense strand
aguauaugcccuuugaaca

SEQ ID NO: 2223138 - RNA, 19 nt, Homo sapiens
  misc_RNA (1)...(19): siRNA sense strand
aggaugaggacgaagaucu

SEQ ID NO: 2223139 - RNA, 19 nt, Homo sapiens
  misc_RNA (1)...(19): siRNA sense strand
guggagaugaagaaagcaa

SEQ ID NO: 2223140 - RNA, 19 nt, Homo sapiens
  misc_RNA (1)...(19): siRNA sense strand
guguggucuuggaggacua

SEQ ID NO: 2223141 - RNA, 19 nt, Homo sapiens
  misc_RNA (1)...(19): siRNA sense strand
agaacaagagcaagcaaaa

SEQ ID NO: 2223142 - RNA, 19 nt, Homo sapiens
  misc_RNA (1)...(19): siRNA sense strand
cuggaaucccggaggugaa

SEQ ID NO: 2223143 - RNA, 19 nt, Homo sapiens
  misc_RNA (1)...(19): siRNA sense strand
caucguggcuggagggauc

SEQ ID NO: 2223144 - RNA, 19 nt, Homo sapiens
  misc_RNA (1)...(19): siRNA sense strand
ccacagaaccagugacccu

SEQ ID NO: 2223145 - RNA, 19 nt, Homo sapiens
  misc_RNA (1)...(19): siRNA sense strand
agccugagaacaagagcaa

SEQ ID NO: 2223146 - RNA, 19 nt, Homo sapiens
  misc_RNA (1)...(19): siRNA sense strand
cgugaaggcuccucaggga

SEQ ID NO: 2223147 - RNA, 19 nt, Homo sapiens
  misc_RNA (1)...(19): siRNA sense strand
cacuggaggagguggucaa

SEQ ID NO: 2223148 - RNA, 19 nt, Homo sapiens
  misc_RNA (1)...(19): siRNA sense strand
cggguguggucuuggagga

SEQ ID NO: 2223149 - RNA, 19 nt, Homo sapiens
  misc_RNA (1)...(19): siRNA sense strand
uggaggacuaccuggauau

SEQ ID NO: 2223150 - RNA, 19 nt, Homo sapiens
  misc_RNA (1)...(19): siRNA sense strand
agaccauguuggcgggugu

SEQ ID NO: 2223151 - RNA, 19 nt, Homo sapiens
  misc_RNA (1)...(19): siRNA sense strand
aacaauagguucagcucca

SEQ ID NO: 2223152 - RNA, 19 nt, Homo sapiens
  misc_RNA (1)...(19): siRNA sense strand
uggaacaauuguagagaaa

SEQ ID NO: 2223153 - RNA, 19 nt, Homo sapiens
  misc_RNA (1)...(19): siRNA sense strand
ggucagaagcagcggauca

SEQ ID NO: 2223154 - RNA, 19 nt, Homo sapiens
  misc_RNA (1)...(19): siRNA sense strand
ccaagacauuagugagcaa

SEQ ID NO: 2223155 - RNA, 19 nt, Homo sapiens
  misc_RNA (1)...(19): siRNA sense strand
ggaagauguugaaaagaaa

SEQ ID NO: 2223156 - RNA, 19 nt, Homo sapiens
  misc_RNA (1)...(19): siRNA sense strand
gcuaagaaucugaagacau

SEQ ID NO: 2223157 - RNA, 19 nt, Homo sapiens
  misc_RNA (1)...(19): siRNA sense strand
aagaagaagacgaugacua

SEQ ID NO: 2223158 - RNA, 19 nt, Homo sapiens
  misc_RNA (1)...(19): siRNA sense strand
gugaagaagaagacgauga

SEQ ID NO: 2223159 - RNA, 19 nt, Homo sapiens
  misc_RNA (1)...(19): siRNA sense strand
agguaaugguccuagacaa

SEQ ID NO: 2223160 - RNA, 19 nt, Homo sapiens
  misc_RNA (1)...(19): siRNA sense strand
gugaauagccugaaggaag

SEQ ID NO: 2223161 - RNA, 19 nt, Homo sapiens
  misc_RNA (1)...(19): siRNA sense strand
agaacuagugaaaggacaa

SEQ ID NO: 2223162 - RNA, 19 nt, Homo sapiens
  misc_RNA (1)...(19): siRNA sense strand
gagaagagcucccagcaga

SEQ ID NO: 2223163 - RNA, 19 nt, Homo sapiens
  misc_RNA (1)...(19): siRNA sense strand
ugaacaagaaucagaguca

SEQ ID NO: 2223164 - RNA, 19 nt, Homo sapiens
  misc_RNA (1)...(19): siRNA sense strand
ggacacucuuacaggguga

SEQ ID NO: 2223165 - RNA, 19 nt, Homo sapiens
  misc_RNA (1)...(19): siRNA sense strand
ggaagcuggcauugagaau

SEQ ID NO: 2223166 - RNA, 19 nt, Homo sapiens
  misc_RNA (1)...(19): siRNA sense strand
aacaagaaucagagucaaa

SEQ ID NO: 2223167 - RNA, 19 nt, Homo sapiens
  misc_RNA (1)...(19): siRNA sense strand
cugagaaacuccuugaaaa

SEQ ID NO: 2223168 - RNA, 19 nt, Homo sapiens
  misc_RNA (1)...(19): siRNA sense strand
gcaucauucugaaaggcua

SEQ ID NO: 2223169 - RNA, 19 nt, Homo sapiens
  misc_RNA (1)...(19): siRNA sense strand
gaaucagagucaaagccaa

SEQ ID NO: 2223170 - RNA, 19 nt, Homo sapiens
  misc_RNA (1)...(19): siRNA sense strand
uggaagauguugaaaagaa

SEQ ID NO: 2223171 - RNA, 19 nt, Homo sapiens
  misc_RNA (1)...(19): siRNA sense strand
auucagagaccaaguacaa

SEQ ID NO: 2223172 - RNA, 19 nt, Homo sapiens
  misc_RNA (1)...(19): siRNA sense strand
ugaacuggcuggugaggau

SEQ ID NO: 2223173 - RNA, 19 nt, Homo sapiens
  misc_RNA (1)...(19): siRNA sense strand
cgagagaagcugaccauca

SEQ ID NO: 2223174 - RNA, 19 nt, Homo sapiens
  misc_RNA (1)...(19): siRNA sense strand
guacaaaaccuccggaaga

SEQ ID NO: 2223175 - RNA, 19 nt, Homo sapiens
  misc_RNA (1)...(19): siRNA sense strand
ucuggaagccugaggauga

SEQ ID NO: 2223176 - RNA, 19 nt, Homo sapiens
  misc_RNA (1)...(19): siRNA sense strand
agagaaggguauaaaucuu

SEQ ID NO: 2223177 - RNA, 19 nt, Homo sapiens
  misc_RNA (1)...(19): siRNA sense strand
cauugauggaguagauauu

SEQ ID NO: 2223178 - RNA, 19 nt, Homo sapiens
  misc_RNA (1)...(19): siRNA sense strand
cuguauauaagaaggcauu

SEQ ID NO: 2223179 - RNA, 19 nt, Homo sapiens
  misc_RNA (1)...(19): siRNA sense strand
gggaaguugaugaagagau

SEQ ID NO: 2223180 - RNA, 19 nt, Homo sapiens
  misc_RNA (1)...(19): siRNA sense strand
gucaaguguucuacagauu

SEQ ID NO: 2223181 - RNA, 19 nt, Homo sapiens
  misc_RNA (1)...(19): siRNA sense strand
agauuggagagaaggguau

SEQ ID NO: 2223182 - RNA, 19 nt, Homo sapiens
  misc_RNA (1)...(19): siRNA sense strand
acgaagaacuagugaaagg

SEQ ID NO: 2223183 - RNA, 19 nt, Homo sapiens
  misc_RNA (1)...(19): siRNA sense strand
gggugauggugcuuguaau

SEQ ID NO: 2223184 - RNA, 19 nt, Homo sapiens
  misc_RNA (1)...(19): siRNA sense strand
gccuggagcugguugggaa

SEQ ID NO: 2223185 - RNA, 19 nt, Homo sapiens
  misc_RNA (1)...(19): siRNA sense strand
cagccugcaacuuggguua

SEQ ID NO: 2223186 - RNA, 19 nt, Homo sapiens
  misc_RNA (1)...(19): siRNA sense strand
ccaaaauccugguugauga

SEQ ID NO: 2223187 - RNA, 19 nt, Homo sapiens
  misc_RNA (1)...(19): siRNA sense strand
gagauuggagagaagggua

SEQ ID NO: 2223188 - RNA, 19 nt, Homo sapiens
  misc_RNA (1)...(19): siRNA sense strand
cauuguggcuguugagcga

SEQ ID NO: 2223189 - RNA, 19 nt, Homo sapiens
  misc_RNA (1)...(19): siRNA sense strand
ugauggcagugaagaagaa

SEQ ID NO: 2223190 - RNA, 19 nt, Homo sapiens
  misc_RNA (1)...(19): siRNA sense strand
aucugaagucccugagaaa

SEQ ID NO: 2223191 - RNA, 19 nt, Homo sapiens
  misc_RNA (1)...(19): siRNA sense strand
cugaagucccugagaaacu

SEQ ID NO: 2223192 - RNA, 19 nt, Homo sapiens
  misc_RNA (1)...(19): siRNA sense strand
ccugaaggaagacgaagaa

SEQ ID NO: 2223193 - RNA, 19 nt, Homo sapiens
  misc_RNA (1)...(19): siRNA sense strand
cuuucugccuucaguguua

SEQ ID NO: 2223194 - RNA, 19 nt, Homo sapiens
  misc_RNA (1)...(19): siRNA sense strand
ggaugcucauguaggaaaa

SEQ ID NO: 2223195 - RNA, 19 nt, Homo sapiens
  misc_RNA (1)...(19): siRNA sense strand
cagccuugaugaugguuau

SEQ ID NO: 2223196 - RNA, 19 nt, Homo sapiens
  misc_RNA (1)...(19): siRNA sense strand
ccugaagaacugcuacaaa

SEQ ID NO: 2223197 - RNA, 19 nt, Homo sapiens
  misc_RNA (1)...(19): siRNA sense strand
guaaaaguacggacagcua

SEQ ID NO: 2223198 - RNA, 19 nt, Homo sapiens
  misc_RNA (1)...(19): siRNA sense strand
uggaguaccuacaagcaau

SEQ ID NO: 2223199 - RNA, 19 nt, Homo sapiens
  misc_RNA (1)...(19): siRNA sense strand
aaguugaugaagagaugaa

SEQ ID NO: 2223200 - RNA, 19 nt, Homo sapiens
  misc_RNA (1)...(19): siRNA sense strand
ugaagagagagcugcagaa

SEQ ID NO: 2223201 - RNA, 19 nt, Homo sapiens
  misc_RNA (1)...(19): siRNA sense strand
ucaagaaccugcuggccuu

SEQ ID NO: 2223202 - RNA, 19 nt, Homo sapiens
  misc_RNA (1)...(19): siRNA sense strand
gcagugaagaagaagacga

SEQ ID NO: 2223203 - RNA, 19 nt, Homo sapiens
  misc_RNA (1)...(19): siRNA sense strand
cggaaugugaauagccuga

SEQ ID NO: 2223204 - RNA, 19 nt, Homo sapiens
  misc_RNA (1)...(19): siRNA sense strand
gccugaaggaagacgaaga

SEQ ID NO: 2223205 - RNA, 19 nt, Homo sapiens
  misc_RNA (1)...(19): siRNA sense strand
aagaacuagugaaaggaca

SEQ ID NO: 2223206 - RNA, 19 nt, Homo sapiens
  misc_RNA (1)...(19): siRNA sense strand
gaaggaauucauagaaacu

SEQ ID NO: 2223207 - RNA, 19 nt, Homo sapiens
  misc_RNA (1)...(19): siRNA sense strand
ugaugaauucuguggcuuu

SEQ ID NO: 2223208 - RNA, 19 nt, Homo sapiens
  misc_RNA (1)...(19): siRNA sense strand
cagcaggagcaaagggaau

SEQ ID NO: 2223209 - RNA, 19 nt, Homo sapiens
  misc_RNA (1)...(19): siRNA sense strand
aggaaaaccaggagagaga

SEQ ID NO: 2223210 - RNA, 19 nt, Homo sapiens
  misc_RNA (1)...(19): siRNA sense strand
agaaaggggaaaugggaua

SEQ ID NO: 2223211 - RNA, 19 nt, Homo sapiens
  misc_RNA (1)...(19): siRNA sense strand
ggaucaggcuucagggagu

SEQ ID NO: 2223212 - RNA, 19 nt, Homo sapiens
  misc_RNA (1)...(19): siRNA sense strand
agcaguaagaggagagcaa

SEQ ID NO: 2223213 - RNA, 19 nt, Homo sapiens
  misc_RNA (1)...(19): siRNA sense strand
cagucaugccugaggguuu

SEQ ID NO: 2223214 - RNA, 19 nt, Homo sapiens
  misc_RNA (1)...(19): siRNA sense strand
augaauacaccaaaggcua

SEQ ID NO: 2223215 - RNA, 19 nt, Homo sapiens
  misc_RNA (1)...(19): siRNA sense strand
agguauagcaguaagagga

SEQ ID NO: 2223216 - RNA, 19 nt, Homo sapiens
  misc_RNA (1)...(19): siRNA sense strand
gcaagguacuccuggucca

SEQ ID NO: 2223217 - RNA, 19 nt, Homo sapiens
  misc_RNA (1)...(19): siRNA sense strand
accauaaagaguaaaggua

SEQ ID NO: 2223218 - RNA, 19 nt, Homo sapiens
  misc_RNA (1)...(19): siRNA sense strand
uugucagauaccaggaaua

SEQ ID NO: 2223219 - RNA, 19 nt, Homo sapiens
  misc_RNA (1)...(19): siRNA sense strand
ugccaggccugaagggaga

SEQ ID NO: 2223220 - RNA, 19 nt, Homo sapiens
  misc_RNA (1)...(19): siRNA sense strand
aggccugaagggagaaaga

SEQ ID NO: 2223221 - RNA, 19 nt, Homo sapiens
  misc_RNA (1)...(19): siRNA sense strand
agggaaaccaggugugcca

SEQ ID NO: 2223222 - RNA, 19 nt, Homo sapiens
  misc_RNA (1)...(19): siRNA sense strand
ggaaaugggauauggugcu

SEQ ID NO: 2223223 - RNA, 19 nt, Homo sapiens
  misc_RNA (1)...(19): siRNA sense strand
gagaggaccauauggacca

SEQ ID NO: 2223224 - RNA, 19 nt, Homo sapiens
  misc_RNA (1)...(19): siRNA sense strand
aguaaagguauagcaguaa

SEQ ID NO: 2223225 - RNA, 19 nt, Homo sapiens
  misc_RNA (1)...(19): siRNA sense strand
aggagagagaggaccauau

SEQ ID NO: 2223226 - RNA, 19 nt, Homo sapiens
  misc_RNA (1)...(19): siRNA sense strand
gaccaucagcuguagggaa

SEQ ID NO: 2223227 - RNA, 19 nt, Homo sapiens
  misc_RNA (1)...(19): siRNA sense strand
agcaauaggaacucccaua

SEQ ID NO: 2223228 - RNA, 19 nt, Homo sapiens
  misc_RNA (1)...(19): siRNA sense strand
ccuaugaugaauacaccaa

SEQ ID NO: 2223229 - RNA, 19 nt, Homo sapiens
  misc_RNA (1)...(19): siRNA sense strand
guuccugauccuagagaaa

SEQ ID NO: 2223230 - RNA, 19 nt, Homo sapiens
  misc_RNA (1)...(19): siRNA sense strand
cugaagucacugagagaau

SEQ ID NO: 2223231 - RNA, 19 nt, Homo sapiens
  misc_RNA (1)...(19): siRNA sense strand
gagaauugucacugaaaca

SEQ ID NO: 2223232 - RNA, 19 nt, Homo sapiens
  misc_RNA (1)...(19): siRNA sense strand
gagucaaacacgagagagu

SEQ ID NO: 2223233 - RNA, 19 nt, Homo sapiens
  misc_RNA (1)...(19): siRNA sense strand
gcauauggggugaagaaaa

SEQ ID NO: 2223234 - RNA, 19 nt, Homo sapiens
  misc_RNA (1)...(19): siRNA sense strand
uggcggaggaggugaggaa

SEQ ID NO: 2223235 - RNA, 19 nt, Homo sapiens
  misc_RNA (1)...(19): siRNA sense strand
uccuggaucuggagagaaa

SEQ ID NO: 2223236 - RNA, 19 nt, Homo sapiens
  misc_RNA (1)...(19): siRNA sense strand
ccuaaaagccgaagcuaau

SEQ ID NO: 2223237 - RNA, 19 nt, Homo sapiens
  misc_RNA (1)...(19): siRNA sense strand
ccaaaggugaccaggguga

SEQ ID NO: 2223238 - RNA, 19 nt, Homo sapiens
  misc_RNA (1)...(19): siRNA sense strand
augcagagugacaguauua

SEQ ID NO: 2223239 - RNA, 19 nt, Homo sapiens
  misc_RNA (1)...(19): siRNA sense strand
gcuaaugauggaacaggaa

SEQ ID NO: 2223240 - RNA, 19 nt, Homo sapiens
  misc_RNA (1)...(19): siRNA sense strand
gccuaaaagccgaagcuaa

SEQ ID NO: 2223241 - RNA, 19 nt, Homo sapiens
  misc_RNA (1)...(19): siRNA sense strand
uaaaggagaucgaggguuc

SEQ ID NO: 2223242 - RNA, 19 nt, Homo sapiens
  misc_RNA (1)...(19): siRNA sense strand
aaacaaacgagauggaacu

SEQ ID NO: 2223243 - RNA, 19 nt, Homo sapiens
  misc_RNA (1)...(19): siRNA sense strand
gaguacaugcagagugaca

SEQ ID NO: 2223244 - RNA, 19 nt, Homo sapiens
  misc_RNA (1)...(19): siRNA sense strand
cagcauauggggugaagaa

SEQ ID NO: 2223245 - RNA, 19 nt, Homo sapiens
  misc_RNA (1)...(19): siRNA sense strand
ucuggauguucgugaggaa

SEQ ID NO: 2223246 - RNA, 19 nt, Homo sapiens
  misc_RNA (1)...(19): siRNA sense strand
ccuaaaggugacaugggaa

SEQ ID NO: 2223247 - RNA, 19 nt, Homo sapiens
  misc_RNA (1)...(19): siRNA sense strand
aggcccaagaggugaacaa

SEQ ID NO: 2223248 - RNA, 19 nt, Homo sapiens
  misc_RNA (1)...(19): siRNA sense strand
gcggagaaggagaagaagu

SEQ ID NO: 2223249 - RNA, 19 nt, Homo sapiens
  misc_RNA (1)...(19): siRNA sense strand
gagaggaucaggaggagca

SEQ ID NO: 2223250 - RNA, 19 nt, Homo sapiens
  misc_RNA (1)...(19): siRNA sense strand
ccaagggcuccgaggugaa

SEQ ID NO: 2223251 - RNA, 19 nt, Homo sapiens
  misc_RNA (1)...(19): siRNA sense strand
gaagggagcuccaguggca

SEQ ID NO: 2223252 - RNA, 19 nt, Homo sapiens
  misc_RNA (1)...(19): siRNA sense strand
ggaacaggaaaauggaaau

SEQ ID NO: 2223253 - RNA, 19 nt, Homo sapiens
  misc_RNA (1)...(19): siRNA sense strand
ugacaaaggaccaauggga

SEQ ID NO: 2223254 - RNA, 19 nt, Homo sapiens
  misc_RNA (1)...(19): siRNA sense strand
cugcuaagaaggagaugga

SEQ ID NO: 2223255 - RNA, 19 nt, Homo sapiens
  misc_RNA (1)...(19): siRNA sense strand
ccacaaagggcaagaccac

SEQ ID NO: 2223256 - RNA, 19 nt, Homo sapiens
  misc_RNA (1)...(19): siRNA sense strand
aggaauaaaaggugaacca

SEQ ID NO: 2223257 - RNA, 19 nt, Homo sapiens
  misc_RNA (1)...(19): siRNA sense strand
cgggagcagaccuggacaa

SEQ ID NO: 2223258 - RNA, 19 nt, Homo sapiens
  misc_RNA (1)...(19): siRNA sense strand
gggaaguccaggcccuaaa

SEQ ID NO: 2223259 - RNA, 19 nt, Homo sapiens
  misc_RNA (1)...(19): siRNA sense strand
gagaagaaguauugcuguc

SEQ ID NO: 2223260 - RNA, 19 nt, Homo sapiens
  misc_RNA (1)...(19): siRNA sense strand
gcugaaggcgcguguggau

SEQ ID NO: 2223261 - RNA, 19 nt, Homo sapiens
  misc_RNA (1)...(19): siRNA sense strand
cuggagaggaucaggagga

SEQ ID NO: 2223262 - RNA, 19 nt, Homo sapiens
  misc_RNA (1)...(19): siRNA sense strand
uaaugauggaacaggaaaa

SEQ ID NO: 2223263 - RNA, 19 nt, Homo sapiens
  misc_RNA (1)...(19): siRNA sense strand
gagcugacuuugcuggaga

SEQ ID NO: 2223264 - RNA, 19 nt, Homo sapiens
  misc_RNA (1)...(19): siRNA sense strand
cagagagcaugcagcguca

SEQ ID NO: 2223265 - RNA, 19 nt, Homo sapiens
  misc_RNA (1)...(19): siRNA sense strand
gucaaacacgagagaguga

SEQ ID NO: 2223266 - RNA, 19 nt, Homo sapiens
  misc_RNA (1)...(19): siRNA sense strand
uggaacaggaaaauggaaa

SEQ ID NO: 2223267 - RNA, 19 nt, Homo sapiens
  misc_RNA (1)...(19): siRNA sense strand
gggaccaaaaggugacaaa

SEQ ID NO: 2223268 - RNA, 19 nt, Homo sapiens
  misc_RNA (1)...(19): siRNA sense strand
gaacaaggucuuacuggga

SEQ ID NO: 2223269 - RNA, 19 nt, Homo sapiens
  misc_RNA (1)...(19): siRNA sense strand
uggaggagguggcgguguu

SEQ ID NO: 2223270 - RNA, 19 nt, Homo sapiens
  misc_RNA (1)...(19): siRNA sense strand
gaaaggaccucgaggccuc

SEQ ID NO: 2223271 - RNA, 19 nt, Homo sapiens
  misc_RNA (1)...(19): siRNA sense strand
gcaucagcguggaggaccu

SEQ ID NO: 2223272 - RNA, 19 nt, Homo sapiens
  misc_RNA (1)...(19): siRNA sense strand
gcgucagggccuacugcaa

SEQ ID NO: 2223273 - RNA, 19 nt, Homo sapiens
  misc_RNA (1)...(19): siRNA sense strand
cgaggacacaagggagaaa

SEQ ID NO: 2223274 - RNA, 19 nt, Homo sapiens
  misc_RNA (1)...(19): siRNA sense strand
ggauguucgugaggaagaa

SEQ ID NO: 2223275 - RNA, 19 nt, Homo sapiens
  misc_RNA (1)...(19): siRNA sense strand
cuaaugauggaacaggaaa

SEQ ID NO: 2223276 - RNA, 19 nt, Homo sapiens
  misc_RNA (1)...(19): siRNA sense strand
aggugaccagggugagaaa

SEQ ID NO: 2223277 - RNA, 19 nt, Homo sapiens
  misc_RNA (1)...(19): siRNA sense strand
aaacucaacuggaagcaca

SEQ ID NO: 2223278 - RNA, 19 nt, Homo sapiens
  misc_RNA (1)...(19): siRNA sense strand
gggagcagaccuggacaaa

SEQ ID NO: 2223279 - RNA, 19 nt, Homo sapiens
  misc_RNA (1)...(19): siRNA sense strand
cugaagacauccuggcugu

SEQ ID NO: 2223280 - RNA, 19 nt, Homo sapiens
  misc_RNA (1)...(19): siRNA sense strand
gcugugagggugucagaga

SEQ ID NO: 2223281 - RNA, 19 nt, Homo sapiens
  misc_RNA (1)...(19): siRNA sense strand
gggaaggucuuuacagccu

SEQ ID NO: 2223282 - RNA, 19 nt, Homo sapiens
  misc_RNA (1)...(19): siRNA sense strand
agaagcuaaugauggaaca

SEQ ID NO: 2223283 - RNA, 19 nt, Homo sapiens
  misc_RNA (1)...(19): siRNA sense strand
ugacaaaggugauccgggu

SEQ ID NO: 2223284 - RNA, 19 nt, Homo sapiens
  misc_RNA (1)...(19): siRNA sense strand
uugcuggagaucuggauua

SEQ ID NO: 2223285 - RNA, 19 nt, Homo sapiens
  misc_RNA (1)...(19): siRNA sense strand
gggcacuccaggacccaaa

SEQ ID NO: 2223286 - RNA, 19 nt, Homo sapiens
  misc_RNA (1)...(19): siRNA sense strand
gcagcagcggcuacauaaa

SEQ ID NO: 2223287 - RNA, 19 nt, Homo sapiens
  misc_RNA (1)...(19): siRNA sense strand
uaucacaacaacaugacaa

SEQ ID NO: 2223288 - RNA, 19 nt, Homo sapiens
  misc_RNA (1)...(19): siRNA sense strand
ggaggagcauacugcccua

SEQ ID NO: 2223289 - RNA, 19 nt, Homo sapiens
  misc_RNA (1)...(19): siRNA sense strand
caaaggugacaaaggacca

SEQ ID NO: 2223290 - RNA, 19 nt, Homo sapiens
  misc_RNA (1)...(19): siRNA sense strand
gcucuggccaggagauuca

SEQ ID NO: 2223291 - RNA, 19 nt, Homo sapiens
  misc_RNA (1)...(19): siRNA sense strand
caguauuagaucuuaccua

SEQ ID NO: 2223292 - RNA, 19 nt, Homo sapiens
  misc_RNA (1)...(19): siRNA sense strand
guuccugauccuagagaaa

SEQ ID NO: 2223293 - RNA, 19 nt, Homo sapiens
  misc_RNA (1)...(19): siRNA sense strand
cugaagucacugagagaau

SEQ ID NO: 2223294 - RNA, 19 nt, Homo sapiens
  misc_RNA (1)...(19): siRNA sense strand
gagaauugucacugaaaca

SEQ ID NO: 2223295 - RNA, 19 nt, Homo sapiens
  misc_RNA (1)...(19): siRNA sense strand
gagucaaacacgagagagu

SEQ ID NO: 2223296 - RNA, 19 nt, Homo sapiens
  misc_RNA (1)...(19): siRNA sense strand
gcauauggggugaagaaaa

SEQ ID NO: 2223297 - RNA, 19 nt, Homo sapiens
  misc_RNA (1)...(19): siRNA sense strand
uggcggaggaggugaggaa

SEQ ID NO: 2223298 - RNA, 19 nt, Homo sapiens
  misc_RNA (1)...(19): siRNA sense strand
uccuggaucuggagagaaa

SEQ ID NO: 2223299 - RNA, 19 nt, Homo sapiens
  misc_RNA (1)...(19): siRNA sense strand
ccuaaaagccgaagcuaau

SEQ ID NO: 2223300 - RNA, 19 nt, Homo sapiens
  misc_RNA (1)...(19): siRNA sense strand
ccaaaggugaccaggguga

SEQ ID NO: 2223301 - RNA, 19 nt, Homo sapiens
  misc_RNA (1)...(19): siRNA sense strand
augcagagugacaguauua

SEQ ID NO: 2223302 - RNA, 19 nt, Homo sapiens
  misc_RNA (1)...(19): siRNA sense strand
gcuaaugauggaacaggaa

SEQ ID NO: 2223303 - RNA, 19 nt, Homo sapiens
  misc_RNA (1)...(19): siRNA sense strand
gccuaaaagccgaagcuaa

SEQ ID NO: 2223304 - RNA, 19 nt, Homo sapiens
  misc_RNA (1)...(19): siRNA sense strand
uaaaggagaucgaggguuc

SEQ ID NO: 2223305 - RNA, 19 nt, Homo sapiens
  misc_RNA (1)...(19): siRNA sense strand
aaacaaacgagauggaacu

SEQ ID NO: 2223306 - RNA, 19 nt, Homo sapiens
  misc_RNA (1)...(19): siRNA sense strand
gaguacaugcagagugaca

SEQ ID NO: 2223307 - RNA, 19 nt, Homo sapiens
  misc_RNA (1)...(19): siRNA sense strand
cagcauauggggugaagaa

SEQ ID NO: 2223308 - RNA, 19 nt, Homo sapiens
  misc_RNA (1)...(19): siRNA sense strand
ucuggauguucgugaggaa

SEQ ID NO: 2223309 - RNA, 19 nt, Homo sapiens
  misc_RNA (1)...(19): siRNA sense strand
ccuaaaggugacaugggaa

SEQ ID NO: 2223310 - RNA, 19 nt, Homo sapiens
  misc_RNA (1)...(19): siRNA sense strand
aggcccaagaggugaacaa

SEQ ID NO: 2223311 - RNA, 19 nt, Homo sapiens
  misc_RNA (1)...(19): siRNA sense strand
gcggagaaggagaagaagu

SEQ ID NO: 2223312 - RNA, 19 nt, Homo sapiens
  misc_RNA (1)...(19): siRNA sense strand
gagaggaucaggaggagca

SEQ ID NO: 2223313 - RNA, 19 nt, Homo sapiens
  misc_RNA (1)...(19): siRNA sense strand
ccaagggcuccgaggugaa

SEQ ID NO: 2223314 - RNA, 19 nt, Homo sapiens
  misc_RNA (1)...(19): siRNA sense strand
gaagggagcuccaguggca

SEQ ID NO: 2223315 - RNA, 19 nt, Homo sapiens
  misc_RNA (1)...(19): siRNA sense strand
ggaacaggaaaauggaaau

SEQ ID NO: 2223316 - RNA, 19 nt, Homo sapiens
  misc_RNA (1)...(19): siRNA sense strand
ugacaaaggaccaauggga

SEQ ID NO: 2223317 - RNA, 19 nt, Homo sapiens
  misc_RNA (1)...(19): siRNA sense strand
cugcuaagaaggagaugga

SEQ ID NO: 2223318 - RNA, 19 nt, Homo sapiens
  misc_RNA (1)...(19): siRNA sense strand
ccacaaagggcaagaccac

SEQ ID NO: 2223319 - RNA, 19 nt, Homo sapiens
  misc_RNA (1)...(19): siRNA sense strand
aggaauaaaaggugaacca

SEQ ID NO: 2223320 - RNA, 19 nt, Homo sapiens
  misc_RNA (1)...(19): siRNA sense strand
cgggagcagaccuggacaa

SEQ ID NO: 2223321 - RNA, 19 nt, Homo sapiens
  misc_RNA (1)...(19): siRNA sense strand
gggaaguccaggcccuaaa

SEQ ID NO: 2223322 - RNA, 19 nt, Homo sapiens
  misc_RNA (1)...(19): siRNA sense strand
gagaagaaguauugcuguc

SEQ ID NO: 2223323 - RNA, 19 nt, Homo sapiens
  misc_RNA (1)...(19): siRNA sense strand
gcugaaggcgcguguggau

SEQ ID NO: 2223324 - RNA, 19 nt, Homo sapiens
  misc_RNA (1)...(19): siRNA sense strand
cuggagaggaucaggagga

SEQ ID NO: 2223325 - RNA, 19 nt, Homo sapiens
  misc_RNA (1)...(19): siRNA sense strand
uaaugauggaacaggaaaa

SEQ ID NO: 2223326 - RNA, 19 nt, Homo sapiens
  misc_RNA (1)...(19): siRNA sense strand
gagcugacuuugcuggaga

SEQ ID NO: 2223327 - RNA, 19 nt, Homo sapiens
  misc_RNA (1)...(19): siRNA sense strand
cagagagcaugcagcguca

SEQ ID NO: 2223328 - RNA, 19 nt, Homo sapiens
  misc_RNA (1)...(19): siRNA sense strand
gucaaacacgagagaguga

SEQ ID NO: 2223329 - RNA, 19 nt, Homo sapiens
  misc_RNA (1)...(19): siRNA sense strand
uggaacaggaaaauggaaa

SEQ ID NO: 2223330 - RNA, 19 nt, Homo sapiens
  misc_RNA (1)...(19): siRNA sense strand
gggaccaaaaggugacaaa

SEQ ID NO: 2223331 - RNA, 19 nt, Homo sapiens
  misc_RNA (1)...(19): siRNA sense strand
gaacaaggucuuacuggga

SEQ ID NO: 2223332 - RNA, 19 nt, Homo sapiens
  misc_RNA (1)...(19): siRNA sense strand
uggaggagguggcgguguu

SEQ ID NO: 2223333 - RNA, 19 nt, Homo sapiens
  misc_RNA (1)...(19): siRNA sense strand
gaaaggaccucgaggccuc

SEQ ID NO: 2223334 - RNA, 19 nt, Homo sapiens
  misc_RNA (1)...(19): siRNA sense strand
gcaucagcguggaggaccu

SEQ ID NO: 2223335 - RNA, 19 nt, Homo sapiens
  misc_RNA (1)...(19): siRNA sense strand
gcgucagggccuacugcaa

SEQ ID NO: 2223336 - RNA, 19 nt, Homo sapiens
  misc_RNA (1)...(19): siRNA sense strand
cgaggacacaagggagaaa

SEQ ID NO: 2223337 - RNA, 19 nt, Homo sapiens
  misc_RNA (1)...(19): siRNA sense strand
ggauguucgugaggaagaa

SEQ ID NO: 2223338 - RNA, 19 nt, Homo sapiens
  misc_RNA (1)...(19): siRNA sense strand
cuaaugauggaacaggaaa

SEQ ID NO: 2223339 - RNA, 19 nt, Homo sapiens
  misc_RNA (1)...(19): siRNA sense strand
aggugaccagggugagaaa

SEQ ID NO: 2223340 - RNA, 19 nt, Homo sapiens
  misc_RNA (1)...(19): siRNA sense strand
aaacucaacuggaagcaca

SEQ ID NO: 2223341 - RNA, 19 nt, Homo sapiens
  misc_RNA (1)...(19): siRNA sense strand
gggagcagaccuggacaaa

SEQ ID NO: 2223342 - RNA, 19 nt, Homo sapiens
  misc_RNA (1)...(19): siRNA sense strand
cugaagacauccuggcugu

SEQ ID NO: 2223343 - RNA, 19 nt, Homo sapiens
  misc_RNA (1)...(19): siRNA sense strand
gcugugagggugucagaga

SEQ ID NO: 2223344 - RNA, 19 nt, Homo sapiens
  misc_RNA (1)...(19): siRNA sense strand
gggaaggucuuuacagccu

SEQ ID NO: 2223345 - RNA, 19 nt, Homo sapiens
  misc_RNA (1)...(19): siRNA sense strand
agaagcuaaugauggaaca

SEQ ID NO: 2223346 - RNA, 19 nt, Homo sapiens
  misc_RNA (1)...(19): siRNA sense strand
ugacaaaggugauccgggu

SEQ ID NO: 2223347 - RNA, 19 nt, Homo sapiens
  misc_RNA (1)...(19): siRNA sense strand
uugcuggagaucuggauua

SEQ ID NO: 2223348 - RNA, 19 nt, Homo sapiens
  misc_RNA (1)...(19): siRNA sense strand
gggcacuccaggacccaaa

SEQ ID NO: 2223349 - RNA, 19 nt, Homo sapiens
  misc_RNA (1)...(19): siRNA sense strand
gcagcagcggcuacauaaa

SEQ ID NO: 2223350 - RNA, 19 nt, Homo sapiens
  misc_RNA (1)...(19): siRNA sense strand
uaucacaacaacaugacaa

SEQ ID NO: 2223351 - RNA, 19 nt, Homo sapiens
  misc_RNA (1)...(19): siRNA sense strand
ggaggagcauacugcccua

SEQ ID NO: 2223352 - RNA, 19 nt, Homo sapiens
  misc_RNA (1)...(19): siRNA sense strand
caaaggugacaaaggacca

SEQ ID NO: 2223353 - RNA, 19 nt, Homo sapiens
  misc_RNA (1)...(19): siRNA sense strand
gcucuggccaggagauuca

SEQ ID NO: 2223354 - RNA, 19 nt, Homo sapiens
  misc_RNA (1)...(19): siRNA sense strand
caguauuagaucuuaccua

SEQ ID NO: 2223355 - RNA, 19 nt, Homo sapiens
  misc_RNA (1)...(19): siRNA sense strand
gcaagacagugauugaaua

SEQ ID NO: 2223356 - RNA, 19 nt, Homo sapiens
  misc_RNA (1)...(19): siRNA sense strand
uggcaaagauggagaggcu

SEQ ID NO: 2223357 - RNA, 19 nt, Homo sapiens
  misc_RNA (1)...(19): siRNA sense strand
agacagugauugaauacaa

SEQ ID NO: 2223358 - RNA, 19 nt, Homo sapiens
  misc_RNA (1)...(19): siRNA sense strand
uggugaugcuggugccaaa

SEQ ID NO: 2223359 - RNA, 19 nt, Homo sapiens
  misc_RNA (1)...(19): siRNA sense strand
gcaagaacagcguggccua

SEQ ID NO: 2223360 - RNA, 19 nt, Homo sapiens
  misc_RNA (1)...(19): siRNA sense strand
cugcuggagaggaaggaaa

SEQ ID NO: 2223361 - RNA, 19 nt, Homo sapiens
  misc_RNA (1)...(19): siRNA sense strand
uggcgagagaggugaacaa

SEQ ID NO: 2223362 - RNA, 19 nt, Homo sapiens
  misc_RNA (1)...(19): siRNA sense strand
gaauggagaugauggggaa

SEQ ID NO: 2223363 - RNA, 19 nt, Homo sapiens
  misc_RNA (1)...(19): siRNA sense strand
cuggaagaguggagaguac

SEQ ID NO: 2223364 - RNA, 19 nt, Homo sapiens
  misc_RNA (1)...(19): siRNA sense strand
cgacagaggcauaaagggu

SEQ ID NO: 2223365 - RNA, 19 nt, Homo sapiens
  misc_RNA (1)...(19): siRNA sense strand
uggcgagcguggugugcaa

SEQ ID NO: 2223366 - RNA, 19 nt, Homo sapiens
  misc_RNA (1)...(19): siRNA sense strand
uggucagagaggagagaga

SEQ ID NO: 2223367 - RNA, 19 nt, Homo sapiens
  misc_RNA (1)...(19): siRNA sense strand
gaacagggcgacagaggca

SEQ ID NO: 2223368 - RNA, 19 nt, Homo sapiens
  misc_RNA (1)...(19): siRNA sense strand
aggugaugcuggucccaaa

SEQ ID NO: 2223369 - RNA, 19 nt, Homo sapiens
  misc_RNA (1)...(19): siRNA sense strand
uggcccugcuggcgagaaa

SEQ ID NO: 2223370 - RNA, 19 nt, Homo sapiens
  misc_RNA (1)...(19): siRNA sense strand
uggcccugcuggagaggaa

SEQ ID NO: 2223371 - RNA, 19 nt, Homo sapiens
  misc_RNA (1)...(19): siRNA sense strand
uggaaaugauggugcuacu

SEQ ID NO: 2223372 - RNA, 19 nt, Homo sapiens
  misc_RNA (1)...(19): siRNA sense strand
acagaggcauaaaggguca

SEQ ID NO: 2223373 - RNA, 19 nt, Homo sapiens
  misc_RNA (1)...(19): siRNA sense strand
uggcaagaguggugaucgu

SEQ ID NO: 2223374 - RNA, 19 nt, Homo sapiens
  misc_RNA (1)...(19): siRNA sense strand
agucgagggccaagacgaa

SEQ ID NO: 2223375 - RNA, 19 nt, Homo sapiens
  misc_RNA (1)...(19): siRNA sense strand
ggaaggaaagcgaggagcu

SEQ ID NO: 2223376 - RNA, 19 nt, Homo sapiens
  misc_RNA (1)...(19): siRNA sense strand
gacagugauugaauacaaa

SEQ ID NO: 2223377 - RNA, 19 nt, Homo sapiens
  misc_RNA (1)...(19): siRNA sense strand
gagaaaucaaccggaggaa

SEQ ID NO: 2223378 - RNA, 19 nt, Homo sapiens
  misc_RNA (1)...(19): siRNA sense strand
gggugaagcugguccccaa

SEQ ID NO: 2223379 - RNA, 19 nt, Homo sapiens
  misc_RNA (1)...(19): siRNA sense strand
ggguaacagcggugaaccu

SEQ ID NO: 2223380 - RNA, 19 nt, Homo sapiens
  misc_RNA (1)...(19): siRNA sense strand
gcucgaggauugcccggaa

SEQ ID NO: 2223381 - RNA, 19 nt, Homo sapiens
  misc_RNA (1)...(19): siRNA sense strand
agacaggcgaacagggcga

SEQ ID NO: 2223382 - RNA, 19 nt, Homo sapiens
  misc_RNA (1)...(19): siRNA sense strand
gagcaagaggcgagagagg

SEQ ID NO: 2223383 - RNA, 19 nt, Homo sapiens
  misc_RNA (1)...(19): siRNA sense strand
gcgacaacggcaagguguu

SEQ ID NO: 2223384 - RNA, 19 nt, Homo sapiens
  misc_RNA (1)...(19): siRNA sense strand
ugcuggugcucguggaaau

SEQ ID NO: 2223385 - RNA, 19 nt, Homo sapiens
  misc_RNA (1)...(19): siRNA sense strand
uggcucuccuggugaacaa

SEQ ID NO: 2223386 - RNA, 19 nt, Homo sapiens
  misc_RNA (1)...(19): siRNA sense strand
ggcaagacagugauugaau

SEQ ID NO: 2223387 - RNA, 19 nt, Homo sapiens
  misc_RNA (1)...(19): siRNA sense strand
augaagggacacagagguu

SEQ ID NO: 2223388 - RNA, 19 nt, Homo sapiens
  misc_RNA (1)...(19): siRNA sense strand
acacuggugcuaagggaga

SEQ ID NO: 2223389 - RNA, 19 nt, Homo sapiens
  misc_RNA (1)...(19): siRNA sense strand
acggcaagguguugugcga

SEQ ID NO: 2223390 - RNA, 19 nt, Homo sapiens
  misc_RNA (1)...(19): siRNA sense strand
uggugaucguggugagacu

SEQ ID NO: 2223391 - RNA, 19 nt, Homo sapiens
  misc_RNA (1)...(19): siRNA sense strand
agagcaugaccgauggauu

SEQ ID NO: 2223392 - RNA, 19 nt, Homo sapiens
  misc_RNA (1)...(19): siRNA sense strand
gagaggaguuguuggacca

SEQ ID NO: 2223393 - RNA, 19 nt, Homo sapiens
  misc_RNA (1)...(19): siRNA sense strand
ccagaggacuuguugguga

SEQ ID NO: 2223394 - RNA, 19 nt, Homo sapiens
  misc_RNA (1)...(19): siRNA sense strand
cguuggaccuccugguaau

SEQ ID NO: 2223395 - RNA, 19 nt, Homo sapiens
  misc_RNA (1)...(19): siRNA sense strand
caacggugcuccuggugaa

SEQ ID NO: 2223396 - RNA, 19 nt, Homo sapiens
  misc_RNA (1)...(19): siRNA sense strand
uggugaagaaggaaagaga

SEQ ID NO: 2223397 - RNA, 19 nt, Homo sapiens
  misc_RNA (1)...(19): siRNA sense strand
uggcauaccuggaggcaag

SEQ ID NO: 2223398 - RNA, 19 nt, Homo sapiens
  misc_RNA (1)...(19): siRNA sense strand
acauggaaaccguggugaa

SEQ ID NO: 2223399 - RNA, 19 nt, Homo sapiens
  misc_RNA (1)...(19): siRNA sense strand
uggauggauugaagggaca

SEQ ID NO: 2223400 - RNA, 19 nt, Homo sapiens
  misc_RNA (1)...(19): siRNA sense strand
agacaaaugaauggggaaa

SEQ ID NO: 2223401 - RNA, 19 nt, Homo sapiens
  misc_RNA (1)...(19): siRNA sense strand
gagaggugaacguggucua

SEQ ID NO: 2223402 - RNA, 19 nt, Homo sapiens
  misc_RNA (1)...(19): siRNA sense strand
uauaggagcuccaaggaca

SEQ ID NO: 2223403 - RNA, 19 nt, Homo sapiens
  misc_RNA (1)...(19): siRNA sense strand
ccaguggugaagaaggaaa

SEQ ID NO: 2223404 - RNA, 19 nt, Homo sapiens
  misc_RNA (1)...(19): siRNA sense strand
caagaaacacgucuggcua

SEQ ID NO: 2223405 - RNA, 19 nt, Homo sapiens
  misc_RNA (1)...(19): siRNA sense strand
uggaaaccguggugaaacu

SEQ ID NO: 2223406 - RNA, 19 nt, Homo sapiens
  misc_RNA (1)...(19): siRNA sense strand
aaacaauggugcucaggga

SEQ ID NO: 2223407 - RNA, 19 nt, Homo sapiens
  misc_RNA (1)...(19): siRNA sense strand
ugguaauccuggagcaaac

SEQ ID NO: 2223408 - RNA, 19 nt, Homo sapiens
  misc_RNA (1)...(19): siRNA sense strand
ggguguucaagguggaaaa

SEQ ID NO: 2223409 - RNA, 19 nt, Homo sapiens
  misc_RNA (1)...(19): siRNA sense strand
cguggguccugcuggcaaa

SEQ ID NO: 2223410 - RNA, 19 nt, Homo sapiens
  misc_RNA (1)...(19): siRNA sense strand
ccaaaggagagagcgguaa

SEQ ID NO: 2223411 - RNA, 19 nt, Homo sapiens
  misc_RNA (1)...(19): siRNA sense strand
ccuggaggcaagggagaaa

SEQ ID NO: 2223412 - RNA, 19 nt, Homo sapiens
  misc_RNA (1)...(19): siRNA sense strand
cucuaaugauguugaacuu

SEQ ID NO: 2223413 - RNA, 19 nt, Homo sapiens
  misc_RNA (1)...(19): siRNA sense strand
ugauaaaggucaugcuggu

SEQ ID NO: 2223414 - RNA, 19 nt, Homo sapiens
  misc_RNA (1)...(19): siRNA sense strand
cccugguccugcugggaaa

SEQ ID NO: 2223415 - RNA, 19 nt, Homo sapiens
  misc_RNA (1)...(19): siRNA sense strand
uggaagucguggugaugga

SEQ ID NO: 2223416 - RNA, 19 nt, Homo sapiens
  misc_RNA (1)...(19): siRNA sense strand
uggagaaguaggugcaguu

SEQ ID NO: 2223417 - RNA, 19 nt, Homo sapiens
  misc_RNA (1)...(19): siRNA sense strand
ggguaguccuggagucaac

SEQ ID NO: 2223418 - RNA, 19 nt, Homo sapiens
  misc_RNA (1)...(19): siRNA sense strand
uggugaagcuggucgugau

SEQ ID NO: 2223419 - RNA, 19 nt, Homo sapiens
  misc_RNA (1)...(19): siRNA sense strand
cugauggaaacaaggguga

SEQ ID NO: 2223420 - RNA, 19 nt, Homo sapiens
  misc_RNA (1)...(19): siRNA sense strand
agccggagauagaggacca

SEQ ID NO: 2223421 - RNA, 19 nt, Homo sapiens
  misc_RNA (1)...(19): siRNA sense strand
uugcauacauggaugagga

SEQ ID NO: 2223422 - RNA, 19 nt, Homo sapiens
  misc_RNA (1)...(19): siRNA sense strand
gggcuuaaugggaccuaga

SEQ ID NO: 2223423 - RNA, 19 nt, Homo sapiens
  misc_RNA (1)...(19): siRNA sense strand
gcaagggagaaaaggguga

SEQ ID NO: 2223424 - RNA, 19 nt, Homo sapiens
  misc_RNA (1)...(19): siRNA sense strand
cccuggaacuccuggacuu

SEQ ID NO: 2223425 - RNA, 19 nt, Homo sapiens
  misc_RNA (1)...(19): siRNA sense strand
uccaaaggagagagcggua

SEQ ID NO: 2223426 - RNA, 19 nt, Homo sapiens
  misc_RNA (1)...(19): siRNA sense strand
uggcagagauggugcucgu

SEQ ID NO: 2223427 - RNA, 19 nt, Homo sapiens
  misc_RNA (1)...(19): siRNA sense strand
ugguaagaauggugccaaa

SEQ ID NO: 2223428 - RNA, 19 nt, Homo sapiens
  misc_RNA (1)...(19): siRNA sense strand
ggaucaggccaguggaaau

SEQ ID NO: 2223429 - RNA, 19 nt, Homo sapiens
  misc_RNA (1)...(19): siRNA sense strand
ugguaguccuggugguaaa

SEQ ID NO: 2223430 - RNA, 19 nt, Homo sapiens
  misc_RNA (1)...(19): siRNA sense strand
accaggaagugaugggaaa

SEQ ID NO: 2223431 - RNA, 19 nt, Homo sapiens
  misc_RNA (1)...(19): siRNA sense strand
ugguaagaauggagaacga

SEQ ID NO: 2223432 - RNA, 19 nt, Homo sapiens
  misc_RNA (1)...(19): siRNA sense strand
uggaaagaauggugaaacu

SEQ ID NO: 2223433 - RNA, 19 nt, Homo sapiens
  misc_RNA (1)...(19): siRNA sense strand
gcugaaggaaauagcaaau

SEQ ID NO: 2223434 - RNA, 19 nt, Homo sapiens
  misc_RNA (1)...(19): siRNA sense strand
caagggugaaagugggaaa

SEQ ID NO: 2223435 - RNA, 19 nt, Homo sapiens
  misc_RNA (1)...(19): siRNA sense strand
gaguggugacagaggagaa

SEQ ID NO: 2223436 - RNA, 19 nt, Homo sapiens
  misc_RNA (1)...(19): siRNA sense strand
cgauggacgaaauggagaa

SEQ ID NO: 2223437 - RNA, 19 nt, Homo sapiens
  misc_RNA (1)...(19): siRNA sense strand
agguaacagaggugaaaga

SEQ ID NO: 2223438 - RNA, 19 nt, Homo sapiens
  misc_RNA (1)...(19): siRNA sense strand
uaacagaggugaaagagga

SEQ ID NO: 2223439 - RNA, 19 nt, Homo sapiens
  misc_RNA (1)...(19): siRNA sense strand
agauggaaccaguggacau

SEQ ID NO: 2223440 - RNA, 19 nt, Homo sapiens
  misc_RNA (1)...(19): siRNA sense strand
cuaaaggcgaagauggcaa

SEQ ID NO: 2223441 - RNA, 19 nt, Homo sapiens
  misc_RNA (1)...(19): siRNA sense strand
aggcccacguggugacaaa

SEQ ID NO: 2223442 - RNA, 19 nt, Homo sapiens
  misc_RNA (1)...(19): siRNA sense strand
gggugaucguggugaaaau

SEQ ID NO: 2223443 - RNA, 19 nt, Homo sapiens
  misc_RNA (1)...(19): siRNA sense strand
ggacaaauagaaagccuca

SEQ ID NO: 2223444 - RNA, 19 nt, Homo sapiens
  misc_RNA (1)...(19): siRNA sense strand
cggaagucaaggagaaagu

SEQ ID NO: 2223445 - RNA, 19 nt, Homo sapiens
  misc_RNA (1)...(19): siRNA sense strand
aggugagccugguaagaau

SEQ ID NO: 2223446 - RNA, 19 nt, Homo sapiens
  misc_RNA (1)...(19): siRNA sense strand
gcuagaaacugcagagacc

SEQ ID NO: 2223447 - RNA, 19 nt, Homo sapiens
  misc_RNA (1)...(19): siRNA sense strand
ggauagagaugucuggaag

SEQ ID NO: 2223448 - RNA, 19 nt, Homo sapiens
  misc_RNA (1)...(19): siRNA sense strand
ugguagcccuggugagaga

SEQ ID NO: 2223449 - RNA, 19 nt, Homo sapiens
  misc_RNA (1)...(19): siRNA sense strand
uggcaaagauggaaccagu

SEQ ID NO: 2223450 - RNA, 19 nt, Homo sapiens
  misc_RNA (1)...(19): siRNA sense strand
cauuggugguccugaucaa

SEQ ID NO: 2223451 - RNA, 19 nt, Homo sapiens
  misc_RNA (1)...(19): siRNA sense strand
ggguaaugacggugcucga

SEQ ID NO: 2223452 - RNA, 19 nt, Homo sapiens
  misc_RNA (1)...(19): siRNA sense strand
ucccggaagucaaggagaa

SEQ ID NO: 2223453 - RNA, 19 nt, Homo sapiens
  misc_RNA (1)...(19): siRNA sense strand
ccaaggugucaaaggugaa

SEQ ID NO: 2223454 - RNA, 19 nt, Homo sapiens
  misc_RNA (1)...(19): siRNA sense strand
caucaaaggacaucgagga

SEQ ID NO: 2223455 - RNA, 19 nt, Homo sapiens
  misc_RNA (1)...(19): siRNA sense strand
ggucaaaugaaggugaauu

SEQ ID NO: 2223456 - RNA, 19 nt, Homo sapiens
  misc_RNA (1)...(19): siRNA sense strand
ggcugaaggaaauagcaaa

SEQ ID NO: 2223457 - RNA, 19 nt, Homo sapiens
  misc_RNA (1)...(19): siRNA sense strand
uggaguagcaguaggagga

SEQ ID NO: 2223458 - RNA, 19 nt, Homo sapiens
  misc_RNA (1)...(19): siRNA sense strand
uggugaaccuggaagagau

SEQ ID NO: 2223459 - RNA, 19 nt, Homo sapiens
  misc_RNA (1)...(19): siRNA sense strand
cggaaacacugguggacag

SEQ ID NO: 2223460 - RNA, 19 nt, Homo sapiens
  misc_RNA (1)...(19): siRNA sense strand
aggcgaagauggcaaggau

SEQ ID NO: 2223461 - RNA, 19 nt, Homo sapiens
  misc_RNA (1)...(19): siRNA sense strand
ugacaaaggugaaacaggu

SEQ ID NO: 2223462 - RNA, 19 nt, Homo sapiens
  misc_RNA (1)...(19): siRNA sense strand
cggauagagaugucuggaa

SEQ ID NO: 2223463 - RNA, 19 nt, Homo sapiens
  misc_RNA (1)...(19): siRNA sense strand
agauggagaaucagguaga

SEQ ID NO: 2223464 - RNA, 19 nt, Homo sapiens
  misc_RNA (1)...(19): siRNA sense strand
agauaagggugaagguggu

SEQ ID NO: 2223465 - RNA, 19 nt, Homo sapiens
  misc_RNA (1)...(19): siRNA sense strand
agauggaaacccuggauca

SEQ ID NO: 2223466 - RNA, 19 nt, Homo sapiens
  misc_RNA (1)...(19): siRNA sense strand
gggugagaaaggugaagga

SEQ ID NO: 2223467 - RNA, 19 nt, Homo sapiens
  misc_RNA (1)...(19): siRNA sense strand
agguguuccaggagcuaaa

SEQ ID NO: 2223468 - RNA, 19 nt, Homo sapiens
  misc_RNA (1)...(19): siRNA sense strand
caaaggugaaacaggugaa

SEQ ID NO: 2223469 - RNA, 19 nt, Homo sapiens
  misc_RNA (1)...(19): siRNA sense strand
aggcugaaggaaauagcaa

SEQ ID NO: 2223470 - RNA, 19 nt, Homo sapiens
  misc_RNA (1)...(19): siRNA sense strand
acgcaaggcugugagacua

SEQ ID NO: 2223471 - RNA, 19 nt, Homo sapiens
  misc_RNA (1)...(19): siRNA sense strand
ccuggaaagaauggugaaa

SEQ ID NO: 2223472 - RNA, 19 nt, Homo sapiens
  misc_RNA (1)...(19): siRNA sense strand
caaagggugacaaggguga

SEQ ID NO: 2223473 - RNA, 19 nt, Homo sapiens
  misc_RNA (1)...(19): siRNA sense strand
ccugaugguucucguaaaa

SEQ ID NO: 2223474 - RNA, 19 nt, Homo sapiens
  misc_RNA (1)...(19): siRNA sense strand
ggaagcuguugaaggagga

SEQ ID NO: 2223475 - RNA, 19 nt, Homo sapiens
  misc_RNA (1)...(19): siRNA sense strand
uaggaggacucgcaggcua

SEQ ID NO: 2223476 - RNA, 19 nt, Homo sapiens
  misc_RNA (1)...(19): siRNA sense strand
gcaaaaggggagcuggcua

SEQ ID NO: 2223477 - RNA, 19 nt, Homo sapiens
  misc_RNA (1)...(19): siRNA sense strand
ggguccuccuggaaagaau

SEQ ID NO: 2223478 - RNA, 19 nt, Homo sapiens
  misc_RNA (1)...(19): siRNA sense strand
gaaacaugcauaagugcca

SEQ ID NO: 2223479 - RNA, 19 nt, Homo sapiens
  misc_RNA (1)...(19): siRNA sense strand
uggauuaaagggugaaaau

SEQ ID NO: 2223480 - RNA, 19 nt, Homo sapiens
  misc_RNA (1)...(19): siRNA sense strand
ugacggugcucgaggcagu

SEQ ID NO: 2223481 - RNA, 19 nt, Homo sapiens
  misc_RNA (1)...(19): siRNA sense strand
uggacaaagaggagaaccu

SEQ ID NO: 2223482 - RNA, 19 nt, Homo sapiens
  misc_RNA (1)...(19): siRNA sense strand
uggugguaaaggagaaaga

SEQ ID NO: 2223483 - RNA, 19 nt, Homo sapiens
  misc_RNA (1)...(19): siRNA sense strand
gggugaaguuggaccugca

SEQ ID NO: 2223484 - RNA, 19 nt, Homo sapiens
  misc_RNA (1)...(19): siRNA sense strand
uccaggagcuaaaggcgaa

SEQ ID NO: 2223485 - RNA, 19 nt, Homo sapiens
  misc_RNA (1)...(19): siRNA sense strand
gggugaaagugggaaacca

SEQ ID NO: 2223486 - RNA, 19 nt, Homo sapiens
  misc_RNA (1)...(19): siRNA sense strand
ugguacagcuggugaaccu

SEQ ID NO: 2223487 - RNA, 19 nt, Homo sapiens
  misc_RNA (1)...(19): siRNA sense strand
ucgagguaacagaggugaa

SEQ ID NO: 2223488 - RNA, 19 nt, Homo sapiens
  misc_RNA (1)...(19): siRNA sense strand
ggaaauagcaaauucaccu

SEQ ID NO: 2223489 - RNA, 19 nt, Homo sapiens
  misc_RNA (1)...(19): siRNA sense strand
gaaauggagaaaaggguga

SEQ ID NO: 2223490 - RNA, 19 nt, Homo sapiens
  misc_RNA (1)...(19): siRNA sense strand
uggaagagauggaaacccu

SEQ ID NO: 2223491 - RNA, 19 nt, Homo sapiens
  misc_RNA (1)...(19): siRNA sense strand
aggugaaacaggugaacgu

SEQ ID NO: 2223492 - RNA, 19 nt, Homo sapiens
  misc_RNA (1)...(19): siRNA sense strand
guauuauggagaugaacca

SEQ ID NO: 2223493 - RNA, 19 nt, Homo sapiens
  misc_RNA (1)...(19): siRNA sense strand
aggaaauccaggugagaaa

SEQ ID NO: 2223494 - RNA, 19 nt, Homo sapiens
  misc_RNA (1)...(19): siRNA sense strand
ggguauaagaggugaccaa

SEQ ID NO: 2223495 - RNA, 19 nt, Homo sapiens
  misc_RNA (1)...(19): siRNA sense strand
gggaauaaguggauugcca

SEQ ID NO: 2223496 - RNA, 19 nt, Homo sapiens
  misc_RNA (1)...(19): siRNA sense strand
ggcucugaguggugagaaa

SEQ ID NO: 2223497 - RNA, 19 nt, Homo sapiens
  misc_RNA (1)...(19): siRNA sense strand
gaaaggaaguaaaggggaa

SEQ ID NO: 2223498 - RNA, 19 nt, Homo sapiens
  misc_RNA (1)...(19): siRNA sense strand
aggcauaaaaggagacaaa

SEQ ID NO: 2223499 - RNA, 19 nt, Homo sapiens
  misc_RNA (1)...(19): siRNA sense strand
gugaaagagugauaggaca

SEQ ID NO: 2223500 - RNA, 19 nt, Homo sapiens
  misc_RNA (1)...(19): siRNA sense strand
gugagggagucaagggcaa

SEQ ID NO: 2223501 - RNA, 19 nt, Homo sapiens
  misc_RNA (1)...(19): siRNA sense strand
gggugauaugggaaagaaa

SEQ ID NO: 2223502 - RNA, 19 nt, Homo sapiens
  misc_RNA (1)...(19): siRNA sense strand
ugaaagagugauaggacau

SEQ ID NO: 2223503 - RNA, 19 nt, Homo sapiens
  misc_RNA (1)...(19): siRNA sense strand
uggcauuaagggacagaaa

SEQ ID NO: 2223504 - RNA, 19 nt, Homo sapiens
  misc_RNA (1)...(19): siRNA sense strand
ugaaaggagaaaaggguaa

SEQ ID NO: 2223505 - RNA, 19 nt, Homo sapiens
  misc_RNA (1)...(19): siRNA sense strand
gagucauguaauaggcaua

SEQ ID NO: 2223506 - RNA, 19 nt, Homo sapiens
  misc_RNA (1)...(19): siRNA sense strand
uggaccaccuggagaacaa

SEQ ID NO: 2223507 - RNA, 19 nt, Homo sapiens
  misc_RNA (1)...(19): siRNA sense strand
gggaaaacccggaaaagau

SEQ ID NO: 2223508 - RNA, 19 nt, Homo sapiens
  misc_RNA (1)...(19): siRNA sense strand
gaaaggaaacagaggcguu

SEQ ID NO: 2223509 - RNA, 19 nt, Homo sapiens
  misc_RNA (1)...(19): siRNA sense strand
gaaaaggggccaugggaga

SEQ ID NO: 2223510 - RNA, 19 nt, Homo sapiens
  misc_RNA (1)...(19): siRNA sense strand
aggacugccuggagaauca

SEQ ID NO: 2223511 - RNA, 19 nt, Homo sapiens
  misc_RNA (1)...(19): siRNA sense strand
acaaggcagaagagguaaa

SEQ ID NO: 2223512 - RNA, 19 nt, Homo sapiens
  misc_RNA (1)...(19): siRNA sense strand
uggcacaccuggagaacca

SEQ ID NO: 2223513 - RNA, 19 nt, Homo sapiens
  misc_RNA (1)...(19): siRNA sense strand
ugggaauccuggagaacca

SEQ ID NO: 2223514 - RNA, 19 nt, Homo sapiens
  misc_RNA (1)...(19): siRNA sense strand
gggagauaagggagagcca

SEQ ID NO: 2223515 - RNA, 19 nt, Homo sapiens
  misc_RNA (1)...(19): siRNA sense strand
ucgaggacccacaggcaua

SEQ ID NO: 2223516 - RNA, 19 nt, Homo sapiens
  misc_RNA (1)...(19): siRNA sense strand
agauauagaacuugaugca

SEQ ID NO: 2223517 - RNA, 19 nt, Homo sapiens
  misc_RNA (1)...(19): siRNA sense strand
aggauuaccaggaccuaaa

SEQ ID NO: 2223518 - RNA, 19 nt, Homo sapiens
  misc_RNA (1)...(19): siRNA sense strand
aacaaggagauaaaggaaa

SEQ ID NO: 2223519 - RNA, 19 nt, Homo sapiens
  misc_RNA (1)...(19): siRNA sense strand
ugauaggacauaaaggaga

SEQ ID NO: 2223520 - RNA, 19 nt, Homo sapiens
  misc_RNA (1)...(19): siRNA sense strand
cccaggacuuaaaggagaa

SEQ ID NO: 2223521 - RNA, 19 nt, Homo sapiens
  misc_RNA (1)...(19): siRNA sense strand
caugggugaaagagugaua

SEQ ID NO: 2223522 - RNA, 19 nt, Homo sapiens
  misc_RNA (1)...(19): siRNA sense strand
gcaacaaggcagaagaggu

SEQ ID NO: 2223523 - RNA, 19 nt, Homo sapiens
  misc_RNA (1)...(19): siRNA sense strand
aggaaucccaggaagacaa

SEQ ID NO: 2223524 - RNA, 19 nt, Homo sapiens
  misc_RNA (1)...(19): siRNA sense strand
uggagaaacuggaucacca

SEQ ID NO: 2223525 - RNA, 19 nt, Homo sapiens
  misc_RNA (1)...(19): siRNA sense strand
aagagugauaggacauaaa

SEQ ID NO: 2223526 - RNA, 19 nt, Homo sapiens
  misc_RNA (1)...(19): siRNA sense strand
ggacaaaggagaaccaggu

SEQ ID NO: 2223527 - RNA, 19 nt, Homo sapiens
  misc_RNA (1)...(19): siRNA sense strand
aaccagggaugcagggaga

SEQ ID NO: 2223528 - RNA, 19 nt, Homo sapiens
  misc_RNA (1)...(19): siRNA sense strand
uggggaacauggagaaauu

SEQ ID NO: 2223529 - RNA, 19 nt, Homo sapiens
  misc_RNA (1)...(19): siRNA sense strand
augccagguucuaaaggaa

SEQ ID NO: 2223530 - RNA, 19 nt, Homo sapiens
  misc_RNA (1)...(19): siRNA sense strand
ugaccaaggacgugaugga

SEQ ID NO: 2223531 - RNA, 19 nt, Homo sapiens
  misc_RNA (1)...(19): siRNA sense strand
ugauggaccacgaggagau

SEQ ID NO: 2223532 - RNA, 19 nt, Homo sapiens
  misc_RNA (1)...(19): siRNA sense strand
acaaagggucuaugggcca

SEQ ID NO: 2223533 - RNA, 19 nt, Homo sapiens
  misc_RNA (1)...(19): siRNA sense strand
aagauggcauuaagggaca

SEQ ID NO: 2223534 - RNA, 19 nt, Homo sapiens
  misc_RNA (1)...(19): siRNA sense strand
aggaauuccaggucaucaa

SEQ ID NO: 2223535 - RNA, 19 nt, Homo sapiens
  misc_RNA (1)...(19): siRNA sense strand
ccacugggucaaagaggau

SEQ ID NO: 2223536 - RNA, 19 nt, Homo sapiens
  misc_RNA (1)...(19): siRNA sense strand
ucugggagugaaaggauua

SEQ ID NO: 2223537 - RNA, 19 nt, Homo sapiens
  misc_RNA (1)...(19): siRNA sense strand
gaguaaagggccagagagg

SEQ ID NO: 2223538 - RNA, 19 nt, Homo sapiens
  misc_RNA (1)...(19): siRNA sense strand
gggagaugcuggaccucga

SEQ ID NO: 2223539 - RNA, 19 nt, Homo sapiens
  misc_RNA (1)...(19): siRNA sense strand
aaugggagagccuggguua

SEQ ID NO: 2223540 - RNA, 19 nt, Homo sapiens
  misc_RNA (1)...(19): siRNA sense strand
aaauggauugaaagggcaa

SEQ ID NO: 2223541 - RNA, 19 nt, Homo sapiens
  misc_RNA (1)...(19): siRNA sense strand
gggucaaagaggauaucca

SEQ ID NO: 2223542 - RNA, 19 nt, Homo sapiens
  misc_RNA (1)...(19): siRNA sense strand
acaaagguucuaaaggaga

SEQ ID NO: 2223543 - RNA, 19 nt, Homo sapiens
  misc_RNA (1)...(19): siRNA sense strand
acccaggacuuaaaggaga

SEQ ID NO: 2223544 - RNA, 19 nt, Homo sapiens
  misc_RNA (1)...(19): siRNA sense strand
agccaugccuggaggacca

SEQ ID NO: 2223545 - RNA, 19 nt, Homo sapiens
  misc_RNA (1)...(19): siRNA sense strand
aggcaacaaagguucuaaa

SEQ ID NO: 2223546 - RNA, 19 nt, Homo sapiens
  misc_RNA (1)...(19): siRNA sense strand
gugaaaggguuaacaggac

SEQ ID NO: 2223547 - RNA, 19 nt, Homo sapiens
  misc_RNA (1)...(19): siRNA sense strand
gcagggaaaacccggaaaa

SEQ ID NO: 2223548 - RNA, 19 nt, Homo sapiens
  misc_RNA (1)...(19): siRNA sense strand
gaggccaaccugggagaaa

SEQ ID NO: 2223549 - RNA, 19 nt, Homo sapiens
  misc_RNA (1)...(19): siRNA sense strand
ccaggaaaagggagaugaa

SEQ ID NO: 2223550 - RNA, 19 nt, Homo sapiens
  misc_RNA (1)...(19): siRNA sense strand
cccaggauugccaggguua

SEQ ID NO: 2223551 - RNA, 19 nt, Homo sapiens
  misc_RNA (1)...(19): siRNA sense strand
ggagaaagggcuuggaugg

SEQ ID NO: 2223552 - RNA, 19 nt, Homo sapiens
  misc_RNA (1)...(19): siRNA sense strand
gacaggaaaucguggucca

SEQ ID NO: 2223553 - RNA, 19 nt, Homo sapiens
  misc_RNA (1)...(19): siRNA sense strand
agccaggcaaggauggaaa

SEQ ID NO: 2223554 - RNA, 19 nt, Homo sapiens
  misc_RNA (1)...(19): siRNA sense strand
gaaucauauggaucugaaa

SEQ ID NO: 2223555 - RNA, 19 nt, Homo sapiens
  misc_RNA (1)...(19): siRNA sense strand
ggggaaauguggagauccu

SEQ ID NO: 2223556 - RNA, 19 nt, Homo sapiens
  misc_RNA (1)...(19): siRNA sense strand
gccagguucuaaaggaaaa

SEQ ID NO: 2223557 - RNA, 19 nt, Homo sapiens
  misc_RNA (1)...(19): siRNA sense strand
aggcaaggauggaaaacca

SEQ ID NO: 2223558 - RNA, 19 nt, Homo sapiens
  misc_RNA (1)...(19): siRNA sense strand
aggaaauccaggugagaaa

SEQ ID NO: 2223559 - RNA, 19 nt, Homo sapiens
  misc_RNA (1)...(19): siRNA sense strand
ggguauaagaggugaccaa

SEQ ID NO: 2223560 - RNA, 19 nt, Homo sapiens
  misc_RNA (1)...(19): siRNA sense strand
gggaauaaguggauugcca

SEQ ID NO: 2223561 - RNA, 19 nt, Homo sapiens
  misc_RNA (1)...(19): siRNA sense strand
ggcucugaguggugagaaa

SEQ ID NO: 2223562 - RNA, 19 nt, Homo sapiens
  misc_RNA (1)...(19): siRNA sense strand
gaaaggaaguaaaggggaa

SEQ ID NO: 2223563 - RNA, 19 nt, Homo sapiens
  misc_RNA (1)...(19): siRNA sense strand
aggcauaaaaggagacaaa

SEQ ID NO: 2223564 - RNA, 19 nt, Homo sapiens
  misc_RNA (1)...(19): siRNA sense strand
gugaaagagugauaggaca

SEQ ID NO: 2223565 - RNA, 19 nt, Homo sapiens
  misc_RNA (1)...(19): siRNA sense strand
gugagggagucaagggcaa

SEQ ID NO: 2223566 - RNA, 19 nt, Homo sapiens
  misc_RNA (1)...(19): siRNA sense strand
gggugauaugggaaagaaa

SEQ ID NO: 2223567 - RNA, 19 nt, Homo sapiens
  misc_RNA (1)...(19): siRNA sense strand
ugaaagagugauaggacau

SEQ ID NO: 2223568 - RNA, 19 nt, Homo sapiens
  misc_RNA (1)...(19): siRNA sense strand
uggcauuaagggacagaaa

SEQ ID NO: 2223569 - RNA, 19 nt, Homo sapiens
  misc_RNA (1)...(19): siRNA sense strand
ugaaaggagaaaaggguaa

SEQ ID NO: 2223570 - RNA, 19 nt, Homo sapiens
  misc_RNA (1)...(19): siRNA sense strand
gagucauguaauaggcaua

SEQ ID NO: 2223571 - RNA, 19 nt, Homo sapiens
  misc_RNA (1)...(19): siRNA sense strand
uggaccaccuggagaacaa

SEQ ID NO: 2223572 - RNA, 19 nt, Homo sapiens
  misc_RNA (1)...(19): siRNA sense strand
gggaaaacccggaaaagau

SEQ ID NO: 2223573 - RNA, 19 nt, Homo sapiens
  misc_RNA (1)...(19): siRNA sense strand
gaaaggaaacagaggcguu

SEQ ID NO: 2223574 - RNA, 19 nt, Homo sapiens
  misc_RNA (1)...(19): siRNA sense strand
gaaaaggggccaugggaga

SEQ ID NO: 2223575 - RNA, 19 nt, Homo sapiens
  misc_RNA (1)...(19): siRNA sense strand
aggacugccuggagaauca

SEQ ID NO: 2223576 - RNA, 19 nt, Homo sapiens
  misc_RNA (1)...(19): siRNA sense strand
acaaggcagaagagguaaa

SEQ ID NO: 2223577 - RNA, 19 nt, Homo sapiens
  misc_RNA (1)...(19): siRNA sense strand
caaaguaaugacagaacau

SEQ ID NO: 2223578 - RNA, 19 nt, Homo sapiens
  misc_RNA (1)...(19): siRNA sense strand
uggcacaccuggagaacca

SEQ ID NO: 2223579 - RNA, 19 nt, Homo sapiens
  misc_RNA (1)...(19): siRNA sense strand
ugggaauccuggagaacca

SEQ ID NO: 2223580 - RNA, 19 nt, Homo sapiens
  misc_RNA (1)...(19): siRNA sense strand
gggagauaagggagagcca

SEQ ID NO: 2223581 - RNA, 19 nt, Homo sapiens
  misc_RNA (1)...(19): siRNA sense strand
ucgaggacccacaggcaua

SEQ ID NO: 2223582 - RNA, 19 nt, Homo sapiens
  misc_RNA (1)...(19): siRNA sense strand
agauauagaacuugaugca

SEQ ID NO: 2223583 - RNA, 19 nt, Homo sapiens
  misc_RNA (1)...(19): siRNA sense strand
aggauuaccaggaccuaaa

SEQ ID NO: 2223584 - RNA, 19 nt, Homo sapiens
  misc_RNA (1)...(19): siRNA sense strand
aacaaggagauaaaggaaa

SEQ ID NO: 2223585 - RNA, 19 nt, Homo sapiens
  misc_RNA (1)...(19): siRNA sense strand
ugauaggacauaaaggaga

SEQ ID NO: 2223586 - RNA, 19 nt, Homo sapiens
  misc_RNA (1)...(19): siRNA sense strand
cccaggacuuaaaggagaa

SEQ ID NO: 2223587 - RNA, 19 nt, Homo sapiens
  misc_RNA (1)...(19): siRNA sense strand
caugggugaaagagugaua

SEQ ID NO: 2223588 - RNA, 19 nt, Homo sapiens
  misc_RNA (1)...(19): siRNA sense strand
gcaacaaggcagaagaggu

SEQ ID NO: 2223589 - RNA, 19 nt, Homo sapiens
  misc_RNA (1)...(19): siRNA sense strand
aggaaucccaggaagacaa

SEQ ID NO: 2223590 - RNA, 19 nt, Homo sapiens
  misc_RNA (1)...(19): siRNA sense strand
uggagaaacuggaucacca

SEQ ID NO: 2223591 - RNA, 19 nt, Homo sapiens
  misc_RNA (1)...(19): siRNA sense strand
aagagugauaggacauaaa

SEQ ID NO: 2223592 - RNA, 19 nt, Homo sapiens
  misc_RNA (1)...(19): siRNA sense strand
ggacaaaggagaaccaggu

SEQ ID NO: 2223593 - RNA, 19 nt, Homo sapiens
  misc_RNA (1)...(19): siRNA sense strand
aaccagggaugcagggaga

SEQ ID NO: 2223594 - RNA, 19 nt, Homo sapiens
  misc_RNA (1)...(19): siRNA sense strand
uggggaacauggagaaauu

SEQ ID NO: 2223595 - RNA, 19 nt, Homo sapiens
  misc_RNA (1)...(19): siRNA sense strand
augccagguucuaaaggaa

SEQ ID NO: 2223596 - RNA, 19 nt, Homo sapiens
  misc_RNA (1)...(19): siRNA sense strand
ugaccaaggacgugaugga

SEQ ID NO: 2223597 - RNA, 19 nt, Homo sapiens
  misc_RNA (1)...(19): siRNA sense strand
ugauggaccacgaggagau

SEQ ID NO: 2223598 - RNA, 19 nt, Homo sapiens
  misc_RNA (1)...(19): siRNA sense strand
acaaagggucuaugggcca

SEQ ID NO: 2223599 - RNA, 19 nt, Homo sapiens
  misc_RNA (1)...(19): siRNA sense strand
aagauggcauuaagggaca

SEQ ID NO: 2223600 - RNA, 19 nt, Homo sapiens
  misc_RNA (1)...(19): siRNA sense strand
aggaauuccaggucaucaa

SEQ ID NO: 2223601 - RNA, 19 nt, Homo sapiens
  misc_RNA (1)...(19): siRNA sense strand
ccacugggucaaagaggau

SEQ ID NO: 2223602 - RNA, 19 nt, Homo sapiens
  misc_RNA (1)...(19): siRNA sense strand
ucugggagugaaaggauua

SEQ ID NO: 2223603 - RNA, 19 nt, Homo sapiens
  misc_RNA (1)...(19): siRNA sense strand
gaguaaagggccagagagg

SEQ ID NO: 2223604 - RNA, 19 nt, Homo sapiens
  misc_RNA (1)...(19): siRNA sense strand
gggagaugcuggaccucga

SEQ ID NO: 2223605 - RNA, 19 nt, Homo sapiens
  misc_RNA (1)...(19): siRNA sense strand
aaugggagagccuggguua

SEQ ID NO: 2223606 - RNA, 19 nt, Homo sapiens
  misc_RNA (1)...(19): siRNA sense strand
aaauggauugaaagggcaa

SEQ ID NO: 2223607 - RNA, 19 nt, Homo sapiens
  misc_RNA (1)...(19): siRNA sense strand
gggucaaagaggauaucca

SEQ ID NO: 2223608 - RNA, 19 nt, Homo sapiens
  misc_RNA (1)...(19): siRNA sense strand
acaaagguucuaaaggaga

SEQ ID NO: 2223609 - RNA, 19 nt, Homo sapiens
  misc_RNA (1)...(19): siRNA sense strand
acccaggacuuaaaggaga

SEQ ID NO: 2223610 - RNA, 19 nt, Homo sapiens
  misc_RNA (1)...(19): siRNA sense strand
agccaugccuggaggacca

SEQ ID NO: 2223611 - RNA, 19 nt, Homo sapiens
  misc_RNA (1)...(19): siRNA sense strand
aggcaacaaagguucuaaa

SEQ ID NO: 2223612 - RNA, 19 nt, Homo sapiens
  misc_RNA (1)...(19): siRNA sense strand
gugaaaggguuaacaggac

SEQ ID NO: 2223613 - RNA, 19 nt, Homo sapiens
  misc_RNA (1)...(19): siRNA sense strand
gcagggaaaacccggaaaa

SEQ ID NO: 2223614 - RNA, 19 nt, Homo sapiens
  misc_RNA (1)...(19): siRNA sense strand
gaggccaaccugggagaaa

SEQ ID NO: 2223615 - RNA, 19 nt, Homo sapiens
  misc_RNA (1)...(19): siRNA sense strand
ccuaaagaacaaaguaaug

SEQ ID NO: 2223616 - RNA, 19 nt, Homo sapiens
  misc_RNA (1)...(19): siRNA sense strand
ccaggaaaagggagaugaa

SEQ ID NO: 2223617 - RNA, 19 nt, Homo sapiens
  misc_RNA (1)...(19): siRNA sense strand
cccaggauugccaggguua

SEQ ID NO: 2223618 - RNA, 19 nt, Homo sapiens
  misc_RNA (1)...(19): siRNA sense strand
ggagaaagggcuuggaugg

SEQ ID NO: 2223619 - RNA, 19 nt, Homo sapiens
  misc_RNA (1)...(19): siRNA sense strand
gacaggaaaucguggucca

SEQ ID NO: 2223620 - RNA, 19 nt, Homo sapiens
  misc_RNA (1)...(19): siRNA sense strand
aggaaauccaggugagaaa

SEQ ID NO: 2223621 - RNA, 19 nt, Homo sapiens
  misc_RNA (1)...(19): siRNA sense strand
ggguauaagaggugaccaa

SEQ ID NO: 2223622 - RNA, 19 nt, Homo sapiens
  misc_RNA (1)...(19): siRNA sense strand
gggaauaaguggauugcca

SEQ ID NO: 2223623 - RNA, 19 nt, Homo sapiens
  misc_RNA (1)...(19): siRNA sense strand
ggcucugaguggugagaaa

SEQ ID NO: 2223624 - RNA, 19 nt, Homo sapiens
  misc_RNA (1)...(19): siRNA sense strand
gaaaggaaguaaaggggaa

SEQ ID NO: 2223625 - RNA, 19 nt, Homo sapiens
  misc_RNA (1)...(19): siRNA sense strand
aggcauaaaaggagacaaa

SEQ ID NO: 2223626 - RNA, 19 nt, Homo sapiens
  misc_RNA (1)...(19): siRNA sense strand
gugaaagagugauaggaca

SEQ ID NO: 2223627 - RNA, 19 nt, Homo sapiens
  misc_RNA (1)...(19): siRNA sense strand
gugagggagucaagggcaa

SEQ ID NO: 2223628 - RNA, 19 nt, Homo sapiens
  misc_RNA (1)...(19): siRNA sense strand
gggugauaugggaaagaaa

SEQ ID NO: 2223629 - RNA, 19 nt, Homo sapiens
  misc_RNA (1)...(19): siRNA sense strand
ugaaagagugauaggacau

SEQ ID NO: 2223630 - RNA, 19 nt, Homo sapiens
  misc_RNA (1)...(19): siRNA sense strand
uggcauuaagggacagaaa

SEQ ID NO: 2223631 - RNA, 19 nt, Homo sapiens
  misc_RNA (1)...(19): siRNA sense strand
ugaaaggagaaaaggguaa

SEQ ID NO: 2223632 - RNA, 19 nt, Homo sapiens
  misc_RNA (1)...(19): siRNA sense strand
gagucauguaauaggcaua

SEQ ID NO: 2223633 - RNA, 19 nt, Homo sapiens
  misc_RNA (1)...(19): siRNA sense strand
uggaccaccuggagaacaa

SEQ ID NO: 2223634 - RNA, 19 nt, Homo sapiens
  misc_RNA (1)...(19): siRNA sense strand
gggaaaacccggaaaagau

SEQ ID NO: 2223635 - RNA, 19 nt, Homo sapiens
  misc_RNA (1)...(19): siRNA sense strand
gaaaggaaacagaggcguu

SEQ ID NO: 2223636 - RNA, 19 nt, Homo sapiens
  misc_RNA (1)...(19): siRNA sense strand
gaaaaggggccaugggaga

SEQ ID NO: 2223637 - RNA, 19 nt, Homo sapiens
  misc_RNA (1)...(19): siRNA sense strand
aggacugccuggagaauca

SEQ ID NO: 2223638 - RNA, 19 nt, Homo sapiens
  misc_RNA (1)...(19): siRNA sense strand
acaaggcagaagagguaaa

SEQ ID NO: 2223639 - RNA, 19 nt, Homo sapiens
  misc_RNA (1)...(19): siRNA sense strand
uggcacaccuggagaacca

SEQ ID NO: 2223640 - RNA, 19 nt, Homo sapiens
  misc_RNA (1)...(19): siRNA sense strand
ugggaauccuggagaacca

SEQ ID NO: 2223641 - RNA, 19 nt, Homo sapiens
  misc_RNA (1)...(19): siRNA sense strand
gggagauaagggagagcca

SEQ ID NO: 2223642 - RNA, 19 nt, Homo sapiens
  misc_RNA (1)...(19): siRNA sense strand
ucgaggacccacaggcaua

SEQ ID NO: 2223643 - RNA, 19 nt, Homo sapiens
  misc_RNA (1)...(19): siRNA sense strand
agauauagaacuugaugca

SEQ ID NO: 2223644 - RNA, 19 nt, Homo sapiens
  misc_RNA (1)...(19): siRNA sense strand
aggauuaccaggaccuaaa

SEQ ID NO: 2223645 - RNA, 19 nt, Homo sapiens
  misc_RNA (1)...(19): siRNA sense strand
aacaaggagauaaaggaaa

SEQ ID NO: 2223646 - RNA, 19 nt, Homo sapiens
  misc_RNA (1)...(19): siRNA sense strand
ugauaggacauaaaggaga

SEQ ID NO: 2223647 - RNA, 19 nt, Homo sapiens
  misc_RNA (1)...(19): siRNA sense strand
cccaggacuuaaaggagaa

SEQ ID NO: 2223648 - RNA, 19 nt, Homo sapiens
  misc_RNA (1)...(19): siRNA sense strand
caugggugaaagagugaua

SEQ ID NO: 2223649 - RNA, 19 nt, Homo sapiens
  misc_RNA (1)...(19): siRNA sense strand
gcaacaaggcagaagaggu

SEQ ID NO: 2223650 - RNA, 19 nt, Homo sapiens
  misc_RNA (1)...(19): siRNA sense strand
aggaaucccaggaagacaa

SEQ ID NO: 2223651 - RNA, 19 nt, Homo sapiens
  misc_RNA (1)...(19): siRNA sense strand
uggagaaacuggaucacca

SEQ ID NO: 2223652 - RNA, 19 nt, Homo sapiens
  misc_RNA (1)...(19): siRNA sense strand
aagagugauaggacauaaa

SEQ ID NO: 2223653 - RNA, 19 nt, Homo sapiens
  misc_RNA (1)...(19): siRNA sense strand
ggacaaaggagaaccaggu

SEQ ID NO: 2223654 - RNA, 19 nt, Homo sapiens
  misc_RNA (1)...(19): siRNA sense strand
aaccagggaugcagggaga

SEQ ID NO: 2223655 - RNA, 19 nt, Homo sapiens
  misc_RNA (1)...(19): siRNA sense strand
uggggaacauggagaaauu

SEQ ID NO: 2223656 - RNA, 19 nt, Homo sapiens
  misc_RNA (1)...(19): siRNA sense strand
augccagguucuaaaggaa

SEQ ID NO: 2223657 - RNA, 19 nt, Homo sapiens
  misc_RNA (1)...(19): siRNA sense strand
ugaccaaggacgugaugga

SEQ ID NO: 2223658 - RNA, 19 nt, Homo sapiens
  misc_RNA (1)...(19): siRNA sense strand
ugauggaccacgaggagau

SEQ ID NO: 2223659 - RNA, 19 nt, Homo sapiens
  misc_RNA (1)...(19): siRNA sense strand
acaaagggucuaugggcca

SEQ ID NO: 2223660 - RNA, 19 nt, Homo sapiens
  misc_RNA (1)...(19): siRNA sense strand
aagauggcauuaagggaca

SEQ ID NO: 2223661 - RNA, 19 nt, Homo sapiens
  misc_RNA (1)...(19): siRNA sense strand
aggaauuccaggucaucaa

SEQ ID NO: 2223662 - RNA, 19 nt, Homo sapiens
  misc_RNA (1)...(19): siRNA sense strand
ccacugggucaaagaggau

SEQ ID NO: 2223663 - RNA, 19 nt, Homo sapiens
  misc_RNA (1)...(19): siRNA sense strand
ucugggagugaaaggauua

SEQ ID NO: 2223664 - RNA, 19 nt, Homo sapiens
  misc_RNA (1)...(19): siRNA sense strand
gaguaaagggccagagagg

SEQ ID NO: 2223665 - RNA, 19 nt, Homo sapiens
  misc_RNA (1)...(19): siRNA sense strand
gggagaugcuggaccucga

SEQ ID NO: 2223666 - RNA, 19 nt, Homo sapiens
  misc_RNA (1)...(19): siRNA sense strand
aaugggagagccuggguua

SEQ ID NO: 2223667 - RNA, 19 nt, Homo sapiens
  misc_RNA (1)...(19): siRNA sense strand
aaauggauugaaagggcaa

SEQ ID NO: 2223668 - RNA, 19 nt, Homo sapiens
  misc_RNA (1)...(19): siRNA sense strand
gggucaaagaggauaucca

SEQ ID NO: 2223669 - RNA, 19 nt, Homo sapiens
  misc_RNA (1)...(19): siRNA sense strand
acaaagguucuaaaggaga

SEQ ID NO: 2223670 - RNA, 19 nt, Homo sapiens
  misc_RNA (1)...(19): siRNA sense strand
acccaggacuuaaaggaga

SEQ ID NO: 2223671 - RNA, 19 nt, Homo sapiens
  misc_RNA (1)...(19): siRNA sense strand
agccaugccuggaggacca

SEQ ID NO: 2223672 - RNA, 19 nt, Homo sapiens
  misc_RNA (1)...(19): siRNA sense strand
aggcaacaaagguucuaaa

SEQ ID NO: 2223673 - RNA, 19 nt, Homo sapiens
  misc_RNA (1)...(19): siRNA sense strand
gugaaaggguuaacaggac

SEQ ID NO: 2223674 - RNA, 19 nt, Homo sapiens
  misc_RNA (1)...(19): siRNA sense strand
gcagggaaaacccggaaaa

SEQ ID NO: 2223675 - RNA, 19 nt, Homo sapiens
  misc_RNA (1)...(19): siRNA sense strand
gaggccaaccugggagaaa

SEQ ID NO: 2223676 - RNA, 19 nt, Homo sapiens
  misc_RNA (1)...(19): siRNA sense strand
ccaggaaaagggagaugaa

SEQ ID NO: 2223677 - RNA, 19 nt, Homo sapiens
  misc_RNA (1)...(19): siRNA sense strand
cccaggauugccaggguua

SEQ ID NO: 2223678 - RNA, 19 nt, Homo sapiens
  misc_RNA (1)...(19): siRNA sense strand
ggagaaagggcuuggaugg

SEQ ID NO: 2223679 - RNA, 19 nt, Homo sapiens
  misc_RNA (1)...(19): siRNA sense strand
gacaggaaaucguggucca

SEQ ID NO: 2223680 - RNA, 19 nt, Homo sapiens
  misc_RNA (1)...(19): siRNA sense strand
agccaggcaaggauggaaa

SEQ ID NO: 2223681 - RNA, 19 nt, Homo sapiens
  misc_RNA (1)...(19): siRNA sense strand
gaaucauauggaucugaaa

SEQ ID NO: 2223682 - RNA, 19 nt, Homo sapiens
  misc_RNA (1)...(19): siRNA sense strand
ggggaaauguggagauccu

SEQ ID NO: 2223683 - RNA, 19 nt, Homo sapiens
  misc_RNA (1)...(19): siRNA sense strand
gccagguucuaaaggaaaa

SEQ ID NO: 2223684 - RNA, 19 nt, Homo sapiens
  misc_RNA (1)...(19): siRNA sense strand
aggcaaggauggaaaacca

SEQ ID NO: 2223685 - RNA, 19 nt, Homo sapiens
  misc_RNA (1)...(19): siRNA sense strand
ugaugggcccaaaggagaa

SEQ ID NO: 2223686 - RNA, 19 nt, Homo sapiens
  misc_RNA (1)...(19): siRNA sense strand
aggaaauccaggugagaaa

SEQ ID NO: 2223687 - RNA, 19 nt, Homo sapiens
  misc_RNA (1)...(19): siRNA sense strand
ggguauaagaggugaccaa

SEQ ID NO: 2223688 - RNA, 19 nt, Homo sapiens
  misc_RNA (1)...(19): siRNA sense strand
gggaauaaguggauugcca

SEQ ID NO: 2223689 - RNA, 19 nt, Homo sapiens
  misc_RNA (1)...(19): siRNA sense strand
ggcucugaguggugagaaa

SEQ ID NO: 2223690 - RNA, 19 nt, Homo sapiens
  misc_RNA (1)...(19): siRNA sense strand
gaaaggaaguaaaggggaa

SEQ ID NO: 2223691 - RNA, 19 nt, Homo sapiens
  misc_RNA (1)...(19): siRNA sense strand
aggcauaaaaggagacaaa

SEQ ID NO: 2223692 - RNA, 19 nt, Homo sapiens
  misc_RNA (1)...(19): siRNA sense strand
gugaaagagugauaggaca

SEQ ID NO: 2223693 - RNA, 19 nt, Homo sapiens
  misc_RNA (1)...(19): siRNA sense strand
gugagggagucaagggcaa

SEQ ID NO: 2223694 - RNA, 19 nt, Homo sapiens
  misc_RNA (1)...(19): siRNA sense strand
gggugauaugggaaagaaa

SEQ ID NO: 2223695 - RNA, 19 nt, Homo sapiens
  misc_RNA (1)...(19): siRNA sense strand
ugaaagagugauaggacau

SEQ ID NO: 2223696 - RNA, 19 nt, Homo sapiens
  misc_RNA (1)...(19): siRNA sense strand
uggcauuaagggacagaaa

SEQ ID NO: 2223697 - RNA, 19 nt, Homo sapiens
  misc_RNA (1)...(19): siRNA sense strand
ugaaaggagaaaaggguaa

SEQ ID NO: 2223698 - RNA, 19 nt, Homo sapiens
  misc_RNA (1)...(19): siRNA sense strand
gagucauguaauaggcaua

SEQ ID NO: 2223699 - RNA, 19 nt, Homo sapiens
  misc_RNA (1)...(19): siRNA sense strand
uggaccaccuggagaacaa

SEQ ID NO: 2223700 - RNA, 19 nt, Homo sapiens
  misc_RNA (1)...(19): siRNA sense strand
gggaaaacccggaaaagau

SEQ ID NO: 2223701 - RNA, 19 nt, Homo sapiens
  misc_RNA (1)...(19): siRNA sense strand
gaaaggaaacagaggcguu

SEQ ID NO: 2223702 - RNA, 19 nt, Homo sapiens
  misc_RNA (1)...(19): siRNA sense strand
gaaaaggggccaugggaga

SEQ ID NO: 2223703 - RNA, 19 nt, Homo sapiens
  misc_RNA (1)...(19): siRNA sense strand
aggacugccuggagaauca

SEQ ID NO: 2223704 - RNA, 19 nt, Homo sapiens
  misc_RNA (1)...(19): siRNA sense strand
acaaggcagaagagguaaa

SEQ ID NO: 2223705 - RNA, 19 nt, Homo sapiens
  misc_RNA (1)...(19): siRNA sense strand
uggcacaccuggagaacca

SEQ ID NO: 2223706 - RNA, 19 nt, Homo sapiens
  misc_RNA (1)...(19): siRNA sense strand
ugggaauccuggagaacca

SEQ ID NO: 2223707 - RNA, 19 nt, Homo sapiens
  misc_RNA (1)...(19): siRNA sense strand
gggagauaagggagagcca

SEQ ID NO: 2223708 - RNA, 19 nt, Homo sapiens
  misc_RNA (1)...(19): siRNA sense strand
ucgaggacccacaggcaua

SEQ ID NO: 2223709 - RNA, 19 nt, Homo sapiens
  misc_RNA (1)...(19): siRNA sense strand
agauauagaacuugaugca

SEQ ID NO: 2223710 - RNA, 19 nt, Homo sapiens
  misc_RNA (1)...(19): siRNA sense strand
aggauuaccaggaccuaaa

SEQ ID NO: 2223711 - RNA, 19 nt, Homo sapiens
  misc_RNA (1)...(19): siRNA sense strand
aacaaggagauaaaggaaa

SEQ ID NO: 2223712 - RNA, 19 nt, Homo sapiens
  misc_RNA (1)...(19): siRNA sense strand
ugauaggacauaaaggaga

SEQ ID NO: 2223713 - RNA, 19 nt, Homo sapiens
  misc_RNA (1)...(19): siRNA sense strand
cccaggacuuaaaggagaa

SEQ ID NO: 2223714 - RNA, 19 nt, Homo sapiens
  misc_RNA (1)...(19): siRNA sense strand
caugggugaaagagugaua

SEQ ID NO: 2223715 - RNA, 19 nt, Homo sapiens
  misc_RNA (1)...(19): siRNA sense strand
gcaacaaggcagaagaggu

SEQ ID NO: 2223716 - RNA, 19 nt, Homo sapiens
  misc_RNA (1)...(19): siRNA sense strand
aggaaucccaggaagacaa

SEQ ID NO: 2223717 - RNA, 19 nt, Homo sapiens
  misc_RNA (1)...(19): siRNA sense strand
uggagaaacuggaucacca

SEQ ID NO: 2223718 - RNA, 19 nt, Homo sapiens
  misc_RNA (1)...(19): siRNA sense strand
aagagugauaggacauaaa

SEQ ID NO: 2223719 - RNA, 19 nt, Homo sapiens
  misc_RNA (1)...(19): siRNA sense strand
ggacaaaggagaaccaggu

SEQ ID NO: 2223720 - RNA, 19 nt, Homo sapiens
  misc_RNA (1)...(19): siRNA sense strand
aaccagggaugcagggaga

SEQ ID NO: 2223721 - RNA, 19 nt, Homo sapiens
  misc_RNA (1)...(19): siRNA sense strand
uggggaacauggagaaauu

SEQ ID NO: 2223722 - RNA, 19 nt, Homo sapiens
  misc_RNA (1)...(19): siRNA sense strand
augccagguucuaaaggaa

SEQ ID NO: 2223723 - RNA, 19 nt, Homo sapiens
  misc_RNA (1)...(19): siRNA sense strand
ugaccaaggacgugaugga

SEQ ID NO: 2223724 - RNA, 19 nt, Homo sapiens
  misc_RNA (1)...(19): siRNA sense strand
ugauggaccacgaggagau

SEQ ID NO: 2223725 - RNA, 19 nt, Homo sapiens
  misc_RNA (1)...(19): siRNA sense strand
acaaagggucuaugggcca

SEQ ID NO: 2223726 - RNA, 19 nt, Homo sapiens
  misc_RNA (1)...(19): siRNA sense strand
aagauggcauuaagggaca

SEQ ID NO: 2223727 - RNA, 19 nt, Homo sapiens
  misc_RNA (1)...(19): siRNA sense strand
aggaauuccaggucaucaa

SEQ ID NO: 2223728 - RNA, 19 nt, Homo sapiens
  misc_RNA (1)...(19): siRNA sense strand
ccacugggucaaagaggau

SEQ ID NO: 2223729 - RNA, 19 nt, Homo sapiens
  misc_RNA (1)...(19): siRNA sense strand
ucugggagugaaaggauua

SEQ ID NO: 2223730 - RNA, 19 nt, Homo sapiens
  misc_RNA (1)...(19): siRNA sense strand
gaguaaagggccagagagg

SEQ ID NO: 2223731 - RNA, 19 nt, Homo sapiens
  misc_RNA (1)...(19): siRNA sense strand
gggagaugcuggaccucga

SEQ ID NO: 2223732 - RNA, 19 nt, Homo sapiens
  misc_RNA (1)...(19): siRNA sense strand
aaugggagagccuggguua

SEQ ID NO: 2223733 - RNA, 19 nt, Homo sapiens
  misc_RNA (1)...(19): siRNA sense strand
aaauggauugaaagggcaa

SEQ ID NO: 2223734 - RNA, 19 nt, Homo sapiens
  misc_RNA (1)...(19): siRNA sense strand
gggucaaagaggauaucca

SEQ ID NO: 2223735 - RNA, 19 nt, Homo sapiens
  misc_RNA (1)...(19): siRNA sense strand
acaaagguucuaaaggaga

SEQ ID NO: 2223736 - RNA, 19 nt, Homo sapiens
  misc_RNA (1)...(19): siRNA sense strand
acccaggacuuaaaggaga

SEQ ID NO: 2223737 - RNA, 19 nt, Homo sapiens
  misc_RNA (1)...(19): siRNA sense strand
agccaugccuggaggacca

SEQ ID NO: 2223738 - RNA, 19 nt, Homo sapiens
  misc_RNA (1)...(19): siRNA sense strand
aggcaacaaagguucuaaa

SEQ ID NO: 2223739 - RNA, 19 nt, Homo sapiens
  misc_RNA (1)...(19): siRNA sense strand
gugaaaggguuaacaggac

SEQ ID NO: 2223740 - RNA, 19 nt, Homo sapiens
  misc_RNA (1)...(19): siRNA sense strand
gcagggaaaacccggaaaa

SEQ ID NO: 2223741 - RNA, 19 nt, Homo sapiens
  misc_RNA (1)...(19): siRNA sense strand
gaggccaaccugggagaaa

SEQ ID NO: 2223742 - RNA, 19 nt, Homo sapiens
  misc_RNA (1)...(19): siRNA sense strand
ccaggaaaagggagaugaa

SEQ ID NO: 2223743 - RNA, 19 nt, Homo sapiens
  misc_RNA (1)...(19): siRNA sense strand
cccaggauugccaggguua

SEQ ID NO: 2223744 - RNA, 19 nt, Homo sapiens
  misc_RNA (1)...(19): siRNA sense strand
ggagaaagggcuuggaugg

SEQ ID NO: 2223745 - RNA, 19 nt, Homo sapiens
  misc_RNA (1)...(19): siRNA sense strand
gacaggaaaucguggucca

SEQ ID NO: 2223746 - RNA, 19 nt, Homo sapiens
  misc_RNA (1)...(19): siRNA sense strand
agccaggcaaggauggaaa

SEQ ID NO: 2223747 - RNA, 19 nt, Homo sapiens
  misc_RNA (1)...(19): siRNA sense strand
gaaucauauggaucugaaa

SEQ ID NO: 2223748 - RNA, 19 nt, Homo sapiens
  misc_RNA (1)...(19): siRNA sense strand
ggggaaauguggagauccu

SEQ ID NO: 2223749 - RNA, 19 nt, Homo sapiens
  misc_RNA (1)...(19): siRNA sense strand
gccagguucuaaaggaaaa

SEQ ID NO: 2223750 - RNA, 19 nt, Homo sapiens
  misc_RNA (1)...(19): siRNA sense strand
aggcaaggauggaaaacca

SEQ ID NO: 2223751 - RNA, 19 nt, Homo sapiens
  misc_RNA (1)...(19): siRNA sense strand
ugaugggcccaaaggagaa

SEQ ID NO: 2223752 - RNA, 19 nt, Homo sapiens
  misc_RNA (1)...(19): siRNA sense strand
aggaaauccaggugagaaa

SEQ ID NO: 2223753 - RNA, 19 nt, Homo sapiens
  misc_RNA (1)...(19): siRNA sense strand
ggguauaagaggugaccaa

SEQ ID NO: 2223754 - RNA, 19 nt, Homo sapiens
  misc_RNA (1)...(19): siRNA sense strand
gggaauaaguggauugcca

SEQ ID NO: 2223755 - RNA, 19 nt, Homo sapiens
  misc_RNA (1)...(19): siRNA sense strand
ggcucugaguggugagaaa

SEQ ID NO: 2223756 - RNA, 19 nt, Homo sapiens
  misc_RNA (1)...(19): siRNA sense strand
gaaaggaaguaaaggggaa

SEQ ID NO: 2223757 - RNA, 19 nt, Homo sapiens
  misc_RNA (1)...(19): siRNA sense strand
aggcauaaaaggagacaaa

SEQ ID NO: 2223758 - RNA, 19 nt, Homo sapiens
  misc_RNA (1)...(19): siRNA sense strand
gugaaagagugauaggaca

SEQ ID NO: 2223759 - RNA, 19 nt, Homo sapiens
  misc_RNA (1)...(19): siRNA sense strand
gugagggagucaagggcaa

SEQ ID NO: 2223760 - RNA, 19 nt, Homo sapiens
  misc_RNA (1)...(19): siRNA sense strand
gggugauaugggaaagaaa

SEQ ID NO: 2223761 - RNA, 19 nt, Homo sapiens
  misc_RNA (1)...(19): siRNA sense strand
ugaaagagugauaggacau

SEQ ID NO: 2223762 - RNA, 19 nt, Homo sapiens
  misc_RNA (1)...(19): siRNA sense strand
uggcauuaagggacagaaa

SEQ ID NO: 2223763 - RNA, 19 nt, Homo sapiens
  misc_RNA (1)...(19): siRNA sense strand
ugaaaggagaaaaggguaa

SEQ ID NO: 2223764 - RNA, 19 nt, Homo sapiens
  misc_RNA (1)...(19): siRNA sense strand
gagucauguaauaggcaua

SEQ ID NO: 2223765 - RNA, 19 nt, Homo sapiens
  misc_RNA (1)...(19): siRNA sense strand
uggaccaccuggagaacaa

SEQ ID NO: 2223766 - RNA, 19 nt, Homo sapiens
  misc_RNA (1)...(19): siRNA sense strand
gggaaaacccggaaaagau

SEQ ID NO: 2223767 - RNA, 19 nt, Homo sapiens
  misc_RNA (1)...(19): siRNA sense strand
gaaaggaaacagaggcguu

SEQ ID NO: 2223768 - RNA, 19 nt, Homo sapiens
  misc_RNA (1)...(19): siRNA sense strand
gaaaaggggccaugggaga

SEQ ID NO: 2223769 - RNA, 19 nt, Homo sapiens
  misc_RNA (1)...(19): siRNA sense strand
aggacugccuggagaauca

SEQ ID NO: 2223770 - RNA, 19 nt, Homo sapiens
  misc_RNA (1)...(19): siRNA sense strand
acaaggcagaagagguaaa

SEQ ID NO: 2223771 - RNA, 19 nt, Homo sapiens
  misc_RNA (1)...(19): siRNA sense strand
uggcacaccuggagaacca

SEQ ID NO: 2223772 - RNA, 19 nt, Homo sapiens
  misc_RNA (1)...(19): siRNA sense strand
ugggaauccuggagaacca

SEQ ID NO: 2223773 - RNA, 19 nt, Homo sapiens
  misc_RNA (1)...(19): siRNA sense strand
gggagauaagggagagcca

SEQ ID NO: 2223774 - RNA, 19 nt, Homo sapiens
  misc_RNA (1)...(19): siRNA sense strand
ucgaggacccacaggcaua

SEQ ID NO: 2223775 - RNA, 19 nt, Homo sapiens
  misc_RNA (1)...(19): siRNA sense strand
agauauagaacuugaugca

SEQ ID NO: 2223776 - RNA, 19 nt, Homo sapiens
  misc_RNA (1)...(19): siRNA sense strand
aggauuaccaggaccuaaa

SEQ ID NO: 2223777 - RNA, 19 nt, Homo sapiens
  misc_RNA (1)...(19): siRNA sense strand
aacaaggagauaaaggaaa

SEQ ID NO: 2223778 - RNA, 19 nt, Homo sapiens
  misc_RNA (1)...(19): siRNA sense strand
ugauaggacauaaaggaga

SEQ ID NO: 2223779 - RNA, 19 nt, Homo sapiens
  misc_RNA (1)...(19): siRNA sense strand
cccaggacuuaaaggagaa

SEQ ID NO: 2223780 - RNA, 19 nt, Homo sapiens
  misc_RNA (1)...(19): siRNA sense strand
caugggugaaagagugaua

SEQ ID NO: 2223781 - RNA, 19 nt, Homo sapiens
  misc_RNA (1)...(19): siRNA sense strand
gcaacaaggcagaagaggu

SEQ ID NO: 2223782 - RNA, 19 nt, Homo sapiens
  misc_RNA (1)...(19): siRNA sense strand
aggaaucccaggaagacaa

SEQ ID NO: 2223783 - RNA, 19 nt, Homo sapiens
  misc_RNA (1)...(19): siRNA sense strand
uggagaaacuggaucacca

SEQ ID NO: 2223784 - RNA, 19 nt, Homo sapiens
  misc_RNA (1)...(19): siRNA sense strand
aagagugauaggacauaaa

SEQ ID NO: 2223785 - RNA, 19 nt, Homo sapiens
  misc_RNA (1)...(19): siRNA sense strand
ggacaaaggagaaccaggu

SEQ ID NO: 2223786 - RNA, 19 nt, Homo sapiens
  misc_RNA (1)...(19): siRNA sense strand
aaccagggaugcagggaga

SEQ ID NO: 2223787 - RNA, 19 nt, Homo sapiens
  misc_RNA (1)...(19): siRNA sense strand
uggggaacauggagaaauu

SEQ ID NO: 2223788 - RNA, 19 nt, Homo sapiens
  misc_RNA (1)...(19): siRNA sense strand
augccagguucuaaaggaa

SEQ ID NO: 2223789 - RNA, 19 nt, Homo sapiens
  misc_RNA (1)...(19): siRNA sense strand
ugaccaaggacgugaugga

SEQ ID NO: 2223790 - RNA, 19 nt, Homo sapiens
  misc_RNA (1)...(19): siRNA sense strand
ugauggaccacgaggagau

SEQ ID NO: 2223791 - RNA, 19 nt, Homo sapiens
  misc_RNA (1)...(19): siRNA sense strand
acaaagggucuaugggcca

SEQ ID NO: 2223792 - RNA, 19 nt, Homo sapiens
  misc_RNA (1)...(19): siRNA sense strand
aagauggcauuaagggaca

SEQ ID NO: 2223793 - RNA, 19 nt, Homo sapiens
  misc_RNA (1)...(19): siRNA sense strand
aggaauuccaggucaucaa

SEQ ID NO: 2223794 - RNA, 19 nt, Homo sapiens
  misc_RNA (1)...(19): siRNA sense strand
ccacugggucaaagaggau

SEQ ID NO: 2223795 - RNA, 19 nt, Homo sapiens
  misc_RNA (1)...(19): siRNA sense strand
ucugggagugaaaggauua

SEQ ID NO: 2223796 - RNA, 19 nt, Homo sapiens
  misc_RNA (1)...(19): siRNA sense strand
gaguaaagggccagagagg

SEQ ID NO: 2223797 - RNA, 19 nt, Homo sapiens
  misc_RNA (1)...(19): siRNA sense strand
gggagaugcuggaccucga

SEQ ID NO: 2223798 - RNA, 19 nt, Homo sapiens
  misc_RNA (1)...(19): siRNA sense strand
aaugggagagccuggguua

SEQ ID NO: 2223799 - RNA, 19 nt, Homo sapiens
  misc_RNA (1)...(19): siRNA sense strand
aaauggauugaaagggcaa

SEQ ID NO: 2223800 - RNA, 19 nt, Homo sapiens
  misc_RNA (1)...(19): siRNA sense strand
gggucaaagaggauaucca

SEQ ID NO: 2223801 - RNA, 19 nt, Homo sapiens
  misc_RNA (1)...(19): siRNA sense strand
acaaagguucuaaaggaga

SEQ ID NO: 2223802 - RNA, 19 nt, Homo sapiens
  misc_RNA (1)...(19): siRNA sense strand
acccaggacuuaaaggaga

SEQ ID NO: 2223803 - RNA, 19 nt, Homo sapiens
  misc_RNA (1)...(19): siRNA sense strand
agccaugccuggaggacca

SEQ ID NO: 2223804 - RNA, 19 nt, Homo sapiens
  misc_RNA (1)...(19): siRNA sense strand
aggcaacaaagguucuaaa

SEQ ID NO: 2223805 - RNA, 19 nt, Homo sapiens
  misc_RNA (1)...(19): siRNA sense strand
gugaaaggguuaacaggac

SEQ ID NO: 2223806 - RNA, 19 nt, Homo sapiens
  misc_RNA (1)...(19): siRNA sense strand
gcagggaaaacccggaaaa

SEQ ID NO: 2223807 - RNA, 19 nt, Homo sapiens
  misc_RNA (1)...(19): siRNA sense strand
gaggccaaccugggagaaa

SEQ ID NO: 2223808 - RNA, 19 nt, Homo sapiens
  misc_RNA (1)...(19): siRNA sense strand
ccaggaaaagggagaugaa

SEQ ID NO: 2223809 - RNA, 19 nt, Homo sapiens
  misc_RNA (1)...(19): siRNA sense strand
cccaggauugccaggguua

SEQ ID NO: 2223810 - RNA, 19 nt, Homo sapiens
  misc_RNA (1)...(19): siRNA sense strand
ggagaaagggcuuggaugg

SEQ ID NO: 2223811 - RNA, 19 nt, Homo sapiens
  misc_RNA (1)...(19): siRNA sense strand
gacaggaaaucguggucca

SEQ ID NO: 2223812 - RNA, 19 nt, Homo sapiens
  misc_RNA (1)...(19): siRNA sense strand
agccaggcaaggauggaaa

SEQ ID NO: 2223813 - RNA, 19 nt, Homo sapiens
  misc_RNA (1)...(19): siRNA sense strand
gaaucauauggaucugaaa

SEQ ID NO: 2223814 - RNA, 19 nt, Homo sapiens
  misc_RNA (1)...(19): siRNA sense strand
ggggaaauguggagauccu

SEQ ID NO: 2223815 - RNA, 19 nt, Homo sapiens
  misc_RNA (1)...(19): siRNA sense strand
gccagguucuaaaggaaaa

SEQ ID NO: 2223816 - RNA, 19 nt, Homo sapiens
  misc_RNA (1)...(19): siRNA sense strand
aggcaaggauggaaaacca

SEQ ID NO: 2223817 - RNA, 19 nt, Homo sapiens
  misc_RNA (1)...(19): siRNA sense strand
ugaugggcccaaaggagaa

SEQ ID NO: 2223818 - RNA, 19 nt, Homo sapiens
  misc_RNA (1)...(19): siRNA sense strand
aggaaauccaggugagaaa

SEQ ID NO: 2223819 - RNA, 19 nt, Homo sapiens
  misc_RNA (1)...(19): siRNA sense strand
ggguauaagaggugaccaa

SEQ ID NO: 2223820 - RNA, 19 nt, Homo sapiens
  misc_RNA (1)...(19): siRNA sense strand
gggaauaaguggauugcca

SEQ ID NO: 2223821 - RNA, 19 nt, Homo sapiens
  misc_RNA (1)...(19): siRNA sense strand
ggcucugaguggugagaaa

SEQ ID NO: 2223822 - RNA, 19 nt, Homo sapiens
  misc_RNA (1)...(19): siRNA sense strand
gaaaggaaguaaaggggaa

SEQ ID NO: 2223823 - RNA, 19 nt, Homo sapiens
  misc_RNA (1)...(19): siRNA sense strand
aggcauaaaaggagacaaa

SEQ ID NO: 2223824 - RNA, 19 nt, Homo sapiens
  misc_RNA (1)...(19): siRNA sense strand
gugaaagagugauaggaca

SEQ ID NO: 2223825 - RNA, 19 nt, Homo sapiens
  misc_RNA (1)...(19): siRNA sense strand
gugagggagucaagggcaa

SEQ ID NO: 2223826 - RNA, 19 nt, Homo sapiens
  misc_RNA (1)...(19): siRNA sense strand
gggugauaugggaaagaaa

SEQ ID NO: 2223827 - RNA, 19 nt, Homo sapiens
  misc_RNA (1)...(19): siRNA sense strand
ugaaagagugauaggacau

SEQ ID NO: 2223828 - RNA, 19 nt, Homo sapiens
  misc_RNA (1)...(19): siRNA sense strand
uggcauuaagggacagaaa

SEQ ID NO: 2223829 - RNA, 19 nt, Homo sapiens
  misc_RNA (1)...(19): siRNA sense strand
ugaaaggagaaaaggguaa

SEQ ID NO: 2223830 - RNA, 19 nt, Homo sapiens
  misc_RNA (1)...(19): siRNA sense strand
gagucauguaauaggcaua

SEQ ID NO: 2223831 - RNA, 19 nt, Homo sapiens
  misc_RNA (1)...(19): siRNA sense strand
uggaccaccuggagaacaa

SEQ ID NO: 2223832 - RNA, 19 nt, Homo sapiens
  misc_RNA (1)...(19): siRNA sense strand
gggaaaacccggaaaagau

SEQ ID NO: 2223833 - RNA, 19 nt, Homo sapiens
  misc_RNA (1)...(19): siRNA sense strand
gaaaggaaacagaggcguu

SEQ ID NO: 2223834 - RNA, 19 nt, Homo sapiens
  misc_RNA (1)...(19): siRNA sense strand
gaaaaggggccaugggaga

SEQ ID NO: 2223835 - RNA, 19 nt, Homo sapiens
  misc_RNA (1)...(19): siRNA sense strand
aggacugccuggagaauca

SEQ ID NO: 2223836 - RNA, 19 nt, Homo sapiens
  misc_RNA (1)...(19): siRNA sense strand
acaaggcagaagagguaaa

SEQ ID NO: 2223837 - RNA, 19 nt, Homo sapiens
  misc_RNA (1)...(19): siRNA sense strand
uggcacaccuggagaacca

SEQ ID NO: 2223838 - RNA, 19 nt, Homo sapiens
  misc_RNA (1)...(19): siRNA sense strand
ugggaauccuggagaacca

SEQ ID NO: 2223839 - RNA, 19 nt, Homo sapiens
  misc_RNA (1)...(19): siRNA sense strand
gggagauaagggagagcca

SEQ ID NO: 2223840 - RNA, 19 nt, Homo sapiens
  misc_RNA (1)...(19): siRNA sense strand
ucgaggacccacaggcaua

SEQ ID NO: 2223841 - RNA, 19 nt, Homo sapiens
  misc_RNA (1)...(19): siRNA sense strand
agauauagaacuugaugca

SEQ ID NO: 2223842 - RNA, 19 nt, Homo sapiens
  misc_RNA (1)...(19): siRNA sense strand
aggauuaccaggaccuaaa

SEQ ID NO: 2223843 - RNA, 19 nt, Homo sapiens
  misc_RNA (1)...(19): siRNA sense strand
aacaaggagauaaaggaaa

SEQ ID NO: 2223844 - RNA, 19 nt, Homo sapiens
  misc_RNA (1)...(19): siRNA sense strand
ugauaggacauaaaggaga

SEQ ID NO: 2223845 - RNA, 19 nt, Homo sapiens
  misc_RNA (1)...(19): siRNA sense strand
cccaggacuuaaaggagaa

SEQ ID NO: 2223846 - RNA, 19 nt, Homo sapiens
  misc_RNA (1)...(19): siRNA sense strand
caugggugaaagagugaua

SEQ ID NO: 2223847 - RNA, 19 nt, Homo sapiens
  misc_RNA (1)...(19): siRNA sense strand
gcaacaaggcagaagaggu

SEQ ID NO: 2223848 - RNA, 19 nt, Homo sapiens
  misc_RNA (1)...(19): siRNA sense strand
aggaaucccaggaagacaa

SEQ ID NO: 2223849 - RNA, 19 nt, Homo sapiens
  misc_RNA (1)...(19): siRNA sense strand
uggagaaacuggaucacca

SEQ ID NO: 2223850 - RNA, 19 nt, Homo sapiens
  misc_RNA (1)...(19): siRNA sense strand
aagagugauaggacauaaa

SEQ ID NO: 2223851 - RNA, 19 nt, Homo sapiens
  misc_RNA (1)...(19): siRNA sense strand
ggacaaaggagaaccaggu

SEQ ID NO: 2223852 - RNA, 19 nt, Homo sapiens
  misc_RNA (1)...(19): siRNA sense strand
aaccagggaugcagggaga

SEQ ID NO: 2223853 - RNA, 19 nt, Homo sapiens
  misc_RNA (1)...(19): siRNA sense strand
uggggaacauggagaaauu

SEQ ID NO: 2223854 - RNA, 19 nt, Homo sapiens
  misc_RNA (1)...(19): siRNA sense strand
augccagguucuaaaggaa

SEQ ID NO: 2223855 - RNA, 19 nt, Homo sapiens
  misc_RNA (1)...(19): siRNA sense strand
ugaccaaggacgugaugga

SEQ ID NO: 2223856 - RNA, 19 nt, Homo sapiens
  misc_RNA (1)...(19): siRNA sense strand
ugauggaccacgaggagau

SEQ ID NO: 2223857 - RNA, 19 nt, Homo sapiens
  misc_RNA (1)...(19): siRNA sense strand
acaaagggucuaugggcca

SEQ ID NO: 2223858 - RNA, 19 nt, Homo sapiens
  misc_RNA (1)...(19): siRNA sense strand
aagauggcauuaagggaca

SEQ ID NO: 2223859 - RNA, 19 nt, Homo sapiens
  misc_RNA (1)...(19): siRNA sense strand
aggaauuccaggucaucaa

SEQ ID NO: 2223860 - RNA, 19 nt, Homo sapiens
  misc_RNA (1)...(19): siRNA sense strand
ccacugggucaaagaggau

SEQ ID NO: 2223861 - RNA, 19 nt, Homo sapiens
  misc_RNA (1)...(19): siRNA sense strand
ucugggagugaaaggauua

SEQ ID NO: 2223862 - RNA, 19 nt, Homo sapiens
  misc_RNA (1)...(19): siRNA sense strand
gaguaaagggccagagagg

SEQ ID NO: 2223863 - RNA, 19 nt, Homo sapiens
  misc_RNA (1)...(19): siRNA sense strand
gggagaugcuggaccucga

SEQ ID NO: 2223864 - RNA, 19 nt, Homo sapiens
  misc_RNA (1)...(19): siRNA sense strand
aaugggagagccuggguua

SEQ ID NO: 2223865 - RNA, 19 nt, Homo sapiens
  misc_RNA (1)...(19): siRNA sense strand
aaauggauugaaagggcaa

SEQ ID NO: 2223866 - RNA, 19 nt, Homo sapiens
  misc_RNA (1)...(19): siRNA sense strand
gggucaaagaggauaucca

SEQ ID NO: 2223867 - RNA, 19 nt, Homo sapiens
  misc_RNA (1)...(19): siRNA sense strand
acaaagguucuaaaggaga

SEQ ID NO: 2223868 - RNA, 19 nt, Homo sapiens
  misc_RNA (1)...(19): siRNA sense strand
acccaggacuuaaaggaga

SEQ ID NO: 2223869 - RNA, 19 nt, Homo sapiens
  misc_RNA (1)...(19): siRNA sense strand
agccaugccuggaggacca

SEQ ID NO: 2223870 - RNA, 19 nt, Homo sapiens
  misc_RNA (1)...(19): siRNA sense strand
aggcaacaaagguucuaaa

SEQ ID NO: 2223871 - RNA, 19 nt, Homo sapiens
  misc_RNA (1)...(19): siRNA sense strand
gugaaaggguuaacaggac

SEQ ID NO: 2223872 - RNA, 19 nt, Homo sapiens
  misc_RNA (1)...(19): siRNA sense strand
gcagggaaaacccggaaaa

SEQ ID NO: 2223873 - RNA, 19 nt, Homo sapiens
  misc_RNA (1)...(19): siRNA sense strand
gaggccaaccugggagaaa

SEQ ID NO: 2223874 - RNA, 19 nt, Homo sapiens
  misc_RNA (1)...(19): siRNA sense strand
ccaggaaaagggagaugaa

SEQ ID NO: 2223875 - RNA, 19 nt, Homo sapiens
  misc_RNA (1)...(19): siRNA sense strand
cccaggauugccaggguua

SEQ ID NO: 2223876 - RNA, 19 nt, Homo sapiens
  misc_RNA (1)...(19): siRNA sense strand
ggagaaagggcuuggaugg

SEQ ID NO: 2223877 - RNA, 19 nt, Homo sapiens
  misc_RNA (1)...(19): siRNA sense strand
gacaggaaaucguggucca

SEQ ID NO: 2223878 - RNA, 19 nt, Homo sapiens
  misc_RNA (1)...(19): siRNA sense strand
agccaggcaaggauggaaa

SEQ ID NO: 2223879 - RNA, 19 nt, Homo sapiens
  misc_RNA (1)...(19): siRNA sense strand
gaaucauauggaucugaaa

SEQ ID NO: 2223880 - RNA, 19 nt, Homo sapiens
  misc_RNA (1)...(19): siRNA sense strand
ggggaaauguggagauccu

SEQ ID NO: 2223881 - RNA, 19 nt, Homo sapiens
  misc_RNA (1)...(19): siRNA sense strand
gccagguucuaaaggaaaa

SEQ ID NO: 2223882 - RNA, 19 nt, Homo sapiens
  misc_RNA (1)...(19): siRNA sense strand
aggcaaggauggaaaacca

SEQ ID NO: 2223883 - RNA, 19 nt, Homo sapiens
  misc_RNA (1)...(19): siRNA sense strand
ugaugggcccaaaggagaa

SEQ ID NO: 2223884 - RNA, 19 nt, Homo sapiens
  misc_RNA (1)...(19): siRNA sense strand
aggcaaagauggagaaaau

SEQ ID NO: 2223885 - RNA, 19 nt, Homo sapiens
  misc_RNA (1)...(19): siRNA sense strand
uuaaaggagagaagggaaa

SEQ ID NO: 2223886 - RNA, 19 nt, Homo sapiens
  misc_RNA (1)...(19): siRNA sense strand
aggagaacaaggagugaaa

SEQ ID NO: 2223887 - RNA, 19 nt, Homo sapiens
  misc_RNA (1)...(19): siRNA sense strand
aggaaugaagggugacaaa

SEQ ID NO: 2223888 - RNA, 19 nt, Homo sapiens
  misc_RNA (1)...(19): siRNA sense strand
gaaaggagaucaaggacca

SEQ ID NO: 2223889 - RNA, 19 nt, Homo sapiens
  misc_RNA (1)...(19): siRNA sense strand
gaagggaaauccaggccaa

SEQ ID NO: 2223890 - RNA, 19 nt, Homo sapiens
  misc_RNA (1)...(19): siRNA sense strand
aggaauagguguucaggga

SEQ ID NO: 2223891 - RNA, 19 nt, Homo sapiens
  misc_RNA (1)...(19): siRNA sense strand
gcaauggaaccaagggaga

SEQ ID NO: 2223892 - RNA, 19 nt, Homo sapiens
  misc_RNA (1)...(19): siRNA sense strand
ggcagaaggcucaggucaa

SEQ ID NO: 2223893 - RNA, 19 nt, Homo sapiens
  misc_RNA (1)...(19): siRNA sense strand
ccaaaggugaaauggguau

SEQ ID NO: 2223894 - RNA, 19 nt, Homo sapiens
  misc_RNA (1)...(19): siRNA sense strand
uggaaauggagguauuaaa

SEQ ID NO: 2223895 - RNA, 19 nt, Homo sapiens
  misc_RNA (1)...(19): siRNA sense strand
aggagugaaaggugacaaa

SEQ ID NO: 2223896 - RNA, 19 nt, Homo sapiens
  misc_RNA (1)...(19): siRNA sense strand
ccacaaugcccacagggaa

SEQ ID NO: 2223897 - RNA, 19 nt, Homo sapiens
  misc_RNA (1)...(19): siRNA sense strand
uggaaggaccuaaaggcaa

SEQ ID NO: 2223898 - RNA, 19 nt, Homo sapiens
  misc_RNA (1)...(19): siRNA sense strand
ugccaggaccaaaggguaa

SEQ ID NO: 2223899 - RNA, 19 nt, Homo sapiens
  misc_RNA (1)...(19): siRNA sense strand
aggacaagcuggugcaacu

SEQ ID NO: 2223900 - RNA, 19 nt, Homo sapiens
  misc_RNA (1)...(19): siRNA sense strand
uggaauaccaggagagaag

SEQ ID NO: 2223901 - RNA, 19 nt, Homo sapiens
  misc_RNA (1)...(19): siRNA sense strand
uaucaaagguucuguggga

SEQ ID NO: 2223902 - RNA, 19 nt, Homo sapiens
  misc_RNA (1)...(19): siRNA sense strand
gggucucaauggaaugaaa

SEQ ID NO: 2223903 - RNA, 19 nt, Homo sapiens
  misc_RNA (1)...(19): siRNA sense strand
gcuaaagggucuaccagga

SEQ ID NO: 2223904 - RNA, 19 nt, Homo sapiens
  misc_RNA (1)...(19): siRNA sense strand
agaaaggugagaaggguga

SEQ ID NO: 2223905 - RNA, 19 nt, Homo sapiens
  misc_RNA (1)...(19): siRNA sense strand
acgaauuagccgaugucaa

SEQ ID NO: 2223906 - RNA, 19 nt, Homo sapiens
  misc_RNA (1)...(19): siRNA sense strand
gaaaggugaugaaggacca

SEQ ID NO: 2223907 - RNA, 19 nt, Homo sapiens
  misc_RNA (1)...(19): siRNA sense strand
ccaaaagggugauggagga

SEQ ID NO: 2223908 - RNA, 19 nt, Homo sapiens
  misc_RNA (1)...(19): siRNA sense strand
agggaacacuucaggucua

SEQ ID NO: 2223909 - RNA, 19 nt, Homo sapiens
  misc_RNA (1)...(19): siRNA sense strand
aguaaaccucagucagaaa

SEQ ID NO: 2223910 - RNA, 19 nt, Homo sapiens
  misc_RNA (1)...(19): siRNA sense strand
gggucagaaaggugaugaa

SEQ ID NO: 2223911 - RNA, 19 nt, Homo sapiens
  misc_RNA (1)...(19): siRNA sense strand
caccaggaccuuugggaau

SEQ ID NO: 2223912 - RNA, 19 nt, Homo sapiens
  misc_RNA (1)...(19): siRNA sense strand
ucaaagguucugugggaga

SEQ ID NO: 2223913 - RNA, 19 nt, Homo sapiens
  misc_RNA (1)...(19): siRNA sense strand
ggaaggaccuaaaggcaac

SEQ ID NO: 2223914 - RNA, 19 nt, Homo sapiens
  misc_RNA (1)...(19): siRNA sense strand
cccuggaaauggagguauu

SEQ ID NO: 2223915 - RNA, 19 nt, Homo sapiens
  misc_RNA (1)...(19): siRNA sense strand
gggcagaaggcucagguca

SEQ ID NO: 2223916 - RNA, 19 nt, Homo sapiens
  misc_RNA (1)...(19): siRNA sense strand
agaaaggagaucagggacu

SEQ ID NO: 2223917 - RNA, 19 nt, Homo sapiens
  misc_RNA (1)...(19): siRNA sense strand
cugcauuggaacugguauu

SEQ ID NO: 2223918 - RNA, 19 nt, Homo sapiens
  misc_RNA (1)...(19): siRNA sense strand
aggugagaagggugagcaa

SEQ ID NO: 2223919 - RNA, 19 nt, Homo sapiens
  misc_RNA (1)...(19): siRNA sense strand
auuaaaggagagaagggaa

SEQ ID NO: 2223920 - RNA, 19 nt, Homo sapiens
  misc_RNA (1)...(19): siRNA sense strand
uggagaaaggggucagaaa

SEQ ID NO: 2223921 - RNA, 19 nt, Homo sapiens
  misc_RNA (1)...(19): siRNA sense strand
aaagggagagagaggguuu

SEQ ID NO: 2223922 - RNA, 19 nt, Homo sapiens
  misc_RNA (1)...(19): siRNA sense strand
ccaccaggucccaaaggua

SEQ ID NO: 2223923 - RNA, 19 nt, Homo sapiens
  misc_RNA (1)...(19): siRNA sense strand
cauuagucgaugugcagua

SEQ ID NO: 2223924 - RNA, 19 nt, Homo sapiens
  misc_RNA (1)...(19): siRNA sense strand
aggcuuuccuggaucuaaa

SEQ ID NO: 2223925 - RNA, 19 nt, Homo sapiens
  misc_RNA (1)...(19): siRNA sense strand
uggacagaaaggcgacaaa

SEQ ID NO: 2223926 - RNA, 19 nt, Homo sapiens
  misc_RNA (1)...(19): siRNA sense strand
uguaggugguggaggucau

SEQ ID NO: 2223927 - RNA, 19 nt, Homo sapiens
  misc_RNA (1)...(19): siRNA sense strand
cagcuggacagaaggguga

SEQ ID NO: 2223928 - RNA, 19 nt, Homo sapiens
  misc_RNA (1)...(19): siRNA sense strand
gcuuaaauuuccagggacc

SEQ ID NO: 2223929 - RNA, 19 nt, Homo sapiens
  misc_RNA (1)...(19): siRNA sense strand
aagagguaaaccaggcaaa

SEQ ID NO: 2223930 - RNA, 19 nt, Homo sapiens
  misc_RNA (1)...(19): siRNA sense strand
ccaaaggauuaccaggcau

SEQ ID NO: 2223931 - RNA, 19 nt, Homo sapiens
  misc_RNA (1)...(19): siRNA sense strand
caaaggagcacuuggucca

SEQ ID NO: 2223932 - RNA, 19 nt, Homo sapiens
  misc_RNA (1)...(19): siRNA sense strand
agaaaggcgacaaagguga

SEQ ID NO: 2223933 - RNA, 19 nt, Homo sapiens
  misc_RNA (1)...(19): siRNA sense strand
agguauuaaaggagagaag

SEQ ID NO: 2223934 - RNA, 19 nt, Homo sapiens
  misc_RNA (1)...(19): siRNA sense strand
gcauacaagugcaggggca

SEQ ID NO: 2223935 - RNA, 19 nt, Homo sapiens
  misc_RNA (1)...(19): siRNA sense strand
gcaggagacuugaggacac

SEQ ID NO: 2223936 - RNA, 19 nt, Homo sapiens
  misc_RNA (1)...(19): siRNA sense strand
ccagggacccaaaggugaa

SEQ ID NO: 2223937 - RNA, 19 nt, Homo sapiens
  misc_RNA (1)...(19): siRNA sense strand
ucaauggaaugaaaggaga

SEQ ID NO: 2223938 - RNA, 19 nt, Homo sapiens
  misc_RNA (1)...(19): siRNA sense strand
ccaccaggaccuuugggaa

SEQ ID NO: 2223939 - RNA, 19 nt, Homo sapiens
  misc_RNA (1)...(19): siRNA sense strand
uggaggucauccugggcaa

SEQ ID NO: 2223940 - RNA, 19 nt, Homo sapiens
  misc_RNA (1)...(19): siRNA sense strand
gggcuuaaauuuccaggga

SEQ ID NO: 2223941 - RNA, 19 nt, Homo sapiens
  misc_RNA (1)...(19): siRNA sense strand
gggacuuccuggugaccga

SEQ ID NO: 2223942 - RNA, 19 nt, Homo sapiens
  misc_RNA (1)...(19): siRNA sense strand
gggugagcaaggagagcca

SEQ ID NO: 2223943 - RNA, 19 nt, Homo sapiens
  misc_RNA (1)...(19): siRNA sense strand
cggaagggauggugaaaag

SEQ ID NO: 2223944 - RNA, 19 nt, Homo sapiens
  misc_RNA (1)...(19): siRNA sense strand
aggcaaagauggagaaaau

SEQ ID NO: 2223945 - RNA, 19 nt, Homo sapiens
  misc_RNA (1)...(19): siRNA sense strand
uuaaaggagagaagggaaa

SEQ ID NO: 2223946 - RNA, 19 nt, Homo sapiens
  misc_RNA (1)...(19): siRNA sense strand
aggagaacaaggagugaaa

SEQ ID NO: 2223947 - RNA, 19 nt, Homo sapiens
  misc_RNA (1)...(19): siRNA sense strand
aggaaugaagggugacaaa

SEQ ID NO: 2223948 - RNA, 19 nt, Homo sapiens
  misc_RNA (1)...(19): siRNA sense strand
gaaaggagaucaaggacca

SEQ ID NO: 2223949 - RNA, 19 nt, Homo sapiens
  misc_RNA (1)...(19): siRNA sense strand
gaagggaaauccaggccaa

SEQ ID NO: 2223950 - RNA, 19 nt, Homo sapiens
  misc_RNA (1)...(19): siRNA sense strand
aggaauagguguucaggga

SEQ ID NO: 2223951 - RNA, 19 nt, Homo sapiens
  misc_RNA (1)...(19): siRNA sense strand
gcaauggaaccaagggaga

SEQ ID NO: 2223952 - RNA, 19 nt, Homo sapiens
  misc_RNA (1)...(19): siRNA sense strand
ggcagaaggcucaggucaa

SEQ ID NO: 2223953 - RNA, 19 nt, Homo sapiens
  misc_RNA (1)...(19): siRNA sense strand
ccaaaggugaaauggguau

SEQ ID NO: 2223954 - RNA, 19 nt, Homo sapiens
  misc_RNA (1)...(19): siRNA sense strand
uggaaauggagguauuaaa

SEQ ID NO: 2223955 - RNA, 19 nt, Homo sapiens
  misc_RNA (1)...(19): siRNA sense strand
aggagugaaaggugacaaa

SEQ ID NO: 2223956 - RNA, 19 nt, Homo sapiens
  misc_RNA (1)...(19): siRNA sense strand
ccacaaugcccacagggaa

SEQ ID NO: 2223957 - RNA, 19 nt, Homo sapiens
  misc_RNA (1)...(19): siRNA sense strand
uggaaggaccuaaaggcaa

SEQ ID NO: 2223958 - RNA, 19 nt, Homo sapiens
  misc_RNA (1)...(19): siRNA sense strand
ugccaggaccaaaggguaa

SEQ ID NO: 2223959 - RNA, 19 nt, Homo sapiens
  misc_RNA (1)...(19): siRNA sense strand
aggacaagcuggugcaacu

SEQ ID NO: 2223960 - RNA, 19 nt, Homo sapiens
  misc_RNA (1)...(19): siRNA sense strand
uggaauaccaggagagaag

SEQ ID NO: 2223961 - RNA, 19 nt, Homo sapiens
  misc_RNA (1)...(19): siRNA sense strand
uaucaaagguucuguggga

SEQ ID NO: 2223962 - RNA, 19 nt, Homo sapiens
  misc_RNA (1)...(19): siRNA sense strand
gggucucaauggaaugaaa

SEQ ID NO: 2223963 - RNA, 19 nt, Homo sapiens
  misc_RNA (1)...(19): siRNA sense strand
gcuaaagggucuaccagga

SEQ ID NO: 2223964 - RNA, 19 nt, Homo sapiens
  misc_RNA (1)...(19): siRNA sense strand
agaaaggugagaaggguga

SEQ ID NO: 2223965 - RNA, 19 nt, Homo sapiens
  misc_RNA (1)...(19): siRNA sense strand
acgaauuagccgaugucaa

SEQ ID NO: 2223966 - RNA, 19 nt, Homo sapiens
  misc_RNA (1)...(19): siRNA sense strand
gaaaggugaugaaggacca

SEQ ID NO: 2223967 - RNA, 19 nt, Homo sapiens
  misc_RNA (1)...(19): siRNA sense strand
ccaaaagggugauggagga

SEQ ID NO: 2223968 - RNA, 19 nt, Homo sapiens
  misc_RNA (1)...(19): siRNA sense strand
agggaacacuucaggucua

SEQ ID NO: 2223969 - RNA, 19 nt, Homo sapiens
  misc_RNA (1)...(19): siRNA sense strand
aguaaaccucagucagaaa

SEQ ID NO: 2223970 - RNA, 19 nt, Homo sapiens
  misc_RNA (1)...(19): siRNA sense strand
gggucagaaaggugaugaa

SEQ ID NO: 2223971 - RNA, 19 nt, Homo sapiens
  misc_RNA (1)...(19): siRNA sense strand
caccaggaccuuugggaau

SEQ ID NO: 2223972 - RNA, 19 nt, Homo sapiens
  misc_RNA (1)...(19): siRNA sense strand
ucaaagguucugugggaga

SEQ ID NO: 2223973 - RNA, 19 nt, Homo sapiens
  misc_RNA (1)...(19): siRNA sense strand
ggaaggaccuaaaggcaac

SEQ ID NO: 2223974 - RNA, 19 nt, Homo sapiens
  misc_RNA (1)...(19): siRNA sense strand
cccuggaaauggagguauu

SEQ ID NO: 2223975 - RNA, 19 nt, Homo sapiens
  misc_RNA (1)...(19): siRNA sense strand
gggcagaaggcucagguca

SEQ ID NO: 2223976 - RNA, 19 nt, Homo sapiens
  misc_RNA (1)...(19): siRNA sense strand
agaaaggagaucagggacu

SEQ ID NO: 2223977 - RNA, 19 nt, Homo sapiens
  misc_RNA (1)...(19): siRNA sense strand
cugcauuggaacugguauu

SEQ ID NO: 2223978 - RNA, 19 nt, Homo sapiens
  misc_RNA (1)...(19): siRNA sense strand
aggugagaagggugagcaa

SEQ ID NO: 2223979 - RNA, 19 nt, Homo sapiens
  misc_RNA (1)...(19): siRNA sense strand
auuaaaggagagaagggaa

SEQ ID NO: 2223980 - RNA, 19 nt, Homo sapiens
  misc_RNA (1)...(19): siRNA sense strand
uggagaaaggggucagaaa

SEQ ID NO: 2223981 - RNA, 19 nt, Homo sapiens
  misc_RNA (1)...(19): siRNA sense strand
aaagggagagagaggguuu

SEQ ID NO: 2223982 - RNA, 19 nt, Homo sapiens
  misc_RNA (1)...(19): siRNA sense strand
ccaccaggucccaaaggua

SEQ ID NO: 2223983 - RNA, 19 nt, Homo sapiens
  misc_RNA (1)...(19): siRNA sense strand
cauuagucgaugugcagua

SEQ ID NO: 2223984 - RNA, 19 nt, Homo sapiens
  misc_RNA (1)...(19): siRNA sense strand
aggcuuuccuggaucuaaa

SEQ ID NO: 2223985 - RNA, 19 nt, Homo sapiens
  misc_RNA (1)...(19): siRNA sense strand
uggacagaaaggcgacaaa

SEQ ID NO: 2223986 - RNA, 19 nt, Homo sapiens
  misc_RNA (1)...(19): siRNA sense strand
uguaggugguggaggucau

SEQ ID NO: 2223987 - RNA, 19 nt, Homo sapiens
  misc_RNA (1)...(19): siRNA sense strand
cagcuggacagaaggguga

SEQ ID NO: 2223988 - RNA, 19 nt, Homo sapiens
  misc_RNA (1)...(19): siRNA sense strand
gcuuaaauuuccagggacc

SEQ ID NO: 2223989 - RNA, 19 nt, Homo sapiens
  misc_RNA (1)...(19): siRNA sense strand
aagagguaaaccaggcaaa

SEQ ID NO: 2223990 - RNA, 19 nt, Homo sapiens
  misc_RNA (1)...(19): siRNA sense strand
ccaaaggauuaccaggcau

SEQ ID NO: 2223991 - RNA, 19 nt, Homo sapiens
  misc_RNA (1)...(19): siRNA sense strand
caaaggagcacuuggucca

SEQ ID NO: 2223992 - RNA, 19 nt, Homo sapiens
  misc_RNA (1)...(19): siRNA sense strand
agaaaggcgacaaagguga

SEQ ID NO: 2223993 - RNA, 19 nt, Homo sapiens
  misc_RNA (1)...(19): siRNA sense strand
agguauuaaaggagagaag

SEQ ID NO: 2223994 - RNA, 19 nt, Homo sapiens
  misc_RNA (1)...(19): siRNA sense strand
gcauacaagugcaggggca

SEQ ID NO: 2223995 - RNA, 19 nt, Homo sapiens
  misc_RNA (1)...(19): siRNA sense strand
gcaggagacuugaggacac

SEQ ID NO: 2223996 - RNA, 19 nt, Homo sapiens
  misc_RNA (1)...(19): siRNA sense strand
ccagggacccaaaggugaa

SEQ ID NO: 2223997 - RNA, 19 nt, Homo sapiens
  misc_RNA (1)...(19): siRNA sense strand
ucaauggaaugaaaggaga

SEQ ID NO: 2223998 - RNA, 19 nt, Homo sapiens
  misc_RNA (1)...(19): siRNA sense strand
ccaccaggaccuuugggaa

SEQ ID NO: 2223999 - RNA, 19 nt, Homo sapiens
  misc_RNA (1)...(19): siRNA sense strand
uggaggucauccugggcaa

SEQ ID NO: 2224000 - RNA, 19 nt, Homo sapiens
  misc_RNA (1)...(19): siRNA sense strand
gggcuuaaauuuccaggga

SEQ ID NO: 2224001 - RNA, 19 nt, Homo sapiens
  misc_RNA (1)...(19): siRNA sense strand
gggacuuccuggugaccga

SEQ ID NO: 2224002 - RNA, 19 nt, Homo sapiens
  misc_RNA (1)...(19): siRNA sense strand
gggugagcaaggagagcca

SEQ ID NO: 2224003 - RNA, 19 nt, Homo sapiens
  misc_RNA (1)...(19): siRNA sense strand
cggaagggauggugaaaag

SEQ ID NO: 2224004 - RNA, 19 nt, Homo sapiens
  misc_RNA (1)...(19): siRNA sense strand
aggcaaagauggagaaaau

SEQ ID NO: 2224005 - RNA, 19 nt, Homo sapiens
  misc_RNA (1)...(19): siRNA sense strand
uuaaaggagagaagggaaa

SEQ ID NO: 2224006 - RNA, 19 nt, Homo sapiens
  misc_RNA (1)...(19): siRNA sense strand
aggagaacaaggagugaaa

SEQ ID NO: 2224007 - RNA, 19 nt, Homo sapiens
  misc_RNA (1)...(19): siRNA sense strand
aggaaugaagggugacaaa

SEQ ID NO: 2224008 - RNA, 19 nt, Homo sapiens
  misc_RNA (1)...(19): siRNA sense strand
gaaaggagaucaaggacca

SEQ ID NO: 2224009 - RNA, 19 nt, Homo sapiens
  misc_RNA (1)...(19): siRNA sense strand
gaagggaaauccaggccaa

SEQ ID NO: 2224010 - RNA, 19 nt, Homo sapiens
  misc_RNA (1)...(19): siRNA sense strand
aggaauagguguucaggga

SEQ ID NO: 2224011 - RNA, 19 nt, Homo sapiens
  misc_RNA (1)...(19): siRNA sense strand
gcaauggaaccaagggaga

SEQ ID NO: 2224012 - RNA, 19 nt, Homo sapiens
  misc_RNA (1)...(19): siRNA sense strand
ggcagaaggcucaggucaa

SEQ ID NO: 2224013 - RNA, 19 nt, Homo sapiens
  misc_RNA (1)...(19): siRNA sense strand
ccaaaggugaaauggguau

SEQ ID NO: 2224014 - RNA, 19 nt, Homo sapiens
  misc_RNA (1)...(19): siRNA sense strand
uggaaauggagguauuaaa

SEQ ID NO: 2224015 - RNA, 19 nt, Homo sapiens
  misc_RNA (1)...(19): siRNA sense strand
aggagugaaaggugacaaa

SEQ ID NO: 2224016 - RNA, 19 nt, Homo sapiens
  misc_RNA (1)...(19): siRNA sense strand
ccacaaugcccacagggaa

SEQ ID NO: 2224017 - RNA, 19 nt, Homo sapiens
  misc_RNA (1)...(19): siRNA sense strand
uggaaggaccuaaaggcaa

SEQ ID NO: 2224018 - RNA, 19 nt, Homo sapiens
  misc_RNA (1)...(19): siRNA sense strand
ugccaggaccaaaggguaa

SEQ ID NO: 2224019 - RNA, 19 nt, Homo sapiens
  misc_RNA (1)...(19): siRNA sense strand
aggacaagcuggugcaacu

SEQ ID NO: 2224020 - RNA, 19 nt, Homo sapiens
  misc_RNA (1)...(19): siRNA sense strand
uggaauaccaggagagaag

SEQ ID NO: 2224021 - RNA, 19 nt, Homo sapiens
  misc_RNA (1)...(19): siRNA sense strand
uaucaaagguucuguggga

SEQ ID NO: 2224022 - RNA, 19 nt, Homo sapiens
  misc_RNA (1)...(19): siRNA sense strand
gggucucaauggaaugaaa

SEQ ID NO: 2224023 - RNA, 19 nt, Homo sapiens
  misc_RNA (1)...(19): siRNA sense strand
gcuaaagggucuaccagga

SEQ ID NO: 2224024 - RNA, 19 nt, Homo sapiens
  misc_RNA (1)...(19): siRNA sense strand
agaaaggugagaaggguga

SEQ ID NO: 2224025 - RNA, 19 nt, Homo sapiens
  misc_RNA (1)...(19): siRNA sense strand
acgaauuagccgaugucaa

SEQ ID NO: 2224026 - RNA, 19 nt, Homo sapiens
  misc_RNA (1)...(19): siRNA sense strand
gaaaggugaugaaggacca

SEQ ID NO: 2224027 - RNA, 19 nt, Homo sapiens
  misc_RNA (1)...(19): siRNA sense strand
ccaaaagggugauggagga

SEQ ID NO: 2224028 - RNA, 19 nt, Homo sapiens
  misc_RNA (1)...(19): siRNA sense strand
agggaacacuucaggucua

SEQ ID NO: 2224029 - RNA, 19 nt, Homo sapiens
  misc_RNA (1)...(19): siRNA sense strand
aguaaaccucagucagaaa

SEQ ID NO: 2224030 - RNA, 19 nt, Homo sapiens
  misc_RNA (1)...(19): siRNA sense strand
gggucagaaaggugaugaa

SEQ ID NO: 2224031 - RNA, 19 nt, Homo sapiens
  misc_RNA (1)...(19): siRNA sense strand
caccaggaccuuugggaau

SEQ ID NO: 2224032 - RNA, 19 nt, Homo sapiens
  misc_RNA (1)...(19): siRNA sense strand
ucaaagguucugugggaga

SEQ ID NO: 2224033 - RNA, 19 nt, Homo sapiens
  misc_RNA (1)...(19): siRNA sense strand
ggaaggaccuaaaggcaac

SEQ ID NO: 2224034 - RNA, 19 nt, Homo sapiens
  misc_RNA (1)...(19): siRNA sense strand
cccuggaaauggagguauu

SEQ ID NO: 2224035 - RNA, 19 nt, Homo sapiens
  misc_RNA (1)...(19): siRNA sense strand
gggcagaaggcucagguca

SEQ ID NO: 2224036 - RNA, 19 nt, Homo sapiens
  misc_RNA (1)...(19): siRNA sense strand
agaaaggagaucagggacu

SEQ ID NO: 2224037 - RNA, 19 nt, Homo sapiens
  misc_RNA (1)...(19): siRNA sense strand
cugcauuggaacugguauu

SEQ ID NO: 2224038 - RNA, 19 nt, Homo sapiens
  misc_RNA (1)...(19): siRNA sense strand
aggugagaagggugagcaa

SEQ ID NO: 2224039 - RNA, 19 nt, Homo sapiens
  misc_RNA (1)...(19): siRNA sense strand
auuaaaggagagaagggaa

SEQ ID NO: 2224040 - RNA, 19 nt, Homo sapiens
  misc_RNA (1)...(19): siRNA sense strand
uggagaaaggggucagaaa

SEQ ID NO: 2224041 - RNA, 19 nt, Homo sapiens
  misc_RNA (1)...(19): siRNA sense strand
aaagggagagagaggguuu

SEQ ID NO: 2224042 - RNA, 19 nt, Homo sapiens
  misc_RNA (1)...(19): siRNA sense strand
ccaccaggucccaaaggua

SEQ ID NO: 2224043 - RNA, 19 nt, Homo sapiens
  misc_RNA (1)...(19): siRNA sense strand
cauuagucgaugugcagua

SEQ ID NO: 2224044 - RNA, 19 nt, Homo sapiens
  misc_RNA (1)...(19): siRNA sense strand
aggcuuuccuggaucuaaa

SEQ ID NO: 2224045 - RNA, 19 nt, Homo sapiens
  misc_RNA (1)...(19): siRNA sense strand
uggacagaaaggcgacaaa

SEQ ID NO: 2224046 - RNA, 19 nt, Homo sapiens
  misc_RNA (1)...(19): siRNA sense strand
uguaggugguggaggucau

SEQ ID NO: 2224047 - RNA, 19 nt, Homo sapiens
  misc_RNA (1)...(19): siRNA sense strand
cagcuggacagaaggguga

SEQ ID NO: 2224048 - RNA, 19 nt, Homo sapiens
  misc_RNA (1)...(19): siRNA sense strand
gcuuaaauuuccagggacc

SEQ ID NO: 2224049 - RNA, 19 nt, Homo sapiens
  misc_RNA (1)...(19): siRNA sense strand
aagagguaaaccaggcaaa

SEQ ID NO: 2224050 - RNA, 19 nt, Homo sapiens
  misc_RNA (1)...(19): siRNA sense strand
ccaaaggauuaccaggcau

SEQ ID NO: 2224051 - RNA, 19 nt, Homo sapiens
  misc_RNA (1)...(19): siRNA sense strand
caaaggagcacuuggucca

SEQ ID NO: 2224052 - RNA, 19 nt, Homo sapiens
  misc_RNA (1)...(19): siRNA sense strand
agaaaggcgacaaagguga

SEQ ID NO: 2224053 - RNA, 19 nt, Homo sapiens
  misc_RNA (1)...(19): siRNA sense strand
agguauuaaaggagagaag

SEQ ID NO: 2224054 - RNA, 19 nt, Homo sapiens
  misc_RNA (1)...(19): siRNA sense strand
gcauacaagugcaggggca

SEQ ID NO: 2224055 - RNA, 19 nt, Homo sapiens
  misc_RNA (1)...(19): siRNA sense strand
gcaggagacuugaggacac

SEQ ID NO: 2224056 - RNA, 19 nt, Homo sapiens
  misc_RNA (1)...(19): siRNA sense strand
ccagggacccaaaggugaa

SEQ ID NO: 2224057 - RNA, 19 nt, Homo sapiens
  misc_RNA (1)...(19): siRNA sense strand
ucaauggaaugaaaggaga

SEQ ID NO: 2224058 - RNA, 19 nt, Homo sapiens
  misc_RNA (1)...(19): siRNA sense strand
ccaccaggaccuuugggaa

SEQ ID NO: 2224059 - RNA, 19 nt, Homo sapiens
  misc_RNA (1)...(19): siRNA sense strand
uggaggucauccugggcaa

SEQ ID NO: 2224060 - RNA, 19 nt, Homo sapiens
  misc_RNA (1)...(19): siRNA sense strand
gggcuuaaauuuccaggga

SEQ ID NO: 2224061 - RNA, 19 nt, Homo sapiens
  misc_RNA (1)...(19): siRNA sense strand
gggacuuccuggugaccga

SEQ ID NO: 2224062 - RNA, 19 nt, Homo sapiens
  misc_RNA (1)...(19): siRNA sense strand
gggugagcaaggagagcca

SEQ ID NO: 2224063 - RNA, 19 nt, Homo sapiens
  misc_RNA (1)...(19): siRNA sense strand
cggaagggauggugaaaag

SEQ ID NO: 2224064 - RNA, 19 nt, Homo sapiens
  misc_RNA (1)...(19): siRNA sense strand
aggcagacagggagagaaa

SEQ ID NO: 2224065 - RNA, 19 nt, Homo sapiens
  misc_RNA (1)...(19): siRNA sense strand
caucggaauuccagggaga

SEQ ID NO: 2224066 - RNA, 19 nt, Homo sapiens
  misc_RNA (1)...(19): siRNA sense strand
aggagguguuugaggguga

SEQ ID NO: 2224067 - RNA, 19 nt, Homo sapiens
  misc_RNA (1)...(19): siRNA sense strand
aggaagaggacgucggcau

SEQ ID NO: 2224068 - RNA, 19 nt, Homo sapiens
  misc_RNA (1)...(19): siRNA sense strand
cggcuugcuucaugggcua

SEQ ID NO: 2224069 - RNA, 19 nt, Homo sapiens
  misc_RNA (1)...(19): siRNA sense strand
ggacaaaggagaacagggu

SEQ ID NO: 2224070 - RNA, 19 nt, Homo sapiens
  misc_RNA (1)...(19): siRNA sense strand
aagaagggacgaaggguga

SEQ ID NO: 2224071 - RNA, 19 nt, Homo sapiens
  misc_RNA (1)...(19): siRNA sense strand
acaaaggagaugaugguga

SEQ ID NO: 2224072 - RNA, 19 nt, Homo sapiens
  misc_RNA (1)...(19): siRNA sense strand
ugaauucaagcgugggaaa

SEQ ID NO: 2224073 - RNA, 19 nt, Homo sapiens
  misc_RNA (1)...(19): siRNA sense strand
agacaggagacgugggcca

SEQ ID NO: 2224074 - RNA, 19 nt, Homo sapiens
  misc_RNA (1)...(19): siRNA sense strand
cagaggaaugccuggacaa

SEQ ID NO: 2224075 - RNA, 19 nt, Homo sapiens
  misc_RNA (1)...(19): siRNA sense strand
agggagaaccagcgauuau

SEQ ID NO: 2224076 - RNA, 19 nt, Homo sapiens
  misc_RNA (1)...(19): siRNA sense strand
agaaaggggccaagggaga

SEQ ID NO: 2224077 - RNA, 19 nt, Homo sapiens
  misc_RNA (1)...(19): siRNA sense strand
auguggacgccgagggcaa

SEQ ID NO: 2224078 - RNA, 19 nt, Homo sapiens
  misc_RNA (1)...(19): siRNA sense strand
cugcauuucccgaggacuu

SEQ ID NO: 2224079 - RNA, 19 nt, Homo sapiens
  misc_RNA (1)...(19): siRNA sense strand
gcaagaagcccguggaagc

SEQ ID NO: 2224080 - RNA, 19 nt, Homo sapiens
  misc_RNA (1)...(19): siRNA sense strand
cuaagggagaacaggguau

SEQ ID NO: 2224081 - RNA, 19 nt, Homo sapiens
  misc_RNA (1)...(19): siRNA sense strand
aaggagacggcgaggguga

SEQ ID NO: 2224082 - RNA, 19 nt, Homo sapiens
  misc_RNA (1)...(19): siRNA sense strand
acaacuugccugauggaau

SEQ ID NO: 2224083 - RNA, 19 nt, Homo sapiens
  misc_RNA (1)...(19): siRNA sense strand
ucuacaacgagcaggguau

SEQ ID NO: 2224084 - RNA, 19 nt, Homo sapiens
  misc_RNA (1)...(19): siRNA sense strand
guggaagcugccaaagaaa

SEQ ID NO: 2224085 - RNA, 19 nt, Homo sapiens
  misc_RNA (1)...(19): siRNA sense strand
ggaaccuugacgagaacua

SEQ ID NO: 2224086 - RNA, 19 nt, Homo sapiens
  misc_RNA (1)...(19): siRNA sense strand
acgggaauggcgagaacua

SEQ ID NO: 2224087 - RNA, 19 nt, Homo sapiens
  misc_RNA (1)...(19): siRNA sense strand
cgucacagaaauuuggauu

SEQ ID NO: 2224088 - RNA, 19 nt, Homo sapiens
  misc_RNA (1)...(19): siRNA sense strand
ccgaaggcagacagggaga

SEQ ID NO: 2224089 - RNA, 19 nt, Homo sapiens
  misc_RNA (1)...(19): siRNA sense strand
agugauggagccagaggaa

SEQ ID NO: 2224090 - RNA, 19 nt, Homo sapiens
  misc_RNA (1)...(19): siRNA sense strand
gggagagaagggcgaguca

SEQ ID NO: 2224091 - RNA, 19 nt, Homo sapiens
  misc_RNA (1)...(19): siRNA sense strand
aauauuacacggaaggaga

SEQ ID NO: 2224092 - RNA, 19 nt, Homo sapiens
  misc_RNA (1)...(19): siRNA sense strand
gugaaagccaagaaaggca

SEQ ID NO: 2224093 - RNA, 19 nt, Homo sapiens
  misc_RNA (1)...(19): siRNA sense strand
caaagaaaccacagagguc

SEQ ID NO: 2224094 - RNA, 19 nt, Homo sapiens
  misc_RNA (1)...(19): siRNA sense strand
gcggagguuugaagggcga

SEQ ID NO: 2224095 - RNA, 19 nt, Homo sapiens
  misc_RNA (1)...(19): siRNA sense strand
aggcgagaagggugagaca

SEQ ID NO: 2224096 - RNA, 19 nt, Homo sapiens
  misc_RNA (1)...(19): siRNA sense strand
caaagggcgagaaggguga

SEQ ID NO: 2224097 - RNA, 19 nt, Homo sapiens
  misc_RNA (1)...(19): siRNA sense strand
uuaaaggagacaugggcau

SEQ ID NO: 2224098 - RNA, 19 nt, Homo sapiens
  misc_RNA (1)...(19): siRNA sense strand
cuggagaagacggagauaa

SEQ ID NO: 2224099 - RNA, 19 nt, Homo sapiens
  misc_RNA (1)...(19): siRNA sense strand
caacuggcccgaaggguga

SEQ ID NO: 2224100 - RNA, 19 nt, Homo sapiens
  misc_RNA (1)...(19): siRNA sense strand
ugggagugauggagccaga

SEQ ID NO: 2224101 - RNA, 19 nt, Homo sapiens
  misc_RNA (1)...(19): siRNA sense strand
gggugacgacggagaaguu

SEQ ID NO: 2224102 - RNA, 19 nt, Homo sapiens
  misc_RNA (1)...(19): siRNA sense strand
gcacaaagggcgagaaggg

SEQ ID NO: 2224103 - RNA, 19 nt, Homo sapiens
  misc_RNA (1)...(19): siRNA sense strand
cuaugaagggauuggagga

SEQ ID NO: 2224104 - RNA, 19 nt, Homo sapiens
  misc_RNA (1)...(19): siRNA sense strand
cgagaaaggccaaaaggga

SEQ ID NO: 2224105 - RNA, 19 nt, Homo sapiens
  misc_RNA (1)...(19): siRNA sense strand
uggagaagacggagauaag

SEQ ID NO: 2224106 - RNA, 19 nt, Homo sapiens
  misc_RNA (1)...(19): siRNA sense strand
cggagauaagggagagauc

SEQ ID NO: 2224107 - RNA, 19 nt, Homo sapiens
  misc_RNA (1)...(19): siRNA sense strand
uaacaaagacaacaggcuu

SEQ ID NO: 2224108 - RNA, 19 nt, Homo sapiens
  misc_RNA (1)...(19): siRNA sense strand
ucagauggcaaguggcaca

SEQ ID NO: 2224109 - RNA, 19 nt, Homo sapiens
  misc_RNA (1)...(19): siRNA sense strand
agacugguuuccaaggcaa

SEQ ID NO: 2224110 - RNA, 19 nt, Homo sapiens
  misc_RNA (1)...(19): siRNA sense strand
cgggcagaaaggugaugaa

SEQ ID NO: 2224111 - RNA, 19 nt, Homo sapiens
  misc_RNA (1)...(19): siRNA sense strand
cgacaugcgucuucccuga

SEQ ID NO: 2224112 - RNA, 19 nt, Homo sapiens
  misc_RNA (1)...(19): siRNA sense strand
gggaguucacugaggaaac

SEQ ID NO: 2224113 - RNA, 19 nt, Homo sapiens
  misc_RNA (1)...(19): siRNA sense strand
ccccaggacagcaggguaa

SEQ ID NO: 2224114 - RNA, 19 nt, Homo sapiens
  misc_RNA (1)...(19): siRNA sense strand
acaugggcaucaaggguga

SEQ ID NO: 2224115 - RNA, 19 nt, Homo sapiens
  misc_RNA (1)...(19): siRNA sense strand
aagacggagauaagggaga

SEQ ID NO: 2224116 - RNA, 19 nt, Homo sapiens
  misc_RNA (1)...(19): siRNA sense strand
cagcaagaagcccguggaa

SEQ ID NO: 2224117 - RNA, 19 nt, Homo sapiens
  misc_RNA (1)...(19): siRNA sense strand
agaaaggccaaaagggaga

SEQ ID NO: 2224118 - RNA, 19 nt, Homo sapiens
  misc_RNA (1)...(19): siRNA sense strand
gggugaacagggugagaag

SEQ ID NO: 2224119 - RNA, 19 nt, Homo sapiens
  misc_RNA (1)...(19): siRNA sense strand
uaacaacugugaaagccaa

SEQ ID NO: 2224120 - RNA, 19 nt, Homo sapiens
  misc_RNA (1)...(19): siRNA sense strand
augauuacugugagcacua

SEQ ID NO: 2224121 - RNA, 19 nt, Homo sapiens
  misc_RNA (1)...(19): siRNA sense strand
ccguggaagcugccaaaga

SEQ ID NO: 2224122 - RNA, 19 nt, Homo sapiens
  misc_RNA (1)...(19): siRNA sense strand
ugauggaauaacaaagaca

SEQ ID NO: 2224123 - RNA, 19 nt, Homo sapiens
  misc_RNA (1)...(19): siRNA sense strand
cggcgaaccaggauaccau

SEQ ID NO: 2224124 - RNA, 19 nt, Homo sapiens
  misc_RNA (1)...(19): siRNA sense strand
ugaaggucccagaggcuuu

SEQ ID NO: 2224125 - RNA, 19 nt, Homo sapiens
  misc_RNA (1)...(19): siRNA sense strand
uggcgaagcaggugagccu

SEQ ID NO: 2224126 - RNA, 19 nt, Homo sapiens
  misc_RNA (1)...(19): siRNA sense strand
ccaaaggugaaaaggguca

SEQ ID NO: 2224127 - RNA, 19 nt, Homo sapiens
  misc_RNA (1)...(19): siRNA sense strand
auaucaaagcagagggaaa

SEQ ID NO: 2224128 - RNA, 19 nt, Homo sapiens
  misc_RNA (1)...(19): siRNA sense strand
aggaagaagacgaggauga

SEQ ID NO: 2224129 - RNA, 19 nt, Homo sapiens
  misc_RNA (1)...(19): siRNA sense strand
gggaaugccaggagagaga

SEQ ID NO: 2224130 - RNA, 19 nt, Homo sapiens
  misc_RNA (1)...(19): siRNA sense strand
gggucuacguggugaaaga

SEQ ID NO: 2224131 - RNA, 19 nt, Homo sapiens
  misc_RNA (1)...(19): siRNA sense strand
uggugaaagaggagaacaa

SEQ ID NO: 2224132 - RNA, 19 nt, Homo sapiens
  misc_RNA (1)...(19): siRNA sense strand
ggaauggaaaugugggcaa

SEQ ID NO: 2224133 - RNA, 19 nt, Homo sapiens
  misc_RNA (1)...(19): siRNA sense strand
caauaaaagcccaggaaga

SEQ ID NO: 2224134 - RNA, 19 nt, Homo sapiens
  misc_RNA (1)...(19): siRNA sense strand
aagacgaggaugaaggaua

SEQ ID NO: 2224135 - RNA, 19 nt, Homo sapiens
  misc_RNA (1)...(19): siRNA sense strand
aagaggagaaccugggaua

SEQ ID NO: 2224136 - RNA, 19 nt, Homo sapiens
  misc_RNA (1)...(19): siRNA sense strand
cauggaaacaggagaaaca

SEQ ID NO: 2224137 - RNA, 19 nt, Homo sapiens
  misc_RNA (1)...(19): siRNA sense strand
cguaaaaccuggugggcca

SEQ ID NO: 2224138 - RNA, 19 nt, Homo sapiens
  misc_RNA (1)...(19): siRNA sense strand
ugggcaacguggagagaga

SEQ ID NO: 2224139 - RNA, 19 nt, Homo sapiens
  misc_RNA (1)...(19): siRNA sense strand
uagaggagaacgaggaaau

SEQ ID NO: 2224140 - RNA, 19 nt, Homo sapiens
  misc_RNA (1)...(19): siRNA sense strand
cggacagccuggaguaaaa

SEQ ID NO: 2224141 - RNA, 19 nt, Homo sapiens
  misc_RNA (1)...(19): siRNA sense strand
ggguuuacaaggacagcaa

SEQ ID NO: 2224142 - RNA, 19 nt, Homo sapiens
  misc_RNA (1)...(19): siRNA sense strand
gggugacagagguggcaua

SEQ ID NO: 2224143 - RNA, 19 nt, Homo sapiens
  misc_RNA (1)...(19): siRNA sense strand
cagagguggcauaggagaa

SEQ ID NO: 2224144 - RNA, 19 nt, Homo sapiens
  misc_RNA (1)...(19): siRNA sense strand
aggucuuccuggugcaaua

SEQ ID NO: 2224145 - RNA, 19 nt, Homo sapiens
  misc_RNA (1)...(19): siRNA sense strand
ugguaaaguugguccuuau

SEQ ID NO: 2224146 - RNA, 19 nt, Homo sapiens
  misc_RNA (1)...(19): siRNA sense strand
agaaagaggaauugcagga

SEQ ID NO: 2224147 - RNA, 19 nt, Homo sapiens
  misc_RNA (1)...(19): siRNA sense strand
uggugcaacaggagauaaa

SEQ ID NO: 2224148 - RNA, 19 nt, Homo sapiens
  misc_RNA (1)...(19): siRNA sense strand
uggaaaugauggugcagga

SEQ ID NO: 2224149 - RNA, 19 nt, Homo sapiens
  misc_RNA (1)...(19): siRNA sense strand
gggcaauuugucucaauaa

SEQ ID NO: 2224150 - RNA, 19 nt, Homo sapiens
  misc_RNA (1)...(19): siRNA sense strand
uggaaaaccaggugaucaa

SEQ ID NO: 2224151 - RNA, 19 nt, Homo sapiens
  misc_RNA (1)...(19): siRNA sense strand
agguaugccgggagaaaga

SEQ ID NO: 2224152 - RNA, 19 nt, Homo sapiens
  misc_RNA (1)...(19): siRNA sense strand
aguugguccuucagguaaa

SEQ ID NO: 2224153 - RNA, 19 nt, Homo sapiens
  misc_RNA (1)...(19): siRNA sense strand
caagguaugccgggagaaa

SEQ ID NO: 2224154 - RNA, 19 nt, Homo sapiens
  misc_RNA (1)...(19): siRNA sense strand
ugguccaaauggugaacaa

SEQ ID NO: 2224155 - RNA, 19 nt, Homo sapiens
  misc_RNA (1)...(19): siRNA sense strand
gggaccaagaggagagcga

SEQ ID NO: 2224156 - RNA, 19 nt, Homo sapiens
  misc_RNA (1)...(19): siRNA sense strand
aauggguccucuugggaua

SEQ ID NO: 2224157 - RNA, 19 nt, Homo sapiens
  misc_RNA (1)...(19): siRNA sense strand
acgaggcaguguaggagaa

SEQ ID NO: 2224158 - RNA, 19 nt, Homo sapiens
  misc_RNA (1)...(19): siRNA sense strand
ugauaugaacagagggucu

SEQ ID NO: 2224159 - RNA, 19 nt, Homo sapiens
  misc_RNA (1)...(19): siRNA sense strand
ugguagaggaagaaaggga

SEQ ID NO: 2224160 - RNA, 19 nt, Homo sapiens
  misc_RNA (1)...(19): siRNA sense strand
gccaggagagagagggaga

SEQ ID NO: 2224161 - RNA, 19 nt, Homo sapiens
  misc_RNA (1)...(19): siRNA sense strand
gggagaagcagguccuaca

SEQ ID NO: 2224162 - RNA, 19 nt, Homo sapiens
  misc_RNA (1)...(19): siRNA sense strand
uaucaaagcagagggaaau

SEQ ID NO: 2224163 - RNA, 19 nt, Homo sapiens
  misc_RNA (1)...(19): siRNA sense strand
gugacaagauagaaugcca

SEQ ID NO: 2224164 - RNA, 19 nt, Homo sapiens
  misc_RNA (1)...(19): siRNA sense strand
uggugaaccuggcagaaau

SEQ ID NO: 2224165 - RNA, 19 nt, Homo sapiens
  misc_RNA (1)...(19): siRNA sense strand
aggagaagcuggcccaaaa

SEQ ID NO: 2224166 - RNA, 19 nt, Homo sapiens
  misc_RNA (1)...(19): siRNA sense strand
aaggauauggugaagaaau

SEQ ID NO: 2224167 - RNA, 19 nt, Homo sapiens
  misc_RNA (1)...(19): siRNA sense strand
ccauaggaaucaaagggca

SEQ ID NO: 2224168 - RNA, 19 nt, Homo sapiens
  misc_RNA (1)...(19): siRNA sense strand
uccaggagaugcaggacaa

SEQ ID NO: 2224169 - RNA, 19 nt, Homo sapiens
  misc_RNA (1)...(19): siRNA sense strand
aaauuuugguagaggaaga

SEQ ID NO: 2224170 - RNA, 19 nt, Homo sapiens
  misc_RNA (1)...(19): siRNA sense strand
aggagaugcaggacaaaga

SEQ ID NO: 2224171 - RNA, 19 nt, Homo sapiens
  misc_RNA (1)...(19): siRNA sense strand
agauagaaugccaggaugu

SEQ ID NO: 2224172 - RNA, 19 nt, Homo sapiens
  misc_RNA (1)...(19): siRNA sense strand
guagaggaagaaagggaca

SEQ ID NO: 2224173 - RNA, 19 nt, Homo sapiens
  misc_RNA (1)...(19): siRNA sense strand
aagaggaauugcaggaacu

SEQ ID NO: 2224174 - RNA, 19 nt, Homo sapiens
  misc_RNA (1)...(19): siRNA sense strand
cugaaggcacagcuggaaa

SEQ ID NO: 2224175 - RNA, 19 nt, Homo sapiens
  misc_RNA (1)...(19): siRNA sense strand
guuuacugcaacauggaaa

SEQ ID NO: 2224176 - RNA, 19 nt, Homo sapiens
  misc_RNA (1)...(19): siRNA sense strand
acagcaagguggugcagga

SEQ ID NO: 2224177 - RNA, 19 nt, Homo sapiens
  misc_RNA (1)...(19): siRNA sense strand
uaaugguguuccuggacua

SEQ ID NO: 2224178 - RNA, 19 nt, Homo sapiens
  misc_RNA (1)...(19): siRNA sense strand
aggcaguguaggagaagca

SEQ ID NO: 2224179 - RNA, 19 nt, Homo sapiens
  misc_RNA (1)...(19): siRNA sense strand
agaggaagaaagggacaaa

SEQ ID NO: 2224180 - RNA, 19 nt, Homo sapiens
  misc_RNA (1)...(19): siRNA sense strand
aggcauacguggucgucca

SEQ ID NO: 2224181 - RNA, 19 nt, Homo sapiens
  misc_RNA (1)...(19): siRNA sense strand
cccuaaaggugaaguugga

SEQ ID NO: 2224182 - RNA, 19 nt, Homo sapiens
  misc_RNA (1)...(19): siRNA sense strand
cagaggugacccaggaaca

SEQ ID NO: 2224183 - RNA, 19 nt, Homo sapiens
  misc_RNA (1)...(19): siRNA sense strand
gccgggagaaagaggaauu

SEQ ID NO: 2224184 - RNA, 19 nt, Homo sapiens
  misc_RNA (1)...(19): siRNA sense strand
acuaaaagguggucgagga

SEQ ID NO: 2224185 - RNA, 19 nt, Homo sapiens
  misc_RNA (1)...(19): siRNA sense strand
agagaggaauuguuggcau

SEQ ID NO: 2224186 - RNA, 19 nt, Homo sapiens
  misc_RNA (1)...(19): siRNA sense strand
aggaccucguggugacaaa

SEQ ID NO: 2224187 - RNA, 19 nt, Homo sapiens
  misc_RNA (1)...(19): siRNA sense strand
ccaaauggugaacaaggaa

SEQ ID NO: 2224188 - RNA, 19 nt, Homo sapiens
  misc_RNA (1)...(19): siRNA sense strand
gaggagagcgagggccaaa

SEQ ID NO: 2224189 - RNA, 19 nt, Homo sapiens
  misc_RNA (1)...(19): siRNA sense strand
acacaaaggucuugaaggc

SEQ ID NO: 2224190 - RNA, 19 nt, Homo sapiens
  misc_RNA (1)...(19): siRNA sense strand
uggaaugaagggagaagca

SEQ ID NO: 2224191 - RNA, 19 nt, Homo sapiens
  misc_RNA (1)...(19): siRNA sense strand
gggaacaccaggaaaagua

SEQ ID NO: 2224192 - RNA, 19 nt, Homo sapiens
  misc_RNA (1)...(19): siRNA sense strand
cgggaggaagggagagaaa

SEQ ID NO: 2224193 - RNA, 19 nt, Homo sapiens
  misc_RNA (1)...(19): siRNA sense strand
gggagaacggggagagaaa

SEQ ID NO: 2224194 - RNA, 19 nt, Homo sapiens
  misc_RNA (1)...(19): siRNA sense strand
gugcaggacuaaaggguga

SEQ ID NO: 2224195 - RNA, 19 nt, Homo sapiens
  misc_RNA (1)...(19): siRNA sense strand
ccaaagguuucaaggguga

SEQ ID NO: 2224196 - RNA, 19 nt, Homo sapiens
  misc_RNA (1)...(19): siRNA sense strand
ccugaagcuccuugggaua

SEQ ID NO: 2224197 - RNA, 19 nt, Homo sapiens
  misc_RNA (1)...(19): siRNA sense strand
cuggagaccugguggguga

SEQ ID NO: 2224198 - RNA, 19 nt, Homo sapiens
  misc_RNA (1)...(19): siRNA sense strand
ucaaaggagacaagggaga

SEQ ID NO: 2224199 - RNA, 19 nt, Homo sapiens
  misc_RNA (1)...(19): siRNA sense strand
gaacagccaugaaggguga

SEQ ID NO: 2224200 - RNA, 19 nt, Homo sapiens
  misc_RNA (1)...(19): siRNA sense strand
gggaaagccaggcgaggau

SEQ ID NO: 2224201 - RNA, 19 nt, Homo sapiens
  misc_RNA (1)...(19): siRNA sense strand
gggagagaaaggagauuca

SEQ ID NO: 2224202 - RNA, 19 nt, Homo sapiens
  misc_RNA (1)...(19): siRNA sense strand
gagccagagagaagggaga

SEQ ID NO: 2224203 - RNA, 19 nt, Homo sapiens
  misc_RNA (1)...(19): siRNA sense strand
ggagcggacuggaugggaa

SEQ ID NO: 2224204 - RNA, 19 nt, Homo sapiens
  misc_RNA (1)...(19): siRNA sense strand
cagcauucgacuuggauga

SEQ ID NO: 2224205 - RNA, 19 nt, Homo sapiens
  misc_RNA (1)...(19): siRNA sense strand
ccaaaggagaaaagggaga

SEQ ID NO: 2224206 - RNA, 19 nt, Homo sapiens
  misc_RNA (1)...(19): siRNA sense strand
ggaagggagagaaaggaga

SEQ ID NO: 2224207 - RNA, 19 nt, Homo sapiens
  misc_RNA (1)...(19): siRNA sense strand
agaagggagacaagggaga

SEQ ID NO: 2224208 - RNA, 19 nt, Homo sapiens
  misc_RNA (1)...(19): siRNA sense strand
guucaguguugcugcguga

SEQ ID NO: 2224209 - RNA, 19 nt, Homo sapiens
  misc_RNA (1)...(19): siRNA sense strand
gggucaaccuggugcagca

SEQ ID NO: 2224210 - RNA, 19 nt, Homo sapiens
  misc_RNA (1)...(19): siRNA sense strand
ccuggaaagaaaggagaaa

SEQ ID NO: 2224211 - RNA, 19 nt, Homo sapiens
  misc_RNA (1)...(19): siRNA sense strand
uguugggagugcaggacua

SEQ ID NO: 2224212 - RNA, 19 nt, Homo sapiens
  misc_RNA (1)...(19): siRNA sense strand
cggauuagcuggagcacag

SEQ ID NO: 2224213 - RNA, 19 nt, Homo sapiens
  misc_RNA (1)...(19): siRNA sense strand
ccucuggacucaaaggaga

SEQ ID NO: 2224214 - RNA, 19 nt, Homo sapiens
  misc_RNA (1)...(19): siRNA sense strand
gagaaaggggagcggggaa

SEQ ID NO: 2224215 - RNA, 19 nt, Homo sapiens
  misc_RNA (1)...(19): siRNA sense strand
cugaggagcugaagcgagu

SEQ ID NO: 2224216 - RNA, 19 nt, Homo sapiens
  misc_RNA (1)...(19): siRNA sense strand
uggggaagauggucagaaa

SEQ ID NO: 2224217 - RNA, 19 nt, Homo sapiens
  misc_RNA (1)...(19): siRNA sense strand
aggaaaggauggagugccu

SEQ ID NO: 2224218 - RNA, 19 nt, Homo sapiens
  misc_RNA (1)...(19): siRNA sense strand
cgagauggugccaguggaa

SEQ ID NO: 2224219 - RNA, 19 nt, Homo sapiens
  misc_RNA (1)...(19): siRNA sense strand
agauggugccaguggaaaa

SEQ ID NO: 2224220 - RNA, 19 nt, Homo sapiens
  misc_RNA (1)...(19): siRNA sense strand
agagaaaggugacgagggu

SEQ ID NO: 2224221 - RNA, 19 nt, Homo sapiens
  misc_RNA (1)...(19): siRNA sense strand
agccaugaagggugacaaa

SEQ ID NO: 2224222 - RNA, 19 nt, Homo sapiens
  misc_RNA (1)...(19): siRNA sense strand
aggagaacguggagaacag

SEQ ID NO: 2224223 - RNA, 19 nt, Homo sapiens
  misc_RNA (1)...(19): siRNA sense strand
ccacagugcaguacagcga

SEQ ID NO: 2224224 - RNA, 19 nt, Homo sapiens
  misc_RNA (1)...(19): siRNA sense strand
cgaucgacucggugacuuu

SEQ ID NO: 2224225 - RNA, 19 nt, Homo sapiens
  misc_RNA (1)...(19): siRNA sense strand
gcaaaggauccgugacaug

SEQ ID NO: 2224226 - RNA, 19 nt, Homo sapiens
  misc_RNA (1)...(19): siRNA sense strand
ccgaggacgagauggugaa

SEQ ID NO: 2224227 - RNA, 19 nt, Homo sapiens
  misc_RNA (1)...(19): siRNA sense strand
cuggagaagacgggaggaa

SEQ ID NO: 2224228 - RNA, 19 nt, Homo sapiens
  misc_RNA (1)...(19): siRNA sense strand
uggcaggacacaaaggaga

SEQ ID NO: 2224229 - RNA, 19 nt, Homo sapiens
  misc_RNA (1)...(19): siRNA sense strand
ccagauacucccaggaaac

SEQ ID NO: 2224230 - RNA, 19 nt, Homo sapiens
  misc_RNA (1)...(19): siRNA sense strand
uggcugagcuggauggacu

SEQ ID NO: 2224231 - RNA, 19 nt, Homo sapiens
  misc_RNA (1)...(19): siRNA sense strand
auguggugauguugggaau

SEQ ID NO: 2224232 - RNA, 19 nt, Homo sapiens
  misc_RNA (1)...(19): siRNA sense strand
gggagagaaaggagaacgu

SEQ ID NO: 2224233 - RNA, 19 nt, Homo sapiens
  misc_RNA (1)...(19): siRNA sense strand
cugcacugacggaggauga

SEQ ID NO: 2224234 - RNA, 19 nt, Homo sapiens
  misc_RNA (1)...(19): siRNA sense strand
uggcugggccugaagggaa

SEQ ID NO: 2224235 - RNA, 19 nt, Homo sapiens
  misc_RNA (1)...(19): siRNA sense strand
gggugaccagggcgagaaa

SEQ ID NO: 2224236 - RNA, 19 nt, Homo sapiens
  misc_RNA (1)...(19): siRNA sense strand
gcagacacuuccagggauc

SEQ ID NO: 2224237 - RNA, 19 nt, Homo sapiens
  misc_RNA (1)...(19): siRNA sense strand
cgggcuggcaggacacaaa

SEQ ID NO: 2224238 - RNA, 19 nt, Homo sapiens
  misc_RNA (1)...(19): siRNA sense strand
ccgaguauucuguggagga

SEQ ID NO: 2224239 - RNA, 19 nt, Homo sapiens
  misc_RNA (1)...(19): siRNA sense strand
agccaauccuugagaguac

SEQ ID NO: 2224240 - RNA, 19 nt, Homo sapiens
  misc_RNA (1)...(19): siRNA sense strand
gcauuaucuugcaaaggau

SEQ ID NO: 2224241 - RNA, 19 nt, Homo sapiens
  misc_RNA (1)...(19): siRNA sense strand
gaagggugauguugggagu

SEQ ID NO: 2224242 - RNA, 19 nt, Homo sapiens
  misc_RNA (1)...(19): siRNA sense strand
gcuuggagccaccgcagaa

SEQ ID NO: 2224243 - RNA, 19 nt, Homo sapiens
  misc_RNA (1)...(19): siRNA sense strand
uugcaaaggauccgugaca

SEQ ID NO: 2224244 - RNA, 19 nt, Homo sapiens
  misc_RNA (1)...(19): siRNA sense strand
cagcaggagaaaaggguga

SEQ ID NO: 2224245 - RNA, 19 nt, Homo sapiens
  misc_RNA (1)...(19): siRNA sense strand
gggucuaccaggagagcgu

SEQ ID NO: 2224246 - RNA, 19 nt, Homo sapiens
  misc_RNA (1)...(19): siRNA sense strand
ugguggcuguggagggaau

SEQ ID NO: 2224247 - RNA, 19 nt, Homo sapiens
  misc_RNA (1)...(19): siRNA sense strand
gggucaagcuauuugcugu

SEQ ID NO: 2224248 - RNA, 19 nt, Homo sapiens
  misc_RNA (1)...(19): siRNA sense strand
cuggagaggauggacgaaa

SEQ ID NO: 2224249 - RNA, 19 nt, Homo sapiens
  misc_RNA (1)...(19): siRNA sense strand
cgaauggugcugcaggcaa

SEQ ID NO: 2224250 - RNA, 19 nt, Homo sapiens
  misc_RNA (1)...(19): siRNA sense strand
gaucaagaaugcugacccu

SEQ ID NO: 2224251 - RNA, 19 nt, Homo sapiens
  misc_RNA (1)...(19): siRNA sense strand
agcccacggcccagagaaa

SEQ ID NO: 2224252 - RNA, 19 nt, Homo sapiens
  misc_RNA (1)...(19): siRNA sense strand
acaagucaucggaggugaa

SEQ ID NO: 2224253 - RNA, 19 nt, Homo sapiens
  misc_RNA (1)...(19): siRNA sense strand
gcgaggagagccuggaagu

SEQ ID NO: 2224254 - RNA, 19 nt, Homo sapiens
  misc_RNA (1)...(19): siRNA sense strand
gcuggaaacugcuggcauc

SEQ ID NO: 2224255 - RNA, 19 nt, Homo sapiens
  misc_RNA (1)...(19): siRNA sense strand
acuaaagggugacaaggga

SEQ ID NO: 2224256 - RNA, 19 nt, Homo sapiens
  misc_RNA (1)...(19): siRNA sense strand
gccugguauccgaggagaa

SEQ ID NO: 2224257 - RNA, 19 nt, Homo sapiens
  misc_RNA (1)...(19): siRNA sense strand
ugacaagggcagcaaggga

SEQ ID NO: 2224258 - RNA, 19 nt, Homo sapiens
  misc_RNA (1)...(19): siRNA sense strand
ccuggaacuuggugccuga

SEQ ID NO: 2224259 - RNA, 19 nt, Homo sapiens
  misc_RNA (1)...(19): siRNA sense strand
caucaggacucucgggaca

SEQ ID NO: 2224260 - RNA, 19 nt, Homo sapiens
  misc_RNA (1)...(19): siRNA sense strand
cagugauggcgaugguaua

SEQ ID NO: 2224261 - RNA, 19 nt, Homo sapiens
  misc_RNA (1)...(19): siRNA sense strand
gcgacgacgacgacgacaa

SEQ ID NO: 2224262 - RNA, 19 nt, Homo sapiens
  misc_RNA (1)...(19): siRNA sense strand
cggaacgcucuguggcaua

SEQ ID NO: 2224263 - RNA, 19 nt, Homo sapiens
  misc_RNA (1)...(19): siRNA sense strand
acaccaucccagaggacua

SEQ ID NO: 2224264 - RNA, 19 nt, Homo sapiens
  misc_RNA (1)...(19): siRNA sense strand
cguaaggacaacugcguga

SEQ ID NO: 2224265 - RNA, 19 nt, Homo sapiens
  misc_RNA (1)...(19): siRNA sense strand
acacugaccuagacggcuu

SEQ ID NO: 2224266 - RNA, 19 nt, Homo sapiens
  misc_RNA (1)...(19): siRNA sense strand
agaagaacgacgaccaaaa

SEQ ID NO: 2224267 - RNA, 19 nt, Homo sapiens
  misc_RNA (1)...(19): siRNA sense strand
uguggaaggacccgcgaaa

SEQ ID NO: 2224268 - RNA, 19 nt, Homo sapiens
  misc_RNA (1)...(19): siRNA sense strand
cgacaacugcccuagggua

SEQ ID NO: 2224269 - RNA, 19 nt, Homo sapiens
  misc_RNA (1)...(19): siRNA sense strand
acucagggcaggaggaugu

SEQ ID NO: 2224270 - RNA, 19 nt, Homo sapiens
  misc_RNA (1)...(19): siRNA sense strand
agaccaggauggagacgga

SEQ ID NO: 2224271 - RNA, 19 nt, Homo sapiens
  misc_RNA (1)...(19): siRNA sense strand
augcagacaaggugguaga

SEQ ID NO: 2224272 - RNA, 19 nt, Homo sapiens
  misc_RNA (1)...(19): siRNA sense strand
cggacaucaacgaguguga

SEQ ID NO: 2224273 - RNA, 19 nt, Homo sapiens
  misc_RNA (1)...(19): siRNA sense strand
gagcaaacguauuggcagg

SEQ ID NO: 2224274 - RNA, 19 nt, Homo sapiens
  misc_RNA (1)...(19): siRNA sense strand
cgccagugccguaaggaca

SEQ ID NO: 2224275 - RNA, 19 nt, Homo sapiens
  misc_RNA (1)...(19): siRNA sense strand
ccgcagaugcuucgggaac

SEQ ID NO: 2224276 - RNA, 19 nt, Homo sapiens
  misc_RNA (1)...(19): siRNA sense strand
caggccuggcuguggguua

SEQ ID NO: 2224277 - RNA, 19 nt, Homo sapiens
  misc_RNA (1)...(19): siRNA sense strand
ccuucaauggcguggacuu

SEQ ID NO: 2224278 - RNA, 19 nt, Homo sapiens
  misc_RNA (1)...(19): siRNA sense strand
gagaacaucaucugggcca

SEQ ID NO: 2224279 - RNA, 19 nt, Homo sapiens
  misc_RNA (1)...(19): siRNA sense strand
ccgacgucaacgagugcaa

SEQ ID NO: 2224280 - RNA, 19 nt, Homo sapiens
  misc_RNA (1)...(19): siRNA sense strand
gcuacaucagggugcgauu

SEQ ID NO: 2224281 - RNA, 19 nt, Homo sapiens
  misc_RNA (1)...(19): siRNA sense strand
cuucgggaacugcaggaaa

SEQ ID NO: 2224282 - RNA, 19 nt, Homo sapiens
  misc_RNA (1)...(19): siRNA sense strand
ucuacguggucauguggaa

SEQ ID NO: 2224283 - RNA, 19 nt, Homo sapiens
  misc_RNA (1)...(19): siRNA sense strand
gcaacguggucuuggacac

SEQ ID NO: 2224284 - RNA, 19 nt, Homo sapiens
  misc_RNA (1)...(19): siRNA sense strand
acaaagaugaugaggaauu

SEQ ID NO: 2224285 - RNA, 19 nt, Homo sapiens
  misc_RNA (1)...(19): siRNA sense strand
gcucagaaccagagaaagu

SEQ ID NO: 2224286 - RNA, 19 nt, Homo sapiens
  misc_RNA (1)...(19): siRNA sense strand
agcugaaacuggagauaaa

SEQ ID NO: 2224287 - RNA, 19 nt, Homo sapiens
  misc_RNA (1)...(19): siRNA sense strand
gcucaaaguacaagaaagu

SEQ ID NO: 2224288 - RNA, 19 nt, Homo sapiens
  misc_RNA (1)...(19): siRNA sense strand
aagaagaacaucugggaau

SEQ ID NO: 2224289 - RNA, 19 nt, Homo sapiens
  misc_RNA (1)...(19): siRNA sense strand
ucacaaugcacgugggaga

SEQ ID NO: 2224290 - RNA, 19 nt, Homo sapiens
  misc_RNA (1)...(19): siRNA sense strand
acauauugaccgagaauuu

SEQ ID NO: 2224291 - RNA, 19 nt, Homo sapiens
  misc_RNA (1)...(19): siRNA sense strand
aggaauucauagaaagcaa

SEQ ID NO: 2224292 - RNA, 19 nt, Homo sapiens
  misc_RNA (1)...(19): siRNA sense strand
cuacauugccgcugaggaa

SEQ ID NO: 2224293 - RNA, 19 nt, Homo sapiens
  misc_RNA (1)...(19): siRNA sense strand
cuacaguauuugaugagaa

SEQ ID NO: 2224294 - RNA, 19 nt, Homo sapiens
  misc_RNA (1)...(19): siRNA sense strand
gggcgaaagaaaagcauua

SEQ ID NO: 2224295 - RNA, 19 nt, Homo sapiens
  misc_RNA (1)...(19): siRNA sense strand
gcugguaccuagaagacaa

SEQ ID NO: 2224296 - RNA, 19 nt, Homo sapiens
  misc_RNA (1)...(19): siRNA sense strand
agaacaaaguccuggggaa

SEQ ID NO: 2224297 - RNA, 19 nt, Homo sapiens
  misc_RNA (1)...(19): siRNA sense strand
auggaagaauguuuggaaa

SEQ ID NO: 2224298 - RNA, 19 nt, Homo sapiens
  misc_RNA (1)...(19): siRNA sense strand
ccugauaacaccacagauu

SEQ ID NO: 2224299 - RNA, 19 nt, Homo sapiens
  misc_RNA (1)...(19): siRNA sense strand
caguauuugaugagaauga

SEQ ID NO: 2224300 - RNA, 19 nt, Homo sapiens
  misc_RNA (1)...(19): siRNA sense strand
aagacuuccaggagaguaa

SEQ ID NO: 2224301 - RNA, 19 nt, Homo sapiens
  misc_RNA (1)...(19): siRNA sense strand
ccauaacaaaggagcauau

SEQ ID NO: 2224302 - RNA, 19 nt, Homo sapiens
  misc_RNA (1)...(19): siRNA sense strand
gggugagauucaauaagaa

SEQ ID NO: 2224303 - RNA, 19 nt, Homo sapiens
  misc_RNA (1)...(19): siRNA sense strand
agaaagaucuggagcugga

SEQ ID NO: 2224304 - RNA, 19 nt, Homo sapiens
  misc_RNA (1)...(19): siRNA sense strand
guuuacuccuggaagauaa

SEQ ID NO: 2224305 - RNA, 19 nt, Homo sapiens
  misc_RNA (1)...(19): siRNA sense strand
ugcagauguuggagacaaa

SEQ ID NO: 2224306 - RNA, 19 nt, Homo sapiens
  misc_RNA (1)...(19): siRNA sense strand
cugcucagaaccagagaaa

SEQ ID NO: 2224307 - RNA, 19 nt, Homo sapiens
  misc_RNA (1)...(19): siRNA sense strand
uggauaaggaagaugaaga

SEQ ID NO: 2224308 - RNA, 19 nt, Homo sapiens
  misc_RNA (1)...(19): siRNA sense strand
gggaaaaggagcugcauca

SEQ ID NO: 2224309 - RNA, 19 nt, Homo sapiens
  misc_RNA (1)...(19): siRNA sense strand
agaugaaaccuuuaggaca

SEQ ID NO: 2224310 - RNA, 19 nt, Homo sapiens
  misc_RNA (1)...(19): siRNA sense strand
ugcaaaugggagacagaaa

SEQ ID NO: 2224311 - RNA, 19 nt, Homo sapiens
  misc_RNA (1)...(19): siRNA sense strand
augcaagaaaggaaguuua

SEQ ID NO: 2224312 - RNA, 19 nt, Homo sapiens
  misc_RNA (1)...(19): siRNA sense strand
gacagaaagauguagacaa

SEQ ID NO: 2224313 - RNA, 19 nt, Homo sapiens
  misc_RNA (1)...(19): siRNA sense strand
auugaaacgacuugggauu

SEQ ID NO: 2224314 - RNA, 19 nt, Homo sapiens
  misc_RNA (1)...(19): siRNA sense strand
agauagaauugggagacua

SEQ ID NO: 2224315 - RNA, 19 nt, Homo sapiens
  misc_RNA (1)...(19): siRNA sense strand
ugguauggguaaugaaguu

SEQ ID NO: 2224316 - RNA, 19 nt, Homo sapiens
  misc_RNA (1)...(19): siRNA sense strand
uugaugagaaugagaguuu

SEQ ID NO: 2224317 - RNA, 19 nt, Homo sapiens
  misc_RNA (1)...(19): siRNA sense strand
ggagagaaaagcugaagaa

SEQ ID NO: 2224318 - RNA, 19 nt, Homo sapiens
  misc_RNA (1)...(19): siRNA sense strand
agagaaaagcugaagaaga

SEQ ID NO: 2224319 - RNA, 19 nt, Homo sapiens
  misc_RNA (1)...(19): siRNA sense strand
ggccgauguacauggaaua

SEQ ID NO: 2224320 - RNA, 19 nt, Homo sapiens
  misc_RNA (1)...(19): siRNA sense strand
ggagaguaacagaauguau

SEQ ID NO: 2224321 - RNA, 19 nt, Homo sapiens
  misc_RNA (1)...(19): siRNA sense strand
uguaacaagucuucaucaa

SEQ ID NO: 2224322 - RNA, 19 nt, Homo sapiens
  misc_RNA (1)...(19): siRNA sense strand
ggguacaaacagagaguuc

SEQ ID NO: 2224323 - RNA, 19 nt, Homo sapiens
  misc_RNA (1)...(19): siRNA sense strand
agaggagaacggagagaca

SEQ ID NO: 2224324 - RNA, 19 nt, Homo sapiens
  misc_RNA (1)...(19): siRNA sense strand
ccugauuguuugucgaaga

SEQ ID NO: 2224325 - RNA, 19 nt, Homo sapiens
  misc_RNA (1)...(19): siRNA sense strand
agaaaguugacaaagacaa

SEQ ID NO: 2224326 - RNA, 19 nt, Homo sapiens
  misc_RNA (1)...(19): siRNA sense strand
acaaagacaacgaagacuu

SEQ ID NO: 2224327 - RNA, 19 nt, Homo sapiens
  misc_RNA (1)...(19): siRNA sense strand
aggaaaucaucuggaacua

SEQ ID NO: 2224328 - RNA, 19 nt, Homo sapiens
  misc_RNA (1)...(19): siRNA sense strand
agauauauucacugggcuu

SEQ ID NO: 2224329 - RNA, 19 nt, Homo sapiens
  misc_RNA (1)...(19): siRNA sense strand
guggagaggagaacggaga

SEQ ID NO: 2224330 - RNA, 19 nt, Homo sapiens
  misc_RNA (1)...(19): siRNA sense strand
ccacauugaugcuccaaaa

SEQ ID NO: 2224331 - RNA, 19 nt, Homo sapiens
  misc_RNA (1)...(19): siRNA sense strand
gaguaaccuuccauaacaa

SEQ ID NO: 2224332 - RNA, 19 nt, Homo sapiens
  misc_RNA (1)...(19): siRNA sense strand
acugguaucugaugggaau

SEQ ID NO: 2224333 - RNA, 19 nt, Homo sapiens
  misc_RNA (1)...(19): siRNA sense strand
ucugaaagccgguuugcaa

SEQ ID NO: 2224334 - RNA, 19 nt, Homo sapiens
  misc_RNA (1)...(19): siRNA sense strand
caagaaaggaaguuuacau

SEQ ID NO: 2224335 - RNA, 19 nt, Homo sapiens
  misc_RNA (1)...(19): siRNA sense strand
gggcaagcacugacuaaca

SEQ ID NO: 2224336 - RNA, 19 nt, Homo sapiens
  misc_RNA (1)...(19): siRNA sense strand
aggagaacggagagacaca

SEQ ID NO: 2224337 - RNA, 19 nt, Homo sapiens
  misc_RNA (1)...(19): siRNA sense strand
uuacaagagcagaauguuu

SEQ ID NO: 2224338 - RNA, 19 nt, Homo sapiens
  misc_RNA (1)...(19): siRNA sense strand
gggaauucuagguccacaa

SEQ ID NO: 2224339 - RNA, 19 nt, Homo sapiens
  misc_RNA (1)...(19): siRNA sense strand
guaaugaaguugaugugca

SEQ ID NO: 2224340 - RNA, 19 nt, Homo sapiens
  misc_RNA (1)...(19): siRNA sense strand
cagcaaaccucuucccuca

SEQ ID NO: 2224341 - RNA, 19 nt, Homo sapiens
  misc_RNA (1)...(19): siRNA sense strand
aaacauauugaccgagaau

SEQ ID NO: 2224342 - RNA, 19 nt, Homo sapiens
  misc_RNA (1)...(19): siRNA sense strand
gaggaaaucaucuggaacu

SEQ ID NO: 2224343 - RNA, 19 nt, Homo sapiens
  misc_RNA (1)...(19): siRNA sense strand
cacaagaauuggaggcucu

SEQ ID NO: 2224344 - RNA, 19 nt, Homo sapiens
  misc_RNA (1)...(19): siRNA sense strand
aagauguagacaaggaauu

SEQ ID NO: 2224345 - RNA, 19 nt, Homo sapiens
  misc_RNA (1)...(19): siRNA sense strand
cuaacaagaacuaccguau

SEQ ID NO: 2224346 - RNA, 19 nt, Homo sapiens
  misc_RNA (1)...(19): siRNA sense strand
agucuucaucaaaggauaa

SEQ ID NO: 2224347 - RNA, 19 nt, Homo sapiens
  misc_RNA (1)...(19): siRNA sense strand
ugaaaaugggauuggaaaa

SEQ ID NO: 2224348 - RNA, 19 nt, Homo sapiens
  misc_RNA (1)...(19): siRNA sense strand
guuucagagaggaggcaaa

SEQ ID NO: 2224349 - RNA, 19 nt, Homo sapiens
  misc_RNA (1)...(19): siRNA sense strand
agacauguuugaugccuua

SEQ ID NO: 2224350 - RNA, 19 nt, Homo sapiens
  misc_RNA (1)...(19): siRNA sense strand
cagcaaugggccagggcuu

SEQ ID NO: 2224351 - RNA, 19 nt, Homo sapiens
  misc_RNA (1)...(19): siRNA sense strand
ccucggaaauccaggcaca

SEQ ID NO: 2224352 - RNA, 19 nt, Homo sapiens
  misc_RNA (1)...(19): siRNA sense strand
acccaaaaucugaguauaa

SEQ ID NO: 2224353 - RNA, 19 nt, Homo sapiens
  misc_RNA (1)...(19): siRNA sense strand
ccuuagaagacauguuuga

SEQ ID NO: 2224354 - RNA, 19 nt, Homo sapiens
  misc_RNA (1)...(19): siRNA sense strand
gaaaagaacugcaugagca

SEQ ID NO: 2224355 - RNA, 19 nt, Homo sapiens
  misc_RNA (1)...(19): siRNA sense strand
gaauaaacauacaagcuac

SEQ ID NO: 2224356 - RNA, 19 nt, Homo sapiens
  misc_RNA (1)...(19): siRNA sense strand
uggacaaacagaauaaaca

SEQ ID NO: 2224357 - RNA, 19 nt, Homo sapiens
  misc_RNA (1)...(19): siRNA sense strand
ggaaaguggacucggcagu

SEQ ID NO: 2224358 - RNA, 19 nt, Homo sapiens
  misc_RNA (1)...(19): siRNA sense strand
ccacuugaacccugcaaaa

SEQ ID NO: 2224359 - RNA, 19 nt, Homo sapiens
  misc_RNA (1)...(19): siRNA sense strand
augaggagagccugaggaa

SEQ ID NO: 2224360 - RNA, 19 nt, Homo sapiens
  misc_RNA (1)...(19): siRNA sense strand
cuuucaauccugacccaaa

SEQ ID NO: 2224361 - RNA, 19 nt, Homo sapiens
  misc_RNA (1)...(19): siRNA sense strand
ggcaaugaggagagccuga

SEQ ID NO: 2224362 - RNA, 19 nt, Homo sapiens
  misc_RNA (1)...(19): siRNA sense strand
ugaccaaagaagcagcaau

SEQ ID NO: 2224363 - RNA, 19 nt, Homo sapiens
  misc_RNA (1)...(19): siRNA sense strand
ccaucaaaguggacagcca

SEQ ID NO: 2224364 - RNA, 19 nt, Homo sapiens
  misc_RNA (1)...(19): siRNA sense strand
ccgggaagaagauggaaau

SEQ ID NO: 2224365 - RNA, 19 nt, Homo sapiens
  misc_RNA (1)...(19): siRNA sense strand
aggaaacuggcguggagaa

SEQ ID NO: 2224366 - RNA, 19 nt, Homo sapiens
  misc_RNA (1)...(19): siRNA sense strand
uggagaagggagacuacaa

SEQ ID NO: 2224367 - RNA, 19 nt, Homo sapiens
  misc_RNA (1)...(19): siRNA sense strand
uggacagccaagagcacaa

SEQ ID NO: 2224368 - RNA, 19 nt, Homo sapiens
  misc_RNA (1)...(19): siRNA sense strand
caucaaaguggacagccaa

SEQ ID NO: 2224369 - RNA, 19 nt, Homo sapiens
  misc_RNA (1)...(19): siRNA sense strand
gcccauggcuaccaggaga

SEQ ID NO: 2224370 - RNA, 19 nt, Homo sapiens
  misc_RNA (1)...(19): siRNA sense strand
guucaaugcuuguggcugu

SEQ ID NO: 2224371 - RNA, 19 nt, Homo sapiens
  misc_RNA (1)...(19): siRNA sense strand
ccuccuaugacuuggaaau

SEQ ID NO: 2224372 - RNA, 19 nt, Homo sapiens
  misc_RNA (1)...(19): siRNA sense strand
ggaaauggauagugggucc

SEQ ID NO: 2224373 - RNA, 19 nt, Homo sapiens
  misc_RNA (1)...(19): siRNA sense strand
guuagugggagcagggauu

SEQ ID NO: 2224374 - RNA, 19 nt, Homo sapiens
  misc_RNA (1)...(19): siRNA sense strand
ucaaaauggaagugggaca

SEQ ID NO: 2224375 - RNA, 19 nt, Homo sapiens
  misc_RNA (1)...(19): siRNA sense strand
agcuacagaugaagaagaa

SEQ ID NO: 2224376 - RNA, 19 nt, Homo sapiens
  misc_RNA (1)...(19): siRNA sense strand
gugagagguuggugcgguu

SEQ ID NO: 2224377 - RNA, 19 nt, Homo sapiens
  misc_RNA (1)...(19): siRNA sense strand
ugugaaugcccgagucaau

SEQ ID NO: 2224378 - RNA, 19 nt, Homo sapiens
  misc_RNA (1)...(19): siRNA sense strand
gccagaugcaggaaaggaa

SEQ ID NO: 2224379 - RNA, 19 nt, Homo sapiens
  misc_RNA (1)...(19): siRNA sense strand
uuucaaaaccaucgagcua

SEQ ID NO: 2224380 - RNA, 19 nt, Homo sapiens
  misc_RNA (1)...(19): siRNA sense strand
agucagucugguacaaaua

SEQ ID NO: 2224381 - RNA, 19 nt, Homo sapiens
  misc_RNA (1)...(19): siRNA sense strand
aagaagaagggguucaaaa

SEQ ID NO: 2224382 - RNA, 19 nt, Homo sapiens
  misc_RNA (1)...(19): siRNA sense strand
ucgaaagagaauaaagaac

SEQ ID NO: 2224383 - RNA, 19 nt, Homo sapiens
  misc_RNA (1)...(19): siRNA sense strand
ggcagaccgcagagaguuu

SEQ ID NO: 2224384 - RNA, 19 nt, Homo sapiens
  misc_RNA (1)...(19): siRNA sense strand
ccgcagagaguuuggcugu

SEQ ID NO: 2224385 - RNA, 19 nt, Homo sapiens
  misc_RNA (1)...(19): siRNA sense strand
ccaacaaaacccuggaaaa

SEQ ID NO: 2224386 - RNA, 19 nt, Homo sapiens
  misc_RNA (1)...(19): siRNA sense strand
agaagaagcucuacgagga

SEQ ID NO: 2224387 - RNA, 19 nt, Homo sapiens
  misc_RNA (1)...(19): siRNA sense strand
ucauagacaaccugagcaa

SEQ ID NO: 2224388 - RNA, 19 nt, Homo sapiens
  misc_RNA (1)...(19): siRNA sense strand
gugaguuugcuguggacaa

SEQ ID NO: 2224389 - RNA, 19 nt, Homo sapiens
  misc_RNA (1)...(19): siRNA sense strand
guugaaugucauacagaau

SEQ ID NO: 2224390 - RNA, 19 nt, Homo sapiens
  misc_RNA (1)...(19): siRNA sense strand
aguucaugccugagcguuu

SEQ ID NO: 2224391 - RNA, 19 nt, Homo sapiens
  misc_RNA (1)...(19): siRNA sense strand
uggccaaggaggugcuuau

SEQ ID NO: 2224392 - RNA, 19 nt, Homo sapiens
  misc_RNA (1)...(19): siRNA sense strand
agaauuacaaugaaggcau

SEQ ID NO: 2224393 - RNA, 19 nt, Homo sapiens
  misc_RNA (1)...(19): siRNA sense strand
aggugaagaagaagcucua

SEQ ID NO: 2224394 - RNA, 19 nt, Homo sapiens
  misc_RNA (1)...(19): siRNA sense strand
aggagaaauuccggaguga

SEQ ID NO: 2224395 - RNA, 19 nt, Homo sapiens
  misc_RNA (1)...(19): siRNA sense strand
cuacagugauugucggcca

SEQ ID NO: 2224396 - RNA, 19 nt, Homo sapiens
  misc_RNA (1)...(19): siRNA sense strand
gcaaagacagccuggugga

SEQ ID NO: 2224397 - RNA, 19 nt, Homo sapiens
  misc_RNA (1)...(19): siRNA sense strand
ugaugcaagccaagaugaa

SEQ ID NO: 2224398 - RNA, 19 nt, Homo sapiens
  misc_RNA (1)...(19): siRNA sense strand
acaaugagaaggaguggca

SEQ ID NO: 2224399 - RNA, 19 nt, Homo sapiens
  misc_RNA (1)...(19): siRNA sense strand
cagcacaacaagagacaca

SEQ ID NO: 2224400 - RNA, 19 nt, Homo sapiens
  misc_RNA (1)...(19): siRNA sense strand
agagaaagauccaagagga

SEQ ID NO: 2224401 - RNA, 19 nt, Homo sapiens
  misc_RNA (1)...(19): siRNA sense strand
agaagauggucaaggagca

SEQ ID NO: 2224402 - RNA, 19 nt, Homo sapiens
  misc_RNA (1)...(19): siRNA sense strand
guguuaagugagaagguga

SEQ ID NO: 2224403 - RNA, 19 nt, Homo sapiens
  misc_RNA (1)...(19): siRNA sense strand
acacaaguuugaaaggcuu

SEQ ID NO: 2224404 - RNA, 19 nt, Homo sapiens
  misc_RNA (1)...(19): siRNA sense strand
gaagaauccaccagggcca

SEQ ID NO: 2224405 - RNA, 19 nt, Homo sapiens
  misc_RNA (1)...(19): siRNA sense strand
ccucuuuggagcuggguuu

SEQ ID NO: 2224406 - RNA, 19 nt, Homo sapiens
  misc_RNA (1)...(19): siRNA sense strand
gccuagucaaccugaauaa

SEQ ID NO: 2224407 - RNA, 19 nt, Homo sapiens
  misc_RNA (1)...(19): siRNA sense strand
aguaauggucagagcaugu

SEQ ID NO: 2224408 - RNA, 19 nt, Homo sapiens
  misc_RNA (1)...(19): siRNA sense strand
gagaaagauccaagaggag

SEQ ID NO: 2224409 - RNA, 19 nt, Homo sapiens
  misc_RNA (1)...(19): siRNA sense strand
agaucaaccaugaccagaa

SEQ ID NO: 2224410 - RNA, 19 nt, Homo sapiens
  misc_RNA (1)...(19): siRNA sense strand
ccuucauccuggagaccuu

SEQ ID NO: 2224411 - RNA, 19 nt, Homo sapiens
  misc_RNA (1)...(19): siRNA sense strand
acaugcugacccugggaaa

SEQ ID NO: 2224412 - RNA, 19 nt, Homo sapiens
  misc_RNA (1)...(19): siRNA sense strand
ccaagaacugcuuagccua

SEQ ID NO: 2224413 - RNA, 19 nt, Homo sapiens
  misc_RNA (1)...(19): siRNA sense strand
cccaaaugagccugcgaaa

SEQ ID NO: 2224414 - RNA, 19 nt, Homo sapiens
  misc_RNA (1)...(19): siRNA sense strand
cagcucgauucuuggacaa

SEQ ID NO: 2224415 - RNA, 19 nt, Homo sapiens
  misc_RNA (1)...(19): siRNA sense strand
ccuugauagugcuguccaa

SEQ ID NO: 2224416 - RNA, 19 nt, Homo sapiens
  misc_RNA (1)...(19): siRNA sense strand
gcgacaugauggacgccuu

SEQ ID NO: 2224417 - RNA, 19 nt, Homo sapiens
  misc_RNA (1)...(19): siRNA sense strand
acaccucugucuugggcua

SEQ ID NO: 2224418 - RNA, 19 nt, Homo sapiens
  misc_RNA (1)...(19): siRNA sense strand
gaacuuugauccagcucga

SEQ ID NO: 2224419 - RNA, 19 nt, Homo sapiens
  misc_RNA (1)...(19): siRNA sense strand
gagacaagaucaaggacga

SEQ ID NO: 2224420 - RNA, 19 nt, Homo sapiens
  misc_RNA (1)...(19): siRNA sense strand
ggcaagaacuccagagcuc

SEQ ID NO: 2224421 - RNA, 19 nt, Homo sapiens
  misc_RNA (1)...(19): siRNA sense strand
agaucaaggacgacaacuu

SEQ ID NO: 2224422 - RNA, 19 nt, Homo sapiens
  misc_RNA (1)...(19): siRNA sense strand
gcacauggcugcaguggac

SEQ ID NO: 2224423 - RNA, 19 nt, Homo sapiens
  misc_RNA (1)...(19): siRNA sense strand
uggccauugaggaggaauu

SEQ ID NO: 2224424 - RNA, 19 nt, Homo sapiens
  misc_RNA (1)...(19): siRNA sense strand
gugcugaacuccaagagga

SEQ ID NO: 2224425 - RNA, 19 nt, Homo sapiens
  misc_RNA (1)...(19): siRNA sense strand
ccauggagccaguggugga

SEQ ID NO: 2224426 - RNA, 19 nt, Homo sapiens
  misc_RNA (1)...(19): siRNA sense strand
aggaggagcuagaccacga

SEQ ID NO: 2224427 - RNA, 19 nt, Homo sapiens
  misc_RNA (1)...(19): siRNA sense strand
acaagaucaaggacgacaa

SEQ ID NO: 2224428 - RNA, 19 nt, Homo sapiens
  misc_RNA (1)...(19): siRNA sense strand
ccuucggagacaagaucaa

SEQ ID NO: 2224429 - RNA, 19 nt, Homo sapiens
  misc_RNA (1)...(19): siRNA sense strand
gcacagucaucauuccgaa

SEQ ID NO: 2224430 - RNA, 19 nt, Homo sapiens
  misc_RNA (1)...(19): siRNA sense strand
uggacaaagccgugagcaa

SEQ ID NO: 2224431 - RNA, 19 nt, Homo sapiens
  misc_RNA (1)...(19): siRNA sense strand
gcaacuugggccugggcaa

SEQ ID NO: 2224432 - RNA, 19 nt, Homo sapiens
  misc_RNA (1)...(19): siRNA sense strand
gcaagaagucgcuggagca

SEQ ID NO: 2224433 - RNA, 19 nt, Homo sapiens
  misc_RNA (1)...(19): siRNA sense strand
acaucgaaguacagggcuu

SEQ ID NO: 2224434 - RNA, 19 nt, Homo sapiens
  misc_RNA (1)...(19): siRNA sense strand
cagagauggagaaggccaa

SEQ ID NO: 2224435 - RNA, 19 nt, Homo sapiens
  misc_RNA (1)...(19): siRNA sense strand
gcagagauggagaaggcca

SEQ ID NO: 2224436 - RNA, 19 nt, Homo sapiens
  misc_RNA (1)...(19): siRNA sense strand
gaugagaaccugugcauag

SEQ ID NO: 2224437 - RNA, 19 nt, Homo sapiens
  misc_RNA (1)...(19): siRNA sense strand
ugaaggaggagucgggcuu

SEQ ID NO: 2224438 - RNA, 19 nt, Homo sapiens
  misc_RNA (1)...(19): siRNA sense strand
uugugaagccggaggccuu

SEQ ID NO: 2224439 - RNA, 19 nt, Homo sapiens
  misc_RNA (1)...(19): siRNA sense strand
ccuuaugaauugaggacga

SEQ ID NO: 2224440 - RNA, 19 nt, Homo sapiens
  misc_RNA (1)...(19): siRNA sense strand
cguagaucaaacagugaaa

SEQ ID NO: 2224441 - RNA, 19 nt, Homo sapiens
  misc_RNA (1)...(19): siRNA sense strand
cugcaagacuuuaaaggca

SEQ ID NO: 2224442 - RNA, 19 nt, Homo sapiens
  misc_RNA (1)...(19): siRNA sense strand
ugcaagacuuuaaaggcaa

SEQ ID NO: 2224443 - RNA, 19 nt, Homo sapiens
  misc_RNA (1)...(19): siRNA sense strand
ccacggaccagaagagcga

SEQ ID NO: 2224444 - RNA, 19 nt, Homo sapiens
  misc_RNA (1)...(19): siRNA sense strand
caucaaagggauuggagcu

SEQ ID NO: 2224445 - RNA, 19 nt, Homo sapiens
  misc_RNA (1)...(19): siRNA sense strand
gauuggagcuggagggagc

SEQ ID NO: 2224446 - RNA, 19 nt, Homo sapiens
  misc_RNA (1)...(19): siRNA sense strand
aggaacaagaggagcagga

SEQ ID NO: 2224447 - RNA, 19 nt, Homo sapiens
  misc_RNA (1)...(19): siRNA sense strand
cgauggaaacucagggaag

SEQ ID NO: 2224448 - RNA, 19 nt, Homo sapiens
  misc_RNA (1)...(19): siRNA sense strand
gaacaagaggagcaggagu

SEQ ID NO: 2224449 - RNA, 19 nt, Homo sapiens
  misc_RNA (1)...(19): siRNA sense strand
ccaagaagcucugugcgaa

SEQ ID NO: 2224450 - RNA, 19 nt, Homo sapiens
  misc_RNA (1)...(19): siRNA sense strand
caggagacaacguggggaa

SEQ ID NO: 2224451 - RNA, 19 nt, Homo sapiens
  misc_RNA (1)...(19): siRNA sense strand
gccaagaagcucugugcga

SEQ ID NO: 2224452 - RNA, 19 nt, Homo sapiens
  misc_RNA (1)...(19): siRNA sense strand
ccagaaacccagaagaccu

SEQ ID NO: 2224453 - RNA, 19 nt, Homo sapiens
  misc_RNA (1)...(19): siRNA sense strand
ugcugaacauggacggcaa

SEQ ID NO: 2224454 - RNA, 19 nt, Homo sapiens
  misc_RNA (1)...(19): siRNA sense strand
caaagggauuggagcugga

SEQ ID NO: 2224455 - RNA, 19 nt, Homo sapiens
  misc_RNA (1)...(19): siRNA sense strand
cagugaagucugugggcau

SEQ ID NO: 2224456 - RNA, 19 nt, Homo sapiens
  misc_RNA (1)...(19): siRNA sense strand
gcgaugaugacaagggcuu

SEQ ID NO: 2224457 - RNA, 19 nt, Homo sapiens
  misc_RNA (1)...(19): siRNA sense strand
cucaguaccuggagagcau

SEQ ID NO: 2224458 - RNA, 19 nt, Homo sapiens
  misc_RNA (1)...(19): siRNA sense strand
caugaucgcgggagggaca

SEQ ID NO: 2224459 - RNA, 19 nt, Homo sapiens
  misc_RNA (1)...(19): siRNA sense strand
cggccagggcuucgugaau

SEQ ID NO: 2224460 - RNA, 19 nt, Homo sapiens
  misc_RNA (1)...(19): siRNA sense strand
cuggaggaacucaggaaca

SEQ ID NO: 2224461 - RNA, 19 nt, Homo sapiens
  misc_RNA (1)...(19): siRNA sense strand
gcuucgugaaugaggagau

SEQ ID NO: 2224462 - RNA, 19 nt, Homo sapiens
  misc_RNA (1)...(19): siRNA sense strand
cagugaagucugugggcau

SEQ ID NO: 2224463 - RNA, 19 nt, Homo sapiens
  misc_RNA (1)...(19): siRNA sense strand
gcgaugaugacaagggcuu

SEQ ID NO: 2224464 - RNA, 19 nt, Homo sapiens
  misc_RNA (1)...(19): siRNA sense strand
cucaguaccuggagagcau

SEQ ID NO: 2224465 - RNA, 19 nt, Homo sapiens
  misc_RNA (1)...(19): siRNA sense strand
caugaucgcgggagggaca

SEQ ID NO: 2224466 - RNA, 19 nt, Homo sapiens
  misc_RNA (1)...(19): siRNA sense strand
cggccagggcuucgugaau

SEQ ID NO: 2224467 - RNA, 19 nt, Homo sapiens
  misc_RNA (1)...(19): siRNA sense strand
cuggaggaacucaggaaca

SEQ ID NO: 2224468 - RNA, 19 nt, Homo sapiens
  misc_RNA (1)...(19): siRNA sense strand
gcuucgugaaugaggagau

SEQ ID NO: 2224469 - RNA, 19 nt, Homo sapiens
  misc_RNA (1)...(19): siRNA sense strand
aguugaaagaagaggguau

SEQ ID NO: 2224470 - RNA, 19 nt, Homo sapiens
  misc_RNA (1)...(19): siRNA sense strand
uguuauuggugcaggagua

SEQ ID NO: 2224471 - RNA, 19 nt, Homo sapiens
  misc_RNA (1)...(19): siRNA sense strand
ucgaauaucucauggccua

SEQ ID NO: 2224472 - RNA, 19 nt, Homo sapiens
  misc_RNA (1)...(19): siRNA sense strand
uggaaagauaacuggcaaa

SEQ ID NO: 2224473 - RNA, 19 nt, Homo sapiens
  misc_RNA (1)...(19): siRNA sense strand
gaguaauagguguagaauu

SEQ ID NO: 2224474 - RNA, 19 nt, Homo sapiens
  misc_RNA (1)...(19): siRNA sense strand
agguagaauuccagucaau

SEQ ID NO: 2224475 - RNA, 19 nt, Homo sapiens
  misc_RNA (1)...(19): siRNA sense strand
aguacaaaguugggaaauu

SEQ ID NO: 2224476 - RNA, 19 nt, Homo sapiens
  misc_RNA (1)...(19): siRNA sense strand
cgauagaugaagauacaau

SEQ ID NO: 2224477 - RNA, 19 nt, Homo sapiens
  misc_RNA (1)...(19): siRNA sense strand
gacuagaagagcugggaau

SEQ ID NO: 2224478 - RNA, 19 nt, Homo sapiens
  misc_RNA (1)...(19): siRNA sense strand
aagcagaggaugaaggcau

SEQ ID NO: 2224479 - RNA, 19 nt, Homo sapiens
  misc_RNA (1)...(19): siRNA sense strand
cugugaagauauagcuaga

SEQ ID NO: 2224480 - RNA, 19 nt, Homo sapiens
  misc_RNA (1)...(19): siRNA sense strand
aggaguaauagguguagaa

SEQ ID NO: 2224481 - RNA, 19 nt, Homo sapiens
  misc_RNA (1)...(19): siRNA sense strand
gugcuggagaaaugguaaa

SEQ ID NO: 2224482 - RNA, 19 nt, Homo sapiens
  misc_RNA (1)...(19): siRNA sense strand
agaagaggguauugaguac

SEQ ID NO: 2224483 - RNA, 19 nt, Homo sapiens
  misc_RNA (1)...(19): siRNA sense strand
acagcagagcuaagacaaa

SEQ ID NO: 2224484 - RNA, 19 nt, Homo sapiens
  misc_RNA (1)...(19): siRNA sense strand
gguuauugauacaaagaac

SEQ ID NO: 2224485 - RNA, 19 nt, Homo sapiens
  misc_RNA (1)...(19): siRNA sense strand
caagaagucagauggaaaa

SEQ ID NO: 2224486 - RNA, 19 nt, Homo sapiens
  misc_RNA (1)...(19): siRNA sense strand
gugguaaagcugaaguuau

SEQ ID NO: 2224487 - RNA, 19 nt, Homo sapiens
  misc_RNA (1)...(19): siRNA sense strand
aaucagaagagcaguugaa

SEQ ID NO: 2224488 - RNA, 19 nt, Homo sapiens
  misc_RNA (1)...(19): siRNA sense strand
cucacaaagcagaggauga

SEQ ID NO: 2224489 - RNA, 19 nt, Homo sapiens
  misc_RNA (1)...(19): siRNA sense strand
acacagauggcauggugaa

SEQ ID NO: 2224490 - RNA, 19 nt, Homo sapiens
  misc_RNA (1)...(19): siRNA sense strand
aggcauuaucuguguugaa

SEQ ID NO: 2224491 - RNA, 19 nt, Homo sapiens
  misc_RNA (1)...(19): siRNA sense strand
agucaauaccagauuucaa

SEQ ID NO: 2224492 - RNA, 19 nt, Homo sapiens
  misc_RNA (1)...(19): siRNA sense strand
agcuuuaacagguggaauu

SEQ ID NO: 2224493 - RNA, 19 nt, Homo sapiens
  misc_RNA (1)...(19): siRNA sense strand
auggaaagauaacuggcaa

SEQ ID NO: 2224494 - RNA, 19 nt, Homo sapiens
  misc_RNA (1)...(19): siRNA sense strand
ugaguacaaaguugggaaa

SEQ ID NO: 2224495 - RNA, 19 nt, Homo sapiens
  misc_RNA (1)...(19): siRNA sense strand
cuugaauguugguuguauu

SEQ ID NO: 2224496 - RNA, 19 nt, Homo sapiens
  misc_RNA (1)...(19): siRNA sense strand
ugaagauacaauaguguca

SEQ ID NO: 2224497 - RNA, 19 nt, Homo sapiens
  misc_RNA (1)...(19): siRNA sense strand
gguaaaugaagcugcucuu

SEQ ID NO: 2224498 - RNA, 19 nt, Homo sapiens
  misc_RNA (1)...(19): siRNA sense strand
aggauauguugcugcuauu

SEQ ID NO: 2224499 - RNA, 19 nt, Homo sapiens
  misc_RNA (1)...(19): siRNA sense strand
ggaaagauaacuggcaaaa

SEQ ID NO: 2224500 - RNA, 19 nt, Homo sapiens
  misc_RNA (1)...(19): siRNA sense strand
uagacaagaugauggagca

SEQ ID NO: 2224501 - RNA, 19 nt, Homo sapiens
  misc_RNA (1)...(19): siRNA sense strand
uggaaucacgauagaugaa

SEQ ID NO: 2224502 - RNA, 19 nt, Homo sapiens
  misc_RNA (1)...(19): siRNA sense strand
uguagguggaguuggaauu

SEQ ID NO: 2224503 - RNA, 19 nt, Homo sapiens
  misc_RNA (1)...(19): siRNA sense strand
aguuauagguucugguccu

SEQ ID NO: 2224504 - RNA, 19 nt, Homo sapiens
  misc_RNA (1)...(19): siRNA sense strand
gagcuaagacaaaugcuga

SEQ ID NO: 2224505 - RNA, 19 nt, Homo sapiens
  misc_RNA (1)...(19): siRNA sense strand
gauuuugcaucuagaggaa

SEQ ID NO: 2224506 - RNA, 19 nt, Homo sapiens
  misc_RNA (1)...(19): siRNA sense strand
gugcaggaguaauaggugu

SEQ ID NO: 2224507 - RNA, 19 nt, Homo sapiens
  misc_RNA (1)...(19): siRNA sense strand
aggaauggcugguggugcu

SEQ ID NO: 2224508 - RNA, 19 nt, Homo sapiens
  misc_RNA (1)...(19): siRNA sense strand
uggagaaaugguaaaugaa

SEQ ID NO: 2224509 - RNA, 19 nt, Homo sapiens
  misc_RNA (1)...(19): siRNA sense strand
gguuguuauuggugcagga

SEQ ID NO: 2224510 - RNA, 19 nt, Homo sapiens
  misc_RNA (1)...(19): siRNA sense strand
ggacuagaagagcugggaa

SEQ ID NO: 2224511 - RNA, 19 nt, Homo sapiens
  misc_RNA (1)...(19): siRNA sense strand
cuaaggcuuuauugaacaa

SEQ ID NO: 2224512 - RNA, 19 nt, Homo sapiens
  misc_RNA (1)...(19): siRNA sense strand
augucaauggauauggaaa

SEQ ID NO: 2224513 - RNA, 19 nt, Homo sapiens
  misc_RNA (1)...(19): siRNA sense strand
gacagucugcauugagaaa

SEQ ID NO: 2224514 - RNA, 19 nt, Homo sapiens
  misc_RNA (1)...(19): siRNA sense strand
aaaugaaacacuuggugga

SEQ ID NO: 2224515 - RNA, 19 nt, Homo sapiens
  misc_RNA (1)...(19): siRNA sense strand
uuacuaagaauuugggacu

SEQ ID NO: 2224516 - RNA, 19 nt, Homo sapiens
  misc_RNA (1)...(19): siRNA sense strand
gagaaaugguaaaugaagc

SEQ ID NO: 2224517 - RNA, 19 nt, Homo sapiens
  misc_RNA (1)...(19): siRNA sense strand
cgaccuuaucagaagcuuu

SEQ ID NO: 2224518 - RNA, 19 nt, Homo sapiens
  misc_RNA (1)...(19): siRNA sense strand
ugauguaguugcuggucca

SEQ ID NO: 2224519 - RNA, 19 nt, Homo sapiens
  misc_RNA (1)...(19): siRNA sense strand
agcagaggaugaaggcauu

SEQ ID NO: 2224520 - RNA, 19 nt, Homo sapiens
  misc_RNA (1)...(19): siRNA sense strand
cuucuaaggcuuuauugaa

SEQ ID NO: 2224521 - RNA, 19 nt, Homo sapiens
  misc_RNA (1)...(19): siRNA sense strand
ugucaauggauauggaaag

SEQ ID NO: 2224522 - RNA, 19 nt, Homo sapiens
  misc_RNA (1)...(19): siRNA sense strand
uuaucuguguugaaggaau

SEQ ID NO: 2224523 - RNA, 19 nt, Homo sapiens
  misc_RNA (1)...(19): siRNA sense strand
ggccauuucaaucgaauau

SEQ ID NO: 2224524 - RNA, 19 nt, Homo sapiens
  misc_RNA (1)...(19): siRNA sense strand
agacaagaaacauuggaaa

SEQ ID NO: 2224525 - RNA, 19 nt, Homo sapiens
  misc_RNA (1)...(19): siRNA sense strand
gauuagacugaaagaacaa

SEQ ID NO: 2224526 - RNA, 19 nt, Homo sapiens
  misc_RNA (1)...(19): siRNA sense strand
gguuuaaguacuucugaaa

SEQ ID NO: 2224527 - RNA, 19 nt, Homo sapiens
  misc_RNA (1)...(19): siRNA sense strand
guaaagauaauuugcggua

SEQ ID NO: 2224528 - RNA, 19 nt, Homo sapiens
  misc_RNA (1)...(19): siRNA sense strand
ggcuaugauugaugaagaa

SEQ ID NO: 2224529 - RNA, 19 nt, Homo sapiens
  misc_RNA (1)...(19): siRNA sense strand
guguaucaacugugguaaa

SEQ ID NO: 2224530 - RNA, 19 nt, Homo sapiens
  misc_RNA (1)...(19): siRNA sense strand
gacaagaaacauuggaaaa

SEQ ID NO: 2224531 - RNA, 19 nt, Homo sapiens
  misc_RNA (1)...(19): siRNA sense strand
ccugauaagaacugcuuua

SEQ ID NO: 2224532 - RNA, 19 nt, Homo sapiens
  misc_RNA (1)...(19): siRNA sense strand
cugugaauccgguguguua

SEQ ID NO: 2224533 - RNA, 19 nt, Homo sapiens
  misc_RNA (1)...(19): siRNA sense strand
cggccaagaaauuagacaa

SEQ ID NO: 2224534 - RNA, 19 nt, Homo sapiens
  misc_RNA (1)...(19): siRNA sense strand
gcaagaugaaacuggaaaa

SEQ ID NO: 2224535 - RNA, 19 nt, Homo sapiens
  misc_RNA (1)...(19): siRNA sense strand
aaagaagccuugagcccua

SEQ ID NO: 2224536 - RNA, 19 nt, Homo sapiens
  misc_RNA (1)...(19): siRNA sense strand
caagaaaaucauagcagaa

SEQ ID NO: 2224537 - RNA, 19 nt, Homo sapiens
  misc_RNA (1)...(19): siRNA sense strand
acggaagguuauaguaaaa

SEQ ID NO: 2224538 - RNA, 19 nt, Homo sapiens
  misc_RNA (1)...(19): siRNA sense strand
cugagugauccuaaaguaa

SEQ ID NO: 2224539 - RNA, 19 nt, Homo sapiens
  misc_RNA (1)...(19): siRNA sense strand
caguggaaucggugaauga

SEQ ID NO: 2224540 - RNA, 19 nt, Homo sapiens
  misc_RNA (1)...(19): siRNA sense strand
cuauugaucugguggacau

SEQ ID NO: 2224541 - RNA, 19 nt, Homo sapiens
  misc_RNA (1)...(19): siRNA sense strand
gcugcauauuggugucaaa

SEQ ID NO: 2224542 - RNA, 19 nt, Homo sapiens
  misc_RNA (1)...(19): siRNA sense strand
ucacugaacuaaaggcuga

SEQ ID NO: 2224543 - RNA, 19 nt, Homo sapiens
  misc_RNA (1)...(19): siRNA sense strand
agauuagacugaaagaaca

SEQ ID NO: 2224544 - RNA, 19 nt, Homo sapiens
  misc_RNA (1)...(19): siRNA sense strand
uuuaaauccucgaacacaa

SEQ ID NO: 2224545 - RNA, 19 nt, Homo sapiens
  misc_RNA (1)...(19): siRNA sense strand
cauuaauauugguggauug

SEQ ID NO: 2224546 - RNA, 19 nt, Homo sapiens
  misc_RNA (1)...(19): siRNA sense strand
ugauaaggacauugugaca

SEQ ID NO: 2224547 - RNA, 19 nt, Homo sapiens
  misc_RNA (1)...(19): siRNA sense strand
ccuuggaacauuuggugaa

SEQ ID NO: 2224548 - RNA, 19 nt, Homo sapiens
  misc_RNA (1)...(19): siRNA sense strand
gagugauccuaaaguaaaa

SEQ ID NO: 2224549 - RNA, 19 nt, Homo sapiens
  misc_RNA (1)...(19): siRNA sense strand
uggcuaugauugaugaaga

SEQ ID NO: 2224550 - RNA, 19 nt, Homo sapiens
  misc_RNA (1)...(19): siRNA sense strand
uguucaucgucuucagaaa

SEQ ID NO: 2224551 - RNA, 19 nt, Homo sapiens
  misc_RNA (1)...(19): siRNA sense strand
caucagugccuuugguuca

SEQ ID NO: 2224552 - RNA, 19 nt, Homo sapiens
  misc_RNA (1)...(19): siRNA sense strand
ccggauugaaguuuauaaa

SEQ ID NO: 2224553 - RNA, 19 nt, Homo sapiens
  misc_RNA (1)...(19): siRNA sense strand
ucugaaaagcauugaagaa

SEQ ID NO: 2224554 - RNA, 19 nt, Homo sapiens
  misc_RNA (1)...(19): siRNA sense strand
ggaaaagaaauccugauaa

SEQ ID NO: 2224555 - RNA, 19 nt, Homo sapiens
  misc_RNA (1)...(19): siRNA sense strand
gggauugcaaagcgaacua

SEQ ID NO: 2224556 - RNA, 19 nt, Homo sapiens
  misc_RNA (1)...(19): siRNA sense strand
caaggauguaauaggaaaa

SEQ ID NO: 2224557 - RNA, 19 nt, Homo sapiens
  misc_RNA (1)...(19): siRNA sense strand
gguaaaugcuacaugaccu

SEQ ID NO: 2224558 - RNA, 19 nt, Homo sapiens
  misc_RNA (1)...(19): siRNA sense strand
gauccagaaacuaugcaaa

SEQ ID NO: 2224559 - RNA, 19 nt, Homo sapiens
  misc_RNA (1)...(19): siRNA sense strand
ugucagaagagcuguccaa

SEQ ID NO: 2224560 - RNA, 19 nt, Homo sapiens
  misc_RNA (1)...(19): siRNA sense strand
auguguagguggaugcaau

SEQ ID NO: 2224561 - RNA, 19 nt, Homo sapiens
  misc_RNA (1)...(19): siRNA sense strand
aguaaaaggugggagaauu

SEQ ID NO: 2224562 - RNA, 19 nt, Homo sapiens
  misc_RNA (1)...(19): siRNA sense strand
cauguauggcccuggacaa

SEQ ID NO: 2224563 - RNA, 19 nt, Homo sapiens
  misc_RNA (1)...(19): siRNA sense strand
gguauuugcagguggugau

SEQ ID NO: 2224564 - RNA, 19 nt, Homo sapiens
  misc_RNA (1)...(19): siRNA sense strand
caucacaaguauugcaaac

SEQ ID NO: 2224565 - RNA, 19 nt, Homo sapiens
  misc_RNA (1)...(19): siRNA sense strand
aaguagauccagaaacuau

SEQ ID NO: 2224566 - RNA, 19 nt, Homo sapiens
  misc_RNA (1)...(19): siRNA sense strand
cuacaguggaaucggugaa

SEQ ID NO: 2224567 - RNA, 19 nt, Homo sapiens
  misc_RNA (1)...(19): siRNA sense strand
aaucggugaaugauggaaa

SEQ ID NO: 2224568 - RNA, 19 nt, Homo sapiens
  misc_RNA (1)...(19): siRNA sense strand
uagagcaaguuguggcuau

SEQ ID NO: 2224569 - RNA, 19 nt, Homo sapiens
  misc_RNA (1)...(19): siRNA sense strand
ugugagaagcuggagaaua

SEQ ID NO: 2224570 - RNA, 19 nt, Homo sapiens
  misc_RNA (1)...(19): siRNA sense strand
cccaaaugucacugauauu

SEQ ID NO: 2224571 - RNA, 19 nt, Homo sapiens
  misc_RNA (1)...(19): siRNA sense strand
cugaagagggacccauuaa

SEQ ID NO: 2224572 - RNA, 19 nt, Homo sapiens
  misc_RNA (1)...(19): siRNA sense strand
acuuggagcuggagacacu

SEQ ID NO: 2224573 - RNA, 19 nt, Homo sapiens
  misc_RNA (1)...(19): siRNA sense strand
gagcaagaugaaacuggaa

SEQ ID NO: 2224574 - RNA, 19 nt, Homo sapiens
  misc_RNA (1)...(19): siRNA sense strand
gggacagcaaucagaccua

SEQ ID NO: 2224575 - RNA, 19 nt, Homo sapiens
  misc_RNA (1)...(19): siRNA sense strand
ugggaaacuuaaagggaau

SEQ ID NO: 2224576 - RNA, 19 nt, Homo sapiens
  misc_RNA (1)...(19): siRNA sense strand
cagcuuuagcauugggaaa

SEQ ID NO: 2224577 - RNA, 19 nt, Homo sapiens
  misc_RNA (1)...(19): siRNA sense strand
agauagaaguacuggacca

SEQ ID NO: 2224578 - RNA, 19 nt, Homo sapiens
  misc_RNA (1)...(19): siRNA sense strand
cacaaauagagaagacuaa

SEQ ID NO: 2224579 - RNA, 19 nt, Homo sapiens
  misc_RNA (1)...(19): siRNA sense strand
cguucuagccauuggauuu

SEQ ID NO: 2224580 - RNA, 19 nt, Homo sapiens
  misc_RNA (1)...(19): siRNA sense strand
cacaaaaggccaagagaau

SEQ ID NO: 2224581 - RNA, 19 nt, Homo sapiens
  misc_RNA (1)...(19): siRNA sense strand
ccacaaaaggccaagagaa

SEQ ID NO: 2224582 - RNA, 19 nt, Homo sapiens
  misc_RNA (1)...(19): siRNA sense strand
uggaguauucagaggauuu

SEQ ID NO: 2224583 - RNA, 19 nt, Homo sapiens
  misc_RNA (1)...(19): siRNA sense strand
cugacgaagagcuggacaa

SEQ ID NO: 2224584 - RNA, 19 nt, Homo sapiens
  misc_RNA (1)...(19): siRNA sense strand
gcuaauauuggaagaacca

SEQ ID NO: 2224585 - RNA, 19 nt, Homo sapiens
  misc_RNA (1)...(19): siRNA sense strand
cauaaauacaaauggagga

SEQ ID NO: 2224586 - RNA, 19 nt, Homo sapiens
  misc_RNA (1)...(19): siRNA sense strand
cgugauugcagcaggugua

SEQ ID NO: 2224587 - RNA, 19 nt, Homo sapiens
  misc_RNA (1)...(19): siRNA sense strand
guuuaaucccagucaggaa

SEQ ID NO: 2224588 - RNA, 19 nt, Homo sapiens
  misc_RNA (1)...(19): siRNA sense strand
cuggaugacgagaggguga

SEQ ID NO: 2224589 - RNA, 19 nt, Homo sapiens
  misc_RNA (1)...(19): siRNA sense strand
aguuaauagccuugggacu

SEQ ID NO: 2224590 - RNA, 19 nt, Homo sapiens
  misc_RNA (1)...(19): siRNA sense strand
ugguaucagcacagggauu

SEQ ID NO: 2224591 - RNA, 19 nt, Homo sapiens
  misc_RNA (1)...(19): siRNA sense strand
uugggaaacuuaaagggaa

SEQ ID NO: 2224592 - RNA, 19 nt, Homo sapiens
  misc_RNA (1)...(19): siRNA sense strand
cuuaaagaaugguugcuca

SEQ ID NO: 2224593 - RNA, 19 nt, Homo sapiens
  misc_RNA (1)...(19): siRNA sense strand
uugagaagcuuaaccggua

SEQ ID NO: 2224594 - RNA, 19 nt, Homo sapiens
  misc_RNA (1)...(19): siRNA sense strand
ggguauaugaggugccagu

SEQ ID NO: 2224595 - RNA, 19 nt, Homo sapiens
  misc_RNA (1)...(19): siRNA sense strand
aagaaauaaaucagcgcuu

SEQ ID NO: 2224596 - RNA, 19 nt, Homo sapiens
  misc_RNA (1)...(19): siRNA sense strand
caagaauuuaucaggauca

SEQ ID NO: 2224597 - RNA, 19 nt, Homo sapiens
  misc_RNA (1)...(19): siRNA sense strand
ugagccagaaggagugaaa

SEQ ID NO: 2224598 - RNA, 19 nt, Homo sapiens
  misc_RNA (1)...(19): siRNA sense strand
cggcacuuccagacacaua

SEQ ID NO: 2224599 - RNA, 19 nt, Homo sapiens
  misc_RNA (1)...(19): siRNA sense strand
ccaaaacaccguaggagau

SEQ ID NO: 2224600 - RNA, 19 nt, Homo sapiens
  misc_RNA (1)...(19): siRNA sense strand
guuuaaaguggcugugguu

SEQ ID NO: 2224601 - RNA, 19 nt, Homo sapiens
  misc_RNA (1)...(19): siRNA sense strand
cagaggauuugcugggagu

SEQ ID NO: 2224602 - RNA, 19 nt, Homo sapiens
  misc_RNA (1)...(19): siRNA sense strand
ugaguaugauggugggacu

SEQ ID NO: 2224603 - RNA, 19 nt, Homo sapiens
  misc_RNA (1)...(19): siRNA sense strand
uguaugagccagaaggagu

SEQ ID NO: 2224604 - RNA, 19 nt, Homo sapiens
  misc_RNA (1)...(19): siRNA sense strand
cuacuuugggauugccuaa

SEQ ID NO: 2224605 - RNA, 19 nt, Homo sapiens
  misc_RNA (1)...(19): siRNA sense strand
ggaagacaucauaagacau

SEQ ID NO: 2224606 - RNA, 19 nt, Homo sapiens
  misc_RNA (1)...(19): siRNA sense strand
uagccuugggacuggguaa

SEQ ID NO: 2224607 - RNA, 19 nt, Homo sapiens
  misc_RNA (1)...(19): siRNA sense strand
uggacaacaaucagauaga

SEQ ID NO: 2224608 - RNA, 19 nt, Homo sapiens
  misc_RNA (1)...(19): siRNA sense strand
gcaucuugguugccagcau

SEQ ID NO: 2224609 - RNA, 19 nt, Homo sapiens
  misc_RNA (1)...(19): siRNA sense strand
ucaagguagauguguauau

SEQ ID NO: 2224610 - RNA, 19 nt, Homo sapiens
  misc_RNA (1)...(19): siRNA sense strand
uugccuaacaacucgaaua

SEQ ID NO: 2224611 - RNA, 19 nt, Homo sapiens
  misc_RNA (1)...(19): siRNA sense strand
uuaucaggaucaagguaga

SEQ ID NO: 2224612 - RNA, 19 nt, Homo sapiens
  misc_RNA (1)...(19): siRNA sense strand
ugaagaaagauuacaguac

SEQ ID NO: 2224613 - RNA, 19 nt, Homo sapiens
  misc_RNA (1)...(19): siRNA sense strand
gaaucauccaguuggcuuu

SEQ ID NO: 2224614 - RNA, 19 nt, Homo sapiens
  misc_RNA (1)...(19): siRNA sense strand
gcaagaauuuaucaggauc

SEQ ID NO: 2224615 - RNA, 19 nt, Homo sapiens
  misc_RNA (1)...(19): siRNA sense strand
aagcagucccagaucgcaa

SEQ ID NO: 2224616 - RNA, 19 nt, Homo sapiens
  misc_RNA (1)...(19): siRNA sense strand
agccagaaggagugaaaau

SEQ ID NO: 2224617 - RNA, 19 nt, Homo sapiens
  misc_RNA (1)...(19): siRNA sense strand
uuuugauggugaagugaaa

SEQ ID NO: 2224618 - RNA, 19 nt, Homo sapiens
  misc_RNA (1)...(19): siRNA sense strand
ccuuaugauuggugagaca

SEQ ID NO: 2224619 - RNA, 19 nt, Homo sapiens
  misc_RNA (1)...(19): siRNA sense strand
cagcaaagagaaagaucaa

SEQ ID NO: 2224620 - RNA, 19 nt, Homo sapiens
  misc_RNA (1)...(19): siRNA sense strand
cgucaagagaaaucagaua

SEQ ID NO: 2224621 - RNA, 19 nt, Homo sapiens
  misc_RNA (1)...(19): siRNA sense strand
gagucuuaguagugauuaa

SEQ ID NO: 2224622 - RNA, 19 nt, Homo sapiens
  misc_RNA (1)...(19): siRNA sense strand
agacaggauaugugacaaa

SEQ ID NO: 2224623 - RNA, 19 nt, Homo sapiens
  misc_RNA (1)...(19): siRNA sense strand
uugcaaagacauugguuaa

SEQ ID NO: 2224624 - RNA, 19 nt, Homo sapiens
  misc_RNA (1)...(19): siRNA sense strand
acugcuaaguacugaaaua

SEQ ID NO: 2224625 - RNA, 19 nt, Homo sapiens
  misc_RNA (1)...(19): siRNA sense strand
cugaaggaaaugacaguua

SEQ ID NO: 2224626 - RNA, 19 nt, Homo sapiens
  misc_RNA (1)...(19): siRNA sense strand
ggaugaaaugucagugcaa

SEQ ID NO: 2224627 - RNA, 19 nt, Homo sapiens
  misc_RNA (1)...(19): siRNA sense strand
ccaaaguaccagaauggaa

SEQ ID NO: 2224628 - RNA, 19 nt, Homo sapiens
  misc_RNA (1)...(19): siRNA sense strand
agaaggcagcaaagagaaa

SEQ ID NO: 2224629 - RNA, 19 nt, Homo sapiens
  misc_RNA (1)...(19): siRNA sense strand
gagacucagcugaaggaaa

SEQ ID NO: 2224630 - RNA, 19 nt, Homo sapiens
  misc_RNA (1)...(19): siRNA sense strand
ugaccgagaacuacagaaa

SEQ ID NO: 2224631 - RNA, 19 nt, Homo sapiens
  misc_RNA (1)...(19): siRNA sense strand
gauacaaacuucaaggagu

SEQ ID NO: 2224632 - RNA, 19 nt, Homo sapiens
  misc_RNA (1)...(19): siRNA sense strand
uucagaaaguaaagagcaa

SEQ ID NO: 2224633 - RNA, 19 nt, Homo sapiens
  misc_RNA (1)...(19): siRNA sense strand
gaguauuaguagaauggau

SEQ ID NO: 2224634 - RNA, 19 nt, Homo sapiens
  misc_RNA (1)...(19): siRNA sense strand
gcugcauacuauagugauu

SEQ ID NO: 2224635 - RNA, 19 nt, Homo sapiens
  misc_RNA (1)...(19): siRNA sense strand
cagaaaguaaagagcaaca

SEQ ID NO: 2224636 - RNA, 19 nt, Homo sapiens
  misc_RNA (1)...(19): siRNA sense strand
cuucaaagggaaucaagua

SEQ ID NO: 2224637 - RNA, 19 nt, Homo sapiens
  misc_RNA (1)...(19): siRNA sense strand
agucaaagcaaaccaggaa

SEQ ID NO: 2224638 - RNA, 19 nt, Homo sapiens
  misc_RNA (1)...(19): siRNA sense strand
aguagaauggauacaguua

SEQ ID NO: 2224639 - RNA, 19 nt, Homo sapiens
  misc_RNA (1)...(19): siRNA sense strand
gaaacauccauaagaccaa

SEQ ID NO: 2224640 - RNA, 19 nt, Homo sapiens
  misc_RNA (1)...(19): siRNA sense strand
acuucaaauccaagcuuaa

SEQ ID NO: 2224641 - RNA, 19 nt, Homo sapiens
  misc_RNA (1)...(19): siRNA sense strand
cuucguaaauuuagggauc

SEQ ID NO: 2224642 - RNA, 19 nt, Homo sapiens
  misc_RNA (1)...(19): siRNA sense strand
guuacacagucaaagcaaa

SEQ ID NO: 2224643 - RNA, 19 nt, Homo sapiens
  misc_RNA (1)...(19): siRNA sense strand
aaagaaguucgcagagauu

SEQ ID NO: 2224644 - RNA, 19 nt, Homo sapiens
  misc_RNA (1)...(19): siRNA sense strand
agaaguucgcagagauuau

SEQ ID NO: 2224645 - RNA, 19 nt, Homo sapiens
  misc_RNA (1)...(19): siRNA sense strand
gcagcaaagagaaagauca

SEQ ID NO: 2224646 - RNA, 19 nt, Homo sapiens
  misc_RNA (1)...(19): siRNA sense strand
ucaaagcaaaccaggaaau

SEQ ID NO: 2224647 - RNA, 19 nt, Homo sapiens
  misc_RNA (1)...(19): siRNA sense strand
caaaauacgaccuaaagaa

SEQ ID NO: 2224648 - RNA, 19 nt, Homo sapiens
  misc_RNA (1)...(19): siRNA sense strand
ccuaaccaacggagaauau

SEQ ID NO: 2224649 - RNA, 19 nt, Homo sapiens
  misc_RNA (1)...(19): siRNA sense strand
cuugcaaagacauugguua

SEQ ID NO: 2224650 - RNA, 19 nt, Homo sapiens
  misc_RNA (1)...(19): siRNA sense strand
caggcuugauugugggcau

SEQ ID NO: 2224651 - RNA, 19 nt, Homo sapiens
  misc_RNA (1)...(19): siRNA sense strand
gguuacacagucaaagcaa

SEQ ID NO: 2224652 - RNA, 19 nt, Homo sapiens
  misc_RNA (1)...(19): siRNA sense strand
gugagacaguugaccgaga

SEQ ID NO: 2224653 - RNA, 19 nt, Homo sapiens
  misc_RNA (1)...(19): siRNA sense strand
gcuucuuucaaguggguuu

SEQ ID NO: 2224654 - RNA, 19 nt, Homo sapiens
  misc_RNA (1)...(19): siRNA sense strand
cugagauguuugccaagaa

SEQ ID NO: 2224655 - RNA, 19 nt, Homo sapiens
  misc_RNA (1)...(19): siRNA sense strand
uugccaagaaacaugguua

SEQ ID NO: 2224656 - RNA, 19 nt, Homo sapiens
  misc_RNA (1)...(19): siRNA sense strand
caguccagccaaagccaaa

SEQ ID NO: 2224657 - RNA, 19 nt, Homo sapiens
  misc_RNA (1)...(19): siRNA sense strand
cagagauuaugaagccauu

SEQ ID NO: 2224658 - RNA, 19 nt, Homo sapiens
  misc_RNA (1)...(19): siRNA sense strand
gaccaaugaucaaugcaga

SEQ ID NO: 2224659 - RNA, 19 nt, Homo sapiens
  misc_RNA (1)...(19): siRNA sense strand
guuucaaaugggagcacau

SEQ ID NO: 2224660 - RNA, 19 nt, Homo sapiens
  misc_RNA (1)...(19): siRNA sense strand
auaaagguggcuuggaaga

SEQ ID NO: 2224661 - RNA, 19 nt, Homo sapiens
  misc_RNA (1)...(19): siRNA sense strand
cuucaaggaguuuguuauu

SEQ ID NO: 2224662 - RNA, 19 nt, Homo sapiens
  misc_RNA (1)...(19): siRNA sense strand
ucuggaacuucaaagggaa

SEQ ID NO: 2224663 - RNA, 19 nt, Homo sapiens
  misc_RNA (1)...(19): siRNA sense strand
gcagagauuaugaagccau

SEQ ID NO: 2224664 - RNA, 19 nt, Homo sapiens
  misc_RNA (1)...(19): siRNA sense strand
aguacugacuucaagcaau

SEQ ID NO: 2224665 - RNA, 19 nt, Homo sapiens
  misc_RNA (1)...(19): siRNA sense strand
ucaagagaaaucagauaca

SEQ ID NO: 2224666 - RNA, 19 nt, Homo sapiens
  misc_RNA (1)...(19): siRNA sense strand
ggacuaauggugugggcuc

SEQ ID NO: 2224667 - RNA, 19 nt, Homo sapiens
  misc_RNA (1)...(19): siRNA sense strand
caaacaaacugucaaccca

SEQ ID NO: 2224668 - RNA, 19 nt, Homo sapiens
  misc_RNA (1)...(19): siRNA sense strand
caacauaacguuucaccca

SEQ ID NO: 2224669 - RNA, 19 nt, Homo sapiens
  misc_RNA (1)...(19): siRNA sense strand
cuacauaaacaaagaaugc

SEQ ID NO: 2224670 - RNA, 19 nt, Homo sapiens
  misc_RNA (1)...(19): siRNA sense strand
auuaugaagccauuggaau

SEQ ID NO: 2224671 - RNA, 19 nt, Homo sapiens
  misc_RNA (1)...(19): siRNA sense strand
aggcuugauugugggcaua

SEQ ID NO: 2224672 - RNA, 19 nt, Homo sapiens
  misc_RNA (1)...(19): siRNA sense strand
ccacacacugaaagaaguu

SEQ ID NO: 2224673 - RNA, 19 nt, Homo sapiens
  misc_RNA (1)...(19): siRNA sense strand
ucagaaaggaguauguguu

SEQ ID NO: 2224674 - RNA, 19 nt, Homo sapiens
  misc_RNA (1)...(19): siRNA sense strand
cccaaagaggagagaguuu

SEQ ID NO: 2224675 - RNA, 19 nt, Homo sapiens
  misc_RNA (1)...(19): siRNA sense strand
agaucaucgcagagaauau

SEQ ID NO: 2224676 - RNA, 19 nt, Homo sapiens
  misc_RNA (1)...(19): siRNA sense strand
acgacaaccucuuuggaca

SEQ ID NO: 2224677 - RNA, 19 nt, Homo sapiens
  misc_RNA (1)...(19): siRNA sense strand
gcagcuuaauugaccggaa

SEQ ID NO: 2224678 - RNA, 19 nt, Homo sapiens
  misc_RNA (1)...(19): siRNA sense strand
guggacaggcaccggcaaa

SEQ ID NO: 2224679 - RNA, 19 nt, Homo sapiens
  misc_RNA (1)...(19): siRNA sense strand
aggcuaugaaauugaugaa

SEQ ID NO: 2224680 - RNA, 19 nt, Homo sapiens
  misc_RNA (1)...(19): siRNA sense strand
aguggaaagcagagggaag

SEQ ID NO: 2224681 - RNA, 19 nt, Homo sapiens
  misc_RNA (1)...(19): siRNA sense strand
uaaacaacccaaagcccaa

SEQ ID NO: 2224682 - RNA, 19 nt, Homo sapiens
  misc_RNA (1)...(19): siRNA sense strand
ucagauaaaggcugcaaaa

SEQ ID NO: 2224683 - RNA, 19 nt, Homo sapiens
  misc_RNA (1)...(19): siRNA sense strand
acaaagaagaggaagggaa

SEQ ID NO: 2224684 - RNA, 19 nt, Homo sapiens
  misc_RNA (1)...(19): siRNA sense strand
ccgaacagacggugcccua

SEQ ID NO: 2224685 - RNA, 19 nt, Homo sapiens
  misc_RNA (1)...(19): siRNA sense strand
caaagaagaggaagggaag

SEQ ID NO: 2224686 - RNA, 19 nt, Homo sapiens
  misc_RNA (1)...(19): siRNA sense strand
aaacagacaaagaagagga

SEQ ID NO: 2224687 - RNA, 19 nt, Homo sapiens
  misc_RNA (1)...(19): siRNA sense strand
aauucaaggacggcagaaa

SEQ ID NO: 2224688 - RNA, 19 nt, Homo sapiens
  misc_RNA (1)...(19): siRNA sense strand
aagaggaagggaagguuga

SEQ ID NO: 2224689 - RNA, 19 nt, Homo sapiens
  misc_RNA (1)...(19): siRNA sense strand
ccuaaagcagagacgggaa

SEQ ID NO: 2224690 - RNA, 19 nt, Homo sapiens
  misc_RNA (1)...(19): siRNA sense strand
cucuguauuuggugagcaa

SEQ ID NO: 2224691 - RNA, 19 nt, Homo sapiens
  misc_RNA (1)...(19): siRNA sense strand
cggaggugccuaaaggaga

SEQ ID NO: 2224692 - RNA, 19 nt, Homo sapiens
  misc_RNA (1)...(19): siRNA sense strand
aagaacaagugcaugcgaa

SEQ ID NO: 2224693 - RNA, 19 nt, Homo sapiens
  misc_RNA (1)...(19): siRNA sense strand
caaaggaaguuaucugcga

SEQ ID NO: 2224694 - RNA, 19 nt, Homo sapiens
  misc_RNA (1)...(19): siRNA sense strand
cccaauaucuugaucgcca

SEQ ID NO: 2224695 - RNA, 19 nt, Homo sapiens
  misc_RNA (1)...(19): siRNA sense strand
gaguauugacagauaucga

SEQ ID NO: 2224696 - RNA, 19 nt, Homo sapiens
  misc_RNA (1)...(19): siRNA sense strand
agagacgggaaguggccaa

SEQ ID NO: 2224697 - RNA, 19 nt, Homo sapiens
  misc_RNA (1)...(19): siRNA sense strand
ucccaauagaugugaacuu

SEQ ID NO: 2224698 - RNA, 19 nt, Homo sapiens
  misc_RNA (1)...(19): siRNA sense strand
ggccagaaagaaagagcaa

SEQ ID NO: 2224699 - RNA, 19 nt, Homo sapiens
  misc_RNA (1)...(19): siRNA sense strand
ccuaaagcagagacgggaa

SEQ ID NO: 2224700 - RNA, 19 nt, Homo sapiens
  misc_RNA (1)...(19): siRNA sense strand
cucuguauuuggugagcaa

SEQ ID NO: 2224701 - RNA, 19 nt, Homo sapiens
  misc_RNA (1)...(19): siRNA sense strand
guuggaaauaagcuaguaa

SEQ ID NO: 2224702 - RNA, 19 nt, Homo sapiens
  misc_RNA (1)...(19): siRNA sense strand
cggaggugccuaaaggaga

SEQ ID NO: 2224703 - RNA, 19 nt, Homo sapiens
  misc_RNA (1)...(19): siRNA sense strand
aagaacaagugcaugcgaa

SEQ ID NO: 2224704 - RNA, 19 nt, Homo sapiens
  misc_RNA (1)...(19): siRNA sense strand
caaaggaaguuaucugcga

SEQ ID NO: 2224705 - RNA, 19 nt, Homo sapiens
  misc_RNA (1)...(19): siRNA sense strand
cccaauaucuugaucgcca

SEQ ID NO: 2224706 - RNA, 19 nt, Homo sapiens
  misc_RNA (1)...(19): siRNA sense strand
gaguauugacagauaucga

SEQ ID NO: 2224707 - RNA, 19 nt, Homo sapiens
  misc_RNA (1)...(19): siRNA sense strand
agagacgggaaguggccaa

SEQ ID NO: 2224708 - RNA, 19 nt, Homo sapiens
  misc_RNA (1)...(19): siRNA sense strand
ucccaauagaugugaacuu

SEQ ID NO: 2224709 - RNA, 19 nt, Homo sapiens
  misc_RNA (1)...(19): siRNA sense strand
cggaaagcccugacggacu

SEQ ID NO: 2224710 - RNA, 19 nt, Homo sapiens
  misc_RNA (1)...(19): siRNA sense strand
cggcuguggagaugcggaa

SEQ ID NO: 2224711 - RNA, 19 nt, Homo sapiens
  misc_RNA (1)...(19): siRNA sense strand
ucacugugcugaucgggaa

SEQ ID NO: 2224712 - RNA, 19 nt, Homo sapiens
  misc_RNA (1)...(19): siRNA sense strand
cggaaagcccugacggacu

SEQ ID NO: 2224713 - RNA, 19 nt, Homo sapiens
  misc_RNA (1)...(19): siRNA sense strand
cggcuguggagaugcggaa

SEQ ID NO: 2224714 - RNA, 19 nt, Homo sapiens
  misc_RNA (1)...(19): siRNA sense strand
ucacugugcugaucgggaa

SEQ ID NO: 2224715 - RNA, 19 nt, Homo sapiens
  misc_RNA (1)...(19): siRNA sense strand
cggaaagcccugacggacu

SEQ ID NO: 2224716 - RNA, 19 nt, Homo sapiens
  misc_RNA (1)...(19): siRNA sense strand
cggcuguggagaugcggaa

SEQ ID NO: 2224717 - RNA, 19 nt, Homo sapiens
  misc_RNA (1)...(19): siRNA sense strand
ucacugugcugaucgggaa

SEQ ID NO: 2224718 - RNA, 19 nt, Homo sapiens
  misc_RNA (1)...(19): siRNA sense strand
cggaaagcccugacggacu

SEQ ID NO: 2224719 - RNA, 19 nt, Homo sapiens
  misc_RNA (1)...(19): siRNA sense strand
cggcuguggagaugcggaa

SEQ ID NO: 2224720 - RNA, 19 nt, Homo sapiens
  misc_RNA (1)...(19): siRNA sense strand
ucacugugcugaucgggaa

SEQ ID NO: 2224721 - RNA, 19 nt, Homo sapiens
  misc_RNA (1)...(19): siRNA sense strand
gagaagaggucguuggauc

SEQ ID NO: 2224722 - RNA, 19 nt, Homo sapiens
  misc_RNA (1)...(19): siRNA sense strand
ccgccaaggccguagacaa

SEQ ID NO: 2224723 - RNA, 19 nt, Homo sapiens
  misc_RNA (1)...(19): siRNA sense strand
agacagaaagagcggaaaa

SEQ ID NO: 2224724 - RNA, 19 nt, Homo sapiens
  misc_RNA (1)...(19): siRNA sense strand
ccaagauccaccugagaca

SEQ ID NO: 2224725 - RNA, 19 nt, Homo sapiens
  misc_RNA (1)...(19): siRNA sense strand
ugagacagaaagagcggaa

SEQ ID NO: 2224726 - RNA, 19 nt, Homo sapiens
  misc_RNA (1)...(19): siRNA sense strand
ccggagauggcaugaucaa

SEQ ID NO: 2224727 - RNA, 19 nt, Homo sapiens
  misc_RNA (1)...(19): siRNA sense strand
cccaaugaucccagacuau

SEQ ID NO: 2224728 - RNA, 19 nt, Homo sapiens
  misc_RNA (1)...(19): siRNA sense strand
gaugagaggaagcgccaca

SEQ ID NO: 2224729 - RNA, 19 nt, Homo sapiens
  misc_RNA (1)...(19): siRNA sense strand
acuacuaugaagagagcua

SEQ ID NO: 2224730 - RNA, 19 nt, Homo sapiens
  misc_RNA (1)...(19): siRNA sense strand
aggaucaacucguaggcuu

SEQ ID NO: 2224731 - RNA, 19 nt, Homo sapiens
  misc_RNA (1)...(19): siRNA sense strand
gguacuaaagaaagagcuu

SEQ ID NO: 2224732 - RNA, 19 nt, Homo sapiens
  misc_RNA (1)...(19): siRNA sense strand
gcucaucaccacagcggaa

SEQ ID NO: 2224733 - RNA, 19 nt, Homo sapiens
  misc_RNA (1)...(19): siRNA sense strand
agaaagagcuuguugcgca

SEQ ID NO: 2224734 - RNA, 19 nt, Homo sapiens
  misc_RNA (1)...(19): siRNA sense strand
gaaagagcuuguugcgcau

SEQ ID NO: 2224735 - RNA, 19 nt, Homo sapiens
  misc_RNA (1)...(19): siRNA sense strand
cccugguacuaaagaaaga

SEQ ID NO: 2224736 - RNA, 19 nt, Homo sapiens
  misc_RNA (1)...(19): siRNA sense strand
gcgcauuugaagugcacca

SEQ ID NO: 2224737 - RNA, 19 nt, Homo sapiens
  misc_RNA (1)...(19): siRNA sense strand
ggacugucuucaugcgcuu

SEQ ID NO: 2224738 - RNA, 19 nt, Homo sapiens
  misc_RNA (1)...(19): siRNA sense strand
acacaaaguauguuggcaa

SEQ ID NO: 2224739 - RNA, 19 nt, Homo sapiens
  misc_RNA (1)...(19): siRNA sense strand
ggagaaggccagagaggca

SEQ ID NO: 2224740 - RNA, 19 nt, Homo sapiens
  misc_RNA (1)...(19): siRNA sense strand
cauuaaaggaagugggaug

SEQ ID NO: 2224741 - RNA, 19 nt, Homo sapiens
  misc_RNA (1)...(19): siRNA sense strand
aggacaagcagguagagaa

SEQ ID NO: 2224742 - RNA, 19 nt, Homo sapiens
  misc_RNA (1)...(19): siRNA sense strand
gcuggagagagucgagaaa

SEQ ID NO: 2224743 - RNA, 19 nt, Homo sapiens
  misc_RNA (1)...(19): siRNA sense strand
caagaaacaaugaggagca

SEQ ID NO: 2224744 - RNA, 19 nt, Homo sapiens
  misc_RNA (1)...(19): siRNA sense strand
cagugguggaggagagaga

SEQ ID NO: 2224745 - RNA, 19 nt, Homo sapiens
  misc_RNA (1)...(19): siRNA sense strand
cuguggaaguggacugcaa

SEQ ID NO: 2224746 - RNA, 19 nt, Homo sapiens
  misc_RNA (1)...(19): siRNA sense strand
cgaaagugguggagugcag

SEQ ID NO: 2224747 - RNA, 19 nt, Homo sapiens
  misc_RNA (1)...(19): siRNA sense strand
gaaacaaugaggagcacca

SEQ ID NO: 2224748 - RNA, 19 nt, Homo sapiens
  misc_RNA (1)...(19): siRNA sense strand
ucuccaauuuugagcgaaa

SEQ ID NO: 2224749 - RNA, 19 nt, Homo sapiens
  misc_RNA (1)...(19): siRNA sense strand
ucucagugacgcugguuaa

SEQ ID NO: 2224750 - RNA, 19 nt, Homo sapiens
  misc_RNA (1)...(19): siRNA sense strand
caacaggacccaagccaca

SEQ ID NO: 2224751 - RNA, 19 nt, Homo sapiens
  misc_RNA (1)...(19): siRNA sense strand
gagucgagaaagagaaaau

SEQ ID NO: 2224752 - RNA, 19 nt, Homo sapiens
  misc_RNA (1)...(19): siRNA sense strand
gugagaaagacaacggcau

SEQ ID NO: 2224753 - RNA, 19 nt, Homo sapiens
  misc_RNA (1)...(19): siRNA sense strand
cgacagggcuugcuggacu

SEQ ID NO: 2224754 - RNA, 19 nt, Homo sapiens
  misc_RNA (1)...(19): siRNA sense strand
acuauaaugaggagggacu

SEQ ID NO: 2224755 - RNA, 19 nt, Homo sapiens
  misc_RNA (1)...(19): siRNA sense strand
aggcagugcagcuggcaau

SEQ ID NO: 2224756 - RNA, 19 nt, Homo sapiens
  misc_RNA (1)...(19): siRNA sense strand
gguuaugauggauggcaga

SEQ ID NO: 2224757 - RNA, 19 nt, Homo sapiens
  misc_RNA (1)...(19): siRNA sense strand
gugcagugguggaggagag

SEQ ID NO: 2224758 - RNA, 19 nt, Homo sapiens
  misc_RNA (1)...(19): siRNA sense strand
uggaguacuuguugaacca

SEQ ID NO: 2224759 - RNA, 19 nt, Homo sapiens
  misc_RNA (1)...(19): siRNA sense strand
aggacaucacucagaacua

SEQ ID NO: 2224760 - RNA, 19 nt, Homo sapiens
  misc_RNA (1)...(19): siRNA sense strand
gggcucauucacagagaga

SEQ ID NO: 2224761 - RNA, 19 nt, Homo sapiens
  misc_RNA (1)...(19): siRNA sense strand
cuggaagugcugugaggau

SEQ ID NO: 2224762 - RNA, 19 nt, Homo sapiens
  misc_RNA (1)...(19): siRNA sense strand
gaauagagaggaugcuguu

SEQ ID NO: 2224763 - RNA, 19 nt, Homo sapiens
  misc_RNA (1)...(19): siRNA sense strand
ggagugcagugguggagga

SEQ ID NO: 2224764 - RNA, 19 nt, Homo sapiens
  misc_RNA (1)...(19): siRNA sense strand
cgugguagccccugaacua

SEQ ID NO: 2224765 - RNA, 19 nt, Homo sapiens
  misc_RNA (1)...(19): siRNA sense strand
aagagaaaauggaacguga

SEQ ID NO: 2224766 - RNA, 19 nt, Homo sapiens
  misc_RNA (1)...(19): siRNA sense strand
cugccuugccccaggguua

SEQ ID NO: 2224767 - RNA, 19 nt, Homo sapiens
  misc_RNA (1)...(19): siRNA sense strand
caaguauccugaagggucu

SEQ ID NO: 2224768 - RNA, 19 nt, Homo sapiens
  misc_RNA (1)...(19): siRNA sense strand
cgagaaagagaaaauggaa

SEQ ID NO: 2224769 - RNA, 19 nt, Homo sapiens
  misc_RNA (1)...(19): siRNA sense strand
ggguccaggcuguacacua

SEQ ID NO: 2224770 - RNA, 19 nt, Homo sapiens
  misc_RNA (1)...(19): siRNA sense strand
gagcgaaacccacccgaga

SEQ ID NO: 2224771 - RNA, 19 nt, Homo sapiens
  misc_RNA (1)...(19): siRNA sense strand
cgucagaugaggagaucca

SEQ ID NO: 2224772 - RNA, 19 nt, Homo sapiens
  misc_RNA (1)...(19): siRNA sense strand
acaaggagaaccugggaca

SEQ ID NO: 2224773 - RNA, 19 nt, Homo sapiens
  misc_RNA (1)...(19): siRNA sense strand
cugaaaagugggugagguu

SEQ ID NO: 2224774 - RNA, 19 nt, Homo sapiens
  misc_RNA (1)...(19): siRNA sense strand
gaaaagugggugagguuca

SEQ ID NO: 2224775 - RNA, 19 nt, Homo sapiens
  misc_RNA (1)...(19): siRNA sense strand
cccagaagcaugagcggau

SEQ ID NO: 2224776 - RNA, 19 nt, Homo sapiens
  misc_RNA (1)...(19): siRNA sense strand
acuccaacuaccugaagaa

SEQ ID NO: 2224777 - RNA, 19 nt, Homo sapiens
  misc_RNA (1)...(19): siRNA sense strand
uggaagaagcagguggaga

SEQ ID NO: 2224778 - RNA, 19 nt, Homo sapiens
  misc_RNA (1)...(19): siRNA sense strand
ccuuaugagaacagccuua

SEQ ID NO: 2224779 - RNA, 19 nt, Homo sapiens
  misc_RNA (1)...(19): siRNA sense strand
acauaguggccauggauga

SEQ ID NO: 2224780 - RNA, 19 nt, Homo sapiens
  misc_RNA (1)...(19): siRNA sense strand
ggccauggaugaaggcuca

SEQ ID NO: 2224781 - RNA, 19 nt, Homo sapiens
  misc_RNA (1)...(19): siRNA sense strand
ccuaucuggugcuggacaa

SEQ ID NO: 2224782 - RNA, 19 nt, Homo sapiens
  misc_RNA (1)...(19): siRNA sense strand
gcguacagaggguggagau

SEQ ID NO: 2224783 - RNA, 19 nt, Homo sapiens
  misc_RNA (1)...(19): siRNA sense strand
accccaaguucgagagcaa

SEQ ID NO: 2224784 - RNA, 19 nt, Homo sapiens
  misc_RNA (1)...(19): siRNA sense strand
ccgagcgguuggaggacuu

SEQ ID NO: 2224785 - RNA, 19 nt, Homo sapiens
  misc_RNA (1)...(19): siRNA sense strand
guguggacauaguggccau

SEQ ID NO: 2224786 - RNA, 19 nt, Homo sapiens
  misc_RNA (1)...(19): siRNA sense strand
gccagugggcagugagcau

SEQ ID NO: 2224787 - RNA, 19 nt, Homo sapiens
  misc_RNA (1)...(19): siRNA sense strand
ggaaggacgucgaugggaa

SEQ ID NO: 2224788 - RNA, 19 nt, Homo sapiens
  misc_RNA (1)...(19): siRNA sense strand
gcucaggaucaaagagaca

SEQ ID NO: 2224789 - RNA, 19 nt, Homo sapiens
  misc_RNA (1)...(19): siRNA sense strand
gggaaaugccacagccuca

SEQ ID NO: 2224790 - RNA, 19 nt, Homo sapiens
  misc_RNA (1)...(19): siRNA sense strand
gcucaagaacugugccaga

SEQ ID NO: 2224791 - RNA, 19 nt, Homo sapiens
  misc_RNA (1)...(19): siRNA sense strand
augagaagcaggagggcga

SEQ ID NO: 2224792 - RNA, 19 nt, Homo sapiens
  misc_RNA (1)...(19): siRNA sense strand
gggcaaaguguccgaggga

SEQ ID NO: 2224793 - RNA, 19 nt, Homo sapiens
  misc_RNA (1)...(19): siRNA sense strand
gcgugugcauccagcgcaa

SEQ ID NO: 2224794 - RNA, 19 nt, Homo sapiens
  misc_RNA (1)...(19): siRNA sense strand
gcaaugaccagguggccau

SEQ ID NO: 2224795 - RNA, 19 nt, Homo sapiens
  misc_RNA (1)...(19): siRNA sense strand
ucaaagagacagacgagca

SEQ ID NO: 2224796 - RNA, 19 nt, Homo sapiens
  misc_RNA (1)...(19): siRNA sense strand
caucaucacaucugggaca

SEQ ID NO: 2224797 - RNA, 19 nt, Homo sapiens
  misc_RNA (1)...(19): siRNA sense strand
ccuacaugcgggagcucaa

SEQ ID NO: 2224798 - RNA, 19 nt, Homo sapiens
  misc_RNA (1)...(19): siRNA sense strand
ccagagauugagaagguga

SEQ ID NO: 2224799 - RNA, 19 nt, Homo sapiens
  misc_RNA (1)...(19): siRNA sense strand
gcaccuacgccaaaggcuu

SEQ ID NO: 2224800 - RNA, 19 nt, Homo sapiens
  misc_RNA (1)...(19): siRNA sense strand
gaaucgacuuugugcacca

SEQ ID NO: 2224801 - RNA, 19 nt, Homo sapiens
  misc_RNA (1)...(19): siRNA sense strand
ccaaguacuuccugcggca

SEQ ID NO: 2224802 - RNA, 19 nt, Homo sapiens
  misc_RNA (1)...(19): siRNA sense strand
gagcauauccgcuggaggu

SEQ ID NO: 2224803 - RNA, 19 nt, Homo sapiens
  misc_RNA (1)...(19): siRNA sense strand
gcgcaguaccagcaugaca

SEQ ID NO: 2224804 - RNA, 19 nt, Homo sapiens
  misc_RNA (1)...(19): siRNA sense strand
cugccgauucuaugaggaa

SEQ ID NO: 2224805 - RNA, 19 nt, Homo sapiens
  misc_RNA (1)...(19): siRNA sense strand
aagaacugugccagagauu

SEQ ID NO: 2224806 - RNA, 19 nt, Homo sapiens
  misc_RNA (1)...(19): siRNA sense strand
auguggugguuuauagcua

SEQ ID NO: 2224807 - RNA, 19 nt, Homo sapiens
  misc_RNA (1)...(19): siRNA sense strand
gguuauagcuucaagguga

SEQ ID NO: 2224808 - RNA, 19 nt, Homo sapiens
  misc_RNA (1)...(19): siRNA sense strand
aggaaaugauugaggaacu

SEQ ID NO: 2224809 - RNA, 19 nt, Homo sapiens
  misc_RNA (1)...(19): siRNA sense strand
agaagaagaagaagagaca

SEQ ID NO: 2224810 - RNA, 19 nt, Homo sapiens
  misc_RNA (1)...(19): siRNA sense strand
aggagaagagcuugcgaaa

SEQ ID NO: 2224811 - RNA, 19 nt, Homo sapiens
  misc_RNA (1)...(19): siRNA sense strand
aagaagaagaagagacaca

SEQ ID NO: 2224812 - RNA, 19 nt, Homo sapiens
  misc_RNA (1)...(19): siRNA sense strand
cuucaagcgcuuuaggaaa

SEQ ID NO: 2224813 - RNA, 19 nt, Homo sapiens
  misc_RNA (1)...(19): siRNA sense strand
gcaggaaaugauugaggaa

SEQ ID NO: 2224814 - RNA, 19 nt, Homo sapiens
  misc_RNA (1)...(19): siRNA sense strand
augaagaagaagaagaaga

SEQ ID NO: 2224815 - RNA, 19 nt, Homo sapiens
  misc_RNA (1)...(19): siRNA sense strand
cugcaugcacugucagaaa

SEQ ID NO: 2224816 - RNA, 19 nt, Homo sapiens
  misc_RNA (1)...(19): siRNA sense strand
caugaaaggaggaaugaca

SEQ ID NO: 2224817 - RNA, 19 nt, Homo sapiens
  misc_RNA (1)...(19): siRNA sense strand
augaagaggaugaugaaga

SEQ ID NO: 2224818 - RNA, 19 nt, Homo sapiens
  misc_RNA (1)...(19): siRNA sense strand
uggacaaggaugaagaaga

SEQ ID NO: 2224819 - RNA, 19 nt, Homo sapiens
  misc_RNA (1)...(19): siRNA sense strand
aggaugaagaagaagaaga

SEQ ID NO: 2224820 - RNA, 19 nt, Homo sapiens
  misc_RNA (1)...(19): siRNA sense strand
gcgggugcuucgagcuaaa

SEQ ID NO: 2224821 - RNA, 19 nt, Homo sapiens
  misc_RNA (1)...(19): siRNA sense strand
ucuaugagcaaauggacaa

SEQ ID NO: 2224822 - RNA, 19 nt, Homo sapiens
  misc_RNA (1)...(19): siRNA sense strand
ccuccgaugccaaggacaa

SEQ ID NO: 2224823 - RNA, 19 nt, Homo sapiens
  misc_RNA (1)...(19): siRNA sense strand
cuaugaggaugaagaggau

SEQ ID NO: 2224824 - RNA, 19 nt, Homo sapiens
  misc_RNA (1)...(19): siRNA sense strand
cagaauaugacuuccggaa

SEQ ID NO: 2224825 - RNA, 19 nt, Homo sapiens
  misc_RNA (1)...(19): siRNA sense strand
ccuaaaggaauaugccauu

SEQ ID NO: 2224826 - RNA, 19 nt, Homo sapiens
  misc_RNA (1)...(19): siRNA sense strand
agcaaauggacaaggauga

SEQ ID NO: 2224827 - RNA, 19 nt, Homo sapiens
  misc_RNA (1)...(19): siRNA sense strand
aggaggaaugacaagauua

SEQ ID NO: 2224828 - RNA, 19 nt, Homo sapiens
  misc_RNA (1)...(19): siRNA sense strand
aauauggagccaaggacua

SEQ ID NO: 2224829 - RNA, 19 nt, Homo sapiens
  misc_RNA (1)...(19): siRNA sense strand
aggaugaagaggaugauga

SEQ ID NO: 2224830 - RNA, 19 nt, Homo sapiens
  misc_RNA (1)...(19): siRNA sense strand
ggcagagauucuugguaga

SEQ ID NO: 2224831 - RNA, 19 nt, Homo sapiens
  misc_RNA (1)...(19): siRNA sense strand
gcugaggucuggugcccua

SEQ ID NO: 2224832 - RNA, 19 nt, Homo sapiens
  misc_RNA (1)...(19): siRNA sense strand
ucacgaaacucgcuggcau

SEQ ID NO: 2224833 - RNA, 19 nt, Homo sapiens
  misc_RNA (1)...(19): siRNA sense strand
acaaggaugaagaagaaga

SEQ ID NO: 2224834 - RNA, 19 nt, Homo sapiens
  misc_RNA (1)...(19): siRNA sense strand
agaagaagagacacagaca

SEQ ID NO: 2224835 - RNA, 19 nt, Homo sapiens
  misc_RNA (1)...(19): siRNA sense strand
ggaugguugcagaagagua

SEQ ID NO: 2224836 - RNA, 19 nt, Homo sapiens
  misc_RNA (1)...(19): siRNA sense strand
ggaugaauauggagccaag

SEQ ID NO: 2224837 - RNA, 19 nt, Homo sapiens
  misc_RNA (1)...(19): siRNA sense strand
aagaagagacacagacagu

SEQ ID NO: 2224838 - RNA, 19 nt, Homo sapiens
  misc_RNA (1)...(19): siRNA sense strand
cggcagagauucuugguag

SEQ ID NO: 2224839 - RNA, 19 nt, Homo sapiens
  misc_RNA (1)...(19): siRNA sense strand
acaagaagaaauccaggaa

SEQ ID NO: 2224840 - RNA, 19 nt, Homo sapiens
  misc_RNA (1)...(19): siRNA sense strand
ugacaauguguuugcccua

SEQ ID NO: 2224841 - RNA, 19 nt, Homo sapiens
  misc_RNA (1)...(19): siRNA sense strand
augaggaugaagaggauga

SEQ ID NO: 2224842 - RNA, 19 nt, Homo sapiens
  misc_RNA (1)...(19): siRNA sense strand
ccuaucaggagaagagcuu

SEQ ID NO: 2224843 - RNA, 19 nt, Homo sapiens
  misc_RNA (1)...(19): siRNA sense strand
agagauucuugguagauca

SEQ ID NO: 2224844 - RNA, 19 nt, Homo sapiens
  misc_RNA (1)...(19): siRNA sense strand
cuggcauggaggaggaaga

SEQ ID NO: 2224845 - RNA, 19 nt, Homo sapiens
  misc_RNA (1)...(19): siRNA sense strand
aagaagaaauccaggaagc

SEQ ID NO: 2224846 - RNA, 19 nt, Homo sapiens
  misc_RNA (1)...(19): siRNA sense strand
cggggaagcagguggauga

SEQ ID NO: 2224847 - RNA, 19 nt, Homo sapiens
  misc_RNA (1)...(19): siRNA sense strand
gagacuuucacaagcaaau

SEQ ID NO: 2224848 - RNA, 19 nt, Homo sapiens
  misc_RNA (1)...(19): siRNA sense strand
cuucaaggugaucacgaaa

SEQ ID NO: 2224849 - RNA, 19 nt, Homo sapiens
  misc_RNA (1)...(19): siRNA sense strand
guacugucagcuauggaaa

SEQ ID NO: 2224850 - RNA, 19 nt, Homo sapiens
  misc_RNA (1)...(19): siRNA sense strand
cugucaacccugauaucaa

SEQ ID NO: 2224851 - RNA, 19 nt, Homo sapiens
  misc_RNA (1)...(19): siRNA sense strand
gcugucuggugcugggcaa

SEQ ID NO: 2224852 - RNA, 19 nt, Homo sapiens
  misc_RNA (1)...(19): siRNA sense strand
augaaaggaggaaugacaa

SEQ ID NO: 2224853 - RNA, 19 nt, Homo sapiens
  misc_RNA (1)...(19): siRNA sense strand
cagaagaguacaaugccuu

SEQ ID NO: 2224854 - RNA, 19 nt, Homo sapiens
  misc_RNA (1)...(19): siRNA sense strand
uccagaauuucaagcacaa

SEQ ID NO: 2224855 - RNA, 19 nt, Homo sapiens
  misc_RNA (1)...(19): siRNA sense strand
ccacugaccuggaugccga

SEQ ID NO: 2224856 - RNA, 19 nt, Homo sapiens
  misc_RNA (1)...(19): siRNA sense strand
cuggagucccugauggaau

SEQ ID NO: 2224857 - RNA, 19 nt, Homo sapiens
  misc_RNA (1)...(19): siRNA sense strand
gagcaaauggacaaggaug

SEQ ID NO: 2224858 - RNA, 19 nt, Homo sapiens
  misc_RNA (1)...(19): siRNA sense strand
agaauaugacuuccggaau

SEQ ID NO: 2224859 - RNA, 19 nt, Homo sapiens
  misc_RNA (1)...(19): siRNA sense strand
uggaaagcccaguucaaga

SEQ ID NO: 2224860 - RNA, 19 nt, Homo sapiens
  misc_RNA (1)...(19): siRNA sense strand
caacaaauuuagagcuugc

SEQ ID NO: 2224861 - RNA, 19 nt, Homo sapiens
  misc_RNA (1)...(19): siRNA sense strand
guuauagcuucaaggugau

SEQ ID NO: 2224862 - RNA, 19 nt, Homo sapiens
  misc_RNA (1)...(19): siRNA sense strand
cccaggacacacaggaaau

SEQ ID NO: 2224863 - RNA, 19 nt, Homo sapiens
  misc_RNA (1)...(19): siRNA sense strand
acagcagcucuuacagaaa

SEQ ID NO: 2224864 - RNA, 19 nt, Homo sapiens
  misc_RNA (1)...(19): siRNA sense strand
auuaagagccagagacuaa

SEQ ID NO: 2224865 - RNA, 19 nt, Homo sapiens
  misc_RNA (1)...(19): siRNA sense strand
ugaugacgauggagggaaa

SEQ ID NO: 2224866 - RNA, 19 nt, Homo sapiens
  misc_RNA (1)...(19): siRNA sense strand
gagcagaagaaaugcguau

SEQ ID NO: 2224867 - RNA, 19 nt, Homo sapiens
  misc_RNA (1)...(19): siRNA sense strand
ugauuauaccgaaggaaua

SEQ ID NO: 2224868 - RNA, 19 nt, Homo sapiens
  misc_RNA (1)...(19): siRNA sense strand
cagaagaggaagaugaaaa

SEQ ID NO: 2224869 - RNA, 19 nt, Homo sapiens
  misc_RNA (1)...(19): siRNA sense strand
ccgaagcgcuggaagggaa

SEQ ID NO: 2224870 - RNA, 19 nt, Homo sapiens
  misc_RNA (1)...(19): siRNA sense strand
ugaagagaaggcagagaaa

SEQ ID NO: 2224871 - RNA, 19 nt, Homo sapiens
  misc_RNA (1)...(19): siRNA sense strand
guucagaagaggaagauga

SEQ ID NO: 2224872 - RNA, 19 nt, Homo sapiens
  misc_RNA (1)...(19): siRNA sense strand
aagaauggcaagaaagaau

SEQ ID NO: 2224873 - RNA, 19 nt, Homo sapiens
  misc_RNA (1)...(19): siRNA sense strand
agaaagaauuugagcuacu

SEQ ID NO: 2224874 - RNA, 19 nt, Homo sapiens
  misc_RNA (1)...(19): siRNA sense strand
aggagaaagaagaugcuaa

SEQ ID NO: 2224875 - RNA, 19 nt, Homo sapiens
  misc_RNA (1)...(19): siRNA sense strand
ugugauuagugaugaggaa

SEQ ID NO: 2224876 - RNA, 19 nt, Homo sapiens
  misc_RNA (1)...(19): siRNA sense strand
gggacgacguggaugguga

SEQ ID NO: 2224877 - RNA, 19 nt, Homo sapiens
  misc_RNA (1)...(19): siRNA sense strand
cggcaugucuauagaaacu

SEQ ID NO: 2224878 - RNA, 19 nt, Homo sapiens
  misc_RNA (1)...(19): siRNA sense strand
gagagauggaaaaggaaua

SEQ ID NO: 2224879 - RNA, 19 nt, Homo sapiens
  misc_RNA (1)...(19): siRNA sense strand
ccguggaaccaauggaaau

SEQ ID NO: 2224880 - RNA, 19 nt, Homo sapiens
  misc_RNA (1)...(19): siRNA sense strand
agaaacagacuuuggugaa

SEQ ID NO: 2224881 - RNA, 19 nt, Homo sapiens
  misc_RNA (1)...(19): siRNA sense strand
uagcacaacaggagaaaga

SEQ ID NO: 2224882 - RNA, 19 nt, Homo sapiens
  misc_RNA (1)...(19): siRNA sense strand
agacagagaaagagccuga

SEQ ID NO: 2224883 - RNA, 19 nt, Homo sapiens
  misc_RNA (1)...(19): siRNA sense strand
cgacguggauggugagcca

SEQ ID NO: 2224884 - RNA, 19 nt, Homo sapiens
  misc_RNA (1)...(19): siRNA sense strand
cugagaaagaugcggaaga

SEQ ID NO: 2224885 - RNA, 19 nt, Homo sapiens
  misc_RNA (1)...(19): siRNA sense strand
gugaagagaaggcagagaa

SEQ ID NO: 2224886 - RNA, 19 nt, Homo sapiens
  misc_RNA (1)...(19): siRNA sense strand
ccacagacucaguuccaaa

SEQ ID NO: 2224887 - RNA, 19 nt, Homo sapiens
  misc_RNA (1)...(19): siRNA sense strand
ugucaaagaaugaaacaca

SEQ ID NO: 2224888 - RNA, 19 nt, Homo sapiens
  misc_RNA (1)...(19): siRNA sense strand
gugauuauaccgaaggaau

SEQ ID NO: 2224889 - RNA, 19 nt, Homo sapiens
  misc_RNA (1)...(19): siRNA sense strand
ggaacagaacgaagacaga

SEQ ID NO: 2224890 - RNA, 19 nt, Homo sapiens
  misc_RNA (1)...(19): siRNA sense strand
cgauaagugaugagucuau

SEQ ID NO: 2224891 - RNA, 19 nt, Homo sapiens
  misc_RNA (1)...(19): siRNA sense strand
gguuagacauagugacgca

SEQ ID NO: 2224892 - RNA, 19 nt, Homo sapiens
  misc_RNA (1)...(19): siRNA sense strand
acacaguucagaagaggaa

SEQ ID NO: 2224893 - RNA, 19 nt, Homo sapiens
  misc_RNA (1)...(19): siRNA sense strand
uuaaagugagagauggaaa

SEQ ID NO: 2224894 - RNA, 19 nt, Homo sapiens
  misc_RNA (1)...(19): siRNA sense strand
cacaggaagcugagaaaga

SEQ ID NO: 2224895 - RNA, 19 nt, Homo sapiens
  misc_RNA (1)...(19): siRNA sense strand
ggccaggagcagaagaaau

SEQ ID NO: 2224896 - RNA, 19 nt, Homo sapiens
  misc_RNA (1)...(19): siRNA sense strand
guggaugacucgaagggau

SEQ ID NO: 2224897 - RNA, 19 nt, Homo sapiens
  misc_RNA (1)...(19): siRNA sense strand
aggcauaacaaauaccuua

SEQ ID NO: 2224898 - RNA, 19 nt, Homo sapiens
  misc_RNA (1)...(19): siRNA sense strand
acccaaguucgaagagaaa

SEQ ID NO: 2224899 - RNA, 19 nt, Homo sapiens
  misc_RNA (1)...(19): siRNA sense strand
uaugcuaaggaaagagaaa

SEQ ID NO: 2224900 - RNA, 19 nt, Homo sapiens
  misc_RNA (1)...(19): siRNA sense strand
gccacaggaagcugagaaa

SEQ ID NO: 2224901 - RNA, 19 nt, Homo sapiens
  misc_RNA (1)...(19): siRNA sense strand
aauccaaagauaagaccua

SEQ ID NO: 2224902 - RNA, 19 nt, Homo sapiens
  misc_RNA (1)...(19): siRNA sense strand
ccucaugacaccaaaguga

SEQ ID NO: 2224903 - RNA, 19 nt, Homo sapiens
  misc_RNA (1)...(19): siRNA sense strand
gauuagcacaacaggagaa

SEQ ID NO: 2224904 - RNA, 19 nt, Homo sapiens
  misc_RNA (1)...(19): siRNA sense strand
ggcaagaaagaaugaauca

SEQ ID NO: 2224905 - RNA, 19 nt, Homo sapiens
  misc_RNA (1)...(19): siRNA sense strand
ugaggaacuucaagcagaa

SEQ ID NO: 2224906 - RNA, 19 nt, Homo sapiens
  misc_RNA (1)...(19): siRNA sense strand
cuaugauuaaggacagaaa

SEQ ID NO: 2224907 - RNA, 19 nt, Homo sapiens
  misc_RNA (1)...(19): siRNA sense strand
gguaggaacuagggaggga

SEQ ID NO: 2224908 - RNA, 19 nt, Homo sapiens
  misc_RNA (1)...(19): siRNA sense strand
guguaaccgccauggaaau

SEQ ID NO: 2224909 - RNA, 19 nt, Homo sapiens
  misc_RNA (1)...(19): siRNA sense strand
aggaagcucccgugaagaa

SEQ ID NO: 2224910 - RNA, 19 nt, Homo sapiens
  misc_RNA (1)...(19): siRNA sense strand
ggaaagagaagaugguccu

SEQ ID NO: 2224911 - RNA, 19 nt, Homo sapiens
  misc_RNA (1)...(19): siRNA sense strand
agacuuuggugaagagaag

SEQ ID NO: 2224912 - RNA, 19 nt, Homo sapiens
  misc_RNA (1)...(19): siRNA sense strand
ccugucaguuugcaagaaa

SEQ ID NO: 2224913 - RNA, 19 nt, Homo sapiens
  misc_RNA (1)...(19): siRNA sense strand
ugcuaaggaaagagaaaga

SEQ ID NO: 2224914 - RNA, 19 nt, Homo sapiens
  misc_RNA (1)...(19): siRNA sense strand
agaagagaggcauaacaaa

SEQ ID NO: 2224915 - RNA, 19 nt, Homo sapiens
  misc_RNA (1)...(19): siRNA sense strand
cuuuacaagaggaagaaaa

SEQ ID NO: 2224916 - RNA, 19 nt, Homo sapiens
  misc_RNA (1)...(19): siRNA sense strand
gcuaaagagcaugagaauu

SEQ ID NO: 2224917 - RNA, 19 nt, Homo sapiens
  misc_RNA (1)...(19): siRNA sense strand
ucaugacaccaaagugaaa

SEQ ID NO: 2224918 - RNA, 19 nt, Homo sapiens
  misc_RNA (1)...(19): siRNA sense strand
augaauguacaaaggagaa

SEQ ID NO: 2224919 - RNA, 19 nt, Homo sapiens
  misc_RNA (1)...(19): siRNA sense strand
ggagguagagucaaggaga

SEQ ID NO: 2224920 - RNA, 19 nt, Homo sapiens
  misc_RNA (1)...(19): siRNA sense strand
agaaguggauucagagucu

SEQ ID NO: 2224921 - RNA, 19 nt, Homo sapiens
  misc_RNA (1)...(19): siRNA sense strand
aacugaagacagagaaaga

SEQ ID NO: 2224922 - RNA, 19 nt, Homo sapiens
  misc_RNA (1)...(19): siRNA sense strand
gaggagcuggagagugaaa

SEQ ID NO: 2224923 - RNA, 19 nt, Homo sapiens
  misc_RNA (1)...(19): siRNA sense strand
cggaagaaagugaaucuga

SEQ ID NO: 2224924 - RNA, 19 nt, Homo sapiens
  misc_RNA (1)...(19): siRNA sense strand
ugggaagaaaagaaggaaa

SEQ ID NO: 2224925 - RNA, 19 nt, Homo sapiens
  misc_RNA (1)...(19): siRNA sense strand
gggaagaaaagaaggaaac

SEQ ID NO: 2224926 - RNA, 19 nt, Homo sapiens
  misc_RNA (1)...(19): siRNA sense strand
cuggaaacguucugggaaa

SEQ ID NO: 2224927 - RNA, 19 nt, Homo sapiens
  misc_RNA (1)...(19): siRNA sense strand
aagagaaaucugaggcuaa

SEQ ID NO: 2224928 - RNA, 19 nt, Homo sapiens
  misc_RNA (1)...(19): siRNA sense strand
cuaaaggagcugaaguaaa

SEQ ID NO: 2224929 - RNA, 19 nt, Homo sapiens
  misc_RNA (1)...(19): siRNA sense strand
ggaaagugggauugccaaa

SEQ ID NO: 2224930 - RNA, 19 nt, Homo sapiens
  misc_RNA (1)...(19): siRNA sense strand
ggagaauaggccagaagaa

SEQ ID NO: 2224931 - RNA, 19 nt, Homo sapiens
  misc_RNA (1)...(19): siRNA sense strand
ccgagaugauggagaugaa

SEQ ID NO: 2224932 - RNA, 19 nt, Homo sapiens
  misc_RNA (1)...(19): siRNA sense strand
uccgagaacuauugagaaa

SEQ ID NO: 2224933 - RNA, 19 nt, Homo sapiens
  misc_RNA (1)...(19): siRNA sense strand
ggcuaaaggagcugaagua

SEQ ID NO: 2224934 - RNA, 19 nt, Homo sapiens
  misc_RNA (1)...(19): siRNA sense strand
gagaaacaucugagaccaa

SEQ ID NO: 2224935 - RNA, 19 nt, Homo sapiens
  misc_RNA (1)...(19): siRNA sense strand
ugacaaauagagugcuaaa

SEQ ID NO: 2224936 - RNA, 19 nt, Homo sapiens
  misc_RNA (1)...(19): siRNA sense strand
aggccaaggaacagagcaa

SEQ ID NO: 2224937 - RNA, 19 nt, Homo sapiens
  misc_RNA (1)...(19): siRNA sense strand
aagaagagacccuggagaa

SEQ ID NO: 2224938 - RNA, 19 nt, Homo sapiens
  misc_RNA (1)...(19): siRNA sense strand
gggaagauaccgagaugau

SEQ ID NO: 2224939 - RNA, 19 nt, Homo sapiens
  misc_RNA (1)...(19): siRNA sense strand
gcuaaaagacccaaaacaa

SEQ ID NO: 2224940 - RNA, 19 nt, Homo sapiens
  misc_RNA (1)...(19): siRNA sense strand
gggugaagagucugaguau

SEQ ID NO: 2224941 - RNA, 19 nt, Homo sapiens
  misc_RNA (1)...(19): siRNA sense strand
gaaugaagucagaugucaa

SEQ ID NO: 2224942 - RNA, 19 nt, Homo sapiens
  misc_RNA (1)...(19): siRNA sense strand
uggugaaggaauuuggaaa

SEQ ID NO: 2224943 - RNA, 19 nt, Homo sapiens
  misc_RNA (1)...(19): siRNA sense strand
ugaugaaagcauugaugaa

SEQ ID NO: 2224944 - RNA, 19 nt, Homo sapiens
  misc_RNA (1)...(19): siRNA sense strand
gcgggaaacggcagaagaa

SEQ ID NO: 2224945 - RNA, 19 nt, Homo sapiens
  misc_RNA (1)...(19): siRNA sense strand
augaaaugggauugggcaa

SEQ ID NO: 2224946 - RNA, 19 nt, Homo sapiens
  misc_RNA (1)...(19): siRNA sense strand
aggagaaggaggaggagga

SEQ ID NO: 2224947 - RNA, 19 nt, Homo sapiens
  misc_RNA (1)...(19): siRNA sense strand
augaugaacuagaagaaga

SEQ ID NO: 2224948 - RNA, 19 nt, Homo sapiens
  misc_RNA (1)...(19): siRNA sense strand
cgacaaaucuucaagcagu

SEQ ID NO: 2224949 - RNA, 19 nt, Homo sapiens
  misc_RNA (1)...(19): siRNA sense strand
guuagguggcugugggaau

SEQ ID NO: 2224950 - RNA, 19 nt, Homo sapiens
  misc_RNA (1)...(19): siRNA sense strand
ccagcaggcaggaggaauu

SEQ ID NO: 2224951 - RNA, 19 nt, Homo sapiens
  misc_RNA (1)...(19): siRNA sense strand
caucagugggugaaggaau

SEQ ID NO: 2224952 - RNA, 19 nt, Homo sapiens
  misc_RNA (1)...(19): siRNA sense strand
agaagagacccuggagaaa

SEQ ID NO: 2224953 - RNA, 19 nt, Homo sapiens
  misc_RNA (1)...(19): siRNA sense strand
caggaggaauucugggaga

SEQ ID NO: 2224954 - RNA, 19 nt, Homo sapiens
  misc_RNA (1)...(19): siRNA sense strand
agggagacucugaggguga

SEQ ID NO: 2224955 - RNA, 19 nt, Homo sapiens
  misc_RNA (1)...(19): siRNA sense strand
ccacaucaucugaagagaa

SEQ ID NO: 2224956 - RNA, 19 nt, Homo sapiens
  misc_RNA (1)...(19): siRNA sense strand
agaaauggcaaucaagcaa

SEQ ID NO: 2224957 - RNA, 19 nt, Homo sapiens
  misc_RNA (1)...(19): siRNA sense strand
agauaaugucccugagcau

SEQ ID NO: 2224958 - RNA, 19 nt, Homo sapiens
  misc_RNA (1)...(19): siRNA sense strand
auaaggaacaacagcuaaa

SEQ ID NO: 2224959 - RNA, 19 nt, Homo sapiens
  misc_RNA (1)...(19): siRNA sense strand
ugaugaugaacuagaagaa

SEQ ID NO: 2224960 - RNA, 19 nt, Homo sapiens
  misc_RNA (1)...(19): siRNA sense strand
cuaaaagacccaaaacaaa

SEQ ID NO: 2224961 - RNA, 19 nt, Homo sapiens
  misc_RNA (1)...(19): siRNA sense strand
gaagagaaaucugaggcua

SEQ ID NO: 2224962 - RNA, 19 nt, Homo sapiens
  misc_RNA (1)...(19): siRNA sense strand
augaagaaauggcaaucaa

SEQ ID NO: 2224963 - RNA, 19 nt, Homo sapiens
  misc_RNA (1)...(19): siRNA sense strand
ggagaauaaacaaauggaa

SEQ ID NO: 2224964 - RNA, 19 nt, Homo sapiens
  misc_RNA (1)...(19): siRNA sense strand
caaugauaggcuuggagaa

SEQ ID NO: 2224965 - RNA, 19 nt, Homo sapiens
  misc_RNA (1)...(19): siRNA sense strand
gucugaagcuggaggacga

SEQ ID NO: 2224966 - RNA, 19 nt, Homo sapiens
  misc_RNA (1)...(19): siRNA sense strand
aggagaaacuaauucgaga

SEQ ID NO: 2224967 - RNA, 19 nt, Homo sapiens
  misc_RNA (1)...(19): siRNA sense strand
agagugaggccaaggaaca

SEQ ID NO: 2224968 - RNA, 19 nt, Homo sapiens
  misc_RNA (1)...(19): siRNA sense strand
acugcaggacaaagagaaa

SEQ ID NO: 2224969 - RNA, 19 nt, Homo sapiens
  misc_RNA (1)...(19): siRNA sense strand
cagcauaaagucuaccaaa

SEQ ID NO: 2224970 - RNA, 19 nt, Homo sapiens
  misc_RNA (1)...(19): siRNA sense strand
ggcuuggagaagagacaaa

SEQ ID NO: 2224971 - RNA, 19 nt, Homo sapiens
  misc_RNA (1)...(19): siRNA sense strand
uguucaaauucuucaggaa

SEQ ID NO: 2224972 - RNA, 19 nt, Homo sapiens
  misc_RNA (1)...(19): siRNA sense strand
cagaagcaagacagugaaa

SEQ ID NO: 2224973 - RNA, 19 nt, Homo sapiens
  misc_RNA (1)...(19): siRNA sense strand
cugccagagcguuuagaaa

SEQ ID NO: 2224974 - RNA, 19 nt, Homo sapiens
  misc_RNA (1)...(19): siRNA sense strand
cugaauuugacgaagguuu

SEQ ID NO: 2224975 - RNA, 19 nt, Homo sapiens
  misc_RNA (1)...(19): siRNA sense strand
ccaagaaucucaaaggucu

SEQ ID NO: 2224976 - RNA, 19 nt, Homo sapiens
  misc_RNA (1)...(19): siRNA sense strand
ccacugauuacgagauaca

SEQ ID NO: 2224977 - RNA, 19 nt, Homo sapiens
  misc_RNA (1)...(19): siRNA sense strand
ccuccucacucuuggcuaa

SEQ ID NO: 2224978 - RNA, 19 nt, Homo sapiens
  misc_RNA (1)...(19): siRNA sense strand
uaauaaggaacaacagcua

SEQ ID NO: 2224979 - RNA, 19 nt, Homo sapiens
  misc_RNA (1)...(19): siRNA sense strand
aggaauucugggagaugaa

SEQ ID NO: 2224980 - RNA, 19 nt, Homo sapiens
  misc_RNA (1)...(19): siRNA sense strand
ggaugguaccacuacaaua

SEQ ID NO: 2224981 - RNA, 19 nt, Homo sapiens
  misc_RNA (1)...(19): siRNA sense strand
cuacaauagcuucaagaca

SEQ ID NO: 2224982 - RNA, 19 nt, Homo sapiens
  misc_RNA (1)...(19): siRNA sense strand
gcuaaaggagcugaaguaa

SEQ ID NO: 2224983 - RNA, 19 nt, Homo sapiens
  misc_RNA (1)...(19): siRNA sense strand
gucagugauuaguggaaau

SEQ ID NO: 2224984 - RNA, 19 nt, Homo sapiens
  misc_RNA (1)...(19): siRNA sense strand
acgacaucccuaaggcaaa

SEQ ID NO: 2224985 - RNA, 19 nt, Homo sapiens
  misc_RNA (1)...(19): siRNA sense strand
ggaaacuagauucuguaaa

SEQ ID NO: 2224986 - RNA, 19 nt, Homo sapiens
  misc_RNA (1)...(19): siRNA sense strand
aggaagaugacgaggugga

SEQ ID NO: 2224987 - RNA, 19 nt, Homo sapiens
  misc_RNA (1)...(19): siRNA sense strand
ugggagaugaaaugggauu

SEQ ID NO: 2224988 - RNA, 19 nt, Homo sapiens
  misc_RNA (1)...(19): siRNA sense strand
agaagaagcaagugacugu

SEQ ID NO: 2224989 - RNA, 19 nt, Homo sapiens
  misc_RNA (1)...(19): siRNA sense strand
acaugaggccagaggcaga

SEQ ID NO: 2224990 - RNA, 19 nt, Homo sapiens
  misc_RNA (1)...(19): siRNA sense strand
aagcagggucagcgaguau

SEQ ID NO: 2224991 - RNA, 19 nt, Homo sapiens
  misc_RNA (1)...(19): siRNA sense strand
ccuuagagcccaaaaguau

SEQ ID NO: 2224992 - RNA, 19 nt, Homo sapiens
  misc_RNA (1)...(19): siRNA sense strand
cuguaaaguagcaggcaua

SEQ ID NO: 2224993 - RNA, 19 nt, Homo sapiens
  misc_RNA (1)...(19): siRNA sense strand
cuugaagaguggagagaac

SEQ ID NO: 2224994 - RNA, 19 nt, Homo sapiens
  misc_RNA (1)...(19): siRNA sense strand
agagcuaacaggugccaaa

SEQ ID NO: 2224995 - RNA, 19 nt, Homo sapiens
  misc_RNA (1)...(19): siRNA sense strand
augaaagacagcaagacaa

SEQ ID NO: 2224996 - RNA, 19 nt, Homo sapiens
  misc_RNA (1)...(19): siRNA sense strand
acucagaagcaguucaauu

SEQ ID NO: 2224997 - RNA, 19 nt, Homo sapiens
  misc_RNA (1)...(19): siRNA sense strand
gugccaaaguggugguauc

SEQ ID NO: 2224998 - RNA, 19 nt, Homo sapiens
  misc_RNA (1)...(19): siRNA sense strand
gugugaugagaaagugaaa

SEQ ID NO: 2224999 - RNA, 19 nt, Homo sapiens
  misc_RNA (1)...(19): siRNA sense strand
cagugaagugugaugagaa

SEQ ID NO: 2225000 - RNA, 19 nt, Homo sapiens
  misc_RNA (1)...(19): siRNA sense strand
gugaugagaaagugaaagu

SEQ ID NO: 2225001 - RNA, 19 nt, Homo sapiens
  misc_RNA (1)...(19): siRNA sense strand
cgguagugccaguucagaa

SEQ ID NO: 2225002 - RNA, 19 nt, Homo sapiens
  misc_RNA (1)...(19): siRNA sense strand
uguuauaugacuuggcaga

SEQ ID NO: 2225003 - RNA, 19 nt, Homo sapiens
  misc_RNA (1)...(19): siRNA sense strand
uggaauaucuggagccauc

SEQ ID NO: 2225004 - RNA, 19 nt, Homo sapiens
  misc_RNA (1)...(19): siRNA sense strand
ggugguaucugguggucga

SEQ ID NO: 2225005 - RNA, 19 nt, Homo sapiens
  misc_RNA (1)...(19): siRNA sense strand
ggcaauuaauaaagaccca

SEQ ID NO: 2225006 - RNA, 19 nt, Homo sapiens
  misc_RNA (1)...(19): siRNA sense strand
cagcaagacaauuguggca

SEQ ID NO: 2225007 - RNA, 19 nt, Homo sapiens
  misc_RNA (1)...(19): siRNA sense strand
caaaaguucugguggcuca

SEQ ID NO: 2225008 - RNA, 19 nt, Homo sapiens
  misc_RNA (1)...(19): siRNA sense strand
aagugaucgaccagagcua

SEQ ID NO: 2225009 - RNA, 19 nt, Homo sapiens
  misc_RNA (1)...(19): siRNA sense strand
uccugaaaugacugagaua

SEQ ID NO: 2225010 - RNA, 19 nt, Homo sapiens
  misc_RNA (1)...(19): siRNA sense strand
aguagcaggcauagcaaaa

SEQ ID NO: 2225011 - RNA, 19 nt, Homo sapiens
  misc_RNA (1)...(19): siRNA sense strand
augagaaagugaaaguguu

SEQ ID NO: 2225012 - RNA, 19 nt, Homo sapiens
  misc_RNA (1)...(19): siRNA sense strand
ugaagaguggagagaacuu

SEQ ID NO: 2225013 - RNA, 19 nt, Homo sapiens
  misc_RNA (1)...(19): siRNA sense strand
gcuggaaccaaaugugaca

SEQ ID NO: 2225014 - RNA, 19 nt, Homo sapiens
  misc_RNA (1)...(19): siRNA sense strand
cagccaaacuugagguugc

SEQ ID NO: 2225015 - RNA, 19 nt, Homo sapiens
  misc_RNA (1)...(19): siRNA sense strand
aaguaugauuaucgggaaa

SEQ ID NO: 2225016 - RNA, 19 nt, Homo sapiens
  misc_RNA (1)...(19): siRNA sense strand
ggacagacuucucgggcuu

SEQ ID NO: 2225017 - RNA, 19 nt, Homo sapiens
  misc_RNA (1)...(19): siRNA sense strand
aggaagaaauaccgagaca

SEQ ID NO: 2225018 - RNA, 19 nt, Homo sapiens
  misc_RNA (1)...(19): siRNA sense strand
ucauugaaggagagagcaa

SEQ ID NO: 2225019 - RNA, 19 nt, Homo sapiens
  misc_RNA (1)...(19): siRNA sense strand
agaaaaucgccgaaaguua

SEQ ID NO: 2225020 - RNA, 19 nt, Homo sapiens
  misc_RNA (1)...(19): siRNA sense strand
caguauaaggagacaauga

SEQ ID NO: 2225021 - RNA, 19 nt, Homo sapiens
  misc_RNA (1)...(19): siRNA sense strand
gugcacaauuugagaucca

SEQ ID NO: 2225022 - RNA, 19 nt, Homo sapiens
  misc_RNA (1)...(19): siRNA sense strand
gaguaugagaaguaugauu

SEQ ID NO: 2225023 - RNA, 19 nt, Homo sapiens
  misc_RNA (1)...(19): siRNA sense strand
agagaagaacacagcggua

SEQ ID NO: 2225024 - RNA, 19 nt, Homo sapiens
  misc_RNA (1)...(19): siRNA sense strand
ccacagccggagagaagaa

SEQ ID NO: 2225025 - RNA, 19 nt, Homo sapiens
  misc_RNA (1)...(19): siRNA sense strand
acguauacccacagcaaaa

SEQ ID NO: 2225026 - RNA, 19 nt, Homo sapiens
  misc_RNA (1)...(19): siRNA sense strand
acagaauauucaagcacau

SEQ ID NO: 2225027 - RNA, 19 nt, Homo sapiens
  misc_RNA (1)...(19): siRNA sense strand
uggcaaaagcacaaggauu

SEQ ID NO: 2225028 - RNA, 19 nt, Homo sapiens
  misc_RNA (1)...(19): siRNA sense strand
aagaagcaguauaaggaga

SEQ ID NO: 2225029 - RNA, 19 nt, Homo sapiens
  misc_RNA (1)...(19): siRNA sense strand
gaaguaugauuaucgggaa

SEQ ID NO: 2225030 - RNA, 19 nt, Homo sapiens
  misc_RNA (1)...(19): siRNA sense strand
cugagaggauuguggggua

SEQ ID NO: 2225031 - RNA, 19 nt, Homo sapiens
  misc_RNA (1)...(19): siRNA sense strand
caucaaaguggacgaacga

SEQ ID NO: 2225032 - RNA, 19 nt, Homo sapiens
  misc_RNA (1)...(19): siRNA sense strand
aggagacaaugaugggaca

SEQ ID NO: 2225033 - RNA, 19 nt, Homo sapiens
  misc_RNA (1)...(19): siRNA sense strand
aaggagagagcaagguuau

SEQ ID NO: 2225034 - RNA, 19 nt, Homo sapiens
  misc_RNA (1)...(19): siRNA sense strand
agaacacagcgguaggaau

SEQ ID NO: 2225035 - RNA, 19 nt, Homo sapiens
  misc_RNA (1)...(19): siRNA sense strand
cuacguauacccacagcaa

SEQ ID NO: 2225036 - RNA, 19 nt, Homo sapiens
  misc_RNA (1)...(19): siRNA sense strand
aggaaguacaugcugguau

SEQ ID NO: 2225037 - RNA, 19 nt, Homo sapiens
  misc_RNA (1)...(19): siRNA sense strand
aguacaugcugguauucaa

SEQ ID NO: 2225038 - RNA, 19 nt, Homo sapiens
  misc_RNA (1)...(19): siRNA sense strand
gcacaaggauucucgcugu

SEQ ID NO: 2225039 - RNA, 19 nt, Homo sapiens
  misc_RNA (1)...(19): siRNA sense strand
guucuauggaauugugaca

SEQ ID NO: 2225040 - RNA, 19 nt, Homo sapiens
  misc_RNA (1)...(19): siRNA sense strand
aggacauucucaugaacuu

SEQ ID NO: 2225041 - RNA, 19 nt, Homo sapiens
  misc_RNA (1)...(19): siRNA sense strand
acccagaagaagcaguaua

SEQ ID NO: 2225042 - RNA, 19 nt, Homo sapiens
  misc_RNA (1)...(19): siRNA sense strand
ccuugggaucaauuggaaa

SEQ ID NO: 2225043 - RNA, 19 nt, Homo sapiens
  misc_RNA (1)...(19): siRNA sense strand
ccuucuacaaucaggucua

SEQ ID NO: 2225044 - RNA, 19 nt, Homo sapiens
  misc_RNA (1)...(19): siRNA sense strand
gcgacagagcugcaugaau

SEQ ID NO: 2225045 - RNA, 19 nt, Homo sapiens
  misc_RNA (1)...(19): siRNA sense strand
ggaucagacaccaggaaug

SEQ ID NO: 2225046 - RNA, 19 nt, Homo sapiens
  misc_RNA (1)...(19): siRNA sense strand
aggcgaugagagauuguua

SEQ ID NO: 2225047 - RNA, 19 nt, Homo sapiens
  misc_RNA (1)...(19): siRNA sense strand
ggauacacaucaaagugga

SEQ ID NO: 2225048 - RNA, 19 nt, Homo sapiens
  misc_RNA (1)...(19): siRNA sense strand
cgucauugaaggagagagc

SEQ ID NO: 2225049 - RNA, 19 nt, Homo sapiens
  misc_RNA (1)...(19): siRNA sense strand
uggccaacgucacgggaaa

SEQ ID NO: 2225050 - RNA, 19 nt, Homo sapiens
  misc_RNA (1)...(19): siRNA sense strand
gcuucaacccaaagaacaa

SEQ ID NO: 2225051 - RNA, 19 nt, Homo sapiens
  misc_RNA (1)...(19): siRNA sense strand
ggacuuaccggcaaggcua

SEQ ID NO: 2225052 - RNA, 19 nt, Homo sapiens
  misc_RNA (1)...(19): siRNA sense strand
caucaaggagacagcacaa

SEQ ID NO: 2225053 - RNA, 19 nt, Homo sapiens
  misc_RNA (1)...(19): siRNA sense strand
agaacaaaaucaaggugua

SEQ ID NO: 2225054 - RNA, 19 nt, Homo sapiens
  misc_RNA (1)...(19): siRNA sense strand
caguguuaguacucgauaa

SEQ ID NO: 2225055 - RNA, 19 nt, Homo sapiens
  misc_RNA (1)...(19): siRNA sense strand
gagaugaauaaguggaagu

SEQ ID NO: 2225056 - RNA, 19 nt, Homo sapiens
  misc_RNA (1)...(19): siRNA sense strand
cugaccgguugguggguua

SEQ ID NO: 2225057 - RNA, 19 nt, Homo sapiens
  misc_RNA (1)...(19): siRNA sense strand
cucucaaggugguggaaca

SEQ ID NO: 2225058 - RNA, 19 nt, Homo sapiens
  misc_RNA (1)...(19): siRNA sense strand
ucauaugaacugugaagau

SEQ ID NO: 2225059 - RNA, 19 nt, Homo sapiens
  misc_RNA (1)...(19): siRNA sense strand
ugaacuuccugguggccaa

SEQ ID NO: 2225060 - RNA, 19 nt, Homo sapiens
  misc_RNA (1)...(19): siRNA sense strand
ucccaagaaugaagaccaa

SEQ ID NO: 2225061 - RNA, 19 nt, Homo sapiens
  misc_RNA (1)...(19): siRNA sense strand
cgggaaaagcaguuaucaa

SEQ ID NO: 2225062 - RNA, 19 nt, Homo sapiens
  misc_RNA (1)...(19): siRNA sense strand
aguguuaguacucgauaaa

SEQ ID NO: 2225063 - RNA, 19 nt, Homo sapiens
  misc_RNA (1)...(19): siRNA sense strand
cauuaaaaguugugaggac

SEQ ID NO: 2225064 - RNA, 19 nt, Homo sapiens
  misc_RNA (1)...(19): siRNA sense strand
ccuccaucgaugugcuuaa

SEQ ID NO: 2225065 - RNA, 19 nt, Homo sapiens
  misc_RNA (1)...(19): siRNA sense strand
gcaauuugguuaugagguc

SEQ ID NO: 2225066 - RNA, 19 nt, Homo sapiens
  misc_RNA (1)...(19): siRNA sense strand
cgaaagaaauucaaguguc

SEQ ID NO: 2225067 - RNA, 19 nt, Homo sapiens
  misc_RNA (1)...(19): siRNA sense strand
ccucugacgagcugcaauu

SEQ ID NO: 2225068 - RNA, 19 nt, Homo sapiens
  misc_RNA (1)...(19): siRNA sense strand
agaacuggguagaugcuca

SEQ ID NO: 2225069 - RNA, 19 nt, Homo sapiens
  misc_RNA (1)...(19): siRNA sense strand
gaaagaaauucaagugucc

SEQ ID NO: 2225070 - RNA, 19 nt, Homo sapiens
  misc_RNA (1)...(19): siRNA sense strand
ccgccauaguccucaccua

SEQ ID NO: 2225071 - RNA, 19 nt, Homo sapiens
  misc_RNA (1)...(19): siRNA sense strand
cuacaaaaugccuggggau

SEQ ID NO: 2225072 - RNA, 19 nt, Homo sapiens
  misc_RNA (1)...(19): siRNA sense strand
uggagaggucagagugcau

SEQ ID NO: 2225073 - RNA, 19 nt, Homo sapiens
  misc_RNA (1)...(19): siRNA sense strand
gcucauaugaacugugaag

SEQ ID NO: 2225074 - RNA, 19 nt, Homo sapiens
  misc_RNA (1)...(19): siRNA sense strand
uagaaggauucgaaggcaa

SEQ ID NO: 2225075 - RNA, 19 nt, Homo sapiens
  misc_RNA (1)...(19): siRNA sense strand
gccaagagauucaagguga

SEQ ID NO: 2225076 - RNA, 19 nt, Homo sapiens
  misc_RNA (1)...(19): siRNA sense strand
agguggagguggucaucaa

SEQ ID NO: 2225077 - RNA, 19 nt, Homo sapiens
  misc_RNA (1)...(19): siRNA sense strand
ggaagaggucaguggccca

SEQ ID NO: 2225078 - RNA, 19 nt, Homo sapiens
  misc_RNA (1)...(19): siRNA sense strand
gaaagagagugcauggaag

SEQ ID NO: 2225079 - RNA, 19 nt, Homo sapiens
  misc_RNA (1)...(19): siRNA sense strand
ucuaccaagccaagagauu

SEQ ID NO: 2225080 - RNA, 19 nt, Homo sapiens
  misc_RNA (1)...(19): siRNA sense strand
gguucacaaaggagaccua

SEQ ID NO: 2225081 - RNA, 19 nt, Homo sapiens
  misc_RNA (1)...(19): siRNA sense strand
auaaauacaaagauggcga

SEQ ID NO: 2225082 - RNA, 19 nt, Homo sapiens
  misc_RNA (1)...(19): siRNA sense strand
gggaaguacgggaucuaca

SEQ ID NO: 2225083 - RNA, 19 nt, Homo sapiens
  misc_RNA (1)...(19): siRNA sense strand
ggaacacggagcaggagga

SEQ ID NO: 2225084 - RNA, 19 nt, Homo sapiens
  misc_RNA (1)...(19): siRNA sense strand
agguggucaucaagcacaa

SEQ ID NO: 2225085 - RNA, 19 nt, Homo sapiens
  misc_RNA (1)...(19): siRNA sense strand
cuacaaagcugcaggcaca

SEQ ID NO: 2225086 - RNA, 19 nt, Homo sapiens
  misc_RNA (1)...(19): siRNA sense strand
cagaaaacuaagagacaaa

SEQ ID NO: 2225087 - RNA, 19 nt, Homo sapiens
  misc_RNA (1)...(19): siRNA sense strand
cuuccaaaggagauagaaa

SEQ ID NO: 2225088 - RNA, 19 nt, Homo sapiens
  misc_RNA (1)...(19): siRNA sense strand
acacugauuucuugggaga

SEQ ID NO: 2225089 - RNA, 19 nt, Homo sapiens
  misc_RNA (1)...(19): siRNA sense strand
ccugaaagacaguguuaca

SEQ ID NO: 2225090 - RNA, 19 nt, Homo sapiens
  misc_RNA (1)...(19): siRNA sense strand
cagaagagauacagaggac

SEQ ID NO: 2225091 - RNA, 19 nt, Homo sapiens
  misc_RNA (1)...(19): siRNA sense strand
ggguauucuuucaagcaau

SEQ ID NO: 2225092 - RNA, 19 nt, Homo sapiens
  misc_RNA (1)...(19): siRNA sense strand
acucaguuguugaaggaca

SEQ ID NO: 2225093 - RNA, 19 nt, Homo sapiens
  misc_RNA (1)...(19): siRNA sense strand
gauaaugaguguaccacca

SEQ ID NO: 2225094 - RNA, 19 nt, Homo sapiens
  misc_RNA (1)...(19): siRNA sense strand
auuggaaaccaguggauau

SEQ ID NO: 2225095 - RNA, 19 nt, Homo sapiens
  misc_RNA (1)...(19): siRNA sense strand
ucuuauaucaagugguaca

SEQ ID NO: 2225096 - RNA, 19 nt, Homo sapiens
  misc_RNA (1)...(19): siRNA sense strand
cuacagggaaggagggaag

SEQ ID NO: 2225097 - RNA, 19 nt, Homo sapiens
  misc_RNA (1)...(19): siRNA sense strand
cuacugaagcacacccaaa

SEQ ID NO: 2225098 - RNA, 19 nt, Homo sapiens
  misc_RNA (1)...(19): siRNA sense strand
ccuuaaaacaucugagagu

SEQ ID NO: 2225099 - RNA, 19 nt, Homo sapiens
  misc_RNA (1)...(19): siRNA sense strand
cuuugggguucaagaaaua

SEQ ID NO: 2225100 - RNA, 19 nt, Homo sapiens
  misc_RNA (1)...(19): siRNA sense strand
uaaaauacuucacgggaga

SEQ ID NO: 2225101 - RNA, 19 nt, Homo sapiens
  misc_RNA (1)...(19): siRNA sense strand
caggaucguuggaggaacu

SEQ ID NO: 2225102 - RNA, 19 nt, Homo sapiens
  misc_RNA (1)...(19): siRNA sense strand
acugaaauccugugcacuu

SEQ ID NO: 2225103 - RNA, 19 nt, Homo sapiens
  misc_RNA (1)...(19): siRNA sense strand
gggaagggcaaguguuacu

SEQ ID NO: 2225104 - RNA, 19 nt, Homo sapiens
  misc_RNA (1)...(19): siRNA sense strand
ccuuagugaccaacgaaga

SEQ ID NO: 2225105 - RNA, 19 nt, Homo sapiens
  misc_RNA (1)...(19): siRNA sense strand
gccaagagugaauaggaca

SEQ ID NO: 2225106 - RNA, 19 nt, Homo sapiens
  misc_RNA (1)...(19): siRNA sense strand
caguauaaaauggcagaaa

SEQ ID NO: 2225107 - RNA, 19 nt, Homo sapiens
  misc_RNA (1)...(19): siRNA sense strand
uuccaaaggagauagaaau

SEQ ID NO: 2225108 - RNA, 19 nt, Homo sapiens
  misc_RNA (1)...(19): siRNA sense strand
ggguagagucaccuaagau

SEQ ID NO: 2225109 - RNA, 19 nt, Homo sapiens
  misc_RNA (1)...(19): siRNA sense strand
ugaccaacgaagagugcca

SEQ ID NO: 2225110 - RNA, 19 nt, Homo sapiens
  misc_RNA (1)...(19): siRNA sense strand
cuacaaagcugcaggcaca

SEQ ID NO: 2225111 - RNA, 19 nt, Homo sapiens
  misc_RNA (1)...(19): siRNA sense strand
gcaacgaagggaagggcaa

SEQ ID NO: 2225112 - RNA, 19 nt, Homo sapiens
  misc_RNA (1)...(19): siRNA sense strand
cagaaaacuaagagacaaa

SEQ ID NO: 2225113 - RNA, 19 nt, Homo sapiens
  misc_RNA (1)...(19): siRNA sense strand
gagaagaacuggauauugu

SEQ ID NO: 2225114 - RNA, 19 nt, Homo sapiens
  misc_RNA (1)...(19): siRNA sense strand
cuuccaaaggagauagaaa

SEQ ID NO: 2225115 - RNA, 19 nt, Homo sapiens
  misc_RNA (1)...(19): siRNA sense strand
caggaauggcccaaagaau

SEQ ID NO: 2225116 - RNA, 19 nt, Homo sapiens
  misc_RNA (1)...(19): siRNA sense strand
acacugauuucuugggaga

SEQ ID NO: 2225117 - RNA, 19 nt, Homo sapiens
  misc_RNA (1)...(19): siRNA sense strand
ccugaaagacaguguuaca

SEQ ID NO: 2225118 - RNA, 19 nt, Homo sapiens
  misc_RNA (1)...(19): siRNA sense strand
cagaagagauacagaggac

SEQ ID NO: 2225119 - RNA, 19 nt, Homo sapiens
  misc_RNA (1)...(19): siRNA sense strand
ugggagaagaacuggauau

SEQ ID NO: 2225120 - RNA, 19 nt, Homo sapiens
  misc_RNA (1)...(19): siRNA sense strand
ggguauucuuucaagcaau

SEQ ID NO: 2225121 - RNA, 19 nt, Homo sapiens
  misc_RNA (1)...(19): siRNA sense strand
acucaguuguugaaggaca

SEQ ID NO: 2225122 - RNA, 19 nt, Homo sapiens
  misc_RNA (1)...(19): siRNA sense strand
gauaaugaguguaccacca

SEQ ID NO: 2225123 - RNA, 19 nt, Homo sapiens
  misc_RNA (1)...(19): siRNA sense strand
auuggaaaccaguggauau

SEQ ID NO: 2225124 - RNA, 19 nt, Homo sapiens
  misc_RNA (1)...(19): siRNA sense strand
gggagaagaacuggauauu

SEQ ID NO: 2225125 - RNA, 19 nt, Homo sapiens
  misc_RNA (1)...(19): siRNA sense strand
ucuuauaucaagugguaca

SEQ ID NO: 2225126 - RNA, 19 nt, Homo sapiens
  misc_RNA (1)...(19): siRNA sense strand
cuacagggaaggagggaag

SEQ ID NO: 2225127 - RNA, 19 nt, Homo sapiens
  misc_RNA (1)...(19): siRNA sense strand
cuacugaagcacacccaaa

SEQ ID NO: 2225128 - RNA, 19 nt, Homo sapiens
  misc_RNA (1)...(19): siRNA sense strand
ccuuaaaacaucugagagu

SEQ ID NO: 2225129 - RNA, 19 nt, Homo sapiens
  misc_RNA (1)...(19): siRNA sense strand
cuuugggguucaagaaaua

SEQ ID NO: 2225130 - RNA, 19 nt, Homo sapiens
  misc_RNA (1)...(19): siRNA sense strand
uaaaauacuucacgggaga

SEQ ID NO: 2225131 - RNA, 19 nt, Homo sapiens
  misc_RNA (1)...(19): siRNA sense strand
caggaucguuggaggaacu

SEQ ID NO: 2225132 - RNA, 19 nt, Homo sapiens
  misc_RNA (1)...(19): siRNA sense strand
acugaaauccugugcacuu

SEQ ID NO: 2225133 - RNA, 19 nt, Homo sapiens
  misc_RNA (1)...(19): siRNA sense strand
gggaagggcaaguguuacu

SEQ ID NO: 2225134 - RNA, 19 nt, Homo sapiens
  misc_RNA (1)...(19): siRNA sense strand
ccuuagugaccaacgaaga

SEQ ID NO: 2225135 - RNA, 19 nt, Homo sapiens
  misc_RNA (1)...(19): siRNA sense strand
ggaaucaccaucugaggau

SEQ ID NO: 2225136 - RNA, 19 nt, Homo sapiens
  misc_RNA (1)...(19): siRNA sense strand
gccaagagugaauaggaca

SEQ ID NO: 2225137 - RNA, 19 nt, Homo sapiens
  misc_RNA (1)...(19): siRNA sense strand
caguauaaaauggcagaaa

SEQ ID NO: 2225138 - RNA, 19 nt, Homo sapiens
  misc_RNA (1)...(19): siRNA sense strand
uuccaaaggagauagaaau

SEQ ID NO: 2225139 - RNA, 19 nt, Homo sapiens
  misc_RNA (1)...(19): siRNA sense strand
ggguagagucaccuaagau

SEQ ID NO: 2225140 - RNA, 19 nt, Homo sapiens
  misc_RNA (1)...(19): siRNA sense strand
ugaccaacgaagagugcca

SEQ ID NO: 2225141 - RNA, 19 nt, Homo sapiens
  misc_RNA (1)...(19): siRNA sense strand
gagggaaggacgcuugcaa

SEQ ID NO: 2225142 - RNA, 19 nt, Homo sapiens
  misc_RNA (1)...(19): siRNA sense strand
guacaaagcugaagagcac

SEQ ID NO: 2225143 - RNA, 19 nt, Homo sapiens
  misc_RNA (1)...(19): siRNA sense strand
ccaagaaagugaaagacca

SEQ ID NO: 2225144 - RNA, 19 nt, Homo sapiens
  misc_RNA (1)...(19): siRNA sense strand
gagcauaaguacaaagcug

SEQ ID NO: 2225145 - RNA, 19 nt, Homo sapiens
  misc_RNA (1)...(19): siRNA sense strand
aguacaaagcugaagagca

SEQ ID NO: 2225146 - RNA, 19 nt, Homo sapiens
  misc_RNA (1)...(19): siRNA sense strand
agcccaagaaagugaaaga

SEQ ID NO: 2225147 - RNA, 19 nt, Homo sapiens
  misc_RNA (1)...(19): siRNA sense strand
gugaaagaccacugcagca

SEQ ID NO: 2225148 - RNA, 19 nt, Homo sapiens
  misc_RNA (1)...(19): siRNA sense strand
gguuccugcuggugagcuu

SEQ ID NO: 2225149 - RNA, 19 nt, Homo sapiens
  misc_RNA (1)...(19): siRNA sense strand
gccagaaagagaagugcuu

SEQ ID NO: 2225150 - RNA, 19 nt, Homo sapiens
  misc_RNA (1)...(19): siRNA sense strand
gucaagaagaagagagauu

SEQ ID NO: 2225151 - RNA, 19 nt, Homo sapiens
  misc_RNA (1)...(19): siRNA sense strand
guaucuggacaaugagaaa

SEQ ID NO: 2225152 - RNA, 19 nt, Homo sapiens
  misc_RNA (1)...(19): siRNA sense strand
ccaaauguauuguggggaa

SEQ ID NO: 2225153 - RNA, 19 nt, Homo sapiens
  misc_RNA (1)...(19): siRNA sense strand
ccacaggagaacaagggaa

SEQ ID NO: 2225154 - RNA, 19 nt, Homo sapiens
  misc_RNA (1)...(19): siRNA sense strand
cugcaauggugaaugccaa

SEQ ID NO: 2225155 - RNA, 19 nt, Homo sapiens
  misc_RNA (1)...(19): siRNA sense strand
gggacaauaucuaugccua

SEQ ID NO: 2225156 - RNA, 19 nt, Homo sapiens
  misc_RNA (1)...(19): siRNA sense strand
uaaaagaaacccugcgaaa

SEQ ID NO: 2225157 - RNA, 19 nt, Homo sapiens
  misc_RNA (1)...(19): siRNA sense strand
aggucaagaagaagagaga

SEQ ID NO: 2225158 - RNA, 19 nt, Homo sapiens
  misc_RNA (1)...(19): siRNA sense strand
acaaugagaaagaaagaga

SEQ ID NO: 2225159 - RNA, 19 nt, Homo sapiens
  misc_RNA (1)...(19): siRNA sense strand
ccaaagaugacgaaggugu

SEQ ID NO: 2225160 - RNA, 19 nt, Homo sapiens
  misc_RNA (1)...(19): siRNA sense strand
ccaaggauucaguguggaa

SEQ ID NO: 2225161 - RNA, 19 nt, Homo sapiens
  misc_RNA (1)...(19): siRNA sense strand
ccugauguacggagcuaaa

SEQ ID NO: 2225162 - RNA, 19 nt, Homo sapiens
  misc_RNA (1)...(19): siRNA sense strand
ccuggaugguccuggagua

SEQ ID NO: 2225163 - RNA, 19 nt, Homo sapiens
  misc_RNA (1)...(19): siRNA sense strand
cuggacaaugagaaagaaa

SEQ ID NO: 2225164 - RNA, 19 nt, Homo sapiens
  misc_RNA (1)...(19): siRNA sense strand
ugaagaagauguuccguga

SEQ ID NO: 2225165 - RNA, 19 nt, Homo sapiens
  misc_RNA (1)...(19): siRNA sense strand
cagucgaaacccagaaaca

SEQ ID NO: 2225166 - RNA, 19 nt, Homo sapiens
  misc_RNA (1)...(19): siRNA sense strand
uuuacgaugccuuggaaua

SEQ ID NO: 2225167 - RNA, 19 nt, Homo sapiens
  misc_RNA (1)...(19): siRNA sense strand
acaaauuccaagaagguca

SEQ ID NO: 2225168 - RNA, 19 nt, Homo sapiens
  misc_RNA (1)...(19): siRNA sense strand
aaugaagcauggaugacaa

SEQ ID NO: 2225169 - RNA, 19 nt, Homo sapiens
  misc_RNA (1)...(19): siRNA sense strand
ccaugauaaugaugccaau

SEQ ID NO: 2225170 - RNA, 19 nt, Homo sapiens
  misc_RNA (1)...(19): siRNA sense strand
uugcagaggucaacagcga

SEQ ID NO: 2225171 - RNA, 19 nt, Homo sapiens
  misc_RNA (1)...(19): siRNA sense strand
gaagaagaugggaacguga

SEQ ID NO: 2225172 - RNA, 19 nt, Homo sapiens
  misc_RNA (1)...(19): siRNA sense strand
uggaaugaagcauggauga

SEQ ID NO: 2225173 - RNA, 19 nt, Homo sapiens
  misc_RNA (1)...(19): siRNA sense strand
caaugagaaagaaagagaa

SEQ ID NO: 2225174 - RNA, 19 nt, Homo sapiens
  misc_RNA (1)...(19): siRNA sense strand
acucuaaugcagcggaaga

SEQ ID NO: 2225175 - RNA, 19 nt, Homo sapiens
  misc_RNA (1)...(19): siRNA sense strand
gcagugacucccugagaca

SEQ ID NO: 2225176 - RNA, 19 nt, Homo sapiens
  misc_RNA (1)...(19): siRNA sense strand
caucaagguccguggcacu

SEQ ID NO: 2225177 - RNA, 19 nt, Homo sapiens
  misc_RNA (1)...(19): siRNA sense strand
acauuacagcuaagaaaga

SEQ ID NO: 2225178 - RNA, 19 nt, Homo sapiens
  misc_RNA (1)...(19): siRNA sense strand
aagaaggucaagaagaaga

SEQ ID NO: 2225179 - RNA, 19 nt, Homo sapiens
  misc_RNA (1)...(19): siRNA sense strand
acacuaacaagguggacca

SEQ ID NO: 2225180 - RNA, 19 nt, Homo sapiens
  misc_RNA (1)...(19): siRNA sense strand
aggagagaugggacacuaa

SEQ ID NO: 2225181 - RNA, 19 nt, Homo sapiens
  misc_RNA (1)...(19): siRNA sense strand
cugacaaguaugaaaacaa

SEQ ID NO: 2225182 - RNA, 19 nt, Homo sapiens
  misc_RNA (1)...(19): siRNA sense strand
cuuucuaugugcagauuga

SEQ ID NO: 2225183 - RNA, 19 nt, Homo sapiens
  misc_RNA (1)...(19): siRNA sense strand
cuggaugguccuggaguaa

SEQ ID NO: 2225184 - RNA, 19 nt, Homo sapiens
  misc_RNA (1)...(19): siRNA sense strand
ugagaaagaaagagaagag

SEQ ID NO: 2225185 - RNA, 19 nt, Homo sapiens
  misc_RNA (1)...(19): siRNA sense strand
caucggaagcugauagcca

SEQ ID NO: 2225186 - RNA, 19 nt, Homo sapiens
  misc_RNA (1)...(19): siRNA sense strand
caaauguauuguggggaaa

SEQ ID NO: 2225187 - RNA, 19 nt, Homo sapiens
  misc_RNA (1)...(19): siRNA sense strand
gacuggaagcguugacauu

SEQ ID NO: 2225188 - RNA, 19 nt, Homo sapiens
  misc_RNA (1)...(19): siRNA sense strand
cugagaauccaguccggua

SEQ ID NO: 2225189 - RNA, 19 nt, Homo sapiens
  misc_RNA (1)...(19): siRNA sense strand
ggaaaagacuucaagcucu

SEQ ID NO: 2225190 - RNA, 19 nt, Homo sapiens
  misc_RNA (1)...(19): siRNA sense strand
auaccggagcucugagaau

SEQ ID NO: 2225191 - RNA, 19 nt, Homo sapiens
  misc_RNA (1)...(19): siRNA sense strand
gcuacccacaggagaacaa

SEQ ID NO: 2225192 - RNA, 19 nt, Homo sapiens
  misc_RNA (1)...(19): siRNA sense strand
auuccaagaaggucaagaa

SEQ ID NO: 2225193 - RNA, 19 nt, Homo sapiens
  misc_RNA (1)...(19): siRNA sense strand
aggcagaagagcaguucca

SEQ ID NO: 2225194 - RNA, 19 nt, Homo sapiens
  misc_RNA (1)...(19): siRNA sense strand
gcacaagguacgagcgaaa

SEQ ID NO: 2225195 - RNA, 19 nt, Homo sapiens
  misc_RNA (1)...(19): siRNA sense strand
agguacaacuggcgggaga

SEQ ID NO: 2225196 - RNA, 19 nt, Homo sapiens
  misc_RNA (1)...(19): siRNA sense strand
agggcaaccuagagcgaga

SEQ ID NO: 2225197 - RNA, 19 nt, Homo sapiens
  misc_RNA (1)...(19): siRNA sense strand
gacaagaacuucaccgaga

SEQ ID NO: 2225198 - RNA, 19 nt, Homo sapiens
  misc_RNA (1)...(19): siRNA sense strand
agaagaagucgcuggagga

SEQ ID NO: 2225199 - RNA, 19 nt, Homo sapiens
  misc_RNA (1)...(19): siRNA sense strand
aggaggugcgcaagggcaa

SEQ ID NO: 2225200 - RNA, 19 nt, Homo sapiens
  misc_RNA (1)...(19): siRNA sense strand
ucuuggaggaggugcgcaa

SEQ ID NO: 2225201 - RNA, 19 nt, Homo sapiens
  misc_RNA (1)...(19): siRNA sense strand
agaacuucaccgagaauga

SEQ ID NO: 2225202 - RNA, 19 nt, Homo sapiens
  misc_RNA (1)...(19): siRNA sense strand
gggacauugcccugaugaa

SEQ ID NO: 2225203 - RNA, 19 nt, Homo sapiens
  misc_RNA (1)...(19): siRNA sense strand
gagaugggcuggaugagga

SEQ ID NO: 2225204 - RNA, 19 nt, Homo sapiens
  misc_RNA (1)...(19): siRNA sense strand
ccgaccuacaggagaauuu

SEQ ID NO: 2225205 - RNA, 19 nt, Homo sapiens
  misc_RNA (1)...(19): siRNA sense strand
aggacaaaaccgaaagaga

SEQ ID NO: 2225206 - RNA, 19 nt, Homo sapiens
  misc_RNA (1)...(19): siRNA sense strand
aaggagacguggacagcca

SEQ ID NO: 2225207 - RNA, 19 nt, Homo sapiens
  misc_RNA (1)...(19): siRNA sense strand
gcagcuacgaggaggccuu

SEQ ID NO: 2225208 - RNA, 19 nt, Homo sapiens
  misc_RNA (1)...(19): siRNA sense strand
ugaagaagccuguugccuu

SEQ ID NO: 2225209 - RNA, 19 nt, Homo sapiens
  misc_RNA (1)...(19): siRNA sense strand
ggcaagcacucccgcacaa

SEQ ID NO: 2225210 - RNA, 19 nt, Homo sapiens
  misc_RNA (1)...(19): siRNA sense strand
ccaaaguuuccuagaguua

SEQ ID NO: 2225211 - RNA, 19 nt, Homo sapiens
  misc_RNA (1)...(19): siRNA sense strand
agucauggcuacacggaaa

SEQ ID NO: 2225212 - RNA, 19 nt, Homo sapiens
  misc_RNA (1)...(19): siRNA sense strand
cuucauugcugcagaggaa

SEQ ID NO: 2225213 - RNA, 19 nt, Homo sapiens
  misc_RNA (1)...(19): siRNA sense strand
cugaaugguuuaaggaaga

SEQ ID NO: 2225214 - RNA, 19 nt, Homo sapiens
  misc_RNA (1)...(19): siRNA sense strand
cagaacucauucagagaaa

SEQ ID NO: 2225215 - RNA, 19 nt, Homo sapiens
  misc_RNA (1)...(19): siRNA sense strand
aggaagaagaagaguucaa

SEQ ID NO: 2225216 - RNA, 19 nt, Homo sapiens
  misc_RNA (1)...(19): siRNA sense strand
cugaagaugaagagaguga

SEQ ID NO: 2225217 - RNA, 19 nt, Homo sapiens
  misc_RNA (1)...(19): siRNA sense strand
acugcaagguugugaggua

SEQ ID NO: 2225218 - RNA, 19 nt, Homo sapiens
  misc_RNA (1)...(19): siRNA sense strand
acucauucaucuauggaaa

SEQ ID NO: 2225219 - RNA, 19 nt, Homo sapiens
  misc_RNA (1)...(19): siRNA sense strand
gagaaagguagcuaugaaa

SEQ ID NO: 2225220 - RNA, 19 nt, Homo sapiens
  misc_RNA (1)...(19): siRNA sense strand
guuuagaaccugaagauga

SEQ ID NO: 2225221 - RNA, 19 nt, Homo sapiens
  misc_RNA (1)...(19): siRNA sense strand
agaaagagaucaagcagca

SEQ ID NO: 2225222 - RNA, 19 nt, Homo sapiens
  misc_RNA (1)...(19): siRNA sense strand
ggaggaaagaguagacuga

SEQ ID NO: 2225223 - RNA, 19 nt, Homo sapiens
  misc_RNA (1)...(19): siRNA sense strand
agaaagaagacuuaagcau

SEQ ID NO: 2225224 - RNA, 19 nt, Homo sapiens
  misc_RNA (1)...(19): siRNA sense strand
caguaaagaugguacagau

SEQ ID NO: 2225225 - RNA, 19 nt, Homo sapiens
  misc_RNA (1)...(19): siRNA sense strand
gacccaagguagaaagaga

SEQ ID NO: 2225226 - RNA, 19 nt, Homo sapiens
  misc_RNA (1)...(19): siRNA sense strand
caagguagaaagagaucaa

SEQ ID NO: 2225227 - RNA, 19 nt, Homo sapiens
  misc_RNA (1)...(19): siRNA sense strand
cagauuacauugagaucau

SEQ ID NO: 2225228 - RNA, 19 nt, Homo sapiens
  misc_RNA (1)...(19): siRNA sense strand
ccuaaaacauggaaucaaa

SEQ ID NO: 2225229 - RNA, 19 nt, Homo sapiens
  misc_RNA (1)...(19): siRNA sense strand
caccaaacauacagugaau

SEQ ID NO: 2225230 - RNA, 19 nt, Homo sapiens
  misc_RNA (1)...(19): siRNA sense strand
caauggaaacagaagaaau

SEQ ID NO: 2225231 - RNA, 19 nt, Homo sapiens
  misc_RNA (1)...(19): siRNA sense strand
cuacauaaggacagcaaca

SEQ ID NO: 2225232 - RNA, 19 nt, Homo sapiens
  misc_RNA (1)...(19): siRNA sense strand
ccucaaggaauuagguaca

SEQ ID NO: 2225233 - RNA, 19 nt, Homo sapiens
  misc_RNA (1)...(19): siRNA sense strand
guacacagucaauggauau

SEQ ID NO: 2225234 - RNA, 19 nt, Homo sapiens
  misc_RNA (1)...(19): siRNA sense strand
cuguaauaccagcgaauau

SEQ ID NO: 2225235 - RNA, 19 nt, Homo sapiens
  misc_RNA (1)...(19): siRNA sense strand
cauugcugcugaagaaaua

SEQ ID NO: 2225236 - RNA, 19 nt, Homo sapiens
  misc_RNA (1)...(19): siRNA sense strand
uaugaaagaagaugggauu

SEQ ID NO: 2225237 - RNA, 19 nt, Homo sapiens
  misc_RNA (1)...(19): siRNA sense strand
gcuaugugccugagagcau

SEQ ID NO: 2225238 - RNA, 19 nt, Homo sapiens
  misc_RNA (1)...(19): siRNA sense strand
gccagaugucacagggaua

SEQ ID NO: 2225239 - RNA, 19 nt, Homo sapiens
  misc_RNA (1)...(19): siRNA sense strand
cagugaaaugcuugaguau

SEQ ID NO: 2225240 - RNA, 19 nt, Homo sapiens
  misc_RNA (1)...(19): siRNA sense strand
agucaauggauaugugaau

SEQ ID NO: 2225241 - RNA, 19 nt, Homo sapiens
  misc_RNA (1)...(19): siRNA sense strand
gaaaauaacucgugagcag

SEQ ID NO: 2225242 - RNA, 19 nt, Homo sapiens
  misc_RNA (1)...(19): siRNA sense strand
cagccaaauagcaguuaua

SEQ ID NO: 2225243 - RNA, 19 nt, Homo sapiens
  misc_RNA (1)...(19): siRNA sense strand
cugugggcccagagggaaa

SEQ ID NO: 2225244 - RNA, 19 nt, Homo sapiens
  misc_RNA (1)...(19): siRNA sense strand
agacaucgccucugggcua

SEQ ID NO: 2225245 - RNA, 19 nt, Homo sapiens
  misc_RNA (1)...(19): siRNA sense strand
ggaaagaggcaugaggaca

SEQ ID NO: 2225246 - RNA, 19 nt, Homo sapiens
  misc_RNA (1)...(19): siRNA sense strand
ggaugaaauuacuagcaca

SEQ ID NO: 2225247 - RNA, 19 nt, Homo sapiens
  misc_RNA (1)...(19): siRNA sense strand
uccuagaguuagacauaaa

SEQ ID NO: 2225248 - RNA, 19 nt, Homo sapiens
  misc_RNA (1)...(19): siRNA sense strand
gguuacaccugcugaacau

SEQ ID NO: 2225249 - RNA, 19 nt, Homo sapiens
  misc_RNA (1)...(19): siRNA sense strand
ccagaagauaccacauaua

SEQ ID NO: 2225250 - RNA, 19 nt, Homo sapiens
  misc_RNA (1)...(19): siRNA sense strand
cucaagaucaagaagauaa

SEQ ID NO: 2225251 - RNA, 19 nt, Homo sapiens
  misc_RNA (1)...(19): siRNA sense strand
cacaugaagaggugggaau

SEQ ID NO: 2225252 - RNA, 19 nt, Homo sapiens
  misc_RNA (1)...(19): siRNA sense strand
aauccaagauacugaugaa

SEQ ID NO: 2225253 - RNA, 19 nt, Homo sapiens
  misc_RNA (1)...(19): siRNA sense strand
acaaagggaaacagauauu

SEQ ID NO: 2225254 - RNA, 19 nt, Homo sapiens
  misc_RNA (1)...(19): siRNA sense strand
gaacauaggcggcucccaa

SEQ ID NO: 2225255 - RNA, 19 nt, Homo sapiens
  misc_RNA (1)...(19): siRNA sense strand
aauaagcaguggcuagaaa

SEQ ID NO: 2225256 - RNA, 19 nt, Homo sapiens
  misc_RNA (1)...(19): siRNA sense strand
ucaagaagauaacggcaau

SEQ ID NO: 2225257 - RNA, 19 nt, Homo sapiens
  misc_RNA (1)...(19): siRNA sense strand
aaccaggaaucuuaagaaa

SEQ ID NO: 2225258 - RNA, 19 nt, Homo sapiens
  misc_RNA (1)...(19): siRNA sense strand
ccaggaaucuuaagaaaau

SEQ ID NO: 2225259 - RNA, 19 nt, Homo sapiens
  misc_RNA (1)...(19): siRNA sense strand
guuggaacuuggauguuaa

SEQ ID NO: 2225260 - RNA, 19 nt, Homo sapiens
  misc_RNA (1)...(19): siRNA sense strand
ugucaauaaccuugcagaa

SEQ ID NO: 2225261 - RNA, 19 nt, Homo sapiens
  misc_RNA (1)...(19): siRNA sense strand
cgaaguucuuggagacuca

SEQ ID NO: 2225262 - RNA, 19 nt, Homo sapiens
  misc_RNA (1)...(19): siRNA sense strand
gcagggaguggaauggaaa

SEQ ID NO: 2225263 - RNA, 19 nt, Homo sapiens
  misc_RNA (1)...(19): siRNA sense strand
ggaacaucuuagaguuuga

SEQ ID NO: 2225264 - RNA, 19 nt, Homo sapiens
  misc_RNA (1)...(19): siRNA sense strand
ggaaaaugcaugaucguuu

SEQ ID NO: 2225265 - RNA, 19 nt, Homo sapiens
  misc_RNA (1)...(19): siRNA sense strand
uuuagaaccugaagaugaa

SEQ ID NO: 2225266 - RNA, 19 nt, Homo sapiens
  misc_RNA (1)...(19): siRNA sense strand
gguccagagcagugaagau

SEQ ID NO: 2225267 - RNA, 19 nt, Homo sapiens
  misc_RNA (1)...(19): siRNA sense strand
acacagagguuggagaaaa

SEQ ID NO: 2225268 - RNA, 19 nt, Homo sapiens
  misc_RNA (1)...(19): siRNA sense strand
gaugaaagcaagagcugga

SEQ ID NO: 2225269 - RNA, 19 nt, Homo sapiens
  misc_RNA (1)...(19): siRNA sense strand
ggacaaugccagauauaac

SEQ ID NO: 2225270 - RNA, 19 nt, Homo sapiens
  misc_RNA (1)...(19): siRNA sense strand
ucaaacaucaugagcacua

SEQ ID NO: 2225271 - RNA, 19 nt, Homo sapiens
  misc_RNA (1)...(19): siRNA sense strand
cugcaagguugugagguaa

SEQ ID NO: 2225272 - RNA, 19 nt, Homo sapiens
  misc_RNA (1)...(19): siRNA sense strand
ggauaauuucucaaaccaa

SEQ ID NO: 2225273 - RNA, 19 nt, Homo sapiens
  misc_RNA (1)...(19): siRNA sense strand
aagaguagacugaagaaaa

SEQ ID NO: 2225274 - RNA, 19 nt, Homo sapiens
  misc_RNA (1)...(19): siRNA sense strand
cauucaagacccugaucaa

SEQ ID NO: 2225275 - RNA, 19 nt, Homo sapiens
  misc_RNA (1)...(19): siRNA sense strand
aguaaagaugguacagauu

SEQ ID NO: 2225276 - RNA, 19 nt, Homo sapiens
  misc_RNA (1)...(19): siRNA sense strand
ccuauuguggcuagauaua

SEQ ID NO: 2225277 - RNA, 19 nt, Homo sapiens
  misc_RNA (1)...(19): siRNA sense strand
ccagagggaaaguggauca

SEQ ID NO: 2225278 - RNA, 19 nt, Homo sapiens
  misc_RNA (1)...(19): siRNA sense strand
agucacggaaggugggaga

SEQ ID NO: 2225279 - RNA, 19 nt, Homo sapiens
  misc_RNA (1)...(19): siRNA sense strand
gcggagaggacgaagcugu

SEQ ID NO: 2225280 - RNA, 19 nt, Homo sapiens
  misc_RNA (1)...(19): siRNA sense strand
cgugguaccugacgggcau

SEQ ID NO: 2225281 - RNA, 19 nt, Homo sapiens
  misc_RNA (1)...(19): siRNA sense strand
gggagugcaaggaggagca

SEQ ID NO: 2225282 - RNA, 19 nt, Homo sapiens
  misc_RNA (1)...(19): siRNA sense strand
agucacggaaggugggaga

SEQ ID NO: 2225283 - RNA, 19 nt, Homo sapiens
  misc_RNA (1)...(19): siRNA sense strand
gcggagaggacgaagcugu

SEQ ID NO: 2225284 - RNA, 19 nt, Homo sapiens
  misc_RNA (1)...(19): siRNA sense strand
cgugguaccugacgggcau

SEQ ID NO: 2225285 - RNA, 19 nt, Homo sapiens
  misc_RNA (1)...(19): siRNA sense strand
gggagugcaaggaggagca

SEQ ID NO: 2225286 - RNA, 19 nt, Homo sapiens
  misc_RNA (1)...(19): siRNA sense strand
aaugaaagucacaggagua

SEQ ID NO: 2225287 - RNA, 19 nt, Homo sapiens
  misc_RNA (1)...(19): siRNA sense strand
cagaagacaaugaaaguca

SEQ ID NO: 2225288 - RNA, 19 nt, Homo sapiens
  misc_RNA (1)...(19): siRNA sense strand
gcagcaugccauugggaau

SEQ ID NO: 2225289 - RNA, 19 nt, Homo sapiens
  misc_RNA (1)...(19): siRNA sense strand
caaugaaagucacaggagu

SEQ ID NO: 2225290 - RNA, 19 nt, Homo sapiens
  misc_RNA (1)...(19): siRNA sense strand
ggauggagguucugggcug

SEQ ID NO: 2225291 - RNA, 19 nt, Homo sapiens
  misc_RNA (1)...(19): siRNA sense strand
augaaagucacaggaguaa

SEQ ID NO: 2225292 - RNA, 19 nt, Homo sapiens
  misc_RNA (1)...(19): siRNA sense strand
aagcaauaucagaugcaca

SEQ ID NO: 2225293 - RNA, 19 nt, Homo sapiens
  misc_RNA (1)...(19): siRNA sense strand
cauuauagcauucgcagca

SEQ ID NO: 2225294 - RNA, 19 nt, Homo sapiens
  misc_RNA (1)...(19): siRNA sense strand
uguggauucaucugggaua

SEQ ID NO: 2225295 - RNA, 19 nt, Homo sapiens
  misc_RNA (1)...(19): siRNA sense strand
gauuuaaauaguugcagca

SEQ ID NO: 2225296 - RNA, 19 nt, Homo sapiens
  misc_RNA (1)...(19): siRNA sense strand
ggugaacucucuagaccca

SEQ ID NO: 2225297 - RNA, 19 nt, Homo sapiens
  misc_RNA (1)...(19): siRNA sense strand
gcauggaguugaugggcug

SEQ ID NO: 2225298 - RNA, 19 nt, Homo sapiens
  misc_RNA (1)...(19): siRNA sense strand
gugaauaauccaaaagagu

SEQ ID NO: 2225299 - RNA, 19 nt, Homo sapiens
  misc_RNA (1)...(19): siRNA sense strand
aaugaaagucacaggagua

SEQ ID NO: 2225300 - RNA, 19 nt, Homo sapiens
  misc_RNA (1)...(19): siRNA sense strand
cagaagacaaugaaaguca

SEQ ID NO: 2225301 - RNA, 19 nt, Homo sapiens
  misc_RNA (1)...(19): siRNA sense strand
gcagcaugccauugggaau

SEQ ID NO: 2225302 - RNA, 19 nt, Homo sapiens
  misc_RNA (1)...(19): siRNA sense strand
caaugaaagucacaggagu

SEQ ID NO: 2225303 - RNA, 19 nt, Homo sapiens
  misc_RNA (1)...(19): siRNA sense strand
ggauggagguucugggcug

SEQ ID NO: 2225304 - RNA, 19 nt, Homo sapiens
  misc_RNA (1)...(19): siRNA sense strand
augaaagucacaggaguaa

SEQ ID NO: 2225305 - RNA, 19 nt, Homo sapiens
  misc_RNA (1)...(19): siRNA sense strand
aagcaauaucagaugcaca

SEQ ID NO: 2225306 - RNA, 19 nt, Homo sapiens
  misc_RNA (1)...(19): siRNA sense strand
cauuauagcauucgcagca

SEQ ID NO: 2225307 - RNA, 19 nt, Homo sapiens
  misc_RNA (1)...(19): siRNA sense strand
uguggauucaucugggaua

SEQ ID NO: 2225308 - RNA, 19 nt, Homo sapiens
  misc_RNA (1)...(19): siRNA sense strand
gauuuaaauaguugcagca

SEQ ID NO: 2225309 - RNA, 19 nt, Homo sapiens
  misc_RNA (1)...(19): siRNA sense strand
ggugaacucucuagaccca

SEQ ID NO: 2225310 - RNA, 19 nt, Homo sapiens
  misc_RNA (1)...(19): siRNA sense strand
gcauggaguugaugggcug

SEQ ID NO: 2225311 - RNA, 19 nt, Homo sapiens
  misc_RNA (1)...(19): siRNA sense strand
gugaauaauccaaaagagu

SEQ ID NO: 2225312 - RNA, 19 nt, Homo sapiens
  misc_RNA (1)...(19): siRNA sense strand
gguuguugguggagaagau

SEQ ID NO: 2225313 - RNA, 19 nt, Homo sapiens
  misc_RNA (1)...(19): siRNA sense strand
gcuccuguacugagggaua

SEQ ID NO: 2225314 - RNA, 19 nt, Homo sapiens
  misc_RNA (1)...(19): siRNA sense strand
cgguaugucaacuggauua

SEQ ID NO: 2225315 - RNA, 19 nt, Homo sapiens
  misc_RNA (1)...(19): siRNA sense strand
agguaaauuggaagaguuu

SEQ ID NO: 2225316 - RNA, 19 nt, Homo sapiens
  misc_RNA (1)...(19): siRNA sense strand
auacagagcaaaagcgaaa

SEQ ID NO: 2225317 - RNA, 19 nt, Homo sapiens
  misc_RNA (1)...(19): siRNA sense strand
agguagagauucaugucaa

SEQ ID NO: 2225318 - RNA, 19 nt, Homo sapiens
  misc_RNA (1)...(19): siRNA sense strand
ucacaaacuucuaagcuca

SEQ ID NO: 2225319 - RNA, 19 nt, Homo sapiens
  misc_RNA (1)...(19): siRNA sense strand
cggccaaagagguauaauu

SEQ ID NO: 2225320 - RNA, 19 nt, Homo sapiens
  misc_RNA (1)...(19): siRNA sense strand
guugcaaggaugacauuaa

SEQ ID NO: 2225321 - RNA, 19 nt, Homo sapiens
  misc_RNA (1)...(19): siRNA sense strand
ucaacuggauuaaggaaaa

SEQ ID NO: 2225322 - RNA, 19 nt, Homo sapiens
  misc_RNA (1)...(19): siRNA sense strand
agagagaauguauggaaga

SEQ ID NO: 2225323 - RNA, 19 nt, Homo sapiens
  misc_RNA (1)...(19): siRNA sense strand
gggauaucgacuugcagaa

SEQ ID NO: 2225324 - RNA, 19 nt, Homo sapiens
  misc_RNA (1)...(19): siRNA sense strand
gcugaaaccauuuuggaua

SEQ ID NO: 2225325 - RNA, 19 nt, Homo sapiens
  misc_RNA (1)...(19): siRNA sense strand
ccaugaaggagguagagau

SEQ ID NO: 2225326 - RNA, 19 nt, Homo sapiens
  misc_RNA (1)...(19): siRNA sense strand
cugaaaccauuuuggauaa

SEQ ID NO: 2225327 - RNA, 19 nt, Homo sapiens
  misc_RNA (1)...(19): siRNA sense strand
cagaacauacagagcaaaa

SEQ ID NO: 2225328 - RNA, 19 nt, Homo sapiens
  misc_RNA (1)...(19): siRNA sense strand
gaacauaauauugaggaga

SEQ ID NO: 2225329 - RNA, 19 nt, Homo sapiens
  misc_RNA (1)...(19): siRNA sense strand
ccagaaguccugugaacca

SEQ ID NO: 2225330 - RNA, 19 nt, Homo sapiens
  misc_RNA (1)...(19): siRNA sense strand
gcucuaucguuaaugaaaa

SEQ ID NO: 2225331 - RNA, 19 nt, Homo sapiens
  misc_RNA (1)...(19): siRNA sense strand
gugcaaugaaaggcaaaua

SEQ ID NO: 2225332 - RNA, 19 nt, Homo sapiens
  misc_RNA (1)...(19): siRNA sense strand
agagaauguauggaagaaa

SEQ ID NO: 2225333 - RNA, 19 nt, Homo sapiens
  misc_RNA (1)...(19): siRNA sense strand
acauaauauugaggagaca

SEQ ID NO: 2225334 - RNA, 19 nt, Homo sapiens
  misc_RNA (1)...(19): siRNA sense strand
gcaaaagcgaaaugugauu

SEQ ID NO: 2225335 - RNA, 19 nt, Homo sapiens
  misc_RNA (1)...(19): siRNA sense strand
guaaauuggaagaguuugu

SEQ ID NO: 2225336 - RNA, 19 nt, Homo sapiens
  misc_RNA (1)...(19): siRNA sense strand
caugaaaacgccaacaaaa

SEQ ID NO: 2225337 - RNA, 19 nt, Homo sapiens
  misc_RNA (1)...(19): siRNA sense strand
augguaaaguugaugcauu

SEQ ID NO: 2225338 - RNA, 19 nt, Homo sapiens
  misc_RNA (1)...(19): siRNA sense strand
ugaaaggcaaauauggaau

SEQ ID NO: 2225339 - RNA, 19 nt, Homo sapiens
  misc_RNA (1)...(19): siRNA sense strand
acugaaagaacaacugaau

SEQ ID NO: 2225340 - RNA, 19 nt, Homo sapiens
  misc_RNA (1)...(19): siRNA sense strand
cugauguggacuauguaaa

SEQ ID NO: 2225341 - RNA, 19 nt, Homo sapiens
  misc_RNA (1)...(19): siRNA sense strand
ucggguuguugguggagaa

SEQ ID NO: 2225342 - RNA, 19 nt, Homo sapiens
  misc_RNA (1)...(19): siRNA sense strand
cugacaaggaauacacgaa

SEQ ID NO: 2225343 - RNA, 19 nt, Homo sapiens
  misc_RNA (1)...(19): siRNA sense strand
gucaacuggauuaaggaaa

SEQ ID NO: 2225344 - RNA, 19 nt, Homo sapiens
  misc_RNA (1)...(19): siRNA sense strand
gaaaacacugaaagaacaa

SEQ ID NO: 2225345 - RNA, 19 nt, Homo sapiens
  misc_RNA (1)...(19): siRNA sense strand
gggaaccuugagagagaau

SEQ ID NO: 2225346 - RNA, 19 nt, Homo sapiens
  misc_RNA (1)...(19): siRNA sense strand
cuacugaagcugaaaccau

SEQ ID NO: 2225347 - RNA, 19 nt, Homo sapiens
  misc_RNA (1)...(19): siRNA sense strand
ugguggagaagaugccaaa

SEQ ID NO: 2225348 - RNA, 19 nt, Homo sapiens
  misc_RNA (1)...(19): siRNA sense strand
agcaguauguugauggaga

SEQ ID NO: 2225349 - RNA, 19 nt, Homo sapiens
  misc_RNA (1)...(19): siRNA sense strand
ccaucugccuuuuaggaua

SEQ ID NO: 2225350 - RNA, 19 nt, Homo sapiens
  misc_RNA (1)...(19): siRNA sense strand
cuucaguaccuuagaguuc

SEQ ID NO: 2225351 - RNA, 19 nt, Homo sapiens
  misc_RNA (1)...(19): siRNA sense strand
gauucaugucaaggagaua

SEQ ID NO: 2225352 - RNA, 19 nt, Homo sapiens
  misc_RNA (1)...(19): siRNA sense strand
aagaguuuguucaagggaa

SEQ ID NO: 2225353 - RNA, 19 nt, Homo sapiens
  misc_RNA (1)...(19): siRNA sense strand
gagagagaauguauggaag

SEQ ID NO: 2225354 - RNA, 19 nt, Homo sapiens
  misc_RNA (1)...(19): siRNA sense strand
cugaaagaacaacugaauu

SEQ ID NO: 2225355 - RNA, 19 nt, Homo sapiens
  misc_RNA (1)...(19): siRNA sense strand
gugugcaaugaaaggcaaa

SEQ ID NO: 2225356 - RNA, 19 nt, Homo sapiens
  misc_RNA (1)...(19): siRNA sense strand
gcugauaacaaggugguuu

SEQ ID NO: 2225357 - RNA, 19 nt, Homo sapiens
  misc_RNA (1)...(19): siRNA sense strand
augaaaacgccaacaaaau

SEQ ID NO: 2225358 - RNA, 19 nt, Homo sapiens
  misc_RNA (1)...(19): siRNA sense strand
augaaaggcaaauauggaa

SEQ ID NO: 2225359 - RNA, 19 nt, Homo sapiens
  misc_RNA (1)...(19): siRNA sense strand
auaauauugaggagacaga

SEQ ID NO: 2225360 - RNA, 19 nt, Homo sapiens
  misc_RNA (1)...(19): siRNA sense strand
agauucaugucaaggagau

SEQ ID NO: 2225361 - RNA, 19 nt, Homo sapiens
  misc_RNA (1)...(19): siRNA sense strand
gagaucagugugaguccaa

SEQ ID NO: 2225362 - RNA, 19 nt, Homo sapiens
  misc_RNA (1)...(19): siRNA sense strand
ccgagaaauuauaggugau

SEQ ID NO: 2225363 - RNA, 19 nt, Homo sapiens
  misc_RNA (1)...(19): siRNA sense strand
cugaauacuguccgagaaa

SEQ ID NO: 2225364 - RNA, 19 nt, Homo sapiens
  misc_RNA (1)...(19): siRNA sense strand
augaaggaguagaagccaa

SEQ ID NO: 2225365 - RNA, 19 nt, Homo sapiens
  misc_RNA (1)...(19): siRNA sense strand
auucaaacggacagacaau

SEQ ID NO: 2225366 - RNA, 19 nt, Homo sapiens
  misc_RNA (1)...(19): siRNA sense strand
caugacaauuugaagcuga

SEQ ID NO: 2225367 - RNA, 19 nt, Homo sapiens
  misc_RNA (1)...(19): siRNA sense strand
gaguagaagccaaaaggau

SEQ ID NO: 2225368 - RNA, 19 nt, Homo sapiens
  misc_RNA (1)...(19): siRNA sense strand
acaauuugaagcugacaau

SEQ ID NO: 2225369 - RNA, 19 nt, Homo sapiens
  misc_RNA (1)...(19): siRNA sense strand
gggcugagaugguggcaga

SEQ ID NO: 2225370 - RNA, 19 nt, Homo sapiens
  misc_RNA (1)...(19): siRNA sense strand
gcauaugaugaaagccaaa

SEQ ID NO: 2225371 - RNA, 19 nt, Homo sapiens
  misc_RNA (1)...(19): siRNA sense strand
agaaauugucugagaagga

SEQ ID NO: 2225372 - RNA, 19 nt, Homo sapiens
  misc_RNA (1)...(19): siRNA sense strand
uuguagaagcucuggagaa

SEQ ID NO: 2225373 - RNA, 19 nt, Homo sapiens
  misc_RNA (1)...(19): siRNA sense strand
gagaagcaguugaagacca

SEQ ID NO: 2225374 - RNA, 19 nt, Homo sapiens
  misc_RNA (1)...(19): siRNA sense strand
ugagaugguggcagagcaa

SEQ ID NO: 2225375 - RNA, 19 nt, Homo sapiens
  misc_RNA (1)...(19): siRNA sense strand
agaugguggcagagcaauu

SEQ ID NO: 2225376 - RNA, 19 nt, Homo sapiens
  misc_RNA (1)...(19): siRNA sense strand
cuccagacacugaagcaua

SEQ ID NO: 2225377 - RNA, 19 nt, Homo sapiens
  misc_RNA (1)...(19): siRNA sense strand
auggaaucgucuuggcauu

SEQ ID NO: 2225378 - RNA, 19 nt, Homo sapiens
  misc_RNA (1)...(19): siRNA sense strand
ggaagauguaugaagccuu

SEQ ID NO: 2225379 - RNA, 19 nt, Homo sapiens
  misc_RNA (1)...(19): siRNA sense strand
cauugaaagcccuagauca

SEQ ID NO: 2225380 - RNA, 19 nt, Homo sapiens
  misc_RNA (1)...(19): siRNA sense strand
caguugaagaccagacuca

SEQ ID NO: 2225381 - RNA, 19 nt, Homo sapiens
  misc_RNA (1)...(19): siRNA sense strand
uagcauaugaugaaagcca

SEQ ID NO: 2225382 - RNA, 19 nt, Homo sapiens
  misc_RNA (1)...(19): siRNA sense strand
aggcagagagcacagacua

SEQ ID NO: 2225383 - RNA, 19 nt, Homo sapiens
  misc_RNA (1)...(19): siRNA sense strand
ggcagagagcacagacuau

SEQ ID NO: 2225384 - RNA, 19 nt, Homo sapiens
  misc_RNA (1)...(19): siRNA sense strand
agauaacucacgagaucau

SEQ ID NO: 2225385 - RNA, 19 nt, Homo sapiens
  misc_RNA (1)...(19): siRNA sense strand
aggacagggcacagacaca

SEQ ID NO: 2225386 - RNA, 19 nt, Homo sapiens
  misc_RNA (1)...(19): siRNA sense strand
ccauuuugcugaagaagau

SEQ ID NO: 2225387 - RNA, 19 nt, Homo sapiens
  misc_RNA (1)...(19): siRNA sense strand
ugucugagaaggaucgaau

SEQ ID NO: 2225388 - RNA, 19 nt, Homo sapiens
  misc_RNA (1)...(19): siRNA sense strand
cuuuggaaacccagcaaga

SEQ ID NO: 2225389 - RNA, 19 nt, Homo sapiens
  misc_RNA (1)...(19): siRNA sense strand
ccuugaaagagauggauuc

SEQ ID NO: 2225390 - RNA, 19 nt, Homo sapiens
  misc_RNA (1)...(19): siRNA sense strand
ggagaaagcaagcaagcag

SEQ ID NO: 2225391 - RNA, 19 nt, Homo sapiens
  misc_RNA (1)...(19): siRNA sense strand
gagcacagacuauggucca

SEQ ID NO: 2225392 - RNA, 19 nt, Homo sapiens
  misc_RNA (1)...(19): siRNA sense strand
gagaaugcguugaugccaa

SEQ ID NO: 2225393 - RNA, 19 nt, Homo sapiens
  misc_RNA (1)...(19): siRNA sense strand
ggaaucauguucagggaca

SEQ ID NO: 2225394 - RNA, 19 nt, Homo sapiens
  misc_RNA (1)...(19): siRNA sense strand
gaacugucguggaagggaa

SEQ ID NO: 2225395 - RNA, 19 nt, Homo sapiens
  misc_RNA (1)...(19): siRNA sense strand
cuguuaaccugaaaggaga

SEQ ID NO: 2225396 - RNA, 19 nt, Homo sapiens
  misc_RNA (1)...(19): siRNA sense strand
cuggaaacagauugggaga

SEQ ID NO: 2225397 - RNA, 19 nt, Homo sapiens
  misc_RNA (1)...(19): siRNA sense strand
cuggagugcacgagacauu

SEQ ID NO: 2225398 - RNA, 19 nt, Homo sapiens
  misc_RNA (1)...(19): siRNA sense strand
gcucagagaugacaccgaa

SEQ ID NO: 2225399 - RNA, 19 nt, Homo sapiens
  misc_RNA (1)...(19): siRNA sense strand
uggaaggaggcgagagugu

SEQ ID NO: 2225400 - RNA, 19 nt, Homo sapiens
  misc_RNA (1)...(19): siRNA sense strand
uggacauggagcuggaaau

SEQ ID NO: 2225401 - RNA, 19 nt, Homo sapiens
  misc_RNA (1)...(19): siRNA sense strand
ccauaggagacuacacaga

SEQ ID NO: 2225402 - RNA, 19 nt, Homo sapiens
  misc_RNA (1)...(19): siRNA sense strand
uguucagggacaaggagaa

SEQ ID NO: 2225403 - RNA, 19 nt, Homo sapiens
  misc_RNA (1)...(19): siRNA sense strand
ccuggaaggaggcgagagu

SEQ ID NO: 2225404 - RNA, 19 nt, Homo sapiens
  misc_RNA (1)...(19): siRNA sense strand
gggacaaggagaaugcguu

SEQ ID NO: 2225405 - RNA, 19 nt, Homo sapiens
  misc_RNA (1)...(19): siRNA sense strand
ggacaaggagaaugcguug

SEQ ID NO: 2225406 - RNA, 19 nt, Homo sapiens
  misc_RNA (1)...(19): siRNA sense strand
cuguauagauguugaugaa

SEQ ID NO: 2225407 - RNA, 19 nt, Homo sapiens
  misc_RNA (1)...(19): siRNA sense strand
uggcaauccuuguggaaau

SEQ ID NO: 2225408 - RNA, 19 nt, Homo sapiens
  misc_RNA (1)...(19): siRNA sense strand
cggagaagcacaaacgaaa

SEQ ID NO: 2225409 - RNA, 19 nt, Homo sapiens
  misc_RNA (1)...(19): siRNA sense strand
cgggaaagccugugaagau

SEQ ID NO: 2225410 - RNA, 19 nt, Homo sapiens
  misc_RNA (1)...(19): siRNA sense strand
gagaagaggcgguggagga

SEQ ID NO: 2225411 - RNA, 19 nt, Homo sapiens
  misc_RNA (1)...(19): siRNA sense strand
gcccagugcugacgggaaa

SEQ ID NO: 2225412 - RNA, 19 nt, Homo sapiens
  misc_RNA (1)...(19): siRNA sense strand
gugaauguccagugggauu

SEQ ID NO: 2225413 - RNA, 19 nt, Homo sapiens
  misc_RNA (1)...(19): siRNA sense strand
guguauugauguugaugaa

SEQ ID NO: 2225414 - RNA, 19 nt, Homo sapiens
  misc_RNA (1)...(19): siRNA sense strand
gugcaaugaucguaaugaa

SEQ ID NO: 2225415 - RNA, 19 nt, Homo sapiens
  misc_RNA (1)...(19): siRNA sense strand
uggacgagugugaggguaa

SEQ ID NO: 2225416 - RNA, 19 nt, Homo sapiens
  misc_RNA (1)...(19): siRNA sense strand
agaagaaguuugugcuaca

SEQ ID NO: 2225417 - RNA, 19 nt, Homo sapiens
  misc_RNA (1)...(19): siRNA sense strand
gcugggaacgugaaggaaa

SEQ ID NO: 2225418 - RNA, 19 nt, Homo sapiens
  misc_RNA (1)...(19): siRNA sense strand
uguugaugaaugugagaaa

SEQ ID NO: 2225419 - RNA, 19 nt, Homo sapiens
  misc_RNA (1)...(19): siRNA sense strand
ggaagaacugugaagauau

SEQ ID NO: 2225420 - RNA, 19 nt, Homo sapiens
  misc_RNA (1)...(19): siRNA sense strand
gcgugaaccucauagggaa

SEQ ID NO: 2225421 - RNA, 19 nt, Homo sapiens
  misc_RNA (1)...(19): siRNA sense strand
cgaugagugugaagauaau

SEQ ID NO: 2225422 - RNA, 19 nt, Homo sapiens
  misc_RNA (1)...(19): siRNA sense strand
cucaagaauuaaaggaaca

SEQ ID NO: 2225423 - RNA, 19 nt, Homo sapiens
  misc_RNA (1)...(19): siRNA sense strand
ccgcugugagugugagaua

SEQ ID NO: 2225424 - RNA, 19 nt, Homo sapiens
  misc_RNA (1)...(19): siRNA sense strand
aagagaugccugugggaau

SEQ ID NO: 2225425 - RNA, 19 nt, Homo sapiens
  misc_RNA (1)...(19): siRNA sense strand
cauuaauacuguugggucu

SEQ ID NO: 2225426 - RNA, 19 nt, Homo sapiens
  misc_RNA (1)...(19): siRNA sense strand
gcaccugcgaggagggauu

SEQ ID NO: 2225427 - RNA, 19 nt, Homo sapiens
  misc_RNA (1)...(19): siRNA sense strand
ugaaagagauuacaggaca

SEQ ID NO: 2225428 - RNA, 19 nt, Homo sapiens
  misc_RNA (1)...(19): siRNA sense strand
ggacguuauugcaaagaca

SEQ ID NO: 2225429 - RNA, 19 nt, Homo sapiens
  misc_RNA (1)...(19): siRNA sense strand
ggaaguuaccgcugugaau

SEQ ID NO: 2225430 - RNA, 19 nt, Homo sapiens
  misc_RNA (1)...(19): siRNA sense strand
ggaacuugccggaacacaa

SEQ ID NO: 2225431 - RNA, 19 nt, Homo sapiens
  misc_RNA (1)...(19): siRNA sense strand
cuaagugggaccugugaaa

SEQ ID NO: 2225432 - RNA, 19 nt, Homo sapiens
  misc_RNA (1)...(19): siRNA sense strand
uagaaauacuccuggaagu

SEQ ID NO: 2225433 - RNA, 19 nt, Homo sapiens
  misc_RNA (1)...(19): siRNA sense strand
ugaaugugcaaguggaaau

SEQ ID NO: 2225434 - RNA, 19 nt, Homo sapiens
  misc_RNA (1)...(19): siRNA sense strand
augagugugaagagggaaa

SEQ ID NO: 2225435 - RNA, 19 nt, Homo sapiens
  misc_RNA (1)...(19): siRNA sense strand
guggugaaauggaugacaa

SEQ ID NO: 2225436 - RNA, 19 nt, Homo sapiens
  misc_RNA (1)...(19): siRNA sense strand
ugugaauguucuucugaaa

SEQ ID NO: 2225437 - RNA, 19 nt, Homo sapiens
  misc_RNA (1)...(19): siRNA sense strand
cauaaugaauggugguugu

SEQ ID NO: 2225438 - RNA, 19 nt, Homo sapiens
  misc_RNA (1)...(19): siRNA sense strand
ucgaugagugugaagauaa

SEQ ID NO: 2225439 - RNA, 19 nt, Homo sapiens
  misc_RNA (1)...(19): siRNA sense strand
cgguuuacccguugauauu

SEQ ID NO: 2225440 - RNA, 19 nt, Homo sapiens
  misc_RNA (1)...(19): siRNA sense strand
ggaugagugugaagaggga

SEQ ID NO: 2225441 - RNA, 19 nt, Homo sapiens
  misc_RNA (1)...(19): siRNA sense strand
aggaaacggagaagcacaa

SEQ ID NO: 2225442 - RNA, 19 nt, Homo sapiens
  misc_RNA (1)...(19): siRNA sense strand
uaaccaacuagaagacaaa

SEQ ID NO: 2225443 - RNA, 19 nt, Homo sapiens
  misc_RNA (1)...(19): siRNA sense strand
ggauuuuguucgaggccaa

SEQ ID NO: 2225444 - RNA, 19 nt, Homo sapiens
  misc_RNA (1)...(19): siRNA sense strand
augaauggugguugugaaa

SEQ ID NO: 2225445 - RNA, 19 nt, Homo sapiens
  misc_RNA (1)...(19): siRNA sense strand
aguguaagaucaauggcua

SEQ ID NO: 2225446 - RNA, 19 nt, Homo sapiens
  misc_RNA (1)...(19): siRNA sense strand
gggaaauaauugcauggau

SEQ ID NO: 2225447 - RNA, 19 nt, Homo sapiens
  misc_RNA (1)...(19): siRNA sense strand
ggaccuguguggauaucaa

SEQ ID NO: 2225448 - RNA, 19 nt, Homo sapiens
  misc_RNA (1)...(19): siRNA sense strand
ucuacaaaccugaucuaaa

SEQ ID NO: 2225449 - RNA, 19 nt, Homo sapiens
  misc_RNA (1)...(19): siRNA sense strand
aaugagaagugugaagaua

SEQ ID NO: 2225450 - RNA, 19 nt, Homo sapiens
  misc_RNA (1)...(19): siRNA sense strand
cagaaaggauacauaggga

SEQ ID NO: 2225451 - RNA, 19 nt, Homo sapiens
  misc_RNA (1)...(19): siRNA sense strand
caaccgaggauuucaacaa

SEQ ID NO: 2225452 - RNA, 19 nt, Homo sapiens
  misc_RNA (1)...(19): siRNA sense strand
ugauauggacgaaugcaaa

SEQ ID NO: 2225453 - RNA, 19 nt, Homo sapiens
  misc_RNA (1)...(19): siRNA sense strand
aagaugaggaugaguguga

SEQ ID NO: 2225454 - RNA, 19 nt, Homo sapiens
  misc_RNA (1)...(19): siRNA sense strand
aaacaaauggaaugcaaga

SEQ ID NO: 2225455 - RNA, 19 nt, Homo sapiens
  misc_RNA (1)...(19): siRNA sense strand
gggugaauguacaaacaca

SEQ ID NO: 2225456 - RNA, 19 nt, Homo sapiens
  misc_RNA (1)...(19): siRNA sense strand
cggacagaaugccgagaca

SEQ ID NO: 2225457 - RNA, 19 nt, Homo sapiens
  misc_RNA (1)...(19): siRNA sense strand
agauggacguuauugcaaa

SEQ ID NO: 2225458 - RNA, 19 nt, Homo sapiens
  misc_RNA (1)...(19): siRNA sense strand
ugugcaaagaugaggauga

SEQ ID NO: 2225459 - RNA, 19 nt, Homo sapiens
  misc_RNA (1)...(19): siRNA sense strand
guauaugcaauucaggaua

SEQ ID NO: 2225460 - RNA, 19 nt, Homo sapiens
  misc_RNA (1)...(19): siRNA sense strand
ggaggauaccgcugugaau

SEQ ID NO: 2225461 - RNA, 19 nt, Homo sapiens
  misc_RNA (1)...(19): siRNA sense strand
gaaguuugugcuacagaaa

SEQ ID NO: 2225462 - RNA, 19 nt, Homo sapiens
  misc_RNA (1)...(19): siRNA sense strand
aaacauggacagugcauca

SEQ ID NO: 2225463 - RNA, 19 nt, Homo sapiens
  misc_RNA (1)...(19): siRNA sense strand
agagaagaccguaggaugu

SEQ ID NO: 2225464 - RNA, 19 nt, Homo sapiens
  misc_RNA (1)...(19): siRNA sense strand
ggaucauaucauugcauuu

SEQ ID NO: 2225465 - RNA, 19 nt, Homo sapiens
  misc_RNA (1)...(19): siRNA sense strand
guucaugcccgaaaggcua

SEQ ID NO: 2225466 - RNA, 19 nt, Homo sapiens
  misc_RNA (1)...(19): siRNA sense strand
cuuaaugaagugucacaaa

SEQ ID NO: 2225467 - RNA, 19 nt, Homo sapiens
  misc_RNA (1)...(19): siRNA sense strand
caucagagcaaccgaggau

SEQ ID NO: 2225468 - RNA, 19 nt, Homo sapiens
  misc_RNA (1)...(19): siRNA sense strand
guaaaggguacucaagaau

SEQ ID NO: 2225469 - RNA, 19 nt, Homo sapiens
  misc_RNA (1)...(19): siRNA sense strand
gcuacgaacuggacagaag

SEQ ID NO: 2225470 - RNA, 19 nt, Homo sapiens
  misc_RNA (1)...(19): siRNA sense strand
ggauggaaggagcugcaaa

SEQ ID NO: 2225471 - RNA, 19 nt, Homo sapiens
  misc_RNA (1)...(19): siRNA sense strand
gaaaggauacauagggacu

SEQ ID NO: 2225472 - RNA, 19 nt, Homo sapiens
  misc_RNA (1)...(19): siRNA sense strand
aaguaauaggagagcaaau

SEQ ID NO: 2225473 - RNA, 19 nt, Homo sapiens
  misc_RNA (1)...(19): siRNA sense strand
cugaaauuguagugaugau

SEQ ID NO: 2225474 - RNA, 19 nt, Homo sapiens
  misc_RNA (1)...(19): siRNA sense strand
caacauaucuggugagagg

SEQ ID NO: 2225475 - RNA, 19 nt, Homo sapiens
  misc_RNA (1)...(19): siRNA sense strand
ugaagaagagcuuggccua

SEQ ID NO: 2225476 - RNA, 19 nt, Homo sapiens
  misc_RNA (1)...(19): siRNA sense strand
uuucacacauugagggaga

SEQ ID NO: 2225477 - RNA, 19 nt, Homo sapiens
  misc_RNA (1)...(19): siRNA sense strand
cacagaaaguaauaggaga

SEQ ID NO: 2225478 - RNA, 19 nt, Homo sapiens
  misc_RNA (1)...(19): siRNA sense strand
ugaaaggagaaaugcaaca

SEQ ID NO: 2225479 - RNA, 19 nt, Homo sapiens
  misc_RNA (1)...(19): siRNA sense strand
gaaacaagguuccagagga

SEQ ID NO: 2225480 - RNA, 19 nt, Homo sapiens
  misc_RNA (1)...(19): siRNA sense strand
acauaucuggugagaggaa

SEQ ID NO: 2225481 - RNA, 19 nt, Homo sapiens
  misc_RNA (1)...(19): siRNA sense strand
ggggaagaacucaaaggaa

SEQ ID NO: 2225482 - RNA, 19 nt, Homo sapiens
  misc_RNA (1)...(19): siRNA sense strand
guuggaagacccaggggaa

SEQ ID NO: 2225483 - RNA, 19 nt, Homo sapiens
  misc_RNA (1)...(19): siRNA sense strand
cagaagaggaagccgaaaa

SEQ ID NO: 2225484 - RNA, 19 nt, Homo sapiens
  misc_RNA (1)...(19): siRNA sense strand
ccaagcagggagagggcau

SEQ ID NO: 2225485 - RNA, 19 nt, Homo sapiens
  misc_RNA (1)...(19): siRNA sense strand
ccgcagaagaggaagccga

SEQ ID NO: 2225486 - RNA, 19 nt, Homo sapiens
  misc_RNA (1)...(19): siRNA sense strand
agggagagggcauggugaa

SEQ ID NO: 2225487 - RNA, 19 nt, Homo sapiens
  misc_RNA (1)...(19): siRNA sense strand
gcaauugaagagauggaga

SEQ ID NO: 2225488 - RNA, 19 nt, Homo sapiens
  misc_RNA (1)...(19): siRNA sense strand
ccgaaaacuggaauauuaa

SEQ ID NO: 2225489 - RNA, 19 nt, Homo sapiens
  misc_RNA (1)...(19): siRNA sense strand
gaucauauucuaaaggaac

SEQ ID NO: 2225490 - RNA, 19 nt, Homo sapiens
  misc_RNA (1)...(19): siRNA sense strand
cagccauggagguggaagu

SEQ ID NO: 2225491 - RNA, 19 nt, Homo sapiens
  misc_RNA (1)...(19): siRNA sense strand
agagaagcgagguggucau

SEQ ID NO: 2225492 - RNA, 19 nt, Homo sapiens
  misc_RNA (1)...(19): siRNA sense strand
gugcaaaaccucaaguuca

SEQ ID NO: 2225493 - RNA, 19 nt, Homo sapiens
  misc_RNA (1)...(19): siRNA sense strand
ggacuuccaagcagggaga

SEQ ID NO: 2225494 - RNA, 19 nt, Homo sapiens
  misc_RNA (1)...(19): siRNA sense strand
cuuuaacagaagaagcaau

SEQ ID NO: 2225495 - RNA, 19 nt, Homo sapiens
  misc_RNA (1)...(19): siRNA sense strand
aagcaauugaagagaugga

SEQ ID NO: 2225496 - RNA, 19 nt, Homo sapiens
  misc_RNA (1)...(19): siRNA sense strand
gauggagagagauggccua

SEQ ID NO: 2225497 - RNA, 19 nt, Homo sapiens
  misc_RNA (1)...(19): siRNA sense strand
uuugaaagcaagagcuaua

SEQ ID NO: 2225498 - RNA, 19 nt, Homo sapiens
  misc_RNA (1)...(19): siRNA sense strand
ggcaauggauuuaggcaca

SEQ ID NO: 2225499 - RNA, 19 nt, Homo sapiens
  misc_RNA (1)...(19): siRNA sense strand
agagaguaccacacagaaa

SEQ ID NO: 2225500 - RNA, 19 nt, Homo sapiens
  misc_RNA (1)...(19): siRNA sense strand
ccaaagaaguggugaccuc

SEQ ID NO: 2225501 - RNA, 19 nt, Homo sapiens
  misc_RNA (1)...(19): siRNA sense strand
ggacaaggagagaguacca

SEQ ID NO: 2225502 - RNA, 19 nt, Homo sapiens
  misc_RNA (1)...(19): siRNA sense strand
cauuugaaagcaagagcua

SEQ ID NO: 2225503 - RNA, 19 nt, Homo sapiens
  misc_RNA (1)...(19): siRNA sense strand
gggucaugcaguagggcuu

SEQ ID NO: 2225504 - RNA, 19 nt, Homo sapiens
  misc_RNA (1)...(19): siRNA sense strand
agaugagaauggaguuaga

SEQ ID NO: 2225505 - RNA, 19 nt, Homo sapiens
  misc_RNA (1)...(19): siRNA sense strand
ccuucuggcugcaggauga

SEQ ID NO: 2225506 - RNA, 19 nt, Homo sapiens
  misc_RNA (1)...(19): siRNA sense strand
uugaaguccugaagcgcaa

SEQ ID NO: 2225507 - RNA, 19 nt, Homo sapiens
  misc_RNA (1)...(19): siRNA sense strand
ccugaagcgcaaagucaua

SEQ ID NO: 2225508 - RNA, 19 nt, Homo sapiens
  misc_RNA (1)...(19): siRNA sense strand
acuaugaagaucagcagaa

SEQ ID NO: 2225509 - RNA, 19 nt, Homo sapiens
  misc_RNA (1)...(19): siRNA sense strand
ugaagaggugucaggaaau

SEQ ID NO: 2225510 - RNA, 19 nt, Homo sapiens
  misc_RNA (1)...(19): siRNA sense strand
cuucuaaaggagauaaaga

SEQ ID NO: 2225511 - RNA, 19 nt, Homo sapiens
  misc_RNA (1)...(19): siRNA sense strand
agccaauaaccgugauaau

SEQ ID NO: 2225512 - RNA, 19 nt, Homo sapiens
  misc_RNA (1)...(19): siRNA sense strand
ugaacaggucauugccaaa

SEQ ID NO: 2225513 - RNA, 19 nt, Homo sapiens
  misc_RNA (1)...(19): siRNA sense strand
cuuucuagcugaaggagga

SEQ ID NO: 2225514 - RNA, 19 nt, Homo sapiens
  misc_RNA (1)...(19): siRNA sense strand
ggucacuucuaaaggagau

SEQ ID NO: 2225515 - RNA, 19 nt, Homo sapiens
  misc_RNA (1)...(19): siRNA sense strand
acuaguagcacgaguuaca

SEQ ID NO: 2225516 - RNA, 19 nt, Homo sapiens
  misc_RNA (1)...(19): siRNA sense strand
ugaaacgacuggaggugga

SEQ ID NO: 2225517 - RNA, 19 nt, Homo sapiens
  misc_RNA (1)...(19): siRNA sense strand
gaauggaguuagagagacc

SEQ ID NO: 2225518 - RNA, 19 nt, Homo sapiens
  misc_RNA (1)...(19): siRNA sense strand
gcucuaaaaccguuacuaa

SEQ ID NO: 2225519 - RNA, 19 nt, Homo sapiens
  misc_RNA (1)...(19): siRNA sense strand
agaugaggccggaagugaa

SEQ ID NO: 2225520 - RNA, 19 nt, Homo sapiens
  misc_RNA (1)...(19): siRNA sense strand
uggaaguacuggaaaccga

SEQ ID NO: 2225521 - RNA, 19 nt, Homo sapiens
  misc_RNA (1)...(19): siRNA sense strand
gugaaguagaucugaagga

SEQ ID NO: 2225522 - RNA, 19 nt, Homo sapiens
  misc_RNA (1)...(19): siRNA sense strand
uggaaggcauuaacagaca

SEQ ID NO: 2225523 - RNA, 19 nt, Homo sapiens
  misc_RNA (1)...(19): siRNA sense strand
ccgaucuugucgaggguca

SEQ ID NO: 2225524 - RNA, 19 nt, Homo sapiens
  misc_RNA (1)...(19): siRNA sense strand
acuccacauuugaaagcaa

SEQ ID NO: 2225525 - RNA, 19 nt, Homo sapiens
  misc_RNA (1)...(19): siRNA sense strand
gauaaagagcucaggacug

SEQ ID NO: 2225526 - RNA, 19 nt, Homo sapiens
  misc_RNA (1)...(19): siRNA sense strand
caaccgagugucagaggau

SEQ ID NO: 2225527 - RNA, 19 nt, Homo sapiens
  misc_RNA (1)...(19): siRNA sense strand
ccggaaauuuuaagagcca

SEQ ID NO: 2225528 - RNA, 19 nt, Homo sapiens
  misc_RNA (1)...(19): siRNA sense strand
gguuguggaaagacaucaa

SEQ ID NO: 2225529 - RNA, 19 nt, Homo sapiens
  misc_RNA (1)...(19): siRNA sense strand
gcucugaugaagacuggaa

SEQ ID NO: 2225530 - RNA, 19 nt, Homo sapiens
  misc_RNA (1)...(19): siRNA sense strand
cugaugaagacuggaacua

SEQ ID NO: 2225531 - RNA, 19 nt, Homo sapiens
  misc_RNA (1)...(19): siRNA sense strand
ccagggacaaggagagagu

SEQ ID NO: 2225532 - RNA, 19 nt, Homo sapiens
  misc_RNA (1)...(19): siRNA sense strand
ugaaggacuaugaagauca

SEQ ID NO: 2225533 - RNA, 19 nt, Homo sapiens
  misc_RNA (1)...(19): siRNA sense strand
ccgcagaugagaauggagu

SEQ ID NO: 2225534 - RNA, 19 nt, Homo sapiens
  misc_RNA (1)...(19): siRNA sense strand
cugacugucccgaggcaau

SEQ ID NO: 2225535 - RNA, 19 nt, Homo sapiens
  misc_RNA (1)...(19): siRNA sense strand
aggcacauugucuggcaua

SEQ ID NO: 2225536 - RNA, 19 nt, Homo sapiens
  misc_RNA (1)...(19): siRNA sense strand
gggacuggagggacugcaa

SEQ ID NO: 2225537 - RNA, 19 nt, Homo sapiens
  misc_RNA (1)...(19): siRNA sense strand
gcaucuucacaaauacaaa

SEQ ID NO: 2225538 - RNA, 19 nt, Homo sapiens
  misc_RNA (1)...(19): siRNA sense strand
uuugaaagcaagagcuaua

SEQ ID NO: 2225539 - RNA, 19 nt, Homo sapiens
  misc_RNA (1)...(19): siRNA sense strand
ggcaauggauuuaggcaca

SEQ ID NO: 2225540 - RNA, 19 nt, Homo sapiens
  misc_RNA (1)...(19): siRNA sense strand
agagaguaccacacagaaa

SEQ ID NO: 2225541 - RNA, 19 nt, Homo sapiens
  misc_RNA (1)...(19): siRNA sense strand
ccaaagaaguggugaccuc

SEQ ID NO: 2225542 - RNA, 19 nt, Homo sapiens
  misc_RNA (1)...(19): siRNA sense strand
ggacaaggagagaguacca

SEQ ID NO: 2225543 - RNA, 19 nt, Homo sapiens
  misc_RNA (1)...(19): siRNA sense strand
cauuugaaagcaagagcua

SEQ ID NO: 2225544 - RNA, 19 nt, Homo sapiens
  misc_RNA (1)...(19): siRNA sense strand
gggucaugcaguagggcuu

SEQ ID NO: 2225545 - RNA, 19 nt, Homo sapiens
  misc_RNA (1)...(19): siRNA sense strand
agaugagaauggaguuaga

SEQ ID NO: 2225546 - RNA, 19 nt, Homo sapiens
  misc_RNA (1)...(19): siRNA sense strand
ccuucuggcugcaggauga

SEQ ID NO: 2225547 - RNA, 19 nt, Homo sapiens
  misc_RNA (1)...(19): siRNA sense strand
uugaaguccugaagcgcaa

SEQ ID NO: 2225548 - RNA, 19 nt, Homo sapiens
  misc_RNA (1)...(19): siRNA sense strand
ccugaagcgcaaagucaua

SEQ ID NO: 2225549 - RNA, 19 nt, Homo sapiens
  misc_RNA (1)...(19): siRNA sense strand
acuaugaagaucagcagaa

SEQ ID NO: 2225550 - RNA, 19 nt, Homo sapiens
  misc_RNA (1)...(19): siRNA sense strand
ugaagaggugucaggaaau

SEQ ID NO: 2225551 - RNA, 19 nt, Homo sapiens
  misc_RNA (1)...(19): siRNA sense strand
cuucuaaaggagauaaaga

SEQ ID NO: 2225552 - RNA, 19 nt, Homo sapiens
  misc_RNA (1)...(19): siRNA sense strand
agccaauaaccgugauaau

SEQ ID NO: 2225553 - RNA, 19 nt, Homo sapiens
  misc_RNA (1)...(19): siRNA sense strand
ugaacaggucauugccaaa

SEQ ID NO: 2225554 - RNA, 19 nt, Homo sapiens
  misc_RNA (1)...(19): siRNA sense strand
cuuucuagcugaaggagga

SEQ ID NO: 2225555 - RNA, 19 nt, Homo sapiens
  misc_RNA (1)...(19): siRNA sense strand
ggucacuucuaaaggagau

SEQ ID NO: 2225556 - RNA, 19 nt, Homo sapiens
  misc_RNA (1)...(19): siRNA sense strand
acuaguagcacgaguuaca

SEQ ID NO: 2225557 - RNA, 19 nt, Homo sapiens
  misc_RNA (1)...(19): siRNA sense strand
ugaaacgacuggaggugga

SEQ ID NO: 2225558 - RNA, 19 nt, Homo sapiens
  misc_RNA (1)...(19): siRNA sense strand
gaauggaguuagagagacc

SEQ ID NO: 2225559 - RNA, 19 nt, Homo sapiens
  misc_RNA (1)...(19): siRNA sense strand
gcucuaaaaccguuacuaa

SEQ ID NO: 2225560 - RNA, 19 nt, Homo sapiens
  misc_RNA (1)...(19): siRNA sense strand
agaugaggccggaagugaa

SEQ ID NO: 2225561 - RNA, 19 nt, Homo sapiens
  misc_RNA (1)...(19): siRNA sense strand
uggaaguacuggaaaccga

SEQ ID NO: 2225562 - RNA, 19 nt, Homo sapiens
  misc_RNA (1)...(19): siRNA sense strand
gugaaguagaucugaagga

SEQ ID NO: 2225563 - RNA, 19 nt, Homo sapiens
  misc_RNA (1)...(19): siRNA sense strand
uggaaggcauuaacagaca

SEQ ID NO: 2225564 - RNA, 19 nt, Homo sapiens
  misc_RNA (1)...(19): siRNA sense strand
ccgaucuugucgaggguca

SEQ ID NO: 2225565 - RNA, 19 nt, Homo sapiens
  misc_RNA (1)...(19): siRNA sense strand
acuccacauuugaaagcaa

SEQ ID NO: 2225566 - RNA, 19 nt, Homo sapiens
  misc_RNA (1)...(19): siRNA sense strand
gauaaagagcucaggacug

SEQ ID NO: 2225567 - RNA, 19 nt, Homo sapiens
  misc_RNA (1)...(19): siRNA sense strand
caaccgagugucagaggau

SEQ ID NO: 2225568 - RNA, 19 nt, Homo sapiens
  misc_RNA (1)...(19): siRNA sense strand
ccggaaauuuuaagagcca

SEQ ID NO: 2225569 - RNA, 19 nt, Homo sapiens
  misc_RNA (1)...(19): siRNA sense strand
gguuguggaaagacaucaa

SEQ ID NO: 2225570 - RNA, 19 nt, Homo sapiens
  misc_RNA (1)...(19): siRNA sense strand
gcucugaugaagacuggaa

SEQ ID NO: 2225571 - RNA, 19 nt, Homo sapiens
  misc_RNA (1)...(19): siRNA sense strand
cugaugaagacuggaacua

SEQ ID NO: 2225572 - RNA, 19 nt, Homo sapiens
  misc_RNA (1)...(19): siRNA sense strand
ccagggacaaggagagagu

SEQ ID NO: 2225573 - RNA, 19 nt, Homo sapiens
  misc_RNA (1)...(19): siRNA sense strand
ugaaggacuaugaagauca

SEQ ID NO: 2225574 - RNA, 19 nt, Homo sapiens
  misc_RNA (1)...(19): siRNA sense strand
ccgcagaugagaauggagu

SEQ ID NO: 2225575 - RNA, 19 nt, Homo sapiens
  misc_RNA (1)...(19): siRNA sense strand
cugacugucccgaggcaau

SEQ ID NO: 2225576 - RNA, 19 nt, Homo sapiens
  misc_RNA (1)...(19): siRNA sense strand
aggcacauugucuggcaua

SEQ ID NO: 2225577 - RNA, 19 nt, Homo sapiens
  misc_RNA (1)...(19): siRNA sense strand
gggacuggagggacugcaa

SEQ ID NO: 2225578 - RNA, 19 nt, Homo sapiens
  misc_RNA (1)...(19): siRNA sense strand
gcaucuucacaaauacaaa

SEQ ID NO: 2225579 - RNA, 19 nt, Homo sapiens
  misc_RNA (1)...(19): siRNA sense strand
acacagaaaagauggaaaa

SEQ ID NO: 2225580 - RNA, 19 nt, Homo sapiens
  misc_RNA (1)...(19): siRNA sense strand
ggaaggaguuuaagcagga

SEQ ID NO: 2225581 - RNA, 19 nt, Homo sapiens
  misc_RNA (1)...(19): siRNA sense strand
ggauaccacauuagagcca

SEQ ID NO: 2225582 - RNA, 19 nt, Homo sapiens
  misc_RNA (1)...(19): siRNA sense strand
acacagaaaagauggaaaa

SEQ ID NO: 2225583 - RNA, 19 nt, Homo sapiens
  misc_RNA (1)...(19): siRNA sense strand
ggaaggaguuuaagcagga

SEQ ID NO: 2225584 - RNA, 19 nt, Homo sapiens
  misc_RNA (1)...(19): siRNA sense strand
ggauaccacauuagagcca

SEQ ID NO: 2225585 - RNA, 19 nt, Homo sapiens
  misc_RNA (1)...(19): siRNA sense strand
acacagaaaagauggaaaa

SEQ ID NO: 2225586 - RNA, 19 nt, Homo sapiens
  misc_RNA (1)...(19): siRNA sense strand
ggaaggaguuuaagcagga

SEQ ID NO: 2225587 - RNA, 19 nt, Homo sapiens
  misc_RNA (1)...(19): siRNA sense strand
ggauaccacauuagagcca

SEQ ID NO: 2225588 - RNA, 19 nt, Homo sapiens
  misc_RNA (1)...(19): siRNA sense strand
acacagaaaagauggaaaa

SEQ ID NO: 2225589 - RNA, 19 nt, Homo sapiens
  misc_RNA (1)...(19): siRNA sense strand
ggaaggaguuuaagcagga

SEQ ID NO: 2225590 - RNA, 19 nt, Homo sapiens
  misc_RNA (1)...(19): siRNA sense strand
ggauaccacauuagagcca

SEQ ID NO: 2225591 - RNA, 19 nt, Homo sapiens
  misc_RNA (1)...(19): siRNA sense strand
acacagaaaagauggaaaa

SEQ ID NO: 2225592 - RNA, 19 nt, Homo sapiens
  misc_RNA (1)...(19): siRNA sense strand
ggaaggaguuuaagcagga

SEQ ID NO: 2225593 - RNA, 19 nt, Homo sapiens
  misc_RNA (1)...(19): siRNA sense strand
ggauaccacauuagagcca

SEQ ID NO: 2225594 - RNA, 19 nt, Homo sapiens
  misc_RNA (1)...(19): siRNA sense strand
acacagaaaagauggaaaa

SEQ ID NO: 2225595 - RNA, 19 nt, Homo sapiens
  misc_RNA (1)...(19): siRNA sense strand
ggaaggaguuuaagcagga

SEQ ID NO: 2225596 - RNA, 19 nt, Homo sapiens
  misc_RNA (1)...(19): siRNA sense strand
ggauaccacauuagagcca

SEQ ID NO: 2225597 - RNA, 19 nt, Homo sapiens
  misc_RNA (1)...(19): siRNA sense strand
acacagaaaagauggaaaa

SEQ ID NO: 2225598 - RNA, 19 nt, Homo sapiens
  misc_RNA (1)...(19): siRNA sense strand
ggaaggaguuuaagcagga

SEQ ID NO: 2225599 - RNA, 19 nt, Homo sapiens
  misc_RNA (1)...(19): siRNA sense strand
ggauaccacauuagagcca

SEQ ID NO: 2225600 - RNA, 19 nt, Homo sapiens
  misc_RNA (1)...(19): siRNA sense strand
acacagaaaagauggaaaa

SEQ ID NO: 2225601 - RNA, 19 nt, Homo sapiens
  misc_RNA (1)...(19): siRNA sense strand
ggaaggaguuuaagcagga

SEQ ID NO: 2225602 - RNA, 19 nt, Homo sapiens
  misc_RNA (1)...(19): siRNA sense strand
ggauaccacauuagagcca

SEQ ID NO: 2225603 - RNA, 19 nt, Homo sapiens
  misc_RNA (1)...(19): siRNA sense strand
acacagaaaagauggaaaa

SEQ ID NO: 2225604 - RNA, 19 nt, Homo sapiens
  misc_RNA (1)...(19): siRNA sense strand
ggaaggaguuuaagcagga

SEQ ID NO: 2225605 - RNA, 19 nt, Homo sapiens
  misc_RNA (1)...(19): siRNA sense strand
ggauaccacauuagagcca

SEQ ID NO: 2225606 - RNA, 19 nt, Homo sapiens
  misc_RNA (1)...(19): siRNA sense strand
acacagaaaagauggaaaa

SEQ ID NO: 2225607 - RNA, 19 nt, Homo sapiens
  misc_RNA (1)...(19): siRNA sense strand
ggaaggaguuuaagcagga

SEQ ID NO: 2225608 - RNA, 19 nt, Homo sapiens
  misc_RNA (1)...(19): siRNA sense strand
ggauaccacauuagagcca

SEQ ID NO: 2225609 - RNA, 19 nt, Homo sapiens
  misc_RNA (1)...(19): siRNA sense strand
acacagaaaagauggaaaa

SEQ ID NO: 2225610 - RNA, 19 nt, Homo sapiens
  misc_RNA (1)...(19): siRNA sense strand
ggaaggaguuuaagcagga

SEQ ID NO: 2225611 - RNA, 19 nt, Homo sapiens
  misc_RNA (1)...(19): siRNA sense strand
ggauaccacauuagagcca

SEQ ID NO: 2225612 - RNA, 19 nt, Homo sapiens
  misc_RNA (1)...(19): siRNA sense strand
acacagaaaagauggaaaa

SEQ ID NO: 2225613 - RNA, 19 nt, Homo sapiens
  misc_RNA (1)...(19): siRNA sense strand
ggaaggaguuuaagcagga

SEQ ID NO: 2225614 - RNA, 19 nt, Homo sapiens
  misc_RNA (1)...(19): siRNA sense strand
ggauaccacauuagagcca

SEQ ID NO: 2225615 - RNA, 19 nt, Homo sapiens
  misc_RNA (1)...(19): siRNA sense strand
acacagaaaagauggaaaa

SEQ ID NO: 2225616 - RNA, 19 nt, Homo sapiens
  misc_RNA (1)...(19): siRNA sense strand
ggaaggaguuuaagcagga

SEQ ID NO: 2225617 - RNA, 19 nt, Homo sapiens
  misc_RNA (1)...(19): siRNA sense strand
ggauaccacauuagagcca

SEQ ID NO: 2225618 - RNA, 19 nt, Homo sapiens
  misc_RNA (1)...(19): siRNA sense strand
gaugaagaugaucgggaaa

SEQ ID NO: 2225619 - RNA, 19 nt, Homo sapiens
  misc_RNA (1)...(19): siRNA sense strand
ugaugaagaugaucgggaa

SEQ ID NO: 2225620 - RNA, 19 nt, Homo sapiens
  misc_RNA (1)...(19): siRNA sense strand
gcaaugugcuggugaccga

SEQ ID NO: 2225621 - RNA, 19 nt, Homo sapiens
  misc_RNA (1)...(19): siRNA sense strand
cugaagaacggcagggagu

SEQ ID NO: 2225622 - RNA, 19 nt, Homo sapiens
  misc_RNA (1)...(19): siRNA sense strand
ccugcgucguggagaacaa

SEQ ID NO: 2225623 - RNA, 19 nt, Homo sapiens
  misc_RNA (1)...(19): siRNA sense strand
ccgaggacaacgugaugaa

SEQ ID NO: 2225624 - RNA, 19 nt, Homo sapiens
  misc_RNA (1)...(19): siRNA sense strand
ugaagaugcugaaagacga

SEQ ID NO: 2225625 - RNA, 19 nt, Homo sapiens
  misc_RNA (1)...(19): siRNA sense strand
cugagauggagaugaugaa

SEQ ID NO: 2225626 - RNA, 19 nt, Homo sapiens
  misc_RNA (1)...(19): siRNA sense strand
ucaagcagcugguggagga

SEQ ID NO: 2225627 - RNA, 19 nt, Homo sapiens
  misc_RNA (1)...(19): siRNA sense strand
acaagaagcugcuggccgu

SEQ ID NO: 2225628 - RNA, 19 nt, Homo sapiens
  misc_RNA (1)...(19): siRNA sense strand
ccucgggagaugacgaaga

SEQ ID NO: 2225629 - RNA, 19 nt, Homo sapiens
  misc_RNA (1)...(19): siRNA sense strand
gcugaaagacgaugccacu

SEQ ID NO: 2225630 - RNA, 19 nt, Homo sapiens
  misc_RNA (1)...(19): siRNA sense strand
gaugaagaugaucgggaaa

SEQ ID NO: 2225631 - RNA, 19 nt, Homo sapiens
  misc_RNA (1)...(19): siRNA sense strand
ugaugaagaugaucgggaa

SEQ ID NO: 2225632 - RNA, 19 nt, Homo sapiens
  misc_RNA (1)...(19): siRNA sense strand
gcaaugugcuggugaccga

SEQ ID NO: 2225633 - RNA, 19 nt, Homo sapiens
  misc_RNA (1)...(19): siRNA sense strand
cugaagaacggcagggagu

SEQ ID NO: 2225634 - RNA, 19 nt, Homo sapiens
  misc_RNA (1)...(19): siRNA sense strand
ccugcgucguggagaacaa

SEQ ID NO: 2225635 - RNA, 19 nt, Homo sapiens
  misc_RNA (1)...(19): siRNA sense strand
ccgaggacaacgugaugaa

SEQ ID NO: 2225636 - RNA, 19 nt, Homo sapiens
  misc_RNA (1)...(19): siRNA sense strand
ugaagaugcugaaagacga

SEQ ID NO: 2225637 - RNA, 19 nt, Homo sapiens
  misc_RNA (1)...(19): siRNA sense strand
cugagauggagaugaugaa

SEQ ID NO: 2225638 - RNA, 19 nt, Homo sapiens
  misc_RNA (1)...(19): siRNA sense strand
ucaagcagcugguggagga

SEQ ID NO: 2225639 - RNA, 19 nt, Homo sapiens
  misc_RNA (1)...(19): siRNA sense strand
acaagaagcugcuggccgu

SEQ ID NO: 2225640 - RNA, 19 nt, Homo sapiens
  misc_RNA (1)...(19): siRNA sense strand
ccucgggagaugacgaaga

SEQ ID NO: 2225641 - RNA, 19 nt, Homo sapiens
  misc_RNA (1)...(19): siRNA sense strand
gcugaaagacgaugccacu

SEQ ID NO: 2225642 - RNA, 19 nt, Homo sapiens
  misc_RNA (1)...(19): siRNA sense strand
gugaagauaucauggggua

SEQ ID NO: 2225643 - RNA, 19 nt, Homo sapiens
  misc_RNA (1)...(19): siRNA sense strand
gcugaauaagaaugggauu

SEQ ID NO: 2225644 - RNA, 19 nt, Homo sapiens
  misc_RNA (1)...(19): siRNA sense strand
gcuacaugaaggugagcau

SEQ ID NO: 2225645 - RNA, 19 nt, Homo sapiens
  misc_RNA (1)...(19): siRNA sense strand
uggaggugauagaggcaga

SEQ ID NO: 2225646 - RNA, 19 nt, Homo sapiens
  misc_RNA (1)...(19): siRNA sense strand
gcaaugaagugguugacgu

SEQ ID NO: 2225647 - RNA, 19 nt, Homo sapiens
  misc_RNA (1)...(19): siRNA sense strand
ugauagaggcagauguguu

SEQ ID NO: 2225648 - RNA, 19 nt, Homo sapiens
  misc_RNA (1)...(19): siRNA sense strand
gauccuaacuaccagccaa

SEQ ID NO: 2225649 - RNA, 19 nt, Homo sapiens
  misc_RNA (1)...(19): siRNA sense strand
cugugaugcugcuggcuuu

SEQ ID NO: 2225650 - RNA, 19 nt, Homo sapiens
  misc_RNA (1)...(19): siRNA sense strand
gcugaaucuaagcgauaau

SEQ ID NO: 2225651 - RNA, 19 nt, Homo sapiens
  misc_RNA (1)...(19): siRNA sense strand
cuaugaaaugcaagcccaa

SEQ ID NO: 2225652 - RNA, 19 nt, Homo sapiens
  misc_RNA (1)...(19): siRNA sense strand
ggaacaucauagugcuagu

SEQ ID NO: 2225653 - RNA, 19 nt, Homo sapiens
  misc_RNA (1)...(19): siRNA sense strand
uccacacaauugaaagaaa

SEQ ID NO: 2225654 - RNA, 19 nt, Homo sapiens
  misc_RNA (1)...(19): siRNA sense strand
ccaagagccaauaucacaa

SEQ ID NO: 2225655 - RNA, 19 nt, Homo sapiens
  misc_RNA (1)...(19): siRNA sense strand
ggauucaagaaauacacaa

SEQ ID NO: 2225656 - RNA, 19 nt, Homo sapiens
  misc_RNA (1)...(19): siRNA sense strand
gcccaaauuuauaggacag

SEQ ID NO: 2225657 - RNA, 19 nt, Homo sapiens
  misc_RNA (1)...(19): siRNA sense strand
agaaugaugucuuggaggu

SEQ ID NO: 2225658 - RNA, 19 nt, Homo sapiens
  misc_RNA (1)...(19): siRNA sense strand
caacacagguauuaagcac

SEQ ID NO: 2225659 - RNA, 19 nt, Homo sapiens
  misc_RNA (1)...(19): siRNA sense strand
ugggaacaucauagugcua

SEQ ID NO: 2225660 - RNA, 19 nt, Homo sapiens
  misc_RNA (1)...(19): siRNA sense strand
gcuaugaaaugcaagccca

SEQ ID NO: 2225661 - RNA, 19 nt, Homo sapiens
  misc_RNA (1)...(19): siRNA sense strand
cauccacacaauugaaaga

SEQ ID NO: 2225662 - RNA, 19 nt, Homo sapiens
  misc_RNA (1)...(19): siRNA sense strand
aaggcaagaaguugauuau

SEQ ID NO: 2225663 - RNA, 19 nt, Homo sapiens
  misc_RNA (1)...(19): siRNA sense strand
gugaagauaucauggggua

SEQ ID NO: 2225664 - RNA, 19 nt, Homo sapiens
  misc_RNA (1)...(19): siRNA sense strand
gcugaauaagaaugggauu

SEQ ID NO: 2225665 - RNA, 19 nt, Homo sapiens
  misc_RNA (1)...(19): siRNA sense strand
gcuacaugaaggugagcau

SEQ ID NO: 2225666 - RNA, 19 nt, Homo sapiens
  misc_RNA (1)...(19): siRNA sense strand
uggaggugauagaggcaga

SEQ ID NO: 2225667 - RNA, 19 nt, Homo sapiens
  misc_RNA (1)...(19): siRNA sense strand
gcaaugaagugguugacgu

SEQ ID NO: 2225668 - RNA, 19 nt, Homo sapiens
  misc_RNA (1)...(19): siRNA sense strand
ugauagaggcagauguguu

SEQ ID NO: 2225669 - RNA, 19 nt, Homo sapiens
  misc_RNA (1)...(19): siRNA sense strand
gauccuaacuaccagccaa

SEQ ID NO: 2225670 - RNA, 19 nt, Homo sapiens
  misc_RNA (1)...(19): siRNA sense strand
cugugaugcugcuggcuuu

SEQ ID NO: 2225671 - RNA, 19 nt, Homo sapiens
  misc_RNA (1)...(19): siRNA sense strand
gcugaaucuaagcgauaau

SEQ ID NO: 2225672 - RNA, 19 nt, Homo sapiens
  misc_RNA (1)...(19): siRNA sense strand
cuaugaaaugcaagcccaa

SEQ ID NO: 2225673 - RNA, 19 nt, Homo sapiens
  misc_RNA (1)...(19): siRNA sense strand
ggaacaucauagugcuagu

SEQ ID NO: 2225674 - RNA, 19 nt, Homo sapiens
  misc_RNA (1)...(19): siRNA sense strand
uccacacaauugaaagaaa

SEQ ID NO: 2225675 - RNA, 19 nt, Homo sapiens
  misc_RNA (1)...(19): siRNA sense strand
ccaagagccaauaucacaa

SEQ ID NO: 2225676 - RNA, 19 nt, Homo sapiens
  misc_RNA (1)...(19): siRNA sense strand
ggauucaagaaauacacaa

SEQ ID NO: 2225677 - RNA, 19 nt, Homo sapiens
  misc_RNA (1)...(19): siRNA sense strand
gcccaaauuuauaggacag

SEQ ID NO: 2225678 - RNA, 19 nt, Homo sapiens
  misc_RNA (1)...(19): siRNA sense strand
agaaugaugucuuggaggu

SEQ ID NO: 2225679 - RNA, 19 nt, Homo sapiens
  misc_RNA (1)...(19): siRNA sense strand
caacacagguauuaagcac

SEQ ID NO: 2225680 - RNA, 19 nt, Homo sapiens
  misc_RNA (1)...(19): siRNA sense strand
ugggaacaucauagugcua

SEQ ID NO: 2225681 - RNA, 19 nt, Homo sapiens
  misc_RNA (1)...(19): siRNA sense strand
gcuaugaaaugcaagccca

SEQ ID NO: 2225682 - RNA, 19 nt, Homo sapiens
  misc_RNA (1)...(19): siRNA sense strand
cauccacacaauugaaaga

SEQ ID NO: 2225683 - RNA, 19 nt, Homo sapiens
  misc_RNA (1)...(19): siRNA sense strand
aaggcaagaaguugauuau

SEQ ID NO: 2225684 - RNA, 19 nt, Homo sapiens
  misc_RNA (1)...(19): siRNA sense strand
cauuaaacuccuuugggua

SEQ ID NO: 2225685 - RNA, 19 nt, Homo sapiens
  misc_RNA (1)...(19): siRNA sense strand
gagaaagcccagagguggu

SEQ ID NO: 2225686 - RNA, 19 nt, Homo sapiens
  misc_RNA (1)...(19): siRNA sense strand
aagauaaagccgaccuaca

SEQ ID NO: 2225687 - RNA, 19 nt, Homo sapiens
  misc_RNA (1)...(19): siRNA sense strand
ggguagcugugauuggaga

SEQ ID NO: 2225688 - RNA, 19 nt, Homo sapiens
  misc_RNA (1)...(19): siRNA sense strand
gggaggacaugguggcuga

SEQ ID NO: 2225689 - RNA, 19 nt, Homo sapiens
  misc_RNA (1)...(19): siRNA sense strand
accuggacguugugggaua

SEQ ID NO: 2225690 - RNA, 19 nt, Homo sapiens
  misc_RNA (1)...(19): siRNA sense strand
gcccuuagcuggaggucga

SEQ ID NO: 2225691 - RNA, 19 nt, Homo sapiens
  misc_RNA (1)...(19): siRNA sense strand
acgugaugauggagacuga

SEQ ID NO: 2225692 - RNA, 19 nt, Homo sapiens
  misc_RNA (1)...(19): siRNA sense strand
ccaagagcguggugcagca

SEQ ID NO: 2225693 - RNA, 19 nt, Homo sapiens
  misc_RNA (1)...(19): siRNA sense strand
gcaccuggacuguggacca

SEQ ID NO: 2225694 - RNA, 19 nt, Homo sapiens
  misc_RNA (1)...(19): siRNA sense strand
cgggaaggccgaagugacu

SEQ ID NO: 2225695 - RNA, 19 nt, Homo sapiens
  misc_RNA (1)...(19): siRNA sense strand
gaaaugggcuacacggcca

SEQ ID NO: 2225696 - RNA, 19 nt, Homo sapiens
  misc_RNA (1)...(19): siRNA sense strand
ugaaugagcugguacgugu

SEQ ID NO: 2225697 - RNA, 19 nt, Homo sapiens
  misc_RNA (1)...(19): siRNA sense strand
aggccgaagugacuggcua

SEQ ID NO: 2225698 - RNA, 19 nt, Homo sapiens
  misc_RNA (1)...(19): siRNA sense strand
gggccuacacacaggucau

SEQ ID NO: 2225699 - RNA, 19 nt, Homo sapiens
  misc_RNA (1)...(19): siRNA sense strand
ccgcugauugggaagguau

SEQ ID NO: 2225700 - RNA, 19 nt, Homo sapiens
  misc_RNA (1)...(19): siRNA sense strand
gggacuucacguucaacaa

SEQ ID NO: 2225701 - RNA, 19 nt, Homo sapiens
  misc_RNA (1)...(19): siRNA sense strand
gugaaauaccagagcuaca

SEQ ID NO: 2225702 - RNA, 19 nt, Homo sapiens
  misc_RNA (1)...(19): siRNA sense strand
augcacuagaugagaauua

SEQ ID NO: 2225703 - RNA, 19 nt, Homo sapiens
  misc_RNA (1)...(19): siRNA sense strand
gguugaugaaagaagcuaa

SEQ ID NO: 2225704 - RNA, 19 nt, Homo sapiens
  misc_RNA (1)...(19): siRNA sense strand
uagugaaauaccagagcua

SEQ ID NO: 2225705 - RNA, 19 nt, Homo sapiens
  misc_RNA (1)...(19): siRNA sense strand
uguugaaguuacagcaaaa

SEQ ID NO: 2225706 - RNA, 19 nt, Homo sapiens
  misc_RNA (1)...(19): siRNA sense strand
augcaaaguugacugggaa

SEQ ID NO: 2225707 - RNA, 19 nt, Homo sapiens
  misc_RNA (1)...(19): siRNA sense strand
ccuauaaggaugauuucaa

SEQ ID NO: 2225708 - RNA, 19 nt, Homo sapiens
  misc_RNA (1)...(19): siRNA sense strand
aguuggccauuuagagaaa

SEQ ID NO: 2225709 - RNA, 19 nt, Homo sapiens
  misc_RNA (1)...(19): siRNA sense strand
ggaaauagguggugauggg

SEQ ID NO: 2225710 - RNA, 19 nt, Homo sapiens
  misc_RNA (1)...(19): siRNA sense strand
auuagaagugccagaggaa

SEQ ID NO: 2225711 - RNA, 19 nt, Homo sapiens
  misc_RNA (1)...(19): siRNA sense strand
ugguauacacucacguuaa

SEQ ID NO: 2225712 - RNA, 19 nt, Homo sapiens
  misc_RNA (1)...(19): siRNA sense strand
aauggaucuuacaggguua

SEQ ID NO: 2225713 - RNA, 19 nt, Homo sapiens
  misc_RNA (1)...(19): siRNA sense strand
uaaauuacccagagcccua

SEQ ID NO: 2225714 - RNA, 19 nt, Homo sapiens
  misc_RNA (1)...(19): siRNA sense strand
gaagcuaagaagaggaauc

SEQ ID NO: 2225715 - RNA, 19 nt, Homo sapiens
  misc_RNA (1)...(19): siRNA sense strand
ccaaguaccuauaaggaug

SEQ ID NO: 2225716 - RNA, 19 nt, Homo sapiens
  misc_RNA (1)...(19): siRNA sense strand
ccacaaucgcauggaauuu

SEQ ID NO: 2225717 - RNA, 19 nt, Homo sapiens
  misc_RNA (1)...(19): siRNA sense strand
gauuagaagugccagagga

SEQ ID NO: 2225718 - RNA, 19 nt, Homo sapiens
  misc_RNA (1)...(19): siRNA sense strand
ugaugaaagaagcuaagaa

SEQ ID NO: 2225719 - RNA, 19 nt, Homo sapiens
  misc_RNA (1)...(19): siRNA sense strand
gggaucuuuuagugaaaua

SEQ ID NO: 2225720 - RNA, 19 nt, Homo sapiens
  misc_RNA (1)...(19): siRNA sense strand
agugauaaucucugggagu

SEQ ID NO: 2225721 - RNA, 19 nt, Homo sapiens
  misc_RNA (1)...(19): siRNA sense strand
cauugcaggaagaguaaau

SEQ ID NO: 2225722 - RNA, 19 nt, Homo sapiens
  misc_RNA (1)...(19): siRNA sense strand
gcuaagaagaggaauccca

SEQ ID NO: 2225723 - RNA, 19 nt, Homo sapiens
  misc_RNA (1)...(19): siRNA sense strand
uugcaggaagaguaaauaa

SEQ ID NO: 2225724 - RNA, 19 nt, Homo sapiens
  misc_RNA (1)...(19): siRNA sense strand
augaaagaagcuaagaaga

SEQ ID NO: 2225725 - RNA, 19 nt, Homo sapiens
  misc_RNA (1)...(19): siRNA sense strand
ccauuuagagaaaggagga

SEQ ID NO: 2225726 - RNA, 19 nt, Homo sapiens
  misc_RNA (1)...(19): siRNA sense strand
ccuggaacccauucagcaa

SEQ ID NO: 2225727 - RNA, 19 nt, Homo sapiens
  misc_RNA (1)...(19): siRNA sense strand
ugcaggaagaguaaauaaa

SEQ ID NO: 2225728 - RNA, 19 nt, Homo sapiens
  misc_RNA (1)...(19): siRNA sense strand
gcaaaguugacugggaaga

SEQ ID NO: 2225729 - RNA, 19 nt, Homo sapiens
  misc_RNA (1)...(19): siRNA sense strand
acaguugccuuaugggaga

SEQ ID NO: 2225730 - RNA, 19 nt, Homo sapiens
  misc_RNA (1)...(19): siRNA sense strand
ccugaagacaguuggccau

SEQ ID NO: 2225731 - RNA, 19 nt, Homo sapiens
  misc_RNA (1)...(19): siRNA sense strand
aguggugguugaugaaaga

SEQ ID NO: 2225732 - RNA, 19 nt, Homo sapiens
  misc_RNA (1)...(19): siRNA sense strand
gaugcaaaguugacuggga

SEQ ID NO: 2225733 - RNA, 19 nt, Homo sapiens
  misc_RNA (1)...(19): siRNA sense strand
agagaaaggaggaagcuac

SEQ ID NO: 2225734 - RNA, 19 nt, Homo sapiens
  misc_RNA (1)...(19): siRNA sense strand
guauuauaggagacuacaa

SEQ ID NO: 2225735 - RNA, 19 nt, Homo sapiens
  misc_RNA (1)...(19): siRNA sense strand
uuacaggguuacaggugau

SEQ ID NO: 2225736 - RNA, 19 nt, Homo sapiens
  misc_RNA (1)...(19): siRNA sense strand
cuggcaugcugaaugacaa

SEQ ID NO: 2225737 - RNA, 19 nt, Homo sapiens
  misc_RNA (1)...(19): siRNA sense strand
ggcuauaugacuuccacaa

SEQ ID NO: 2225738 - RNA, 19 nt, Homo sapiens
  misc_RNA (1)...(19): siRNA sense strand
gcauggaauuuaguggcua

SEQ ID NO: 2225739 - RNA, 19 nt, Homo sapiens
  misc_RNA (1)...(19): siRNA sense strand
caaucaguauuauaggaga

SEQ ID NO: 2225740 - RNA, 19 nt, Homo sapiens
  misc_RNA (1)...(19): siRNA sense strand
gaguaaauaaaggugguau

SEQ ID NO: 2225741 - RNA, 19 nt, Homo sapiens
  misc_RNA (1)...(19): siRNA sense strand
ccuuaaggaagcugaaaga

SEQ ID NO: 2225742 - RNA, 19 nt, Homo sapiens
  misc_RNA (1)...(19): siRNA sense strand
cuguggaguuugaggagau

SEQ ID NO: 2225743 - RNA, 19 nt, Homo sapiens
  misc_RNA (1)...(19): siRNA sense strand
guaccaacccuuacggcaa

SEQ ID NO: 2225744 - RNA, 19 nt, Homo sapiens
  misc_RNA (1)...(19): siRNA sense strand
acguagugcugcugcgcua

SEQ ID NO: 2225745 - RNA, 19 nt, Homo sapiens
  misc_RNA (1)...(19): siRNA sense strand
aguucuucaucgaggaaau

SEQ ID NO: 2225746 - RNA, 19 nt, Homo sapiens
  misc_RNA (1)...(19): siRNA sense strand
ccugaaugucuuuggcaau

SEQ ID NO: 2225747 - RNA, 19 nt, Homo sapiens
  misc_RNA (1)...(19): siRNA sense strand
ggagaaggccucugggaag

SEQ ID NO: 2225748 - RNA, 19 nt, Homo sapiens
  misc_RNA (1)...(19): siRNA sense strand
uggcaaugacuaugacaca

SEQ ID NO: 2225749 - RNA, 19 nt, Homo sapiens
  misc_RNA (1)...(19): siRNA sense strand
gcgggaaggugauguggca

SEQ ID NO: 2225750 - RNA, 19 nt, Homo sapiens
  misc_RNA (1)...(19): siRNA sense strand
gggugaagaaccugguguu

SEQ ID NO: 2225751 - RNA, 19 nt, Homo sapiens
  misc_RNA (1)...(19): siRNA sense strand
uggagaaggccucugggaa

SEQ ID NO: 2225752 - RNA, 19 nt, Homo sapiens
  misc_RNA (1)...(19): siRNA sense strand
gcuacuugccuguggucau

SEQ ID NO: 2225753 - RNA, 19 nt, Homo sapiens
  misc_RNA (1)...(19): siRNA sense strand
ugacuaugacacagaggau

SEQ ID NO: 2225754 - RNA, 19 nt, Homo sapiens
  misc_RNA (1)...(19): siRNA sense strand
cccugaaugucuuuggcaa

SEQ ID NO: 2225755 - RNA, 19 nt, Homo sapiens
  misc_RNA (1)...(19): siRNA sense strand
aguuugaggagauggacau

SEQ ID NO: 2225756 - RNA, 19 nt, Homo sapiens
  misc_RNA (1)...(19): siRNA sense strand
gaguuugaggagauggaca

SEQ ID NO: 2225757 - RNA, 19 nt, Homo sapiens
  misc_RNA (1)...(19): siRNA sense strand
ccaacuaugucaagggagu

SEQ ID NO: 2225758 - RNA, 19 nt, Homo sapiens
  misc_RNA (1)...(19): siRNA sense strand
gggagguacaacuggaaga

SEQ ID NO: 2225759 - RNA, 19 nt, Homo sapiens
  misc_RNA (1)...(19): siRNA sense strand
gccucaugguggagagcca

SEQ ID NO: 2225760 - RNA, 19 nt, Homo sapiens
  misc_RNA (1)...(19): siRNA sense strand
uggaagagcuagaggcugc

SEQ ID NO: 2225761 - RNA, 19 nt, Homo sapiens
  misc_RNA (1)...(19): siRNA sense strand
ggcacauccaggagcacua

SEQ ID NO: 2225762 - RNA, 19 nt, Homo sapiens
  misc_RNA (1)...(19): siRNA sense strand
ucagcaagauugucggcaa

SEQ ID NO: 2225763 - RNA, 19 nt, Homo sapiens
  misc_RNA (1)...(19): siRNA sense strand
gcaaguggcaucuggguca

SEQ ID NO: 2225764 - RNA, 19 nt, Homo sapiens
  misc_RNA (1)...(19): siRNA sense strand
guguacagggacugggaga

SEQ ID NO: 2225765 - RNA, 19 nt, Homo sapiens
  misc_RNA (1)...(19): siRNA sense strand
ggaagauacuggagcuccu

SEQ ID NO: 2225766 - RNA, 19 nt, Homo sapiens
  misc_RNA (1)...(19): siRNA sense strand
uggacuucauuaagagaca

SEQ ID NO: 2225767 - RNA, 19 nt, Homo sapiens
  misc_RNA (1)...(19): siRNA sense strand
gggagauugaugacagcau

SEQ ID NO: 2225768 - RNA, 19 nt, Homo sapiens
  misc_RNA (1)...(19): siRNA sense strand
cgaacaagguggcagcaac

SEQ ID NO: 2225769 - RNA, 19 nt, Homo sapiens
  misc_RNA (1)...(19): siRNA sense strand
cggcugauggacaggccua

SEQ ID NO: 2225770 - RNA, 19 nt, Homo sapiens
  misc_RNA (1)...(19): siRNA sense strand
ggaaauucaugguuggcua

SEQ ID NO: 2225771 - RNA, 19 nt, Homo sapiens
  misc_RNA (1)...(19): siRNA sense strand
gcagcaaccuuccgggcaa

SEQ ID NO: 2225772 - RNA, 19 nt, Homo sapiens
  misc_RNA (1)...(19): siRNA sense strand
gguccuaaccagugagcac

SEQ ID NO: 2225773 - RNA, 19 nt, Homo sapiens
  misc_RNA (1)...(19): siRNA sense strand
gggcaaacgaccaucagca

SEQ ID NO: 2225774 - RNA, 19 nt, Homo sapiens
  misc_RNA (1)...(19): siRNA sense strand
cagauauugcccagcguga

SEQ ID NO: 2225775 - RNA, 19 nt, Homo sapiens
  misc_RNA (1)...(19): siRNA sense strand
gcagcaaccuuccgggcaa

SEQ ID NO: 2225776 - RNA, 19 nt, Homo sapiens
  misc_RNA (1)...(19): siRNA sense strand
gggcaaacgaccaucagca

SEQ ID NO: 2225777 - RNA, 19 nt, Homo sapiens
  misc_RNA (1)...(19): siRNA sense strand
gcagcaaccuuccgggcaa

SEQ ID NO: 2225778 - RNA, 19 nt, Homo sapiens
  misc_RNA (1)...(19): siRNA sense strand
gggcaaacgaccaucagca

SEQ ID NO: 2225779 - RNA, 19 nt, Homo sapiens
  misc_RNA (1)...(19): siRNA sense strand
cagauauugcccagcguga

SEQ ID NO: 2225780 - RNA, 19 nt, Homo sapiens
  misc_RNA (1)...(19): siRNA sense strand
acucaugaucuuugggaua

SEQ ID NO: 2225781 - RNA, 19 nt, Homo sapiens
  misc_RNA (1)...(19): siRNA sense strand
gaauauguuugaugggaca

SEQ ID NO: 2225782 - RNA, 19 nt, Homo sapiens
  misc_RNA (1)...(19): siRNA sense strand
ggguaaugaauuugggcau

SEQ ID NO: 2225783 - RNA, 19 nt, Homo sapiens
  misc_RNA (1)...(19): siRNA sense strand
ccaccaaagcagaauaaau

SEQ ID NO: 2225784 - RNA, 19 nt, Homo sapiens
  misc_RNA (1)...(19): siRNA sense strand
uugaagaacauuggagaaa

SEQ ID NO: 2225785 - RNA, 19 nt, Homo sapiens
  misc_RNA (1)...(19): siRNA sense strand
agaaagauaugguuggcuu

SEQ ID NO: 2225786 - RNA, 19 nt, Homo sapiens
  misc_RNA (1)...(19): siRNA sense strand
cguauuucaccgugggcaa

SEQ ID NO: 2225787 - RNA, 19 nt, Homo sapiens
  misc_RNA (1)...(19): siRNA sense strand
gauccaaauuaaagguagu

SEQ ID NO: 2225788 - RNA, 19 nt, Homo sapiens
  misc_RNA (1)...(19): siRNA sense strand
aaucaaaggccuuggauac

SEQ ID NO: 2225789 - RNA, 19 nt, Homo sapiens
  misc_RNA (1)...(19): siRNA sense strand
cauccaagcaagagcuaca

SEQ ID NO: 2225790 - RNA, 19 nt, Homo sapiens
  misc_RNA (1)...(19): siRNA sense strand
cagcauugccagggaaauu

SEQ ID NO: 2225791 - RNA, 19 nt, Homo sapiens
  misc_RNA (1)...(19): siRNA sense strand
caaaguaugugguucguga

SEQ ID NO: 2225792 - RNA, 19 nt, Homo sapiens
  misc_RNA (1)...(19): siRNA sense strand
gguauaagcaguuuagcca

SEQ ID NO: 2225793 - RNA, 19 nt, Homo sapiens
  misc_RNA (1)...(19): siRNA sense strand
agaaaaugaaggugguauu

SEQ ID NO: 2225794 - RNA, 19 nt, Homo sapiens
  misc_RNA (1)...(19): siRNA sense strand
aggcauugguuggggauaa

SEQ ID NO: 2225795 - RNA, 19 nt, Homo sapiens
  misc_RNA (1)...(19): siRNA sense strand
augccgaaauguauacaaa

SEQ ID NO: 2225796 - RNA, 19 nt, Homo sapiens
  misc_RNA (1)...(19): siRNA sense strand
ggaaaaugggagcuguaua

SEQ ID NO: 2225797 - RNA, 19 nt, Homo sapiens
  misc_RNA (1)...(19): siRNA sense strand
agauucagaugcagcggaa

SEQ ID NO: 2225798 - RNA, 19 nt, Homo sapiens
  misc_RNA (1)...(19): siRNA sense strand
caugaaggcaauaagauca

SEQ ID NO: 2225799 - RNA, 19 nt, Homo sapiens
  misc_RNA (1)...(19): siRNA sense strand
gguucgugaaggugauaau

SEQ ID NO: 2225800 - RNA, 19 nt, Homo sapiens
  misc_RNA (1)...(19): siRNA sense strand
guggaauacagcuucauaa

SEQ ID NO: 2225801 - RNA, 19 nt, Homo sapiens
  misc_RNA (1)...(19): siRNA sense strand
gaacagcauugccagggaa

SEQ ID NO: 2225802 - RNA, 19 nt, Homo sapiens
  misc_RNA (1)...(19): siRNA sense strand
uaguaaaagcggagagauc

SEQ ID NO: 2225803 - RNA, 19 nt, Homo sapiens
  misc_RNA (1)...(19): siRNA sense strand
agauaaguggauucagcua

SEQ ID NO: 2225804 - RNA, 19 nt, Homo sapiens
  misc_RNA (1)...(19): siRNA sense strand
uuaaagaugaagacuggaa

SEQ ID NO: 2225805 - RNA, 19 nt, Homo sapiens
  misc_RNA (1)...(19): siRNA sense strand
uuugaagaacauuggagaa

SEQ ID NO: 2225806 - RNA, 19 nt, Homo sapiens
  misc_RNA (1)...(19): siRNA sense strand
uaguauacacgcucacaaa

SEQ ID NO: 2225807 - RNA, 19 nt, Homo sapiens
  misc_RNA (1)...(19): siRNA sense strand
ggggauaagucgcuggcau

SEQ ID NO: 2225808 - RNA, 19 nt, Homo sapiens
  misc_RNA (1)...(19): siRNA sense strand
acaagaacugguagacaca

SEQ ID NO: 2225809 - RNA, 19 nt, Homo sapiens
  misc_RNA (1)...(19): siRNA sense strand
aggugauuacagugaauau

SEQ ID NO: 2225810 - RNA, 19 nt, Homo sapiens
  misc_RNA (1)...(19): siRNA sense strand
gguugauggaugccgaaau

SEQ ID NO: 2225811 - RNA, 19 nt, Homo sapiens
  misc_RNA (1)...(19): siRNA sense strand
aucucaauuucauggguaa

SEQ ID NO: 2225812 - RNA, 19 nt, Homo sapiens
  misc_RNA (1)...(19): siRNA sense strand
uguacuaccaagaaucaaa

SEQ ID NO: 2225813 - RNA, 19 nt, Homo sapiens
  misc_RNA (1)...(19): siRNA sense strand
acucauuacgcaugggcuu

SEQ ID NO: 2225814 - RNA, 19 nt, Homo sapiens
  misc_RNA (1)...(19): siRNA sense strand
gggcaaaguaugugguucg

SEQ ID NO: 2225815 - RNA, 19 nt, Homo sapiens
  misc_RNA (1)...(19): siRNA sense strand
uuuaagcauuccagaccaa

SEQ ID NO: 2225816 - RNA, 19 nt, Homo sapiens
  misc_RNA (1)...(19): siRNA sense strand
uaagauggugguuggaaga

SEQ ID NO: 2225817 - RNA, 19 nt, Homo sapiens
  misc_RNA (1)...(19): siRNA sense strand
gcuugguggagaaggcuau

SEQ ID NO: 2225818 - RNA, 19 nt, Homo sapiens
  misc_RNA (1)...(19): siRNA sense strand
aaugaaggugguauugaua

SEQ ID NO: 2225819 - RNA, 19 nt, Homo sapiens
  misc_RNA (1)...(19): siRNA sense strand
ucaggugauuacagugaau

SEQ ID NO: 2225820 - RNA, 19 nt, Homo sapiens
  misc_RNA (1)...(19): siRNA sense strand
guauacacgcucacaaaca

SEQ ID NO: 2225821 - RNA, 19 nt, Homo sapiens
  misc_RNA (1)...(19): siRNA sense strand
ugauggaugccgaaaugua

SEQ ID NO: 2225822 - RNA, 19 nt, Homo sapiens
  misc_RNA (1)...(19): siRNA sense strand
ugggcauccugaaugguua

SEQ ID NO: 2225823 - RNA, 19 nt, Homo sapiens
  misc_RNA (1)...(19): siRNA sense strand
ccaaagaagccacggaguc

SEQ ID NO: 2225824 - RNA, 19 nt, Homo sapiens
  misc_RNA (1)...(19): siRNA sense strand
gcuugaaggaccaggacaa

SEQ ID NO: 2225825 - RNA, 19 nt, Homo sapiens
  misc_RNA (1)...(19): siRNA sense strand
agaagaagcuggcagacau

SEQ ID NO: 2225826 - RNA, 19 nt, Homo sapiens
  misc_RNA (1)...(19): siRNA sense strand
uggaggugccagaggagaa

SEQ ID NO: 2225827 - RNA, 19 nt, Homo sapiens
  misc_RNA (1)...(19): siRNA sense strand
caucaaaggauauggcugu

SEQ ID NO: 2225828 - RNA, 19 nt, Homo sapiens
  misc_RNA (1)...(19): siRNA sense strand
cagaagaagcuggcagaca

SEQ ID NO: 2225829 - RNA, 19 nt, Homo sapiens
  misc_RNA (1)...(19): siRNA sense strand
gugggaaagcccuggacau

SEQ ID NO: 2225830 - RNA, 19 nt, Homo sapiens
  misc_RNA (1)...(19): siRNA sense strand
ccaugaaccuggaggccgu

SEQ ID NO: 2225831 - RNA, 19 nt, Homo sapiens
  misc_RNA (1)...(19): siRNA sense strand
cgggagaucauuucggaga

SEQ ID NO: 2225832 - RNA, 19 nt, Homo sapiens
  misc_RNA (1)...(19): siRNA sense strand
gggaccaagaccuggauca

SEQ ID NO: 2225833 - RNA, 19 nt, Homo sapiens
  misc_RNA (1)...(19): siRNA sense strand
acucauccaacaagagcua

SEQ ID NO: 2225834 - RNA, 19 nt, Homo sapiens
  misc_RNA (1)...(19): siRNA sense strand
ggguuucgucuguggccua

SEQ ID NO: 2225835 - RNA, 19 nt, Homo sapiens
  misc_RNA (1)...(19): siRNA sense strand
gggagaacacagagccaac

SEQ ID NO: 2225836 - RNA, 19 nt, Homo sapiens
  misc_RNA (1)...(19): siRNA sense strand
gcuugaaggaccaggacaa

SEQ ID NO: 2225837 - RNA, 19 nt, Homo sapiens
  misc_RNA (1)...(19): siRNA sense strand
agaagaagcuggcagacau

SEQ ID NO: 2225838 - RNA, 19 nt, Homo sapiens
  misc_RNA (1)...(19): siRNA sense strand
uggaggugccagaggagaa

SEQ ID NO: 2225839 - RNA, 19 nt, Homo sapiens
  misc_RNA (1)...(19): siRNA sense strand
caucaaaggauauggcugu

SEQ ID NO: 2225840 - RNA, 19 nt, Homo sapiens
  misc_RNA (1)...(19): siRNA sense strand
cagaagaagcuggcagaca

SEQ ID NO: 2225841 - RNA, 19 nt, Homo sapiens
  misc_RNA (1)...(19): siRNA sense strand
gugggaaagcccuggacau

SEQ ID NO: 2225842 - RNA, 19 nt, Homo sapiens
  misc_RNA (1)...(19): siRNA sense strand
ccaugaaccuggaggccgu

SEQ ID NO: 2225843 - RNA, 19 nt, Homo sapiens
  misc_RNA (1)...(19): siRNA sense strand
cgggagaucauuucggaga

SEQ ID NO: 2225844 - RNA, 19 nt, Homo sapiens
  misc_RNA (1)...(19): siRNA sense strand
gggaccaagaccuggauca

SEQ ID NO: 2225845 - RNA, 19 nt, Homo sapiens
  misc_RNA (1)...(19): siRNA sense strand
acucauccaacaagagcua

SEQ ID NO: 2225846 - RNA, 19 nt, Homo sapiens
  misc_RNA (1)...(19): siRNA sense strand
ggguuucgucuguggccua

SEQ ID NO: 2225847 - RNA, 19 nt, Homo sapiens
  misc_RNA (1)...(19): siRNA sense strand
gggagaacacagagccaac

SEQ ID NO: 2225848 - RNA, 19 nt, Homo sapiens
  misc_RNA (1)...(19): siRNA sense strand
ggcacuaacuucaggguga

SEQ ID NO: 2225849 - RNA, 19 nt, Homo sapiens
  misc_RNA (1)...(19): siRNA sense strand
ccucaggagcagaagggaa

SEQ ID NO: 2225850 - RNA, 19 nt, Homo sapiens
  misc_RNA (1)...(19): siRNA sense strand
gcgaggacguaaugcgcau

SEQ ID NO: 2225851 - RNA, 19 nt, Homo sapiens
  misc_RNA (1)...(19): siRNA sense strand
agacggaugcagaaggaga

SEQ ID NO: 2225852 - RNA, 19 nt, Homo sapiens
  misc_RNA (1)...(19): siRNA sense strand
cuucaaggccucaggagca

SEQ ID NO: 2225853 - RNA, 19 nt, Homo sapiens
  misc_RNA (1)...(19): siRNA sense strand
ccugcuacauggaggagau

SEQ ID NO: 2225854 - RNA, 19 nt, Homo sapiens
  misc_RNA (1)...(19): siRNA sense strand
acauggaggagaugcagaa

SEQ ID NO: 2225855 - RNA, 19 nt, Homo sapiens
  misc_RNA (1)...(19): siRNA sense strand
ucuccgacuuccuggacaa

SEQ ID NO: 2225856 - RNA, 19 nt, Homo sapiens
  misc_RNA (1)...(19): siRNA sense strand
gugaugagacggaugcaga

SEQ ID NO: 2225857 - RNA, 19 nt, Homo sapiens
  misc_RNA (1)...(19): siRNA sense strand
gcuacauggaggagaugca

SEQ ID NO: 2225858 - RNA, 19 nt, Homo sapiens
  misc_RNA (1)...(19): siRNA sense strand
aguggagcgugaagaccaa

SEQ ID NO: 2225859 - RNA, 19 nt, Homo sapiens
  misc_RNA (1)...(19): siRNA sense strand
acgaagaccaucagugcga

SEQ ID NO: 2225860 - RNA, 19 nt, Homo sapiens
  misc_RNA (1)...(19): siRNA sense strand
ugaagaaggugaugagacg

SEQ ID NO: 2225861 - RNA, 19 nt, Homo sapiens
  misc_RNA (1)...(19): siRNA sense strand
ggaacaaugucguggggcu

SEQ ID NO: 2225862 - RNA, 19 nt, Homo sapiens
  misc_RNA (1)...(19): siRNA sense strand
agaugaaacacaagaagcu

SEQ ID NO: 2225863 - RNA, 19 nt, Homo sapiens
  misc_RNA (1)...(19): siRNA sense strand
ggcacuaacuucaggguga

SEQ ID NO: 2225864 - RNA, 19 nt, Homo sapiens
  misc_RNA (1)...(19): siRNA sense strand
ccucaggagcagaagggaa

SEQ ID NO: 2225865 - RNA, 19 nt, Homo sapiens
  misc_RNA (1)...(19): siRNA sense strand
gcgaggacguaaugcgcau

SEQ ID NO: 2225866 - RNA, 19 nt, Homo sapiens
  misc_RNA (1)...(19): siRNA sense strand
agacggaugcagaaggaga

SEQ ID NO: 2225867 - RNA, 19 nt, Homo sapiens
  misc_RNA (1)...(19): siRNA sense strand
cuucaaggccucaggagca

SEQ ID NO: 2225868 - RNA, 19 nt, Homo sapiens
  misc_RNA (1)...(19): siRNA sense strand
ccugcuacauggaggagau

SEQ ID NO: 2225869 - RNA, 19 nt, Homo sapiens
  misc_RNA (1)...(19): siRNA sense strand
acauggaggagaugcagaa

SEQ ID NO: 2225870 - RNA, 19 nt, Homo sapiens
  misc_RNA (1)...(19): siRNA sense strand
ucuccgacuuccuggacaa

SEQ ID NO: 2225871 - RNA, 19 nt, Homo sapiens
  misc_RNA (1)...(19): siRNA sense strand
gugaugagacggaugcaga

SEQ ID NO: 2225872 - RNA, 19 nt, Homo sapiens
  misc_RNA (1)...(19): siRNA sense strand
gcuacauggaggagaugca

SEQ ID NO: 2225873 - RNA, 19 nt, Homo sapiens
  misc_RNA (1)...(19): siRNA sense strand
aguggagcgugaagaccaa

SEQ ID NO: 2225874 - RNA, 19 nt, Homo sapiens
  misc_RNA (1)...(19): siRNA sense strand
acgaagaccaucagugcga

SEQ ID NO: 2225875 - RNA, 19 nt, Homo sapiens
  misc_RNA (1)...(19): siRNA sense strand
ugaagaaggugaugagacg

SEQ ID NO: 2225876 - RNA, 19 nt, Homo sapiens
  misc_RNA (1)...(19): siRNA sense strand
ggaacaaugucguggggcu

SEQ ID NO: 2225877 - RNA, 19 nt, Homo sapiens
  misc_RNA (1)...(19): siRNA sense strand
agaugaaacacaagaagcu

SEQ ID NO: 2225878 - RNA, 19 nt, Homo sapiens
  misc_RNA (1)...(19): siRNA sense strand
ggcacuaacuucaggguga

SEQ ID NO: 2225879 - RNA, 19 nt, Homo sapiens
  misc_RNA (1)...(19): siRNA sense strand
ccucaggagcagaagggaa

SEQ ID NO: 2225880 - RNA, 19 nt, Homo sapiens
  misc_RNA (1)...(19): siRNA sense strand
gcgaggacguaaugcgcau

SEQ ID NO: 2225881 - RNA, 19 nt, Homo sapiens
  misc_RNA (1)...(19): siRNA sense strand
agacggaugcagaaggaga

SEQ ID NO: 2225882 - RNA, 19 nt, Homo sapiens
  misc_RNA (1)...(19): siRNA sense strand
cuucaaggccucaggagca

SEQ ID NO: 2225883 - RNA, 19 nt, Homo sapiens
  misc_RNA (1)...(19): siRNA sense strand
ccugcuacauggaggagau

SEQ ID NO: 2225884 - RNA, 19 nt, Homo sapiens
  misc_RNA (1)...(19): siRNA sense strand
acauggaggagaugcagaa

SEQ ID NO: 2225885 - RNA, 19 nt, Homo sapiens
  misc_RNA (1)...(19): siRNA sense strand
ucuccgacuuccuggacaa

SEQ ID NO: 2225886 - RNA, 19 nt, Homo sapiens
  misc_RNA (1)...(19): siRNA sense strand
gugaugagacggaugcaga

SEQ ID NO: 2225887 - RNA, 19 nt, Homo sapiens
  misc_RNA (1)...(19): siRNA sense strand
gcuacauggaggagaugca

SEQ ID NO: 2225888 - RNA, 19 nt, Homo sapiens
  misc_RNA (1)...(19): siRNA sense strand
aguggagcgugaagaccaa

SEQ ID NO: 2225889 - RNA, 19 nt, Homo sapiens
  misc_RNA (1)...(19): siRNA sense strand
acgaagaccaucagugcga

SEQ ID NO: 2225890 - RNA, 19 nt, Homo sapiens
  misc_RNA (1)...(19): siRNA sense strand
ugaagaaggugaugagacg

SEQ ID NO: 2225891 - RNA, 19 nt, Homo sapiens
  misc_RNA (1)...(19): siRNA sense strand
ggaacaaugucguggggcu

SEQ ID NO: 2225892 - RNA, 19 nt, Homo sapiens
  misc_RNA (1)...(19): siRNA sense strand
agaugaaacacaagaagcu

SEQ ID NO: 2225893 - RNA, 19 nt, Homo sapiens
  misc_RNA (1)...(19): siRNA sense strand
agaaauagaaggcugguga

SEQ ID NO: 2225894 - RNA, 19 nt, Homo sapiens
  misc_RNA (1)...(19): siRNA sense strand
cuaagaaagcauuccgcua

SEQ ID NO: 2225895 - RNA, 19 nt, Homo sapiens
  misc_RNA (1)...(19): siRNA sense strand
gcuaugaaaccaaggagga

SEQ ID NO: 2225896 - RNA, 19 nt, Homo sapiens
  misc_RNA (1)...(19): siRNA sense strand
cuaugaaaccaaggaggaa

SEQ ID NO: 2225897 - RNA, 19 nt, Homo sapiens
  misc_RNA (1)...(19): siRNA sense strand
gcugagacaacguacgaca

SEQ ID NO: 2225898 - RNA, 19 nt, Homo sapiens
  misc_RNA (1)...(19): siRNA sense strand
cugacuugggucugggcua

SEQ ID NO: 2225899 - RNA, 19 nt, Homo sapiens
  misc_RNA (1)...(19): siRNA sense strand
cugccaacccagagaauuc

SEQ ID NO: 2225900 - RNA, 19 nt, Homo sapiens
  misc_RNA (1)...(19): siRNA sense strand
agaaauagaaggcugguga

SEQ ID NO: 2225901 - RNA, 19 nt, Homo sapiens
  misc_RNA (1)...(19): siRNA sense strand
cuaagaaagcauuccgcua

SEQ ID NO: 2225902 - RNA, 19 nt, Homo sapiens
  misc_RNA (1)...(19): siRNA sense strand
gcuaugaaaccaaggagga

SEQ ID NO: 2225903 - RNA, 19 nt, Homo sapiens
  misc_RNA (1)...(19): siRNA sense strand
cuaugaaaccaaggaggaa

SEQ ID NO: 2225904 - RNA, 19 nt, Homo sapiens
  misc_RNA (1)...(19): siRNA sense strand
gcugagacaacguacgaca

SEQ ID NO: 2225905 - RNA, 19 nt, Homo sapiens
  misc_RNA (1)...(19): siRNA sense strand
cugacuugggucugggcua

SEQ ID NO: 2225906 - RNA, 19 nt, Homo sapiens
  misc_RNA (1)...(19): siRNA sense strand
cugccaacccagagaauuc

SEQ ID NO: 2225907 - RNA, 19 nt, Homo sapiens
  misc_RNA (1)...(19): siRNA sense strand
agaaauagaaggcugguga

SEQ ID NO: 2225908 - RNA, 19 nt, Homo sapiens
  misc_RNA (1)...(19): siRNA sense strand
cuaagaaagcauuccgcua

SEQ ID NO: 2225909 - RNA, 19 nt, Homo sapiens
  misc_RNA (1)...(19): siRNA sense strand
gcuaugaaaccaaggagga

SEQ ID NO: 2225910 - RNA, 19 nt, Homo sapiens
  misc_RNA (1)...(19): siRNA sense strand
cuaugaaaccaaggaggaa

SEQ ID NO: 2225911 - RNA, 19 nt, Homo sapiens
  misc_RNA (1)...(19): siRNA sense strand
gcugagacaacguacgaca

SEQ ID NO: 2225912 - RNA, 19 nt, Homo sapiens
  misc_RNA (1)...(19): siRNA sense strand
cugacuugggucugggcua

SEQ ID NO: 2225913 - RNA, 19 nt, Homo sapiens
  misc_RNA (1)...(19): siRNA sense strand
cugccaacccagagaauuc

SEQ ID NO: 2225914 - RNA, 19 nt, Homo sapiens
  misc_RNA (1)...(19): siRNA sense strand
gggcagaucuucaagcaga

SEQ ID NO: 2225915 - RNA, 19 nt, Homo sapiens
  misc_RNA (1)...(19): siRNA sense strand
gggcagaucuucaagcaga

SEQ ID NO: 2225916 - RNA, 19 nt, Homo sapiens
  misc_RNA (1)...(19): siRNA sense strand
gggcagaucuucaagcaga

SEQ ID NO: 2225917 - RNA, 19 nt, Homo sapiens
  misc_RNA (1)...(19): siRNA sense strand
gggcagaucuucaagcaga

SEQ ID NO: 2225918 - RNA, 19 nt, Homo sapiens
  misc_RNA (1)...(19): siRNA sense strand
gggcagaucuucaagcaga

SEQ ID NO: 2225919 - RNA, 19 nt, Homo sapiens
  misc_RNA (1)...(19): siRNA sense strand
ggguuaagggaaagagcga

SEQ ID NO: 2225920 - RNA, 19 nt, Homo sapiens
  misc_RNA (1)...(19): siRNA sense strand
cuugaagcagauugagaua

SEQ ID NO: 2225921 - RNA, 19 nt, Homo sapiens
  misc_RNA (1)...(19): siRNA sense strand
cuucaagggcguuaaggau

SEQ ID NO: 2225922 - RNA, 19 nt, Homo sapiens
  misc_RNA (1)...(19): siRNA sense strand
ggcuaauuacagugcagaa

SEQ ID NO: 2225923 - RNA, 19 nt, Homo sapiens
  misc_RNA (1)...(19): siRNA sense strand
agagcaugguaaggugaaa

SEQ ID NO: 2225924 - RNA, 19 nt, Homo sapiens
  misc_RNA (1)...(19): siRNA sense strand
gugcagaacaaaaucgaau

SEQ ID NO: 2225925 - RNA, 19 nt, Homo sapiens
  misc_RNA (1)...(19): siRNA sense strand
ugacaagguucaagccuac

SEQ ID NO: 2225926 - RNA, 19 nt, Homo sapiens
  misc_RNA (1)...(19): siRNA sense strand
cagcaaagucagugaggaa

SEQ ID NO: 2225927 - RNA, 19 nt, Homo sapiens
  misc_RNA (1)...(19): siRNA sense strand
gggacaaagaugaaagcaa

SEQ ID NO: 2225928 - RNA, 19 nt, Homo sapiens
  misc_RNA (1)...(19): siRNA sense strand
agucagaccugcaggguga

SEQ ID NO: 2225929 - RNA, 19 nt, Homo sapiens
  misc_RNA (1)...(19): siRNA sense strand
ccucaaagcugaagagcac

SEQ ID NO: 2225930 - RNA, 19 nt, Homo sapiens
  misc_RNA (1)...(19): siRNA sense strand
ccauauaaauaacgaccau

SEQ ID NO: 2225931 - RNA, 19 nt, Homo sapiens
  misc_RNA (1)...(19): siRNA sense strand
agaucaaacccgaugaaga

SEQ ID NO: 2225932 - RNA, 19 nt, Homo sapiens
  misc_RNA (1)...(19): siRNA sense strand
gugcauaugagaagacaca

SEQ ID NO: 2225933 - RNA, 19 nt, Homo sapiens
  misc_RNA (1)...(19): siRNA sense strand
ccaaauggauggagcacgu

SEQ ID NO: 2225934 - RNA, 19 nt, Homo sapiens
  misc_RNA (1)...(19): siRNA sense strand
ccuucaaagcccaguauau

SEQ ID NO: 2225935 - RNA, 19 nt, Homo sapiens
  misc_RNA (1)...(19): siRNA sense strand
cgaacagaugugagcgaga

SEQ ID NO: 2225936 - RNA, 19 nt, Homo sapiens
  misc_RNA (1)...(19): siRNA sense strand
acaagagguccaagaucaa

SEQ ID NO: 2225937 - RNA, 19 nt, Homo sapiens
  misc_RNA (1)...(19): siRNA sense strand
cagcaggaccucagcaaca

SEQ ID NO: 2225938 - RNA, 19 nt, Homo sapiens
  misc_RNA (1)...(19): siRNA sense strand
uaucacagagagagaagaa

SEQ ID NO: 2225939 - RNA, 19 nt, Homo sapiens
  misc_RNA (1)...(19): siRNA sense strand
cguaaaacuagaaaggcua

SEQ ID NO: 2225940 - RNA, 19 nt, Homo sapiens
  misc_RNA (1)...(19): siRNA sense strand
ucucauaggaaauggcaca

SEQ ID NO: 2225941 - RNA, 19 nt, Homo sapiens
  misc_RNA (1)...(19): siRNA sense strand
agagagagaagaaacgcaa

SEQ ID NO: 2225942 - RNA, 19 nt, Homo sapiens
  misc_RNA (1)...(19): siRNA sense strand
caggcuaugccgagggaca

SEQ ID NO: 2225943 - RNA, 19 nt, Homo sapiens
  misc_RNA (1)...(19): siRNA sense strand
ccucagugccaucgaugaa

SEQ ID NO: 2225944 - RNA, 19 nt, Homo sapiens
  misc_RNA (1)...(19): siRNA sense strand
cagacuuaucacagagaga

SEQ ID NO: 2225945 - RNA, 19 nt, Homo sapiens
  misc_RNA (1)...(19): siRNA sense strand
gcuuugaccuucagaccau

SEQ ID NO: 2225946 - RNA, 19 nt, Homo sapiens
  misc_RNA (1)...(19): siRNA sense strand
cagcagaauacuaucauca

SEQ ID NO: 2225947 - RNA, 19 nt, Homo sapiens
  misc_RNA (1)...(19): siRNA sense strand
ggaccaaauggauggagca

SEQ ID NO: 2225948 - RNA, 19 nt, Homo sapiens
  misc_RNA (1)...(19): siRNA sense strand
acaacagagcuuagguuca

SEQ ID NO: 2225949 - RNA, 19 nt, Homo sapiens
  misc_RNA (1)...(19): siRNA sense strand
gagucagcccagcagaaua

SEQ ID NO: 2225950 - RNA, 19 nt, Homo sapiens
  misc_RNA (1)...(19): siRNA sense strand
caacagugggcucgagcuu

SEQ ID NO: 2225951 - RNA, 19 nt, Homo sapiens
  misc_RNA (1)...(19): siRNA sense strand
ccauggacgcugaugccaa

SEQ ID NO: 2225952 - RNA, 19 nt, Homo sapiens
  misc_RNA (1)...(19): siRNA sense strand
gaagaaugccuccagguga

SEQ ID NO: 2225953 - RNA, 19 nt, Homo sapiens
  misc_RNA (1)...(19): siRNA sense strand
ccaaugacaucucagccaa

SEQ ID NO: 2225954 - RNA, 19 nt, Homo sapiens
  misc_RNA (1)...(19): siRNA sense strand
gcagcauggugaauggcau

SEQ ID NO: 2225955 - RNA, 19 nt, Homo sapiens
  misc_RNA (1)...(19): siRNA sense strand
aggaacagcccgaaggaac

SEQ ID NO: 2225956 - RNA, 19 nt, Homo sapiens
  misc_RNA (1)...(19): siRNA sense strand
gggcgagaagccucacaaa

SEQ ID NO: 2225957 - RNA, 19 nt, Homo sapiens
  misc_RNA (1)...(19): siRNA sense strand
gaccgauggagguaguaua

SEQ ID NO: 2225958 - RNA, 19 nt, Homo sapiens
  misc_RNA (1)...(19): siRNA sense strand
ccugcagggugaaugguau

SEQ ID NO: 2225959 - RNA, 19 nt, Homo sapiens
  misc_RNA (1)...(19): siRNA sense strand
ucauugaucaagaaagaga

SEQ ID NO: 2225960 - RNA, 19 nt, Homo sapiens
  misc_RNA (1)...(19): siRNA sense strand
cgaucauagcuuugaccuu

SEQ ID NO: 2225961 - RNA, 19 nt, Homo sapiens
  misc_RNA (1)...(19): siRNA sense strand
gagaagaaggaguucgugu

SEQ ID NO: 2225962 - RNA, 19 nt, Homo sapiens
  misc_RNA (1)...(19): siRNA sense strand
acgacguggugcaguauuu

SEQ ID NO: 2225963 - RNA, 19 nt, Homo sapiens
  misc_RNA (1)...(19): siRNA sense strand
uggaagggguacagauuga

SEQ ID NO: 2225964 - RNA, 19 nt, Homo sapiens
  misc_RNA (1)...(19): siRNA sense strand
accugaacgaugaggauuu

SEQ ID NO: 2225965 - RNA, 19 nt, Homo sapiens
  misc_RNA (1)...(19): siRNA sense strand
agauggagaugaaagggca

SEQ ID NO: 2225966 - RNA, 19 nt, Homo sapiens
  misc_RNA (1)...(19): siRNA sense strand
agaaagagauccauggguc

SEQ ID NO: 2225967 - RNA, 19 nt, Homo sapiens
  misc_RNA (1)...(19): siRNA sense strand
ccggaaacaugugaagaca

SEQ ID NO: 2225968 - RNA, 19 nt, Homo sapiens
  misc_RNA (1)...(19): siRNA sense strand
ggucagucuucaugcagca

SEQ ID NO: 2225969 - RNA, 19 nt, Homo sapiens
  misc_RNA (1)...(19): siRNA sense strand
ugcccaacauggagaggau

SEQ ID NO: 2225970 - RNA, 19 nt, Homo sapiens
  misc_RNA (1)...(19): siRNA sense strand
auuuaaauucccagaacca

SEQ ID NO: 2225971 - RNA, 19 nt, Homo sapiens
  misc_RNA (1)...(19): siRNA sense strand
gacuuaucacagagagaga

SEQ ID NO: 2225972 - RNA, 19 nt, Homo sapiens
  misc_RNA (1)...(19): siRNA sense strand
ucacagagagagaagaaac

SEQ ID NO: 2225973 - RNA, 19 nt, Homo sapiens
  misc_RNA (1)...(19): siRNA sense strand
gguccaagaucaaacccga

SEQ ID NO: 2225974 - RNA, 19 nt, Homo sapiens
  misc_RNA (1)...(19): siRNA sense strand
ggaaggggacaaagaugaa

SEQ ID NO: 2225975 - RNA, 19 nt, Homo sapiens
  misc_RNA (1)...(19): siRNA sense strand
auggagaggaugagccuga

SEQ ID NO: 2225976 - RNA, 19 nt, Homo sapiens
  misc_RNA (1)...(19): siRNA sense strand
cuucagaccaugauaagga

SEQ ID NO: 2225977 - RNA, 19 nt, Homo sapiens
  misc_RNA (1)...(19): siRNA sense strand
caaccugaacgaugaggau

SEQ ID NO: 2225978 - RNA, 19 nt, Homo sapiens
  misc_RNA (1)...(19): siRNA sense strand
gcagauuagugcuaccuca

SEQ ID NO: 2225979 - RNA, 19 nt, Homo sapiens
  misc_RNA (1)...(19): siRNA sense strand
gcgaauucguugugccuga

SEQ ID NO: 2225980 - RNA, 19 nt, Homo sapiens
  misc_RNA (1)...(19): siRNA sense strand
uggauuuaguuuuggagaa

SEQ ID NO: 2225981 - RNA, 19 nt, Homo sapiens
  misc_RNA (1)...(19): siRNA sense strand
gaaccuacucacugcccaa

SEQ ID NO: 2225982 - RNA, 19 nt, Homo sapiens
  misc_RNA (1)...(19): siRNA sense strand
gggccagugcugaggagaa

SEQ ID NO: 2225983 - RNA, 19 nt, Homo sapiens
  misc_RNA (1)...(19): siRNA sense strand
gggaagagcaccaucguca

SEQ ID NO: 2225984 - RNA, 19 nt, Homo sapiens
  misc_RNA (1)...(19): siRNA sense strand
gcgacgugaaggagaucua

SEQ ID NO: 2225985 - RNA, 19 nt, Homo sapiens
  misc_RNA (1)...(19): siRNA sense strand
uggaaaagaagcugaaaga

SEQ ID NO: 2225986 - RNA, 19 nt, Homo sapiens
  misc_RNA (1)...(19): siRNA sense strand
acaucaucaucaaggagaa

SEQ ID NO: 2225987 - RNA, 19 nt, Homo sapiens
  misc_RNA (1)...(19): siRNA sense strand
gcaacuacaucaaggugca

SEQ ID NO: 2225988 - RNA, 19 nt, Homo sapiens
  misc_RNA (1)...(19): siRNA sense strand
ccucggaguaccagcucaa

SEQ ID NO: 2225989 - RNA, 19 nt, Homo sapiens
  misc_RNA (1)...(19): siRNA sense strand
ccucaaagacuguggccuc

SEQ ID NO: 2225990 - RNA, 19 nt, Homo sapiens
  misc_RNA (1)...(19): siRNA sense strand
acauggugcuaguggagga

SEQ ID NO: 2225991 - RNA, 19 nt, Homo sapiens
  misc_RNA (1)...(19): siRNA sense strand
ucgucaagcagaugaagau

SEQ ID NO: 2225992 - RNA, 19 nt, Homo sapiens
  misc_RNA (1)...(19): siRNA sense strand
uggaggacgacgaagugaa

SEQ ID NO: 2225993 - RNA, 19 nt, Homo sapiens
  misc_RNA (1)...(19): siRNA sense strand
gggccagugcugaggagaa

SEQ ID NO: 2225994 - RNA, 19 nt, Homo sapiens
  misc_RNA (1)...(19): siRNA sense strand
gggaagagcaccaucguca

SEQ ID NO: 2225995 - RNA, 19 nt, Homo sapiens
  misc_RNA (1)...(19): siRNA sense strand
gcgacgugaaggagaucua

SEQ ID NO: 2225996 - RNA, 19 nt, Homo sapiens
  misc_RNA (1)...(19): siRNA sense strand
uggaaaagaagcugaaaga

SEQ ID NO: 2225997 - RNA, 19 nt, Homo sapiens
  misc_RNA (1)...(19): siRNA sense strand
acaucaucaucaaggagaa

SEQ ID NO: 2225998 - RNA, 19 nt, Homo sapiens
  misc_RNA (1)...(19): siRNA sense strand
gcaacuacaucaaggugca

SEQ ID NO: 2225999 - RNA, 19 nt, Homo sapiens
  misc_RNA (1)...(19): siRNA sense strand
ccucggaguaccagcucaa

SEQ ID NO: 2226000 - RNA, 19 nt, Homo sapiens
  misc_RNA (1)...(19): siRNA sense strand
ccucaaagacuguggccuc

SEQ ID NO: 2226001 - RNA, 19 nt, Homo sapiens
  misc_RNA (1)...(19): siRNA sense strand
acauggugcuaguggagga

SEQ ID NO: 2226002 - RNA, 19 nt, Homo sapiens
  misc_RNA (1)...(19): siRNA sense strand
ucgucaagcagaugaagau

SEQ ID NO: 2226003 - RNA, 19 nt, Homo sapiens
  misc_RNA (1)...(19): siRNA sense strand
uggaggacgacgaagugaa

SEQ ID NO: 2226004 - RNA, 19 nt, Homo sapiens
  misc_RNA (1)...(19): siRNA sense strand
auacaauaccaaagggcuu

SEQ ID NO: 2226005 - RNA, 19 nt, Homo sapiens
  misc_RNA (1)...(19): siRNA sense strand
ucaccaagcuccaggucga

SEQ ID NO: 2226006 - RNA, 19 nt, Homo sapiens
  misc_RNA (1)...(19): siRNA sense strand
gcaaugagcugaagacccu

SEQ ID NO: 2226007 - RNA, 19 nt, Homo sapiens
  misc_RNA (1)...(19): siRNA sense strand
cgauaaggugcgugccaca

SEQ ID NO: 2226008 - RNA, 19 nt, Homo sapiens
  misc_RNA (1)...(19): siRNA sense strand
ugaacugugacaagaggaa

SEQ ID NO: 2226009 - RNA, 19 nt, Homo sapiens
  misc_RNA (1)...(19): siRNA sense strand
ucuacaaauacccaggaaa

SEQ ID NO: 2226010 - RNA, 19 nt, Homo sapiens
  misc_RNA (1)...(19): siRNA sense strand
gcgaacuccaagagcucua

SEQ ID NO: 2226011 - RNA, 19 nt, Homo sapiens
  misc_RNA (1)...(19): siRNA sense strand
guguggacgucaaggccau

SEQ ID NO: 2226012 - RNA, 19 nt, Homo sapiens
  misc_RNA (1)...(19): siRNA sense strand
aagaggacacugagggcga

SEQ ID NO: 2226013 - RNA, 19 nt, Homo sapiens
  misc_RNA (1)...(19): siRNA sense strand
ccugaaaggcaaugagcug

SEQ ID NO: 2226014 - RNA, 19 nt, Homo sapiens
  misc_RNA (1)...(19): siRNA sense strand
ccugcguggucuuggcgaa

SEQ ID NO: 2226015 - RNA, 19 nt, Homo sapiens
  misc_RNA (1)...(19): siRNA sense strand
ccugaaugggcuggagaau

SEQ ID NO: 2226016 - RNA, 19 nt, Homo sapiens
  misc_RNA (1)...(19): siRNA sense strand
ugggaaagcagcuggcuaa

SEQ ID NO: 2226017 - RNA, 19 nt, Homo sapiens
  misc_RNA (1)...(19): siRNA sense strand
ccaagaaccuggugacgga

SEQ ID NO: 2226018 - RNA, 19 nt, Homo sapiens
  misc_RNA (1)...(19): siRNA sense strand
ggggaguggagcugggaaa

SEQ ID NO: 2226019 - RNA, 19 nt, Homo sapiens
  misc_RNA (1)...(19): siRNA sense strand
gaaagcagcuggcuaagaa

SEQ ID NO: 2226020 - RNA, 19 nt, Homo sapiens
  misc_RNA (1)...(19): siRNA sense strand
agugaaggaguuuggaauu

SEQ ID NO: 2226021 - RNA, 19 nt, Homo sapiens
  misc_RNA (1)...(19): siRNA sense strand
acaagauccuccuggccaa

SEQ ID NO: 2226022 - RNA, 19 nt, Homo sapiens
  misc_RNA (1)...(19): siRNA sense strand
cggaggacgugaugcggau

SEQ ID NO: 2226023 - RNA, 19 nt, Homo sapiens
  misc_RNA (1)...(19): siRNA sense strand
aagugaaggaguuuggaau

SEQ ID NO: 2226024 - RNA, 19 nt, Homo sapiens
  misc_RNA (1)...(19): siRNA sense strand
cagaggaccuugagaggcu

SEQ ID NO: 2226025 - RNA, 19 nt, Homo sapiens
  misc_RNA (1)...(19): siRNA sense strand
gcagagacggcgaaggagu

SEQ ID NO: 2226026 - RNA, 19 nt, Homo sapiens
  misc_RNA (1)...(19): siRNA sense strand
cuaagaaaauagagccuga

SEQ ID NO: 2226027 - RNA, 19 nt, Homo sapiens
  misc_RNA (1)...(19): siRNA sense strand
ccauccugguagacggcaa

SEQ ID NO: 2226028 - RNA, 19 nt, Homo sapiens
  misc_RNA (1)...(19): siRNA sense strand
cugcuuugggugugagaca

SEQ ID NO: 2226029 - RNA, 19 nt, Homo sapiens
  misc_RNA (1)...(19): siRNA sense strand
ucgccauguaugagcacaa

SEQ ID NO: 2226030 - RNA, 19 nt, Homo sapiens
  misc_RNA (1)...(19): siRNA sense strand
agaucuucguucagggcau
